United States Patent Application Publication US 2005/0244851 A1 - sequence listing, part 96

SEQ ID NO: 3741526 - DNA, 25 bp, Homo sapien
gcaccttttattgtgcttgtcagga

SEQ ID NO: 3741527 - DNA, 25 bp, Homo sapien
tttattgtgcttgtcaggacaggga

SEQ ID NO: 3741528 - DNA, 25 bp, Homo sapien
ccttttattgtgcttgtcaggacag

SEQ ID NO: 3741529 - DNA, 25 bp, Homo sapien
caccttttattgtgcttgtcaggac

SEQ ID NO: 3741530 - DNA, 25 bp, Homo sapien
agccggctgcgcctgcctctgtgag

SEQ ID NO: 3741531 - DNA, 25 bp, Homo sapien
tgtccacacatctcgatgagccggc

SEQ ID NO: 3741532 - DNA, 25 bp, Homo sapien
tcttgcctcactcgctttctgctgt

SEQ ID NO: 3741533 - DNA, 25 bp, Homo sapien
tctgctgtccacacatctcgatgag

SEQ ID NO: 3741534 - DNA, 25 bp, Homo sapien
aatgtacaaaacgagacattcagac

SEQ ID NO: 3741535 - DNA, 25 bp, Homo sapien
cttgaatgtacaaaacgagacattc

SEQ ID NO: 3741536 - DNA, 25 bp, Homo sapien
tgaatgtacaaaacgagacattcag

SEQ ID NO: 3741537 - DNA, 25 bp, Homo sapien
tgtacaaaacgagacattcagacag

SEQ ID NO: 3741538 - DNA, 25 bp, Homo sapien
agggagcagctgtatatctgtaaat

SEQ ID NO: 3741539 - DNA, 25 bp, Homo sapien
gggagcagctgtatatctgtaaatc

SEQ ID NO: 3741540 - DNA, 25 bp, Homo sapien
gctgtccaggtctcttgtcgcttaa

SEQ ID NO: 3741541 - DNA, 25 bp, Homo sapien
atttttgctactggctcctccaggg

SEQ ID NO: 3741542 - DNA, 25 bp, Homo sapien
tctcatccttaaacccaagtagtga

SEQ ID NO: 3741543 - DNA, 25 bp, Homo sapien
tttcctccaatatcgagacttggcc

SEQ ID NO: 3741544 - DNA, 25 bp, Homo sapien
tgccgggcatgtgtcacatctggga

SEQ ID NO: 3741545 - DNA, 25 bp, Homo sapien
atagctgccttcatgccgggcatgt

SEQ ID NO: 3741546 - DNA, 25 bp, Homo sapien
catctgggaaatacccgaaagaaag

SEQ ID NO: 3741547 - DNA, 25 bp, Homo sapien
tcacatctgggaaatacccgaaaga

SEQ ID NO: 3741548 - DNA, 25 bp, Homo sapien
tctggaatgatgaagacccagggaa

SEQ ID NO: 3741549 - DNA, 25 bp, Homo sapien
gatcaggtctttgcgtctggaatga

SEQ ID NO: 3741550 - DNA, 25 bp, Homo sapien
gaatgtggatctaagcccaggaatg

SEQ ID NO: 3741551 - DNA, 25 bp, Homo sapien
ggcaggcaagacagatcaggtcttt

SEQ ID NO: 3741552 - DNA, 25 bp, Homo sapien
tgggtctcatcacccacgtgtgcat

SEQ ID NO: 3741553 - DNA, 25 bp, Homo sapien
tctggacgagttctccgtaatcccc

SEQ ID NO: 3741554 - DNA, 25 bp, Homo sapien
cccaagtgttagtttctgggtctca

SEQ ID NO: 3741555 - DNA, 25 bp, Homo sapien
tgtgtttaagtcagggtgtgaagca

SEQ ID NO: 3741556 - DNA, 25 bp, Homo sapien
tgggactccccgaggagacagttgt

SEQ ID NO: 3741557 - DNA, 25 bp, Homo sapien
gaggagacagttgtcaggttccttc

SEQ ID NO: 3741558 - DNA, 25 bp, Homo sapien
agctgaactgcatacccatctttag

SEQ ID NO: 3741559 - DNA, 25 bp, Homo sapien
aatcctcctgcttacagcggcagtg

SEQ ID NO: 3741560 - DNA, 25 bp, Homo sapien
caggccaaccctctatagtaaagga

SEQ ID NO: 3741561 - DNA, 25 bp, Homo sapien
cccctgggacctgacagaaaggata

SEQ ID NO: 3741562 - DNA, 25 bp, Homo sapien
gactacgtcttgactgagtagaaag

SEQ ID NO: 3741563 - DNA, 25 bp, Homo sapien
gaagcctttacatgagactacgtct

SEQ ID NO: 3741564 - DNA, 25 bp, Homo sapien
ctgctgagtaaagccgcattttctg

SEQ ID NO: 3741565 - DNA, 25 bp, Homo sapien
ttgacaccatgattattgatgtggc

SEQ ID NO: 3741566 - DNA, 25 bp, Homo sapien
tcctccactgagtaccactggcctg

SEQ ID NO: 3741567 - DNA, 25 bp, Homo sapien
gcaccacggcccatcacaagctctg

SEQ ID NO: 3741568 - DNA, 25 bp, Homo sapien
tgcaaagcaagtggcctgaaggcct

SEQ ID NO: 3741569 - DNA, 25 bp, Homo sapien
tgttggatgccgtgcagacttcttg

SEQ ID NO: 3741570 - DNA, 25 bp, Homo sapien
gattgtccaggcagaatgcagccag

SEQ ID NO: 3741571 - DNA, 25 bp, Homo sapien
tcaggcaatcgaggctctgcggtga

SEQ ID NO: 3741572 - DNA, 25 bp, Homo sapien
aaaacaagcggatcctcatggaaca

SEQ ID NO: 3741573 - DNA, 25 bp, Homo sapien
tgagacccgcaggtctaagaccaag

SEQ ID NO: 3741574 - DNA, 25 bp, Homo sapien
aaggaggagatcatcaagactttgg

SEQ ID NO: 3741575 - DNA, 25 bp, Homo sapien
aagcacgcaagcaccgtgaagagca

SEQ ID NO: 3741576 - DNA, 25 bp, Homo sapien
tgggcacatctctgaggaagggtct

SEQ ID NO: 3741577 - DNA, 25 bp, Homo sapien
cctggcttgataccggaaaacacct

SEQ ID NO: 3741578 - DNA, 25 bp, Homo sapien
aatgccaactcccatcagtggatcc

SEQ ID NO: 3741579 - DNA, 25 bp, Homo sapien
gggaaaagcaatgtcccaatggcca

SEQ ID NO: 3741580 - DNA, 25 bp, Homo sapien
cacctgtgctttgttagtggttagc

SEQ ID NO: 3741581 - DNA, 25 bp, Homo sapien
aggatttgtgtaacatgcaaacacc

SEQ ID NO: 3741582 - DNA, 25 bp, Homo sapien
taacatgcaaacacctgtgctttgt

SEQ ID NO: 3741583 - DNA, 25 bp, Homo sapien
caaacacctgtgctttgttagtggt

SEQ ID NO: 3741584 - DNA, 25 bp, Homo sapien
cacagttgatccaataaggcatggg

SEQ ID NO: 3741585 - DNA, 25 bp, Homo sapien
gccttgttattatctcctgtgcagt

SEQ ID NO: 3741586 - DNA, 25 bp, Homo sapien
tcatggcttcacagttgatccaata

SEQ ID NO: 3741587 - DNA, 25 bp, Homo sapien
ggtgaagatcacaggatgccttgtt

SEQ ID NO: 3741588 - DNA, 25 bp, Homo sapien
cgccaagttaaaggtaactcgatag

SEQ ID NO: 3741589 - DNA, 25 bp, Homo sapien
agcctggaacttgggtctatagccc

SEQ ID NO: 3741590 - DNA, 25 bp, Homo sapien
cgtctgccttgtaatcgccaagtta

SEQ ID NO: 3741591 - DNA, 25 bp, Homo sapien
ggtaactcgataggcagatagggaa

SEQ ID NO: 3741592 - DNA, 25 bp, Homo sapien
gccgactgtgagataaccgccaagg

SEQ ID NO: 3741593 - DNA, 25 bp, Homo sapien
cacctgagtggctgcgatatgaaga

SEQ ID NO: 3741594 - DNA, 25 bp, Homo sapien
tcttgttctgtgagcggccgactgt

SEQ ID NO: 3741595 - DNA, 25 bp, Homo sapien
tgaccctagacgtgagcagaggagc

SEQ ID NO: 3741596 - DNA, 25 bp, Homo sapien
gctgagtccaggtacagagttctgg

SEQ ID NO: 3741597 - DNA, 25 bp, Homo sapien
agtccaggtacagagttctggatgc

SEQ ID NO: 3741598 - DNA, 25 bp, Homo sapien
gcagagctgagtccaggtacagagt

SEQ ID NO: 3741599 - DNA, 25 bp, Homo sapien
gagctgagtccaggtacagagttct

SEQ ID NO: 3741600 - DNA, 25 bp, Homo sapien
gatgggtctgggagcggtgtttctg

SEQ ID NO: 3741601 - DNA, 25 bp, Homo sapien
agagggatgggtctgggagcggtgt

SEQ ID NO: 3741602 - DNA, 25 bp, Homo sapien
ggtctgggagcggtgtttctggtga

SEQ ID NO: 3741603 - DNA, 25 bp, Homo sapien
tctgggagcggtgtttctggtgaga

SEQ ID NO: 3741604 - DNA, 25 bp, Homo sapien
gagaagcaacctgactgatggaaga

SEQ ID NO: 3741605 - DNA, 25 bp, Homo sapien
tcagaggttcctacctgggagacag

SEQ ID NO: 3741606 - DNA, 25 bp, Homo sapien
gcaagaatacgtcctcagcttcaga

SEQ ID NO: 3741607 - DNA, 25 bp, Homo sapien
tcagaaatgtgtaataggtcacgaa

SEQ ID NO: 3741608 - DNA, 25 bp, Homo sapien
agatggatggagtactgtaatgcat

SEQ ID NO: 3741609 - DNA, 25 bp, Homo sapien
gagtactgtaatgcatcattgccat

SEQ ID NO: 3741610 - DNA, 25 bp, Homo sapien
gatggagtactgtaatgcatcattg

SEQ ID NO: 3741611 - DNA, 25 bp, Homo sapien
ctgtaatgcatcattgccatttgca

SEQ ID NO: 3741612 - DNA, 25 bp, Homo sapien
gccaggaagagaaagctttcagtct

SEQ ID NO: 3741613 - DNA, 25 bp, Homo sapien
ctgccaggaagagaaagctttcagt

SEQ ID NO: 3741614 - DNA, 25 bp, Homo sapien
tgccaggaagagaaagctttcagtc

SEQ ID NO: 3741615 - DNA, 25 bp, Homo sapien
ggtgtggcttctcatgcatgtaggt

SEQ ID NO: 3741616 - DNA, 25 bp, Homo sapien
caacgtctctgcatgcaaatgtcgg

SEQ ID NO: 3741617 - DNA, 25 bp, Homo sapien
catgtaggtatcaggatcccagcca

SEQ ID NO: 3741618 - DNA, 25 bp, Homo sapien
gcatgcaaatgtcggctggcattct

SEQ ID NO: 3741619 - DNA, 25 bp, Homo sapien
taattcccctgttgtagagtcagca

SEQ ID NO: 3741620 - DNA, 25 bp, Homo sapien
agcaatagccatgcacaaccttggg

SEQ ID NO: 3741621 - DNA, 25 bp, Homo sapien
tcagtgcgctgccatgtagggaaca

SEQ ID NO: 3741622 - DNA, 25 bp, Homo sapien
tacagaaaagtgcttccttgggagg

SEQ ID NO: 3741623 - DNA, 25 bp, Homo sapien
tgatctcggtaggttcagttaaggt

SEQ ID NO: 3741624 - DNA, 25 bp, Homo sapien
ccgaggtaagcatcaagtttctcct

SEQ ID NO: 3741625 - DNA, 25 bp, Homo sapien
gaacatgagctcttcctgatctcgg

SEQ ID NO: 3741626 - DNA, 25 bp, Homo sapien
tatactcagagatttccccgaggta

SEQ ID NO: 3741627 - DNA, 25 bp, Homo sapien
tatatggttacatcaacaaggcagg

SEQ ID NO: 3741628 - DNA, 25 bp, Homo sapien
taaagacacggtgctggaaacgcaa

SEQ ID NO: 3741629 - DNA, 25 bp, Homo sapien
gaaacgcaatggtgttccaagacct

SEQ ID NO: 3741630 - DNA, 25 bp, Homo sapien
tctccagcaaagataaggctcagtc

SEQ ID NO: 3741631 - DNA, 25 bp, Homo sapien
ccctcatgtggcaggaacaattcct

SEQ ID NO: 3741632 - DNA, 25 bp, Homo sapien
gagaccataaaaggactcagtggct

SEQ ID NO: 3741633 - DNA, 25 bp, Homo sapien
gatcttagttctacgagagaccata

SEQ ID NO: 3741634 - DNA, 25 bp, Homo sapien
tattgcagttcagctgtgaggccct

SEQ ID NO: 3741635 - DNA, 25 bp, Homo sapien
acggtccaattcataggcagagcca

SEQ ID NO: 3741636 - DNA, 25 bp, Homo sapien
tcaactaggagcaaatgaaaggctc

SEQ ID NO: 3741637 - DNA, 25 bp, Homo sapien
caagggatttgcagcttcaactagg

SEQ ID NO: 3741638 - DNA, 25 bp, Homo sapien
tttccctgtggcaatctgagaagcc

SEQ ID NO: 3741639 - DNA, 25 bp, Homo sapien
cctggaacatcacggctgagactcc

SEQ ID NO: 3741640 - DNA, 25 bp, Homo sapien
ggaacatcacggctgagactccagt

SEQ ID NO: 3741641 - DNA, 25 bp, Homo sapien
ggcctggaacatcacggctgagact

SEQ ID NO: 3741642 - DNA, 25 bp, Homo sapien
acatcacggctgagactccagttaa

SEQ ID NO: 3741643 - DNA, 25 bp, Homo sapien
tcctgcctccgcaccaagttatttt

SEQ ID NO: 3741644 - DNA, 25 bp, Homo sapien
ccaagttattttcaggcggcagcat

SEQ ID NO: 3741645 - DNA, 25 bp, Homo sapien
tttagaatttcctgcctccgcacca

SEQ ID NO: 3741646 - DNA, 25 bp, Homo sapien
accaagttattttcaggcggcagca

SEQ ID NO: 3741647 - DNA, 25 bp, Homo sapien
tgcctgtgtcgcctctgggctttgt

SEQ ID NO: 3741648 - DNA, 25 bp, Homo sapien
tccagctgagggtgttttgacatcc

SEQ ID NO: 3741649 - DNA, 25 bp, Homo sapien
tgtctgtaatatcggcacgggcaaa

SEQ ID NO: 3741650 - DNA, 25 bp, Homo sapien
tgacatcccttgtgtacggctctgg

SEQ ID NO: 3741651 - DNA, 25 bp, Homo sapien
agcgagctccgtgccaatcctgcat

SEQ ID NO: 3741652 - DNA, 25 bp, Homo sapien
agcagatggctccaaatgaggtcat

SEQ ID NO: 3741653 - DNA, 25 bp, Homo sapien
gccagcagatggctccaaatgaggt

SEQ ID NO: 3741654 - DNA, 25 bp, Homo sapien
cgtgccaatcctgcatgccagcaga

SEQ ID NO: 3741655 - DNA, 25 bp, Homo sapien
taaatttgagagttccagcaccctg

SEQ ID NO: 3741656 - DNA, 25 bp, Homo sapien
agcaccctgggagatgacgctctca

SEQ ID NO: 3741657 - DNA, 25 bp, Homo sapien
tttctttaaatttgagagttccagc

SEQ ID NO: 3741658 - DNA, 25 bp, Homo sapien
tgggagatgacgctctcagctccaa

SEQ ID NO: 3741659 - DNA, 25 bp, Homo sapien
gggtcccgtggctctcactctctaa

SEQ ID NO: 3741660 - DNA, 25 bp, Homo sapien
gatgggttgtccagaatacaggaca

SEQ ID NO: 3741661 - DNA, 25 bp, Homo sapien
tctctaaagagccaccctttggaga

SEQ ID NO: 3741662 - DNA, 25 bp, Homo sapien
tgaactggcagggtcaaaatgtggt

SEQ ID NO: 3741663 - DNA, 25 bp, Homo sapien
catctgactgttttacctctccagt

SEQ ID NO: 3741664 - DNA, 25 bp, Homo sapien
actgacatctgactgttttacctct

SEQ ID NO: 3741665 - DNA, 25 bp, Homo sapien
agcaactgacatctgactgttttac

SEQ ID NO: 3741666 - DNA, 25 bp, Homo sapien
ctgtagcaactgacatctgactgtt

SEQ ID NO: 3741667 - DNA, 25 bp, Homo sapien
cctcttgtaactgagtagatacgca

SEQ ID NO: 3741668 - DNA, 25 bp, Homo sapien
gagtagatacgcagattgttttctt

SEQ ID NO: 3741669 - DNA, 25 bp, Homo sapien
tgggcagagaatctctaccaatatc

SEQ ID NO: 3741670 - DNA, 25 bp, Homo sapien
ctttcaacttcatgtgggcagctgg

SEQ ID NO: 3741671 - DNA, 25 bp, Homo sapien
aagagtggaggtccggtctcctgag

SEQ ID NO: 3741672 - DNA, 25 bp, Homo sapien
gtggaggtccggtctcctgagcagg

SEQ ID NO: 3741673 - DNA, 25 bp, Homo sapien
agtggaggtccggtctcctgagcag

SEQ ID NO: 3741674 - DNA, 25 bp, Homo sapien
tgggaagagtggaggtccggtctcc

SEQ ID NO: 3741675 - DNA, 25 bp, Homo sapien
gggtatccaggatgacaggcctgac

SEQ ID NO: 3741676 - DNA, 25 bp, Homo sapien
gaaagggtatccaggatgacaggcc

SEQ ID NO: 3741677 - DNA, 25 bp, Homo sapien
ggaaagggtatccaggatgacaggc

SEQ ID NO: 3741678 - DNA, 25 bp, Homo sapien
aagggtatccaggatgacaggcctg

SEQ ID NO: 3741679 - DNA, 25 bp, Homo sapien
cgcccactgggatgaggcacaggaa

SEQ ID NO: 3741680 - DNA, 25 bp, Homo sapien
gaaggaggcaatcacccctttctgc

SEQ ID NO: 3741681 - DNA, 25 bp, Homo sapien
cagttccatctcctgaaacgtggca

SEQ ID NO: 3741682 - DNA, 25 bp, Homo sapien
ggagactgtacaaccatcagaagca

SEQ ID NO: 3741683 - DNA, 25 bp, Homo sapien
ctgaggcaggtccgacagaggagcc

SEQ ID NO: 3741684 - DNA, 25 bp, Homo sapien
ggcaggtccgacagaggagcctgtg

SEQ ID NO: 3741685 - DNA, 25 bp, Homo sapien
caggtccgacagaggagcctgtggc

SEQ ID NO: 3741686 - DNA, 25 bp, Homo sapien
ggtccgacagaggagcctgtggcct

SEQ ID NO: 3741687 - DNA, 25 bp, Homo sapien
aacaggtcagtgcaaggcgtggaaa

SEQ ID NO: 3741688 - DNA, 25 bp, Homo sapien
tgcaaggcgtggaaatgtattgctc

SEQ ID NO: 3741689 - DNA, 25 bp, Homo sapien
gtattgctcatcagccctagcccag

SEQ ID NO: 3741690 - DNA, 25 bp, Homo sapien
cgtggaaatgtattgctcatcagcc

SEQ ID NO: 3741691 - DNA, 25 bp, Homo sapien
cagctactatctgagtgtcccggtc

SEQ ID NO: 3741692 - DNA, 25 bp, Homo sapien
agtgtcccggtcatcagccatgcac

SEQ ID NO: 3741693 - DNA, 25 bp, Homo sapien
tactatctgagtgtcccggtcatca

SEQ ID NO: 3741694 - DNA, 25 bp, Homo sapien
tcagccatgcacacgctctcagctg

SEQ ID NO: 3741695 - DNA, 25 bp, Homo sapien
tctgtgtgcctttgaccctcagagt

SEQ ID NO: 3741696 - DNA, 25 bp, Homo sapien
ctgtgtgcctttgaccctcagagtt

SEQ ID NO: 3741697 - DNA, 25 bp, Homo sapien
ttctgtgtgcctttgaccctcagag

SEQ ID NO: 3741698 - DNA, 25 bp, Homo sapien
cttctgtgtgcctttgaccctcaga

SEQ ID NO: 3741699 - DNA, 25 bp, Homo sapien
gctttgttgtgcgaagacacgtcat

SEQ ID NO: 3741700 - DNA, 25 bp, Homo sapien
cattttcatgccacaagttgcccca

SEQ ID NO: 3741701 - DNA, 25 bp, Homo sapien
ctgcccaagacaactgctgctccat

SEQ ID NO: 3741702 - DNA, 25 bp, Homo sapien
ccaaacacaagctggcacaccactg

SEQ ID NO: 3741703 - DNA, 25 bp, Homo sapien
atcacctggccctgagcaagtgcaa

SEQ ID NO: 3741704 - DNA, 25 bp, Homo sapien
ctgtggctctcttggtagggtcaga

SEQ ID NO: 3741705 - DNA, 25 bp, Homo sapien
ggaaaccatcacctggccctgagca

SEQ ID NO: 3741706 - DNA, 25 bp, Homo sapien
cagaggatggttccaagcctgtggc

SEQ ID NO: 3741707 - DNA, 25 bp, Homo sapien
actgttgcttaagtacttcacctgc

SEQ ID NO: 3741708 - DNA, 25 bp, Homo sapien
gcttaagtacttcacctgcctgaga

SEQ ID NO: 3741709 - DNA, 25 bp, Homo sapien
agtacttcacctgcctgagagtgaa

SEQ ID NO: 3741710 - DNA, 25 bp, Homo sapien
gttgcttaagtacttcacctgcctg

SEQ ID NO: 3741711 - DNA, 25 bp, Homo sapien
tcaactgatttactgtcatggaccc

SEQ ID NO: 3741712 - DNA, 25 bp, Homo sapien
ttcaagcacttcttagatttatggc

SEQ ID NO: 3741713 - DNA, 25 bp, Homo sapien
tctttacatattacttctgacccat

SEQ ID NO: 3741714 - DNA, 25 bp, Homo sapien
tagaaagtcagctgtctgtcttatt

SEQ ID NO: 3741715 - DNA, 25 bp, Homo sapien
ctcgggagacctaaaccgctgtttg

SEQ ID NO: 3741716 - DNA, 25 bp, Homo sapien
tcgggagacctaaaccgctgtttgc

SEQ ID NO: 3741717 - DNA, 25 bp, Homo sapien
cccagatctggaatgtttcaggcat

SEQ ID NO: 3741718 - DNA, 25 bp, Homo sapien
gtttgcccagatctggaatgtttca

SEQ ID NO: 3741719 - DNA, 25 bp, Homo sapien
tgtggtcctcaggtcagcatccgac

SEQ ID NO: 3741720 - DNA, 25 bp, Homo sapien
gggcttgcaacctgcttcctcgacc

SEQ ID NO: 3741721 - DNA, 25 bp, Homo sapien
ccgactccttactgactggtgcaaa

SEQ ID NO: 3741722 - DNA, 25 bp, Homo sapien
agcatccgacaagccgtgaagacag

SEQ ID NO: 3741723 - DNA, 25 bp, Homo sapien
actcttccaaattcaagagccttca

SEQ ID NO: 3741724 - DNA, 25 bp, Homo sapien
agagccttcagagtatgacaacctg

SEQ ID NO: 3741725 - DNA, 25 bp, Homo sapien
tcttccaaattcaagagccttcaga

SEQ ID NO: 3741726 - DNA, 25 bp, Homo sapien
cagagtatgacaacctggatttgtt

SEQ ID NO: 3741727 - DNA, 25 bp, Homo sapien
aactcagtcatagaatcccatctcc

SEQ ID NO: 3741728 - DNA, 25 bp, Homo sapien
ctgttgcactgtcagaggcaaactc

SEQ ID NO: 3741729 - DNA, 25 bp, Homo sapien
ctctgcctggatacctgagcgcaca

SEQ ID NO: 3741730 - DNA, 25 bp, Homo sapien
tctctctgcctggatacctgagcgc

SEQ ID NO: 3741731 - DNA, 25 bp, Homo sapien
cctcatgaccaggaaacttttccaa

SEQ ID NO: 3741732 - DNA, 25 bp, Homo sapien
tggttcttctacttgtaccttgtac

SEQ ID NO: 3741733 - DNA, 25 bp, Homo sapien
tgtcctaagcgctccacctcatgac

SEQ ID NO: 3741734 - DNA, 25 bp, Homo sapien
caatgctgtttctagtggttcttct

SEQ ID NO: 3741735 - DNA, 25 bp, Homo sapien
acactttgacaaacagattagaaag

SEQ ID NO: 3741736 - DNA, 25 bp, Homo sapien
agttgtccgaagtcatcataacctc

SEQ ID NO: 3741737 - DNA, 25 bp, Homo sapien
tgacgtgtgagtatttcggttttcc

SEQ ID NO: 3741738 - DNA, 25 bp, Homo sapien
ctgtttggtaccttgtgacgtgtga

SEQ ID NO: 3741739 - DNA, 25 bp, Homo sapien
aatctaaccattgctgaagtattca

SEQ ID NO: 3741740 - DNA, 25 bp, Homo sapien
tgtgccagcccagaaaaatctaacc

SEQ ID NO: 3741741 - DNA, 25 bp, Homo sapien
tttcgtggcttcaacagaccttgta

SEQ ID NO: 3741742 - DNA, 25 bp, Homo sapien
gctgatttatattccatgaactgag

SEQ ID NO: 3741743 - DNA, 25 bp, Homo sapien
ctgattgtctctcttagggactgac

SEQ ID NO: 3741744 - DNA, 25 bp, Homo sapien
ctgctctttcagtcctgatgccagg

SEQ ID NO: 3741745 - DNA, 25 bp, Homo sapien
tagggactgacatagtgtaactcat

SEQ ID NO: 3741746 - DNA, 25 bp, Homo sapien
cacaggcacttggtagggttttatc

SEQ ID NO: 3741747 - DNA, 25 bp, Homo sapien
caatgatagaatggttactgggaac

SEQ ID NO: 3741748 - DNA, 25 bp, Homo sapien
tgatagaatggttactgggaacaga

SEQ ID NO: 3741749 - DNA, 25 bp, Homo sapien
tttcaatgatagaatggttactggg

SEQ ID NO: 3741750 - DNA, 25 bp, Homo sapien
ctccagtttcaatgatagaatggtt

SEQ ID NO: 3741751 - DNA, 25 bp, Homo sapien
atttcgctggcgacctcttcatcac

SEQ ID NO: 3741752 - DNA, 25 bp, Homo sapien
gcaggctgtggtttatttcgctggc

SEQ ID NO: 3741753 - DNA, 25 bp, Homo sapien
gtttatttcgctggcgacctcttca

SEQ ID NO: 3741754 - DNA, 25 bp, Homo sapien
ctgtggtttatttcgctggcgacct

SEQ ID NO: 3741755 - DNA, 25 bp, Homo sapien
gccaacccacgaagtgcagatggta

SEQ ID NO: 3741756 - DNA, 25 bp, Homo sapien
agtgggtgtcctctcaagcggagcc

SEQ ID NO: 3741757 - DNA, 25 bp, Homo sapien
gaacttgaggcttttcgccaaccca

SEQ ID NO: 3741758 - DNA, 25 bp, Homo sapien
gagccccgagtccagtagaacttga

SEQ ID NO: 3741759 - DNA, 25 bp, Homo sapien
ggtggcaggtttcccggtcagctgt

SEQ ID NO: 3741760 - DNA, 25 bp, Homo sapien
aaggtggcaggtttcccggtcagct

SEQ ID NO: 3741761 - DNA, 25 bp, Homo sapien
ccaaggtggcaggtttcccggtcag

SEQ ID NO: 3741762 - DNA, 25 bp, Homo sapien
ggaggggtttgcaggagtatcacac

SEQ ID NO: 3741763 - DNA, 25 bp, Homo sapien
cccagaggcagttgatgacaatagt

SEQ ID NO: 3741764 - DNA, 25 bp, Homo sapien
gtattcactgattttgactagagtt

SEQ ID NO: 3741765 - DNA, 25 bp, Homo sapien
gcagttgatgacaatagttctccaa

SEQ ID NO: 3741766 - DNA, 25 bp, Homo sapien
tgggcatggtgatgtcaaccaagtt

SEQ ID NO: 3741767 - DNA, 25 bp, Homo sapien
cctagaagaaggtctggctgggtct

SEQ ID NO: 3741768 - DNA, 25 bp, Homo sapien
tctccaacaacaatgtggactccat

SEQ ID NO: 3741769 - DNA, 25 bp, Homo sapien
ttccttctcctagaagaaggtctgg

SEQ ID NO: 3741770 - DNA, 25 bp, Homo sapien
tggctgggtctgaagcttctccaac

SEQ ID NO: 3741771 - DNA, 25 bp, Homo sapien
actgacaggctctgctcactgaggg

SEQ ID NO: 3741772 - DNA, 25 bp, Homo sapien
aataagttgggtgactgacaggctc

SEQ ID NO: 3741773 - DNA, 25 bp, Homo sapien
cctcatgggaaataagttgggtgac

SEQ ID NO: 3741774 - DNA, 25 bp, Homo sapien
ccagtgcctcatgggaaataagttg

SEQ ID NO: 3741775 - DNA, 25 bp, Homo sapien
aaatgctgtgttgagcaaaatggat

SEQ ID NO: 3741776 - DNA, 25 bp, Homo sapien
cataaaacccacattgtctaaaaat

SEQ ID NO: 3741777 - DNA, 25 bp, Homo sapien
tgctgtgttgagcaaaatggattca

SEQ ID NO: 3741778 - DNA, 25 bp, Homo sapien
aaaaatgctgtgttgagcaaaatgg

SEQ ID NO: 3741779 - DNA, 25 bp, Homo sapien
acttcctgtctctgccacgtgtgtc

SEQ ID NO: 3741780 - DNA, 25 bp, Homo sapien
gctgttcttgttccgtatcccgcaa

SEQ ID NO: 3741781 - DNA, 25 bp, Homo sapien
agcccgtgggctctctggtgagcac

SEQ ID NO: 3741782 - DNA, 25 bp, Homo sapien
tccgtatcccgcaagggagtctggg

SEQ ID NO: 3741783 - DNA, 25 bp, Homo sapien
caggccatggaacccaacaagagat

SEQ ID NO: 3741784 - DNA, 25 bp, Homo sapien
gatgcttgcctcatattagtggtct

SEQ ID NO: 3741785 - DNA, 25 bp, Homo sapien
aacaagagatgcaaccacaaacagc

SEQ ID NO: 3741786 - DNA, 25 bp, Homo sapien
tctgtctgtcaagagtactctcatg

SEQ ID NO: 3741787 - DNA, 25 bp, Homo sapien
gaaggtaaattcattaaccagattg

SEQ ID NO: 3741788 - DNA, 25 bp, Homo sapien
agattgtatttcaggccagaagagg

SEQ ID NO: 3741789 - DNA, 25 bp, Homo sapien
tacgtgaacgtgatttaacagctcc

SEQ ID NO: 3741790 - DNA, 25 bp, Homo sapien
agaagaggaatgtcctacgtgaacg

SEQ ID NO: 3741791 - DNA, 25 bp, Homo sapien
ctcacatatgagtcatttctcagca

SEQ ID NO: 3741792 - DNA, 25 bp, Homo sapien
tgtgactcacatatgagtcatttct

SEQ ID NO: 3741793 - DNA, 25 bp, Homo sapien
tcacatatgagtcatttctcagcat

SEQ ID NO: 3741794 - DNA, 25 bp, Homo sapien
gactcacatatgagtcatttctcag

SEQ ID NO: 3741795 - DNA, 25 bp, Homo sapien
acaaaggagaaggagcggcgtcctc

SEQ ID NO: 3741796 - DNA, 25 bp, Homo sapien
ggagaaggagcggcgtcctccactg

SEQ ID NO: 3741797 - DNA, 25 bp, Homo sapien
ggagcggcgtcctccactgtcattg

SEQ ID NO: 3741798 - DNA, 25 bp, Homo sapien
gtcctccactgtcattgagctcaca

SEQ ID NO: 3741799 - DNA, 25 bp, Homo sapien
ttttcccctacgatgtcagttgccc

SEQ ID NO: 3741800 - DNA, 25 bp, Homo sapien
aatctcttgggctattctttacttc

SEQ ID NO: 3741801 - DNA, 25 bp, Homo sapien
acttcattcggctcatttttaagag

SEQ ID NO: 3741802 - DNA, 25 bp, Homo sapien
ggttggtgtcctctccaccctgatt

SEQ ID NO: 3741803 - DNA, 25 bp, Homo sapien
taaactgcaagacagtctagccccg

SEQ ID NO: 3741804 - DNA, 25 bp, Homo sapien
ttcctcttgctgagtgtggactctg

SEQ ID NO: 3741805 - DNA, 25 bp, Homo sapien
ggccctctccatgggccacttgact

SEQ ID NO: 3741806 - DNA, 25 bp, Homo sapien
caagacagtctagccccggctttag

SEQ ID NO: 3741807 - DNA, 25 bp, Homo sapien
gacttaggccatcaagaccctcctt

SEQ ID NO: 3741808 - DNA, 25 bp, Homo sapien
cacatttaactctaggaacgtggta

SEQ ID NO: 3741809 - DNA, 25 bp, Homo sapien
taatcttgactcgtaggacttaggc

SEQ ID NO: 3741810 - DNA, 25 bp, Homo sapien
cctttgccagcaaagtaattgctac

SEQ ID NO: 3741811 - DNA, 25 bp, Homo sapien
ctggctgcttgacttactgtgcatt

SEQ ID NO: 3741812 - DNA, 25 bp, Homo sapien
tcccagtcagcactgatgtctgtga

SEQ ID NO: 3741813 - DNA, 25 bp, Homo sapien
gtttgccacaggagtcggctctacc

SEQ ID NO: 3741814 - DNA, 25 bp, Homo sapien
tgtcctgggacaaatggcttcatcc

SEQ ID NO: 3741815 - DNA, 25 bp, Homo sapien
ctatgggaaatccagagccattcaa

SEQ ID NO: 3741816 - DNA, 25 bp, Homo sapien
tgggaaatccagagccattcaaggg

SEQ ID NO: 3741817 - DNA, 25 bp, Homo sapien
tcaagggcatcaggcaaagtggtca

SEQ ID NO: 3741818 - DNA, 25 bp, Homo sapien
aatccagagccattcaagggcatca

SEQ ID NO: 3741819 - DNA, 25 bp, Homo sapien
gaacagaagccacatccttcttgtg

SEQ ID NO: 3741820 - DNA, 25 bp, Homo sapien
gcagccatattggcccatcagcttc

SEQ ID NO: 3741821 - DNA, 25 bp, Homo sapien
agaagccacatccttcttgtggcat

SEQ ID NO: 3741822 - DNA, 25 bp, Homo sapien
cagaagccacatccttcttgtggca

SEQ ID NO: 3741823 - DNA, 25 bp, Homo sapien
ttgtgttcctcctagaacttcttgg

SEQ ID NO: 3741824 - DNA, 25 bp, Homo sapien
tgtgttcctcctagaacttcttggg

SEQ ID NO: 3741825 - DNA, 25 bp, Homo sapien
attgtgttcctcctagaacttcttg

SEQ ID NO: 3741826 - DNA, 25 bp, Homo sapien
aaattgtgttcctcctagaacttct

SEQ ID NO: 3741827 - DNA, 25 bp, Homo sapien
tcgaatctttcctgatggtacagtg

SEQ ID NO: 3741828 - DNA, 25 bp, Homo sapien
ggaaaactgttctacgattgtcgaa

SEQ ID NO: 3741829 - DNA, 25 bp, Homo sapien
tacgattgtcgaatctttcctgatg

SEQ ID NO: 3741830 - DNA, 25 bp, Homo sapien
cttgttggaaaactgttctacgatt

SEQ ID NO: 3741831 - DNA, 25 bp, Homo sapien
gaactcaggcgaaatagcttcaaag

SEQ ID NO: 3741832 - DNA, 25 bp, Homo sapien
ggctggaactcaggcgaaatagctt

SEQ ID NO: 3741833 - DNA, 25 bp, Homo sapien
tcaggcgaaatagcttcaaagagtg

SEQ ID NO: 3741834 - DNA, 25 bp, Homo sapien
ccaggagggctggaactcaggcgaa

SEQ ID NO: 3741835 - DNA, 25 bp, Homo sapien
gatggtcttcctcttggagcacata

SEQ ID NO: 3741836 - DNA, 25 bp, Homo sapien
cacctgcctatccagttcgattggc

SEQ ID NO: 3741837 - DNA, 25 bp, Homo sapien
gattggctgaaccaactctggagat

SEQ ID NO: 3741838 - DNA, 25 bp, Homo sapien
ttcctcttggagcacatagcttcgg

SEQ ID NO: 3741839 - DNA, 25 bp, Homo sapien
tgttcacttagggtgcatgggttga

SEQ ID NO: 3741840 - DNA, 25 bp, Homo sapien
catggggaagtccccggctcctcaa

SEQ ID NO: 3741841 - DNA, 25 bp, Homo sapien
atggggaagtccccggctcctcaat

SEQ ID NO: 3741842 - DNA, 25 bp, Homo sapien
caggtgttcacttagggtgcatggg

SEQ ID NO: 3741843 - DNA, 25 bp, Homo sapien
caggtgaaccctgtaccacttaagc

SEQ ID NO: 3741844 - DNA, 25 bp, Homo sapien
tgctgcaggtgaaccctgtaccact

SEQ ID NO: 3741845 - DNA, 25 bp, Homo sapien
tgaaccctgtaccacttaagcctga

SEQ ID NO: 3741846 - DNA, 25 bp, Homo sapien
tgtaccacttaagcctgatgtccat

SEQ ID NO: 3741847 - DNA, 25 bp, Homo sapien
caattgctgcaagtctggagctgta

SEQ ID NO: 3741848 - DNA, 25 bp, Homo sapien
aattggataaattggccctggaggg

SEQ ID NO: 3741849 - DNA, 25 bp, Homo sapien
tacctcagctacagagcagatccga

SEQ ID NO: 3741850 - DNA, 25 bp, Homo sapien
gcatgaagcaggctgtacgcagccc

SEQ ID NO: 3741851 - DNA, 25 bp, Homo sapien
ctagattagtagcagtttccttcat

SEQ ID NO: 3741852 - DNA, 25 bp, Homo sapien
ttccatgcctagattagtagcagtt

SEQ ID NO: 3741853 - DNA, 25 bp, Homo sapien
gcctagattagtagcagtttccttc

SEQ ID NO: 3741854 - DNA, 25 bp, Homo sapien
catgcctagattagtagcagtttcc

SEQ ID NO: 3741855 - DNA, 25 bp, Homo sapien
taaaacccaagatctcctgctggag

SEQ ID NO: 3741856 - DNA, 25 bp, Homo sapien
ccgagataagatggagactttttca

SEQ ID NO: 3741857 - DNA, 25 bp, Homo sapien
cacttctgctccgagataagatgga

SEQ ID NO: 3741858 - DNA, 25 bp, Homo sapien
tatttgggctggcaagtgacaccac

SEQ ID NO: 3741859 - DNA, 25 bp, Homo sapien
gcccaggctctgatctgtatccaga

SEQ ID NO: 3741860 - DNA, 25 bp, Homo sapien
tacattgcatacagatgcccaggct

SEQ ID NO: 3741861 - DNA, 25 bp, Homo sapien
cccagagtggactggtgcgttctcc

SEQ ID NO: 3741862 - DNA, 25 bp, Homo sapien
cacatctggagctgtttacattgca

SEQ ID NO: 3741863 - DNA, 25 bp, Homo sapien
tgggctttgggtaaaattgaaggca

SEQ ID NO: 3741864 - DNA, 25 bp, Homo sapien
aattgaaggcaataagacatcccat

SEQ ID NO: 3741865 - DNA, 25 bp, Homo sapien
tctggaccacaggtgattcctgttt

SEQ ID NO: 3741866 - DNA, 25 bp, Homo sapien
tgattctcgaaaccagttaactggg

SEQ ID NO: 3741867 - DNA, 25 bp, Homo sapien
catgtcccacggtcagggagctgct

SEQ ID NO: 3741868 - DNA, 25 bp, Homo sapien
tgtttgttgtccccactgatgtcag

SEQ ID NO: 3741869 - DNA, 25 bp, Homo sapien
tcctagagataagggtggcctgcta

SEQ ID NO: 3741870 - DNA, 25 bp, Homo sapien
cactgatgtcaggaggtcctagaga

SEQ ID NO: 3741871 - DNA, 25 bp, Homo sapien
tacagcgtgtactgcagaggtttaa

SEQ ID NO: 3741872 - DNA, 25 bp, Homo sapien
agatggctggaacatgaacacgggc

SEQ ID NO: 3741873 - DNA, 25 bp, Homo sapien
ggcctggtcttgactccccatgaga

SEQ ID NO: 3741874 - DNA, 25 bp, Homo sapien
tcttgccggatttaggtttcaccaa

SEQ ID NO: 3741875 - DNA, 25 bp, Homo sapien
ggcaggacctcaccaaaagatccag

SEQ ID NO: 3741876 - DNA, 25 bp, Homo sapien
ggtgtgcaaccctgtcattacgtca

SEQ ID NO: 3741877 - DNA, 25 bp, Homo sapien
ggtaccagcgtcctcttaaaagatg

SEQ ID NO: 3741878 - DNA, 25 bp, Homo sapien
catttctatgcaggcagcacagcag

SEQ ID NO: 3741879 - DNA, 25 bp, Homo sapien
taggtccgtgtgaagccgagttgcc

SEQ ID NO: 3741880 - DNA, 25 bp, Homo sapien
tacattttcaactcggagagcttct

SEQ ID NO: 3741881 - DNA, 25 bp, Homo sapien
gctcgcatttgaagcaagggctcta

SEQ ID NO: 3741882 - DNA, 25 bp, Homo sapien
tagactcagcgggttatttaggtcc

SEQ ID NO: 3741883 - DNA, 25 bp, Homo sapien
cagtgtctctgtgcaagctgagccc

SEQ ID NO: 3741884 - DNA, 25 bp, Homo sapien
tgtataaaatggtcagctccctgtg

SEQ ID NO: 3741885 - DNA, 25 bp, Homo sapien
gtttgatgtttcctagcccctggga

SEQ ID NO: 3741886 - DNA, 25 bp, Homo sapien
tgtgctggagaacggctgacattcc

SEQ ID NO: 3741887 - DNA, 25 bp, Homo sapien
cgatctctcgagcagagccagcgca

SEQ ID NO: 3741888 - DNA, 25 bp, Homo sapien
ctggaccttggctgatgcgatctct

SEQ ID NO: 3741889 - DNA, 25 bp, Homo sapien
tgcgatctctcgagcagagccagcg

SEQ ID NO: 3741890 - DNA, 25 bp, Homo sapien
accttggctgatgcgatctctcgag

SEQ ID NO: 3741891 - DNA, 25 bp, Homo sapien
taattagagtggtcacggatgactt

SEQ ID NO: 3741892 - DNA, 25 bp, Homo sapien
gatgacttaactggaatctgccctt

SEQ ID NO: 3741893 - DNA, 25 bp, Homo sapien
gtggtcacggatgacttaactggaa

SEQ ID NO: 3741894 - DNA, 25 bp, Homo sapien
aacatttgggtaattagagtggtca

SEQ ID NO: 3741895 - DNA, 25 bp, Homo sapien
tatcgggtatctggataaaagaggg

SEQ ID NO: 3741896 - DNA, 25 bp, Homo sapien
gataaaagagggttattggactgga

SEQ ID NO: 3741897 - DNA, 25 bp, Homo sapien
tattggactggagctggaatgaaaa

SEQ ID NO: 3741898 - DNA, 25 bp, Homo sapien
gagctggaatgaaaagccccagaaa

SEQ ID NO: 3741899 - DNA, 25 bp, Homo sapien
cttagaaatgtactggagccgagcg

SEQ ID NO: 3741900 - DNA, 25 bp, Homo sapien
taattttgggataccatctctgccc

SEQ ID NO: 3741901 - DNA, 25 bp, Homo sapien
agagaccgcctcttagctggagaga

SEQ ID NO: 3741902 - DNA, 25 bp, Homo sapien
catttgaaagtcagctgggcgtggt

SEQ ID NO: 3741903 - DNA, 25 bp, Homo sapien
actataggcacgatgctgtgcagca

SEQ ID NO: 3741904 - DNA, 25 bp, Homo sapien
agttctgggattatgctcaaaggca

SEQ ID NO: 3741905 - DNA, 25 bp, Homo sapien
gcaattaatataggagtgcagatcc

SEQ ID NO: 3741906 - DNA, 25 bp, Homo sapien
gatacctcatatcagtggagtcagg

SEQ ID NO: 3741907 - DNA, 25 bp, Homo sapien
ggtggtggatcgctgaagggttcga

SEQ ID NO: 3741908 - DNA, 25 bp, Homo sapien
tcgctgaagggttcgagaggaggag

SEQ ID NO: 3741909 - DNA, 25 bp, Homo sapien
cgcagcgttcggcagatgctggcat

SEQ ID NO: 3741910 - DNA, 25 bp, Homo sapien
gaggaggagcgcagcgttcggcaga

SEQ ID NO: 3741911 - DNA, 25 bp, Homo sapien
gatttttgttatcacatagaagaag

SEQ ID NO: 3741912 - DNA, 25 bp, Homo sapien
gaagaagagatgaactagcactggg

SEQ ID NO: 3741913 - DNA, 25 bp, Homo sapien
tagcactgggctttagtctctcgcc

SEQ ID NO: 3741914 - DNA, 25 bp, Homo sapien
tctctcgcccagagataatacatca

SEQ ID NO: 3741915 - DNA, 25 bp, Homo sapien
tttctgctaatcatttttagttctg

SEQ ID NO: 3741916 - DNA, 25 bp, Homo sapien
ttcctggccgtcatagcgttccctt

SEQ ID NO: 3741917 - DNA, 25 bp, Homo sapien
ccgtcatagcgttccctttttctgc

SEQ ID NO: 3741918 - DNA, 25 bp, Homo sapien
ctgaccttcctttgtgctgatcttc

SEQ ID NO: 3741919 - DNA, 25 bp, Homo sapien
aagcttttacttctgctcgaaccgc

SEQ ID NO: 3741920 - DNA, 25 bp, Homo sapien
ttgctcagatgggctgaaagctttt

SEQ ID NO: 3741921 - DNA, 25 bp, Homo sapien
agggaggcatttcttgtttgctcag

SEQ ID NO: 3741922 - DNA, 25 bp, Homo sapien
agcttttacttctgctcgaaccgcc

SEQ ID NO: 3741923 - DNA, 25 bp, Homo sapien
ccttttgccgctttcgtgtccccag

SEQ ID NO: 3741924 - DNA, 25 bp, Homo sapien
tccttttgccgctttcgtgtcccca

SEQ ID NO: 3741925 - DNA, 25 bp, Homo sapien
ttttgccgctttcgtgtccccagca

SEQ ID NO: 3741926 - DNA, 25 bp, Homo sapien
ttgccgctttcgtgtccccagcagc

SEQ ID NO: 3741927 - DNA, 25 bp, Homo sapien
ctcttgacttagaggcttcctggcc

SEQ ID NO: 3741928 - DNA, 25 bp, Homo sapien
acgggctctgcatgccagctctaga

SEQ ID NO: 3741929 - DNA, 25 bp, Homo sapien
tagagttgcgaaatctcaccggagg

SEQ ID NO: 3741930 - DNA, 25 bp, Homo sapien
taagacttggtgtcctaccctgaca

SEQ ID NO: 3741931 - DNA, 25 bp, Homo sapien
tcagccccagacatgataggacaca

SEQ ID NO: 3741932 - DNA, 25 bp, Homo sapien
taagctcgaatgtggagttgacacc

SEQ ID NO: 3741933 - DNA, 25 bp, Homo sapien
tgataggacacagcctgaaagcgca

SEQ ID NO: 3741934 - DNA, 25 bp, Homo sapien
caggaatccgtaccagagcgaagtc

SEQ ID NO: 3741935 - DNA, 25 bp, Homo sapien
ccagcaagtgtattttcagaaggta

SEQ ID NO: 3741936 - DNA, 25 bp, Homo sapien
aacgtaagtatctatttcctgggcg

SEQ ID NO: 3741937 - DNA, 25 bp, Homo sapien
ttcctgggcgctacatgatctaatg

SEQ ID NO: 3741938 - DNA, 25 bp, Homo sapien
tctaatggcctgtcgctttgggaaa

SEQ ID NO: 3741939 - DNA, 25 bp, Homo sapien
catgcccgtagaggaagtgtgcaga

SEQ ID NO: 3741940 - DNA, 25 bp, Homo sapien
gatgggattaacgtccacatggaga

SEQ ID NO: 3741941 - DNA, 25 bp, Homo sapien
gcattgcgcgtagtccatgcccgta

SEQ ID NO: 3741942 - DNA, 25 bp, Homo sapien
ggtaccgtaaccatggtcagctggg

SEQ ID NO: 3741943 - DNA, 25 bp, Homo sapien
gaccgactttttctagttcgcctgc

SEQ ID NO: 3741944 - DNA, 25 bp, Homo sapien
cgagttctaacttgcgcgctcattt

SEQ ID NO: 3741945 - DNA, 25 bp, Homo sapien
tgtcgaaagcgcaggcgagttctaa

SEQ ID NO: 3741946 - DNA, 25 bp, Homo sapien
aacctgctttcaaactcagggcacc

SEQ ID NO: 3741947 - DNA, 25 bp, Homo sapien
ccgaggtgccccatccgtgtgtcct

SEQ ID NO: 3741948 - DNA, 25 bp, Homo sapien
cccatccgtgtgtcctgggaacttc

SEQ ID NO: 3741949 - DNA, 25 bp, Homo sapien
tcatctccgaggtgccccatccgtg

SEQ ID NO: 3741950 - DNA, 25 bp, Homo sapien
catccgtgtgtcctgggaacttccg

SEQ ID NO: 3741951 - DNA, 25 bp, Homo sapien
tcttctgcgtttggagttgctcccc

SEQ ID NO: 3741952 - DNA, 25 bp, Homo sapien
tcgcggaggagcgttgccattcaag

SEQ ID NO: 3741953 - DNA, 25 bp, Homo sapien
caactcgcgagcaaagtttggtgga

SEQ ID NO: 3741954 - DNA, 25 bp, Homo sapien
ttggtggaggcaacgccaagcctga

SEQ ID NO: 3741955 - DNA, 25 bp, Homo sapien
gcagtatcaagcaggcgcattttaa

SEQ ID NO: 3741956 - DNA, 25 bp, Homo sapien
tagtgtgaccctcccatagtagggc

SEQ ID NO: 3741957 - DNA, 25 bp, Homo sapien
gaaactgggaatagtactctgcagg

SEQ ID NO: 3741958 - DNA, 25 bp, Homo sapien
aacgtaacgcagtcgctcagcgagc

SEQ ID NO: 3741959 - DNA, 25 bp, Homo sapien
agccacctgcttcccgggcgctgcc

SEQ ID NO: 3741960 - DNA, 25 bp, Homo sapien
ggagccacctgcttcccgggcgctg

SEQ ID NO: 3741961 - DNA, 25 bp, Homo sapien
ctggagccacctgcttcccgggcgc

SEQ ID NO: 3741962 - DNA, 25 bp, Homo sapien
ggcgctgccccagcgccaggccagc

SEQ ID NO: 3741963 - DNA, 25 bp, Homo sapien
ctcgacctgggtcgctcatcatctg

SEQ ID NO: 3741964 - DNA, 25 bp, Homo sapien
gcgctggcgcccgatgcgctcctcc

SEQ ID NO: 3741965 - DNA, 25 bp, Homo sapien
tctgcacagccgaaacgacttcagg

SEQ ID NO: 3741966 - DNA, 25 bp, Homo sapien
gccgaaacgacttcagggctgggct

SEQ ID NO: 3741967 - DNA, 25 bp, Homo sapien
aatggagaattagcctgaggtagcc

SEQ ID NO: 3741968 - DNA, 25 bp, Homo sapien
ggcgaatccacgcagcgaatggaga

SEQ ID NO: 3741969 - DNA, 25 bp, Homo sapien
agggtgcaaaggtggttctccgcct

SEQ ID NO: 3741970 - DNA, 25 bp, Homo sapien
ttgatccacaggctggaaacgtggg

SEQ ID NO: 3741971 - DNA, 25 bp, Homo sapien
tttggacgatgggtaaactgagtcc

SEQ ID NO: 3741972 - DNA, 25 bp, Homo sapien
tctgaagctgaaggaatttgtggca

SEQ ID NO: 3741973 - DNA, 25 bp, Homo sapien
aaataggagagtgacatgacaggga

SEQ ID NO: 3741974 - DNA, 25 bp, Homo sapien
tgtggcaaatttggacgatgggtaa

SEQ ID NO: 3741975 - DNA, 25 bp, Homo sapien
tgctttgggttcaattgtgaccgtc

SEQ ID NO: 3741976 - DNA, 25 bp, Homo sapien
tttgggttcaattgtgaccgtcctc

SEQ ID NO: 3741977 - DNA, 25 bp, Homo sapien
tgggttcaattgtgaccgtcctcct

SEQ ID NO: 3741978 - DNA, 25 bp, Homo sapien
ggttcaattgtgaccgtcctcctct

SEQ ID NO: 3741979 - DNA, 25 bp, Homo sapien
caggtgggacttgaaggatggccag

SEQ ID NO: 3741980 - DNA, 25 bp, Homo sapien
cttgccgatgggtgcagcacgtgag

SEQ ID NO: 3741981 - DNA, 25 bp, Homo sapien
gtgggacttgaaggatggccaggat

SEQ ID NO: 3741982 - DNA, 25 bp, Homo sapien
tgcagcacgtgagggcggcctctcc

SEQ ID NO: 3741983 - DNA, 25 bp, Homo sapien
tcctgggttctgctggcgactgtac

SEQ ID NO: 3741984 - DNA, 25 bp, Homo sapien
gatgatcatgtacgtggcttgcacc

SEQ ID NO: 3741985 - DNA, 25 bp, Homo sapien
tggcgactgtactagaaggatctgc

SEQ ID NO: 3741986 - DNA, 25 bp, Homo sapien
cgcctccgggatcagttgaagatga

SEQ ID NO: 3741987 - DNA, 25 bp, Homo sapien
gggcttgatggttcatcagagtaat

SEQ ID NO: 3741988 - DNA, 25 bp, Homo sapien
ttgatggttcatcagagtaatgcca

SEQ ID NO: 3741989 - DNA, 25 bp, Homo sapien
gattgcatggacaaatgctcttctg

SEQ ID NO: 3741990 - DNA, 25 bp, Homo sapien
tttagattgcatggacaaatgctct

SEQ ID NO: 3741991 - DNA, 25 bp, Homo sapien
tctcactctcctgtgaatgttttgg

SEQ ID NO: 3741992 - DNA, 25 bp, Homo sapien
caatgtgactgggtggggtatagag

SEQ ID NO: 3741993 - DNA, 25 bp, Homo sapien
tatagagttgttgcaagaaatctcc

SEQ ID NO: 3741994 - DNA, 25 bp, Homo sapien
cactctcctgtgaatgttttggccc

SEQ ID NO: 3741995 - DNA, 25 bp, Homo sapien
tgtattgatccggtagttcctctga

SEQ ID NO: 3741996 - DNA, 25 bp, Homo sapien
caaaacccggttcaaacaatcagtg

SEQ ID NO: 3741997 - DNA, 25 bp, Homo sapien
tcttcccgcacatgagctctgcttg

SEQ ID NO: 3741998 - DNA, 25 bp, Homo sapien
ggtctatacgtgcagatgtcaggct

SEQ ID NO: 3741999 - DNA, 25 bp, Homo sapien
tttggattactctggttccactcca

SEQ ID NO: 3742000 - DNA, 25 bp, Homo sapien
tgtctggggcacctatgactcagca

SEQ ID NO: 3742001 - DNA, 25 bp, Homo sapien
gacttgctatgatccattcctcttg

SEQ ID NO: 3742002 - DNA, 25 bp, Homo sapien
tccagcaccagggtattcgtgactt

SEQ ID NO: 3742003 - DNA, 25 bp, Homo sapien
tatagacagctgtggttctgcctgc

SEQ ID NO: 3742004 - DNA, 25 bp, Homo sapien
tcgttggcagaaacttggcattgct

SEQ ID NO: 3742005 - DNA, 25 bp, Homo sapien
tcatcaaagcatgggccgatcagac

SEQ ID NO: 3742006 - DNA, 25 bp, Homo sapien
gagctgattcctttcaacaagagtg

SEQ ID NO: 3742007 - DNA, 25 bp, Homo sapien
gcattgtcagaaagccccagttgga

SEQ ID NO: 3742008 - DNA, 25 bp, Homo sapien
cgcgtgagggagcacggcgtgcagt

SEQ ID NO: 3742009 - DNA, 25 bp, Homo sapien
gcagggttgcattgtcagaaagccc

SEQ ID NO: 3742010 - DNA, 25 bp, Homo sapien
aaagccccagttggacagaggcaga

SEQ ID NO: 3742011 - DNA, 25 bp, Homo sapien
gggatctggcaggttagctcaaagc

SEQ ID NO: 3742012 - DNA, 25 bp, Homo sapien
gctccgcactgcttggcggtcacag

SEQ ID NO: 3742013 - DNA, 25 bp, Homo sapien
ctggcgcaggcatgtccctccgctc

SEQ ID NO: 3742014 - DNA, 25 bp, Homo sapien
actgcttggcggtcacagcactggc

SEQ ID NO: 3742015 - DNA, 25 bp, Homo sapien
gatttttgggacatctttgccccac

SEQ ID NO: 3742016 - DNA, 25 bp, Homo sapien
tctgaaatccggaggcagatgtctg

SEQ ID NO: 3742017 - DNA, 25 bp, Homo sapien
gacatgcagcagacacttcttgtca

SEQ ID NO: 3742018 - DNA, 25 bp, Homo sapien
gaataccagtgatccttcaaaaccc

SEQ ID NO: 3742019 - DNA, 25 bp, Homo sapien
tgcaaggggttttcctgggcagcag

SEQ ID NO: 3742020 - DNA, 25 bp, Homo sapien
atgcaaggggttttcctgggcagca

SEQ ID NO: 3742021 - DNA, 25 bp, Homo sapien
catgcaaggggttttcctgggcagc

SEQ ID NO: 3742022 - DNA, 25 bp, Homo sapien
taattattatgagaagcccttttgc

SEQ ID NO: 3742023 - DNA, 25 bp, Homo sapien
actcccttgaacctgttcatgcatg

SEQ ID NO: 3742024 - DNA, 25 bp, Homo sapien
tgcacgaagactgcaaaaactaccg

SEQ ID NO: 3742025 - DNA, 25 bp, Homo sapien
tcatgcatgagcagcataggctcct

SEQ ID NO: 3742026 - DNA, 25 bp, Homo sapien
tcttgagatctattatggtcacggc

SEQ ID NO: 3742027 - DNA, 25 bp, Homo sapien
ggcatttcgaagaacacagtcagga

SEQ ID NO: 3742028 - DNA, 25 bp, Homo sapien
tggtcacggccacctttgccagtga

SEQ ID NO: 3742029 - DNA, 25 bp, Homo sapien
cagcgttgaccctggaatatgggca

SEQ ID NO: 3742030 - DNA, 25 bp, Homo sapien
tccttaatgctgaaaactgttgatg

SEQ ID NO: 3742031 - DNA, 25 bp, Homo sapien
ttccaggtgcatgttaatgaaggca

SEQ ID NO: 3742032 - DNA, 25 bp, Homo sapien
aaccctttgagttgggagatagtgc

SEQ ID NO: 3742033 - DNA, 25 bp, Homo sapien
tcaagacaacaggaagaaccctttg

SEQ ID NO: 3742034 - DNA, 25 bp, Homo sapien
ttgaggctggatgacccctgcccat

SEQ ID NO: 3742035 - DNA, 25 bp, Homo sapien
gcccatgcagggctagggtaggaga

SEQ ID NO: 3742036 - DNA, 25 bp, Homo sapien
tgtctggctctgttggtcttgaggc

SEQ ID NO: 3742037 - DNA, 25 bp, Homo sapien
cccaggtgttcccaaggcctggctg

SEQ ID NO: 3742038 - DNA, 25 bp, Homo sapien
ttcaacttcagcttcgctgtgtttc

SEQ ID NO: 3742039 - DNA, 25 bp, Homo sapien
tcaacttcagcttcgctgtgtttct

SEQ ID NO: 3742040 - DNA, 25 bp, Homo sapien
ttgttcagttttctcattgatcctg

SEQ ID NO: 3742041 - DNA, 25 bp, Homo sapien
cttgttcagttttctcattgatcct

SEQ ID NO: 3742042 - DNA, 25 bp, Homo sapien
cttcccatgtggagatgtgcatcct

SEQ ID NO: 3742043 - DNA, 25 bp, Homo sapien
tcccatgtggagatgtgcatcctca

SEQ ID NO: 3742044 - DNA, 25 bp, Homo sapien
gatgtgcatcctcacttcctgcctc

SEQ ID NO: 3742045 - DNA, 25 bp, Homo sapien
gaggcttcccatgtggagatgtgca

SEQ ID NO: 3742046 - DNA, 25 bp, Homo sapien
catctccatctatgcccaccagatc

SEQ ID NO: 3742047 - DNA, 25 bp, Homo sapien
ctcgactccctgcagccgggcttca

SEQ ID NO: 3742048 - DNA, 25 bp, Homo sapien
atctccatctatgcccaccagatcc

SEQ ID NO: 3742049 - DNA, 25 bp, Homo sapien
tccagccccaggactcctcgactcc

SEQ ID NO: 3742050 - DNA, 25 bp, Homo sapien
gctgctttgaaagtcccctgagctg

SEQ ID NO: 3742051 - DNA, 25 bp, Homo sapien
gctcccggggcagttgagcatctgc

SEQ ID NO: 3742052 - DNA, 25 bp, Homo sapien
tgaaagtcccctgagctgtttgtct

SEQ ID NO: 3742053 - DNA, 25 bp, Homo sapien
tgctttgaaagtcccctgagctgtt

SEQ ID NO: 3742054 - DNA, 25 bp, Homo sapien
ggccaaagcagaacctgaaggcatg

SEQ ID NO: 3742055 - DNA, 25 bp, Homo sapien
ggctccggctttactggctctaggt

SEQ ID NO: 3742056 - DNA, 25 bp, Homo sapien
gaacctctgaaatgaagactgcaca

SEQ ID NO: 3742057 - DNA, 25 bp, Homo sapien
tgcattctgctgactctgttccacc

SEQ ID NO: 3742058 - DNA, 25 bp, Homo sapien
ttgatacaggcgtgcagtgcatgat

SEQ ID NO: 3742059 - DNA, 25 bp, Homo sapien
agcgatttttaaatgtacgattcaa

SEQ ID NO: 3742060 - DNA, 25 bp, Homo sapien
ccagttatactctttagcgattttt

SEQ ID NO: 3742061 - DNA, 25 bp, Homo sapien
taaatgtacgattcaatcatttttg

SEQ ID NO: 3742062 - DNA, 25 bp, Homo sapien
tcttcttgaagtgttgtctggattt

SEQ ID NO: 3742063 - DNA, 25 bp, Homo sapien
aaaaaacaccagctctttggtgtct

SEQ ID NO: 3742064 - DNA, 25 bp, Homo sapien
tgtctgtagtttcgggatttgagct

SEQ ID NO: 3742065 - DNA, 25 bp, Homo sapien
ggatttgagctttttccaccgtcat

SEQ ID NO: 3742066 - DNA, 25 bp, Homo sapien
ctttggtgtctgtagtttcgggatt

SEQ ID NO: 3742067 - DNA, 25 bp, Homo sapien
tggagatgtctgcagcactgaactg

SEQ ID NO: 3742068 - DNA, 25 bp, Homo sapien
actgaactgactgtagagtggtgga

SEQ ID NO: 3742069 - DNA, 25 bp, Homo sapien
tgaactgactgtagagtggtggagg

SEQ ID NO: 3742070 - DNA, 25 bp, Homo sapien
agatgtctgcagcactgaactgact

SEQ ID NO: 3742071 - DNA, 25 bp, Homo sapien
tggctaaagcactttggttttggta

SEQ ID NO: 3742072 - DNA, 25 bp, Homo sapien
ggacgtagtgattattaataggctc

SEQ ID NO: 3742073 - DNA, 25 bp, Homo sapien
accacaaacagagtgtctaagttct

SEQ ID NO: 3742074 - DNA, 25 bp, Homo sapien
gggtctttcaagcacaaacactaaa

SEQ ID NO: 3742075 - DNA, 25 bp, Homo sapien
tcatgcaacacctgtctctgcgggc

SEQ ID NO: 3742076 - DNA, 25 bp, Homo sapien
caagaccctgagctcgattctgtgg

SEQ ID NO: 3742077 - DNA, 25 bp, Homo sapien
gagatgcaggacgtaacaccttggg

SEQ ID NO: 3742078 - DNA, 25 bp, Homo sapien
aaattgggactaatgcttgctgctc

SEQ ID NO: 3742079 - DNA, 25 bp, Homo sapien
ggctctcagacacttcagtcaagct

SEQ ID NO: 3742080 - DNA, 25 bp, Homo sapien
cctgcccaggtgtccaaggcttggt

SEQ ID NO: 3742081 - DNA, 25 bp, Homo sapien
cagtcaagctctgtggcctgcccag

SEQ ID NO: 3742082 - DNA, 25 bp, Homo sapien
accaccagccagcacacctctgctg

SEQ ID NO: 3742083 - DNA, 25 bp, Homo sapien
ttgttcctcatcccttttgggtcca

SEQ ID NO: 3742084 - DNA, 25 bp, Homo sapien
catcccttttgggtccagggcggag

SEQ ID NO: 3742085 - DNA, 25 bp, Homo sapien
tcctcatcccttttgggtccagggc

SEQ ID NO: 3742086 - DNA, 25 bp, Homo sapien
gagggggtgatggagtatggttttc

SEQ ID NO: 3742087 - DNA, 25 bp, Homo sapien
aaacagatggtgactttggagcaca

SEQ ID NO: 3742088 - DNA, 25 bp, Homo sapien
atcacagtgagaaaacagatggtga

SEQ ID NO: 3742089 - DNA, 25 bp, Homo sapien
cagtgagaaaacagatggtgacttt

SEQ ID NO: 3742090 - DNA, 25 bp, Homo sapien
agcctaataagagcctggtgtttgc

SEQ ID NO: 3742091 - DNA, 25 bp, Homo sapien
gctgagattattagtacaatgaaac

SEQ ID NO: 3742092 - DNA, 25 bp, Homo sapien
ctgagattattagtacaatgaaacc

SEQ ID NO: 3742093 - DNA, 25 bp, Homo sapien
agctgagattattagtacaatgaaa

SEQ ID NO: 3742094 - DNA, 25 bp, Homo sapien
gagtgaggaatctttaagtccaaat

SEQ ID NO: 3742095 - DNA, 25 bp, Homo sapien
tcacctttcactgaatttgggagtg

SEQ ID NO: 3742096 - DNA, 25 bp, Homo sapien
tgggagtgaggaatctttaagtcca

SEQ ID NO: 3742097 - DNA, 25 bp, Homo sapien
tgaggaatctttaagtccaaataat

SEQ ID NO: 3742098 - DNA, 25 bp, Homo sapien
gacactggttgcatggcagtgtgaa

SEQ ID NO: 3742099 - DNA, 25 bp, Homo sapien
tggacactggttgcatggcagtgtg

SEQ ID NO: 3742100 - DNA, 25 bp, Homo sapien
ggacactggttgcatggcagtgtga

SEQ ID NO: 3742101 - DNA, 25 bp, Homo sapien
ccttcatcacaatgcggtcctcccc

SEQ ID NO: 3742102 - DNA, 25 bp, Homo sapien
ggtcctccccgccagttcttgcttc

SEQ ID NO: 3742103 - DNA, 25 bp, Homo sapien
caatgcggtcctccccgccagttct

SEQ ID NO: 3742104 - DNA, 25 bp, Homo sapien
tcccattctgtgtgtgacactgatt

SEQ ID NO: 3742105 - DNA, 25 bp, Homo sapien
ccttcagcagtgtcatcttcactca

SEQ ID NO: 3742106 - DNA, 25 bp, Homo sapien
ggcaatggccccctgatttttctgt

SEQ ID NO: 3742107 - DNA, 25 bp, Homo sapien
gtttatctccttcagcagtgtcatc

SEQ ID NO: 3742108 - DNA, 25 bp, Homo sapien
ttcctttattctggcaatggccccc

SEQ ID NO: 3742109 - DNA, 25 bp, Homo sapien
gggttcgtggccataaagttcagag

SEQ ID NO: 3742110 - DNA, 25 bp, Homo sapien
caatgtcagactcggggatgagagc

SEQ ID NO: 3742111 - DNA, 25 bp, Homo sapien
ttcgtggccataaagttcagaggcc

SEQ ID NO: 3742112 - DNA, 25 bp, Homo sapien
ggccataaagttcagaggccactga

SEQ ID NO: 3742113 - DNA, 25 bp, Homo sapien
cccatggggagaatccagtctgagg

SEQ ID NO: 3742114 - DNA, 25 bp, Homo sapien
catggggagaatccagtctgagggg

SEQ ID NO: 3742115 - DNA, 25 bp, Homo sapien
ccatggggagaatccagtctgaggg

SEQ ID NO: 3742116 - DNA, 25 bp, Homo sapien
tggggagaatccagtctgaggggga

SEQ ID NO: 3742117 - DNA, 25 bp, Homo sapien
tctcaggatagatgtggagcccgct

SEQ ID NO: 3742118 - DNA, 25 bp, Homo sapien
ggtggaatgtccacaaatcctaagc

SEQ ID NO: 3742119 - DNA, 25 bp, Homo sapien
caacccgcgaagttggtctgctgct

SEQ ID NO: 3742120 - DNA, 25 bp, Homo sapien
gaccagcccggatggtttttcacaa

SEQ ID NO: 3742121 - DNA, 25 bp, Homo sapien
gctggaaggatggatggtctgagga

SEQ ID NO: 3742122 - DNA, 25 bp, Homo sapien
gatggatggtctgaggagtctccac

SEQ ID NO: 3742123 - DNA, 25 bp, Homo sapien
aaggatggatggtctgaggagtctc

SEQ ID NO: 3742124 - DNA, 25 bp, Homo sapien
tggatggtctgaggagtctccacca

SEQ ID NO: 3742125 - DNA, 25 bp, Homo sapien
gacacaaaggcgtttttctacatgc

SEQ ID NO: 3742126 - DNA, 25 bp, Homo sapien
cttcaccctgggaatagtccacttg

SEQ ID NO: 3742127 - DNA, 25 bp, Homo sapien
aatagtccacttgcccctaattgag

SEQ ID NO: 3742128 - DNA, 25 bp, Homo sapien
aaaggcgtttttctacatgctgaac

SEQ ID NO: 3742129 - DNA, 25 bp, Homo sapien
caaagaaaggccggactcgttggag

SEQ ID NO: 3742130 - DNA, 25 bp, Homo sapien
ccaaccacgcaactggggtcatagg

SEQ ID NO: 3742131 - DNA, 25 bp, Homo sapien
ctcagttaagggagccaaagaaagg

SEQ ID NO: 3742132 - DNA, 25 bp, Homo sapien
tggtctcagttaagggagccaaaga

SEQ ID NO: 3742133 - DNA, 25 bp, Homo sapien
cagcaggctttcaaccagcggccat

SEQ ID NO: 3742134 - DNA, 25 bp, Homo sapien
tattgcagcaggctttcaaccagcg

SEQ ID NO: 3742135 - DNA, 25 bp, Homo sapien
tggattattgcagcaggctttcaac

SEQ ID NO: 3742136 - DNA, 25 bp, Homo sapien
ttggattattgcagcaggctttcaa

SEQ ID NO: 3742137 - DNA, 25 bp, Homo sapien
tgggatcccgtgtctgatgcatccc

SEQ ID NO: 3742138 - DNA, 25 bp, Homo sapien
tcccgtgtctgatgcatcccagtct

SEQ ID NO: 3742139 - DNA, 25 bp, Homo sapien
ctagttatgggatcccgtgtctgat

SEQ ID NO: 3742140 - DNA, 25 bp, Homo sapien
gtgtctgatgcatcccagtctccca

SEQ ID NO: 3742141 - DNA, 25 bp, Homo sapien
tctgaagcctcgttaaaagtgaatt

SEQ ID NO: 3742142 - DNA, 25 bp, Homo sapien
tgtccgtggctgtgtatccagcccc

SEQ ID NO: 3742143 - DNA, 25 bp, Homo sapien
attctgttgtgtccgtggctgtgta

SEQ ID NO: 3742144 - DNA, 25 bp, Homo sapien
ttttctgaagcctcgttaaaagtga

SEQ ID NO: 3742145 - DNA, 25 bp, Homo sapien
tgtgtgacgttagtgccagaaggaa

SEQ ID NO: 3742146 - DNA, 25 bp, Homo sapien
tggtgaactgggcaacctgctgccc

SEQ ID NO: 3742147 - DNA, 25 bp, Homo sapien
ggaaggcaaaccagactaagttcaa

SEQ ID NO: 3742148 - DNA, 25 bp, Homo sapien
tcctaggagcgctatgaagtgtgtg

SEQ ID NO: 3742149 - DNA, 25 bp, Homo sapien
tgcctttgtaaagatacggaaactg

SEQ ID NO: 3742150 - DNA, 25 bp, Homo sapien
tgtgtgatgaattgtagacctcact

SEQ ID NO: 3742151 - DNA, 25 bp, Homo sapien
gatacggaaactgttatatgtcagc

SEQ ID NO: 3742152 - DNA, 25 bp, Homo sapien
tgttatatgtcagcattatcggtgt

SEQ ID NO: 3742153 - DNA, 25 bp, Homo sapien
catgcatatagagagcgtggtttcc

SEQ ID NO: 3742154 - DNA, 25 bp, Homo sapien
atagcttgcatgcatatagagagcg

SEQ ID NO: 3742155 - DNA, 25 bp, Homo sapien
tatagagagcgtggtttcctcatca

SEQ ID NO: 3742156 - DNA, 25 bp, Homo sapien
cttgcatgcatatagagagcgtggt

SEQ ID NO: 3742157 - DNA, 25 bp, Homo sapien
ccaatgactataaggcaaaagaagt

SEQ ID NO: 3742158 - DNA, 25 bp, Homo sapien
tcaagtgcacactcttttctaaaag

SEQ ID NO: 3742159 - DNA, 25 bp, Homo sapien
ctaaaatgtatctgtcgttgctaac

SEQ ID NO: 3742160 - DNA, 25 bp, Homo sapien
tttgaacaagctatttgataaagcc

SEQ ID NO: 3742161 - DNA, 25 bp, Homo sapien
ggcaggaagctttgcatttgcaatc

SEQ ID NO: 3742162 - DNA, 25 bp, Homo sapien
caattccccttgctaccgtccttat

SEQ ID NO: 3742163 - DNA, 25 bp, Homo sapien
taaagaaagacacaaggacttttca

SEQ ID NO: 3742164 - DNA, 25 bp, Homo sapien
gcaatcttagtgttgtgtccctttc

SEQ ID NO: 3742165 - DNA, 25 bp, Homo sapien
gaaagtgtagtaagtaatctctgca

SEQ ID NO: 3742166 - DNA, 25 bp, Homo sapien
caacccttgaatatcagatgaagag

SEQ ID NO: 3742167 - DNA, 25 bp, Homo sapien
tagggctggtacttggctcgcttag

SEQ ID NO: 3742168 - DNA, 25 bp, Homo sapien
gctcgcttagcatttgaatgtccaa

SEQ ID NO: 3742169 - DNA, 25 bp, Homo sapien
tggaactgccttcagaatctataga

SEQ ID NO: 3742170 - DNA, 25 bp, Homo sapien
gaatctatagagccttttttctctt

SEQ ID NO: 3742171 - DNA, 25 bp, Homo sapien
tgccttcagaatctatagagccttt

SEQ ID NO: 3742172 - DNA, 25 bp, Homo sapien
ttcagaatctatagagccttttttc

SEQ ID NO: 3742173 - DNA, 25 bp, Homo sapien
ctgagtactgaggattttgtgaaat

SEQ ID NO: 3742174 - DNA, 25 bp, Homo sapien
tgaaatgttagaacctggtgtattg

SEQ ID NO: 3742175 - DNA, 25 bp, Homo sapien
aatgttagaacctggtgtattgggc

SEQ ID NO: 3742176 - DNA, 25 bp, Homo sapien
tgttagaacctggtgtattgggcat

SEQ ID NO: 3742177 - DNA, 25 bp, Homo sapien
gagcatgacgtgactttgtttctgg

SEQ ID NO: 3742178 - DNA, 25 bp, Homo sapien
ttactgaaagatatggagcttgggt

SEQ ID NO: 3742179 - DNA, 25 bp, Homo sapien
cttgggtatggagcatgacgtgact

SEQ ID NO: 3742180 - DNA, 25 bp, Homo sapien
catcagttgagctttagcagttact

SEQ ID NO: 3742181 - DNA, 25 bp, Homo sapien
ctgtgctcaatttcaccacactgcc

SEQ ID NO: 3742182 - DNA, 25 bp, Homo sapien
taactgtgctcaatttcaccacact

SEQ ID NO: 3742183 - DNA, 25 bp, Homo sapien
aactgtgctcaatttcaccacactg

SEQ ID NO: 3742184 - DNA, 25 bp, Homo sapien
actgtgctcaatttcaccacactgc

SEQ ID NO: 3742185 - DNA, 25 bp, Homo sapien
tggtatcgcactgagtgttaatgcc

SEQ ID NO: 3742186 - DNA, 25 bp, Homo sapien
aggctcctacatgtgtaccaggctg

SEQ ID NO: 3742187 - DNA, 25 bp, Homo sapien
tacgtgacaaatacagagcaggctc

SEQ ID NO: 3742188 - DNA, 25 bp, Homo sapien
gcccttgagtgtgtacgtgacaaat

SEQ ID NO: 3742189 - DNA, 25 bp, Homo sapien
gatatgcagcagtaagttggaaatg

SEQ ID NO: 3742190 - DNA, 25 bp, Homo sapien
gagaagtcatcgtcaccagcttcct

SEQ ID NO: 3742191 - DNA, 25 bp, Homo sapien
taagttggaaatgacagtgctgaga

SEQ ID NO: 3742192 - DNA, 25 bp, Homo sapien
gtgctgagaagtcatcgtcaccagc

SEQ ID NO: 3742193 - DNA, 25 bp, Homo sapien
gttagtcgtaaacaccactgccctc

SEQ ID NO: 3742194 - DNA, 25 bp, Homo sapien
tactggttgttatcagttagtcgta

SEQ ID NO: 3742195 - DNA, 25 bp, Homo sapien
tgtactggttgttatcagttagtcg

SEQ ID NO: 3742196 - DNA, 25 bp, Homo sapien
aatctgtactggttgttatcagtta

SEQ ID NO: 3742197 - DNA, 25 bp, Homo sapien
tacagtggagttagggctcaaatcc

SEQ ID NO: 3742198 - DNA, 25 bp, Homo sapien
tcaagagtgtggtctggtaatgcca

SEQ ID NO: 3742199 - DNA, 25 bp, Homo sapien
tatagagagttggaggatacccctc

SEQ ID NO: 3742200 - DNA, 25 bp, Homo sapien
tctaggaatggatgactgagcctcc

SEQ ID NO: 3742201 - DNA, 25 bp, Homo sapien
cacgttgatacagtgtgattgtgtg

SEQ ID NO: 3742202 - DNA, 25 bp, Homo sapien
actagagcacgttgatacagtgtga

SEQ ID NO: 3742203 - DNA, 25 bp, Homo sapien
gatacagtgtgattgtgtgttggca

SEQ ID NO: 3742204 - DNA, 25 bp, Homo sapien
ctcttgtgttgactagagcacgttg

SEQ ID NO: 3742205 - DNA, 25 bp, Homo sapien
tcaaaactgggtcctgtacggagct

SEQ ID NO: 3742206 - DNA, 25 bp, Homo sapien
aactgggtcctgtacggagcttgca

SEQ ID NO: 3742207 - DNA, 25 bp, Homo sapien
ctgggtcctgtacggagcttgcaga

SEQ ID NO: 3742208 - DNA, 25 bp, Homo sapien
gcttgcagagtcagcagtaaaggga

SEQ ID NO: 3742209 - DNA, 25 bp, Homo sapien
aagtgcgttaacattttgaagcatg

SEQ ID NO: 3742210 - DNA, 25 bp, Homo sapien
gcgttaacattttgaagcatgtatt

SEQ ID NO: 3742211 - DNA, 25 bp, Homo sapien
tgtatttgcccccaatttcaatgtg

SEQ ID NO: 3742212 - DNA, 25 bp, Homo sapien
tgaagcatgtatttgcccccaattt

SEQ ID NO: 3742213 - DNA, 25 bp, Homo sapien
tctcgaaatcgtggtggtctcccca

SEQ ID NO: 3742214 - DNA, 25 bp, Homo sapien
ggctactgcaagaacgagtcgggca

SEQ ID NO: 3742215 - DNA, 25 bp, Homo sapien
gaacgccccagagccgtagttaatg

SEQ ID NO: 3742216 - DNA, 25 bp, Homo sapien
cgtggactatttccctagcgaggac

SEQ ID NO: 3742217 - DNA, 25 bp, Homo sapien
aagcgtcctgcggtgagtgttcccg

SEQ ID NO: 3742218 - DNA, 25 bp, Homo sapien
ggctgataacgcacagctgtgggaa

SEQ ID NO: 3742219 - DNA, 25 bp, Homo sapien
ccatggcgtcggtggtggaatacaa

SEQ ID NO: 3742220 - DNA, 25 bp, Homo sapien
gctactgcgattccaaggagggcaa

SEQ ID NO: 3742221 - DNA, 25 bp, Homo sapien
atcaccagggcctagggccgagcct

SEQ ID NO: 3742222 - DNA, 25 bp, Homo sapien
tctacttacaacacctttagaggga

SEQ ID NO: 3742223 - DNA, 25 bp, Homo sapien
gttgtcaccatgcaaagatccttca

SEQ ID NO: 3742224 - DNA, 25 bp, Homo sapien
aagaaacatgatctaagcctgttgt

SEQ ID NO: 3742225 - DNA, 25 bp, Homo sapien
tgaagtccagtagcgtcagtcctcc

SEQ ID NO: 3742226 - DNA, 25 bp, Homo sapien
tctgactgggactactcagaatctg

SEQ ID NO: 3742227 - DNA, 25 bp, Homo sapien
gaaaatgacttcctaggattctgac

SEQ ID NO: 3742228 - DNA, 25 bp, Homo sapien
tatcttgatgactagctttatagca

SEQ ID NO: 3742229 - DNA, 25 bp, Homo sapien
caagagcaacttttggcattggaaa

SEQ ID NO: 3742230 - DNA, 25 bp, Homo sapien
tgaacttgatatgaacttcacagta

SEQ ID NO: 3742231 - DNA, 25 bp, Homo sapien
tgatatgaacttcacagtaaaatgc

SEQ ID NO: 3742232 - DNA, 25 bp, Homo sapien
aatgcaagagcaacttttggcattg

SEQ ID NO: 3742233 - DNA, 25 bp, Homo sapien
gaggcctctggtttgttcagcctgg

SEQ ID NO: 3742234 - DNA, 25 bp, Homo sapien
gctattgatagtagtacgcctctgc

SEQ ID NO: 3742235 - DNA, 25 bp, Homo sapien
cagttccctctcaggcactagatag

SEQ ID NO: 3742236 - DNA, 25 bp, Homo sapien
gccaccttgtgcttactggtttcag

SEQ ID NO: 3742237 - DNA, 25 bp, Homo sapien
gaagccatcttggaccctccagatg

SEQ ID NO: 3742238 - DNA, 25 bp, Homo sapien
cacattcgtggagtcgtgagtcacc

SEQ ID NO: 3742239 - DNA, 25 bp, Homo sapien
tgagtcaccgaataataagtccaac

SEQ ID NO: 3742240 - DNA, 25 bp, Homo sapien
taagtccaactaccacgtggcactg

SEQ ID NO: 3742241 - DNA, 25 bp, Homo sapien
tcatgtcagtccgtggcagtgtggc

SEQ ID NO: 3742242 - DNA, 25 bp, Homo sapien
ttttttgccacgaagctagctagtc

SEQ ID NO: 3742243 - DNA, 25 bp, Homo sapien
tttctgtggaagactctgggctcca

SEQ ID NO: 3742244 - DNA, 25 bp, Homo sapien
taggttgttaatgccctgcggacca

SEQ ID NO: 3742245 - DNA, 25 bp, Homo sapien
cggaaagcggcatgtatcgtacata

SEQ ID NO: 3742246 - DNA, 25 bp, Homo sapien
tccaaaacggaaagcggcatgtatc

SEQ ID NO: 3742247 - DNA, 25 bp, Homo sapien
ttgtctttgattaaaggaaactcac

SEQ ID NO: 3742248 - DNA, 25 bp, Homo sapien
tcaaatggatagtgaagtccaaaac

SEQ ID NO: 3742249 - DNA, 25 bp, Homo sapien
tttcagagcctgtgattactccaag

SEQ ID NO: 3742250 - DNA, 25 bp, Homo sapien
tatagctttgagttaccgtgactgg

SEQ ID NO: 3742251 - DNA, 25 bp, Homo sapien
ctgccaggagattgtgaagaccttt

SEQ ID NO: 3742252 - DNA, 25 bp, Homo sapien
ccgtgactgggaggtaaagctctgc

SEQ ID NO: 3742253 - DNA, 25 bp, Homo sapien
agatactgaaaacatggccagcgtc

SEQ ID NO: 3742254 - DNA, 25 bp, Homo sapien
tattgtatcttgctcaactacctga

SEQ ID NO: 3742255 - DNA, 25 bp, Homo sapien
tgtagtatccctctttctaatcacg

SEQ ID NO: 3742256 - DNA, 25 bp, Homo sapien
cacgttttgtcagatgccggcacct

SEQ ID NO: 3742257 - DNA, 25 bp, Homo sapien
agacttgaccaagaccgactgccag

SEQ ID NO: 3742258 - DNA, 25 bp, Homo sapien
gaataagacttgaccaagaccgact

SEQ ID NO: 3742259 - DNA, 25 bp, Homo sapien
gaccaagaccgactgccagtaatag

SEQ ID NO: 3742260 - DNA, 25 bp, Homo sapien
gcaagaataagacttgaccaagacc

SEQ ID NO: 3742261 - DNA, 25 bp, Homo sapien
ttgtggttgatcctcattctttccc

SEQ ID NO: 3742262 - DNA, 25 bp, Homo sapien
tgttgcagacatattttcgagaaga

SEQ ID NO: 3742263 - DNA, 25 bp, Homo sapien
attgttgcagacatattttcgagaa

SEQ ID NO: 3742264 - DNA, 25 bp, Homo sapien
gaaagaatcttgggattgttgcaga

SEQ ID NO: 3742265 - DNA, 25 bp, Homo sapien
ttgcagacatattttcgagaagatc

SEQ ID NO: 3742266 - DNA, 25 bp, Homo sapien
gggaaagtcacacccactcgagaac

SEQ ID NO: 3742267 - DNA, 25 bp, Homo sapien
tacatgtgacaacaaatgttccctg

SEQ ID NO: 3742268 - DNA, 25 bp, Homo sapien
cactgtcaacatttacggctggata

SEQ ID NO: 3742269 - DNA, 25 bp, Homo sapien
ttctccgaagccagggtcaacctca

SEQ ID NO: 3742270 - DNA, 25 bp, Homo sapien
gttgatcgtccaagaaaagttcctg

SEQ ID NO: 3742271 - DNA, 25 bp, Homo sapien
caatatacggagagtgccctgtgcc

SEQ ID NO: 3742272 - DNA, 25 bp, Homo sapien
tgtgccaaagccacgagttgatcgt

SEQ ID NO: 3742273 - DNA, 25 bp, Homo sapien
gttcctgtgatacaagaggagaggg

SEQ ID NO: 3742274 - DNA, 25 bp, Homo sapien
ggtaactcaggtgcccagagccatt

SEQ ID NO: 3742275 - DNA, 25 bp, Homo sapien
taagcgcccaggatctaccatgttg

SEQ ID NO: 3742276 - DNA, 25 bp, Homo sapien
tctttaagtggtatagctcctgggc

SEQ ID NO: 3742277 - DNA, 25 bp, Homo sapien
taaactctagatgtggatggaacct

SEQ ID NO: 3742278 - DNA, 25 bp, Homo sapien
tagtctatgactcctggaagataac

SEQ ID NO: 3742279 - DNA, 25 bp, Homo sapien
tcacacatatgggtgtaaatccgct

SEQ ID NO: 3742280 - DNA, 25 bp, Homo sapien
tcatccgtgatgaagatagtcctga

SEQ ID NO: 3742281 - DNA, 25 bp, Homo sapien
tatgggtgtaaatccgctagaagct

SEQ ID NO: 3742282 - DNA, 25 bp, Homo sapien
tgtcccgagcaagagaagcagtcct

SEQ ID NO: 3742283 - DNA, 25 bp, Homo sapien
gaaagcaaagcagctgcgctcagac

SEQ ID NO: 3742284 - DNA, 25 bp, Homo sapien
ttggcttcagatttgggcaaagaga

SEQ ID NO: 3742285 - DNA, 25 bp, Homo sapien
cctgagctcctttgacatgttaaga

SEQ ID NO: 3742286 - DNA, 25 bp, Homo sapien
gaagaggctaacactctgtttaatg

SEQ ID NO: 3742287 - DNA, 25 bp, Homo sapien
ggacatactgaatgccggtgacaaa

SEQ ID NO: 3742288 - DNA, 25 bp, Homo sapien
aatgccggtgacaaattaacagagg

SEQ ID NO: 3742289 - DNA, 25 bp, Homo sapien
aaaaccgtgaggacatactgaatgc

SEQ ID NO: 3742290 - DNA, 25 bp, Homo sapien
cgaagtaattactcagagcgcaggg

SEQ ID NO: 3742291 - DNA, 25 bp, Homo sapien
tcaactccgtccaacgtaaggcggc

SEQ ID NO: 3742292 - DNA, 25 bp, Homo sapien
aattcgaatctctgggtgggtccgc

SEQ ID NO: 3742293 - DNA, 25 bp, Homo sapien
gcacgcgagagctgtcaaatgcacg

SEQ ID NO: 3742294 - DNA, 25 bp, Homo sapien
cgggtgacttgagaaatcccagtgc

SEQ ID NO: 3742295 - DNA, 25 bp, Homo sapien
tcccagtgcactgtacaacccttaa

SEQ ID NO: 3742296 - DNA, 25 bp, Homo sapien
gcactccagctgttaccagtaggga

SEQ ID NO: 3742297 - DNA, 25 bp, Homo sapien
tttatatgttggcacggttctggga

SEQ ID NO: 3742298 - DNA, 25 bp, Homo sapien
aattctggcagtgtttggtggctca

SEQ ID NO: 3742299 - DNA, 25 bp, Homo sapien
acaatggtgggaacgtacttgggca

SEQ ID NO: 3742300 - DNA, 25 bp, Homo sapien
taatggaaagcagtgacggcctggt

SEQ ID NO: 3742301 - DNA, 25 bp, Homo sapien
tggccccgtgccataagacaaaaac

SEQ ID NO: 3742302 - DNA, 25 bp, Homo sapien
agaagcgggagaaggccctctcttc

SEQ ID NO: 3742303 - DNA, 25 bp, Homo sapien
ggccctctcttccagaggctccttt

SEQ ID NO: 3742304 - DNA, 25 bp, Homo sapien
gaggagagaagcgggagaaggccct

SEQ ID NO: 3742305 - DNA, 25 bp, Homo sapien
agagaagcgggagaaggccctctct

SEQ ID NO: 3742306 - DNA, 25 bp, Homo sapien
taatacaaacaaacagccgtagccc

SEQ ID NO: 3742307 - DNA, 25 bp, Homo sapien
cagggccctacaggctctgaattgc

SEQ ID NO: 3742308 - DNA, 25 bp, Homo sapien
ccaagttgtgtttgctcatcgaggg

SEQ ID NO: 3742309 - DNA, 25 bp, Homo sapien
cagcaagctcagatcagaactgcgt

SEQ ID NO: 3742310 - DNA, 25 bp, Homo sapien
cacaaattaagcatcttatagaaga

SEQ ID NO: 3742311 - DNA, 25 bp, Homo sapien
gaaacttggagtcggaagaagctgg

SEQ ID NO: 3742312 - DNA, 25 bp, Homo sapien
gctgaggcatttagagatgtctttg

SEQ ID NO: 3742313 - DNA, 25 bp, Homo sapien
tatctccaaaggcaatcacattcta

SEQ ID NO: 3742314 - DNA, 25 bp, Homo sapien
cacaggggacttcgcaggcgacgca

SEQ ID NO: 3742315 - DNA, 25 bp, Homo sapien
gacttcgcaggcgacgcatgtgcaa

SEQ ID NO: 3742316 - DNA, 25 bp, Homo sapien
tcgcaggcgacgcatgtgcaatctt

SEQ ID NO: 3742317 - DNA, 25 bp, Homo sapien
caggcgacgcatgtgcaatcttcca

SEQ ID NO: 3742318 - DNA, 25 bp, Homo sapien
tcttattaggcaaaatgtcttgaat

SEQ ID NO: 3742319 - DNA, 25 bp, Homo sapien
tcttcaacaggcggcaaaacacagg

SEQ ID NO: 3742320 - DNA, 25 bp, Homo sapien
tgggaatggcggcaagtcttcaaca

SEQ ID NO: 3742321 - DNA, 25 bp, Homo sapien
aatgtcttgaatgagccaattggga

SEQ ID NO: 3742322 - DNA, 25 bp, Homo sapien
gctgataggcagacttgccggccca

SEQ ID NO: 3742323 - DNA, 25 bp, Homo sapien
cataaaaagtagcaggcttgcccag

SEQ ID NO: 3742324 - DNA, 25 bp, Homo sapien
caggcttgcccagatcgctgatagg

SEQ ID NO: 3742325 - DNA, 25 bp, Homo sapien
gagtttcggcaagtgaggtcataaa

SEQ ID NO: 3742326 - DNA, 25 bp, Homo sapien
attagacaagcgttcctgcccacag

SEQ ID NO: 3742327 - DNA, 25 bp, Homo sapien
ctgcacttcatacctgggcaggagc

SEQ ID NO: 3742328 - DNA, 25 bp, Homo sapien
tctccgccctcgcactggtgcaagc

SEQ ID NO: 3742329 - DNA, 25 bp, Homo sapien
cgtgcagggccgtcgcaattagaca

SEQ ID NO: 3742330 - DNA, 25 bp, Homo sapien
tggtctggacttggaagctgcgggc

SEQ ID NO: 3742331 - DNA, 25 bp, Homo sapien
gctgcgggcgcatggaaattctgcc

SEQ ID NO: 3742332 - DNA, 25 bp, Homo sapien
tcctcctccgttcagaattgcgcga

SEQ ID NO: 3742333 - DNA, 25 bp, Homo sapien
cgcgagttctaagcagaggccctga

SEQ ID NO: 3742334 - DNA, 25 bp, Homo sapien
ctgcactatgcgtactgaaccatca

SEQ ID NO: 3742335 - DNA, 25 bp, Homo sapien
tagccaccctgcactatgcgtactg

SEQ ID NO: 3742336 - DNA, 25 bp, Homo sapien
tgattgcgtagccaccctgcactat

SEQ ID NO: 3742337 - DNA, 25 bp, Homo sapien
ttaagcaacactgattgcgtagcca

SEQ ID NO: 3742338 - DNA, 25 bp, Homo sapien
gtccccagaattttgtcagaggtga

SEQ ID NO: 3742339 - DNA, 25 bp, Homo sapien
cagcgtccccagaattttgtcagag

SEQ ID NO: 3742340 - DNA, 25 bp, Homo sapien
tcccagcgtccccagaattttgtca

SEQ ID NO: 3742341 - DNA, 25 bp, Homo sapien
gcgtccccagaattttgtcagaggt

SEQ ID NO: 3742342 - DNA, 25 bp, Homo sapien
tggttgtccgaggtgctgttctcat

SEQ ID NO: 3742343 - DNA, 25 bp, Homo sapien
ctggttgtccgaggtgctgttctca

SEQ ID NO: 3742344 - DNA, 25 bp, Homo sapien
gatgagacgctgtaaaaagaaccta

SEQ ID NO: 3742345 - DNA, 25 bp, Homo sapien
tctggcctgcccctaaagatgctgg

SEQ ID NO: 3742346 - DNA, 25 bp, Homo sapien
cacgtagctcgagagagaagcttcc

SEQ ID NO: 3742347 - DNA, 25 bp, Homo sapien
tagcgtttccggctttaactagagc

SEQ ID NO: 3742348 - DNA, 25 bp, Homo sapien
ctgagcattatggaggcagaagctg

SEQ ID NO: 3742349 - DNA, 25 bp, Homo sapien
ggttggagggactcgcggtggctct

SEQ ID NO: 3742350 - DNA, 25 bp, Homo sapien
ttgggttggagggactcgcggtggc

SEQ ID NO: 3742351 - DNA, 25 bp, Homo sapien
gttggagggactcgcggtggctctg

SEQ ID NO: 3742352 - DNA, 25 bp, Homo sapien
tctgtcttggatggccaggtagatc

SEQ ID NO: 3742353 - DNA, 25 bp, Homo sapien
aggtagatcatggtacccaagaggg

SEQ ID NO: 3742354 - DNA, 25 bp, Homo sapien
gatggccaggtagatcatggtaccc

SEQ ID NO: 3742355 - DNA, 25 bp, Homo sapien
tcttggatggccaggtagatcatgg

SEQ ID NO: 3742356 - DNA, 25 bp, Homo sapien
tgggatttcagctttccgcaaacgg

SEQ ID NO: 3742357 - DNA, 25 bp, Homo sapien
gaaaggctgccagcgtgggatttca

SEQ ID NO: 3742358 - DNA, 25 bp, Homo sapien
tagcaggcactctgtcaggccaaca

SEQ ID NO: 3742359 - DNA, 25 bp, Homo sapien
tgatacagcacgatagagcagaaga

SEQ ID NO: 3742360 - DNA, 25 bp, Homo sapien
ttccagctgtggtggacgaaaccgc

SEQ ID NO: 3742361 - DNA, 25 bp, Homo sapien
cgggattccctgaagaaccagggca

SEQ ID NO: 3742362 - DNA, 25 bp, Homo sapien
gacgaaaccgccacagaaagagatg

SEQ ID NO: 3742363 - DNA, 25 bp, Homo sapien
tctatagaaggtgagtcgggaagtc

SEQ ID NO: 3742364 - DNA, 25 bp, Homo sapien
cgcgtctctgtggtcagggcttccg

SEQ ID NO: 3742365 - DNA, 25 bp, Homo sapien
gacgcgtctctgtggtcagggcttc

SEQ ID NO: 3742366 - DNA, 25 bp, Homo sapien
ctggacgcgtctctgtggtcagggc

SEQ ID NO: 3742367 - DNA, 25 bp, Homo sapien
ttggagtctgagctgataaagtcct

SEQ ID NO: 3742368 - DNA, 25 bp, Homo sapien
ttttcaatcatgcaggcctagccag

SEQ ID NO: 3742369 - DNA, 25 bp, Homo sapien
catggcctgtttgcgagttgaaccc

SEQ ID NO: 3742370 - DNA, 25 bp, Homo sapien
gattagacactgataaacccctggg

SEQ ID NO: 3742371 - DNA, 25 bp, Homo sapien
tagtcatccagagccaagtcagagg

SEQ ID NO: 3742372 - DNA, 25 bp, Homo sapien
tacttccagaccgtgtcctctggtt

SEQ ID NO: 3742373 - DNA, 25 bp, Homo sapien
aagcctcgccaaagatttcctcctg

SEQ ID NO: 3742374 - DNA, 25 bp, Homo sapien
gcagggagggtgctcgaggaagcgg

SEQ ID NO: 3742375 - DNA, 25 bp, Homo sapien
gaggaagcggtcatgggctcccaaa

SEQ ID NO: 3742376 - DNA, 25 bp, Homo sapien
gtctgtgtgacctagaacaagttcc

SEQ ID NO: 3742377 - DNA, 25 bp, Homo sapien
cagacacctgtgagagtcagttacg

SEQ ID NO: 3742378 - DNA, 25 bp, Homo sapien
ggtggatcaaaccagcctcggttct

SEQ ID NO: 3742379 - DNA, 25 bp, Homo sapien
tgttaaggattgaccaaggttcact

SEQ ID NO: 3742380 - DNA, 25 bp, Homo sapien
cagtgactgagccaactctgatagg

SEQ ID NO: 3742381 - DNA, 25 bp, Homo sapien
taagaatgaagcttcctaggctggg

SEQ ID NO: 3742382 - DNA, 25 bp, Homo sapien
caatcataagtctggtaggcaaggt

SEQ ID NO: 3742383 - DNA, 25 bp, Homo sapien
aatatatgactgctaggtgtgtaag

SEQ ID NO: 3742384 - DNA, 25 bp, Homo sapien
gttaaggtgttcgaggtccttgaga

SEQ ID NO: 3742385 - DNA, 25 bp, Homo sapien
gagatgaactaccacaatgcagccc

SEQ ID NO: 3742386 - DNA, 25 bp, Homo sapien
gattccggttttggcatcctgcagc

SEQ ID NO: 3742387 - DNA, 25 bp, Homo sapien
atttgccacgtgacgagctccctgg

SEQ ID NO: 3742388 - DNA, 25 bp, Homo sapien
gacaggaactgccaacttaggaaag

SEQ ID NO: 3742389 - DNA, 25 bp, Homo sapien
atgaagtgctcctatttatgtcggc

SEQ ID NO: 3742390 - DNA, 25 bp, Homo sapien
gagtaatggtgtgtaattcagaaat

SEQ ID NO: 3742391 - DNA, 25 bp, Homo sapien
tcaagctggaaagaaacgaagccac

SEQ ID NO: 3742392 - DNA, 25 bp, Homo sapien
aaatatttaatgtttcattggttat

SEQ ID NO: 3742393 - DNA, 25 bp, Homo sapien
tatttaatgtttcattggttatcat

SEQ ID NO: 3742394 - DNA, 25 bp, Homo sapien
tgaaaatatttaatgtttcattggt

SEQ ID NO: 3742395 - DNA, 25 bp, Homo sapien
ctgaaaatatttaatgtttcattgg

SEQ ID NO: 3742396 - DNA, 25 bp, Homo sapien
tgactggtcgatgccactggagaag

SEQ ID NO: 3742397 - DNA, 25 bp, Homo sapien
cagaactctcagaagcggtgcagaa

SEQ ID NO: 3742398 - DNA, 25 bp, Homo sapien
tggacttgccaagcaaccttccggg

SEQ ID NO: 3742399 - DNA, 25 bp, Homo sapien
tcttggtatggagtagagctgtccc

SEQ ID NO: 3742400 - DNA, 25 bp, Homo sapien
cacggctgggcttgtggaatcttca

SEQ ID NO: 3742401 - DNA, 25 bp, Homo sapien
tacttctggatcacgcttgctgctg

SEQ ID NO: 3742402 - DNA, 25 bp, Homo sapien
cacccagcttgtgtggtaggccaga

SEQ ID NO: 3742403 - DNA, 25 bp, Homo sapien
tgttaaatactgaggcggcgcctcc

SEQ ID NO: 3742404 - DNA, 25 bp, Homo sapien
gacatttgggctgcaatcctgaccc

SEQ ID NO: 3742405 - DNA, 25 bp, Homo sapien
gaagttccctgcaagagaaaagtct

SEQ ID NO: 3742406 - DNA, 25 bp, Homo sapien
tgtggcaccccagcatgaaattcct

SEQ ID NO: 3742407 - DNA, 25 bp, Homo sapien
cagatggctccttcgggaacagtgg

SEQ ID NO: 3742408 - DNA, 25 bp, Homo sapien
gggactctgcatccgaagtggccca

SEQ ID NO: 3742409 - DNA, 25 bp, Homo sapien
gcagggaactgcatccaggagagct

SEQ ID NO: 3742410 - DNA, 25 bp, Homo sapien
cacaactcaaagtagcttctccagg

SEQ ID NO: 3742411 - DNA, 25 bp, Homo sapien
tcctgggtttcatcacatgcctctg

SEQ ID NO: 3742412 - DNA, 25 bp, Homo sapien
gaagatcttggcgatgtgctccctg

SEQ ID NO: 3742413 - DNA, 25 bp, Homo sapien
caaatgttgcagcttcgggtcgtga

SEQ ID NO: 3742414 - DNA, 25 bp, Homo sapien
gaaaaatccatggtgctcctgggaa

SEQ ID NO: 3742415 - DNA, 25 bp, Homo sapien
ccaagcgtgtcaagggtccagggct

SEQ ID NO: 3742416 - DNA, 25 bp, Homo sapien
cacattcccgtgggaattttttcat

SEQ ID NO: 3742417 - DNA, 25 bp, Homo sapien
ctctggtctcatctgaagtgacttt

SEQ ID NO: 3742418 - DNA, 25 bp, Homo sapien
tgactcttggagcatccttcttagg

SEQ ID NO: 3742419 - DNA, 25 bp, Homo sapien
gaagtgactttatccatgactcttg

SEQ ID NO: 3742420 - DNA, 25 bp, Homo sapien
accgaaggtaacatggatgggccag

SEQ ID NO: 3742421 - DNA, 25 bp, Homo sapien
taaaacgggaatggccatttgcttc

SEQ ID NO: 3742422 - DNA, 25 bp, Homo sapien
tgctgtataaggactactctccttt

SEQ ID NO: 3742423 - DNA, 25 bp, Homo sapien
ccagtgtgtctgtatctaaggaagg

SEQ ID NO: 3742424 - DNA, 25 bp, Homo sapien
ccaggtactgctgtacctgtacata

SEQ ID NO: 3742425 - DNA, 25 bp, Homo sapien
gaacagtgcagagacatcagtggaa

SEQ ID NO: 3742426 - DNA, 25 bp, Homo sapien
tttaacactggactaacaggcatta

SEQ ID NO: 3742427 - DNA, 25 bp, Homo sapien
cagtaactagacctgttccagtgcc

SEQ ID NO: 3742428 - DNA, 25 bp, Homo sapien
ctgccaggttttcgggacaagaaca

SEQ ID NO: 3742429 - DNA, 25 bp, Homo sapien
gagggttgccgaaaaaccaccagca

SEQ ID NO: 3742430 - DNA, 25 bp, Homo sapien
ttcaccacaatttgggaagtatgtg

SEQ ID NO: 3742431 - DNA, 25 bp, Homo sapien
ctgacagcatttgcaggagggttgc

SEQ ID NO: 3742432 - DNA, 25 bp, Homo sapien
tgagttaagctgtagcctctgtgct

SEQ ID NO: 3742433 - DNA, 25 bp, Homo sapien
taaagggtggcccataaactgccca

SEQ ID NO: 3742434 - DNA, 25 bp, Homo sapien
tgtagaaatacctggcgaactttga

SEQ ID NO: 3742435 - DNA, 25 bp, Homo sapien
gccagctgttccgtgttgtgtagaa

SEQ ID NO: 3742436 - DNA, 25 bp, Homo sapien
tgtgggagttttcagtgtgcagcca

SEQ ID NO: 3742437 - DNA, 25 bp, Homo sapien
gacagacgtgtgttccatgagccaa

SEQ ID NO: 3742438 - DNA, 25 bp, Homo sapien
cccatgctaagaggaaatgtcagcc

SEQ ID NO: 3742439 - DNA, 25 bp, Homo sapien
tgaactgcaacccagcaaaacttgg

SEQ ID NO: 3742440 - DNA, 25 bp, Homo sapien
caaaacttggttacagggcgaggag

SEQ ID NO: 3742441 - DNA, 25 bp, Homo sapien
cagtccagtgctcatcgtcctccat

SEQ ID NO: 3742442 - DNA, 25 bp, Homo sapien
ctaggttgaccccagtccagtgctc

SEQ ID NO: 3742443 - DNA, 25 bp, Homo sapien
tgggcctccactaggttgaccccag

SEQ ID NO: 3742444 - DNA, 25 bp, Homo sapien
cagctggtcggctgggcctccacta

SEQ ID NO: 3742445 - DNA, 25 bp, Homo sapien
agtcccatgtaggaccaactcatta

SEQ ID NO: 3742446 - DNA, 25 bp, Homo sapien
taggaccaactcattagaagatgaa

SEQ ID NO: 3742447 - DNA, 25 bp, Homo sapien
tcattagaagatgaagtcaggggct

SEQ ID NO: 3742448 - DNA, 25 bp, Homo sapien
cccatgtaggaccaactcattagaa

SEQ ID NO: 3742449 - DNA, 25 bp, Homo sapien
aatgactgaactcaggcagtgcagt

SEQ ID NO: 3742450 - DNA, 25 bp, Homo sapien
caatcacaggaaactaatgcagtag

SEQ ID NO: 3742451 - DNA, 25 bp, Homo sapien
tcattcactgcaggagaaccactct

SEQ ID NO: 3742452 - DNA, 25 bp, Homo sapien
gaagatagctaggatttcattcaca

SEQ ID NO: 3742453 - DNA, 25 bp, Homo sapien
gaaccactctggtcgaggaaggctg

SEQ ID NO: 3742454 - DNA, 25 bp, Homo sapien
caccatggcatatcaccttttctct

SEQ ID NO: 3742455 - DNA, 25 bp, Homo sapien
tgccaacaccatggcatatcacctt

SEQ ID NO: 3742456 - DNA, 25 bp, Homo sapien
ggcatatcaccttttctctagaaat

SEQ ID NO: 3742457 - DNA, 25 bp, Homo sapien
atggcatatcaccttttctctagaa

SEQ ID NO: 3742458 - DNA, 25 bp, Homo sapien
tgcacactctgaagtcggcagaggc

SEQ ID NO: 3742459 - DNA, 25 bp, Homo sapien
tctatttggctgttgcacactctga

SEQ ID NO: 3742460 - DNA, 25 bp, Homo sapien
ctctgaagtcggcagaggctaaatc

SEQ ID NO: 3742461 - DNA, 25 bp, Homo sapien
tggctgttgcacactctgaagtcgg

SEQ ID NO: 3742462 - DNA, 25 bp, Homo sapien
tcggagtcgcaactgccaaagagcc

SEQ ID NO: 3742463 - DNA, 25 bp, Homo sapien
tgcggccctgggacgcaaagtttcc

SEQ ID NO: 3742464 - DNA, 25 bp, Homo sapien
gaaaggctcgggaaaagttgcagca

SEQ ID NO: 3742465 - DNA, 25 bp, Homo sapien
tactgttcttagtttgtccacggcc

SEQ ID NO: 3742466 - DNA, 25 bp, Homo sapien
gcagacactctggggcccgcggttt

SEQ ID NO: 3742467 - DNA, 25 bp, Homo sapien
ctcccactcaagggaaccaggctcc

SEQ ID NO: 3742468 - DNA, 25 bp, Homo sapien
ctgccagcaggggaccgaatgtgca

SEQ ID NO: 3742469 - DNA, 25 bp, Homo sapien
cgaatgtgcagttagccacttttcc

SEQ ID NO: 3742470 - DNA, 25 bp, Homo sapien
ggcgccaaccacaaccacgcgcggg

SEQ ID NO: 3742471 - DNA, 25 bp, Homo sapien
cacgcgcggggaccccaaccgcgag

SEQ ID NO: 3742472 - DNA, 25 bp, Homo sapien
agagcccggtgggaaggcgcggagg

SEQ ID NO: 3742473 - DNA, 25 bp, Homo sapien
ggcagggagcctggtcacgggcgcc

SEQ ID NO: 3742474 - DNA, 25 bp, Homo sapien
ggccctgctgacgtaactattcgag

SEQ ID NO: 3742475 - DNA, 25 bp, Homo sapien
ttttatggctagtccacgcgccgtc

SEQ ID NO: 3742476 - DNA, 25 bp, Homo sapien
gtgttgcgccggatccccgaagtgc

SEQ ID NO: 3742477 - DNA, 25 bp, Homo sapien
tcccaaactcggaggaaatccagcg

SEQ ID NO: 3742478 - DNA, 25 bp, Homo sapien
cagcgccccgacactggatttcgag

SEQ ID NO: 3742479 - DNA, 25 bp, Homo sapien
cacagcgtggtgtattcggcgctcg

SEQ ID NO: 3742480 - DNA, 25 bp, Homo sapien
atttcgaggacaccccgaggcagag

SEQ ID NO: 3742481 - DNA, 25 bp, Homo sapien
gccacagcgtggtgtattcggcgct

SEQ ID NO: 3742482 - DNA, 25 bp, Homo sapien
taatcctgtctaggttccacagagg

SEQ ID NO: 3742483 - DNA, 25 bp, Homo sapien
catgatcacacttctgaggcttggg

SEQ ID NO: 3742484 - DNA, 25 bp, Homo sapien
ccgaataaaaccaacgaggccgcag

SEQ ID NO: 3742485 - DNA, 25 bp, Homo sapien
ctcttgtggcgtggcattgtgaacc

SEQ ID NO: 3742486 - DNA, 25 bp, Homo sapien
gatgcagacactagaatagctcctg

SEQ ID NO: 3742487 - DNA, 25 bp, Homo sapien
tcaatttagaatgtgccccactggg

SEQ ID NO: 3742488 - DNA, 25 bp, Homo sapien
ctcagaggaccaagcgtggacacaa

SEQ ID NO: 3742489 - DNA, 25 bp, Homo sapien
tagcgggactgtaaataacctgaga

SEQ ID NO: 3742490 - DNA, 25 bp, Homo sapien
gagattttccactctcggatgagaa

SEQ ID NO: 3742491 - DNA, 25 bp, Homo sapien
atcttagagctttgttaaatgccac

SEQ ID NO: 3742492 - DNA, 25 bp, Homo sapien
gagaaagcctagcaatttaaagatt

SEQ ID NO: 3742493 - DNA, 25 bp, Homo sapien
gtatggtatcttagagctttgttaa

SEQ ID NO: 3742494 - DNA, 25 bp, Homo sapien
gcaggtgataccagaagaacaaact

SEQ ID NO: 3742495 - DNA, 25 bp, Homo sapien
agtgcttcaataggccgatgtgtgc

SEQ ID NO: 3742496 - DNA, 25 bp, Homo sapien
tgaggaccccttcctagttcacaga

SEQ ID NO: 3742497 - DNA, 25 bp, Homo sapien
tcctgagaggagaatagctgaatca

SEQ ID NO: 3742498 - DNA, 25 bp, Homo sapien
tgaccacatccaaggagtcagagaa

SEQ ID NO: 3742499 - DNA, 25 bp, Homo sapien
ccctgtgaccacatccaaggagtca

SEQ ID NO: 3742500 - DNA, 25 bp, Homo sapien
gaagccctgtgaccacatccaagga

SEQ ID NO: 3742501 - DNA, 25 bp, Homo sapien
tccagttcccccagaacaagatcct

SEQ ID NO: 3742502 - DNA, 25 bp, Homo sapien
gaggcagctaaggttgggctttcca

SEQ ID NO: 3742503 - DNA, 25 bp, Homo sapien
taaggttgggctttccaggtctgcg

SEQ ID NO: 3742504 - DNA, 25 bp, Homo sapien
gctatcagatccgtagagacctggc

SEQ ID NO: 3742505 - DNA, 25 bp, Homo sapien
gccaacaacatcaccgtggtaggaa

SEQ ID NO: 3742506 - DNA, 25 bp, Homo sapien
gggccctgaggtctcatcaccagct

SEQ ID NO: 3742507 - DNA, 25 bp, Homo sapien
gccctgaggtctcatcaccagctcc

SEQ ID NO: 3742508 - DNA, 25 bp, Homo sapien
ggccctgaggtctcatcaccagctc

SEQ ID NO: 3742509 - DNA, 25 bp, Homo sapien
cttcacagagagagcccgtgctcag

SEQ ID NO: 3742510 - DNA, 25 bp, Homo sapien
atgttattttcaaatttggcacaag

SEQ ID NO: 3742511 - DNA, 25 bp, Homo sapien
ccgtgctcagaggagggatgttatt

SEQ ID NO: 3742512 - DNA, 25 bp, Homo sapien
tattttcaaatttggcacaagcaaa

SEQ ID NO: 3742513 - DNA, 25 bp, Homo sapien
cgcctgcccttaacacccacagctg

SEQ ID NO: 3742514 - DNA, 25 bp, Homo sapien
ccgcctgcccttaacacccacagct

SEQ ID NO: 3742515 - DNA, 25 bp, Homo sapien
gcctgcccttaacacccacagctgc

SEQ ID NO: 3742516 - DNA, 25 bp, Homo sapien
ctgcccttaacacccacagctgctc

SEQ ID NO: 3742517 - DNA, 25 bp, Homo sapien
gcagaggggataccgccaagtgtcc

SEQ ID NO: 3742518 - DNA, 25 bp, Homo sapien
gggataccgccaagtgtccaactgg

SEQ ID NO: 3742519 - DNA, 25 bp, Homo sapien
cgcaggatcgcaaccctgggccagg

SEQ ID NO: 3742520 - DNA, 25 bp, Homo sapien
acatctgccacatccaccgcaggat

SEQ ID NO: 3742521 - DNA, 25 bp, Homo sapien
gggcagatggcgaaactatgtgttc

SEQ ID NO: 3742522 - DNA, 25 bp, Homo sapien
cgagggaggaagacccgcatgggca

SEQ ID NO: 3742523 - DNA, 25 bp, Homo sapien
aactatgtgttctgcagccgaggga

SEQ ID NO: 3742524 - DNA, 25 bp, Homo sapien
ctgctgaggtccttggccggatctg

SEQ ID NO: 3742525 - DNA, 25 bp, Homo sapien
tgtggagagagtcgaggtggagagt

SEQ ID NO: 3742526 - DNA, 25 bp, Homo sapien
ctgtggagagagtcgaggtggagag

SEQ ID NO: 3742527 - DNA, 25 bp, Homo sapien
tggagagagtcgaggtggagagtgc

SEQ ID NO: 3742528 - DNA, 25 bp, Homo sapien
ggagagagtcgaggtggagagtgca

SEQ ID NO: 3742529 - DNA, 25 bp, Homo sapien
aaaaacacggttgattggatccctg

SEQ ID NO: 3742530 - DNA, 25 bp, Homo sapien
ttgaaaacctccaggaactcatcca

SEQ ID NO: 3742531 - DNA, 25 bp, Homo sapien
ctccaggaactcatccaaagggaaa

SEQ ID NO: 3742532 - DNA, 25 bp, Homo sapien
aaaacacggttgattggatccctgg

SEQ ID NO: 3742533 - DNA, 25 bp, Homo sapien
ttgctgattgaaggagcaaatatac

SEQ ID NO: 3742534 - DNA, 25 bp, Homo sapien
tctcttgctgattgaaggagcaaat

SEQ ID NO: 3742535 - DNA, 25 bp, Homo sapien
gcagtctcttgctgattgaaggagc

SEQ ID NO: 3742536 - DNA, 25 bp, Homo sapien
ttgaaggagcaaatatacagtgcca

SEQ ID NO: 3742537 - DNA, 25 bp, Homo sapien
tacaagcttcggtgaagccccatct

SEQ ID NO: 3742538 - DNA, 25 bp, Homo sapien
tcttgggcttaagtacaagcttcgg

SEQ ID NO: 3742539 - DNA, 25 bp, Homo sapien
ctctgggagtctaagtggtttcttg

SEQ ID NO: 3742540 - DNA, 25 bp, Homo sapien
caaagggctgatctatttacggcat

SEQ ID NO: 3742541 - DNA, 25 bp, Homo sapien
cactgagctaggcatgctcactgcc

SEQ ID NO: 3742542 - DNA, 25 bp, Homo sapien
tcacacaactctgcacccagcagtg

SEQ ID NO: 3742543 - DNA, 25 bp, Homo sapien
gccgaaaattcgaagagctgggaag

SEQ ID NO: 3742544 - DNA, 25 bp, Homo sapien
aacgcccgagccctgcactgagcta

SEQ ID NO: 3742545 - DNA, 25 bp, Homo sapien
tggggaggcgaagaccctccctctg

SEQ ID NO: 3742546 - DNA, 25 bp, Homo sapien
ggggaggcgaagaccctccctctgc

SEQ ID NO: 3742547 - DNA, 25 bp, Homo sapien
cagccggctcctgtgtgtgacacga

SEQ ID NO: 3742548 - DNA, 25 bp, Homo sapien
gatgatgtcatcatcgccgagcagc

SEQ ID NO: 3742549 - DNA, 25 bp, Homo sapien
cggtgtggtccgaaaggctcttctc

SEQ ID NO: 3742550 - DNA, 25 bp, Homo sapien
gcgggtatgagcgtgagcgccggtg

SEQ ID NO: 3742551 - DNA, 25 bp, Homo sapien
gggccagcgtcctggcgcgattcct

SEQ ID NO: 3742552 - DNA, 25 bp, Homo sapien
cctggcgcgattcctgcagccggga

SEQ ID NO: 3742553 - DNA, 25 bp, Homo sapien
gtcctggcgcgattcctgcagccgg

SEQ ID NO: 3742554 - DNA, 25 bp, Homo sapien
agcgtcctggcgcgattcctgcagc

SEQ ID NO: 3742555 - DNA, 25 bp, Homo sapien
gctgcagggactgcgaccctcccat

SEQ ID NO: 3742556 - DNA, 25 bp, Homo sapien
taggaaaggcgacactaacaaagcc

SEQ ID NO: 3742557 - DNA, 25 bp, Homo sapien
aggttgcacaggcattaggaaaggc

SEQ ID NO: 3742558 - DNA, 25 bp, Homo sapien
cacaggcattaggaaaggcgacact

SEQ ID NO: 3742559 - DNA, 25 bp, Homo sapien
gacactaacaaagcccgggcatcct

SEQ ID NO: 3742560 - DNA, 25 bp, Homo sapien
tgagcgaccaaaactgaattccagg

SEQ ID NO: 3742561 - DNA, 25 bp, Homo sapien
ggaatcgtttctgcccacagcagta

SEQ ID NO: 3742562 - DNA, 25 bp, Homo sapien
tgctgagcgaccaaaactgaattcc

SEQ ID NO: 3742563 - DNA, 25 bp, Homo sapien
ctgaattccagggaatcgtttctgc

SEQ ID NO: 3742564 - DNA, 25 bp, Homo sapien
agatgctgacggcaggagaagcccc

SEQ ID NO: 3742565 - DNA, 25 bp, Homo sapien
ttgcaggaaataccactgtgccggg

SEQ ID NO: 3742566 - DNA, 25 bp, Homo sapien
cgcagctgcccggaaactgggctgt

SEQ ID NO: 3742567 - DNA, 25 bp, Homo sapien
ccacgctcatgggttcttcctagga

SEQ ID NO: 3742568 - DNA, 25 bp, Homo sapien
gaagacaaatgatgggtgcacacct

SEQ ID NO: 3742569 - DNA, 25 bp, Homo sapien
tgcacacctgctcggaagaatgact

SEQ ID NO: 3742570 - DNA, 25 bp, Homo sapien
gcctgagttgctgaaatgcgacccg

SEQ ID NO: 3742571 - DNA, 25 bp, Homo sapien
tagggaccggcgagctgaatttcca

SEQ ID NO: 3742572 - DNA, 25 bp, Homo sapien
cagagacgggttttgaagaggacag

SEQ ID NO: 3742573 - DNA, 25 bp, Homo sapien
tagaacaaaaatgttacgggatgga

SEQ ID NO: 3742574 - DNA, 25 bp, Homo sapien
agatgctagcaatggcactggcccc

SEQ ID NO: 3742575 - DNA, 25 bp, Homo sapien
gagtgaatatactatcgtaaagatc

SEQ ID NO: 3742576 - DNA, 25 bp, Homo sapien
ggcacttacgtcttctcaagagtct

SEQ ID NO: 3742577 - DNA, 25 bp, Homo sapien
tttctggcacttacgtcttctcaag

SEQ ID NO: 3742578 - DNA, 25 bp, Homo sapien
cttacgtcttctcaagagtctttgc

SEQ ID NO: 3742579 - DNA, 25 bp, Homo sapien
tacgtcttctcaagagtctttgcag

SEQ ID NO: 3742580 - DNA, 25 bp, Homo sapien
ctggcctgagttctcggccccataa

SEQ ID NO: 3742581 - DNA, 25 bp, Homo sapien
ggcctgagttctcggccccataagg

SEQ ID NO: 3742582 - DNA, 25 bp, Homo sapien
gagtaagtgaagctggaatgttgat

SEQ ID NO: 3742583 - DNA, 25 bp, Homo sapien
tccacaaacaccttggagtaagtga

SEQ ID NO: 3742584 - DNA, 25 bp, Homo sapien
taagtcagctgttctagatcaaagg

SEQ ID NO: 3742585 - DNA, 25 bp, Homo sapien
ggagtaagtcagctgttctagatca

SEQ ID NO: 3742586 - DNA, 25 bp, Homo sapien
cagctgttctagatcaaaggtgatt

SEQ ID NO: 3742587 - DNA, 25 bp, Homo sapien
gccacaggagtaagtcagctgttct

SEQ ID NO: 3742588 - DNA, 25 bp, Homo sapien
taaagtgagcaaacccagatgtggg

SEQ ID NO: 3742589 - DNA, 25 bp, Homo sapien
ggatggagaagctacaacagcttag

SEQ ID NO: 3742590 - DNA, 25 bp, Homo sapien
gtggtctactgtgtgtctcaacgag

SEQ ID NO: 3742591 - DNA, 25 bp, Homo sapien
gcaataaagcagtacaatcacgagg

SEQ ID NO: 3742592 - DNA, 25 bp, Homo sapien
agagggaccgccgttcacgatcgcc

SEQ ID NO: 3742593 - DNA, 25 bp, Homo sapien
tcagagggaccgccgttcacgatcg

SEQ ID NO: 3742594 - DNA, 25 bp, Homo sapien
gctcagagggaccgccgttcacgat

SEQ ID NO: 3742595 - DNA, 25 bp, Homo sapien
tgctcagagggaccgccgttcacga

SEQ ID NO: 3742596 - DNA, 25 bp, Homo sapien
agtccccactgctggtcaccgctgt

SEQ ID NO: 3742597 - DNA, 25 bp, Homo sapien
catccaccgggcccattccactggg

SEQ ID NO: 3742598 - DNA, 25 bp, Homo sapien
gaagcaccagcagactggagtcccc

SEQ ID NO: 3742599 - DNA, 25 bp, Homo sapien
tttccagagtctccctgaagcacca

SEQ ID NO: 3742600 - DNA, 25 bp, Homo sapien
gcaccatcatgagcaacactgacaa

SEQ ID NO: 3742601 - DNA, 25 bp, Homo sapien
actgcaccatcatgagcaacactga

SEQ ID NO: 3742602 - DNA, 25 bp, Homo sapien
cagcactgcaccatcatgagcaaca

SEQ ID NO: 3742603 - DNA, 25 bp, Homo sapien
ccagcactgcaccatcatgagcaac

SEQ ID NO: 3742604 - DNA, 25 bp, Homo sapien
gttgactccggggtctcaaatgcct

SEQ ID NO: 3742605 - DNA, 25 bp, Homo sapien
gacctcgggttctgggatgacttcg

SEQ ID NO: 3742606 - DNA, 25 bp, Homo sapien
gctttgacaggggtcgttgactccg

SEQ ID NO: 3742607 - DNA, 25 bp, Homo sapien
aaatgcctcttcagaatcggaactc

SEQ ID NO: 3742608 - DNA, 25 bp, Homo sapien
ctgcagacttctcatcacacgggaa

SEQ ID NO: 3742609 - DNA, 25 bp, Homo sapien
ctagaaggggtttggccctgcagac

SEQ ID NO: 3742610 - DNA, 25 bp, Homo sapien
gggtttggccctgcagacttctcat

SEQ ID NO: 3742611 - DNA, 25 bp, Homo sapien
gcagacttctcatcacacgggaagg

SEQ ID NO: 3742612 - DNA, 25 bp, Homo sapien
cgctcccaggtatccagcgtgtggt

SEQ ID NO: 3742613 - DNA, 25 bp, Homo sapien
ctggccagggcaagtacacagtgga

SEQ ID NO: 3742614 - DNA, 25 bp, Homo sapien
ggttccttctcaggtacagtttgcc

SEQ ID NO: 3742615 - DNA, 25 bp, Homo sapien
tggccagggcaagtacacagtggag

SEQ ID NO: 3742616 - DNA, 25 bp, Homo sapien
tggttccttctcaggtacagtttgc

SEQ ID NO: 3742617 - DNA, 25 bp, Homo sapien
gacatgggagcagtattcggcagac

SEQ ID NO: 3742618 - DNA, 25 bp, Homo sapien
ctttccaaaacaacgggctgctcga

SEQ ID NO: 3742619 - DNA, 25 bp, Homo sapien
tgctcgaacccacggcggataaaaa

SEQ ID NO: 3742620 - DNA, 25 bp, Homo sapien
ttaggaacaaagctccgggagtgta

SEQ ID NO: 3742621 - DNA, 25 bp, Homo sapien
caccagagtccccttatcgctgtga

SEQ ID NO: 3742622 - DNA, 25 bp, Homo sapien
gagatggcgtatgaggttcgtaacc

SEQ ID NO: 3742623 - DNA, 25 bp, Homo sapien
caaatggaagggagccgggcttgga

SEQ ID NO: 3742624 - DNA, 25 bp, Homo sapien
tgcgcagagagcagtctggttccaa

SEQ ID NO: 3742625 - DNA, 25 bp, Homo sapien
ccttggctcaatggctcgggccccc

SEQ ID NO: 3742626 - DNA, 25 bp, Homo sapien
ttggctcaatggctcgggcccccag

SEQ ID NO: 3742627 - DNA, 25 bp, Homo sapien
ggctcaatggctcgggcccccaggt

SEQ ID NO: 3742628 - DNA, 25 bp, Homo sapien
gctcaatggctcgggcccccaggtg

SEQ ID NO: 3742629 - DNA, 25 bp, Homo sapien
gcttggatctggtggctgtgaatct

SEQ ID NO: 3742630 - DNA, 25 bp, Homo sapien
ttagagcacaacgagtgcctggcga

SEQ ID NO: 3742631 - DNA, 25 bp, Homo sapien
tgcttggatctggtggctgtgaatc

SEQ ID NO: 3742632 - DNA, 25 bp, Homo sapien
cttggatctggtggctgtgaatctg

SEQ ID NO: 3742633 - DNA, 25 bp, Homo sapien
gagcagccggcccaagagggcccga

SEQ ID NO: 3742634 - DNA, 25 bp, Homo sapien
tgaagagggagcagccggcccaaga

SEQ ID NO: 3742635 - DNA, 25 bp, Homo sapien
agccggcccaagagggcccgagtgc

SEQ ID NO: 3742636 - DNA, 25 bp, Homo sapien
attgtgaagagggagcagccggccc

SEQ ID NO: 3742637 - DNA, 25 bp, Homo sapien
ggccgtcctctcactgtagatgtgg

SEQ ID NO: 3742638 - DNA, 25 bp, Homo sapien
tggccgtcctctcactgtagatgtg

SEQ ID NO: 3742639 - DNA, 25 bp, Homo sapien
ggtggccgtcctctcactgtagatg

SEQ ID NO: 3742640 - DNA, 25 bp, Homo sapien
gtggccgtcctctcactgtagatgt

SEQ ID NO: 3742641 - DNA, 25 bp, Homo sapien
ctccccatgtgaacatggccactgt

SEQ ID NO: 3742642 - DNA, 25 bp, Homo sapien
ctgtgggcaggtgaggtcgccgtcc

SEQ ID NO: 3742643 - DNA, 25 bp, Homo sapien
ggcaggtgaggtcgccgtcctcccc

SEQ ID NO: 3742644 - DNA, 25 bp, Homo sapien
caggtgaggtcgccgtcctccccat

SEQ ID NO: 3742645 - DNA, 25 bp, Homo sapien
gtgggcaggtgaggtcgccgtcctc

SEQ ID NO: 3742646 - DNA, 25 bp, Homo sapien
ggccgtcctctcactgtagatgtgg

SEQ ID NO: 3742647 - DNA, 25 bp, Homo sapien
ggtggccgtcctctcactgtagatg

SEQ ID NO: 3742648 - DNA, 25 bp, Homo sapien
ttccccatgtgaacgcagccactgt

SEQ ID NO: 3742649 - DNA, 25 bp, Homo sapien
ccatgtgaacgcagccactgtgggc

SEQ ID NO: 3742650 - DNA, 25 bp, Homo sapien
tcaagcccctccagcgaggtcatta

SEQ ID NO: 3742651 - DNA, 25 bp, Homo sapien
caagcccctccagcgaggtcattac

SEQ ID NO: 3742652 - DNA, 25 bp, Homo sapien
tacatgagcttgctgggctgccatc

SEQ ID NO: 3742653 - DNA, 25 bp, Homo sapien
tataggaacactggtccccatgggc

SEQ ID NO: 3742654 - DNA, 25 bp, Homo sapien
tgaaaagggtcactagggtatccca

SEQ ID NO: 3742655 - DNA, 25 bp, Homo sapien
agtgctgcccagtaaaatgcccaag

SEQ ID NO: 3742656 - DNA, 25 bp, Homo sapien
ctggtcatcatggtgaaacccagtc

SEQ ID NO: 3742657 - DNA, 25 bp, Homo sapien
cagcctggtcatcatggtgaaaccc

SEQ ID NO: 3742658 - DNA, 25 bp, Homo sapien
gcctggtcatcatggtgaaacccag

SEQ ID NO: 3742659 - DNA, 25 bp, Homo sapien
tcatcatggtgaaacccagtctcta

SEQ ID NO: 3742660 - DNA, 25 bp, Homo sapien
ggaccgattaaagaacagctcagag

SEQ ID NO: 3742661 - DNA, 25 bp, Homo sapien
tacccgtaattagctcaagacccag

SEQ ID NO: 3742662 - DNA, 25 bp, Homo sapien
tgcctaatcaggaccagacatggtt

SEQ ID NO: 3742663 - DNA, 25 bp, Homo sapien
tactacttgggtacagaacctgacc

SEQ ID NO: 3742664 - DNA, 25 bp, Homo sapien
cacctctcctcttgtaccaaaacat

SEQ ID NO: 3742665 - DNA, 25 bp, Homo sapien
tggggcacctctcctcttgtaccaa

SEQ ID NO: 3742666 - DNA, 25 bp, Homo sapien
gggcacctctcctcttgtaccaaaa

SEQ ID NO: 3742667 - DNA, 25 bp, Homo sapien
ggcacctctcctcttgtaccaaaac

SEQ ID NO: 3742668 - DNA, 25 bp, Homo sapien
caacgccatcaattacagacacagg

SEQ ID NO: 3742669 - DNA, 25 bp, Homo sapien
ccatcaattacagacacaggacgca

SEQ ID NO: 3742670 - DNA, 25 bp, Homo sapien
cacagacaacgccatcaattacaga

SEQ ID NO: 3742671 - DNA, 25 bp, Homo sapien
gggaaacacagacaacgccatcaat

SEQ ID NO: 3742672 - DNA, 25 bp, Homo sapien
caaggtctgaaaggtatccacaagc

SEQ ID NO: 3742673 - DNA, 25 bp, Homo sapien
ggctaggaccttccgtcttggcaga

SEQ ID NO: 3742674 - DNA, 25 bp, Homo sapien
gaggcagcgttttcctcccgacagg

SEQ ID NO: 3742675 - DNA, 25 bp, Homo sapien
caagttgtaagtcccactgctggct

SEQ ID NO: 3742676 - DNA, 25 bp, Homo sapien
atagcactggctgggatctcaaagg

SEQ ID NO: 3742677 - DNA, 25 bp, Homo sapien
agtgttgtcaagtttctcgggtgtc

SEQ ID NO: 3742678 - DNA, 25 bp, Homo sapien
gagactcctgcatttttgaggtgga

SEQ ID NO: 3742679 - DNA, 25 bp, Homo sapien
gggtcaacggactcatcacaggtgt

SEQ ID NO: 3742680 - DNA, 25 bp, Homo sapien
ttttctcctccatatgaatagcggg

SEQ ID NO: 3742681 - DNA, 25 bp, Homo sapien
catggtaaacagacaagattcacag

SEQ ID NO: 3742682 - DNA, 25 bp, Homo sapien
taaacagacaagattcacagctctt

SEQ ID NO: 3742683 - DNA, 25 bp, Homo sapien
ccctttttctcctccatatgaatag

SEQ ID NO: 3742684 - DNA, 25 bp, Homo sapien
agagagaggagaccgttttggcgac

SEQ ID NO: 3742685 - DNA, 25 bp, Homo sapien
agagaggagaccgttttggcgactt

SEQ ID NO: 3742686 - DNA, 25 bp, Homo sapien
tcagagagaggagaccgttttggcg

SEQ ID NO: 3742687 - DNA, 25 bp, Homo sapien
atcagagagaggagaccgttttggc

SEQ ID NO: 3742688 - DNA, 25 bp, Homo sapien
tgcgggtagtcctgtttgtcagcct

SEQ ID NO: 3742689 - DNA, 25 bp, Homo sapien
tctcgtttacaaaggtggacaggtc

SEQ ID NO: 3742690 - DNA, 25 bp, Homo sapien
cacgtccacttctggttggtgaccg

SEQ ID NO: 3742691 - DNA, 25 bp, Homo sapien
tggaccaccgcagagatcactggtg

SEQ ID NO: 3742692 - DNA, 25 bp, Homo sapien
gggtccagctggctacagagttgct

SEQ ID NO: 3742693 - DNA, 25 bp, Homo sapien
tccagctggctacagagttgcttac

SEQ ID NO: 3742694 - DNA, 25 bp, Homo sapien
ctaggggcaggattctccgaggcag

SEQ ID NO: 3742695 - DNA, 25 bp, Homo sapien
gcaggattctccgaggcagagtggg

SEQ ID NO: 3742696 - DNA, 25 bp, Homo sapien
gctgagaagtttctctcctggcctt

SEQ ID NO: 3742697 - DNA, 25 bp, Homo sapien
agtttctctcctggcctttggctcc

SEQ ID NO: 3742698 - DNA, 25 bp, Homo sapien
aagtttctctcctggcctttggctc

SEQ ID NO: 3742699 - DNA, 25 bp, Homo sapien
ctggctgagaagtttctctcctggc

SEQ ID NO: 3742700 - DNA, 25 bp, Homo sapien
acttttggtagagtcagtgttttgc

SEQ ID NO: 3742701 - DNA, 25 bp, Homo sapien
aagatggtcactttcggacctctca

SEQ ID NO: 3742702 - DNA, 25 bp, Homo sapien
ttgcatttgtgagatgcctggtttc

SEQ ID NO: 3742703 - DNA, 25 bp, Homo sapien
cttgttgcaatcacggtcatttggg

SEQ ID NO: 3742704 - DNA, 25 bp, Homo sapien
tgctgcttcagaacacgccctgctt

SEQ ID NO: 3742705 - DNA, 25 bp, Homo sapien
ccccatcaatcccagatgagtggca

SEQ ID NO: 3742706 - DNA, 25 bp, Homo sapien
tcctatatggtttgcacagtgccag

SEQ ID NO: 3742707 - DNA, 25 bp, Homo sapien
gaagctttgtaagtcacctggagcc

SEQ ID NO: 3742708 - DNA, 25 bp, Homo sapien
gaaagccctgttgcatcctgaataa

SEQ ID NO: 3742709 - DNA, 25 bp, Homo sapien
gacgatattgttccttcagcgctgc

SEQ ID NO: 3742710 - DNA, 25 bp, Homo sapien
gccaattttctccatatattcaatt

SEQ ID NO: 3742711 - DNA, 25 bp, Homo sapien
atattcaatttcataggagtttctg

SEQ ID NO: 3742712 - DNA, 25 bp, Homo sapien
gtaaggaggagccaattttctccat

SEQ ID NO: 3742713 - DNA, 25 bp, Homo sapien
tcataggagtttctgtaatccaact

SEQ ID NO: 3742714 - DNA, 25 bp, Homo sapien
tggaagcagtaaccccggcatctat

SEQ ID NO: 3742715 - DNA, 25 bp, Homo sapien
gaagcagtaaccccggcatctatga

SEQ ID NO: 3742716 - DNA, 25 bp, Homo sapien
ttggaagcagtaaccccggcatcta

SEQ ID NO: 3742717 - DNA, 25 bp, Homo sapien
tttggaagcagtaaccccggcatct

SEQ ID NO: 3742718 - DNA, 25 bp, Homo sapien
taagctctttaagcaacgcacaagg

SEQ ID NO: 3742719 - DNA, 25 bp, Homo sapien
tgctcctcacgaattcatccgcgag

SEQ ID NO: 3742720 - DNA, 25 bp, Homo sapien
tctcagtgatgggaagaccttgaaa

SEQ ID NO: 3742721 - DNA, 25 bp, Homo sapien
tgcaacggccggcaggtatgctgct

SEQ ID NO: 3742722 - DNA, 25 bp, Homo sapien
gcttcttcggggcatcgtcgtcctg

SEQ ID NO: 3742723 - DNA, 25 bp, Homo sapien
tcaaacataaggtacaaggcctgct

SEQ ID NO: 3742724 - DNA, 25 bp, Homo sapien
catgcggacgggagatgacttgaca

SEQ ID NO: 3742725 - DNA, 25 bp, Homo sapien
tctcctgagaagtgtcaaacataag

SEQ ID NO: 3742726 - DNA, 25 bp, Homo sapien
ctggtttttcgcagcagtgttcaca

SEQ ID NO: 3742727 - DNA, 25 bp, Homo sapien
gccagtcctcgtgggacaggatgct

SEQ ID NO: 3742728 - DNA, 25 bp, Homo sapien
tcaatcgcttctgaaggggtgccca

SEQ ID NO: 3742729 - DNA, 25 bp, Homo sapien
tttctctggcacctgcaagtgtgac

SEQ ID NO: 3742730 - DNA, 25 bp, Homo sapien
tgatctggggccctccaactccact

SEQ ID NO: 3742731 - DNA, 25 bp, Homo sapien
tctggggccctccaactccacttac

SEQ ID NO: 3742732 - DNA, 25 bp, Homo sapien
cccctgtgatctggggccctccaac

SEQ ID NO: 3742733 - DNA, 25 bp, Homo sapien
ctgtgatctggggccctccaactcc

SEQ ID NO: 3742734 - DNA, 25 bp, Homo sapien
gtgagtgttgctctgaaggcctggc

SEQ ID NO: 3742735 - DNA, 25 bp, Homo sapien
gtgccaggtgagtgttgctctgaag

SEQ ID NO: 3742736 - DNA, 25 bp, Homo sapien
tcttggtgacaatacgcagctggcc

SEQ ID NO: 3742737 - DNA, 25 bp, Homo sapien
gggagtcagggtgggacccatggca

SEQ ID NO: 3742738 - DNA, 25 bp, Homo sapien
tttcagatgtgtggaagaccgtggc

SEQ ID NO: 3742739 - DNA, 25 bp, Homo sapien
gagaaatggcctactaacacagaac

SEQ ID NO: 3742740 - DNA, 25 bp, Homo sapien
tgtttttctagtatccaccccagca

SEQ ID NO: 3742741 - DNA, 25 bp, Homo sapien
cacaaggccatgtgacacgtgtgct

SEQ ID NO: 3742742 - DNA, 25 bp, Homo sapien
cttttctgctaagtcgggctccaga

SEQ ID NO: 3742743 - DNA, 25 bp, Homo sapien
ctggagtttctgagcgaatagtggg

SEQ ID NO: 3742744 - DNA, 25 bp, Homo sapien
gatagtcaagtgcaccacagagaga

SEQ ID NO: 3742745 - DNA, 25 bp, Homo sapien
agctagcctgctgaggagggcgtca

SEQ ID NO: 3742746 - DNA, 25 bp, Homo sapien
ggtttgctctgaacaccctagtcta

SEQ ID NO: 3742747 - DNA, 25 bp, Homo sapien
gatggctgttaacaatctctctagg

SEQ ID NO: 3742748 - DNA, 25 bp, Homo sapien
cgtatatataaacggcttggctcag

SEQ ID NO: 3742749 - DNA, 25 bp, Homo sapien
ggagtctgagatagccacgtatata

SEQ ID NO: 3742750 - DNA, 25 bp, Homo sapien
cttcagggcttctatccgcatgatg

SEQ ID NO: 3742751 - DNA, 25 bp, Homo sapien
gcatgatggcaaactctaactcctc

SEQ ID NO: 3742752 - DNA, 25 bp, Homo sapien
tatccgcatgatggcaaactctaac

SEQ ID NO: 3742753 - DNA, 25 bp, Homo sapien
ggcttctatccgcatgatggcaaac

SEQ ID NO: 3742754 - DNA, 25 bp, Homo sapien
tatcccgcggtttagcattatcgac

SEQ ID NO: 3742755 - DNA, 25 bp, Homo sapien
cccgcctggcggatggttagcaaag

SEQ ID NO: 3742756 - DNA, 25 bp, Homo sapien
catgacattctcaggaggtggcgca

SEQ ID NO: 3742757 - DNA, 25 bp, Homo sapien
gactctttgctggacaccgatgatg

SEQ ID NO: 3742758 - DNA, 25 bp, Homo sapien
cattctgtctttaggccccaaggat

SEQ ID NO: 3742759 - DNA, 25 bp, Homo sapien
attctgtctttaggccccaaggatg

SEQ ID NO: 3742760 - DNA, 25 bp, Homo sapien
ttctgtctttaggccccaaggatgt

SEQ ID NO: 3742761 - DNA, 25 bp, Homo sapien
ctgggggtggcatcgtagccccctt

SEQ ID NO: 3742762 - DNA, 25 bp, Homo sapien
catcgtagcccccttgtcgacagtt

SEQ ID NO: 3742763 - DNA, 25 bp, Homo sapien
ggtggcatcgtagcccccttgtcga

SEQ ID NO: 3742764 - DNA, 25 bp, Homo sapien
atcgtagcccccttgtcgacagttc

SEQ ID NO: 3742765 - DNA, 25 bp, Homo sapien
tccactgaagtcctgcgacctgtga

SEQ ID NO: 3742766 - DNA, 25 bp, Homo sapien
aaatgggtttcacagttctgcttgt

SEQ ID NO: 3742767 - DNA, 25 bp, Homo sapien
gtttcacagttctgcttgtcatggg

SEQ ID NO: 3742768 - DNA, 25 bp, Homo sapien
tgctattggaaaatgggtttcacag

SEQ ID NO: 3742769 - DNA, 25 bp, Homo sapien
gggtttcacagttctgcttgtcatg

SEQ ID NO: 3742770 - DNA, 25 bp, Homo sapien
aatttgtctcttccaccaccagaac

SEQ ID NO: 3742771 - DNA, 25 bp, Homo sapien
gcagaatttgtctcttccaccacca

SEQ ID NO: 3742772 - DNA, 25 bp, Homo sapien
tcttccaccaccagaacaggcgtgc

SEQ ID NO: 3742773 - DNA, 25 bp, Homo sapien
caccaccagaacaggcgtgcctacc

SEQ ID NO: 3742774 - DNA, 25 bp, Homo sapien
tatgagaaagtgcaaagactgatga

SEQ ID NO: 3742775 - DNA, 25 bp, Homo sapien
cctctcatgaatgggccaattgtat

SEQ ID NO: 3742776 - DNA, 25 bp, Homo sapien
tggatggagatctatcattctgcac

SEQ ID NO: 3742777 - DNA, 25 bp, Homo sapien
ggaaatgccgagtccagtctatgga

SEQ ID NO: 3742778 - DNA, 25 bp, Homo sapien
ccgatgcgggagtacaaggctgttt

SEQ ID NO: 3742779 - DNA, 25 bp, Homo sapien
ctctgctctggcgatctggagggca

SEQ ID NO: 3742780 - DNA, 25 bp, Homo sapien
cacctcagcggtcccgatgcgggag

SEQ ID NO: 3742781 - DNA, 25 bp, Homo sapien
gacgtctgttgggtgagcagcctct

SEQ ID NO: 3742782 - DNA, 25 bp, Homo sapien
ttccatcacttcccgcctgctttct

SEQ ID NO: 3742783 - DNA, 25 bp, Homo sapien
catcacttcccgcctgctttcttca

SEQ ID NO: 3742784 - DNA, 25 bp, Homo sapien
tccatcacttcccgcctgctttctt

SEQ ID NO: 3742785 - DNA, 25 bp, Homo sapien
tcacttcccgcctgctttcttcata

SEQ ID NO: 3742786 - DNA, 25 bp, Homo sapien
tcaaaccaggtagagtggtgcatgc

SEQ ID NO: 3742787 - DNA, 25 bp, Homo sapien
aaatatgccactcccttgtgcaaag

SEQ ID NO: 3742788 - DNA, 25 bp, Homo sapien
tataagagaagtaaagacacgttgg

SEQ ID NO: 3742789 - DNA, 25 bp, Homo sapien
cctggtgcgtgactctaaatatgcc

SEQ ID NO: 3742790 - DNA, 25 bp, Homo sapien
atctgagcgatggtcttctcatact

SEQ ID NO: 3742791 - DNA, 25 bp, Homo sapien
tatcatctgagcgatggtcttctca

SEQ ID NO: 3742792 - DNA, 25 bp, Homo sapien
agcgatggtcttctcatactcggcc

SEQ ID NO: 3742793 - DNA, 25 bp, Homo sapien
tgagcgatggtcttctcatactcgg

SEQ ID NO: 3742794 - DNA, 25 bp, Homo sapien
gacacataaagcgtggtctgcagtg

SEQ ID NO: 3742795 - DNA, 25 bp, Homo sapien
tggaaagcactcaattgttggcctc

SEQ ID NO: 3742796 - DNA, 25 bp, Homo sapien
ctttgataggaagcatgcaccatga

SEQ ID NO: 3742797 - DNA, 25 bp, Homo sapien
tatttaccttgggacaagctagagg

SEQ ID NO: 3742798 - DNA, 25 bp, Homo sapien
gaaattccattcacgcaggcacaga

SEQ ID NO: 3742799 - DNA, 25 bp, Homo sapien
tacacgggccccatgtaatgacaga

SEQ ID NO: 3742800 - DNA, 25 bp, Homo sapien
gatttctaatgagcctgtcacccag

SEQ ID NO: 3742801 - DNA, 25 bp, Homo sapien
gaaataacagaacaacgggagccag

SEQ ID NO: 3742802 - DNA, 25 bp, Homo sapien
tgctgcaccgtctggtgggagactg

SEQ ID NO: 3742803 - DNA, 25 bp, Homo sapien
tccacggagttcaggtcggccaggg

SEQ ID NO: 3742804 - DNA, 25 bp, Homo sapien
ctgcaccgtctggtgggagactgac

SEQ ID NO: 3742805 - DNA, 25 bp, Homo sapien
ctccacggagttcaggtcggccagg

SEQ ID NO: 3742806 - DNA, 25 bp, Homo sapien
cttgcggaagccttctaggacctcc

SEQ ID NO: 3742807 - DNA, 25 bp, Homo sapien
tatcttctgaagaggtcggccagag

SEQ ID NO: 3742808 - DNA, 25 bp, Homo sapien
ttgcggaagccttctaggacctcct

SEQ ID NO: 3742809 - DNA, 25 bp, Homo sapien
ttctgaagaggtcggccagagactt

SEQ ID NO: 3742810 - DNA, 25 bp, Homo sapien
ctcctgcgcacatctcttcaacacc

SEQ ID NO: 3742811 - DNA, 25 bp, Homo sapien
gacaggtactcctgcgcacatctct

SEQ ID NO: 3742812 - DNA, 25 bp, Homo sapien
ccagtttctcctccgcgtgcacctt

SEQ ID NO: 3742813 - DNA, 25 bp, Homo sapien
gtccagtttctcctccgcgtgcacc

SEQ ID NO: 3742814 - DNA, 25 bp, Homo sapien
cagcgtcctttccagggcgtccact

SEQ ID NO: 3742815 - DNA, 25 bp, Homo sapien
agcgtcctttccagggcgtccactc

SEQ ID NO: 3742816 - DNA, 25 bp, Homo sapien
ctgtctagtagccatctgtcttttt

SEQ ID NO: 3742817 - DNA, 25 bp, Homo sapien
ctacaaaacaggtagttgaacatat

SEQ ID NO: 3742818 - DNA, 25 bp, Homo sapien
actgtctagtagccatctgtctttt

SEQ ID NO: 3742819 - DNA, 25 bp, Homo sapien
caaaacaggtagttgaacatatgca

SEQ ID NO: 3742820 - DNA, 25 bp, Homo sapien
tgaatgggatacagcactgaccact

SEQ ID NO: 3742821 - DNA, 25 bp, Homo sapien
caactcgagagaggcactgaaatgc

SEQ ID NO: 3742822 - DNA, 25 bp, Homo sapien
tcttattggagtgcccaccgtgagc

SEQ ID NO: 3742823 - DNA, 25 bp, Homo sapien
ttgcatctgaggtcaacaactcgag

SEQ ID NO: 3742824 - DNA, 25 bp, Homo sapien
tcaagttcaacagcacgaccgatct

SEQ ID NO: 3742825 - DNA, 25 bp, Homo sapien
tgctcagagggatgccaaataggtg

SEQ ID NO: 3742826 - DNA, 25 bp, Homo sapien
cataaggagggttacgcagttctac

SEQ ID NO: 3742827 - DNA, 25 bp, Homo sapien
caaccacaggtttgtctagcacaga

SEQ ID NO: 3742828 - DNA, 25 bp, Homo sapien
gacttggagccaaacaatctgagta

SEQ ID NO: 3742829 - DNA, 25 bp, Homo sapien
ggtgtccttatctctagaacatagg

SEQ ID NO: 3742830 - DNA, 25 bp, Homo sapien
gagtatatatcccagctgtagctgt

SEQ ID NO: 3742831 - DNA, 25 bp, Homo sapien
ccccactaaagcagtgagacaaatg

SEQ ID NO: 3742832 - DNA, 25 bp, Homo sapien
ccccattttggcaatcagttcgtca

SEQ ID NO: 3742833 - DNA, 25 bp, Homo sapien
ttcgtcacaaatcttggtgagttct

SEQ ID NO: 3742834 - DNA, 25 bp, Homo sapien
tggcaatcagttcgtcacaaatctt

SEQ ID NO: 3742835 - DNA, 25 bp, Homo sapien
tcagttcgtcacaaatcttggtgag

SEQ ID NO: 3742836 - DNA, 25 bp, Homo sapien
cagcagtgtgccgacggtcatattg

SEQ ID NO: 3742837 - DNA, 25 bp, Homo sapien
tagtgcatacgaaaaagtgaaaaca

SEQ ID NO: 3742838 - DNA, 25 bp, Homo sapien
tattgcacgcaacagttaagtccaa

SEQ ID NO: 3742839 - DNA, 25 bp, Homo sapien
tactgcatacaatcaaatcaatttt

SEQ ID NO: 3742840 - DNA, 25 bp, Homo sapien
tcaccctgggaacttgtgtacaaag

SEQ ID NO: 3742841 - DNA, 25 bp, Homo sapien
taaggcaagagtccctatgcacgct

SEQ ID NO: 3742842 - DNA, 25 bp, Homo sapien
ggccaaggtcagcaatgtgtctttt

SEQ ID NO: 3742843 - DNA, 25 bp, Homo sapien
caaatgcagatcaagtttacactcc

SEQ ID NO: 3742844 - DNA, 25 bp, Homo sapien
tgagaaaagactcaacccttcccag

SEQ ID NO: 3742845 - DNA, 25 bp, Homo sapien
aatgcagccacgataacaaaggaaa

SEQ ID NO: 3742846 - DNA, 25 bp, Homo sapien
aagagcacgaagccaaatctggtat

SEQ ID NO: 3742847 - DNA, 25 bp, Homo sapien
ttaagtctatggacaaagaaatgag

SEQ ID NO: 3742848 - DNA, 25 bp, Homo sapien
ctgccggccactggcaattgtgcac

SEQ ID NO: 3742849 - DNA, 25 bp, Homo sapien
aattgtgcaccctttcccagtgctt

SEQ ID NO: 3742850 - DNA, 25 bp, Homo sapien
ggccactggcaattgtgcacccttt

SEQ ID NO: 3742851 - DNA, 25 bp, Homo sapien
actggcaattgtgcaccctttccca

SEQ ID NO: 3742852 - DNA, 25 bp, Homo sapien
aatataaacgctcatcagtaccggg

SEQ ID NO: 3742853 - DNA, 25 bp, Homo sapien
tttccaagagatgcaagctgggcat

SEQ ID NO: 3742854 - DNA, 25 bp, Homo sapien
ggatttggccttgagaagcgagcac

SEQ ID NO: 3742855 - DNA, 25 bp, Homo sapien
gaatgcagtcgaggtcagaatccag

SEQ ID NO: 3742856 - DNA, 25 bp, Homo sapien
tattctggggccacttgcttctcag

SEQ ID NO: 3742857 - DNA, 25 bp, Homo sapien
ttgttagagccataacataggtctc

SEQ ID NO: 3742858 - DNA, 25 bp, Homo sapien
tcatagtagttgcacaggatgggcg

SEQ ID NO: 3742859 - DNA, 25 bp, Homo sapien
tctccggcggcaggaatgatccatt

SEQ ID NO: 3742860 - DNA, 25 bp, Homo sapien
catccctagacgctcaggggcagca

SEQ ID NO: 3742861 - DNA, 25 bp, Homo sapien
gcaggcctctaacaactgttgcagg

SEQ ID NO: 3742862 - DNA, 25 bp, Homo sapien
agcatgagaccggaagcaggcctct

SEQ ID NO: 3742863 - DNA, 25 bp, Homo sapien
ccggaagcaggcctctaacaactgt

SEQ ID NO: 3742864 - DNA, 25 bp, Homo sapien
ccagtgggagaagaatgtaggcgac

SEQ ID NO: 3742865 - DNA, 25 bp, Homo sapien
gcacaatgagagaaccagtgggaga

SEQ ID NO: 3742866 - DNA, 25 bp, Homo sapien
agacactggcatgtcttagacaggg

SEQ ID NO: 3742867 - DNA, 25 bp, Homo sapien
atgtaggcgacaaggggctgaagac

SEQ ID NO: 3742868 - DNA, 25 bp, Homo sapien
tgatcccagcaactgccaccgggtt

SEQ ID NO: 3742869 - DNA, 25 bp, Homo sapien
actgccaccgggttggagaagcagc

SEQ ID NO: 3742870 - DNA, 25 bp, Homo sapien
cagcaactgccaccgggttggagaa

SEQ ID NO: 3742871 - DNA, 25 bp, Homo sapien
catggtagtatacaactgatcccag

SEQ ID NO: 3742872 - DNA, 25 bp, Homo sapien
tgtcctcagcgacgtggcctgtgaa

SEQ ID NO: 3742873 - DNA, 25 bp, Homo sapien
gtgtcctcagcgacgtggcctgtga

SEQ ID NO: 3742874 - DNA, 25 bp, Homo sapien
agtgtcctcagcgacgtggcctgtg

SEQ ID NO: 3742875 - DNA, 25 bp, Homo sapien
ttgcccaccacaggcgtgtttacag

SEQ ID NO: 3742876 - DNA, 25 bp, Homo sapien
ccttttgcccaccacaggcgtgttt

SEQ ID NO: 3742877 - DNA, 25 bp, Homo sapien
ccaaggtgctttgacagggggagct

SEQ ID NO: 3742878 - DNA, 25 bp, Homo sapien
cctggaagcgctcatcacatctggg

SEQ ID NO: 3742879 - DNA, 25 bp, Homo sapien
gaaagtggaaattacgcaggagaga

SEQ ID NO: 3742880 - DNA, 25 bp, Homo sapien
aagtggaaattacgcaggagagaaa

SEQ ID NO: 3742881 - DNA, 25 bp, Homo sapien
aaagtggaaattacgcaggagagaa

SEQ ID NO: 3742882 - DNA, 25 bp, Homo sapien
cttggtaatcaaagaaagagaagac

SEQ ID NO: 3742883 - DNA, 25 bp, Homo sapien
tggtaatcaaagaaagagaagacat

SEQ ID NO: 3742884 - DNA, 25 bp, Homo sapien
ttggtaatcaaagaaagagaagaca

SEQ ID NO: 3742885 - DNA, 25 bp, Homo sapien
ctgtttgggcaaacgccaccggttg

SEQ ID NO: 3742886 - DNA, 25 bp, Homo sapien
tcctcaaagtctatgctcagagcct

SEQ ID NO: 3742887 - DNA, 25 bp, Homo sapien
cgccaccggttggttgagccagtga

SEQ ID NO: 3742888 - DNA, 25 bp, Homo sapien
agcttcctcaaagtctatgctcaga

SEQ ID NO: 3742889 - DNA, 25 bp, Homo sapien
gcccctgttgtgctggaggaaggtg

SEQ ID NO: 3742890 - DNA, 25 bp, Homo sapien
ggagagggccagatgtgtaaaagct

SEQ ID NO: 3742891 - DNA, 25 bp, Homo sapien
tctgcccctgttgtgctggaggaag

SEQ ID NO: 3742892 - DNA, 25 bp, Homo sapien
tgcccctgttgtgctggaggaaggt

SEQ ID NO: 3742893 - DNA, 25 bp, Homo sapien
ggatctctgggtttccatgacagca

SEQ ID NO: 3742894 - DNA, 25 bp, Homo sapien
tctgggtttccatgacagcacgcat

SEQ ID NO: 3742895 - DNA, 25 bp, Homo sapien
tgggtttccatgacagcacgcatcc

SEQ ID NO: 3742896 - DNA, 25 bp, Homo sapien
tctctgggtttccatgacagcacgc

SEQ ID NO: 3742897 - DNA, 25 bp, Homo sapien
gcttccccactttggatgtccttgt

SEQ ID NO: 3742898 - DNA, 25 bp, Homo sapien
tgcttccccactttggatgtccttg

SEQ ID NO: 3742899 - DNA, 25 bp, Homo sapien
tctcatgaccctctttgacaatata

SEQ ID NO: 3742900 - DNA, 25 bp, Homo sapien
ataaagaaggctctttgcaaactgt

SEQ ID NO: 3742901 - DNA, 25 bp, Homo sapien
caacgagggtaggattctcatgacc

SEQ ID NO: 3742902 - DNA, 25 bp, Homo sapien
ctgtagaagactttcttcaggggca

SEQ ID NO: 3742903 - DNA, 25 bp, Homo sapien
tgcgccagggctttcaggtagagct

SEQ ID NO: 3742904 - DNA, 25 bp, Homo sapien
tagagcttggccaaggtctcagact

SEQ ID NO: 3742905 - DNA, 25 bp, Homo sapien
tggggctgatggagctcccatttga

SEQ ID NO: 3742906 - DNA, 25 bp, Homo sapien
aagcccaggcactcgagaatcacat

SEQ ID NO: 3742907 - DNA, 25 bp, Homo sapien
tgaccgtggtctcaaaacagataac

SEQ ID NO: 3742908 - DNA, 25 bp, Homo sapien
tgggaccgtcaagctagagggcact

SEQ ID NO: 3742909 - DNA, 25 bp, Homo sapien
caaaacagataaccatgttccaagc

SEQ ID NO: 3742910 - DNA, 25 bp, Homo sapien
tcttgactgctagagtgaccgtggt

SEQ ID NO: 3742911 - DNA, 25 bp, Homo sapien
cagtgggtcattgatcttcaaggaa

SEQ ID NO: 3742912 - DNA, 25 bp, Homo sapien
cgactttagtgaccagtgggtcatt

SEQ ID NO: 3742913 - DNA, 25 bp, Homo sapien
aatgatgatcctctttgcaggggat

SEQ ID NO: 3742914 - DNA, 25 bp, Homo sapien
tttagtgaccagtgggtcattgatc

SEQ ID NO: 3742915 - DNA, 25 bp, Homo sapien
atggcattctcagaatatagacggg

SEQ ID NO: 3742916 - DNA, 25 bp, Homo sapien
cattctcagaatatagacgggtata

SEQ ID NO: 3742917 - DNA, 25 bp, Homo sapien
gaggaccatttgttcaatggcattc

SEQ ID NO: 3742918 - DNA, 25 bp, Homo sapien
tctcagaatatagacgggtatatac

SEQ ID NO: 3742919 - DNA, 25 bp, Homo sapien
gggaggcacagccaagcgagccatc

SEQ ID NO: 3742920 - DNA, 25 bp, Homo sapien
aggcacagccaagcgagccatctgt

SEQ ID NO: 3742921 - DNA, 25 bp, Homo sapien
acagccaagcgagccatctgtgtgg

SEQ ID NO: 3742922 - DNA, 25 bp, Homo sapien
gcacagccaagcgagccatctgtgt

SEQ ID NO: 3742923 - DNA, 25 bp, Homo sapien
catgtagaggttcttcagggccgtg

SEQ ID NO: 3742924 - DNA, 25 bp, Homo sapien
ggatgtgggcggaagccagcactcc

SEQ ID NO: 3742925 - DNA, 25 bp, Homo sapien
gaggatgtgggcggaagccagcact

SEQ ID NO: 3742926 - DNA, 25 bp, Homo sapien
ctggaggatgtgggcggaagccagc

SEQ ID NO: 3742927 - DNA, 25 bp, Homo sapien
tggtgcttggcttgagtctggctat

SEQ ID NO: 3742928 - DNA, 25 bp, Homo sapien
gtctggctatcatcacatccacgca

SEQ ID NO: 3742929 - DNA, 25 bp, Homo sapien
cttgcagccggcctcgtagaatttc

SEQ ID NO: 3742930 - DNA, 25 bp, Homo sapien
ggcctcgtagaatttcttgatggtg

SEQ ID NO: 3742931 - DNA, 25 bp, Homo sapien
ggtcctgtgggattttgtggaggtg

SEQ ID NO: 3742932 - DNA, 25 bp, Homo sapien
ttctcgcagccggtggtgagctgct

SEQ ID NO: 3742933 - DNA, 25 bp, Homo sapien
tggatctgcgtcccccctagaggaa

SEQ ID NO: 3742934 - DNA, 25 bp, Homo sapien
cagcactttgtggagcaggtcctgt

SEQ ID NO: 3742935 - DNA, 25 bp, Homo sapien
tggctgatgacatgcctgaagccac

SEQ ID NO: 3742936 - DNA, 25 bp, Homo sapien
tttcccttcagtgatagccctggac

SEQ ID NO: 3742937 - DNA, 25 bp, Homo sapien
tgatagccctggactgtctgtgcag

SEQ ID NO: 3742938 - DNA, 25 bp, Homo sapien
gccactggagatcaacctcagaaga

SEQ ID NO: 3742939 - DNA, 25 bp, Homo sapien
cttactcaaggccactcaactggga

SEQ ID NO: 3742940 - DNA, 25 bp, Homo sapien
cacgctgcttgtaagaagctggtta

SEQ ID NO: 3742941 - DNA, 25 bp, Homo sapien
gaaggtagcctcagacatcaagcag

SEQ ID NO: 3742942 - DNA, 25 bp, Homo sapien
cagaaatagcacaaaatcacgctgc

SEQ ID NO: 3742943 - DNA, 25 bp, Homo sapien
aaaaatgtcatcacggtttcataag

SEQ ID NO: 3742944 - DNA, 25 bp, Homo sapien
cagttgcaagaagacccacaaaagc

SEQ ID NO: 3742945 - DNA, 25 bp, Homo sapien
gaatcttgtagttcagttgcaagaa

SEQ ID NO: 3742946 - DNA, 25 bp, Homo sapien
ggtttcataagtcggaattgcctga

SEQ ID NO: 3742947 - DNA, 25 bp, Homo sapien
ggtggtttgaaagcatcctataatc

SEQ ID NO: 3742948 - DNA, 25 bp, Homo sapien
ggagtaccttttgcctcatgcctgt

SEQ ID NO: 3742949 - DNA, 25 bp, Homo sapien
ggacacagcaagttcccagaagcac

SEQ ID NO: 3742950 - DNA, 25 bp, Homo sapien
agtgccctctgaatgatgctatgaa

SEQ ID NO: 3742951 - DNA, 25 bp, Homo sapien
caagccctacactttcccatctttt

SEQ ID NO: 3742952 - DNA, 25 bp, Homo sapien
ccacaaggtcctccatgatgacaga

SEQ ID NO: 3742953 - DNA, 25 bp, Homo sapien
ggacagtgtgcaggggagagcatcc

SEQ ID NO: 3742954 - DNA, 25 bp, Homo sapien
gagagcatccaagccctacactttc

SEQ ID NO: 3742955 - DNA, 25 bp, Homo sapien
aactcctctctggaattagctcggg

SEQ ID NO: 3742956 - DNA, 25 bp, Homo sapien
agcaaactcctctctggaattagct

SEQ ID NO: 3742957 - DNA, 25 bp, Homo sapien
caaactcctctctggaattagctcg

SEQ ID NO: 3742958 - DNA, 25 bp, Homo sapien
aaactcctctctggaattagctcgg

SEQ ID NO: 3742959 - DNA, 25 bp, Homo sapien
gtcccggtccagaaagcaacagttc

SEQ ID NO: 3742960 - DNA, 25 bp, Homo sapien
ctatgtcccggtccagaaagcaaca

SEQ ID NO: 3742961 - DNA, 25 bp, Homo sapien
tccagaaagcaacagttctcaggaa

SEQ ID NO: 3742962 - DNA, 25 bp, Homo sapien
cagaaagcaacagttctcaggaaag

SEQ ID NO: 3742963 - DNA, 25 bp, Homo sapien
tgatgccgtgcagacgcaagcagag

SEQ ID NO: 3742964 - DNA, 25 bp, Homo sapien
gtgatgccgtgcagacgcaagcaga

SEQ ID NO: 3742965 - DNA, 25 bp, Homo sapien
atgccgtgcagacgcaagcagagga

SEQ ID NO: 3742966 - DNA, 25 bp, Homo sapien
ccgtgcagacgcaagcagaggaaga

SEQ ID NO: 3742967 - DNA, 25 bp, Homo sapien
tgcgtggtaatggttgactgtaacc

SEQ ID NO: 3742968 - DNA, 25 bp, Homo sapien
gttaaggtgccgcagcacctccaga

SEQ ID NO: 3742969 - DNA, 25 bp, Homo sapien
tggtcgagccatgactctgggaaga

SEQ ID NO: 3742970 - DNA, 25 bp, Homo sapien
agaagttaaggtgccgcagcacctc

SEQ ID NO: 3742971 - DNA, 25 bp, Homo sapien
gttaagatctttcaggtggaccatg

SEQ ID NO: 3742972 - DNA, 25 bp, Homo sapien
ctgggtgttaagatctttcaggtgg

SEQ ID NO: 3742973 - DNA, 25 bp, Homo sapien
gatctttcaggtggaccatgtcgcc

SEQ ID NO: 3742974 - DNA, 25 bp, Homo sapien
tctttcaggtggaccatgtcgcccc

SEQ ID NO: 3742975 - DNA, 25 bp, Homo sapien
aagaggtagtatcatgtttgagtcc

SEQ ID NO: 3742976 - DNA, 25 bp, Homo sapien
ccatatagagcaatcgttttcgaat

SEQ ID NO: 3742977 - DNA, 25 bp, Homo sapien
tcgttttcgaataagttgtattctc

SEQ ID NO: 3742978 - DNA, 25 bp, Homo sapien
ctataagaggtagtatcatgtttga

SEQ ID NO: 3742979 - DNA, 25 bp, Homo sapien
ctcgtagaccgcagagggagattcc

SEQ ID NO: 3742980 - DNA, 25 bp, Homo sapien
aggcgtgccgctcgcaggctgacgt

SEQ ID NO: 3742981 - DNA, 25 bp, Homo sapien
ctcgcaggctgacgtggttgtgctc

SEQ ID NO: 3742982 - DNA, 25 bp, Homo sapien
cgtggttgtgctcgtagaccgcaga

SEQ ID NO: 3742983 - DNA, 25 bp, Homo sapien
ccacttgccgtcaaccagggcctct

SEQ ID NO: 3742984 - DNA, 25 bp, Homo sapien
gccacttgccgtcaaccagggcctc

SEQ ID NO: 3742985 - DNA, 25 bp, Homo sapien
cacttgccgtcaaccagggcctctg

SEQ ID NO: 3742986 - DNA, 25 bp, Homo sapien
acttgccgtcaaccagggcctctgc

SEQ ID NO: 3742987 - DNA, 25 bp, Homo sapien
catagattgggatgcccacagtttg

SEQ ID NO: 3742988 - DNA, 25 bp, Homo sapien
aaaacttacatagattgggatgccc

SEQ ID NO: 3742989 - DNA, 25 bp, Homo sapien
gaatgcaaaacttacatagattggg

SEQ ID NO: 3742990 - DNA, 25 bp, Homo sapien
ttgggatgcccacagtttggatttt

SEQ ID NO: 3742991 - DNA, 25 bp, Homo sapien
gggaaaatcccatagattcttctgg

SEQ ID NO: 3742992 - DNA, 25 bp, Homo sapien
ttattttcttttatgcagaccagtg

SEQ ID NO: 3742993 - DNA, 25 bp, Homo sapien
attttcttttatgcagaccagtggg

SEQ ID NO: 3742994 - DNA, 25 bp, Homo sapien
tatgcagaccagtggggggaaaatc

SEQ ID NO: 3742995 - DNA, 25 bp, Homo sapien
gttctgtgtagcaggcagagctgca

SEQ ID NO: 3742996 - DNA, 25 bp, Homo sapien
cccaaactgccagggacgattggca

SEQ ID NO: 3742997 - DNA, 25 bp, Homo sapien
ttctgtgtagcaggcagagctgcat

SEQ ID NO: 3742998 - DNA, 25 bp, Homo sapien
tgttctgtctgagcccaaactgcca

SEQ ID NO: 3742999 - DNA, 25 bp, Homo sapien
catctttttgcaggggtgatgctaa

SEQ ID NO: 3743000 - DNA, 25 bp, Homo sapien
tgtatgtcatctttttgcaggggtg

SEQ ID NO: 3743001 - DNA, 25 bp, Homo sapien
gtatatctgctaccaaagtgagcat

SEQ ID NO: 3743002 - DNA, 25 bp, Homo sapien
tgtcatctttttgcaggggtgatgc

SEQ ID NO: 3743003 - DNA, 25 bp, Homo sapien
agcagcacagcttgtacccacaagc

SEQ ID NO: 3743004 - DNA, 25 bp, Homo sapien
taacacttggctggaggagtcaagc

SEQ ID NO: 3743005 - DNA, 25 bp, Homo sapien
ttaacacttggctggaggagtcaag

SEQ ID NO: 3743006 - DNA, 25 bp, Homo sapien
gagatggctctgtcagtcaccgcat

SEQ ID NO: 3743007 - DNA, 25 bp, Homo sapien
tggagatggctctgtcagtcaccgc

SEQ ID NO: 3743008 - DNA, 25 bp, Homo sapien
gtcaccgcatcaccctcatttggca

SEQ ID NO: 3743009 - DNA, 25 bp, Homo sapien
atggctctgtcagtcaccgcatcac

SEQ ID NO: 3743010 - DNA, 25 bp, Homo sapien
agggactggcggctggagtcctggc

SEQ ID NO: 3743011 - DNA, 25 bp, Homo sapien
gactggcggctggagtcctggcatg

SEQ ID NO: 3743012 - DNA, 25 bp, Homo sapien
gcggctggagtcctggcatggccct

SEQ ID NO: 3743013 - DNA, 25 bp, Homo sapien
tggagtcctggcatggccctgagct

SEQ ID NO: 3743014 - DNA, 25 bp, Homo sapien
tccagggagagcatgtaggtggtct

SEQ ID NO: 3743015 - DNA, 25 bp, Homo sapien
cagcccaaaagcagagaaactccaa

SEQ ID NO: 3743016 - DNA, 25 bp, Homo sapien
gcatgtaggtggtctgaagcaccac

SEQ ID NO: 3743017 - DNA, 25 bp, Homo sapien
cacagcccaaaagcagagaaactcc

SEQ ID NO: 3743018 - DNA, 25 bp, Homo sapien
tgctcccacgctggagactccagca

SEQ ID NO: 3743019 - DNA, 25 bp, Homo sapien
agagccagactgctcccacgctgga

SEQ ID NO: 3743020 - DNA, 25 bp, Homo sapien
aagccagtgcggcagcacggtgaca

SEQ ID NO: 3743021 - DNA, 25 bp, Homo sapien
tgagaagccagtgcggcagcacggt

SEQ ID NO: 3743022 - DNA, 25 bp, Homo sapien
tgagaaccagaagtcacaagcacga

SEQ ID NO: 3743023 - DNA, 25 bp, Homo sapien
tgaccccttggcgtggctttcgagg

SEQ ID NO: 3743024 - DNA, 25 bp, Homo sapien
tgaacaatactcagaattcccatgg

SEQ ID NO: 3743025 - DNA, 25 bp, Homo sapien
cattgcaagttatgcgaatcacggc

SEQ ID NO: 3743026 - DNA, 25 bp, Homo sapien
ggcttccagacagacgtcagcccct

SEQ ID NO: 3743027 - DNA, 25 bp, Homo sapien
cattatcatcatgctttgcacgtgt

SEQ ID NO: 3743028 - DNA, 25 bp, Homo sapien
cacgtgtgaagtacgttgatgtttc

SEQ ID NO: 3743029 - DNA, 25 bp, Homo sapien
tccatatgcttagtgctgggctctg

SEQ ID NO: 3743030 - DNA, 25 bp, Homo sapien
ccggagcggcgtccgcgacggccag

SEQ ID NO: 3743031 - DNA, 25 bp, Homo sapien
gctgagattccggagcgggcgctcc

SEQ ID NO: 3743032 - DNA, 25 bp, Homo sapien
gccagcccgcgcactgcgcacgcgt

SEQ ID NO: 3743033 - DNA, 25 bp, Homo sapien
ccctcagacggcggctgagattccg

SEQ ID NO: 3743034 - DNA, 25 bp, Homo sapien
cagcgggaaccgcgctccagcagcc

SEQ ID NO: 3743035 - DNA, 25 bp, Homo sapien
agcacccaccgcccctctgcggacg

SEQ ID NO: 3743036 - DNA, 25 bp, Homo sapien
gacgcctccccgctcgccacagcgg

SEQ ID NO: 3743037 - DNA, 25 bp, Homo sapien
gcgggaaccgcgctccagcagcccg

SEQ ID NO: 3743038 - DNA, 25 bp, Homo sapien
cctcggcgtcgaaagacctgggtct

SEQ ID NO: 3743039 - DNA, 25 bp, Homo sapien
tgcggaggtaaatcgcggacaccgc

SEQ ID NO: 3743040 - DNA, 25 bp, Homo sapien
caaagctctgcggttggcagctggc

SEQ ID NO: 3743041 - DNA, 25 bp, Homo sapien
gaccttgggcaagtcgctttcaacg

SEQ ID NO: 3743042 - DNA, 25 bp, Homo sapien
taaacgaactatcatatattgctgg

SEQ ID NO: 3743043 - DNA, 25 bp, Homo sapien
gaaataaacgaactatcatatattg

SEQ ID NO: 3743044 - DNA, 25 bp, Homo sapien
tgtgaaataaacgaactatcatata

SEQ ID NO: 3743045 - DNA, 25 bp, Homo sapien
aagatgtgaaataaacgaactatca

SEQ ID NO: 3743046 - DNA, 25 bp, Homo sapien
gaagaggctatcttgaccatccagc

SEQ ID NO: 3743047 - DNA, 25 bp, Homo sapien
cagactgccccgttgtgtgaaagcc

SEQ ID NO: 3743048 - DNA, 25 bp, Homo sapien
gtgaaagccaactagtcccatgaag

SEQ ID NO: 3743049 - DNA, 25 bp, Homo sapien
taattttcaaccaaggtgccaaggc

SEQ ID NO: 3743050 - DNA, 25 bp, Homo sapien
gaggaacatgctaaactgcaccaaa

SEQ ID NO: 3743051 - DNA, 25 bp, Homo sapien
aggaattcaatcagcaagagccaga

SEQ ID NO: 3743052 - DNA, 25 bp, Homo sapien
tacaggagatgcagaacacagagga

SEQ ID NO: 3743053 - DNA, 25 bp, Homo sapien
tgctaaactgcaccaaaggaattca

SEQ ID NO: 3743054 - DNA, 25 bp, Homo sapien
gataagcaggtatgatgtgcctcct

SEQ ID NO: 3743055 - DNA, 25 bp, Homo sapien
taatgtactggaaagagagataagc

SEQ ID NO: 3743056 - DNA, 25 bp, Homo sapien
taaactagttaatgtactggaaaga

SEQ ID NO: 3743057 - DNA, 25 bp, Homo sapien
catcctctctaaaaaacccttgaat

SEQ ID NO: 3743058 - DNA, 25 bp, Homo sapien
aaccacaaatgcgattctgacgatc

SEQ ID NO: 3743059 - DNA, 25 bp, Homo sapien
gcgattctgacgatccacataaggc

SEQ ID NO: 3743060 - DNA, 25 bp, Homo sapien
gaaaaccacaaatgcgattctgacg

SEQ ID NO: 3743061 - DNA, 25 bp, Homo sapien
caaatgcgattctgacgatccacat

SEQ ID NO: 3743062 - DNA, 25 bp, Homo sapien
ctgtggattatccatgtaccacacg

SEQ ID NO: 3743063 - DNA, 25 bp, Homo sapien
tatgaagtaccttcgaagaaatttc

SEQ ID NO: 3743064 - DNA, 25 bp, Homo sapien
tggtatccagtatgaagtaccttcg

SEQ ID NO: 3743065 - DNA, 25 bp, Homo sapien
gaaactatcttctctggtatccagt

SEQ ID NO: 3743066 - DNA, 25 bp, Homo sapien
acaaattctaaagcctgtatagtat

SEQ ID NO: 3743067 - DNA, 25 bp, Homo sapien
aattctaaagcctgtatagtatgtt

SEQ ID NO: 3743068 - DNA, 25 bp, Homo sapien
aggacagccagtagaaataaatcta

SEQ ID NO: 3743069 - DNA, 25 bp, Homo sapien
tatactgcttaagaagacaaattct

SEQ ID NO: 3743070 - DNA, 25 bp, Homo sapien
ttaaaaagccatgaacaagatcaga

SEQ ID NO: 3743071 - DNA, 25 bp, Homo sapien
aaaagccatgaacaagatcagattt

SEQ ID NO: 3743072 - DNA, 25 bp, Homo sapien
aagccatgaacaagatcagattttg

SEQ ID NO: 3743073 - DNA, 25 bp, Homo sapien
gccatgaacaagatcagattttgtt

SEQ ID NO: 3743074 - DNA, 25 bp, Homo sapien
taatggctccaacacgtgatgatcc

SEQ ID NO: 3743075 - DNA, 25 bp, Homo sapien
taagcttaatggctccaacacgtga

SEQ ID NO: 3743076 - DNA, 25 bp, Homo sapien
tccaacacgtgatgatccagaaggt

SEQ ID NO: 3743077 - DNA, 25 bp, Homo sapien
cacgtgatgatccagaaggtaggtt

SEQ ID NO: 3743078 - DNA, 25 bp, Homo sapien
tcagtatatgcataacagtacccat

SEQ ID NO: 3743079 - DNA, 25 bp, Homo sapien
tttgccaacagatctcagtatatgc

SEQ ID NO: 3743080 - DNA, 25 bp, Homo sapien
catctatcttctaaacagaggcaca

SEQ ID NO: 3743081 - DNA, 25 bp, Homo sapien
ggtcttctgttgaagtgatctacct

SEQ ID NO: 3743082 - DNA, 25 bp, Homo sapien
acagaactccgcctttggccttagc

SEQ ID NO: 3743083 - DNA, 25 bp, Homo sapien
tttggccttagcttagtagcatcgc

SEQ ID NO: 3743084 - DNA, 25 bp, Homo sapien
caaaacagaactccgcctttggcct

SEQ ID NO: 3743085 - DNA, 25 bp, Homo sapien
gccttagcttagtagcatcgctaac

SEQ ID NO: 3743086 - DNA, 25 bp, Homo sapien
ttcccacaaagttgaatccattcac

SEQ ID NO: 3743087 - DNA, 25 bp, Homo sapien
tcgaatacccctcaccagaactggt

SEQ ID NO: 3743088 - DNA, 25 bp, Homo sapien
cagaactggttgttagcacctgtgg

SEQ ID NO: 3743089 - DNA, 25 bp, Homo sapien
acctgtggatacctctagtttctag

SEQ ID NO: 3743090 - DNA, 25 bp, Homo sapien
atcattggcttgtaggaagtacttc

SEQ ID NO: 3743091 - DNA, 25 bp, Homo sapien
tggcttgtaggaagtacttcctcat

SEQ ID NO: 3743092 - DNA, 25 bp, Homo sapien
tttacccattccactaggtcctgct

SEQ ID NO: 3743093 - DNA, 25 bp, Homo sapien
acacatttacccattccactaggtc

SEQ ID NO: 3743094 - DNA, 25 bp, Homo sapien
ggcaggcctgctatgtatttctcta

SEQ ID NO: 3743095 - DNA, 25 bp, Homo sapien
caaaagagtaaggagagggctgttc

SEQ ID NO: 3743096 - DNA, 25 bp, Homo sapien
aaaatagagcctatctacgtgctgc

SEQ ID NO: 3743097 - DNA, 25 bp, Homo sapien
tacagatcagatgcggtgcgtaggc

SEQ ID NO: 3743098 - DNA, 25 bp, Homo sapien
cattgctatcctatgagttaaatgt

SEQ ID NO: 3743099 - DNA, 25 bp, Homo sapien
caaatctatactcactttaatgcag

SEQ ID NO: 3743100 - DNA, 25 bp, Homo sapien
gcagttataaccactttattaagta

SEQ ID NO: 3743101 - DNA, 25 bp, Homo sapien
tataacaaattggagattccacact

SEQ ID NO: 3743102 - DNA, 25 bp, Homo sapien
gactcaagtaaggaaagtcacagac

SEQ ID NO: 3743103 - DNA, 25 bp, Homo sapien
aagtggcacccacctagactcaagt

SEQ ID NO: 3743104 - DNA, 25 bp, Homo sapien
gggaacagaaaccaccatatttatg

SEQ ID NO: 3743105 - DNA, 25 bp, Homo sapien
tcacagactatagcgttagaggata

SEQ ID NO: 3743106 - DNA, 25 bp, Homo sapien
cacgtaatgagtgcttactcgggca

SEQ ID NO: 3743107 - DNA, 25 bp, Homo sapien
tactcgggcaggtactagttcacac

SEQ ID NO: 3743108 - DNA, 25 bp, Homo sapien
tgtgtaactcttccaagcccaactg

SEQ ID NO: 3743109 - DNA, 25 bp, Homo sapien
caatgatttaaagggcacgtggaac

SEQ ID NO: 3743110 - DNA, 25 bp, Homo sapien
tcaccatggcgacttaggttatcag

SEQ ID NO: 3743111 - DNA, 25 bp, Homo sapien
tgggagtaatgatgggtacgccacc

SEQ ID NO: 3743112 - DNA, 25 bp, Homo sapien
tcagttctgtaagacacttgctttt

SEQ ID NO: 3743113 - DNA, 25 bp, Homo sapien
gaattaggctgtgagtctgactgct

SEQ ID NO: 3743114 - DNA, 25 bp, Homo sapien
taattagaccctcacacaatagaag

SEQ ID NO: 3743115 - DNA, 25 bp, Homo sapien
tatggtaaatccatggaagaactac

SEQ ID NO: 3743116 - DNA, 25 bp, Homo sapien
taccaattaagcaaagatgcactgt

SEQ ID NO: 3743117 - DNA, 25 bp, Homo sapien
taaaaggatttctgatgacttggaa

SEQ ID NO: 3743118 - DNA, 25 bp, Homo sapien
taaacacctagtcctgcaaatgctg

SEQ ID NO: 3743119 - DNA, 25 bp, Homo sapien
tctagagattcgtccagactgttcc

SEQ ID NO: 3743120 - DNA, 25 bp, Homo sapien
gttcacccattaaaggacatttgag

SEQ ID NO: 3743121 - DNA, 25 bp, Homo sapien
gactgttccttgtatctagagttca

SEQ ID NO: 3743122 - DNA, 25 bp, Homo sapien
ggaagatggctttgtgaccgtttca

SEQ ID NO: 3743123 - DNA, 25 bp, Homo sapien
ggctttgtgaccgtttcagattatt

SEQ ID NO: 3743124 - DNA, 25 bp, Homo sapien
tatcttgaggtggtttaggagtaaa

SEQ ID NO: 3743125 - DNA, 25 bp, Homo sapien
ccagctttgataaccgcactatctt

SEQ ID NO: 3743126 - DNA, 25 bp, Homo sapien
taacagcattgaattataaacagag

SEQ ID NO: 3743127 - DNA, 25 bp, Homo sapien
tgagtttgctagaacgtaatccttt

SEQ ID NO: 3743128 - DNA, 25 bp, Homo sapien
tcagcatgccggtctctcactttgg

SEQ ID NO: 3743129 - DNA, 25 bp, Homo sapien
ttataaacagagaatatcccctatt

SEQ ID NO: 3743130 - DNA, 25 bp, Homo sapien
taatgggcattaactttcctggccc

SEQ ID NO: 3743131 - DNA, 25 bp, Homo sapien
agtggtaatgggcattaactttcct

SEQ ID NO: 3743132 - DNA, 25 bp, Homo sapien
tcagtggtaatgggcattaactttc

SEQ ID NO: 3743133 - DNA, 25 bp, Homo sapien
ggtaatgggcattaactttcctggc

SEQ ID NO: 3743134 - DNA, 25 bp, Homo sapien
aaggaagagacctcctaggcaccac

SEQ ID NO: 3743135 - DNA, 25 bp, Homo sapien
aggccaatgcctaaacaaggaagag

SEQ ID NO: 3743136 - DNA, 25 bp, Homo sapien
aggtcagagagcttaccacggaggt

SEQ ID NO: 3743137 - DNA, 25 bp, Homo sapien
ccacggaggtcaggccaatgcctaa

SEQ ID NO: 3743138 - DNA, 25 bp, Homo sapien
gaacccacaatcagacatgccaagc

SEQ ID NO: 3743139 - DNA, 25 bp, Homo sapien
cattacttcccttagagatgcgata

SEQ ID NO: 3743140 - DNA, 25 bp, Homo sapien
tgttagtcaccacttaattaccctg

SEQ ID NO: 3743141 - DNA, 25 bp, Homo sapien
catgccaagcagtgaaaaatctcat

SEQ ID NO: 3743142 - DNA, 25 bp, Homo sapien
gatttgaagtagcctattgtgtttt

SEQ ID NO: 3743143 - DNA, 25 bp, Homo sapien
cagagtgagttgctgacctgtccca

SEQ ID NO: 3743144 - DNA, 25 bp, Homo sapien
tattaggaggtacacacccgatggt

SEQ ID NO: 3743145 - DNA, 25 bp, Homo sapien
caagtatgcatagggtaccacaggg

SEQ ID NO: 3743146 - DNA, 25 bp, Homo sapien
tatacactagtgctctgctggccaa

SEQ ID NO: 3743147 - DNA, 25 bp, Homo sapien
cctggactttatgaacctctttaag

SEQ ID NO: 3743148 - DNA, 25 bp, Homo sapien
tttgcttacattcctggactttatg

SEQ ID NO: 3743149 - DNA, 25 bp, Homo sapien
agtggtattacacgaagaggttcct

SEQ ID NO: 3743150 - DNA, 25 bp, Homo sapien
cctctttaagtggtattacacgaag

SEQ ID NO: 3743151 - DNA, 25 bp, Homo sapien
ctgcacatagaaagttcgagacgtt

SEQ ID NO: 3743152 - DNA, 25 bp, Homo sapien
cacatagaaagttcgagacgttgtt

SEQ ID NO: 3743153 - DNA, 25 bp, Homo sapien
tagaaagttcgagacgttgttacaa

SEQ ID NO: 3743154 - DNA, 25 bp, Homo sapien
gttcgagacgttgttacaatttcaa

SEQ ID NO: 3743155 - DNA, 25 bp, Homo sapien
ttaacctcaagtgcaacaagcttgt

SEQ ID NO: 3743156 - DNA, 25 bp, Homo sapien
tcctgaacatataaccccaccaata

SEQ ID NO: 3743157 - DNA, 25 bp, Homo sapien
tacaggatgcctactattagtgaaa

SEQ ID NO: 3743158 - DNA, 25 bp, Homo sapien
cagtacccttttattaagctggtga

SEQ ID NO: 3743159 - DNA, 25 bp, Homo sapien
agagactgctttaatccaactgtgc

SEQ ID NO: 3743160 - DNA, 25 bp, Homo sapien
ctacaatggcgccagagactgcttt

SEQ ID NO: 3743161 - DNA, 25 bp, Homo sapien
gggaccccgctgtgctacaatggcg

SEQ ID NO: 3743162 - DNA, 25 bp, Homo sapien
agaagacgcagatctgccgggaccc

SEQ ID NO: 3743163 - DNA, 25 bp, Homo sapien
tatgagactactttccgcagatggc

SEQ ID NO: 3743164 - DNA, 25 bp, Homo sapien
tcagacctgagatcagtggccaaag

SEQ ID NO: 3743165 - DNA, 25 bp, Homo sapien
gccaaatctagagctactgacaagt

SEQ ID NO: 3743166 - DNA, 25 bp, Homo sapien
tgaactgtatttaaggccccagctg

SEQ ID NO: 3743167 - DNA, 25 bp, Homo sapien
ccaacagacactgtttttgcagaga

SEQ ID NO: 3743168 - DNA, 25 bp, Homo sapien
tcttcccaacagacactgtttttgc

SEQ ID NO: 3743169 - DNA, 25 bp, Homo sapien
tgtgctgacagtcatagctagatag

SEQ ID NO: 3743170 - DNA, 25 bp, Homo sapien
cccccaccacaaagcacaaaacaca

SEQ ID NO: 3743171 - DNA, 25 bp, Homo sapien
caaagctaagattagagttaaccta

SEQ ID NO: 3743172 - DNA, 25 bp, Homo sapien
tgcaaagctaagattagagttaacc

SEQ ID NO: 3743173 - DNA, 25 bp, Homo sapien
aagctaagattagagttaacctata

SEQ ID NO: 3743174 - DNA, 25 bp, Homo sapien
ctggaacacagtgcaaagctaagat

SEQ ID NO: 3743175 - DNA, 25 bp, Homo sapien
atacaagggttcgacagccttctgg

SEQ ID NO: 3743176 - DNA, 25 bp, Homo sapien
tgtatacaagggttcgacagccttc

SEQ ID NO: 3743177 - DNA, 25 bp, Homo sapien
ctctgtatacaagggttcgacagcc

SEQ ID NO: 3743178 - DNA, 25 bp, Homo sapien
tatacaagggttcgacagccttctg

SEQ ID NO: 3743179 - DNA, 25 bp, Homo sapien
tgcattcaccagctcttgatgtata

SEQ ID NO: 3743180 - DNA, 25 bp, Homo sapien
gtgctgcattcaccagctcttgatg

SEQ ID NO: 3743181 - DNA, 25 bp, Homo sapien
gcattcaccagctcttgatgtatac

SEQ ID NO: 3743182 - DNA, 25 bp, Homo sapien
gctgcattcaccagctcttgatgta

SEQ ID NO: 3743183 - DNA, 25 bp, Homo sapien
gcacgtttgcgtgagagcccacata

SEQ ID NO: 3743184 - DNA, 25 bp, Homo sapien
ctgggccctccactaagaaggcacg

SEQ ID NO: 3743185 - DNA, 25 bp, Homo sapien
tgtaagtagtaagtctgggccctcc

SEQ ID NO: 3743186 - DNA, 25 bp, Homo sapien
tatgatcagttgtaagtagtaagtc

SEQ ID NO: 3743187 - DNA, 25 bp, Homo sapien
gttatgataactgcaaaaggcagtt

SEQ ID NO: 3743188 - DNA, 25 bp, Homo sapien
cagtgaaacagtttgcgttagtatt

SEQ ID NO: 3743189 - DNA, 25 bp, Homo sapien
agtattgacaaaatcagttatgata

SEQ ID NO: 3743190 - DNA, 25 bp, Homo sapien
gaaacagtttgcgttagtattgaca

SEQ ID NO: 3743191 - DNA, 25 bp, Homo sapien
cagctgcaactgaactgtgtttaaa

SEQ ID NO: 3743192 - DNA, 25 bp, Homo sapien
gaatttcactgcaaccaataatagc

SEQ ID NO: 3743193 - DNA, 25 bp, Homo sapien
tacagagtcctattagatggctaaa

SEQ ID NO: 3743194 - DNA, 25 bp, Homo sapien
caaattaccaaaacactacagagtc

SEQ ID NO: 3743195 - DNA, 25 bp, Homo sapien
ccaggttagtaactcagtgtgagac

SEQ ID NO: 3743196 - DNA, 25 bp, Homo sapien
gtcagtcactcatgaccaggttagt

SEQ ID NO: 3743197 - DNA, 25 bp, Homo sapien
tcagtgtgagacttgattctctgaa

SEQ ID NO: 3743198 - DNA, 25 bp, Homo sapien
tggcagtcagacacggtcagtcact

SEQ ID NO: 3743199 - DNA, 25 bp, Homo sapien
gtggcggtggctgcgttggtaggac

SEQ ID NO: 3743200 - DNA, 25 bp, Homo sapien
gacggaaagcgtgtttggattctga

SEQ ID NO: 3743201 - DNA, 25 bp, Homo sapien
tggtaggacggaaagcgtgtttgga

SEQ ID NO: 3743202 - DNA, 25 bp, Homo sapien
gctgcgttggtaggacggaaagcgt

SEQ ID NO: 3743203 - DNA, 25 bp, Homo sapien
ggctcgcatcgtccaagtctactag

SEQ ID NO: 3743204 - DNA, 25 bp, Homo sapien
tgaccttggcaagagactcgtaaaa

SEQ ID NO: 3743205 - DNA, 25 bp, Homo sapien
ggagagacagtctggaccttgaagt

SEQ ID NO: 3743206 - DNA, 25 bp, Homo sapien
tggaagctggttctcttggagagac

SEQ ID NO: 3743207 - DNA, 25 bp, Homo sapien
aataagtcacctcaagattcagggc

SEQ ID NO: 3743208 - DNA, 25 bp, Homo sapien
taacagtaaatgttgggaggcacac

SEQ ID NO: 3743209 - DNA, 25 bp, Homo sapien
ttttgcggaataaagcagtgactgc

SEQ ID NO: 3743210 - DNA, 25 bp, Homo sapien
tataaagagtacacctaagaggcag

SEQ ID NO: 3743211 - DNA, 25 bp, Homo sapien
tattcagaccaatgagacactaggc

SEQ ID NO: 3743212 - DNA, 25 bp, Homo sapien
gaactagagttgaagacaggcgcca

SEQ ID NO: 3743213 - DNA, 25 bp, Homo sapien
caggatgccgggtctaagacagcca

SEQ ID NO: 3743214 - DNA, 25 bp, Homo sapien
aatcaggtgtccaagacccaatggg

SEQ ID NO: 3743215 - DNA, 25 bp, Homo sapien
tacgatggaggcaataaacagactc

SEQ ID NO: 3743216 - DNA, 25 bp, Homo sapien
actacaggcgtgtgggtctacatta

SEQ ID NO: 3743217 - DNA, 25 bp, Homo sapien
caatgatataaccagaaggtggcgc

SEQ ID NO: 3743218 - DNA, 25 bp, Homo sapien
tttgataaaggtacaagcaccactt

SEQ ID NO: 3743219 - DNA, 25 bp, Homo sapien
ctcagctctaaggatactatgtaac

SEQ ID NO: 3743220 - DNA, 25 bp, Homo sapien
ttcatgttcagttggtcagagccgg

SEQ ID NO: 3743221 - DNA, 25 bp, Homo sapien
tgtaacaaaggccatcctggtcgca

SEQ ID NO: 3743222 - DNA, 25 bp, Homo sapien
gcacgcagcctctttcagtgggttc

SEQ ID NO: 3743223 - DNA, 25 bp, Homo sapien
taatgaggagctcacgaaatggaca

SEQ ID NO: 3743224 - DNA, 25 bp, Homo sapien
gggaggctccgtgtcacatggaaaa

SEQ ID NO: 3743225 - DNA, 25 bp, Homo sapien
gtacagttaacagcgatggtggctc

SEQ ID NO: 3743226 - DNA, 25 bp, Homo sapien
catttggcttgtttacagaggctac

SEQ ID NO: 3743227 - DNA, 25 bp, Homo sapien
tctcgcagagtggaaatgaaggaca

SEQ ID NO: 3743228 - DNA, 25 bp, Homo sapien
catcggtcctgggtataggcgcagc

SEQ ID NO: 3743229 - DNA, 25 bp, Homo sapien
gaggacagacttgccatctcaggcc

SEQ ID NO: 3743230 - DNA, 25 bp, Homo sapien
gataaagacagtttgctcctctgct

SEQ ID NO: 3743231 - DNA, 25 bp, Homo sapien
tctgtcactcgggagcagcttgaaa

SEQ ID NO: 3743232 - DNA, 25 bp, Homo sapien
tgagcgcgctcacatttagaacatg

SEQ ID NO: 3743233 - DNA, 25 bp, Homo sapien
caggcagccaccgaaaggtcttgaa

SEQ ID NO: 3743234 - DNA, 25 bp, Homo sapien
gatacaattcaaacagagccccagg

SEQ ID NO: 3743235 - DNA, 25 bp, Homo sapien
agttaatgcctatcacccgggagag

SEQ ID NO: 3743236 - DNA, 25 bp, Homo sapien
ggtgatgacgtgatgagtccgccca

SEQ ID NO: 3743237 - DNA, 25 bp, Homo sapien
gttgagaaagatttcaccagctgca

SEQ ID NO: 3743238 - DNA, 25 bp, Homo sapien
cagtctaggttgtgagggactccct

SEQ ID NO: 3743239 - DNA, 25 bp, Homo sapien
ggcggacagggcgagggccggagag

SEQ ID NO: 3743240 - DNA, 25 bp, Homo sapien
agcggcgccggggagagtgcaggag

SEQ ID NO: 3743241 - DNA, 25 bp, Homo sapien
gcgggtgcgagtgcgcgcggccgcg

SEQ ID NO: 3743242 - DNA, 25 bp, Homo sapien
cggtggcggcggacagggcgagggc

SEQ ID NO: 3743243 - DNA, 25 bp, Homo sapien
gaagagcggcgcgcgggatctgcat

SEQ ID NO: 3743244 - DNA, 25 bp, Homo sapien
gcagcgggagaagagcggcgcgcgg

SEQ ID NO: 3743245 - DNA, 25 bp, Homo sapien
cagcagcgggagaagagcggcgcgc

SEQ ID NO: 3743246 - DNA, 25 bp, Homo sapien
agcgggagaagagcggcgcgcggga

SEQ ID NO: 3743247 - DNA, 25 bp, Homo sapien
gggacagctgcgccgaggcgggcgc

SEQ ID NO: 3743248 - DNA, 25 bp, Homo sapien
acccggcggccaaaggcgccgagcg

SEQ ID NO: 3743249 - DNA, 25 bp, Homo sapien
ccggcggccaaaggcgccgagcggc

SEQ ID NO: 3743250 - DNA, 25 bp, Homo sapien
gccggcccgggacagctgcgccgag

SEQ ID NO: 3743251 - DNA, 25 bp, Homo sapien
gccctcgcagtgctccggctgcggc

SEQ ID NO: 3743252 - DNA, 25 bp, Homo sapien
cgccctcgcagtgctccggctgcgg

SEQ ID NO: 3743253 - DNA, 25 bp, Homo sapien
ccctcgcagtgctccggctgcggcg

SEQ ID NO: 3743254 - DNA, 25 bp, Homo sapien
gaggctggcaccccgaagggcacca

SEQ ID NO: 3743255 - DNA, 25 bp, Homo sapien
accccgaagggcaccacgcactgca

SEQ ID NO: 3743256 - DNA, 25 bp, Homo sapien
aagggcaccacgcactgcagcccct

SEQ ID NO: 3743257 - DNA, 25 bp, Homo sapien
tggcaccccgaagggcaccacgcac

SEQ ID NO: 3743258 - DNA, 25 bp, Homo sapien
acacacagaggccggcctgcgcgcg

SEQ ID NO: 3743259 - DNA, 25 bp, Homo sapien
tggcgcacacacagaggccggcctg

SEQ ID NO: 3743260 - DNA, 25 bp, Homo sapien
ctgctggcgcacacacagaggccgg

SEQ ID NO: 3743261 - DNA, 25 bp, Homo sapien
gcgcacacacagaggccggcctgcg

SEQ ID NO: 3743262 - DNA, 25 bp, Homo sapien
gcgtaggtgttggcgtcgctgccgc

SEQ ID NO: 3743263 - DNA, 25 bp, Homo sapien
cgtaggtgttggcgtcgctgccgca

SEQ ID NO: 3743264 - DNA, 25 bp, Homo sapien
ggcgtaggtgttggcgtcgctgccg

SEQ ID NO: 3743265 - DNA, 25 bp, Homo sapien
caggctccgcgctgcaggacgatga

SEQ ID NO: 3743266 - DNA, 25 bp, Homo sapien
atgaccggcggccggtgcagcctct

SEQ ID NO: 3743267 - DNA, 25 bp, Homo sapien
tgcagcctctcggagcggcggctgg

SEQ ID NO: 3743268 - DNA, 25 bp, Homo sapien
tccgcgctgcaggacgatgaccggc

SEQ ID NO: 3743269 - DNA, 25 bp, Homo sapien
accagtcccgcagaagcaggtccga

SEQ ID NO: 3743270 - DNA, 25 bp, Homo sapien
ccaccagtcccgcagaagcaggtcc

SEQ ID NO: 3743271 - DNA, 25 bp, Homo sapien
caccagtcccgcagaagcaggtccg

SEQ ID NO: 3743272 - DNA, 25 bp, Homo sapien
ggggacttcagcagccagtacaaag

SEQ ID NO: 3743273 - DNA, 25 bp, Homo sapien
gtctcccggggacttcagcagccag

SEQ ID NO: 3743274 - DNA, 25 bp, Homo sapien
gatgaacatgtcacccctgtggtct

SEQ ID NO: 3743275 - DNA, 25 bp, Homo sapien
tggagatgaacatgtcacccctgtg

SEQ ID NO: 3743276 - DNA, 25 bp, Homo sapien
tagatggcaaattccgagtcagctc

SEQ ID NO: 3743277 - DNA, 25 bp, Homo sapien
catgatataggcaacaactgggacc

SEQ ID NO: 3743278 - DNA, 25 bp, Homo sapien
tccagggagagttaacgagatgaca

SEQ ID NO: 3743279 - DNA, 25 bp, Homo sapien
cataattatcctgtggcgagggacc

SEQ ID NO: 3743280 - DNA, 25 bp, Homo sapien
gacatgatggtagtgaaccctgcat

SEQ ID NO: 3743281 - DNA, 25 bp, Homo sapien
cagagacggctgtttgcttggtata

SEQ ID NO: 3743282 - DNA, 25 bp, Homo sapien
agcgtgtgctctccacggtgcaggc

SEQ ID NO: 3743283 - DNA, 25 bp, Homo sapien
ggaccaacgcatctgcccttggaca

SEQ ID NO: 3743284 - DNA, 25 bp, Homo sapien
cttgaagggagacatcagtcatcgg

SEQ ID NO: 3743285 - DNA, 25 bp, Homo sapien
cacactggcccctacagatgagctg

SEQ ID NO: 3743286 - DNA, 25 bp, Homo sapien
ggttgagctctaggacctgccagga

SEQ ID NO: 3743287 - DNA, 25 bp, Homo sapien
ttagagagactaagggaacaaggcc

SEQ ID NO: 3743288 - DNA, 25 bp, Homo sapien
cactttggggcacataaacttcctg

SEQ ID NO: 3743289 - DNA, 25 bp, Homo sapien
tctcctcgggcccacgatcccctct

SEQ ID NO: 3743290 - DNA, 25 bp, Homo sapien
agccatcgccatctcctcgggccca

SEQ ID NO: 3743291 - DNA, 25 bp, Homo sapien
gtctccccctaactgataatgccac

SEQ ID NO: 3743292 - DNA, 25 bp, Homo sapien
aatcccactctacgctaattcaggc

SEQ ID NO: 3743293 - DNA, 25 bp, Homo sapien
ttccaagaatcccactctacgctaa

SEQ ID NO: 3743294 - DNA, 25 bp, Homo sapien
tcccaggtgcatttcaacacctcca

SEQ ID NO: 3743295 - DNA, 25 bp, Homo sapien
agaatcccactctacgctaattcag

SEQ ID NO: 3743296 - DNA, 25 bp, Homo sapien
acaccagagctatgcctataggaca

SEQ ID NO: 3743297 - DNA, 25 bp, Homo sapien
ggacaccagagctatgcctatagga

SEQ ID NO: 3743298 - DNA, 25 bp, Homo sapien
gacaccagagctatgcctataggac

SEQ ID NO: 3743299 - DNA, 25 bp, Homo sapien
tgtatgcttctttcatctttaaggc

SEQ ID NO: 3743300 - DNA, 25 bp, Homo sapien
cgcacctggccgaatatgtgcttta

SEQ ID NO: 3743301 - DNA, 25 bp, Homo sapien
gcacctggccgaatatgtgctttaa

SEQ ID NO: 3743302 - DNA, 25 bp, Homo sapien
cacctggccgaatatgtgctttaaa

SEQ ID NO: 3743303 - DNA, 25 bp, Homo sapien
ttttaacacaacaaatggcccatta

SEQ ID NO: 3743304 - DNA, 25 bp, Homo sapien
tttaacacaacaaatggcccattaa

SEQ ID NO: 3743305 - DNA, 25 bp, Homo sapien
ttaacacaacaaatggcccattaag

SEQ ID NO: 3743306 - DNA, 25 bp, Homo sapien
cacaggataagaggtcaataaataa

SEQ ID NO: 3743307 - DNA, 25 bp, Homo sapien
tagaaatctacgaatatatgactgc

SEQ ID NO: 3743308 - DNA, 25 bp, Homo sapien
ctatgtattagcaacaattggaatc

SEQ ID NO: 3743309 - DNA, 25 bp, Homo sapien
ctgcgtttatcaatgtcacaggata

SEQ ID NO: 3743310 - DNA, 25 bp, Homo sapien
tgtacgggcgtgcatcctagaaaca

SEQ ID NO: 3743311 - DNA, 25 bp, Homo sapien
gccatctaggtttgcgtaggcacac

SEQ ID NO: 3743312 - DNA, 25 bp, Homo sapien
agtaacctactgtacgggcgtgcat

SEQ ID NO: 3743313 - DNA, 25 bp, Homo sapien
tttgcgtaggcacactctgtaacat

SEQ ID NO: 3743314 - DNA, 25 bp, Homo sapien
aagaatagatacttaatgacactct

SEQ ID NO: 3743315 - DNA, 25 bp, Homo sapien
aaaagcaaagaatagatacttaatg

SEQ ID NO: 3743316 - DNA, 25 bp, Homo sapien
caaagaatagatacttaatgacact

SEQ ID NO: 3743317 - DNA, 25 bp, Homo sapien
gatacttaatgacactctgctgtgg

SEQ ID NO: 3743318 - DNA, 25 bp, Homo sapien
caccacgtccgcgataaagttatat

SEQ ID NO: 3743319 - DNA, 25 bp, Homo sapien
tttatggcgcaaactgttgggatct

SEQ ID NO: 3743320 - DNA, 25 bp, Homo sapien
aaagttatatttatggcgcaaactg

SEQ ID NO: 3743321 - DNA, 25 bp, Homo sapien
caattcgatatgaaccacggcaggg

SEQ ID NO: 3743322 - DNA, 25 bp, Homo sapien
gccaccggcacctctcgtttagaaa

SEQ ID NO: 3743323 - DNA, 25 bp, Homo sapien
gtgggcatttgtcacgatcagtcca

SEQ ID NO: 3743324 - DNA, 25 bp, Homo sapien
gacccggtgcttgttggtcaccacg

SEQ ID NO: 3743325 - DNA, 25 bp, Homo sapien
gattttggcttcgtaagtggcaccg

SEQ ID NO: 3743326 - DNA, 25 bp, Homo sapien
tggtggtcaattttgatgagtgcga

SEQ ID NO: 3743327 - DNA, 25 bp, Homo sapien
ctggtggtcaattttgatgagtgcg

SEQ ID NO: 3743328 - DNA, 25 bp, Homo sapien
ggtcaattttgatgagtgcgatgtc

SEQ ID NO: 3743329 - DNA, 25 bp, Homo sapien
aattttgatgagtgcgatgtctgct

SEQ ID NO: 3743330 - DNA, 25 bp, Homo sapien
cagcacacgcagagttgtttccaga

SEQ ID NO: 3743331 - DNA, 25 bp, Homo sapien
gagttgtttccagaaggaggtgtaa

SEQ ID NO: 3743332 - DNA, 25 bp, Homo sapien
cagaaggaggtgtaaccagcgtgcc

SEQ ID NO: 3743333 - DNA, 25 bp, Homo sapien
aacagcacacgcagagttgtttcca

SEQ ID NO: 3743334 - DNA, 25 bp, Homo sapien
gactggccgtaaaggagcctgagct

SEQ ID NO: 3743335 - DNA, 25 bp, Homo sapien
gctgggcagcaacttgatgttataa

SEQ ID NO: 3743336 - DNA, 25 bp, Homo sapien
tgatgttataaaaagacggagaagg

SEQ ID NO: 3743337 - DNA, 25 bp, Homo sapien
ttttctgaagactggccgtaaagga

SEQ ID NO: 3743338 - DNA, 25 bp, Homo sapien
acagagcctatatctacccagagcc

SEQ ID NO: 3743339 - DNA, 25 bp, Homo sapien
cgggcacagagcctatatctaccca

SEQ ID NO: 3743340 - DNA, 25 bp, Homo sapien
tatatctacccagagcctcttcggc

SEQ ID NO: 3743341 - DNA, 25 bp, Homo sapien
gagcctatatctacccagagcctct

SEQ ID NO: 3743342 - DNA, 25 bp, Homo sapien
ctaagatgacacaaagcaaggccag

SEQ ID NO: 3743343 - DNA, 25 bp, Homo sapien
agatgacacaaagcaaggccagcca

SEQ ID NO: 3743344 - DNA, 25 bp, Homo sapien
taagatgacacaaagcaaggccagc

SEQ ID NO: 3743345 - DNA, 25 bp, Homo sapien
tgacacaaagcaaggccagccagag

SEQ ID NO: 3743346 - DNA, 25 bp, Homo sapien
acagtttctgctggttctgttctgc

SEQ ID NO: 3743347 - DNA, 25 bp, Homo sapien
gcttcactgggttactcttaaatgg

SEQ ID NO: 3743348 - DNA, 25 bp, Homo sapien
tctcatatgacaaggagccgtgtag

SEQ ID NO: 3743349 - DNA, 25 bp, Homo sapien
gaggctgggccacagtctcatatga

SEQ ID NO: 3743350 - DNA, 25 bp, Homo sapien
gctgtccgatgatggacatgtgaaa

SEQ ID NO: 3743351 - DNA, 25 bp, Homo sapien
tggacatgtgaaatgccggctgttg

SEQ ID NO: 3743352 - DNA, 25 bp, Homo sapien
gatgatggacatgtgaaatgccggc

SEQ ID NO: 3743353 - DNA, 25 bp, Homo sapien
tccgatgatggacatgtgaaatgcc

SEQ ID NO: 3743354 - DNA, 25 bp, Homo sapien
tctgtgggtgccatctggcccaaag

SEQ ID NO: 3743355 - DNA, 25 bp, Homo sapien
cagtaagaggaccctctgcaaacac

SEQ ID NO: 3743356 - DNA, 25 bp, Homo sapien
gcagtaagaggaccctctgcaaaca

SEQ ID NO: 3743357 - DNA, 25 bp, Homo sapien
tcaaacaggtctgtgggtgccatct

SEQ ID NO: 3743358 - DNA, 25 bp, Homo sapien
acagccagcccgtgtcacccagcca

SEQ ID NO: 3743359 - DNA, 25 bp, Homo sapien
cagtgggtgaccctttccctgtgtg

SEQ ID NO: 3743360 - DNA, 25 bp, Homo sapien
agccagcccgtgtcacccagccatg

SEQ ID NO: 3743361 - DNA, 25 bp, Homo sapien
gacagtgggtgaccctttccctgtg

SEQ ID NO: 3743362 - DNA, 25 bp, Homo sapien
tggtgctcacgatcccggtggtgac

SEQ ID NO: 3743363 - DNA, 25 bp, Homo sapien
gtccatgtctgagttgcggagcccc

SEQ ID NO: 3743364 - DNA, 25 bp, Homo sapien
gaaaacgggcttccgatggcgacca

SEQ ID NO: 3743365 - DNA, 25 bp, Homo sapien
gctctttgccgcctcgctgggtggt

SEQ ID NO: 3743366 - DNA, 25 bp, Homo sapien
tgttaattccaatcacttcaccgtc

SEQ ID NO: 3743367 - DNA, 25 bp, Homo sapien
tcatgggactccgtgaggaactttt

SEQ ID NO: 3743368 - DNA, 25 bp, Homo sapien
tttggcctgtcggtcatgggactcc

SEQ ID NO: 3743369 - DNA, 25 bp, Homo sapien
tatcagatgggattgcaaaggagat

SEQ ID NO: 3743370 - DNA, 25 bp, Homo sapien
tggtgagacaacaaagggacagcag

SEQ ID NO: 3743371 - DNA, 25 bp, Homo sapien
ctggtgagacaacaaagggacagca

SEQ ID NO: 3743372 - DNA, 25 bp, Homo sapien
tgagacaacaaagggacagcagaag

SEQ ID NO: 3743373 - DNA, 25 bp, Homo sapien
ggtgagacaacaaagggacagcaga

SEQ ID NO: 3743374 - DNA, 25 bp, Homo sapien
cattcggataccaatatacttcttc

SEQ ID NO: 3743375 - DNA, 25 bp, Homo sapien
gagtgacatcattcggataccaata

SEQ ID NO: 3743376 - DNA, 25 bp, Homo sapien
ctggacgtgagtgacatcattcgga

SEQ ID NO: 3743377 - DNA, 25 bp, Homo sapien
gataccaatatacttcttcttggtg

SEQ ID NO: 3743378 - DNA, 25 bp, Homo sapien
cgtgagcaccttctgaagttcaggt

SEQ ID NO: 3743379 - DNA, 25 bp, Homo sapien
aatgacctgtcctctttcccgatgc

SEQ ID NO: 3743380 - DNA, 25 bp, Homo sapien
agaaactgagacgtcttaaggcagc

SEQ ID NO: 3743381 - DNA, 25 bp, Homo sapien
ttcccgatgctacttcattataagc

SEQ ID NO: 3743382 - DNA, 25 bp, Homo sapien
ctgcgctggacctgccctggcattc

SEQ ID NO: 3743383 - DNA, 25 bp, Homo sapien
tgccctggcattcctggagccgcgg

SEQ ID NO: 3743384 - DNA, 25 bp, Homo sapien
tccctgcgctggacctgccctggca

SEQ ID NO: 3743385 - DNA, 25 bp, Homo sapien
ccctggcattcctggagccgcggcc

SEQ ID NO: 3743386 - DNA, 25 bp, Homo sapien
cagttcccgtcttctccttaggtct

SEQ ID NO: 3743387 - DNA, 25 bp, Homo sapien
ttcctcacgcaaaactcagctctca

SEQ ID NO: 3743388 - DNA, 25 bp, Homo sapien
caggccttcctcacgcaaaactcag

SEQ ID NO: 3743389 - DNA, 25 bp, Homo sapien
gaaaaagcacccgtgttagtgtgaa

SEQ ID NO: 3743390 - DNA, 25 bp, Homo sapien
aagtcccggtgccggtccttcagct

SEQ ID NO: 3743391 - DNA, 25 bp, Homo sapien
ctgagatcacgtctgggaagtcccg

SEQ ID NO: 3743392 - DNA, 25 bp, Homo sapien
tacttcaattatatacgctcctgag

SEQ ID NO: 3743393 - DNA, 25 bp, Homo sapien
tgctggggtatcaggaattacttca

SEQ ID NO: 3743394 - DNA, 25 bp, Homo sapien
ttcccttttaatgacgtcgctgaca

SEQ ID NO: 3743395 - DNA, 25 bp, Homo sapien
tgcggaccaccatgttcagggtgct

SEQ ID NO: 3743396 - DNA, 25 bp, Homo sapien
tccattgatgctgattatgacgtcg

SEQ ID NO: 3743397 - DNA, 25 bp, Homo sapien
acatcattggcggagaccacggact

SEQ ID NO: 3743398 - DNA, 25 bp, Homo sapien
gtgtcctattccagcagcccagagt

SEQ ID NO: 3743399 - DNA, 25 bp, Homo sapien
ttctgttggccagggagtctccact

SEQ ID NO: 3743400 - DNA, 25 bp, Homo sapien
gcaacttcggccgtttgagaagcca

SEQ ID NO: 3743401 - DNA, 25 bp, Homo sapien
gactgtctaagcaagaatggcccaa

SEQ ID NO: 3743402 - DNA, 25 bp, Homo sapien
caaattgtaggcttgctcataggcc

SEQ ID NO: 3743403 - DNA, 25 bp, Homo sapien
tagaacctggacatgtcagtccaat

SEQ ID NO: 3743404 - DNA, 25 bp, Homo sapien
tgtccatgacctcagggaactgttc

SEQ ID NO: 3743405 - DNA, 25 bp, Homo sapien
aattcaaagcacacatagcctgtat

SEQ ID NO: 3743406 - DNA, 25 bp, Homo sapien
gaacggctaaatcatttgtgcattg

SEQ ID NO: 3743407 - DNA, 25 bp, Homo sapien
taatctaatggcgtcttggaacggc

SEQ ID NO: 3743408 - DNA, 25 bp, Homo sapien
cacagtttggtttgcctggcgccat

SEQ ID NO: 3743409 - DNA, 25 bp, Homo sapien
tgggactagcagaatcacagtttgg

SEQ ID NO: 3743410 - DNA, 25 bp, Homo sapien
actggcttctagcttcccgtgctcc

SEQ ID NO: 3743411 - DNA, 25 bp, Homo sapien
tcactggcttctagcttcccgtgct

SEQ ID NO: 3743412 - DNA, 25 bp, Homo sapien
tccatctggatttggtaaacaggtt

SEQ ID NO: 3743413 - DNA, 25 bp, Homo sapien
ctcactggcttctagcttcccgtgc

SEQ ID NO: 3743414 - DNA, 25 bp, Homo sapien
catacaatggagcagctgaatcctc

SEQ ID NO: 3743415 - DNA, 25 bp, Homo sapien
gaggctgattgcagtttctcctagc

SEQ ID NO: 3743416 - DNA, 25 bp, Homo sapien
gcaactttgctgtcttatgtaggaa

SEQ ID NO: 3743417 - DNA, 25 bp, Homo sapien
ggaatagacatgtagctcacagggt

SEQ ID NO: 3743418 - DNA, 25 bp, Homo sapien
agatgctagttttgttgcatcctca

SEQ ID NO: 3743419 - DNA, 25 bp, Homo sapien
catgttggcttccttcacgttgctg

SEQ ID NO: 3743420 - DNA, 25 bp, Homo sapien
gaatgctggttgctgcatgttggct

SEQ ID NO: 3743421 - DNA, 25 bp, Homo sapien
agaggagaatgctggttgctgcatg

SEQ ID NO: 3743422 - DNA, 25 bp, Homo sapien
tttcctccttgtgcctaaaagcata

SEQ ID NO: 3743423 - DNA, 25 bp, Homo sapien
ttcttggtaaatccacatgttccct

SEQ ID NO: 3743424 - DNA, 25 bp, Homo sapien
ttattcttggtaaatccacatgttc

SEQ ID NO: 3743425 - DNA, 25 bp, Homo sapien
ctttcctccttgtgcctaaaagcat

SEQ ID NO: 3743426 - DNA, 25 bp, Homo sapien
ctagcatatgtctaactccatattc

SEQ ID NO: 3743427 - DNA, 25 bp, Homo sapien
cttctctagcatatgtctaactcca

SEQ ID NO: 3743428 - DNA, 25 bp, Homo sapien
tctctagcatatgtctaactccata

SEQ ID NO: 3743429 - DNA, 25 bp, Homo sapien
ctctagcatatgtctaactccatat

SEQ ID NO: 3743430 - DNA, 25 bp, Homo sapien
ctgcttcaggtagaataacggcatg

SEQ ID NO: 3743431 - DNA, 25 bp, Homo sapien
tagaataacggcatggaagaacagc

SEQ ID NO: 3743432 - DNA, 25 bp, Homo sapien
aacagcagccaaagcgggagggctt

SEQ ID NO: 3743433 - DNA, 25 bp, Homo sapien
gagggcttggcagcccatgttggga

SEQ ID NO: 3743434 - DNA, 25 bp, Homo sapien
ctgggagtccctgtctgaggaggca

SEQ ID NO: 3743435 - DNA, 25 bp, Homo sapien
gtaaggttttggtagcacagttcct

SEQ ID NO: 3743436 - DNA, 25 bp, Homo sapien
aggaactgtgctaccaaaaccttac

SEQ ID NO: 3743437 - DNA, 25 bp, Homo sapien
gctgatgccactggattggcaatca

SEQ ID NO: 3743438 - DNA, 25 bp, Homo sapien
ctgatgccactggattggcaatcaa

SEQ ID NO: 3743439 - DNA, 25 bp, Homo sapien
tgctgatgccactggattggcaatc

SEQ ID NO: 3743440 - DNA, 25 bp, Homo sapien
cagagcatgggttccacagccttcc

SEQ ID NO: 3743441 - DNA, 25 bp, Homo sapien
gctgagtcgcaggtgtaccttggac

SEQ ID NO: 3743442 - DNA, 25 bp, Homo sapien
ggtgtaccttggacagtgcttctct

SEQ ID NO: 3743443 - DNA, 25 bp, Homo sapien
cttcttgctgagtcgcaggtgtacc

SEQ ID NO: 3743444 - DNA, 25 bp, Homo sapien
tccacgagttgcacagcaatccagt

SEQ ID NO: 3743445 - DNA, 25 bp, Homo sapien
gccccacacgccttcaaaatacacc

SEQ ID NO: 3743446 - DNA, 25 bp, Homo sapien
aatacacctcgactcgtcctgaaca

SEQ ID NO: 3743447 - DNA, 25 bp, Homo sapien
ttccagaaccttccacgagttgcac

SEQ ID NO: 3743448 - DNA, 25 bp, Homo sapien
cttctcatcccacaggtcatcgcac

SEQ ID NO: 3743449 - DNA, 25 bp, Homo sapien
tcatcccacaggtcatcgcacacca

SEQ ID NO: 3743450 - DNA, 25 bp, Homo sapien
tctcatcccacaggtcatcgcacac

SEQ ID NO: 3743451 - DNA, 25 bp, Homo sapien
catcccacaggtcatcgcacaccat

SEQ ID NO: 3743452 - DNA, 25 bp, Homo sapien
tgggagcactcctccaggtagtcct

SEQ ID NO: 3743453 - DNA, 25 bp, Homo sapien
tcaatcccggaacactgcacatcgt

SEQ ID NO: 3743454 - DNA, 25 bp, Homo sapien
cccacagttgtgggtggaccagcca

SEQ ID NO: 3743455 - DNA, 25 bp, Homo sapien
catcgtccagaagaatggggccgga

SEQ ID NO: 3743456 - DNA, 25 bp, Homo sapien
atgaaaaaaatggatgtgggtcctg

SEQ ID NO: 3743457 - DNA, 25 bp, Homo sapien
agcagttccacaaagccagccagct

SEQ ID NO: 3743458 - DNA, 25 bp, Homo sapien
gaatacctacacgtgaagaaaactc

SEQ ID NO: 3743459 - DNA, 25 bp, Homo sapien
gcgctgctcccaggttatgaggctg

SEQ ID NO: 3743460 - DNA, 25 bp, Homo sapien
gggtttgactctgggaatcatgctc

SEQ ID NO: 3743461 - DNA, 25 bp, Homo sapien
tccacaaagccagccagtagagatg

SEQ ID NO: 3743462 - DNA, 25 bp, Homo sapien
gtgaaaaaataagtggtgctgaagg

SEQ ID NO: 3743463 - DNA, 25 bp, Homo sapien
tggatgcatacacctgcctgcaggc

SEQ ID NO: 3743464 - DNA, 25 bp, Homo sapien
gaacctgaggccagctctaaccagt

SEQ ID NO: 3743465 - DNA, 25 bp, Homo sapien
accataaagctaaaggaagaaggag

SEQ ID NO: 3743466 - DNA, 25 bp, Homo sapien
aggaagaaggagcttttaagtgaat

SEQ ID NO: 3743467 - DNA, 25 bp, Homo sapien
gagcctcagggattgatcagaaaaa

SEQ ID NO: 3743468 - DNA, 25 bp, Homo sapien
ggagcctcagggattgatcagaaaa

SEQ ID NO: 3743469 - DNA, 25 bp, Homo sapien
aagattgcaagcgctcattttcata

SEQ ID NO: 3743470 - DNA, 25 bp, Homo sapien
aaaagattgcaagcgctcattttca

SEQ ID NO: 3743471 - DNA, 25 bp, Homo sapien
gattgcaagcgctcattttcatact

SEQ ID NO: 3743472 - DNA, 25 bp, Homo sapien
caaaagattgcaagcgctcattttc

SEQ ID NO: 3743473 - DNA, 25 bp, Homo sapien
caccaggaaatggcgttaggatctc

SEQ ID NO: 3743474 - DNA, 25 bp, Homo sapien
caggaaatggcgttaggatctcagc

SEQ ID NO: 3743475 - DNA, 25 bp, Homo sapien
ccaggaaatggcgttaggatctcag

SEQ ID NO: 3743476 - DNA, 25 bp, Homo sapien
ggaaatggcgttaggatctcagcat

SEQ ID NO: 3743477 - DNA, 25 bp, Homo sapien
tttggggaaatacaaaaatactgca

SEQ ID NO: 3743478 - DNA, 25 bp, Homo sapien
ttggggaaatacaaaaatactgcat

SEQ ID NO: 3743479 - DNA, 25 bp, Homo sapien
atgccccgaacacctacctgagcca

SEQ ID NO: 3743480 - DNA, 25 bp, Homo sapien
ggcacaccacgtcagcttcattcat

SEQ ID NO: 3743481 - DNA, 25 bp, Homo sapien
attcatgtcccgctggtcgtcgcaa

SEQ ID NO: 3743482 - DNA, 25 bp, Homo sapien
cattcactagttgcaattgtggcca

SEQ ID NO: 3743483 - DNA, 25 bp, Homo sapien
cagccggcatgaggacattgtccca

SEQ ID NO: 3743484 - DNA, 25 bp, Homo sapien
gtagaaattcgcctctgccttcgcc

SEQ ID NO: 3743485 - DNA, 25 bp, Homo sapien
tgcgcagatgatgctggcatcttct

SEQ ID NO: 3743486 - DNA, 25 bp, Homo sapien
cttcgccaaattgggcctcagcagg

SEQ ID NO: 3743487 - DNA, 25 bp, Homo sapien
tcaattacataggtggaagcactgc

SEQ ID NO: 3743488 - DNA, 25 bp, Homo sapien
aattacataggtggaagcactgcca

SEQ ID NO: 3743489 - DNA, 25 bp, Homo sapien
agtggagatgtagtgagcggcattg

SEQ ID NO: 3743490 - DNA, 25 bp, Homo sapien
gagatgtagtgagcggcattgtgga

SEQ ID NO: 3743491 - DNA, 25 bp, Homo sapien
ttgtctcttagttcaccacagtgac

SEQ ID NO: 3743492 - DNA, 25 bp, Homo sapien
acctttgtctcttagttcaccacag

SEQ ID NO: 3743493 - DNA, 25 bp, Homo sapien
aacctttgtctcttagttcaccaca

SEQ ID NO: 3743494 - DNA, 25 bp, Homo sapien
ctttgtctcttagttcaccacagtg

SEQ ID NO: 3743495 - DNA, 25 bp, Homo sapien
tctctacttcctgtttggtcaccat

SEQ ID NO: 3743496 - DNA, 25 bp, Homo sapien
tgtccataaggaacattgacagagg

SEQ ID NO: 3743497 - DNA, 25 bp, Homo sapien
aatgtccataaggaacattgacaga

SEQ ID NO: 3743498 - DNA, 25 bp, Homo sapien
gacttgggtagatgctccccctctt

SEQ ID NO: 3743499 - DNA, 25 bp, Homo sapien
tccataaggaacattgacagaggca

SEQ ID NO: 3743500 - DNA, 25 bp, Homo sapien
ctgacgatgccgaatgtgcagcagt

SEQ ID NO: 3743501 - DNA, 25 bp, Homo sapien
cgatgccgaatgtgcagcagttgta

SEQ ID NO: 3743502 - DNA, 25 bp, Homo sapien
gacgatgccgaatgtgcagcagttg

SEQ ID NO: 3743503 - DNA, 25 bp, Homo sapien
tgccgaatgtgcagcagttgtagga

SEQ ID NO: 3743504 - DNA, 25 bp, Homo sapien
ggcagaggagctggtagtgtcctac

SEQ ID NO: 3743505 - DNA, 25 bp, Homo sapien
atggcagaggagctggtagtgtcct

SEQ ID NO: 3743506 - DNA, 25 bp, Homo sapien
tggcagaggagctggtagtgtccta

SEQ ID NO: 3743507 - DNA, 25 bp, Homo sapien
ctgatgatatggttgggtggttaac

SEQ ID NO: 3743508 - DNA, 25 bp, Homo sapien
tgatgatatggttgggtggttaaca

SEQ ID NO: 3743509 - DNA, 25 bp, Homo sapien
gatgatatggttgggtggttaacat

SEQ ID NO: 3743510 - DNA, 25 bp, Homo sapien
tgatatggttgggtggttaacatct

SEQ ID NO: 3743511 - DNA, 25 bp, Homo sapien
tgctagggtagttggtaacttttca

SEQ ID NO: 3743512 - DNA, 25 bp, Homo sapien
gcacgttggccctacggctggcaga

SEQ ID NO: 3743513 - DNA, 25 bp, Homo sapien
tggccctacggctggcagatgctga

SEQ ID NO: 3743514 - DNA, 25 bp, Homo sapien
ggcagatgctgagtcagccacaggt

SEQ ID NO: 3743515 - DNA, 25 bp, Homo sapien
gctgggcccaggcacgttggcccta

SEQ ID NO: 3743516 - DNA, 25 bp, Homo sapien
tatggccagtgaagtctccgaagtg

SEQ ID NO: 3743517 - DNA, 25 bp, Homo sapien
cacaggggttatggccagtgaagtc

SEQ ID NO: 3743518 - DNA, 25 bp, Homo sapien
agtgaagtctccgaagtgaccccaa

SEQ ID NO: 3743519 - DNA, 25 bp, Homo sapien
gggttatggccagtgaagtctccga

SEQ ID NO: 3743520 - DNA, 25 bp, Homo sapien
gcttggactgatgctggggacctca

SEQ ID NO: 3743521 - DNA, 25 bp, Homo sapien
ctagcttggactgatgctggggacc

SEQ ID NO: 3743522 - DNA, 25 bp, Homo sapien
ctcagcatccatatctcctggtttc

SEQ ID NO: 3743523 - DNA, 25 bp, Homo sapien
gcatccatatctcctggtttcccag

SEQ ID NO: 3743524 - DNA, 25 bp, Homo sapien
caagaacctccacgcggcctgagca

SEQ ID NO: 3743525 - DNA, 25 bp, Homo sapien
ggccagattccagaggtcgtcacgc

SEQ ID NO: 3743526 - DNA, 25 bp, Homo sapien
cgtcacgcaacacacggtcctccat

SEQ ID NO: 3743527 - DNA, 25 bp, Homo sapien
tgccccgaagtgagcccctgttggg

SEQ ID NO: 3743528 - DNA, 25 bp, Homo sapien
agcccgtccacactgtagctggcgg

SEQ ID NO: 3743529 - DNA, 25 bp, Homo sapien
tgaacagatgacactggcatcctcc

SEQ ID NO: 3743530 - DNA, 25 bp, Homo sapien
cccatgcacgcactgccccaggtgg

SEQ ID NO: 3743531 - DNA, 25 bp, Homo sapien
acacactgcacgtcatccagcagga

SEQ ID NO: 3743532 - DNA, 25 bp, Homo sapien
gtgcccacagttgtgcctggcccgg

SEQ ID NO: 3743533 - DNA, 25 bp, Homo sapien
ccagtagtttctattagtgttggct

SEQ ID NO: 3743534 - DNA, 25 bp, Homo sapien
cctgtgacaatagtgaagtcctggg

SEQ ID NO: 3743535 - DNA, 25 bp, Homo sapien
tatttataatgtattgtccagtagt

SEQ ID NO: 3743536 - DNA, 25 bp, Homo sapien
gttggctgcctgtgacaatagtgaa

SEQ ID NO: 3743537 - DNA, 25 bp, Homo sapien
atgatggcgtggcagcttcagaatc

SEQ ID NO: 3743538 - DNA, 25 bp, Homo sapien
gtgggacctgatgaattgccagcac

SEQ ID NO: 3743539 - DNA, 25 bp, Homo sapien
tctgtggttggagtgggacctgatg

SEQ ID NO: 3743540 - DNA, 25 bp, Homo sapien
tggtgtgtatgatggcgtggcagct

SEQ ID NO: 3743541 - DNA, 25 bp, Homo sapien
tgtggtagttaatgacagtgcttga

SEQ ID NO: 3743542 - DNA, 25 bp, Homo sapien
ctgtggtagttaatgacagtgcttg

SEQ ID NO: 3743543 - DNA, 25 bp, Homo sapien
gtggtagttaatgacagtgcttgac

SEQ ID NO: 3743544 - DNA, 25 bp, Homo sapien
tctgtggtagttaatgacagtgctt

SEQ ID NO: 3743545 - DNA, 25 bp, Homo sapien
caggctctgttgtggctatggttgc

SEQ ID NO: 3743546 - DNA, 25 bp, Homo sapien
agggacacaggctctgttgtggcta

SEQ ID NO: 3743547 - DNA, 25 bp, Homo sapien
gctatggttgcagataacccagcac

SEQ ID NO: 3743548 - DNA, 25 bp, Homo sapien
catgggtgtggatggcagggacaca

SEQ ID NO: 3743549 - DNA, 25 bp, Homo sapien
ctggggaggcacaagaagtagggac

SEQ ID NO: 3743550 - DNA, 25 bp, Homo sapien
tggggaggcacaagaagtagggaca

SEQ ID NO: 3743551 - DNA, 25 bp, Homo sapien
ttccacacggcctgagcaccttcct

SEQ ID NO: 3743552 - DNA, 25 bp, Homo sapien
gtcccccacgtgccctggacgagaa

SEQ ID NO: 3743553 - DNA, 25 bp, Homo sapien
ctggacgagaacttccacacggcct

SEQ ID NO: 3743554 - DNA, 25 bp, Homo sapien
ccctggacgagaacttccacacggc

SEQ ID NO: 3743555 - DNA, 25 bp, Homo sapien
catgcattgacccagatggctctca

SEQ ID NO: 3743556 - DNA, 25 bp, Homo sapien
agcctgcccgaaagtgggcccctgt

SEQ ID NO: 3743557 - DNA, 25 bp, Homo sapien
cagtaagatcttcccagagcctgcc

SEQ ID NO: 3743558 - DNA, 25 bp, Homo sapien
ggcctggtccccacgcatgcattga

SEQ ID NO: 3743559 - DNA, 25 bp, Homo sapien
gcgagacctggtgaattgccagcac

SEQ ID NO: 3743560 - DNA, 25 bp, Homo sapien
gtatgatgaagtgacagcttcaggc

SEQ ID NO: 3743561 - DNA, 25 bp, Homo sapien
ttggagcgagacctggtgaattgcc

SEQ ID NO: 3743562 - DNA, 25 bp, Homo sapien
ctctgtggttggagcgagacctggt

SEQ ID NO: 3743563 - DNA, 25 bp, Homo sapien
agtgagctgagttcacgctgctgca

SEQ ID NO: 3743564 - DNA, 25 bp, Homo sapien
gcagtgagctgagttcacgctgctg

SEQ ID NO: 3743565 - DNA, 25 bp, Homo sapien
gttgcagtgagctgagttcacgctg

SEQ ID NO: 3743566 - DNA, 25 bp, Homo sapien
tgagctgagttcacgctgctgcact

SEQ ID NO: 3743567 - DNA, 25 bp, Homo sapien
gggcacagctaataacagtgcttga

SEQ ID NO: 3743568 - DNA, 25 bp, Homo sapien
gtggtgggcacagctaataacagtg

SEQ ID NO: 3743569 - DNA, 25 bp, Homo sapien
ggtgggcacagctaataacagtgct

SEQ ID NO: 3743570 - DNA, 25 bp, Homo sapien
tgggcacagctaataacagtgcttg

SEQ ID NO: 3743571 - DNA, 25 bp, Homo sapien
cagggtcatggctgtcgtggctatg

SEQ ID NO: 3743572 - DNA, 25 bp, Homo sapien
catggctgtcgtggctatggttgca

SEQ ID NO: 3743573 - DNA, 25 bp, Homo sapien
gctatggttgcagataatccatcac

SEQ ID NO: 3743574 - DNA, 25 bp, Homo sapien
ggcatgggtgtggatggcagggtca

SEQ ID NO: 3743575 - DNA, 25 bp, Homo sapien
caaaagtgggcccttatgcgggctg

SEQ ID NO: 3743576 - DNA, 25 bp, Homo sapien
agtgggcccttatgcgggctgccat

SEQ ID NO: 3743577 - DNA, 25 bp, Homo sapien
ctgaccaaaagtgggcccttatgcg

SEQ ID NO: 3743578 - DNA, 25 bp, Homo sapien
aaagtgggcccttatgcgggctgcc

SEQ ID NO: 3743579 - DNA, 25 bp, Homo sapien
tctcactgcccacatgctgaaagtc

SEQ ID NO: 3743580 - DNA, 25 bp, Homo sapien
tgcccacatgctgaaagtcatctag

SEQ ID NO: 3743581 - DNA, 25 bp, Homo sapien
gtccagctcctgttcacacactgcc

SEQ ID NO: 3743582 - DNA, 25 bp, Homo sapien
aaagtcatctagcaggatcttcctg

SEQ ID NO: 3743583 - DNA, 25 bp, Homo sapien
catctatatactctcatgtgtgagc

SEQ ID NO: 3743584 - DNA, 25 bp, Homo sapien
tactctcatgtgtgagctatctgca

SEQ ID NO: 3743585 - DNA, 25 bp, Homo sapien
gtgtgagctatctgcagcactgcca

SEQ ID NO: 3743586 - DNA, 25 bp, Homo sapien
tcatgtgtgagctatctgcagcact

SEQ ID NO: 3743587 - DNA, 25 bp, Homo sapien
tgttggagaagtgattgaagacttg

SEQ ID NO: 3743588 - DNA, 25 bp, Homo sapien
ggagaagtgattgaagacttggcac

SEQ ID NO: 3743589 - DNA, 25 bp, Homo sapien
ctgttggagaagtgattgaagactt

SEQ ID NO: 3743590 - DNA, 25 bp, Homo sapien
ttggagaagtgattgaagacttggc

SEQ ID NO: 3743591 - DNA, 25 bp, Homo sapien
tgccccaggagcagcaaatgactca

SEQ ID NO: 3743592 - DNA, 25 bp, Homo sapien
tgtgggttttgttgccccaggagca

SEQ ID NO: 3743593 - DNA, 25 bp, Homo sapien
gttgccccaggagcagcaaatgact

SEQ ID NO: 3743594 - DNA, 25 bp, Homo sapien
attgtgggttttgttgccccaggag

SEQ ID NO: 3743595 - DNA, 25 bp, Homo sapien
aggttatccaagttgctgggctgcc

SEQ ID NO: 3743596 - DNA, 25 bp, Homo sapien
gaggttatccaagttgctgggctgc

SEQ ID NO: 3743597 - DNA, 25 bp, Homo sapien
tggaattttagaagatgttggtgcc

SEQ ID NO: 3743598 - DNA, 25 bp, Homo sapien
gcctttgatataaaaacgctttctc

SEQ ID NO: 3743599 - DNA, 25 bp, Homo sapien
gtgccattcagcagcctcacctcca

SEQ ID NO: 3743600 - DNA, 25 bp, Homo sapien
tgccattcagcagcctcacctccat

SEQ ID NO: 3743601 - DNA, 25 bp, Homo sapien
tgtgccattcagcagcctcacctcc

SEQ ID NO: 3743602 - DNA, 25 bp, Homo sapien
ctgtgccattcagcagcctcacctc

SEQ ID NO: 3743603 - DNA, 25 bp, Homo sapien
agagcttgccccgaagtgggctgcc

SEQ ID NO: 3743604 - DNA, 25 bp, Homo sapien
gcggcctcggccaggttccagaagt

SEQ ID NO: 3743605 - DNA, 25 bp, Homo sapien
agctggcggcacacaacggcggcct

SEQ ID NO: 3743606 - DNA, 25 bp, Homo sapien
catggcctggccacattgcagctgg

SEQ ID NO: 3743607 - DNA, 25 bp, Homo sapien
ggcagagcagctgtggaatcagcac

SEQ ID NO: 3743608 - DNA, 25 bp, Homo sapien
tgtaggcagagcagctgtggaatca

SEQ ID NO: 3743609 - DNA, 25 bp, Homo sapien
taggcagagcagctgtggaatcagc

SEQ ID NO: 3743610 - DNA, 25 bp, Homo sapien
ctgtaggcagagcagctgtggaatc

SEQ ID NO: 3743611 - DNA, 25 bp, Homo sapien
ggtggtgcagaagacggtgggtgtt

SEQ ID NO: 3743612 - DNA, 25 bp, Homo sapien
ggtgggtgttgagccactgatatca

SEQ ID NO: 3743613 - DNA, 25 bp, Homo sapien
ggtgcagaagacggtgggtgttgag

SEQ ID NO: 3743614 - DNA, 25 bp, Homo sapien
cggtgggtgttgagccactgatatc

SEQ ID NO: 3743615 - DNA, 25 bp, Homo sapien
gggattcctaatcgctccagatgag

SEQ ID NO: 3743616 - DNA, 25 bp, Homo sapien
taatcgctccagatgagttggtaat

SEQ ID NO: 3743617 - DNA, 25 bp, Homo sapien
gccttgatttcccacacacaagtga

SEQ ID NO: 3743618 - DNA, 25 bp, Homo sapien
tggtaataatgccaccacaccgaga

SEQ ID NO: 3743619 - DNA, 25 bp, Homo sapien
aaaatattcattggtgcagtcaagg

SEQ ID NO: 3743620 - DNA, 25 bp, Homo sapien
tggaggaggagatgtaggtgtgttg

SEQ ID NO: 3743621 - DNA, 25 bp, Homo sapien
ttactgaggatggtggaccgtccag

SEQ ID NO: 3743622 - DNA, 25 bp, Homo sapien
ggtcctccccaatgactttactgag

SEQ ID NO: 3743623 - DNA, 25 bp, Homo sapien
tcctaggttgttgaagcttcggaaa

SEQ ID NO: 3743624 - DNA, 25 bp, Homo sapien
agttttatcctaggttgttgaagct

SEQ ID NO: 3743625 - DNA, 25 bp, Homo sapien
taggttgttgaagcttcggaaatac

SEQ ID NO: 3743626 - DNA, 25 bp, Homo sapien
ctttgggtgcagagtaataataagc

SEQ ID NO: 3743627 - DNA, 25 bp, Homo sapien
agatgtggggtctgcaacactgcct

SEQ ID NO: 3743628 - DNA, 25 bp, Homo sapien
tagatgtggggtctgcaacactgcc

SEQ ID NO: 3743629 - DNA, 25 bp, Homo sapien
tgattagatgtggggtctgcaacac

SEQ ID NO: 3743630 - DNA, 25 bp, Homo sapien
attagatgtggggtctgcaacactg

SEQ ID NO: 3743631 - DNA, 25 bp, Homo sapien
gttctgggtgttgctgtcgggatgg

SEQ ID NO: 3743632 - DNA, 25 bp, Homo sapien
ctgctcttgctgttactgttctggg

SEQ ID NO: 3743633 - DNA, 25 bp, Homo sapien
ttactgttctgggtgttgctgtcgg

SEQ ID NO: 3743634 - DNA, 25 bp, Homo sapien
actgttctgggtgttgctgtcggga

SEQ ID NO: 3743635 - DNA, 25 bp, Homo sapien
gcagttggtccagtttctgtgcatg

SEQ ID NO: 3743636 - DNA, 25 bp, Homo sapien
ccatttgcaaatagatgcactattt

SEQ ID NO: 3743637 - DNA, 25 bp, Homo sapien
tcccaaaagttttgaatgtctctaa

SEQ ID NO: 3743638 - DNA, 25 bp, Homo sapien
tgaagcagatacaggtgaggataca

SEQ ID NO: 3743639 - DNA, 25 bp, Homo sapien
gaaagtacttgtaagctgctcaagc

SEQ ID NO: 3743640 - DNA, 25 bp, Homo sapien
tgtaagctgctcaagctttgatgac

SEQ ID NO: 3743641 - DNA, 25 bp, Homo sapien
tggaaagatagaaccccactagaaa

SEQ ID NO: 3743642 - DNA, 25 bp, Homo sapien
cagtactggtcataaggtggaaaga

SEQ ID NO: 3743643 - DNA, 25 bp, Homo sapien
agagagagatctggtgactgttgtc

SEQ ID NO: 3743644 - DNA, 25 bp, Homo sapien
gagagagatctggtgactgttgtcc

SEQ ID NO: 3743645 - DNA, 25 bp, Homo sapien
agagagatctggtgactgttgtcct

SEQ ID NO: 3743646 - DNA, 25 bp, Homo sapien
gcagagagagatctggtgactgttg

SEQ ID NO: 3743647 - DNA, 25 bp, Homo sapien
ggcacacaacctcagcttcgttcag

SEQ ID NO: 3743648 - DNA, 25 bp, Homo sapien
ggagaatctccacgcgtcctgagca

SEQ ID NO: 3743649 - DNA, 25 bp, Homo sapien
ccctggtggagaatctccacgcgtc

SEQ ID NO: 3743650 - DNA, 25 bp, Homo sapien
ttccaagggcagacatggctcgacc

SEQ ID NO: 3743651 - DNA, 25 bp, Homo sapien
cagcccgagtgggtgcactggccca

SEQ ID NO: 3743652 - DNA, 25 bp, Homo sapien
agcccgagtgggtgcactggcccag

SEQ ID NO: 3743653 - DNA, 25 bp, Homo sapien
ggtgcactggcccaggtagcgctcc

SEQ ID NO: 3743654 - DNA, 25 bp, Homo sapien
cactggcccaggtagcgctccacac

SEQ ID NO: 3743655 - DNA, 25 bp, Homo sapien
tcgtggtggccagttgtgctctgac

SEQ ID NO: 3743656 - DNA, 25 bp, Homo sapien
tggcatcctcgtggtggccagttgt

SEQ ID NO: 3743657 - DNA, 25 bp, Homo sapien
gcagatgacactggcatcctcgtgg

SEQ ID NO: 3743658 - DNA, 25 bp, Homo sapien
acactggcatcctcgtggtggccag

SEQ ID NO: 3743659 - DNA, 25 bp, Homo sapien
gactctgaacactggcagggagatt

SEQ ID NO: 3743660 - DNA, 25 bp, Homo sapien
tggcagggagattttgaagcactct

SEQ ID NO: 3743661 - DNA, 25 bp, Homo sapien
gttccaggctgactctgaacactgg

SEQ ID NO: 3743662 - DNA, 25 bp, Homo sapien
aagcactctaggactggcagtgccc

SEQ ID NO: 3743663 - DNA, 25 bp, Homo sapien
ctttggtaatacttgctaccaaatt

SEQ ID NO: 3743664 - DNA, 25 bp, Homo sapien
atacttgctaccaaattagaaaacg

SEQ ID NO: 3743665 - DNA, 25 bp, Homo sapien
ttggtaatacttgctaccaaattag

SEQ ID NO: 3743666 - DNA, 25 bp, Homo sapien
cttgctaccaaattagaaaacgagg

SEQ ID NO: 3743667 - DNA, 25 bp, Homo sapien
ggactgttagcaagtgattcttcag

SEQ ID NO: 3743668 - DNA, 25 bp, Homo sapien
ctggactgttagcaagtgattcttc

SEQ ID NO: 3743669 - DNA, 25 bp, Homo sapien
tggactgttagcaagtgattcttca

SEQ ID NO: 3743670 - DNA, 25 bp, Homo sapien
accccgcctgggtccaccagtgcca

SEQ ID NO: 3743671 - DNA, 25 bp, Homo sapien
aagaccccgcctgggtccaccagtg

SEQ ID NO: 3743672 - DNA, 25 bp, Homo sapien
cagagacacagcatgtgatttccca

SEQ ID NO: 3743673 - DNA, 25 bp, Homo sapien
ctgcagacagagacacagcatgtga

SEQ ID NO: 3743674 - DNA, 25 bp, Homo sapien
ccaagcaccggcctgagccgcccat

SEQ ID NO: 3743675 - DNA, 25 bp, Homo sapien
tggtggagaatctccacgcgcccca

SEQ ID NO: 3743676 - DNA, 25 bp, Homo sapien
gtggagaatctccacgcgccccaag

SEQ ID NO: 3743677 - DNA, 25 bp, Homo sapien
acgcgccccaagcaccggcctgagc

SEQ ID NO: 3743678 - DNA, 25 bp, Homo sapien
ggtcccacaggtcgtcgcacacggt

SEQ ID NO: 3743679 - DNA, 25 bp, Homo sapien
attcaggtcccacaggtcgtcgcac

SEQ ID NO: 3743680 - DNA, 25 bp, Homo sapien
gtcccacaggtcgtcgcacacggtg

SEQ ID NO: 3743681 - DNA, 25 bp, Homo sapien
ttcattcaggtcccacaggtcgtcg

SEQ ID NO: 3743682 - DNA, 25 bp, Homo sapien
cacagttgtgctctgaccagcccaa

SEQ ID NO: 3743683 - DNA, 25 bp, Homo sapien
tacactggcccaggtagtgctctac

SEQ ID NO: 3743684 - DNA, 25 bp, Homo sapien
agtgctctacccgagtgcactggag

SEQ ID NO: 3743685 - DNA, 25 bp, Homo sapien
tgagcctgggccaaagtgggcctcg

SEQ ID NO: 3743686 - DNA, 25 bp, Homo sapien
tcactggctgagaggggatatgtta

SEQ ID NO: 3743687 - DNA, 25 bp, Homo sapien
cactggctgagaggggatatgttac

SEQ ID NO: 3743688 - DNA, 25 bp, Homo sapien
gtgtgggtggaggtaggtcttccgc

SEQ ID NO: 3743689 - DNA, 25 bp, Homo sapien
ctggaggtgtgggtggaggtaggtc

SEQ ID NO: 3743690 - DNA, 25 bp, Homo sapien
gtgggtggaggtaggtcttccgcat

SEQ ID NO: 3743691 - DNA, 25 bp, Homo sapien
gaggtgtgggtggaggtaggtcttc

SEQ ID NO: 3743692 - DNA, 25 bp, Homo sapien
ttttatgtgatcctgagaagctgta

SEQ ID NO: 3743693 - DNA, 25 bp, Homo sapien
tttatgtgatcctgagaagctgtag

SEQ ID NO: 3743694 - DNA, 25 bp, Homo sapien
tgtgatcctgagaagctgtagaaga

SEQ ID NO: 3743695 - DNA, 25 bp, Homo sapien
tatgtgatcctgagaagctgtagaa

SEQ ID NO: 3743696 - DNA, 25 bp, Homo sapien
agaaatgacccctccacaagagtta

SEQ ID NO: 3743697 - DNA, 25 bp, Homo sapien
cacactggatatctgttgggtagtt

SEQ ID NO: 3743698 - DNA, 25 bp, Homo sapien
ggaattatgagttctatgtgaaatt

SEQ ID NO: 3743699 - DNA, 25 bp, Homo sapien
aattttgcacccatgtggatctccc

SEQ ID NO: 3743700 - DNA, 25 bp, Homo sapien
tggatctcccaaacacactggatat

SEQ ID NO: 3743701 - DNA, 25 bp, Homo sapien
agatgacaaagacgtctatctttgg

SEQ ID NO: 3743702 - DNA, 25 bp, Homo sapien
tgacaaagacgtctatctttggact

SEQ ID NO: 3743703 - DNA, 25 bp, Homo sapien
gatgacaaagacgtctatctttgga

SEQ ID NO: 3743704 - DNA, 25 bp, Homo sapien
gacaaagacgtctatctttggactg

SEQ ID NO: 3743705 - DNA, 25 bp, Homo sapien
tacagacccacatattggtgaacag

SEQ ID NO: 3743706 - DNA, 25 bp, Homo sapien
tggaacgcaattcagtgcatgcctg

SEQ ID NO: 3743707 - DNA, 25 bp, Homo sapien
taacacgatgtgtgtcatgcacaag

SEQ ID NO: 3743708 - DNA, 25 bp, Homo sapien
gaagggcttcatgcagactctttta

SEQ ID NO: 3743709 - DNA, 25 bp, Homo sapien
caccactgtcatgatgtgtgaggag

SEQ ID NO: 3743710 - DNA, 25 bp, Homo sapien
tttcaacggagtcatagggacatcc

SEQ ID NO: 3743711 - DNA, 25 bp, Homo sapien
tcctgggaccattgaagatttcaac

SEQ ID NO: 3743712 - DNA, 25 bp, Homo sapien
gactccctttcaccctgaggaatgg

SEQ ID NO: 3743713 - DNA, 25 bp, Homo sapien
gacaacattggcatcctcatggtgg

SEQ ID NO: 3743714 - DNA, 25 bp, Homo sapien
ggagcccttgtgtaggacctcccca

SEQ ID NO: 3743715 - DNA, 25 bp, Homo sapien
gaatgttgtctagaaggatgtctcc

SEQ ID NO: 3743716 - DNA, 25 bp, Homo sapien
caaggtggttctcacttcctgaaca

SEQ ID NO: 3743717 - DNA, 25 bp, Homo sapien
tgggtgaaagatcagaaggaatcta

SEQ ID NO: 3743718 - DNA, 25 bp, Homo sapien
gaggaatcacatctggagcccagtc

SEQ ID NO: 3743719 - DNA, 25 bp, Homo sapien
gtggaggaatcacatctggagccca

SEQ ID NO: 3743720 - DNA, 25 bp, Homo sapien
gtggtataggggctggaggaatgat

SEQ ID NO: 3743721 - DNA, 25 bp, Homo sapien
tggtataggggctggaggaatgata

SEQ ID NO: 3743722 - DNA, 25 bp, Homo sapien
ggtataggggctggaggaatgatat

SEQ ID NO: 3743723 - DNA, 25 bp, Homo sapien
gagtgatcatgctggtgtagacaca

SEQ ID NO: 3743724 - DNA, 25 bp, Homo sapien
tccagatgtagaatccagaattcca

SEQ ID NO: 3743725 - DNA, 25 bp, Homo sapien
tttcactaggcttgcacgttgcatt

SEQ ID NO: 3743726 - DNA, 25 bp, Homo sapien
tggtttggctggtgtgagtgactgt

SEQ ID NO: 3743727 - DNA, 25 bp, Homo sapien
gtggaatttctcagccacgtgtatc

SEQ ID NO: 3743728 - DNA, 25 bp, Homo sapien
tcaggcttgggatcatcagttctat

SEQ ID NO: 3743729 - DNA, 25 bp, Homo sapien
acccagacgcactccaagttggtgg

SEQ ID NO: 3743730 - DNA, 25 bp, Homo sapien
ttctcagccacgtgtatcacccaga

SEQ ID NO: 3743731 - DNA, 25 bp, Homo sapien
gatttatcccacaaaagcctacctc

SEQ ID NO: 3743732 - DNA, 25 bp, Homo sapien
gtatggattcaaatctaaactggcc

SEQ ID NO: 3743733 - DNA, 25 bp, Homo sapien
cctcattgaggaaagtatggattca

SEQ ID NO: 3743734 - DNA, 25 bp, Homo sapien
cagagcaattctcgcctaaaatgtg

SEQ ID NO: 3743735 - DNA, 25 bp, Homo sapien
tcatgtgtgggttgccccagctaca

SEQ ID NO: 3743736 - DNA, 25 bp, Homo sapien
tctcttattgcacaggaagttgagc

SEQ ID NO: 3743737 - DNA, 25 bp, Homo sapien
ccagctacagctcaacgggctggtg

SEQ ID NO: 3743738 - DNA, 25 bp, Homo sapien
agctcaacgggctggtgtcagggag

SEQ ID NO: 3743739 - DNA, 25 bp, Homo sapien
agaacaggaagcagatttgtgtagc

SEQ ID NO: 3743740 - DNA, 25 bp, Homo sapien
gaatgaagatcagaccatgaggatg

SEQ ID NO: 3743741 - DNA, 25 bp, Homo sapien
tggtaaggacgtgatagaaattctt

SEQ ID NO: 3743742 - DNA, 25 bp, Homo sapien
tgaagaagaacagatctgggttcag

SEQ ID NO: 3743743 - DNA, 25 bp, Homo sapien
ttgaaattgtccattgagtcattgg

SEQ ID NO: 3743744 - DNA, 25 bp, Homo sapien
agagatctcgtctttcttggttggc

SEQ ID NO: 3743745 - DNA, 25 bp, Homo sapien
actctgtgagggtagagatctcgtc

SEQ ID NO: 3743746 - DNA, 25 bp, Homo sapien
gagtcattggtttatctgagtacca

SEQ ID NO: 3743747 - DNA, 25 bp, Homo sapien
gataaagtcgtaaggacacccatag

SEQ ID NO: 3743748 - DNA, 25 bp, Homo sapien
gaggcagcctgttgtccatcgaaca

SEQ ID NO: 3743749 - DNA, 25 bp, Homo sapien
aaaccctgtgttggtgatcatggcg

SEQ ID NO: 3743750 - DNA, 25 bp, Homo sapien
agaaaggaacgtgagctctgtccca

SEQ ID NO: 3743751 - DNA, 25 bp, Homo sapien
acatagaaggtgtgggtagctcatc

SEQ ID NO: 3743752 - DNA, 25 bp, Homo sapien
gtgtgggtagctcatctctcttcag

SEQ ID NO: 3743753 - DNA, 25 bp, Homo sapien
aagacatagaaggtgtgggtagctc

SEQ ID NO: 3743754 - DNA, 25 bp, Homo sapien
gaaggtgtgggtagctcatctctct

SEQ ID NO: 3743755 - DNA, 25 bp, Homo sapien
gaggttgggtaactcacagcagcag

SEQ ID NO: 3743756 - DNA, 25 bp, Homo sapien
ctgaggttgggtaactcacagcagc

SEQ ID NO: 3743757 - DNA, 25 bp, Homo sapien
ttgggtaactcacagcagcagatgc

SEQ ID NO: 3743758 - DNA, 25 bp, Homo sapien
gggtaactcacagcagcagatgctc

SEQ ID NO: 3743759 - DNA, 25 bp, Homo sapien
gagatgaaatcttgctctgctgctc

SEQ ID NO: 3743760 - DNA, 25 bp, Homo sapien
attacagacatgccccaccaagccc

SEQ ID NO: 3743761 - DNA, 25 bp, Homo sapien
tcagcccacctcagcttccgaaagt

SEQ ID NO: 3743762 - DNA, 25 bp, Homo sapien
agatgaaatcttgctctgctgctca

SEQ ID NO: 3743763 - DNA, 25 bp, Homo sapien
catgtgggcacctctgttggctttg

SEQ ID NO: 3743764 - DNA, 25 bp, Homo sapien
ggcacctctgttggctttggaaaag

SEQ ID NO: 3743765 - DNA, 25 bp, Homo sapien
gtgggcacctctgttggctttggaa

SEQ ID NO: 3743766 - DNA, 25 bp, Homo sapien
tgtccatgtgggcacctctgttggc

SEQ ID NO: 3743767 - DNA, 25 bp, Homo sapien
ttggcatggtagacctcgactcggc

SEQ ID NO: 3743768 - DNA, 25 bp, Homo sapien
tgggcatcctctatagaccagctgt

SEQ ID NO: 3743769 - DNA, 25 bp, Homo sapien
agttgtgggtgtaccaacctctgtg

SEQ ID NO: 3743770 - DNA, 25 bp, Homo sapien
cagttgacgtcatcaaggaggatgc

SEQ ID NO: 3743771 - DNA, 25 bp, Homo sapien
atgtattgaacagctggtcatattt

SEQ ID NO: 3743772 - DNA, 25 bp, Homo sapien
tgtattgaacagctggtcatatttt

SEQ ID NO: 3743773 - DNA, 25 bp, Homo sapien
catgtattgaacagctggtcatatt

SEQ ID NO: 3743774 - DNA, 25 bp, Homo sapien
gtattgaacagctggtcatattttc

SEQ ID NO: 3743775 - DNA, 25 bp, Homo sapien
aggcccctgtagaaggacctgcagg

SEQ ID NO: 3743776 - DNA, 25 bp, Homo sapien
cctgcgcccaaagcagatgaagctg

SEQ ID NO: 3743777 - DNA, 25 bp, Homo sapien
cccgaggcccctgtagaaggacctg

SEQ ID NO: 3743778 - DNA, 25 bp, Homo sapien
tgcgcccaaagcagatgaagctgac

SEQ ID NO: 3743779 - DNA, 25 bp, Homo sapien
catttctgtcaatgctggggcaact

SEQ ID NO: 3743780 - DNA, 25 bp, Homo sapien
tctgtcaatgctggggcaacttcaa

SEQ ID NO: 3743781 - DNA, 25 bp, Homo sapien
ccatttctgtcaatgctggggcaac

SEQ ID NO: 3743782 - DNA, 25 bp, Homo sapien
tttctgtcaatgctggggcaacttc

SEQ ID NO: 3743783 - DNA, 25 bp, Homo sapien
tctcatctgccaacttgacaatggg

SEQ ID NO: 3743784 - DNA, 25 bp, Homo sapien
ctctcatctgccaacttgacaatgg

SEQ ID NO: 3743785 - DNA, 25 bp, Homo sapien
tctgccaacttgacaatgggcaagg

SEQ ID NO: 3743786 - DNA, 25 bp, Homo sapien
tcatctgccaacttgacaatgggca

SEQ ID NO: 3743787 - DNA, 25 bp, Homo sapien
ccattgtggtagacttcaatgtgcc

SEQ ID NO: 3743788 - DNA, 25 bp, Homo sapien
acagtcccccatgtgccattgtggt

SEQ ID NO: 3743789 - DNA, 25 bp, Homo sapien
gccccagaggttgtcgcacacagtc

SEQ ID NO: 3743790 - DNA, 25 bp, Homo sapien
gggcagcgttgacgccccagaggtt

SEQ ID NO: 3743791 - DNA, 25 bp, Homo sapien
tgtggtctccatgccttgacactgc

SEQ ID NO: 3743792 - DNA, 25 bp, Homo sapien
gcccatcgtccaggaggatgtgtcc

SEQ ID NO: 3743793 - DNA, 25 bp, Homo sapien
ggtcccccactgagagtcatggctc

SEQ ID NO: 3743794 - DNA, 25 bp, Homo sapien
atggacagacccagatagccacgct

SEQ ID NO: 3743795 - DNA, 25 bp, Homo sapien
tgaggtggttagagcagtattcaaa

SEQ ID NO: 3743796 - DNA, 25 bp, Homo sapien
ttttgaggtggttagagcagtattc

SEQ ID NO: 3743797 - DNA, 25 bp, Homo sapien
tttgaggtggttagagcagtattca

SEQ ID NO: 3743798 - DNA, 25 bp, Homo sapien
cttttgaggtggttagagcagtatt

SEQ ID NO: 3743799 - DNA, 25 bp, Homo sapien
tggaggtcacgggagtggagatgga

SEQ ID NO: 3743800 - DNA, 25 bp, Homo sapien
gcttctgctgagattgaagatgcat

SEQ ID NO: 3743801 - DNA, 25 bp, Homo sapien
tgtccgcttctgctgagattgaaga

SEQ ID NO: 3743802 - DNA, 25 bp, Homo sapien
agggcgtgtccgcttctgctgagat

SEQ ID NO: 3743803 - DNA, 25 bp, Homo sapien
gcgtgtccgcttctgctgagattga

SEQ ID NO: 3743804 - DNA, 25 bp, Homo sapien
ctggacaggatcgcagggtgccact

SEQ ID NO: 3743805 - DNA, 25 bp, Homo sapien
ggacaggatcgcagggtgccacttg

SEQ ID NO: 3743806 - DNA, 25 bp, Homo sapien
tggacaggatcgcagggtgccactt

SEQ ID NO: 3743807 - DNA, 25 bp, Homo sapien
gaagaaactcgaggtcaggtttcca

SEQ ID NO: 3743808 - DNA, 25 bp, Homo sapien
catggtgagagaagcggtcaggtgg

SEQ ID NO: 3743809 - DNA, 25 bp, Homo sapien
ctgcatggtgagagaagcggtcagg

SEQ ID NO: 3743810 - DNA, 25 bp, Homo sapien
agaaactcgaggtcaggtttccatc

SEQ ID NO: 3743811 - DNA, 25 bp, Homo sapien
gtcgcacaccgtgccccacacgccc

SEQ ID NO: 3743812 - DNA, 25 bp, Homo sapien
gttccagtggtcgtcgcacaccgtg

SEQ ID NO: 3743813 - DNA, 25 bp, Homo sapien
gccccacacgccctggtgccgcagc

SEQ ID NO: 3743814 - DNA, 25 bp, Homo sapien
ctggtgccgcagctctacccggccc

SEQ ID NO: 3743815 - DNA, 25 bp, Homo sapien
ccagagcacggccgcaacccaggag

SEQ ID NO: 3743816 - DNA, 25 bp, Homo sapien
agagcacggccgcaacccaggaggc

SEQ ID NO: 3743817 - DNA, 25 bp, Homo sapien
gcgcccagagcacggccgcaaccca

SEQ ID NO: 3743818 - DNA, 25 bp, Homo sapien
gggcgcccagagcacggccgcaacc

SEQ ID NO: 3743819 - DNA, 25 bp, Homo sapien
cagcccgagtgggtgcagcgctcca

SEQ ID NO: 3743820 - DNA, 25 bp, Homo sapien
gctggcagttgtgccgggcccagcc

SEQ ID NO: 3743821 - DNA, 25 bp, Homo sapien
ccgcgtcctcgcggtgctggcagtt

SEQ ID NO: 3743822 - DNA, 25 bp, Homo sapien
ctccagcgcgttctcgtggccggtg

SEQ ID NO: 3743823 - DNA, 25 bp, Homo sapien
gaatttggaccccaggaatgtgagg

SEQ ID NO: 3743824 - DNA, 25 bp, Homo sapien
cccaggatggtgaatttggacccca

SEQ ID NO: 3743825 - DNA, 25 bp, Homo sapien
ttaggtacaagagagtcagccagac

SEQ ID NO: 3743826 - DNA, 25 bp, Homo sapien
cattgtccttaggtacaagagagtc

SEQ ID NO: 3743827 - DNA, 25 bp, Homo sapien
tccttaggtacaagagagtcagcca

SEQ ID NO: 3743828 - DNA, 25 bp, Homo sapien
tgtccttaggtacaagagagtcagc

SEQ ID NO: 3743829 - DNA, 25 bp, Homo sapien
aggtgaggcaagcaggatagctggg

SEQ ID NO: 3743830 - DNA, 25 bp, Homo sapien
aagaggtgaggcaagcaggatagct

SEQ ID NO: 3743831 - DNA, 25 bp, Homo sapien
ttggaagaggtgaggcaagcaggat

SEQ ID NO: 3743832 - DNA, 25 bp, Homo sapien
gaagaggtgaggcaagcaggatagc

SEQ ID NO: 3743833 - DNA, 25 bp, Homo sapien
gatcaggcagcgtcccatgactttg

SEQ ID NO: 3743834 - DNA, 25 bp, Homo sapien
ccatagggaatgttgaagatcaggc

SEQ ID NO: 3743835 - DNA, 25 bp, Homo sapien
gcctccggagatagcctcggtcaat

SEQ ID NO: 3743836 - DNA, 25 bp, Homo sapien
atgtcccaggaggagtagcccagcc

SEQ ID NO: 3743837 - DNA, 25 bp, Homo sapien
ccgtttccggcctctgatggagtta

SEQ ID NO: 3743838 - DNA, 25 bp, Homo sapien
tatagacacggtgtagccagcaccc

SEQ ID NO: 3743839 - DNA, 25 bp, Homo sapien
gctgtcatagtagggcaccatgcct

SEQ ID NO: 3743840 - DNA, 25 bp, Homo sapien
gaagccacacaggtatccacgaaga

SEQ ID NO: 3743841 - DNA, 25 bp, Homo sapien
tcagtgtaggccaatgccccgaggg

SEQ ID NO: 3743842 - DNA, 25 bp, Homo sapien
cccgagggcctgcactatgaatggg

SEQ ID NO: 3743843 - DNA, 25 bp, Homo sapien
gggagtccagtgaagtcatacggct

SEQ ID NO: 3743844 - DNA, 25 bp, Homo sapien
ccagtgaagtcatacggctggaagg

SEQ ID NO: 3743845 - DNA, 25 bp, Homo sapien
tggaggttgatgtaggtattgtctt

SEQ ID NO: 3743846 - DNA, 25 bp, Homo sapien
acatcatagctgtcaagaaagctga

SEQ ID NO: 3743847 - DNA, 25 bp, Homo sapien
gcagatataccacatcatagctgtc

SEQ ID NO: 3743848 - DNA, 25 bp, Homo sapien
gaaagctgaagacattgaacttgaa

SEQ ID NO: 3743849 - DNA, 25 bp, Homo sapien
agcagagagaggcataatcccccac

SEQ ID NO: 3743850 - DNA, 25 bp, Homo sapien
ctgtacagccccaggagcagagaga

SEQ ID NO: 3743851 - DNA, 25 bp, Homo sapien
ggagcagagagaggcataatccccc

SEQ ID NO: 3743852 - DNA, 25 bp, Homo sapien
gagcagagagaggcataatccccca

SEQ ID NO: 3743853 - DNA, 25 bp, Homo sapien
agtgactttgtggatctccagtggc

SEQ ID NO: 3743854 - DNA, 25 bp, Homo sapien
gtgactttgtggatctccagtggcc

SEQ ID NO: 3743855 - DNA, 25 bp, Homo sapien
cagtgactttgtggatctccagtgg

SEQ ID NO: 3743856 - DNA, 25 bp, Homo sapien
cggatagcgtctgattggtcaaaca

SEQ ID NO: 3743857 - DNA, 25 bp, Homo sapien
gacaatgcggtatagagagataacc

SEQ ID NO: 3743858 - DNA, 25 bp, Homo sapien
gaaaataaatcctcgtaccgtcaga

SEQ ID NO: 3743859 - DNA, 25 bp, Homo sapien
tgacctgtctctatgcggatagcgt

SEQ ID NO: 3743860 - DNA, 25 bp, Homo sapien
gaagagctttgagcctgatatccag

SEQ ID NO: 3743861 - DNA, 25 bp, Homo sapien
aaaatgagtatagctcaggaggccc

SEQ ID NO: 3743862 - DNA, 25 bp, Homo sapien
gaagtcttttgacctccatacagtg

SEQ ID NO: 3743863 - DNA, 25 bp, Homo sapien
tatctgcctaggtacatcgaagtct

SEQ ID NO: 3743864 - DNA, 25 bp, Homo sapien
tatcagtggagaccccttggggagt

SEQ ID NO: 3743865 - DNA, 25 bp, Homo sapien
gactcaatagataatggggcaactt

SEQ ID NO: 3743866 - DNA, 25 bp, Homo sapien
gaggaggcctggtgaaatttcatga

SEQ ID NO: 3743867 - DNA, 25 bp, Homo sapien
ttattatctcgcagtggtaataagg

SEQ ID NO: 3743868 - DNA, 25 bp, Homo sapien
caggcttatgtagttttggatccag

SEQ ID NO: 3743869 - DNA, 25 bp, Homo sapien
aactgggtcaagtagggagctcaca

SEQ ID NO: 3743870 - DNA, 25 bp, Homo sapien
ggagctcacaggcttatgtagtttt

SEQ ID NO: 3743871 - DNA, 25 bp, Homo sapien
gaactgggtcaagtagggagctcac

SEQ ID NO: 3743872 - DNA, 25 bp, Homo sapien
tccgattgcatattgttcaccacaa

SEQ ID NO: 3743873 - DNA, 25 bp, Homo sapien
agggccatagcaaggtccccatctg

SEQ ID NO: 3743874 - DNA, 25 bp, Homo sapien
aagattcagttaaggagatcctctc

SEQ ID NO: 3743875 - DNA, 25 bp, Homo sapien
tggcagttcataaaatccgattgca

SEQ ID NO: 3743876 - DNA, 25 bp, Homo sapien
cattgggattgagctgcagaatcag

SEQ ID NO: 3743877 - DNA, 25 bp, Homo sapien
gctgactccccgcactgacactctg

SEQ ID NO: 3743878 - DNA, 25 bp, Homo sapien
cagaatcagggctttatgacctccc

SEQ ID NO: 3743879 - DNA, 25 bp, Homo sapien
tcaaaggccgttctcattgggattg

SEQ ID NO: 3743880 - DNA, 25 bp, Homo sapien
tgtgctgtccacttccatccaaaag

SEQ ID NO: 3743881 - DNA, 25 bp, Homo sapien
tgggcaattctgtgggagcctagtt

SEQ ID NO: 3743882 - DNA, 25 bp, Homo sapien
cctggaagaggaaccgctgatggaa

SEQ ID NO: 3743883 - DNA, 25 bp, Homo sapien
cagagagaccaaggatgggcaattc

SEQ ID NO: 3743884 - DNA, 25 bp, Homo sapien
tttgcttgatagagactgcacttgg

SEQ ID NO: 3743885 - DNA, 25 bp, Homo sapien
cacagtgagtgggaatataccttcc

SEQ ID NO: 3743886 - DNA, 25 bp, Homo sapien
ggtgataagaccaaatgccttggct

SEQ ID NO: 3743887 - DNA, 25 bp, Homo sapien
aaagctacatgtcctggtgataaga

SEQ ID NO: 3743888 - DNA, 25 bp, Homo sapien
tcttccagtgcttaagtgtcggcca

SEQ ID NO: 3743889 - DNA, 25 bp, Homo sapien
ggcaggcagagcgactcccggctta

SEQ ID NO: 3743890 - DNA, 25 bp, Homo sapien
tgtcggccagtgcagcgcagaaacg

SEQ ID NO: 3743891 - DNA, 25 bp, Homo sapien
caggcagagcgactcccggcttaca

SEQ ID NO: 3743892 - DNA, 25 bp, Homo sapien
tgagttagggccccgcctgcggcat

SEQ ID NO: 3743893 - DNA, 25 bp, Homo sapien
cgtggcgcaggtggcgccagaagct

SEQ ID NO: 3743894 - DNA, 25 bp, Homo sapien
ctcccagtcgaagtcgcgggcgcag

SEQ ID NO: 3743895 - DNA, 25 bp, Homo sapien
gcgcagacacgagcccgggtgagga

SEQ ID NO: 3743896 - DNA, 25 bp, Homo sapien
tgatagcagccctgacgacccgtca

SEQ ID NO: 3743897 - DNA, 25 bp, Homo sapien
cgcctgacggggacgtttatgaaat

SEQ ID NO: 3743898 - DNA, 25 bp, Homo sapien
tgctctcctggatcccggactcaga

SEQ ID NO: 3743899 - DNA, 25 bp, Homo sapien
agaccctcacgttccccgaggagcg

SEQ ID NO: 3743900 - DNA, 25 bp, Homo sapien
cttggttgttcaatcttctcttcta

SEQ ID NO: 3743901 - DNA, 25 bp, Homo sapien
ttggttgttcaatcttctcttctaa

SEQ ID NO: 3743902 - DNA, 25 bp, Homo sapien
tggttgttcaatcttctcttctaaa

SEQ ID NO: 3743903 - DNA, 25 bp, Homo sapien
cagggccacacctcaggtaaaggaa

SEQ ID NO: 3743904 - DNA, 25 bp, Homo sapien
gggccacacctcaggtaaaggaagc

SEQ ID NO: 3743905 - DNA, 25 bp, Homo sapien
tcagggccacacctcaggtaaagga

SEQ ID NO: 3743906 - DNA, 25 bp, Homo sapien
atcagggccacacctcaggtaaagg

SEQ ID NO: 3743907 - DNA, 25 bp, Homo sapien
ctctcctaagtacacttccatattt

SEQ ID NO: 3743908 - DNA, 25 bp, Homo sapien
tctcctaagtacacttccatatttc

SEQ ID NO: 3743909 - DNA, 25 bp, Homo sapien
catgagtggaggatgccaatattaa

SEQ ID NO: 3743910 - DNA, 25 bp, Homo sapien
tgagtggaggatgccaatattaagt

SEQ ID NO: 3743911 - DNA, 25 bp, Homo sapien
tggaggatgccaatattaagtaatt

SEQ ID NO: 3743912 - DNA, 25 bp, Homo sapien
aggcatgagtggaggatgccaatat

SEQ ID NO: 3743913 - DNA, 25 bp, Homo sapien
tgtatgaacaaaccaacagtacata

SEQ ID NO: 3743914 - DNA, 25 bp, Homo sapien
caaggactaagttggactaactgta

SEQ ID NO: 3743915 - DNA, 25 bp, Homo sapien
aaacgtggttttcttggcaccatag

SEQ ID NO: 3743916 - DNA, 25 bp, Homo sapien
tagcttttaggtgcttttctctgca

SEQ ID NO: 3743917 - DNA, 25 bp, Homo sapien
gaaactgctctcatgtgtatcacaa

SEQ ID NO: 3743918 - DNA, 25 bp, Homo sapien
cagcaggagagcctgttgaataatt

SEQ ID NO: 3743919 - DNA, 25 bp, Homo sapien
tgctgaaactgctctcatgtgtatc

SEQ ID NO: 3743920 - DNA, 25 bp, Homo sapien
gctgaaactgctctcatgtgtatca

SEQ ID NO: 3743921 - DNA, 25 bp, Homo sapien
catattaatcaattgctgagctcca

SEQ ID NO: 3743922 - DNA, 25 bp, Homo sapien
ccatattaatcaattgctgagctcc

SEQ ID NO: 3743923 - DNA, 25 bp, Homo sapien
atattaatcaattgctgagctccag

SEQ ID NO: 3743924 - DNA, 25 bp, Homo sapien
ttgtctaaggctcctaaggcagatg

SEQ ID NO: 3743925 - DNA, 25 bp, Homo sapien
gcagatgagcattgtagtccagtca

SEQ ID NO: 3743926 - DNA, 25 bp, Homo sapien
cccacaaggagatagttaacttgac

SEQ ID NO: 3743927 - DNA, 25 bp, Homo sapien
cctgtgtgcttttatcaatgtacgc

SEQ ID NO: 3743928 - DNA, 25 bp, Homo sapien
gaaatcagctgtcaacaaacttggt

SEQ ID NO: 3743929 - DNA, 25 bp, Homo sapien
caccctggtagaactgaagtactgc

SEQ ID NO: 3743930 - DNA, 25 bp, Homo sapien
tctttaagggtaggcctgccagtgc

SEQ ID NO: 3743931 - DNA, 25 bp, Homo sapien
tactcggctctgttgataccaccca

SEQ ID NO: 3743932 - DNA, 25 bp, Homo sapien
taagcctcagtatttgtgggagact

SEQ ID NO: 3743933 - DNA, 25 bp, Homo sapien
cttaagtcccttatataagatgaca

SEQ ID NO: 3743934 - DNA, 25 bp, Homo sapien
tctctatttctgatccacagtgggt

SEQ ID NO: 3743935 - DNA, 25 bp, Homo sapien
catcatttgtacagttaagcctcag

SEQ ID NO: 3743936 - DNA, 25 bp, Homo sapien
aacagacttccttacactttctggg

SEQ ID NO: 3743937 - DNA, 25 bp, Homo sapien
gaagaatctacatcagctcaaaaaa

SEQ ID NO: 3743938 - DNA, 25 bp, Homo sapien
gaactgattttacacatgccaaaca

SEQ ID NO: 3743939 - DNA, 25 bp, Homo sapien
taatggccccaatgtgaactgattt

SEQ ID NO: 3743940 - DNA, 25 bp, Homo sapien
ctcagctcacttttggaagctcagg

SEQ ID NO: 3743941 - DNA, 25 bp, Homo sapien
aaaaaacctctagggcatcggatat

SEQ ID NO: 3743942 - DNA, 25 bp, Homo sapien
tcggatatttggaacttctcaaacc

SEQ ID NO: 3743943 - DNA, 25 bp, Homo sapien
catccagagctagatgaaggccaat

SEQ ID NO: 3743944 - DNA, 25 bp, Homo sapien
tacagttcaaccatccagagctaga

SEQ ID NO: 3743945 - DNA, 25 bp, Homo sapien
acaacacttaggagcaccatcgcgg

SEQ ID NO: 3743946 - DNA, 25 bp, Homo sapien
catcgcggcaaccagtaagctgctt

SEQ ID NO: 3743947 - DNA, 25 bp, Homo sapien
taagctgcttccgatgccgatcatg

SEQ ID NO: 3743948 - DNA, 25 bp, Homo sapien
gccgatcatgatcttcgtcctgaga

SEQ ID NO: 3743949 - DNA, 25 bp, Homo sapien
tgggttgtgattttttacagccaca

SEQ ID NO: 3743950 - DNA, 25 bp, Homo sapien
attttttacagccacagcatcaggg

SEQ ID NO: 3743951 - DNA, 25 bp, Homo sapien
cacagcatcagggtcctttgcagct

SEQ ID NO: 3743952 - DNA, 25 bp, Homo sapien
gtgattttttacagccacagcatca

SEQ ID NO: 3743953 - DNA, 25 bp, Homo sapien
atttttgtgcccagctttcccaagt

SEQ ID NO: 3743954 - DNA, 25 bp, Homo sapien
cagggaatcagaactggcatgcatt

SEQ ID NO: 3743955 - DNA, 25 bp, Homo sapien
cattctacaaccttcacagcactgg

SEQ ID NO: 3743956 - DNA, 25 bp, Homo sapien
tgtaaacactctagaacttgacttg

SEQ ID NO: 3743957 - DNA, 25 bp, Homo sapien
gggaaggagccggaacagaaggcaa

SEQ ID NO: 3743958 - DNA, 25 bp, Homo sapien
ggggaaggagccggaacagaaggca

SEQ ID NO: 3743959 - DNA, 25 bp, Homo sapien
cggttatgcctttctcgtgctcgaa

SEQ ID NO: 3743960 - DNA, 25 bp, Homo sapien
ttagttcatgagaggagtatacatg

SEQ ID NO: 3743961 - DNA, 25 bp, Homo sapien
tctcgtgctcgaaagcagttccagg

SEQ ID NO: 3743962 - DNA, 25 bp, Homo sapien
gaggagtatacatgacggttatgcc

SEQ ID NO: 3743963 - DNA, 25 bp, Homo sapien
ctccagagctgctaggcctgcctgc

SEQ ID NO: 3743964 - DNA, 25 bp, Homo sapien
cctccagggagttgctcggctccaa

SEQ ID NO: 3743965 - DNA, 25 bp, Homo sapien
gaatcctgaatattcccaagactcc

SEQ ID NO: 3743966 - DNA, 25 bp, Homo sapien
cagcactaaggttgggggaatcctg

SEQ ID NO: 3743967 - DNA, 25 bp, Homo sapien
tgcggatgaggtgggactgggtgtc

SEQ ID NO: 3743968 - DNA, 25 bp, Homo sapien
ggctggctgcggatgaggtgggact

SEQ ID NO: 3743969 - DNA, 25 bp, Homo sapien
ttagacactctccaaggcccctgcc

SEQ ID NO: 3743970 - DNA, 25 bp, Homo sapien
tctgctcaggctggctgcggatgag

SEQ ID NO: 3743971 - DNA, 25 bp, Homo sapien
cagcgaatacatgaactccaggagc

SEQ ID NO: 3743972 - DNA, 25 bp, Homo sapien
gcccactgggatacctctaagacat

SEQ ID NO: 3743973 - DNA, 25 bp, Homo sapien
tccaggagcacattgatgataagat

SEQ ID NO: 3743974 - DNA, 25 bp, Homo sapien
aacttatggattacattgatcagcg

SEQ ID NO: 3743975 - DNA, 25 bp, Homo sapien
agagcaagggtctgccagtgcgcat

SEQ ID NO: 3743976 - DNA, 25 bp, Homo sapien
tgtttccccacagccaacgtcgaaa

SEQ ID NO: 3743977 - DNA, 25 bp, Homo sapien
aacggtcgtccacgccgcttgctgt

SEQ ID NO: 3743978 - DNA, 25 bp, Homo sapien
gcctgcgcatagtctccagcgaaag

SEQ ID NO: 3743979 - DNA, 25 bp, Homo sapien
gatatgctgtagagattctggactt

SEQ ID NO: 3743980 - DNA, 25 bp, Homo sapien
gggatctgcctcacgaatcatatct

SEQ ID NO: 3743981 - DNA, 25 bp, Homo sapien
gataacagttaacctggcagaaata

SEQ ID NO: 3743982 - DNA, 25 bp, Homo sapien
gattatgttctcaacattgtggatg

SEQ ID NO: 3743983 - DNA, 25 bp, Homo sapien
ggtttcaaaactctgactggcaggg

SEQ ID NO: 3743984 - DNA, 25 bp, Homo sapien
tctttgcaaaaagtctggccatgtt

SEQ ID NO: 3743985 - DNA, 25 bp, Homo sapien
gagaaacaggattggaaacccacac

SEQ ID NO: 3743986 - DNA, 25 bp, Homo sapien
cgcttctaccctgtggttggcatga

SEQ ID NO: 3743987 - DNA, 25 bp, Homo sapien
ttagtgttgatatgtgtggacttca

SEQ ID NO: 3743988 - DNA, 25 bp, Homo sapien
gactttttacatgtggctcctttat

SEQ ID NO: 3743989 - DNA, 25 bp, Homo sapien
acatgtggctcctttatagtgtcac

SEQ ID NO: 3743990 - DNA, 25 bp, Homo sapien
atcttgaagtcagcataccagtggg

SEQ ID NO: 3743991 - DNA, 25 bp, Homo sapien
ccagggcctcaagcctactgagcct

SEQ ID NO: 3743992 - DNA, 25 bp, Homo sapien
caagagccccatttctaggtaccat

SEQ ID NO: 3743993 - DNA, 25 bp, Homo sapien
ctacaggcttgaccaatgatgccca

SEQ ID NO: 3743994 - DNA, 25 bp, Homo sapien
cagtggttattcataagcaagaaca

SEQ ID NO: 3743995 - DNA, 25 bp, Homo sapien
gaagttcactctgtaatagctggac

SEQ ID NO: 3743996 - DNA, 25 bp, Homo sapien
gaatatctggctcccttatagcagt

SEQ ID NO: 3743997 - DNA, 25 bp, Homo sapien
cagttaaaagtagccacacagcagg

SEQ ID NO: 3743998 - DNA, 25 bp, Homo sapien
gactggtgtccctaaagttccagga

SEQ ID NO: 3743999 - DNA, 25 bp, Homo sapien
taatacattacatgctcagtgggtg

SEQ ID NO: 3744000 - DNA, 25 bp, Homo sapien
tgattaccctcccaaacctatgtag

SEQ ID NO: 3744001 - DNA, 25 bp, Homo sapien
cacttttattaatgggagtcaccca

SEQ ID NO: 3744002 - DNA, 25 bp, Homo sapien
tccaggcctctacagattcacaagc

SEQ ID NO: 3744003 - DNA, 25 bp, Homo sapien
caaagaatagaaggcgaggctgaca

SEQ ID NO: 3744004 - DNA, 25 bp, Homo sapien
cctgccgaaagttgccagccagtag

SEQ ID NO: 3744005 - DNA, 25 bp, Homo sapien
cagccagtaggattggcgcctcagt

SEQ ID NO: 3744006 - DNA, 25 bp, Homo sapien
gaaaatcccaaaagagacgttgagc

SEQ ID NO: 3744007 - DNA, 25 bp, Homo sapien
agtctgggagcgtcgtctccgctct

SEQ ID NO: 3744008 - DNA, 25 bp, Homo sapien
gggagcgtcgtctccgctctaccgt

SEQ ID NO: 3744009 - DNA, 25 bp, Homo sapien
gagaccggaggagtctgggagcgtc

SEQ ID NO: 3744010 - DNA, 25 bp, Homo sapien
ctaccgtctgccctgcgcgcacgcg

SEQ ID NO: 3744011 - DNA, 25 bp, Homo sapien
ctctgatgttctcggcggtcttcat

SEQ ID NO: 3744012 - DNA, 25 bp, Homo sapien
cacagaggacgcagaggcctcgttt

SEQ ID NO: 3744013 - DNA, 25 bp, Homo sapien
gacgtcatcatacgcgacaacaccg

SEQ ID NO: 3744014 - DNA, 25 bp, Homo sapien
cgaaagtcgattttcctgccgcggg

SEQ ID NO: 3744015 - DNA, 25 bp, Homo sapien
aaacgcgtcgggcatgacgtcatca

SEQ ID NO: 3744016 - DNA, 25 bp, Homo sapien
tatcatccaagagaaaggtggagtc

SEQ ID NO: 3744017 - DNA, 25 bp, Homo sapien
tcagactcaaccatgcagaaggcag

SEQ ID NO: 3744018 - DNA, 25 bp, Homo sapien
tgtccattgcatactcagcctccag

SEQ ID NO: 3744019 - DNA, 25 bp, Homo sapien
tcagctcacaatacggaaccatctg

SEQ ID NO: 3744020 - DNA, 25 bp, Homo sapien
tgttaagaggtagcaagactgggcc

SEQ ID NO: 3744021 - DNA, 25 bp, Homo sapien
catctgacacccattaatgacagcc

SEQ ID NO: 3744022 - DNA, 25 bp, Homo sapien
acagttcctgtcgaagcaatttcca

SEQ ID NO: 3744023 - DNA, 25 bp, Homo sapien
gagccagctggtagacttcatatct

SEQ ID NO: 3744024 - DNA, 25 bp, Homo sapien
gtatctccatgtgtaagaaaaaaaa

SEQ ID NO: 3744025 - DNA, 25 bp, Homo sapien
atctccatgtgtaagaaaaaaaaag

SEQ ID NO: 3744026 - DNA, 25 bp, Homo sapien
aagtatctccatgtgtaagaaaaaa

SEQ ID NO: 3744027 - DNA, 25 bp, Homo sapien
agtatctccatgtgtaagaaaaaaa

SEQ ID NO: 3744028 - DNA, 25 bp, Homo sapien
gaattactggtatactctttttcca

SEQ ID NO: 3744029 - DNA, 25 bp, Homo sapien
taaattctcattgaagacaatagtg

SEQ ID NO: 3744030 - DNA, 25 bp, Homo sapien
gcaatactgaacatctagcttttaa

SEQ ID NO: 3744031 - DNA, 25 bp, Homo sapien
ggaaaaactccgtttgcaatactga

SEQ ID NO: 3744032 - DNA, 25 bp, Homo sapien
ctggactcggaattgtgaggctgtt

SEQ ID NO: 3744033 - DNA, 25 bp, Homo sapien
gaattgtgaggctgttgtgttccca

SEQ ID NO: 3744034 - DNA, 25 bp, Homo sapien
tttcttcccatcaggtggatggtct

SEQ ID NO: 3744035 - DNA, 25 bp, Homo sapien
tggcctccgaagcacatgctggact

SEQ ID NO: 3744036 - DNA, 25 bp, Homo sapien
atccagggagggatgattgagtgga

SEQ ID NO: 3744037 - DNA, 25 bp, Homo sapien
gcatccagggagggatgattgagtg

SEQ ID NO: 3744038 - DNA, 25 bp, Homo sapien
agcatccagggagggatgattgagt

SEQ ID NO: 3744039 - DNA, 25 bp, Homo sapien
catccagggagggatgattgagtgg

SEQ ID NO: 3744040 - DNA, 25 bp, Homo sapien
tagaacatttccatcgccagcgaag

SEQ ID NO: 3744041 - DNA, 25 bp, Homo sapien
gatccctcgtggacaatatgcagga

SEQ ID NO: 3744042 - DNA, 25 bp, Homo sapien
gaagtgtgggcaatatacctctgga

SEQ ID NO: 3744043 - DNA, 25 bp, Homo sapien
gataagagtgacagggtagcccaac

SEQ ID NO: 3744044 - DNA, 25 bp, Homo sapien
ctgcttcccggatttgcgccattct

SEQ ID NO: 3744045 - DNA, 25 bp, Homo sapien
gatccttatatccaacatctgactt

SEQ ID NO: 3744046 - DNA, 25 bp, Homo sapien
tgcttcccggatttgcgccattctc

SEQ ID NO: 3744047 - DNA, 25 bp, Homo sapien
atgggataaaatacaatagatcctt

SEQ ID NO: 3744048 - DNA, 25 bp, Homo sapien
cctcagcatattttactggattttc

SEQ ID NO: 3744049 - DNA, 25 bp, Homo sapien
tcctcagcatattttactggatttt

SEQ ID NO: 3744050 - DNA, 25 bp, Homo sapien
aagtttaacaatcggctttgcccag

SEQ ID NO: 3744051 - DNA, 25 bp, Homo sapien
actgggttccagctaggcggtgata

SEQ ID NO: 3744052 - DNA, 25 bp, Homo sapien
gagtccaaccaaatcagatccagtg

SEQ ID NO: 3744053 - DNA, 25 bp, Homo sapien
ttgcccagccggcatgagctgtcag

SEQ ID NO: 3744054 - DNA, 25 bp, Homo sapien
gagatacaatccttcggagtgtctg

SEQ ID NO: 3744055 - DNA, 25 bp, Homo sapien
cattgtctgagatacaatccttcgg

SEQ ID NO: 3744056 - DNA, 25 bp, Homo sapien
caatccttcggagtgtctgatcagt

SEQ ID NO: 3744057 - DNA, 25 bp, Homo sapien
cggagtgtctgatcagttttatgaa

SEQ ID NO: 3744058 - DNA, 25 bp, Homo sapien
cccagcatctagagtaaggcctagt

SEQ ID NO: 3744059 - DNA, 25 bp, Homo sapien
taaactctgagtgtcgggaataaca

SEQ ID NO: 3744060 - DNA, 25 bp, Homo sapien
tcttcagagcatgggcatatactca

SEQ ID NO: 3744061 - DNA, 25 bp, Homo sapien
cctagtacagtaaggcaactcagta

SEQ ID NO: 3744062 - DNA, 25 bp, Homo sapien
gaatgatcctccagatagctgcatg

SEQ ID NO: 3744063 - DNA, 25 bp, Homo sapien
catggttcgctcttacccatctttg

SEQ ID NO: 3744064 - DNA, 25 bp, Homo sapien
aacctttgcgcttctgcacttgatg

SEQ ID NO: 3744065 - DNA, 25 bp, Homo sapien
gctcaatggcctcttctcgattctg

SEQ ID NO: 3744066 - DNA, 25 bp, Homo sapien
tgagttcgtgtactgggttataccc

SEQ ID NO: 3744067 - DNA, 25 bp, Homo sapien
ccaaatatttagtagctgttcagtc

SEQ ID NO: 3744068 - DNA, 25 bp, Homo sapien
aaattccatgctgatcttacacctg

SEQ ID NO: 3744069 - DNA, 25 bp, Homo sapien
aagcgcttaacgtatagaaaggtgc

SEQ ID NO: 3744070 - DNA, 25 bp, Homo sapien
tcaaaaacccatatcctggtggctc

SEQ ID NO: 3744071 - DNA, 25 bp, Homo sapien
cacacgtgggcagtgttactgagaa

SEQ ID NO: 3744072 - DNA, 25 bp, Homo sapien
gttgttgttgccaagaaaactcaag

SEQ ID NO: 3744073 - DNA, 25 bp, Homo sapien
tctagaacagtagttgtccaacata

SEQ ID NO: 3744074 - DNA, 25 bp, Homo sapien
tctggtatgtcaatggtttgctgaa

SEQ ID NO: 3744075 - DNA, 25 bp, Homo sapien
catctggtatgtcaatggtttgctg

SEQ ID NO: 3744076 - DNA, 25 bp, Homo sapien
tgacatctggtatgtcaatggtttg

SEQ ID NO: 3744077 - DNA, 25 bp, Homo sapien
gaaatgacatctggtatgtcaatgg

SEQ ID NO: 3744078 - DNA, 25 bp, Homo sapien
taattccctgctaaagacgttttca

SEQ ID NO: 3744079 - DNA, 25 bp, Homo sapien
cttgcattatggttgtacaatacac

SEQ ID NO: 3744080 - DNA, 25 bp, Homo sapien
tattgtttagggattccggaaagca

SEQ ID NO: 3744081 - DNA, 25 bp, Homo sapien
tgaacttcaagttaaggctagacat

SEQ ID NO: 3744082 - DNA, 25 bp, Homo sapien
tgaggcaaatctaccttagaggctt

SEQ ID NO: 3744083 - DNA, 25 bp, Homo sapien
gataaaagcagtaccccaaaataga

SEQ ID NO: 3744084 - DNA, 25 bp, Homo sapien
gatgttcgtgtcttcccctctgtat

SEQ ID NO: 3744085 - DNA, 25 bp, Homo sapien
gccatgacttaaagagcacagttga

SEQ ID NO: 3744086 - DNA, 25 bp, Homo sapien
ccccaagtgccaagttaatggaatc

SEQ ID NO: 3744087 - DNA, 25 bp, Homo sapien
gcagtttagcatccagtctaagcta

SEQ ID NO: 3744088 - DNA, 25 bp, Homo sapien
aataactcacgtactctgaagagag

SEQ ID NO: 3744089 - DNA, 25 bp, Homo sapien
ttaaagagcagcatcaaggacactt

SEQ ID NO: 3744090 - DNA, 25 bp, Homo sapien
tagtccagtggcaggtccaagcagt

SEQ ID NO: 3744091 - DNA, 25 bp, Homo sapien
gaattatgttccttccgctgcagtg

SEQ ID NO: 3744092 - DNA, 25 bp, Homo sapien
gaatcagctctcgactctagcaggg

SEQ ID NO: 3744093 - DNA, 25 bp, Homo sapien
gatgtagttccctgccctgatgaaa

SEQ ID NO: 3744094 - DNA, 25 bp, Homo sapien
tgatcaatttccagttgtccaatga

SEQ ID NO: 3744095 - DNA, 25 bp, Homo sapien
taacaatctcatatgctatgcaaat

SEQ ID NO: 3744096 - DNA, 25 bp, Homo sapien
gcttatgagcgtcatctggaagccc

SEQ ID NO: 3744097 - DNA, 25 bp, Homo sapien
ggtgaaaaacctcatcgatgtcatc

SEQ ID NO: 3744098 - DNA, 25 bp, Homo sapien
aattagcctcagttcagaaagtctg

SEQ ID NO: 3744099 - DNA, 25 bp, Homo sapien
cttttgtgagaagtgaactgtcaat

SEQ ID NO: 3744100 - DNA, 25 bp, Homo sapien
acagaatgtattactgcttttgtat

SEQ ID NO: 3744101 - DNA, 25 bp, Homo sapien
ccccaataaaaggttctcagaatat

SEQ ID NO: 3744102 - DNA, 25 bp, Homo sapien
gcttgaattgtgcatgccaggactg

SEQ ID NO: 3744103 - DNA, 25 bp, Homo sapien
tgagccttgtccctcgaatgcagtg

SEQ ID NO: 3744104 - DNA, 25 bp, Homo sapien
gatattggtcttgtctcaaccagca

SEQ ID NO: 3744105 - DNA, 25 bp, Homo sapien
gaatgcagtgtagccctcttggata

SEQ ID NO: 3744106 - DNA, 25 bp, Homo sapien
aaccagagcctttggacttcgtgaa

SEQ ID NO: 3744107 - DNA, 25 bp, Homo sapien
gattataagatgctgaaaggcaggc

SEQ ID NO: 3744108 - DNA, 25 bp, Homo sapien
tgttactgtgaagaccactgcgcat

SEQ ID NO: 3744109 - DNA, 25 bp, Homo sapien
cagcagacccatcacgtgaacatga

SEQ ID NO: 3744110 - DNA, 25 bp, Homo sapien
gaagccagacaaaggttcatagtgt

SEQ ID NO: 3744111 - DNA, 25 bp, Homo sapien
tacagagtcagaagtcaggatggct

SEQ ID NO: 3744112 - DNA, 25 bp, Homo sapien
cagactccagcagtaaatttgagca

SEQ ID NO: 3744113 - DNA, 25 bp, Homo sapien
tcctagcattggaagggtacacgag

SEQ ID NO: 3744114 - DNA, 25 bp, Homo sapien
agcctgctgccgcgcagcaaccgca

SEQ ID NO: 3744115 - DNA, 25 bp, Homo sapien
tgccgcgcagcaaccgcactgccag

SEQ ID NO: 3744116 - DNA, 25 bp, Homo sapien
tgctgccgcgcagcaaccgcactgc

SEQ ID NO: 3744117 - DNA, 25 bp, Homo sapien
gccgcgcagcaaccgcactgccagg

SEQ ID NO: 3744118 - DNA, 25 bp, Homo sapien
cagctgcgattccaggggccaaggt

SEQ ID NO: 3744119 - DNA, 25 bp, Homo sapien
cgaggcccgttagaaggctctgcca

SEQ ID NO: 3744120 - DNA, 25 bp, Homo sapien
gctctgccagctgcgattccagggg

SEQ ID NO: 3744121 - DNA, 25 bp, Homo sapien
ccccgaggcccgttagaaggctctg

SEQ ID NO: 3744122 - DNA, 25 bp, Homo sapien
aagcagcttctagacagccccgacc

SEQ ID NO: 3744123 - DNA, 25 bp, Homo sapien
aaggtacttgctccgccaaagcagc

SEQ ID NO: 3744124 - DNA, 25 bp, Homo sapien
agccccgacccccttgccaccagct

SEQ ID NO: 3744125 - DNA, 25 bp, Homo sapien
gggtcatagactgcccgcgggtaaa

SEQ ID NO: 3744126 - DNA, 25 bp, Homo sapien
gacatctgtgcaaaatgcatccaga

SEQ ID NO: 3744127 - DNA, 25 bp, Homo sapien
aatgtaatcactcgggaaaggtgcg

SEQ ID NO: 3744128 - DNA, 25 bp, Homo sapien
aaaggacatcttgcggacgcgaccc

SEQ ID NO: 3744129 - DNA, 25 bp, Homo sapien
agactcggtggctctcaggacgcaa

SEQ ID NO: 3744130 - DNA, 25 bp, Homo sapien
tattgcctgagaaggactccgtatg

SEQ ID NO: 3744131 - DNA, 25 bp, Homo sapien
tatgcgcctgtaacagtagctgcgt

SEQ ID NO: 3744132 - DNA, 25 bp, Homo sapien
gatggtctgaactgtaccccaaagg

SEQ ID NO: 3744133 - DNA, 25 bp, Homo sapien
gcttctcaacatttacccaggatgg

SEQ ID NO: 3744134 - DNA, 25 bp, Homo sapien
gggcttgcctttattgtgaccttag

SEQ ID NO: 3744135 - DNA, 25 bp, Homo sapien
cccaaattaccagtggacaaaaatg

SEQ ID NO: 3744136 - DNA, 25 bp, Homo sapien
tataaggtaaaggagttgggcttgc

SEQ ID NO: 3744137 - DNA, 25 bp, Homo sapien
aatcacataattacttgggtccaac

SEQ ID NO: 3744138 - DNA, 25 bp, Homo sapien
cagaaaagtcaccaaggaccctatt

SEQ ID NO: 3744139 - DNA, 25 bp, Homo sapien
gagaggccctaagatcacttctgag

SEQ ID NO: 3744140 - DNA, 25 bp, Homo sapien
gaaaaatcttacaactactgcacgt

SEQ ID NO: 3744141 - DNA, 25 bp, Homo sapien
tcctggccctgttgcgtgaagagct

SEQ ID NO: 3744142 - DNA, 25 bp, Homo sapien
agtgggatggaattgcatgtaccca

SEQ ID NO: 3744143 - DNA, 25 bp, Homo sapien
gctctcctttagtgctgtttggccc

SEQ ID NO: 3744144 - DNA, 25 bp, Homo sapien
gcctggttagcgagggatgctctcc

SEQ ID NO: 3744145 - DNA, 25 bp, Homo sapien
tggaattgcatgtacccaggctttt

SEQ ID NO: 3744146 - DNA, 25 bp, Homo sapien
gccttggccaaaacagtatgctgtt

SEQ ID NO: 3744147 - DNA, 25 bp, Homo sapien
actgggccaggcattcttatatttg

SEQ ID NO: 3744148 - DNA, 25 bp, Homo sapien
gagacaaggtttatttacacaggca

SEQ ID NO: 3744149 - DNA, 25 bp, Homo sapien
tagacagattaacaatagtagagac

SEQ ID NO: 3744150 - DNA, 25 bp, Homo sapien
tgggagggcctctgaaccatggcag

SEQ ID NO: 3744151 - DNA, 25 bp, Homo sapien
gggagggcctctgaaccatggcagg

SEQ ID NO: 3744152 - DNA, 25 bp, Homo sapien
gacactggattgatatctgccaagg

SEQ ID NO: 3744153 - DNA, 25 bp, Homo sapien
aatcctccctagttgtggacactgg

SEQ ID NO: 3744154 - DNA, 25 bp, Homo sapien
tacacacccgttgtatgggaacaag

SEQ ID NO: 3744155 - DNA, 25 bp, Homo sapien
tctggtcagatcatgcctcctggca

SEQ ID NO: 3744156 - DNA, 25 bp, Homo sapien
agtatgtacaattgcctgaaccacg

SEQ ID NO: 3744157 - DNA, 25 bp, Homo sapien
tagctatgactccaggtgtgcgaca

SEQ ID NO: 3744158 - DNA, 25 bp, Homo sapien
ttacaattgtaagccattatgccca

SEQ ID NO: 3744159 - DNA, 25 bp, Homo sapien
tcaaagggattcaaagtaggcttgc

SEQ ID NO: 3744160 - DNA, 25 bp, Homo sapien
actacaaactgcacctcctgggttt

SEQ ID NO: 3744161 - DNA, 25 bp, Homo sapien
gcagtgtcgtggtttcagctcacta

SEQ ID NO: 3744162 - DNA, 25 bp, Homo sapien
attcttgtgcctcagtctccaagta

SEQ ID NO: 3744163 - DNA, 25 bp, Homo sapien
agctcactacaaactgcacctcctg

SEQ ID NO: 3744164 - DNA, 25 bp, Homo sapien
ttgttatattgagtagagcttctga

SEQ ID NO: 3744165 - DNA, 25 bp, Homo sapien
tatattgagtagagcttctgactgg

SEQ ID NO: 3744166 - DNA, 25 bp, Homo sapien
tctgtaaatgtttgcaggggagcaa

SEQ ID NO: 3744167 - DNA, 25 bp, Homo sapien
ggagcaaagtgtattccattatttg

SEQ ID NO: 3744168 - DNA, 25 bp, Homo sapien
gtgcaatttgttcctgagcaaattt

SEQ ID NO: 3744169 - DNA, 25 bp, Homo sapien
ttgaaaccaaaggtgcaatttgttc

SEQ ID NO: 3744170 - DNA, 25 bp, Homo sapien
tgaaaccaaaggtgcaatttgttcc

SEQ ID NO: 3744171 - DNA, 25 bp, Homo sapien
caatttgttcctgagcaaatttttt

SEQ ID NO: 3744172 - DNA, 25 bp, Homo sapien
tctccattttcgaattttcatccat

SEQ ID NO: 3744173 - DNA, 25 bp, Homo sapien
tttctccattttcgaattttcatcc

SEQ ID NO: 3744174 - DNA, 25 bp, Homo sapien
ttctccattttcgaattttcatcca

SEQ ID NO: 3744175 - DNA, 25 bp, Homo sapien
accactatggttccacataagattc

SEQ ID NO: 3744176 - DNA, 25 bp, Homo sapien
actatggttccacataagattccag

SEQ ID NO: 3744177 - DNA, 25 bp, Homo sapien
ccactatggttccacataagattcc

SEQ ID NO: 3744178 - DNA, 25 bp, Homo sapien
cactatggttccacataagattcca

SEQ ID NO: 3744179 - DNA, 25 bp, Homo sapien
catattctgggtcaacttcaatacc

SEQ ID NO: 3744180 - DNA, 25 bp, Homo sapien
tctgtagtgagctgaggcaaatagg

SEQ ID NO: 3744181 - DNA, 25 bp, Homo sapien
tcctctatcacgagcacagtggata

SEQ ID NO: 3744182 - DNA, 25 bp, Homo sapien
cacagatgcatcaactttggctaat

SEQ ID NO: 3744183 - DNA, 25 bp, Homo sapien
aagcaaatgagtcactacctgctcc

SEQ ID NO: 3744184 - DNA, 25 bp, Homo sapien
agcaaatgagtcactacctgctcca

SEQ ID NO: 3744185 - DNA, 25 bp, Homo sapien
ggtagggtctacatttgccatcacc

SEQ ID NO: 3744186 - DNA, 25 bp, Homo sapien
taataatctccctctttatcagctc

SEQ ID NO: 3744187 - DNA, 25 bp, Homo sapien
ccacatctttgatccattgaggaca

SEQ ID NO: 3744188 - DNA, 25 bp, Homo sapien
tcagcactgctgatccacatctttg

SEQ ID NO: 3744189 - DNA, 25 bp, Homo sapien
tttcgaatgttaacgggcaggtgga

SEQ ID NO: 3744190 - DNA, 25 bp, Homo sapien
gacattttcgaatgttaacgggcag

SEQ ID NO: 3744191 - DNA, 25 bp, Homo sapien
tcaggtttccctatatgaaggcccg

SEQ ID NO: 3744192 - DNA, 25 bp, Homo sapien
ggagtatcacgatctactaagaagg

SEQ ID NO: 3744193 - DNA, 25 bp, Homo sapien
gatcttctgctgctcacgtttaata

SEQ ID NO: 3744194 - DNA, 25 bp, Homo sapien
tgtggcctttagtgcactgacacca

SEQ ID NO: 3744195 - DNA, 25 bp, Homo sapien
gcatcagcactaactatctggatct

SEQ ID NO: 3744196 - DNA, 25 bp, Homo sapien
ggctgtttccgctctcactgagcaa

SEQ ID NO: 3744197 - DNA, 25 bp, Homo sapien
ccttgcacaggtattgaatggatga

SEQ ID NO: 3744198 - DNA, 25 bp, Homo sapien
ccccaattcttatctgtaggctaca

SEQ ID NO: 3744199 - DNA, 25 bp, Homo sapien
gaatctagagtaagggaatctcata

SEQ ID NO: 3744200 - DNA, 25 bp, Homo sapien
caccctcataaaaatcaacggtggg

SEQ ID NO: 3744201 - DNA, 25 bp, Homo sapien
gagactccctatggcatacttatag

SEQ ID NO: 3744202 - DNA, 25 bp, Homo sapien
taccttcattgagactccctatggc

SEQ ID NO: 3744203 - DNA, 25 bp, Homo sapien
agcaattcctattctaccttcattg

SEQ ID NO: 3744204 - DNA, 25 bp, Homo sapien
tggcatacttatagccatgtccaat

SEQ ID NO: 3744205 - DNA, 25 bp, Homo sapien
tatggaatagtgtagtcaaaacatc

SEQ ID NO: 3744206 - DNA, 25 bp, Homo sapien
gaatagtgtagtcaaaacatccttg

SEQ ID NO: 3744207 - DNA, 25 bp, Homo sapien
tgtagtcaaaacatccttgcgccag

SEQ ID NO: 3744208 - DNA, 25 bp, Homo sapien
taatatatggaatagtgtagtcaaa

SEQ ID NO: 3744209 - DNA, 25 bp, Homo sapien
tatttcacatagcatgtctctatca

SEQ ID NO: 3744210 - DNA, 25 bp, Homo sapien
atttcacatagcatgtctctatcaa

SEQ ID NO: 3744211 - DNA, 25 bp, Homo sapien
gcctggcatggagaacatgctaaat

SEQ ID NO: 3744212 - DNA, 25 bp, Homo sapien
gaataggctggtctctaccctcaag

SEQ ID NO: 3744213 - DNA, 25 bp, Homo sapien
gaactcaccattgctgaatactcgt

SEQ ID NO: 3744214 - DNA, 25 bp, Homo sapien
tactcgttccctaactacattgtga

SEQ ID NO: 3744215 - DNA, 25 bp, Homo sapien
ttttagagggtgattaggtccatac

SEQ ID NO: 3744216 - DNA, 25 bp, Homo sapien
caacagttaacttagtgagccagaa

SEQ ID NO: 3744217 - DNA, 25 bp, Homo sapien
ttattgggcacctctgagatggcag

SEQ ID NO: 3744218 - DNA, 25 bp, Homo sapien
acaggcacagatgtttactacaaac

SEQ ID NO: 3744219 - DNA, 25 bp, Homo sapien
tgcatagtatttggccattgacgct

SEQ ID NO: 3744220 - DNA, 25 bp, Homo sapien
gcttcttttatgaatggctttccag

SEQ ID NO: 3744221 - DNA, 25 bp, Homo sapien
tgtatgttagtaatcttgcagcttc

SEQ ID NO: 3744222 - DNA, 25 bp, Homo sapien
gcctagcagcattgtatgttagtaa

SEQ ID NO: 3744223 - DNA, 25 bp, Homo sapien
ccatccactcgatacatttactcgt

SEQ ID NO: 3744224 - DNA, 25 bp, Homo sapien
acatttactcgttgtttgtcctgca

SEQ ID NO: 3744225 - DNA, 25 bp, Homo sapien
taatctttggtgtagcctactcccc

SEQ ID NO: 3744226 - DNA, 25 bp, Homo sapien
gcatctcggaagtatttctccacag

SEQ ID NO: 3744227 - DNA, 25 bp, Homo sapien
tcaactggatgttggaagctccttc

SEQ ID NO: 3744228 - DNA, 25 bp, Homo sapien
tcagtattctgcatcgatatgcttt

SEQ ID NO: 3744229 - DNA, 25 bp, Homo sapien
cgatatgctttgcaatggtgttcaa

SEQ ID NO: 3744230 - DNA, 25 bp, Homo sapien
caatggtgttcaactggatgttgga

SEQ ID NO: 3744231 - DNA, 25 bp, Homo sapien
tgacttcgcttgcaacttagagttg

SEQ ID NO: 3744232 - DNA, 25 bp, Homo sapien
gaagtttattcccacgcaaggcact

SEQ ID NO: 3744233 - DNA, 25 bp, Homo sapien
caaggtgggcgatatccagaagcca

SEQ ID NO: 3744234 - DNA, 25 bp, Homo sapien
tgtgcctaagttaaacagcctgaaa

SEQ ID NO: 3744235 - DNA, 25 bp, Homo sapien
tactgatgcactaacggaagaaggt

SEQ ID NO: 3744236 - DNA, 25 bp, Homo sapien
gctatgtccccactgaaattgcaac

SEQ ID NO: 3744237 - DNA, 25 bp, Homo sapien
taagcaactgcatgagccttggaag

SEQ ID NO: 3744238 - DNA, 25 bp, Homo sapien
tctagatgcaaatgggaagctctct

SEQ ID NO: 3744239 - DNA, 25 bp, Homo sapien
gattcatatacataagcgatgacac

SEQ ID NO: 3744240 - DNA, 25 bp, Homo sapien
aaacaatccgatacataccattctg

SEQ ID NO: 3744241 - DNA, 25 bp, Homo sapien
tgtttaatactaggaagaacactga

SEQ ID NO: 3744242 - DNA, 25 bp, Homo sapien
gcgatgacactgactaatcctaaca

SEQ ID NO: 3744243 - DNA, 25 bp, Homo sapien
gtatgtataacaaacaattttgctt

SEQ ID NO: 3744244 - DNA, 25 bp, Homo sapien
tgtatgtataacaaacaattttgct

SEQ ID NO: 3744245 - DNA, 25 bp, Homo sapien
ctgtatgtataacaaacaattttgc

SEQ ID NO: 3744246 - DNA, 25 bp, Homo sapien
tctgtatgtataacaaacaattttg

SEQ ID NO: 3744247 - DNA, 25 bp, Homo sapien
gaatcatggctagcacatggtagga

SEQ ID NO: 3744248 - DNA, 25 bp, Homo sapien
ggctcagcgtccacagcactttgga

SEQ ID NO: 3744249 - DNA, 25 bp, Homo sapien
tctgtgatgaatagaaaagacacct

SEQ ID NO: 3744250 - DNA, 25 bp, Homo sapien
gaatgggcgcacatttaaacaagga

SEQ ID NO: 3744251 - DNA, 25 bp, Homo sapien
tacacctaaatgtaacctcgacttc

SEQ ID NO: 3744252 - DNA, 25 bp, Homo sapien
tttaagatcaagaatcaaacatggc

SEQ ID NO: 3744253 - DNA, 25 bp, Homo sapien
gcaattacacctaaatgtaacctcg

SEQ ID NO: 3744254 - DNA, 25 bp, Homo sapien
gctggaatgcaattacacctaaatg

SEQ ID NO: 3744255 - DNA, 25 bp, Homo sapien
ctaagtcagcaactatgattatggc

SEQ ID NO: 3744256 - DNA, 25 bp, Homo sapien
ggtgatttctaagtcagcaactatg

SEQ ID NO: 3744257 - DNA, 25 bp, Homo sapien
gatttctaagtcagcaactatgatt

SEQ ID NO: 3744258 - DNA, 25 bp, Homo sapien
cttggtgatttctaagtcagcaact

SEQ ID NO: 3744259 - DNA, 25 bp, Homo sapien
tcataggtttcagatctcttttctg

SEQ ID NO: 3744260 - DNA, 25 bp, Homo sapien
gctgaatagagctgccgatttcact

SEQ ID NO: 3744261 - DNA, 25 bp, Homo sapien
ttttctgtgctctctatgtcagagt

SEQ ID NO: 3744262 - DNA, 25 bp, Homo sapien
tgtcagagtctactctcccgtgagg

SEQ ID NO: 3744263 - DNA, 25 bp, Homo sapien
agcaggtgggtctctagggagcttg

SEQ ID NO: 3744264 - DNA, 25 bp, Homo sapien
gtttacctcgttggtcctgctggac

SEQ ID NO: 3744265 - DNA, 25 bp, Homo sapien
ggtttacctcgttggtcctgctgga

SEQ ID NO: 3744266 - DNA, 25 bp, Homo sapien
aggtgggtctctagggagcttgggg

SEQ ID NO: 3744267 - DNA, 25 bp, Homo sapien
gacaccgtttcaagccacgtgaggt

SEQ ID NO: 3744268 - DNA, 25 bp, Homo sapien
ggacaccgtttcaagccacgtgagg

SEQ ID NO: 3744269 - DNA, 25 bp, Homo sapien
tggacaccgtttcaagccacgtgag

SEQ ID NO: 3744270 - DNA, 25 bp, Homo sapien
caccgtttcaagccacgtgaggtac

SEQ ID NO: 3744271 - DNA, 25 bp, Homo sapien
ggtacccttgggctggtcccagcac

SEQ ID NO: 3744272 - DNA, 25 bp, Homo sapien
gcagccaatttccagagttccaggc

SEQ ID NO: 3744273 - DNA, 25 bp, Homo sapien
caggtggcaggtacacagcttcgag

SEQ ID NO: 3744274 - DNA, 25 bp, Homo sapien
gaaattgagattgctgtgctccggg

SEQ ID NO: 3744275 - DNA, 25 bp, Homo sapien
tagtgataagagtttaaacctgaac

SEQ ID NO: 3744276 - DNA, 25 bp, Homo sapien
tgataagagtttaaacctgaactcc

SEQ ID NO: 3744277 - DNA, 25 bp, Homo sapien
tttagtgataagagtttaaacctga

SEQ ID NO: 3744278 - DNA, 25 bp, Homo sapien
gtgataagagtttaaacctgaactc

SEQ ID NO: 3744279 - DNA, 25 bp, Homo sapien
ataaactctcctcaagtactgcagg

SEQ ID NO: 3744280 - DNA, 25 bp, Homo sapien
tggctgccctttaaactcctctgca

SEQ ID NO: 3744281 - DNA, 25 bp, Homo sapien
ttattaatggcaggctggctgacca

SEQ ID NO: 3744282 - DNA, 25 bp, Homo sapien
cacagatgcaaacgttattaatggc

SEQ ID NO: 3744283 - DNA, 25 bp, Homo sapien
atgagaaaacatgctggcagcttca

SEQ ID NO: 3744284 - DNA, 25 bp, Homo sapien
tgagaaaacatgctggcagcttcac

SEQ ID NO: 3744285 - DNA, 25 bp, Homo sapien
gagaaaacatgctggcagcttcaca

SEQ ID NO: 3744286 - DNA, 25 bp, Homo sapien
agaaaacatgctggcagcttcacat

SEQ ID NO: 3744287 - DNA, 25 bp, Homo sapien
cctgcattggcagacgtgatcgtgt

SEQ ID NO: 3744288 - DNA, 25 bp, Homo sapien
gaagctcccgcacacgagggctttt

SEQ ID NO: 3744289 - DNA, 25 bp, Homo sapien
ttgagcctcgcctaattcaaggccg

SEQ ID NO: 3744290 - DNA, 25 bp, Homo sapien
caccaaatctcgacgggcatatgta

SEQ ID NO: 3744291 - DNA, 25 bp, Homo sapien
ggacctttgcagaacggcttagtga

SEQ ID NO: 3744292 - DNA, 25 bp, Homo sapien
gaagtccttagagaaccacactgga

SEQ ID NO: 3744293 - DNA, 25 bp, Homo sapien
tggaaaaccgaagagtgagccttcc

SEQ ID NO: 3744294 - DNA, 25 bp, Homo sapien
cgtctcgacggcagcgaagtcctta

SEQ ID NO: 3744295 - DNA, 25 bp, Homo sapien
catccagccgatagtaagggaatcc

SEQ ID NO: 3744296 - DNA, 25 bp, Homo sapien
gggaatccaggtgtaagtcctcgca

SEQ ID NO: 3744297 - DNA, 25 bp, Homo sapien
cgcactgcgtcttcggactcagaaa

SEQ ID NO: 3744298 - DNA, 25 bp, Homo sapien
ttcggactcagaaatccgcgtggcc

SEQ ID NO: 3744299 - DNA, 25 bp, Homo sapien
cctgcggcgcagggacccgcttccc

SEQ ID NO: 3744300 - DNA, 25 bp, Homo sapien
gcggcgcagggacccgcttcccgcc

SEQ ID NO: 3744301 - DNA, 25 bp, Homo sapien
ggcgcagggacccgcttcccgccgc

SEQ ID NO: 3744302 - DNA, 25 bp, Homo sapien
ctgcggcgcagggacccgcttcccg

SEQ ID NO: 3744303 - DNA, 25 bp, Homo sapien
gcggagcaggcggcgcccttggccg

SEQ ID NO: 3744304 - DNA, 25 bp, Homo sapien
gcggcgcccttggccgaagcgcact

SEQ ID NO: 3744305 - DNA, 25 bp, Homo sapien
gagcaggcggcgcccttggccgaag

SEQ ID NO: 3744306 - DNA, 25 bp, Homo sapien
gcgcccttggccgaagcgcactaac

SEQ ID NO: 3744307 - DNA, 25 bp, Homo sapien
cagcgtccggcccgggttccggcat

SEQ ID NO: 3744308 - DNA, 25 bp, Homo sapien
ggccggtggtggtctccgttgagca

SEQ ID NO: 3744309 - DNA, 25 bp, Homo sapien
gctgtgcgctggcggtgccggcagc

SEQ ID NO: 3744310 - DNA, 25 bp, Homo sapien
ggttggggctgtgcgctggcggtgc

SEQ ID NO: 3744311 - DNA, 25 bp, Homo sapien
cggcggcagccgaggctggcgcgaa

SEQ ID NO: 3744312 - DNA, 25 bp, Homo sapien
cggcagccgaggctggcgcgaagag

SEQ ID NO: 3744313 - DNA, 25 bp, Homo sapien
ggcagccgaggctggcgcgaagagc

SEQ ID NO: 3744314 - DNA, 25 bp, Homo sapien
cagccgaggctggcgcgaagagcgt

SEQ ID NO: 3744315 - DNA, 25 bp, Homo sapien
gcgagagcgcgaagcccgcggcgcc

SEQ ID NO: 3744316 - DNA, 25 bp, Homo sapien
ctgcgagagcgcgaagcccgcggcg

SEQ ID NO: 3744317 - DNA, 25 bp, Homo sapien
agagcgcgaagcccgcggcgccctc

SEQ ID NO: 3744318 - DNA, 25 bp, Homo sapien
gagagcgcgaagcccgcggcgccct

SEQ ID NO: 3744319 - DNA, 25 bp, Homo sapien
agggcaaacctctgcgccgggatct

SEQ ID NO: 3744320 - DNA, 25 bp, Homo sapien
tagtgcgcgggcagggcaaacctct

SEQ ID NO: 3744321 - DNA, 25 bp, Homo sapien
ggatctcaaagcgagggaaagccag

SEQ ID NO: 3744322 - DNA, 25 bp, Homo sapien
gagcgctccaggtagtgcgcgggca

SEQ ID NO: 3744323 - DNA, 25 bp, Homo sapien
aggagtctctcagcaaggccttctc

SEQ ID NO: 3744324 - DNA, 25 bp, Homo sapien
cgggggaggagtctctcagcaaggc

SEQ ID NO: 3744325 - DNA, 25 bp, Homo sapien
gaggagtctctcagcaaggccttct

SEQ ID NO: 3744326 - DNA, 25 bp, Homo sapien
gggaggagtctctcagcaaggcctt

SEQ ID NO: 3744327 - DNA, 25 bp, Homo sapien
tcttcttgcggcacgccggcttctt

SEQ ID NO: 3744328 - DNA, 25 bp, Homo sapien
tcggagtcgctctcctccagaatga

SEQ ID NO: 3744329 - DNA, 25 bp, Homo sapien
tccagaatgatctcgtccgggctct

SEQ ID NO: 3744330 - DNA, 25 bp, Homo sapien
ttcttccagtcttctgcgcccggag

SEQ ID NO: 3744331 - DNA, 25 bp, Homo sapien
agttctcgtggtagaggatgggcac

SEQ ID NO: 3744332 - DNA, 25 bp, Homo sapien
ccgcggctgcagccgccgcgccctc

SEQ ID NO: 3744333 - DNA, 25 bp, Homo sapien
ctggcaccggggcccccgcggctgc

SEQ ID NO: 3744334 - DNA, 25 bp, Homo sapien
gcagccgccgcgccctcggccgccg

SEQ ID NO: 3744335 - DNA, 25 bp, Homo sapien
ctgcagccgccgcgccctcggccgc

SEQ ID NO: 3744336 - DNA, 25 bp, Homo sapien
gaagagaccaccgggtgcgagtagt

SEQ ID NO: 3744337 - DNA, 25 bp, Homo sapien
gagaccaccgggtgcgagtagtaga

SEQ ID NO: 3744338 - DNA, 25 bp, Homo sapien
agaccaccgggtgcgagtagtagac

SEQ ID NO: 3744339 - DNA, 25 bp, Homo sapien
gcgagtagtagacggggtgcgggaa

SEQ ID NO: 3744340 - DNA, 25 bp, Homo sapien
gggaagcgcctccaatccattaggg

SEQ ID NO: 3744341 - DNA, 25 bp, Homo sapien
tccattagggatgaattgcacgaaa

SEQ ID NO: 3744342 - DNA, 25 bp, Homo sapien
tacaaaatgctaccgactgggggag

SEQ ID NO: 3744343 - DNA, 25 bp, Homo sapien
cgaaatctctgacccgaaaattttg

SEQ ID NO: 3744344 - DNA, 25 bp, Homo sapien
tatcacagaacaacaggtgtaccga

SEQ ID NO: 3744345 - DNA, 25 bp, Homo sapien
tcacttaaagcgctccagtatgcct

SEQ ID NO: 3744346 - DNA, 25 bp, Homo sapien
cctgcggagtagagggtgaacttta

SEQ ID NO: 3744347 - DNA, 25 bp, Homo sapien
taaaaagggactcaacccaggcaga

SEQ ID NO: 3744348 - DNA, 25 bp, Homo sapien
gctcattaacccggaaggacctggc

SEQ ID NO: 3744349 - DNA, 25 bp, Homo sapien
gctcctgggccacgtcgcagcgggt

SEQ ID NO: 3744350 - DNA, 25 bp, Homo sapien
gaaatacaatttgtgcgttctcctc

SEQ ID NO: 3744351 - DNA, 25 bp, Homo sapien
aaggacctggcgctgaaatacaatt

SEQ ID NO: 3744352 - DNA, 25 bp, Homo sapien
gcggccaatcgcagcgccgccgagc

SEQ ID NO: 3744353 - DNA, 25 bp, Homo sapien
ccgaacgcggccaatcgcagcgccg

SEQ ID NO: 3744354 - DNA, 25 bp, Homo sapien
aatttcaaaacgctccggccaggca

SEQ ID NO: 3744355 - DNA, 25 bp, Homo sapien
ccaggcacacagcaccggtgcgccc

SEQ ID NO: 3744356 - DNA, 25 bp, Homo sapien
gggcgccgaggctggtgaggcgtcc

SEQ ID NO: 3744357 - DNA, 25 bp, Homo sapien
atgcaggcaccggatggctgcgcag

SEQ ID NO: 3744358 - DNA, 25 bp, Homo sapien
ccttccgcgccagggacatgcaggc

SEQ ID NO: 3744359 - DNA, 25 bp, Homo sapien
gcaggcaccggatggctgcgcaggg

SEQ ID NO: 3744360 - DNA, 25 bp, Homo sapien
cataagaaatcgaaggaaaccaaga

SEQ ID NO: 3744361 - DNA, 25 bp, Homo sapien
ctccctttagagacgatctgggtga

SEQ ID NO: 3744362 - DNA, 25 bp, Homo sapien
gaactccctttagagacgatctggg

SEQ ID NO: 3744363 - DNA, 25 bp, Homo sapien
accaagaactccctttagagacgat

SEQ ID NO: 3744364 - DNA, 25 bp, Homo sapien
cggacaccccttgcccgcatcttct

SEQ ID NO: 3744365 - DNA, 25 bp, Homo sapien
ccctgctccttagggccgtgctggt

SEQ ID NO: 3744366 - DNA, 25 bp, Homo sapien
aggacacggacaggctgcgcttcct

SEQ ID NO: 3744367 - DNA, 25 bp, Homo sapien
gatggtgaagctggagacgccaccg

SEQ ID NO: 3744368 - DNA, 25 bp, Homo sapien
ctcttctttaaagtccgagtgcgaa

SEQ ID NO: 3744369 - DNA, 25 bp, Homo sapien
cgggcccgagcctccgctgcccttg

SEQ ID NO: 3744370 - DNA, 25 bp, Homo sapien
agaggaaaggcgtgcgctccaagcc

SEQ ID NO: 3744371 - DNA, 25 bp, Homo sapien
ttaaagtccgagtgcgaaggagaga

SEQ ID NO: 3744372 - DNA, 25 bp, Homo sapien
agcggcatgctcaccagagtctgcg

SEQ ID NO: 3744373 - DNA, 25 bp, Homo sapien
caagtctttacctgggtctccgtga

SEQ ID NO: 3744374 - DNA, 25 bp, Homo sapien
tggtacacctggctgcgcgaaaaga

SEQ ID NO: 3744375 - DNA, 25 bp, Homo sapien
tcagtagtcgagcttgttgtatagg

SEQ ID NO: 3744376 - DNA, 25 bp, Homo sapien
tagtaattgtccaaagcctctgagg

SEQ ID NO: 3744377 - DNA, 25 bp, Homo sapien
tcaaagcgtactggttcggtctagg

SEQ ID NO: 3744378 - DNA, 25 bp, Homo sapien
atatttctggaaacacgccgccttg

SEQ ID NO: 3744379 - DNA, 25 bp, Homo sapien
tgcttacagtacagtacgcgcccgg

SEQ ID NO: 3744380 - DNA, 25 bp, Homo sapien
cacagggcatgtcatagcgggagct

SEQ ID NO: 3744381 - DNA, 25 bp, Homo sapien
cagctcgcttgttcccagaaggcaa

SEQ ID NO: 3744382 - DNA, 25 bp, Homo sapien
gcctgctttatacccctggagagga

SEQ ID NO: 3744383 - DNA, 25 bp, Homo sapien
aatcgcttaaatggcgaggcctgcc

SEQ ID NO: 3744384 - DNA, 25 bp, Homo sapien
tctccgcgcgagacacataactctg

SEQ ID NO: 3744385 - DNA, 25 bp, Homo sapien
tcgcgccaagctcgcggcgagcaaa

SEQ ID NO: 3744386 - DNA, 25 bp, Homo sapien
ctttactaggtacaagcagcgccat

SEQ ID NO: 3744387 - DNA, 25 bp, Homo sapien
gcagcgacaagctggtcgcgccaag

SEQ ID NO: 3744388 - DNA, 25 bp, Homo sapien
gagtgtagggaagcgcctttgcctc

SEQ ID NO: 3744389 - DNA, 25 bp, Homo sapien
tagggaagcgcctttgcctccctca

SEQ ID NO: 3744390 - DNA, 25 bp, Homo sapien
gatccagccacacgctgaaccaatg

SEQ ID NO: 3744391 - DNA, 25 bp, Homo sapien
caacaaaagagtgtagggaagcgcc

SEQ ID NO: 3744392 - DNA, 25 bp, Homo sapien
cactcgcaggctaggcgaaggaggc

SEQ ID NO: 3744393 - DNA, 25 bp, Homo sapien
gaagcaacgtttccactactcgcca

SEQ ID NO: 3744394 - DNA, 25 bp, Homo sapien
ttgggctcccctcagaagcaacgtt

SEQ ID NO: 3744395 - DNA, 25 bp, Homo sapien
cttgcttccctcagaacactcgcag

SEQ ID NO: 3744396 - DNA, 25 bp, Homo sapien
gcgccgagcactcgcccgccaaggt

SEQ ID NO: 3744397 - DNA, 25 bp, Homo sapien
accgcgaggagactctgcgcttgcg

SEQ ID NO: 3744398 - DNA, 25 bp, Homo sapien
ccgagaggacgaccgcgaggagact

SEQ ID NO: 3744399 - DNA, 25 bp, Homo sapien
ccaaggtccggactcgccccatcat

SEQ ID NO: 3744400 - DNA, 25 bp, Homo sapien
tacttgagccgcatggagttggccg

SEQ ID NO: 3744401 - DNA, 25 bp, Homo sapien
tcagcttgaactcgttagaaccggt

SEQ ID NO: 3744402 - DNA, 25 bp, Homo sapien
gagttggccggcacatcgtagagac

SEQ ID NO: 3744403 - DNA, 25 bp, Homo sapien
tgaacttcacggaggagatgccatc

SEQ ID NO: 3744404 - DNA, 25 bp, Homo sapien
ctccactccaggcatgcgttggatc

SEQ ID NO: 3744405 - DNA, 25 bp, Homo sapien
tagtcctccactccaggcatgcgtt

SEQ ID NO: 3744406 - DNA, 25 bp, Homo sapien
gatctagtcctccactccaggcatg

SEQ ID NO: 3744407 - DNA, 25 bp, Homo sapien
tcctccactccaggcatgcgttgga

SEQ ID NO: 3744408 - DNA, 25 bp, Homo sapien
cagtgaccatcacattcacttctgg

SEQ ID NO: 3744409 - DNA, 25 bp, Homo sapien
acactctgcggcctgctgttcccac

SEQ ID NO: 3744410 - DNA, 25 bp, Homo sapien
tgctgttcccacaatcagccggtct

SEQ ID NO: 3744411 - DNA, 25 bp, Homo sapien
tgcacgtaacccatgttccgtaagt

SEQ ID NO: 3744412 - DNA, 25 bp, Homo sapien
tctccagacactgagagggtatata

SEQ ID NO: 3744413 - DNA, 25 bp, Homo sapien
tttggaaacgctcgtatgcagcgag

SEQ ID NO: 3744414 - DNA, 25 bp, Homo sapien
tgtttggaaacgctcgtatgcagcg

SEQ ID NO: 3744415 - DNA, 25 bp, Homo sapien
ggaaacgctcgtatgcagcgagtct

SEQ ID NO: 3744416 - DNA, 25 bp, Homo sapien
tggaaacgctcgtatgcagcgagtc

SEQ ID NO: 3744417 - DNA, 25 bp, Homo sapien
tactcaactgccactcggccttcaa

SEQ ID NO: 3744418 - DNA, 25 bp, Homo sapien
tccaaatactcaactgccactcggc

SEQ ID NO: 3744419 - DNA, 25 bp, Homo sapien
cggccttcaatagagcttaatacat

SEQ ID NO: 3744420 - DNA, 25 bp, Homo sapien
acatttgaaggcatacttcttcttc

SEQ ID NO: 3744421 - DNA, 25 bp, Homo sapien
caaatgtattgtggatattgtgaaa

SEQ ID NO: 3744422 - DNA, 25 bp, Homo sapien
tgtggcaaatgtattgtggatattg

SEQ ID NO: 3744423 - DNA, 25 bp, Homo sapien
gatattgtgaaaagaaatggcattg

SEQ ID NO: 3744424 - DNA, 25 bp, Homo sapien
ttgtggatattgtgaaaagaaatgg

SEQ ID NO: 3744425 - DNA, 25 bp, Homo sapien
gatggaattggcacagtcgcttttt

SEQ ID NO: 3744426 - DNA, 25 bp, Homo sapien
gaaggcaagtgatgcgatgctcgtg

SEQ ID NO: 3744427 - DNA, 25 bp, Homo sapien
tcatacatatatgatgacgctattg

SEQ ID NO: 3744428 - DNA, 25 bp, Homo sapien
atgctcgtggggtaccgatggaatt

SEQ ID NO: 3744429 - DNA, 25 bp, Homo sapien
cctacggatattgaaagcttgggag

SEQ ID NO: 3744430 - DNA, 25 bp, Homo sapien
gagtttccaataagacctgaaggtc

SEQ ID NO: 3744431 - DNA, 25 bp, Homo sapien
cagctgtaatatcgagcaggcatca

SEQ ID NO: 3744432 - DNA, 25 bp, Homo sapien
cagatttcccttaaagcctggtaga

SEQ ID NO: 3744433 - DNA, 25 bp, Homo sapien
tgtatcgagaacttcctttaagggc

SEQ ID NO: 3744434 - DNA, 25 bp, Homo sapien
caaatatgtatcgagaacttccttt

SEQ ID NO: 3744435 - DNA, 25 bp, Homo sapien
aatatgtatcgagaacttcctttaa

SEQ ID NO: 3744436 - DNA, 25 bp, Homo sapien
tatgtatcgagaacttcctttaagg

SEQ ID NO: 3744437 - DNA, 25 bp, Homo sapien
gggctcaaccaatcagcaagggtac

SEQ ID NO: 3744438 - DNA, 25 bp, Homo sapien
cagcatgagatcaaaatggccagcc

SEQ ID NO: 3744439 - DNA, 25 bp, Homo sapien
ccaggacaggagatacaaaagtgac

SEQ ID NO: 3744440 - DNA, 25 bp, Homo sapien
taactcagcaaagtacaggaatcct

SEQ ID NO: 3744441 - DNA, 25 bp, Homo sapien
catggcacttaagtaaatgaaatct

SEQ ID NO: 3744442 - DNA, 25 bp, Homo sapien
tatcatcaacatggcacttaagtaa

SEQ ID NO: 3744443 - DNA, 25 bp, Homo sapien
tcatcaacatggcacttaagtaaat

SEQ ID NO: 3744444 - DNA, 25 bp, Homo sapien
tcaacatggcacttaagtaaatgaa

SEQ ID NO: 3744445 - DNA, 25 bp, Homo sapien
tctttaatagtaataaatccaccat

SEQ ID NO: 3744446 - DNA, 25 bp, Homo sapien
ctttaatagtaataaatccaccatt

SEQ ID NO: 3744447 - DNA, 25 bp, Homo sapien
gtcacttgccctccaattttgtttg

SEQ ID NO: 3744448 - DNA, 25 bp, Homo sapien
tcaaggtcaaaactgattctcaaaa

SEQ ID NO: 3744449 - DNA, 25 bp, Homo sapien
caaatacctttaatgcagcaaacca

SEQ ID NO: 3744450 - DNA, 25 bp, Homo sapien
gtttgcccaaatacctttaatgcag

SEQ ID NO: 3744451 - DNA, 25 bp, Homo sapien
cagcggctggtcaactgaaatggac

SEQ ID NO: 3744452 - DNA, 25 bp, Homo sapien
tagattaacctcctcatgaagcagt

SEQ ID NO: 3744453 - DNA, 25 bp, Homo sapien
caaaagatgggttcagacttacacc

SEQ ID NO: 3744454 - DNA, 25 bp, Homo sapien
tttaactttaatcaccagcggctgg

SEQ ID NO: 3744455 - DNA, 25 bp, Homo sapien
gatacagcaactgggcttactaggg

SEQ ID NO: 3744456 - DNA, 25 bp, Homo sapien
aaatacgtcagactactgtacaggg

SEQ ID NO: 3744457 - DNA, 25 bp, Homo sapien
gaagcaaacaaagctttccatagag

SEQ ID NO: 3744458 - DNA, 25 bp, Homo sapien
agtaactctaacacatcccttaagg

SEQ ID NO: 3744459 - DNA, 25 bp, Homo sapien
catgcctgtgatgacgagttttgcc

SEQ ID NO: 3744460 - DNA, 25 bp, Homo sapien
gaagctgcacacttggctcaaaggc

SEQ ID NO: 3744461 - DNA, 25 bp, Homo sapien
gtaaagcactgagccaaaaggtccc

SEQ ID NO: 3744462 - DNA, 25 bp, Homo sapien
tactgcgctggcactagtaaagcac

SEQ ID NO: 3744463 - DNA, 25 bp, Homo sapien
gcctcctatgagatgagtaagttct

SEQ ID NO: 3744464 - DNA, 25 bp, Homo sapien
atgttaaaagtagctgcctcctatg

SEQ ID NO: 3744465 - DNA, 25 bp, Homo sapien
aaatcctgaaggatggatatacacc

SEQ ID NO: 3744466 - DNA, 25 bp, Homo sapien
agtgtggtggctatcttagtaataa

SEQ ID NO: 3744467 - DNA, 25 bp, Homo sapien
tctcgctctggaacagccgataggg

SEQ ID NO: 3744468 - DNA, 25 bp, Homo sapien
caggctcttttgtatccaggcgtca

SEQ ID NO: 3744469 - DNA, 25 bp, Homo sapien
tgctcaggcgcatcttagccacagg

SEQ ID NO: 3744470 - DNA, 25 bp, Homo sapien
ggaaagcccgtgcaaggctcactca

SEQ ID NO: 3744471 - DNA, 25 bp, Homo sapien
tctggatgagtgacaggccctctga

SEQ ID NO: 3744472 - DNA, 25 bp, Homo sapien
tttgacaagatgctaggctcccttc

SEQ ID NO: 3744473 - DNA, 25 bp, Homo sapien
ccctctgagtgagtgggctcaaaga

SEQ ID NO: 3744474 - DNA, 25 bp, Homo sapien
ggctggactctaagattcacgctgt

SEQ ID NO: 3744475 - DNA, 25 bp, Homo sapien
taatgaatgccctaagaatctaatg

SEQ ID NO: 3744476 - DNA, 25 bp, Homo sapien
tactagagagcactgtaggcatcct

SEQ ID NO: 3744477 - DNA, 25 bp, Homo sapien
catgacattcgtatagcccaaaaga

SEQ ID NO: 3744478 - DNA, 25 bp, Homo sapien
tgtagttacataatgcactgcctga

SEQ ID NO: 3744479 - DNA, 25 bp, Homo sapien
aataaagagcctccgagcggcagaa

SEQ ID NO: 3744480 - DNA, 25 bp, Homo sapien
tccaggcttgagttaggatcccctc

SEQ ID NO: 3744481 - DNA, 25 bp, Homo sapien
tacggcttccctgcttcgatacaaa

SEQ ID NO: 3744482 - DNA, 25 bp, Homo sapien
tacttcctcaagactgcgatgtgct

SEQ ID NO: 3744483 - DNA, 25 bp, Homo sapien
ctgcgtggacagggcactggtggca

SEQ ID NO: 3744484 - DNA, 25 bp, Homo sapien
tgcgtggacagggcactggtggcat

SEQ ID NO: 3744485 - DNA, 25 bp, Homo sapien
ggacagggcatcccggttcactcac

SEQ ID NO: 3744486 - DNA, 25 bp, Homo sapien
ccggttcactcacacctgaaactga

SEQ ID NO: 3744487 - DNA, 25 bp, Homo sapien
tcactcacacctgaaactgatcctg

SEQ ID NO: 3744488 - DNA, 25 bp, Homo sapien
catcccggttcactcacacctgaaa

SEQ ID NO: 3744489 - DNA, 25 bp, Homo sapien
ttcactcgcacctgaaacactgacc

SEQ ID NO: 3744490 - DNA, 25 bp, Homo sapien
gttcactcgcacctgaaacactgac

SEQ ID NO: 3744491 - DNA, 25 bp, Homo sapien
gcacacatacatctaggcaagcagt

SEQ ID NO: 3744492 - DNA, 25 bp, Homo sapien
tgtgtctgagatgagcccaacaggc

SEQ ID NO: 3744493 - DNA, 25 bp, Homo sapien
gaaatgatgtactaggaccaacgtg

SEQ ID NO: 3744494 - DNA, 25 bp, Homo sapien
caataggactggcacatcatggatg

SEQ ID NO: 3744495 - DNA, 25 bp, Homo sapien
gtgccaacggacttcatccacagca

SEQ ID NO: 3744496 - DNA, 25 bp, Homo sapien
agggactcactgtgccaacggactt

SEQ ID NO: 3744497 - DNA, 25 bp, Homo sapien
ccagccatgggtcaagcagcgagtg

SEQ ID NO: 3744498 - DNA, 25 bp, Homo sapien
agccatgggtcaagcagcgagtgca

SEQ ID NO: 3744499 - DNA, 25 bp, Homo sapien
tattcacaaagtgggcctcatcagc

SEQ ID NO: 3744500 - DNA, 25 bp, Homo sapien
taatgataacaagagcggccaacgt

SEQ ID NO: 3744501 - DNA, 25 bp, Homo sapien
ggagactctgtgacatgcccaaggc

SEQ ID NO: 3744502 - DNA, 25 bp, Homo sapien
agcacgtagctaacacattcccgga

SEQ ID NO: 3744503 - DNA, 25 bp, Homo sapien
gtagcaatacacaaatggaggtttg

SEQ ID NO: 3744504 - DNA, 25 bp, Homo sapien
tacacaaatggaggtttgcatctgc

SEQ ID NO: 3744505 - DNA, 25 bp, Homo sapien
caatacacaaatggaggtttgcatc

SEQ ID NO: 3744506 - DNA, 25 bp, Homo sapien
cacaaatggaggtttgcatctgccc

SEQ ID NO: 3744507 - DNA, 25 bp, Homo sapien
gtgtccaccgagcatccccgaggct

SEQ ID NO: 3744508 - DNA, 25 bp, Homo sapien
ggtgtccaccgagcatccccgaggc

SEQ ID NO: 3744509 - DNA, 25 bp, Homo sapien
tacagagcccgttgcatgcagagct

SEQ ID NO: 3744510 - DNA, 25 bp, Homo sapien
taaagttagtttactgcgccccatc

SEQ ID NO: 3744511 - DNA, 25 bp, Homo sapien
tcctgagccatggtgaaggtgtctc

SEQ ID NO: 3744512 - DNA, 25 bp, Homo sapien
cagctaagactagaaccggctctgt

SEQ ID NO: 3744513 - DNA, 25 bp, Homo sapien
gattggtgacactagagcactgaac

SEQ ID NO: 3744514 - DNA, 25 bp, Homo sapien
catttatcgccctctagaatctgag

SEQ ID NO: 3744515 - DNA, 25 bp, Homo sapien
cccagagggaatacagaagtggcta

SEQ ID NO: 3744516 - DNA, 25 bp, Homo sapien
atacaaatccctggcattggccccg

SEQ ID NO: 3744517 - DNA, 25 bp, Homo sapien
gaataacggttcattacttgttgca

SEQ ID NO: 3744518 - DNA, 25 bp, Homo sapien
actcatataatgtcctctgtttccc

SEQ ID NO: 3744519 - DNA, 25 bp, Homo sapien
ttgcagcacgtcatatggagacaaa

SEQ ID NO: 3744520 - DNA, 25 bp, Homo sapien
gagacaaacttttactccacattat

SEQ ID NO: 3744521 - DNA, 25 bp, Homo sapien
ttttctctggtttactctgcacact

SEQ ID NO: 3744522 - DNA, 25 bp, Homo sapien
tgtgaccctaccactttggacagcc

SEQ ID NO: 3744523 - DNA, 25 bp, Homo sapien
tgcctgtgaccctaccactttggac

SEQ ID NO: 3744524 - DNA, 25 bp, Homo sapien
aggatgagaccagccagaacaacat

SEQ ID NO: 3744525 - DNA, 25 bp, Homo sapien
gaccctaccactttggacagccaaa

SEQ ID NO: 3744526 - DNA, 25 bp, Homo sapien
tgtccacatcagataaggagacggg

SEQ ID NO: 3744527 - DNA, 25 bp, Homo sapien
ctatttaattcgagctggttgcccc

SEQ ID NO: 3744528 - DNA, 25 bp, Homo sapien
taaatatgctgggtaaatagtccct

SEQ ID NO: 3744529 - DNA, 25 bp, Homo sapien
tctgtcaagctaacactcctttggg

SEQ ID NO: 3744530 - DNA, 25 bp, Homo sapien
gagaattgccaggatgctacaacta

SEQ ID NO: 3744531 - DNA, 25 bp, Homo sapien
ttctatcacagaacaacctgggcca

SEQ ID NO: 3744532 - DNA, 25 bp, Homo sapien
gatctgactagatccactctggctg

SEQ ID NO: 3744533 - DNA, 25 bp, Homo sapien
ttttaagtcacccagataagctggc

SEQ ID NO: 3744534 - DNA, 25 bp, Homo sapien
caggacaagggtggagccgtggtcc

SEQ ID NO: 3744535 - DNA, 25 bp, Homo sapien
cagaatcggcagctccatcctactt

SEQ ID NO: 3744536 - DNA, 25 bp, Homo sapien
tccaggatcagggagcagaatcggc

SEQ ID NO: 3744537 - DNA, 25 bp, Homo sapien
gaagggatgtcaacaccaggacaag

SEQ ID NO: 3744538 - DNA, 25 bp, Homo sapien
agatcaggtgaaggcccttcagcag

SEQ ID NO: 3744539 - DNA, 25 bp, Homo sapien
agcacctgccagatcaggtgaaggc

SEQ ID NO: 3744540 - DNA, 25 bp, Homo sapien
cagatcaggtgaaggcccttcagca

SEQ ID NO: 3744541 - DNA, 25 bp, Homo sapien
tgtatggaaacggatgtcctggaag

SEQ ID NO: 3744542 - DNA, 25 bp, Homo sapien
gtatggaaacggatgtcctggaagt

SEQ ID NO: 3744543 - DNA, 25 bp, Homo sapien
atggaaacggatgtcctggaagtcc

SEQ ID NO: 3744544 - DNA, 25 bp, Homo sapien
tatggaaacggatgtcctggaagtc

SEQ ID NO: 3744545 - DNA, 25 bp, Homo sapien
ggttaatcctcactagctcagcctc

SEQ ID NO: 3744546 - DNA, 25 bp, Homo sapien
gctcggttaatcctcactagctcag

SEQ ID NO: 3744547 - DNA, 25 bp, Homo sapien
caggctcggttaatcctcactagct

SEQ ID NO: 3744548 - DNA, 25 bp, Homo sapien
acaggctcggttaatcctcactagc

SEQ ID NO: 3744549 - DNA, 25 bp, Homo sapien
tttgggcatgttgctctctgatgac

SEQ ID NO: 3744550 - DNA, 25 bp, Homo sapien
gtgatttgggcatgttgctctctga

SEQ ID NO: 3744551 - DNA, 25 bp, Homo sapien
gatttgggcatgttgctctctgatg

SEQ ID NO: 3744552 - DNA, 25 bp, Homo sapien
tgatttgggcatgttgctctctgat

SEQ ID NO: 3744553 - DNA, 25 bp, Homo sapien
tgaggtctccgtagtcacagacaga

SEQ ID NO: 3744554 - DNA, 25 bp, Homo sapien
tgtgaggtctccgtagtcacagaca

SEQ ID NO: 3744555 - DNA, 25 bp, Homo sapien
aggtctccgtagtcacagacagatt

SEQ ID NO: 3744556 - DNA, 25 bp, Homo sapien
atggtgtgaggtctccgtagtcaca

SEQ ID NO: 3744557 - DNA, 25 bp, Homo sapien
agcgtcttccactatttcctcactg

SEQ ID NO: 3744558 - DNA, 25 bp, Homo sapien
gattgccagcgtcttccactatttc

SEQ ID NO: 3744559 - DNA, 25 bp, Homo sapien
gtcttccactatttcctcactgtgt

SEQ ID NO: 3744560 - DNA, 25 bp, Homo sapien
ttgccagcgtcttccactatttcct

SEQ ID NO: 3744561 - DNA, 25 bp, Homo sapien
ttaatgtccctgtccccggtgaaca

SEQ ID NO: 3744562 - DNA, 25 bp, Homo sapien
ggctctgtcactaattacctgtgtg

SEQ ID NO: 3744563 - DNA, 25 bp, Homo sapien
cctgtgtgaatcatggaccagttac

SEQ ID NO: 3744564 - DNA, 25 bp, Homo sapien
gagaatctagaaggaccacaggtca

SEQ ID NO: 3744565 - DNA, 25 bp, Homo sapien
gttgctgttgcccgagccacaggat

SEQ ID NO: 3744566 - DNA, 25 bp, Homo sapien
ctaagtgttgctgttgcccgagcca

SEQ ID NO: 3744567 - DNA, 25 bp, Homo sapien
cattgaagcatttgttgttatagca

SEQ ID NO: 3744568 - DNA, 25 bp, Homo sapien
aaagttcattgaagcatttgttgtt

SEQ ID NO: 3744569 - DNA, 25 bp, Homo sapien
aagaaattgtcaacaacctcaaata

SEQ ID NO: 3744570 - DNA, 25 bp, Homo sapien
atatctatcaataaaaaagtaggta

SEQ ID NO: 3744571 - DNA, 25 bp, Homo sapien
tgctccaacttcctctatactttgc

SEQ ID NO: 3744572 - DNA, 25 bp, Homo sapien
ttttccttctgcttatggcttcccg

SEQ ID NO: 3744573 - DNA, 25 bp, Homo sapien
aggatattaagatggcagattctct

SEQ ID NO: 3744574 - DNA, 25 bp, Homo sapien
tatactttgctaagcttattttcct

SEQ ID NO: 3744575 - DNA, 25 bp, Homo sapien
tctctgaaaagccagcaccctaggc

SEQ ID NO: 3744576 - DNA, 25 bp, Homo sapien
tggttctctgaaaagccagcaccct

SEQ ID NO: 3744577 - DNA, 25 bp, Homo sapien
gttctctgaaaagccagcaccctag

SEQ ID NO: 3744578 - DNA, 25 bp, Homo sapien
gagtagggggatggttctctgaaaa

SEQ ID NO: 3744579 - DNA, 25 bp, Homo sapien
tccaggttctgtttaccctgatatt

SEQ ID NO: 3744580 - DNA, 25 bp, Homo sapien
gatattgtccaggataatcatttat

SEQ ID NO: 3744581 - DNA, 25 bp, Homo sapien
tctgtttaccctgatattgtccagg

SEQ ID NO: 3744582 - DNA, 25 bp, Homo sapien
tcctgctgccttctaagttttatta

SEQ ID NO: 3744583 - DNA, 25 bp, Homo sapien
gtctttgaattgtggccgccagccc

SEQ ID NO: 3744584 - DNA, 25 bp, Homo sapien
aattgcaaaaggaaagggccgcttg

SEQ ID NO: 3744585 - DNA, 25 bp, Homo sapien
attgcaaaaggaaagggccgcttgt

SEQ ID NO: 3744586 - DNA, 25 bp, Homo sapien
taacaagaagcccctcgtgatgccc

SEQ ID NO: 3744587 - DNA, 25 bp, Homo sapien
gtcagatccacataatccacacact

SEQ ID NO: 3744588 - DNA, 25 bp, Homo sapien
aatagtggtcaaatggcttgttggc

SEQ ID NO: 3744589 - DNA, 25 bp, Homo sapien
tccgagcctggcgtcagatccacat

SEQ ID NO: 3744590 - DNA, 25 bp, Homo sapien
cggcgatgatcgaacagggaacaaa

SEQ ID NO: 3744591 - DNA, 25 bp, Homo sapien
ctgggctgaaatggtactactggac

SEQ ID NO: 3744592 - DNA, 25 bp, Homo sapien
tggacaaggaaccaattcagggact

SEQ ID NO: 3744593 - DNA, 25 bp, Homo sapien
ctaaagaagctccttgtgatgggtc

SEQ ID NO: 3744594 - DNA, 25 bp, Homo sapien
tctatttgacatctcccttgacctc

SEQ ID NO: 3744595 - DNA, 25 bp, Homo sapien
tgtctaagctctctggaacacctcc

SEQ ID NO: 3744596 - DNA, 25 bp, Homo sapien
cacagttagagttatgatgtcatcc

SEQ ID NO: 3744597 - DNA, 25 bp, Homo sapien
ctcctccagggttgcctctatttga

SEQ ID NO: 3744598 - DNA, 25 bp, Homo sapien
gatgagacaattacagcaaagagca

SEQ ID NO: 3744599 - DNA, 25 bp, Homo sapien
aagaggccacctctgctgtacgtgc

SEQ ID NO: 3744600 - DNA, 25 bp, Homo sapien
caccctgtgtaatggaaggcaaggc

SEQ ID NO: 3744601 - DNA, 25 bp, Homo sapien
tctcggtgctgaaaagtgaagacgc

SEQ ID NO: 3744602 - DNA, 25 bp, Homo sapien
tgattcggttggttcttgttgctca

SEQ ID NO: 3744603 - DNA, 25 bp, Homo sapien
gattcggttggttcttgttgctcat

SEQ ID NO: 3744604 - DNA, 25 bp, Homo sapien
tgtccagtttggtttgattcggttg

SEQ ID NO: 3744605 - DNA, 25 bp, Homo sapien
tttgattcggttggttcttgttgct

SEQ ID NO: 3744606 - DNA, 25 bp, Homo sapien
tcaaggagacaaatcacatagaaca

SEQ ID NO: 3744607 - DNA, 25 bp, Homo sapien
aggagacaaatcacatagaacaatc

SEQ ID NO: 3744608 - DNA, 25 bp, Homo sapien
gacaaatcacatagaacaatcctgg

SEQ ID NO: 3744609 - DNA, 25 bp, Homo sapien
gagacaaatcacatagaacaatcct

SEQ ID NO: 3744610 - DNA, 25 bp, Homo sapien
cgtttgtgcggaagtggcgtttaca

SEQ ID NO: 3744611 - DNA, 25 bp, Homo sapien
aattaaattgattgcaagcaaccgt

SEQ ID NO: 3744612 - DNA, 25 bp, Homo sapien
ctttaatcgctttaaatggagccaa

SEQ ID NO: 3744613 - DNA, 25 bp, Homo sapien
tccaatcagatctccactttaatcg

SEQ ID NO: 3744614 - DNA, 25 bp, Homo sapien
tcttgttgacatccaaccaattcag

SEQ ID NO: 3744615 - DNA, 25 bp, Homo sapien
attcagagctaaaaatccatcctcc

SEQ ID NO: 3744616 - DNA, 25 bp, Homo sapien
cccagtaaatgctgaccttggttta

SEQ ID NO: 3744617 - DNA, 25 bp, Homo sapien
caatactcaagacaccataatttgg

SEQ ID NO: 3744618 - DNA, 25 bp, Homo sapien
tccaaagtgacaagaagagtctggc

SEQ ID NO: 3744619 - DNA, 25 bp, Homo sapien
tcttgctaagttgtacaatgaccta

SEQ ID NO: 3744620 - DNA, 25 bp, Homo sapien
attagagtatgaggatccatttttg

SEQ ID NO: 3744621 - DNA, 25 bp, Homo sapien
catctcgaaacgcttccaactccag

SEQ ID NO: 3744622 - DNA, 25 bp, Homo sapien
ctgagaccatctcgaaacgcttcca

SEQ ID NO: 3744623 - DNA, 25 bp, Homo sapien
agaccatctcgaaacgcttccaact

SEQ ID NO: 3744624 - DNA, 25 bp, Homo sapien
atctcgaaacgcttccaactccagc

SEQ ID NO: 3744625 - DNA, 25 bp, Homo sapien
cctaacagcaagaacagttcctgca

SEQ ID NO: 3744626 - DNA, 25 bp, Homo sapien
ctaacagcaagaacagttcctgcat

SEQ ID NO: 3744627 - DNA, 25 bp, Homo sapien
gagctcattatcatacccggaggac

SEQ ID NO: 3744628 - DNA, 25 bp, Homo sapien
cagcagttctggatatctgaaagag

SEQ ID NO: 3744629 - DNA, 25 bp, Homo sapien
tctgaaagagggtgtccagaagttt

SEQ ID NO: 3744630 - DNA, 25 bp, Homo sapien
tttgtagcagcccacgagctcatta

SEQ ID NO: 3744631 - DNA, 25 bp, Homo sapien
ggctgaaatccgatcattaaaccaa

SEQ ID NO: 3744632 - DNA, 25 bp, Homo sapien
cattaaaccaacttcactattaggg

SEQ ID NO: 3744633 - DNA, 25 bp, Homo sapien
tccgatcattaaaccaacttcacta

SEQ ID NO: 3744634 - DNA, 25 bp, Homo sapien
cttccttggctgaaatccgatcatt

SEQ ID NO: 3744635 - DNA, 25 bp, Homo sapien
gaggaggcagtctgtatatgcaccg

SEQ ID NO: 3744636 - DNA, 25 bp, Homo sapien
taaattgtgctctcaagtcagccag

SEQ ID NO: 3744637 - DNA, 25 bp, Homo sapien
agtaaacactttgccgcattgtctg

SEQ ID NO: 3744638 - DNA, 25 bp, Homo sapien
tattttaacctcgtgcagaaaatgc

SEQ ID NO: 3744639 - DNA, 25 bp, Homo sapien
gtttcagcggcgaaaagcgtgattt

SEQ ID NO: 3744640 - DNA, 25 bp, Homo sapien
gccaatttgtttcagcggcgaaaag

SEQ ID NO: 3744641 - DNA, 25 bp, Homo sapien
aaagcgtgatttagtgtttgtagca

SEQ ID NO: 3744642 - DNA, 25 bp, Homo sapien
gcggcgaaaagcgtgatttagtgtt

SEQ ID NO: 3744643 - DNA, 25 bp, Homo sapien
acgtacaccatttctgtactgcagg

SEQ ID NO: 3744644 - DNA, 25 bp, Homo sapien
gatgactgaagcatctgtatatagc

SEQ ID NO: 3744645 - DNA, 25 bp, Homo sapien
tgaacactatagctgatgactgaag

SEQ ID NO: 3744646 - DNA, 25 bp, Homo sapien
cagacccatttcctaataagatgaa

SEQ ID NO: 3744647 - DNA, 25 bp, Homo sapien
tgcggaaaaccattttcattgaaaa

SEQ ID NO: 3744648 - DNA, 25 bp, Homo sapien
gctgcggaaaaccattttcattgaa

SEQ ID NO: 3744649 - DNA, 25 bp, Homo sapien
ttagctgcggaaaaccattttcatt

SEQ ID NO: 3744650 - DNA, 25 bp, Homo sapien
tagctgcggaaaaccattttcattg

SEQ ID NO: 3744651 - DNA, 25 bp, Homo sapien
tgttgtcacattgtaccgtggcctt

SEQ ID NO: 3744652 - DNA, 25 bp, Homo sapien
taccgtggccttaaaacactgttca

SEQ ID NO: 3744653 - DNA, 25 bp, Homo sapien
gcctggtttaattacagtttcagta

SEQ ID NO: 3744654 - DNA, 25 bp, Homo sapien
tggtttaattacagtttcagtagca

SEQ ID NO: 3744655 - DNA, 25 bp, Homo sapien
ctctggcaaccattctccaggtgcc

SEQ ID NO: 3744656 - DNA, 25 bp, Homo sapien
tcactctggcaaccattctccaggt

SEQ ID NO: 3744657 - DNA, 25 bp, Homo sapien
cactctggcaaccattctccaggtg

SEQ ID NO: 3744658 - DNA, 25 bp, Homo sapien
tccaaattatctctattgtctgggg

SEQ ID NO: 3744659 - DNA, 25 bp, Homo sapien
ctgctttacactaaccaagtagtta

SEQ ID NO: 3744660 - DNA, 25 bp, Homo sapien
ctctctgctttacactaaccaagta

SEQ ID NO: 3744661 - DNA, 25 bp, Homo sapien
acagcctctcctgtcatccatgaat

SEQ ID NO: 3744662 - DNA, 25 bp, Homo sapien
gcctctcctgtcatccatgaatctt

SEQ ID NO: 3744663 - DNA, 25 bp, Homo sapien
ccttgctacggtccttgggctcttc

SEQ ID NO: 3744664 - DNA, 25 bp, Homo sapien
cagaatcagggccttgctacggtcc

SEQ ID NO: 3744665 - DNA, 25 bp, Homo sapien
ctcgtctcccagaatcagggccttg

SEQ ID NO: 3744666 - DNA, 25 bp, Homo sapien
cagggccttgctacggtccttgggc

SEQ ID NO: 3744667 - DNA, 25 bp, Homo sapien
tccagtcggagatgaaagtgtcgtc

SEQ ID NO: 3744668 - DNA, 25 bp, Homo sapien
tgctccagcctagagcccggggttt

SEQ ID NO: 3744669 - DNA, 25 bp, Homo sapien
catctctcaccaaaatccagtcgga

SEQ ID NO: 3744670 - DNA, 25 bp, Homo sapien
aagtgtcgtccatctactttctgac

SEQ ID NO: 3744671 - DNA, 25 bp, Homo sapien
agccaggtcattgggtgaggccaaa

SEQ ID NO: 3744672 - DNA, 25 bp, Homo sapien
cagcatcttggagggaagcttccaa

SEQ ID NO: 3744673 - DNA, 25 bp, Homo sapien
aaaaggatgttgtgcccatgctgcc

SEQ ID NO: 3744674 - DNA, 25 bp, Homo sapien
ttcagaggctcgtgtacccacagtc

SEQ ID NO: 3744675 - DNA, 25 bp, Homo sapien
caaacaggagagtaaagagagggcc

SEQ ID NO: 3744676 - DNA, 25 bp, Homo sapien
catcctcttctcttttcaggggcaa

SEQ ID NO: 3744677 - DNA, 25 bp, Homo sapien
gagagtaaagagagggccaattttg

SEQ ID NO: 3744678 - DNA, 25 bp, Homo sapien
cttttcaggggcaaacaggagagta

SEQ ID NO: 3744679 - DNA, 25 bp, Homo sapien
caggctcatggttggtttgttggca

SEQ ID NO: 3744680 - DNA, 25 bp, Homo sapien
cctgcatgttgcaaagcattctgaa

SEQ ID NO: 3744681 - DNA, 25 bp, Homo sapien
tctttggatgcaggctcatggttgg

SEQ ID NO: 3744682 - DNA, 25 bp, Homo sapien
tcatgtggctgtagaaggctttctt

SEQ ID NO: 3744683 - DNA, 25 bp, Homo sapien
tgtgtgtgatcgcttttcctctaca

SEQ ID NO: 3744684 - DNA, 25 bp, Homo sapien
atctctgttcctcgcaataatgagg

SEQ ID NO: 3744685 - DNA, 25 bp, Homo sapien
gtgatctctgtctgttcctctacaa

SEQ ID NO: 3744686 - DNA, 25 bp, Homo sapien
aatgagggtttgtatgtatgagtgt

SEQ ID NO: 3744687 - DNA, 25 bp, Homo sapien
ctaattttccacgagcagaaccagg

SEQ ID NO: 3744688 - DNA, 25 bp, Homo sapien
tggtcagaccgaaagagaagggccc

SEQ ID NO: 3744689 - DNA, 25 bp, Homo sapien
gcctgtaggccccattgtcaataga

SEQ ID NO: 3744690 - DNA, 25 bp, Homo sapien
ggatcaacagggcaccacaaaaggt

SEQ ID NO: 3744691 - DNA, 25 bp, Homo sapien
ctgtagcttgatgatgagaggacat

SEQ ID NO: 3744692 - DNA, 25 bp, Homo sapien
gaagtctgtagcttgatgatgagag

SEQ ID NO: 3744693 - DNA, 25 bp, Homo sapien
agtctgtagcttgatgatgagagga

SEQ ID NO: 3744694 - DNA, 25 bp, Homo sapien
cttggaagtctgtagcttgatgatg

SEQ ID NO: 3744695 - DNA, 25 bp, Homo sapien
ttctctgtatatcttgagttccagc

SEQ ID NO: 3744696 - DNA, 25 bp, Homo sapien
ctgtatatcttgagttccagcacct

SEQ ID NO: 3744697 - DNA, 25 bp, Homo sapien
ccagtttgttcatcaattaccacca

SEQ ID NO: 3744698 - DNA, 25 bp, Homo sapien
gtttgttcatcaattaccaccatct

SEQ ID NO: 3744699 - DNA, 25 bp, Homo sapien
caaagtgacagaaacgtgagcaggc

SEQ ID NO: 3744700 - DNA, 25 bp, Homo sapien
cagggcctaaacacacgctagcttc

SEQ ID NO: 3744701 - DNA, 25 bp, Homo sapien
tctgctgcgtaggtagaaaagacag

SEQ ID NO: 3744702 - DNA, 25 bp, Homo sapien
tgtggtcaaagcaagagaagtctcc

SEQ ID NO: 3744703 - DNA, 25 bp, Homo sapien
ctggtacttgctgatgtccatacat

SEQ ID NO: 3744704 - DNA, 25 bp, Homo sapien
aaagtctctgcgggcaaagcctgca

SEQ ID NO: 3744705 - DNA, 25 bp, Homo sapien
acctttcagggcatcgttaagcttg

SEQ ID NO: 3744706 - DNA, 25 bp, Homo sapien
catcgttaagcttgccaagttcttc

SEQ ID NO: 3744707 - DNA, 25 bp, Homo sapien
gacataggccacgatttgaaatctg

SEQ ID NO: 3744708 - DNA, 25 bp, Homo sapien
tgacagagtccttatctgggtttcc

SEQ ID NO: 3744709 - DNA, 25 bp, Homo sapien
tccatgaggctcaagtaaaaattaa

SEQ ID NO: 3744710 - DNA, 25 bp, Homo sapien
aactcacagcccaaagacataggcc

SEQ ID NO: 3744711 - DNA, 25 bp, Homo sapien
tgggcgaggagacatgaaacacttc

SEQ ID NO: 3744712 - DNA, 25 bp, Homo sapien
tacggagaccctttgtcactgctaa

SEQ ID NO: 3744713 - DNA, 25 bp, Homo sapien
tctgctggctgggacattcctcaca

SEQ ID NO: 3744714 - DNA, 25 bp, Homo sapien
tcctgggtacctgctagatgcaaag

SEQ ID NO: 3744715 - DNA, 25 bp, Homo sapien
gccatctcagataaaatagcccaag

SEQ ID NO: 3744716 - DNA, 25 bp, Homo sapien
caatttgcagtgtgcgatcttctcc

SEQ ID NO: 3744717 - DNA, 25 bp, Homo sapien
acctgaatatgccaacagagagggc

SEQ ID NO: 3744718 - DNA, 25 bp, Homo sapien
gctgcgctgtcttgaacctctgcca

SEQ ID NO: 3744719 - DNA, 25 bp, Homo sapien
ctccaaaacaaggaaaccgtatgct

SEQ ID NO: 3744720 - DNA, 25 bp, Homo sapien
gcagctctgatctcacggtatgaat

SEQ ID NO: 3744721 - DNA, 25 bp, Homo sapien
tagaactcgagcttcctccaatgga

SEQ ID NO: 3744722 - DNA, 25 bp, Homo sapien
taccaaacatctgttgccgagaaca

SEQ ID NO: 3744723 - DNA, 25 bp, Homo sapien
ggaatggcattcatgaagggctcag

SEQ ID NO: 3744724 - DNA, 25 bp, Homo sapien
gaaggaattgaaccacgcgaagatt

SEQ ID NO: 3744725 - DNA, 25 bp, Homo sapien
gatcccagacctgtactctcaaagg

SEQ ID NO: 3744726 - DNA, 25 bp, Homo sapien
caaaggcttccatccttgttggtat

SEQ ID NO: 3744727 - DNA, 25 bp, Homo sapien
ctggcctgccatgtggacaggaggt

SEQ ID NO: 3744728 - DNA, 25 bp, Homo sapien
tggcctgccatgtggacaggaggtg

SEQ ID NO: 3744729 - DNA, 25 bp, Homo sapien
tcctagcagcacggagctcctctgg

SEQ ID NO: 3744730 - DNA, 25 bp, Homo sapien
tgtttctgcctggatctcctagcag

SEQ ID NO: 3744731 - DNA, 25 bp, Homo sapien
gttcatgtgttaaaggacctggccc

SEQ ID NO: 3744732 - DNA, 25 bp, Homo sapien
ccacaacaggaccataaccaaaggc

SEQ ID NO: 3744733 - DNA, 25 bp, Homo sapien
taatgaagcattgggcaggctgcag

SEQ ID NO: 3744734 - DNA, 25 bp, Homo sapien
ggagtcccaggttcttcttacacag

SEQ ID NO: 3744735 - DNA, 25 bp, Homo sapien
tgtaggtagcaagctgtcaattgcc

SEQ ID NO: 3744736 - DNA, 25 bp, Homo sapien
ttcctctggcctgacagcaggtctc

SEQ ID NO: 3744737 - DNA, 25 bp, Homo sapien
cagttgcagatacatgtgtgggctc

SEQ ID NO: 3744738 - DNA, 25 bp, Homo sapien
tgcagaatgtcagggtcagcttcac

SEQ ID NO: 3744739 - DNA, 25 bp, Homo sapien
gagcacctgggcgttttcaaggccc

SEQ ID NO: 3744740 - DNA, 25 bp, Homo sapien
atgagcacctgggcgttttcaaggc

SEQ ID NO: 3744741 - DNA, 25 bp, Homo sapien
tgagcacctgggcgttttcaaggcc

SEQ ID NO: 3744742 - DNA, 25 bp, Homo sapien
ctattggatggggtccaggttgggg

SEQ ID NO: 3744743 - DNA, 25 bp, Homo sapien
tggtccaggaccatcagggaccacg

SEQ ID NO: 3744744 - DNA, 25 bp, Homo sapien
caaatcagtggtccaggaccatcag

SEQ ID NO: 3744745 - DNA, 25 bp, Homo sapien
tcagtggtccaggaccatcagggac

SEQ ID NO: 3744746 - DNA, 25 bp, Homo sapien
tcaaatcagtggtccaggaccatca

SEQ ID NO: 3744747 - DNA, 25 bp, Homo sapien
tacacagacacaatgcatgtagtgg

SEQ ID NO: 3744748 - DNA, 25 bp, Homo sapien
agtgataacactctcagccttgccc

SEQ ID NO: 3744749 - DNA, 25 bp, Homo sapien
tacaagatcaacacacccacaggtt

SEQ ID NO: 3744750 - DNA, 25 bp, Homo sapien
catgtagtggaagagaggatttctc

SEQ ID NO: 3744751 - DNA, 25 bp, Homo sapien
caaaggatcgcggtgaatgtcacat

SEQ ID NO: 3744752 - DNA, 25 bp, Homo sapien
cagcagttctcagcagggcacaaag

SEQ ID NO: 3744753 - DNA, 25 bp, Homo sapien
tgagggaaagcccttgagtattcgg

SEQ ID NO: 3744754 - DNA, 25 bp, Homo sapien
aatgtcacattgagactgctccagc

SEQ ID NO: 3744755 - DNA, 25 bp, Homo sapien
cagaatgcccatcagcctcagagat

SEQ ID NO: 3744756 - DNA, 25 bp, Homo sapien
atgcccatcagcctcagagatctca

SEQ ID NO: 3744757 - DNA, 25 bp, Homo sapien
aagcagaatgcccatcagcctcaga

SEQ ID NO: 3744758 - DNA, 25 bp, Homo sapien
tcctaaagcagaatgcccatcagcc

SEQ ID NO: 3744759 - DNA, 25 bp, Homo sapien
cagttctgggtaattgatgggctct

SEQ ID NO: 3744760 - DNA, 25 bp, Homo sapien
gattgcggatgaaatgactgcagcc

SEQ ID NO: 3744761 - DNA, 25 bp, Homo sapien
gggcagcgtgtgctccagtccagtt

SEQ ID NO: 3744762 - DNA, 25 bp, Homo sapien
gctcaaaccgctgaagctcagaatg

SEQ ID NO: 3744763 - DNA, 25 bp, Homo sapien
tgcttttacactacatggcagagtt

SEQ ID NO: 3744764 - DNA, 25 bp, Homo sapien
tccagaggcccttcttatgattgct

SEQ ID NO: 3744765 - DNA, 25 bp, Homo sapien
gagacaaaagccaaccgacaaggga

SEQ ID NO: 3744766 - DNA, 25 bp, Homo sapien
gacaagggaaaatctacctgcagtc

SEQ ID NO: 3744767 - DNA, 25 bp, Homo sapien
agcccagctggagaaggaagcccgg

SEQ ID NO: 3744768 - DNA, 25 bp, Homo sapien
cttaagcaacagctgagcccagctg

SEQ ID NO: 3744769 - DNA, 25 bp, Homo sapien
ccagctggagaaggaagcccggacc

SEQ ID NO: 3744770 - DNA, 25 bp, Homo sapien
gctggagaaggaagcccggacccca

SEQ ID NO: 3744771 - DNA, 25 bp, Homo sapien
gagagtcccccttagggacagccat

SEQ ID NO: 3744772 - DNA, 25 bp, Homo sapien
agagcagagagtcccccttagggac

SEQ ID NO: 3744773 - DNA, 25 bp, Homo sapien
cagtactcccccttagagcagagca

SEQ ID NO: 3744774 - DNA, 25 bp, Homo sapien
gagcagagcagagagtcccccttag

SEQ ID NO: 3744775 - DNA, 25 bp, Homo sapien
gccaaggattcccaatgcacagtga

SEQ ID NO: 3744776 - DNA, 25 bp, Homo sapien
gatgacccccttgacgatttgatct

SEQ ID NO: 3744777 - DNA, 25 bp, Homo sapien
tgaagcagagaagttcccgtgccaa

SEQ ID NO: 3744778 - DNA, 25 bp, Homo sapien
tgcacagtgaaatcccttcgatgac

SEQ ID NO: 3744779 - DNA, 25 bp, Homo sapien
gaactcagtcaagaggaggcgtctc

SEQ ID NO: 3744780 - DNA, 25 bp, Homo sapien
taagggaccatacggcacttcatct

SEQ ID NO: 3744781 - DNA, 25 bp, Homo sapien
cctgcctgcagaagattagcctcca

SEQ ID NO: 3744782 - DNA, 25 bp, Homo sapien
cagaggctccgatgacataatcagg

SEQ ID NO: 3744783 - DNA, 25 bp, Homo sapien
gcataaagccatgcgggtgaagcct

SEQ ID NO: 3744784 - DNA, 25 bp, Homo sapien
tgtgtcagggactttctaggcccac

SEQ ID NO: 3744785 - DNA, 25 bp, Homo sapien
atgtctaaaaactgggcacccctca

SEQ ID NO: 3744786 - DNA, 25 bp, Homo sapien
tgcagtcccctctttcagtggaaag

SEQ ID NO: 3744787 - DNA, 25 bp, Homo sapien
agcaggaggcgagctagcagctgtc

SEQ ID NO: 3744788 - DNA, 25 bp, Homo sapien
acccagcaggaggcgagctagcagc

SEQ ID NO: 3744789 - DNA, 25 bp, Homo sapien
cccagcaggaggcgagctagcagct

SEQ ID NO: 3744790 - DNA, 25 bp, Homo sapien
caggaggcgagctagcagctgtccc

SEQ ID NO: 3744791 - DNA, 25 bp, Homo sapien
tctggacctaagcactgtcagtgag

SEQ ID NO: 3744792 - DNA, 25 bp, Homo sapien
gcttccatggatttgaggtactcga

SEQ ID NO: 3744793 - DNA, 25 bp, Homo sapien
gcttggtggcgtctatggcttgacc

SEQ ID NO: 3744794 - DNA, 25 bp, Homo sapien
tgccaaatatgcaaaagggtacctg

SEQ ID NO: 3744795 - DNA, 25 bp, Homo sapien
gtcattgcctctgacacttccttca

SEQ ID NO: 3744796 - DNA, 25 bp, Homo sapien
ggtgtcacccatggcaacgacagct

SEQ ID NO: 3744797 - DNA, 25 bp, Homo sapien
tgtcacccatggcaacgacagctgt

SEQ ID NO: 3744798 - DNA, 25 bp, Homo sapien
aggtgtcacccatggcaacgacagc

SEQ ID NO: 3744799 - DNA, 25 bp, Homo sapien
ctcccaattattagcaaggatgtgg

SEQ ID NO: 3744800 - DNA, 25 bp, Homo sapien
cttggagaacgtatttgcaaatcac

SEQ ID NO: 3744801 - DNA, 25 bp, Homo sapien
cagaggcacaaagacgattggagaa

SEQ ID NO: 3744802 - DNA, 25 bp, Homo sapien
aactgatacagtggactacgctgaa

SEQ ID NO: 3744803 - DNA, 25 bp, Homo sapien
caaagaagcccctttcagggtgagg

SEQ ID NO: 3744804 - DNA, 25 bp, Homo sapien
tctcggatgagctgtgcattgctgc

SEQ ID NO: 3744805 - DNA, 25 bp, Homo sapien
cacagggcgattgttgtagagcaga

SEQ ID NO: 3744806 - DNA, 25 bp, Homo sapien
cacagcatgcggttcacactctgag

SEQ ID NO: 3744807 - DNA, 25 bp, Homo sapien
ggcaaatgtcttaaacccagctctc

SEQ ID NO: 3744808 - DNA, 25 bp, Homo sapien
cacacctaagattgtgcctgcacag

SEQ ID NO: 3744809 - DNA, 25 bp, Homo sapien
cataagtgatagattcctgctttac

SEQ ID NO: 3744810 - DNA, 25 bp, Homo sapien
ttgtattgtatcctccacacctaag

SEQ ID NO: 3744811 - DNA, 25 bp, Homo sapien
ggctggctttttctatgcgtggagc

SEQ ID NO: 3744812 - DNA, 25 bp, Homo sapien
actggccactcagttacagcgctgg

SEQ ID NO: 3744813 - DNA, 25 bp, Homo sapien
gcgtggagcctctagtacatgccgt

SEQ ID NO: 3744814 - DNA, 25 bp, Homo sapien
agtacatgccgtcttgggccccttg

SEQ ID NO: 3744815 - DNA, 25 bp, Homo sapien
atgtatgccccctccgcgtctgtga

SEQ ID NO: 3744816 - DNA, 25 bp, Homo sapien
tgccccctccgcgtctgtgacctca

SEQ ID NO: 3744817 - DNA, 25 bp, Homo sapien
gccccctccgcgtctgtgacctcac

SEQ ID NO: 3744818 - DNA, 25 bp, Homo sapien
cccatgtatgccccctccgcgtctg

SEQ ID NO: 3744819 - DNA, 25 bp, Homo sapien
attcaggtcttcaaccaattaaata

SEQ ID NO: 3744820 - DNA, 25 bp, Homo sapien
tgtatccaaaaacattgtcacggaa

SEQ ID NO: 3744821 - DNA, 25 bp, Homo sapien
aacattgtcacggaaacactcagaa

SEQ ID NO: 3744822 - DNA, 25 bp, Homo sapien
attctcttacttgagagaattgaac

SEQ ID NO: 3744823 - DNA, 25 bp, Homo sapien
tccatgtctgaaggcttgatggtgt

SEQ ID NO: 3744824 - DNA, 25 bp, Homo sapien
ttagctcacatggttataaggctga

SEQ ID NO: 3744825 - DNA, 25 bp, Homo sapien
tgaagaccgaggagagccaatagtg

SEQ ID NO: 3744826 - DNA, 25 bp, Homo sapien
cttgatggtgtagttgtagtgtaga

SEQ ID NO: 3744827 - DNA, 25 bp, Homo sapien
agaagggtgcacactcgaaacagca

SEQ ID NO: 3744828 - DNA, 25 bp, Homo sapien
gaagggtgcacactcgaaacagcat

SEQ ID NO: 3744829 - DNA, 25 bp, Homo sapien
atatgggccagcagaagggtgcaca

SEQ ID NO: 3744830 - DNA, 25 bp, Homo sapien
tatgggccagcagaagggtgcacac

SEQ ID NO: 3744831 - DNA, 25 bp, Homo sapien
gcagctgttcgagtgactcaatcac

SEQ ID NO: 3744832 - DNA, 25 bp, Homo sapien
caggggcagctgttcgagtgactca

SEQ ID NO: 3744833 - DNA, 25 bp, Homo sapien
gctgggggagtggaatctggcacat

SEQ ID NO: 3744834 - DNA, 25 bp, Homo sapien
cctggaggatgctgggggagtggaa

SEQ ID NO: 3744835 - DNA, 25 bp, Homo sapien
tgttctgaggacctcggagctgcca

SEQ ID NO: 3744836 - DNA, 25 bp, Homo sapien
gacctttgaacaactccagggtgag

SEQ ID NO: 3744837 - DNA, 25 bp, Homo sapien
catttgactgtgttaggaccccagc

SEQ ID NO: 3744838 - DNA, 25 bp, Homo sapien
gacagtgtccggcacatagcatcca

SEQ ID NO: 3744839 - DNA, 25 bp, Homo sapien
tctgctggatcttgaagtttggaaa

SEQ ID NO: 3744840 - DNA, 25 bp, Homo sapien
ctgctggatcttgaagtttggaaat

SEQ ID NO: 3744841 - DNA, 25 bp, Homo sapien
tgctggatcttgaagtttggaaatt

SEQ ID NO: 3744842 - DNA, 25 bp, Homo sapien
ttctgctggatcttgaagtttggaa

SEQ ID NO: 3744843 - DNA, 25 bp, Homo sapien
ctcccgctgcaggccttccttggtc

SEQ ID NO: 3744844 - DNA, 25 bp, Homo sapien
ccgctgcaggccttccttggtcagg

SEQ ID NO: 3744845 - DNA, 25 bp, Homo sapien
tcaggccctgtttaaatccctctgg

SEQ ID NO: 3744846 - DNA, 25 bp, Homo sapien
tggtcaggccctgtttaaatccctc

SEQ ID NO: 3744847 - DNA, 25 bp, Homo sapien
gtttgggggtgatcgggctgccgct

SEQ ID NO: 3744848 - DNA, 25 bp, Homo sapien
tgagaactggcctcttgttaagagc

SEQ ID NO: 3744849 - DNA, 25 bp, Homo sapien
ggcctcttgttaagagcctggtgaa

SEQ ID NO: 3744850 - DNA, 25 bp, Homo sapien
cgcttctccatctcgtggttcttcc

SEQ ID NO: 3744851 - DNA, 25 bp, Homo sapien
tacgggctccaaaggtagttcacaa

SEQ ID NO: 3744852 - DNA, 25 bp, Homo sapien
ttctgagttcagtgacatgcatggg

SEQ ID NO: 3744853 - DNA, 25 bp, Homo sapien
gctggtcttggttattctgtggatc

SEQ ID NO: 3744854 - DNA, 25 bp, Homo sapien
gggctcatctccactttacgggctc

SEQ ID NO: 3744855 - DNA, 25 bp, Homo sapien
cccgagtggtcattggctggcagca

SEQ ID NO: 3744856 - DNA, 25 bp, Homo sapien
gctcccccgagtggtcattggctgg

SEQ ID NO: 3744857 - DNA, 25 bp, Homo sapien
accctgcaggctttgactagggact

SEQ ID NO: 3744858 - DNA, 25 bp, Homo sapien
tgactagggactttcagaactgaag

SEQ ID NO: 3744859 - DNA, 25 bp, Homo sapien
tgcgttcttcctcaacttcgggact

SEQ ID NO: 3744860 - DNA, 25 bp, Homo sapien
atctccattcccgacacaggctgtg

SEQ ID NO: 3744861 - DNA, 25 bp, Homo sapien
tccattcccgacacaggctgtgctt

SEQ ID NO: 3744862 - DNA, 25 bp, Homo sapien
ttttgatggcatgtctaacaaagaa

SEQ ID NO: 3744863 - DNA, 25 bp, Homo sapien
tgaagaacaggacaggagcatccca

SEQ ID NO: 3744864 - DNA, 25 bp, Homo sapien
aagaacaggacaggagcatcccact

SEQ ID NO: 3744865 - DNA, 25 bp, Homo sapien
agaacaggacaggagcatcccactc

SEQ ID NO: 3744866 - DNA, 25 bp, Homo sapien
gttgaagaacaggacaggagcatcc

SEQ ID NO: 3744867 - DNA, 25 bp, Homo sapien
ctctgccggagggaatgcaccctcc

SEQ ID NO: 3744868 - DNA, 25 bp, Homo sapien
cacaggagccggctccgcctgactt

SEQ ID NO: 3744869 - DNA, 25 bp, Homo sapien
ccggagggaatgcaccctccacagg

SEQ ID NO: 3744870 - DNA, 25 bp, Homo sapien
tgccggagggaatgcaccctccaca

SEQ ID NO: 3744871 - DNA, 25 bp, Homo sapien
agcctgtgggagacgggctgctgcc

SEQ ID NO: 3744872 - DNA, 25 bp, Homo sapien
tgagcgggacctgagtcgctggtga

SEQ ID NO: 3744873 - DNA, 25 bp, Homo sapien
gcctcggaaggagcgaagcctgtgg

SEQ ID NO: 3744874 - DNA, 25 bp, Homo sapien
tcgctggtgactgggaggtctcctc

SEQ ID NO: 3744875 - DNA, 25 bp, Homo sapien
caaatgtagccacgttaacaacgcg

SEQ ID NO: 3744876 - DNA, 25 bp, Homo sapien
gccacgttaacaacgcgcactgtgc

SEQ ID NO: 3744877 - DNA, 25 bp, Homo sapien
tgcagcactcatcctcgtctgcttc

SEQ ID NO: 3744878 - DNA, 25 bp, Homo sapien
ctctgaaggcaaatgtagccacgtt

SEQ ID NO: 3744879 - DNA, 25 bp, Homo sapien
cttagcatcctggtctgagcacatg

SEQ ID NO: 3744880 - DNA, 25 bp, Homo sapien
gcatcctggtctgagcacatggcca

SEQ ID NO: 3744881 - DNA, 25 bp, Homo sapien
ctggtctgagcacatggccagagtc

SEQ ID NO: 3744882 - DNA, 25 bp, Homo sapien
tcctggtctgagcacatggccagag

SEQ ID NO: 3744883 - DNA, 25 bp, Homo sapien
ggagctcccagcgtctgaacctggg

SEQ ID NO: 3744884 - DNA, 25 bp, Homo sapien
gggaaatggcatcagcccgttccca

SEQ ID NO: 3744885 - DNA, 25 bp, Homo sapien
gcagagcttggtgacttccaggcac

SEQ ID NO: 3744886 - DNA, 25 bp, Homo sapien
ggcatcagcccgttcccagcagtga

SEQ ID NO: 3744887 - DNA, 25 bp, Homo sapien
agtgaagttgttgaaggctgccagc

SEQ ID NO: 3744888 - DNA, 25 bp, Homo sapien
gagacatttcgacatctgactctga

SEQ ID NO: 3744889 - DNA, 25 bp, Homo sapien
gatacatgggccctttcaataccat

SEQ ID NO: 3744890 - DNA, 25 bp, Homo sapien
tcaataccatgagatctattgccac

SEQ ID NO: 3744891 - DNA, 25 bp, Homo sapien
ctgcaggactcctggtttccacatg

SEQ ID NO: 3744892 - DNA, 25 bp, Homo sapien
tgcaggactcctggtttccacatgg

SEQ ID NO: 3744893 - DNA, 25 bp, Homo sapien
tttccacatgggatgcagagagctg

SEQ ID NO: 3744894 - DNA, 25 bp, Homo sapien
tggtttccacatgggatgcagagag

SEQ ID NO: 3744895 - DNA, 25 bp, Homo sapien
tgccagcaaaggtgctcagcacaca

SEQ ID NO: 3744896 - DNA, 25 bp, Homo sapien
cagagctccacaaggctgccagcaa

SEQ ID NO: 3744897 - DNA, 25 bp, Homo sapien
tgctcagcacacagatccagggccc

SEQ ID NO: 3744898 - DNA, 25 bp, Homo sapien
gctccacaaggctgccagcaaaggt

SEQ ID NO: 3744899 - DNA, 25 bp, Homo sapien
gctgttctgcatcggacaaatggct

SEQ ID NO: 3744900 - DNA, 25 bp, Homo sapien
gaatcaggcggctaataccacactt

SEQ ID NO: 3744901 - DNA, 25 bp, Homo sapien
cagagtcacctccatagttgtcaaa

SEQ ID NO: 3744902 - DNA, 25 bp, Homo sapien
tggatcctgtctgctcaccgagctt

SEQ ID NO: 3744903 - DNA, 25 bp, Homo sapien
caccttcattatagcatagctatct

SEQ ID NO: 3744904 - DNA, 25 bp, Homo sapien
ccttcattatagcatagctatctcc

SEQ ID NO: 3744905 - DNA, 25 bp, Homo sapien
attatagcatagctatctcctgtgg

SEQ ID NO: 3744906 - DNA, 25 bp, Homo sapien
ttcattatagcatagctatctcctg

SEQ ID NO: 3744907 - DNA, 25 bp, Homo sapien
gttttcagcttggttgtctgacccc

SEQ ID NO: 3744908 - DNA, 25 bp, Homo sapien
agggtcccctggctgtcgtacccag

SEQ ID NO: 3744909 - DNA, 25 bp, Homo sapien
tcagcttggttgtctgaccccccag

SEQ ID NO: 3744910 - DNA, 25 bp, Homo sapien
ggtcccctggctgtcgtacccagag

SEQ ID NO: 3744911 - DNA, 25 bp, Homo sapien
tgggcggcaggcgacacagactcct

SEQ ID NO: 3744912 - DNA, 25 bp, Homo sapien
ccttccttgagtgggcggcaggcga

SEQ ID NO: 3744913 - DNA, 25 bp, Homo sapien
ctgctgcttgatcagtcttggtttg

SEQ ID NO: 3744914 - DNA, 25 bp, Homo sapien
atcagtcttggtttgaaacaccttc

SEQ ID NO: 3744915 - DNA, 25 bp, Homo sapien
ccggtagaggtcacctagagtcagc

SEQ ID NO: 3744916 - DNA, 25 bp, Homo sapien
aggtattaatgccaagcctgggagt

SEQ ID NO: 3744917 - DNA, 25 bp, Homo sapien
taatgccaagcctgggagtctcctt

SEQ ID NO: 3744918 - DNA, 25 bp, Homo sapien
gatatgctgccggtagaggtcacct

SEQ ID NO: 3744919 - DNA, 25 bp, Homo sapien
gactggtgacgttccagactcctgg

SEQ ID NO: 3744920 - DNA, 25 bp, Homo sapien
tcttccatatgtgtagagggaggca

SEQ ID NO: 3744921 - DNA, 25 bp, Homo sapien
gaggcatctcccagtttatccaaga

SEQ ID NO: 3744922 - DNA, 25 bp, Homo sapien
gaggcaagagtctgtcaaaagtgac

SEQ ID NO: 3744923 - DNA, 25 bp, Homo sapien
aatccttgtgcaggatagcaaaaag

SEQ ID NO: 3744924 - DNA, 25 bp, Homo sapien
tccttgtgcaggatagcaaaaaggc

SEQ ID NO: 3744925 - DNA, 25 bp, Homo sapien
aaatccttgtgcaggatagcaaaaa

SEQ ID NO: 3744926 - DNA, 25 bp, Homo sapien
ccttgtgcaggatagcaaaaaggcc

SEQ ID NO: 3744927 - DNA, 25 bp, Homo sapien
ccgaagcctctttgcatctgtggtt

SEQ ID NO: 3744928 - DNA, 25 bp, Homo sapien
ggcagcttccgaagcctctttgcat

SEQ ID NO: 3744929 - DNA, 25 bp, Homo sapien
tgctggcagcttccgaagcctcttt

SEQ ID NO: 3744930 - DNA, 25 bp, Homo sapien
agcttccgaagcctctttgcatctg

SEQ ID NO: 3744931 - DNA, 25 bp, Homo sapien
tgcagatgctcaagtaagggattcc

SEQ ID NO: 3744932 - DNA, 25 bp, Homo sapien
cccgataaggtgctggatatgcaga

SEQ ID NO: 3744933 - DNA, 25 bp, Homo sapien
taccatgctacagagtggaaccacc

SEQ ID NO: 3744934 - DNA, 25 bp, Homo sapien
cactccatcgtgagcggaagaacag

SEQ ID NO: 3744935 - DNA, 25 bp, Homo sapien
accaccctgcccatcatgagtattt

SEQ ID NO: 3744936 - DNA, 25 bp, Homo sapien
cctgcccatcatgagtatttcatac

SEQ ID NO: 3744937 - DNA, 25 bp, Homo sapien
acagtgtcgtctcatttccttgccc

SEQ ID NO: 3744938 - DNA, 25 bp, Homo sapien
cgtgtaaccacagtgtcgtctcatt

SEQ ID NO: 3744939 - DNA, 25 bp, Homo sapien
ttgggtggatatgctcctgggagct

SEQ ID NO: 3744940 - DNA, 25 bp, Homo sapien
tgagctctcccaggtcgtgttgggt

SEQ ID NO: 3744941 - DNA, 25 bp, Homo sapien
gtgctcacgttcatcagagcagcca

SEQ ID NO: 3744942 - DNA, 25 bp, Homo sapien
tgtctgtgctcacgttcatcagagc

SEQ ID NO: 3744943 - DNA, 25 bp, Homo sapien
cagacctcgaatcctcaacactggg

SEQ ID NO: 3744944 - DNA, 25 bp, Homo sapien
tccagggggacttgaaggcagcttc

SEQ ID NO: 3744945 - DNA, 25 bp, Homo sapien
ccaggttctgtccagtcatgtccag

SEQ ID NO: 3744946 - DNA, 25 bp, Homo sapien
tccagaacttcctgacaatgcgcag

SEQ ID NO: 3744947 - DNA, 25 bp, Homo sapien
aagcagctcctggaaggttccactc

SEQ ID NO: 3744948 - DNA, 25 bp, Homo sapien
tcaagcagctcctggaaggttccac

SEQ ID NO: 3744949 - DNA, 25 bp, Homo sapien
gcagctcctggaaggttccactcac

SEQ ID NO: 3744950 - DNA, 25 bp, Homo sapien
caagcagctcctggaaggttccact

SEQ ID NO: 3744951 - DNA, 25 bp, Homo sapien
tgacttctaaagatgtctggccctg

SEQ ID NO: 3744952 - DNA, 25 bp, Homo sapien
gcagtggagcttgtcttgtattccc

SEQ ID NO: 3744953 - DNA, 25 bp, Homo sapien
ccattaaatgtgtctgtggtggcag

SEQ ID NO: 3744954 - DNA, 25 bp, Homo sapien
tccttagtgttagactgcgaggcat

SEQ ID NO: 3744955 - DNA, 25 bp, Homo sapien
taaagatcatttgctttctgaattc

SEQ ID NO: 3744956 - DNA, 25 bp, Homo sapien
ttaaagatcatttgctttctgaatt

SEQ ID NO: 3744957 - DNA, 25 bp, Homo sapien
gccccgggatcctgggttgcaggca

SEQ ID NO: 3744958 - DNA, 25 bp, Homo sapien
agcgtgcggtagaacccgaagcctt

SEQ ID NO: 3744959 - DNA, 25 bp, Homo sapien
agcacctctggagccagcgactgag

SEQ ID NO: 3744960 - DNA, 25 bp, Homo sapien
acctggcgcgcggcagtgaaccctg

SEQ ID NO: 3744961 - DNA, 25 bp, Homo sapien
gcttgcaatggaagcgggccacctt

SEQ ID NO: 3744962 - DNA, 25 bp, Homo sapien
accttgaggtacgtgcagcagagca

SEQ ID NO: 3744963 - DNA, 25 bp, Homo sapien
agcaggttcccgcacgtgaggttca

SEQ ID NO: 3744964 - DNA, 25 bp, Homo sapien
ggtgatcacgtcgatgcgcttgcaa

SEQ ID NO: 3744965 - DNA, 25 bp, Homo sapien
cccactctctaagtagtatctcaga

SEQ ID NO: 3744966 - DNA, 25 bp, Homo sapien
taccacagttaatcctggcaggtgt

SEQ ID NO: 3744967 - DNA, 25 bp, Homo sapien
ttaaatgcataaagcacagagatgc

SEQ ID NO: 3744968 - DNA, 25 bp, Homo sapien
tacctgccctggtttacaatgaaaa

SEQ ID NO: 3744969 - DNA, 25 bp, Homo sapien
ctggtgatcacatagggcgcgaagc

SEQ ID NO: 3744970 - DNA, 25 bp, Homo sapien
ttcttggtggctcgctgtcgcctcc

SEQ ID NO: 3744971 - DNA, 25 bp, Homo sapien
gaagcacacaaggaaggtccctatg

SEQ ID NO: 3744972 - DNA, 25 bp, Homo sapien
tccctatgaaggtgctgatcttctt

SEQ ID NO: 3744973 - DNA, 25 bp, Homo sapien
caccgtgcagaagaacgtgtggcca

SEQ ID NO: 3744974 - DNA, 25 bp, Homo sapien
caccctttgggttctgagttgaatc

SEQ ID NO: 3744975 - DNA, 25 bp, Homo sapien
ccatcttgcattcagtgggcagtaa

SEQ ID NO: 3744976 - DNA, 25 bp, Homo sapien
gaggctgccactgctaaaggtcact

SEQ ID NO: 3744977 - DNA, 25 bp, Homo sapien
cctgctgctcaaagactctgggaag

SEQ ID NO: 3744978 - DNA, 25 bp, Homo sapien
gaagagtcctctgtgacctagggct

SEQ ID NO: 3744979 - DNA, 25 bp, Homo sapien
ttgggaatcccctgcatatgagacc

SEQ ID NO: 3744980 - DNA, 25 bp, Homo sapien
tagatcgctgtggagagcatagcct

SEQ ID NO: 3744981 - DNA, 25 bp, Homo sapien
cagcttttgcggtactggtgtcgca

SEQ ID NO: 3744982 - DNA, 25 bp, Homo sapien
tgtcgcagtaaggagtacacaaagg

SEQ ID NO: 3744983 - DNA, 25 bp, Homo sapien
tcggatgcggccttgctgtacgcca

SEQ ID NO: 3744984 - DNA, 25 bp, Homo sapien
tgtgcaggagcctgttcagaatctc

SEQ ID NO: 3744985 - DNA, 25 bp, Homo sapien
gatgctccccgtccagaggatagga

SEQ ID NO: 3744986 - DNA, 25 bp, Homo sapien
taagtcagttctcccggctgcaagg

SEQ ID NO: 3744987 - DNA, 25 bp, Homo sapien
gatagattccctgtcggcacaaagg

SEQ ID NO: 3744988 - DNA, 25 bp, Homo sapien
taaaaagccggaatagttgcagcgt

SEQ ID NO: 3744989 - DNA, 25 bp, Homo sapien
agaacagaccgtagaggccaagctc

SEQ ID NO: 3744990 - DNA, 25 bp, Homo sapien
tgcaagaacagaccgtagaggccaa

SEQ ID NO: 3744991 - DNA, 25 bp, Homo sapien
tctgcaagaacagaccgtagaggcc

SEQ ID NO: 3744992 - DNA, 25 bp, Homo sapien
cacactgctctcataccactttctc

SEQ ID NO: 3744993 - DNA, 25 bp, Homo sapien
tttgaccaggccagaacttaggcca

SEQ ID NO: 3744994 - DNA, 25 bp, Homo sapien
ggcccaatgccactacctctgagaa

SEQ ID NO: 3744995 - DNA, 25 bp, Homo sapien
tcttctgcacagtgatgtcgtggcc

SEQ ID NO: 3744996 - DNA, 25 bp, Homo sapien
cactgagtacacacttccagggcag

SEQ ID NO: 3744997 - DNA, 25 bp, Homo sapien
tctggacccacactgagctctgtca

SEQ ID NO: 3744998 - DNA, 25 bp, Homo sapien
caggcaggctcccatctcctctgtg

SEQ ID NO: 3744999 - DNA, 25 bp, Homo sapien
accactggacccctcaccaggcagg

SEQ ID NO: 3745000 - DNA, 25 bp, Homo sapien
tctgtcaccactggacccctcacca

SEQ ID NO: 3745001 - DNA, 25 bp, Homo sapien
atcatcacgttcagcccatctcaag

SEQ ID NO: 3745002 - DNA, 25 bp, Homo sapien
tttttggtagctaaaaatatatgga

SEQ ID NO: 3745003 - DNA, 25 bp, Homo sapien
tatattcccaacctcaagacttcta

SEQ ID NO: 3745004 - DNA, 25 bp, Homo sapien
aagagacctaattcttatattccca

SEQ ID NO: 3745005 - DNA, 25 bp, Homo sapien
cattcgaaggttgttagagcagaga

SEQ ID NO: 3745006 - DNA, 25 bp, Homo sapien
tgttgaggtttggaacaatttcagc

SEQ ID NO: 3745007 - DNA, 25 bp, Homo sapien
gtttctgcactccaaaagaggttgt

SEQ ID NO: 3745008 - DNA, 25 bp, Homo sapien
ttgcaagggaacttgacattcgaag

SEQ ID NO: 3745009 - DNA, 25 bp, Homo sapien
tattgaatgctaaaccagctggcac

SEQ ID NO: 3745010 - DNA, 25 bp, Homo sapien
taaagcctccgtgtggcgaaatgag

SEQ ID NO: 3745011 - DNA, 25 bp, Homo sapien
aagctatggttggtgtgagttcccc

SEQ ID NO: 3745012 - DNA, 25 bp, Homo sapien
tgatcacgggcacacagacttatgg

SEQ ID NO: 3745013 - DNA, 25 bp, Homo sapien
ctccgagtgtagctgtttgtgttca

SEQ ID NO: 3745014 - DNA, 25 bp, Homo sapien
atataatcacgggcacacaaacata

SEQ ID NO: 3745015 - DNA, 25 bp, Homo sapien
gcacacaaacattcacccgtatgca

SEQ ID NO: 3745016 - DNA, 25 bp, Homo sapien
catatacccatatgcatatactcat

SEQ ID NO: 3745017 - DNA, 25 bp, Homo sapien
ccattgtaaacagagcaggcagcat

SEQ ID NO: 3745018 - DNA, 25 bp, Homo sapien
gcagcattggccttggattcaaaat

SEQ ID NO: 3745019 - DNA, 25 bp, Homo sapien
tgggagggcttctggtaatactaaa

SEQ ID NO: 3745020 - DNA, 25 bp, Homo sapien
taacaggaggctttattggacagaa

SEQ ID NO: 3745021 - DNA, 25 bp, Homo sapien
gcctctaaccacctgtttgtcccca

SEQ ID NO: 3745022 - DNA, 25 bp, Homo sapien
ggtgttagcaggagcctctactctt

SEQ ID NO: 3745023 - DNA, 25 bp, Homo sapien
gttagcaggagcctctactctttgc

SEQ ID NO: 3745024 - DNA, 25 bp, Homo sapien
agcaggagcctctactctttgcccg

SEQ ID NO: 3745025 - DNA, 25 bp, Homo sapien
gtgtgggctgagtcctaaggccatt

SEQ ID NO: 3745026 - DNA, 25 bp, Homo sapien
gagacgacaaagtccagccctgtga

SEQ ID NO: 3745027 - DNA, 25 bp, Homo sapien
acctggttgccatctctcatagcca

SEQ ID NO: 3745028 - DNA, 25 bp, Homo sapien
gctgagtcctaaggccattgatcca

SEQ ID NO: 3745029 - DNA, 25 bp, Homo sapien
cccatgtgtcctgggtaggtttgca

SEQ ID NO: 3745030 - DNA, 25 bp, Homo sapien
aaagcggaggaaaactgtctcttgg

SEQ ID NO: 3745031 - DNA, 25 bp, Homo sapien
atgtgtcctgggtaggtttgcagat

SEQ ID NO: 3745032 - DNA, 25 bp, Homo sapien
aagcggaggaaaactgtctcttggc

SEQ ID NO: 3745033 - DNA, 25 bp, Homo sapien
tgggatgttcctgcttaaagactgg

SEQ ID NO: 3745034 - DNA, 25 bp, Homo sapien
gactgggatgttcctgcttaaagac

SEQ ID NO: 3745035 - DNA, 25 bp, Homo sapien
cccagactgggatgttcctgcttaa

SEQ ID NO: 3745036 - DNA, 25 bp, Homo sapien
gatgttcctgcttaaagactggact

SEQ ID NO: 3745037 - DNA, 25 bp, Homo sapien
acctgctgctccacgtggcccagag

SEQ ID NO: 3745038 - DNA, 25 bp, Homo sapien
tcgggtcacctgctgctccacgtgg

SEQ ID NO: 3745039 - DNA, 25 bp, Homo sapien
ctccacgtggcccagagcttctgtg

SEQ ID NO: 3745040 - DNA, 25 bp, Homo sapien
tgctgctccacgtggcccagagctt

SEQ ID NO: 3745041 - DNA, 25 bp, Homo sapien
aggcatcagcccaacactggcaata

SEQ ID NO: 3745042 - DNA, 25 bp, Homo sapien
ccaacactggcaatagtgacataga

SEQ ID NO: 3745043 - DNA, 25 bp, Homo sapien
agtgacatagaagtacatttggttc

SEQ ID NO: 3745044 - DNA, 25 bp, Homo sapien
ttggttctccgtgaaggaactgtcc

SEQ ID NO: 3745045 - DNA, 25 bp, Homo sapien
ccagttaagggaactcttgatactt

SEQ ID NO: 3745046 - DNA, 25 bp, Homo sapien
gcctgggattctggcagtctttggt

SEQ ID NO: 3745047 - DNA, 25 bp, Homo sapien
tctcttcgtaagtctttgcattgct

SEQ ID NO: 3745048 - DNA, 25 bp, Homo sapien
ccagatctcatcaatctcttcgtaa

SEQ ID NO: 3745049 - DNA, 25 bp, Homo sapien
actgtcgatccggacgagactacgg

SEQ ID NO: 3745050 - DNA, 25 bp, Homo sapien
cgatccggacgagactacggatagg

SEQ ID NO: 3745051 - DNA, 25 bp, Homo sapien
gggaggtgccactactgtcgatccg

SEQ ID NO: 3745052 - DNA, 25 bp, Homo sapien
gccactactgtcgatccggacgaga

SEQ ID NO: 3745053 - DNA, 25 bp, Homo sapien
gccttgaaatcagccaggctgccat

SEQ ID NO: 3745054 - DNA, 25 bp, Homo sapien
cttgaaatcagccaggctgccatcc

SEQ ID NO: 3745055 - DNA, 25 bp, Homo sapien
ctcctggccttgaaatcagccaggc

SEQ ID NO: 3745056 - DNA, 25 bp, Homo sapien
tggccttgaaatcagccaggctgcc

SEQ ID NO: 3745057 - DNA, 25 bp, Homo sapien
ttgctccctagaggctcaaagaggc

SEQ ID NO: 3745058 - DNA, 25 bp, Homo sapien
tgtgagaatctctttccagctcagg

SEQ ID NO: 3745059 - DNA, 25 bp, Homo sapien
acccacagtactattggagcagcgg

SEQ ID NO: 3745060 - DNA, 25 bp, Homo sapien
gcagccctagctttggttgtgagaa

SEQ ID NO: 3745061 - DNA, 25 bp, Homo sapien
aaacccgtgcacttggctcacagga

SEQ ID NO: 3745062 - DNA, 25 bp, Homo sapien
gatatacggacttttcttcagagca

SEQ ID NO: 3745063 - DNA, 25 bp, Homo sapien
tccactgcctctggatagtgatata

SEQ ID NO: 3745064 - DNA, 25 bp, Homo sapien
tagtacagaggaggcaaaccaaacc

SEQ ID NO: 3745065 - DNA, 25 bp, Homo sapien
ggtggaactaagcacctgcaaggtg

SEQ ID NO: 3745066 - DNA, 25 bp, Homo sapien
gaacagcagacagccgagaaggatc

SEQ ID NO: 3745067 - DNA, 25 bp, Homo sapien
tttggagtcaactctattgccctca

SEQ ID NO: 3745068 - DNA, 25 bp, Homo sapien
cacaggtggagccatactaagcgct

SEQ ID NO: 3745069 - DNA, 25 bp, Homo sapien
acagcatcaggttccatctctgggc

SEQ ID NO: 3745070 - DNA, 25 bp, Homo sapien
cggaagcccagtgactccacagcat

SEQ ID NO: 3745071 - DNA, 25 bp, Homo sapien
ccagtgactccacagcatcaggttc

SEQ ID NO: 3745072 - DNA, 25 bp, Homo sapien
agctcccggaagcccagtgactcca

SEQ ID NO: 3745073 - DNA, 25 bp, Homo sapien
aaaggccatgatcccatcctttggg

SEQ ID NO: 3745074 - DNA, 25 bp, Homo sapien
gctcttcatcctccctaagcatgag

SEQ ID NO: 3745075 - DNA, 25 bp, Homo sapien
attgaaaataatggcctcctgtctg

SEQ ID NO: 3745076 - DNA, 25 bp, Homo sapien
tggcctcctgtctgactctgccatg

SEQ ID NO: 3745077 - DNA, 25 bp, Homo sapien
catggggtcggtgttcagtgcattt

SEQ ID NO: 3745078 - DNA, 25 bp, Homo sapien
gcccttgtcctttctgactgctgta

SEQ ID NO: 3745079 - DNA, 25 bp, Homo sapien
tcttgaaggcaccacctcttttatt

SEQ ID NO: 3745080 - DNA, 25 bp, Homo sapien
ggctagttctctggagcccttttat

SEQ ID NO: 3745081 - DNA, 25 bp, Homo sapien
agtccaaggttaaggcacgggcaga

SEQ ID NO: 3745082 - DNA, 25 bp, Homo sapien
tgagaggatagttacatcttggccc

SEQ ID NO: 3745083 - DNA, 25 bp, Homo sapien
gacaaatgaggaacgatggcagaag

SEQ ID NO: 3745084 - DNA, 25 bp, Homo sapien
ccagggcggagcagcaagcctttag

SEQ ID NO: 3745085 - DNA, 25 bp, Homo sapien
gaattcctacggttttgatgagagg

SEQ ID NO: 3745086 - DNA, 25 bp, Homo sapien
cagagccgacaggtgtgttctgtga

SEQ ID NO: 3745087 - DNA, 25 bp, Homo sapien
ggcctctgtgcctgaagaaggatga

SEQ ID NO: 3745088 - DNA, 25 bp, Homo sapien
cccagtggaggtcacccgttggagt

SEQ ID NO: 3745089 - DNA, 25 bp, Homo sapien
cagctgtcatccaacgtgcgtggct

SEQ ID NO: 3745090 - DNA, 25 bp, Homo sapien
agttttcagaagtctccagtggccg

SEQ ID NO: 3745091 - DNA, 25 bp, Homo sapien
tcctatgacctgtcagttcttgcca

SEQ ID NO: 3745092 - DNA, 25 bp, Homo sapien
tggttggcagaatgctcagaagagc

SEQ ID NO: 3745093 - DNA, 25 bp, Homo sapien
cagaagagcatattgagccttgggc

SEQ ID NO: 3745094 - DNA, 25 bp, Homo sapien
ctaactttcacagaagtcaatattt

SEQ ID NO: 3745095 - DNA, 25 bp, Homo sapien
tcttttctaataacattctgatctc

SEQ ID NO: 3745096 - DNA, 25 bp, Homo sapien
ctaataacattctgatctccagttt

SEQ ID NO: 3745097 - DNA, 25 bp, Homo sapien
tttctaataacattctgatctccag

SEQ ID NO: 3745098 - DNA, 25 bp, Homo sapien
ttggaatgcagctgtcaggaggtga

SEQ ID NO: 3745099 - DNA, 25 bp, Homo sapien
ctgttggaatgcagctgtcaggagg

SEQ ID NO: 3745100 - DNA, 25 bp, Homo sapien
atgcagctgtcaggaggtgatggac

SEQ ID NO: 3745101 - DNA, 25 bp, Homo sapien
ggaatgcagctgtcaggaggtgatg

SEQ ID NO: 3745102 - DNA, 25 bp, Homo sapien
agccagagtccacctagcatagcgg

SEQ ID NO: 3745103 - DNA, 25 bp, Homo sapien
agacaagccagagtccacctagcat

SEQ ID NO: 3745104 - DNA, 25 bp, Homo sapien
cgggggctctttagtgcagaaagca

SEQ ID NO: 3745105 - DNA, 25 bp, Homo sapien
ctccagtgctagattagagccctgc

SEQ ID NO: 3745106 - DNA, 25 bp, Homo sapien
gaagcattcagcaagtccacccttt

SEQ ID NO: 3745107 - DNA, 25 bp, Homo sapien
cccattttcacagtaggaagcattc

SEQ ID NO: 3745108 - DNA, 25 bp, Homo sapien
tccactggatccagctttttgctcc

SEQ ID NO: 3745109 - DNA, 25 bp, Homo sapien
tttggctgagtttcccattttcaca

SEQ ID NO: 3745110 - DNA, 25 bp, Homo sapien
gtccagggcgtcggggagcccgagc

SEQ ID NO: 3745111 - DNA, 25 bp, Homo sapien
tggtccagggcgtcggggagcccga

SEQ ID NO: 3745112 - DNA, 25 bp, Homo sapien
gcgtcggggagcccgagcctcccca

SEQ ID NO: 3745113 - DNA, 25 bp, Homo sapien
cagggcgtcggggagcccgagcctc

SEQ ID NO: 3745114 - DNA, 25 bp, Homo sapien
ggaggtgcagggcaggttcaggagc

SEQ ID NO: 3745115 - DNA, 25 bp, Homo sapien
gaggtgcagggcaggttcaggagcc

SEQ ID NO: 3745116 - DNA, 25 bp, Homo sapien
aggtgcagggcaggttcaggagccg

SEQ ID NO: 3745117 - DNA, 25 bp, Homo sapien
ctggaggtgcagggcaggttcagga

SEQ ID NO: 3745118 - DNA, 25 bp, Homo sapien
gatcaggaacaagggcgttgtggca

SEQ ID NO: 3745119 - DNA, 25 bp, Homo sapien
ggagatcaggaacaagggcgttgtg

SEQ ID NO: 3745120 - DNA, 25 bp, Homo sapien
gaggagatcaggaacaagggcgttg

SEQ ID NO: 3745121 - DNA, 25 bp, Homo sapien
ctggaggagatcaggaacaagggcg

SEQ ID NO: 3745122 - DNA, 25 bp, Homo sapien
gttcttttgggcacgcttggtggta

SEQ ID NO: 3745123 - DNA, 25 bp, Homo sapien
catctttctccagttgcagagaggg

SEQ ID NO: 3745124 - DNA, 25 bp, Homo sapien
cagagagtgtaagatctgcattgag

SEQ ID NO: 3745125 - DNA, 25 bp, Homo sapien
tgcattgagataagggacagagagc

SEQ ID NO: 3745126 - DNA, 25 bp, Homo sapien
tgtgacaggattcgggtctggaaac

SEQ ID NO: 3745127 - DNA, 25 bp, Homo sapien
accccagagggtttcacattcttgg

SEQ ID NO: 3745128 - DNA, 25 bp, Homo sapien
cacattcttggtgaagtaggaggtg

SEQ ID NO: 3745129 - DNA, 25 bp, Homo sapien
ggatgtgacaggattcgggtctgga

SEQ ID NO: 3745130 - DNA, 25 bp, Homo sapien
cttccatctccacgccgccttccat

SEQ ID NO: 3745131 - DNA, 25 bp, Homo sapien
ccgccttccatctccacgccgcctt

SEQ ID NO: 3745132 - DNA, 25 bp, Homo sapien
cgccttccatctccacgccgccttc

SEQ ID NO: 3745133 - DNA, 25 bp, Homo sapien
gccttccatctccacgccgccttcc

SEQ ID NO: 3745134 - DNA, 25 bp, Homo sapien
cctgctcttagactgtgaagttgct

SEQ ID NO: 3745135 - DNA, 25 bp, Homo sapien
tcttagactgtgaagttgctgcttt

SEQ ID NO: 3745136 - DNA, 25 bp, Homo sapien
gaaagtctccgtacctgctcttaga

SEQ ID NO: 3745137 - DNA, 25 bp, Homo sapien
gatgctttctcacaggaaagtctcc

SEQ ID NO: 3745138 - DNA, 25 bp, Homo sapien
gcacaggagcctcaccgtagatggg

SEQ ID NO: 3745139 - DNA, 25 bp, Homo sapien
tgtcctcacttcgtcttcctggctt

SEQ ID NO: 3745140 - DNA, 25 bp, Homo sapien
gagcagccggcgaggctgtcctcac

SEQ ID NO: 3745141 - DNA, 25 bp, Homo sapien
ggcgaggctgtcctcacttcgtctt

SEQ ID NO: 3745142 - DNA, 25 bp, Homo sapien
ccagaggtcaggagaccccttctgg

SEQ ID NO: 3745143 - DNA, 25 bp, Homo sapien
gaccccttctggatgctgctttaag

SEQ ID NO: 3745144 - DNA, 25 bp, Homo sapien
tgtggtgggcgtgggggcaaacagc

SEQ ID NO: 3745145 - DNA, 25 bp, Homo sapien
agcccagaggtcaggagaccccttc

SEQ ID NO: 3745146 - DNA, 25 bp, Homo sapien
tgtgtgcacccctccgccttcacta

SEQ ID NO: 3745147 - DNA, 25 bp, Homo sapien
gtgcacccctccgccttcactaaat

SEQ ID NO: 3745148 - DNA, 25 bp, Homo sapien
gtgtgcacccctccgccttcactaa

SEQ ID NO: 3745149 - DNA, 25 bp, Homo sapien
cacccctccgccttcactaaatgct

SEQ ID NO: 3745150 - DNA, 25 bp, Homo sapien
gctccaagaggcgaatggcatccga

SEQ ID NO: 3745151 - DNA, 25 bp, Homo sapien
ctggattctgacaaggccctctggt

SEQ ID NO: 3745152 - DNA, 25 bp, Homo sapien
tctggtggataccagtgaccgctgg

SEQ ID NO: 3745153 - DNA, 25 bp, Homo sapien
ccgctggggactgtgagctccaaga

SEQ ID NO: 3745154 - DNA, 25 bp, Homo sapien
atctggagccgggagccctactacg

SEQ ID NO: 3745155 - DNA, 25 bp, Homo sapien
aagctcccaagagggagaagtcggc

SEQ ID NO: 3745156 - DNA, 25 bp, Homo sapien
cctccaccaggtaaggaactttctg

SEQ ID NO: 3745157 - DNA, 25 bp, Homo sapien
ttattacgggcaggagatctggagc

SEQ ID NO: 3745158 - DNA, 25 bp, Homo sapien
ttcttctctcaggtcacgtttctcc

SEQ ID NO: 3745159 - DNA, 25 bp, Homo sapien
tgcttgggctctgatttactttagg

SEQ ID NO: 3745160 - DNA, 25 bp, Homo sapien
gaccctgggccaatcttttcttctc

SEQ ID NO: 3745161 - DNA, 25 bp, Homo sapien
tgatttactttaggaccctgggcca

SEQ ID NO: 3745162 - DNA, 25 bp, Homo sapien
caaaccctcttgtgacccctggatg

SEQ ID NO: 3745163 - DNA, 25 bp, Homo sapien
tgctcccagggaactttactcccag

SEQ ID NO: 3745164 - DNA, 25 bp, Homo sapien
gccaccttggggtaacgtcactgtc

SEQ ID NO: 3745165 - DNA, 25 bp, Homo sapien
tggggtaacgtcactgtctttccca

SEQ ID NO: 3745166 - DNA, 25 bp, Homo sapien
gagggatgcctgaactcagaccttc

SEQ ID NO: 3745167 - DNA, 25 bp, Homo sapien
agagggatgcctgaactcagacctt

SEQ ID NO: 3745168 - DNA, 25 bp, Homo sapien
gcccatgtggcagtgatgagccggg

SEQ ID NO: 3745169 - DNA, 25 bp, Homo sapien
cagagctcgggctctggacatcagc

SEQ ID NO: 3745170 - DNA, 25 bp, Homo sapien
tgttcacatagaacccgagagccag

SEQ ID NO: 3745171 - DNA, 25 bp, Homo sapien
gggcttggcctgttcacatagaacc

SEQ ID NO: 3745172 - DNA, 25 bp, Homo sapien
ttggcctgttcacatagaacccgag

SEQ ID NO: 3745173 - DNA, 25 bp, Homo sapien
atccattaagatcccgtagctgtct

SEQ ID NO: 3745174 - DNA, 25 bp, Homo sapien
tttggggaacagtgatttggcagat

SEQ ID NO: 3745175 - DNA, 25 bp, Homo sapien
cagatccattaagatcccgtagctg

SEQ ID NO: 3745176 - DNA, 25 bp, Homo sapien
gaacagtgatttggcagatccatta

SEQ ID NO: 3745177 - DNA, 25 bp, Homo sapien
aatgtctagtaactgatgattctgc

SEQ ID NO: 3745178 - DNA, 25 bp, Homo sapien
tctagtaactgatgattctgcacca

SEQ ID NO: 3745179 - DNA, 25 bp, Homo sapien
cttatgcaaatgtctagtaactgat

SEQ ID NO: 3745180 - DNA, 25 bp, Homo sapien
gtaactgatgattctgcaccagcct

SEQ ID NO: 3745181 - DNA, 25 bp, Homo sapien
tagccccgcatccagggcgcgtcaa

SEQ ID NO: 3745182 - DNA, 25 bp, Homo sapien
agccccgagcctctagccccgcatc

SEQ ID NO: 3745183 - DNA, 25 bp, Homo sapien
atccagggcgcgtcaacctgactcc

SEQ ID NO: 3745184 - DNA, 25 bp, Homo sapien
cctctagccccgcatccagggcgcg

SEQ ID NO: 3745185 - DNA, 25 bp, Homo sapien
ctcggctcgccgcaccaaggccggc

SEQ ID NO: 3745186 - DNA, 25 bp, Homo sapien
tcgctcggctcgccgcaccaaggcc

SEQ ID NO: 3745187 - DNA, 25 bp, Homo sapien
tcgccgcaccaaggccggccagaga

SEQ ID NO: 3745188 - DNA, 25 bp, Homo sapien
ggctcgccgcaccaaggccggccag

SEQ ID NO: 3745189 - DNA, 25 bp, Homo sapien
gcagaaacgctgcaggtcctgctgc

SEQ ID NO: 3745190 - DNA, 25 bp, Homo sapien
ggcagaaacgctgcaggtcctgctg

SEQ ID NO: 3745191 - DNA, 25 bp, Homo sapien
gctggccaggcgtctcgttgcaaac

SEQ ID NO: 3745192 - DNA, 25 bp, Homo sapien
gagcagatagcaagaatgactggca

SEQ ID NO: 3745193 - DNA, 25 bp, Homo sapien
atgactggcaaacgcttcctgaagg

SEQ ID NO: 3745194 - DNA, 25 bp, Homo sapien
gccaggcgtctcgttgcaaacacag

SEQ ID NO: 3745195 - DNA, 25 bp, Homo sapien
cactaccgagaacaggccgaggcca

SEQ ID NO: 3745196 - DNA, 25 bp, Homo sapien
catcccacccacagtaagggattaa

SEQ ID NO: 3745197 - DNA, 25 bp, Homo sapien
taaccaatcatccaggttgtccttc

SEQ ID NO: 3745198 - DNA, 25 bp, Homo sapien
taaagctaaacagcccccaggaatc

SEQ ID NO: 3745199 - DNA, 25 bp, Homo sapien
gggactcggcctttctggaacatat

SEQ ID NO: 3745200 - DNA, 25 bp, Homo sapien
tgatgagagaggatcacgccaccat

SEQ ID NO: 3745201 - DNA, 25 bp, Homo sapien
aagttcagcgtgtcctaaaagcagc

SEQ ID NO: 3745202 - DNA, 25 bp, Homo sapien
gatactgttctcgttagtcggagca

SEQ ID NO: 3745203 - DNA, 25 bp, Homo sapien
gacttccagtgagcacgtcttctca

SEQ ID NO: 3745204 - DNA, 25 bp, Homo sapien
gaactttgaaagatacacatgcatg

SEQ ID NO: 3745205 - DNA, 25 bp, Homo sapien
ctattgtcgataggtgagcaaatga

SEQ ID NO: 3745206 - DNA, 25 bp, Homo sapien
gcatttttctatcgacttatttcca

SEQ ID NO: 3745207 - DNA, 25 bp, Homo sapien
gatatttgcgaccttgtctgctgcc

SEQ ID NO: 3745208 - DNA, 25 bp, Homo sapien
tgttcttcacccagagacgggacgg

SEQ ID NO: 3745209 - DNA, 25 bp, Homo sapien
cagcgagcatcggacaggtgttctt

SEQ ID NO: 3745210 - DNA, 25 bp, Homo sapien
caacggagatgtcacctttgtggaa

SEQ ID NO: 3745211 - DNA, 25 bp, Homo sapien
gaaagggcaactctgagtctgggcc

SEQ ID NO: 3745212 - DNA, 25 bp, Homo sapien
atgctcattcaagaagccctcttcc

SEQ ID NO: 3745213 - DNA, 25 bp, Homo sapien
gctcattcaagaagccctcttccaa

SEQ ID NO: 3745214 - DNA, 25 bp, Homo sapien
tccctctccactggcaaaggggaaa

SEQ ID NO: 3745215 - DNA, 25 bp, Homo sapien
tattaaagccctactctatgtcagg

SEQ ID NO: 3745216 - DNA, 25 bp, Homo sapien
tagcttagtatttggcggtgctctc

SEQ ID NO: 3745217 - DNA, 25 bp, Homo sapien
gctcaagtgtagagccctgggatgc

SEQ ID NO: 3745218 - DNA, 25 bp, Homo sapien
agaagagggcagatgacctcagacg

SEQ ID NO: 3745219 - DNA, 25 bp, Homo sapien
accaccgccaagacgtgttctgtca

SEQ ID NO: 3745220 - DNA, 25 bp, Homo sapien
gcttctgcatctatttctgggactg

SEQ ID NO: 3745221 - DNA, 25 bp, Homo sapien
cactgcgagtctgggactcgaaccc

SEQ ID NO: 3745222 - DNA, 25 bp, Homo sapien
aaacttctttagctaacacactgcg

SEQ ID NO: 3745223 - DNA, 25 bp, Homo sapien
ggagcacagcgaagaccttgcttaa

SEQ ID NO: 3745224 - DNA, 25 bp, Homo sapien
agaatacccacatctctccggagca

SEQ ID NO: 3745225 - DNA, 25 bp, Homo sapien
gaagtgagagtcagcaatacagcgt

SEQ ID NO: 3745226 - DNA, 25 bp, Homo sapien
accgctgtcttgctcatcctgtcaa

SEQ ID NO: 3745227 - DNA, 25 bp, Homo sapien
catccttcctgatgactgggacaca

SEQ ID NO: 3745228 - DNA, 25 bp, Homo sapien
ttcctgtaatctgatccttacggtt

SEQ ID NO: 3745229 - DNA, 25 bp, Homo sapien
cctgaatcaagacacaatggctgaa

SEQ ID NO: 3745230 - DNA, 25 bp, Homo sapien
tgatccttacggtttccttgccaga

SEQ ID NO: 3745231 - DNA, 25 bp, Homo sapien
ggcggatgactcaagcccagggtca

SEQ ID NO: 3745232 - DNA, 25 bp, Homo sapien
cccagaggttggctaccaccagcag

SEQ ID NO: 3745233 - DNA, 25 bp, Homo sapien
caatgtaatgatggaaactcagagg

SEQ ID NO: 3745234 - DNA, 25 bp, Homo sapien
ccagcagccgataggccaatgtaat

SEQ ID NO: 3745235 - DNA, 25 bp, Homo sapien
tggatgtccgcaagtcgtgctagaa

SEQ ID NO: 3745236 - DNA, 25 bp, Homo sapien
aaggtcacaagttcgggagcagctc

SEQ ID NO: 3745237 - DNA, 25 bp, Homo sapien
cactagagaaagagggtgcacattc

SEQ ID NO: 3745238 - DNA, 25 bp, Homo sapien
gagtcatgttctacaagagccgctg

SEQ ID NO: 3745239 - DNA, 25 bp, Homo sapien
tgcgccgtcgggtaacagctgtatg

SEQ ID NO: 3745240 - DNA, 25 bp, Homo sapien
ggttttcgctgtccatcaagctggg

SEQ ID NO: 3745241 - DNA, 25 bp, Homo sapien
tgagatcagaagctcttggtgggcc

SEQ ID NO: 3745242 - DNA, 25 bp, Homo sapien
tctgggagctgtctggtcgtgaact

SEQ ID NO: 3745243 - DNA, 25 bp, Homo sapien
ctatgatgtagaagtgcggcaggca

SEQ ID NO: 3745244 - DNA, 25 bp, Homo sapien
tccttgatggcggagaacttgacct

SEQ ID NO: 3745245 - DNA, 25 bp, Homo sapien
tcggtggtgttctgccccgagaact

SEQ ID NO: 3745246 - DNA, 25 bp, Homo sapien
catagaggtctgtggtcccgcactt

SEQ ID NO: 3745247 - DNA, 25 bp, Homo sapien
gcagcccatctcttaggcggacgat

SEQ ID NO: 3745248 - DNA, 25 bp, Homo sapien
ccttgatggatctggtgtgcggcca

SEQ ID NO: 3745249 - DNA, 25 bp, Homo sapien
agagctggcctgcagtccttgatgg

SEQ ID NO: 3745250 - DNA, 25 bp, Homo sapien
ttccacgggatagcggtctcgcagc

SEQ ID NO: 3745251 - DNA, 25 bp, Homo sapien
ccatccgtgctgttgtcgtagaaga

SEQ ID NO: 3745252 - DNA, 25 bp, Homo sapien
ggatgaagtcctgcgtcagaaacgg

SEQ ID NO: 3745253 - DNA, 25 bp, Homo sapien
tcgtagaagaacgtccaggcattat

SEQ ID NO: 3745254 - DNA, 25 bp, Homo sapien
tatcccacatcgtggaggcactggc

SEQ ID NO: 3745255 - DNA, 25 bp, Homo sapien
tcaataggcagcttcaataaagaca

SEQ ID NO: 3745256 - DNA, 25 bp, Homo sapien
ttcaataaagacaccgcactacagt

SEQ ID NO: 3745257 - DNA, 25 bp, Homo sapien
caaggacccttgtaattcttaatct

SEQ ID NO: 3745258 - DNA, 25 bp, Homo sapien
cgcactacagtagtcctcacaagga

SEQ ID NO: 3745259 - DNA, 25 bp, Homo sapien
tctgaacagggactagattcaccac

SEQ ID NO: 3745260 - DNA, 25 bp, Homo sapien
agacatctgaacagggactagattc

SEQ ID NO: 3745261 - DNA, 25 bp, Homo sapien
actgcgagaaactatgctgggtccc

SEQ ID NO: 3745262 - DNA, 25 bp, Homo sapien
tcgaaccccactgcgagaaactatg

SEQ ID NO: 3745263 - DNA, 25 bp, Homo sapien
gcaaagtagagatagtctgagtaca

SEQ ID NO: 3745264 - DNA, 25 bp, Homo sapien
ctttctcatggaagtcgtccgcgga

SEQ ID NO: 3745265 - DNA, 25 bp, Homo sapien
gacgcaggcgcgcagtgaataatca

SEQ ID NO: 3745266 - DNA, 25 bp, Homo sapien
ccgcggatttattcgaacttgcaaa

SEQ ID NO: 3745267 - DNA, 25 bp, Homo sapien
agctccttctgccaggggccagctc

SEQ ID NO: 3745268 - DNA, 25 bp, Homo sapien
tctgccaggggccagctcggggggt

SEQ ID NO: 3745269 - DNA, 25 bp, Homo sapien
tgccaggggccagctcggggggtac

SEQ ID NO: 3745270 - DNA, 25 bp, Homo sapien
tccttctgccaggggccagctcggg

SEQ ID NO: 3745271 - DNA, 25 bp, Homo sapien
tctctctgttcctatgctgaaacgc

SEQ ID NO: 3745272 - DNA, 25 bp, Homo sapien
caggagccagaccaagagcccatca

SEQ ID NO: 3745273 - DNA, 25 bp, Homo sapien
tttgcacattaaaacgcttctctct

SEQ ID NO: 3745274 - DNA, 25 bp, Homo sapien
gctgaaacgcaaacccacaatgccg

SEQ ID NO: 3745275 - DNA, 25 bp, Homo sapien
taatcttcctaaaggcaccctcatc

SEQ ID NO: 3745276 - DNA, 25 bp, Homo sapien
tcaagagaatgctcttaagacaatt

SEQ ID NO: 3745277 - DNA, 25 bp, Homo sapien
gcattgaaaatcattgatgggtagt

SEQ ID NO: 3745278 - DNA, 25 bp, Homo sapien
aatccaccgctcaagagaatgctct

SEQ ID NO: 3745279 - DNA, 25 bp, Homo sapien
aaccaacaaaacaatccaccgctca

SEQ ID NO: 3745280 - DNA, 25 bp, Homo sapien
catagtggcaagaatgaacgcagga

SEQ ID NO: 3745281 - DNA, 25 bp, Homo sapien
aaacctgacccacaccaatggctgg

SEQ ID NO: 3745282 - DNA, 25 bp, Homo sapien
gagacaactgcctagagtcacagag

SEQ ID NO: 3745283 - DNA, 25 bp, Homo sapien
gaagccccgttctcaggtggttctc

SEQ ID NO: 3745284 - DNA, 25 bp, Homo sapien
ctccaccattccctccttgcaaagc

SEQ ID NO: 3745285 - DNA, 25 bp, Homo sapien
aagcctgcactctggccctcaacat

SEQ ID NO: 3745286 - DNA, 25 bp, Homo sapien
cagggactgtggcttctccaccatt

SEQ ID NO: 3745287 - DNA, 25 bp, Homo sapien
ctggaccttgaccttgagggcaggg

SEQ ID NO: 3745288 - DNA, 25 bp, Homo sapien
tccagaaggtacacagcatagagcc

SEQ ID NO: 3745289 - DNA, 25 bp, Homo sapien
tccaggcgaagaatgagaaactgtt

SEQ ID NO: 3745290 - DNA, 25 bp, Homo sapien
caaaaacgctgagccagtccagaag

SEQ ID NO: 3745291 - DNA, 25 bp, Homo sapien
catggtgtacttgacgttggatgca

SEQ ID NO: 3745292 - DNA, 25 bp, Homo sapien
caagaccattagtcagggctgcagg

SEQ ID NO: 3745293 - DNA, 25 bp, Homo sapien
cagaaatactcaattaaccaagttc

SEQ ID NO: 3745294 - DNA, 25 bp, Homo sapien
ggcggcttgttcgagcctgctcagc

SEQ ID NO: 3745295 - DNA, 25 bp, Homo sapien
tcaccacaaagtgactctcaggccc

SEQ ID NO: 3745296 - DNA, 25 bp, Homo sapien
ggctgacctcaaggattcccttcca

SEQ ID NO: 3745297 - DNA, 25 bp, Homo sapien
taatgatgatacagcgtctaaggct

SEQ ID NO: 3745298 - DNA, 25 bp, Homo sapien
gctgctctccatgggtgtcagcccg

SEQ ID NO: 3745299 - DNA, 25 bp, Homo sapien
cagcccgtccttggaggaacgtgcg

SEQ ID NO: 3745300 - DNA, 25 bp, Homo sapien
gcctgtagaaatcccgcagaatctt

SEQ ID NO: 3745301 - DNA, 25 bp, Homo sapien
ccagcctagcgttgaagggcctgta

SEQ ID NO: 3745302 - DNA, 25 bp, Homo sapien
cctcgggacgccgtgcattggatgc

SEQ ID NO: 3745303 - DNA, 25 bp, Homo sapien
tccggtcctcgggacgccgtgcatt

SEQ ID NO: 3745304 - DNA, 25 bp, Homo sapien
ctattctgtcagcaagagccgggcc

SEQ ID NO: 3745305 - DNA, 25 bp, Homo sapien
tgttgccaaggatgctcaagcgttc

SEQ ID NO: 3745306 - DNA, 25 bp, Homo sapien
gaggaactttgaccacacgcagtgg

SEQ ID NO: 3745307 - DNA, 25 bp, Homo sapien
gagaaatggagcctgtagccggcca

SEQ ID NO: 3745308 - DNA, 25 bp, Homo sapien
agaggaagagcacgcgctccacagg

SEQ ID NO: 3745309 - DNA, 25 bp, Homo sapien
caacagctgaacttcaaagcaactc

SEQ ID NO: 3745310 - DNA, 25 bp, Homo sapien
aagcaactcaaaactacctaggtgg

SEQ ID NO: 3745311 - DNA, 25 bp, Homo sapien
gtagtttacacacatcctggaaaac

SEQ ID NO: 3745312 - DNA, 25 bp, Homo sapien
taggtggctgatgtgtgtagtttac

SEQ ID NO: 3745313 - DNA, 25 bp, Homo sapien
gagtctctcgcaggcctgctgcatt

SEQ ID NO: 3745314 - DNA, 25 bp, Homo sapien
caggtgcaagcctgagctgggtcct

SEQ ID NO: 3745315 - DNA, 25 bp, Homo sapien
ccctgaatagggactggaaaatgtt

SEQ ID NO: 3745316 - DNA, 25 bp, Homo sapien
tcaacaaggaagaacccaggtgcaa

SEQ ID NO: 3745317 - DNA, 25 bp, Homo sapien
cacactgtccttgtcggtggcagag

SEQ ID NO: 3745318 - DNA, 25 bp, Homo sapien
cccctgatgggttgagctgcagaaa

SEQ ID NO: 3745319 - DNA, 25 bp, Homo sapien
tgccttcagggaggcgcagacaact

SEQ ID NO: 3745320 - DNA, 25 bp, Homo sapien
tctctgctgcggaactgggctttga

SEQ ID NO: 3745321 - DNA, 25 bp, Homo sapien
tccctgaaagggtcgcaagtggtcc

SEQ ID NO: 3745322 - DNA, 25 bp, Homo sapien
caaataatgaaggactctgcctcga

SEQ ID NO: 3745323 - DNA, 25 bp, Homo sapien
tgcaagcgccttccagttctcatgt

SEQ ID NO: 3745324 - DNA, 25 bp, Homo sapien
gaagctttggaaagtcccagcacag

SEQ ID NO: 3745325 - DNA, 25 bp, Homo sapien
tcctttccaagagggtccaagctcc

SEQ ID NO: 3745326 - DNA, 25 bp, Homo sapien
gacacttcctaagttcacgggtcat

SEQ ID NO: 3745327 - DNA, 25 bp, Homo sapien
attcagacacttcctaagttcacgg

SEQ ID NO: 3745328 - DNA, 25 bp, Homo sapien
agcttcctttccaagagggtccaag

SEQ ID NO: 3745329 - DNA, 25 bp, Homo sapien
ccagtcaactgcaggtcccaggtaa

SEQ ID NO: 3745330 - DNA, 25 bp, Homo sapien
tccagttctctgagtttgggaagaa

SEQ ID NO: 3745331 - DNA, 25 bp, Homo sapien
aggcccactcatcggtgatgctgga

SEQ ID NO: 3745332 - DNA, 25 bp, Homo sapien
tctgcactcagaatcctggattcca

SEQ ID NO: 3745333 - DNA, 25 bp, Homo sapien
gcaaactctctggtcacactccaag

SEQ ID NO: 3745334 - DNA, 25 bp, Homo sapien
gagcgcttggttatttccatccaag

SEQ ID NO: 3745335 - DNA, 25 bp, Homo sapien
ggagagcgcttggttatttccatcc

SEQ ID NO: 3745336 - DNA, 25 bp, Homo sapien
agcccctccctggtgcgtttgttct

SEQ ID NO: 3745337 - DNA, 25 bp, Homo sapien
ttaacacggaagtacgccagtgtcc

SEQ ID NO: 3745338 - DNA, 25 bp, Homo sapien
aacacggaagtacgccagtgtccag

SEQ ID NO: 3745339 - DNA, 25 bp, Homo sapien
cggaagtacgccagtgtccagattc

SEQ ID NO: 3745340 - DNA, 25 bp, Homo sapien
tatgttaacacggaagtacgccagt

SEQ ID NO: 3745341 - DNA, 25 bp, Homo sapien
gccatgattccattaaagaaagcca

SEQ ID NO: 3745342 - DNA, 25 bp, Homo sapien
catctctgtgtaaaggatactccaa

SEQ ID NO: 3745343 - DNA, 25 bp, Homo sapien
tagtcttagaccagggaaaccttga

SEQ ID NO: 3745344 - DNA, 25 bp, Homo sapien
ttcacatttagtcttagaccaggga

SEQ ID NO: 3745345 - DNA, 25 bp, Homo sapien
gcataaccagttaaatcttgatctc

SEQ ID NO: 3745346 - DNA, 25 bp, Homo sapien
tgtcttctgttacgatctgccatgg

SEQ ID NO: 3745347 - DNA, 25 bp, Homo sapien
tacgatctgccatggtctacagcat

SEQ ID NO: 3745348 - DNA, 25 bp, Homo sapien
ggtctacagcataaccagttaaatc

SEQ ID NO: 3745349 - DNA, 25 bp, Homo sapien
tgttcatgaaggaccgctgaatcag

SEQ ID NO: 3745350 - DNA, 25 bp, Homo sapien
ttcttgttcagttgcctattgttca

SEQ ID NO: 3745351 - DNA, 25 bp, Homo sapien
ctgggagttggtagcagaggagatc

SEQ ID NO: 3745352 - DNA, 25 bp, Homo sapien
agttggtagcagaggagatctcctg

SEQ ID NO: 3745353 - DNA, 25 bp, Homo sapien
tgtgttcagaagctaaccatagtta

SEQ ID NO: 3745354 - DNA, 25 bp, Homo sapien
caaactgtagattgtggccaccatc

SEQ ID NO: 3745355 - DNA, 25 bp, Homo sapien
tatgcttcagcatgggtcactctgt

SEQ ID NO: 3745356 - DNA, 25 bp, Homo sapien
tctgggatacaacgtgctcagttga

SEQ ID NO: 3745357 - DNA, 25 bp, Homo sapien
gtctttcttggctaccagctttttc

SEQ ID NO: 3745358 - DNA, 25 bp, Homo sapien
agggcccaggctacggtggggctgt

SEQ ID NO: 3745359 - DNA, 25 bp, Homo sapien
gctgagccaggtatgtgccaactgg

SEQ ID NO: 3745360 - DNA, 25 bp, Homo sapien
ttgctgagatgttgctgacagcctg

SEQ ID NO: 3745361 - DNA, 25 bp, Homo sapien
gagctgagccaggtatgtgccaact

SEQ ID NO: 3745362 - DNA, 25 bp, Homo sapien
ctggacaactgtttcggcagcatgc

SEQ ID NO: 3745363 - DNA, 25 bp, Homo sapien
caactgtttcggcagcatgctgggc

SEQ ID NO: 3745364 - DNA, 25 bp, Homo sapien
agtgctgggctggacaactgtttcg

SEQ ID NO: 3745365 - DNA, 25 bp, Homo sapien
tgcaagtcttcatcctccagatgga

SEQ ID NO: 3745366 - DNA, 25 bp, Homo sapien
ctgaggtggacctggtgcaaagaca

SEQ ID NO: 3745367 - DNA, 25 bp, Homo sapien
aagccacgggaagcctggggcgctg

SEQ ID NO: 3745368 - DNA, 25 bp, Homo sapien
cgctgaggtggacctggtgcaaaga

SEQ ID NO: 3745369 - DNA, 25 bp, Homo sapien
tactgctgaagccacgggaagcctg

SEQ ID NO: 3745370 - DNA, 25 bp, Homo sapien
cagagagtaggtccaaagcagggca

SEQ ID NO: 3745371 - DNA, 25 bp, Homo sapien
cgatgttggctgcacaaggactgca

SEQ ID NO: 3745372 - DNA, 25 bp, Homo sapien
ccggcgagagaaagacgccgatgtt

SEQ ID NO: 3745373 - DNA, 25 bp, Homo sapien
tgctgccccagctgtacaaactgtc

SEQ ID NO: 3745374 - DNA, 25 bp, Homo sapien
ccccaagccgcagaagagcaaggaa

SEQ ID NO: 3745375 - DNA, 25 bp, Homo sapien
gggacttgttggctgatacttggca

SEQ ID NO: 3745376 - DNA, 25 bp, Homo sapien
aaggaaagtggttgccgtcaggcac

SEQ ID NO: 3745377 - DNA, 25 bp, Homo sapien
ggcttggctgctaaatgatcagaga

SEQ ID NO: 3745378 - DNA, 25 bp, Homo sapien
ttggctgatacttggcaacagattg

SEQ ID NO: 3745379 - DNA, 25 bp, Homo sapien
tcaacctcgggctgcacttggcact

SEQ ID NO: 3745380 - DNA, 25 bp, Homo sapien
gaggaaggtcctattcagagcccca

SEQ ID NO: 3745381 - DNA, 25 bp, Homo sapien
gggctctcagcctccaagatccggt

SEQ ID NO: 3745382 - DNA, 25 bp, Homo sapien
aatcctcccatggttctctatgagg

SEQ ID NO: 3745383 - DNA, 25 bp, Homo sapien
cctggacccgggcatattaacgatg

SEQ ID NO: 3745384 - DNA, 25 bp, Homo sapien
cctggttcctggacccgggcatatt

SEQ ID NO: 3745385 - DNA, 25 bp, Homo sapien
gggcatattaacgatgatgcccaca

SEQ ID NO: 3745386 - DNA, 25 bp, Homo sapien
gacccgggcatattaacgatgatgc

SEQ ID NO: 3745387 - DNA, 25 bp, Homo sapien
cttgtagttatcagggcacttggca

SEQ ID NO: 3745388 - DNA, 25 bp, Homo sapien
cactgttggcatgaagaccttgcaa

SEQ ID NO: 3745389 - DNA, 25 bp, Homo sapien
cagtctaactagcaccagccagaga

SEQ ID NO: 3745390 - DNA, 25 bp, Homo sapien
cagacacgaagacgaaaggagaggt

SEQ ID NO: 3745391 - DNA, 25 bp, Homo sapien
tctagacgtttcagagatagcccat

SEQ ID NO: 3745392 - DNA, 25 bp, Homo sapien
cattgcaggatatgagggcccctga

SEQ ID NO: 3745393 - DNA, 25 bp, Homo sapien
gatagcccatgacccacgaagatgg

SEQ ID NO: 3745394 - DNA, 25 bp, Homo sapien
cactgctagtgaggacggatggatc

SEQ ID NO: 3745395 - DNA, 25 bp, Homo sapien
ctaaggagaacattcgagtctggag

SEQ ID NO: 3745396 - DNA, 25 bp, Homo sapien
gtgagtccgtgccaggcatctgctt

SEQ ID NO: 3745397 - DNA, 25 bp, Homo sapien
aggagcagctctcccttggtgagtc

SEQ ID NO: 3745398 - DNA, 25 bp, Homo sapien
aacattcgagtctggaggcatcggg

SEQ ID NO: 3745399 - DNA, 25 bp, Homo sapien
tgaacgttgccagttttgtgaccat

SEQ ID NO: 3745400 - DNA, 25 bp, Homo sapien
ggtgaacgttgccagttttgtgacc

SEQ ID NO: 3745401 - DNA, 25 bp, Homo sapien
tgttggtgaacgttgccagttttgt

SEQ ID NO: 3745402 - DNA, 25 bp, Homo sapien
gtgctgttggtgaacgttgccagtt

SEQ ID NO: 3745403 - DNA, 25 bp, Homo sapien
tgaacagcgttgagcgagagagctt

SEQ ID NO: 3745404 - DNA, 25 bp, Homo sapien
tctaggtttgtgtccccatttgttc

SEQ ID NO: 3745405 - DNA, 25 bp, Homo sapien
cgagagagcttgtgtctaggtttgt

SEQ ID NO: 3745406 - DNA, 25 bp, Homo sapien
ctggttgggtgaacagcgttgagcg

SEQ ID NO: 3745407 - DNA, 25 bp, Homo sapien
ttgctggtgcttggccagctcggtg

SEQ ID NO: 3745408 - DNA, 25 bp, Homo sapien
tggtgcttggccagctcggtgcccc

SEQ ID NO: 3745409 - DNA, 25 bp, Homo sapien
tgcttggccagctcggtgccccagg

SEQ ID NO: 3745410 - DNA, 25 bp, Homo sapien
ctggtgcttggccagctcggtgccc

SEQ ID NO: 3745411 - DNA, 25 bp, Homo sapien
tgaaggactaaggcagttgcttcca

SEQ ID NO: 3745412 - DNA, 25 bp, Homo sapien
gctgaaggactaaggcagttgcttc

SEQ ID NO: 3745413 - DNA, 25 bp, Homo sapien
gaaggactaaggcagttgcttccac

SEQ ID NO: 3745414 - DNA, 25 bp, Homo sapien
ctgaaggactaaggcagttgcttcc

SEQ ID NO: 3745415 - DNA, 25 bp, Homo sapien
actcagcaactgcattaaagcacag

SEQ ID NO: 3745416 - DNA, 25 bp, Homo sapien
tgggtccttccccacgctcaaatgc

SEQ ID NO: 3745417 - DNA, 25 bp, Homo sapien
cgctcaaatgcaacgtgcggttggg

SEQ ID NO: 3745418 - DNA, 25 bp, Homo sapien
tgcattaaagcacagctcgcagccc

SEQ ID NO: 3745419 - DNA, 25 bp, Homo sapien
gccttgcgtgaactccccactgttt

SEQ ID NO: 3745420 - DNA, 25 bp, Homo sapien
ggcctggccttgcgtgaactcccca

SEQ ID NO: 3745421 - DNA, 25 bp, Homo sapien
ggccttgcgtgaactccccactgtt

SEQ ID NO: 3745422 - DNA, 25 bp, Homo sapien
ccttgcgtgaactccccactgtttg

SEQ ID NO: 3745423 - DNA, 25 bp, Homo sapien
ctgtgccagccaagcagggtggaga

SEQ ID NO: 3745424 - DNA, 25 bp, Homo sapien
agggtggagaggaccgctgcttcca

SEQ ID NO: 3745425 - DNA, 25 bp, Homo sapien
gaggaccgctgcttccaagatgtca

SEQ ID NO: 3745426 - DNA, 25 bp, Homo sapien
aagatgtcactttgccactgaaatg

SEQ ID NO: 3745427 - DNA, 25 bp, Homo sapien
ctgactgggaaccggcatgggatgc

SEQ ID NO: 3745428 - DNA, 25 bp, Homo sapien
ggtgttggggccataggccacaggg

SEQ ID NO: 3745429 - DNA, 25 bp, Homo sapien
aggtgttggggccataggccacagg

SEQ ID NO: 3745430 - DNA, 25 bp, Homo sapien
actgggaaccggcatgggatgcctt

SEQ ID NO: 3745431 - DNA, 25 bp, Homo sapien
cagacagcttggctgcttcctactt

SEQ ID NO: 3745432 - DNA, 25 bp, Homo sapien
cctacttctacggtgaatggctgga

SEQ ID NO: 3745433 - DNA, 25 bp, Homo sapien
ggaagcgtccaagtaggaagctact

SEQ ID NO: 3745434 - DNA, 25 bp, Homo sapien
ggaagctactggacctgcttgtgtc

SEQ ID NO: 3745435 - DNA, 25 bp, Homo sapien
catgttggtccagttacggttatgg

SEQ ID NO: 3745436 - DNA, 25 bp, Homo sapien
cacagttactgtttgcaaagggttt

SEQ ID NO: 3745437 - DNA, 25 bp, Homo sapien
tggcttgtgtataggcctcccacaa

SEQ ID NO: 3745438 - DNA, 25 bp, Homo sapien
cttgctggcttgtgtataggcctcc

SEQ ID NO: 3745439 - DNA, 25 bp, Homo sapien
catggttggtgtccttcattacctg

SEQ ID NO: 3745440 - DNA, 25 bp, Homo sapien
ttagggcagatgcagtttggtaccg

SEQ ID NO: 3745441 - DNA, 25 bp, Homo sapien
tcattacctggtttggttgccatat

SEQ ID NO: 3745442 - DNA, 25 bp, Homo sapien
tggagttggtgggagtttcgtcgcc

SEQ ID NO: 3745443 - DNA, 25 bp, Homo sapien
gcctgtgtgccgctgcttgtgttct

SEQ ID NO: 3745444 - DNA, 25 bp, Homo sapien
cttattcacggagctcagaaccttt

SEQ ID NO: 3745445 - DNA, 25 bp, Homo sapien
gaacctttgcggtgtcctgggcctg

SEQ ID NO: 3745446 - DNA, 25 bp, Homo sapien
tgtgtgccgctgcttgtgttctgat

SEQ ID NO: 3745447 - DNA, 25 bp, Homo sapien
ccagagggtgtttgcaagagcgtgc

SEQ ID NO: 3745448 - DNA, 25 bp, Homo sapien
gcgtggctcgagaacaggatgctca

SEQ ID NO: 3745449 - DNA, 25 bp, Homo sapien
tggctcgagaacaggatgctcagct

SEQ ID NO: 3745450 - DNA, 25 bp, Homo sapien
ccaggctggcgtggctcgagaacag

SEQ ID NO: 3745451 - DNA, 25 bp, Homo sapien
tgggtcttggatcccccagatggct

SEQ ID NO: 3745452 - DNA, 25 bp, Homo sapien
ttctgggtcttggatcccccagatg

SEQ ID NO: 3745453 - DNA, 25 bp, Homo sapien
ctgggtcttggatcccccagatggc

SEQ ID NO: 3745454 - DNA, 25 bp, Homo sapien
tctgggtcttggatcccccagatgg

SEQ ID NO: 3745455 - DNA, 25 bp, Homo sapien
ctccaagctgcccaggcaatgatga

SEQ ID NO: 3745456 - DNA, 25 bp, Homo sapien
tctgctccaagctgcccaggcaatg

SEQ ID NO: 3745457 - DNA, 25 bp, Homo sapien
ctgcccaggcaatgatgagatcagg

SEQ ID NO: 3745458 - DNA, 25 bp, Homo sapien
cttgtcctccgattccagagctctg

SEQ ID NO: 3745459 - DNA, 25 bp, Homo sapien
ggactcttgagggcgggatctccag

SEQ ID NO: 3745460 - DNA, 25 bp, Homo sapien
tgagggcgggatctccagaagctgc

SEQ ID NO: 3745461 - DNA, 25 bp, Homo sapien
ttgagggcgggatctccagaagctg

SEQ ID NO: 3745462 - DNA, 25 bp, Homo sapien
tggactcttgagggcgggatctcca

SEQ ID NO: 3745463 - DNA, 25 bp, Homo sapien
cttggccagtactctctgcacccat

SEQ ID NO: 3745464 - DNA, 25 bp, Homo sapien
ggctcggaggatctcccacggggac

SEQ ID NO: 3745465 - DNA, 25 bp, Homo sapien
ctcaggctcggaggatctcccacgg

SEQ ID NO: 3745466 - DNA, 25 bp, Homo sapien
tcaggctcggaggatctcccacggg

SEQ ID NO: 3745467 - DNA, 25 bp, Homo sapien
taaagctcggatctaattctatttt

SEQ ID NO: 3745468 - DNA, 25 bp, Homo sapien
gtgttgaaaataaagctcggatcta

SEQ ID NO: 3745469 - DNA, 25 bp, Homo sapien
gttgaaaataaagctcggatctaat

SEQ ID NO: 3745470 - DNA, 25 bp, Homo sapien
aaataaagctcggatctaattctat

SEQ ID NO: 3745471 - DNA, 25 bp, Homo sapien
tctccattgcctgctactctttgtg

SEQ ID NO: 3745472 - DNA, 25 bp, Homo sapien
tctttgtggaaagcaatgctgtgct

SEQ ID NO: 3745473 - DNA, 25 bp, Homo sapien
tttgggatgtaaacgcaggagccgc

SEQ ID NO: 3745474 - DNA, 25 bp, Homo sapien
tttttcgttcctgggcgatggcctc

SEQ ID NO: 3745475 - DNA, 25 bp, Homo sapien
gaaagatcccgacttctgcattgca

SEQ ID NO: 3745476 - DNA, 25 bp, Homo sapien
ccgaatttgcgtggtgggaaatgtc

SEQ ID NO: 3745477 - DNA, 25 bp, Homo sapien
tctgcattgcaacaaagaccccgaa

SEQ ID NO: 3745478 - DNA, 25 bp, Homo sapien
tcatccatgtgaccggtgctgtctg

SEQ ID NO: 3745479 - DNA, 25 bp, Homo sapien
ccaggcactgctattgttcacctga

SEQ ID NO: 3745480 - DNA, 25 bp, Homo sapien
tattgttcacctgactgggttgctc

SEQ ID NO: 3745481 - DNA, 25 bp, Homo sapien
ccgcccaggcactgctattgttcac

SEQ ID NO: 3745482 - DNA, 25 bp, Homo sapien
attgttcacctgactgggttgctct

SEQ ID NO: 3745483 - DNA, 25 bp, Homo sapien
tgtgtctcaagcttgaggttgaatc

SEQ ID NO: 3745484 - DNA, 25 bp, Homo sapien
ggttgaatcccgagtcctctgttgg

SEQ ID NO: 3745485 - DNA, 25 bp, Homo sapien
cccatcgcagcgcagagtttgctga

SEQ ID NO: 3745486 - DNA, 25 bp, Homo sapien
caagcttgaggttgaatcccgagtc

SEQ ID NO: 3745487 - DNA, 25 bp, Homo sapien
ttctctgagttggggtcccagcacc

SEQ ID NO: 3745488 - DNA, 25 bp, Homo sapien
accagcagctgagaatgccagctgt

SEQ ID NO: 3745489 - DNA, 25 bp, Homo sapien
ttgcttctgtctcagacgaacacaa

SEQ ID NO: 3745490 - DNA, 25 bp, Homo sapien
tgtctcagacgaacacaaacaccag

SEQ ID NO: 3745491 - DNA, 25 bp, Homo sapien
ggactggaatcctcatcttgatact

SEQ ID NO: 3745492 - DNA, 25 bp, Homo sapien
tgatacttcccgttttcgctttgcc

SEQ ID NO: 3745493 - DNA, 25 bp, Homo sapien
tcagtatgcgggcaggtctgtcgag

SEQ ID NO: 3745494 - DNA, 25 bp, Homo sapien
taccaagtccacctgtgcttggacc

SEQ ID NO: 3745495 - DNA, 25 bp, Homo sapien
gctgccctgttgtccgaggggttaa

SEQ ID NO: 3745496 - DNA, 25 bp, Homo sapien
cgaagggacgtgacaacgccattga

SEQ ID NO: 3745497 - DNA, 25 bp, Homo sapien
tgcccacgaagggacgtgacaacgc

SEQ ID NO: 3745498 - DNA, 25 bp, Homo sapien
caacgccattgaaggaacagtaaac

SEQ ID NO: 3745499 - DNA, 25 bp, Homo sapien
gatgtgatgtgatgtctttattaac

SEQ ID NO: 3745500 - DNA, 25 bp, Homo sapien
aagatgtgatgtgatgtctttatta

SEQ ID NO: 3745501 - DNA, 25 bp, Homo sapien
gaaggaggaaaagatgtgatgtgat

SEQ ID NO: 3745502 - DNA, 25 bp, Homo sapien
ggaggaaaagatgtgatgtgatgtc

SEQ ID NO: 3745503 - DNA, 25 bp, Homo sapien
tctaccttccgtccggcttgtgtac

SEQ ID NO: 3745504 - DNA, 25 bp, Homo sapien
ccttccgtccggcttgtgtactgtc

SEQ ID NO: 3745505 - DNA, 25 bp, Homo sapien
ttccgtccggcttgtgtactgtcat

SEQ ID NO: 3745506 - DNA, 25 bp, Homo sapien
catcctctaccttccgtccggcttg

SEQ ID NO: 3745507 - DNA, 25 bp, Homo sapien
ctaaaccatcaatccccagagcagg

SEQ ID NO: 3745508 - DNA, 25 bp, Homo sapien
taaaccatcaatccccagagcaggt

SEQ ID NO: 3745509 - DNA, 25 bp, Homo sapien
tgctggacctgcagccggtgcccat

SEQ ID NO: 3745510 - DNA, 25 bp, Homo sapien
gcagccggtgcccataaacactcag

SEQ ID NO: 3745511 - DNA, 25 bp, Homo sapien
tctgcagatgtcgagcagacaggcc

SEQ ID NO: 3745512 - DNA, 25 bp, Homo sapien
aacattcttggccacccttggctct

SEQ ID NO: 3745513 - DNA, 25 bp, Homo sapien
ggtgtactgtccacctgcccctggt

SEQ ID NO: 3745514 - DNA, 25 bp, Homo sapien
ttccatggttacttgaagggtaaca

SEQ ID NO: 3745515 - DNA, 25 bp, Homo sapien
tctcggtcagtccagtttgcattga

SEQ ID NO: 3745516 - DNA, 25 bp, Homo sapien
tcctgttctccaccgcgagaggtgc

SEQ ID NO: 3745517 - DNA, 25 bp, Homo sapien
tgacgggcggctttattgatgtcgc

SEQ ID NO: 3745518 - DNA, 25 bp, Homo sapien
tccgatagtgcttgcgaaagccgtt

SEQ ID NO: 3745519 - DNA, 25 bp, Homo sapien
ctcggtgcactgtgtaaatccattc

SEQ ID NO: 3745520 - DNA, 25 bp, Homo sapien
tactcggtgcactgtgtaaatccat

SEQ ID NO: 3745521 - DNA, 25 bp, Homo sapien
cggtgcactgtgtaaatccattcac

SEQ ID NO: 3745522 - DNA, 25 bp, Homo sapien
gtactcggtgcactgtgtaaatcca

SEQ ID NO: 3745523 - DNA, 25 bp, Homo sapien
ggtgaccggaggcaggctcgctcac

SEQ ID NO: 3745524 - DNA, 25 bp, Homo sapien
gccctggggtgaccggaggcaggct

SEQ ID NO: 3745525 - DNA, 25 bp, Homo sapien
tggggtgaccggaggcaggctcgct

SEQ ID NO: 3745526 - DNA, 25 bp, Homo sapien
ctgagatgggggtcccttcagccct

SEQ ID NO: 3745527 - DNA, 25 bp, Homo sapien
catagggccccacgcgcgttgggac

SEQ ID NO: 3745528 - DNA, 25 bp, Homo sapien
ggaactgctcgcagccatagggccc

SEQ ID NO: 3745529 - DNA, 25 bp, Homo sapien
cgcaagtcaataaccccaagtccgg

SEQ ID NO: 3745530 - DNA, 25 bp, Homo sapien
gggcgctgcccgcaaagcgttgctt

SEQ ID NO: 3745531 - DNA, 25 bp, Homo sapien
aaaggaggccccatttcagcagaaa

SEQ ID NO: 3745532 - DNA, 25 bp, Homo sapien
agcagaaaggggcttcgagctccag

SEQ ID NO: 3745533 - DNA, 25 bp, Homo sapien
gtggcgagttgtcccctcccctcca

SEQ ID NO: 3745534 - DNA, 25 bp, Homo sapien
gagaggacgggggtgtggcgagttg

SEQ ID NO: 3745535 - DNA, 25 bp, Homo sapien
catgcagtacacactggttgtaggg

SEQ ID NO: 3745536 - DNA, 25 bp, Homo sapien
agggcctatgtccagtggtgaacag

SEQ ID NO: 3745537 - DNA, 25 bp, Homo sapien
tacacactggttgtagggcctcagg

SEQ ID NO: 3745538 - DNA, 25 bp, Homo sapien
caggaacctgctgacggcacttagt

SEQ ID NO: 3745539 - DNA, 25 bp, Homo sapien
caacaccagggttgtattctatgga

SEQ ID NO: 3745540 - DNA, 25 bp, Homo sapien
tacttcctaaggtgaaatgcatcta

SEQ ID NO: 3745541 - DNA, 25 bp, Homo sapien
tagaacaacgtttatgaacctgccg

SEQ ID NO: 3745542 - DNA, 25 bp, Homo sapien
tatctctgggtattgcataaaaggc

SEQ ID NO: 3745543 - DNA, 25 bp, Homo sapien
tcaggaagcgagtccctttttggaa

SEQ ID NO: 3745544 - DNA, 25 bp, Homo sapien
ctataatatgttgagctcaggaagc

SEQ ID NO: 3745545 - DNA, 25 bp, Homo sapien
attctgatttgacggatctgggacg

SEQ ID NO: 3745546 - DNA, 25 bp, Homo sapien
gccaggttgagaatcgctgctataa

SEQ ID NO: 3745547 - DNA, 25 bp, Homo sapien
aaggcaatgttctgctctcagtgag

SEQ ID NO: 3745548 - DNA, 25 bp, Homo sapien
tgagctgtcttaaagggctcccctg

SEQ ID NO: 3745549 - DNA, 25 bp, Homo sapien
ctttggtgaccagatagcctttccc

SEQ ID NO: 3745550 - DNA, 25 bp, Homo sapien
ctcagtgagttctggagagcccatg

SEQ ID NO: 3745551 - DNA, 25 bp, Homo sapien
ggagtcttgggctctataagagttc

SEQ ID NO: 3745552 - DNA, 25 bp, Homo sapien
gacaaggcataactcgggagtcttg

SEQ ID NO: 3745553 - DNA, 25 bp, Homo sapien
ggcataactcgggagtcttgggctc

SEQ ID NO: 3745554 - DNA, 25 bp, Homo sapien
tgggctctataagagttccaagagc

SEQ ID NO: 3745555 - DNA, 25 bp, Homo sapien
gcagctttcaagttcaggtctctct

SEQ ID NO: 3745556 - DNA, 25 bp, Homo sapien
tcatgctttctggacctattgcatt

SEQ ID NO: 3745557 - DNA, 25 bp, Homo sapien
tctagtacagagaccataaaatgtt

SEQ ID NO: 3745558 - DNA, 25 bp, Homo sapien
ctctgtcaaggccacattatgctga

SEQ ID NO: 3745559 - DNA, 25 bp, Homo sapien
agcgcggacccggctcctggctgga

SEQ ID NO: 3745560 - DNA, 25 bp, Homo sapien
gaaggcaagcccgagcggcgccatc

SEQ ID NO: 3745561 - DNA, 25 bp, Homo sapien
cctggctggaaagctaccgccaagc

SEQ ID NO: 3745562 - DNA, 25 bp, Homo sapien
acagccgaaggcaagcccgagcggc

SEQ ID NO: 3745563 - DNA, 25 bp, Homo sapien
ctgcgccggtgccaatcggcgcgca

SEQ ID NO: 3745564 - DNA, 25 bp, Homo sapien
gccggtgccaatcggcgcgcagccc

SEQ ID NO: 3745565 - DNA, 25 bp, Homo sapien
ggctgcgccggtgccaatcggcgcg

SEQ ID NO: 3745566 - DNA, 25 bp, Homo sapien
tgcgccggtgccaatcggcgcgcag

SEQ ID NO: 3745567 - DNA, 25 bp, Homo sapien
gatttccgcaggctttaaagtccgc

SEQ ID NO: 3745568 - DNA, 25 bp, Homo sapien
cattcccttcgatgggaggtggtcc

SEQ ID NO: 3745569 - DNA, 25 bp, Homo sapien
aaagtccgcagggaatacagtgacc

SEQ ID NO: 3745570 - DNA, 25 bp, Homo sapien
tgtcgggcgccactttttagtttca

SEQ ID NO: 3745571 - DNA, 25 bp, Homo sapien
agctccgcgtcccaaccgacgccgg

SEQ ID NO: 3745572 - DNA, 25 bp, Homo sapien
gctccgcgtcccaaccgacgccggc

SEQ ID NO: 3745573 - DNA, 25 bp, Homo sapien
cagctccgcgtcccaaccgacgccg

SEQ ID NO: 3745574 - DNA, 25 bp, Homo sapien
tcagctccgcgtcccaaccgacgcc

SEQ ID NO: 3745575 - DNA, 25 bp, Homo sapien
cgctgtcgtacagcacgcccgagat

SEQ ID NO: 3745576 - DNA, 25 bp, Homo sapien
acagcacgcccgagatgtcaagcag

SEQ ID NO: 3745577 - DNA, 25 bp, Homo sapien
tccaccgagccggcgatggccgtgc

SEQ ID NO: 3745578 - DNA, 25 bp, Homo sapien
agatgtcaagcagcaccccgcgcac

SEQ ID NO: 3745579 - DNA, 25 bp, Homo sapien
agaatgctctcatctgtgactgagc

SEQ ID NO: 3745580 - DNA, 25 bp, Homo sapien
tgctctcatctgtgactgagctagt

SEQ ID NO: 3745581 - DNA, 25 bp, Homo sapien
catctgtgactgagctagtctaaag

SEQ ID NO: 3745582 - DNA, 25 bp, Homo sapien
tctcatctgtgactgagctagtcta

SEQ ID NO: 3745583 - DNA, 25 bp, Homo sapien
gcgagggagggtgtacggagcttcc

SEQ ID NO: 3745584 - DNA, 25 bp, Homo sapien
cacgagccccacaggcatgcgaggg

SEQ ID NO: 3745585 - DNA, 25 bp, Homo sapien
atgcgagggagggtgtacggagctt

SEQ ID NO: 3745586 - DNA, 25 bp, Homo sapien
acgagccccacaggcatgcgaggga

SEQ ID NO: 3745587 - DNA, 25 bp, Homo sapien
caatcaccaggcgaggaaaacaggt

SEQ ID NO: 3745588 - DNA, 25 bp, Homo sapien
tgcaggccacacagacttcacctgg

SEQ ID NO: 3745589 - DNA, 25 bp, Homo sapien
aacaggtgtcctgcatctctggaaa

SEQ ID NO: 3745590 - DNA, 25 bp, Homo sapien
aaagcaggcacactttcctggaggg

SEQ ID NO: 3745591 - DNA, 25 bp, Homo sapien
atgaaaggcgcagggccactcgccc

SEQ ID NO: 3745592 - DNA, 25 bp, Homo sapien
ctgtacatatcaaggaggccacagc

SEQ ID NO: 3745593 - DNA, 25 bp, Homo sapien
catgaaaggcgcagggccactcgcc

SEQ ID NO: 3745594 - DNA, 25 bp, Homo sapien
gcaggctgtacatatcaaggaggcc

SEQ ID NO: 3745595 - DNA, 25 bp, Homo sapien
cttgtaattggccaagggcttccaa

SEQ ID NO: 3745596 - DNA, 25 bp, Homo sapien
tcatgagctttgtaacttgtgccac

SEQ ID NO: 3745597 - DNA, 25 bp, Homo sapien
aatatggcttcttgcacgttgtggg

SEQ ID NO: 3745598 - DNA, 25 bp, Homo sapien
cactgctttgccaatatggcttctt

SEQ ID NO: 3745599 - DNA, 25 bp, Homo sapien
agggcaacaggtccactagacgctg

SEQ ID NO: 3745600 - DNA, 25 bp, Homo sapien
agagaagagacacagtgacgcagga

SEQ ID NO: 3745601 - DNA, 25 bp, Homo sapien
tagacgctgttgagcacctgcacag

SEQ ID NO: 3745602 - DNA, 25 bp, Homo sapien
tgcacagagccttgagtcatcagag

SEQ ID NO: 3745603 - DNA, 25 bp, Homo sapien
caggtaggagcagcaacagatcggc

SEQ ID NO: 3745604 - DNA, 25 bp, Homo sapien
taggagcagcaacagatcggcatct

SEQ ID NO: 3745605 - DNA, 25 bp, Homo sapien
ccataaacagtgatgggtgatggtg

SEQ ID NO: 3745606 - DNA, 25 bp, Homo sapien
ctggcgcgcgcaccaggctggtgga

SEQ ID NO: 3745607 - DNA, 25 bp, Homo sapien
ccgtgccctgcaccatgaagcacac

SEQ ID NO: 3745608 - DNA, 25 bp, Homo sapien
ggccctcatagcaccctgagtcttt

SEQ ID NO: 3745609 - DNA, 25 bp, Homo sapien
cttggtgctgctctggtcctgacat

SEQ ID NO: 3745610 - DNA, 25 bp, Homo sapien
gatcatcctacaaagcagggttcat

SEQ ID NO: 3745611 - DNA, 25 bp, Homo sapien
agccccggtactggtcaccttcgtg

SEQ ID NO: 3745612 - DNA, 25 bp, Homo sapien
ctgttaggacaattattggacatcc

SEQ ID NO: 3745613 - DNA, 25 bp, Homo sapien
ttaggacaattattggacatcctga

SEQ ID NO: 3745614 - DNA, 25 bp, Homo sapien
ttgggacagctcaatagctagccct

SEQ ID NO: 3745615 - DNA, 25 bp, Homo sapien
ctgagtgaccttgggacagctcaat

SEQ ID NO: 3745616 - DNA, 25 bp, Homo sapien
aatcacctcggactctccacatctg

SEQ ID NO: 3745617 - DNA, 25 bp, Homo sapien
tgagtgacaacatcgcccggggcaa

SEQ ID NO: 3745618 - DNA, 25 bp, Homo sapien
gatgaaccggcccttacaaatcacc

SEQ ID NO: 3745619 - DNA, 25 bp, Homo sapien
ctgacctttacctcatctcagcagg

SEQ ID NO: 3745620 - DNA, 25 bp, Homo sapien
tcggatagaaagaactcgagcagcg

SEQ ID NO: 3745621 - DNA, 25 bp, Homo sapien
cttgcgcacaggcaggtgtgcactg

SEQ ID NO: 3745622 - DNA, 25 bp, Homo sapien
atagaaagaactcgagcagcgtggg

SEQ ID NO: 3745623 - DNA, 25 bp, Homo sapien
accctctcggatagaaagaactcga

SEQ ID NO: 3745624 - DNA, 25 bp, Homo sapien
gaagggacccgagcgtgctagagga

SEQ ID NO: 3745625 - DNA, 25 bp, Homo sapien
aagggacccgagcgtgctagaggaa

SEQ ID NO: 3745626 - DNA, 25 bp, Homo sapien
agggacccgagcgtgctagaggaac

SEQ ID NO: 3745627 - DNA, 25 bp, Homo sapien
cactgtcaatggagaaaggtttgcc

SEQ ID NO: 3745628 - DNA, 25 bp, Homo sapien
aaagtacaaaggcagatggcccgag

SEQ ID NO: 3745629 - DNA, 25 bp, Homo sapien
cagatggcccgagacaggtttgtct

SEQ ID NO: 3745630 - DNA, 25 bp, Homo sapien
gacaccaacattccgggatggacag

SEQ ID NO: 3745631 - DNA, 25 bp, Homo sapien
agcaggtatggtcgcaggccttgct

SEQ ID NO: 3745632 - DNA, 25 bp, Homo sapien
agctctgcccgggacttctgcgact

SEQ ID NO: 3745633 - DNA, 25 bp, Homo sapien
cgttggtgcagaacctcaccttcag

SEQ ID NO: 3745634 - DNA, 25 bp, Homo sapien
atgagcaggtatggtcgcaggcctt

SEQ ID NO: 3745635 - DNA, 25 bp, Homo sapien
ccttttcccagtgatatgagcacag

SEQ ID NO: 3745636 - DNA, 25 bp, Homo sapien
acagtttgggttggatgtgtcgatc

SEQ ID NO: 3745637 - DNA, 25 bp, Homo sapien
ctggaaggcgttattcatgttttga

SEQ ID NO: 3745638 - DNA, 25 bp, Homo sapien
ttctcctgcgtctgcaattaccaca

SEQ ID NO: 3745639 - DNA, 25 bp, Homo sapien
cagagagagatacccacagatggcg

SEQ ID NO: 3745640 - DNA, 25 bp, Homo sapien
ggagagatacccacagacgaggaga

SEQ ID NO: 3745641 - DNA, 25 bp, Homo sapien
tacaggcgtatttggtcgtggacat

SEQ ID NO: 3745642 - DNA, 25 bp, Homo sapien
caaccgaatttcagtttacaggcgt

SEQ ID NO: 3745643 - DNA, 25 bp, Homo sapien
gagagcgtgtctgctaccccatgcc

SEQ ID NO: 3745644 - DNA, 25 bp, Homo sapien
ccacatggggatccagaatctctgc

SEQ ID NO: 3745645 - DNA, 25 bp, Homo sapien
agagcgtgtctgctaccccatgcca

SEQ ID NO: 3745646 - DNA, 25 bp, Homo sapien
gaatctctgcgattaccaccatctg

SEQ ID NO: 3745647 - DNA, 25 bp, Homo sapien
tacacaaagtgtgtggcagtggcca

SEQ ID NO: 3745648 - DNA, 25 bp, Homo sapien
tcaaaggcctaatgggtcagcccgg

SEQ ID NO: 3745649 - DNA, 25 bp, Homo sapien
ttagaggtaacacgcacagggtctg

SEQ ID NO: 3745650 - DNA, 25 bp, Homo sapien
caactaactctgtggtctggagaca

SEQ ID NO: 3745651 - DNA, 25 bp, Homo sapien
cagtgacccacagccgaggacggca

SEQ ID NO: 3745652 - DNA, 25 bp, Homo sapien
agtgacccacagccgaggacggcat

SEQ ID NO: 3745653 - DNA, 25 bp, Homo sapien
aaggccatgaccctcgtcccctcct

SEQ ID NO: 3745654 - DNA, 25 bp, Homo sapien
tcaaaggccatgaccctcgtcccct

SEQ ID NO: 3745655 - DNA, 25 bp, Homo sapien
ttggaatccactgagcaccctgctg

SEQ ID NO: 3745656 - DNA, 25 bp, Homo sapien
gccacgccaccacaggcaaggccct

SEQ ID NO: 3745657 - DNA, 25 bp, Homo sapien
tggcattaacgatcccagatgctcc

SEQ ID NO: 3745658 - DNA, 25 bp, Homo sapien
ttggcattaacgatcccagatgctc

SEQ ID NO: 3745659 - DNA, 25 bp, Homo sapien
cccttggcattaacgatcccagatg

SEQ ID NO: 3745660 - DNA, 25 bp, Homo sapien
agggatgccacaggtcgcacagaac

SEQ ID NO: 3745661 - DNA, 25 bp, Homo sapien
gcacagaacgcaaccctgctgtcag

SEQ ID NO: 3745662 - DNA, 25 bp, Homo sapien
tgagaatgaccgcaggggaccagca

SEQ ID NO: 3745663 - DNA, 25 bp, Homo sapien
gcaaccctgctgtcagactcgtggg

SEQ ID NO: 3745664 - DNA, 25 bp, Homo sapien
cggagcacgggatgctgagcacggg

SEQ ID NO: 3745665 - DNA, 25 bp, Homo sapien
ctaagtatcgggagctgagcaccgg

SEQ ID NO: 3745666 - DNA, 25 bp, Homo sapien
aggagagagcagaacggagcacggg

SEQ ID NO: 3745667 - DNA, 25 bp, Homo sapien
ggagctgaccgcaggatgctaagta

SEQ ID NO: 3745668 - DNA, 25 bp, Homo sapien
cgccttcatgtagggaccaacgtcc

SEQ ID NO: 3745669 - DNA, 25 bp, Homo sapien
tagggaccaacgtccagcatcaggc

SEQ ID NO: 3745670 - DNA, 25 bp, Homo sapien
ctcaagcgccttcatgtagggacca

SEQ ID NO: 3745671 - DNA, 25 bp, Homo sapien
ttcatgtagggaccaacgtccagca

SEQ ID NO: 3745672 - DNA, 25 bp, Homo sapien
gcttccactcctatcgcttgcaggg

SEQ ID NO: 3745673 - DNA, 25 bp, Homo sapien
ctggtgggcttccactcctatcgct

SEQ ID NO: 3745674 - DNA, 25 bp, Homo sapien
cactcctatcgcttgcagggcagac

SEQ ID NO: 3745675 - DNA, 25 bp, Homo sapien
cctatcgcttgcagggcagacttga

SEQ ID NO: 3745676 - DNA, 25 bp, Homo sapien
ctgtcttgccagtgagatatattaa

SEQ ID NO: 3745677 - DNA, 25 bp, Homo sapien
ccatattgttgtaatcttgctgtta

SEQ ID NO: 3745678 - DNA, 25 bp, Homo sapien
ttcttatcctttcagagaagcagca

SEQ ID NO: 3745679 - DNA, 25 bp, Homo sapien
taacacactgataggacttgtcaat

SEQ ID NO: 3745680 - DNA, 25 bp, Homo sapien
tgaagctggatgatggatataatgg

SEQ ID NO: 3745681 - DNA, 25 bp, Homo sapien
tgtatgcctgttggccatgttagga

SEQ ID NO: 3745682 - DNA, 25 bp, Homo sapien
tggcaaaatcttaaccactgaagct

SEQ ID NO: 3745683 - DNA, 25 bp, Homo sapien
tgtatttacatccaaaaatcgtgat

SEQ ID NO: 3745684 - DNA, 25 bp, Homo sapien
tgcccattctagacatttgctatac

SEQ ID NO: 3745685 - DNA, 25 bp, Homo sapien
caaaaggagacctcgtaccctgaag

SEQ ID NO: 3745686 - DNA, 25 bp, Homo sapien
gaagaatacaatatgtgtccttttg

SEQ ID NO: 3745687 - DNA, 25 bp, Homo sapien
gcccagttccagaatatttgtatca

SEQ ID NO: 3745688 - DNA, 25 bp, Homo sapien
cttctttcggcggtgaggtgggctg

SEQ ID NO: 3745689 - DNA, 25 bp, Homo sapien
cagcatccgaaaacgacaaacccag

SEQ ID NO: 3745690 - DNA, 25 bp, Homo sapien
tgtatctcattcgaaatgtgaagga

SEQ ID NO: 3745691 - DNA, 25 bp, Homo sapien
tccgaaaacgacaaacccagattca

SEQ ID NO: 3745692 - DNA, 25 bp, Homo sapien
gcagccacggtgacccaccaggaat

SEQ ID NO: 3745693 - DNA, 25 bp, Homo sapien
aagcagccacggtgacccaccagga

SEQ ID NO: 3745694 - DNA, 25 bp, Homo sapien
tcaagcagccacggtgacccaccag

SEQ ID NO: 3745695 - DNA, 25 bp, Homo sapien
cagccacggtgacccaccaggaatc

SEQ ID NO: 3745696 - DNA, 25 bp, Homo sapien
taaatagagctagtggcaagtaccc

SEQ ID NO: 3745697 - DNA, 25 bp, Homo sapien
tcttcaaaccgtgaggtcagcagtg

SEQ ID NO: 3745698 - DNA, 25 bp, Homo sapien
tacagacttggttcttcctgggctg

SEQ ID NO: 3745699 - DNA, 25 bp, Homo sapien
tgactgatgttagggaaaatcctgc

SEQ ID NO: 3745700 - DNA, 25 bp, Homo sapien
tgcagcgctctcattccacaccgct

SEQ ID NO: 3745701 - DNA, 25 bp, Homo sapien
gcaccgccgacgtcgcccacgatat

SEQ ID NO: 3745702 - DNA, 25 bp, Homo sapien
tcgcccacgatatcgtccccaatca

SEQ ID NO: 3745703 - DNA, 25 bp, Homo sapien
attccacaccgctgggcaccgccga

SEQ ID NO: 3745704 - DNA, 25 bp, Homo sapien
atgagaatgtggtcatcccctggaa

SEQ ID NO: 3745705 - DNA, 25 bp, Homo sapien
tgagaatgtggtcatcccctggaag

SEQ ID NO: 3745706 - DNA, 25 bp, Homo sapien
cctctcgatgaccaggcgagctgga

SEQ ID NO: 3745707 - DNA, 25 bp, Homo sapien
ccaagatcctctcgatgaccaggcg

SEQ ID NO: 3745708 - DNA, 25 bp, Homo sapien
gtccaagatcctctcgatgaccagg

SEQ ID NO: 3745709 - DNA, 25 bp, Homo sapien
gatcctctcgatgaccaggcgagct

SEQ ID NO: 3745710 - DNA, 25 bp, Homo sapien
tctgaatggccacaatcgaaaccat

SEQ ID NO: 3745711 - DNA, 25 bp, Homo sapien
tctgcaaagatgtactttctctgaa

SEQ ID NO: 3745712 - DNA, 25 bp, Homo sapien
caggagagacttcagagcgacggtc

SEQ ID NO: 3745713 - DNA, 25 bp, Homo sapien
ggtcctgcctaagcagatctctcag

SEQ ID NO: 3745714 - DNA, 25 bp, Homo sapien
gacggtcgggccctctgatctgtct

SEQ ID NO: 3745715 - DNA, 25 bp, Homo sapien
aggcccatatgtcatacacgtcggg

SEQ ID NO: 3745716 - DNA, 25 bp, Homo sapien
ccggcatcaactatagggccccgag

SEQ ID NO: 3745717 - DNA, 25 bp, Homo sapien
ccccgaggtccgctgtcagcggaga

SEQ ID NO: 3745718 - DNA, 25 bp, Homo sapien
gcatcaactatagggccccgaggtc

SEQ ID NO: 3745719 - DNA, 25 bp, Homo sapien
aggtccgctgtcagcggagagcccc

SEQ ID NO: 3745720 - DNA, 25 bp, Homo sapien
gaaggattcggcaaactgttgatgg

SEQ ID NO: 3745721 - DNA, 25 bp, Homo sapien
caaaatattaccagtctgtttatct

SEQ ID NO: 3745722 - DNA, 25 bp, Homo sapien
gagatcgatcgcacctctgtactcc

SEQ ID NO: 3745723 - DNA, 25 bp, Homo sapien
aggaagaggcgggtggttcgcctga

SEQ ID NO: 3745724 - DNA, 25 bp, Homo sapien
gagcaccacgcaggcaattccagtc

SEQ ID NO: 3745725 - DNA, 25 bp, Homo sapien
tccagagagcgaggccccatcagcc

SEQ ID NO: 3745726 - DNA, 25 bp, Homo sapien
cagtgtatctgtgtaccaagagtac

SEQ ID NO: 3745727 - DNA, 25 bp, Homo sapien
gaaggaagggatgccggcccagcgg

SEQ ID NO: 3745728 - DNA, 25 bp, Homo sapien
gccgtgctgaggtgccagagggctg

SEQ ID NO: 3745729 - DNA, 25 bp, Homo sapien
ggtggccctggaagggcgaggtgct

SEQ ID NO: 3745730 - DNA, 25 bp, Homo sapien
ctgtgcagaatggggccgtgctgag

SEQ ID NO: 3745731 - DNA, 25 bp, Homo sapien
tgctgctccatagagcctggctggg

SEQ ID NO: 3745732 - DNA, 25 bp, Homo sapien
agccatgtccaatgcgccaggagtc

SEQ ID NO: 3745733 - DNA, 25 bp, Homo sapien
gcatcatgaggatttgccacccatg

SEQ ID NO: 3745734 - DNA, 25 bp, Homo sapien
ggctgcaggactcatggcatcatga

SEQ ID NO: 3745735 - DNA, 25 bp, Homo sapien
ccccacggaggagacactgttgtcc

SEQ ID NO: 3745736 - DNA, 25 bp, Homo sapien
tgactgctgcaaaatgtggccccaa

SEQ ID NO: 3745737 - DNA, 25 bp, Homo sapien
gactgctgcaaaatgtggccccaag

SEQ ID NO: 3745738 - DNA, 25 bp, Homo sapien
ccactgggcctcgcatccaaacatg

SEQ ID NO: 3745739 - DNA, 25 bp, Homo sapien
gtgactgctgcaaaatgtggcccca

SEQ ID NO: 3745740 - DNA, 25 bp, Homo sapien
gatgtcgggaatcacggtccaggaa

SEQ ID NO: 3745741 - DNA, 25 bp, Homo sapien
gcttcccaggcagtggcgcctttga

SEQ ID NO: 3745742 - DNA, 25 bp, Homo sapien
taagagaagaccagaggcgagctcc

SEQ ID NO: 3745743 - DNA, 25 bp, Homo sapien
tgtggctcagatgtgccagcggctc

SEQ ID NO: 3745744 - DNA, 25 bp, Homo sapien
gaaatccgtcactgcgaagtctggg

SEQ ID NO: 3745745 - DNA, 25 bp, Homo sapien
gctggaatcctagatcggctggcca

SEQ ID NO: 3745746 - DNA, 25 bp, Homo sapien
tcacactccacgtagcacagaagaa

SEQ ID NO: 3745747 - DNA, 25 bp, Homo sapien
gtcatgttccaaagcgaatccacag

SEQ ID NO: 3745748 - DNA, 25 bp, Homo sapien
tccaccggggctggctcggattgcc

SEQ ID NO: 3745749 - DNA, 25 bp, Homo sapien
aacttggggtgagctcccaagccca

SEQ ID NO: 3745750 - DNA, 25 bp, Homo sapien
ccaggatgagtacccgaggaacttg

SEQ ID NO: 3745751 - DNA, 25 bp, Homo sapien
gctggctcggattgccctggctggt

SEQ ID NO: 3745752 - DNA, 25 bp, Homo sapien
gtgggtcccactccgtgtgacctca

SEQ ID NO: 3745753 - DNA, 25 bp, Homo sapien
caggtgagctaaatgacccctctga

SEQ ID NO: 3745754 - DNA, 25 bp, Homo sapien
cgtgggagtgatttctcaataaagc

SEQ ID NO: 3745755 - DNA, 25 bp, Homo sapien
tataaaattgtggtgacgactgcac

SEQ ID NO: 3745756 - DNA, 25 bp, Homo sapien
gggagaagagcacgtgtgagcacca

SEQ ID NO: 3745757 - DNA, 25 bp, Homo sapien
agaagagcacgtgtgagcaccaggt

SEQ ID NO: 3745758 - DNA, 25 bp, Homo sapien
ggtccagagcacgtgccttgcaaca

SEQ ID NO: 3745759 - DNA, 25 bp, Homo sapien
gaagagcacgtgtgagcaccaggtc

SEQ ID NO: 3745760 - DNA, 25 bp, Homo sapien
ctgggtgatgctgggtgagtctgca

SEQ ID NO: 3745761 - DNA, 25 bp, Homo sapien
cagctgggtgatgctgggtgagtct

SEQ ID NO: 3745762 - DNA, 25 bp, Homo sapien
gatgctgggtgagtctgcagcttcc

SEQ ID NO: 3745763 - DNA, 25 bp, Homo sapien
gggtgatgctgggtgagtctgcagc

SEQ ID NO: 3745764 - DNA, 25 bp, Homo sapien
cacaaggtggaacagctcagaacaa

SEQ ID NO: 3745765 - DNA, 25 bp, Homo sapien
caagcagttatgacctctgggcaag

SEQ ID NO: 3745766 - DNA, 25 bp, Homo sapien
taaattactcgcacccgtgagagct

SEQ ID NO: 3745767 - DNA, 25 bp, Homo sapien
cactggtcagcaaacgtgggctctg

SEQ ID NO: 3745768 - DNA, 25 bp, Homo sapien
ggtcttgtgcgctttggcaagggcc

SEQ ID NO: 3745769 - DNA, 25 bp, Homo sapien
tggtcttggagaggcgggcgattct

SEQ ID NO: 3745770 - DNA, 25 bp, Homo sapien
tcaaagagcttgtgcccctgctgtg

SEQ ID NO: 3745771 - DNA, 25 bp, Homo sapien
acctgcaggcgactctgcctcaaag

SEQ ID NO: 3745772 - DNA, 25 bp, Homo sapien
cacaggggcatcaggcggtgggcgg

SEQ ID NO: 3745773 - DNA, 25 bp, Homo sapien
gcacaggggcatcaggcggtgggcg

SEQ ID NO: 3745774 - DNA, 25 bp, Homo sapien
cccaggaactcccctagagacaaag

SEQ ID NO: 3745775 - DNA, 25 bp, Homo sapien
tagagacaaagggagcttgctgacc

SEQ ID NO: 3745776 - DNA, 25 bp, Homo sapien
ggagaactcggaacacacccatcca

SEQ ID NO: 3745777 - DNA, 25 bp, Homo sapien
gcttgctgaccggagaactcggaac

SEQ ID NO: 3745778 - DNA, 25 bp, Homo sapien
ttcactttagacttacaagttccca

SEQ ID NO: 3745779 - DNA, 25 bp, Homo sapien
gtccacaatgcgttgcggaaaattg

SEQ ID NO: 3745780 - DNA, 25 bp, Homo sapien
tgtgcctggctatacattcatcaaa

SEQ ID NO: 3745781 - DNA, 25 bp, Homo sapien
gttcccattcaggtctaaccacaag

SEQ ID NO: 3745782 - DNA, 25 bp, Homo sapien
ccaggcgagttgctcatcagcccag

SEQ ID NO: 3745783 - DNA, 25 bp, Homo sapien
gggccccaggcgagttgctcatcag

SEQ ID NO: 3745784 - DNA, 25 bp, Homo sapien
cagcgggatgggatcgggcctctct

SEQ ID NO: 3745785 - DNA, 25 bp, Homo sapien
cccagcgggatgggatcgggcctct

SEQ ID NO: 3745786 - DNA, 25 bp, Homo sapien
tgatggtgtcaccaccaaggatgca

SEQ ID NO: 3745787 - DNA, 25 bp, Homo sapien
tgagcaaggagtccaccagagcctg

SEQ ID NO: 3745788 - DNA, 25 bp, Homo sapien
gtgtcaccaccaaggatgcagaggg

SEQ ID NO: 3745789 - DNA, 25 bp, Homo sapien
tgagggccgggggtgccaaacttgc

SEQ ID NO: 3745790 - DNA, 25 bp, Homo sapien
cagcctccaccccgagggtcctgtg

SEQ ID NO: 3745791 - DNA, 25 bp, Homo sapien
gcctccaccccgagggtcctgtgat

SEQ ID NO: 3745792 - DNA, 25 bp, Homo sapien
agcctccaccccgagggtcctgtga

SEQ ID NO: 3745793 - DNA, 25 bp, Homo sapien
ccatctagacccgatttagaaatga

SEQ ID NO: 3745794 - DNA, 25 bp, Homo sapien
gcgtccagtccatctagacccgatt

SEQ ID NO: 3745795 - DNA, 25 bp, Homo sapien
cagtccatctagacccgatttagaa

SEQ ID NO: 3745796 - DNA, 25 bp, Homo sapien
tggcagccacgcgtccagtccatct

SEQ ID NO: 3745797 - DNA, 25 bp, Homo sapien
agcatggtgccgcaaggacaacagg

SEQ ID NO: 3745798 - DNA, 25 bp, Homo sapien
tcccagagcatggtgccgcaaggac

SEQ ID NO: 3745799 - DNA, 25 bp, Homo sapien
ggacaacaggggggctctgtccctc

SEQ ID NO: 3745800 - DNA, 25 bp, Homo sapien
cacaggagcgcccagttcccagagc

SEQ ID NO: 3745801 - DNA, 25 bp, Homo sapien
ccacacaacttgtgatgtgacttcg

SEQ ID NO: 3745802 - DNA, 25 bp, Homo sapien
cttgtgatgtgacttcgctggaagg

SEQ ID NO: 3745803 - DNA, 25 bp, Homo sapien
acaacttgtgatgtgacttcgctgg

SEQ ID NO: 3745804 - DNA, 25 bp, Homo sapien
aacttgtgatgtgacttcgctggaa

SEQ ID NO: 3745805 - DNA, 25 bp, Homo sapien
cagccggatttccaagtgttgcagc

SEQ ID NO: 3745806 - DNA, 25 bp, Homo sapien
ccaagtgttgcagcatccccaacag

SEQ ID NO: 3745807 - DNA, 25 bp, Homo sapien
gacatacgcagcaagacggcttcca

SEQ ID NO: 3745808 - DNA, 25 bp, Homo sapien
tccccaacaggtacactctgggcct

SEQ ID NO: 3745809 - DNA, 25 bp, Homo sapien
caggccaaattgcaaacgcagatgg

SEQ ID NO: 3745810 - DNA, 25 bp, Homo sapien
catgttaactgatgttgccggtgga

SEQ ID NO: 3745811 - DNA, 25 bp, Homo sapien
agcaggccaacgaggagggtatttt

SEQ ID NO: 3745812 - DNA, 25 bp, Homo sapien
cagatgggtctgtttcaaagctaac

SEQ ID NO: 3745813 - DNA, 25 bp, Homo sapien
tcgggagcacggcatgttctctaga

SEQ ID NO: 3745814 - DNA, 25 bp, Homo sapien
ctgtgagcctgacgtcgggagcacg

SEQ ID NO: 3745815 - DNA, 25 bp, Homo sapien
gaatcaccacggagacccactctga

SEQ ID NO: 3745816 - DNA, 25 bp, Homo sapien
gagacccactctgagtcatggctaa

SEQ ID NO: 3745817 - DNA, 25 bp, Homo sapien
ctctaaaatgctcttcacggttttg

SEQ ID NO: 3745818 - DNA, 25 bp, Homo sapien
gctttgggtgaagaagcatcatgtg

SEQ ID NO: 3745819 - DNA, 25 bp, Homo sapien
tgcagaagaccccggagagccctag

SEQ ID NO: 3745820 - DNA, 25 bp, Homo sapien
tgctcccctcaaagtgttcgctctg

SEQ ID NO: 3745821 - DNA, 25 bp, Homo sapien
caagcccgtgtcttaattgcctaaa

SEQ ID NO: 3745822 - DNA, 25 bp, Homo sapien
aggtcctgcaatggccactccaagc

SEQ ID NO: 3745823 - DNA, 25 bp, Homo sapien
ctgggagcacgctgggagccgtggg

SEQ ID NO: 3745824 - DNA, 25 bp, Homo sapien
gggacagaacatgccagtcgccagc

SEQ ID NO: 3745825 - DNA, 25 bp, Homo sapien
tgggtgaattctggctgcactgagc

SEQ ID NO: 3745826 - DNA, 25 bp, Homo sapien
tgagctaaaccagagggacccaaat

SEQ ID NO: 3745827 - DNA, 25 bp, Homo sapien
tgcccgactcacataggcactgggt

SEQ ID NO: 3745828 - DNA, 25 bp, Homo sapien
gctgcactgagctaaaccagaggga

SEQ ID NO: 3745829 - DNA, 25 bp, Homo sapien
gtttctacacacgacagggaccaca

SEQ ID NO: 3745830 - DNA, 25 bp, Homo sapien
tctacacacgacagggaccacagga

SEQ ID NO: 3745831 - DNA, 25 bp, Homo sapien
tgtgtttctacacacgacagggacc

SEQ ID NO: 3745832 - DNA, 25 bp, Homo sapien
gagtatgtgtttctacacacgacag

SEQ ID NO: 3745833 - DNA, 25 bp, Homo sapien
ctggaccacgccaggtgctcctgca

SEQ ID NO: 3745834 - DNA, 25 bp, Homo sapien
cagcaccagggcttcgtgtcccctg

SEQ ID NO: 3745835 - DNA, 25 bp, Homo sapien
cccctggaccacgccaggtgctcct

SEQ ID NO: 3745836 - DNA, 25 bp, Homo sapien
gcaccagggcttcgtgtcccctgga

SEQ ID NO: 3745837 - DNA, 25 bp, Homo sapien
atgtgcacgcagatgacacatgtgg

SEQ ID NO: 3745838 - DNA, 25 bp, Homo sapien
tgtgcacgcagatgacacatgtggt

SEQ ID NO: 3745839 - DNA, 25 bp, Homo sapien
ggcaggcgggtctcatctgcttgtc

SEQ ID NO: 3745840 - DNA, 25 bp, Homo sapien
cagcaaatattttggcaggcgggtc

SEQ ID NO: 3745841 - DNA, 25 bp, Homo sapien
tctgcttgtctttcgggtttcacac

SEQ ID NO: 3745842 - DNA, 25 bp, Homo sapien
gttctgcgcggcagcaaatattttg

SEQ ID NO: 3745843 - DNA, 25 bp, Homo sapien
gggccaagtccccttgacagtggca

SEQ ID NO: 3745844 - DNA, 25 bp, Homo sapien
ccttgacagtggcacatggaggcct

SEQ ID NO: 3745845 - DNA, 25 bp, Homo sapien
tgcactcaggatcatggcgggccaa

SEQ ID NO: 3745846 - DNA, 25 bp, Homo sapien
cctggctgtggtcgggtgctcagca

SEQ ID NO: 3745847 - DNA, 25 bp, Homo sapien
ggaagcaggtcaaggctatcagcag

SEQ ID NO: 3745848 - DNA, 25 bp, Homo sapien
gcagggagcaacctgtgaaggcttc

SEQ ID NO: 3745849 - DNA, 25 bp, Homo sapien
gctatcagcagggagcaacctgtga

SEQ ID NO: 3745850 - DNA, 25 bp, Homo sapien
gtcaaggctatcagcagggagcaac

SEQ ID NO: 3745851 - DNA, 25 bp, Homo sapien
gcacggacttggtcttcgttctact

SEQ ID NO: 3745852 - DNA, 25 bp, Homo sapien
agcagcccctgcacggacttggtct

SEQ ID NO: 3745853 - DNA, 25 bp, Homo sapien
cttcgttctactcccttgcaaatgc

SEQ ID NO: 3745854 - DNA, 25 bp, Homo sapien
acttggtcttcgttctactcccttg

SEQ ID NO: 3745855 - DNA, 25 bp, Homo sapien
tcaagtggggactcgcagagccgcc

SEQ ID NO: 3745856 - DNA, 25 bp, Homo sapien
tgtcaagtggggactcgcagagccg

SEQ ID NO: 3745857 - DNA, 25 bp, Homo sapien
caagtggggactcgcagagccgccc

SEQ ID NO: 3745858 - DNA, 25 bp, Homo sapien
gtcaagtggggactcgcagagccgc

SEQ ID NO: 3745859 - DNA, 25 bp, Homo sapien
cctcagcctactcacatcctactca

SEQ ID NO: 3745860 - DNA, 25 bp, Homo sapien
tcctcagcctactcacatcctactc

SEQ ID NO: 3745861 - DNA, 25 bp, Homo sapien
tcagcactcggccagggcctccacg

SEQ ID NO: 3745862 - DNA, 25 bp, Homo sapien
tcggccagggcctccacgtcctcat

SEQ ID NO: 3745863 - DNA, 25 bp, Homo sapien
agcactcggccagggcctccacgtc

SEQ ID NO: 3745864 - DNA, 25 bp, Homo sapien
cactcggccagggcctccacgtcct

SEQ ID NO: 3745865 - DNA, 25 bp, Homo sapien
cccaataatgctcacacaccatgtt

SEQ ID NO: 3745866 - DNA, 25 bp, Homo sapien
ccccaataatgctcacacaccatgt

SEQ ID NO: 3745867 - DNA, 25 bp, Homo sapien
cacgtccggccgatgctgtcttaaa

SEQ ID NO: 3745868 - DNA, 25 bp, Homo sapien
gcagcactccacagaggtactgagg

SEQ ID NO: 3745869 - DNA, 25 bp, Homo sapien
cagtctctagtttggtcatggcagc

SEQ ID NO: 3745870 - DNA, 25 bp, Homo sapien
gacgcagcaaggacctggtgttcaa

SEQ ID NO: 3745871 - DNA, 25 bp, Homo sapien
cctctccccgctcccgagcactcat

SEQ ID NO: 3745872 - DNA, 25 bp, Homo sapien
tgcagcctggtggtcaacaggaccc

SEQ ID NO: 3745873 - DNA, 25 bp, Homo sapien
tgcattccttgggatctgcagcctg

SEQ ID NO: 3745874 - DNA, 25 bp, Homo sapien
catgctgcgagtgcacgcagggcct

SEQ ID NO: 3745875 - DNA, 25 bp, Homo sapien
ccccatggctggtgctccacgtggg

SEQ ID NO: 3745876 - DNA, 25 bp, Homo sapien
cttccacagggcgagttgctctctc

SEQ ID NO: 3745877 - DNA, 25 bp, Homo sapien
tgttgacttcgcttcctggagggac

SEQ ID NO: 3745878 - DNA, 25 bp, Homo sapien
cagtgcctgtcatcagtgattcctc

SEQ ID NO: 3745879 - DNA, 25 bp, Homo sapien
gcacccaggaagtgcccaccaaatg

SEQ ID NO: 3745880 - DNA, 25 bp, Homo sapien
tccagttccacactcacagttgtca

SEQ ID NO: 3745881 - DNA, 25 bp, Homo sapien
gggttcacagtccagttccacactc

SEQ ID NO: 3745882 - DNA, 25 bp, Homo sapien
acagtccagttccacactcacagtt

SEQ ID NO: 3745883 - DNA, 25 bp, Homo sapien
ggttcacagtccagttccacactca

SEQ ID NO: 3745884 - DNA, 25 bp, Homo sapien
ctggcgctggccctgccccctccca

SEQ ID NO: 3745885 - DNA, 25 bp, Homo sapien
cctggcgctggccctgccccctccc

SEQ ID NO: 3745886 - DNA, 25 bp, Homo sapien
tggcgctggccctgccccctcccac

SEQ ID NO: 3745887 - DNA, 25 bp, Homo sapien
ttccagcaaacaccgcccatgattc

SEQ ID NO: 3745888 - DNA, 25 bp, Homo sapien
caacagtgagaggtttgggttcctt

SEQ ID NO: 3745889 - DNA, 25 bp, Homo sapien
tgggttccttgttgcccgaagcgga

SEQ ID NO: 3745890 - DNA, 25 bp, Homo sapien
gtctgacgtcctctctggtaccgca

SEQ ID NO: 3745891 - DNA, 25 bp, Homo sapien
cggcttactcagatccctcttggag

SEQ ID NO: 3745892 - DNA, 25 bp, Homo sapien
gggtccaaggtccccttgaggctgc

SEQ ID NO: 3745893 - DNA, 25 bp, Homo sapien
gctgatgctctccggcttactcaga

SEQ ID NO: 3745894 - DNA, 25 bp, Homo sapien
ttctctcagcagctctacctctgag

SEQ ID NO: 3745895 - DNA, 25 bp, Homo sapien
tcaccctcaccctcgcccgctccat

SEQ ID NO: 3745896 - DNA, 25 bp, Homo sapien
ctcaccctcaccctcgcccgctcca

SEQ ID NO: 3745897 - DNA, 25 bp, Homo sapien
ccagcaccctcacccgcaccctcac

SEQ ID NO: 3745898 - DNA, 25 bp, Homo sapien
cgcacccgcacccgctccaccagca

SEQ ID NO: 3745899 - DNA, 25 bp, Homo sapien
tcacccgcaccctcacccgctccat

SEQ ID NO: 3745900 - DNA, 25 bp, Homo sapien
cccgcacccgctccaccagcaccct

SEQ ID NO: 3745901 - DNA, 25 bp, Homo sapien
tgtggaaggggctgtgggctgagtc

SEQ ID NO: 3745902 - DNA, 25 bp, Homo sapien
ccaggggactttgtggaaggggctg

SEQ ID NO: 3745903 - DNA, 25 bp, Homo sapien
tttgtggaaggggctgtgggctgag

SEQ ID NO: 3745904 - DNA, 25 bp, Homo sapien
ctgccaggggactttgtggaagggg

SEQ ID NO: 3745905 - DNA, 25 bp, Homo sapien
gccatgagacagtgcagaggcctcc

SEQ ID NO: 3745906 - DNA, 25 bp, Homo sapien
ggcaccgggctcctggataaactgc

SEQ ID NO: 3745907 - DNA, 25 bp, Homo sapien
aagccttcagccattccccaggcat

SEQ ID NO: 3745908 - DNA, 25 bp, Homo sapien
ttctgggggcagcaacctctccaaa

SEQ ID NO: 3745909 - DNA, 25 bp, Homo sapien
ggtggggacatgagtgtaccctgct

SEQ ID NO: 3745910 - DNA, 25 bp, Homo sapien
cctagtgccccgtgggaggagccta

SEQ ID NO: 3745911 - DNA, 25 bp, Homo sapien
catgagtgtaccctgctctgggctc

SEQ ID NO: 3745912 - DNA, 25 bp, Homo sapien
tggatggtggggacatgagtgtacc

SEQ ID NO: 3745913 - DNA, 25 bp, Homo sapien
tcacttccggatggtgctcgtcact

SEQ ID NO: 3745914 - DNA, 25 bp, Homo sapien
ttccggatggtgctcgtcactgggc

SEQ ID NO: 3745915 - DNA, 25 bp, Homo sapien
acttccggatggtgctcgtcactgg

SEQ ID NO: 3745916 - DNA, 25 bp, Homo sapien
ccttcacttccggatggtgctcgtc

SEQ ID NO: 3745917 - DNA, 25 bp, Homo sapien
cactgcctctgcgaggttgtccacg

SEQ ID NO: 3745918 - DNA, 25 bp, Homo sapien
tgcctctgcgaggttgtccacgtac

SEQ ID NO: 3745919 - DNA, 25 bp, Homo sapien
ccactgcctctgcgaggttgtccac

SEQ ID NO: 3745920 - DNA, 25 bp, Homo sapien
ctgcctctgcgaggttgtccacgta

SEQ ID NO: 3745921 - DNA, 25 bp, Homo sapien
tcctggacttcactacagggagctg

SEQ ID NO: 3745922 - DNA, 25 bp, Homo sapien
ttgggagattcccagaggcctgaca

SEQ ID NO: 3745923 - DNA, 25 bp, Homo sapien
cacccaggtagggaacaaatgcctg

SEQ ID NO: 3745924 - DNA, 25 bp, Homo sapien
gcatagtgcccctgaatctggttag

SEQ ID NO: 3745925 - DNA, 25 bp, Homo sapien
cagcagtgggtccagaaagtaccct

SEQ ID NO: 3745926 - DNA, 25 bp, Homo sapien
aaagtaccctgtgtgccttggacgc

SEQ ID NO: 3745927 - DNA, 25 bp, Homo sapien
accgggcatgacaccttcaagtctg

SEQ ID NO: 3745928 - DNA, 25 bp, Homo sapien
ccttggacgcagaggctacagttct

SEQ ID NO: 3745929 - DNA, 25 bp, Homo sapien
cgacagttccgcgacatgtgttgaa

SEQ ID NO: 3745930 - DNA, 25 bp, Homo sapien
taagtggtacattgagcccagggct

SEQ ID NO: 3745931 - DNA, 25 bp, Homo sapien
tgtgttgaacacagggccttagccc

SEQ ID NO: 3745932 - DNA, 25 bp, Homo sapien
cttggtactgtgtgggccctagagc

SEQ ID NO: 3745933 - DNA, 25 bp, Homo sapien
tctggagggctcaagccgaacggaa

SEQ ID NO: 3745934 - DNA, 25 bp, Homo sapien
caacgtgccgtgttctctctggtta

SEQ ID NO: 3745935 - DNA, 25 bp, Homo sapien
tcagcctttccgatcctctggaggg

SEQ ID NO: 3745936 - DNA, 25 bp, Homo sapien
tcacatctgacgtggaggcctctgc

SEQ ID NO: 3745937 - DNA, 25 bp, Homo sapien
tggttcaatacccaagtgcctggtg

SEQ ID NO: 3745938 - DNA, 25 bp, Homo sapien
gtgtggcgaccagaaagcgtagacc

SEQ ID NO: 3745939 - DNA, 25 bp, Homo sapien
tgtccacgctgttggtcaaacccct

SEQ ID NO: 3745940 - DNA, 25 bp, Homo sapien
cagccgctctagtctctcaggaatt

SEQ ID NO: 3745941 - DNA, 25 bp, Homo sapien
gagcttgttctgaccagacgtacag

SEQ ID NO: 3745942 - DNA, 25 bp, Homo sapien
ctaaagcgcgggctaagcctgcagg

SEQ ID NO: 3745943 - DNA, 25 bp, Homo sapien
gatttgcacgggcagacgtgcacct

SEQ ID NO: 3745944 - DNA, 25 bp, Homo sapien
ccttactcgcggtggaggccggatt

SEQ ID NO: 3745945 - DNA, 25 bp, Homo sapien
cagagccagaagcaagccgtgccag

SEQ ID NO: 3745946 - DNA, 25 bp, Homo sapien
agtggcaggagccttacttttgtca

SEQ ID NO: 3745947 - DNA, 25 bp, Homo sapien
caggagccttacttttgtcacagcc

SEQ ID NO: 3745948 - DNA, 25 bp, Homo sapien
ggcaggagccttacttttgtcacag

SEQ ID NO: 3745949 - DNA, 25 bp, Homo sapien
tcagtcctctgggagggaggttcgc

SEQ ID NO: 3745950 - DNA, 25 bp, Homo sapien
acactgcccggagcagcctgttcct

SEQ ID NO: 3745951 - DNA, 25 bp, Homo sapien
ggaggtgccccccacattggtgtcc

SEQ ID NO: 3745952 - DNA, 25 bp, Homo sapien
ctatctataaggtgccaccccatca

SEQ ID NO: 3745953 - DNA, 25 bp, Homo sapien
ttcaagttcccaatatgtgggtggc

SEQ ID NO: 3745954 - DNA, 25 bp, Homo sapien
tcagctttaaggagctggcagaaag

SEQ ID NO: 3745955 - DNA, 25 bp, Homo sapien
tgacacatggggtatgccgggcact

SEQ ID NO: 3745956 - DNA, 25 bp, Homo sapien
ccctgagagatggtgttgctagctc

SEQ ID NO: 3745957 - DNA, 25 bp, Homo sapien
acctcccgtttgtccttgaggactg

SEQ ID NO: 3745958 - DNA, 25 bp, Homo sapien
ccaggcacctcccgtttgtccttga

SEQ ID NO: 3745959 - DNA, 25 bp, Homo sapien
cacctcccgtttgtccttgaggact

SEQ ID NO: 3745960 - DNA, 25 bp, Homo sapien
tgagtacgttgctcatgggcccgtc

SEQ ID NO: 3745961 - DNA, 25 bp, Homo sapien
gacctgtcctgtgaggagtcagaca

SEQ ID NO: 3745962 - DNA, 25 bp, Homo sapien
tggaattgcgcgtgtctttatgagc

SEQ ID NO: 3745963 - DNA, 25 bp, Homo sapien
ttgcgcttcagaaaggctgtggacg

SEQ ID NO: 3745964 - DNA, 25 bp, Homo sapien
atatccaggactgcgccgggagtgc

SEQ ID NO: 3745965 - DNA, 25 bp, Homo sapien
ctgctgggaagaaactaaaggctgg

SEQ ID NO: 3745966 - DNA, 25 bp, Homo sapien
ctttgaaagaatcaggccctcggga

SEQ ID NO: 3745967 - DNA, 25 bp, Homo sapien
tgctattcgacctcgttgctgcagt

SEQ ID NO: 3745968 - DNA, 25 bp, Homo sapien
ggcacaaatttcgaccgtagcacca

SEQ ID NO: 3745969 - DNA, 25 bp, Homo sapien
gattatttatccttacacaccgtgg

SEQ ID NO: 3745970 - DNA, 25 bp, Homo sapien
tacctgcgccttatgccagaggagg

SEQ ID NO: 3745971 - DNA, 25 bp, Homo sapien
gtgccgagacccacacaatcatggt

SEQ ID NO: 3745972 - DNA, 25 bp, Homo sapien
cacagagcgccataaaactggacta

SEQ ID NO: 3745973 - DNA, 25 bp, Homo sapien
tctcagagggactcgaggtagctcc

SEQ ID NO: 3745974 - DNA, 25 bp, Homo sapien
aggaaatgcgtccactcagccagag

SEQ ID NO: 3745975 - DNA, 25 bp, Homo sapien
gaccagctctgctcgtgacttgtga

SEQ ID NO: 3745976 - DNA, 25 bp, Homo sapien
caggttaacgctgtaggagcccttc

SEQ ID NO: 3745977 - DNA, 25 bp, Homo sapien
tcttggaggatgtcgccaggttaac

SEQ ID NO: 3745978 - DNA, 25 bp, Homo sapien
tgtgaatttcacgtgcatgagtccc

SEQ ID NO: 3745979 - DNA, 25 bp, Homo sapien
ccctttgggcatgggagatccgtct

SEQ ID NO: 3745980 - DNA, 25 bp, Homo sapien
gctggcatggcagcttgcccgtaaa

SEQ ID NO: 3745981 - DNA, 25 bp, Homo sapien
cgtgttcacacgcatggcgctctgg

SEQ ID NO: 3745982 - DNA, 25 bp, Homo sapien
tcacaaccaccggagaggcgttggt

SEQ ID NO: 3745983 - DNA, 25 bp, Homo sapien
ttgttaagatctctaggacctgctg

SEQ ID NO: 3745984 - DNA, 25 bp, Homo sapien
cgggacaggctgtttacccttattg

SEQ ID NO: 3745985 - DNA, 25 bp, Homo sapien
gctgcccccgggacaggctgtttac

SEQ ID NO: 3745986 - DNA, 25 bp, Homo sapien
ggacaggctgtttacccttattggc

SEQ ID NO: 3745987 - DNA, 25 bp, Homo sapien
gacaggctgtttacccttattggcc

SEQ ID NO: 3745988 - DNA, 25 bp, Homo sapien
gacgttagttttactgctagaaata

SEQ ID NO: 3745989 - DNA, 25 bp, Homo sapien
tcgccagcttgtcttgttatgacgt

SEQ ID NO: 3745990 - DNA, 25 bp, Homo sapien
ctgtcgccagcttgtcttgttatga

SEQ ID NO: 3745991 - DNA, 25 bp, Homo sapien
cttgttatgacgttagttttactgc

SEQ ID NO: 3745992 - DNA, 25 bp, Homo sapien
ggtcggaagtcagctgacagtctcc

SEQ ID NO: 3745993 - DNA, 25 bp, Homo sapien
cagggtcggaagtcagctgacagtc

SEQ ID NO: 3745994 - DNA, 25 bp, Homo sapien
caggccccagggtcggaagtcagct

SEQ ID NO: 3745995 - DNA, 25 bp, Homo sapien
ggaagtcagctgacagtctccacag

SEQ ID NO: 3745996 - DNA, 25 bp, Homo sapien
ggcaggggctagacatctgtggggc

SEQ ID NO: 3745997 - DNA, 25 bp, Homo sapien
gcaggggctagacatctgtggggct

SEQ ID NO: 3745998 - DNA, 25 bp, Homo sapien
aggggctagacatctgtggggctct

SEQ ID NO: 3745999 - DNA, 25 bp, Homo sapien
caggggctagacatctgtggggctc

SEQ ID NO: 3746000 - DNA, 25 bp, Homo sapien
catatccaagcctatgggcttctcc

SEQ ID NO: 3746001 - DNA, 25 bp, Homo sapien
tgagaaacatatccaagcctatggg

SEQ ID NO: 3746002 - DNA, 25 bp, Homo sapien
acatatccaagcctatgggcttctc

SEQ ID NO: 3746003 - DNA, 25 bp, Homo sapien
gaaacatatccaagcctatgggctt

SEQ ID NO: 3746004 - DNA, 25 bp, Homo sapien
catgacgatgacaatcgcacttcgc

SEQ ID NO: 3746005 - DNA, 25 bp, Homo sapien
taggctccaggtcctttgtttgaag

SEQ ID NO: 3746006 - DNA, 25 bp, Homo sapien
ccatagcgttgcatgacgatgacaa

SEQ ID NO: 3746007 - DNA, 25 bp, Homo sapien
tttctgagcaccatagcgttgcatg

SEQ ID NO: 3746008 - DNA, 25 bp, Homo sapien
gctgatgttccagtgtggtccagtt

SEQ ID NO: 3746009 - DNA, 25 bp, Homo sapien
cagaccggaagtggcccttcccaga

SEQ ID NO: 3746010 - DNA, 25 bp, Homo sapien
cccagagctgatgttccagtgtggt

SEQ ID NO: 3746011 - DNA, 25 bp, Homo sapien
agcatggccacagaccggaagtggc

SEQ ID NO: 3746012 - DNA, 25 bp, Homo sapien
catctctgctgccatccgcatgact

SEQ ID NO: 3746013 - DNA, 25 bp, Homo sapien
tctgctgccatccgcatgactgcag

SEQ ID NO: 3746014 - DNA, 25 bp, Homo sapien
atctctgctgccatccgcatgactg

SEQ ID NO: 3746015 - DNA, 25 bp, Homo sapien
tgctgccatccgcatgactgcagac

SEQ ID NO: 3746016 - DNA, 25 bp, Homo sapien
gctggtatcgtcctgagaagcttcg

SEQ ID NO: 3746017 - DNA, 25 bp, Homo sapien
attcctcggcatcccgtgtttcctg

SEQ ID NO: 3746018 - DNA, 25 bp, Homo sapien
cctgagaagcttcgtgggatgagat

SEQ ID NO: 3746019 - DNA, 25 bp, Homo sapien
ttcctcattcctcggcatcccgtgt

SEQ ID NO: 3746020 - DNA, 25 bp, Homo sapien
tcactgtggcattgtacccaaacca

SEQ ID NO: 3746021 - DNA, 25 bp, Homo sapien
aaatagtctatatgtgagttcaggg

SEQ ID NO: 3746022 - DNA, 25 bp, Homo sapien
ccaaaccagccctccattagggcca

SEQ ID NO: 3746023 - DNA, 25 bp, Homo sapien
tgttcttaacaaatagtctatatgt

SEQ ID NO: 3746024 - DNA, 25 bp, Homo sapien
cttggcccggcaaggtggttttgca

SEQ ID NO: 3746025 - DNA, 25 bp, Homo sapien
agcttgtggtaatggagcttggccc

SEQ ID NO: 3746026 - DNA, 25 bp, Homo sapien
gcccggcaaggtggttttgcagcca

SEQ ID NO: 3746027 - DNA, 25 bp, Homo sapien
tcagaagttgctagaggagatgagc

SEQ ID NO: 3746028 - DNA, 25 bp, Homo sapien
ttggcctcgagtgggcccttcccat

SEQ ID NO: 3746029 - DNA, 25 bp, Homo sapien
gcccccccaggtgataagcaggcat

SEQ ID NO: 3746030 - DNA, 25 bp, Homo sapien
catgcccccccaggtgataagcagg

SEQ ID NO: 3746031 - DNA, 25 bp, Homo sapien
gttggcctcgagtgggcccttccca

SEQ ID NO: 3746032 - DNA, 25 bp, Homo sapien
cagcagggatctcacatgacgtcat

SEQ ID NO: 3746033 - DNA, 25 bp, Homo sapien
gcagcagggatctcacatgacgtca

SEQ ID NO: 3746034 - DNA, 25 bp, Homo sapien
ttggcagccgctccagtgctggcct

SEQ ID NO: 3746035 - DNA, 25 bp, Homo sapien
tctgatgttggtctcctgctcgcat

SEQ ID NO: 3746036 - DNA, 25 bp, Homo sapien
tggtctcctgctcgcattgtctctt

SEQ ID NO: 3746037 - DNA, 25 bp, Homo sapien
ggcagccgctccagtgctggccttt

SEQ ID NO: 3746038 - DNA, 25 bp, Homo sapien
gaagcccttgggaatttcttgcctg

SEQ ID NO: 3746039 - DNA, 25 bp, Homo sapien
agtaagagaaggctatgcccacgcc

SEQ ID NO: 3746040 - DNA, 25 bp, Homo sapien
cttgggaatttcttgcctggttctc

SEQ ID NO: 3746041 - DNA, 25 bp, Homo sapien
gcctttggtacccttcagtggagaa

SEQ ID NO: 3746042 - DNA, 25 bp, Homo sapien
cctcctcgtggggctggtccgggag

SEQ ID NO: 3746043 - DNA, 25 bp, Homo sapien
acaaatatgcatgccggcatctgct

SEQ ID NO: 3746044 - DNA, 25 bp, Homo sapien
ggaaaactacgaacaaatatgcatg

SEQ ID NO: 3746045 - DNA, 25 bp, Homo sapien
gagacaccagatcttcagcttgatt

SEQ ID NO: 3746046 - DNA, 25 bp, Homo sapien
tcagcttgattcacgcagggaaaac

SEQ ID NO: 3746047 - DNA, 25 bp, Homo sapien
tcagcagatccttgcctggagtgtg

SEQ ID NO: 3746048 - DNA, 25 bp, Homo sapien
cagcagatccttgcctggagtgtgc

SEQ ID NO: 3746049 - DNA, 25 bp, Homo sapien
agcagatccttgcctggagtgtgct

SEQ ID NO: 3746050 - DNA, 25 bp, Homo sapien
gagaacaaagccagcgtgaagcgtg

SEQ ID NO: 3746051 - DNA, 25 bp, Homo sapien
tcgacacaggaaacatgggtcaggt

SEQ ID NO: 3746052 - DNA, 25 bp, Homo sapien
gggaaagagccatttatatgactgg

SEQ ID NO: 3746053 - DNA, 25 bp, Homo sapien
tcagtgccccttattagggtgccag

SEQ ID NO: 3746054 - DNA, 25 bp, Homo sapien
gaaaccactctcagatgatagatga

SEQ ID NO: 3746055 - DNA, 25 bp, Homo sapien
tctgcgtggactcagaaaccactct

SEQ ID NO: 3746056 - DNA, 25 bp, Homo sapien
gagtttctgtaacgtctgcgtggac

SEQ ID NO: 3746057 - DNA, 25 bp, Homo sapien
gggacgtcttgccggatgagtttct

SEQ ID NO: 3746058 - DNA, 25 bp, Homo sapien
tctctggggctaagagctcctttca

SEQ ID NO: 3746059 - DNA, 25 bp, Homo sapien
ctctggggctaagagctcctttcat

SEQ ID NO: 3746060 - DNA, 25 bp, Homo sapien
ttctctggggctaagagctcctttc

SEQ ID NO: 3746061 - DNA, 25 bp, Homo sapien
gtcattttgatatggggagtgttca

SEQ ID NO: 3746062 - DNA, 25 bp, Homo sapien
ccttttagaagtcagagccttctgt

SEQ ID NO: 3746063 - DNA, 25 bp, Homo sapien
ctggaagtcttgtctgtttgtgtca

SEQ ID NO: 3746064 - DNA, 25 bp, Homo sapien
ttcagggttccttttagaagtcaga

SEQ ID NO: 3746065 - DNA, 25 bp, Homo sapien
accccgtgggatgaacacggcgttg

SEQ ID NO: 3746066 - DNA, 25 bp, Homo sapien
gctggtgccaggtgcttgccgcctt

SEQ ID NO: 3746067 - DNA, 25 bp, Homo sapien
gatgaacacggcgttgaccttgtgc

SEQ ID NO: 3746068 - DNA, 25 bp, Homo sapien
ggcgttgaccttgtgcagaggtccc

SEQ ID NO: 3746069 - DNA, 25 bp, Homo sapien
ctggcttcgcttgcactgccggcag

SEQ ID NO: 3746070 - DNA, 25 bp, Homo sapien
taacattagctgctcccctggaagg

SEQ ID NO: 3746071 - DNA, 25 bp, Homo sapien
cagacgtttgaccttggagcactgt

SEQ ID NO: 3746072 - DNA, 25 bp, Homo sapien
catggctgggtccagttcccctttc

SEQ ID NO: 3746073 - DNA, 25 bp, Homo sapien
tcacgactgagtgggtgcgactaga

SEQ ID NO: 3746074 - DNA, 25 bp, Homo sapien
gtagctctgaccaaaaagaagggac

SEQ ID NO: 3746075 - DNA, 25 bp, Homo sapien
tggatgagcttgcaggttcctgtca

SEQ ID NO: 3746076 - DNA, 25 bp, Homo sapien
cattgtcttactctctctctggctg

SEQ ID NO: 3746077 - DNA, 25 bp, Homo sapien
cggagaggggctgcggataggctgt

SEQ ID NO: 3746078 - DNA, 25 bp, Homo sapien
gggctgcggataggctgtgcagaat

SEQ ID NO: 3746079 - DNA, 25 bp, Homo sapien
aaatgatggtgggttatcggagagg

SEQ ID NO: 3746080 - DNA, 25 bp, Homo sapien
cagaatggcgatgctgagtgggtcc

SEQ ID NO: 3746081 - DNA, 25 bp, Homo sapien
cgtagagctgaattggggctcacac

SEQ ID NO: 3746082 - DNA, 25 bp, Homo sapien
gacggctggctgccgtagagctgaa

SEQ ID NO: 3746083 - DNA, 25 bp, Homo sapien
ctcaggccttgtgccgacggctggc

SEQ ID NO: 3746084 - DNA, 25 bp, Homo sapien
tctcaggccttgtgccgacggctgg

SEQ ID NO: 3746085 - DNA, 25 bp, Homo sapien
ctcctggggttgagtcagagagcac

SEQ ID NO: 3746086 - DNA, 25 bp, Homo sapien
atgagtcattgagtaggggctcctg

SEQ ID NO: 3746087 - DNA, 25 bp, Homo sapien
ggtgaagatgagtcattgagtaggg

SEQ ID NO: 3746088 - DNA, 25 bp, Homo sapien
ggctcctggggttgagtcagagagc

SEQ ID NO: 3746089 - DNA, 25 bp, Homo sapien
cagaagcgtccccaagcagattaaa

SEQ ID NO: 3746090 - DNA, 25 bp, Homo sapien
tctgagagcaatgacttccgggagc

SEQ ID NO: 3746091 - DNA, 25 bp, Homo sapien
gacctgaagacatgggaaccctggc

SEQ ID NO: 3746092 - DNA, 25 bp, Homo sapien
gaagctgcacattcgtgggtcctga

SEQ ID NO: 3746093 - DNA, 25 bp, Homo sapien
aagttgcagagcttagccagggccc

SEQ ID NO: 3746094 - DNA, 25 bp, Homo sapien
gctcttgctgtgatactgacttagc

SEQ ID NO: 3746095 - DNA, 25 bp, Homo sapien
agatagacatcagtcaggttgctgc

SEQ ID NO: 3746096 - DNA, 25 bp, Homo sapien
gcagaaagctgagcaaagttgcaga

SEQ ID NO: 3746097 - DNA, 25 bp, Homo sapien
gagggagagtccgagagctcataaa

SEQ ID NO: 3746098 - DNA, 25 bp, Homo sapien
gagagtccgagagctcataaacatt

SEQ ID NO: 3746099 - DNA, 25 bp, Homo sapien
aggagagggagagtccgagagctca

SEQ ID NO: 3746100 - DNA, 25 bp, Homo sapien
gtccgagagctcataaacattttgt

SEQ ID NO: 3746101 - DNA, 25 bp, Homo sapien
tgcaccggtaggaaagctgtgtctg

SEQ ID NO: 3746102 - DNA, 25 bp, Homo sapien
tctccctgcctgctgagtgactgga

SEQ ID NO: 3746103 - DNA, 25 bp, Homo sapien
cttccctctgtgcagtgtctttggg

SEQ ID NO: 3746104 - DNA, 25 bp, Homo sapien
gttctgtgagagctgtagacaccaa

SEQ ID NO: 3746105 - DNA, 25 bp, Homo sapien
tgtctgattaatttctacaacagac

SEQ ID NO: 3746106 - DNA, 25 bp, Homo sapien
gtctgattaatttctacaacagacc

SEQ ID NO: 3746107 - DNA, 25 bp, Homo sapien
ctgtctgattaatttctacaacaga

SEQ ID NO: 3746108 - DNA, 25 bp, Homo sapien
ttactcctttactgtctcccataag

SEQ ID NO: 3746109 - DNA, 25 bp, Homo sapien
tctctggaagcaaggttcgcccagg

SEQ ID NO: 3746110 - DNA, 25 bp, Homo sapien
gggagactcccttacagactgtgac

SEQ ID NO: 3746111 - DNA, 25 bp, Homo sapien
tactgtctcccataagtaagctctg

SEQ ID NO: 3746112 - DNA, 25 bp, Homo sapien
tcgcgaagccaagcgagtccatgga

SEQ ID NO: 3746113 - DNA, 25 bp, Homo sapien
gaatgtgtgactggatcgcgaagcc

SEQ ID NO: 3746114 - DNA, 25 bp, Homo sapien
aaccaagatgaaacttagtcgtttg

SEQ ID NO: 3746115 - DNA, 25 bp, Homo sapien
gccagggagtggtgccgatgagaat

SEQ ID NO: 3746116 - DNA, 25 bp, Homo sapien
tagtccacgctgtctacattggagt

SEQ ID NO: 3746117 - DNA, 25 bp, Homo sapien
cacatttgtgcatgctgatagactc

SEQ ID NO: 3746118 - DNA, 25 bp, Homo sapien
taaatgcatcagtgctggacccatc

SEQ ID NO: 3746119 - DNA, 25 bp, Homo sapien
tatggagggcgtagatctccagttc

SEQ ID NO: 3746120 - DNA, 25 bp, Homo sapien
ttgtaagacgacgactgagcgtggc

SEQ ID NO: 3746121 - DNA, 25 bp, Homo sapien
tgatcctgcccggtttctgggtgga

SEQ ID NO: 3746122 - DNA, 25 bp, Homo sapien
cttcccctgcacttgtaagacgacg

SEQ ID NO: 3746123 - DNA, 25 bp, Homo sapien
gacgactgagcgtggctgatcctgc

SEQ ID NO: 3746124 - DNA, 25 bp, Homo sapien
caggccccgttgactgtgtggcatg

SEQ ID NO: 3746125 - DNA, 25 bp, Homo sapien
ctgactcttggcggccagtgcgcct

SEQ ID NO: 3746126 - DNA, 25 bp, Homo sapien
actcttggcggccagtgcgcctgag

SEQ ID NO: 3746127 - DNA, 25 bp, Homo sapien
ccagattccaggccccgttgactgt

SEQ ID NO: 3746128 - DNA, 25 bp, Homo sapien
acactcgagaatggcgggcctgagt

SEQ ID NO: 3746129 - DNA, 25 bp, Homo sapien
tgacacagacactcgagaatggcgg

SEQ ID NO: 3746130 - DNA, 25 bp, Homo sapien
acagacactcgagaatggcgggcct

SEQ ID NO: 3746131 - DNA, 25 bp, Homo sapien
tgctgacacagacactcgagaatgg

SEQ ID NO: 3746132 - DNA, 25 bp, Homo sapien
tcacgcagcctgtggcaagcgcgtg

SEQ ID NO: 3746133 - DNA, 25 bp, Homo sapien
aagcgcgtgctgttgcgaggactga

SEQ ID NO: 3746134 - DNA, 25 bp, Homo sapien
tgctgttgcgaggactgaagggagg

SEQ ID NO: 3746135 - DNA, 25 bp, Homo sapien
cagcctgtggcaagcgcgtgctgtt

SEQ ID NO: 3746136 - DNA, 25 bp, Homo sapien
tcggctgcatgccacctaggtgctt

SEQ ID NO: 3746137 - DNA, 25 bp, Homo sapien
caatgggcgtagtgccttgcagagc

SEQ ID NO: 3746138 - DNA, 25 bp, Homo sapien
tgccacccagcgtttttaggaagat

SEQ ID NO: 3746139 - DNA, 25 bp, Homo sapien
tttgagaagccccttgcaatgggcg

SEQ ID NO: 3746140 - DNA, 25 bp, Homo sapien
tacatttcatagaattgtgtttaga

SEQ ID NO: 3746141 - DNA, 25 bp, Homo sapien
ggattacatttcatagaattgtgtt

SEQ ID NO: 3746142 - DNA, 25 bp, Homo sapien
ttcatagaattgtgtttagaatggc

SEQ ID NO: 3746143 - DNA, 25 bp, Homo sapien
atagaattgtgtttagaatggccag

SEQ ID NO: 3746144 - DNA, 25 bp, Homo sapien
cagcgtttgatgaatgggattctgc

SEQ ID NO: 3746145 - DNA, 25 bp, Homo sapien
cactccgagtcttccatacggtaca

SEQ ID NO: 3746146 - DNA, 25 bp, Homo sapien
aagtggcccccggaatggcttgcat

SEQ ID NO: 3746147 - DNA, 25 bp, Homo sapien
tacggtacaatctccggactcggtg

SEQ ID NO: 3746148 - DNA, 25 bp, Homo sapien
gacgagttgcaaacacttcaggaag

SEQ ID NO: 3746149 - DNA, 25 bp, Homo sapien
tcgtacaaagcgctcggcgccggca

SEQ ID NO: 3746150 - DNA, 25 bp, Homo sapien
ggaagtgacaagtcgatttcctcct

SEQ ID NO: 3746151 - DNA, 25 bp, Homo sapien
ctccccgggagtcgctcgtacaaag

SEQ ID NO: 3746152 - DNA, 25 bp, Homo sapien
cgcatccggccccagtaattattca

SEQ ID NO: 3746153 - DNA, 25 bp, Homo sapien
gaaccaagagcatatccctgtagga

SEQ ID NO: 3746154 - DNA, 25 bp, Homo sapien
taagttaacagtgccattcacggtg

SEQ ID NO: 3746155 - DNA, 25 bp, Homo sapien
caaatggacaaggatatggtatacc

SEQ ID NO: 3746156 - DNA, 25 bp, Homo sapien
ggagtatcagaatagcagtcagcca

SEQ ID NO: 3746157 - DNA, 25 bp, Homo sapien
gcctttgtagcatttacagtacagc

SEQ ID NO: 3746158 - DNA, 25 bp, Homo sapien
tataagccctcagcgatacatgcac

SEQ ID NO: 3746159 - DNA, 25 bp, Homo sapien
gctggagacccatgatgattacata

SEQ ID NO: 3746160 - DNA, 25 bp, Homo sapien
ggacgaattcaggtagctacacaga

SEQ ID NO: 3746161 - DNA, 25 bp, Homo sapien
aataatgagcatctaagtggttggg

SEQ ID NO: 3746162 - DNA, 25 bp, Homo sapien
cctgacacagaaaatccttgtgcaa

SEQ ID NO: 3746163 - DNA, 25 bp, Homo sapien
agtacacaggatgcacatgttgaat

SEQ ID NO: 3746164 - DNA, 25 bp, Homo sapien
caagtgaagcagtgataatagagaa

SEQ ID NO: 3746165 - DNA, 25 bp, Homo sapien
ataaatttgtaactggttttgatcg

SEQ ID NO: 3746166 - DNA, 25 bp, Homo sapien
gaagcagtgataatagagaaggaag

SEQ ID NO: 3746167 - DNA, 25 bp, Homo sapien
aatttgtaactggttttgatcgatt

SEQ ID NO: 3746168 - DNA, 25 bp, Homo sapien
cgccctgtcgcctagacagtagtgc

SEQ ID NO: 3746169 - DNA, 25 bp, Homo sapien
gccctgtcgcctagacagtagtgca

SEQ ID NO: 3746170 - DNA, 25 bp, Homo sapien
ccctgtcgcctagacagtagtgcag

SEQ ID NO: 3746171 - DNA, 25 bp, Homo sapien
ctttatctgaagttacttatttagc

SEQ ID NO: 3746172 - DNA, 25 bp, Homo sapien
tttatctgaagttacttatttagct

SEQ ID NO: 3746173 - DNA, 25 bp, Homo sapien
ttatctgaagttacttatttagctt

SEQ ID NO: 3746174 - DNA, 25 bp, Homo sapien
gatgggatttcagcacgtcgctcag

SEQ ID NO: 3746175 - DNA, 25 bp, Homo sapien
gttatctcaattgctccctgtgaag

SEQ ID NO: 3746176 - DNA, 25 bp, Homo sapien
cctgtgaagtccgaaccaccattat

SEQ ID NO: 3746177 - DNA, 25 bp, Homo sapien
gatgttcttttaccacagggcagcc

SEQ ID NO: 3746178 - DNA, 25 bp, Homo sapien
gcttcttatggtggacgaccagaga

SEQ ID NO: 3746179 - DNA, 25 bp, Homo sapien
cagcaggcatccttattgaggcaag

SEQ ID NO: 3746180 - DNA, 25 bp, Homo sapien
gcaaggtttgagagcattgcctcca

SEQ ID NO: 3746181 - DNA, 25 bp, Homo sapien
gaagaatcagtcgatacggcaaact

SEQ ID NO: 3746182 - DNA, 25 bp, Homo sapien
ggtgattcatgatcattgatctttg

SEQ ID NO: 3746183 - DNA, 25 bp, Homo sapien
tgttgtaatatttcagagcttttca

SEQ ID NO: 3746184 - DNA, 25 bp, Homo sapien
aactgtgcccacgtaagatggtgag

SEQ ID NO: 3746185 - DNA, 25 bp, Homo sapien
cacgtaagatggtgagcttaattga

SEQ ID NO: 3746186 - DNA, 25 bp, Homo sapien
cattctgtgtataacagggatattt

SEQ ID NO: 3746187 - DNA, 25 bp, Homo sapien
tcattctgtgtataacagggatatt

SEQ ID NO: 3746188 - DNA, 25 bp, Homo sapien
gtcattctgtgtataacagggatat

SEQ ID NO: 3746189 - DNA, 25 bp, Homo sapien
tgtcattctgtgtataacagggata

SEQ ID NO: 3746190 - DNA, 25 bp, Homo sapien
tatcacttattgttagctataagcc

SEQ ID NO: 3746191 - DNA, 25 bp, Homo sapien
caagtaaacttattaggtgttggtg

SEQ ID NO: 3746192 - DNA, 25 bp, Homo sapien
catatgtggcgtagaatatttggtg

SEQ ID NO: 3746193 - DNA, 25 bp, Homo sapien
gttatattaacagccattgaagacc

SEQ ID NO: 3746194 - DNA, 25 bp, Homo sapien
cctcgtgttgtctgtacgttggaaa

SEQ ID NO: 3746195 - DNA, 25 bp, Homo sapien
cacagtctacgggtcaaatctggac

SEQ ID NO: 3746196 - DNA, 25 bp, Homo sapien
gctgttaagtccacacattgcaatt

SEQ ID NO: 3746197 - DNA, 25 bp, Homo sapien
cagcttaagtgttgcattggtagag

SEQ ID NO: 3746198 - DNA, 25 bp, Homo sapien
tctaatggtccctcacgaacagcag

SEQ ID NO: 3746199 - DNA, 25 bp, Homo sapien
cgtcggctttaggtgtccacggtgc

SEQ ID NO: 3746200 - DNA, 25 bp, Homo sapien
aaatacagccgctcttggacctcga

SEQ ID NO: 3746201 - DNA, 25 bp, Homo sapien
cacggtgcggaagccagccgttttc

SEQ ID NO: 3746202 - DNA, 25 bp, Homo sapien
tcaagtcagaatcttagccagaaac

SEQ ID NO: 3746203 - DNA, 25 bp, Homo sapien
gccaaataactggatggacgctcgc

SEQ ID NO: 3746204 - DNA, 25 bp, Homo sapien
cagaaacgaagttggcctcttgcca

SEQ ID NO: 3746205 - DNA, 25 bp, Homo sapien
caaataactggatggacgctcgcac

SEQ ID NO: 3746206 - DNA, 25 bp, Homo sapien
gggcatcctctcacttagcagtctt

SEQ ID NO: 3746207 - DNA, 25 bp, Homo sapien
ttggcgtattgtggagagttgcagg

SEQ ID NO: 3746208 - DNA, 25 bp, Homo sapien
atccccgtgtttggcgtattgtgga

SEQ ID NO: 3746209 - DNA, 25 bp, Homo sapien
ttatccgggcatcctctcacttagc

SEQ ID NO: 3746210 - DNA, 25 bp, Homo sapien
cacagcactgaaggtgtagcccgaa

SEQ ID NO: 3746211 - DNA, 25 bp, Homo sapien
ggcgctgtggaaacacacagcactg

SEQ ID NO: 3746212 - DNA, 25 bp, Homo sapien
tgctgttggcgctgtggaaacacac

SEQ ID NO: 3746213 - DNA, 25 bp, Homo sapien
tgtagcccgaaatggacgccgccat

SEQ ID NO: 3746214 - DNA, 25 bp, Homo sapien
ggcttggccgcgagcgccggcctga

SEQ ID NO: 3746215 - DNA, 25 bp, Homo sapien
ggagccgcccgggtcaccagctcct

SEQ ID NO: 3746216 - DNA, 25 bp, Homo sapien
gcccagggggcgagccgcatgaggt

SEQ ID NO: 3746217 - DNA, 25 bp, Homo sapien
tgaaagcccccagcgggcgcggcag

SEQ ID NO: 3746218 - DNA, 25 bp, Homo sapien
ctaacaagtatcagtagtgacagcc

SEQ ID NO: 3746219 - DNA, 25 bp, Homo sapien
cagccacggtttcactcgcagcacc

SEQ ID NO: 3746220 - DNA, 25 bp, Homo sapien
agccacggtttcactcgcagcaccc

SEQ ID NO: 3746221 - DNA, 25 bp, Homo sapien
aacaagtatcagtagtgacagccac

SEQ ID NO: 3746222 - DNA, 25 bp, Homo sapien
ttcctatcattaagttctaccatca

SEQ ID NO: 3746223 - DNA, 25 bp, Homo sapien
cctatcattaagttctaccatcaac

SEQ ID NO: 3746224 - DNA, 25 bp, Homo sapien
tcctattcctatcattaagttctac

SEQ ID NO: 3746225 - DNA, 25 bp, Homo sapien
cctaggccatagtcttcaaagctgc

SEQ ID NO: 3746226 - DNA, 25 bp, Homo sapien
attattaaatagctggttgtagtac

SEQ ID NO: 3746227 - DNA, 25 bp, Homo sapien
gtcactgatgctaaacgtttcctct

SEQ ID NO: 3746228 - DNA, 25 bp, Homo sapien
gtgagtcactgatgctaaacgtttc

SEQ ID NO: 3746229 - DNA, 25 bp, Homo sapien
ctgatgctaaacgtttcctcttgtc

SEQ ID NO: 3746230 - DNA, 25 bp, Homo sapien
gatgctaaacgtttcctcttgtctt

SEQ ID NO: 3746231 - DNA, 25 bp, Homo sapien
tgtggtactgttgttcttgcttctc

SEQ ID NO: 3746232 - DNA, 25 bp, Homo sapien
gtgtggtactgttgttcttgcttct

SEQ ID NO: 3746233 - DNA, 25 bp, Homo sapien
ctttctgttgggtgcgttgaacatt

SEQ ID NO: 3746234 - DNA, 25 bp, Homo sapien
tgttgggtgcgttgaacatttcttc

SEQ ID NO: 3746235 - DNA, 25 bp, Homo sapien
gcctcaacaacacagtagacacctg

SEQ ID NO: 3746236 - DNA, 25 bp, Homo sapien
cacagtagacacctgctcatgtaca

SEQ ID NO: 3746237 - DNA, 25 bp, Homo sapien
tgctcatgtacacatcgcctctcgg

SEQ ID NO: 3746238 - DNA, 25 bp, Homo sapien
agagtttcttgtgcctcaacaacac

SEQ ID NO: 3746239 - DNA, 25 bp, Homo sapien
tatctgtccatgtatgatgagcaca

SEQ ID NO: 3746240 - DNA, 25 bp, Homo sapien
gtacaccagtctgaatactcaccct

SEQ ID NO: 3746241 - DNA, 25 bp, Homo sapien
catttaatcaagtgggataaaagct

SEQ ID NO: 3746242 - DNA, 25 bp, Homo sapien
cgcagctattgtgtaccttattcaa

SEQ ID NO: 3746243 - DNA, 25 bp, Homo sapien
aagttttgaacaaggctgatggtta

SEQ ID NO: 3746244 - DNA, 25 bp, Homo sapien
gaacaaggctgatggttatggattt

SEQ ID NO: 3746245 - DNA, 25 bp, Homo sapien
aaaagttttgaacaaggctgatggt

SEQ ID NO: 3746246 - DNA, 25 bp, Homo sapien
ttttgaacaaggctgatggttatgg

SEQ ID NO: 3746247 - DNA, 25 bp, Homo sapien
catagtattgtgacatagacgtgct

SEQ ID NO: 3746248 - DNA, 25 bp, Homo sapien
gtattgtgacatagacgtgcttggc

SEQ ID NO: 3746249 - DNA, 25 bp, Homo sapien
caccacatagtattgtgacatagac

SEQ ID NO: 3746250 - DNA, 25 bp, Homo sapien
tgtgacatagacgtgcttggctgca

SEQ ID NO: 3746251 - DNA, 25 bp, Homo sapien
cactttgcttgcgtagtcataaaaa

SEQ ID NO: 3746252 - DNA, 25 bp, Homo sapien
cattcactttgcttgcgtagtcata

SEQ ID NO: 3746253 - DNA, 25 bp, Homo sapien
tccgatctttaagaatcctgtccaa

SEQ ID NO: 3746254 - DNA, 25 bp, Homo sapien
ctttctccgatctttaagaatcctg

SEQ ID NO: 3746255 - DNA, 25 bp, Homo sapien
catataaccacccttttgaggtaat

SEQ ID NO: 3746256 - DNA, 25 bp, Homo sapien
cttttgaggtaatgataaaattttg

SEQ ID NO: 3746257 - DNA, 25 bp, Homo sapien
cttgtgggtcatataaccacccttt

SEQ ID NO: 3746258 - DNA, 25 bp, Homo sapien
tgggtcatataaccacccttttgag

SEQ ID NO: 3746259 - DNA, 25 bp, Homo sapien
gttacagagctcatgagtgacagcc

SEQ ID NO: 3746260 - DNA, 25 bp, Homo sapien
tccactgggcaacactaactttcac

SEQ ID NO: 3746261 - DNA, 25 bp, Homo sapien
gatgttttgtccgaagttacagagc

SEQ ID NO: 3746262 - DNA, 25 bp, Homo sapien
gaattacctactcagcagacctcag

SEQ ID NO: 3746263 - DNA, 25 bp, Homo sapien
cgtattgcgccggaatctgtaccac

SEQ ID NO: 3746264 - DNA, 25 bp, Homo sapien
ctgctgcgtattgcgccggaatctg

SEQ ID NO: 3746265 - DNA, 25 bp, Homo sapien
ctgctgctgcgtattgcgccggaat

SEQ ID NO: 3746266 - DNA, 25 bp, Homo sapien
gtattgcgccggaatctgtaccacc

SEQ ID NO: 3746267 - DNA, 25 bp, Homo sapien
agaagaaagacgaggtcgggcacgc

SEQ ID NO: 3746268 - DNA, 25 bp, Homo sapien
gcacatattctaaagcgtgagtgga

SEQ ID NO: 3746269 - DNA, 25 bp, Homo sapien
ccgaggatgcgggtgagctgcttgt

SEQ ID NO: 3746270 - DNA, 25 bp, Homo sapien
gtgagctgcttgtgaagaacctgct

SEQ ID NO: 3746271 - DNA, 25 bp, Homo sapien
cacatagtggattatggagaagcaa

SEQ ID NO: 3746272 - DNA, 25 bp, Homo sapien
cagcaggtggttcaatttcacaatt

SEQ ID NO: 3746273 - DNA, 25 bp, Homo sapien
caaaaccctcgttaaccagcaggtg

SEQ ID NO: 3746274 - DNA, 25 bp, Homo sapien
gttaatgcttcttgatccaaaaaca

SEQ ID NO: 3746275 - DNA, 25 bp, Homo sapien
agcgagtgatatcctctgattatac

SEQ ID NO: 3746276 - DNA, 25 bp, Homo sapien
atcactttggcataactctgagaag

SEQ ID NO: 3746277 - DNA, 25 bp, Homo sapien
tgttctttaatcactttggcataac

SEQ ID NO: 3746278 - DNA, 25 bp, Homo sapien
gctagtatttcctagattgggaata

SEQ ID NO: 3746279 - DNA, 25 bp, Homo sapien
gtgcattataaacctgataaatcgc

SEQ ID NO: 3746280 - DNA, 25 bp, Homo sapien
cctgataaatcgccctgatgtcttt

SEQ ID NO: 3746281 - DNA, 25 bp, Homo sapien
gcattataaacctgataaatcgccc

SEQ ID NO: 3746282 - DNA, 25 bp, Homo sapien
ttataaacctgataaatcgccctga

SEQ ID NO: 3746283 - DNA, 25 bp, Homo sapien
cctctgagtgatttgtcttcttaat

SEQ ID NO: 3746284 - DNA, 25 bp, Homo sapien
actcgctcactcttttcaacatctg

SEQ ID NO: 3746285 - DNA, 25 bp, Homo sapien
catttttcctctgagtgatttgtct

SEQ ID NO: 3746286 - DNA, 25 bp, Homo sapien
ttgttcacttctgcctgacaagatt

SEQ ID NO: 3746287 - DNA, 25 bp, Homo sapien
ccggcactggtggaagcataattgg

SEQ ID NO: 3746288 - DNA, 25 bp, Homo sapien
tgtgccatgggtcgagaatcctttg

SEQ ID NO: 3746289 - DNA, 25 bp, Homo sapien
ccacagcttgaggtcgaggcataaa

SEQ ID NO: 3746290 - DNA, 25 bp, Homo sapien
gcataattggaagagcccacagctt

SEQ ID NO: 3746291 - DNA, 25 bp, Homo sapien
tcttctcgggagttaaggtatctga

SEQ ID NO: 3746292 - DNA, 25 bp, Homo sapien
gaaacttgcacactgtatccaaagg

SEQ ID NO: 3746293 - DNA, 25 bp, Homo sapien
tgaatcgcaccagaattaggacaat

SEQ ID NO: 3746294 - DNA, 25 bp, Homo sapien
tcaaaaaccctctcagtaagcaatg

SEQ ID NO: 3746295 - DNA, 25 bp, Homo sapien
gataatacatatcaagctagtagaa

SEQ ID NO: 3746296 - DNA, 25 bp, Homo sapien
catgatagtgcaagaggtaagtttt

SEQ ID NO: 3746297 - DNA, 25 bp, Homo sapien
agttggaagccctctcttttatctc

SEQ ID NO: 3746298 - DNA, 25 bp, Homo sapien
atctgatttgttctaatcaggcttc

SEQ ID NO: 3746299 - DNA, 25 bp, Homo sapien
cagaacagagaccataaatgtgcca

SEQ ID NO: 3746300 - DNA, 25 bp, Homo sapien
tatgaactcagctaaacctaccgtg

SEQ ID NO: 3746301 - DNA, 25 bp, Homo sapien
cagtagtcactgtaatccatcaaag

SEQ ID NO: 3746302 - DNA, 25 bp, Homo sapien
tgtgccagtgcaacacagtagtcac

SEQ ID NO: 3746303 - DNA, 25 bp, Homo sapien
taaattcacactggcgctgaagctg

SEQ ID NO: 3746304 - DNA, 25 bp, Homo sapien
catagagtggcgatccaaagaacgg

SEQ ID NO: 3746305 - DNA, 25 bp, Homo sapien
tctgaacagaggagacggtaatggc

SEQ ID NO: 3746306 - DNA, 25 bp, Homo sapien
tgtaaggccaacataaccaggagag

SEQ ID NO: 3746307 - DNA, 25 bp, Homo sapien
caatctctagggatcagaagaaccc

SEQ ID NO: 3746308 - DNA, 25 bp, Homo sapien
cccagtttggaggtactctatgtcc

SEQ ID NO: 3746309 - DNA, 25 bp, Homo sapien
tcaaagcctcattgctagaaggtag

SEQ ID NO: 3746310 - DNA, 25 bp, Homo sapien
taagacagctgatctaaatcccaga

SEQ ID NO: 3746311 - DNA, 25 bp, Homo sapien
gatggcggccatgcgtccatgctgc

SEQ ID NO: 3746312 - DNA, 25 bp, Homo sapien
cccaggtcatcgatgcacacgaaca

SEQ ID NO: 3746313 - DNA, 25 bp, Homo sapien
aggaccacagagtcgcccaggtcat

SEQ ID NO: 3746314 - DNA, 25 bp, Homo sapien
ggtcccatggacttcatcaccggag

SEQ ID NO: 3746315 - DNA, 25 bp, Homo sapien
cagtcgctgttcatccaggagtgtt

SEQ ID NO: 3746316 - DNA, 25 bp, Homo sapien
gagtgttcagttcttctcgtctgta

SEQ ID NO: 3746317 - DNA, 25 bp, Homo sapien
ggttcttctttaagccacagtcgct

SEQ ID NO: 3746318 - DNA, 25 bp, Homo sapien
tcatccaggagtgttcagttcttct

SEQ ID NO: 3746319 - DNA, 25 bp, Homo sapien
cgagtgagtgtgtacagagaatctt

SEQ ID NO: 3746320 - DNA, 25 bp, Homo sapien
ctggacagcgagtgagtgtgtacag

SEQ ID NO: 3746321 - DNA, 25 bp, Homo sapien
acagcgagtgagtgtgtacagagaa

SEQ ID NO: 3746322 - DNA, 25 bp, Homo sapien
cagcgagtgagtgtgtacagagaat

SEQ ID NO: 3746323 - DNA, 25 bp, Homo sapien
tgagcaggcaggccgaggactgagc

SEQ ID NO: 3746324 - DNA, 25 bp, Homo sapien
caggcaggccgaggactgagcaagt

SEQ ID NO: 3746325 - DNA, 25 bp, Homo sapien
ggccgaggactgagcaagtggaagg

SEQ ID NO: 3746326 - DNA, 25 bp, Homo sapien
caggccgaggactgagcaagtggaa

SEQ ID NO: 3746327 - DNA, 25 bp, Homo sapien
agccaggcggcagcctctgacccct

SEQ ID NO: 3746328 - DNA, 25 bp, Homo sapien
aggcttctttccaacagcagggcca

SEQ ID NO: 3746329 - DNA, 25 bp, Homo sapien
ctgaccccttccaggtctttggtgg

SEQ ID NO: 3746330 - DNA, 25 bp, Homo sapien
cccaggcttctttccaacagcaggg

SEQ ID NO: 3746331 - DNA, 25 bp, Homo sapien
cgcaggcgacaaccccattttggaa

SEQ ID NO: 3746332 - DNA, 25 bp, Homo sapien
ttcagaacgcagtaaaacgtcccta

SEQ ID NO: 3746333 - DNA, 25 bp, Homo sapien
cttccggagcaatcttttccagggt

SEQ ID NO: 3746334 - DNA, 25 bp, Homo sapien
tggccacgatgtcaaagactgaacc

SEQ ID NO: 3746335 - DNA, 25 bp, Homo sapien
gatgcttcccatccacatagtgggc

SEQ ID NO: 3746336 - DNA, 25 bp, Homo sapien
gtccacgtccacagacacgctgatg

SEQ ID NO: 3746337 - DNA, 25 bp, Homo sapien
acacgctgatgtgcctggagtcttg

SEQ ID NO: 3746338 - DNA, 25 bp, Homo sapien
agatggcagccacatgtccacgtcc

SEQ ID NO: 3746339 - DNA, 25 bp, Homo sapien
ggtggtagagaaggcggacggagat

SEQ ID NO: 3746340 - DNA, 25 bp, Homo sapien
cttaggtggtagagaaggcggacgg

SEQ ID NO: 3746341 - DNA, 25 bp, Homo sapien
gaaggcggacggagataaacgacca

SEQ ID NO: 3746342 - DNA, 25 bp, Homo sapien
taggtggtagagaaggcggacggag

SEQ ID NO: 3746343 - DNA, 25 bp, Homo sapien
ggcctcagaggactcatgtgcatgt

SEQ ID NO: 3746344 - DNA, 25 bp, Homo sapien
aggactcatgtgcatgtccatcgaa

SEQ ID NO: 3746345 - DNA, 25 bp, Homo sapien
cagaggactcatgtgcatgtccatc

SEQ ID NO: 3746346 - DNA, 25 bp, Homo sapien
cctcagaggactcatgtgcatgtcc

SEQ ID NO: 3746347 - DNA, 25 bp, Homo sapien
tcaacaatgtgcaatcatcctctgc

SEQ ID NO: 3746348 - DNA, 25 bp, Homo sapien
aacaatgtgcaatcatcctctgcac

SEQ ID NO: 3746349 - DNA, 25 bp, Homo sapien
caacaatgtgcaatcatcctctgca

SEQ ID NO: 3746350 - DNA, 25 bp, Homo sapien
gccacactacaactgtaagaccact

SEQ ID NO: 3746351 - DNA, 25 bp, Homo sapien
tggccctgagccacactacaactgt

SEQ ID NO: 3746352 - DNA, 25 bp, Homo sapien
gccctgagccacactacaactgtaa

SEQ ID NO: 3746353 - DNA, 25 bp, Homo sapien
tgagccacactacaactgtaagacc

SEQ ID NO: 3746354 - DNA, 25 bp, Homo sapien
ttaagagtttcgcactctcctcctc

SEQ ID NO: 3746355 - DNA, 25 bp, Homo sapien
atacttaagagtttcgcactctcct

SEQ ID NO: 3746356 - DNA, 25 bp, Homo sapien
aagagtttcgcactctcctcctctt

SEQ ID NO: 3746357 - DNA, 25 bp, Homo sapien
acttaagagtttcgcactctcctcc

SEQ ID NO: 3746358 - DNA, 25 bp, Homo sapien
cttcatcagcagcaagttttacttg

SEQ ID NO: 3746359 - DNA, 25 bp, Homo sapien
atcagcagcaagttttacttgtttc

SEQ ID NO: 3746360 - DNA, 25 bp, Homo sapien
tttacttgtttctgtggaaccttgc

SEQ ID NO: 3746361 - DNA, 25 bp, Homo sapien
tcatcagcagcaagttttacttgtt

SEQ ID NO: 3746362 - DNA, 25 bp, Homo sapien
cagcagtcagagaaagtgcattagg

SEQ ID NO: 3746363 - DNA, 25 bp, Homo sapien
aatagaagactatggtctggattgt

SEQ ID NO: 3746364 - DNA, 25 bp, Homo sapien
gaagactatggtctggattgttgat

SEQ ID NO: 3746365 - DNA, 25 bp, Homo sapien
gcagtcagagaaagtgcattaggga

SEQ ID NO: 3746366 - DNA, 25 bp, Homo sapien
ctgtctgcaaggctctgagattctc

SEQ ID NO: 3746367 - DNA, 25 bp, Homo sapien
tctgcaaggctctgagattctctga

SEQ ID NO: 3746368 - DNA, 25 bp, Homo sapien
tcatgtgctgtctgcaaggctctga

SEQ ID NO: 3746369 - DNA, 25 bp, Homo sapien
ctgcaaggctctgagattctctgag

SEQ ID NO: 3746370 - DNA, 25 bp, Homo sapien
gagtgtgcatgtacctgtgcgtaca

SEQ ID NO: 3746371 - DNA, 25 bp, Homo sapien
tgagtacaccctgcaaagagtgtgc

SEQ ID NO: 3746372 - DNA, 25 bp, Homo sapien
gcagtcctggcaaatgagtacaccc

SEQ ID NO: 3746373 - DNA, 25 bp, Homo sapien
tgatttcagcccttcgtgtatggga

SEQ ID NO: 3746374 - DNA, 25 bp, Homo sapien
tagtgccccacagtcgatggaactg

SEQ ID NO: 3746375 - DNA, 25 bp, Homo sapien
ttcttgtattactgtgctgtcagac

SEQ ID NO: 3746376 - DNA, 25 bp, Homo sapien
gaactgaagtgtgatgtttttcttg

SEQ ID NO: 3746377 - DNA, 25 bp, Homo sapien
ttttcttgtattactgtgctgtcag

SEQ ID NO: 3746378 - DNA, 25 bp, Homo sapien
tcgacacagggtgacgtcagccggc

SEQ ID NO: 3746379 - DNA, 25 bp, Homo sapien
tctggacgcgcgctttgcctcttct

SEQ ID NO: 3746380 - DNA, 25 bp, Homo sapien
ctgattgtgagtcggcggcgcgcgt

SEQ ID NO: 3746381 - DNA, 25 bp, Homo sapien
atgagcgaccgcctctttccgggct

SEQ ID NO: 3746382 - DNA, 25 bp, Homo sapien
tctcccctcagtcaggacatggtct

SEQ ID NO: 3746383 - DNA, 25 bp, Homo sapien
tcaggacatggtctccgagggtccg

SEQ ID NO: 3746384 - DNA, 25 bp, Homo sapien
tcagtcaggacatggtctccgaggg

SEQ ID NO: 3746385 - DNA, 25 bp, Homo sapien
acatggtctccgagggtccgcgcgc

SEQ ID NO: 3746386 - DNA, 25 bp, Homo sapien
cccgtccgacgggcgcttggcggcg

SEQ ID NO: 3746387 - DNA, 25 bp, Homo sapien
ctcctccccgtccgacgggcgcttg

SEQ ID NO: 3746388 - DNA, 25 bp, Homo sapien
ctccccgtccgacgggcgcttggcg

SEQ ID NO: 3746389 - DNA, 25 bp, Homo sapien
tagtgaatcacatattctcctgtct

SEQ ID NO: 3746390 - DNA, 25 bp, Homo sapien
acaggtagcagtagtgaatcacata

SEQ ID NO: 3746391 - DNA, 25 bp, Homo sapien
tctcatctgccttatcatcagtgac

SEQ ID NO: 3746392 - DNA, 25 bp, Homo sapien
tatttttcattcaagacggttgaca

SEQ ID NO: 3746393 - DNA, 25 bp, Homo sapien
ggagaatcacttcaagccgggtggt

SEQ ID NO: 3746394 - DNA, 25 bp, Homo sapien
gtaacagggagagactccatcttaa

SEQ ID NO: 3746395 - DNA, 25 bp, Homo sapien
gaatcacttcaagccgggtggtgga

SEQ ID NO: 3746396 - DNA, 25 bp, Homo sapien
ggtaacagggagagactccatctta

SEQ ID NO: 3746397 - DNA, 25 bp, Homo sapien
cacattatggccaggtgcggaggct

SEQ ID NO: 3746398 - DNA, 25 bp, Homo sapien
gatgaaaaaccaaaactgcggtgtg

SEQ ID NO: 3746399 - DNA, 25 bp, Homo sapien
gatagtttaaaagcgtggcacttcc

SEQ ID NO: 3746400 - DNA, 25 bp, Homo sapien
cctgagtaacgtaccaagaccccat

SEQ ID NO: 3746401 - DNA, 25 bp, Homo sapien
gaaacggaacatatattgctggcag

SEQ ID NO: 3746402 - DNA, 25 bp, Homo sapien
caaatacaggaagggaattgtatcc

SEQ ID NO: 3746403 - DNA, 25 bp, Homo sapien
acactgaaataaacaccactctaaa

SEQ ID NO: 3746404 - DNA, 25 bp, Homo sapien
atgccattccactagaatgacaatt

SEQ ID NO: 3746405 - DNA, 25 bp, Homo sapien
gaaacttaatattctgctggtatca

SEQ ID NO: 3746406 - DNA, 25 bp, Homo sapien
ggtatcaaaagatagtattccacaa

SEQ ID NO: 3746407 - DNA, 25 bp, Homo sapien
ccactcacaagtgtattgtttcaac

SEQ ID NO: 3746408 - DNA, 25 bp, Homo sapien
cattatgtccctaaacagtatctcc

SEQ ID NO: 3746409 - DNA, 25 bp, Homo sapien
gccttcactcgtaacaggatgcttg

SEQ ID NO: 3746410 - DNA, 25 bp, Homo sapien
tagcctctgctagtccctaaagatg

SEQ ID NO: 3746411 - DNA, 25 bp, Homo sapien
tcaagtgctaagagtgcctttccaa

SEQ ID NO: 3746412 - DNA, 25 bp, Homo sapien
cagcttaaatgttcccacctcggta

SEQ ID NO: 3746413 - DNA, 25 bp, Homo sapien
gattagctagctaccactgatacta

SEQ ID NO: 3746414 - DNA, 25 bp, Homo sapien
ggattactgcagagactaagtgatc

SEQ ID NO: 3746415 - DNA, 25 bp, Homo sapien
tgatactacctcctaaacaagtccc

SEQ ID NO: 3746416 - DNA, 25 bp, Homo sapien
cattatttgtcacttggattactgc

SEQ ID NO: 3746417 - DNA, 25 bp, Homo sapien
taggaaccactgctgtaatcctagc

SEQ ID NO: 3746418 - DNA, 25 bp, Homo sapien
gtaggaaccactgctgtaatcctag

SEQ ID NO: 3746419 - DNA, 25 bp, Homo sapien
aaaacctttgttcagagattccagt

SEQ ID NO: 3746420 - DNA, 25 bp, Homo sapien
cagtggcacggaaggtagaccagca

SEQ ID NO: 3746421 - DNA, 25 bp, Homo sapien
tcccttcgatttccagtcaaacagc

SEQ ID NO: 3746422 - DNA, 25 bp, Homo sapien
acagccaggctttcaaaaacctttg

SEQ ID NO: 3746423 - DNA, 25 bp, Homo sapien
gtatcgcacatactcatctcttttc

SEQ ID NO: 3746424 - DNA, 25 bp, Homo sapien
acttaactcttaagccaaagtatcg

SEQ ID NO: 3746425 - DNA, 25 bp, Homo sapien
tcttcttcgcaatagtcaacaggaa

SEQ ID NO: 3746426 - DNA, 25 bp, Homo sapien
tcactgtcttcttcgcaatagtcaa

SEQ ID NO: 3746427 - DNA, 25 bp, Homo sapien
aggtgcagtcgcctgtgcctatagt

SEQ ID NO: 3746428 - DNA, 25 bp, Homo sapien
ggaatgttgtttagtaactgcaagg

SEQ ID NO: 3746429 - DNA, 25 bp, Homo sapien
aatgatgtacagtgttcactctgag

SEQ ID NO: 3746430 - DNA, 25 bp, Homo sapien
gaagagtggctaggtgctcacgcct

SEQ ID NO: 3746431 - DNA, 25 bp, Homo sapien
cactgaaataaccagtagcataatc

SEQ ID NO: 3746432 - DNA, 25 bp, Homo sapien
tggcttgaatttagacactggccac

SEQ ID NO: 3746433 - DNA, 25 bp, Homo sapien
ctacactataatgaagaaagacttc

SEQ ID NO: 3746434 - DNA, 25 bp, Homo sapien
gatttctaggattcaacaatgggct

SEQ ID NO: 3746435 - DNA, 25 bp, Homo sapien
taacgggaagccactaatagaaatg

SEQ ID NO: 3746436 - DNA, 25 bp, Homo sapien
caaaagatgcatgcaacatttcgac

SEQ ID NO: 3746437 - DNA, 25 bp, Homo sapien
aatacgctgcccaaaaagcaagtcc

SEQ ID NO: 3746438 - DNA, 25 bp, Homo sapien
gataggcaggagatataacgaggtt

SEQ ID NO: 3746439 - DNA, 25 bp, Homo sapien
ttcttgaagtgagctgtgtcaggca

SEQ ID NO: 3746440 - DNA, 25 bp, Homo sapien
tgtgcacttcttgaagtgagctgtg

SEQ ID NO: 3746441 - DNA, 25 bp, Homo sapien
tcttgaagtgagctgtgtcaggcag

SEQ ID NO: 3746442 - DNA, 25 bp, Homo sapien
cacttcttgaagtgagctgtgtcag

SEQ ID NO: 3746443 - DNA, 25 bp, Homo sapien
tagtacacttgattgcagatggcca

SEQ ID NO: 3746444 - DNA, 25 bp, Homo sapien
tttgggcacgacacatagtacactt

SEQ ID NO: 3746445 - DNA, 25 bp, Homo sapien
tggtcttgagccagatcctgaggac

SEQ ID NO: 3746446 - DNA, 25 bp, Homo sapien
tcggtgctggaaggatcccaatctc

SEQ ID NO: 3746447 - DNA, 25 bp, Homo sapien
ggtgatctcctttggctattaccac

SEQ ID NO: 3746448 - DNA, 25 bp, Homo sapien
gcaccagccaattcaatcctctgaa

SEQ ID NO: 3746449 - DNA, 25 bp, Homo sapien
cgcttcgtagcaggaggtgatctcc

SEQ ID NO: 3746450 - DNA, 25 bp, Homo sapien
ttcacttcagagtcccgcttcgtag

SEQ ID NO: 3746451 - DNA, 25 bp, Homo sapien
ttttcccatcccacgcaaaaaatgc

SEQ ID NO: 3746452 - DNA, 25 bp, Homo sapien
ccatcccacgcaaaaaatgcagaat

SEQ ID NO: 3746453 - DNA, 25 bp, Homo sapien
cccacgcaaaaaatgcagaatacag

SEQ ID NO: 3746454 - DNA, 25 bp, Homo sapien
cacgcaaaaaatgcagaatacagaa

SEQ ID NO: 3746455 - DNA, 25 bp, Homo sapien
atacacctaaactttccatattctt

SEQ ID NO: 3746456 - DNA, 25 bp, Homo sapien
tcatacacctaaactttccatattc

SEQ ID NO: 3746457 - DNA, 25 bp, Homo sapien
catacacctaaactttccatattct

SEQ ID NO: 3746458 - DNA, 25 bp, Homo sapien
gttcatacacctaaactttccatat

SEQ ID NO: 3746459 - DNA, 25 bp, Homo sapien
gacagcagattgtacggagggcaaa

SEQ ID NO: 3746460 - DNA, 25 bp, Homo sapien
catcaaccaagatgagagcctggga

SEQ ID NO: 3746461 - DNA, 25 bp, Homo sapien
agtggacgcgcacagttcagacctg

SEQ ID NO: 3746462 - DNA, 25 bp, Homo sapien
gaaaactcacgtataagtggacgcg

SEQ ID NO: 3746463 - DNA, 25 bp, Homo sapien
caccagtgtccaatgcaaggatttc

SEQ ID NO: 3746464 - DNA, 25 bp, Homo sapien
cacaatcgtttgtatgccctgagtt

SEQ ID NO: 3746465 - DNA, 25 bp, Homo sapien
tgtttggattattgtacaacctccc

SEQ ID NO: 3746466 - DNA, 25 bp, Homo sapien
ttacaccaggcacatatttcaacag

SEQ ID NO: 3746467 - DNA, 25 bp, Homo sapien
cagcaatcagcttcatacaggcata

SEQ ID NO: 3746468 - DNA, 25 bp, Homo sapien
tgggccacagcaatcagcttcatac

SEQ ID NO: 3746469 - DNA, 25 bp, Homo sapien
cacagcaatcagcttcatacaggca

SEQ ID NO: 3746470 - DNA, 25 bp, Homo sapien
gccacagcaatcagcttcatacagg

SEQ ID NO: 3746471 - DNA, 25 bp, Homo sapien
caaaagacgctacagaagtctgtgt

SEQ ID NO: 3746472 - DNA, 25 bp, Homo sapien
ttccttttacggatgcaggccaaaa

SEQ ID NO: 3746473 - DNA, 25 bp, Homo sapien
gatgcaggccaaaagacgctacaga

SEQ ID NO: 3746474 - DNA, 25 bp, Homo sapien
tttacggatgcaggccaaaagacgc

SEQ ID NO: 3746475 - DNA, 25 bp, Homo sapien
agggtggacctggagtcggctggca

SEQ ID NO: 3746476 - DNA, 25 bp, Homo sapien
cctggagtcggctggcacaatttca

SEQ ID NO: 3746477 - DNA, 25 bp, Homo sapien
gtcggctggcacaatttcaggaacc

SEQ ID NO: 3746478 - DNA, 25 bp, Homo sapien
gacatcacagcatggtttatgctgt

SEQ ID NO: 3746479 - DNA, 25 bp, Homo sapien
gggccagcccaacactaccctggag

SEQ ID NO: 3746480 - DNA, 25 bp, Homo sapien
gccaagtcttccttatatccattaa

SEQ ID NO: 3746481 - DNA, 25 bp, Homo sapien
aacaaatgctgagctttccatactg

SEQ ID NO: 3746482 - DNA, 25 bp, Homo sapien
catcttcagtgtaagtaaacgttgg

SEQ ID NO: 3746483 - DNA, 25 bp, Homo sapien
gaaacaacttagagcaactgaaacc

SEQ ID NO: 3746484 - DNA, 25 bp, Homo sapien
aacacaaaccgtagcaatcactcca

SEQ ID NO: 3746485 - DNA, 25 bp, Homo sapien
aaaacacaaaccgtagcaatcactc

SEQ ID NO: 3746486 - DNA, 25 bp, Homo sapien
cacaaaccgtagcaatcactccaaa

SEQ ID NO: 3746487 - DNA, 25 bp, Homo sapien
caaaaaacacaaaccgtagcaatca

SEQ ID NO: 3746488 - DNA, 25 bp, Homo sapien
tcctgcctctgaaaacgtatagcca

SEQ ID NO: 3746489 - DNA, 25 bp, Homo sapien
ccaagtgtacaagagtatagccaac

SEQ ID NO: 3746490 - DNA, 25 bp, Homo sapien
gcagaaggacgattcagcaagcgta

SEQ ID NO: 3746491 - DNA, 25 bp, Homo sapien
tcatctgcggtgagctgacgtgcaa

SEQ ID NO: 3746492 - DNA, 25 bp, Homo sapien
tcccaaaggtagccttccagccaca

SEQ ID NO: 3746493 - DNA, 25 bp, Homo sapien
ttatcccaaaggtagccttccagcc

SEQ ID NO: 3746494 - DNA, 25 bp, Homo sapien
tatcccaaaggtagccttccagcca

SEQ ID NO: 3746495 - DNA, 25 bp, Homo sapien
atcccaaaggtagccttccagccac

SEQ ID NO: 3746496 - DNA, 25 bp, Homo sapien
agaattctaaaatcacagttgagca

SEQ ID NO: 3746497 - DNA, 25 bp, Homo sapien
gaattctaaaatcacagttgagcat

SEQ ID NO: 3746498 - DNA, 25 bp, Homo sapien
cagaattctaaaatcacagttgagc

SEQ ID NO: 3746499 - DNA, 25 bp, Homo sapien
acagaattctaaaatcacagttgag

SEQ ID NO: 3746500 - DNA, 25 bp, Homo sapien
tgaagagaggcagctatctctctcc

SEQ ID NO: 3746501 - DNA, 25 bp, Homo sapien
ttcaggacacaccattgctggaata

SEQ ID NO: 3746502 - DNA, 25 bp, Homo sapien
gagaggcagctatctctctccggat

SEQ ID NO: 3746503 - DNA, 25 bp, Homo sapien
gaatacactttgctgcttgttgaga

SEQ ID NO: 3746504 - DNA, 25 bp, Homo sapien
gtctctatcaagcacctcatcaaat

SEQ ID NO: 3746505 - DNA, 25 bp, Homo sapien
acatgttcatttccatacctatgtc

SEQ ID NO: 3746506 - DNA, 25 bp, Homo sapien
tttccatacctatgtcattagagaa

SEQ ID NO: 3746507 - DNA, 25 bp, Homo sapien
cattagagaatactcatggggagaa

SEQ ID NO: 3746508 - DNA, 25 bp, Homo sapien
ttcatttccatacctatgtcattag

SEQ ID NO: 3746509 - DNA, 25 bp, Homo sapien
gatgccccaggtagcttgtagaact

SEQ ID NO: 3746510 - DNA, 25 bp, Homo sapien
cagtcgactgtccaaacgtgtagcc

SEQ ID NO: 3746511 - DNA, 25 bp, Homo sapien
acgtgtagccaattccaaggaccag

SEQ ID NO: 3746512 - DNA, 25 bp, Homo sapien
agtctcctgcagtccggttccaaag

SEQ ID NO: 3746513 - DNA, 25 bp, Homo sapien
taatccagcaaatgcactcctgggt

SEQ ID NO: 3746514 - DNA, 25 bp, Homo sapien
cccaccactacaaggaaataatcca

SEQ ID NO: 3746515 - DNA, 25 bp, Homo sapien
ctgggttgaaacagggcagaatgcc

SEQ ID NO: 3746516 - DNA, 25 bp, Homo sapien
tgacataaaaagtatcccaccacta

SEQ ID NO: 3746517 - DNA, 25 bp, Homo sapien
ggaaattgggttggcatgtcactga

SEQ ID NO: 3746518 - DNA, 25 bp, Homo sapien
tagcctatcttgaagtgacgggtgg

SEQ ID NO: 3746519 - DNA, 25 bp, Homo sapien
tgcaaaaggcacctcagcaaagagc

SEQ ID NO: 3746520 - DNA, 25 bp, Homo sapien
gagtcagctaaaatcacgggtatcc

SEQ ID NO: 3746521 - DNA, 25 bp, Homo sapien
tctggtaatgacataacgatagccc

SEQ ID NO: 3746522 - DNA, 25 bp, Homo sapien
gagtctccataagaacagacaagca

SEQ ID NO: 3746523 - DNA, 25 bp, Homo sapien
gtaccgaaacaactgggtatccaca

SEQ ID NO: 3746524 - DNA, 25 bp, Homo sapien
caaaaaggtgaatttaggacatctc

SEQ ID NO: 3746525 - DNA, 25 bp, Homo sapien
ttcaaacgctaatgatgagactggt

SEQ ID NO: 3746526 - DNA, 25 bp, Homo sapien
taatgcagtctttaagcagtctgtg

SEQ ID NO: 3746527 - DNA, 25 bp, Homo sapien
ttccactagcagataccttgtaaca

SEQ ID NO: 3746528 - DNA, 25 bp, Homo sapien
tcagaatttgatttaccgacaacca

SEQ ID NO: 3746529 - DNA, 25 bp, Homo sapien
tgagaataccatgattcccaatctt

SEQ ID NO: 3746530 - DNA, 25 bp, Homo sapien
catgattcccaatctttccagcgtg

SEQ ID NO: 3746531 - DNA, 25 bp, Homo sapien
ctgactagcaagagagagtataaat

SEQ ID NO: 3746532 - DNA, 25 bp, Homo sapien
caagagagagtataaatgcccagtc

SEQ ID NO: 3746533 - DNA, 25 bp, Homo sapien
ataggtaccataggcatcaagccta

SEQ ID NO: 3746534 - DNA, 25 bp, Homo sapien
aggtaccataggcatcaagcctatg

SEQ ID NO: 3746535 - DNA, 25 bp, Homo sapien
ctggataggtaccataggcatcaag

SEQ ID NO: 3746536 - DNA, 25 bp, Homo sapien
ggataggtaccataggcatcaagcc

SEQ ID NO: 3746537 - DNA, 25 bp, Homo sapien
aaatgtgcgtctgctccaagcttgc

SEQ ID NO: 3746538 - DNA, 25 bp, Homo sapien
cttgaaaccgagtatatcctaaagt

SEQ ID NO: 3746539 - DNA, 25 bp, Homo sapien
cgtctaagaatatgtgccagtacaa

SEQ ID NO: 3746540 - DNA, 25 bp, Homo sapien
cataaactataattggtcgtctaag

SEQ ID NO: 3746541 - DNA, 25 bp, Homo sapien
aagtggcccctcgtataacccagag

SEQ ID NO: 3746542 - DNA, 25 bp, Homo sapien
tcggtattgagattagcaccagcac

SEQ ID NO: 3746543 - DNA, 25 bp, Homo sapien
gaaaggaagtgcacatggagtagct

SEQ ID NO: 3746544 - DNA, 25 bp, Homo sapien
taacccagagcaatcggacttttcc

SEQ ID NO: 3746545 - DNA, 25 bp, Homo sapien
ctaaagaggagcacactagagggta

SEQ ID NO: 3746546 - DNA, 25 bp, Homo sapien
cctacagctggtatgctaactcatg

SEQ ID NO: 3746547 - DNA, 25 bp, Homo sapien
taaactgatcctggcaagccacagc

SEQ ID NO: 3746548 - DNA, 25 bp, Homo sapien
gctgaaattatacaagttacggtct

SEQ ID NO: 3746549 - DNA, 25 bp, Homo sapien
gatcagagacttggtaggaatgtga

SEQ ID NO: 3746550 - DNA, 25 bp, Homo sapien
cagagacttggtaggaatgtgacat

SEQ ID NO: 3746551 - DNA, 25 bp, Homo sapien
tcagagacttggtaggaatgtgaca

SEQ ID NO: 3746552 - DNA, 25 bp, Homo sapien
cagatcagagacttggtaggaatgt

SEQ ID NO: 3746553 - DNA, 25 bp, Homo sapien
catcagacagggatgtacacggccg

SEQ ID NO: 3746554 - DNA, 25 bp, Homo sapien
gagaactcttctgcatggcaaccag

SEQ ID NO: 3746555 - DNA, 25 bp, Homo sapien
tacacggccggatctgtcggtagcg

SEQ ID NO: 3746556 - DNA, 25 bp, Homo sapien
ttttctaccatctgagtgaccaggg

SEQ ID NO: 3746557 - DNA, 25 bp, Homo sapien
ccatgatgtcgactctgcttggagc

SEQ ID NO: 3746558 - DNA, 25 bp, Homo sapien
gatctgatgccttggtcttctgctg

SEQ ID NO: 3746559 - DNA, 25 bp, Homo sapien
agcagatcctgccagatttggttca

SEQ ID NO: 3746560 - DNA, 25 bp, Homo sapien
ttggagcaccacactaactttaggg

SEQ ID NO: 3746561 - DNA, 25 bp, Homo sapien
tacaaaacgtttccagatctgagac

SEQ ID NO: 3746562 - DNA, 25 bp, Homo sapien
aggaagaatccgaagaccctctggc

SEQ ID NO: 3746563 - DNA, 25 bp, Homo sapien
gctttttctaagtgcccatgctgga

SEQ ID NO: 3746564 - DNA, 25 bp, Homo sapien
gcagcacattgttgatggagtccaa

SEQ ID NO: 3746565 - DNA, 25 bp, Homo sapien
tggccacatcaatagtctagaaagt

SEQ ID NO: 3746566 - DNA, 25 bp, Homo sapien
gaatggccacaattaaccaacatgc

SEQ ID NO: 3746567 - DNA, 25 bp, Homo sapien
cccagtattgaatgtatacctgaag

SEQ ID NO: 3746568 - DNA, 25 bp, Homo sapien
cgcgtgcgtgtgtcgtctttccaaa

SEQ ID NO: 3746569 - DNA, 25 bp, Homo sapien
ggctttttcaattgggagggcagat

SEQ ID NO: 3746570 - DNA, 25 bp, Homo sapien
gaatgctgcacctatcacactatgt

SEQ ID NO: 3746571 - DNA, 25 bp, Homo sapien
taagtgctgagcgtgtactctggac

SEQ ID NO: 3746572 - DNA, 25 bp, Homo sapien
tctggacaacgctggctgcaatgca

SEQ ID NO: 3746573 - DNA, 25 bp, Homo sapien
cattaatgtctgtcacctagccacg

SEQ ID NO: 3746574 - DNA, 25 bp, Homo sapien
taattattagatcttggtcgcccaa

SEQ ID NO: 3746575 - DNA, 25 bp, Homo sapien
tccacagagtgcaggtatgacttac

SEQ ID NO: 3746576 - DNA, 25 bp, Homo sapien
gccacgctctgtttgctctagaaaa

SEQ ID NO: 3746577 - DNA, 25 bp, Homo sapien
gagacggcgctcatagttactgacc

SEQ ID NO: 3746578 - DNA, 25 bp, Homo sapien
actcattttaaggtggtggccccat

SEQ ID NO: 3746579 - DNA, 25 bp, Homo sapien
ggaggccaagcgcacacagaatatc

SEQ ID NO: 3746580 - DNA, 25 bp, Homo sapien
gaagtctgggacacgatgaacctaa

SEQ ID NO: 3746581 - DNA, 25 bp, Homo sapien
caatggtgggttagtgctaaatcaa

SEQ ID NO: 3746582 - DNA, 25 bp, Homo sapien
tcacacaagtccatcattatcacgt

SEQ ID NO: 3746583 - DNA, 25 bp, Homo sapien
ttatcacgtcatgccatccttaaga

SEQ ID NO: 3746584 - DNA, 25 bp, Homo sapien
gccatccttaagatgcaatggtggg

SEQ ID NO: 3746585 - DNA, 25 bp, Homo sapien
ttccataaccagactcaagaccgct

SEQ ID NO: 3746586 - DNA, 25 bp, Homo sapien
cagctcttgttactacagggttcca

SEQ ID NO: 3746587 - DNA, 25 bp, Homo sapien
tctctacttgagatgtttaaggcaa

SEQ ID NO: 3746588 - DNA, 25 bp, Homo sapien
ggtggacatttagcgttcagtgcag

SEQ ID NO: 3746589 - DNA, 25 bp, Homo sapien
gaaagtcttgagctaaaagggttca

SEQ ID NO: 3746590 - DNA, 25 bp, Homo sapien
tgttgcatttccttatgtctcagga

SEQ ID NO: 3746591 - DNA, 25 bp, Homo sapien
cagtaaaaccctctgatgatgcaaa

SEQ ID NO: 3746592 - DNA, 25 bp, Homo sapien
gtaacttgtcagattgtctatgaac

SEQ ID NO: 3746593 - DNA, 25 bp, Homo sapien
tcccatctgataagggcgcttggaa

SEQ ID NO: 3746594 - DNA, 25 bp, Homo sapien
ggaaaatgagcctctgtccagacgt

SEQ ID NO: 3746595 - DNA, 25 bp, Homo sapien
ggaccagacgctgctttccagggag

SEQ ID NO: 3746596 - DNA, 25 bp, Homo sapien
gcacttttcgaatgtagactctgga

SEQ ID NO: 3746597 - DNA, 25 bp, Homo sapien
tgagcgctgactcccgggctgtgaa

SEQ ID NO: 3746598 - DNA, 25 bp, Homo sapien
tgtacgcatggaaaaggccgtcagc

SEQ ID NO: 3746599 - DNA, 25 bp, Homo sapien
tacggggccaccctgagcgctgact

SEQ ID NO: 3746600 - DNA, 25 bp, Homo sapien
tgcaggactcttgtcagccttgtgg

SEQ ID NO: 3746601 - DNA, 25 bp, Homo sapien
tctgcagctgccgtgggaacaggca

SEQ ID NO: 3746602 - DNA, 25 bp, Homo sapien
aattatgccttgaagctgctcccgg

SEQ ID NO: 3746603 - DNA, 25 bp, Homo sapien
tcctgtggtccttctcgtgaaaggc

SEQ ID NO: 3746604 - DNA, 25 bp, Homo sapien
ggagatgcctgttgcccgcagtctt

SEQ ID NO: 3746605 - DNA, 25 bp, Homo sapien
gttgaagtgactgcacgtgcttgtc

SEQ ID NO: 3746606 - DNA, 25 bp, Homo sapien
cgctgtgctcctccgttccgcatag

SEQ ID NO: 3746607 - DNA, 25 bp, Homo sapien
ccgcatagcgcggacactgcagggt

SEQ ID NO: 3746608 - DNA, 25 bp, Homo sapien
ggctctgaggaacccgttgaagtga

SEQ ID NO: 3746609 - DNA, 25 bp, Homo sapien
aagcctcaggcccttggttcttgat

SEQ ID NO: 3746610 - DNA, 25 bp, Homo sapien
gcctggttgatagatcgaacaatca

SEQ ID NO: 3746611 - DNA, 25 bp, Homo sapien
ggttgatagatcgaacaatcacatt

SEQ ID NO: 3746612 - DNA, 25 bp, Homo sapien
ttttgtgtgcctggttgatagatcg

SEQ ID NO: 3746613 - DNA, 25 bp, Homo sapien
catctgattccaagggacaagccag

SEQ ID NO: 3746614 - DNA, 25 bp, Homo sapien
ctggaacttggcagtggcactcggc

SEQ ID NO: 3746615 - DNA, 25 bp, Homo sapien
tactcagggtccttttgcgggagga

SEQ ID NO: 3746616 - DNA, 25 bp, Homo sapien
tgcaggttcatggaacatccagggc

SEQ ID NO: 3746617 - DNA, 25 bp, Homo sapien
tccacgagcacctgctggtgtttgc

SEQ ID NO: 3746618 - DNA, 25 bp, Homo sapien
gagctgctccgactgcggggccaaa

SEQ ID NO: 3746619 - DNA, 25 bp, Homo sapien
gtgtgcatggcaagctcagggtccc

SEQ ID NO: 3746620 - DNA, 25 bp, Homo sapien
gcatcacaccggagctgtgtgcatg

SEQ ID NO: 3746621 - DNA, 25 bp, Homo sapien
aagggggaagaggtcgacaaatgat

SEQ ID NO: 3746622 - DNA, 25 bp, Homo sapien
agggggaagaggtcgacaaatgatt

SEQ ID NO: 3746623 - DNA, 25 bp, Homo sapien
ccttgtgcgtaacaggctgggctcc

SEQ ID NO: 3746624 - DNA, 25 bp, Homo sapien
tgggtgggtgatctgaccaggagtc

SEQ ID NO: 3746625 - DNA, 25 bp, Homo sapien
ttgcatagagtgtgtccccctcgac

SEQ ID NO: 3746626 - DNA, 25 bp, Homo sapien
agagtaacgtggatgcttggtgtca

SEQ ID NO: 3746627 - DNA, 25 bp, Homo sapien
tccaggggctgtgaccccaggctgg

SEQ ID NO: 3746628 - DNA, 25 bp, Homo sapien
tgctcttgagggtcttgacccttaa

SEQ ID NO: 3746629 - DNA, 25 bp, Homo sapien
accttcggcaggcttcccccatctc

SEQ ID NO: 3746630 - DNA, 25 bp, Homo sapien
cccatctcagagcacaaggacattt

SEQ ID NO: 3746631 - DNA, 25 bp, Homo sapien
tgagtcctcaagcagccttgcctct

SEQ ID NO: 3746632 - DNA, 25 bp, Homo sapien
agtcctcaagcagccttgcctcttg

SEQ ID NO: 3746633 - DNA, 25 bp, Homo sapien
ctgctgctgagtcctcaagcagcct

SEQ ID NO: 3746634 - DNA, 25 bp, Homo sapien
tgctgagtcctcaagcagccttgcc

SEQ ID NO: 3746635 - DNA, 25 bp, Homo sapien
ccatcaataattttagccctatcag

SEQ ID NO: 3746636 - DNA, 25 bp, Homo sapien
gaatctgtatagagggtcgccgcca

SEQ ID NO: 3746637 - DNA, 25 bp, Homo sapien
tccagcaactggaggtgtgaacgct

SEQ ID NO: 3746638 - DNA, 25 bp, Homo sapien
gctgatctcctaggtagaaagcacc

SEQ ID NO: 3746639 - DNA, 25 bp, Homo sapien
tggggtcggctgtcgctctcaggct

SEQ ID NO: 3746640 - DNA, 25 bp, Homo sapien
ctccaggcccgcgtgagtggcagca

SEQ ID NO: 3746641 - DNA, 25 bp, Homo sapien
caggcccgcgtgagtggcagcacct

SEQ ID NO: 3746642 - DNA, 25 bp, Homo sapien
cagccccggtgacacagacaaatgg

SEQ ID NO: 3746643 - DNA, 25 bp, Homo sapien
tgtgtgtggaggataatgttgacat

SEQ ID NO: 3746644 - DNA, 25 bp, Homo sapien
ccagtgttgcttgtttgggacgccg

SEQ ID NO: 3746645 - DNA, 25 bp, Homo sapien
tgcttgtttgggacgccgccagcct

SEQ ID NO: 3746646 - DNA, 25 bp, Homo sapien
tccaggacgcggccatctggaaatc

SEQ ID NO: 3746647 - DNA, 25 bp, Homo sapien
ggctggcgtccctggtagcgcttca

SEQ ID NO: 3746648 - DNA, 25 bp, Homo sapien
tagcgcttcagctgtgtacatggct

SEQ ID NO: 3746649 - DNA, 25 bp, Homo sapien
ggttccacagaatccgcagtcacat

SEQ ID NO: 3746650 - DNA, 25 bp, Homo sapien
gtatgctgattgtggcattatcccc

SEQ ID NO: 3746651 - DNA, 25 bp, Homo sapien
ccagctgggctgtgaagatgccgag

SEQ ID NO: 3746652 - DNA, 25 bp, Homo sapien
ctgggctgtgaagatgccgagaggg

SEQ ID NO: 3746653 - DNA, 25 bp, Homo sapien
tgtgaagatgccgagaggggagagc

SEQ ID NO: 3746654 - DNA, 25 bp, Homo sapien
agctgggctgtgaagatgccgagag

SEQ ID NO: 3746655 - DNA, 25 bp, Homo sapien
ggtctcttctgtgtcgcgggctctt

SEQ ID NO: 3746656 - DNA, 25 bp, Homo sapien
cttctcagtgggttgaacttgccat

SEQ ID NO: 3746657 - DNA, 25 bp, Homo sapien
ctttgtcgcaggaggatgagaagtc

SEQ ID NO: 3746658 - DNA, 25 bp, Homo sapien
aagtctgagaagatgctgccgggga

SEQ ID NO: 3746659 - DNA, 25 bp, Homo sapien
ttctcacgaccacagaggataaaag

SEQ ID NO: 3746660 - DNA, 25 bp, Homo sapien
agctggttgggtggatatgaggaaa

SEQ ID NO: 3746661 - DNA, 25 bp, Homo sapien
aaaaggaatgagaacgttgagctgg

SEQ ID NO: 3746662 - DNA, 25 bp, Homo sapien
tctcacgaccacagaggataaaagg

SEQ ID NO: 3746663 - DNA, 25 bp, Homo sapien
tggtgtctggatacaccagctcctt

SEQ ID NO: 3746664 - DNA, 25 bp, Homo sapien
tgtctggatacaccagctccttaaa

SEQ ID NO: 3746665 - DNA, 25 bp, Homo sapien
cccgcctgctacacaatgccaacat

SEQ ID NO: 3746666 - DNA, 25 bp, Homo sapien
cttggtgtctggatacaccagctcc

SEQ ID NO: 3746667 - DNA, 25 bp, Homo sapien
ctaaagttaaaagcaagagatctgt

SEQ ID NO: 3746668 - DNA, 25 bp, Homo sapien
tgacgattgtcttgtgtgcattcac

SEQ ID NO: 3746669 - DNA, 25 bp, Homo sapien
gttaaaagcaagagatctgttggaa

SEQ ID NO: 3746670 - DNA, 25 bp, Homo sapien
gcttccagaaataactgacgattgt

SEQ ID NO: 3746671 - DNA, 25 bp, Homo sapien
tgtcacttggtctctgccactggaa

SEQ ID NO: 3746672 - DNA, 25 bp, Homo sapien
ttattacacttcaaattggtcagta

SEQ ID NO: 3746673 - DNA, 25 bp, Homo sapien
ggctgtcacttggtctctgccactg

SEQ ID NO: 3746674 - DNA, 25 bp, Homo sapien
ggtcagtaaattggaatttatagcc

SEQ ID NO: 3746675 - DNA, 25 bp, Homo sapien
gagtcgccacggtgtgcgtctgcat

SEQ ID NO: 3746676 - DNA, 25 bp, Homo sapien
agagcccctcgagtcgccacggtgt

SEQ ID NO: 3746677 - DNA, 25 bp, Homo sapien
gagcccctcgagtcgccacggtgtg

SEQ ID NO: 3746678 - DNA, 25 bp, Homo sapien
cctcgagtcgccacggtgtgcgtct

SEQ ID NO: 3746679 - DNA, 25 bp, Homo sapien
tggaaccaagtgtcaaggccagcag

SEQ ID NO: 3746680 - DNA, 25 bp, Homo sapien
acccctgcgcggctgttttggaaag

SEQ ID NO: 3746681 - DNA, 25 bp, Homo sapien
cacccgcgttctcacgtggtagagt

SEQ ID NO: 3746682 - DNA, 25 bp, Homo sapien
ttgctggtgctgactgcggtcccct

SEQ ID NO: 3746683 - DNA, 25 bp, Homo sapien
taatcaatgtaaagaatgcagttcc

SEQ ID NO: 3746684 - DNA, 25 bp, Homo sapien
tggccaagattcattaagcctcctt

SEQ ID NO: 3746685 - DNA, 25 bp, Homo sapien
ggacagctgttaatgatctggacct

SEQ ID NO: 3746686 - DNA, 25 bp, Homo sapien
ctcaccgggcacattggtgacagtc

SEQ ID NO: 3746687 - DNA, 25 bp, Homo sapien
tgttttgcataactgatgaccgtac

SEQ ID NO: 3746688 - DNA, 25 bp, Homo sapien
tcatttctaccccttgggcctcatt

SEQ ID NO: 3746689 - DNA, 25 bp, Homo sapien
gataaagtaactcttaatgttttgc

SEQ ID NO: 3746690 - DNA, 25 bp, Homo sapien
gatgaccgtacatcattatcctcat

SEQ ID NO: 3746691 - DNA, 25 bp, Homo sapien
aaacctggtagacctgcagtctgac

SEQ ID NO: 3746692 - DNA, 25 bp, Homo sapien
gaaacctggtagacctgcagtctga

SEQ ID NO: 3746693 - DNA, 25 bp, Homo sapien
tttttcatctccgaggtcttcacaa

SEQ ID NO: 3746694 - DNA, 25 bp, Homo sapien
tggatgacgcagctgatgtggaaat

SEQ ID NO: 3746695 - DNA, 25 bp, Homo sapien
ccccttggatgacgcagctgatgtg

SEQ ID NO: 3746696 - DNA, 25 bp, Homo sapien
tctccgaggtcttcacaaaaattaa

SEQ ID NO: 3746697 - DNA, 25 bp, Homo sapien
agcaagcttgtgaggtattcgtggc

SEQ ID NO: 3746698 - DNA, 25 bp, Homo sapien
tattcgtggcatcagagccatgaag

SEQ ID NO: 3746699 - DNA, 25 bp, Homo sapien
caagcttgtgaggtattcgtggcat

SEQ ID NO: 3746700 - DNA, 25 bp, Homo sapien
tgtgaggtattcgtggcatcagagc

SEQ ID NO: 3746701 - DNA, 25 bp, Homo sapien
ttcccaccatcttcgaccatgcctg

SEQ ID NO: 3746702 - DNA, 25 bp, Homo sapien
cttgctgaaggttccacactgaagt

SEQ ID NO: 3746703 - DNA, 25 bp, Homo sapien
cactgaagtgggttgtacagaggaa

SEQ ID NO: 3746704 - DNA, 25 bp, Homo sapien
tatctctgcccgtccagcttgaact

SEQ ID NO: 3746705 - DNA, 25 bp, Homo sapien
cgtgcacgccttcactgtgcaaacc

SEQ ID NO: 3746706 - DNA, 25 bp, Homo sapien
gtgcacgccttcactgtgcaaacca

SEQ ID NO: 3746707 - DNA, 25 bp, Homo sapien
ggcgtgcacgccttcactgtgcaaa

SEQ ID NO: 3746708 - DNA, 25 bp, Homo sapien
gcgtgcacgccttcactgtgcaaac

SEQ ID NO: 3746709 - DNA, 25 bp, Homo sapien
gacatctgtgctgggcgtgtcctcc

SEQ ID NO: 3746710 - DNA, 25 bp, Homo sapien
ctgtgctgggcgtgtcctcctccat

SEQ ID NO: 3746711 - DNA, 25 bp, Homo sapien
acatctgtgctgggcgtgtcctcct

SEQ ID NO: 3746712 - DNA, 25 bp, Homo sapien
atctgtgctgggcgtgtcctcctcc

SEQ ID NO: 3746713 - DNA, 25 bp, Homo sapien
tgggctccttagagccaatggcaca

SEQ ID NO: 3746714 - DNA, 25 bp, Homo sapien
gggctccttagagccaatggcacac

SEQ ID NO: 3746715 - DNA, 25 bp, Homo sapien
ctgggctccttagagccaatggcac

SEQ ID NO: 3746716 - DNA, 25 bp, Homo sapien
ctgtcatctgacctgactctgtggc

SEQ ID NO: 3746717 - DNA, 25 bp, Homo sapien
tgtccgcattgctgcccgtgatggg

SEQ ID NO: 3746718 - DNA, 25 bp, Homo sapien
ttgggagcgatggagttggaggtcc

SEQ ID NO: 3746719 - DNA, 25 bp, Homo sapien
gccacggaagtttctgtagccaaca

SEQ ID NO: 3746720 - DNA, 25 bp, Homo sapien
gagcgatggagttggaggtcctaag

SEQ ID NO: 3746721 - DNA, 25 bp, Homo sapien
ctcccgccacccagctcgttgatgg

SEQ ID NO: 3746722 - DNA, 25 bp, Homo sapien
cagctcgttgatggcatgaaagcac

SEQ ID NO: 3746723 - DNA, 25 bp, Homo sapien
gttgatggcatgaaagcaccaggcc

SEQ ID NO: 3746724 - DNA, 25 bp, Homo sapien
cctgagcctggcttcccgtgagacc

SEQ ID NO: 3746725 - DNA, 25 bp, Homo sapien
gacttatttcatgacatttgtctct

SEQ ID NO: 3746726 - DNA, 25 bp, Homo sapien
gagtgaagtcagagtaacccgctca

SEQ ID NO: 3746727 - DNA, 25 bp, Homo sapien
catttgtcgtgtgaagagtgaagtc

SEQ ID NO: 3746728 - DNA, 25 bp, Homo sapien
ttttcctctgcggattcccttggca

SEQ ID NO: 3746729 - DNA, 25 bp, Homo sapien
gggctgtttgccaccgcaggaatcc

SEQ ID NO: 3746730 - DNA, 25 bp, Homo sapien
cagggctgtttgccaccgcaggaat

SEQ ID NO: 3746731 - DNA, 25 bp, Homo sapien
agggctgtttgccaccgcaggaatc

SEQ ID NO: 3746732 - DNA, 25 bp, Homo sapien
tgctgccgtagacgctgttatatcc

SEQ ID NO: 3746733 - DNA, 25 bp, Homo sapien
ctcccatacccagatcacctggtgt

SEQ ID NO: 3746734 - DNA, 25 bp, Homo sapien
gtagacgctgttatatcctcccata

SEQ ID NO: 3746735 - DNA, 25 bp, Homo sapien
ggctttgctgccgtagacgctgtta

SEQ ID NO: 3746736 - DNA, 25 bp, Homo sapien
gctggggttaggatttgggatgtgg

SEQ ID NO: 3746737 - DNA, 25 bp, Homo sapien
ctggggttaggatttgggatgtggc

SEQ ID NO: 3746738 - DNA, 25 bp, Homo sapien
gctgcctgtgcctagccatcgccat

SEQ ID NO: 3746739 - DNA, 25 bp, Homo sapien
ggcttggtagaggggtggctgcctg

SEQ ID NO: 3746740 - DNA, 25 bp, Homo sapien
tggtagctccatgtgacacaaagca

SEQ ID NO: 3746741 - DNA, 25 bp, Homo sapien
gatgttggtagctccatgtgacaca

SEQ ID NO: 3746742 - DNA, 25 bp, Homo sapien
ccgatttctcgctggtcctgatgtt

SEQ ID NO: 3746743 - DNA, 25 bp, Homo sapien
gatgttttcccgatttctcgctggt

SEQ ID NO: 3746744 - DNA, 25 bp, Homo sapien
gcttagaaggcacgggacgttctga

SEQ ID NO: 3746745 - DNA, 25 bp, Homo sapien
ctgactgcttagaaggcacgggacg

SEQ ID NO: 3746746 - DNA, 25 bp, Homo sapien
gactgcttagaaggcacgggacgtt

SEQ ID NO: 3746747 - DNA, 25 bp, Homo sapien
ctgcttagaaggcacgggacgttct

SEQ ID NO: 3746748 - DNA, 25 bp, Homo sapien
gaagaggcacgtcgcacacactggg

SEQ ID NO: 3746749 - DNA, 25 bp, Homo sapien
agacttctggattctcgagttcacc

SEQ ID NO: 3746750 - DNA, 25 bp, Homo sapien
cctggagacttctggattctcgagt

SEQ ID NO: 3746751 - DNA, 25 bp, Homo sapien
gaggcacgtcgcacacactgggctt

SEQ ID NO: 3746752 - DNA, 25 bp, Homo sapien
cgttcagctgaccaaagacttttcc

SEQ ID NO: 3746753 - DNA, 25 bp, Homo sapien
tgcgttcagctgaccaaagactttt

SEQ ID NO: 3746754 - DNA, 25 bp, Homo sapien
cggggacttcaggaattcagcagcc

SEQ ID NO: 3746755 - DNA, 25 bp, Homo sapien
cttgcctgcgttcagctgaccaaag

SEQ ID NO: 3746756 - DNA, 25 bp, Homo sapien
aggcccatctgactgtctggaggta

SEQ ID NO: 3746757 - DNA, 25 bp, Homo sapien
ccgttgttgcttggcaccagagggc

SEQ ID NO: 3746758 - DNA, 25 bp, Homo sapien
tctggaggtagtgggtattcatccg

SEQ ID NO: 3746759 - DNA, 25 bp, Homo sapien
tagtgggtattcatccgttgttgct

SEQ ID NO: 3746760 - DNA, 25 bp, Homo sapien
caatgaccaatttgttagccggctt

SEQ ID NO: 3746761 - DNA, 25 bp, Homo sapien
tgtaccaatgaccaatttgttagcc

SEQ ID NO: 3746762 - DNA, 25 bp, Homo sapien
tttgttagccggctttgctgcttcc

SEQ ID NO: 3746763 - DNA, 25 bp, Homo sapien
accaatttgttagccggctttgctg

SEQ ID NO: 3746764 - DNA, 25 bp, Homo sapien
ttaagggatgatagtggggtaatgg

SEQ ID NO: 3746765 - DNA, 25 bp, Homo sapien
tgttaagggatgatagtggggtaat

SEQ ID NO: 3746766 - DNA, 25 bp, Homo sapien
gtgttaagggatgatagtggggtaa

SEQ ID NO: 3746767 - DNA, 25 bp, Homo sapien
taagggatgatagtggggtaatggg

SEQ ID NO: 3746768 - DNA, 25 bp, Homo sapien
cagggttggagccttaagccacgtt

SEQ ID NO: 3746769 - DNA, 25 bp, Homo sapien
gccacgtttgctcagggtcgtcttc

SEQ ID NO: 3746770 - DNA, 25 bp, Homo sapien
gccttaagccacgtttgctcagggt

SEQ ID NO: 3746771 - DNA, 25 bp, Homo sapien
tgagtggagttgacagggttggagc

SEQ ID NO: 3746772 - DNA, 25 bp, Homo sapien
caggagaactcggaaagtgaagtct

SEQ ID NO: 3746773 - DNA, 25 bp, Homo sapien
tccttttgtgccaagtgtgtcttcc

SEQ ID NO: 3746774 - DNA, 25 bp, Homo sapien
tgctgcgtggagaggcgcgctgcct

SEQ ID NO: 3746775 - DNA, 25 bp, Homo sapien
tgtcttccacgtcaggtcggtggca

SEQ ID NO: 3746776 - DNA, 25 bp, Homo sapien
gggcaggctcccgaaagctcctggt

SEQ ID NO: 3746777 - DNA, 25 bp, Homo sapien
tcccgggcaggctcccgaaagctcc

SEQ ID NO: 3746778 - DNA, 25 bp, Homo sapien
gcccatcaggggctggtttttccac

SEQ ID NO: 3746779 - DNA, 25 bp, Homo sapien
aggctcccgaaagctcctggtggcc

SEQ ID NO: 3746780 - DNA, 25 bp, Homo sapien
gctggcctggggtttggatacttga

SEQ ID NO: 3746781 - DNA, 25 bp, Homo sapien
tggcctggggtttggatacttgagc

SEQ ID NO: 3746782 - DNA, 25 bp, Homo sapien
ctggcctggggtttggatacttgag

SEQ ID NO: 3746783 - DNA, 25 bp, Homo sapien
gagcctgcccctgggcagcgctgac

SEQ ID NO: 3746784 - DNA, 25 bp, Homo sapien
tggcacacagcagcaggtacagagc

SEQ ID NO: 3746785 - DNA, 25 bp, Homo sapien
cacacagcagcaggtacagagcctg

SEQ ID NO: 3746786 - DNA, 25 bp, Homo sapien
agcagcaggtacagagcctgcccct

SEQ ID NO: 3746787 - DNA, 25 bp, Homo sapien
tggtttctggactgtactgtggccg

SEQ ID NO: 3746788 - DNA, 25 bp, Homo sapien
tggctggtttctggactgtactgtg

SEQ ID NO: 3746789 - DNA, 25 bp, Homo sapien
ttctggactgtactgtggccgtgtg

SEQ ID NO: 3746790 - DNA, 25 bp, Homo sapien
gttctggctggtttctggactgtac

SEQ ID NO: 3746791 - DNA, 25 bp, Homo sapien
gtgactttcaggtctgttcccttgc

SEQ ID NO: 3746792 - DNA, 25 bp, Homo sapien
gggcacgccaagctttgtgactttc

SEQ ID NO: 3746793 - DNA, 25 bp, Homo sapien
atcagggagggcacgccaagctttg

SEQ ID NO: 3746794 - DNA, 25 bp, Homo sapien
ggagggcacgccaagctttgtgact

SEQ ID NO: 3746795 - DNA, 25 bp, Homo sapien
cagagggcggtatcctcgcccaggt

SEQ ID NO: 3746796 - DNA, 25 bp, Homo sapien
tgtcagtgttgtgtcctcggacagc

SEQ ID NO: 3746797 - DNA, 25 bp, Homo sapien
ggaatgggcctctgttttcaccgag

SEQ ID NO: 3746798 - DNA, 25 bp, Homo sapien
tcctgggaactcagaggctcagcag

SEQ ID NO: 3746799 - DNA, 25 bp, Homo sapien
gtgtggacattcgtcctcatggatg

SEQ ID NO: 3746800 - DNA, 25 bp, Homo sapien
cattcgtcctcatggatgtcttctt

SEQ ID NO: 3746801 - DNA, 25 bp, Homo sapien
gtttcctggcaggtgtggacattcg

SEQ ID NO: 3746802 - DNA, 25 bp, Homo sapien
tttcctggcaggtgtggacattcgt

SEQ ID NO: 3746803 - DNA, 25 bp, Homo sapien
agtaggcctctccaatacttttctt

SEQ ID NO: 3746804 - DNA, 25 bp, Homo sapien
gatacctctgcagaccagtaggcct

SEQ ID NO: 3746805 - DNA, 25 bp, Homo sapien
tggcagattgtgcatagatacctct

SEQ ID NO: 3746806 - DNA, 25 bp, Homo sapien
tcctgcattcccattcgatatggca

SEQ ID NO: 3746807 - DNA, 25 bp, Homo sapien
tgtcgctctcatgtggtaactgggc

SEQ ID NO: 3746808 - DNA, 25 bp, Homo sapien
agccagtgcccacattgggtacgtt

SEQ ID NO: 3746809 - DNA, 25 bp, Homo sapien
tgctcctaaacgtaagccagtgccc

SEQ ID NO: 3746810 - DNA, 25 bp, Homo sapien
ctgggcatgttgtagaagtcgttgc

SEQ ID NO: 3746811 - DNA, 25 bp, Homo sapien
tccctttcagcgtattgcttatgtc

SEQ ID NO: 3746812 - DNA, 25 bp, Homo sapien
tgtccctttcagcgtattgcttatg

SEQ ID NO: 3746813 - DNA, 25 bp, Homo sapien
ttgtccctttcagcgtattgcttat

SEQ ID NO: 3746814 - DNA, 25 bp, Homo sapien
gtccctttcagcgtattgcttatgt

SEQ ID NO: 3746815 - DNA, 25 bp, Homo sapien
taaatgaccacgtgctataacctgc

SEQ ID NO: 3746816 - DNA, 25 bp, Homo sapien
tagccatctgtttagtcgagtagcg

SEQ ID NO: 3746817 - DNA, 25 bp, Homo sapien
tccagtaactgtttcggcagggagg

SEQ ID NO: 3746818 - DNA, 25 bp, Homo sapien
gtttactgggttgtggttagccatc

SEQ ID NO: 3746819 - DNA, 25 bp, Homo sapien
agttccaataattcatgttgcacag

SEQ ID NO: 3746820 - DNA, 25 bp, Homo sapien
taattcgctgctacagttccaataa

SEQ ID NO: 3746821 - DNA, 25 bp, Homo sapien
gatgaatagagttaattcgctgcta

SEQ ID NO: 3746822 - DNA, 25 bp, Homo sapien
aattcatgttgcacagtttaatgac

SEQ ID NO: 3746823 - DNA, 25 bp, Homo sapien
gatgcaagacgaacggaactcaaac

SEQ ID NO: 3746824 - DNA, 25 bp, Homo sapien
ctttcttggtcgtgaaggtctgctg

SEQ ID NO: 3746825 - DNA, 25 bp, Homo sapien
gaaggttctgtcttccacctggcac

SEQ ID NO: 3746826 - DNA, 25 bp, Homo sapien
gcccatcgacctggtaataatgttt

SEQ ID NO: 3746827 - DNA, 25 bp, Homo sapien
cttcgccatccacggcgggacagta

SEQ ID NO: 3746828 - DNA, 25 bp, Homo sapien
gaagcaggggtgatgaatccttcgc

SEQ ID NO: 3746829 - DNA, 25 bp, Homo sapien
tgatgaatccttcgccatccacggc

SEQ ID NO: 3746830 - DNA, 25 bp, Homo sapien
aagcaggggtgatgaatccttcgcc

SEQ ID NO: 3746831 - DNA, 25 bp, Homo sapien
tagcagtaaacgtgaacggtgcttc

SEQ ID NO: 3746832 - DNA, 25 bp, Homo sapien
tctctttttagcagtaaacgtgaac

SEQ ID NO: 3746833 - DNA, 25 bp, Homo sapien
ctgtgggaaacttttgatcgcctaa

SEQ ID NO: 3746834 - DNA, 25 bp, Homo sapien
ttgatcgcctaagggatggttttgt

SEQ ID NO: 3746835 - DNA, 25 bp, Homo sapien
aaatgacgtcgttgtgtgggctgct

SEQ ID NO: 3746836 - DNA, 25 bp, Homo sapien
tgggctgcttgctcgtggatccact

SEQ ID NO: 3746837 - DNA, 25 bp, Homo sapien
tcagcagcacccgtttatcaatttg

SEQ ID NO: 3746838 - DNA, 25 bp, Homo sapien
cctttcaaaacttggcccatggcag

SEQ ID NO: 3746839 - DNA, 25 bp, Homo sapien
cctaaatggggccactttacaatgt

SEQ ID NO: 3746840 - DNA, 25 bp, Homo sapien
ccactttacaatgttggtgtggccc

SEQ ID NO: 3746841 - DNA, 25 bp, Homo sapien
gggccactttacaatgttggtgtgg

SEQ ID NO: 3746842 - DNA, 25 bp, Homo sapien
aaatggggccactttacaatgttgg

SEQ ID NO: 3746843 - DNA, 25 bp, Homo sapien
gtacagcagccacgcagggacttac

SEQ ID NO: 3746844 - DNA, 25 bp, Homo sapien
ctttgtagtacagcagccacgcagg

SEQ ID NO: 3746845 - DNA, 25 bp, Homo sapien
tagtacagcagccacgcagggactt

SEQ ID NO: 3746846 - DNA, 25 bp, Homo sapien
ttgtagtacagcagccacgcaggga

SEQ ID NO: 3746847 - DNA, 25 bp, Homo sapien
ttgttgtattcgtttggcactgtga

SEQ ID NO: 3746848 - DNA, 25 bp, Homo sapien
ttgtattcgtttggcactgtgatta

SEQ ID NO: 3746849 - DNA, 25 bp, Homo sapien
ttctagatgttgttgtattcgtttg

SEQ ID NO: 3746850 - DNA, 25 bp, Homo sapien
agatgttgttgtattcgtttggcac

SEQ ID NO: 3746851 - DNA, 25 bp, Homo sapien
acagcgtggtgtggcgcaaggtgga

SEQ ID NO: 3746852 - DNA, 25 bp, Homo sapien
tggtgtggcgcaaggtggaaaggag

SEQ ID NO: 3746853 - DNA, 25 bp, Homo sapien
gatgtgtttcttgagcctgggtgac

SEQ ID NO: 3746854 - DNA, 25 bp, Homo sapien
tggaaaggagtttgttgctgatggt

SEQ ID NO: 3746855 - DNA, 25 bp, Homo sapien
gacttttgtaccagttggcttggct

SEQ ID NO: 3746856 - DNA, 25 bp, Homo sapien
ctcagcagatgtccatggggtcgta

SEQ ID NO: 3746857 - DNA, 25 bp, Homo sapien
cagcagatgtccatggggtcgtatt

SEQ ID NO: 3746858 - DNA, 25 bp, Homo sapien
ggtcgtattgggagtgacttttgta

SEQ ID NO: 3746859 - DNA, 25 bp, Homo sapien
tctgtcagggaacgtgccctctgtt

SEQ ID NO: 3746860 - DNA, 25 bp, Homo sapien
tgctctgtcagggaacgtgccctct

SEQ ID NO: 3746861 - DNA, 25 bp, Homo sapien
gctctgtcagggaacgtgccctctg

SEQ ID NO: 3746862 - DNA, 25 bp, Homo sapien
tgtcagggaacgtgccctctgttgg

SEQ ID NO: 3746863 - DNA, 25 bp, Homo sapien
ggaaacagcaaagacgctcctgcag

SEQ ID NO: 3746864 - DNA, 25 bp, Homo sapien
gatagtaaattgtcgaatgaactga

SEQ ID NO: 3746865 - DNA, 25 bp, Homo sapien
tgaagataataaaggcggaaacagc

SEQ ID NO: 3746866 - DNA, 25 bp, Homo sapien
tgctagcgtcgagtatgccagccct

SEQ ID NO: 3746867 - DNA, 25 bp, Homo sapien
ggctagccccggtgacctgccagcc

SEQ ID NO: 3746868 - DNA, 25 bp, Homo sapien
gtgcacggctagccccggtgacctg

SEQ ID NO: 3746869 - DNA, 25 bp, Homo sapien
gatcagggcaggattgggcttgttt

SEQ ID NO: 3746870 - DNA, 25 bp, Homo sapien
gacctgccagcctctcagatgtgca

SEQ ID NO: 3746871 - DNA, 25 bp, Homo sapien
gcctactgatggtcacatggtagca

SEQ ID NO: 3746872 - DNA, 25 bp, Homo sapien
aagtggacttttggagcctactgat

SEQ ID NO: 3746873 - DNA, 25 bp, Homo sapien
tctgtgcccactgttttgcattcat

SEQ ID NO: 3746874 - DNA, 25 bp, Homo sapien
tgcccactgttttgcattcatgact

SEQ ID NO: 3746875 - DNA, 25 bp, Homo sapien
cctctagcccagcgcagcgagtggg

SEQ ID NO: 3746876 - DNA, 25 bp, Homo sapien
caaggcatccatgcacaatgtagcc

SEQ ID NO: 3746877 - DNA, 25 bp, Homo sapien
ggcatccatgcacaatgtagccttg

SEQ ID NO: 3746878 - DNA, 25 bp, Homo sapien
catgcacaatgtagccttgccgctg

SEQ ID NO: 3746879 - DNA, 25 bp, Homo sapien
atttttttcggagccctcagatggg

SEQ ID NO: 3746880 - DNA, 25 bp, Homo sapien
gagccctcagatgggaatccttggc

SEQ ID NO: 3746881 - DNA, 25 bp, Homo sapien
tttttcggagccctcagatgggaat

SEQ ID NO: 3746882 - DNA, 25 bp, Homo sapien
tcggagccctcagatgggaatcctt

SEQ ID NO: 3746883 - DNA, 25 bp, Homo sapien
ggatagtctcgaatcacccagcgtg

SEQ ID NO: 3746884 - DNA, 25 bp, Homo sapien
agtgcacttgaccagaagctccggc

SEQ ID NO: 3746885 - DNA, 25 bp, Homo sapien
tagcacagtccttgaaacctcagcg

SEQ ID NO: 3746886 - DNA, 25 bp, Homo sapien
tccggcgacactgagattataaggg

SEQ ID NO: 3746887 - DNA, 25 bp, Homo sapien
cgccatagccgctggctccaggtcc

SEQ ID NO: 3746888 - DNA, 25 bp, Homo sapien
ccagagggactgtgagtgactgcca

SEQ ID NO: 3746889 - DNA, 25 bp, Homo sapien
aggccagggccgctttctcctttct

SEQ ID NO: 3746890 - DNA, 25 bp, Homo sapien
ctcttcgtccgccatagccgctggc

SEQ ID NO: 3746891 - DNA, 25 bp, Homo sapien
gtgtgcgggatgtcgtgggggggct

SEQ ID NO: 3746892 - DNA, 25 bp, Homo sapien
tgtgtgcgggatgtcgtgggggggc

SEQ ID NO: 3746893 - DNA, 25 bp, Homo sapien
aatggttgtgtattcacatgacccc

SEQ ID NO: 3746894 - DNA, 25 bp, Homo sapien
cagtttcaagagtctggagcctttg

SEQ ID NO: 3746895 - DNA, 25 bp, Homo sapien
tgaaaggtgaacttgaaagagcatc

SEQ ID NO: 3746896 - DNA, 25 bp, Homo sapien
cacgggtgtccttagatgaagaagg

SEQ ID NO: 3746897 - DNA, 25 bp, Homo sapien
tgtcgacttgcttggtggcatcctg

SEQ ID NO: 3746898 - DNA, 25 bp, Homo sapien
tgggtggcagatctgctgtgatgtt

SEQ ID NO: 3746899 - DNA, 25 bp, Homo sapien
tggtggcatcctgtttggtttcttg

SEQ ID NO: 3746900 - DNA, 25 bp, Homo sapien
agcagcagctgtggtaactggacca

SEQ ID NO: 3746901 - DNA, 25 bp, Homo sapien
cagggatcctttgcgctgggcagaa

SEQ ID NO: 3746902 - DNA, 25 bp, Homo sapien
gcgcagtggtggacctgccgcagct

SEQ ID NO: 3746903 - DNA, 25 bp, Homo sapien
ttcctccagcagaacacggcgcagt

SEQ ID NO: 3746904 - DNA, 25 bp, Homo sapien
tcagggatcctttgcgctgggcaga

SEQ ID NO: 3746905 - DNA, 25 bp, Homo sapien
cgcagagtggtaggacggtgcgatc

SEQ ID NO: 3746906 - DNA, 25 bp, Homo sapien
cgaggcatgtgactagaggttgtcc

SEQ ID NO: 3746907 - DNA, 25 bp, Homo sapien
gatctggcccgtttcgtcttgccct

SEQ ID NO: 3746908 - DNA, 25 bp, Homo sapien
actagaggttgtccgagcgcagagt

SEQ ID NO: 3746909 - DNA, 25 bp, Homo sapien
tcatttccacttgaccggcttggga

SEQ ID NO: 3746910 - DNA, 25 bp, Homo sapien
ccttgtagtacaaatagcgcagtgg

SEQ ID NO: 3746911 - DNA, 25 bp, Homo sapien
tcgaggacgagtgacatttgcgcgc

SEQ ID NO: 3746912 - DNA, 25 bp, Homo sapien
gcaaacggtaaacagcggcatcatt

SEQ ID NO: 3746913 - DNA, 25 bp, Homo sapien
gcggggacctggttgcaccaggcca

SEQ ID NO: 3746914 - DNA, 25 bp, Homo sapien
gcaggggcggggacctggttgcacc

SEQ ID NO: 3746915 - DNA, 25 bp, Homo sapien
aggggcggggacctggttgcaccag

SEQ ID NO: 3746916 - DNA, 25 bp, Homo sapien
ggacctggttgcaccaggccagagc

SEQ ID NO: 3746917 - DNA, 25 bp, Homo sapien
gggaagtcgttgagaggtgtgagaa

SEQ ID NO: 3746918 - DNA, 25 bp, Homo sapien
tcgcgcctcgcctttacacttgtaa

SEQ ID NO: 3746919 - DNA, 25 bp, Homo sapien
gggtccagctagacgccgcctcaag

SEQ ID NO: 3746920 - DNA, 25 bp, Homo sapien
ctcaagccagcagggtcgccggccc

SEQ ID NO: 3746921 - DNA, 25 bp, Homo sapien
gaaacggtaaaacttgctatctgta

SEQ ID NO: 3746922 - DNA, 25 bp, Homo sapien
tttagtttctgagtagccagctaca

SEQ ID NO: 3746923 - DNA, 25 bp, Homo sapien
tagtttgtcagttaccctttcagag

SEQ ID NO: 3746924 - DNA, 25 bp, Homo sapien
atatatagtatgtactgaacaagca

SEQ ID NO: 3746925 - DNA, 25 bp, Homo sapien
cgtagagttgaaacgctaaatattc

SEQ ID NO: 3746926 - DNA, 25 bp, Homo sapien
gctaaatattcttttgtctggcatc

SEQ ID NO: 3746927 - DNA, 25 bp, Homo sapien
tagcagagactgtatcgtagagttg

SEQ ID NO: 3746928 - DNA, 25 bp, Homo sapien
aaggatacttcttacagcaattata

SEQ ID NO: 3746929 - DNA, 25 bp, Homo sapien
tccagggtgggcgcctttcgccgtg

SEQ ID NO: 3746930 - DNA, 25 bp, Homo sapien
cgcctttcgccgtggacgccgaccg

SEQ ID NO: 3746931 - DNA, 25 bp, Homo sapien
gtgggcgcctttcgccgtggacgcc

SEQ ID NO: 3746932 - DNA, 25 bp, Homo sapien
cagggtgggcgcctttcgccgtgga

SEQ ID NO: 3746933 - DNA, 25 bp, Homo sapien
acggtctcccggatctggatttggg

SEQ ID NO: 3746934 - DNA, 25 bp, Homo sapien
tgagaaggcagaagcggccggtgcg

SEQ ID NO: 3746935 - DNA, 25 bp, Homo sapien
ctgaccccgcgggcctgagaaggca

SEQ ID NO: 3746936 - DNA, 25 bp, Homo sapien
gcggtcgccgcctctccggcacggt

SEQ ID NO: 3746937 - DNA, 25 bp, Homo sapien
cacctggtgcgctttggcaaacaag

SEQ ID NO: 3746938 - DNA, 25 bp, Homo sapien
taagcaatcttcgatagtcccggcc

SEQ ID NO: 3746939 - DNA, 25 bp, Homo sapien
cattacgtggactagcgggcaagaa

SEQ ID NO: 3746940 - DNA, 25 bp, Homo sapien
ttgccagaagacgagacaaccgtga

SEQ ID NO: 3746941 - DNA, 25 bp, Homo sapien
tccgtgctatagatcagccggcacc

SEQ ID NO: 3746942 - DNA, 25 bp, Homo sapien
tcacaataccgccgacgcctaatgt

SEQ ID NO: 3746943 - DNA, 25 bp, Homo sapien
ttgatattgcgagccatttccgtgc

SEQ ID NO: 3746944 - DNA, 25 bp, Homo sapien
gagccatttccgtgctatagatcag

SEQ ID NO: 3746945 - DNA, 25 bp, Homo sapien
gagcatgatgtagtcctttcaggaa

SEQ ID NO: 3746946 - DNA, 25 bp, Homo sapien
cacgtttgtcttagataatagagac

SEQ ID NO: 3746947 - DNA, 25 bp, Homo sapien
tgcagaagtggtacacgtttgtctt

SEQ ID NO: 3746948 - DNA, 25 bp, Homo sapien
tcccagagcatgatgtagtcctttc

SEQ ID NO: 3746949 - DNA, 25 bp, Homo sapien
ggccccaagtatcagcggcagcagc

SEQ ID NO: 3746950 - DNA, 25 bp, Homo sapien
caggccccaagtatcagcggcagca

SEQ ID NO: 3746951 - DNA, 25 bp, Homo sapien
aggccccaagtatcagcggcagcag

SEQ ID NO: 3746952 - DNA, 25 bp, Homo sapien
caaccaatgtttggtgacagcacag

SEQ ID NO: 3746953 - DNA, 25 bp, Homo sapien
gccaaccaatgtttggtgacagcac

SEQ ID NO: 3746954 - DNA, 25 bp, Homo sapien
ccaaccaatgtttggtgacagcaca

SEQ ID NO: 3746955 - DNA, 25 bp, Homo sapien
agccaaccaatgtttggtgacagca

SEQ ID NO: 3746956 - DNA, 25 bp, Homo sapien
ggaactcacattctcgtggcggaga

SEQ ID NO: 3746957 - DNA, 25 bp, Homo sapien
ctcgtggcggagatcaaacaggaag

SEQ ID NO: 3746958 - DNA, 25 bp, Homo sapien
tcacattctcgtggcggagatcaaa

SEQ ID NO: 3746959 - DNA, 25 bp, Homo sapien
ccatgacggaactcacattctcgtg

SEQ ID NO: 3746960 - DNA, 25 bp, Homo sapien
gagagatgtcgccaaggaatccaag

SEQ ID NO: 3746961 - DNA, 25 bp, Homo sapien
gatgtcgccaaggaatccaagcttc

SEQ ID NO: 3746962 - DNA, 25 bp, Homo sapien
ctggagagatgtcgccaaggaatcc

SEQ ID NO: 3746963 - DNA, 25 bp, Homo sapien
cagctggagagatgtcgccaaggaa

SEQ ID NO: 3746964 - DNA, 25 bp, Homo sapien
tctccagtcgtttagtaagaaatcg

SEQ ID NO: 3746965 - DNA, 25 bp, Homo sapien
cagcgtgatccagatgtttaaggcc

SEQ ID NO: 3746966 - DNA, 25 bp, Homo sapien
agactctgatgctgcgggaacgctc

SEQ ID NO: 3746967 - DNA, 25 bp, Homo sapien
acacaacagtgagggcattgtctgg

SEQ ID NO: 3746968 - DNA, 25 bp, Homo sapien
cctgatggaatgtagaggctgttat

SEQ ID NO: 3746969 - DNA, 25 bp, Homo sapien
cttccgttgcttgtagccagagctt

SEQ ID NO: 3746970 - DNA, 25 bp, Homo sapien
gctgttattggacagcgcggcaccc

SEQ ID NO: 3746971 - DNA, 25 bp, Homo sapien
gctggtgtcagcttccgttgcttgt

SEQ ID NO: 3746972 - DNA, 25 bp, Homo sapien
tgtatatctgggcaccagaaacgta

SEQ ID NO: 3746973 - DNA, 25 bp, Homo sapien
tatctgggcaccagaaacgtacccg

SEQ ID NO: 3746974 - DNA, 25 bp, Homo sapien
cgtacccgttctaatcttaggtctg

SEQ ID NO: 3746975 - DNA, 25 bp, Homo sapien
gtctggctccaatagatgtgtggcc

SEQ ID NO: 3746976 - DNA, 25 bp, Homo sapien
ctgtgcacgttaccccttcctgtgc

SEQ ID NO: 3746977 - DNA, 25 bp, Homo sapien
ttcctgtgcacgttaccccttcctg

SEQ ID NO: 3746978 - DNA, 25 bp, Homo sapien
cttcctgtgcacgttaccccttcct

SEQ ID NO: 3746979 - DNA, 25 bp, Homo sapien
gcacgttaccccttcctgtgcacgt

SEQ ID NO: 3746980 - DNA, 25 bp, Homo sapien
taaagtgaccacgattagacctcac

SEQ ID NO: 3746981 - DNA, 25 bp, Homo sapien
ctgaaaacagtcttgaagaggcatt

SEQ ID NO: 3746982 - DNA, 25 bp, Homo sapien
tctggctatagactcaaggaaactg

SEQ ID NO: 3746983 - DNA, 25 bp, Homo sapien
aacagccagtgttgagaaggatgtg

SEQ ID NO: 3746984 - DNA, 25 bp, Homo sapien
ttgtgagggctacaggaaaatatct

SEQ ID NO: 3746985 - DNA, 25 bp, Homo sapien
aaatatctgaaagggcttcggaagc

SEQ ID NO: 3746986 - DNA, 25 bp, Homo sapien
gccagccgtgcagaatgtcaggccc

SEQ ID NO: 3746987 - DNA, 25 bp, Homo sapien
cacgtgagagtcaacagcggcagaa

SEQ ID NO: 3746988 - DNA, 25 bp, Homo sapien
taacttctaacgcaaagctggcatc

SEQ ID NO: 3746989 - DNA, 25 bp, Homo sapien
gatcacgcatatgcaagggcctctg

SEQ ID NO: 3746990 - DNA, 25 bp, Homo sapien
tgtacacgcttgatgaagaagtagc

SEQ ID NO: 3746991 - DNA, 25 bp, Homo sapien
agtgaggagactgccgatggcttca

SEQ ID NO: 3746992 - DNA, 25 bp, Homo sapien
gacaggcctcccgttgggctggtat

SEQ ID NO: 3746993 - DNA, 25 bp, Homo sapien
ttttaatgctataatgctgggaagg

SEQ ID NO: 3746994 - DNA, 25 bp, Homo sapien
tccgaaactctgaaatgatgttcca

SEQ ID NO: 3746995 - DNA, 25 bp, Homo sapien
gaccaactttcaagaccagaagcag

SEQ ID NO: 3746996 - DNA, 25 bp, Homo sapien
aatttcatcaagatcgcacaaacaa

SEQ ID NO: 3746997 - DNA, 25 bp, Homo sapien
tgaaggcgatgtcaaatttcatcaa

SEQ ID NO: 3746998 - DNA, 25 bp, Homo sapien
tttcctctttgaaggcgatgtcaaa

SEQ ID NO: 3746999 - DNA, 25 bp, Homo sapien
agatcgcacaaacaactgtctccat

SEQ ID NO: 3747000 - DNA, 25 bp, Homo sapien
tttcacaagctccataagagcagag

SEQ ID NO: 3747001 - DNA, 25 bp, Homo sapien
caagctccataagagcagagacctg

SEQ ID NO: 3747002 - DNA, 25 bp, Homo sapien
tagccccaggcttgcaggaagtagg

SEQ ID NO: 3747003 - DNA, 25 bp, Homo sapien
gagcagagacctggtagccccaggc

SEQ ID NO: 3747004 - DNA, 25 bp, Homo sapien
ttcagtctggtggaagacgcagata

SEQ ID NO: 3747005 - DNA, 25 bp, Homo sapien
tgtaaatagtggaaggataagcaca

SEQ ID NO: 3747006 - DNA, 25 bp, Homo sapien
agataagcacctcctcatgacgcag

SEQ ID NO: 3747007 - DNA, 25 bp, Homo sapien
cagccatcatgaagttcagtctggt

SEQ ID NO: 3747008 - DNA, 25 bp, Homo sapien
ctgtccccaccgattggctccattg

SEQ ID NO: 3747009 - DNA, 25 bp, Homo sapien
tccttctcaatgctccatgagcagt

SEQ ID NO: 3747010 - DNA, 25 bp, Homo sapien
caccgattggctccattgccacctg

SEQ ID NO: 3747011 - DNA, 25 bp, Homo sapien
ttccttctcaatgctccatgagcag

SEQ ID NO: 3747012 - DNA, 25 bp, Homo sapien
ttcggtgagaatggaactaagttat

SEQ ID NO: 3747013 - DNA, 25 bp, Homo sapien
cggtgagaatggaactaagttatat

SEQ ID NO: 3747014 - DNA, 25 bp, Homo sapien
tttctccttcggtgagaatggaact

SEQ ID NO: 3747015 - DNA, 25 bp, Homo sapien
ctggcaccggcagggaattttctgc

SEQ ID NO: 3747016 - DNA, 25 bp, Homo sapien
aatgaaatttacagactgtgcagtg

SEQ ID NO: 3747017 - DNA, 25 bp, Homo sapien
tgtgagttcccacttccgaatgtct

SEQ ID NO: 3747018 - DNA, 25 bp, Homo sapien
actgtgcagtgtgaagcctttgtct

SEQ ID NO: 3747019 - DNA, 25 bp, Homo sapien
tctgtgtctctattcacatggcttc

SEQ ID NO: 3747020 - DNA, 25 bp, Homo sapien
ctggcaggtgccaccaccaagggtg

SEQ ID NO: 3747021 - DNA, 25 bp, Homo sapien
ggcagggccttcagaggggaggcca

SEQ ID NO: 3747022 - DNA, 25 bp, Homo sapien
agggccttcagaggggaggccaggc

SEQ ID NO: 3747023 - DNA, 25 bp, Homo sapien
accaagggtgggcagggccttcaga

SEQ ID NO: 3747024 - DNA, 25 bp, Homo sapien
gaacacattgcttaccctgacacca

SEQ ID NO: 3747025 - DNA, 25 bp, Homo sapien
gattgccttcaacataaccctttgt

SEQ ID NO: 3747026 - DNA, 25 bp, Homo sapien
cacatttggtacaggtaagaacaca

SEQ ID NO: 3747027 - DNA, 25 bp, Homo sapien
tggcataaatgtggccatgttaaaa

SEQ ID NO: 3747028 - DNA, 25 bp, Homo sapien
cttcaaagggcacacccagggccat

SEQ ID NO: 3747029 - DNA, 25 bp, Homo sapien
gtcttcaaagggcacacccagggcc

SEQ ID NO: 3747030 - DNA, 25 bp, Homo sapien
tcttcaaagggcacacccagggcca

SEQ ID NO: 3747031 - DNA, 25 bp, Homo sapien
tctgagtcattcaagtctccatgaa

SEQ ID NO: 3747032 - DNA, 25 bp, Homo sapien
accatttgcctggtggtacagatga

SEQ ID NO: 3747033 - DNA, 25 bp, Homo sapien
aaactcatctgcaatgtctgagtca

SEQ ID NO: 3747034 - DNA, 25 bp, Homo sapien
tctccatgaacaagagaccatttgc

SEQ ID NO: 3747035 - DNA, 25 bp, Homo sapien
cattcccaggacaatggtttcctta

SEQ ID NO: 3747036 - DNA, 25 bp, Homo sapien
tcattcccaggacaatggtttcctt

SEQ ID NO: 3747037 - DNA, 25 bp, Homo sapien
cacttgggttaactttgctgaatat

SEQ ID NO: 3747038 - DNA, 25 bp, Homo sapien
aaatctctcacttgggttaactttg

SEQ ID NO: 3747039 - DNA, 25 bp, Homo sapien
cagaattaatggcagtgaggcacat

SEQ ID NO: 3747040 - DNA, 25 bp, Homo sapien
tatcagaattaatggcagtgaggca

SEQ ID NO: 3747041 - DNA, 25 bp, Homo sapien
ctatttatcagaattaatggcagtg

SEQ ID NO: 3747042 - DNA, 25 bp, Homo sapien
tttatcagaattaatggcagtgagg

SEQ ID NO: 3747043 - DNA, 25 bp, Homo sapien
agctcactgctgcatcctccttcat

SEQ ID NO: 3747044 - DNA, 25 bp, Homo sapien
ccagctcactgctgcatcctccttc

SEQ ID NO: 3747045 - DNA, 25 bp, Homo sapien
ctccctcatctcctggctgcccagc

SEQ ID NO: 3747046 - DNA, 25 bp, Homo sapien
cagcacccagctcactgctgcatcc

SEQ ID NO: 3747047 - DNA, 25 bp, Homo sapien
cagtccctcgtccccatgttgagaa

SEQ ID NO: 3747048 - DNA, 25 bp, Homo sapien
gaaggccagtactcctgtcctcgta

SEQ ID NO: 3747049 - DNA, 25 bp, Homo sapien
tgttgagaaggccagtactcctgtc

SEQ ID NO: 3747050 - DNA, 25 bp, Homo sapien
cccatgttgagaaggccagtactcc

SEQ ID NO: 3747051 - DNA, 25 bp, Homo sapien
ctgtccccttagacttgaaaggaga

SEQ ID NO: 3747052 - DNA, 25 bp, Homo sapien
tagacttgaaaggagaagcacgaag

SEQ ID NO: 3747053 - DNA, 25 bp, Homo sapien
tcggggagttaacctcagagtcctc

SEQ ID NO: 3747054 - DNA, 25 bp, Homo sapien
gttggtgccaacaggacactcgtgg

SEQ ID NO: 3747055 - DNA, 25 bp, Homo sapien
tgcaacctgggaacaatagattttg

SEQ ID NO: 3747056 - DNA, 25 bp, Homo sapien
cttccagtgatacagtgattctttc

SEQ ID NO: 3747057 - DNA, 25 bp, Homo sapien
gattactccacttctagcttcttcc

SEQ ID NO: 3747058 - DNA, 25 bp, Homo sapien
acagtgattctttctattgcagctc

SEQ ID NO: 3747059 - DNA, 25 bp, Homo sapien
gcgtgccgctgattcttcctctgaa

SEQ ID NO: 3747060 - DNA, 25 bp, Homo sapien
ctgctaggctggctctgcccgttat

SEQ ID NO: 3747061 - DNA, 25 bp, Homo sapien
tctgcccgttattcttccatcctgg

SEQ ID NO: 3747062 - DNA, 25 bp, Homo sapien
agcacgatcactcacacggctgctg

SEQ ID NO: 3747063 - DNA, 25 bp, Homo sapien
ggtgacaatgtcttttcgcaaagca

SEQ ID NO: 3747064 - DNA, 25 bp, Homo sapien
tgtcagataaggtgacaatgtcttt

SEQ ID NO: 3747065 - DNA, 25 bp, Homo sapien
tcttttcgcaaagcatgtattggca

SEQ ID NO: 3747066 - DNA, 25 bp, Homo sapien
ctgtcagataaggtgacaatgtctt

SEQ ID NO: 3747067 - DNA, 25 bp, Homo sapien
tcaggatatcatgattccgcatgac

SEQ ID NO: 3747068 - DNA, 25 bp, Homo sapien
gatatcatgattccgcatgacagtg

SEQ ID NO: 3747069 - DNA, 25 bp, Homo sapien
atttcaggatatcatgattccgcat

SEQ ID NO: 3747070 - DNA, 25 bp, Homo sapien
tcatgattccgcatgacagtgacat

SEQ ID NO: 3747071 - DNA, 25 bp, Homo sapien
tctcttgtttccaaatcctgggtag

SEQ ID NO: 3747072 - DNA, 25 bp, Homo sapien
aaacgtgaacccacgcttcttgttg

SEQ ID NO: 3747073 - DNA, 25 bp, Homo sapien
tcttgtttccaaatcctgggtagag

SEQ ID NO: 3747074 - DNA, 25 bp, Homo sapien
ttgttgatgtagaccaatgagtcag

SEQ ID NO: 3747075 - DNA, 25 bp, Homo sapien
ttaaatgctgctggcccgcaagcct

SEQ ID NO: 3747076 - DNA, 25 bp, Homo sapien
gccgttgtgccttaaatgctgctgg

SEQ ID NO: 3747077 - DNA, 25 bp, Homo sapien
catccttcaggtggagagccagggt

SEQ ID NO: 3747078 - DNA, 25 bp, Homo sapien
agccagggtgccgttgtgccttaaa

SEQ ID NO: 3747079 - DNA, 25 bp, Homo sapien
tggcattcgcatcaccacactttcc

SEQ ID NO: 3747080 - DNA, 25 bp, Homo sapien
ctggcattcgcatcaccacactttc

SEQ ID NO: 3747081 - DNA, 25 bp, Homo sapien
gcagggcaatgattgctgggtaatg

SEQ ID NO: 3747082 - DNA, 25 bp, Homo sapien
aatgattgctgggtaatggttgcag

SEQ ID NO: 3747083 - DNA, 25 bp, Homo sapien
gcaatgattgctgggtaatggttgc

SEQ ID NO: 3747084 - DNA, 25 bp, Homo sapien
gggcaatgattgctgggtaatggtt

SEQ ID NO: 3747085 - DNA, 25 bp, Homo sapien
tccacgttgggtcgctggagaccca

SEQ ID NO: 3747086 - DNA, 25 bp, Homo sapien
aatgacagcaggtaatggtgccagg

SEQ ID NO: 3747087 - DNA, 25 bp, Homo sapien
ccataaaggatttctgggtcaggaa

SEQ ID NO: 3747088 - DNA, 25 bp, Homo sapien
cctgcaacagtgcaacttgggcaca

SEQ ID NO: 3747089 - DNA, 25 bp, Homo sapien
gcaggaagccgaatgtaagaccttc

SEQ ID NO: 3747090 - DNA, 25 bp, Homo sapien
caaacaggggtctgtttacaacatg

SEQ ID NO: 3747091 - DNA, 25 bp, Homo sapien
tcactcattgtacgcaggaagccga

SEQ ID NO: 3747092 - DNA, 25 bp, Homo sapien
ttacaacatgtgctcccaaagccca

SEQ ID NO: 3747093 - DNA, 25 bp, Homo sapien
agtcacctttaataagatgcagggc

SEQ ID NO: 3747094 - DNA, 25 bp, Homo sapien
gatgcagggcatccccattactaag

SEQ ID NO: 3747095 - DNA, 25 bp, Homo sapien
gcatccccattactaagcagcatgg

SEQ ID NO: 3747096 - DNA, 25 bp, Homo sapien
tttaataagatgcagggcatcccca

SEQ ID NO: 3747097 - DNA, 25 bp, Homo sapien
gacaagcctaaaaggccattaaagc

SEQ ID NO: 3747098 - DNA, 25 bp, Homo sapien
ggaacttcttctggcgacaagccta

SEQ ID NO: 3747099 - DNA, 25 bp, Homo sapien
tggcgacaagcctaaaaggccatta

SEQ ID NO: 3747100 - DNA, 25 bp, Homo sapien
ttcttctggcgacaagcctaaaagg

SEQ ID NO: 3747101 - DNA, 25 bp, Homo sapien
tcatggtattttggcctccaggctt

SEQ ID NO: 3747102 - DNA, 25 bp, Homo sapien
ctcctcccaattgtgtgtcatggta

SEQ ID NO: 3747103 - DNA, 25 bp, Homo sapien
aattgtgtgtcatggtattttggcc

SEQ ID NO: 3747104 - DNA, 25 bp, Homo sapien
ccaggctttggccactctccagcca

SEQ ID NO: 3747105 - DNA, 25 bp, Homo sapien
tgagggtgcggcaatgaggctgtgc

SEQ ID NO: 3747106 - DNA, 25 bp, Homo sapien
tgaaccctgcgacgttgacaacagc

SEQ ID NO: 3747107 - DNA, 25 bp, Homo sapien
aggtgactgtgaaccctgcgacgtt

SEQ ID NO: 3747108 - DNA, 25 bp, Homo sapien
tgacaacagccgcactgagggtgcg

SEQ ID NO: 3747109 - DNA, 25 bp, Homo sapien
cttgatttcaaacaataattcagaa

SEQ ID NO: 3747110 - DNA, 25 bp, Homo sapien
attaatatgtttctgattaacagtt

SEQ ID NO: 3747111 - DNA, 25 bp, Homo sapien
caataattcagaaatattaatatgt

SEQ ID NO: 3747112 - DNA, 25 bp, Homo sapien
aatattaatatgtttctgattaaca

SEQ ID NO: 3747113 - DNA, 25 bp, Homo sapien
ttaatggagatgaccgacagccagg

SEQ ID NO: 3747114 - DNA, 25 bp, Homo sapien
caccagtgtggttctaaggcagctg

SEQ ID NO: 3747115 - DNA, 25 bp, Homo sapien
ggtcggcatcttccctagatctagg

SEQ ID NO: 3747116 - DNA, 25 bp, Homo sapien
gactgatccagaacaaacattgcct

SEQ ID NO: 3747117 - DNA, 25 bp, Homo sapien
aagaaaggattaggacagcgcggtt

SEQ ID NO: 3747118 - DNA, 25 bp, Homo sapien
gattcatcttgatttcgaagctgct

SEQ ID NO: 3747119 - DNA, 25 bp, Homo sapien
cagatgacgagccatcagctgattc

SEQ ID NO: 3747120 - DNA, 25 bp, Homo sapien
tctccagttcctcggaagaaaggat

SEQ ID NO: 3747121 - DNA, 25 bp, Homo sapien
cacgccttccggcagggaaagttgg

SEQ ID NO: 3747122 - DNA, 25 bp, Homo sapien
ccagggacagttcagggtcacagca

SEQ ID NO: 3747123 - DNA, 25 bp, Homo sapien
taggccgccacgttaaacacagcaa

SEQ ID NO: 3747124 - DNA, 25 bp, Homo sapien
cctggaacttttgagagcaccgtct

SEQ ID NO: 3747125 - DNA, 25 bp, Homo sapien
tgccaggtgacggaagtggaaaccc

SEQ ID NO: 3747126 - DNA, 25 bp, Homo sapien
gcccggcacctgataaatgttaata

SEQ ID NO: 3747127 - DNA, 25 bp, Homo sapien
gctgtggaggttcccttgccaggtg

SEQ ID NO: 3747128 - DNA, 25 bp, Homo sapien
gaattacataaaacacatgaggccc

SEQ ID NO: 3747129 - DNA, 25 bp, Homo sapien
agtgcttggcctgagtgtggtcttt

SEQ ID NO: 3747130 - DNA, 25 bp, Homo sapien
gatttcaggcgggaaccacagtgct

SEQ ID NO: 3747131 - DNA, 25 bp, Homo sapien
gaaccacagtgcttggcctgagtgt

SEQ ID NO: 3747132 - DNA, 25 bp, Homo sapien
acagtgcttggcctgagtgtggtct

SEQ ID NO: 3747133 - DNA, 25 bp, Homo sapien
actgtctcagcattatggctctgaa

SEQ ID NO: 3747134 - DNA, 25 bp, Homo sapien
gagttgctcatgttgaaggctgtgc

SEQ ID NO: 3747135 - DNA, 25 bp, Homo sapien
aggagttgctcatgttgaaggctgt

SEQ ID NO: 3747136 - DNA, 25 bp, Homo sapien
gctctgaaagataggtccaggctgg

SEQ ID NO: 3747137 - DNA, 25 bp, Homo sapien
gatgtgaagtttactcaacgtcgtg

SEQ ID NO: 3747138 - DNA, 25 bp, Homo sapien
ctcaacgtcgtgcaaacagaaactg

SEQ ID NO: 3747139 - DNA, 25 bp, Homo sapien
aaactgtccggtgtagacactgtga

SEQ ID NO: 3747140 - DNA, 25 bp, Homo sapien
caaagggtaacttccccgatggatg

SEQ ID NO: 3747141 - DNA, 25 bp, Homo sapien
ggtttggatccacgtattatcagca

SEQ ID NO: 3747142 - DNA, 25 bp, Homo sapien
ttgacgtgaatttcaattaagcagc

SEQ ID NO: 3747143 - DNA, 25 bp, Homo sapien
cagctcaagcctgtgggtttggatc

SEQ ID NO: 3747144 - DNA, 25 bp, Homo sapien
tagtcaagttgagctaaaccagaat

SEQ ID NO: 3747145 - DNA, 25 bp, Homo sapien
tctgttaactgacgacaatttaatt

SEQ ID NO: 3747146 - DNA, 25 bp, Homo sapien
cagcaaacaagctctactcaatcac

SEQ ID NO: 3747147 - DNA, 25 bp, Homo sapien
ctgttaactgacgacaatttaattc

SEQ ID NO: 3747148 - DNA, 25 bp, Homo sapien
cagttctgtcatgcttggccttggg

SEQ ID NO: 3747149 - DNA, 25 bp, Homo sapien
tattggacaaatgggactcttagga

SEQ ID NO: 3747150 - DNA, 25 bp, Homo sapien
tcatcgctcctgaaaaatggtccga

SEQ ID NO: 3747151 - DNA, 25 bp, Homo sapien
cacaggtccccatggaaatctccag

SEQ ID NO: 3747152 - DNA, 25 bp, Homo sapien
tttgcctcttaccctggggagtcac

SEQ ID NO: 3747153 - DNA, 25 bp, Homo sapien
ctgaccacagggcttcctcagctgg

SEQ ID NO: 3747154 - DNA, 25 bp, Homo sapien
ctgtctgagctgaccacagggcttc

SEQ ID NO: 3747155 - DNA, 25 bp, Homo sapien
gctgggacctggtggctctttgcct

SEQ ID NO: 3747156 - DNA, 25 bp, Homo sapien
tcacttcacttcatggaggctcggt

SEQ ID NO: 3747157 - DNA, 25 bp, Homo sapien
tggcatggaacttggcctcagtacg

SEQ ID NO: 3747158 - DNA, 25 bp, Homo sapien
caattactaacacctgcttcggctt

SEQ ID NO: 3747159 - DNA, 25 bp, Homo sapien
tgtgggctctggcatatattagctg

SEQ ID NO: 3747160 - DNA, 25 bp, Homo sapien
ggtagaccgacaaactgtaacatgc

SEQ ID NO: 3747161 - DNA, 25 bp, Homo sapien
catggaagacataggcgcatttacc

SEQ ID NO: 3747162 - DNA, 25 bp, Homo sapien
ttaaaacgaggagtggcatgctgcc

SEQ ID NO: 3747163 - DNA, 25 bp, Homo sapien
taacatgcctgcataggtggcagct

SEQ ID NO: 3747164 - DNA, 25 bp, Homo sapien
ccgccatttgggcagattatctgca

SEQ ID NO: 3747165 - DNA, 25 bp, Homo sapien
gccatttgggcagattatctgcacc

SEQ ID NO: 3747166 - DNA, 25 bp, Homo sapien
tttgggcagattatctgcaccactg

SEQ ID NO: 3747167 - DNA, 25 bp, Homo sapien
catttgggcagattatctgcaccac

SEQ ID NO: 3747168 - DNA, 25 bp, Homo sapien
tccatcgccaactccctgccagtac

SEQ ID NO: 3747169 - DNA, 25 bp, Homo sapien
cctgaactgtcctctccatcgccaa

SEQ ID NO: 3747170 - DNA, 25 bp, Homo sapien
tgaactgtcctctccatcgccaact

SEQ ID NO: 3747171 - DNA, 25 bp, Homo sapien
tctccatcgccaactccctgccagt

SEQ ID NO: 3747172 - DNA, 25 bp, Homo sapien
aagcggagatgacgagcaagactgc

SEQ ID NO: 3747173 - DNA, 25 bp, Homo sapien
agcaagactgcaccggatgccagag

SEQ ID NO: 3747174 - DNA, 25 bp, Homo sapien
tgacgagcaagactgcaccggatgc

SEQ ID NO: 3747175 - DNA, 25 bp, Homo sapien
gagatgacgagcaagactgcaccgg

SEQ ID NO: 3747176 - DNA, 25 bp, Homo sapien
gacgaggaaggagatggtgttcctg

SEQ ID NO: 3747177 - DNA, 25 bp, Homo sapien
ggacgaggaaggagatggtgttcct

SEQ ID NO: 3747178 - DNA, 25 bp, Homo sapien
acgaggaaggagatggtgttcctgg

SEQ ID NO: 3747179 - DNA, 25 bp, Homo sapien
cgaggaaggagatggtgttcctgga

SEQ ID NO: 3747180 - DNA, 25 bp, Homo sapien
tttcttatggtttattcctcaggta

SEQ ID NO: 3747181 - DNA, 25 bp, Homo sapien
tcttatggtttattcctcaggtatc

SEQ ID NO: 3747182 - DNA, 25 bp, Homo sapien
ttatggtttattcctcaggtatcat

SEQ ID NO: 3747183 - DNA, 25 bp, Homo sapien
cttatggtttattcctcaggtatca

SEQ ID NO: 3747184 - DNA, 25 bp, Homo sapien
acctccttggagtctgcagatcagc

SEQ ID NO: 3747185 - DNA, 25 bp, Homo sapien
gggacctccttggagtctgcagatc

SEQ ID NO: 3747186 - DNA, 25 bp, Homo sapien
cagatcagctggtgcttctccatct

SEQ ID NO: 3747187 - DNA, 25 bp, Homo sapien
gctggtgcttctccatctcctgtca

SEQ ID NO: 3747188 - DNA, 25 bp, Homo sapien
cccagaagatcttagtggatgacac

SEQ ID NO: 3747189 - DNA, 25 bp, Homo sapien
ttcctgtcccagaagatcttagtgg

SEQ ID NO: 3747190 - DNA, 25 bp, Homo sapien
tgaggtgtgggcagctcttttcttg

SEQ ID NO: 3747191 - DNA, 25 bp, Homo sapien
tgaggggtcatttagaatgcaactc

SEQ ID NO: 3747192 - DNA, 25 bp, Homo sapien
agaggatggtctgcactggcctcca

SEQ ID NO: 3747193 - DNA, 25 bp, Homo sapien
tgcactggcctccaccacgcaggaa

SEQ ID NO: 3747194 - DNA, 25 bp, Homo sapien
gggaagctccgaccactcatgttta

SEQ ID NO: 3747195 - DNA, 25 bp, Homo sapien
taatggcctaataacccagcagggt

SEQ ID NO: 3747196 - DNA, 25 bp, Homo sapien
tcagacctgccctcgagaatagatg

SEQ ID NO: 3747197 - DNA, 25 bp, Homo sapien
tcagtgtaatgcagtcacaagggac

SEQ ID NO: 3747198 - DNA, 25 bp, Homo sapien
tttttagagaccgtccaggctggac

SEQ ID NO: 3747199 - DNA, 25 bp, Homo sapien
tgtggtacccaaaaccaaatgctag

SEQ ID NO: 3747200 - DNA, 25 bp, Homo sapien
tgaactccttcctcggctgaagtga

SEQ ID NO: 3747201 - DNA, 25 bp, Homo sapien
cctgaataggtaggactacaactgt

SEQ ID NO: 3747202 - DNA, 25 bp, Homo sapien
tgtgtagttatcctggctcttgtaa

SEQ ID NO: 3747203 - DNA, 25 bp, Homo sapien
tatcctggctcttgtaactacccat

SEQ ID NO: 3747204 - DNA, 25 bp, Homo sapien
cttgtctgtgtagttatcctggctc

SEQ ID NO: 3747205 - DNA, 25 bp, Homo sapien
tagttatcctggctcttgtaactac

SEQ ID NO: 3747206 - DNA, 25 bp, Homo sapien
tcaaactgtcaaacgcagccacatc

SEQ ID NO: 3747207 - DNA, 25 bp, Homo sapien
ctctggatgggtccgagactcggca

SEQ ID NO: 3747208 - DNA, 25 bp, Homo sapien
ccaggaaacgatgccagcgctttga

SEQ ID NO: 3747209 - DNA, 25 bp, Homo sapien
gcccgggccgtttgcaagctttgaa

SEQ ID NO: 3747210 - DNA, 25 bp, Homo sapien
tccgccccctgcatgtctttgttgg

SEQ ID NO: 3747211 - DNA, 25 bp, Homo sapien
cctgcatgtctttgttggcaaacag

SEQ ID NO: 3747212 - DNA, 25 bp, Homo sapien
ggtatctgacgctcaggctccgccc

SEQ ID NO: 3747213 - DNA, 25 bp, Homo sapien
gcaaacagttctgggggtcgtccga

SEQ ID NO: 3747214 - DNA, 25 bp, Homo sapien
taaatctcgcgatctttgtcccgaa

SEQ ID NO: 3747215 - DNA, 25 bp, Homo sapien
caccttcgcggccagggcgggaatt

SEQ ID NO: 3747216 - DNA, 25 bp, Homo sapien
gaagtagctgtgactcgccattaaa

SEQ ID NO: 3747217 - DNA, 25 bp, Homo sapien
tgcgcttgtccgaacctcttcggga

SEQ ID NO: 3747218 - DNA, 25 bp, Homo sapien
ttcgatccagggcaggcgatacgac

SEQ ID NO: 3747219 - DNA, 25 bp, Homo sapien
agggtaagcgccagagacgctccgc

SEQ ID NO: 3747220 - DNA, 25 bp, Homo sapien
gcaacgcaggcccaaagcagggtaa

SEQ ID NO: 3747221 - DNA, 25 bp, Homo sapien
cacttcgatccagggcaggcgatac

SEQ ID NO: 3747222 - DNA, 25 bp, Homo sapien
aggctgagccctcctcgagcggcgg

SEQ ID NO: 3747223 - DNA, 25 bp, Homo sapien
tgtgcagaagattcctcggattctc

SEQ ID NO: 3747224 - DNA, 25 bp, Homo sapien
gaggctgagccctcctcgagcggcg

SEQ ID NO: 3747225 - DNA, 25 bp, Homo sapien
gattcctcggattctccctgggaca

SEQ ID NO: 3747226 - DNA, 25 bp, Homo sapien
agaagagtatttcaccacagctcgg

SEQ ID NO: 3747227 - DNA, 25 bp, Homo sapien
cacagctcggctcttcacttcattg

SEQ ID NO: 3747228 - DNA, 25 bp, Homo sapien
aagagtatttcaccacagctcggct

SEQ ID NO: 3747229 - DNA, 25 bp, Homo sapien
agctcggctcttcacttcattgcct

SEQ ID NO: 3747230 - DNA, 25 bp, Homo sapien
tgctgttgccaagaatggtagttcc

SEQ ID NO: 3747231 - DNA, 25 bp, Homo sapien
gttttctcttcaaggcgtgcaaatg

SEQ ID NO: 3747232 - DNA, 25 bp, Homo sapien
cctgctggccctagtttggcactct

SEQ ID NO: 3747233 - DNA, 25 bp, Homo sapien
tctcgtaaccagttggcaggtggga

SEQ ID NO: 3747234 - DNA, 25 bp, Homo sapien
ctgaatcaataaagtcatatgccat

SEQ ID NO: 3747235 - DNA, 25 bp, Homo sapien
gagacaacatccacatcatttccca

SEQ ID NO: 3747236 - DNA, 25 bp, Homo sapien
gagtcagagacaacatccacatcat

SEQ ID NO: 3747237 - DNA, 25 bp, Homo sapien
catcatttcccactgaatcaataaa

SEQ ID NO: 3747238 - DNA, 25 bp, Homo sapien
ttcctatgcggtgtactgccatgct

SEQ ID NO: 3747239 - DNA, 25 bp, Homo sapien
gagacgatctcataaagagttcttg

SEQ ID NO: 3747240 - DNA, 25 bp, Homo sapien
gagttcttgaatatctagctcatct

SEQ ID NO: 3747241 - DNA, 25 bp, Homo sapien
gctcatctagtaagagagtccttcc

SEQ ID NO: 3747242 - DNA, 25 bp, Homo sapien
cacttctgatcaatgagtctttgat

SEQ ID NO: 3747243 - DNA, 25 bp, Homo sapien
tgataccagtgctctttgctctttt

SEQ ID NO: 3747244 - DNA, 25 bp, Homo sapien
aaagaattgccttttgataccagtg

SEQ ID NO: 3747245 - DNA, 25 bp, Homo sapien
gataaaactctttcaaccatgtcca

SEQ ID NO: 3747246 - DNA, 25 bp, Homo sapien
ctgagcggctccatcaccattgata

SEQ ID NO: 3747247 - DNA, 25 bp, Homo sapien
ggatgagacaggctgagcggctcca

SEQ ID NO: 3747248 - DNA, 25 bp, Homo sapien
gtggatgagacaggctgagcggctc

SEQ ID NO: 3747249 - DNA, 25 bp, Homo sapien
tggatgagacaggctgagcggctcc

SEQ ID NO: 3747250 - DNA, 25 bp, Homo sapien
gcaggccatgaagccccttccgaat

SEQ ID NO: 3747251 - DNA, 25 bp, Homo sapien
tgaagaaggcatttcgaagggagca

SEQ ID NO: 3747252 - DNA, 25 bp, Homo sapien
catttcgaagggagcaggccatgaa

SEQ ID NO: 3747253 - DNA, 25 bp, Homo sapien
gaatcatttgtctgatctgaactgg

SEQ ID NO: 3747254 - DNA, 25 bp, Homo sapien
atgagggttcaagaggctcacttcc

SEQ ID NO: 3747255 - DNA, 25 bp, Homo sapien
tgaataaagtaatcaggttttgttc

SEQ ID NO: 3747256 - DNA, 25 bp, Homo sapien
cacatgccccactatgtatgagggt

SEQ ID NO: 3747257 - DNA, 25 bp, Homo sapien
tgtgctccccgtcattgaataaagt

SEQ ID NO: 3747258 - DNA, 25 bp, Homo sapien
gtccatagaatattccgaacaaaat

SEQ ID NO: 3747259 - DNA, 25 bp, Homo sapien
ctcctccaaatatgggcatgttgga

SEQ ID NO: 3747260 - DNA, 25 bp, Homo sapien
ggagccgaccaacatatggatatct

SEQ ID NO: 3747261 - DNA, 25 bp, Homo sapien
tatgggcatgttggagccgaccaac

SEQ ID NO: 3747262 - DNA, 25 bp, Homo sapien
aaccaatagtcaattccagttagca

SEQ ID NO: 3747263 - DNA, 25 bp, Homo sapien
tccagttagcacattaattggtttg

SEQ ID NO: 3747264 - DNA, 25 bp, Homo sapien
tgcatatcaagttgtccaaccaata

SEQ ID NO: 3747265 - DNA, 25 bp, Homo sapien
tgtccaaccaatagtcaattccagt

SEQ ID NO: 3747266 - DNA, 25 bp, Homo sapien
ataggaataacagcatgtgaggtag

SEQ ID NO: 3747267 - DNA, 25 bp, Homo sapien
ctttaaagagccaataggtatgtcc

SEQ ID NO: 3747268 - DNA, 25 bp, Homo sapien
gagccaataggtatgtccttctttg

SEQ ID NO: 3747269 - DNA, 25 bp, Homo sapien
taggtatgtccttctttggtacaat

SEQ ID NO: 3747270 - DNA, 25 bp, Homo sapien
taaagagccaataggtatgtccttc

SEQ ID NO: 3747271 - DNA, 25 bp, Homo sapien
tagagcttcactatatcgctgccac

SEQ ID NO: 3747272 - DNA, 25 bp, Homo sapien
ccggcattgtgaatggattttggta

SEQ ID NO: 3747273 - DNA, 25 bp, Homo sapien
ttgtacaagagaatggctaccggca

SEQ ID NO: 3747274 - DNA, 25 bp, Homo sapien
ggtcatagagcttcactatatcgct

SEQ ID NO: 3747275 - DNA, 25 bp, Homo sapien
atgttctaatagttccatagtgttt

SEQ ID NO: 3747276 - DNA, 25 bp, Homo sapien
aggatgcctacttttgtccagtaat

SEQ ID NO: 3747277 - DNA, 25 bp, Homo sapien
gaggatgcctacttttgtccagtaa

SEQ ID NO: 3747278 - DNA, 25 bp, Homo sapien
gatgcctacttttgtccagtaattt

SEQ ID NO: 3747279 - DNA, 25 bp, Homo sapien
gatagttctccaacagacttgatta

SEQ ID NO: 3747280 - DNA, 25 bp, Homo sapien
gacttgattatagctactgctttgc

SEQ ID NO: 3747281 - DNA, 25 bp, Homo sapien
agttctgaaagcatgtaattggcgg

SEQ ID NO: 3747282 - DNA, 25 bp, Homo sapien
tttcatcactgtcgggcatctcttc

SEQ ID NO: 3747283 - DNA, 25 bp, Homo sapien
tattaaggtcaacatattgtttttg

SEQ ID NO: 3747284 - DNA, 25 bp, Homo sapien
ctaccaatgtattaaggtcaacata

SEQ ID NO: 3747285 - DNA, 25 bp, Homo sapien
ccaatgtattaaggtcaacatattg

SEQ ID NO: 3747286 - DNA, 25 bp, Homo sapien
attattaatacactaccaatgtatt

SEQ ID NO: 3747287 - DNA, 25 bp, Homo sapien
gctaagcacaagtctacagcgctct

SEQ ID NO: 3747288 - DNA, 25 bp, Homo sapien
tcttctgtgtcatggcaaactggaa

SEQ ID NO: 3747289 - DNA, 25 bp, Homo sapien
tctagaacatagctaagcacaagtc

SEQ ID NO: 3747290 - DNA, 25 bp, Homo sapien
aagtctacagcgctcttctgtgtca

SEQ ID NO: 3747291 - DNA, 25 bp, Homo sapien
tattttaacgggattggagtgctgg

SEQ ID NO: 3747292 - DNA, 25 bp, Homo sapien
tggaaggtcgctttcttttttgatg

SEQ ID NO: 3747293 - DNA, 25 bp, Homo sapien
ggtcagctgctggaaggtcgctttc

SEQ ID NO: 3747294 - DNA, 25 bp, Homo sapien
tcgggaccccctcttgaggattcat

SEQ ID NO: 3747295 - DNA, 25 bp, Homo sapien
tggctcctacacgatccagcgagaa

SEQ ID NO: 3747296 - DNA, 25 bp, Homo sapien
taggcagtctggctaagtctgtggc

SEQ ID NO: 3747297 - DNA, 25 bp, Homo sapien
tgaagcattagttccccactgtggg

SEQ ID NO: 3747298 - DNA, 25 bp, Homo sapien
ggaagatgcaggctccttatgctct

SEQ ID NO: 3747299 - DNA, 25 bp, Homo sapien
taattgcccttctgaagggagccca

SEQ ID NO: 3747300 - DNA, 25 bp, Homo sapien
tccagattgactggaataattgccc

SEQ ID NO: 3747301 - DNA, 25 bp, Homo sapien
cagattgactggaataattgccctt

SEQ ID NO: 3747302 - DNA, 25 bp, Homo sapien
gattgactggaataattgcccttct

SEQ ID NO: 3747303 - DNA, 25 bp, Homo sapien
tttgatgacttgagaatcagctgaa

SEQ ID NO: 3747304 - DNA, 25 bp, Homo sapien
gcatcggacaaaacataataggcct

SEQ ID NO: 3747305 - DNA, 25 bp, Homo sapien
tttgcaaagctaatttaatgtatcg

SEQ ID NO: 3747306 - DNA, 25 bp, Homo sapien
taatgtatcgtaatgctcttccgta

SEQ ID NO: 3747307 - DNA, 25 bp, Homo sapien
aactcttcaaggtgtgctgctctat

SEQ ID NO: 3747308 - DNA, 25 bp, Homo sapien
acagcacttcggaaagcatattggt

SEQ ID NO: 3747309 - DNA, 25 bp, Homo sapien
tattatttgcattctgggccagcat

SEQ ID NO: 3747310 - DNA, 25 bp, Homo sapien
tattggtgcagaggcagcaataagt

SEQ ID NO: 3747311 - DNA, 25 bp, Homo sapien
cacaagatcatgcttaatcttaaaa

SEQ ID NO: 3747312 - DNA, 25 bp, Homo sapien
tgaaccacgtggtccaagcctgtgg

SEQ ID NO: 3747313 - DNA, 25 bp, Homo sapien
taagcatgagctagactgcacagtc

SEQ ID NO: 3747314 - DNA, 25 bp, Homo sapien
cccttttctgaatactcaaataagc

SEQ ID NO: 3747315 - DNA, 25 bp, Homo sapien
taagagggagggatatcgctgctgc

SEQ ID NO: 3747316 - DNA, 25 bp, Homo sapien
tacacactgtgctgaggtaagaggg

SEQ ID NO: 3747317 - DNA, 25 bp, Homo sapien
gctgcggatcagattattctacttc

SEQ ID NO: 3747318 - DNA, 25 bp, Homo sapien
ttaatggcagcgtggttacacactg

SEQ ID NO: 3747319 - DNA, 25 bp, Homo sapien
tagacaaatcagttgcccatgcaaa

SEQ ID NO: 3747320 - DNA, 25 bp, Homo sapien
ctgtagacaaatcagttgcccatgc

SEQ ID NO: 3747321 - DNA, 25 bp, Homo sapien
gacaaatcagttgcccatgcaaatc

SEQ ID NO: 3747322 - DNA, 25 bp, Homo sapien
tgtagacaaatcagttgcccatgca

SEQ ID NO: 3747323 - DNA, 25 bp, Homo sapien
ttagcagcctcataacatttacaac

SEQ ID NO: 3747324 - DNA, 25 bp, Homo sapien
catttacaactaacagagagttgac

SEQ ID NO: 3747325 - DNA, 25 bp, Homo sapien
tctcactctgtaatgcagcagcctg

SEQ ID NO: 3747326 - DNA, 25 bp, Homo sapien
cagcagcctgattcatgtaaaacac

SEQ ID NO: 3747327 - DNA, 25 bp, Homo sapien
tacataataaaagggcggcattggt

SEQ ID NO: 3747328 - DNA, 25 bp, Homo sapien
cgcatgagccttcccgtgttacata

SEQ ID NO: 3747329 - DNA, 25 bp, Homo sapien
cacaactgttgctcggcagcagaca

SEQ ID NO: 3747330 - DNA, 25 bp, Homo sapien
gtgggcctgcgcacaaatccgcatg

SEQ ID NO: 3747331 - DNA, 25 bp, Homo sapien
tgcttactgtgccatgctgggaaag

SEQ ID NO: 3747332 - DNA, 25 bp, Homo sapien
gctcgttgtacaaaccatttgcaga

SEQ ID NO: 3747333 - DNA, 25 bp, Homo sapien
ggtgaggcccaacatgtacgcgaat

SEQ ID NO: 3747334 - DNA, 25 bp, Homo sapien
gcaagtgttttcacgatctgtctgg

SEQ ID NO: 3747335 - DNA, 25 bp, Homo sapien
aacaaaaccacacttaatcacccag

SEQ ID NO: 3747336 - DNA, 25 bp, Homo sapien
cttgttaccccaatcctcaaataca

SEQ ID NO: 3747337 - DNA, 25 bp, Homo sapien
cactaatgtcatttaaatggcttca

SEQ ID NO: 3747338 - DNA, 25 bp, Homo sapien
ggccattatattgaaaccaaaaaca

SEQ ID NO: 3747339 - DNA, 25 bp, Homo sapien
gactgaagaccactctgtgttccca

SEQ ID NO: 3747340 - DNA, 25 bp, Homo sapien
tacaagaagccaatccgtgctgctg

SEQ ID NO: 3747341 - DNA, 25 bp, Homo sapien
ttcccatctcaaggctacaagaagc

SEQ ID NO: 3747342 - DNA, 25 bp, Homo sapien
tgagcatgatgatgcacttgtttcc

SEQ ID NO: 3747343 - DNA, 25 bp, Homo sapien
aaagtaagtagtggacaattcccag

SEQ ID NO: 3747344 - DNA, 25 bp, Homo sapien
taatcttgctgtagagttgccatag

SEQ ID NO: 3747345 - DNA, 25 bp, Homo sapien
tcccaatgaccttagcgctttcaaa

SEQ ID NO: 3747346 - DNA, 25 bp, Homo sapien
ccaaacagctgggtgtatgtctcgt

SEQ ID NO: 3747347 - DNA, 25 bp, Homo sapien
gtattttagggacttcatcatggcc

SEQ ID NO: 3747348 - DNA, 25 bp, Homo sapien
cagctgtggtacatggaggccagcc

SEQ ID NO: 3747349 - DNA, 25 bp, Homo sapien
gatggttgcagctcgatactgacaa

SEQ ID NO: 3747350 - DNA, 25 bp, Homo sapien
gggctgtcgagcagacactgaatcc

SEQ ID NO: 3747351 - DNA, 25 bp, Homo sapien
tgaacagctacgtgtgccaacacag

SEQ ID NO: 3747352 - DNA, 25 bp, Homo sapien
tcatgtacaatcctgctggcactag

SEQ ID NO: 3747353 - DNA, 25 bp, Homo sapien
tcaacatggagcacaatgcggacat

SEQ ID NO: 3747354 - DNA, 25 bp, Homo sapien
aaaagccaagcaatctctcggaagg

SEQ ID NO: 3747355 - DNA, 25 bp, Homo sapien
ccccactgtgggtcttactaggtct

SEQ ID NO: 3747356 - DNA, 25 bp, Homo sapien
aaatccttcacggtaactacttcag

SEQ ID NO: 3747357 - DNA, 25 bp, Homo sapien
tcaggcttcactaagtgcttcttag

SEQ ID NO: 3747358 - DNA, 25 bp, Homo sapien
ggtaactacttcaggcttcactaag

SEQ ID NO: 3747359 - DNA, 25 bp, Homo sapien
tactctaagcagttcgcagggagca

SEQ ID NO: 3747360 - DNA, 25 bp, Homo sapien
tactctctctagctgtactctaagc

SEQ ID NO: 3747361 - DNA, 25 bp, Homo sapien
gctgaaacagctttgcggccttgct

SEQ ID NO: 3747362 - DNA, 25 bp, Homo sapien
gtaatgaagatctgccagcacccgg

SEQ ID NO: 3747363 - DNA, 25 bp, Homo sapien
gcacttcaaaacatgtagtgatttc

SEQ ID NO: 3747364 - DNA, 25 bp, Homo sapien
tactctaagacaatccagcactaag

SEQ ID NO: 3747365 - DNA, 25 bp, Homo sapien
taagccaatgcatacatatctgaga

SEQ ID NO: 3747366 - DNA, 25 bp, Homo sapien
tctacccgaagtcattaactatggg

SEQ ID NO: 3747367 - DNA, 25 bp, Homo sapien
cagaaggtaaccactaagtccttga

SEQ ID NO: 3747368 - DNA, 25 bp, Homo sapien
taacaatgggatttactgtggggac

SEQ ID NO: 3747369 - DNA, 25 bp, Homo sapien
gggtccttgggtcacaatggatagc

SEQ ID NO: 3747370 - DNA, 25 bp, Homo sapien
caatggatagcctaacaatgggatt

SEQ ID NO: 3747371 - DNA, 25 bp, Homo sapien
ctggataagctggaatgcgtgctca

SEQ ID NO: 3747372 - DNA, 25 bp, Homo sapien
tatcaagagccccagatagtgtttt

SEQ ID NO: 3747373 - DNA, 25 bp, Homo sapien
tggccaaattcttctataagctcct

SEQ ID NO: 3747374 - DNA, 25 bp, Homo sapien
gttctcaccattatatcaagagccc

SEQ ID NO: 3747375 - DNA, 25 bp, Homo sapien
agttgaagatagcagtttaatggac

SEQ ID NO: 3747376 - DNA, 25 bp, Homo sapien
gaagaaatgacaaccgagactcaaa

SEQ ID NO: 3747377 - DNA, 25 bp, Homo sapien
aaatatactgaggagtttcatcact

SEQ ID NO: 3747378 - DNA, 25 bp, Homo sapien
cacttcttctcgattgagactagga

SEQ ID NO: 3747379 - DNA, 25 bp, Homo sapien
caaacacagttatggtctcagcaca

SEQ ID NO: 3747380 - DNA, 25 bp, Homo sapien
gagctgtagaccactatcccctatg

SEQ ID NO: 3747381 - DNA, 25 bp, Homo sapien
tatcaggactaaaagaagggctatc

SEQ ID NO: 3747382 - DNA, 25 bp, Homo sapien
caagggaaaccatgtagtcatctca

SEQ ID NO: 3747383 - DNA, 25 bp, Homo sapien
tggatgccacgcaaggtcagattgg

SEQ ID NO: 3747384 - DNA, 25 bp, Homo sapien
taaagacagaccctctctaaggtgc

SEQ ID NO: 3747385 - DNA, 25 bp, Homo sapien
gacaatgaaccctgccaaccttagg

SEQ ID NO: 3747386 - DNA, 25 bp, Homo sapien
tacacacgaggactgctaggaaaac

SEQ ID NO: 3747387 - DNA, 25 bp, Homo sapien
catggtgcagaaccggaaaaagtct

SEQ ID NO: 3747388 - DNA, 25 bp, Homo sapien
gctggtgagaaagtatagggcctct

SEQ ID NO: 3747389 - DNA, 25 bp, Homo sapien
gccaactagcctgcaatctaaggag

SEQ ID NO: 3747390 - DNA, 25 bp, Homo sapien
tcaagcagggcaaactacaaggtca

SEQ ID NO: 3747391 - DNA, 25 bp, Homo sapien
gatccccatcgctgcctttagacat

SEQ ID NO: 3747392 - DNA, 25 bp, Homo sapien
tacagcaagtgactgttccaaatgc

SEQ ID NO: 3747393 - DNA, 25 bp, Homo sapien
gataccaggtaacaattccacaact

SEQ ID NO: 3747394 - DNA, 25 bp, Homo sapien
gagacccctggctcacataaccaga

SEQ ID NO: 3747395 - DNA, 25 bp, Homo sapien
taaagccactgttgtactgccgtct

SEQ ID NO: 3747396 - DNA, 25 bp, Homo sapien
gcaatgcctaccgacaattcagagg

SEQ ID NO: 3747397 - DNA, 25 bp, Homo sapien
aattctgtgtgaagactgcccctca

SEQ ID NO: 3747398 - DNA, 25 bp, Homo sapien
tccagaaaaccggacagtgacagcc

SEQ ID NO: 3747399 - DNA, 25 bp, Homo sapien
ctcaaaagctgggagtaaatgtgct

SEQ ID NO: 3747400 - DNA, 25 bp, Homo sapien
tctttccagaagagtcgcggtttta

SEQ ID NO: 3747401 - DNA, 25 bp, Homo sapien
gcccagcaggtggacgataacgttg

SEQ ID NO: 3747402 - DNA, 25 bp, Homo sapien
acggcattgctgctcgctgcactgc

SEQ ID NO: 3747403 - DNA, 25 bp, Homo sapien
cggctccgtgttgaaggcactgaca

SEQ ID NO: 3747404 - DNA, 25 bp, Homo sapien
cgtgtctgggacacggctctgtgca

SEQ ID NO: 3747405 - DNA, 25 bp, Homo sapien
tgttgaaggcactgacagcgtgtct

SEQ ID NO: 3747406 - DNA, 25 bp, Homo sapien
aaggcactgacagcgtgtctgggac

SEQ ID NO: 3747407 - DNA, 25 bp, Homo sapien
cactgaagcttatgaagaacacacc

SEQ ID NO: 3747408 - DNA, 25 bp, Homo sapien
gaaagtgtaactgcatcacagcagg

SEQ ID NO: 3747409 - DNA, 25 bp, Homo sapien
tatcttagacccgtgtagcttgaca

SEQ ID NO: 3747410 - DNA, 25 bp, Homo sapien
cagcaggtctgttaataccgaggta

SEQ ID NO: 3747411 - DNA, 25 bp, Homo sapien
aaggggtagtacctgttcttgatca

SEQ ID NO: 3747412 - DNA, 25 bp, Homo sapien
aggggtagtacctgttcttgatcaa

SEQ ID NO: 3747413 - DNA, 25 bp, Homo sapien
tcttaccttattcacagtttcaagt

SEQ ID NO: 3747414 - DNA, 25 bp, Homo sapien
tttcttaccttattcacagtttcaa

SEQ ID NO: 3747415 - DNA, 25 bp, Homo sapien
caaccaagtggacaaatggcaagag

SEQ ID NO: 3747416 - DNA, 25 bp, Homo sapien
taggtttatctagcagggcaaagac

SEQ ID NO: 3747417 - DNA, 25 bp, Homo sapien
gatgtgtgtacacttgctacaaggg

SEQ ID NO: 3747418 - DNA, 25 bp, Homo sapien
gaaacggaatgacagtggtcctgaa

SEQ ID NO: 3747419 - DNA, 25 bp, Homo sapien
ctcaggaacgggaggtggtctgcac

SEQ ID NO: 3747420 - DNA, 25 bp, Homo sapien
gaaccagtttgtgcgggagcccctg

SEQ ID NO: 3747421 - DNA, 25 bp, Homo sapien
cttgccccgcctcaggaacgggagg

SEQ ID NO: 3747422 - DNA, 25 bp, Homo sapien
ccaagccaaagccttgccccgcctc

SEQ ID NO: 3747423 - DNA, 25 bp, Homo sapien
tgagggataccaccagcaacgatga

SEQ ID NO: 3747424 - DNA, 25 bp, Homo sapien
gatgagcataattctcatccggagg

SEQ ID NO: 3747425 - DNA, 25 bp, Homo sapien
agctttctgagggataccaccagca

SEQ ID NO: 3747426 - DNA, 25 bp, Homo sapien
caccagcaacgatgagcataattct

SEQ ID NO: 3747427 - DNA, 25 bp, Homo sapien
ggctgggcttgctgaaaaactggac

SEQ ID NO: 3747428 - DNA, 25 bp, Homo sapien
aaaactggactgtagttctcttact

SEQ ID NO: 3747429 - DNA, 25 bp, Homo sapien
caggaagagctttggcccctaacat

SEQ ID NO: 3747430 - DNA, 25 bp, Homo sapien
tgctgaaaaactggactgtagttct

SEQ ID NO: 3747431 - DNA, 25 bp, Homo sapien
agcaaaggaggactcagccaggaca

SEQ ID NO: 3747432 - DNA, 25 bp, Homo sapien
gcaaaggaggactcagccaggacat

SEQ ID NO: 3747433 - DNA, 25 bp, Homo sapien
cagcaaaggaggactcagccaggac

SEQ ID NO: 3747434 - DNA, 25 bp, Homo sapien
cttatctgggagaatactggtctgc

SEQ ID NO: 3747435 - DNA, 25 bp, Homo sapien
ttatctgggagaatactggtctgca

SEQ ID NO: 3747436 - DNA, 25 bp, Homo sapien
agagccatcgcagtctaagagcagg

SEQ ID NO: 3747437 - DNA, 25 bp, Homo sapien
catcgcagtctaagagcagggcctg

SEQ ID NO: 3747438 - DNA, 25 bp, Homo sapien
gccatcgcagtctaagagcagggcc

SEQ ID NO: 3747439 - DNA, 25 bp, Homo sapien
atcgcagtctaagagcagggcctgg

SEQ ID NO: 3747440 - DNA, 25 bp, Homo sapien
tttcctctaaggtggtcccaggaga

SEQ ID NO: 3747441 - DNA, 25 bp, Homo sapien
caggagaggggtatatgccttggcc

SEQ ID NO: 3747442 - DNA, 25 bp, Homo sapien
tgagagtttcctctaaggtggtccc

SEQ ID NO: 3747443 - DNA, 25 bp, Homo sapien
tcccaggagaggggtatatgccttg

SEQ ID NO: 3747444 - DNA, 25 bp, Homo sapien
acgtccagcttgcggtcccatcttg

SEQ ID NO: 3747445 - DNA, 25 bp, Homo sapien
gtccagcttgcggtcccatcttgct

SEQ ID NO: 3747446 - DNA, 25 bp, Homo sapien
tccagcttgcggtcccatcttgctt

SEQ ID NO: 3747447 - DNA, 25 bp, Homo sapien
cgtccagcttgcggtcccatcttgc

SEQ ID NO: 3747448 - DNA, 25 bp, Homo sapien
cagcccatagtagccaagggggtga

SEQ ID NO: 3747449 - DNA, 25 bp, Homo sapien
gctgagtgcacgtcaaccccaatgc

SEQ ID NO: 3747450 - DNA, 25 bp, Homo sapien
aactacgaagaagctcggcgctgag

SEQ ID NO: 3747451 - DNA, 25 bp, Homo sapien
aagctcggcgctgagtgcacgtcaa

SEQ ID NO: 3747452 - DNA, 25 bp, Homo sapien
catcctcattttcgacttctttttc

SEQ ID NO: 3747453 - DNA, 25 bp, Homo sapien
ctcttcctcgtcgcgctggactggg

SEQ ID NO: 3747454 - DNA, 25 bp, Homo sapien
tttccacggcacgccgcttagacct

SEQ ID NO: 3747455 - DNA, 25 bp, Homo sapien
tcgtcaatgacctcgtcctcttcat

SEQ ID NO: 3747456 - DNA, 25 bp, Homo sapien
gagattaactggaccggactagacc

SEQ ID NO: 3747457 - DNA, 25 bp, Homo sapien
tatggctgcagtgtgttaaagaccg

SEQ ID NO: 3747458 - DNA, 25 bp, Homo sapien
ctaaagaggacgagaagaacacacc

SEQ ID NO: 3747459 - DNA, 25 bp, Homo sapien
gcttcagcctgagaactaaagagga

SEQ ID NO: 3747460 - DNA, 25 bp, Homo sapien
gaacatcgcagaggaaatcagacct

SEQ ID NO: 3747461 - DNA, 25 bp, Homo sapien
caaggccctggaattgcttagagca

SEQ ID NO: 3747462 - DNA, 25 bp, Homo sapien
cctggtacagggaacagcacaaact

SEQ ID NO: 3747463 - DNA, 25 bp, Homo sapien
tgtgccaggcactcaagatgaaaag

SEQ ID NO: 3747464 - DNA, 25 bp, Homo sapien
taatttcttaattccgtcataatca

SEQ ID NO: 3747465 - DNA, 25 bp, Homo sapien
ctgatagggaataagcttcaaattc

SEQ ID NO: 3747466 - DNA, 25 bp, Homo sapien
tcataatcattatctgatagggaat

SEQ ID NO: 3747467 - DNA, 25 bp, Homo sapien
cattatctgatagggaataagcttc

SEQ ID NO: 3747468 - DNA, 25 bp, Homo sapien
ctcctgaggagttaggactaacggt

SEQ ID NO: 3747469 - DNA, 25 bp, Homo sapien
tgaggagttaggactaacggtgtgt

SEQ ID NO: 3747470 - DNA, 25 bp, Homo sapien
cctgaggagttaggactaacggtgt

SEQ ID NO: 3747471 - DNA, 25 bp, Homo sapien
tcctgaggagttaggactaacggtg

SEQ ID NO: 3747472 - DNA, 25 bp, Homo sapien
taagagatctgttagttctgcagtg

SEQ ID NO: 3747473 - DNA, 25 bp, Homo sapien
agtgttcacaggagcctttagaaaa

SEQ ID NO: 3747474 - DNA, 25 bp, Homo sapien
tctgttgaattaagagatctgttag

SEQ ID NO: 3747475 - DNA, 25 bp, Homo sapien
acactcccaatatggttctgttgaa

SEQ ID NO: 3747476 - DNA, 25 bp, Homo sapien
cagccacctgggtaaaaagactaca

SEQ ID NO: 3747477 - DNA, 25 bp, Homo sapien
tgctgtcttctgaaacatccgtttg

SEQ ID NO: 3747478 - DNA, 25 bp, Homo sapien
aggcttatgaaaccaaaaacctcat

SEQ ID NO: 3747479 - DNA, 25 bp, Homo sapien
tatgaaaccaaaaacctcatcttca

SEQ ID NO: 3747480 - DNA, 25 bp, Homo sapien
tcttcatccatatcatcattgctgt

SEQ ID NO: 3747481 - DNA, 25 bp, Homo sapien
gaagcgtagaaccaactcttgaatt

SEQ ID NO: 3747482 - DNA, 25 bp, Homo sapien
ctggtacatgggcagagcgatctgt

SEQ ID NO: 3747483 - DNA, 25 bp, Homo sapien
gaatttgttcaacacactgggtacc

SEQ ID NO: 3747484 - DNA, 25 bp, Homo sapien
ctttcacttaggagaaggcccacag

SEQ ID NO: 3747485 - DNA, 25 bp, Homo sapien
aaagtagcacttcccacatggctta

SEQ ID NO: 3747486 - DNA, 25 bp, Homo sapien
attggttctgtgtgcccccgccagt

SEQ ID NO: 3747487 - DNA, 25 bp, Homo sapien
taatcagaaggtaaaagtagcactt

SEQ ID NO: 3747488 - DNA, 25 bp, Homo sapien
acatggcttattggttctgtgtgcc

SEQ ID NO: 3747489 - DNA, 25 bp, Homo sapien
ttggaattgttttttcctgcttcca

SEQ ID NO: 3747490 - DNA, 25 bp, Homo sapien
tgttttttcctgcttccacaaatgt

SEQ ID NO: 3747491 - DNA, 25 bp, Homo sapien
tttcctgcttccacaaatgtcttac

SEQ ID NO: 3747492 - DNA, 25 bp, Homo sapien
taacgcagctttctttttgttgcta

SEQ ID NO: 3747493 - DNA, 25 bp, Homo sapien
aaattcttcctctgcatttgcaaac

SEQ ID NO: 3747494 - DNA, 25 bp, Homo sapien
catagaaaaattcttcctctgcatt

SEQ ID NO: 3747495 - DNA, 25 bp, Homo sapien
ctcatagaaaaattcttcctctgca

SEQ ID NO: 3747496 - DNA, 25 bp, Homo sapien
attcttcctctgcatttgcaaacat

SEQ ID NO: 3747497 - DNA, 25 bp, Homo sapien
gacatccacgactaaggacacagag

SEQ ID NO: 3747498 - DNA, 25 bp, Homo sapien
aaagtccacatctgtaaaccccagg

SEQ ID NO: 3747499 - DNA, 25 bp, Homo sapien
gctaatgtctacctctccgcatggt

SEQ ID NO: 3747500 - DNA, 25 bp, Homo sapien
tcataaccacagtgcaggcaaggag

SEQ ID NO: 3747501 - DNA, 25 bp, Homo sapien
tatatggctgtccatcacagtacaa

SEQ ID NO: 3747502 - DNA, 25 bp, Homo sapien
gaatattctctggtatatggctgtc

SEQ ID NO: 3747503 - DNA, 25 bp, Homo sapien
gaggaagagagggtaagaatattct

SEQ ID NO: 3747504 - DNA, 25 bp, Homo sapien
ggctgtccatcacagtacaagctac

SEQ ID NO: 3747505 - DNA, 25 bp, Homo sapien
tatgttcccctcagagatacacttc

SEQ ID NO: 3747506 - DNA, 25 bp, Homo sapien
tgtgatatcatccaattcaggaaaa

SEQ ID NO: 3747507 - DNA, 25 bp, Homo sapien
tgtagcgctttagtcttctgcagaa

SEQ ID NO: 3747508 - DNA, 25 bp, Homo sapien
gaagggcacagctaaatttgtagcg

SEQ ID NO: 3747509 - DNA, 25 bp, Homo sapien
cagagtaaatctgcataccccgcca

SEQ ID NO: 3747510 - DNA, 25 bp, Homo sapien
gattttaaacccacatgaggaacag

SEQ ID NO: 3747511 - DNA, 25 bp, Homo sapien
tagcatcaggcttttgtgtgaagac

SEQ ID NO: 3747512 - DNA, 25 bp, Homo sapien
ccccaaatggtcaacctgaggtgtt

SEQ ID NO: 3747513 - DNA, 25 bp, Homo sapien
taacatcacagttcgcaagggcgtc

SEQ ID NO: 3747514 - DNA, 25 bp, Homo sapien
cgttcatcttgtcgcctggaattaa

SEQ ID NO: 3747515 - DNA, 25 bp, Homo sapien
caagggcgtcattggtacgtcatca

SEQ ID NO: 3747516 - DNA, 25 bp, Homo sapien
gagtagttgaacttgagaattgcct

SEQ ID NO: 3747517 - DNA, 25 bp, Homo sapien
atgtgtcagagacacatgggacaga

SEQ ID NO: 3747518 - DNA, 25 bp, Homo sapien
acatgggacagaaccctactttttg

SEQ ID NO: 3747519 - DNA, 25 bp, Homo sapien
catgggacagaaccctactttttgt

SEQ ID NO: 3747520 - DNA, 25 bp, Homo sapien
tgtgtcagagacacatgggacagaa

SEQ ID NO: 3747521 - DNA, 25 bp, Homo sapien
tatttcagtaatctgcctcctagtg

SEQ ID NO: 3747522 - DNA, 25 bp, Homo sapien
tacagcaagtagtggatcacctatc

SEQ ID NO: 3747523 - DNA, 25 bp, Homo sapien
tcccctgtgtcaacaatgaataagg

SEQ ID NO: 3747524 - DNA, 25 bp, Homo sapien
gggaagtgcccagacataatgtttg

SEQ ID NO: 3747525 - DNA, 25 bp, Homo sapien
tacaggtgcattgaccttgagagga

SEQ ID NO: 3747526 - DNA, 25 bp, Homo sapien
gacagtacctactaagggcaggcct

SEQ ID NO: 3747527 - DNA, 25 bp, Homo sapien
gcaggcctctgtggatgatacctaa

SEQ ID NO: 3747528 - DNA, 25 bp, Homo sapien
gatacctaagaaatgtccctgcctg

SEQ ID NO: 3747529 - DNA, 25 bp, Homo sapien
gctgtatcggaactggttccaatcc

SEQ ID NO: 3747530 - DNA, 25 bp, Homo sapien
tggacctccaagcacctcaggtttt

SEQ ID NO: 3747531 - DNA, 25 bp, Homo sapien
tcttcttgtgtctggacctccaagc

SEQ ID NO: 3747532 - DNA, 25 bp, Homo sapien
tgtgctgtatcggaactggttccaa

SEQ ID NO: 3747533 - DNA, 25 bp, Homo sapien
ttattctaatactgggggaacagac

SEQ ID NO: 3747534 - DNA, 25 bp, Homo sapien
gaaaactaactcaaagttcagcaaa

SEQ ID NO: 3747535 - DNA, 25 bp, Homo sapien
ttcattcatcctggcttgtatgttt

SEQ ID NO: 3747536 - DNA, 25 bp, Homo sapien
tgtcactagaggtgtttttccccaa

SEQ ID NO: 3747537 - DNA, 25 bp, Homo sapien
tagtgaggtattttaataggttaga

SEQ ID NO: 3747538 - DNA, 25 bp, Homo sapien
gatgaagtgctaacaatcgcagcca

SEQ ID NO: 3747539 - DNA, 25 bp, Homo sapien
catgcaggagggaaaagtccagtac

SEQ ID NO: 3747540 - DNA, 25 bp, Homo sapien
tacacacatgcgctgatcagtaggg

SEQ ID NO: 3747541 - DNA, 25 bp, Homo sapien
cctcctcggagcatgagctggacaa

SEQ ID NO: 3747542 - DNA, 25 bp, Homo sapien
cccagagagtcgagcaaatattcta

SEQ ID NO: 3747543 - DNA, 25 bp, Homo sapien
ggaagtacttttggctcctgaagcc

SEQ ID NO: 3747544 - DNA, 25 bp, Homo sapien
caggaggccacagcctaggttttta

SEQ ID NO: 3747545 - DNA, 25 bp, Homo sapien
tttttgcgtgcaacagtgcaggcgg

SEQ ID NO: 3747546 - DNA, 25 bp, Homo sapien
gtcatgaaggttccctggaaatcac

SEQ ID NO: 3747547 - DNA, 25 bp, Homo sapien
ggaaatcacttagagttgatcttga

SEQ ID NO: 3747548 - DNA, 25 bp, Homo sapien
gattgaattagtccagccttcagag

SEQ ID NO: 3747549 - DNA, 25 bp, Homo sapien
tgacagagcaattccaacagtcatg

SEQ ID NO: 3747550 - DNA, 25 bp, Homo sapien
ggtgccgagatgttttatccctcca

SEQ ID NO: 3747551 - DNA, 25 bp, Homo sapien
tcaaactctgaaagacactgagact

SEQ ID NO: 3747552 - DNA, 25 bp, Homo sapien
taatttaccattactaggtgccgag

SEQ ID NO: 3747553 - DNA, 25 bp, Homo sapien
tccaggagactatgagcctcctaaa

SEQ ID NO: 3747554 - DNA, 25 bp, Homo sapien
attttggcttataattgacgataaa

SEQ ID NO: 3747555 - DNA, 25 bp, Homo sapien
tttggcttataattgacgataaaat

SEQ ID NO: 3747556 - DNA, 25 bp, Homo sapien
ttttggcttataattgacgataaaa

SEQ ID NO: 3747557 - DNA, 25 bp, Homo sapien
tggcttataattgacgataaaattt

SEQ ID NO: 3747558 - DNA, 25 bp, Homo sapien
tcttaccccagagaacttactagaa

SEQ ID NO: 3747559 - DNA, 25 bp, Homo sapien
taaactgatctcttcttatgaacaa

SEQ ID NO: 3747560 - DNA, 25 bp, Homo sapien
cagagtaattagtatcttaccccag

SEQ ID NO: 3747561 - DNA, 25 bp, Homo sapien
taaggtactagcaaagcaaattgtt

SEQ ID NO: 3747562 - DNA, 25 bp, Homo sapien
caggagcacggttttgcccggcttt

SEQ ID NO: 3747563 - DNA, 25 bp, Homo sapien
cgtctcctgaatcgcgagagccagg

SEQ ID NO: 3747564 - DNA, 25 bp, Homo sapien
ctgcccgcagttggccgtggacgtt

SEQ ID NO: 3747565 - DNA, 25 bp, Homo sapien
cccctgacgggaagcgtggagcaat

SEQ ID NO: 3747566 - DNA, 25 bp, Homo sapien
accaaaagccgcaggaagtgaggga

SEQ ID NO: 3747567 - DNA, 25 bp, Homo sapien
agtgggcagaactaaagggacggcg

SEQ ID NO: 3747568 - DNA, 25 bp, Homo sapien
gtgagggagcgcgtgaggacccgcg

SEQ ID NO: 3747569 - DNA, 25 bp, Homo sapien
ggcgtcgctacggttgccctgacaa

SEQ ID NO: 3747570 - DNA, 25 bp, Homo sapien
tctctaaggcgggaatatacacagc

SEQ ID NO: 3747571 - DNA, 25 bp, Homo sapien
cctgccatcagtttgacataaaaca

SEQ ID NO: 3747572 - DNA, 25 bp, Homo sapien
aaaaattttagcgttcttgtatgct

SEQ ID NO: 3747573 - DNA, 25 bp, Homo sapien
aaaatgtagaatccaaagagctgta

SEQ ID NO: 3747574 - DNA, 25 bp, Homo sapien
tccaagagttcgagggtgtactgag

SEQ ID NO: 3747575 - DNA, 25 bp, Homo sapien
gtagtcacatctagccaggaggctc

SEQ ID NO: 3747576 - DNA, 25 bp, Homo sapien
tagtcacatctagccaggaggctca

SEQ ID NO: 3747577 - DNA, 25 bp, Homo sapien
caagagttcgagggtgtactgagct

SEQ ID NO: 3747578 - DNA, 25 bp, Homo sapien
gatttcatccaaaaggctgagcagt

SEQ ID NO: 3747579 - DNA, 25 bp, Homo sapien
actcgatttcatccaaaaggctgag

SEQ ID NO: 3747580 - DNA, 25 bp, Homo sapien
tttcatccaaaaggctgagcagtga

SEQ ID NO: 3747581 - DNA, 25 bp, Homo sapien
gttcactcgatttcatccaaaaggc

SEQ ID NO: 3747582 - DNA, 25 bp, Homo sapien
gactgcaggcctaatcaacatattg

SEQ ID NO: 3747583 - DNA, 25 bp, Homo sapien
tagcctcagtcaagccttcggatga

SEQ ID NO: 3747584 - DNA, 25 bp, Homo sapien
gccgtcttgaaattggatgccctag

SEQ ID NO: 3747585 - DNA, 25 bp, Homo sapien
tagccatgttaagtgagccgtcttg

SEQ ID NO: 3747586 - DNA, 25 bp, Homo sapien
agaacttcaataccaccccaggcaa

SEQ ID NO: 3747587 - DNA, 25 bp, Homo sapien
ggaaatctataatcgtaaacacatg

SEQ ID NO: 3747588 - DNA, 25 bp, Homo sapien
gatggcacactttctctcaggtata

SEQ ID NO: 3747589 - DNA, 25 bp, Homo sapien
cttgtgggatgtgactaactctggg

SEQ ID NO: 3747590 - DNA, 25 bp, Homo sapien
tgcaagaatgagacttttcactaac

SEQ ID NO: 3747591 - DNA, 25 bp, Homo sapien
catggtggttacctgtaggacagga

SEQ ID NO: 3747592 - DNA, 25 bp, Homo sapien
caatagcaaacgtctggaaacaaac

SEQ ID NO: 3747593 - DNA, 25 bp, Homo sapien
aacaaactggatgtccatcagcagt

SEQ ID NO: 3747594 - DNA, 25 bp, Homo sapien
ttggttaacatcaagctacttcggt

SEQ ID NO: 3747595 - DNA, 25 bp, Homo sapien
ccacaggttttatgaggtagcaaca

SEQ ID NO: 3747596 - DNA, 25 bp, Homo sapien
gtctgatctgttgagggctagtgca

SEQ ID NO: 3747597 - DNA, 25 bp, Homo sapien
tgggcaatagcagaaccacaggttt

SEQ ID NO: 3747598 - DNA, 25 bp, Homo sapien
atcctgtgtattccacaaagacttg

SEQ ID NO: 3747599 - DNA, 25 bp, Homo sapien
ggaagaaacagcatcgtgctgggag

SEQ ID NO: 3747600 - DNA, 25 bp, Homo sapien
gcctgagcgagtcccttcatggtca

SEQ ID NO: 3747601 - DNA, 25 bp, Homo sapien
cttccttctggcttgtcggatattc

SEQ ID NO: 3747602 - DNA, 25 bp, Homo sapien
tctggcttgtcggatattctcctaa

SEQ ID NO: 3747603 - DNA, 25 bp, Homo sapien
tattctcctaaatggcctgagcgag

SEQ ID NO: 3747604 - DNA, 25 bp, Homo sapien
tgtcacaatgactcacatcttcacg

SEQ ID NO: 3747605 - DNA, 25 bp, Homo sapien
gtatcacgacatcagtgttgaacaa

SEQ ID NO: 3747606 - DNA, 25 bp, Homo sapien
gaatcccagcaattctggctggtga

SEQ ID NO: 3747607 - DNA, 25 bp, Homo sapien
cacatcttcacgtccttgtatcacg

SEQ ID NO: 3747608 - DNA, 25 bp, Homo sapien
accaatttcagggttctagatactg

SEQ ID NO: 3747609 - DNA, 25 bp, Homo sapien
tttcagggttctagatactgaggga

SEQ ID NO: 3747610 - DNA, 25 bp, Homo sapien
gttctagatactgagggatacatgt

SEQ ID NO: 3747611 - DNA, 25 bp, Homo sapien
cagggttctagatactgagggatac

SEQ ID NO: 3747612 - DNA, 25 bp, Homo sapien
aaccaaatggtacattgagtacatt

SEQ ID NO: 3747613 - DNA, 25 bp, Homo sapien
aaagactttatgacatatatggcaa

SEQ ID NO: 3747614 - DNA, 25 bp, Homo sapien
caaatggtacattgagtacattacc

SEQ ID NO: 3747615 - DNA, 25 bp, Homo sapien
ttaaaccaaatggtacattgagtac

SEQ ID NO: 3747616 - DNA, 25 bp, Homo sapien
gatgtaatactatgtacaacaaact

SEQ ID NO: 3747617 - DNA, 25 bp, Homo sapien
gatcccagtataattcaatgctgtg

SEQ ID NO: 3747618 - DNA, 25 bp, Homo sapien
gctgtgatgagtcactttgcccacg

SEQ ID NO: 3747619 - DNA, 25 bp, Homo sapien
tgcccacgacaggtggatgaggctt

SEQ ID NO: 3747620 - DNA, 25 bp, Homo sapien
gctttcttttccagatcccagtata

SEQ ID NO: 3747621 - DNA, 25 bp, Homo sapien
atgataccataagtgtgcattttgg

SEQ ID NO: 3747622 - DNA, 25 bp, Homo sapien
tcaatcgagaacctgaaccactgct

SEQ ID NO: 3747623 - DNA, 25 bp, Homo sapien
gggtcttcttcttcaatcgagaacc

SEQ ID NO: 3747624 - DNA, 25 bp, Homo sapien
gtataaatgataccataagtgtgca

SEQ ID NO: 3747625 - DNA, 25 bp, Homo sapien
gctaatcaggaagtaaggcaaagtg

SEQ ID NO: 3747626 - DNA, 25 bp, Homo sapien
cagctaatcaggaagtaaggcaaag

SEQ ID NO: 3747627 - DNA, 25 bp, Homo sapien
acagaaatcattccagctaatcagg

SEQ ID NO: 3747628 - DNA, 25 bp, Homo sapien
agaaatcattccagctaatcaggaa

SEQ ID NO: 3747629 - DNA, 25 bp, Homo sapien
gacccaacacttgtcctagagggag

SEQ ID NO: 3747630 - DNA, 25 bp, Homo sapien
tgggatgtagtcctgaaccagctca

SEQ ID NO: 3747631 - DNA, 25 bp, Homo sapien
agtgtgtggctaaagaacagaccca

SEQ ID NO: 3747632 - DNA, 25 bp, Homo sapien
tctggatcaggtgggtgagctaaca

SEQ ID NO: 3747633 - DNA, 25 bp, Homo sapien
cctgctttgctgaactccgagagaa

SEQ ID NO: 3747634 - DNA, 25 bp, Homo sapien
gcactctctgataagacagcagaag

SEQ ID NO: 3747635 - DNA, 25 bp, Homo sapien
ttccaggacacagccgatggatcct

SEQ ID NO: 3747636 - DNA, 25 bp, Homo sapien
taacaccaggtagcttaatctgcac

SEQ ID NO: 3747637 - DNA, 25 bp, Homo sapien
gacactgagacgagtgggctgtact

SEQ ID NO: 3747638 - DNA, 25 bp, Homo sapien
tgggctgtactcacactccccagag

SEQ ID NO: 3747639 - DNA, 25 bp, Homo sapien
tcaggcgaaatctgtacagcgtcct

SEQ ID NO: 3747640 - DNA, 25 bp, Homo sapien
ggttccagaccttcaacaacatgct

SEQ ID NO: 3747641 - DNA, 25 bp, Homo sapien
cgtgaccccaggaatcgggtttgtg

SEQ ID NO: 3747642 - DNA, 25 bp, Homo sapien
gtttgtgtggcgagttaagacgcac

SEQ ID NO: 3747643 - DNA, 25 bp, Homo sapien
tgaccccaggaatcgggtttgtgtg

SEQ ID NO: 3747644 - DNA, 25 bp, Homo sapien
tggcgagttaagacgcacaccctgg

SEQ ID NO: 3747645 - DNA, 25 bp, Homo sapien
ggattctccgtggatgcagcagcac

SEQ ID NO: 3747646 - DNA, 25 bp, Homo sapien
tccgtggatgcagcagcactgttcg

SEQ ID NO: 3747647 - DNA, 25 bp, Homo sapien
aggattctccgtggatgcagcagca

SEQ ID NO: 3747648 - DNA, 25 bp, Homo sapien
ggatgcagcagcactgttcgttcac

SEQ ID NO: 3747649 - DNA, 25 bp, Homo sapien
ctgtgttttcagtgggtgggccgtg

SEQ ID NO: 3747650 - DNA, 25 bp, Homo sapien
gggccgtggagaacacttgtgacca

SEQ ID NO: 3747651 - DNA, 25 bp, Homo sapien
ggagaacacttgtgaccatcctaat

SEQ ID NO: 3747652 - DNA, 25 bp, Homo sapien
cacttgtgaccatcctaatttttac

SEQ ID NO: 3747653 - DNA, 25 bp, Homo sapien
gaggtgggggaatactgctctgtac

SEQ ID NO: 3747654 - DNA, 25 bp, Homo sapien
atagaggtgggggaatactgctctg

SEQ ID NO: 3747655 - DNA, 25 bp, Homo sapien
tcatagaggtgggggaatactgctc

SEQ ID NO: 3747656 - DNA, 25 bp, Homo sapien
agaggtgggggaatactgctctgta

SEQ ID NO: 3747657 - DNA, 25 bp, Homo sapien
atcgtccatcctttcggagcccgca

SEQ ID NO: 3747658 - DNA, 25 bp, Homo sapien
catcctttcggagcccgcaatgtag

SEQ ID NO: 3747659 - DNA, 25 bp, Homo sapien
ttcggagcccgcaatgtaggtgaga

SEQ ID NO: 3747660 - DNA, 25 bp, Homo sapien
agacaaatacttaagatgcaagaag

SEQ ID NO: 3747661 - DNA, 25 bp, Homo sapien
aaggaactcccacaagctacagatg

SEQ ID NO: 3747662 - DNA, 25 bp, Homo sapien
tttattaaggaactcccacaagcta

SEQ ID NO: 3747663 - DNA, 25 bp, Homo sapien
aactcccacaagctacagatggcca

SEQ ID NO: 3747664 - DNA, 25 bp, Homo sapien
ttaaggaactcccacaagctacaga

SEQ ID NO: 3747665 - DNA, 25 bp, Homo sapien
tggtcttgaggaagccatcgctcat

SEQ ID NO: 3747666 - DNA, 25 bp, Homo sapien
gtgagcaggggcaccgaggagaagg

SEQ ID NO: 3747667 - DNA, 25 bp, Homo sapien
cagagcagggcagagtggtcttgag

SEQ ID NO: 3747668 - DNA, 25 bp, Homo sapien
gcagagtggtcttgaggaagccatc

SEQ ID NO: 3747669 - DNA, 25 bp, Homo sapien
aataaagggctatgtagaagccacc

SEQ ID NO: 3747670 - DNA, 25 bp, Homo sapien
ggtgacagtacagcagctaccatcg

SEQ ID NO: 3747671 - DNA, 25 bp, Homo sapien
taccatcgtcagtggatacagcccc

SEQ ID NO: 3747672 - DNA, 25 bp, Homo sapien
tagcacctgacacatcgtaagtacc

SEQ ID NO: 3747673 - DNA, 25 bp, Homo sapien
ggcagaagggcttcgacccacagga

SEQ ID NO: 3747674 - DNA, 25 bp, Homo sapien
gaaaagccaattaggggagagagct

SEQ ID NO: 3747675 - DNA, 25 bp, Homo sapien
agaagggcttcgacccacaggaagg

SEQ ID NO: 3747676 - DNA, 25 bp, Homo sapien
gagagcttgccaaccagcgaagacc

SEQ ID NO: 3747677 - DNA, 25 bp, Homo sapien
taataaatgtctcctacaagcaagg

SEQ ID NO: 3747678 - DNA, 25 bp, Homo sapien
ggaaataatcctttcagatttcata

SEQ ID NO: 3747679 - DNA, 25 bp, Homo sapien
gaaaacctcagcaattgtcacaata

SEQ ID NO: 3747680 - DNA, 25 bp, Homo sapien
tacagtattgctttgtgaatgttac

SEQ ID NO: 3747681 - DNA, 25 bp, Homo sapien
ccttgaagtattcggaccagcaaat

SEQ ID NO: 3747682 - DNA, 25 bp, Homo sapien
cagcccggtgcaagtgctcactact

SEQ ID NO: 3747683 - DNA, 25 bp, Homo sapien
ttcggaccagcaaatcttcatcatt

SEQ ID NO: 3747684 - DNA, 25 bp, Homo sapien
actgacagcccggtgcaagtgctca

SEQ ID NO: 3747685 - DNA, 25 bp, Homo sapien
aaaacaactgacagagttctctcac

SEQ ID NO: 3747686 - DNA, 25 bp, Homo sapien
gcaaccatcagagcggtaaagccaa

SEQ ID NO: 3747687 - DNA, 25 bp, Homo sapien
cagagcggtaaagccaaacttattg

SEQ ID NO: 3747688 - DNA, 25 bp, Homo sapien
attgggaacatcaaccttaacacgg

SEQ ID NO: 3747689 - DNA, 25 bp, Homo sapien
tcctttctgggcagcaaccatcaga

SEQ ID NO: 3747690 - DNA, 25 bp, Homo sapien
acgtctgtgccattagaaactagga

SEQ ID NO: 3747691 - DNA, 25 bp, Homo sapien
ccattcttcagattcacgtctgtgc

SEQ ID NO: 3747692 - DNA, 25 bp, Homo sapien
cagattcacgtctgtgccattagaa

SEQ ID NO: 3747693 - DNA, 25 bp, Homo sapien
tcttcagattcacgtctgtgccatt

SEQ ID NO: 3747694 - DNA, 25 bp, Homo sapien
tgaacctcgaaacactgtgctgaaa

SEQ ID NO: 3747695 - DNA, 25 bp, Homo sapien
ctgcaacatatggaagaagcggcat

SEQ ID NO: 3747696 - DNA, 25 bp, Homo sapien
gaagcggcatttgacaataagcaca

SEQ ID NO: 3747697 - DNA, 25 bp, Homo sapien
aactagcaggtgagcggttgcctgc

SEQ ID NO: 3747698 - DNA, 25 bp, Homo sapien
tcccaggtctctagcctgccaagaa

SEQ ID NO: 3747699 - DNA, 25 bp, Homo sapien
tatcatccactcaatcacactgcag

SEQ ID NO: 3747700 - DNA, 25 bp, Homo sapien
aacatctaggtgtcccgcatagcac

SEQ ID NO: 3747701 - DNA, 25 bp, Homo sapien
gccaagaagcgccatgtcttcggag

SEQ ID NO: 3747702 - DNA, 25 bp, Homo sapien
gtggtgattggctctcaagtccttc

SEQ ID NO: 3747703 - DNA, 25 bp, Homo sapien
gcttcagaagcatcaggtgagccac

SEQ ID NO: 3747704 - DNA, 25 bp, Homo sapien
ggtgattggctctcaagtccttccc

SEQ ID NO: 3747705 - DNA, 25 bp, Homo sapien
catgggcttcagaagcatcaggtga

SEQ ID NO: 3747706 - DNA, 25 bp, Homo sapien
gagaggccaccctctgatttcccga

SEQ ID NO: 3747707 - DNA, 25 bp, Homo sapien
caccgcagagactctcatgagtggg

SEQ ID NO: 3747708 - DNA, 25 bp, Homo sapien
gcatcaattagaagagaggccaccc

SEQ ID NO: 3747709 - DNA, 25 bp, Homo sapien
tctgatttcccgacaccgcagagac

SEQ ID NO: 3747710 - DNA, 25 bp, Homo sapien
tttgtcaagaagtaactgaactaac

SEQ ID NO: 3747711 - DNA, 25 bp, Homo sapien
ttgtcaagaagtaactgaactaact

SEQ ID NO: 3747712 - DNA, 25 bp, Homo sapien
gtcaagaagtaactgaactaactct

SEQ ID NO: 3747713 - DNA, 25 bp, Homo sapien
tgtcaagaagtaactgaactaactc

SEQ ID NO: 3747714 - DNA, 25 bp, Homo sapien
caaaaattttacatgcttataaatg

SEQ ID NO: 3747715 - DNA, 25 bp, Homo sapien
atgcttataaatgttttctccccct

SEQ ID NO: 3747716 - DNA, 25 bp, Homo sapien
acaacaaaaattttacatgcttata

SEQ ID NO: 3747717 - DNA, 25 bp, Homo sapien
tgcttataaatgttttctccccctc

SEQ ID NO: 3747718 - DNA, 25 bp, Homo sapien
gccatttctaggacacctttgccga

SEQ ID NO: 3747719 - DNA, 25 bp, Homo sapien
ctggccatttctaggacacctttgc

SEQ ID NO: 3747720 - DNA, 25 bp, Homo sapien
ggccatttctaggacacctttgccg

SEQ ID NO: 3747721 - DNA, 25 bp, Homo sapien
ccatttctaggacacctttgccgaa

SEQ ID NO: 3747722 - DNA, 25 bp, Homo sapien
cttgataggcagaaagagcatccca

SEQ ID NO: 3747723 - DNA, 25 bp, Homo sapien
ccttgataggcagaaagagcatccc

SEQ ID NO: 3747724 - DNA, 25 bp, Homo sapien
tgataggcagaaagagcatcccaac

SEQ ID NO: 3747725 - DNA, 25 bp, Homo sapien
gccttgataggcagaaagagcatcc

SEQ ID NO: 3747726 - DNA, 25 bp, Homo sapien
ggtggtttttctgagtctagaagga

SEQ ID NO: 3747727 - DNA, 25 bp, Homo sapien
gacacaagacttctttggcctctgc

SEQ ID NO: 3747728 - DNA, 25 bp, Homo sapien
gcagacacaagacttctttggcctc

SEQ ID NO: 3747729 - DNA, 25 bp, Homo sapien
cacaagacttctttggcctctgctt

SEQ ID NO: 3747730 - DNA, 25 bp, Homo sapien
agcagacacaagacttctttggcct

SEQ ID NO: 3747731 - DNA, 25 bp, Homo sapien
tctaactccaaaaggcgcaagtgca

SEQ ID NO: 3747732 - DNA, 25 bp, Homo sapien
taaactcatgtggtctgtgtgctca

SEQ ID NO: 3747733 - DNA, 25 bp, Homo sapien
ggaaagaattccaacaaggcctagc

SEQ ID NO: 3747734 - DNA, 25 bp, Homo sapien
tagcatggtagaaggacagcttgcg

SEQ ID NO: 3747735 - DNA, 25 bp, Homo sapien
gattctcctataaggtaactcttta

SEQ ID NO: 3747736 - DNA, 25 bp, Homo sapien
aagcagtttctctgttccccatgat

SEQ ID NO: 3747737 - DNA, 25 bp, Homo sapien
aatcctccaaagaataagtatcatg

SEQ ID NO: 3747738 - DNA, 25 bp, Homo sapien
tctttagtcctccatttagcacatt

SEQ ID NO: 3747739 - DNA, 25 bp, Homo sapien
atgcccaaagcccaaccttctccag

SEQ ID NO: 3747740 - DNA, 25 bp, Homo sapien
gtttgacagtcaaatcactacttcc

SEQ ID NO: 3747741 - DNA, 25 bp, Homo sapien
tactttagatcagccaaagtggtga

SEQ ID NO: 3747742 - DNA, 25 bp, Homo sapien
tacttccattgctactttagatcag

SEQ ID NO: 3747743 - DNA, 25 bp, Homo sapien
gactagacacaaagtagcccagagg

SEQ ID NO: 3747744 - DNA, 25 bp, Homo sapien
tagggccatcacctggaaagtcaat

SEQ ID NO: 3747745 - DNA, 25 bp, Homo sapien
taatcagatgtgtagcaaccgaggg

SEQ ID NO: 3747746 - DNA, 25 bp, Homo sapien
cacacaggaggttacatttcacagc

SEQ ID NO: 3747747 - DNA, 25 bp, Homo sapien
ggccatggctgatgacacattctta

SEQ ID NO: 3747748 - DNA, 25 bp, Homo sapien
caatatggacagtattaatccttcc

SEQ ID NO: 3747749 - DNA, 25 bp, Homo sapien
tgatcttatgccatgtcatcaatgg

SEQ ID NO: 3747750 - DNA, 25 bp, Homo sapien
tcagagagccaggagagtttgatat

SEQ ID NO: 3747751 - DNA, 25 bp, Homo sapien
tgaaacatattgatgccgccccagc

SEQ ID NO: 3747752 - DNA, 25 bp, Homo sapien
agccctgcatgagctcgtcagggat

SEQ ID NO: 3747753 - DNA, 25 bp, Homo sapien
ggtagaccgaatttgcacagtgaaa

SEQ ID NO: 3747754 - DNA, 25 bp, Homo sapien
gcatgagctcgtcagggatctctgg

SEQ ID NO: 3747755 - DNA, 25 bp, Homo sapien
gcagtaccagtttgagaccacttta

SEQ ID NO: 3747756 - DNA, 25 bp, Homo sapien
tcttcaaggcctaggatgcaggtgt

SEQ ID NO: 3747757 - DNA, 25 bp, Homo sapien
tggcttggagcttattgaaataccc

SEQ ID NO: 3747758 - DNA, 25 bp, Homo sapien
agaatgctccttgtagtatcctggg

SEQ ID NO: 3747759 - DNA, 25 bp, Homo sapien
caattaggattgttgtgtcatctta

SEQ ID NO: 3747760 - DNA, 25 bp, Homo sapien
tgtctctgtttagctctggtaatct

SEQ ID NO: 3747761 - DNA, 25 bp, Homo sapien
tcatcttagtaaagtgaccctttta

SEQ ID NO: 3747762 - DNA, 25 bp, Homo sapien
catcattcatgattgcagcaaacag

SEQ ID NO: 3747763 - DNA, 25 bp, Homo sapien
gtaactgcatcacggcgatcaccag

SEQ ID NO: 3747764 - DNA, 25 bp, Homo sapien
gatgtgaagtacaccctgatccttg

SEQ ID NO: 3747765 - DNA, 25 bp, Homo sapien
gaaaggactgttgcacacttacctg

SEQ ID NO: 3747766 - DNA, 25 bp, Homo sapien
cctgtgatcactactaagggtctga

SEQ ID NO: 3747767 - DNA, 25 bp, Homo sapien
agaagcaggcacatcacgcggccgg

SEQ ID NO: 3747768 - DNA, 25 bp, Homo sapien
tcccaagaatagcaccaaggtgatg

SEQ ID NO: 3747769 - DNA, 25 bp, Homo sapien
gaattataattctacatgagacttg

SEQ ID NO: 3747770 - DNA, 25 bp, Homo sapien
ggattcccaagtagagatccagtgt

SEQ ID NO: 3747771 - DNA, 25 bp, Homo sapien
gtcagataatatgatacctctggct

SEQ ID NO: 3747772 - DNA, 25 bp, Homo sapien
tcagataatatgatacctctggctt

SEQ ID NO: 3747773 - DNA, 25 bp, Homo sapien
tgccgtcagcactcagacagatgtg

SEQ ID NO: 3747774 - DNA, 25 bp, Homo sapien
tcacacagttatgtcggctccaagc

SEQ ID NO: 3747775 - DNA, 25 bp, Homo sapien
gggaacctagactcagtgcgtgttt

SEQ ID NO: 3747776 - DNA, 25 bp, Homo sapien
tctggatggattcccatccccggtt

SEQ ID NO: 3747777 - DNA, 25 bp, Homo sapien
cctcaggctagctggatgaatccca

SEQ ID NO: 3747778 - DNA, 25 bp, Homo sapien
tgcagctcattagggtctcaacagg

SEQ ID NO: 3747779 - DNA, 25 bp, Homo sapien
gctcagcgtccagttataaggcagt

SEQ ID NO: 3747780 - DNA, 25 bp, Homo sapien
ccatgaggaggagtcacgaggcttt

SEQ ID NO: 3747781 - DNA, 25 bp, Homo sapien
tctgtacataatccatggagacctg

SEQ ID NO: 3747782 - DNA, 25 bp, Homo sapien
cattcttgagttccacattgccctg

SEQ ID NO: 3747783 - DNA, 25 bp, Homo sapien
gaactgggcacatgtagacttcagc

SEQ ID NO: 3747784 - DNA, 25 bp, Homo sapien
cattgccctggtggtaacttcagtg

SEQ ID NO: 3747785 - DNA, 25 bp, Homo sapien
ttcaactgacgagtgtgtccccagc

SEQ ID NO: 3747786 - DNA, 25 bp, Homo sapien
gccacagttgtcacacggatgctga

SEQ ID NO: 3747787 - DNA, 25 bp, Homo sapien
ggtctatactggcaaatggcttcaa

SEQ ID NO: 3747788 - DNA, 25 bp, Homo sapien
tccccagctgccaactgggagttgg

SEQ ID NO: 3747789 - DNA, 25 bp, Homo sapien
tctgcaagtcatattcaccgagccc

SEQ ID NO: 3747790 - DNA, 25 bp, Homo sapien
gtaataaattgcaggttggaaggag

SEQ ID NO: 3747791 - DNA, 25 bp, Homo sapien
actgataggtgttagggacacagct

SEQ ID NO: 3747792 - DNA, 25 bp, Homo sapien
tgaacaggacaagcctgtttcttgc

SEQ ID NO: 3747793 - DNA, 25 bp, Homo sapien
gcattaaggtcattgtgtgtaaaga

SEQ ID NO: 3747794 - DNA, 25 bp, Homo sapien
gctgtggatcagaatgattttccca

SEQ ID NO: 3747795 - DNA, 25 bp, Homo sapien
ctgctgtggatcagaatgattttcc

SEQ ID NO: 3747796 - DNA, 25 bp, Homo sapien
tgctgtggatcagaatgattttccc

SEQ ID NO: 3747797 - DNA, 25 bp, Homo sapien
actgctgtggatcagaatgattttc

SEQ ID NO: 3747798 - DNA, 25 bp, Homo sapien
gggtctaactgatttaagccaggca

SEQ ID NO: 3747799 - DNA, 25 bp, Homo sapien
tccagccagcgtaggcagaagagag

SEQ ID NO: 3747800 - DNA, 25 bp, Homo sapien
taagtagactgcagcggagacctgc

SEQ ID NO: 3747801 - DNA, 25 bp, Homo sapien
catgtaaaacaaggagctgactctc

SEQ ID NO: 3747802 - DNA, 25 bp, Homo sapien
tcaaggtcaccagactcctccacca

SEQ ID NO: 3747803 - DNA, 25 bp, Homo sapien
caaggtcaccagactcctccaccat

SEQ ID NO: 3747804 - DNA, 25 bp, Homo sapien
ctgctgcatctccattgtcaaggtc

SEQ ID NO: 3747805 - DNA, 25 bp, Homo sapien
ctgcatctccattgtcaaggtcacc

SEQ ID NO: 3747806 - DNA, 25 bp, Homo sapien
tccccaccagcgcagctcattcttc

SEQ ID NO: 3747807 - DNA, 25 bp, Homo sapien
accagcgcagctcattcttccccat

SEQ ID NO: 3747808 - DNA, 25 bp, Homo sapien
ttttccccaccagcgcagctcattc

SEQ ID NO: 3747809 - DNA, 25 bp, Homo sapien
cccaccagcgcagctcattcttccc

SEQ ID NO: 3747810 - DNA, 25 bp, Homo sapien
caggtcccttccgtgtttggcggct

SEQ ID NO: 3747811 - DNA, 25 bp, Homo sapien
taggcggaagatgccaatctacatc

SEQ ID NO: 3747812 - DNA, 25 bp, Homo sapien
tatcttgcaggaccccctgctttgg

SEQ ID NO: 3747813 - DNA, 25 bp, Homo sapien
tgctttgggctaggcggaagatgcc

SEQ ID NO: 3747814 - DNA, 25 bp, Homo sapien
gtcatcagccccgatatcttgcagg

SEQ ID NO: 3747815 - DNA, 25 bp, Homo sapien
caattaatacaagttcttcaccgag

SEQ ID NO: 3747816 - DNA, 25 bp, Homo sapien
ttctgcctcaaagcaccaattaata

SEQ ID NO: 3747817 - DNA, 25 bp, Homo sapien
tggcttccgccacggccaagaaaat

SEQ ID NO: 3747818 - DNA, 25 bp, Homo sapien
tcaatttttaagagagctcagctgg

SEQ ID NO: 3747819 - DNA, 25 bp, Homo sapien
tacaggaagtattcttctgttttcc

SEQ ID NO: 3747820 - DNA, 25 bp, Homo sapien
caggaagtattcttctgttttcctt

SEQ ID NO: 3747821 - DNA, 25 bp, Homo sapien
acaggaagtattcttctgttttcct

SEQ ID NO: 3747822 - DNA, 25 bp, Homo sapien
ttacaggaagtattcttctgttttc

SEQ ID NO: 3747823 - DNA, 25 bp, Homo sapien
gggccgctgttacctggcgtgccat

SEQ ID NO: 3747824 - DNA, 25 bp, Homo sapien
cagcagggccgctgttacctggcgt

SEQ ID NO: 3747825 - DNA, 25 bp, Homo sapien
tggcagcagggccgctgttacctgg

SEQ ID NO: 3747826 - DNA, 25 bp, Homo sapien
cacctggcagcagggccgctgttac

SEQ ID NO: 3747827 - DNA, 25 bp, Homo sapien
tccagtcctcatggagtcccgaaga

SEQ ID NO: 3747828 - DNA, 25 bp, Homo sapien
gacgtcctcgtacccttgttgtaca

SEQ ID NO: 3747829 - DNA, 25 bp, Homo sapien
ataaggcagggctcgtgacgtcctc

SEQ ID NO: 3747830 - DNA, 25 bp, Homo sapien
tcactaaagttttgattccagtcct

SEQ ID NO: 3747831 - DNA, 25 bp, Homo sapien
gctcaggggacagcgtcatctggta

SEQ ID NO: 3747832 - DNA, 25 bp, Homo sapien
acagcgtcatctggtactcagagta

SEQ ID NO: 3747833 - DNA, 25 bp, Homo sapien
ttcttggatgctcatctcacactcc

SEQ ID NO: 3747834 - DNA, 25 bp, Homo sapien
gggacagcgtcatctggtactcaga

SEQ ID NO: 3747835 - DNA, 25 bp, Homo sapien
tttgctttgcaaggatgcgtgccag

SEQ ID NO: 3747836 - DNA, 25 bp, Homo sapien
tgctttgcaaggatgcgtgccaggc

SEQ ID NO: 3747837 - DNA, 25 bp, Homo sapien
ctttgcaaggatgcgtgccaggcac

SEQ ID NO: 3747838 - DNA, 25 bp, Homo sapien
gagatgaaaactgagtctgtttgta

SEQ ID NO: 3747839 - DNA, 25 bp, Homo sapien
caagcctgagagttaacgtagtacc

SEQ ID NO: 3747840 - DNA, 25 bp, Homo sapien
cgtagtacccggaggatcccgagat

SEQ ID NO: 3747841 - DNA, 25 bp, Homo sapien
gttgagtgttgcatctggaaagtcc

SEQ ID NO: 3747842 - DNA, 25 bp, Homo sapien
tgggagattcagtcatcgagttgag

SEQ ID NO: 3747843 - DNA, 25 bp, Homo sapien
tttatagaatgaccagcacggcgcc

SEQ ID NO: 3747844 - DNA, 25 bp, Homo sapien
cattggtcaacaggagctgctgcta

SEQ ID NO: 3747845 - DNA, 25 bp, Homo sapien
aaggaccttccccatagagggtcag

SEQ ID NO: 3747846 - DNA, 25 bp, Homo sapien
tgaaatggagttcaccacgcagaga

SEQ ID NO: 3747847 - DNA, 25 bp, Homo sapien
cccatcaagtgccccaatgatgtgg

SEQ ID NO: 3747848 - DNA, 25 bp, Homo sapien
gcccatcaagtgccccaatgatgtg

SEQ ID NO: 3747849 - DNA, 25 bp, Homo sapien
ccatcaagtgccccaatgatgtgga

SEQ ID NO: 3747850 - DNA, 25 bp, Homo sapien
catcaagtgccccaatgatgtggag

SEQ ID NO: 3747851 - DNA, 25 bp, Homo sapien
tacgagatcataaaagtccacagcc

SEQ ID NO: 3747852 - DNA, 25 bp, Homo sapien
gctgccttcgcacaatctcatggaa

SEQ ID NO: 3747853 - DNA, 25 bp, Homo sapien
aggagacgcccacgctctgtgaagt

SEQ ID NO: 3747854 - DNA, 25 bp, Homo sapien
gagagagcacttccgtacctattcc

SEQ ID NO: 3747855 - DNA, 25 bp, Homo sapien
ggaacatggtaacactggcctgctt

SEQ ID NO: 3747856 - DNA, 25 bp, Homo sapien
ggcaggatcctcaggctaagggtcc

SEQ ID NO: 3747857 - DNA, 25 bp, Homo sapien
gcttccagcaacacgatgcagccat

SEQ ID NO: 3747858 - DNA, 25 bp, Homo sapien
gctctgcacgcgctgacagggtgaa

SEQ ID NO: 3747859 - DNA, 25 bp, Homo sapien
ctgggagcatgtgagcagagcggtc

SEQ ID NO: 3747860 - DNA, 25 bp, Homo sapien
tggtggctccatggatgctctggat

SEQ ID NO: 3747861 - DNA, 25 bp, Homo sapien
agcagagcggtcagtggcctttgtc

SEQ ID NO: 3747862 - DNA, 25 bp, Homo sapien
tggcctttgtcctcactacggtggt

SEQ ID NO: 3747863 - DNA, 25 bp, Homo sapien
caaaagtcgtaaaagccaggctagc

SEQ ID NO: 3747864 - DNA, 25 bp, Homo sapien
gaaaaggcatttggctccttcaggg

SEQ ID NO: 3747865 - DNA, 25 bp, Homo sapien
tgttgctgggagatcactgttccaa

SEQ ID NO: 3747866 - DNA, 25 bp, Homo sapien
tatgccccagaagatcaaaagtcgt

SEQ ID NO: 3747867 - DNA, 25 bp, Homo sapien
caagccagaagtgagttcccaggag

SEQ ID NO: 3747868 - DNA, 25 bp, Homo sapien
tgagttcccaggaggtcgaaggtca

SEQ ID NO: 3747869 - DNA, 25 bp, Homo sapien
ctggaccaagccagaagtgagttcc

SEQ ID NO: 3747870 - DNA, 25 bp, Homo sapien
gaccaagccagaagtgagttcccag

SEQ ID NO: 3747871 - DNA, 25 bp, Homo sapien
gggtaggacagcgtggctcatcata

SEQ ID NO: 3747872 - DNA, 25 bp, Homo sapien
gcactcctcaaatgagtggatgatg

SEQ ID NO: 3747873 - DNA, 25 bp, Homo sapien
gagtggatgatggagtctggacaac

SEQ ID NO: 3747874 - DNA, 25 bp, Homo sapien
cgtggctcatcataggcatcgatga

SEQ ID NO: 3747875 - DNA, 25 bp, Homo sapien
ttcctcttccgccaaccatgacatc

SEQ ID NO: 3747876 - DNA, 25 bp, Homo sapien
cctcttccgccaaccatgacatcct

SEQ ID NO: 3747877 - DNA, 25 bp, Homo sapien
tcttccgccaaccatgacatcctta

SEQ ID NO: 3747878 - DNA, 25 bp, Homo sapien
ctttcctcttccgccaaccatgaca

SEQ ID NO: 3747879 - DNA, 25 bp, Homo sapien
ttagttcttctaataagcaatctgt

SEQ ID NO: 3747880 - DNA, 25 bp, Homo sapien
gaagagcttattagttcttctaata

SEQ ID NO: 3747881 - DNA, 25 bp, Homo sapien
caagtcctgcttggtcaaaatagca

SEQ ID NO: 3747882 - DNA, 25 bp, Homo sapien
atctgtatgtaaagatagaactcaa

SEQ ID NO: 3747883 - DNA, 25 bp, Homo sapien
ttccaacctgccattgagccctgaa

SEQ ID NO: 3747884 - DNA, 25 bp, Homo sapien
ccaacctgccattgagccctgaacg

SEQ ID NO: 3747885 - DNA, 25 bp, Homo sapien
tttccaacctgccattgagccctga

SEQ ID NO: 3747886 - DNA, 25 bp, Homo sapien
cttttccaacctgccattgagccct

SEQ ID NO: 3747887 - DNA, 25 bp, Homo sapien
tgagctaagagcatcacgaggacca

SEQ ID NO: 3747888 - DNA, 25 bp, Homo sapien
gacaaagaacttgagctaagagcat

SEQ ID NO: 3747889 - DNA, 25 bp, Homo sapien
gaacttgagctaagagcatcacgag

SEQ ID NO: 3747890 - DNA, 25 bp, Homo sapien
cacgaggaccaaaggtgatgtgatg

SEQ ID NO: 3747891 - DNA, 25 bp, Homo sapien
cctgctccttgtacagggatccttg

SEQ ID NO: 3747892 - DNA, 25 bp, Homo sapien
tcaaagtccagggtttccctgctcc

SEQ ID NO: 3747893 - DNA, 25 bp, Homo sapien
tgtgtcccacagaggacgttggcct

SEQ ID NO: 3747894 - DNA, 25 bp, Homo sapien
cttgtacagccacttgtgtcccaca

SEQ ID NO: 3747895 - DNA, 25 bp, Homo sapien
ctgggccttcatggagagttttaaa

SEQ ID NO: 3747896 - DNA, 25 bp, Homo sapien
gagagttttaaaggccagggcatct

SEQ ID NO: 3747897 - DNA, 25 bp, Homo sapien
catggagagttttaaaggccagggc

SEQ ID NO: 3747898 - DNA, 25 bp, Homo sapien
ctgaaggggccttgtggaagatggg

SEQ ID NO: 3747899 - DNA, 25 bp, Homo sapien
tctgttttcttctccatctgggtca

SEQ ID NO: 3747900 - DNA, 25 bp, Homo sapien
cttctgttttcttctccatctgggt

SEQ ID NO: 3747901 - DNA, 25 bp, Homo sapien
ttctgttttcttctccatctgggtc

SEQ ID NO: 3747902 - DNA, 25 bp, Homo sapien
ctgttttcttctccatctgggtcat

SEQ ID NO: 3747903 - DNA, 25 bp, Homo sapien
gaaaggggtgaaatcttcccatcta

SEQ ID NO: 3747904 - DNA, 25 bp, Homo sapien
gaaatcttcccatctatctgtgttc

SEQ ID NO: 3747905 - DNA, 25 bp, Homo sapien
ggggtgaaatcttcccatctatctg

SEQ ID NO: 3747906 - DNA, 25 bp, Homo sapien
gtgaaatcttcccatctatctgtgt

SEQ ID NO: 3747907 - DNA, 25 bp, Homo sapien
acatgtttgcgcttttccagcacaa

SEQ ID NO: 3747908 - DNA, 25 bp, Homo sapien
aagctgtacaaacatgtttgcgctt

SEQ ID NO: 3747909 - DNA, 25 bp, Homo sapien
agctgttgttacattggtgatatac

SEQ ID NO: 3747910 - DNA, 25 bp, Homo sapien
gatatacataggatagtatgagcaa

SEQ ID NO: 3747911 - DNA, 25 bp, Homo sapien
agttgggtgtcctacagttcagtta

SEQ ID NO: 3747912 - DNA, 25 bp, Homo sapien
ttcagacgccaattgcaaatagagg

SEQ ID NO: 3747913 - DNA, 25 bp, Homo sapien
caattctccaactttggacaccagt

SEQ ID NO: 3747914 - DNA, 25 bp, Homo sapien
gcaaatagagggtccccaggtgacc

SEQ ID NO: 3747915 - DNA, 25 bp, Homo sapien
agagaaggcagttgcttgctgctga

SEQ ID NO: 3747916 - DNA, 25 bp, Homo sapien
gaagagaaggcagttgcttgctgct

SEQ ID NO: 3747917 - DNA, 25 bp, Homo sapien
aagagaagagaaggcagttgcttgc

SEQ ID NO: 3747918 - DNA, 25 bp, Homo sapien
gagaagagaaggcagttgcttgctg

SEQ ID NO: 3747919 - DNA, 25 bp, Homo sapien
gctgcgatgagagggcatcgttcct

SEQ ID NO: 3747920 - DNA, 25 bp, Homo sapien
gcatcgttcctggtttgtcagcgcc

SEQ ID NO: 3747921 - DNA, 25 bp, Homo sapien
cacgtgcatatgtggctgcgatgag

SEQ ID NO: 3747922 - DNA, 25 bp, Homo sapien
tgatgtccccgggtttgacggcacc

SEQ ID NO: 3747923 - DNA, 25 bp, Homo sapien
cattgatggactcgcggtgatgttt

SEQ ID NO: 3747924 - DNA, 25 bp, Homo sapien
gcacttcccatcattgatggactcg

SEQ ID NO: 3747925 - DNA, 25 bp, Homo sapien
gctgtgggtggattcgctcaattgc

SEQ ID NO: 3747926 - DNA, 25 bp, Homo sapien
gattcgctcaattgcagaaacatca

SEQ ID NO: 3747927 - DNA, 25 bp, Homo sapien
ctgtgggtgacaggcatacacctac

SEQ ID NO: 3747928 - DNA, 25 bp, Homo sapien
tgggtgacaggcatacacctactgc

SEQ ID NO: 3747929 - DNA, 25 bp, Homo sapien
gtgggtgacaggcatacacctactg

SEQ ID NO: 3747930 - DNA, 25 bp, Homo sapien
gggtgacaggcatacacctactgca

SEQ ID NO: 3747931 - DNA, 25 bp, Homo sapien
gattattaggtagctgtcccaactc

SEQ ID NO: 3747932 - DNA, 25 bp, Homo sapien
ggtagctgtcccaactcttctgggt

SEQ ID NO: 3747933 - DNA, 25 bp, Homo sapien
ttaggtagctgtcccaactcttctg

SEQ ID NO: 3747934 - DNA, 25 bp, Homo sapien
tattaggtagctgtcccaactcttc

SEQ ID NO: 3747935 - DNA, 25 bp, Homo sapien
tgcttgtgggtcacaagcatcatct

SEQ ID NO: 3747936 - DNA, 25 bp, Homo sapien
tcatcttttagaagactaggaagaa

SEQ ID NO: 3747937 - DNA, 25 bp, Homo sapien
cacctggtgcttgtgggtcacaagc

SEQ ID NO: 3747938 - DNA, 25 bp, Homo sapien
cttttagaagactaggaagaaccat

SEQ ID NO: 3747939 - DNA, 25 bp, Homo sapien
ttgaatgcaggttcatccctgaaga

SEQ ID NO: 3747940 - DNA, 25 bp, Homo sapien
cttgaatgcaggttcatccctgaag

SEQ ID NO: 3747941 - DNA, 25 bp, Homo sapien
tccacttgctctgccagaacccttc

SEQ ID NO: 3747942 - DNA, 25 bp, Homo sapien
ccacttgctctgccagaacccttct

SEQ ID NO: 3747943 - DNA, 25 bp, Homo sapien
caagcagccgttcacgggtgtcaca

SEQ ID NO: 3747944 - DNA, 25 bp, Homo sapien
ctccaagcagccgttcacgggtgtc

SEQ ID NO: 3747945 - DNA, 25 bp, Homo sapien
tccaagcagccgttcacgggtgtca

SEQ ID NO: 3747946 - DNA, 25 bp, Homo sapien
agcagccgttcacgggtgtcacaga

SEQ ID NO: 3747947 - DNA, 25 bp, Homo sapien
ttcccattcagagagtcgactcttt

SEQ ID NO: 3747948 - DNA, 25 bp, Homo sapien
cccattcagagagtcgactcttttc

SEQ ID NO: 3747949 - DNA, 25 bp, Homo sapien
gcttcccattcagagagtcgactct

SEQ ID NO: 3747950 - DNA, 25 bp, Homo sapien
cattcagagagtcgactcttttcac

SEQ ID NO: 3747951 - DNA, 25 bp, Homo sapien
tgctgctgcagggtgcgtcttcctc

SEQ ID NO: 3747952 - DNA, 25 bp, Homo sapien
taaacacgtgggacacaactggccc

SEQ ID NO: 3747953 - DNA, 25 bp, Homo sapien
tagagtcactgacaagagtgcctgt

SEQ ID NO: 3747954 - DNA, 25 bp, Homo sapien
tagaaggcatcagatctagagtcac

SEQ ID NO: 3747955 - DNA, 25 bp, Homo sapien
tgagggcagttttctctacgtccct

SEQ ID NO: 3747956 - DNA, 25 bp, Homo sapien
acaagaatgcaagtcctgagggcag

SEQ ID NO: 3747957 - DNA, 25 bp, Homo sapien
aatgcaagtcctgagggcagttttc

SEQ ID NO: 3747958 - DNA, 25 bp, Homo sapien
aagtcctgagggcagttttctctac

SEQ ID NO: 3747959 - DNA, 25 bp, Homo sapien
catcctgcccaagccacagtcatcc

SEQ ID NO: 3747960 - DNA, 25 bp, Homo sapien
ctgcatcctgcccaagccacagtca

SEQ ID NO: 3747961 - DNA, 25 bp, Homo sapien
tgcatcctgcccaagccacagtcat

SEQ ID NO: 3747962 - DNA, 25 bp, Homo sapien
gcatcctgcccaagccacagtcatc

SEQ ID NO: 3747963 - DNA, 25 bp, Homo sapien
tatggttcgctctcataaacagtga

SEQ ID NO: 3747964 - DNA, 25 bp, Homo sapien
cctcagtgatgaaggctctgtgagt

SEQ ID NO: 3747965 - DNA, 25 bp, Homo sapien
gtgagtttgcaagtccacgtggcac

SEQ ID NO: 3747966 - DNA, 25 bp, Homo sapien
taaacagtgactgtcaaagaacatt

SEQ ID NO: 3747967 - DNA, 25 bp, Homo sapien
catctgattggtaaggtggctctgt

SEQ ID NO: 3747968 - DNA, 25 bp, Homo sapien
ggcagcagcatctgattggtaaggt

SEQ ID NO: 3747969 - DNA, 25 bp, Homo sapien
tggtaaggtggctctgtttctgcat

SEQ ID NO: 3747970 - DNA, 25 bp, Homo sapien
tatgtacaagtcctggagctggcag

SEQ ID NO: 3747971 - DNA, 25 bp, Homo sapien
tggcatgttagtcttggccttggca

SEQ ID NO: 3747972 - DNA, 25 bp, Homo sapien
ctgctggcatgttagtcttggcctt

SEQ ID NO: 3747973 - DNA, 25 bp, Homo sapien
gctggcatgttagtcttggccttgg

SEQ ID NO: 3747974 - DNA, 25 bp, Homo sapien
ggcatgttagtcttggccttggcag

SEQ ID NO: 3747975 - DNA, 25 bp, Homo sapien
taatgactgtgcctttgcactaaac

SEQ ID NO: 3747976 - DNA, 25 bp, Homo sapien
tggatccagtcgcttcttattgaag

SEQ ID NO: 3747977 - DNA, 25 bp, Homo sapien
gtatccttgcgtctcctgttgttgt

SEQ ID NO: 3747978 - DNA, 25 bp, Homo sapien
gaaggtctctgagtagcaaattccc

SEQ ID NO: 3747979 - DNA, 25 bp, Homo sapien
ggccaactcggacagtttgctcatt

SEQ ID NO: 3747980 - DNA, 25 bp, Homo sapien
cccgggccaactcggacagtttgct

SEQ ID NO: 3747981 - DNA, 25 bp, Homo sapien
caaggctggcttgtgccagaacggc

SEQ ID NO: 3747982 - DNA, 25 bp, Homo sapien
tgctcatttattgcaacggtcaagg

SEQ ID NO: 3747983 - DNA, 25 bp, Homo sapien
gaacactgcaaaacctgccgtggga

SEQ ID NO: 3747984 - DNA, 25 bp, Homo sapien
ctggataaccgcctcctaggagtgg

SEQ ID NO: 3747985 - DNA, 25 bp, Homo sapien
tccacatggctagggcagaagacat

SEQ ID NO: 3747986 - DNA, 25 bp, Homo sapien
caccttgttaggaggatcgacctgg

SEQ ID NO: 3747987 - DNA, 25 bp, Homo sapien
ccagtattgaatgtgatgtcggctt

SEQ ID NO: 3747988 - DNA, 25 bp, Homo sapien
ccattacctaacaatccagtattga

SEQ ID NO: 3747989 - DNA, 25 bp, Homo sapien
gaaattttcgtgtgtagatcctggc

SEQ ID NO: 3747990 - DNA, 25 bp, Homo sapien
aagggacaaccagccatctatctga

SEQ ID NO: 3747991 - DNA, 25 bp, Homo sapien
aattgaggtctaagaagcagactga

SEQ ID NO: 3747992 - DNA, 25 bp, Homo sapien
gaaaattgaggtctaagaagcagac

SEQ ID NO: 3747993 - DNA, 25 bp, Homo sapien
aaattgaggtctaagaagcagactg

SEQ ID NO: 3747994 - DNA, 25 bp, Homo sapien
attgaggtctaagaagcagactgaa

SEQ ID NO: 3747995 - DNA, 25 bp, Homo sapien
taacctgtggggacgcttcctcaac

SEQ ID NO: 3747996 - DNA, 25 bp, Homo sapien
cgcttcctcaactattggttcttta

SEQ ID NO: 3747997 - DNA, 25 bp, Homo sapien
cataagaccaggaggtctttgaagg

SEQ ID NO: 3747998 - DNA, 25 bp, Homo sapien
tgtgtctgtgtccttaacctgtggg

SEQ ID NO: 3747999 - DNA, 25 bp, Homo sapien
gggatgaataagcaggatactttct

SEQ ID NO: 3748000 - DNA, 25 bp, Homo sapien
gaataagcaggatactttctcccct

SEQ ID NO: 3748001 - DNA, 25 bp, Homo sapien
gatgtcattaggaagcccagcatgg

SEQ ID NO: 3748002 - DNA, 25 bp, Homo sapien
agatttaagcctgatgtcattagga

SEQ ID NO: 3748003 - DNA, 25 bp, Homo sapien
tcaaatctacaaaccgaagcatatt

SEQ ID NO: 3748004 - DNA, 25 bp, Homo sapien
tatttatatcacaacttcctggata

SEQ ID NO: 3748005 - DNA, 25 bp, Homo sapien
tggacatgccacaaatcaatagtta

SEQ ID NO: 3748006 - DNA, 25 bp, Homo sapien
ggcatgtctcactaaggatgtacaa

SEQ ID NO: 3748007 - DNA, 25 bp, Homo sapien
tgttatgggacttccagacactgaa

SEQ ID NO: 3748008 - DNA, 25 bp, Homo sapien
tcattgctgcgagcttgtggacacc

SEQ ID NO: 3748009 - DNA, 25 bp, Homo sapien
tacagccggctggaggatattgtcc

SEQ ID NO: 3748010 - DNA, 25 bp, Homo sapien
taattaggcccaccacaaatgatgt

SEQ ID NO: 3748011 - DNA, 25 bp, Homo sapien
acgcgagggtctggcaacactgtca

SEQ ID NO: 3748012 - DNA, 25 bp, Homo sapien
tctggcaacactgtcaagcgtggaa

SEQ ID NO: 3748013 - DNA, 25 bp, Homo sapien
tcctgcccacgcgagggtctggcaa

SEQ ID NO: 3748014 - DNA, 25 bp, Homo sapien
acactgtcaagcgtggaagctgcct

SEQ ID NO: 3748015 - DNA, 25 bp, Homo sapien
gtggataatgttgcctcctagagag

SEQ ID NO: 3748016 - DNA, 25 bp, Homo sapien
agtggataatgttgcctcctagaga

SEQ ID NO: 3748017 - DNA, 25 bp, Homo sapien
cagtggataatgttgcctcctagag

SEQ ID NO: 3748018 - DNA, 25 bp, Homo sapien
taatggcctcgtcaccagcaggtgt

SEQ ID NO: 3748019 - DNA, 25 bp, Homo sapien
ctccgtgccgaagtcttcaaaaagg

SEQ ID NO: 3748020 - DNA, 25 bp, Homo sapien
caaaaaggtaatggcctcgtcacca

SEQ ID NO: 3748021 - DNA, 25 bp, Homo sapien
aaagtaacagactccgtgccgaagt

SEQ ID NO: 3748022 - DNA, 25 bp, Homo sapien
gatactgggaagcatcttggcccat

SEQ ID NO: 3748023 - DNA, 25 bp, Homo sapien
actgggaagcatcttggcccattgc

SEQ ID NO: 3748024 - DNA, 25 bp, Homo sapien
atactgggaagcatcttggcccatt

SEQ ID NO: 3748025 - DNA, 25 bp, Homo sapien
tactgggaagcatcttggcccattg

SEQ ID NO: 3748026 - DNA, 25 bp, Homo sapien
catgaagtgaaatccctgtgggtca

SEQ ID NO: 3748027 - DNA, 25 bp, Homo sapien
tgggtcatgctgtacatatcctgaa

SEQ ID NO: 3748028 - DNA, 25 bp, Homo sapien
tatcctgaaggcaattgcgccaggc

SEQ ID NO: 3748029 - DNA, 25 bp, Homo sapien
ttaattttatacaggcagaatttcc

SEQ ID NO: 3748030 - DNA, 25 bp, Homo sapien
tccctccatatcagggaattagaac

SEQ ID NO: 3748031 - DNA, 25 bp, Homo sapien
tgtaagagacccataagcaagctga

SEQ ID NO: 3748032 - DNA, 25 bp, Homo sapien
attcgaggtaaacacaactgtagtc

SEQ ID NO: 3748033 - DNA, 25 bp, Homo sapien
ttgaatgataattcgaggtaaacac

SEQ ID NO: 3748034 - DNA, 25 bp, Homo sapien
acaagctgctatgtgcaacggtcat

SEQ ID NO: 3748035 - DNA, 25 bp, Homo sapien
attcagcagtgggattccacagatg

SEQ ID NO: 3748036 - DNA, 25 bp, Homo sapien
tatgtgcaacggtcattcagcagtg

SEQ ID NO: 3748037 - DNA, 25 bp, Homo sapien
ctgacagggttctgaaacaagctgc

SEQ ID NO: 3748038 - DNA, 25 bp, Homo sapien
tgtggctagctttgcctcacaggaa

SEQ ID NO: 3748039 - DNA, 25 bp, Homo sapien
tctatgttgagcaattccaggaagg

SEQ ID NO: 3748040 - DNA, 25 bp, Homo sapien
gcctaacaatgcaccttgcctggag

SEQ ID NO: 3748041 - DNA, 25 bp, Homo sapien
gtgtaccccggcatctgtaacaatg

SEQ ID NO: 3748042 - DNA, 25 bp, Homo sapien
ccaaagggctggttgcactccgtaa

SEQ ID NO: 3748043 - DNA, 25 bp, Homo sapien
cagtggacaagcagggctaagaact

SEQ ID NO: 3748044 - DNA, 25 bp, Homo sapien
ggctggttgcactccgtaatagcac

SEQ ID NO: 3748045 - DNA, 25 bp, Homo sapien
tgcactccgtaatagcaccaagtct

SEQ ID NO: 3748046 - DNA, 25 bp, Homo sapien
ctgtggttactattaggcatacata

SEQ ID NO: 3748047 - DNA, 25 bp, Homo sapien
ttatctctcatttccaaagggcagc

SEQ ID NO: 3748048 - DNA, 25 bp, Homo sapien
gatttgatggtttgatgtagtagca

SEQ ID NO: 3748049 - DNA, 25 bp, Homo sapien
taataggtaagatattactgctgcc

SEQ ID NO: 3748050 - DNA, 25 bp, Homo sapien
tgaccggtctgatctcaaggctctc

SEQ ID NO: 3748051 - DNA, 25 bp, Homo sapien
tgcactatccttcctgttgaccggt

SEQ ID NO: 3748052 - DNA, 25 bp, Homo sapien
tgagcacaggctgcactatccttcc

SEQ ID NO: 3748053 - DNA, 25 bp, Homo sapien
tcctgttgaccggtctgatctcaag

SEQ ID NO: 3748054 - DNA, 25 bp, Homo sapien
aaaatccagacgcctctcagcctga

SEQ ID NO: 3748055 - DNA, 25 bp, Homo sapien
cccaaaatccagacgcctctcagcc

SEQ ID NO: 3748056 - DNA, 25 bp, Homo sapien
caacctttccagttggtctcatttc

SEQ ID NO: 3748057 - DNA, 25 bp, Homo sapien
aatccagacgcctctcagcctgact

SEQ ID NO: 3748058 - DNA, 25 bp, Homo sapien
actgcaggcagtaaggatacagtcc

SEQ ID NO: 3748059 - DNA, 25 bp, Homo sapien
cagagccactgcaggcagtaaggat

SEQ ID NO: 3748060 - DNA, 25 bp, Homo sapien
ggatacagtccctgtggtcataggg

SEQ ID NO: 3748061 - DNA, 25 bp, Homo sapien
cagtaaggatacagtccctgtggtc

SEQ ID NO: 3748062 - DNA, 25 bp, Homo sapien
catcttctgcaagtcatatgggtac

SEQ ID NO: 3748063 - DNA, 25 bp, Homo sapien
caagtcatatgggtacaagccctgc

SEQ ID NO: 3748064 - DNA, 25 bp, Homo sapien
catagggatacatcttctgcaagtc

SEQ ID NO: 3748065 - DNA, 25 bp, Homo sapien
tctttgcaagtcatagggatacatc

SEQ ID NO: 3748066 - DNA, 25 bp, Homo sapien
tctgcaggtcataggaatacagccc

SEQ ID NO: 3748067 - DNA, 25 bp, Homo sapien
cctgcaggtcgtaggggcacagcct

SEQ ID NO: 3748068 - DNA, 25 bp, Homo sapien
tgcagattgtagaaggtacagccct

SEQ ID NO: 3748069 - DNA, 25 bp, Homo sapien
gaaggtacagcccttgtaggtagta

SEQ ID NO: 3748070 - DNA, 25 bp, Homo sapien
ccacagggttggttactttctagag

SEQ ID NO: 3748071 - DNA, 25 bp, Homo sapien
tagatgcggcactacagtctctgcc

SEQ ID NO: 3748072 - DNA, 25 bp, Homo sapien
tggcggcttcctgcaatccttgatg

SEQ ID NO: 3748073 - DNA, 25 bp, Homo sapien
tagaggctcagtggtcaatcccgtg

SEQ ID NO: 3748074 - DNA, 25 bp, Homo sapien
cagctttgatgccagttgccggtca

SEQ ID NO: 3748075 - DNA, 25 bp, Homo sapien
gctcaacagggcatttcaacaggga

SEQ ID NO: 3748076 - DNA, 25 bp, Homo sapien
gaagaagcttgaacacatggtccag

SEQ ID NO: 3748077 - DNA, 25 bp, Homo sapien
cagttgcagttgtggagatggctcc

SEQ ID NO: 3748078 - DNA, 25 bp, Homo sapien
gatcttgtcagcttaacgaggccca

SEQ ID NO: 3748079 - DNA, 25 bp, Homo sapien
tattgaggagccacgtgaaaatcac

SEQ ID NO: 3748080 - DNA, 25 bp, Homo sapien
ctcctaggagattacacatgctgtg

SEQ ID NO: 3748081 - DNA, 25 bp, Homo sapien
gaggcccattaatagtccactggcg

SEQ ID NO: 3748082 - DNA, 25 bp, Homo sapien
cctgtagttgtgattcatctgtacc

SEQ ID NO: 3748083 - DNA, 25 bp, Homo sapien
tctgcaggaagtttcaaggacgtcc

SEQ ID NO: 3748084 - DNA, 25 bp, Homo sapien
tgactaacgggtctggtaattggga

SEQ ID NO: 3748085 - DNA, 25 bp, Homo sapien
taattcatccgtgctcatcctacag

SEQ ID NO: 3748086 - DNA, 25 bp, Homo sapien
tgggaccctgttgcagcatggatct

SEQ ID NO: 3748087 - DNA, 25 bp, Homo sapien
cctcatttgtccagctcacggcgga

SEQ ID NO: 3748088 - DNA, 25 bp, Homo sapien
cagtggtgtgaacatcttgagcctg

SEQ ID NO: 3748089 - DNA, 25 bp, Homo sapien
tgctccggccaattcagctgaacag

SEQ ID NO: 3748090 - DNA, 25 bp, Homo sapien
tttgatgctaggctctcggaccatg

SEQ ID NO: 3748091 - DNA, 25 bp, Homo sapien
ggctttgctgataagccgttggaga

SEQ ID NO: 3748092 - DNA, 25 bp, Homo sapien
ctttgctgataagccgttggagagt

SEQ ID NO: 3748093 - DNA, 25 bp, Homo sapien
gctttgctgataagccgttggagag

SEQ ID NO: 3748094 - DNA, 25 bp, Homo sapien
ttgctgataagccgttggagagttc

SEQ ID NO: 3748095 - DNA, 25 bp, Homo sapien
tccacgtgatcaagcagccctgagc

SEQ ID NO: 3748096 - DNA, 25 bp, Homo sapien
acaaagtccacgtgatcaagcagcc

SEQ ID NO: 3748097 - DNA, 25 bp, Homo sapien
aagcacaaagtccacgtgatcaagc

SEQ ID NO: 3748098 - DNA, 25 bp, Homo sapien
aaagtccacgtgatcaagcagccct

SEQ ID NO: 3748099 - DNA, 25 bp, Homo sapien
ccaatccagccctcagaagcttcat

SEQ ID NO: 3748100 - DNA, 25 bp, Homo sapien
tcttccagtctgttaagcatcttat

SEQ ID NO: 3748101 - DNA, 25 bp, Homo sapien
tctaatacaatcataggagttactt

SEQ ID NO: 3748102 - DNA, 25 bp, Homo sapien
tacttgttatagtccagctcttcat

SEQ ID NO: 3748103 - DNA, 25 bp, Homo sapien
tttttgtgtgtaatacatttgtcat

SEQ ID NO: 3748104 - DNA, 25 bp, Homo sapien
caagtttctccacccccactggcat

SEQ ID NO: 3748105 - DNA, 25 bp, Homo sapien
ccaagtttctccacccccactggca

SEQ ID NO: 3748106 - DNA, 25 bp, Homo sapien
tgttcgaagcatctgataatcagct

SEQ ID NO: 3748107 - DNA, 25 bp, Homo sapien
taaaaatattgtactgcctctgcag

SEQ ID NO: 3748108 - DNA, 25 bp, Homo sapien
cgagtgtcgtgagattaaagcaagg

SEQ ID NO: 3748109 - DNA, 25 bp, Homo sapien
tccagagaaagttggtagcagggaa

SEQ ID NO: 3748110 - DNA, 25 bp, Homo sapien
ctgaataaaagggaaatctgggaga

SEQ ID NO: 3748111 - DNA, 25 bp, Homo sapien
gaataaaagggaaatctgggagaca

SEQ ID NO: 3748112 - DNA, 25 bp, Homo sapien
agggaaatctgggagacattttcca

SEQ ID NO: 3748113 - DNA, 25 bp, Homo sapien
gaaatctgggagacattttccagga

SEQ ID NO: 3748114 - DNA, 25 bp, Homo sapien
agttactccttttgtgtggaccgca

SEQ ID NO: 3748115 - DNA, 25 bp, Homo sapien
aggtggagtcctactgataatgtgc

SEQ ID NO: 3748116 - DNA, 25 bp, Homo sapien
tgtgcagacgccacatctctgagaa

SEQ ID NO: 3748117 - DNA, 25 bp, Homo sapien
tattgaacttgctgattgtaaggtg

SEQ ID NO: 3748118 - DNA, 25 bp, Homo sapien
tttggcatatgcttctccggatttc

SEQ ID NO: 3748119 - DNA, 25 bp, Homo sapien
ctccggatttcttccgagcctgcag

SEQ ID NO: 3748120 - DNA, 25 bp, Homo sapien
tccggatttcttccgagcctgcaga

SEQ ID NO: 3748121 - DNA, 25 bp, Homo sapien
ccggatttcttccgagcctgcagat

SEQ ID NO: 3748122 - DNA, 25 bp, Homo sapien
gatggttacaaagcccacagagact

SEQ ID NO: 3748123 - DNA, 25 bp, Homo sapien
cctggtgggctgggtctccattctt

SEQ ID NO: 3748124 - DNA, 25 bp, Homo sapien
cttgatgttcatctggatggttaca

SEQ ID NO: 3748125 - DNA, 25 bp, Homo sapien
ctaaaatgctcagcgtggagaggaa

SEQ ID NO: 3748126 - DNA, 25 bp, Homo sapien
tttgccactacctctagcagggact

SEQ ID NO: 3748127 - DNA, 25 bp, Homo sapien
ttttgccactacctctagcagggac

SEQ ID NO: 3748128 - DNA, 25 bp, Homo sapien
tgccactacctctagcagggacttc

SEQ ID NO: 3748129 - DNA, 25 bp, Homo sapien
ttgccactacctctagcagggactt

SEQ ID NO: 3748130 - DNA, 25 bp, Homo sapien
gaggtaacatgggatatggcttgca

SEQ ID NO: 3748131 - DNA, 25 bp, Homo sapien
cttgcatgtctggattgcatcattt

SEQ ID NO: 3748132 - DNA, 25 bp, Homo sapien
gatatggcttgcatgtctggattgc

SEQ ID NO: 3748133 - DNA, 25 bp, Homo sapien
cttgagattattggaggtaacatgg

SEQ ID NO: 3748134 - DNA, 25 bp, Homo sapien
gacgctcttccatatgggtcacctc

SEQ ID NO: 3748135 - DNA, 25 bp, Homo sapien
gatagagagaagaccgttgaggacc

SEQ ID NO: 3748136 - DNA, 25 bp, Homo sapien
gagccccatcatctcggactatttt

SEQ ID NO: 3748137 - DNA, 25 bp, Homo sapien
tgaggaccctttgcattcctggcct

SEQ ID NO: 3748138 - DNA, 25 bp, Homo sapien
cctgagcaccgcaatttgtctgttt

SEQ ID NO: 3748139 - DNA, 25 bp, Homo sapien
tgtctgctgcccttggcagaacctg

SEQ ID NO: 3748140 - DNA, 25 bp, Homo sapien
tgcccttggcagaacctgagcaccg

SEQ ID NO: 3748141 - DNA, 25 bp, Homo sapien
cagaacctgagcaccgcaatttgtc

SEQ ID NO: 3748142 - DNA, 25 bp, Homo sapien
ttcaataaatacgaggcagatggat

SEQ ID NO: 3748143 - DNA, 25 bp, Homo sapien
cgaggcagatggatgtggaggcaca

SEQ ID NO: 3748144 - DNA, 25 bp, Homo sapien
agtacactcttgattattatgttca

SEQ ID NO: 3748145 - DNA, 25 bp, Homo sapien
gagggaagcatagatggtagtacac

SEQ ID NO: 3748146 - DNA, 25 bp, Homo sapien
atcctccggtgagccctgaaaacct

SEQ ID NO: 3748147 - DNA, 25 bp, Homo sapien
caaatcctccggtgagccctgaaaa

SEQ ID NO: 3748148 - DNA, 25 bp, Homo sapien
ggacagctagacatgactcacccat

SEQ ID NO: 3748149 - DNA, 25 bp, Homo sapien
tgaaaacctttctcctaggacagct

SEQ ID NO: 3748150 - DNA, 25 bp, Homo sapien
ccgttgtctttcaacttagataaca

SEQ ID NO: 3748151 - DNA, 25 bp, Homo sapien
ttgtctcccgttgtctttcaactta

SEQ ID NO: 3748152 - DNA, 25 bp, Homo sapien
gtctttcaacttagataacatagcc

SEQ ID NO: 3748153 - DNA, 25 bp, Homo sapien
tcccgttgtctttcaacttagataa

SEQ ID NO: 3748154 - DNA, 25 bp, Homo sapien
cacatgacaggctgtggtgttcatt

SEQ ID NO: 3748155 - DNA, 25 bp, Homo sapien
gggagaaaactggagatcaagctct

SEQ ID NO: 3748156 - DNA, 25 bp, Homo sapien
ctggttggagaccaaattggaccaa

SEQ ID NO: 3748157 - DNA, 25 bp, Homo sapien
tgccaaaactgcaagcagaactttc

SEQ ID NO: 3748158 - DNA, 25 bp, Homo sapien
cactggagtacctgcttgtaagcct

SEQ ID NO: 3748159 - DNA, 25 bp, Homo sapien
tggagtacctgcttgtaagcctttg

SEQ ID NO: 3748160 - DNA, 25 bp, Homo sapien
tacctgcttgtaagcctttgtcacc

SEQ ID NO: 3748161 - DNA, 25 bp, Homo sapien
cctgccactggagtacctgcttgta

SEQ ID NO: 3748162 - DNA, 25 bp, Homo sapien
cctctggaagccagcccgatgtcat

SEQ ID NO: 3748163 - DNA, 25 bp, Homo sapien
tcctctggaagccagcccgatgtca

SEQ ID NO: 3748164 - DNA, 25 bp, Homo sapien
gtcctctggaagccagcccgatgtc

SEQ ID NO: 3748165 - DNA, 25 bp, Homo sapien
catgcgccatggagacgagattttc

SEQ ID NO: 3748166 - DNA, 25 bp, Homo sapien
cacatcatgcgccatggagacgaga

SEQ ID NO: 3748167 - DNA, 25 bp, Homo sapien
aggcctgagtatcatggctgagcag

SEQ ID NO: 3748168 - DNA, 25 bp, Homo sapien
agcaaccgcacatcatgcgccatgg

SEQ ID NO: 3748169 - DNA, 25 bp, Homo sapien
gacccgaccatcagtcaggaggcaa

SEQ ID NO: 3748170 - DNA, 25 bp, Homo sapien
tgttctagaaggaatccgtgggcca

SEQ ID NO: 3748171 - DNA, 25 bp, Homo sapien
tattagatgtacaacttccagaggc

SEQ ID NO: 3748172 - DNA, 25 bp, Homo sapien
tctcaaaaggcataagtaggcccgt

SEQ ID NO: 3748173 - DNA, 25 bp, Homo sapien
ctggaactgctgggtcaggcgccat

SEQ ID NO: 3748174 - DNA, 25 bp, Homo sapien
gaccagaaacccactattgtagaca

SEQ ID NO: 3748175 - DNA, 25 bp, Homo sapien
tgttgtaaggaaaccagtgaacttc

SEQ ID NO: 3748176 - DNA, 25 bp, Homo sapien
ggcagcaagagcgtgcggaccctta

SEQ ID NO: 3748177 - DNA, 25 bp, Homo sapien
caaggttgctacttgggccctggca

SEQ ID NO: 3748178 - DNA, 25 bp, Homo sapien
tttctgcctcgggaaagaacaggga

SEQ ID NO: 3748179 - DNA, 25 bp, Homo sapien
ttccatgctcatcagaagggtctgg

SEQ ID NO: 3748180 - DNA, 25 bp, Homo sapien
gaacagggagtttagctcaggacta

SEQ ID NO: 3748181 - DNA, 25 bp, Homo sapien
ggactagagcccgtgtttccatgct

SEQ ID NO: 3748182 - DNA, 25 bp, Homo sapien
tacaaaaggagggctaagcagccac

SEQ ID NO: 3748183 - DNA, 25 bp, Homo sapien
ctacaaaaggagggctaagcagcca

SEQ ID NO: 3748184 - DNA, 25 bp, Homo sapien
tctttatcttaggaccgggcacttc

SEQ ID NO: 3748185 - DNA, 25 bp, Homo sapien
tgtggtctgaacagcaaaggcaggc

SEQ ID NO: 3748186 - DNA, 25 bp, Homo sapien
tagcaggattctctccaatcgtggg

SEQ ID NO: 3748187 - DNA, 25 bp, Homo sapien
tgagaacaacgaggcctggtgactt

SEQ ID NO: 3748188 - DNA, 25 bp, Homo sapien
tcatccttgctgctctcgcttatac

SEQ ID NO: 3748189 - DNA, 25 bp, Homo sapien
tgcatagaaatctccagccaagtgc

SEQ ID NO: 3748190 - DNA, 25 bp, Homo sapien
gcatagaaatctccagccaagtgct

SEQ ID NO: 3748191 - DNA, 25 bp, Homo sapien
aagctatagcgttgcctgttctgaa

SEQ ID NO: 3748192 - DNA, 25 bp, Homo sapien
gaaatgatgttctactgaggcagca

SEQ ID NO: 3748193 - DNA, 25 bp, Homo sapien
tgacaaatgggtacagttgaactcc

SEQ ID NO: 3748194 - DNA, 25 bp, Homo sapien
cagtaccaaatcgtgacataggcca

SEQ ID NO: 3748195 - DNA, 25 bp, Homo sapien
gcaactagtatcagccacaagcagt

SEQ ID NO: 3748196 - DNA, 25 bp, Homo sapien
gaacgacattgtaattgactcccat

SEQ ID NO: 3748197 - DNA, 25 bp, Homo sapien
caagctctaattttcaagcagagac

SEQ ID NO: 3748198 - DNA, 25 bp, Homo sapien
taaacacgcatgaaatctgatcggc

SEQ ID NO: 3748199 - DNA, 25 bp, Homo sapien
caagtgctcacactagcagtcagcc

SEQ ID NO: 3748200 - DNA, 25 bp, Homo sapien
gaatctccataatcaccacaggctg

SEQ ID NO: 3748201 - DNA, 25 bp, Homo sapien
tggaatctccataatcaccacaggc

SEQ ID NO: 3748202 - DNA, 25 bp, Homo sapien
gtgcttgtgacaagtgctcacacta

SEQ ID NO: 3748203 - DNA, 25 bp, Homo sapien
agtggctggactgtggaggttgtgg

SEQ ID NO: 3748204 - DNA, 25 bp, Homo sapien
gctggactgtggaggttgtggccct

SEQ ID NO: 3748205 - DNA, 25 bp, Homo sapien
tgctggagggtgaggagcaacagtt

SEQ ID NO: 3748206 - DNA, 25 bp, Homo sapien
ggccctgctggagggtgaggagcaa

SEQ ID NO: 3748207 - DNA, 25 bp, Homo sapien
agacatctgctgtgcatgacaaggc

SEQ ID NO: 3748208 - DNA, 25 bp, Homo sapien
tgagttttgcaggagacatctgctg

SEQ ID NO: 3748209 - DNA, 25 bp, Homo sapien
ggagacatctgctgtgcatgacaag

SEQ ID NO: 3748210 - DNA, 25 bp, Homo sapien
agtgagttttgcaggagacatctgc

SEQ ID NO: 3748211 - DNA, 25 bp, Homo sapien
gcagtgtgtcactaaaggcttctcc

SEQ ID NO: 3748212 - DNA, 25 bp, Homo sapien
agaagacaattggcagtgtgtcact

SEQ ID NO: 3748213 - DNA, 25 bp, Homo sapien
gaagacaattggcagtgtgtcacta

SEQ ID NO: 3748214 - DNA, 25 bp, Homo sapien
accttgtccacgctaaggatgagca

SEQ ID NO: 3748215 - DNA, 25 bp, Homo sapien
tgtccacgctaaggatgagcagtga

SEQ ID NO: 3748216 - DNA, 25 bp, Homo sapien
tcggctggttaagaggcatttccaa

SEQ ID NO: 3748217 - DNA, 25 bp, Homo sapien
aatggtcttgaatcctaaattaaga

SEQ ID NO: 3748218 - DNA, 25 bp, Homo sapien
tcagggttgcaggtatggtacttcc

SEQ ID NO: 3748219 - DNA, 25 bp, Homo sapien
gtgatgtgttttggagctgctgact

SEQ ID NO: 3748220 - DNA, 25 bp, Homo sapien
gatgtgttttggagctgctgactgc

SEQ ID NO: 3748221 - DNA, 25 bp, Homo sapien
agggttgcaggtatggtacttccca

SEQ ID NO: 3748222 - DNA, 25 bp, Homo sapien
gactttattatacacgtctgtgatt

SEQ ID NO: 3748223 - DNA, 25 bp, Homo sapien
tagacctcatctttagaggcatgac

SEQ ID NO: 3748224 - DNA, 25 bp, Homo sapien
cgttcttcagacttttagacctcat

SEQ ID NO: 3748225 - DNA, 25 bp, Homo sapien
atacacgtctgtgattttaaagtgc

SEQ ID NO: 3748226 - DNA, 25 bp, Homo sapien
ctgtgaagaccaaggttctctccat

SEQ ID NO: 3748227 - DNA, 25 bp, Homo sapien
atgccagtgcggacttgagtcccag

SEQ ID NO: 3748228 - DNA, 25 bp, Homo sapien
tgtctggggtggatgccagtgcgga

SEQ ID NO: 3748229 - DNA, 25 bp, Homo sapien
cagtgcggacttgagtcccagccct

SEQ ID NO: 3748230 - DNA, 25 bp, Homo sapien
cctctgagctggacggtgctctcca

SEQ ID NO: 3748231 - DNA, 25 bp, Homo sapien
gcaaagccactgattgaagaggcag

SEQ ID NO: 3748232 - DNA, 25 bp, Homo sapien
caggagacctgatttgaagtcataa

SEQ ID NO: 3748233 - DNA, 25 bp, Homo sapien
aaatgtccacaggatacctgcagat

SEQ ID NO: 3748234 - DNA, 25 bp, Homo sapien
cacaggatacctgcagatgccaacc

SEQ ID NO: 3748235 - DNA, 25 bp, Homo sapien
cttccccaaggaacatttaataatg

SEQ ID NO: 3748236 - DNA, 25 bp, Homo sapien
gtggtactcatccagggacaatttc

SEQ ID NO: 3748237 - DNA, 25 bp, Homo sapien
ccatatcaaggggtagagaccaggg

SEQ ID NO: 3748238 - DNA, 25 bp, Homo sapien
tgaacatctgccaggcacacgacag

SEQ ID NO: 3748239 - DNA, 25 bp, Homo sapien
tccagcttcccaatgtggcctgctg

SEQ ID NO: 3748240 - DNA, 25 bp, Homo sapien
tcttcccatcccttctgtctggctc

SEQ ID NO: 3748241 - DNA, 25 bp, Homo sapien
ctgctggtcttctcaggactcttcc

SEQ ID NO: 3748242 - DNA, 25 bp, Homo sapien
tcattgtcgctttttgataactgca

SEQ ID NO: 3748243 - DNA, 25 bp, Homo sapien
tctgtaaagaaggtcattggcagct

SEQ ID NO: 3748244 - DNA, 25 bp, Homo sapien
agatggcattgcatctctaaattac

SEQ ID NO: 3748245 - DNA, 25 bp, Homo sapien
tgttgaataggagtgagggcatccc

SEQ ID NO: 3748246 - DNA, 25 bp, Homo sapien
ggctctgttctgttctatatctctg

SEQ ID NO: 3748247 - DNA, 25 bp, Homo sapien
tgtagccacggtccttgaagccctg

SEQ ID NO: 3748248 - DNA, 25 bp, Homo sapien
agccacggtccttgaagccctgaga

SEQ ID NO: 3748249 - DNA, 25 bp, Homo sapien
ctgtagccacggtccttgaagccct

SEQ ID NO: 3748250 - DNA, 25 bp, Homo sapien
gtagccacggtccttgaagccctga

SEQ ID NO: 3748251 - DNA, 25 bp, Homo sapien
ctttcgagccgcgacaggatgggga

SEQ ID NO: 3748252 - DNA, 25 bp, Homo sapien
tttcgagccgcgacaggatggggag

SEQ ID NO: 3748253 - DNA, 25 bp, Homo sapien
cgagccgcgacaggatggggaggaa

SEQ ID NO: 3748254 - DNA, 25 bp, Homo sapien
ttcgagccgcgacaggatggggagg

SEQ ID NO: 3748255 - DNA, 25 bp, Homo sapien
ggcaggaaactccgcgtctaggccg

SEQ ID NO: 3748256 - DNA, 25 bp, Homo sapien
aactccgcgtctaggccgccatttt

SEQ ID NO: 3748257 - DNA, 25 bp, Homo sapien
gagccgccgcgggtcgggcaggaaa

SEQ ID NO: 3748258 - DNA, 25 bp, Homo sapien
aggaaactccgcgtctaggccgcca

SEQ ID NO: 3748259 - DNA, 25 bp, Homo sapien
tcctcgcgcttggtgggcacccagc

SEQ ID NO: 3748260 - DNA, 25 bp, Homo sapien
caaaagtcagagagccaggattcga

SEQ ID NO: 3748261 - DNA, 25 bp, Homo sapien
aaggtcttcccagtcgggtcgagtg

SEQ ID NO: 3748262 - DNA, 25 bp, Homo sapien
tagcaagcccgaaaaccaactggga

SEQ ID NO: 3748263 - DNA, 25 bp, Homo sapien
tgggaggcgagaccaccaaaggtct

SEQ ID NO: 3748264 - DNA, 25 bp, Homo sapien
ctccctcgagtccagtagcaccagg

SEQ ID NO: 3748265 - DNA, 25 bp, Homo sapien
gagtccagtagcaccagggacccat

SEQ ID NO: 3748266 - DNA, 25 bp, Homo sapien
tccctcgagtccagtagcaccaggg

SEQ ID NO: 3748267 - DNA, 25 bp, Homo sapien
tccagtagcaccagggacccatggg

SEQ ID NO: 3748268 - DNA, 25 bp, Homo sapien
acacagtcagattacatttcccacc

SEQ ID NO: 3748269 - DNA, 25 bp, Homo sapien
ctgcaggtctgaccagagactcagg

SEQ ID NO: 3748270 - DNA, 25 bp, Homo sapien
cgaggcacacagtcagattacattt

SEQ ID NO: 3748271 - DNA, 25 bp, Homo sapien
ttgctgcaggtctgaccagagactc

SEQ ID NO: 3748272 - DNA, 25 bp, Homo sapien
ttttagctcaggaagcccatcggga

SEQ ID NO: 3748273 - DNA, 25 bp, Homo sapien
tcattcaatgtacggcaaggtgtgc

SEQ ID NO: 3748274 - DNA, 25 bp, Homo sapien
actgcattctcgagctgagccgaca

SEQ ID NO: 3748275 - DNA, 25 bp, Homo sapien
cacaatgactaggagctggaagcgt

SEQ ID NO: 3748276 - DNA, 25 bp, Homo sapien
gaacaatgacatcagtaactggttg

SEQ ID NO: 3748277 - DNA, 25 bp, Homo sapien
gagaaggaacaatgacatcagtaac

SEQ ID NO: 3748278 - DNA, 25 bp, Homo sapien
gtggagaaggaacaatgacatcagt

SEQ ID NO: 3748279 - DNA, 25 bp, Homo sapien
tgatcagctagttgtaaacaccact

SEQ ID NO: 3748280 - DNA, 25 bp, Homo sapien
gcaatggtgcgacctcggctcactg

SEQ ID NO: 3748281 - DNA, 25 bp, Homo sapien
cttactcttctgctcagactggagt

SEQ ID NO: 3748282 - DNA, 25 bp, Homo sapien
aggtgcgaaccaccacgcccaacta

SEQ ID NO: 3748283 - DNA, 25 bp, Homo sapien
caacctctgcctcccagattcaagt

SEQ ID NO: 3748284 - DNA, 25 bp, Homo sapien
tacggaccatcgcacatggagagag

SEQ ID NO: 3748285 - DNA, 25 bp, Homo sapien
gagagatgccgagaatggcgctcct

SEQ ID NO: 3748286 - DNA, 25 bp, Homo sapien
ggcgctcctttctccgtggcagatt

SEQ ID NO: 3748287 - DNA, 25 bp, Homo sapien
tcacagggtagaaggaacaagctct

SEQ ID NO: 3748288 - DNA, 25 bp, Homo sapien
acctggccctccatggtaactgctg

SEQ ID NO: 3748289 - DNA, 25 bp, Homo sapien
tgctggtcagacgaaaactgcaaaa

SEQ ID NO: 3748290 - DNA, 25 bp, Homo sapien
ctataaatcacagagatcaaagagg

SEQ ID NO: 3748291 - DNA, 25 bp, Homo sapien
gacaaacgttctagagcccttgacc

SEQ ID NO: 3748292 - DNA, 25 bp, Homo sapien
cacctccagttctggtcaacaacat

SEQ ID NO: 3748293 - DNA, 25 bp, Homo sapien
ctccagttctggtcaacaacattca

SEQ ID NO: 3748294 - DNA, 25 bp, Homo sapien
cctccagttctggtcaacaacattc

SEQ ID NO: 3748295 - DNA, 25 bp, Homo sapien
tccagttctggtcaacaacattcac

SEQ ID NO: 3748296 - DNA, 25 bp, Homo sapien
tgcagatagagtaacagccctccaa

SEQ ID NO: 3748297 - DNA, 25 bp, Homo sapien
tatgaagacaaattaaaagccagcc

SEQ ID NO: 3748298 - DNA, 25 bp, Homo sapien
ccagccttgcaagggtatttgacaa

SEQ ID NO: 3748299 - DNA, 25 bp, Homo sapien
cactgcgagggtgatgaaattcagc

SEQ ID NO: 3748300 - DNA, 25 bp, Homo sapien
tacatctatcacagttcctaacagc

SEQ ID NO: 3748301 - DNA, 25 bp, Homo sapien
tgaccgtattcgtaaaccttcagga

SEQ ID NO: 3748302 - DNA, 25 bp, Homo sapien
gtcctcaactgacaaagatggttat

SEQ ID NO: 3748303 - DNA, 25 bp, Homo sapien
cctattctgttctagacgtgggaaa

SEQ ID NO: 3748304 - DNA, 25 bp, Homo sapien
aggacaggaaggtgcttagccgtac

SEQ ID NO: 3748305 - DNA, 25 bp, Homo sapien
tagccgtacaaggaatggcctccat

SEQ ID NO: 3748306 - DNA, 25 bp, Homo sapien
ggtgcttagccgtacaaggaatggc

SEQ ID NO: 3748307 - DNA, 25 bp, Homo sapien
ggaaggtgcttagccgtacaaggaa

SEQ ID NO: 3748308 - DNA, 25 bp, Homo sapien
taaagaaagttcatccgctcctctg

SEQ ID NO: 3748309 - DNA, 25 bp, Homo sapien
gctcctctggcatcatagttataaa

SEQ ID NO: 3748310 - DNA, 25 bp, Homo sapien
tgtctccgatctgtaaagaaagttc

SEQ ID NO: 3748311 - DNA, 25 bp, Homo sapien
tcatatgtttctaagatgtgcacag

SEQ ID NO: 3748312 - DNA, 25 bp, Homo sapien
ctctggggcacagcaaagaggggat

SEQ ID NO: 3748313 - DNA, 25 bp, Homo sapien
tggggcacagcaaagaggggatgag

SEQ ID NO: 3748314 - DNA, 25 bp, Homo sapien
ctgctctggggcacagcaaagaggg

SEQ ID NO: 3748315 - DNA, 25 bp, Homo sapien
tggctgctctggggcacagcaaaga

SEQ ID NO: 3748316 - DNA, 25 bp, Homo sapien
gacatgttagggtcctcacaataca

SEQ ID NO: 3748317 - DNA, 25 bp, Homo sapien
gatgtgtagaactcactgtttggca

SEQ ID NO: 3748318 - DNA, 25 bp, Homo sapien
caaagttgaaacagttagtacaaag

SEQ ID NO: 3748319 - DNA, 25 bp, Homo sapien
tacattcatgatgtgtagaactcac

SEQ ID NO: 3748320 - DNA, 25 bp, Homo sapien
ttgtgcactgaccacgtacccagac

SEQ ID NO: 3748321 - DNA, 25 bp, Homo sapien
gtcccttgtgcactgaccacgtacc

SEQ ID NO: 3748322 - DNA, 25 bp, Homo sapien
gatgaaagttggtttacaccaccaa

SEQ ID NO: 3748323 - DNA, 25 bp, Homo sapien
aatgatgaaagttggtttacaccac

SEQ ID NO: 3748324 - DNA, 25 bp, Homo sapien
cttcaactatcgcttctttaagatg

SEQ ID NO: 3748325 - DNA, 25 bp, Homo sapien
ttcaactatcgcttctttaagatga

SEQ ID NO: 3748326 - DNA, 25 bp, Homo sapien
tcaactatcgcttctttaagatgaa

SEQ ID NO: 3748327 - DNA, 25 bp, Homo sapien
cctcccttctggtaggcccagtgga

SEQ ID NO: 3748328 - DNA, 25 bp, Homo sapien
tatgaggatctgcaacaacgactgg

SEQ ID NO: 3748329 - DNA, 25 bp, Homo sapien
gggctgttttcatcttacggatcct

SEQ ID NO: 3748330 - DNA, 25 bp, Homo sapien
tacggatcctgggttgagtgcactg

SEQ ID NO: 3748331 - DNA, 25 bp, Homo sapien
tccaccatgtgaatagggcctcagt

SEQ ID NO: 3748332 - DNA, 25 bp, Homo sapien
gagaggttacagcttccaaatgtcc

SEQ ID NO: 3748333 - DNA, 25 bp, Homo sapien
tacaggaagcagttatccttggcga

SEQ ID NO: 3748334 - DNA, 25 bp, Homo sapien
taaagatgccataaattacagccgg

SEQ ID NO: 3748335 - DNA, 25 bp, Homo sapien
tacatacgtctctacgaatgacaag

SEQ ID NO: 3748336 - DNA, 25 bp, Homo sapien
acccgggatgactgtttcatgttgc

SEQ ID NO: 3748337 - DNA, 25 bp, Homo sapien
gcctccagatggtggaccactctcg

SEQ ID NO: 3748338 - DNA, 25 bp, Homo sapien
gaggtcacccgggatgactgtttca

SEQ ID NO: 3748339 - DNA, 25 bp, Homo sapien
agtgtcgtggtgacttcctggatga

SEQ ID NO: 3748340 - DNA, 25 bp, Homo sapien
taagtctatcagaggcaaatttaag

SEQ ID NO: 3748341 - DNA, 25 bp, Homo sapien
tgcacaaatccaaccatgtaagtct

SEQ ID NO: 3748342 - DNA, 25 bp, Homo sapien
ggaaaccaaggtgctcattaagaat

SEQ ID NO: 3748343 - DNA, 25 bp, Homo sapien
gaatacctactctagggttacagac

SEQ ID NO: 3748344 - DNA, 25 bp, Homo sapien
atttgtgatcgccattcaataaggt

SEQ ID NO: 3748345 - DNA, 25 bp, Homo sapien
agaatttgtgatcgccattcaataa

SEQ ID NO: 3748346 - DNA, 25 bp, Homo sapien
tgtgccgcacacttcgaaacatctc

SEQ ID NO: 3748347 - DNA, 25 bp, Homo sapien
atagatcatgtgccgcacacttcga

SEQ ID NO: 3748348 - DNA, 25 bp, Homo sapien
tagaagctatttcatgagctctgaa

SEQ ID NO: 3748349 - DNA, 25 bp, Homo sapien
taaccaccaggtccaaatctagaat

SEQ ID NO: 3748350 - DNA, 25 bp, Homo sapien
atcgtgctagttaattctggatcca

SEQ ID NO: 3748351 - DNA, 25 bp, Homo sapien
tgagctctgaagagactaatcgtgc

SEQ ID NO: 3748352 - DNA, 25 bp, Homo sapien
cacagggtcatatagagacatgagg

SEQ ID NO: 3748353 - DNA, 25 bp, Homo sapien
ggtcatatagagacatgaggacttc

SEQ ID NO: 3748354 - DNA, 25 bp, Homo sapien
tatagagacatgaggacttcagcat

SEQ ID NO: 3748355 - DNA, 25 bp, Homo sapien
catatagagacatgaggacttcagc

SEQ ID NO: 3748356 - DNA, 25 bp, Homo sapien
gaatgggacgcttcagtggttctga

SEQ ID NO: 3748357 - DNA, 25 bp, Homo sapien
tctacacgcaagaaggttcaccctg

SEQ ID NO: 3748358 - DNA, 25 bp, Homo sapien
tacgagcaaatagcaatctacacgc

SEQ ID NO: 3748359 - DNA, 25 bp, Homo sapien
gactcggctgcttgctcgtgtccag

SEQ ID NO: 3748360 - DNA, 25 bp, Homo sapien
tatgtaatctgtctatgtctttagg

SEQ ID NO: 3748361 - DNA, 25 bp, Homo sapien
taggtaatcctgaactggaccagcg

SEQ ID NO: 3748362 - DNA, 25 bp, Homo sapien
tggaccagcgaaccaggtagttctc

SEQ ID NO: 3748363 - DNA, 25 bp, Homo sapien
agtaaacacggctcgcaaattatgt

SEQ ID NO: 3748364 - DNA, 25 bp, Homo sapien
ccacgcgaacaatctgacagacaaa

SEQ ID NO: 3748365 - DNA, 25 bp, Homo sapien
aggtcgccgcaaccccgaggtcagt

SEQ ID NO: 3748366 - DNA, 25 bp, Homo sapien
tggtgttgttgtccctcagctccat

SEQ ID NO: 3748367 - DNA, 25 bp, Homo sapien
cgcaaccccgaggtcagtttcctgg

SEQ ID NO: 3748368 - DNA, 25 bp, Homo sapien
tccatcaccaagacctgaaaacctc

SEQ ID NO: 3748369 - DNA, 25 bp, Homo sapien
cttcttcgttgctttgaccgtcctg

SEQ ID NO: 3748370 - DNA, 25 bp, Homo sapien
ttcgttgctttgaccgtcctgcaca

SEQ ID NO: 3748371 - DNA, 25 bp, Homo sapien
gttgctttgaccgtcctgcacatat

SEQ ID NO: 3748372 - DNA, 25 bp, Homo sapien
accagttcagcatccttcaataaac

SEQ ID NO: 3748373 - DNA, 25 bp, Homo sapien
ctttttccaagatgcccgagaccac

SEQ ID NO: 3748374 - DNA, 25 bp, Homo sapien
atgcccgagaccaccagttcagcat

SEQ ID NO: 3748375 - DNA, 25 bp, Homo sapien
gttcagcatccttcaataaactcat

SEQ ID NO: 3748376 - DNA, 25 bp, Homo sapien
tttattatatctgttacatccatca

SEQ ID NO: 3748377 - DNA, 25 bp, Homo sapien
gctgcttatcttcatcatctacttt

SEQ ID NO: 3748378 - DNA, 25 bp, Homo sapien
gaaatgctgcttatcttcatcatct

SEQ ID NO: 3748379 - DNA, 25 bp, Homo sapien
ggctgaaagggaatgaaatgctgct

SEQ ID NO: 3748380 - DNA, 25 bp, Homo sapien
tcctttaatggagcatggagtcaca

SEQ ID NO: 3748381 - DNA, 25 bp, Homo sapien
tggcgtcaaagcacaggcaatctca

SEQ ID NO: 3748382 - DNA, 25 bp, Homo sapien
gaggacactagcaggcaacaggtaa

SEQ ID NO: 3748383 - DNA, 25 bp, Homo sapien
tgggcatcaagaacctctgaggtct

SEQ ID NO: 3748384 - DNA, 25 bp, Homo sapien
gtcgaatggcgtcgtccaacgcgag

SEQ ID NO: 3748385 - DNA, 25 bp, Homo sapien
tgttcagcggcttgtgtcgaatggc

SEQ ID NO: 3748386 - DNA, 25 bp, Homo sapien
tgaaaaacgggatgacatgttcagc

SEQ ID NO: 3748387 - DNA, 25 bp, Homo sapien
aaaacgggatgacatgttcagcggc

SEQ ID NO: 3748388 - DNA, 25 bp, Homo sapien
tgtttataacagtctgaaggaagtc

SEQ ID NO: 3748389 - DNA, 25 bp, Homo sapien
gacttctttggcagcgatgactttg

SEQ ID NO: 3748390 - DNA, 25 bp, Homo sapien
tataacagtctgaaggaagtcattc

SEQ ID NO: 3748391 - DNA, 25 bp, Homo sapien
gcagcgatgactttgtttataacag

SEQ ID NO: 3748392 - DNA, 25 bp, Homo sapien
ggtgccccttgcaggcacaaccact

SEQ ID NO: 3748393 - DNA, 25 bp, Homo sapien
ccttgaaataggaagacccgctcgc

SEQ ID NO: 3748394 - DNA, 25 bp, Homo sapien
gaaataggaagacccgctcgctcca

SEQ ID NO: 3748395 - DNA, 25 bp, Homo sapien
ttgaaataggaagacccgctcgctc

SEQ ID NO: 3748396 - DNA, 25 bp, Homo sapien
gaagtaatttcaatgttacccacaa

SEQ ID NO: 3748397 - DNA, 25 bp, Homo sapien
ctgatggatatctccaggaagtaat

SEQ ID NO: 3748398 - DNA, 25 bp, Homo sapien
ggatatctccaggaagtaatttcaa

SEQ ID NO: 3748399 - DNA, 25 bp, Homo sapien
ggaagtaatttcaatgttacccaca

SEQ ID NO: 3748400 - DNA, 25 bp, Homo sapien
cactaaatgcggaaactcttttcgg

SEQ ID NO: 3748401 - DNA, 25 bp, Homo sapien
cctgtccactaaatgcggaaactct

SEQ ID NO: 3748402 - DNA, 25 bp, Homo sapien
gcatgattatctccggaaaccctgt

SEQ ID NO: 3748403 - DNA, 25 bp, Homo sapien
gaaaccctgtttttcgagccacagc

SEQ ID NO: 3748404 - DNA, 25 bp, Homo sapien
caggctctgcgctgtccaaagaaga

SEQ ID NO: 3748405 - DNA, 25 bp, Homo sapien
ggaaaacttggcatcgcctgcctgg

SEQ ID NO: 3748406 - DNA, 25 bp, Homo sapien
ggattccaggagtccaacgagctat

SEQ ID NO: 3748407 - DNA, 25 bp, Homo sapien
ccaacgagctatgagaaagtagcag

SEQ ID NO: 3748408 - DNA, 25 bp, Homo sapien
tgatactgaccacgagaagaaccgt

SEQ ID NO: 3748409 - DNA, 25 bp, Homo sapien
taaacagcctcactgataaggaagg

SEQ ID NO: 3748410 - DNA, 25 bp, Homo sapien
gcaaggccacccaaccaagacttgt

SEQ ID NO: 3748411 - DNA, 25 bp, Homo sapien
taaggaaggcataaactccatgatc

SEQ ID NO: 3748412 - DNA, 25 bp, Homo sapien
aaatacatgacaagagcaattttca

SEQ ID NO: 3748413 - DNA, 25 bp, Homo sapien
aatacatgacaagagcaattttcat

SEQ ID NO: 3748414 - DNA, 25 bp, Homo sapien
tcatcgtacacagacaccgtgacct

SEQ ID NO: 3748415 - DNA, 25 bp, Homo sapien
caaaatctccttgaactaatgttac

SEQ ID NO: 3748416 - DNA, 25 bp, Homo sapien
taatcgtttcccatcctcatcgtac

SEQ ID NO: 3748417 - DNA, 25 bp, Homo sapien
cgtgacctccacgttcttcgctgtt

SEQ ID NO: 3748418 - DNA, 25 bp, Homo sapien
ccagcgtggctgctttacttggtag

SEQ ID NO: 3748419 - DNA, 25 bp, Homo sapien
gtaaatcacagatttgtactctgaa

SEQ ID NO: 3748420 - DNA, 25 bp, Homo sapien
acagtctcaaaccagcgtggctgct

SEQ ID NO: 3748421 - DNA, 25 bp, Homo sapien
tctgaaatcgcttcatcaccagcac

SEQ ID NO: 3748422 - DNA, 25 bp, Homo sapien
aaggtgactgcggttaacgtcctcg

SEQ ID NO: 3748423 - DNA, 25 bp, Homo sapien
tgactgcggttaacgtcctcgatgg

SEQ ID NO: 3748424 - DNA, 25 bp, Homo sapien
taacgtcctcgatgggaatggccac

SEQ ID NO: 3748425 - DNA, 25 bp, Homo sapien
tgcggttaacgtcctcgatgggaat

SEQ ID NO: 3748426 - DNA, 25 bp, Homo sapien
accgtgctcgtgcatttgctctcca

SEQ ID NO: 3748427 - DNA, 25 bp, Homo sapien
aacatcatgaccgtgctcgtgcatt

SEQ ID NO: 3748428 - DNA, 25 bp, Homo sapien
cataacatcatgaccgtgctcgtgc

SEQ ID NO: 3748429 - DNA, 25 bp, Homo sapien
tcatgaccgtgctcgtgcatttgct

SEQ ID NO: 3748430 - DNA, 25 bp, Homo sapien
aggcccaagcttctcgatgatctgc

SEQ ID NO: 3748431 - DNA, 25 bp, Homo sapien
ccaagcttctcgatgatctgcacac

SEQ ID NO: 3748432 - DNA, 25 bp, Homo sapien
gcccaagcttctcgatgatctgcac

SEQ ID NO: 3748433 - DNA, 25 bp, Homo sapien
ggcccaagcttctcgatgatctgca

SEQ ID NO: 3748434 - DNA, 25 bp, Homo sapien
gaaggccatggtcagcggccgacat

SEQ ID NO: 3748435 - DNA, 25 bp, Homo sapien
ctgccccaggtatctgcatgcaggg

SEQ ID NO: 3748436 - DNA, 25 bp, Homo sapien
ctttcatcggcatcgcacctgcgat

SEQ ID NO: 3748437 - DNA, 25 bp, Homo sapien
ggtcagcggccgacatccaggcttt

SEQ ID NO: 3748438 - DNA, 25 bp, Homo sapien
gaggaaagcccgcaacactagaaag

SEQ ID NO: 3748439 - DNA, 25 bp, Homo sapien
cactagaaagcgagagtaactgtaa

SEQ ID NO: 3748440 - DNA, 25 bp, Homo sapien
tgtgctttcaacctaagacgcccag

SEQ ID NO: 3748441 - DNA, 25 bp, Homo sapien
ccagaccagcggaaatcaacagggc

SEQ ID NO: 3748442 - DNA, 25 bp, Homo sapien
tgctctccgtctcgcagggtggtac

SEQ ID NO: 3748443 - DNA, 25 bp, Homo sapien
catcagcttgacaaatgctagtgca

SEQ ID NO: 3748444 - DNA, 25 bp, Homo sapien
tatagacgataagatcgtgctctcc

SEQ ID NO: 3748445 - DNA, 25 bp, Homo sapien
ggtaccatcgtatctcatcagcttg

SEQ ID NO: 3748446 - DNA, 25 bp, Homo sapien
taattaaatgtagctagatagcagc

SEQ ID NO: 3748447 - DNA, 25 bp, Homo sapien
caatattgcaccaatgcaaccagat

SEQ ID NO: 3748448 - DNA, 25 bp, Homo sapien
gggagcccagaaaagactgaaactg

SEQ ID NO: 3748449 - DNA, 25 bp, Homo sapien
tcacaatgatgggaaaggttggtcc

SEQ ID NO: 3748450 - DNA, 25 bp, Homo sapien
gctaatggtgcagctcccaaggctc

SEQ ID NO: 3748451 - DNA, 25 bp, Homo sapien
agcacacgagcgtggagatctggaa

SEQ ID NO: 3748452 - DNA, 25 bp, Homo sapien
gactcaagtacgtggcagcatcttc

SEQ ID NO: 3748453 - DNA, 25 bp, Homo sapien
tcagtttggtggagcacacgagcgt

SEQ ID NO: 3748454 - DNA, 25 bp, Homo sapien
tacggagcacacctccacataggaa

SEQ ID NO: 3748455 - DNA, 25 bp, Homo sapien
acataggaaggagcatggaaaagac

SEQ ID NO: 3748456 - DNA, 25 bp, Homo sapien
gctcctggggtgagtgtgtttctcc

SEQ ID NO: 3748457 - DNA, 25 bp, Homo sapien
agtgtgtttctcctctcgaacgcac

SEQ ID NO: 3748458 - DNA, 25 bp, Homo sapien
gaggatgacgaattgagcactctac

SEQ ID NO: 3748459 - DNA, 25 bp, Homo sapien
gcacaaatggcagcagtcatcccag

SEQ ID NO: 3748460 - DNA, 25 bp, Homo sapien
aatgcctagtccaaagcacaaatgg

SEQ ID NO: 3748461 - DNA, 25 bp, Homo sapien
catgacgtgtagaaagcacttagca

SEQ ID NO: 3748462 - DNA, 25 bp, Homo sapien
cttcactacttcaccaccatcgact

SEQ ID NO: 3748463 - DNA, 25 bp, Homo sapien
tggtgttggagcgccatttcaagag

SEQ ID NO: 3748464 - DNA, 25 bp, Homo sapien
caccaccatcgactttcatcagctg

SEQ ID NO: 3748465 - DNA, 25 bp, Homo sapien
gtgttggagcgccatttcaagagcc

SEQ ID NO: 3748466 - DNA, 25 bp, Homo sapien
gggcatccaacgtgtcctgaagaaa

SEQ ID NO: 3748467 - DNA, 25 bp, Homo sapien
aagactaacgtgtcaaaagtctcac

SEQ ID NO: 3748468 - DNA, 25 bp, Homo sapien
tgaagagggcatccaacgtgtcctg

SEQ ID NO: 3748469 - DNA, 25 bp, Homo sapien
cagagcatcaaagactaacgtgtca

SEQ ID NO: 3748470 - DNA, 25 bp, Homo sapien
gctgaaattttctatcagcaatcag

SEQ ID NO: 3748471 - DNA, 25 bp, Homo sapien
taacgttgcactaaagtgtttctta

SEQ ID NO: 3748472 - DNA, 25 bp, Homo sapien
tcagcaatcagtccaatgataaata

SEQ ID NO: 3748473 - DNA, 25 bp, Homo sapien
gaaattttctatcagcaatcagtcc

SEQ ID NO: 3748474 - DNA, 25 bp, Homo sapien
gcaccgtccacgtagttcttcaaca

SEQ ID NO: 3748475 - DNA, 25 bp, Homo sapien
ggattctagcgctttcatggctttg

SEQ ID NO: 3748476 - DNA, 25 bp, Homo sapien
tgctcatttactcccggcttctcag

SEQ ID NO: 3748477 - DNA, 25 bp, Homo sapien
tcctggagcgcacgatgaacttgaa

SEQ ID NO: 3748478 - DNA, 25 bp, Homo sapien
tcacccggacggtctggtctgacat

SEQ ID NO: 3748479 - DNA, 25 bp, Homo sapien
gctgcagcaaagattccacgaagtc

SEQ ID NO: 3748480 - DNA, 25 bp, Homo sapien
agcctctcccttgttttcatacagt

SEQ ID NO: 3748481 - DNA, 25 bp, Homo sapien
attgatggacctgaagagctgcagc

SEQ ID NO: 3748482 - DNA, 25 bp, Homo sapien
gaagaggtgataccgagagacccca

SEQ ID NO: 3748483 - DNA, 25 bp, Homo sapien
tgaccccaggccttttcaatgcagc

SEQ ID NO: 3748484 - DNA, 25 bp, Homo sapien
tcaagtgaggtttcggtagcatggt

SEQ ID NO: 3748485 - DNA, 25 bp, Homo sapien
cactcaaggtaggtgatgtgcggca

SEQ ID NO: 3748486 - DNA, 25 bp, Homo sapien
gaagctgtctggatgtcacacactg

SEQ ID NO: 3748487 - DNA, 25 bp, Homo sapien
ggaacgcactggttctacttgggtc

SEQ ID NO: 3748488 - DNA, 25 bp, Homo sapien
ctggttctacttgggtctccacgag

SEQ ID NO: 3748489 - DNA, 25 bp, Homo sapien
gggctgcctatgaagctgtctggat

SEQ ID NO: 3748490 - DNA, 25 bp, Homo sapien
gggagctaaccctcaggaggctcct

SEQ ID NO: 3748491 - DNA, 25 bp, Homo sapien
tctatcaaccactgattgggggagc

SEQ ID NO: 3748492 - DNA, 25 bp, Homo sapien
cactgattgggggagctaaccctca

SEQ ID NO: 3748493 - DNA, 25 bp, Homo sapien
tgattgggggagctaaccctcagga

SEQ ID NO: 3748494 - DNA, 25 bp, Homo sapien
tctccattgatgtggatggcaggca

SEQ ID NO: 3748495 - DNA, 25 bp, Homo sapien
tgtcggcatctttccagcccaaagc

SEQ ID NO: 3748496 - DNA, 25 bp, Homo sapien
tgtccacttcgatggaaagctccac

SEQ ID NO: 3748497 - DNA, 25 bp, Homo sapien
accagggataatgtcggcatctttc

SEQ ID NO: 3748498 - DNA, 25 bp, Homo sapien
cctggggctctacacgacaatggaa

SEQ ID NO: 3748499 - DNA, 25 bp, Homo sapien
accccagttcaatccgcatgctggt

SEQ ID NO: 3748500 - DNA, 25 bp, Homo sapien
caggaaagttgcctgagcgtcaggg

SEQ ID NO: 3748501 - DNA, 25 bp, Homo sapien
tccgcatgctggtcaggaaagttgc

SEQ ID NO: 3748502 - DNA, 25 bp, Homo sapien
aaacacaaaggtcacagaagcaggt

SEQ ID NO: 3748503 - DNA, 25 bp, Homo sapien
agggaagtggctcccgactcatcca

SEQ ID NO: 3748504 - DNA, 25 bp, Homo sapien
taacttggccaacaatcctgtacca

SEQ ID NO: 3748505 - DNA, 25 bp, Homo sapien
gcccaatgacaagaagcatagaagg

SEQ ID NO: 3748506 - DNA, 25 bp, Homo sapien
taaatgccacatcgtaagtgaagtg

SEQ ID NO: 3748507 - DNA, 25 bp, Homo sapien
cggaatcagttggtcaatagccaca

SEQ ID NO: 3748508 - DNA, 25 bp, Homo sapien
taagacgcacagactttgcatgatg

SEQ ID NO: 3748509 - DNA, 25 bp, Homo sapien
cagatgagcgtttgcaggcctagta

SEQ ID NO: 3748510 - DNA, 25 bp, Homo sapien
gggtgcttgagaaatccaaactcat

SEQ ID NO: 3748511 - DNA, 25 bp, Homo sapien
taactccatgatttcatcaatacat

SEQ ID NO: 3748512 - DNA, 25 bp, Homo sapien
tcttgatgttgactatttgggtgct

SEQ ID NO: 3748513 - DNA, 25 bp, Homo sapien
gatgtgactttctaacctcctaatt

SEQ ID NO: 3748514 - DNA, 25 bp, Homo sapien
taacacacaggaatctagcactcag

SEQ ID NO: 3748515 - DNA, 25 bp, Homo sapien
cacataagacccacgtaggaagaga

SEQ ID NO: 3748516 - DNA, 25 bp, Homo sapien
aatcatgcttccgttaaacctgtgg

SEQ ID NO: 3748517 - DNA, 25 bp, Homo sapien
acagtgctggccacgagtgtatcat

SEQ ID NO: 3748518 - DNA, 25 bp, Homo sapien
gtgcacatagcaagatgtccacaca

SEQ ID NO: 3748519 - DNA, 25 bp, Homo sapien
aactccttggatgctgatttgactc

SEQ ID NO: 3748520 - DNA, 25 bp, Homo sapien
ggtgtcacttgctgtcaggaagttc

SEQ ID NO: 3748521 - DNA, 25 bp, Homo sapien
gatttgactcaacctttgcacccct

SEQ ID NO: 3748522 - DNA, 25 bp, Homo sapien
caggaagttctcaatttatcagcaa

SEQ ID NO: 3748523 - DNA, 25 bp, Homo sapien
tccttgaatccatgtgaaaagcgca

SEQ ID NO: 3748524 - DNA, 25 bp, Homo sapien
tccatgtgaaaagcgcacgtatatt

SEQ ID NO: 3748525 - DNA, 25 bp, Homo sapien
cgcacgtatattaaaacactaccct

SEQ ID NO: 3748526 - DNA, 25 bp, Homo sapien
actaccctttccaataacatccaca

SEQ ID NO: 3748527 - DNA, 25 bp, Homo sapien
ttcctccaagaaggtgaacatcagc

SEQ ID NO: 3748528 - DNA, 25 bp, Homo sapien
tttgaagtaaaaccgccagcagtcc

SEQ ID NO: 3748529 - DNA, 25 bp, Homo sapien
gataactgctcatctaagaaaatcg

SEQ ID NO: 3748530 - DNA, 25 bp, Homo sapien
caggtatggaatgttccaaatcaga

SEQ ID NO: 3748531 - DNA, 25 bp, Homo sapien
ggaaaatgagcagtcgttttgtgct

SEQ ID NO: 3748532 - DNA, 25 bp, Homo sapien
aaaatgagcagtcgttttgtgcttg

SEQ ID NO: 3748533 - DNA, 25 bp, Homo sapien
atgagcagtcgttttgtgcttgggg

SEQ ID NO: 3748534 - DNA, 25 bp, Homo sapien
aaatgagcagtcgttttgtgcttgg

SEQ ID NO: 3748535 - DNA, 25 bp, Homo sapien
cttcttaatgagttccggtgccact

SEQ ID NO: 3748536 - DNA, 25 bp, Homo sapien
tgcaagccactatcagtgccagtgc

SEQ ID NO: 3748537 - DNA, 25 bp, Homo sapien
gccatgtcttgccaaatgcaagcca

SEQ ID NO: 3748538 - DNA, 25 bp, Homo sapien
tgccagtgccttcattaagcaaggt

SEQ ID NO: 3748539 - DNA, 25 bp, Homo sapien
tcttcattcggtgcaaacttccatt

SEQ ID NO: 3748540 - DNA, 25 bp, Homo sapien
tgtggacccatgcacgtgttgacat

SEQ ID NO: 3748541 - DNA, 25 bp, Homo sapien
tggaaaacctcctcagcgtgcacat

SEQ ID NO: 3748542 - DNA, 25 bp, Homo sapien
gcgtgcacatctctcaaacctgaat

SEQ ID NO: 3748543 - DNA, 25 bp, Homo sapien
cttgggctgccggacactgtgtgaa

SEQ ID NO: 3748544 - DNA, 25 bp, Homo sapien
tcgggaccgacagaccgccaagcgg

SEQ ID NO: 3748545 - DNA, 25 bp, Homo sapien
tgccgtggtcttcccgagctcctag

SEQ ID NO: 3748546 - DNA, 25 bp, Homo sapien
cgagctcctagcatcaaaaatgtca

SEQ ID NO: 3748547 - DNA, 25 bp, Homo sapien
tgacgatcgttggtaagtatttcag

SEQ ID NO: 3748548 - DNA, 25 bp, Homo sapien
caatttcacatcgttgacgatcgtt

SEQ ID NO: 3748549 - DNA, 25 bp, Homo sapien
catcgttgacgatcgttggtaagta

SEQ ID NO: 3748550 - DNA, 25 bp, Homo sapien
ttcacatcgttgacgatcgttggta

SEQ ID NO: 3748551 - DNA, 25 bp, Homo sapien
acattgaggatgaattcagtaaaca

SEQ ID NO: 3748552 - DNA, 25 bp, Homo sapien
gatttcgatcaagcagtagagtttc

SEQ ID NO: 3748553 - DNA, 25 bp, Homo sapien
gaggtcactgtggacgatttcgatc

SEQ ID NO: 3748554 - DNA, 25 bp, Homo sapien
caagcccatgggaacattgaggatg

SEQ ID NO: 3748555 - DNA, 25 bp, Homo sapien
aattttcggaggattttacttgctg

SEQ ID NO: 3748556 - DNA, 25 bp, Homo sapien
cggaggattttacttgctgtggtac

SEQ ID NO: 3748557 - DNA, 25 bp, Homo sapien
acttgctgtggtacaaagcttattc

SEQ ID NO: 3748558 - DNA, 25 bp, Homo sapien
tttcggaggattttacttgctgtgg

SEQ ID NO: 3748559 - DNA, 25 bp, Homo sapien
gctgaactctggtgtccttatctga

SEQ ID NO: 3748560 - DNA, 25 bp, Homo sapien
tgactctgaagactctcaaaggaag

SEQ ID NO: 3748561 - DNA, 25 bp, Homo sapien
ccttatctgagcattgagataatca

SEQ ID NO: 3748562 - DNA, 25 bp, Homo sapien
gaagcaaactcgctaatcaatggtt

SEQ ID NO: 3748563 - DNA, 25 bp, Homo sapien
taagaaaagagtgggctgatagatt

SEQ ID NO: 3748564 - DNA, 25 bp, Homo sapien
agtgggctgatagatttgtaagaag

SEQ ID NO: 3748565 - DNA, 25 bp, Homo sapien
ggctgatagatttgtaagaagccac

SEQ ID NO: 3748566 - DNA, 25 bp, Homo sapien
ttaagaaaagagtgggctgatagat

SEQ ID NO: 3748567 - DNA, 25 bp, Homo sapien
gaaacccaccaagacgcaactcgtg

SEQ ID NO: 3748568 - DNA, 25 bp, Homo sapien
acgttgtgcaacacgtggaactgac

SEQ ID NO: 3748569 - DNA, 25 bp, Homo sapien
tgtctgccctttcaagcagtttgca

SEQ ID NO: 3748570 - DNA, 25 bp, Homo sapien
tgtttgctataagcttgtctgccct

SEQ ID NO: 3748571 - DNA, 25 bp, Homo sapien
cctgtctctccagatggtacttgag

SEQ ID NO: 3748572 - DNA, 25 bp, Homo sapien
tctctccagatggtacttgagctga

SEQ ID NO: 3748573 - DNA, 25 bp, Homo sapien
aggtcctcctgtctctccagatggt

SEQ ID NO: 3748574 - DNA, 25 bp, Homo sapien
ccagatggtacttgagctgatcggt

SEQ ID NO: 3748575 - DNA, 25 bp, Homo sapien
cgtcccatggaaatgacggttcggt

SEQ ID NO: 3748576 - DNA, 25 bp, Homo sapien
tctggacgtgcctctgggttggccc

SEQ ID NO: 3748577 - DNA, 25 bp, Homo sapien
atggaaatgacggttcggttcacgg

SEQ ID NO: 3748578 - DNA, 25 bp, Homo sapien
tctcgtcccatggaaatgacggttc

SEQ ID NO: 3748579 - DNA, 25 bp, Homo sapien
agttggagaaggatgctgtcagccc

SEQ ID NO: 3748580 - DNA, 25 bp, Homo sapien
gaaactgccagaagaatgacgactc

SEQ ID NO: 3748581 - DNA, 25 bp, Homo sapien
taagctatgttcaaacagcagttgg

SEQ ID NO: 3748582 - DNA, 25 bp, Homo sapien
taatggcaccttaagtgtaaacact

SEQ ID NO: 3748583 - DNA, 25 bp, Homo sapien
gctcagtcctttcgatgacttctga

SEQ ID NO: 3748584 - DNA, 25 bp, Homo sapien
ctgtgtcttatagaagggactgaca

SEQ ID NO: 3748585 - DNA, 25 bp, Homo sapien
catacatgggaaccaaatccaggct

SEQ ID NO: 3748586 - DNA, 25 bp, Homo sapien
tgacttctgaagtggaccacggcca

SEQ ID NO: 3748587 - DNA, 25 bp, Homo sapien
tgccaaatgcttgatatcaatgtgg

SEQ ID NO: 3748588 - DNA, 25 bp, Homo sapien
ctatgccaaatgcttgatatcaatg

SEQ ID NO: 3748589 - DNA, 25 bp, Homo sapien
ccaaatgcttgatatcaatgtggct

SEQ ID NO: 3748590 - DNA, 25 bp, Homo sapien
tatgccaaatgcttgatatcaatgt

SEQ ID NO: 3748591 - DNA, 25 bp, Homo sapien
taagatataatggaatggaacagcc

SEQ ID NO: 3748592 - DNA, 25 bp, Homo sapien
caaattggaagagcaagggcaggca

SEQ ID NO: 3748593 - DNA, 25 bp, Homo sapien
tacaaggtcccactaaacaactcga

SEQ ID NO: 3748594 - DNA, 25 bp, Homo sapien
taaacagggtagcatttcactcaca

SEQ ID NO: 3748595 - DNA, 25 bp, Homo sapien
caatatacaactgactgcaaagtcg

SEQ ID NO: 3748596 - DNA, 25 bp, Homo sapien
agcacattattatcctaggcacgag

SEQ ID NO: 3748597 - DNA, 25 bp, Homo sapien
tctaattaagtgtgaagttccccag

SEQ ID NO: 3748598 - DNA, 25 bp, Homo sapien
tgtcagggcataatcacattcccag

SEQ ID NO: 3748599 - DNA, 25 bp, Homo sapien
taaaaggcactattcactgggaaac

SEQ ID NO: 3748600 - DNA, 25 bp, Homo sapien
cttgtgtctagggagtcaggatgct

SEQ ID NO: 3748601 - DNA, 25 bp, Homo sapien
tatgatgactatacaaaacccagac

SEQ ID NO: 3748602 - DNA, 25 bp, Homo sapien
ttttccaaatgaaggagcatgtcag

SEQ ID NO: 3748603 - DNA, 25 bp, Homo sapien
agacagaccatcaaatactggcctt

SEQ ID NO: 3748604 - DNA, 25 bp, Homo sapien
gacagaccatcaaatactggccttt

SEQ ID NO: 3748605 - DNA, 25 bp, Homo sapien
aagacagaccatcaaatactggcct

SEQ ID NO: 3748606 - DNA, 25 bp, Homo sapien
acagaccatcaaatactggcctttc

SEQ ID NO: 3748607 - DNA, 25 bp, Homo sapien
tctgcggaaacactatatgaagttc

SEQ ID NO: 3748608 - DNA, 25 bp, Homo sapien
cacatctagtggagtgctgacatgc

SEQ ID NO: 3748609 - DNA, 25 bp, Homo sapien
ccttggtaaaaggatctcacctgct

SEQ ID NO: 3748610 - DNA, 25 bp, Homo sapien
tagtgatcagtaaccagatcgggcc

SEQ ID NO: 3748611 - DNA, 25 bp, Homo sapien
tctgtgcttgcacgccatggcttga

SEQ ID NO: 3748612 - DNA, 25 bp, Homo sapien
acagaaaaacgatgcatggaccggg

SEQ ID NO: 3748613 - DNA, 25 bp, Homo sapien
caagttagaagatcaaatgtggtcc

SEQ ID NO: 3748614 - DNA, 25 bp, Homo sapien
tcaaagacatggagacgagagggct

SEQ ID NO: 3748615 - DNA, 25 bp, Homo sapien
tacgtaggcaactgctaggacccag

SEQ ID NO: 3748616 - DNA, 25 bp, Homo sapien
tctagcaatattacgtaggcaactg

SEQ ID NO: 3748617 - DNA, 25 bp, Homo sapien
cagcccctgctatagttgctggaaa

SEQ ID NO: 3748618 - DNA, 25 bp, Homo sapien
gccttttaagactctgttctcattc

SEQ ID NO: 3748619 - DNA, 25 bp, Homo sapien
ggaaaaccaccagtacgacaagcga

SEQ ID NO: 3748620 - DNA, 25 bp, Homo sapien
tgagaaacatcagcccgtgagagcc

SEQ ID NO: 3748621 - DNA, 25 bp, Homo sapien
tgctgtcagatcaaagcctggctct

SEQ ID NO: 3748622 - DNA, 25 bp, Homo sapien
tagaaacacaattccagcagcaggg

SEQ ID NO: 3748623 - DNA, 25 bp, Homo sapien
catgggtgcaccacttatgtcgtga

SEQ ID NO: 3748624 - DNA, 25 bp, Homo sapien
gccagttagttaagggtcccagcat

SEQ ID NO: 3748625 - DNA, 25 bp, Homo sapien
gacgttttctttgaatgtggcaccc

SEQ ID NO: 3748626 - DNA, 25 bp, Homo sapien
caggtccaggaacaaatctagcatc

SEQ ID NO: 3748627 - DNA, 25 bp, Homo sapien
cttgctagaagaactgcgagtgacc

SEQ ID NO: 3748628 - DNA, 25 bp, Homo sapien
gtgagtcaagacatccagggtaggt

SEQ ID NO: 3748629 - DNA, 25 bp, Homo sapien
gacataaaatgaccctccgtgaaca

SEQ ID NO: 3748630 - DNA, 25 bp, Homo sapien
gagtgaccaagcaccacaggaattt

SEQ ID NO: 3748631 - DNA, 25 bp, Homo sapien
gaaaccacaggtagagataggcacc

SEQ ID NO: 3748632 - DNA, 25 bp, Homo sapien
cgatccagacagagcatcccagata

SEQ ID NO: 3748633 - DNA, 25 bp, Homo sapien
gaggcttgaggctacacaatcttca

SEQ ID NO: 3748634 - DNA, 25 bp, Homo sapien
tctcccaagggaaagcctagacctg

SEQ ID NO: 3748635 - DNA, 25 bp, Homo sapien
tagtttgctggacaaaaccaggccc

SEQ ID NO: 3748636 - DNA, 25 bp, Homo sapien
ggtagagcaaacataagccatggag

SEQ ID NO: 3748637 - DNA, 25 bp, Homo sapien
tttgtacaacgaaagcagagacagg

SEQ ID NO: 3748638 - DNA, 25 bp, Homo sapien
taaatctgcattgaaacatcccaca

SEQ ID NO: 3748639 - DNA, 25 bp, Homo sapien
tgcatgctgagctaaacctgagagg

SEQ ID NO: 3748640 - DNA, 25 bp, Homo sapien
gaccaaggagtgttcaaaaggcatc

SEQ ID NO: 3748641 - DNA, 25 bp, Homo sapien
gaggctagagggtcaacagaacaga

SEQ ID NO: 3748642 - DNA, 25 bp, Homo sapien
gagaggtagccctgactagagctcc

SEQ ID NO: 3748643 - DNA, 25 bp, Homo sapien
gatgccctcttttgccaacggtccg

SEQ ID NO: 3748644 - DNA, 25 bp, Homo sapien
tatgtggccgggaagaaagcttgca

SEQ ID NO: 3748645 - DNA, 25 bp, Homo sapien
taagcagagcttggatatgtggccg

SEQ ID NO: 3748646 - DNA, 25 bp, Homo sapien
atgaaagagcagatgccgtccagcc

SEQ ID NO: 3748647 - DNA, 25 bp, Homo sapien
tctagtttgatagccagtgccacca

SEQ ID NO: 3748648 - DNA, 25 bp, Homo sapien
cattggttacagcactaggttatcc

SEQ ID NO: 3748649 - DNA, 25 bp, Homo sapien
ccaggcctggtagggttcatgccaa

SEQ ID NO: 3748650 - DNA, 25 bp, Homo sapien
agttaatcaactcggcctcagctgg

SEQ ID NO: 3748651 - DNA, 25 bp, Homo sapien
gacttgcgttaacctagaatattga

SEQ ID NO: 3748652 - DNA, 25 bp, Homo sapien
tgacagcatctcttggaaacatgaa

SEQ ID NO: 3748653 - DNA, 25 bp, Homo sapien
catgtttgcgtgatgtgacttgcgt

SEQ ID NO: 3748654 - DNA, 25 bp, Homo sapien
gggtcctgctttggaactctgtgtg

SEQ ID NO: 3748655 - DNA, 25 bp, Homo sapien
taacggctcacgcaaatagatttct

SEQ ID NO: 3748656 - DNA, 25 bp, Homo sapien
tagatgcagggaaacccacgttcct

SEQ ID NO: 3748657 - DNA, 25 bp, Homo sapien
acatttatctgctcgagacgtggca

SEQ ID NO: 3748658 - DNA, 25 bp, Homo sapien
tgttaacccatgagaagcgaccacc

SEQ ID NO: 3748659 - DNA, 25 bp, Homo sapien
ggtattccccgagaggagtcattgg

SEQ ID NO: 3748660 - DNA, 25 bp, Homo sapien
ttccccgagaggagtcattggccac

SEQ ID NO: 3748661 - DNA, 25 bp, Homo sapien
tattccccgagaggagtcattggcc

SEQ ID NO: 3748662 - DNA, 25 bp, Homo sapien
tggtattccccgagaggagtcattg

SEQ ID NO: 3748663 - DNA, 25 bp, Homo sapien
agttgtctcttcttcccccttatgg

SEQ ID NO: 3748664 - DNA, 25 bp, Homo sapien
ccccttatggaaccaccgtgcacct

SEQ ID NO: 3748665 - DNA, 25 bp, Homo sapien
tttagatggtggctgtgaagttgtc

SEQ ID NO: 3748666 - DNA, 25 bp, Homo sapien
cttatggaaccaccgtgcacctcgg

SEQ ID NO: 3748667 - DNA, 25 bp, Homo sapien
atgatggcacaatacattctgacat

SEQ ID NO: 3748668 - DNA, 25 bp, Homo sapien
cttctgcagaatgatggcacaatac

SEQ ID NO: 3748669 - DNA, 25 bp, Homo sapien
gatggcacaatacattctgacatac

SEQ ID NO: 3748670 - DNA, 25 bp, Homo sapien
tctgcagaatgatggcacaatacat

SEQ ID NO: 3748671 - DNA, 25 bp, Homo sapien
ccctgggaggtgtctcggtcagact

SEQ ID NO: 3748672 - DNA, 25 bp, Homo sapien
tgggccctgggaggtgtctcggtca

SEQ ID NO: 3748673 - DNA, 25 bp, Homo sapien
aatcccatcacagggtcaaactgca

SEQ ID NO: 3748674 - DNA, 25 bp, Homo sapien
ccacaaatcccatcacagggtcaaa

SEQ ID NO: 3748675 - DNA, 25 bp, Homo sapien
gagtagcctcatgttcaggcacccc

SEQ ID NO: 3748676 - DNA, 25 bp, Homo sapien
attctgagtagcctcatgttcaggc

SEQ ID NO: 3748677 - DNA, 25 bp, Homo sapien
cttccggtggaagccggtggtgaag

SEQ ID NO: 3748678 - DNA, 25 bp, Homo sapien
tctgagtagcctcatgttcaggcac

SEQ ID NO: 3748679 - DNA, 25 bp, Homo sapien
tttccacaagccttgtaaagtagca

SEQ ID NO: 3748680 - DNA, 25 bp, Homo sapien
aagtagcagggcatctgttccaagg

SEQ ID NO: 3748681 - DNA, 25 bp, Homo sapien
caggcttttgctactgttctctttc

SEQ ID NO: 3748682 - DNA, 25 bp, Homo sapien
tattcatgaactacacaggcttttg

SEQ ID NO: 3748683 - DNA, 25 bp, Homo sapien
cgggagcggacccggtgcggtcgca

SEQ ID NO: 3748684 - DNA, 25 bp, Homo sapien
gcttggccggaaactcggcggctcc

SEQ ID NO: 3748685 - DNA, 25 bp, Homo sapien
agcggacccggtgcggtcgcaggtg

SEQ ID NO: 3748686 - DNA, 25 bp, Homo sapien
cggcttggccggaaactcggcggct

SEQ ID NO: 3748687 - DNA, 25 bp, Homo sapien
cagtaaatgaggacatcggaggagc

SEQ ID NO: 3748688 - DNA, 25 bp, Homo sapien
aattgcagtaaatgaggacatcgga

SEQ ID NO: 3748689 - DNA, 25 bp, Homo sapien
gccgcgtcgcgagcaagcgagcgcg

SEQ ID NO: 3748690 - DNA, 25 bp, Homo sapien
tggctccgccgcgtcgcgagcaagc

SEQ ID NO: 3748691 - DNA, 25 bp, Homo sapien
ctacaggtcgaaggcgatatgagtt

SEQ ID NO: 3748692 - DNA, 25 bp, Homo sapien
gaaggcgatatgagttacttttccc

SEQ ID NO: 3748693 - DNA, 25 bp, Homo sapien
gatctgctaccacagcttctgaact

SEQ ID NO: 3748694 - DNA, 25 bp, Homo sapien
tacttttccctcgtaggcgttgagc

SEQ ID NO: 3748695 - DNA, 25 bp, Homo sapien
taccagcaaggattaagacaagccc

SEQ ID NO: 3748696 - DNA, 25 bp, Homo sapien
gaaagccagggatctcaacgagtcc

SEQ ID NO: 3748697 - DNA, 25 bp, Homo sapien
tcactgcctcagttgcagggagcat

SEQ ID NO: 3748698 - DNA, 25 bp, Homo sapien
caatgatgcatcatagaaagccagg

SEQ ID NO: 3748699 - DNA, 25 bp, Homo sapien
cactaagcgcataaaatgtcaaggg

SEQ ID NO: 3748700 - DNA, 25 bp, Homo sapien
gccacgctgcgaaataaatacatct

SEQ ID NO: 3748701 - DNA, 25 bp, Homo sapien
catctaaagtcaggtcgtcaattct

SEQ ID NO: 3748702 - DNA, 25 bp, Homo sapien
ttcaagataatcaaaaggccatggt

SEQ ID NO: 3748703 - DNA, 25 bp, Homo sapien
ggccaataaccaccaaatgtaagac

SEQ ID NO: 3748704 - DNA, 25 bp, Homo sapien
tgtaagacttcataaaaaatctcat

SEQ ID NO: 3748705 - DNA, 25 bp, Homo sapien
acagtggtttccataggtaatgggc

SEQ ID NO: 3748706 - DNA, 25 bp, Homo sapien
cgccgaagtccagagcgcatgctga

SEQ ID NO: 3748707 - DNA, 25 bp, Homo sapien
atgtgcctggcacccatgcagtcca

SEQ ID NO: 3748708 - DNA, 25 bp, Homo sapien
cagaggggcagagtcaccagctatg

SEQ ID NO: 3748709 - DNA, 25 bp, Homo sapien
aggggcagagtcaccagctatgtgc

SEQ ID NO: 3748710 - DNA, 25 bp, Homo sapien
gcagagtcaccagctatgtgcctgg

SEQ ID NO: 3748711 - DNA, 25 bp, Homo sapien
ctttcggaacatgcagtgggctggc

SEQ ID NO: 3748712 - DNA, 25 bp, Homo sapien
tgatttgcaagagtccagcagcggg

SEQ ID NO: 3748713 - DNA, 25 bp, Homo sapien
agggacctccttgtatctcagcgca

SEQ ID NO: 3748714 - DNA, 25 bp, Homo sapien
caaatcggagacacaaacggcagct

SEQ ID NO: 3748715 - DNA, 25 bp, Homo sapien
aaataattcgaggtgtctgcaagcg

SEQ ID NO: 3748716 - DNA, 25 bp, Homo sapien
aaggagaggcttaactcacgcaggc

SEQ ID NO: 3748717 - DNA, 25 bp, Homo sapien
cctaaaggaaatgagagcttcggcc

SEQ ID NO: 3748718 - DNA, 25 bp, Homo sapien
ccttgctgggcatcgggaaatcact

SEQ ID NO: 3748719 - DNA, 25 bp, Homo sapien
aatagtcattctccatcttaaataa

SEQ ID NO: 3748720 - DNA, 25 bp, Homo sapien
taaataacatgatccaaagccatct

SEQ ID NO: 3748721 - DNA, 25 bp, Homo sapien
gccatctctggatataattaaatca

SEQ ID NO: 3748722 - DNA, 25 bp, Homo sapien
aactggttttccatggatgaaaagc

SEQ ID NO: 3748723 - DNA, 25 bp, Homo sapien
ctttcccatataaacaacccatggt

SEQ ID NO: 3748724 - DNA, 25 bp, Homo sapien
acctttcccatataaacaacccatg

SEQ ID NO: 3748725 - DNA, 25 bp, Homo sapien
tcataaaacctttcccatataaaca

SEQ ID NO: 3748726 - DNA, 25 bp, Homo sapien
ttcccatataaacaacccatggtga

SEQ ID NO: 3748727 - DNA, 25 bp, Homo sapien
caagtgggcataatggtaatcttcc

SEQ ID NO: 3748728 - DNA, 25 bp, Homo sapien
tccatttgtcgtaaaatagctgtca

SEQ ID NO: 3748729 - DNA, 25 bp, Homo sapien
gctgtcatgcaagccacgaagtttc

SEQ ID NO: 3748730 - DNA, 25 bp, Homo sapien
tggtaatcttccatttgtcgtaaaa

SEQ ID NO: 3748731 - DNA, 25 bp, Homo sapien
cacaggggactccaaatccatcaac

SEQ ID NO: 3748732 - DNA, 25 bp, Homo sapien
atcaacttaggtccatccttgtcct

SEQ ID NO: 3748733 - DNA, 25 bp, Homo sapien
tccatcaacttaggtccatccttgt

SEQ ID NO: 3748734 - DNA, 25 bp, Homo sapien
aaatccatcaacttaggtccatcct

SEQ ID NO: 3748735 - DNA, 25 bp, Homo sapien
ttattttgcaccatgttcatgatca

SEQ ID NO: 3748736 - DNA, 25 bp, Homo sapien
tcatgatcacccagtcgaaggggta

SEQ ID NO: 3748737 - DNA, 25 bp, Homo sapien
tgatcacccagtcgaaggggtaaac

SEQ ID NO: 3748738 - DNA, 25 bp, Homo sapien
ttttgcaccatgttcatgatcaccc

SEQ ID NO: 3748739 - DNA, 25 bp, Homo sapien
gacggagctcaagttcttagagcca

SEQ ID NO: 3748740 - DNA, 25 bp, Homo sapien
tgtctccctagaactgtctgcagca

SEQ ID NO: 3748741 - DNA, 25 bp, Homo sapien
aacatgagagcgcagagcgacgtcg

SEQ ID NO: 3748742 - DNA, 25 bp, Homo sapien
gaattaggaacagcgtttgcagagc

SEQ ID NO: 3748743 - DNA, 25 bp, Homo sapien
acggaatccacagcctgagagccag

SEQ ID NO: 3748744 - DNA, 25 bp, Homo sapien
cacggaatccacagcctgagagcca

SEQ ID NO: 3748745 - DNA, 25 bp, Homo sapien
gggccacggaatccacagcctgaga

SEQ ID NO: 3748746 - DNA, 25 bp, Homo sapien
ccagggccacggaatccacagcctg

SEQ ID NO: 3748747 - DNA, 25 bp, Homo sapien
gatgcggctatgatgttccaactga

SEQ ID NO: 3748748 - DNA, 25 bp, Homo sapien
tggctttgcatcacggccagtgctg

SEQ ID NO: 3748749 - DNA, 25 bp, Homo sapien
cagtgaagtaggaagagagaatgat

SEQ ID NO: 3748750 - DNA, 25 bp, Homo sapien
cagtgctgcagcaacccttacgtag

SEQ ID NO: 3748751 - DNA, 25 bp, Homo sapien
tctgtcaggcgccataccctgtgaa

SEQ ID NO: 3748752 - DNA, 25 bp, Homo sapien
aaaatgccactgtaccaacctgctg

SEQ ID NO: 3748753 - DNA, 25 bp, Homo sapien
ctgcagcgcgggtacctctgtcagg

SEQ ID NO: 3748754 - DNA, 25 bp, Homo sapien
aaggctttggtccaaaatgccactg

SEQ ID NO: 3748755 - DNA, 25 bp, Homo sapien
ccactgcacacatatttctatgtat

SEQ ID NO: 3748756 - DNA, 25 bp, Homo sapien
agccactgcacacatatttctatgt

SEQ ID NO: 3748757 - DNA, 25 bp, Homo sapien
gccactgcacacatatttctatgta

SEQ ID NO: 3748758 - DNA, 25 bp, Homo sapien
actgcacacatatttctatgtattt

SEQ ID NO: 3748759 - DNA, 25 bp, Homo sapien
cgtcaagctctctattctcgttatg

SEQ ID NO: 3748760 - DNA, 25 bp, Homo sapien
tcactgaggacctcctcgtcaagct

SEQ ID NO: 3748761 - DNA, 25 bp, Homo sapien
tgttaccaaaactgagcgtggtcag

SEQ ID NO: 3748762 - DNA, 25 bp, Homo sapien
tctctattctcgttatgccaacggg

SEQ ID NO: 3748763 - DNA, 25 bp, Homo sapien
gctggcttccggaactccagtccta

SEQ ID NO: 3748764 - DNA, 25 bp, Homo sapien
ggggagctggcttccggaactccag

SEQ ID NO: 3748765 - DNA, 25 bp, Homo sapien
gggagctggcttccggaactccagt

SEQ ID NO: 3748766 - DNA, 25 bp, Homo sapien
aactccagtcctatccactgggtcc

SEQ ID NO: 3748767 - DNA, 25 bp, Homo sapien
tctgggaatttgacaggtacagtat

SEQ ID NO: 3748768 - DNA, 25 bp, Homo sapien
aagtaatcgtgcacagcagccttcc

SEQ ID NO: 3748769 - DNA, 25 bp, Homo sapien
gatggaactgatgtcatgcagttgg

SEQ ID NO: 3748770 - DNA, 25 bp, Homo sapien
tgggaaaggttgaccacaaaacagc

SEQ ID NO: 3748771 - DNA, 25 bp, Homo sapien
ttctacatgaaacagtcagcgatgg

SEQ ID NO: 3748772 - DNA, 25 bp, Homo sapien
tttatggaggatgagccatttactt

SEQ ID NO: 3748773 - DNA, 25 bp, Homo sapien
ggaggatgagccatttacttctcat

SEQ ID NO: 3748774 - DNA, 25 bp, Homo sapien
aagttctacatgaaacagtcagcga

SEQ ID NO: 3748775 - DNA, 25 bp, Homo sapien
cctgctaagggaacagatgtgcatc

SEQ ID NO: 3748776 - DNA, 25 bp, Homo sapien
cttaggtagtttcacggagcccaga

SEQ ID NO: 3748777 - DNA, 25 bp, Homo sapien
gcatctagggtcctcagcacggagt

SEQ ID NO: 3748778 - DNA, 25 bp, Homo sapien
cataacaggtcgtcaagcaggaggg

SEQ ID NO: 3748779 - DNA, 25 bp, Homo sapien
cacatggagttatccgagggcaaca

SEQ ID NO: 3748780 - DNA, 25 bp, Homo sapien
cacgattcaggcctacacatggagt

SEQ ID NO: 3748781 - DNA, 25 bp, Homo sapien
tcaaaaacaagcagacccaggtgtt

SEQ ID NO: 3748782 - DNA, 25 bp, Homo sapien
gattgcagtagacgcatcgggctga

SEQ ID NO: 3748783 - DNA, 25 bp, Homo sapien
gatcaacagcatacctgacaagcag

SEQ ID NO: 3748784 - DNA, 25 bp, Homo sapien
ccagtatcagctctcggcgggttga

SEQ ID NO: 3748785 - DNA, 25 bp, Homo sapien
tgtcacttcacatcatcggcaggtt

SEQ ID NO: 3748786 - DNA, 25 bp, Homo sapien
ttaaagcccatcactgcaggtggag

SEQ ID NO: 3748787 - DNA, 25 bp, Homo sapien
aaaacttaaattcctggcatcaagt

SEQ ID NO: 3748788 - DNA, 25 bp, Homo sapien
tatatgtgctatccttatttaagaa

SEQ ID NO: 3748789 - DNA, 25 bp, Homo sapien
cttgtttatcaagttacccagcctc

SEQ ID NO: 3748790 - DNA, 25 bp, Homo sapien
tatttaagaataggacaacttggcc

SEQ ID NO: 3748791 - DNA, 25 bp, Homo sapien
tgctaaccgttgtcagaataactct

SEQ ID NO: 3748792 - DNA, 25 bp, Homo sapien
tgtctgctgtccatatttcatgctg

SEQ ID NO: 3748793 - DNA, 25 bp, Homo sapien
tcttttctagtgaccatgcacctgc

SEQ ID NO: 3748794 - DNA, 25 bp, Homo sapien
tctttccttaacaggacatggtgtt

SEQ ID NO: 3748795 - DNA, 25 bp, Homo sapien
agagctcctgactccggacactgtg

SEQ ID NO: 3748796 - DNA, 25 bp, Homo sapien
ggctcccggacatgtattaagttgc

SEQ ID NO: 3748797 - DNA, 25 bp, Homo sapien
gtgaatgtgcactcgaatccagagc

SEQ ID NO: 3748798 - DNA, 25 bp, Homo sapien
ccaactatatgaggcggctcccgga

SEQ ID NO: 3748799 - DNA, 25 bp, Homo sapien
agtccacttataaagaaatccttgg

SEQ ID NO: 3748800 - DNA, 25 bp, Homo sapien
ccttggaaatcaatgagagagcact

SEQ ID NO: 3748801 - DNA, 25 bp, Homo sapien
gccagtatttcttccgggcagaaga

SEQ ID NO: 3748802 - DNA, 25 bp, Homo sapien
aagagccttggagaatgccagtatt

SEQ ID NO: 3748803 - DNA, 25 bp, Homo sapien
gggataggagggacctgtgctcagc

SEQ ID NO: 3748804 - DNA, 25 bp, Homo sapien
cacagccatggggagtgggttcaga

SEQ ID NO: 3748805 - DNA, 25 bp, Homo sapien
cagagcacctccttggggataggag

SEQ ID NO: 3748806 - DNA, 25 bp, Homo sapien
gataggagggacctgtgctcagcct

SEQ ID NO: 3748807 - DNA, 25 bp, Homo sapien
taattagcttgtacacttcaatatg

SEQ ID NO: 3748808 - DNA, 25 bp, Homo sapien
ttagcttgtacacttcaatatgagg

SEQ ID NO: 3748809 - DNA, 25 bp, Homo sapien
agcttgtacacttcaatatgagggc

SEQ ID NO: 3748810 - DNA, 25 bp, Homo sapien
cttgtacacttcaatatgagggcat

SEQ ID NO: 3748811 - DNA, 25 bp, Homo sapien
tatttgcagagtaccctagggtcct

SEQ ID NO: 3748812 - DNA, 25 bp, Homo sapien
gactattaatggagggacgcaggca

SEQ ID NO: 3748813 - DNA, 25 bp, Homo sapien
gaaacctatcggctagctctgggac

SEQ ID NO: 3748814 - DNA, 25 bp, Homo sapien
gatgtacatgcagcaaccccagaga

SEQ ID NO: 3748815 - DNA, 25 bp, Homo sapien
tctcttcagccaagcgtgcctggag

SEQ ID NO: 3748816 - DNA, 25 bp, Homo sapien
tccccacgccctggccatgtcacag

SEQ ID NO: 3748817 - DNA, 25 bp, Homo sapien
tatctcttcagccaagcgtgcctgg

SEQ ID NO: 3748818 - DNA, 25 bp, Homo sapien
ggagaagctccccacgccctggcca

SEQ ID NO: 3748819 - DNA, 25 bp, Homo sapien
agtaactgctgtcctctgacagcat

SEQ ID NO: 3748820 - DNA, 25 bp, Homo sapien
tagtaactgctgtcctctgacagca

SEQ ID NO: 3748821 - DNA, 25 bp, Homo sapien
cagcatatctgcatactgattaatt

SEQ ID NO: 3748822 - DNA, 25 bp, Homo sapien
tatctgcatactgattaattgctcg

SEQ ID NO: 3748823 - DNA, 25 bp, Homo sapien
ctgattaattgctcgcaggaagact

SEQ ID NO: 3748824 - DNA, 25 bp, Homo sapien
ctcaaagttggcttgatccagaaat

SEQ ID NO: 3748825 - DNA, 25 bp, Homo sapien
ccagttgcagggactcttgagtaag

SEQ ID NO: 3748826 - DNA, 25 bp, Homo sapien
ggctctcttggcacttgaaaaattc

SEQ ID NO: 3748827 - DNA, 25 bp, Homo sapien
tcttgagtaaggaaagcaacagcca

SEQ ID NO: 3748828 - DNA, 25 bp, Homo sapien
tcttggcacttgaaaaattctccag

SEQ ID NO: 3748829 - DNA, 25 bp, Homo sapien
gccaagaaggaaccccgatagctct

SEQ ID NO: 3748830 - DNA, 25 bp, Homo sapien
taagcaataaagtcaaccacatgtg

SEQ ID NO: 3748831 - DNA, 25 bp, Homo sapien
cagaagctcctttcgaattgaagaa

SEQ ID NO: 3748832 - DNA, 25 bp, Homo sapien
tcttggattacactgacctggaacc

SEQ ID NO: 3748833 - DNA, 25 bp, Homo sapien
aggtgccgcttcagtccattcaaag

SEQ ID NO: 3748834 - DNA, 25 bp, Homo sapien
ctttcatggagctttggagaggttt

SEQ ID NO: 3748835 - DNA, 25 bp, Homo sapien
cggcaaggatctcggctttcatgga

SEQ ID NO: 3748836 - DNA, 25 bp, Homo sapien
tgcatgatgcaaactggggttacag

SEQ ID NO: 3748837 - DNA, 25 bp, Homo sapien
tatgaaaggaacaccgacagcagtg

SEQ ID NO: 3748838 - DNA, 25 bp, Homo sapien
cagagactgatgacgtggcaacacc

SEQ ID NO: 3748839 - DNA, 25 bp, Homo sapien
cacaggtatgatcgtggtgcactgc

SEQ ID NO: 3748840 - DNA, 25 bp, Homo sapien
gccaagccttagaacagtcgagata

SEQ ID NO: 3748841 - DNA, 25 bp, Homo sapien
atagcgggcgctggacacttgggca

SEQ ID NO: 3748842 - DNA, 25 bp, Homo sapien
cagcttcacccaatagcgggcgctg

SEQ ID NO: 3748843 - DNA, 25 bp, Homo sapien
tgggcaggtggcttcacctgctgtg

SEQ ID NO: 3748844 - DNA, 25 bp, Homo sapien
ccgcaggcatctccgaggccaggag

SEQ ID NO: 3748845 - DNA, 25 bp, Homo sapien
ggaaacacacgacctgaacactgct

SEQ ID NO: 3748846 - DNA, 25 bp, Homo sapien
aacactgcttggaggcttgtagtgc

SEQ ID NO: 3748847 - DNA, 25 bp, Homo sapien
cattcccattttgctcctgcactaa

SEQ ID NO: 3748848 - DNA, 25 bp, Homo sapien
caattgcccaggaaacacacgacct

SEQ ID NO: 3748849 - DNA, 25 bp, Homo sapien
tgatttcaaagccaatctgtctcct

SEQ ID NO: 3748850 - DNA, 25 bp, Homo sapien
aggttgtaccacatgtctctgattt

SEQ ID NO: 3748851 - DNA, 25 bp, Homo sapien
caaggttgtaccacatgtctctgat

SEQ ID NO: 3748852 - DNA, 25 bp, Homo sapien
ctggaatgaactttatcttgtgttg

SEQ ID NO: 3748853 - DNA, 25 bp, Homo sapien
ggaatgaactttatcttgtgttgac

SEQ ID NO: 3748854 - DNA, 25 bp, Homo sapien
ttctggaatgaactttatcttgtgt

SEQ ID NO: 3748855 - DNA, 25 bp, Homo sapien
tggaatgaactttatcttgtgttga

SEQ ID NO: 3748856 - DNA, 25 bp, Homo sapien
gatggtggctttgcgcagctccgtc

SEQ ID NO: 3748857 - DNA, 25 bp, Homo sapien
ggctttgcgcagctccgtctcggga

SEQ ID NO: 3748858 - DNA, 25 bp, Homo sapien
gtcatttctaatattgggcccacca

SEQ ID NO: 3748859 - DNA, 25 bp, Homo sapien
tccgtctcgggaattaatgtcattt

SEQ ID NO: 3748860 - DNA, 25 bp, Homo sapien
catttggaagcttcgggtcgaatgg

SEQ ID NO: 3748861 - DNA, 25 bp, Homo sapien
atttggaagcttcgggtcgaatgga

SEQ ID NO: 3748862 - DNA, 25 bp, Homo sapien
aagcttcgggtcgaatggaattcac

SEQ ID NO: 3748863 - DNA, 25 bp, Homo sapien
tggaagcttcgggtcgaatggaatt

SEQ ID NO: 3748864 - DNA, 25 bp, Homo sapien
ctggctggggatgcatggctgcatc

SEQ ID NO: 3748865 - DNA, 25 bp, Homo sapien
tggctggggatgcatggctgcatcg

SEQ ID NO: 3748866 - DNA, 25 bp, Homo sapien
gctggggatgcatggctgcatcgca

SEQ ID NO: 3748867 - DNA, 25 bp, Homo sapien
tggggatgcatggctgcatcgcagg

SEQ ID NO: 3748868 - DNA, 25 bp, Homo sapien
cccctgagcatgtgcagggggaggt

SEQ ID NO: 3748869 - DNA, 25 bp, Homo sapien
gtgggagaaagttgctggactgtat

SEQ ID NO: 3748870 - DNA, 25 bp, Homo sapien
ccctgagcatgtgcagggggaggtg

SEQ ID NO: 3748871 - DNA, 25 bp, Homo sapien
tgggtgggagaaagttgctggactg

SEQ ID NO: 3748872 - DNA, 25 bp, Homo sapien
agggctccgaggttatcaagagccg

SEQ ID NO: 3748873 - DNA, 25 bp, Homo sapien
cttgatggagggctccgaggttatc

SEQ ID NO: 3748874 - DNA, 25 bp, Homo sapien
tcaagagccgggtgagatctgaaat

SEQ ID NO: 3748875 - DNA, 25 bp, Homo sapien
aggttatcaagagccgggtgagatc

SEQ ID NO: 3748876 - DNA, 25 bp, Homo sapien
gggtgtccaactgaaaatactgaac

SEQ ID NO: 3748877 - DNA, 25 bp, Homo sapien
tgctccaaaaatattcacagggtgt

SEQ ID NO: 3748878 - DNA, 25 bp, Homo sapien
aaaatactgaacagagagtctctca

SEQ ID NO: 3748879 - DNA, 25 bp, Homo sapien
tttctgaatcactaatattgctcca

SEQ ID NO: 3748880 - DNA, 25 bp, Homo sapien
gccaagcccagtcgtgaaaactgct

SEQ ID NO: 3748881 - DNA, 25 bp, Homo sapien
aaaactgctcatccagagtgcctgt

SEQ ID NO: 3748882 - DNA, 25 bp, Homo sapien
tgcattcttggccaggccaagccca

SEQ ID NO: 3748883 - DNA, 25 bp, Homo sapien
ctgctcatccagagtgcctgtgaca

SEQ ID NO: 3748884 - DNA, 25 bp, Homo sapien
aacactttgtactgttcgtctcctc

SEQ ID NO: 3748885 - DNA, 25 bp, Homo sapien
cactttgtactgttcgtctcctctg

SEQ ID NO: 3748886 - DNA, 25 bp, Homo sapien
gacttcatgatccagcttggtgatg

SEQ ID NO: 3748887 - DNA, 25 bp, Homo sapien
tgcctccttcgacttcatgatccag

SEQ ID NO: 3748888 - DNA, 25 bp, Homo sapien
tcctgttttggcgaggtatttgtgc

SEQ ID NO: 3748889 - DNA, 25 bp, Homo sapien
tctttgttctcgtcgtgcatgatgg

SEQ ID NO: 3748890 - DNA, 25 bp, Homo sapien
ccattaagcgcacaacgagttttac

SEQ ID NO: 3748891 - DNA, 25 bp, Homo sapien
catgatggttctataatccaaaagc

SEQ ID NO: 3748892 - DNA, 25 bp, Homo sapien
tgttttgtaagaaaccacgaagctg

SEQ ID NO: 3748893 - DNA, 25 bp, Homo sapien
ctgtgttttgtaagaaaccacgaag

SEQ ID NO: 3748894 - DNA, 25 bp, Homo sapien
tccactaactgtgttttgtaagaaa

SEQ ID NO: 3748895 - DNA, 25 bp, Homo sapien
aatgttccactaactgtgttttgta

SEQ ID NO: 3748896 - DNA, 25 bp, Homo sapien
tatatacatttcttctctttcaatt

SEQ ID NO: 3748897 - DNA, 25 bp, Homo sapien
ctctttcaatttctttgtagaaatt

SEQ ID NO: 3748898 - DNA, 25 bp, Homo sapien
ttctctttcaatttctttgtagaaa

SEQ ID NO: 3748899 - DNA, 25 bp, Homo sapien
cttatatacatttcttctctttcaa

SEQ ID NO: 3748900 - DNA, 25 bp, Homo sapien
gaagcaaggtgtaagccgcttcggt

SEQ ID NO: 3748901 - DNA, 25 bp, Homo sapien
tgtaagccgcttcggtgtagttatc

SEQ ID NO: 3748902 - DNA, 25 bp, Homo sapien
ttcggtgtagttatcacactccttg

SEQ ID NO: 3748903 - DNA, 25 bp, Homo sapien
gttatcacactccttgtgcaggtca

SEQ ID NO: 3748904 - DNA, 25 bp, Homo sapien
gcctttgtcgaagtagtggatgatt

SEQ ID NO: 3748905 - DNA, 25 bp, Homo sapien
cctggtacccgtcccgctgggtgag

SEQ ID NO: 3748906 - DNA, 25 bp, Homo sapien
ttcagctgtccctgcgtggtggcct

SEQ ID NO: 3748907 - DNA, 25 bp, Homo sapien
tagtggatgatttcctggtagagct

SEQ ID NO: 3748908 - DNA, 25 bp, Homo sapien
tacatttgtaaaactggaattgcgt

SEQ ID NO: 3748909 - DNA, 25 bp, Homo sapien
tgtaaaactggaattgcgttgtttc

SEQ ID NO: 3748910 - DNA, 25 bp, Homo sapien
cccaatacatttgtaaaactggaat

SEQ ID NO: 3748911 - DNA, 25 bp, Homo sapien
atttgtaaaactggaattgcgttgt

SEQ ID NO: 3748912 - DNA, 25 bp, Homo sapien
ctccctcctctaagtctgctgccac

SEQ ID NO: 3748913 - DNA, 25 bp, Homo sapien
cctcctctaagtctgctgccaccat

SEQ ID NO: 3748914 - DNA, 25 bp, Homo sapien
tccctcctctaagtctgctgccacc

SEQ ID NO: 3748915 - DNA, 25 bp, Homo sapien
cctccctcctctaagtctgctgcca

SEQ ID NO: 3748916 - DNA, 25 bp, Homo sapien
caagtgtgcacaagatggatcagcc

SEQ ID NO: 3748917 - DNA, 25 bp, Homo sapien
gactgatcttgcagtaatgatgcca

SEQ ID NO: 3748918 - DNA, 25 bp, Homo sapien
ctgcagctcaaagctgactgatctt

SEQ ID NO: 3748919 - DNA, 25 bp, Homo sapien
cagcaaagacggtctgcagctcaaa

SEQ ID NO: 3748920 - DNA, 25 bp, Homo sapien
ctgacatcaaaatggattaaaatca

SEQ ID NO: 3748921 - DNA, 25 bp, Homo sapien
gggaaaagagtcatactcaattacc

SEQ ID NO: 3748922 - DNA, 25 bp, Homo sapien
caggatgcttgaatttcagacattc

SEQ ID NO: 3748923 - DNA, 25 bp, Homo sapien
gttttttcacagcagttattgggaa

SEQ ID NO: 3748924 - DNA, 25 bp, Homo sapien
gtggagatacctcacaggatgcttg

SEQ ID NO: 3748925 - DNA, 25 bp, Homo sapien
tctaaaggactctgcattaaggaga

SEQ ID NO: 3748926 - DNA, 25 bp, Homo sapien
gctacccctggcatgttctaaagga

SEQ ID NO: 3748927 - DNA, 25 bp, Homo sapien
ctcaggttgcatggtggtatcttct

SEQ ID NO: 3748928 - DNA, 25 bp, Homo sapien
aactctgtagctgcctagaatgcca

SEQ ID NO: 3748929 - DNA, 25 bp, Homo sapien
tcactggcatgtcaatcacgcaggc

SEQ ID NO: 3748930 - DNA, 25 bp, Homo sapien
aatcactggcatgtcaatcacgcag

SEQ ID NO: 3748931 - DNA, 25 bp, Homo sapien
tcaatcactggcatgtcaatcacgc

SEQ ID NO: 3748932 - DNA, 25 bp, Homo sapien
actggcatgtcaatcacgcaggcct

SEQ ID NO: 3748933 - DNA, 25 bp, Homo sapien
aacatttcgttctcatactgctcgg

SEQ ID NO: 3748934 - DNA, 25 bp, Homo sapien
tctcatactgctcggctagctcctt

SEQ ID NO: 3748935 - DNA, 25 bp, Homo sapien
cagcaattcgctgagttgctcataa

SEQ ID NO: 3748936 - DNA, 25 bp, Homo sapien
cttgcccaaggcaatggcctcctcc

SEQ ID NO: 3748937 - DNA, 25 bp, Homo sapien
caacagcaaaatagtcaggcttggg

SEQ ID NO: 3748938 - DNA, 25 bp, Homo sapien
ggcctgatcactttgacgatgtttt

SEQ ID NO: 3748939 - DNA, 25 bp, Homo sapien
ccttgtccgtagtagccaacagcaa

SEQ ID NO: 3748940 - DNA, 25 bp, Homo sapien
ccgcaggaatgtggggaacccttgt

SEQ ID NO: 3748941 - DNA, 25 bp, Homo sapien
gattctgggataaccatcctgcacg

SEQ ID NO: 3748942 - DNA, 25 bp, Homo sapien
cacaaggctgcatggcttagggtcc

SEQ ID NO: 3748943 - DNA, 25 bp, Homo sapien
caacctggcatctattggctcggga

SEQ ID NO: 3748944 - DNA, 25 bp, Homo sapien
gatccagagttggtgcctacatacc

SEQ ID NO: 3748945 - DNA, 25 bp, Homo sapien
tctggggctgtctcaaccgaaatga

SEQ ID NO: 3748946 - DNA, 25 bp, Homo sapien
ccttgcaagatacaacaggtctccg

SEQ ID NO: 3748947 - DNA, 25 bp, Homo sapien
caatgagtacctagtgtaatgctgc

SEQ ID NO: 3748948 - DNA, 25 bp, Homo sapien
acacgtgtgttctgagtgtgaactc

SEQ ID NO: 3748949 - DNA, 25 bp, Homo sapien
tatagacggctaggctagactaggc

SEQ ID NO: 3748950 - DNA, 25 bp, Homo sapien
gcattcagaatgtgtgtgcaggtca

SEQ ID NO: 3748951 - DNA, 25 bp, Homo sapien
gagagctactaagttcctggcctcc

SEQ ID NO: 3748952 - DNA, 25 bp, Homo sapien
atgcagaccagagccgagagctact

SEQ ID NO: 3748953 - DNA, 25 bp, Homo sapien
gcacacggccgccgggcgctgactc

SEQ ID NO: 3748954 - DNA, 25 bp, Homo sapien
ctgcacacggccgccgggcgctgac

SEQ ID NO: 3748955 - DNA, 25 bp, Homo sapien
tgcacacggccgccgggcgctgact

SEQ ID NO: 3748956 - DNA, 25 bp, Homo sapien
gccaggacaagtggataatgatgtc

SEQ ID NO: 3748957 - DNA, 25 bp, Homo sapien
tacttgcgttggctttgttaatcaa

SEQ ID NO: 3748958 - DNA, 25 bp, Homo sapien
cactagaatgggcatgaaatggtta

SEQ ID NO: 3748959 - DNA, 25 bp, Homo sapien
gtttaagaagcactcagcactgcgc

SEQ ID NO: 3748960 - DNA, 25 bp, Homo sapien
tcaaaatcttcccggcgctcatact

SEQ ID NO: 3748961 - DNA, 25 bp, Homo sapien
gagtttttaatatcgtcgcctggtg

SEQ ID NO: 3748962 - DNA, 25 bp, Homo sapien
catactctttccctcggtaaatgaa

SEQ ID NO: 3748963 - DNA, 25 bp, Homo sapien
tgtcttcattttctcggcgtttgga

SEQ ID NO: 3748964 - DNA, 25 bp, Homo sapien
gaggcagatcgagtttgggcttcac

SEQ ID NO: 3748965 - DNA, 25 bp, Homo sapien
aacttaggaggcagatcgagtttgg

SEQ ID NO: 3748966 - DNA, 25 bp, Homo sapien
actggcctgtgaaacttaggaggca

SEQ ID NO: 3748967 - DNA, 25 bp, Homo sapien
cgagtttgggcttcactgtgaagca

SEQ ID NO: 3748968 - DNA, 25 bp, Homo sapien
tcaggtgcgatacaactgacaggca

SEQ ID NO: 3748969 - DNA, 25 bp, Homo sapien
aacataagtaacctgcctccgcggt

SEQ ID NO: 3748970 - DNA, 25 bp, Homo sapien
caaccctcgagggaaaacagaagct

SEQ ID NO: 3748971 - DNA, 25 bp, Homo sapien
tatgccattgctaagtcaggtgcga

SEQ ID NO: 3748972 - DNA, 25 bp, Homo sapien
tttctctcccttccggattggccga

SEQ ID NO: 3748973 - DNA, 25 bp, Homo sapien
ttcaaatcgctggacctcgttcacc

SEQ ID NO: 3748974 - DNA, 25 bp, Homo sapien
tattcaaatcgctggacctcgttca

SEQ ID NO: 3748975 - DNA, 25 bp, Homo sapien
gattggccgagaatattcaaatcgc

SEQ ID NO: 3748976 - DNA, 25 bp, Homo sapien
tactgaatgaggaatgagcacccgg

SEQ ID NO: 3748977 - DNA, 25 bp, Homo sapien
tgcgctactcatatgggagctccgg

SEQ ID NO: 3748978 - DNA, 25 bp, Homo sapien
ggagctccggcatttggacggcaca

SEQ ID NO: 3748979 - DNA, 25 bp, Homo sapien
gacatttaatatggctccgtggctg

SEQ ID NO: 3748980 - DNA, 25 bp, Homo sapien
atacaaatgaatccatgaaagcagt

SEQ ID NO: 3748981 - DNA, 25 bp, Homo sapien
tgctgggttcaccaacaaatagggt

SEQ ID NO: 3748982 - DNA, 25 bp, Homo sapien
ggtagccaccactctttacttgagg

SEQ ID NO: 3748983 - DNA, 25 bp, Homo sapien
ttggtgacacacaaggaatctggcc

SEQ ID NO: 3748984 - DNA, 25 bp, Homo sapien
gagggactccatataaacactagcg

SEQ ID NO: 3748985 - DNA, 25 bp, Homo sapien
caaagaagtcttacattagctacag

SEQ ID NO: 3748986 - DNA, 25 bp, Homo sapien
caccactctggtatttgacaatgaa

SEQ ID NO: 3748987 - DNA, 25 bp, Homo sapien
caatgaaagtatactaggtgagtga

SEQ ID NO: 3748988 - DNA, 25 bp, Homo sapien
gatacatcaaagtatcccctgtccc

SEQ ID NO: 3748989 - DNA, 25 bp, Homo sapien
attccaggtaatttatatgcagttg

SEQ ID NO: 3748990 - DNA, 25 bp, Homo sapien
tgtatatatggttctctcgatccac

SEQ ID NO: 3748991 - DNA, 25 bp, Homo sapien
tatatggttctctcgatccacatat

SEQ ID NO: 3748992 - DNA, 25 bp, Homo sapien
ccaggtaatttatatgcagttgtat

SEQ ID NO: 3748993 - DNA, 25 bp, Homo sapien
aactgtagagtctgctgtgtgcacg

SEQ ID NO: 3748994 - DNA, 25 bp, Homo sapien
tatcgatgctctcaagaacaggtgg

SEQ ID NO: 3748995 - DNA, 25 bp, Homo sapien
gctagagttggtcgtgattacacag

SEQ ID NO: 3748996 - DNA, 25 bp, Homo sapien
tatggctaggcgaggagatatcgat

SEQ ID NO: 3748997 - DNA, 25 bp, Homo sapien
gaagaaggttagctgctgctcccac

SEQ ID NO: 3748998 - DNA, 25 bp, Homo sapien
tgttactaatctcatttgcactgag

SEQ ID NO: 3748999 - DNA, 25 bp, Homo sapien
tttggtagcaggacgtgagtcctgc

SEQ ID NO: 3749000 - DNA, 25 bp, Homo sapien
tgcactgagaaagaatcccttccta

SEQ ID NO: 3749001 - DNA, 25 bp, Homo sapien
ttcagaacagacacttccaatcctg

SEQ ID NO: 3749002 - DNA, 25 bp, Homo sapien
agacacttccaatcctgttcttgtt

SEQ ID NO: 3749003 - DNA, 25 bp, Homo sapien
tcagaacagacacttccaatcctgt

SEQ ID NO: 3749004 - DNA, 25 bp, Homo sapien
gaacagacacttccaatcctgttct

SEQ ID NO: 3749005 - DNA, 25 bp, Homo sapien
ctgggtccacgatgccgttcaggag

SEQ ID NO: 3749006 - DNA, 25 bp, Homo sapien
agctgggtccacgatgccgttcagg

SEQ ID NO: 3749007 - DNA, 25 bp, Homo sapien
tgcatggtctcaatggcattctcca

SEQ ID NO: 3749008 - DNA, 25 bp, Homo sapien
gctgttgatcttgtcgttcgtcagc

SEQ ID NO: 3749009 - DNA, 25 bp, Homo sapien
cgtagtttgcgaagccccccatgac

SEQ ID NO: 3749010 - DNA, 25 bp, Homo sapien
tcgtagtttgcgaagccccccatga

SEQ ID NO: 3749011 - DNA, 25 bp, Homo sapien
ttcgtagtttgcgaagccccccatg

SEQ ID NO: 3749012 - DNA, 25 bp, Homo sapien
tcctgcaggtaccggtctgtaaaga

SEQ ID NO: 3749013 - DNA, 25 bp, Homo sapien
gagcttctcgatcttttcatgggcc

SEQ ID NO: 3749014 - DNA, 25 bp, Homo sapien
gcaggtaccggtctgtaaagaaggc

SEQ ID NO: 3749015 - DNA, 25 bp, Homo sapien
ctgcaggtaccggtctgtaaagaag

SEQ ID NO: 3749016 - DNA, 25 bp, Homo sapien
tcctgacgttgatgggaaataacct

SEQ ID NO: 3749017 - DNA, 25 bp, Homo sapien
gaaataaccttctgataggacagga

SEQ ID NO: 3749018 - DNA, 25 bp, Homo sapien
gacaggaactggttccctgttatat

SEQ ID NO: 3749019 - DNA, 25 bp, Homo sapien
tgtgagaattcaccactctcagcag

SEQ ID NO: 3749020 - DNA, 25 bp, Homo sapien
ggaaaacagagaggttgacattcct

SEQ ID NO: 3749021 - DNA, 25 bp, Homo sapien
cagagaggttgacattccttatttc

SEQ ID NO: 3749022 - DNA, 25 bp, Homo sapien
tgacattccttatttcttggataat

SEQ ID NO: 3749023 - DNA, 25 bp, Homo sapien
cattccttatttcttggataatggt

SEQ ID NO: 3749024 - DNA, 25 bp, Homo sapien
ccgtgactttgtctccatggattct

SEQ ID NO: 3749025 - DNA, 25 bp, Homo sapien
gcctcagtgcctccgtgactttgtc

SEQ ID NO: 3749026 - DNA, 25 bp, Homo sapien
ggattctgatcccttcggccagaaa

SEQ ID NO: 3749027 - DNA, 25 bp, Homo sapien
atcctctcgtggaacggcctcagtg

SEQ ID NO: 3749028 - DNA, 25 bp, Homo sapien
tgattcggacgccgtactctttctc

SEQ ID NO: 3749029 - DNA, 25 bp, Homo sapien
ttcggacgccgtactctttctccac

SEQ ID NO: 3749030 - DNA, 25 bp, Homo sapien
catgattcggacgccgtactctttc

SEQ ID NO: 3749031 - DNA, 25 bp, Homo sapien
gattcggacgccgtactctttctcc

SEQ ID NO: 3749032 - DNA, 25 bp, Homo sapien
aggaaggcatcgtgaaggaccgcac

SEQ ID NO: 3749033 - DNA, 25 bp, Homo sapien
gatgaggaaggcatcgtgaaggacc

SEQ ID NO: 3749034 - DNA, 25 bp, Homo sapien
gccacagacagagggcgggatgagg

SEQ ID NO: 3749035 - DNA, 25 bp, Homo sapien
cgtgaaggaccgcaccatggaccgg

SEQ ID NO: 3749036 - DNA, 25 bp, Homo sapien
gacagtggaggttgtgtcatggtca

SEQ ID NO: 3749037 - DNA, 25 bp, Homo sapien
tggaggttgtgtcatggtcagacca

SEQ ID NO: 3749038 - DNA, 25 bp, Homo sapien
gtgtcatggtcagaccacaccagct

SEQ ID NO: 3749039 - DNA, 25 bp, Homo sapien
acaccagctcctgtccgggcacaac

SEQ ID NO: 3749040 - DNA, 25 bp, Homo sapien
agcttgtcctgggacctggagtgca

SEQ ID NO: 3749041 - DNA, 25 bp, Homo sapien
ctccaggtcatccttgtccagcttg

SEQ ID NO: 3749042 - DNA, 25 bp, Homo sapien
caggtcatccttgtccagcttgtcc

SEQ ID NO: 3749043 - DNA, 25 bp, Homo sapien
tggagtgcattttctttggcaggag

SEQ ID NO: 3749044 - DNA, 25 bp, Homo sapien
actgctgcagggaaatgtcggtggg

SEQ ID NO: 3749045 - DNA, 25 bp, Homo sapien
ctgctgcagggaaatgtcggtgggt

SEQ ID NO: 3749046 - DNA, 25 bp, Homo sapien
aggtcagctcagcagtacgggtcat

SEQ ID NO: 3749047 - DNA, 25 bp, Homo sapien
atgaagtatagataaaacgtacctt

SEQ ID NO: 3749048 - DNA, 25 bp, Homo sapien
catgaagtatagataaaacgtacct

SEQ ID NO: 3749049 - DNA, 25 bp, Homo sapien
ctgttggacgtcaagtcatggctgg

SEQ ID NO: 3749050 - DNA, 25 bp, Homo sapien
catggctggggcgtttgccttccac

SEQ ID NO: 3749051 - DNA, 25 bp, Homo sapien
agcagcgctggcctgttggacgtca

SEQ ID NO: 3749052 - DNA, 25 bp, Homo sapien
ccacctctagatagccaggtagcat

SEQ ID NO: 3749053 - DNA, 25 bp, Homo sapien
gaagctgagcttggcccttggtgta

SEQ ID NO: 3749054 - DNA, 25 bp, Homo sapien
cgcctttcgcttccaatgacgttca

SEQ ID NO: 3749055 - DNA, 25 bp, Homo sapien
gggacaccgagaagcgcctttcgct

SEQ ID NO: 3749056 - DNA, 25 bp, Homo sapien
atcacctggctcttcggtctctggg

SEQ ID NO: 3749057 - DNA, 25 bp, Homo sapien
ttccatcaaattcccgtaatctgcc

SEQ ID NO: 3749058 - DNA, 25 bp, Homo sapien
aggtggaggtgttggcgagcccagc

SEQ ID NO: 3749059 - DNA, 25 bp, Homo sapien
aggtgttggcgagcccagcaagtcc

SEQ ID NO: 3749060 - DNA, 25 bp, Homo sapien
tgccacgctgcctttgagaggcaga

SEQ ID NO: 3749061 - DNA, 25 bp, Homo sapien
tcgtcctactttgtggaggcgaagc

SEQ ID NO: 3749062 - DNA, 25 bp, Homo sapien
gtcctactttgtggaggcgaagcaa

SEQ ID NO: 3749063 - DNA, 25 bp, Homo sapien
tggaatgagggactcgtcctacttt

SEQ ID NO: 3749064 - DNA, 25 bp, Homo sapien
cgtcctactttgtggaggcgaagca

SEQ ID NO: 3749065 - DNA, 25 bp, Homo sapien
ttgcaaaatcaaacccgggcccatc

SEQ ID NO: 3749066 - DNA, 25 bp, Homo sapien
cgggcccatcatacatggttttcct

SEQ ID NO: 3749067 - DNA, 25 bp, Homo sapien
cactggagtccttactgcttcgata

SEQ ID NO: 3749068 - DNA, 25 bp, Homo sapien
tggttttcctcatgtgctcactagc

SEQ ID NO: 3749069 - DNA, 25 bp, Homo sapien
tgtcctctgcagtctccgtaaggtg

SEQ ID NO: 3749070 - DNA, 25 bp, Homo sapien
cctctgcagtctccgtaaggtgagt

SEQ ID NO: 3749071 - DNA, 25 bp, Homo sapien
tgcagtctccgtaaggtgagtgcct

SEQ ID NO: 3749072 - DNA, 25 bp, Homo sapien
tctgcagtctccgtaaggtgagtgc

SEQ ID NO: 3749073 - DNA, 25 bp, Homo sapien
ttccagcaggttgcttaggcttaca

SEQ ID NO: 3749074 - DNA, 25 bp, Homo sapien
gggttccagcaggttgcttaggctt

SEQ ID NO: 3749075 - DNA, 25 bp, Homo sapien
taggcttacaaaggccagtgctgct

SEQ ID NO: 3749076 - DNA, 25 bp, Homo sapien
tgcttaggcttacaaaggccagtgc

SEQ ID NO: 3749077 - DNA, 25 bp, Homo sapien
aggcggagttttgctgggcagtgga

SEQ ID NO: 3749078 - DNA, 25 bp, Homo sapien
agttttgctgggcagtggaggtggc

SEQ ID NO: 3749079 - DNA, 25 bp, Homo sapien
aggaggcggagttttgctgggcagt

SEQ ID NO: 3749080 - DNA, 25 bp, Homo sapien
cggagttttgctgggcagtggaggt

SEQ ID NO: 3749081 - DNA, 25 bp, Homo sapien
ccaccgatgcctgcttgcgagttgt

SEQ ID NO: 3749082 - DNA, 25 bp, Homo sapien
tcccggagtccaccgatgcctgctt

SEQ ID NO: 3749083 - DNA, 25 bp, Homo sapien
tcactgcacgatcccggagtccacc

SEQ ID NO: 3749084 - DNA, 25 bp, Homo sapien
tgcacgatcccggagtccaccgatg

SEQ ID NO: 3749085 - DNA, 25 bp, Homo sapien
ttcctaagagtgatggcctagcctc

SEQ ID NO: 3749086 - DNA, 25 bp, Homo sapien
gatacaacatcccatgacagtgagg

SEQ ID NO: 3749087 - DNA, 25 bp, Homo sapien
tgttaacatcacaggcccaatgagg

SEQ ID NO: 3749088 - DNA, 25 bp, Homo sapien
tgataactacgatagcacatcccgg

SEQ ID NO: 3749089 - DNA, 25 bp, Homo sapien
tctactttctgcagcccactgcagg

SEQ ID NO: 3749090 - DNA, 25 bp, Homo sapien
actgcagggggagcactccctccca

SEQ ID NO: 3749091 - DNA, 25 bp, Homo sapien
gccctcacctgaggaaggctggtca

SEQ ID NO: 3749092 - DNA, 25 bp, Homo sapien
acctggccctcacctgaggaaggct

SEQ ID NO: 3749093 - DNA, 25 bp, Homo sapien
ggctctggtcgcctgatccctctat

SEQ ID NO: 3749094 - DNA, 25 bp, Homo sapien
tggtcgcctgatccctctatgggct

SEQ ID NO: 3749095 - DNA, 25 bp, Homo sapien
cgcctgatccctctatgggcttcag

SEQ ID NO: 3749096 - DNA, 25 bp, Homo sapien
gaaggggctctggtcgcctgatccc

SEQ ID NO: 3749097 - DNA, 25 bp, Homo sapien
ccatccattggcgtcatccattggg

SEQ ID NO: 3749098 - DNA, 25 bp, Homo sapien
tcatccatctggtgacgctctccat

SEQ ID NO: 3749099 - DNA, 25 bp, Homo sapien
ggaccagacggcttctgaggatatg

SEQ ID NO: 3749100 - DNA, 25 bp, Homo sapien
cagtgtatatgggtggaggctccct

SEQ ID NO: 3749101 - DNA, 25 bp, Homo sapien
tatgcccctgcgtgtgggatccagg

SEQ ID NO: 3749102 - DNA, 25 bp, Homo sapien
tcccagctgggtttagcatggactg

SEQ ID NO: 3749103 - DNA, 25 bp, Homo sapien
caggccttgcgggatggagagggag

SEQ ID NO: 3749104 - DNA, 25 bp, Homo sapien
ggaggctgaaattgccactgggtcc

SEQ ID NO: 3749105 - DNA, 25 bp, Homo sapien
tgtctaagctggcatggctggcctt

SEQ ID NO: 3749106 - DNA, 25 bp, Homo sapien
ttagcacaggtcctctcaataaagg

SEQ ID NO: 3749107 - DNA, 25 bp, Homo sapien
caataaagggatgcttaagaccggt

SEQ ID NO: 3749108 - DNA, 25 bp, Homo sapien
tggccttagctcctaatactgtgct

SEQ ID NO: 3749109 - DNA, 25 bp, Homo sapien
ctctgacattctgtagagggcatag

SEQ ID NO: 3749110 - DNA, 25 bp, Homo sapien
tgacattctgtagagggcatagctg

SEQ ID NO: 3749111 - DNA, 25 bp, Homo sapien
acattctgtagagggcatagctgtg

SEQ ID NO: 3749112 - DNA, 25 bp, Homo sapien
tctgacattctgtagagggcatagc

SEQ ID NO: 3749113 - DNA, 25 bp, Homo sapien
aagaacagccgctcatgtctgtgga

SEQ ID NO: 3749114 - DNA, 25 bp, Homo sapien
gcttctgggagaatgatgcactcca

SEQ ID NO: 3749115 - DNA, 25 bp, Homo sapien
gaagaaattgttcaaagtagcctct

SEQ ID NO: 3749116 - DNA, 25 bp, Homo sapien
tgcactccaccgaacttatcaagaa

SEQ ID NO: 3749117 - DNA, 25 bp, Homo sapien
aaccttgtgcaaggccgagaccctg

SEQ ID NO: 3749118 - DNA, 25 bp, Homo sapien
gtccacaaccttgtgcaaggccgag

SEQ ID NO: 3749119 - DNA, 25 bp, Homo sapien
acgcaagtccacaaccttgtgcaag

SEQ ID NO: 3749120 - DNA, 25 bp, Homo sapien
ttgtgcaaggccgagaccctgggct

SEQ ID NO: 3749121 - DNA, 25 bp, Homo sapien
ctcattgctgaaggggatagtagtg

SEQ ID NO: 3749122 - DNA, 25 bp, Homo sapien
gaatgagtgcctcattgctgaaggg

SEQ ID NO: 3749123 - DNA, 25 bp, Homo sapien
gcctcattgctgaaggggatagtag

SEQ ID NO: 3749124 - DNA, 25 bp, Homo sapien
gggaatgagtgcctcattgctgaag

SEQ ID NO: 3749125 - DNA, 25 bp, Homo sapien
aaatattacacagcagttcaggcct

SEQ ID NO: 3749126 - DNA, 25 bp, Homo sapien
tgcagccatgcagtgaaatattaca

SEQ ID NO: 3749127 - DNA, 25 bp, Homo sapien
actgagatttgctcgggaggtttac

SEQ ID NO: 3749128 - DNA, 25 bp, Homo sapien
tggtgggcctttcagaggtacctgc

SEQ ID NO: 3749129 - DNA, 25 bp, Homo sapien
tccagtgccagctaattcttctgta

SEQ ID NO: 3749130 - DNA, 25 bp, Homo sapien
agtccttccagtgccagctaattct

SEQ ID NO: 3749131 - DNA, 25 bp, Homo sapien
ggaagtccttccagtgccagctaat

SEQ ID NO: 3749132 - DNA, 25 bp, Homo sapien
cttccagtgccagctaattcttctg

SEQ ID NO: 3749133 - DNA, 25 bp, Homo sapien
tttccttactgtaccttggcatggg

SEQ ID NO: 3749134 - DNA, 25 bp, Homo sapien
aacttctagaaggtggcttgttcca

SEQ ID NO: 3749135 - DNA, 25 bp, Homo sapien
caaaagtctggcaaccactggagat

SEQ ID NO: 3749136 - DNA, 25 bp, Homo sapien
caagattcatcagagctagatagcc

SEQ ID NO: 3749137 - DNA, 25 bp, Homo sapien
gattaataggggggtggcaggtatc

SEQ ID NO: 3749138 - DNA, 25 bp, Homo sapien
taataggggggtggcaggtatcagg

SEQ ID NO: 3749139 - DNA, 25 bp, Homo sapien
taggggggtggcaggtatcagggat

SEQ ID NO: 3749140 - DNA, 25 bp, Homo sapien
attaataggggggtggcaggtatca

SEQ ID NO: 3749141 - DNA, 25 bp, Homo sapien
tccattaaaaagtactgatcctaaa

SEQ ID NO: 3749142 - DNA, 25 bp, Homo sapien
tttccattaaaaagtactgatccta

SEQ ID NO: 3749143 - DNA, 25 bp, Homo sapien
ctgtgacaaatttttggtcaagttt

SEQ ID NO: 3749144 - DNA, 25 bp, Homo sapien
taataacttaaaactgccacatgca

SEQ ID NO: 3749145 - DNA, 25 bp, Homo sapien
taaatcgtagggtcggttcatcatc

SEQ ID NO: 3749146 - DNA, 25 bp, Homo sapien
gctgcctctgaaaacttccttctat

SEQ ID NO: 3749147 - DNA, 25 bp, Homo sapien
taggaagccggttgtcctgctgcct

SEQ ID NO: 3749148 - DNA, 25 bp, Homo sapien
gacccttagccagattaggaagccg

SEQ ID NO: 3749149 - DNA, 25 bp, Homo sapien
ctgctgctgctatttcccaggagag

SEQ ID NO: 3749150 - DNA, 25 bp, Homo sapien
agagctttctgcttgcgtccccctt

SEQ ID NO: 3749151 - DNA, 25 bp, Homo sapien
ttcgccagcctagatgccccggtgt

SEQ ID NO: 3749152 - DNA, 25 bp, Homo sapien
gatgccccggtgtctgtagaaccca

SEQ ID NO: 3749153 - DNA, 25 bp, Homo sapien
tctgccagcctatctgagtgctgct

SEQ ID NO: 3749154 - DNA, 25 bp, Homo sapien
gctctgccagcctatctgagtgctg

SEQ ID NO: 3749155 - DNA, 25 bp, Homo sapien
agagctctgccagcctatctgagtg

SEQ ID NO: 3749156 - DNA, 25 bp, Homo sapien
ccagagctctgccagcctatctgag

SEQ ID NO: 3749157 - DNA, 25 bp, Homo sapien
ttcctctagccgaggatgtgtcact

SEQ ID NO: 3749158 - DNA, 25 bp, Homo sapien
cgaggatgtgtcactgtgatctaca

SEQ ID NO: 3749159 - DNA, 25 bp, Homo sapien
tctagccgaggatgtgtcactgtga

SEQ ID NO: 3749160 - DNA, 25 bp, Homo sapien
ggagaaggtttgtgacggctggtgt

SEQ ID NO: 3749161 - DNA, 25 bp, Homo sapien
tggaaacagcccctgggagttggca

SEQ ID NO: 3749162 - DNA, 25 bp, Homo sapien
ctttgtgggatacatcgcataagtg

SEQ ID NO: 3749163 - DNA, 25 bp, Homo sapien
gatacatcgcataagtgtgttacat

SEQ ID NO: 3749164 - DNA, 25 bp, Homo sapien
gtgtccaagagtcttcagaggtaac

SEQ ID NO: 3749165 - DNA, 25 bp, Homo sapien
ttagaagatggaactggataacacc

SEQ ID NO: 3749166 - DNA, 25 bp, Homo sapien
taggatgagattgagttttactgag

SEQ ID NO: 3749167 - DNA, 25 bp, Homo sapien
ggataacaccaaaacacatgcattg

SEQ ID NO: 3749168 - DNA, 25 bp, Homo sapien
catgcattgtggacagcgacagaac

SEQ ID NO: 3749169 - DNA, 25 bp, Homo sapien
aagctagttctttgctcctgtccaa

SEQ ID NO: 3749170 - DNA, 25 bp, Homo sapien
taattccccgagtcctttgcacact

SEQ ID NO: 3749171 - DNA, 25 bp, Homo sapien
cctgtgccaactccattgcgaaagg

SEQ ID NO: 3749172 - DNA, 25 bp, Homo sapien
tgcacacttagtcatgattttgctc

SEQ ID NO: 3749173 - DNA, 25 bp, Homo sapien
gaaataacacgtcaaccaatgtcgc

SEQ ID NO: 3749174 - DNA, 25 bp, Homo sapien
aaagagtgggcagtctttcctggaa

SEQ ID NO: 3749175 - DNA, 25 bp, Homo sapien
aaggagagggcattaatcagcatag

SEQ ID NO: 3749176 - DNA, 25 bp, Homo sapien
gaattacatctagagtgctccaggg

SEQ ID NO: 3749177 - DNA, 25 bp, Homo sapien
taggtggaacgatcctgcaggactc

SEQ ID NO: 3749178 - DNA, 25 bp, Homo sapien
gcccagtaggtggaacgatcctgca

SEQ ID NO: 3749179 - DNA, 25 bp, Homo sapien
gcaggactcggtcttggtctttgct

SEQ ID NO: 3749180 - DNA, 25 bp, Homo sapien
ggactcggtcttggtctttgctatt

SEQ ID NO: 3749181 - DNA, 25 bp, Homo sapien
ctgcttgcccaaggatgcacggagt

SEQ ID NO: 3749182 - DNA, 25 bp, Homo sapien
tgcttgcccaaggatgcacggagtc

SEQ ID NO: 3749183 - DNA, 25 bp, Homo sapien
tggcaccaggtcagggcctcaggca

SEQ ID NO: 3749184 - DNA, 25 bp, Homo sapien
ctggcaccaggtcagggcctcaggc

SEQ ID NO: 3749185 - DNA, 25 bp, Homo sapien
ggcaccaggtcagggcctcaggcat

SEQ ID NO: 3749186 - DNA, 25 bp, Homo sapien
ttctgtgtctggtaatcagcaatgc

SEQ ID NO: 3749187 - DNA, 25 bp, Homo sapien
tgcaccctgctacccaatcgagatg

SEQ ID NO: 3749188 - DNA, 25 bp, Homo sapien
ccctgctacccaatcgagatgaatg

SEQ ID NO: 3749189 - DNA, 25 bp, Homo sapien
tcctctcttgagtgctgagaagcaa

SEQ ID NO: 3749190 - DNA, 25 bp, Homo sapien
tgtgattaaatatcaggcctgttcc

SEQ ID NO: 3749191 - DNA, 25 bp, Homo sapien
tccacaaatgaagtctaaatcctgg

SEQ ID NO: 3749192 - DNA, 25 bp, Homo sapien
tccccagcatcgtccagtgtcttct

SEQ ID NO: 3749193 - DNA, 25 bp, Homo sapien
ccttaatggagaacccatctcatca

SEQ ID NO: 3749194 - DNA, 25 bp, Homo sapien
agattcctggaacttcggtgcggtt

SEQ ID NO: 3749195 - DNA, 25 bp, Homo sapien
gattcctggaacttcggtgcggtta

SEQ ID NO: 3749196 - DNA, 25 bp, Homo sapien
ggctggaggtgagtgaggtaatctt

SEQ ID NO: 3749197 - DNA, 25 bp, Homo sapien
ctggaggtgagtgaggtaatcttcc

SEQ ID NO: 3749198 - DNA, 25 bp, Homo sapien
aggtgagtgaggtaatcttccttac

SEQ ID NO: 3749199 - DNA, 25 bp, Homo sapien
gaggtgagtgaggtaatcttcctta

SEQ ID NO: 3749200 - DNA, 25 bp, Homo sapien
actgtgcagactccgtgcccttctg

SEQ ID NO: 3749201 - DNA, 25 bp, Homo sapien
tgtgcagactccgtgcccttctgtt

SEQ ID NO: 3749202 - DNA, 25 bp, Homo sapien
tgcagactccgtgcccttctgttgc

SEQ ID NO: 3749203 - DNA, 25 bp, Homo sapien
tcactgtgcagactccgtgcccttc

SEQ ID NO: 3749204 - DNA, 25 bp, Homo sapien
ttgcaaagcattcaccctgtccatt

SEQ ID NO: 3749205 - DNA, 25 bp, Homo sapien
tgcaaagcattcaccctgtccattt

SEQ ID NO: 3749206 - DNA, 25 bp, Homo sapien
gcaaagcattcaccctgtccatttc

SEQ ID NO: 3749207 - DNA, 25 bp, Homo sapien
aggtagccaaaagcccagcagtgaa

SEQ ID NO: 3749208 - DNA, 25 bp, Homo sapien
acatcaggtagccaaaagcccagca

SEQ ID NO: 3749209 - DNA, 25 bp, Homo sapien
tccttgtatacatcaggtagccaaa

SEQ ID NO: 3749210 - DNA, 25 bp, Homo sapien
agtgaagttgggaaccacagctgtg

SEQ ID NO: 3749211 - DNA, 25 bp, Homo sapien
gaccctcgtaatgattcctgaggca

SEQ ID NO: 3749212 - DNA, 25 bp, Homo sapien
tctggctccaaatgtgggttctccc

SEQ ID NO: 3749213 - DNA, 25 bp, Homo sapien
aattctaactgtccttccgtctaag

SEQ ID NO: 3749214 - DNA, 25 bp, Homo sapien
ccaacacagtcagccgtcgaattct

SEQ ID NO: 3749215 - DNA, 25 bp, Homo sapien
gcaaatgaggcaaaaacagatcacc

SEQ ID NO: 3749216 - DNA, 25 bp, Homo sapien
caaatgaggcaaaaacagatcacct

SEQ ID NO: 3749217 - DNA, 25 bp, Homo sapien
gtgcaaatgaggcaaaaacagatca

SEQ ID NO: 3749218 - DNA, 25 bp, Homo sapien
ctgtgcaaatgaggcaaaaacagat

SEQ ID NO: 3749219 - DNA, 25 bp, Homo sapien
atcccattccacacagtataaaggc

SEQ ID NO: 3749220 - DNA, 25 bp, Homo sapien
tcccattccacacagtataaaggcc

SEQ ID NO: 3749221 - DNA, 25 bp, Homo sapien
ggaactggcataaaccaacttggga

SEQ ID NO: 3749222 - DNA, 25 bp, Homo sapien
cataaaacccataactaattctgca

SEQ ID NO: 3749223 - DNA, 25 bp, Homo sapien
caacttgggagcagacataactgat

SEQ ID NO: 3749224 - DNA, 25 bp, Homo sapien
gatccttggtgagctgacagttcag

SEQ ID NO: 3749225 - DNA, 25 bp, Homo sapien
catgtattattgactgaaggttctt

SEQ ID NO: 3749226 - DNA, 25 bp, Homo sapien
cccagatctattgaggaagaggaag

SEQ ID NO: 3749227 - DNA, 25 bp, Homo sapien
gaatggtcagcttgtggattttctc

SEQ ID NO: 3749228 - DNA, 25 bp, Homo sapien
aatggtcagcttgtggattttctca

SEQ ID NO: 3749229 - DNA, 25 bp, Homo sapien
acctctgctcgtaagtcttgatcag

SEQ ID NO: 3749230 - DNA, 25 bp, Homo sapien
tgctcgtaagtcttgatcagatcaa

SEQ ID NO: 3749231 - DNA, 25 bp, Homo sapien
tcttgatcagatcaatatgaaccca

SEQ ID NO: 3749232 - DNA, 25 bp, Homo sapien
atatgaacccaatgctcacactttc

SEQ ID NO: 3749233 - DNA, 25 bp, Homo sapien
tcaaggcaacgctggaggtgtctgt

SEQ ID NO: 3749234 - DNA, 25 bp, Homo sapien
tcagatggttgtaagtttggaacag

SEQ ID NO: 3749235 - DNA, 25 bp, Homo sapien
agatggttgtaagtttggaacagac

SEQ ID NO: 3749236 - DNA, 25 bp, Homo sapien
gatggttgtaagtttggaacagacc

SEQ ID NO: 3749237 - DNA, 25 bp, Homo sapien
cagatggttgtaagtttggaacaga

SEQ ID NO: 3749238 - DNA, 25 bp, Homo sapien
ccccatgcctggaatgagccacggg

SEQ ID NO: 3749239 - DNA, 25 bp, Homo sapien
tgcctggaatgagccacggggccat

SEQ ID NO: 3749240 - DNA, 25 bp, Homo sapien
catgcctggaatgagccacggggcc

SEQ ID NO: 3749241 - DNA, 25 bp, Homo sapien
ccatgcctggaatgagccacggggc

SEQ ID NO: 3749242 - DNA, 25 bp, Homo sapien
ctctgaggaatatctttagcttgtg

SEQ ID NO: 3749243 - DNA, 25 bp, Homo sapien
tcgtcagcaccaagctgcacatgct

SEQ ID NO: 3749244 - DNA, 25 bp, Homo sapien
ctttagcttgtgaggtgagaagcat

SEQ ID NO: 3749245 - DNA, 25 bp, Homo sapien
gggctgacagatgcacatcgtcagc

SEQ ID NO: 3749246 - DNA, 25 bp, Homo sapien
tcctgatgccagattgggtgccgct

SEQ ID NO: 3749247 - DNA, 25 bp, Homo sapien
ggcgcttcatgaaacgcctctcctt

SEQ ID NO: 3749248 - DNA, 25 bp, Homo sapien
ttcatgaaacgcctctccttgagct

SEQ ID NO: 3749249 - DNA, 25 bp, Homo sapien
gattgggtgccgctgcgagtcatcc

SEQ ID NO: 3749250 - DNA, 25 bp, Homo sapien
tgaggcgtcattgaaaaacacatac

SEQ ID NO: 3749251 - DNA, 25 bp, Homo sapien
aggcgtcattgaaaaacacatacat

SEQ ID NO: 3749252 - DNA, 25 bp, Homo sapien
ctgaggcgtcattgaaaaacacata

SEQ ID NO: 3749253 - DNA, 25 bp, Homo sapien
gaggcgtcattgaaaaacacataca

SEQ ID NO: 3749254 - DNA, 25 bp, Homo sapien
ttgctctattctgggatacaatttc

SEQ ID NO: 3749255 - DNA, 25 bp, Homo sapien
gctctattctgggatacaatttctt

SEQ ID NO: 3749256 - DNA, 25 bp, Homo sapien
ctctattctgggatacaatttcttc

SEQ ID NO: 3749257 - DNA, 25 bp, Homo sapien
ttattgctctattctgggatacaat

SEQ ID NO: 3749258 - DNA, 25 bp, Homo sapien
tttctccttagatatcggtgtggtt

SEQ ID NO: 3749259 - DNA, 25 bp, Homo sapien
agatatcggtgtggttacaatgacc

SEQ ID NO: 3749260 - DNA, 25 bp, Homo sapien
gatatcgtctgcagcacacatttct

SEQ ID NO: 3749261 - DNA, 25 bp, Homo sapien
taaaactgtgccagatatcgtctgc

SEQ ID NO: 3749262 - DNA, 25 bp, Homo sapien
catggccagagtcccttacacagtg

SEQ ID NO: 3749263 - DNA, 25 bp, Homo sapien
gtcccttacacagtgcagcttctgt

SEQ ID NO: 3749264 - DNA, 25 bp, Homo sapien
agtagccatggccagagtcccttac

SEQ ID NO: 3749265 - DNA, 25 bp, Homo sapien
ccagagtcccttacacagtgcagct

SEQ ID NO: 3749266 - DNA, 25 bp, Homo sapien
ctgcgccgaagtcgcgcgtacccca

SEQ ID NO: 3749267 - DNA, 25 bp, Homo sapien
gccgaagtcgcgcgtaccccacgga

SEQ ID NO: 3749268 - DNA, 25 bp, Homo sapien
atctgcgccgaagtcgcgcgtaccc

SEQ ID NO: 3749269 - DNA, 25 bp, Homo sapien
cgaagtcgcgcgtaccccacggagg

SEQ ID NO: 3749270 - DNA, 25 bp, Homo sapien
aaactcactggcgacccatccagct

SEQ ID NO: 3749271 - DNA, 25 bp, Homo sapien
gcaccgaaactcactggcgacccat

SEQ ID NO: 3749272 - DNA, 25 bp, Homo sapien
tcactggcgacccatccagcttggc

SEQ ID NO: 3749273 - DNA, 25 bp, Homo sapien
gccgcaccgaaactcactggcgacc

SEQ ID NO: 3749274 - DNA, 25 bp, Homo sapien
ggggcccaggtcgtcgcagtaggtg

SEQ ID NO: 3749275 - DNA, 25 bp, Homo sapien
ggcccaggtcgtcgcagtaggtggc

SEQ ID NO: 3749276 - DNA, 25 bp, Homo sapien
ccctggctcatagcccggggggtgc

SEQ ID NO: 3749277 - DNA, 25 bp, Homo sapien
ccaggtcgtcgcagtaggtggccat

SEQ ID NO: 3749278 - DNA, 25 bp, Homo sapien
agcgctggcgcgttcacccacagga

SEQ ID NO: 3749279 - DNA, 25 bp, Homo sapien
gagcgctggcgcgttcacccacagg

SEQ ID NO: 3749280 - DNA, 25 bp, Homo sapien
ctgagcgctggcgcgttcacccaca

SEQ ID NO: 3749281 - DNA, 25 bp, Homo sapien
cgctggcgcgttcacccacaggagg

SEQ ID NO: 3749282 - DNA, 25 bp, Homo sapien
ggccgcgtagggcggcgcaggcccg

SEQ ID NO: 3749283 - DNA, 25 bp, Homo sapien
cgtagctcggggccgcgtagggcgg

SEQ ID NO: 3749284 - DNA, 25 bp, Homo sapien
tcggggccgcgtagggcggcgcagg

SEQ ID NO: 3749285 - DNA, 25 bp, Homo sapien
gtagctcggggccgcgtagggcggc

SEQ ID NO: 3749286 - DNA, 25 bp, Homo sapien
gcttgtagaaagggaagttaccagc

SEQ ID NO: 3749287 - DNA, 25 bp, Homo sapien
gaagttaccagccacgtactggtag

SEQ ID NO: 3749288 - DNA, 25 bp, Homo sapien
tgagcgtcagcttccgcagcggcgc

SEQ ID NO: 3749289 - DNA, 25 bp, Homo sapien
aagggaagttaccagccacgtactg

SEQ ID NO: 3749290 - DNA, 25 bp, Homo sapien
gggagtcctggacggagcgagccgg

SEQ ID NO: 3749291 - DNA, 25 bp, Homo sapien
gagcgagccggcgcgccgctgttac

SEQ ID NO: 3749292 - DNA, 25 bp, Homo sapien
cccggcgggaagatggggagtcctg

SEQ ID NO: 3749293 - DNA, 25 bp, Homo sapien
gtcctggacggagcgagccggcgcg

SEQ ID NO: 3749294 - DNA, 25 bp, Homo sapien
ttacagagggtctgagtcctcgccc

SEQ ID NO: 3749295 - DNA, 25 bp, Homo sapien
cagaaggttcgagctttgacgggcc

SEQ ID NO: 3749296 - DNA, 25 bp, Homo sapien
gcttcagaaagatcccctgctggcc

SEQ ID NO: 3749297 - DNA, 25 bp, Homo sapien
cagcccagttcagaaggttcgagct

SEQ ID NO: 3749298 - DNA, 25 bp, Homo sapien
cagttggggtccagggtccagtaat

SEQ ID NO: 3749299 - DNA, 25 bp, Homo sapien
tggggtccagggtccagtaattgcc

SEQ ID NO: 3749300 - DNA, 25 bp, Homo sapien
cttctcgcagttggggtccagggtc

SEQ ID NO: 3749301 - DNA, 25 bp, Homo sapien
tccagggtccagtaattgcctttac

SEQ ID NO: 3749302 - DNA, 25 bp, Homo sapien
gccgcgctggcttcagctctcctct

SEQ ID NO: 3749303 - DNA, 25 bp, Homo sapien
ccgcgctggcttcagctctcctctt

SEQ ID NO: 3749304 - DNA, 25 bp, Homo sapien
cgcgctggcttcagctctcctcttc

SEQ ID NO: 3749305 - DNA, 25 bp, Homo sapien
ctgcaggtccaggcaagccgcgctc

SEQ ID NO: 3749306 - DNA, 25 bp, Homo sapien
ccaggcaagccgcgctcgggggctc

SEQ ID NO: 3749307 - DNA, 25 bp, Homo sapien
ggcaagccgcgctcgggggctccag

SEQ ID NO: 3749308 - DNA, 25 bp, Homo sapien
tgcaggtccaggcaagccgcgctcg

SEQ ID NO: 3749309 - DNA, 25 bp, Homo sapien
caggtggcggcctcgggtgcggatg

SEQ ID NO: 3749310 - DNA, 25 bp, Homo sapien
tagcagaagcgaaaccggagaagca

SEQ ID NO: 3749311 - DNA, 25 bp, Homo sapien
cagccagagcgctcatagcagaagc

SEQ ID NO: 3749312 - DNA, 25 bp, Homo sapien
tgtcggtggccgcctcccgaaagaa

SEQ ID NO: 3749313 - DNA, 25 bp, Homo sapien
tcccttcccggctgtagaggaggtg

SEQ ID NO: 3749314 - DNA, 25 bp, Homo sapien
ggcggccgcggtctggtggccaggg

SEQ ID NO: 3749315 - DNA, 25 bp, Homo sapien
actgaggcggaagccggcggccgcg

SEQ ID NO: 3749316 - DNA, 25 bp, Homo sapien
cttcccggctgtagaggaggtgact

SEQ ID NO: 3749317 - DNA, 25 bp, Homo sapien
ccaaaatgcagggaagataggtacc

SEQ ID NO: 3749318 - DNA, 25 bp, Homo sapien
ggttcaatttacacaggaggctgct

SEQ ID NO: 3749319 - DNA, 25 bp, Homo sapien
tgtgggtggcacaaacctggaccct

SEQ ID NO: 3749320 - DNA, 25 bp, Homo sapien
tcgagagcacaggttctagacgccc

SEQ ID NO: 3749321 - DNA, 25 bp, Homo sapien
gatacaagtgactcaacctctattg

SEQ ID NO: 3749322 - DNA, 25 bp, Homo sapien
ggcggttccacatgtttctctccta

SEQ ID NO: 3749323 - DNA, 25 bp, Homo sapien
ccttgaagatcctacccaagatggg

SEQ ID NO: 3749324 - DNA, 25 bp, Homo sapien
tctattgcattctgtggcggttcca

SEQ ID NO: 3749325 - DNA, 25 bp, Homo sapien
cagagcctcagatgggagctcctcc

SEQ ID NO: 3749326 - DNA, 25 bp, Homo sapien
gcagagcctcagatgggagctcctc

SEQ ID NO: 3749327 - DNA, 25 bp, Homo sapien
ggcagagcctcagatgggagctcct

SEQ ID NO: 3749328 - DNA, 25 bp, Homo sapien
gccaactcctctggtagaaataatc

SEQ ID NO: 3749329 - DNA, 25 bp, Homo sapien
ctcctctggtagaaataatctctct

SEQ ID NO: 3749330 - DNA, 25 bp, Homo sapien
ttcctgttgtgctcagaaactttcc

SEQ ID NO: 3749331 - DNA, 25 bp, Homo sapien
tgtgctcagaaactttcctatgttt

SEQ ID NO: 3749332 - DNA, 25 bp, Homo sapien
atgatgcagtacaagccatctgaaa

SEQ ID NO: 3749333 - DNA, 25 bp, Homo sapien
tgggggaatggacaaggcggcttcc

SEQ ID NO: 3749334 - DNA, 25 bp, Homo sapien
atgatgatgcagtacaagccatctg

SEQ ID NO: 3749335 - DNA, 25 bp, Homo sapien
agtgggggaatggacaaggcggctt

SEQ ID NO: 3749336 - DNA, 25 bp, Homo sapien
catttgagtgtagtttcttctgtga

SEQ ID NO: 3749337 - DNA, 25 bp, Homo sapien
gacatttgagtgtagtttcttctgt

SEQ ID NO: 3749338 - DNA, 25 bp, Homo sapien
gggacatttgagtgtagtttcttct

SEQ ID NO: 3749339 - DNA, 25 bp, Homo sapien
tggggacatttgagtgtagtttctt

SEQ ID NO: 3749340 - DNA, 25 bp, Homo sapien
ctccccagagtggacgtctgggtct

SEQ ID NO: 3749341 - DNA, 25 bp, Homo sapien
tcctggcgtcagaggcattgttcag

SEQ ID NO: 3749342 - DNA, 25 bp, Homo sapien
cagagtggacgtctgggtcttcctg

SEQ ID NO: 3749343 - DNA, 25 bp, Homo sapien
ctgggtcttcctggcgtcagaggca

SEQ ID NO: 3749344 - DNA, 25 bp, Homo sapien
tacttttgtaaagatgacttcctta

SEQ ID NO: 3749345 - DNA, 25 bp, Homo sapien
atacttttgtaaagatgacttcctt

SEQ ID NO: 3749346 - DNA, 25 bp, Homo sapien
ttctctccagcggcttgaggttgag

SEQ ID NO: 3749347 - DNA, 25 bp, Homo sapien
tctccagcggcttgaggttgagtgt

SEQ ID NO: 3749348 - DNA, 25 bp, Homo sapien
aggtgctgggactcgatggatgaaa

SEQ ID NO: 3749349 - DNA, 25 bp, Homo sapien
gctgggactcgatggatgaaagaga

SEQ ID NO: 3749350 - DNA, 25 bp, Homo sapien
ctgctttccaacttcatagagaaga

SEQ ID NO: 3749351 - DNA, 25 bp, Homo sapien
gagcaccccctttgaacctgtagga

SEQ ID NO: 3749352 - DNA, 25 bp, Homo sapien
gaagagcaccccctttgaacctgta

SEQ ID NO: 3749353 - DNA, 25 bp, Homo sapien
ccaacttcatagagaagagcacccc

SEQ ID NO: 3749354 - DNA, 25 bp, Homo sapien
cacgatagagatctctccttgttta

SEQ ID NO: 3749355 - DNA, 25 bp, Homo sapien
atcaaggagttacaggtcacgatag

SEQ ID NO: 3749356 - DNA, 25 bp, Homo sapien
tacaggtcacgatagagatctctcc

SEQ ID NO: 3749357 - DNA, 25 bp, Homo sapien
gagttacaggtcacgatagagatct

SEQ ID NO: 3749358 - DNA, 25 bp, Homo sapien
gatctccccagatctgtttccatac

SEQ ID NO: 3749359 - DNA, 25 bp, Homo sapien
ttaagcctgaagatctccccagatc

SEQ ID NO: 3749360 - DNA, 25 bp, Homo sapien
tgaagatctccccagatctgtttcc

SEQ ID NO: 3749361 - DNA, 25 bp, Homo sapien
gaagatctccccagatctgtttcca

SEQ ID NO: 3749362 - DNA, 25 bp, Homo sapien
gcaggcccagagctgaatatacccc

SEQ ID NO: 3749363 - DNA, 25 bp, Homo sapien
aggcccagagctgaatataccccca

SEQ ID NO: 3749364 - DNA, 25 bp, Homo sapien
caggcccagagctgaatataccccc

SEQ ID NO: 3749365 - DNA, 25 bp, Homo sapien
agagctgaatatacccccaaacagc

SEQ ID NO: 3749366 - DNA, 25 bp, Homo sapien
gggtgagccactggcccaccagcat

SEQ ID NO: 3749367 - DNA, 25 bp, Homo sapien
tcctttaaaaagcacctgcagggcc

SEQ ID NO: 3749368 - DNA, 25 bp, Homo sapien
ttaaaaagcacctgcagggcctctg

SEQ ID NO: 3749369 - DNA, 25 bp, Homo sapien
ctgggcactactcctttaaaaagca

SEQ ID NO: 3749370 - DNA, 25 bp, Homo sapien
ctcttttgtcgacaaaggatgaaaa

SEQ ID NO: 3749371 - DNA, 25 bp, Homo sapien
tcttttgtcgacaaaggatgaaaac

SEQ ID NO: 3749372 - DNA, 25 bp, Homo sapien
tgaagaggctttgcatttcagaaag

SEQ ID NO: 3749373 - DNA, 25 bp, Homo sapien
cagaggtatgaagaggctttgcatt

SEQ ID NO: 3749374 - DNA, 25 bp, Homo sapien
caggtgcagagtcgggctggaccag

SEQ ID NO: 3749375 - DNA, 25 bp, Homo sapien
ttccagatgaatctttgtggagaag

SEQ ID NO: 3749376 - DNA, 25 bp, Homo sapien
accaggtgcagagtcgggctggacc

SEQ ID NO: 3749377 - DNA, 25 bp, Homo sapien
gtgcagagtcgggctggaccaggct

SEQ ID NO: 3749378 - DNA, 25 bp, Homo sapien
aaagttcattgtcaggcactgatat

SEQ ID NO: 3749379 - DNA, 25 bp, Homo sapien
aaaaagttcattgtcaggcactgat

SEQ ID NO: 3749380 - DNA, 25 bp, Homo sapien
aaaagttcattgtcaggcactgata

SEQ ID NO: 3749381 - DNA, 25 bp, Homo sapien
gcgaggacatggcagatgttatatc

SEQ ID NO: 3749382 - DNA, 25 bp, Homo sapien
tgttatatcaagcttcgcctgctga

SEQ ID NO: 3749383 - DNA, 25 bp, Homo sapien
tgagtagtgggtccaaggccgttct

SEQ ID NO: 3749384 - DNA, 25 bp, Homo sapien
ttcaggcatcttaggcgaggacatg

SEQ ID NO: 3749385 - DNA, 25 bp, Homo sapien
aagatggtcccggaagttttctgca

SEQ ID NO: 3749386 - DNA, 25 bp, Homo sapien
aattcaccacaatttctagtgtcaa

SEQ ID NO: 3749387 - DNA, 25 bp, Homo sapien
agatggtcccggaagttttctgcat

SEQ ID NO: 3749388 - DNA, 25 bp, Homo sapien
caatttctagtgtcaagtggtgtct

SEQ ID NO: 3749389 - DNA, 25 bp, Homo sapien
accaggtgcttacggagggagtcac

SEQ ID NO: 3749390 - DNA, 25 bp, Homo sapien
cagatgtccggatggctctcatggg

SEQ ID NO: 3749391 - DNA, 25 bp, Homo sapien
aattagcgccaattgtgaggtggcc

SEQ ID NO: 3749392 - DNA, 25 bp, Homo sapien
taattttgtaggcagagagcagctg

SEQ ID NO: 3749393 - DNA, 25 bp, Homo sapien
gctgtccgcagcctagcaggaaatt

SEQ ID NO: 3749394 - DNA, 25 bp, Homo sapien
cccggctgtcttcgccgggcgcgaa

SEQ ID NO: 3749395 - DNA, 25 bp, Homo sapien
tagcaggaaatttgtccggccggcc

SEQ ID NO: 3749396 - DNA, 25 bp, Homo sapien
gccgtgggttcctgaagccgctcgc

SEQ ID NO: 3749397 - DNA, 25 bp, Homo sapien
gtctggtcgcgcagatcgcgctgca

SEQ ID NO: 3749398 - DNA, 25 bp, Homo sapien
gggccggtctggtcgcgcagatcgc

SEQ ID NO: 3749399 - DNA, 25 bp, Homo sapien
ccggtctggtcgcgcagatcgcgct

SEQ ID NO: 3749400 - DNA, 25 bp, Homo sapien
gggggggccggtctggtcgcgcaga

SEQ ID NO: 3749401 - DNA, 25 bp, Homo sapien
ctgcttgggcctcccggggtgcaca

SEQ ID NO: 3749402 - DNA, 25 bp, Homo sapien
cagttccccacaggggcgcagggtc

SEQ ID NO: 3749403 - DNA, 25 bp, Homo sapien
gggccccagccgctggtactgggcg

SEQ ID NO: 3749404 - DNA, 25 bp, Homo sapien
gcgcagggtccctgtccgcacgcgc

SEQ ID NO: 3749405 - DNA, 25 bp, Homo sapien
aatttaggtcaggtccagcgcggtc

SEQ ID NO: 3749406 - DNA, 25 bp, Homo sapien
tttaccgagagggagcgtgagcact

SEQ ID NO: 3749407 - DNA, 25 bp, Homo sapien
tttgggacacaaagacctccagacg

SEQ ID NO: 3749408 - DNA, 25 bp, Homo sapien
caagagtcgttagtgtgcagaggca

SEQ ID NO: 3749409 - DNA, 25 bp, Homo sapien
tccacctcgcctctgaccttttgct

SEQ ID NO: 3749410 - DNA, 25 bp, Homo sapien
ccccaaatgccaagagcctgtgctt

SEQ ID NO: 3749411 - DNA, 25 bp, Homo sapien
cccaaatgccaagagcctgtgcttg

SEQ ID NO: 3749412 - DNA, 25 bp, Homo sapien
tagctcctagctcttgtccacatgg

SEQ ID NO: 3749413 - DNA, 25 bp, Homo sapien
cctcaactggtttgactggaactga

SEQ ID NO: 3749414 - DNA, 25 bp, Homo sapien
ggcctctgtgtgactttccgcattg

SEQ ID NO: 3749415 - DNA, 25 bp, Homo sapien
gtgactaagtcccaagccatctgga

SEQ ID NO: 3749416 - DNA, 25 bp, Homo sapien
gaatattgatcagcggtgcacctta

SEQ ID NO: 3749417 - DNA, 25 bp, Homo sapien
ccaagccagcagtcattttagcagg

SEQ ID NO: 3749418 - DNA, 25 bp, Homo sapien
gaaggccagtctttaccctaatgga

SEQ ID NO: 3749419 - DNA, 25 bp, Homo sapien
ccattgggtcagtaggaagaaagcc

SEQ ID NO: 3749420 - DNA, 25 bp, Homo sapien
cgtctagaacagtgggaaagcgccc

SEQ ID NO: 3749421 - DNA, 25 bp, Homo sapien
tggtccttatctcgtgcccagcaag

SEQ ID NO: 3749422 - DNA, 25 bp, Homo sapien
tctgaatattagctccacgccctga

SEQ ID NO: 3749423 - DNA, 25 bp, Homo sapien
gacatgaggatatgccacccctgtg

SEQ ID NO: 3749424 - DNA, 25 bp, Homo sapien
catatcctgatgaaccccttgtaaa

SEQ ID NO: 3749425 - DNA, 25 bp, Homo sapien
gatcctctatatactgtaggtagtc

SEQ ID NO: 3749426 - DNA, 25 bp, Homo sapien
gaaagaatgttgttggctagctaag

SEQ ID NO: 3749427 - DNA, 25 bp, Homo sapien
tgtacgtacggatgctcctgggctt

SEQ ID NO: 3749428 - DNA, 25 bp, Homo sapien
tataaatccaacctgctgagtcggt

SEQ ID NO: 3749429 - DNA, 25 bp, Homo sapien
gaaagatgacagtttagcgcagtga

SEQ ID NO: 3749430 - DNA, 25 bp, Homo sapien
tctcgtaagcctgtgtctggtccgg

SEQ ID NO: 3749431 - DNA, 25 bp, Homo sapien
gattccacatgttggagcggcttcc

SEQ ID NO: 3749432 - DNA, 25 bp, Homo sapien
ggtctggggtcagagcagtccctcc

SEQ ID NO: 3749433 - DNA, 25 bp, Homo sapien
ccaccaatgctgaggtcactagctg

SEQ ID NO: 3749434 - DNA, 25 bp, Homo sapien
gaagacgaggtcctaagagatgaag

SEQ ID NO: 3749435 - DNA, 25 bp, Homo sapien
ttctggaagacgaggtcctaagaga

SEQ ID NO: 3749436 - DNA, 25 bp, Homo sapien
gtggctcacggatgaccaccgttcc

SEQ ID NO: 3749437 - DNA, 25 bp, Homo sapien
agcaagttcccacgcacatatgctg

SEQ ID NO: 3749438 - DNA, 25 bp, Homo sapien
gatgaccaccgttccatggctagaa

SEQ ID NO: 3749439 - DNA, 25 bp, Homo sapien
gaccacctcccaggtgtagacagtg

SEQ ID NO: 3749440 - DNA, 25 bp, Homo sapien
gcaaaggccacgtttgcaccacggg

SEQ ID NO: 3749441 - DNA, 25 bp, Homo sapien
tgacgcaaccgcatcctgccgccag

SEQ ID NO: 3749442 - DNA, 25 bp, Homo sapien
cacgtttgcaccacgggagctggaa

SEQ ID NO: 3749443 - DNA, 25 bp, Homo sapien
gccagcaaaggccacgtttgcacca

SEQ ID NO: 3749444 - DNA, 25 bp, Homo sapien
gaatgtctgggtttgtagcagtgct

SEQ ID NO: 3749445 - DNA, 25 bp, Homo sapien
tctgggtttgtagcagtgcttgatg

SEQ ID NO: 3749446 - DNA, 25 bp, Homo sapien
ggtccctgtgaatgtctgggtttgt

SEQ ID NO: 3749447 - DNA, 25 bp, Homo sapien
cctgtgaatgtctgggtttgtagca

SEQ ID NO: 3749448 - DNA, 25 bp, Homo sapien
ctatgcagaatgctttgccgtgaaa

SEQ ID NO: 3749449 - DNA, 25 bp, Homo sapien
tgccgtgaaaggagagtgcatccca

SEQ ID NO: 3749450 - DNA, 25 bp, Homo sapien
cagaagctgcatgcctgagctcaga

SEQ ID NO: 3749451 - DNA, 25 bp, Homo sapien
tgagctcagaggcaatcgtcacctg

SEQ ID NO: 3749452 - DNA, 25 bp, Homo sapien
ggccacagcttggagacgcagagac

SEQ ID NO: 3749453 - DNA, 25 bp, Homo sapien
gccacagcttggagacgcagagacg

SEQ ID NO: 3749454 - DNA, 25 bp, Homo sapien
gccaaaccccattcctgtagaggaa

SEQ ID NO: 3749455 - DNA, 25 bp, Homo sapien
ccgccctttggagccttgagaggaa

SEQ ID NO: 3749456 - DNA, 25 bp, Homo sapien
gacatatgacctacttccctgagaa

SEQ ID NO: 3749457 - DNA, 25 bp, Homo sapien
aaatgacctgttggcccgccctttg

SEQ ID NO: 3749458 - DNA, 25 bp, Homo sapien
cagtctttgtgacctgcagtgtgtc

SEQ ID NO: 3749459 - DNA, 25 bp, Homo sapien
gctttagtttttagcagagccaggg

SEQ ID NO: 3749460 - DNA, 25 bp, Homo sapien
cacaggtgcaatgtgcaagcgcatc

SEQ ID NO: 3749461 - DNA, 25 bp, Homo sapien
cgagctgccgtgtcctgtgattcct

SEQ ID NO: 3749462 - DNA, 25 bp, Homo sapien
caagattgagtgtctgataagcagg

SEQ ID NO: 3749463 - DNA, 25 bp, Homo sapien
agattgagtgtctgataagcaggca

SEQ ID NO: 3749464 - DNA, 25 bp, Homo sapien
ttgcaagattgagtgtctgataagc

SEQ ID NO: 3749465 - DNA, 25 bp, Homo sapien
cctggacatcgcctattgattgttg

SEQ ID NO: 3749466 - DNA, 25 bp, Homo sapien
tctgtattttttgaaaagcctcacg

SEQ ID NO: 3749467 - DNA, 25 bp, Homo sapien
accgcgcccggctgtttctgtattt

SEQ ID NO: 3749468 - DNA, 25 bp, Homo sapien
caccgcgcccggctgtttctgtatt

SEQ ID NO: 3749469 - DNA, 25 bp, Homo sapien
gctgtttctgtattttttgaaaagc

SEQ ID NO: 3749470 - DNA, 25 bp, Homo sapien
acagcttcttccgtggggtccaggg

SEQ ID NO: 3749471 - DNA, 25 bp, Homo sapien
ccgacaccaggagcccgctgatgag

SEQ ID NO: 3749472 - DNA, 25 bp, Homo sapien
tgacaactagacaactggctgcaag

SEQ ID NO: 3749473 - DNA, 25 bp, Homo sapien
aggttcacggcacggtccctgtcct

SEQ ID NO: 3749474 - DNA, 25 bp, Homo sapien
acttccttgtacagtgagtgtggga

SEQ ID NO: 3749475 - DNA, 25 bp, Homo sapien
ctgtgctcagctgggagcacccata

SEQ ID NO: 3749476 - DNA, 25 bp, Homo sapien
tgtgttcacttccttgtacagtgag

SEQ ID NO: 3749477 - DNA, 25 bp, Homo sapien
ggagcacccatagcccaccatcagg

SEQ ID NO: 3749478 - DNA, 25 bp, Homo sapien
tacggtcaactgagaaacactgagc

SEQ ID NO: 3749479 - DNA, 25 bp, Homo sapien
gacattggaggcagaactcgccaga

SEQ ID NO: 3749480 - DNA, 25 bp, Homo sapien
tcacactgggcgacaaatgaccatg

SEQ ID NO: 3749481 - DNA, 25 bp, Homo sapien
cacctatagagcaacctgggaggca

SEQ ID NO: 3749482 - DNA, 25 bp, Homo sapien
ctggggacaggtaatgagggaggag

SEQ ID NO: 3749483 - DNA, 25 bp, Homo sapien
tggggacaggtaatgagggaggaga

SEQ ID NO: 3749484 - DNA, 25 bp, Homo sapien
gagctcagttggccttacaggacag

SEQ ID NO: 3749485 - DNA, 25 bp, Homo sapien
ggagagctcagttggccttacagga

SEQ ID NO: 3749486 - DNA, 25 bp, Homo sapien
caccaggtgaccctaggtctgcgat

SEQ ID NO: 3749487 - DNA, 25 bp, Homo sapien
taggtctgcgatgaggctaagcatg

SEQ ID NO: 3749488 - DNA, 25 bp, Homo sapien
gaccctaggtctgcgatgaggctaa

SEQ ID NO: 3749489 - DNA, 25 bp, Homo sapien
gtgatgatcttgacactcggctgtc

SEQ ID NO: 3749490 - DNA, 25 bp, Homo sapien
tgcagacactgcgaaagctcttaga

SEQ ID NO: 3749491 - DNA, 25 bp, Homo sapien
caaggtcatggaattttgccattgc

SEQ ID NO: 3749492 - DNA, 25 bp, Homo sapien
gcttttactgagcatgcaatccgga

SEQ ID NO: 3749493 - DNA, 25 bp, Homo sapien
gcataaaattatgcgacaccactga

SEQ ID NO: 3749494 - DNA, 25 bp, Homo sapien
gggaagacgctgggaaaccatcctg

SEQ ID NO: 3749495 - DNA, 25 bp, Homo sapien
gaagacgctgggaaaccatcctggc

SEQ ID NO: 3749496 - DNA, 25 bp, Homo sapien
tgggaagacgctgggaaaccatcct

SEQ ID NO: 3749497 - DNA, 25 bp, Homo sapien
ggaagacgctgggaaaccatcctgg

SEQ ID NO: 3749498 - DNA, 25 bp, Homo sapien
cagctgccctgaatagggggcctct

SEQ ID NO: 3749499 - DNA, 25 bp, Homo sapien
tgcggtctggccctgagggtaactc

SEQ ID NO: 3749500 - DNA, 25 bp, Homo sapien
tgtttcctgagtgccccgaggccca

SEQ ID NO: 3749501 - DNA, 25 bp, Homo sapien
caaaaggagaggctccaggcctgcg

SEQ ID NO: 3749502 - DNA, 25 bp, Homo sapien
caaaacaaatgtggccacatcagtg

SEQ ID NO: 3749503 - DNA, 25 bp, Homo sapien
aacaaaacaaatgtggccacatcag

SEQ ID NO: 3749504 - DNA, 25 bp, Homo sapien
agtgaaagaaatcactgaagccagt

SEQ ID NO: 3749505 - DNA, 25 bp, Homo sapien
caaatgtggccacatcagtgaaaga

SEQ ID NO: 3749506 - DNA, 25 bp, Homo sapien
tcaggaggaccaacagcccctgcga

SEQ ID NO: 3749507 - DNA, 25 bp, Homo sapien
cagcccctgcgacatcgggctgcat

SEQ ID NO: 3749508 - DNA, 25 bp, Homo sapien
ggaggaccaacagcccctgcgacat

SEQ ID NO: 3749509 - DNA, 25 bp, Homo sapien
cagggagtcaggaggaccaacagcc

SEQ ID NO: 3749510 - DNA, 25 bp, Homo sapien
ctgttgataaggaatttctgaaaca

SEQ ID NO: 3749511 - DNA, 25 bp, Homo sapien
cagccagcgctactgactgcaacag

SEQ ID NO: 3749512 - DNA, 25 bp, Homo sapien
tctttggtgacttcgatgatgacgt

SEQ ID NO: 3749513 - DNA, 25 bp, Homo sapien
cagcgactggaatagcagcctgggt

SEQ ID NO: 3749514 - DNA, 25 bp, Homo sapien
tagatcgacagcattcccagagatg

SEQ ID NO: 3749515 - DNA, 25 bp, Homo sapien
ggtggcatgcccttgctacttcagc

SEQ ID NO: 3749516 - DNA, 25 bp, Homo sapien
gtcttttcttatgtgcagcgccagg

SEQ ID NO: 3749517 - DNA, 25 bp, Homo sapien
aacgcagcacgtcatgtcgggagga

SEQ ID NO: 3749518 - DNA, 25 bp, Homo sapien
cgcggtcgttagtgcaggtcttaca

SEQ ID NO: 3749519 - DNA, 25 bp, Homo sapien
tctccctgggaatacggcgacttca

SEQ ID NO: 3749520 - DNA, 25 bp, Homo sapien
tctttgcccccttctacagcacttc

SEQ ID NO: 3749521 - DNA, 25 bp, Homo sapien
tcgatggtgcagtcagcagtcccag

SEQ ID NO: 3749522 - DNA, 25 bp, Homo sapien
caagcaggctactgatgcgaaaggc

SEQ ID NO: 3749523 - DNA, 25 bp, Homo sapien
gaaatttacaggagagaccgctcat

SEQ ID NO: 3749524 - DNA, 25 bp, Homo sapien
gcgttctcagtagcccctaggtgat

SEQ ID NO: 3749525 - DNA, 25 bp, Homo sapien
cagaaggaacattctggggatccct

SEQ ID NO: 3749526 - DNA, 25 bp, Homo sapien
cgtctgcgctgtgcatccatggata

SEQ ID NO: 3749527 - DNA, 25 bp, Homo sapien
gggatccctttccgcgtctgcgctg

SEQ ID NO: 3749528 - DNA, 25 bp, Homo sapien
tactaagttaaagactcatggaaaa

SEQ ID NO: 3749529 - DNA, 25 bp, Homo sapien
tacgttatctcccagaacatgtcat

SEQ ID NO: 3749530 - DNA, 25 bp, Homo sapien
cagctaacatgtggctggtttccac

SEQ ID NO: 3749531 - DNA, 25 bp, Homo sapien
gcatcctggtttccgcagctcctaa

SEQ ID NO: 3749532 - DNA, 25 bp, Homo sapien
gctcctaatactaagaaccttccca

SEQ ID NO: 3749533 - DNA, 25 bp, Homo sapien
tacagaagccgagcaagttgcacag

SEQ ID NO: 3749534 - DNA, 25 bp, Homo sapien
cttctgggacttagcactgggcact

SEQ ID NO: 3749535 - DNA, 25 bp, Homo sapien
tcttacatccttgagtcctggccgg

SEQ ID NO: 3749536 - DNA, 25 bp, Homo sapien
taagagttgacctgactaggagccg

SEQ ID NO: 3749537 - DNA, 25 bp, Homo sapien
catcagacttgttagggtggtgcat

SEQ ID NO: 3749538 - DNA, 25 bp, Homo sapien
cctggtcctcatcagacttgttagg

SEQ ID NO: 3749539 - DNA, 25 bp, Homo sapien
ctcatcagacttgttagggtggtgc

SEQ ID NO: 3749540 - DNA, 25 bp, Homo sapien
ggtcctcatcagacttgttagggtg

SEQ ID NO: 3749541 - DNA, 25 bp, Homo sapien
aactacagttatgcaccatcatgct

SEQ ID NO: 3749542 - DNA, 25 bp, Homo sapien
tggaactacagttatgcaccatcat

SEQ ID NO: 3749543 - DNA, 25 bp, Homo sapien
tacagttatgcaccatcatgcttgc

SEQ ID NO: 3749544 - DNA, 25 bp, Homo sapien
gttatgcaccatcatgcttgcctaa

SEQ ID NO: 3749545 - DNA, 25 bp, Homo sapien
gggaccagccatgctccggacaagc

SEQ ID NO: 3749546 - DNA, 25 bp, Homo sapien
ggaagtgggcgttgttctatatctt

SEQ ID NO: 3749547 - DNA, 25 bp, Homo sapien
agctgacccactggaagtgggcgtt

SEQ ID NO: 3749548 - DNA, 25 bp, Homo sapien
ggacaagcccgagctgacccactgg

SEQ ID NO: 3749549 - DNA, 25 bp, Homo sapien
aaaggctccatagcccactcttcca

SEQ ID NO: 3749550 - DNA, 25 bp, Homo sapien
tttccaaaggctccatagcccactc

SEQ ID NO: 3749551 - DNA, 25 bp, Homo sapien
cttccagtatccatcctggtcatgc

SEQ ID NO: 3749552 - DNA, 25 bp, Homo sapien
ccactcttccagtatccatcctggt

SEQ ID NO: 3749553 - DNA, 25 bp, Homo sapien
caggagagctcagcctgctttttcg

SEQ ID NO: 3749554 - DNA, 25 bp, Homo sapien
gctttttcgggctcttcaaggccca

SEQ ID NO: 3749555 - DNA, 25 bp, Homo sapien
attcatgcacggagaaataacacga

SEQ ID NO: 3749556 - DNA, 25 bp, Homo sapien
taacacgaatgctggtgtggaaatg

SEQ ID NO: 3749557 - DNA, 25 bp, Homo sapien
aatgcagattctgtgaccttcagag

SEQ ID NO: 3749558 - DNA, 25 bp, Homo sapien
tccgtctcagctcaacttggacaca

SEQ ID NO: 3749559 - DNA, 25 bp, Homo sapien
ggacacatgccgtcttttcttcatc

SEQ ID NO: 3749560 - DNA, 25 bp, Homo sapien
agtccgtctcagctcaacttggaca

SEQ ID NO: 3749561 - DNA, 25 bp, Homo sapien
gacacatgccgtcttttcttcatcc

SEQ ID NO: 3749562 - DNA, 25 bp, Homo sapien
tctgactgctgaggcattgatgccc

SEQ ID NO: 3749563 - DNA, 25 bp, Homo sapien
ggatggagataagtgtcctgtcccc

SEQ ID NO: 3749564 - DNA, 25 bp, Homo sapien
cccagaagagcaatctctctacaaa

SEQ ID NO: 3749565 - DNA, 25 bp, Homo sapien
cagcctgggcggatctgactgctga

SEQ ID NO: 3749566 - DNA, 25 bp, Homo sapien
gagcctgcaattccggagcctgcat

SEQ ID NO: 3749567 - DNA, 25 bp, Homo sapien
catgctgcgggaaactgcaaactca

SEQ ID NO: 3749568 - DNA, 25 bp, Homo sapien
gcaaactcagcaaagcgaacggtgg

SEQ ID NO: 3749569 - DNA, 25 bp, Homo sapien
caaaaaggagcctgcaattccggag

SEQ ID NO: 3749570 - DNA, 25 bp, Homo sapien
gaatgtagccttgctcaggtccgac

SEQ ID NO: 3749571 - DNA, 25 bp, Homo sapien
cacctgcccgtcatctggcagagtc

SEQ ID NO: 3749572 - DNA, 25 bp, Homo sapien
tcaggtccgactgatggctgcacct

SEQ ID NO: 3749573 - DNA, 25 bp, Homo sapien
agccaggtaaggaatgtagccttgc

SEQ ID NO: 3749574 - DNA, 25 bp, Homo sapien
caaaacctgcagctgtttggctttc

SEQ ID NO: 3749575 - DNA, 25 bp, Homo sapien
gtcaaaacctgcagctgtttggctt

SEQ ID NO: 3749576 - DNA, 25 bp, Homo sapien
aaacctgcagctgtttggctttcaa

SEQ ID NO: 3749577 - DNA, 25 bp, Homo sapien
ctggtcaaaacctgcagctgtttgg

SEQ ID NO: 3749578 - DNA, 25 bp, Homo sapien
ttactgaagatgaaaggttgcatta

SEQ ID NO: 3749579 - DNA, 25 bp, Homo sapien
gaagatgaaaggttgcattagagag

SEQ ID NO: 3749580 - DNA, 25 bp, Homo sapien
aggcactccttgtgggggttattgg

SEQ ID NO: 3749581 - DNA, 25 bp, Homo sapien
aaaggttgcattagagaggacagtg

SEQ ID NO: 3749582 - DNA, 25 bp, Homo sapien
gaggccgacacccttgagaaagaca

SEQ ID NO: 3749583 - DNA, 25 bp, Homo sapien
gaaacagaggttcccgaaggataga

SEQ ID NO: 3749584 - DNA, 25 bp, Homo sapien
caatgggcgacaacctgcagaattc

SEQ ID NO: 3749585 - DNA, 25 bp, Homo sapien
gaattcaaagcctgtccaccagctg

SEQ ID NO: 3749586 - DNA, 25 bp, Homo sapien
cagtggtctcgttgcccctgagagc

SEQ ID NO: 3749587 - DNA, 25 bp, Homo sapien
cgtggttgtctcgttgctgtcggca

SEQ ID NO: 3749588 - DNA, 25 bp, Homo sapien
ctggcgagcggcaagctaaaaccca

SEQ ID NO: 3749589 - DNA, 25 bp, Homo sapien
accagcaggagtggacacaagggct

SEQ ID NO: 3749590 - DNA, 25 bp, Homo sapien
tggatgcctcaaagcgcaaacctcg

SEQ ID NO: 3749591 - DNA, 25 bp, Homo sapien
aatgttcccactcctcgaggacaat

SEQ ID NO: 3749592 - DNA, 25 bp, Homo sapien
tcctcgaggacaatctcaaaggccc

SEQ ID NO: 3749593 - DNA, 25 bp, Homo sapien
ctcttgtggacccagaggggccctg

SEQ ID NO: 3749594 - DNA, 25 bp, Homo sapien
ccccacccactctcccaacgtcgca

SEQ ID NO: 3749595 - DNA, 25 bp, Homo sapien
cccacccactctcccaacgtcgcac

SEQ ID NO: 3749596 - DNA, 25 bp, Homo sapien
ctgaagaagtaggcggcgagaagga

SEQ ID NO: 3749597 - DNA, 25 bp, Homo sapien
gctgagccgcgctaaggcctggcct

SEQ ID NO: 3749598 - DNA, 25 bp, Homo sapien
ccgcgctaaggcctggcctctgtgt

SEQ ID NO: 3749599 - DNA, 25 bp, Homo sapien
gagccgcgctaaggcctggcctctg

SEQ ID NO: 3749600 - DNA, 25 bp, Homo sapien
tgagccgcgctaaggcctggcctct

SEQ ID NO: 3749601 - DNA, 25 bp, Homo sapien
ggtgagccgggaaaagctactcctg

SEQ ID NO: 3749602 - DNA, 25 bp, Homo sapien
gagccgggaaaagctactcctgttg

SEQ ID NO: 3749603 - DNA, 25 bp, Homo sapien
caggtgagccgggaaaagctactcc

SEQ ID NO: 3749604 - DNA, 25 bp, Homo sapien
gggaaaagctactcctgttgctcat

SEQ ID NO: 3749605 - DNA, 25 bp, Homo sapien
tccacacttctaggttccccgagag

SEQ ID NO: 3749606 - DNA, 25 bp, Homo sapien
cacaggatgcgttaggtttccacac

SEQ ID NO: 3749607 - DNA, 25 bp, Homo sapien
aggttccccgagagccaacagcgct

SEQ ID NO: 3749608 - DNA, 25 bp, Homo sapien
cagcgctcggcacagtgatacccac

SEQ ID NO: 3749609 - DNA, 25 bp, Homo sapien
cttgctcctccaagattccgttggg

SEQ ID NO: 3749610 - DNA, 25 bp, Homo sapien
tcctccaagattccgttgggcatct

SEQ ID NO: 3749611 - DNA, 25 bp, Homo sapien
tgctcctccaagattccgttgggca

SEQ ID NO: 3749612 - DNA, 25 bp, Homo sapien
gctcctccaagattccgttgggcat

SEQ ID NO: 3749613 - DNA, 25 bp, Homo sapien
tgaactcctcccgaaactgcttgca

SEQ ID NO: 3749614 - DNA, 25 bp, Homo sapien
cagtcgtcggcggatctgatacgga

SEQ ID NO: 3749615 - DNA, 25 bp, Homo sapien
tgctccacggggatgggaaaatact

SEQ ID NO: 3749616 - DNA, 25 bp, Homo sapien
gaaactgcttgcagtcgtcggcgga

SEQ ID NO: 3749617 - DNA, 25 bp, Homo sapien
tgtacagtttacatgggccaccacc

SEQ ID NO: 3749618 - DNA, 25 bp, Homo sapien
cacgttgcttctgggtaaagtctca

SEQ ID NO: 3749619 - DNA, 25 bp, Homo sapien
gaggaggcttgcaccaaaaaacaag

SEQ ID NO: 3749620 - DNA, 25 bp, Homo sapien
gtcaggctgagagattgcaacacaa

SEQ ID NO: 3749621 - DNA, 25 bp, Homo sapien
gatactgtgcattcgtcaaaaccca

SEQ ID NO: 3749622 - DNA, 25 bp, Homo sapien
gataggtggttcttggcctcatccc

SEQ ID NO: 3749623 - DNA, 25 bp, Homo sapien
aaccctgacgtgtggacttctgcta

SEQ ID NO: 3749624 - DNA, 25 bp, Homo sapien
gaaaatacacgggaggcatgatacc

SEQ ID NO: 3749625 - DNA, 25 bp, Homo sapien
tcacttcttcaaatgtaggagaatg

SEQ ID NO: 3749626 - DNA, 25 bp, Homo sapien
tgttcacttcttcaaatgtaggaga

SEQ ID NO: 3749627 - DNA, 25 bp, Homo sapien
ggatgttcacttcttcaaatgtagg

SEQ ID NO: 3749628 - DNA, 25 bp, Homo sapien
cttcttcaaatgtaggagaatgtga

SEQ ID NO: 3749629 - DNA, 25 bp, Homo sapien
tgagctccccacaatgcacagtgtg

SEQ ID NO: 3749630 - DNA, 25 bp, Homo sapien
gcgtgaactctggtggcctgcattc

SEQ ID NO: 3749631 - DNA, 25 bp, Homo sapien
ggcttcagtgcacacgtctttggga

SEQ ID NO: 3749632 - DNA, 25 bp, Homo sapien
tctgagcagcataaccgagcgtgaa

SEQ ID NO: 3749633 - DNA, 25 bp, Homo sapien
gatttggtaagaactgactacgaca

SEQ ID NO: 3749634 - DNA, 25 bp, Homo sapien
gcatttccatggtatctcagggccc

SEQ ID NO: 3749635 - DNA, 25 bp, Homo sapien
cgacagaactgtgaaccgggagatg

SEQ ID NO: 3749636 - DNA, 25 bp, Homo sapien
tcttgcttaagactccaggtgtgct

SEQ ID NO: 3749637 - DNA, 25 bp, Homo sapien
tacctgctgtccatagtccgtctct

SEQ ID NO: 3749638 - DNA, 25 bp, Homo sapien
tcagtttccctactgagcacaggaa

SEQ ID NO: 3749639 - DNA, 25 bp, Homo sapien
tgaaaacacgtggagcaaactacct

SEQ ID NO: 3749640 - DNA, 25 bp, Homo sapien
gattcaagcaccatgctcatgtcag

SEQ ID NO: 3749641 - DNA, 25 bp, Homo sapien
gggaaggatgttgggatatctgttt

SEQ ID NO: 3749642 - DNA, 25 bp, Homo sapien
aagttccttgtatgtgtccagatgg

SEQ ID NO: 3749643 - DNA, 25 bp, Homo sapien
agttccttgtatgtgtccagatggc

SEQ ID NO: 3749644 - DNA, 25 bp, Homo sapien
aaagttccttgtatgtgtccagatg

SEQ ID NO: 3749645 - DNA, 25 bp, Homo sapien
ggcacctaaagaggaacgttctgga

SEQ ID NO: 3749646 - DNA, 25 bp, Homo sapien
caggtcccaacagtaagcataggct

SEQ ID NO: 3749647 - DNA, 25 bp, Homo sapien
gagtcctaggtgcaaatgctgagca

SEQ ID NO: 3749648 - DNA, 25 bp, Homo sapien
ctgtgcagggagatgggcacctaaa

SEQ ID NO: 3749649 - DNA, 25 bp, Homo sapien
tcagaacctacagggtttgtcttgg

SEQ ID NO: 3749650 - DNA, 25 bp, Homo sapien
tggagcaggtcaccgagacgcaccc

SEQ ID NO: 3749651 - DNA, 25 bp, Homo sapien
gggccagctcttacaaaggcggttc

SEQ ID NO: 3749652 - DNA, 25 bp, Homo sapien
cccaggtcacgacccatccagctgg

SEQ ID NO: 3749653 - DNA, 25 bp, Homo sapien
cagcagagaaagggcgggtatagct

SEQ ID NO: 3749654 - DNA, 25 bp, Homo sapien
ctggtggcctgcgacctccgatggt

SEQ ID NO: 3749655 - DNA, 25 bp, Homo sapien
acctccgatggttgagccagctctg

SEQ ID NO: 3749656 - DNA, 25 bp, Homo sapien
gccacgggctggtggcctgcgacct

SEQ ID NO: 3749657 - DNA, 25 bp, Homo sapien
cctgcgacctccgatggttgagcca

SEQ ID NO: 3749658 - DNA, 25 bp, Homo sapien
catccagttggctcagaatcaccct

SEQ ID NO: 3749659 - DNA, 25 bp, Homo sapien
cagttggctcagaatcaccctagaa

SEQ ID NO: 3749660 - DNA, 25 bp, Homo sapien
ctcagaatcaccctagaatggtcat

SEQ ID NO: 3749661 - DNA, 25 bp, Homo sapien
ctatgtaggaagcattgatgtagtc

SEQ ID NO: 3749662 - DNA, 25 bp, Homo sapien
cagtgtgtaaagcacgggcagttcc

SEQ ID NO: 3749663 - DNA, 25 bp, Homo sapien
cgtaccctttgtgcttgtggccaaa

SEQ ID NO: 3749664 - DNA, 25 bp, Homo sapien
aatgctgtagtgaacatcctctgtg

SEQ ID NO: 3749665 - DNA, 25 bp, Homo sapien
gttgtgacaatttacactccgggca

SEQ ID NO: 3749666 - DNA, 25 bp, Homo sapien
gctgctatgaatttattcttctctt

SEQ ID NO: 3749667 - DNA, 25 bp, Homo sapien
cttgagctgctatgaatttattctt

SEQ ID NO: 3749668 - DNA, 25 bp, Homo sapien
ttgagctgctatgaatttattcttc

SEQ ID NO: 3749669 - DNA, 25 bp, Homo sapien
gagctgctatgaatttattcttctc

SEQ ID NO: 3749670 - DNA, 25 bp, Homo sapien
ccagccccggcaccctggccgttgg

SEQ ID NO: 3749671 - DNA, 25 bp, Homo sapien
gttggggacacacacgtcatgccct

SEQ ID NO: 3749672 - DNA, 25 bp, Homo sapien
ctggccgttggcccctggacagctg

SEQ ID NO: 3749673 - DNA, 25 bp, Homo sapien
tgtgtagaggacaatttcgaagtca

SEQ ID NO: 3749674 - DNA, 25 bp, Homo sapien
cattctccagaagtcgttaaccgtt

SEQ ID NO: 3749675 - DNA, 25 bp, Homo sapien
taacatgacgatggtcgcagacttt

SEQ ID NO: 3749676 - DNA, 25 bp, Homo sapien
gaccattctccagaagtcgttaacc

SEQ ID NO: 3749677 - DNA, 25 bp, Homo sapien
ctttcaagtttgttaacatgacgat

SEQ ID NO: 3749678 - DNA, 25 bp, Homo sapien
tggctgtatgcagaacttccggatg

SEQ ID NO: 3749679 - DNA, 25 bp, Homo sapien
cacgcacacccggatgtttccatag

SEQ ID NO: 3749680 - DNA, 25 bp, Homo sapien
ccttggtcgggccagtactgatggc

SEQ ID NO: 3749681 - DNA, 25 bp, Homo sapien
tgtagtcgaccaaaaccacgcagtc

SEQ ID NO: 3749682 - DNA, 25 bp, Homo sapien
gaacttcagcatcccaatgggggta

SEQ ID NO: 3749683 - DNA, 25 bp, Homo sapien
aaaaggcactccgaagtcgggccag

SEQ ID NO: 3749684 - DNA, 25 bp, Homo sapien
tgcacggggttgagcgtctttactt

SEQ ID NO: 3749685 - DNA, 25 bp, Homo sapien
accacgatgggcccagcgtgcacgg

SEQ ID NO: 3749686 - DNA, 25 bp, Homo sapien
ggtgagggcggccaagcagacctgc

SEQ ID NO: 3749687 - DNA, 25 bp, Homo sapien
tgggttttatcgactgggatgaaga

SEQ ID NO: 3749688 - DNA, 25 bp, Homo sapien
cccagaggtgacttgggattcccgg

SEQ ID NO: 3749689 - DNA, 25 bp, Homo sapien
gacatttgtgttcacatcagccctg

SEQ ID NO: 3749690 - DNA, 25 bp, Homo sapien
caaagtgataccctggtgaggccaa

SEQ ID NO: 3749691 - DNA, 25 bp, Homo sapien
gagggacctcagatcaactatgcaa

SEQ ID NO: 3749692 - DNA, 25 bp, Homo sapien
tactaagaggcacattaacagctgg

SEQ ID NO: 3749693 - DNA, 25 bp, Homo sapien
gaaagatgctgcgtcgtgagtcaca

SEQ ID NO: 3749694 - DNA, 25 bp, Homo sapien
ttctgctccgcgtgcatcatggcca

SEQ ID NO: 3749695 - DNA, 25 bp, Homo sapien
ggccatcatggcatcgatcacaatg

SEQ ID NO: 3749696 - DNA, 25 bp, Homo sapien
atccgtttgaaccatctgagggcgc

SEQ ID NO: 3749697 - DNA, 25 bp, Homo sapien
tacggattcgagacacaaattcaaa

SEQ ID NO: 3749698 - DNA, 25 bp, Homo sapien
taggattgccccatctcacatgagg

SEQ ID NO: 3749699 - DNA, 25 bp, Homo sapien
tggcagaccaaagagggcggctttc

SEQ ID NO: 3749700 - DNA, 25 bp, Homo sapien
tgaggcaagagtcagagtaccggcc

SEQ ID NO: 3749701 - DNA, 25 bp, Homo sapien
gcacacctgtgtggcgaaggcatcg

SEQ ID NO: 3749702 - DNA, 25 bp, Homo sapien
tagtactcgagtaaggcttggtaga

SEQ ID NO: 3749703 - DNA, 25 bp, Homo sapien
ctctgtgtccccgtagaggtagtac

SEQ ID NO: 3749704 - DNA, 25 bp, Homo sapien
cagggaggacacgtccagctctgtg

SEQ ID NO: 3749705 - DNA, 25 bp, Homo sapien
tccagcccgatcttgtcgaagtggg

SEQ ID NO: 3749706 - DNA, 25 bp, Homo sapien
tcatgatccggacatttgtcaattt

SEQ ID NO: 3749707 - DNA, 25 bp, Homo sapien
gcaagttgcccgtcctcatgttctc

SEQ ID NO: 3749708 - DNA, 25 bp, Homo sapien
ggccttcttcatgtttgccggcaag

SEQ ID NO: 3749709 - DNA, 25 bp, Homo sapien
cttcatgatccggacatttgtcaat

SEQ ID NO: 3749710 - DNA, 25 bp, Homo sapien
tagttcctcggatccctgtggagtc

SEQ ID NO: 3749711 - DNA, 25 bp, Homo sapien
gacaaggaatcccaagtcgtgcctg

SEQ ID NO: 3749712 - DNA, 25 bp, Homo sapien
cgaggacaagtctataacgaggcac

SEQ ID NO: 3749713 - DNA, 25 bp, Homo sapien
gaggacaccctgcttttgaccctgg

SEQ ID NO: 3749714 - DNA, 25 bp, Homo sapien
caagggccagagtctgaagatggca

SEQ ID NO: 3749715 - DNA, 25 bp, Homo sapien
ctgaaggagtaaatggaatgtggcc

SEQ ID NO: 3749716 - DNA, 25 bp, Homo sapien
ccaggcaagcaatctagagtggcca

SEQ ID NO: 3749717 - DNA, 25 bp, Homo sapien
cactaaaaatattgcgctgaaggag

SEQ ID NO: 3749718 - DNA, 25 bp, Homo sapien
gatgtagtctgtgtattcttgaccc

SEQ ID NO: 3749719 - DNA, 25 bp, Homo sapien
gaaaggatcactcggttgaagtcat

SEQ ID NO: 3749720 - DNA, 25 bp, Homo sapien
tatgaaggatgcgttgatgtagtct

SEQ ID NO: 3749721 - DNA, 25 bp, Homo sapien
cttttcatggaaaggatcactcggt

SEQ ID NO: 3749722 - DNA, 25 bp, Homo sapien
ttgtgaaaacaagctaatcaagtct

SEQ ID NO: 3749723 - DNA, 25 bp, Homo sapien
ttctcattgtgaaaacaagctaatc

SEQ ID NO: 3749724 - DNA, 25 bp, Homo sapien
agccatcgtgccttgccactttttt

SEQ ID NO: 3749725 - DNA, 25 bp, Homo sapien
tgaaaacaagctaatcaagtctgtg

SEQ ID NO: 3749726 - DNA, 25 bp, Homo sapien
agtcctcaaccgtgtgtgccagtgg

SEQ ID NO: 3749727 - DNA, 25 bp, Homo sapien
ccctgggtggcgatgaaatagtcct

SEQ ID NO: 3749728 - DNA, 25 bp, Homo sapien
gatagtgtgggatttccattcccag

SEQ ID NO: 3749729 - DNA, 25 bp, Homo sapien
tgcacctccgtcagcatcacgatag

SEQ ID NO: 3749730 - DNA, 25 bp, Homo sapien
gggattgcaggttcccgccaccatg

SEQ ID NO: 3749731 - DNA, 25 bp, Homo sapien
ggattgcaggttcccgccaccatgc

SEQ ID NO: 3749732 - DNA, 25 bp, Homo sapien
gaagcggggttttgccatgttggcc

SEQ ID NO: 3749733 - DNA, 25 bp, Homo sapien
agaagcggggttttgccatgttggc

SEQ ID NO: 3749734 - DNA, 25 bp, Homo sapien
ttggccaatactggtagcatttatc

SEQ ID NO: 3749735 - DNA, 25 bp, Homo sapien
tactgatggcttctgaaagggtatc

SEQ ID NO: 3749736 - DNA, 25 bp, Homo sapien
gattgagagtgaccagaaagtctcg

SEQ ID NO: 3749737 - DNA, 25 bp, Homo sapien
tctccatgagtaactgagccctcgg

SEQ ID NO: 3749738 - DNA, 25 bp, Homo sapien
gatgaggtcaatcatgcctttgccc

SEQ ID NO: 3749739 - DNA, 25 bp, Homo sapien
cttctgcacggctgcgatgaggtca

SEQ ID NO: 3749740 - DNA, 25 bp, Homo sapien
cagccgtggaagtgaaactggcgca

SEQ ID NO: 3749741 - DNA, 25 bp, Homo sapien
ggcgggaatcccgatctcaggccag

SEQ ID NO: 3749742 - DNA, 25 bp, Homo sapien
tgtgagacaagccatggaactgcag

SEQ ID NO: 3749743 - DNA, 25 bp, Homo sapien
tgaaaggcagtcacaaagagtgggc

SEQ ID NO: 3749744 - DNA, 25 bp, Homo sapien
cagtttcaggagcacattagcacca

SEQ ID NO: 3749745 - DNA, 25 bp, Homo sapien
agtgggcgccaccagtgtgagacaa

SEQ ID NO: 3749746 - DNA, 25 bp, Homo sapien
ggaaggaggtaatcttggcataccc

SEQ ID NO: 3749747 - DNA, 25 bp, Homo sapien
ttcacaaccaggaacagtcaactga

SEQ ID NO: 3749748 - DNA, 25 bp, Homo sapien
cccagcaaggccgatttgagtcatc

SEQ ID NO: 3749749 - DNA, 25 bp, Homo sapien
gggcagtttaaggacattcacaacc

SEQ ID NO: 3749750 - DNA, 25 bp, Homo sapien
gcgcttaatgcagatcatccgactt

SEQ ID NO: 3749751 - DNA, 25 bp, Homo sapien
aaaagcgcttaatgcagatcatccg

SEQ ID NO: 3749752 - DNA, 25 bp, Homo sapien
cttaatgcagatcatccgacttgca

SEQ ID NO: 3749753 - DNA, 25 bp, Homo sapien
agagaaaaagcgcttaatgcagatc

SEQ ID NO: 3749754 - DNA, 25 bp, Homo sapien
tctgaagtcgtaaactcttcacagc

SEQ ID NO: 3749755 - DNA, 25 bp, Homo sapien
tcttcacagcttgaaatacatctaa

SEQ ID NO: 3749756 - DNA, 25 bp, Homo sapien
cagggtttgcaccatatgtggtctc

SEQ ID NO: 3749757 - DNA, 25 bp, Homo sapien
cagcttgaaatacatctaaaagtcc

SEQ ID NO: 3749758 - DNA, 25 bp, Homo sapien
cacacaacatctgagggcagcttct

SEQ ID NO: 3749759 - DNA, 25 bp, Homo sapien
aggcaagagagcacagatgacagcc

SEQ ID NO: 3749760 - DNA, 25 bp, Homo sapien
cagatgacagccacacaacatctga

SEQ ID NO: 3749761 - DNA, 25 bp, Homo sapien
cagcttctcagtcagggagcatgga

SEQ ID NO: 3749762 - DNA, 25 bp, Homo sapien
aaacaagacataaataagtgtgact

SEQ ID NO: 3749763 - DNA, 25 bp, Homo sapien
gtttttaggcacatgcagaattcca

SEQ ID NO: 3749764 - DNA, 25 bp, Homo sapien
gaatgtgtcagttagtgtattaaca

SEQ ID NO: 3749765 - DNA, 25 bp, Homo sapien
gctgtttttctacgtagaatgtgtc

SEQ ID NO: 3749766 - DNA, 25 bp, Homo sapien
taaaatcttgtaccactttgtagca

SEQ ID NO: 3749767 - DNA, 25 bp, Homo sapien
aatcttgtaccactttgtagcagaa

SEQ ID NO: 3749768 - DNA, 25 bp, Homo sapien
taccactttgtagcagaattcatac

SEQ ID NO: 3749769 - DNA, 25 bp, Homo sapien
cttgtaccactttgtagcagaattc

SEQ ID NO: 3749770 - DNA, 25 bp, Homo sapien
tatagtcaccagctactctagtgtg

SEQ ID NO: 3749771 - DNA, 25 bp, Homo sapien
tttaacaactgtatagcaggtggcc

SEQ ID NO: 3749772 - DNA, 25 bp, Homo sapien
catggaccgaaactgagaactttac

SEQ ID NO: 3749773 - DNA, 25 bp, Homo sapien
taatgtgtgctcctctgtactgcgt

SEQ ID NO: 3749774 - DNA, 25 bp, Homo sapien
tgtcaccttcatcgtagcaaactgg

SEQ ID NO: 3749775 - DNA, 25 bp, Homo sapien
tagacatgaaccaaagccggtgccc

SEQ ID NO: 3749776 - DNA, 25 bp, Homo sapien
gatacaagagatgccagttagacca

SEQ ID NO: 3749777 - DNA, 25 bp, Homo sapien
gctgtaatgacctccccgctaaagg

SEQ ID NO: 3749778 - DNA, 25 bp, Homo sapien
agaggaatgaaattaagagatttaa

SEQ ID NO: 3749779 - DNA, 25 bp, Homo sapien
tgaaattaagagatttaaagacaaa

SEQ ID NO: 3749780 - DNA, 25 bp, Homo sapien
gcagaggaatgaaattaagagattt

SEQ ID NO: 3749781 - DNA, 25 bp, Homo sapien
taagagatttaaagacaaaaacaca

SEQ ID NO: 3749782 - DNA, 25 bp, Homo sapien
gcagatgccttgatgttgtgcgcca

SEQ ID NO: 3749783 - DNA, 25 bp, Homo sapien
tttggcaacagtaggcccacacgtg

SEQ ID NO: 3749784 - DNA, 25 bp, Homo sapien
gccacgcccaatatgcaagctgtta

SEQ ID NO: 3749785 - DNA, 25 bp, Homo sapien
ccacacgtgggacatgcatgtgcca

SEQ ID NO: 3749786 - DNA, 25 bp, Homo sapien
gtggcaatgcaggcaccatcaggat

SEQ ID NO: 3749787 - DNA, 25 bp, Homo sapien
aggtggcaatgcaggcaccatcagg

SEQ ID NO: 3749788 - DNA, 25 bp, Homo sapien
ggtggcaatgcaggcaccatcagga

SEQ ID NO: 3749789 - DNA, 25 bp, Homo sapien
tggcatttttacactgtttgaactt

SEQ ID NO: 3749790 - DNA, 25 bp, Homo sapien
aaagcattccaagtccttgttcacc

SEQ ID NO: 3749791 - DNA, 25 bp, Homo sapien
gcatttttacactgtttgaacttca

SEQ ID NO: 3749792 - DNA, 25 bp, Homo sapien
cttgttcctcccatccaaagcattc

SEQ ID NO: 3749793 - DNA, 25 bp, Homo sapien
caggtggcgctacgggcccagccac

SEQ ID NO: 3749794 - DNA, 25 bp, Homo sapien
tccgctcctgtgaccgacgtgcggg

SEQ ID NO: 3749795 - DNA, 25 bp, Homo sapien
ccttccgaggacgcaagggcgcggg

SEQ ID NO: 3749796 - DNA, 25 bp, Homo sapien
tccagggccgcgtgggctccgctcc

SEQ ID NO: 3749797 - DNA, 25 bp, Homo sapien
tggcgtccagaaacagttgaaaggc

SEQ ID NO: 3749798 - DNA, 25 bp, Homo sapien
tttggtaagcgaacgctgcaccgcg

SEQ ID NO: 3749799 - DNA, 25 bp, Homo sapien
tgtccgctgcgagtgggattcgcca

SEQ ID NO: 3749800 - DNA, 25 bp, Homo sapien
gcatccttgggaaacggcctcggga

SEQ ID NO: 3749801 - DNA, 25 bp, Homo sapien
ccttgcctgcaagagttgctggagc

SEQ ID NO: 3749802 - DNA, 25 bp, Homo sapien
tggaccttaatatcaacgtggagct

SEQ ID NO: 3749803 - DNA, 25 bp, Homo sapien
tttctgcttgctgtggttcatgctt

SEQ ID NO: 3749804 - DNA, 25 bp, Homo sapien
tgcccctgtggaccttaatatcaac

SEQ ID NO: 3749805 - DNA, 25 bp, Homo sapien
atatcaacgtggagctcaacagcag

SEQ ID NO: 3749806 - DNA, 25 bp, Homo sapien
cttcaggttgtaagaggtttcctgt

SEQ ID NO: 3749807 - DNA, 25 bp, Homo sapien
ctgccttcaggttgtaagaggtttc

SEQ ID NO: 3749808 - DNA, 25 bp, Homo sapien
tgccttcaggttgtaagaggtttcc

SEQ ID NO: 3749809 - DNA, 25 bp, Homo sapien
gttttaactccaggagagtaagctc

SEQ ID NO: 3749810 - DNA, 25 bp, Homo sapien
ctgccgctgctcagagccagcaggg

SEQ ID NO: 3749811 - DNA, 25 bp, Homo sapien
tgccgctgctcagagccagcagggc

SEQ ID NO: 3749812 - DNA, 25 bp, Homo sapien
cagagccagcagggccagctgtgca

SEQ ID NO: 3749813 - DNA, 25 bp, Homo sapien
agccagcagggccagctgtgcaaac

SEQ ID NO: 3749814 - DNA, 25 bp, Homo sapien
gtcagctggaaatgcgaggaccaat

SEQ ID NO: 3749815 - DNA, 25 bp, Homo sapien
gaggaccaatgtcttgctcatctct

SEQ ID NO: 3749816 - DNA, 25 bp, Homo sapien
ctttagcaagcagcgtttgtggacc

SEQ ID NO: 3749817 - DNA, 25 bp, Homo sapien
aatgggagcacccaacggtcagctg

SEQ ID NO: 3749818 - DNA, 25 bp, Homo sapien
cataagtgcaatgccccatgggtcc

SEQ ID NO: 3749819 - DNA, 25 bp, Homo sapien
tcctctcatacaactggtctggaag

SEQ ID NO: 3749820 - DNA, 25 bp, Homo sapien
catgggtccaacgtcacatgggtcc

SEQ ID NO: 3749821 - DNA, 25 bp, Homo sapien
gggtccaatgccacataagtgcaat

SEQ ID NO: 3749822 - DNA, 25 bp, Homo sapien
ctaaaagccttcatggaaagaagac

SEQ ID NO: 3749823 - DNA, 25 bp, Homo sapien
taaaagccttcatggaaagaagaca

SEQ ID NO: 3749824 - DNA, 25 bp, Homo sapien
aaagccttcatggaaagaagacaag

SEQ ID NO: 3749825 - DNA, 25 bp, Homo sapien
agccttcatggaaagaagacaaggc

SEQ ID NO: 3749826 - DNA, 25 bp, Homo sapien
gacggttaacaagtccggagagatc

SEQ ID NO: 3749827 - DNA, 25 bp, Homo sapien
aaaaagcagcctggccgcaggtgag

SEQ ID NO: 3749828 - DNA, 25 bp, Homo sapien
tggtaaccagagtgtgctcagccct

SEQ ID NO: 3749829 - DNA, 25 bp, Homo sapien
ttctcatgtttgttgaggaggtgag

SEQ ID NO: 3749830 - DNA, 25 bp, Homo sapien
gcagaaggcaggcaaaggccatagc

SEQ ID NO: 3749831 - DNA, 25 bp, Homo sapien
cactcaaaggggtttagtttctgca

SEQ ID NO: 3749832 - DNA, 25 bp, Homo sapien
actcaaaggggtttagtttctgcag

SEQ ID NO: 3749833 - DNA, 25 bp, Homo sapien
gtttctgcagaaggcaggcaaaggc

SEQ ID NO: 3749834 - DNA, 25 bp, Homo sapien
cagaaagcacatcgcccgactgtgc

SEQ ID NO: 3749835 - DNA, 25 bp, Homo sapien
tcttgagcacccttttcgctgtaag

SEQ ID NO: 3749836 - DNA, 25 bp, Homo sapien
tttcgctgtaagacaaggctgcttg

SEQ ID NO: 3749837 - DNA, 25 bp, Homo sapien
cattcaggttccaaaagctgccttt

SEQ ID NO: 3749838 - DNA, 25 bp, Homo sapien
caacgaatgactagccagaaataaa

SEQ ID NO: 3749839 - DNA, 25 bp, Homo sapien
ggaagaactgactggtgtacgtacg

SEQ ID NO: 3749840 - DNA, 25 bp, Homo sapien
actggtgtacgtacgcagcatctaa

SEQ ID NO: 3749841 - DNA, 25 bp, Homo sapien
cttgacaacgaatgactagccagaa

SEQ ID NO: 3749842 - DNA, 25 bp, Homo sapien
tgctcccggatacacttgggcttga

SEQ ID NO: 3749843 - DNA, 25 bp, Homo sapien
ggaggaacccgagactgtccccaga

SEQ ID NO: 3749844 - DNA, 25 bp, Homo sapien
tgtgcagctgccgtaatgaaggaac

SEQ ID NO: 3749845 - DNA, 25 bp, Homo sapien
gcgtgaatctctacaaagccctggt

SEQ ID NO: 3749846 - DNA, 25 bp, Homo sapien
tcaggtagacaaccactgcagtaac

SEQ ID NO: 3749847 - DNA, 25 bp, Homo sapien
acagtgagcattgtgcacgcagtgc

SEQ ID NO: 3749848 - DNA, 25 bp, Homo sapien
tgattcggaacacgggcagatgcac

SEQ ID NO: 3749849 - DNA, 25 bp, Homo sapien
taggtgttccagctcacagtagaca

SEQ ID NO: 3749850 - DNA, 25 bp, Homo sapien
gtgctgagagtctaatggagggcat

SEQ ID NO: 3749851 - DNA, 25 bp, Homo sapien
ccggcagtgctgagagtctaatgga

SEQ ID NO: 3749852 - DNA, 25 bp, Homo sapien
aggagccggcagtgctgagagtcta

SEQ ID NO: 3749853 - DNA, 25 bp, Homo sapien
gagccggcagtgctgagagtctaat

SEQ ID NO: 3749854 - DNA, 25 bp, Homo sapien
cccgcctgggtgagtgacggggttg

SEQ ID NO: 3749855 - DNA, 25 bp, Homo sapien
cctgggtgagtgacggggttggtga

SEQ ID NO: 3749856 - DNA, 25 bp, Homo sapien
cgcctgggtgagtgacggggttggt

SEQ ID NO: 3749857 - DNA, 25 bp, Homo sapien
ctgggtgagtgacggggttggtgat

SEQ ID NO: 3749858 - DNA, 25 bp, Homo sapien
tgtgggtattggtggccggtgtctc

SEQ ID NO: 3749859 - DNA, 25 bp, Homo sapien
tgagatgccaggcagacccacggga

SEQ ID NO: 3749860 - DNA, 25 bp, Homo sapien
ttgctttctagccagaaggttccac

SEQ ID NO: 3749861 - DNA, 25 bp, Homo sapien
ttctagccagaaggttccacgggtc

SEQ ID NO: 3749862 - DNA, 25 bp, Homo sapien
gaaggggcctgagaagcttcttcct

SEQ ID NO: 3749863 - DNA, 25 bp, Homo sapien
gcctagcaggggtgaccgcagcctc

SEQ ID NO: 3749864 - DNA, 25 bp, Homo sapien
tcttccttggtcctcatggagcatg

SEQ ID NO: 3749865 - DNA, 25 bp, Homo sapien
tggagccaaggctctgcctagcagg

SEQ ID NO: 3749866 - DNA, 25 bp, Homo sapien
tctgcatccgatcagaaattggcag

SEQ ID NO: 3749867 - DNA, 25 bp, Homo sapien
ggtgaatagtctgcatccgatcaga

SEQ ID NO: 3749868 - DNA, 25 bp, Homo sapien
ggatggttggtggtgaatagtctgc

SEQ ID NO: 3749869 - DNA, 25 bp, Homo sapien
tagtctgcatccgatcagaaattgg

SEQ ID NO: 3749870 - DNA, 25 bp, Homo sapien
aatttaatcgaagaaccagctcctg

SEQ ID NO: 3749871 - DNA, 25 bp, Homo sapien
ttcggtggccgccagacaatgctct

SEQ ID NO: 3749872 - DNA, 25 bp, Homo sapien
ttgtcaggctcagagataagtgccc

SEQ ID NO: 3749873 - DNA, 25 bp, Homo sapien
gatgtaacgtgtgttaggcagaccc

SEQ ID NO: 3749874 - DNA, 25 bp, Homo sapien
acggcaggcctgattggccatggag

SEQ ID NO: 3749875 - DNA, 25 bp, Homo sapien
gcaggcctgattggccatggagtct

SEQ ID NO: 3749876 - DNA, 25 bp, Homo sapien
catggagtctgggcgggacaaaggc

SEQ ID NO: 3749877 - DNA, 25 bp, Homo sapien
ggagtctgggcgggacaaaggcctc

SEQ ID NO: 3749878 - DNA, 25 bp, Homo sapien
gccagcttcacctccgggtaccatt

SEQ ID NO: 3749879 - DNA, 25 bp, Homo sapien
ccgggtaccattttcaagctttcat

SEQ ID NO: 3749880 - DNA, 25 bp, Homo sapien
ggcagttgatgtccgcgccagcttc

SEQ ID NO: 3749881 - DNA, 25 bp, Homo sapien
tcattcaaggggctcatcgggaaga

SEQ ID NO: 3749882 - DNA, 25 bp, Homo sapien
tcaattccacggtcagagggaggtt

SEQ ID NO: 3749883 - DNA, 25 bp, Homo sapien
ttttcaattccacggtcagagggag

SEQ ID NO: 3749884 - DNA, 25 bp, Homo sapien
cattttcaattccacggtcagaggg

SEQ ID NO: 3749885 - DNA, 25 bp, Homo sapien
ttcaattccacggtcagagggaggt

SEQ ID NO: 3749886 - DNA, 25 bp, Homo sapien
aatacagttggttctggcataagtg

SEQ ID NO: 3749887 - DNA, 25 bp, Homo sapien
tataatacagttggttctggcataa

SEQ ID NO: 3749888 - DNA, 25 bp, Homo sapien
ctataatacagttggttctggcata

SEQ ID NO: 3749889 - DNA, 25 bp, Homo sapien
taatacagttggttctggcataagt

SEQ ID NO: 3749890 - DNA, 25 bp, Homo sapien
cctgggatccgagatctgggcttga

SEQ ID NO: 3749891 - DNA, 25 bp, Homo sapien
gcccatggttcagccggtggggatg

SEQ ID NO: 3749892 - DNA, 25 bp, Homo sapien
ctggaaccgatggtggagcagccca

SEQ ID NO: 3749893 - DNA, 25 bp, Homo sapien
tgaggcagcagtgttggcatgaaca

SEQ ID NO: 3749894 - DNA, 25 bp, Homo sapien
accgatggtggagcagcccatggtt

SEQ ID NO: 3749895 - DNA, 25 bp, Homo sapien
ttcccggatggttcctccatctttc

SEQ ID NO: 3749896 - DNA, 25 bp, Homo sapien
acgccttcccggatggttcctccat

SEQ ID NO: 3749897 - DNA, 25 bp, Homo sapien
gccttcccggatggttcctccatct

SEQ ID NO: 3749898 - DNA, 25 bp, Homo sapien
cttcccggatggttcctccatcttt

SEQ ID NO: 3749899 - DNA, 25 bp, Homo sapien
ctctatgctaactggatgggtgtgc

SEQ ID NO: 3749900 - DNA, 25 bp, Homo sapien
tctccatggaagctagacacgaggc

SEQ ID NO: 3749901 - DNA, 25 bp, Homo sapien
cctactgagggtgaagtggtgtctc

SEQ ID NO: 3749902 - DNA, 25 bp, Homo sapien
tcttattactaaactgggaactggc

SEQ ID NO: 3749903 - DNA, 25 bp, Homo sapien
actgagcctgcaatgggtgactggg

SEQ ID NO: 3749904 - DNA, 25 bp, Homo sapien
gatcagggtaaaccaactgagcctg

SEQ ID NO: 3749905 - DNA, 25 bp, Homo sapien
tgactaggatcagggtaaaccaact

SEQ ID NO: 3749906 - DNA, 25 bp, Homo sapien
agggatttgactaggatcagggtaa

SEQ ID NO: 3749907 - DNA, 25 bp, Homo sapien
tgcactcatcgcaatggccctgtag

SEQ ID NO: 3749908 - DNA, 25 bp, Homo sapien
gctggctgcactcatcgcaatggcc

SEQ ID NO: 3749909 - DNA, 25 bp, Homo sapien
aatggccctgtagacgtctagctgt

SEQ ID NO: 3749910 - DNA, 25 bp, Homo sapien
ctgtagacgtctagctgtgcagcct

SEQ ID NO: 3749911 - DNA, 25 bp, Homo sapien
tgcttgctcagttgtacccagtgga

SEQ ID NO: 3749912 - DNA, 25 bp, Homo sapien
tctaaagatcgtttgccagcattgc

SEQ ID NO: 3749913 - DNA, 25 bp, Homo sapien
tttctaaagcatgacaaccactcgc

SEQ ID NO: 3749914 - DNA, 25 bp, Homo sapien
tttggctgcggttccatcctctgct

SEQ ID NO: 3749915 - DNA, 25 bp, Homo sapien
tggtgacttcgtactgacagcaatt

SEQ ID NO: 3749916 - DNA, 25 bp, Homo sapien
gatatttactgctgggtcccatggc

SEQ ID NO: 3749917 - DNA, 25 bp, Homo sapien
catcttttattagccatagccacaa

SEQ ID NO: 3749918 - DNA, 25 bp, Homo sapien
tcatactgcatgagattatctgtga

SEQ ID NO: 3749919 - DNA, 25 bp, Homo sapien
gaggtctctcgtcactggagatgtc

SEQ ID NO: 3749920 - DNA, 25 bp, Homo sapien
tcccggggtgactgcatgaagccgt

SEQ ID NO: 3749921 - DNA, 25 bp, Homo sapien
agatgtcccggggtgactgcatgaa

SEQ ID NO: 3749922 - DNA, 25 bp, Homo sapien
gacactgaggtctctcgtcactgga

SEQ ID NO: 3749923 - DNA, 25 bp, Homo sapien
tcctaggaaagctcacgcagttcat

SEQ ID NO: 3749924 - DNA, 25 bp, Homo sapien
accccgcagagttgatcccttccag

SEQ ID NO: 3749925 - DNA, 25 bp, Homo sapien
ccttggttagtacactctatggaga

SEQ ID NO: 3749926 - DNA, 25 bp, Homo sapien
tagggcccttggttagtacactcta

SEQ ID NO: 3749927 - DNA, 25 bp, Homo sapien
ctctatggagatgtctgtgtcatcc

SEQ ID NO: 3749928 - DNA, 25 bp, Homo sapien
aagctgggccatgttttaacctcaa

SEQ ID NO: 3749929 - DNA, 25 bp, Homo sapien
tggccaatgatgtacagctgcaatt

SEQ ID NO: 3749930 - DNA, 25 bp, Homo sapien
acaattatgaaagtagtttctcata

SEQ ID NO: 3749931 - DNA, 25 bp, Homo sapien
ggtgctaatatagaactctatgtaa

SEQ ID NO: 3749932 - DNA, 25 bp, Homo sapien
gccatttccgtgtgagtcctgctca

SEQ ID NO: 3749933 - DNA, 25 bp, Homo sapien
caatttgcggcagctgtagacagcc

SEQ ID NO: 3749934 - DNA, 25 bp, Homo sapien
ggaccttcatcacataaagaacatg

SEQ ID NO: 3749935 - DNA, 25 bp, Homo sapien
tcttccttgtaaatcagaggaggtg

SEQ ID NO: 3749936 - DNA, 25 bp, Homo sapien
tatctcagggctgttcatgtcagcc

SEQ ID NO: 3749937 - DNA, 25 bp, Homo sapien
tctcagggctgttcatgtcagccat

SEQ ID NO: 3749938 - DNA, 25 bp, Homo sapien
ttatctcagggctgttcatgtcagc

SEQ ID NO: 3749939 - DNA, 25 bp, Homo sapien
tttatctcagggctgttcatgtcag

SEQ ID NO: 3749940 - DNA, 25 bp, Homo sapien
ggcatccaggctacaggcgttggtt

SEQ ID NO: 3749941 - DNA, 25 bp, Homo sapien
tcctcaggacagatcgagggcctct

SEQ ID NO: 3749942 - DNA, 25 bp, Homo sapien
ggctacaggcgttggttaccatgct

SEQ ID NO: 3749943 - DNA, 25 bp, Homo sapien
gcctctgggcatccaggctacaggc

SEQ ID NO: 3749944 - DNA, 25 bp, Homo sapien
tggtctgcgggccgcgggccgcggg

SEQ ID NO: 3749945 - DNA, 25 bp, Homo sapien
gtggtctgcgggccgcgggccgcgg

SEQ ID NO: 3749946 - DNA, 25 bp, Homo sapien
tgtggtctgcgggccgcgggccgcg

SEQ ID NO: 3749947 - DNA, 25 bp, Homo sapien
ctgtggtctgcgggccgcgggccgc

SEQ ID NO: 3749948 - DNA, 25 bp, Homo sapien
ccgggccttgatgtgcggcgtggcg

SEQ ID NO: 3749949 - DNA, 25 bp, Homo sapien
ggccggccgggccttgatgtgcggc

SEQ ID NO: 3749950 - DNA, 25 bp, Homo sapien
ttcaggctgctaatgaaggcgcccg

SEQ ID NO: 3749951 - DNA, 25 bp, Homo sapien
gctgctaatgaaggcgcccgccggc

SEQ ID NO: 3749952 - DNA, 25 bp, Homo sapien
gcagataaaacagattgataattag

SEQ ID NO: 3749953 - DNA, 25 bp, Homo sapien
tcatcaagaatattttgaataatcc

SEQ ID NO: 3749954 - DNA, 25 bp, Homo sapien
tagttgcaaaatgtaacatttcatc

SEQ ID NO: 3749955 - DNA, 25 bp, Homo sapien
gatatgcagcacatatttttccggg

SEQ ID NO: 3749956 - DNA, 25 bp, Homo sapien
gaatctaggagctcgcctttcttct

SEQ ID NO: 3749957 - DNA, 25 bp, Homo sapien
gtgaattacattagctacttcctag

SEQ ID NO: 3749958 - DNA, 25 bp, Homo sapien
tgtaaacgctacagtgacatcttaa

SEQ ID NO: 3749959 - DNA, 25 bp, Homo sapien
gttcattaggaggagatcgctttgg

SEQ ID NO: 3749960 - DNA, 25 bp, Homo sapien
ttgactgggaaaggccgatgactga

SEQ ID NO: 3749961 - DNA, 25 bp, Homo sapien
catctgcacaatgggaaggatgccc

SEQ ID NO: 3749962 - DNA, 25 bp, Homo sapien
tcaggcagagagttaggtcagacgt

SEQ ID NO: 3749963 - DNA, 25 bp, Homo sapien
agtctcagcaaagtccagtccgtct

SEQ ID NO: 3749964 - DNA, 25 bp, Homo sapien
gatttatcaaaccagagtatatgca

SEQ ID NO: 3749965 - DNA, 25 bp, Homo sapien
ctcccggtccggagggaatccagct

SEQ ID NO: 3749966 - DNA, 25 bp, Homo sapien
tcagatccattatctaagctgttag

SEQ ID NO: 3749967 - DNA, 25 bp, Homo sapien
tatgcatggtatgaacatcagatcc

SEQ ID NO: 3749968 - DNA, 25 bp, Homo sapien
tctcattgtagaaccaggagcccct

SEQ ID NO: 3749969 - DNA, 25 bp, Homo sapien
ccatcatgaagcatggccgggcagt

SEQ ID NO: 3749970 - DNA, 25 bp, Homo sapien
tgttaatagctccagtccataggcc

SEQ ID NO: 3749971 - DNA, 25 bp, Homo sapien
taacaagccccagtagaagcgaatg

SEQ ID NO: 3749972 - DNA, 25 bp, Homo sapien
ctggtgcagggctaatgtcagcaat

SEQ ID NO: 3749973 - DNA, 25 bp, Homo sapien
tgtcagcaatgaaatggaccaaggc

SEQ ID NO: 3749974 - DNA, 25 bp, Homo sapien
ggaagaaacgttctcccgctggtgc

SEQ ID NO: 3749975 - DNA, 25 bp, Homo sapien
taattggagggagttaagtggcctc

SEQ ID NO: 3749976 - DNA, 25 bp, Homo sapien
catgaaaggcagtggatcaaggtct

SEQ ID NO: 3749977 - DNA, 25 bp, Homo sapien
ggacaaattagcagtcaaggagcac

SEQ ID NO: 3749978 - DNA, 25 bp, Homo sapien
gaaaacaatactttgttgccttcat

SEQ ID NO: 3749979 - DNA, 25 bp, Homo sapien
cataagaaaagcatcggtaacaatg

SEQ ID NO: 3749980 - DNA, 25 bp, Homo sapien
gatccaggtcaggactcagcgttag

SEQ ID NO: 3749981 - DNA, 25 bp, Homo sapien
agtagcgccactcgaagtccaagga

SEQ ID NO: 3749982 - DNA, 25 bp, Homo sapien
agattcgactttgccacatgaccag

SEQ ID NO: 3749983 - DNA, 25 bp, Homo sapien
tctaggcaagcaaacagggatccag

SEQ ID NO: 3749984 - DNA, 25 bp, Homo sapien
tgactccagcctctgccactgagac

SEQ ID NO: 3749985 - DNA, 25 bp, Homo sapien
gggcctgagcaggacagctgactcc

SEQ ID NO: 3749986 - DNA, 25 bp, Homo sapien
actccagcctctgccactgagacca

SEQ ID NO: 3749987 - DNA, 25 bp, Homo sapien
ctgtggggcctgagcaggacagctg

SEQ ID NO: 3749988 - DNA, 25 bp, Homo sapien
tccatgggaagcttggtagtaagga

SEQ ID NO: 3749989 - DNA, 25 bp, Homo sapien
gcccaccaaaggcaccagggcccaa

SEQ ID NO: 3749990 - DNA, 25 bp, Homo sapien
ccatgggaagcttggtagtaaggat

SEQ ID NO: 3749991 - DNA, 25 bp, Homo sapien
caggggacgacggtgtgtgatcaaa

SEQ ID NO: 3749992 - DNA, 25 bp, Homo sapien
acgacggtgtgtgatcaaacaccat

SEQ ID NO: 3749993 - DNA, 25 bp, Homo sapien
ggggacgacggtgtgtgatcaaaca

SEQ ID NO: 3749994 - DNA, 25 bp, Homo sapien
ggacgacggtgtgtgatcaaacacc

SEQ ID NO: 3749995 - DNA, 25 bp, Homo sapien
aggtaagcccgtcaccccagtgcct

SEQ ID NO: 3749996 - DNA, 25 bp, Homo sapien
gcacatgtctggaattcttctccat

SEQ ID NO: 3749997 - DNA, 25 bp, Homo sapien
cacatttcaggtaagcccgtcaccc

SEQ ID NO: 3749998 - DNA, 25 bp, Homo sapien
cagtgcctgtcaggacctggtgcct

SEQ ID NO: 3749999 - DNA, 25 bp, Homo sapien
tggcaactttccaggttgaactcat

SEQ ID NO: 3750000 - DNA, 25 bp, Homo sapien
atatgcttgcttcttgactgataac

SEQ ID NO: 3750001 - DNA, 25 bp, Homo sapien
gcttcttgactgataactagttttc

SEQ ID NO: 3750002 - DNA, 25 bp, Homo sapien
gcaactttccaggttgaactcatgg

SEQ ID NO: 3750003 - DNA, 25 bp, Homo sapien
tcaactcatataagagttggacaaa

SEQ ID NO: 3750004 - DNA, 25 bp, Homo sapien
aaaaatcaactcatataagagttgg

SEQ ID NO: 3750005 - DNA, 25 bp, Homo sapien
tttgtggcatagtgtaccagcgagg

SEQ ID NO: 3750006 - DNA, 25 bp, Homo sapien
ttggatttgtggcatagtgtaccag

SEQ ID NO: 3750007 - DNA, 25 bp, Homo sapien
caaagagcgctgtggtggcctctct

SEQ ID NO: 3750008 - DNA, 25 bp, Homo sapien
agcccagcaaagagcgctgtggtgg

SEQ ID NO: 3750009 - DNA, 25 bp, Homo sapien
gcaaagagcgctgtggtggcctctc

SEQ ID NO: 3750010 - DNA, 25 bp, Homo sapien
ccagcaaagagcgctgtggtggcct

SEQ ID NO: 3750011 - DNA, 25 bp, Homo sapien
tctttgtccctcttctgccggctgg

SEQ ID NO: 3750012 - DNA, 25 bp, Homo sapien
gccggctggctgccttgtaaatctc

SEQ ID NO: 3750013 - DNA, 25 bp, Homo sapien
tactatatttacttctttgtccctc

SEQ ID NO: 3750014 - DNA, 25 bp, Homo sapien
tctgccggctggctgccttgtaaat

SEQ ID NO: 3750015 - DNA, 25 bp, Homo sapien
catagtaaagccaactgcatgcttt

SEQ ID NO: 3750016 - DNA, 25 bp, Homo sapien
tttgcaccatagtaaagccaactgc

SEQ ID NO: 3750017 - DNA, 25 bp, Homo sapien
tccttttgcaccatagtaaagccaa

SEQ ID NO: 3750018 - DNA, 25 bp, Homo sapien
gcaccatagtaaagccaactgcatg

SEQ ID NO: 3750019 - DNA, 25 bp, Homo sapien
tagtaacttgccctttcacggcttc

SEQ ID NO: 3750020 - DNA, 25 bp, Homo sapien
agtataaactttccaacgtgcctgc

SEQ ID NO: 3750021 - DNA, 25 bp, Homo sapien
taaactttccaacgtgcctgctgct

SEQ ID NO: 3750022 - DNA, 25 bp, Homo sapien
gcttgtcgaccagatccccaaagta

SEQ ID NO: 3750023 - DNA, 25 bp, Homo sapien
aactcccgccctgatgttgtgcagc

SEQ ID NO: 3750024 - DNA, 25 bp, Homo sapien
aagtcaagccgtgccagtgctgtcc

SEQ ID NO: 3750025 - DNA, 25 bp, Homo sapien
agggcgccgttcacactgtgggcca

SEQ ID NO: 3750026 - DNA, 25 bp, Homo sapien
tgtctacgactctgcggagcatcac

SEQ ID NO: 3750027 - DNA, 25 bp, Homo sapien
cctaagctccaggaatcgcagagaa

SEQ ID NO: 3750028 - DNA, 25 bp, Homo sapien
gaatcgcagagaaccataagaagcc

SEQ ID NO: 3750029 - DNA, 25 bp, Homo sapien
ccataagaagccacaaatcccaagt

SEQ ID NO: 3750030 - DNA, 25 bp, Homo sapien
ctggaggccatgttcatggagaagc

SEQ ID NO: 3750031 - DNA, 25 bp, Homo sapien
tccctaaaaccgagaaagtccatca

SEQ ID NO: 3750032 - DNA, 25 bp, Homo sapien
aagcttctgatgtgagttggttgca

SEQ ID NO: 3750033 - DNA, 25 bp, Homo sapien
gatgaacggtgctagcattttaaag

SEQ ID NO: 3750034 - DNA, 25 bp, Homo sapien
tggttgcatacaaatttccctaaaa

SEQ ID NO: 3750035 - DNA, 25 bp, Homo sapien
tacacaatcgaagggagcggtttcc

SEQ ID NO: 3750036 - DNA, 25 bp, Homo sapien
ttccctggcagggacgagagcacgt

SEQ ID NO: 3750037 - DNA, 25 bp, Homo sapien
ttatttctccgtcgccacatggtga

SEQ ID NO: 3750038 - DNA, 25 bp, Homo sapien
ccctgctgcttgcaatggtgaagac

SEQ ID NO: 3750039 - DNA, 25 bp, Homo sapien
agaggcaggtccgacgtgacgaatc

SEQ ID NO: 3750040 - DNA, 25 bp, Homo sapien
atccttggatgccaagagccgagag

SEQ ID NO: 3750041 - DNA, 25 bp, Homo sapien
cttggatgccaagagccgagaggca

SEQ ID NO: 3750042 - DNA, 25 bp, Homo sapien
tccgacgtgacgaatctcctccgag

SEQ ID NO: 3750043 - DNA, 25 bp, Homo sapien
cctggcgcctgcatgtggatggaga

SEQ ID NO: 3750044 - DNA, 25 bp, Homo sapien
caccggccctgcagcaacagggctt

SEQ ID NO: 3750045 - DNA, 25 bp, Homo sapien
gttgatcatgcgacaggcggagcat

SEQ ID NO: 3750046 - DNA, 25 bp, Homo sapien
ccagggttgatcatgcgacaggcgg

SEQ ID NO: 3750047 - DNA, 25 bp, Homo sapien
ggactccggacccatgtgatgctga

SEQ ID NO: 3750048 - DNA, 25 bp, Homo sapien
tgctgatgtgaaggtatgaggcact

SEQ ID NO: 3750049 - DNA, 25 bp, Homo sapien
gaggactctgcagtatcgtgaagtg

SEQ ID NO: 3750050 - DNA, 25 bp, Homo sapien
cactgtcttgagagttgtcattgac

SEQ ID NO: 3750051 - DNA, 25 bp, Homo sapien
cagaagtgacctcaggaggcatgca

SEQ ID NO: 3750052 - DNA, 25 bp, Homo sapien
agcagaagtgacctcaggaggcatg

SEQ ID NO: 3750053 - DNA, 25 bp, Homo sapien
gaagtgacctcaggaggcatgcaga

SEQ ID NO: 3750054 - DNA, 25 bp, Homo sapien
ggcatgcagagggaaagatgccggg

SEQ ID NO: 3750055 - DNA, 25 bp, Homo sapien
aggtctcggcttgggcacagctgtc

SEQ ID NO: 3750056 - DNA, 25 bp, Homo sapien
tggactggagccaggcttatccctg

SEQ ID NO: 3750057 - DNA, 25 bp, Homo sapien
ctggctgccatccttccagagctga

SEQ ID NO: 3750058 - DNA, 25 bp, Homo sapien
gactgtcagatacacgggcagcgtg

SEQ ID NO: 3750059 - DNA, 25 bp, Homo sapien
catttggaacgggataccgtggcct

SEQ ID NO: 3750060 - DNA, 25 bp, Homo sapien
ggcctgctcgggtcccaagggctct

SEQ ID NO: 3750061 - DNA, 25 bp, Homo sapien
taatgataatggatgcggcccgatt

SEQ ID NO: 3750062 - DNA, 25 bp, Homo sapien
ggcccgattagccagcccatttgga

SEQ ID NO: 3750063 - DNA, 25 bp, Homo sapien
cgatatgaccaagaaggtaagtggc

SEQ ID NO: 3750064 - DNA, 25 bp, Homo sapien
atgaccaagaaggtaagtggccttt

SEQ ID NO: 3750065 - DNA, 25 bp, Homo sapien
tatgaccaagaaggtaagtggcctt

SEQ ID NO: 3750066 - DNA, 25 bp, Homo sapien
gatatgaccaagaaggtaagtggcc

SEQ ID NO: 3750067 - DNA, 25 bp, Homo sapien
tgagctcctgcctgggtggtagcca

SEQ ID NO: 3750068 - DNA, 25 bp, Homo sapien
agcagaagggggacgggccaaccag

SEQ ID NO: 3750069 - DNA, 25 bp, Homo sapien
ccgggaccctgcggctcatcaccag

SEQ ID NO: 3750070 - DNA, 25 bp, Homo sapien
ctgcggctcatcaccagggtgagct

SEQ ID NO: 3750071 - DNA, 25 bp, Homo sapien
aaggccatggctggcctgcgggtca

SEQ ID NO: 3750072 - DNA, 25 bp, Homo sapien
ctgtttctgggccttccacaaggcc

SEQ ID NO: 3750073 - DNA, 25 bp, Homo sapien
ggagaactgtttctgggccttccac

SEQ ID NO: 3750074 - DNA, 25 bp, Homo sapien
catggctggcctgcgggtcagagcc

SEQ ID NO: 3750075 - DNA, 25 bp, Homo sapien
cttcttttccaccttacattctgtc

SEQ ID NO: 3750076 - DNA, 25 bp, Homo sapien
gctgccttcttttccaccttacatt

SEQ ID NO: 3750077 - DNA, 25 bp, Homo sapien
gccttcttttccaccttacattctg

SEQ ID NO: 3750078 - DNA, 25 bp, Homo sapien
tcttttccaccttacattctgtcat

SEQ ID NO: 3750079 - DNA, 25 bp, Homo sapien
tggaggtgtaggtcctcccagctgt

SEQ ID NO: 3750080 - DNA, 25 bp, Homo sapien
tggatccatggaggtgtaggtcctc

SEQ ID NO: 3750081 - DNA, 25 bp, Homo sapien
ctcgggtgattgcagaagagctgca

SEQ ID NO: 3750082 - DNA, 25 bp, Homo sapien
gcacactggtgtcagctcgggtgat

SEQ ID NO: 3750083 - DNA, 25 bp, Homo sapien
ggttgaattcaggcaactggctcca

SEQ ID NO: 3750084 - DNA, 25 bp, Homo sapien
gacattgtccacgaactcattaggg

SEQ ID NO: 3750085 - DNA, 25 bp, Homo sapien
tcattagggagggtcttttgcctgt

SEQ ID NO: 3750086 - DNA, 25 bp, Homo sapien
tatgcatgtagaggccacagggatg

SEQ ID NO: 3750087 - DNA, 25 bp, Homo sapien
ctgcccctatccaggacagaaacag

SEQ ID NO: 3750088 - DNA, 25 bp, Homo sapien
catcccgaagttgagagtgacatca

SEQ ID NO: 3750089 - DNA, 25 bp, Homo sapien
caggataggttcatggccattttca

SEQ ID NO: 3750090 - DNA, 25 bp, Homo sapien
agtgacatcactggcgcagaagcct

SEQ ID NO: 3750091 - DNA, 25 bp, Homo sapien
gcaagccttgattgagcaggatagg

SEQ ID NO: 3750092 - DNA, 25 bp, Homo sapien
caaagctcttctgtgcacgctgtgt

SEQ ID NO: 3750093 - DNA, 25 bp, Homo sapien
ccggaggttatgtcagctgtggcca

SEQ ID NO: 3750094 - DNA, 25 bp, Homo sapien
acttgttggccctgtatccgaccgg

SEQ ID NO: 3750095 - DNA, 25 bp, Homo sapien
cacgctgtgtcatggtgaccctgga

SEQ ID NO: 3750096 - DNA, 25 bp, Homo sapien
gaaggtacctctctgacatttgtcc

SEQ ID NO: 3750097 - DNA, 25 bp, Homo sapien
acagacagcttcttcgtagcccctg

SEQ ID NO: 3750098 - DNA, 25 bp, Homo sapien
cagcttcttcgtagcccctggtgga

SEQ ID NO: 3750099 - DNA, 25 bp, Homo sapien
tttgtcctgcccaaagcacatctca

SEQ ID NO: 3750100 - DNA, 25 bp, Homo sapien
tgagaccacgtctgctttctctttc

SEQ ID NO: 3750101 - DNA, 25 bp, Homo sapien
gagtcctcttgtgactgttccccag

SEQ ID NO: 3750102 - DNA, 25 bp, Homo sapien
gactctgagtgggttgagaccacgt

SEQ ID NO: 3750103 - DNA, 25 bp, Homo sapien
tgggttgagaccacgtctgctttct

SEQ ID NO: 3750104 - DNA, 25 bp, Homo sapien
tgagctccttccttgttgttctgag

SEQ ID NO: 3750105 - DNA, 25 bp, Homo sapien
ctttaaagcccgatggattccaacg

SEQ ID NO: 3750106 - DNA, 25 bp, Homo sapien
caaggaagaagcttggattccatgc

SEQ ID NO: 3750107 - DNA, 25 bp, Homo sapien
ccatgctgggtatgaagatgagctc

SEQ ID NO: 3750108 - DNA, 25 bp, Homo sapien
ctctccacaagatgcagctcacagc

SEQ ID NO: 3750109 - DNA, 25 bp, Homo sapien
gggtgcagcagacacctctccacaa

SEQ ID NO: 3750110 - DNA, 25 bp, Homo sapien
tgccaggcccacacgtgccggctgg

SEQ ID NO: 3750111 - DNA, 25 bp, Homo sapien
acagctcacacgtgccaggcccaca

SEQ ID NO: 3750112 - DNA, 25 bp, Homo sapien
tgctgttgctgctgggccagcctca

SEQ ID NO: 3750113 - DNA, 25 bp, Homo sapien
ctgctgttgctgctgggccagcctc

SEQ ID NO: 3750114 - DNA, 25 bp, Homo sapien
tgggccagcctcagccctccaggtc

SEQ ID NO: 3750115 - DNA, 25 bp, Homo sapien
tgctgggccagcctcagccctccag

SEQ ID NO: 3750116 - DNA, 25 bp, Homo sapien
cgccatcgttgctagtgagtttatc

SEQ ID NO: 3750117 - DNA, 25 bp, Homo sapien
gctagtgagtttatctgctttggcc

SEQ ID NO: 3750118 - DNA, 25 bp, Homo sapien
cgttgctagtgagtttatctgcttt

SEQ ID NO: 3750119 - DNA, 25 bp, Homo sapien
catcgttgctagtgagtttatctgc

SEQ ID NO: 3750120 - DNA, 25 bp, Homo sapien
atgggacctggatgcccgtggccaa

SEQ ID NO: 3750121 - DNA, 25 bp, Homo sapien
cagtgtataccgtgggcaatgggac

SEQ ID NO: 3750122 - DNA, 25 bp, Homo sapien
aggaagatgtactcagtgtataccg

SEQ ID NO: 3750123 - DNA, 25 bp, Homo sapien
tataccgtgggcaatgggacctgga

SEQ ID NO: 3750124 - DNA, 25 bp, Homo sapien
gtgtcaaagcctccggatgatggca

SEQ ID NO: 3750125 - DNA, 25 bp, Homo sapien
tgtgtcaaagcctccggatgatggc

SEQ ID NO: 3750126 - DNA, 25 bp, Homo sapien
agcaggggagaccacaaggaccact

SEQ ID NO: 3750127 - DNA, 25 bp, Homo sapien
caaggaccactgtgtttgtgtcaaa

SEQ ID NO: 3750128 - DNA, 25 bp, Homo sapien
gagtcacataaacggccagtgagag

SEQ ID NO: 3750129 - DNA, 25 bp, Homo sapien
gaaaatttagctcctgtctgcaaag

SEQ ID NO: 3750130 - DNA, 25 bp, Homo sapien
aaccgtagagtcacataaacggcca

SEQ ID NO: 3750131 - DNA, 25 bp, Homo sapien
gtctgcaaagcactattcatttcat

SEQ ID NO: 3750132 - DNA, 25 bp, Homo sapien
tggagagggtcgaacaaagcacatc

SEQ ID NO: 3750133 - DNA, 25 bp, Homo sapien
gctggcattgcaaatctcaccctga

SEQ ID NO: 3750134 - DNA, 25 bp, Homo sapien
cctggacagagaagggtgaacacct

SEQ ID NO: 3750135 - DNA, 25 bp, Homo sapien
catggaaactgtctcaagctggcat

SEQ ID NO: 3750136 - DNA, 25 bp, Homo sapien
gcgtccagttgtcaaaggcacagag

SEQ ID NO: 3750137 - DNA, 25 bp, Homo sapien
tggaaagcgtccagttgtcaaaggc

SEQ ID NO: 3750138 - DNA, 25 bp, Homo sapien
cttggaaagcgtccagttgtcaaag

SEQ ID NO: 3750139 - DNA, 25 bp, Homo sapien
gaaagcgtccagttgtcaaaggcac

SEQ ID NO: 3750140 - DNA, 25 bp, Homo sapien
agctgagcagcggtcacagctgctg

SEQ ID NO: 3750141 - DNA, 25 bp, Homo sapien
gcggtcacagctgctgtgctccgca

SEQ ID NO: 3750142 - DNA, 25 bp, Homo sapien
gcagcggtcacagctgctgtgctcc

SEQ ID NO: 3750143 - DNA, 25 bp, Homo sapien
tgagcagcggtcacagctgctgtgc

SEQ ID NO: 3750144 - DNA, 25 bp, Homo sapien
aaccatgtgcatacacggggccagg

SEQ ID NO: 3750145 - DNA, 25 bp, Homo sapien
cgtcacaaacaaatcgttttatctt

SEQ ID NO: 3750146 - DNA, 25 bp, Homo sapien
cagccctcggaaacgtcacaaacaa

SEQ ID NO: 3750147 - DNA, 25 bp, Homo sapien
catgtgcatacacggggccaggtac

SEQ ID NO: 3750148 - DNA, 25 bp, Homo sapien
cgggtcctgctatgtatgcagaaac

SEQ ID NO: 3750149 - DNA, 25 bp, Homo sapien
tggccgcgcatcctggacgggtcct

SEQ ID NO: 3750150 - DNA, 25 bp, Homo sapien
tggacgggtcctgctatgtatgcag

SEQ ID NO: 3750151 - DNA, 25 bp, Homo sapien
ggtggccgcgcatcctggacgggtc

SEQ ID NO: 3750152 - DNA, 25 bp, Homo sapien
tgcttccaaggcgttttcttagccg

SEQ ID NO: 3750153 - DNA, 25 bp, Homo sapien
ggcgttttcttagccgccagcgagg

SEQ ID NO: 3750154 - DNA, 25 bp, Homo sapien
tttcttagccgccagcgaggtccat

SEQ ID NO: 3750155 - DNA, 25 bp, Homo sapien
tccaaggcgttttcttagccgccag

SEQ ID NO: 3750156 - DNA, 25 bp, Homo sapien
tggttctaagggacacgcgagtccc

SEQ ID NO: 3750157 - DNA, 25 bp, Homo sapien
ctggttctaagggacacgcgagtcc

SEQ ID NO: 3750158 - DNA, 25 bp, Homo sapien
gacctggttctaagggacacgcgag

SEQ ID NO: 3750159 - DNA, 25 bp, Homo sapien
aagacctggttctaagggacacgcg

SEQ ID NO: 3750160 - DNA, 25 bp, Homo sapien
gcttgcccaagtgaaccgcataata

SEQ ID NO: 3750161 - DNA, 25 bp, Homo sapien
tgattaatacctggcaacagcggaa

SEQ ID NO: 3750162 - DNA, 25 bp, Homo sapien
catatgtatagagtcccagttcacc

SEQ ID NO: 3750163 - DNA, 25 bp, Homo sapien
tcgctcttgactgtggtaaccctag

SEQ ID NO: 3750164 - DNA, 25 bp, Homo sapien
ttgtgaaaattctttttctagccgc

SEQ ID NO: 3750165 - DNA, 25 bp, Homo sapien
ctctcaagtgtttcctgaatttgtg

SEQ ID NO: 3750166 - DNA, 25 bp, Homo sapien
tgaaaattctttttctagccgcttg

SEQ ID NO: 3750167 - DNA, 25 bp, Homo sapien
attctttttctagccgcttgtccat

SEQ ID NO: 3750168 - DNA, 25 bp, Homo sapien
taaaagttttatgccggtcagcaca

SEQ ID NO: 3750169 - DNA, 25 bp, Homo sapien
agaggcctgttggttgcggtggcgc

SEQ ID NO: 3750170 - DNA, 25 bp, Homo sapien
tgctctcggattctaataaaagttt

SEQ ID NO: 3750171 - DNA, 25 bp, Homo sapien
ggcgcgtggaaagttctgcgctctc

SEQ ID NO: 3750172 - DNA, 25 bp, Homo sapien
cgcagcgctgcggggggaggcagcc

SEQ ID NO: 3750173 - DNA, 25 bp, Homo sapien
gcgccccggcgccggctcctagcgg

SEQ ID NO: 3750174 - DNA, 25 bp, Homo sapien
cccggcgccggctcctagcgggcat

SEQ ID NO: 3750175 - DNA, 25 bp, Homo sapien
ggaggcagccttggggcgccccggc

SEQ ID NO: 3750176 - DNA, 25 bp, Homo sapien
ccactggtcgttttgatggatatga

SEQ ID NO: 3750177 - DNA, 25 bp, Homo sapien
tcgatggccgcagcgggctgatggc

SEQ ID NO: 3750178 - DNA, 25 bp, Homo sapien
gctgatggccactggtcgttttgat

SEQ ID NO: 3750179 - DNA, 25 bp, Homo sapien
aggggccacccgatcgatggccgca

SEQ ID NO: 3750180 - DNA, 25 bp, Homo sapien
aggccgcctcagacacaattccatt

SEQ ID NO: 3750181 - DNA, 25 bp, Homo sapien
aaattctgtcaagcccctcaggtgg

SEQ ID NO: 3750182 - DNA, 25 bp, Homo sapien
tgtgcagagctaacagccgccgctt

SEQ ID NO: 3750183 - DNA, 25 bp, Homo sapien
aacagccgccgcttgaagtcaccat

SEQ ID NO: 3750184 - DNA, 25 bp, Homo sapien
gtaagtccttgccttcattactctg

SEQ ID NO: 3750185 - DNA, 25 bp, Homo sapien
tgtgtgtatgtggtaagtccttgcc

SEQ ID NO: 3750186 - DNA, 25 bp, Homo sapien
agcccatgtttatccccaggcccat

SEQ ID NO: 3750187 - DNA, 25 bp, Homo sapien
tgtaggtagcaatgcagctgcaatc

SEQ ID NO: 3750188 - DNA, 25 bp, Homo sapien
aaagcttgcagaagctcccacttgc

SEQ ID NO: 3750189 - DNA, 25 bp, Homo sapien
tctttgcaaaagcttgcagaagctc

SEQ ID NO: 3750190 - DNA, 25 bp, Homo sapien
tgccttgaggtctccagcagtctgg

SEQ ID NO: 3750191 - DNA, 25 bp, Homo sapien
gcaaaagcttgcagaagctcccact

SEQ ID NO: 3750192 - DNA, 25 bp, Homo sapien
tcccttaataagatgagccaaacac

SEQ ID NO: 3750193 - DNA, 25 bp, Homo sapien
ccttaataagatgagccaaacactc

SEQ ID NO: 3750194 - DNA, 25 bp, Homo sapien
aatgtagctcccatcgacaagccca

SEQ ID NO: 3750195 - DNA, 25 bp, Homo sapien
gtagctcccatcgacaagcccatat

SEQ ID NO: 3750196 - DNA, 25 bp, Homo sapien
gaaatgcaaaatgtgccctccagca

SEQ ID NO: 3750197 - DNA, 25 bp, Homo sapien
catgcatatgcttgggaaggccagc

SEQ ID NO: 3750198 - DNA, 25 bp, Homo sapien
tatgtgtgcgcctttctgcgaggga

SEQ ID NO: 3750199 - DNA, 25 bp, Homo sapien
tactggcggcgtgtcaacagatcct

SEQ ID NO: 3750200 - DNA, 25 bp, Homo sapien
tccaaggcgcagacgcctctccagc

SEQ ID NO: 3750201 - DNA, 25 bp, Homo sapien
ccaaggcgcagacgcctctccagcc

SEQ ID NO: 3750202 - DNA, 25 bp, Homo sapien
aaggcgcagacgcctctccagccat

SEQ ID NO: 3750203 - DNA, 25 bp, Homo sapien
ctccaaggcgcagacgcctctccag

SEQ ID NO: 3750204 - DNA, 25 bp, Homo sapien
cagaggcgaaagctgatctgggaga

SEQ ID NO: 3750205 - DNA, 25 bp, Homo sapien
aggaattgaaggatggctgatttga

SEQ ID NO: 3750206 - DNA, 25 bp, Homo sapien
cgaaagctgatctgggagagtcatg

SEQ ID NO: 3750207 - DNA, 25 bp, Homo sapien
gctttttacccgcaggcatttgaaa

SEQ ID NO: 3750208 - DNA, 25 bp, Homo sapien
ctaaggagtgggcctgaacaccggt

SEQ ID NO: 3750209 - DNA, 25 bp, Homo sapien
ggcctgtggtactgtccgagccttc

SEQ ID NO: 3750210 - DNA, 25 bp, Homo sapien
aaggagtgggcctgaacaccggtca

SEQ ID NO: 3750211 - DNA, 25 bp, Homo sapien
ctgtggtactgtccgagccttccca

SEQ ID NO: 3750212 - DNA, 25 bp, Homo sapien
ccacccacaggatggtgcctggtgt

SEQ ID NO: 3750213 - DNA, 25 bp, Homo sapien
agacaggcagttagggctgctcggc

SEQ ID NO: 3750214 - DNA, 25 bp, Homo sapien
tgcctggtgtcccatcgatgaatga

SEQ ID NO: 3750215 - DNA, 25 bp, Homo sapien
gtgaccttcggtgttggtgtgccac

SEQ ID NO: 3750216 - DNA, 25 bp, Homo sapien
tcagggattccaaaaatacagcact

SEQ ID NO: 3750217 - DNA, 25 bp, Homo sapien
ctatttaatattgcagcttgacgaa

SEQ ID NO: 3750218 - DNA, 25 bp, Homo sapien
gacgaaattgctctggttccagccc

SEQ ID NO: 3750219 - DNA, 25 bp, Homo sapien
tgcctgcagggttgttcccttccct

SEQ ID NO: 3750220 - DNA, 25 bp, Homo sapien
tagcttgaggttcattaaacccggc

SEQ ID NO: 3750221 - DNA, 25 bp, Homo sapien
ttgaggttcattaaacccggctcac

SEQ ID NO: 3750222 - DNA, 25 bp, Homo sapien
gcttgaggttcattaaacccggctc

SEQ ID NO: 3750223 - DNA, 25 bp, Homo sapien
ttatagcttgaggttcattaaaccc

SEQ ID NO: 3750224 - DNA, 25 bp, Homo sapien
cagcggctatagcagacagcgccat

SEQ ID NO: 3750225 - DNA, 25 bp, Homo sapien
caaatggatcccagcgaatgcagcg

SEQ ID NO: 3750226 - DNA, 25 bp, Homo sapien
agggaaggtaggaaggacagcggct

SEQ ID NO: 3750227 - DNA, 25 bp, Homo sapien
gcgggaggaggcaccgtgagggcag

SEQ ID NO: 3750228 - DNA, 25 bp, Homo sapien
agatggcaaggccagatctccagga

SEQ ID NO: 3750229 - DNA, 25 bp, Homo sapien
ctagatggcaaggccagatctccag

SEQ ID NO: 3750230 - DNA, 25 bp, Homo sapien
atggcaaggccagatctccaggaca

SEQ ID NO: 3750231 - DNA, 25 bp, Homo sapien
tggcaaggccagatctccaggacag

SEQ ID NO: 3750232 - DNA, 25 bp, Homo sapien
tcagccaccagcttaagtttgctgg

SEQ ID NO: 3750233 - DNA, 25 bp, Homo sapien
taatcgctgggcgtctggcctttct

SEQ ID NO: 3750234 - DNA, 25 bp, Homo sapien
cttaagtttgctggccaactctggg

SEQ ID NO: 3750235 - DNA, 25 bp, Homo sapien
tgctttcctgatgaacgcaggtcta

SEQ ID NO: 3750236 - DNA, 25 bp, Homo sapien
tcttgctggcccgattcacaggcga

SEQ ID NO: 3750237 - DNA, 25 bp, Homo sapien
cttcctgttcttgctggcccgattc

SEQ ID NO: 3750238 - DNA, 25 bp, Homo sapien
tgctggcccgattcacaggcgaagg

SEQ ID NO: 3750239 - DNA, 25 bp, Homo sapien
ttcacaggcgaaggcctgcatttct

SEQ ID NO: 3750240 - DNA, 25 bp, Homo sapien
gcttgtgctcattcctagttagtgt

SEQ ID NO: 3750241 - DNA, 25 bp, Homo sapien
tcattcctagttagtgtggtttgaa

SEQ ID NO: 3750242 - DNA, 25 bp, Homo sapien
cttgtgctcattcctagttagtgtg

SEQ ID NO: 3750243 - DNA, 25 bp, Homo sapien
tagttagtgtggtttgaagtttgcc

SEQ ID NO: 3750244 - DNA, 25 bp, Homo sapien
caagcttcatggacacaggtgttcc

SEQ ID NO: 3750245 - DNA, 25 bp, Homo sapien
agacgggaatatcctcaatctgtgc

SEQ ID NO: 3750246 - DNA, 25 bp, Homo sapien
aagcttcatggacacaggtgttcca

SEQ ID NO: 3750247 - DNA, 25 bp, Homo sapien
tgctgctggagacgggaatatcctc

SEQ ID NO: 3750248 - DNA, 25 bp, Homo sapien
ggatttccgagatattttccataag

SEQ ID NO: 3750249 - DNA, 25 bp, Homo sapien
ttccataagaacaggagcaatcctg

SEQ ID NO: 3750250 - DNA, 25 bp, Homo sapien
ctgggacccttatgtaagtagatga

SEQ ID NO: 3750251 - DNA, 25 bp, Homo sapien
aaaatgctcagctcggggatttccg

SEQ ID NO: 3750252 - DNA, 25 bp, Homo sapien
tgctctggtgaagtctgacctctga

SEQ ID NO: 3750253 - DNA, 25 bp, Homo sapien
catctgggcaatgggcggtgctcaa

SEQ ID NO: 3750254 - DNA, 25 bp, Homo sapien
tctaagctcagcactacagggacgg

SEQ ID NO: 3750255 - DNA, 25 bp, Homo sapien
gacacaggatgctgagttaccggct

SEQ ID NO: 3750256 - DNA, 25 bp, Homo sapien
cacatcttggcattggtccccaaca

SEQ ID NO: 3750257 - DNA, 25 bp, Homo sapien
tgaaactttcccagatgcagggatg

SEQ ID NO: 3750258 - DNA, 25 bp, Homo sapien
cagatgcagggatgctgcacatctt

SEQ ID NO: 3750259 - DNA, 25 bp, Homo sapien
gggatgctgcacatcttggcattgg

SEQ ID NO: 3750260 - DNA, 25 bp, Homo sapien
gatacatccatacgtgccagggagc

SEQ ID NO: 3750261 - DNA, 25 bp, Homo sapien
aggagttgaatgtccgtgtggacct

SEQ ID NO: 3750262 - DNA, 25 bp, Homo sapien
ccttgtcctgaataggatacatcca

SEQ ID NO: 3750263 - DNA, 25 bp, Homo sapien
ccagggagcgcaatggctaccttct

SEQ ID NO: 3750264 - DNA, 25 bp, Homo sapien
tcagcgccaataattatccagtcgg

SEQ ID NO: 3750265 - DNA, 25 bp, Homo sapien
ccaataattatccagtcggtgctac

SEQ ID NO: 3750266 - DNA, 25 bp, Homo sapien
cttgtcagcgccaataattatccag

SEQ ID NO: 3750267 - DNA, 25 bp, Homo sapien
attatccagtcggtgctactcagag

SEQ ID NO: 3750268 - DNA, 25 bp, Homo sapien
tacccctggggcgtcagcggcaggt

SEQ ID NO: 3750269 - DNA, 25 bp, Homo sapien
ctccctgggctctgggtacccctgg

SEQ ID NO: 3750270 - DNA, 25 bp, Homo sapien
ccagcgcccacgtgacttcctccag

SEQ ID NO: 3750271 - DNA, 25 bp, Homo sapien
cccctggggcgtcagcggcaggtct

SEQ ID NO: 3750272 - DNA, 25 bp, Homo sapien
gtggaatacacggaagggttgacat

SEQ ID NO: 3750273 - DNA, 25 bp, Homo sapien
tcctgaagtggaatacacggaaggg

SEQ ID NO: 3750274 - DNA, 25 bp, Homo sapien
tacacggaagggttgacattgccaa

SEQ ID NO: 3750275 - DNA, 25 bp, Homo sapien
ggttgacattgccaagacaaaaacc

SEQ ID NO: 3750276 - DNA, 25 bp, Homo sapien
aatcacgtgcgtggcttttaaatcc

SEQ ID NO: 3750277 - DNA, 25 bp, Homo sapien
cattggaatcacgtgcgtggctttt

SEQ ID NO: 3750278 - DNA, 25 bp, Homo sapien
agtggcattggaatcacgtgcgtgg

SEQ ID NO: 3750279 - DNA, 25 bp, Homo sapien
ggaatcacgtgcgtggcttttaaat

SEQ ID NO: 3750280 - DNA, 25 bp, Homo sapien
ccctgtagaaactgccaccagtggg

SEQ ID NO: 3750281 - DNA, 25 bp, Homo sapien
cagtggggtccagtgattaaatttc

SEQ ID NO: 3750282 - DNA, 25 bp, Homo sapien
tggccatgggtctcccctgtagaaa

SEQ ID NO: 3750283 - DNA, 25 bp, Homo sapien
gggtctcccctgtagaaactgccac

SEQ ID NO: 3750284 - DNA, 25 bp, Homo sapien
cttccctgttttcttagcaataaga

SEQ ID NO: 3750285 - DNA, 25 bp, Homo sapien
agacttgaagctggacgatgacttt

SEQ ID NO: 3750286 - DNA, 25 bp, Homo sapien
ttctttagacttgaagctggacgat

SEQ ID NO: 3750287 - DNA, 25 bp, Homo sapien
gaatggatttctttagacttgaagc

SEQ ID NO: 3750288 - DNA, 25 bp, Homo sapien
cggtagcttttttgtaaactcgcat

SEQ ID NO: 3750289 - DNA, 25 bp, Homo sapien
cagcgggagcggtagcttttttgta

SEQ ID NO: 3750290 - DNA, 25 bp, Homo sapien
taccctgccagtcagcgggagcggt

SEQ ID NO: 3750291 - DNA, 25 bp, Homo sapien
gcattatggcgggtaccctgccagt

SEQ ID NO: 3750292 - DNA, 25 bp, Homo sapien
taaggcatcgggatggtacgccttg

SEQ ID NO: 3750293 - DNA, 25 bp, Homo sapien
ctaaggcatcgggatggtacgcctt

SEQ ID NO: 3750294 - DNA, 25 bp, Homo sapien
atcgggatggtacgccttgccccag

SEQ ID NO: 3750295 - DNA, 25 bp, Homo sapien
ggcatcgggatggtacgccttgccc

SEQ ID NO: 3750296 - DNA, 25 bp, Homo sapien
aggctccaaagtgcgatcaggactc

SEQ ID NO: 3750297 - DNA, 25 bp, Homo sapien
tgggctgtcattaggctccaaagtg

SEQ ID NO: 3750298 - DNA, 25 bp, Homo sapien
ctgtgggtttggagatctggtttta

SEQ ID NO: 3750299 - DNA, 25 bp, Homo sapien
gcgatcaggactcgcaattattttt

SEQ ID NO: 3750300 - DNA, 25 bp, Homo sapien
tatctatcatctacgcccatgctgg

SEQ ID NO: 3750301 - DNA, 25 bp, Homo sapien
ccacgcgtggagatgcactgttgct

SEQ ID NO: 3750302 - DNA, 25 bp, Homo sapien
tgatctgccgttgctgtcctcttgt

SEQ ID NO: 3750303 - DNA, 25 bp, Homo sapien
tgccttcggaaaggcaccacgcgtg

SEQ ID NO: 3750304 - DNA, 25 bp, Homo sapien
tcagcgtggctgtcaacccatgtgc

SEQ ID NO: 3750305 - DNA, 25 bp, Homo sapien
gcttgtgttgtctcctgcaggcgac

SEQ ID NO: 3750306 - DNA, 25 bp, Homo sapien
aatcagcttttgacagagactcagg

SEQ ID NO: 3750307 - DNA, 25 bp, Homo sapien
caggacacggttttaacatggtgca

SEQ ID NO: 3750308 - DNA, 25 bp, Homo sapien
gtccagttgcctgtgagtgcggctc

SEQ ID NO: 3750309 - DNA, 25 bp, Homo sapien
ggaagcaccaagaaggccggtgtcc

SEQ ID NO: 3750310 - DNA, 25 bp, Homo sapien
ccagttgcctgtgagtgcggctcct

SEQ ID NO: 3750311 - DNA, 25 bp, Homo sapien
aagggaagcaccaagaaggccggtg

SEQ ID NO: 3750312 - DNA, 25 bp, Homo sapien
cagtgttgcttccggggtgtctgca

SEQ ID NO: 3750313 - DNA, 25 bp, Homo sapien
ttgccgttgcattgtttgttgctct

SEQ ID NO: 3750314 - DNA, 25 bp, Homo sapien
agagctttgccgttgcattgtttgt

SEQ ID NO: 3750315 - DNA, 25 bp, Homo sapien
gctttgccgttgcattgtttgttgc

SEQ ID NO: 3750316 - DNA, 25 bp, Homo sapien
aacattattaccagaaatgtagaga

SEQ ID NO: 3750317 - DNA, 25 bp, Homo sapien
ctgacatctgtgcagtccgggggct

SEQ ID NO: 3750318 - DNA, 25 bp, Homo sapien
ctgtcggtttcagatagttggtttc

SEQ ID NO: 3750319 - DNA, 25 bp, Homo sapien
tagtcaccacaagcttgtgcccagg

SEQ ID NO: 3750320 - DNA, 25 bp, Homo sapien
tgggctcctccgcagagcagagtgg

SEQ ID NO: 3750321 - DNA, 25 bp, Homo sapien
gggctcctccgcagagcagagtggg

SEQ ID NO: 3750322 - DNA, 25 bp, Homo sapien
ctgggctcctccgcagagcagagtg

SEQ ID NO: 3750323 - DNA, 25 bp, Homo sapien
cctgggctcctccgcagagcagagt

SEQ ID NO: 3750324 - DNA, 25 bp, Homo sapien
tgtccaggaaaggcagggacttcct

SEQ ID NO: 3750325 - DNA, 25 bp, Homo sapien
ctgtccaggaaaggcagggacttcc

SEQ ID NO: 3750326 - DNA, 25 bp, Homo sapien
gatatactcaaagaagagctcaggc

SEQ ID NO: 3750327 - DNA, 25 bp, Homo sapien
ttccaccctttggatatactcaaag

SEQ ID NO: 3750328 - DNA, 25 bp, Homo sapien
tttggatatactcaaagaagagctc

SEQ ID NO: 3750329 - DNA, 25 bp, Homo sapien
cttggacttcctcgacactgacctg

SEQ ID NO: 3750330 - DNA, 25 bp, Homo sapien
tgacgggagcggcaatggaggccca

SEQ ID NO: 3750331 - DNA, 25 bp, Homo sapien
caggtgccatcacatttccgccagt

SEQ ID NO: 3750332 - DNA, 25 bp, Homo sapien
tagggtggcgttccatgacgggagc

SEQ ID NO: 3750333 - DNA, 25 bp, Homo sapien
ttccgccagttaggacaaacacacg

SEQ ID NO: 3750334 - DNA, 25 bp, Homo sapien
tatcgaatatacagcatggcataat

SEQ ID NO: 3750335 - DNA, 25 bp, Homo sapien
ttatcgaatatacagcatggcataa

SEQ ID NO: 3750336 - DNA, 25 bp, Homo sapien
tcataagcaacttcatcgcagacaa

SEQ ID NO: 3750337 - DNA, 25 bp, Homo sapien
ataagcaacttcatcgcagacaaag

SEQ ID NO: 3750338 - DNA, 25 bp, Homo sapien
ctttgtctattgcagaatattcctg

SEQ ID NO: 3750339 - DNA, 25 bp, Homo sapien
tgggtgtggctttgtctattgcaga

SEQ ID NO: 3750340 - DNA, 25 bp, Homo sapien
ggctttgtctattgcagaatattcc

SEQ ID NO: 3750341 - DNA, 25 bp, Homo sapien
tgtggctttgtctattgcagaatat

SEQ ID NO: 3750342 - DNA, 25 bp, Homo sapien
ccatacctgtgttttctagaccaag

SEQ ID NO: 3750343 - DNA, 25 bp, Homo sapien
catcaggttactttgtgctacggaa

SEQ ID NO: 3750344 - DNA, 25 bp, Homo sapien
taactagctattcaacagggattgg

SEQ ID NO: 3750345 - DNA, 25 bp, Homo sapien
tcactcggtttgtggaagcagaaag

SEQ ID NO: 3750346 - DNA, 25 bp, Homo sapien
taggaatattgcagctctctcagga

SEQ ID NO: 3750347 - DNA, 25 bp, Homo sapien
tgcgcccgaccaaatgtgtgcattt

SEQ ID NO: 3750348 - DNA, 25 bp, Homo sapien
gacattggacttaactttttgagcc

SEQ ID NO: 3750349 - DNA, 25 bp, Homo sapien
ggcgcgtcctttcagatggcacaga

SEQ ID NO: 3750350 - DNA, 25 bp, Homo sapien
cagttgggccgctggctgatggctg

SEQ ID NO: 3750351 - DNA, 25 bp, Homo sapien
gtgaatgtgcagttgggccgctggc

SEQ ID NO: 3750352 - DNA, 25 bp, Homo sapien
tgatggctggaattgcaacctgagg

SEQ ID NO: 3750353 - DNA, 25 bp, Homo sapien
gctggaattgcaacctgaggtcctt

SEQ ID NO: 3750354 - DNA, 25 bp, Homo sapien
gttgaactcaggcagaacaccaagg

SEQ ID NO: 3750355 - DNA, 25 bp, Homo sapien
aactcaggcagaacaccaaggacat

SEQ ID NO: 3750356 - DNA, 25 bp, Homo sapien
tgaactcaggcagaacaccaaggac

SEQ ID NO: 3750357 - DNA, 25 bp, Homo sapien
ctgttgaactcaggcagaacaccaa

SEQ ID NO: 3750358 - DNA, 25 bp, Homo sapien
caggatgaatcagccgcatggcctg

SEQ ID NO: 3750359 - DNA, 25 bp, Homo sapien
tcagcagccgactgctgaagtccag

SEQ ID NO: 3750360 - DNA, 25 bp, Homo sapien
ggaacaccctcggagcagtctcttt

SEQ ID NO: 3750361 - DNA, 25 bp, Homo sapien
tcaatccggcagttcagcagccgac

SEQ ID NO: 3750362 - DNA, 25 bp, Homo sapien
tcaaaaggtggctttccttcagcat

SEQ ID NO: 3750363 - DNA, 25 bp, Homo sapien
gccaccccagagcaggtcaaaaggt

SEQ ID NO: 3750364 - DNA, 25 bp, Homo sapien
caaagccaccccagagcaggtcaaa

SEQ ID NO: 3750365 - DNA, 25 bp, Homo sapien
gagcaggtcaaaaggtggctttcct

SEQ ID NO: 3750366 - DNA, 25 bp, Homo sapien
gttgctgcaatgactcttgggtctg

SEQ ID NO: 3750367 - DNA, 25 bp, Homo sapien
ccaagggtctggggatgatccagtt

SEQ ID NO: 3750368 - DNA, 25 bp, Homo sapien
gatgatccagttgctgcaatgactc

SEQ ID NO: 3750369 - DNA, 25 bp, Homo sapien
gtctggggatgatccagttgctgca

SEQ ID NO: 3750370 - DNA, 25 bp, Homo sapien
gaactgtttcttggtgctcgacatt

SEQ ID NO: 3750371 - DNA, 25 bp, Homo sapien
acagaactgtttcttggtgctcgac

SEQ ID NO: 3750372 - DNA, 25 bp, Homo sapien
agaactgtttcttggtgctcgacat

SEQ ID NO: 3750373 - DNA, 25 bp, Homo sapien
cagaactgtttcttggtgctcgaca

SEQ ID NO: 3750374 - DNA, 25 bp, Homo sapien
caccaggcatgtgactccagtctgg

SEQ ID NO: 3750375 - DNA, 25 bp, Homo sapien
ttttctctctgcttctgcagaaatt

SEQ ID NO: 3750376 - DNA, 25 bp, Homo sapien
ctctctgcttctgcagaaatttacc

SEQ ID NO: 3750377 - DNA, 25 bp, Homo sapien
ttctctctgcttctgcagaaattta

SEQ ID NO: 3750378 - DNA, 25 bp, Homo sapien
cttttctctctgcttctgcagaaat

SEQ ID NO: 3750379 - DNA, 25 bp, Homo sapien
gcattcgattctatgtcgatcatta

SEQ ID NO: 3750380 - DNA, 25 bp, Homo sapien
tcgattctatgtcgatcattacaca

SEQ ID NO: 3750381 - DNA, 25 bp, Homo sapien
tctatgtcgatcattacacagctca

SEQ ID NO: 3750382 - DNA, 25 bp, Homo sapien
tgtgctttgcattcgattctatgtc

SEQ ID NO: 3750383 - DNA, 25 bp, Homo sapien
gctctgtagactcccagagtcctct

SEQ ID NO: 3750384 - DNA, 25 bp, Homo sapien
tcctctggggtacttctgctcctgg

SEQ ID NO: 3750385 - DNA, 25 bp, Homo sapien
ggaaacatccaaaaggctctgtaga

SEQ ID NO: 3750386 - DNA, 25 bp, Homo sapien
catccaaaaggctctgtagactccc

SEQ ID NO: 3750387 - DNA, 25 bp, Homo sapien
tcaacacgtgtttgcggaacacagg

SEQ ID NO: 3750388 - DNA, 25 bp, Homo sapien
cgtgtttgcggaacacaggtaagtg

SEQ ID NO: 3750389 - DNA, 25 bp, Homo sapien
agagctggaacagcgcagatgatca

SEQ ID NO: 3750390 - DNA, 25 bp, Homo sapien
ttcccgggcagcgaatgggaagtca

SEQ ID NO: 3750391 - DNA, 25 bp, Homo sapien
ggagtatctctctttatcttaagcc

SEQ ID NO: 3750392 - DNA, 25 bp, Homo sapien
gcagtgtctgggaacattgtccctg

SEQ ID NO: 3750393 - DNA, 25 bp, Homo sapien
gcttggctcaggatgacaatttgta

SEQ ID NO: 3750394 - DNA, 25 bp, Homo sapien
gccacgtgtttaagaggcattttcc

SEQ ID NO: 3750395 - DNA, 25 bp, Homo sapien
taagagtatcacaacagactgtcat

SEQ ID NO: 3750396 - DNA, 25 bp, Homo sapien
ttctcacagttgtccataagagtat

SEQ ID NO: 3750397 - DNA, 25 bp, Homo sapien
tgtccataagagtatcacaacagac

SEQ ID NO: 3750398 - DNA, 25 bp, Homo sapien
tcacagttgtccataagagtatcac

SEQ ID NO: 3750399 - DNA, 25 bp, Homo sapien
tctgaactcgacagtagcttttgtg

SEQ ID NO: 3750400 - DNA, 25 bp, Homo sapien
ctatatttcaaagccgagcgaggaa

SEQ ID NO: 3750401 - DNA, 25 bp, Homo sapien
tgtttgttctgaactcgacagtagc

SEQ ID NO: 3750402 - DNA, 25 bp, Homo sapien
gccgagcgaggaaaccatagtgtca

SEQ ID NO: 3750403 - DNA, 25 bp, Homo sapien
cgatgcaacaggttccttcctccaa

SEQ ID NO: 3750404 - DNA, 25 bp, Homo sapien
cacaaggtgcttgctcgatgcaaca

SEQ ID NO: 3750405 - DNA, 25 bp, Homo sapien
tcacaccccctgtaggctttgaaat

SEQ ID NO: 3750406 - DNA, 25 bp, Homo sapien
gactttctgaattcatgaaaaccca

SEQ ID NO: 3750407 - DNA, 25 bp, Homo sapien
agtcatcaagatcctcagaaaagga

SEQ ID NO: 3750408 - DNA, 25 bp, Homo sapien
caagatcctcagaaaaggagaagaa

SEQ ID NO: 3750409 - DNA, 25 bp, Homo sapien
catcaagatcctcagaaaaggagaa

SEQ ID NO: 3750410 - DNA, 25 bp, Homo sapien
ctggcagtcatcaagatcctcagaa

SEQ ID NO: 3750411 - DNA, 25 bp, Homo sapien
agcttcatgtctacctctctgtcca

SEQ ID NO: 3750412 - DNA, 25 bp, Homo sapien
cctctgtgagcacgggcgctgcacg

SEQ ID NO: 3750413 - DNA, 25 bp, Homo sapien
tgtccaggagccacccgttgttctt

SEQ ID NO: 3750414 - DNA, 25 bp, Homo sapien
tgcacctggctcgttgaaagcgcgt

SEQ ID NO: 3750415 - DNA, 25 bp, Homo sapien
gtgtcagctctgttctgtacaatgg

SEQ ID NO: 3750416 - DNA, 25 bp, Homo sapien
tagtcaattcctcccataagtgtgt

SEQ ID NO: 3750417 - DNA, 25 bp, Homo sapien
cattgcagatactctagtcaattcc

SEQ ID NO: 3750418 - DNA, 25 bp, Homo sapien
caagacggcatcctttgtgctctgc

SEQ ID NO: 3750419 - DNA, 25 bp, Homo sapien
ctccaaaactcaaccacaggcccca

SEQ ID NO: 3750420 - DNA, 25 bp, Homo sapien
cactggttctaatgacatgttctta

SEQ ID NO: 3750421 - DNA, 25 bp, Homo sapien
ccctgcactggttctaatgacatgt

SEQ ID NO: 3750422 - DNA, 25 bp, Homo sapien
ttcctccttagtaccccattggctc

SEQ ID NO: 3750423 - DNA, 25 bp, Homo sapien
aacaaccccagattgctgctcaaag

SEQ ID NO: 3750424 - DNA, 25 bp, Homo sapien
gaacaaccccagattgctgctcaaa

SEQ ID NO: 3750425 - DNA, 25 bp, Homo sapien
tgctcaaagactttgccagcagcgt

SEQ ID NO: 3750426 - DNA, 25 bp, Homo sapien
caaagactttgccagcagcgtgtca

SEQ ID NO: 3750427 - DNA, 25 bp, Homo sapien
ggaagttccctctcttgtgtctgca

SEQ ID NO: 3750428 - DNA, 25 bp, Homo sapien
tcagcgggctccaaatcggaaaaga

SEQ ID NO: 3750429 - DNA, 25 bp, Homo sapien
cctgattactgatggctgccccagc

SEQ ID NO: 3750430 - DNA, 25 bp, Homo sapien
gaaccagtagttggtgacactcccc

SEQ ID NO: 3750431 - DNA, 25 bp, Homo sapien
gcccagagcagtgatggatccaagc

SEQ ID NO: 3750432 - DNA, 25 bp, Homo sapien
gggtccctggctcttcccgacgcca

SEQ ID NO: 3750433 - DNA, 25 bp, Homo sapien
ggtccctggctcttcccgacgccat

SEQ ID NO: 3750434 - DNA, 25 bp, Homo sapien
ggatccaagcgcacagccgggtccc

SEQ ID NO: 3750435 - DNA, 25 bp, Homo sapien
ggtgatcatagattttactacctga

SEQ ID NO: 3750436 - DNA, 25 bp, Homo sapien
ctccgagggccagtgaaggccactg

SEQ ID NO: 3750437 - DNA, 25 bp, Homo sapien
gaatctgcaggtgatcatagatttt

SEQ ID NO: 3750438 - DNA, 25 bp, Homo sapien
ggagcctccttgttgagaatctgca

SEQ ID NO: 3750439 - DNA, 25 bp, Homo sapien
ggcctccatccaggtaatttagtag

SEQ ID NO: 3750440 - DNA, 25 bp, Homo sapien
ccttctctgaaggttcggttcaata

SEQ ID NO: 3750441 - DNA, 25 bp, Homo sapien
aaatgggttcacctgtaggatggtc

SEQ ID NO: 3750442 - DNA, 25 bp, Homo sapien
ggtcccatggtctggacaccgagct

SEQ ID NO: 3750443 - DNA, 25 bp, Homo sapien
tgtaaggcatgagagagatgatgca

SEQ ID NO: 3750444 - DNA, 25 bp, Homo sapien
gtaaggcatgagagagatgatgcat

SEQ ID NO: 3750445 - DNA, 25 bp, Homo sapien
ctgtaaggcatgagagagatgatgc

SEQ ID NO: 3750446 - DNA, 25 bp, Homo sapien
ttgggtgccaaaagtcggcgtgtcc

SEQ ID NO: 3750447 - DNA, 25 bp, Homo sapien
atcattgggtgccaaaagtcggcgt

SEQ ID NO: 3750448 - DNA, 25 bp, Homo sapien
cattgggtgccaaaagtcggcgtgt

SEQ ID NO: 3750449 - DNA, 25 bp, Homo sapien
ggtgccaaaagtcggcgtgtccaag

SEQ ID NO: 3750450 - DNA, 25 bp, Homo sapien
cttgaacggaacttgaggaatgaac

SEQ ID NO: 3750451 - DNA, 25 bp, Homo sapien
tgagtgacacatcaggttgattgac

SEQ ID NO: 3750452 - DNA, 25 bp, Homo sapien
ttgaggaatgaactaccccaagccc

SEQ ID NO: 3750453 - DNA, 25 bp, Homo sapien
tcttggatacactgttgagtgacac

SEQ ID NO: 3750454 - DNA, 25 bp, Homo sapien
tggctgagattgagcaccctgcagt

SEQ ID NO: 3750455 - DNA, 25 bp, Homo sapien
acagaggaagggctcttcgatggct

SEQ ID NO: 3750456 - DNA, 25 bp, Homo sapien
taggcaaatttggagcttggagtgg

SEQ ID NO: 3750457 - DNA, 25 bp, Homo sapien
gcaaatttggagcttggagtggggc

SEQ ID NO: 3750458 - DNA, 25 bp, Homo sapien
agctgggcctttctctgacttctgg

SEQ ID NO: 3750459 - DNA, 25 bp, Homo sapien
ctgggcctttctctgacttctggcg

SEQ ID NO: 3750460 - DNA, 25 bp, Homo sapien
tttctctgacttctggcgtcaccaa

SEQ ID NO: 3750461 - DNA, 25 bp, Homo sapien
tgacttctggcgtcaccaagctcac

SEQ ID NO: 3750462 - DNA, 25 bp, Homo sapien
tgcatggcttagacccttagttccc

SEQ ID NO: 3750463 - DNA, 25 bp, Homo sapien
cagacagccaggcacgccttcatat

SEQ ID NO: 3750464 - DNA, 25 bp, Homo sapien
tgacgtgggctttgcatggcttaga

SEQ ID NO: 3750465 - DNA, 25 bp, Homo sapien
cccttagttcccaccagacagccag

SEQ ID NO: 3750466 - DNA, 25 bp, Homo sapien
gtccgacagcggcttcctttgtcct

SEQ ID NO: 3750467 - DNA, 25 bp, Homo sapien
cctgctgtccgacagcggcttcctt

SEQ ID NO: 3750468 - DNA, 25 bp, Homo sapien
gaagcctgctgtccgacagcggctt

SEQ ID NO: 3750469 - DNA, 25 bp, Homo sapien
tgctgtccgacagcggcttcctttg

SEQ ID NO: 3750470 - DNA, 25 bp, Homo sapien
cctggtacttgctcccggtagattc

SEQ ID NO: 3750471 - DNA, 25 bp, Homo sapien
gctcccggtagattcccatattgcg

SEQ ID NO: 3750472 - DNA, 25 bp, Homo sapien
cggtagattcccatattgcggagtg

SEQ ID NO: 3750473 - DNA, 25 bp, Homo sapien
ttcattcctggtacttgctcccggt

SEQ ID NO: 3750474 - DNA, 25 bp, Homo sapien
ctcctccaccatcggcttcacagct

SEQ ID NO: 3750475 - DNA, 25 bp, Homo sapien
tccaccatcggcttcacagctgacc

SEQ ID NO: 3750476 - DNA, 25 bp, Homo sapien
ccatcggcttcacagctgaccccat

SEQ ID NO: 3750477 - DNA, 25 bp, Homo sapien
ctgctcctccaccatcggcttcaca

SEQ ID NO: 3750478 - DNA, 25 bp, Homo sapien
tcattatacactggcgctgggtctg

SEQ ID NO: 3750479 - DNA, 25 bp, Homo sapien
tcaatcattatacactggcgctggg

SEQ ID NO: 3750480 - DNA, 25 bp, Homo sapien
cattcaatcattatacactggcgct

SEQ ID NO: 3750481 - DNA, 25 bp, Homo sapien
aacattcaatcattatacactggcg

SEQ ID NO: 3750482 - DNA, 25 bp, Homo sapien
cttggagtgtcatttccaacctttt

SEQ ID NO: 3750483 - DNA, 25 bp, Homo sapien
cttttgaaactgtatctgattatcc

SEQ ID NO: 3750484 - DNA, 25 bp, Homo sapien
tctgattatccatgtggcaattaat

SEQ ID NO: 3750485 - DNA, 25 bp, Homo sapien
ggagtgtcatttccaaccttttgaa

SEQ ID NO: 3750486 - DNA, 25 bp, Homo sapien
gagttggcaagacaaaatctcctgt

SEQ ID NO: 3750487 - DNA, 25 bp, Homo sapien
ttctgctagactggaaatgacacac

SEQ ID NO: 3750488 - DNA, 25 bp, Homo sapien
gatctgcctcctggtagtaagagct

SEQ ID NO: 3750489 - DNA, 25 bp, Homo sapien
cacactgtgatccttgacttagcca

SEQ ID NO: 3750490 - DNA, 25 bp, Homo sapien
tgttccatattcacggcagctttcc

SEQ ID NO: 3750491 - DNA, 25 bp, Homo sapien
ttggtccctgtaccaagtagcaaag

SEQ ID NO: 3750492 - DNA, 25 bp, Homo sapien
accggcagttggtccctgtaccaag

SEQ ID NO: 3750493 - DNA, 25 bp, Homo sapien
ccatttagaaacactgaatgcaaac

SEQ ID NO: 3750494 - DNA, 25 bp, Homo sapien
catgtaccaagctctatgccaggag

SEQ ID NO: 3750495 - DNA, 25 bp, Homo sapien
aagaccatcggctgggtgagacaca

SEQ ID NO: 3750496 - DNA, 25 bp, Homo sapien
tcaggctggacttaatcatagcact

SEQ ID NO: 3750497 - DNA, 25 bp, Homo sapien
gatgagggaatctaagcaactcttc

SEQ ID NO: 3750498 - DNA, 25 bp, Homo sapien
tttcctgctacatgccccccatgga

SEQ ID NO: 3750499 - DNA, 25 bp, Homo sapien
ctttcctgctacatgccccccatgg

SEQ ID NO: 3750500 - DNA, 25 bp, Homo sapien
gacccctagagtgtcctcctggctg

SEQ ID NO: 3750501 - DNA, 25 bp, Homo sapien
cccatggacccctagagtgtcctcc

SEQ ID NO: 3750502 - DNA, 25 bp, Homo sapien
tgcttctccagaaagtccaccttca

SEQ ID NO: 3750503 - DNA, 25 bp, Homo sapien
cttctgcttctccagaaagtccacc

SEQ ID NO: 3750504 - DNA, 25 bp, Homo sapien
tctgcttctccagaaagtccacctt

SEQ ID NO: 3750505 - DNA, 25 bp, Homo sapien
gggctggcagagggccttctgcttc

SEQ ID NO: 3750506 - DNA, 25 bp, Homo sapien
tgtgtgctagccaggactgcttcag

SEQ ID NO: 3750507 - DNA, 25 bp, Homo sapien
gggtctgagagatgtgtgctagcca

SEQ ID NO: 3750508 - DNA, 25 bp, Homo sapien
agagatgtgtgctagccaggactgc

SEQ ID NO: 3750509 - DNA, 25 bp, Homo sapien
tgtgctagccaggactgcttcagtc

SEQ ID NO: 3750510 - DNA, 25 bp, Homo sapien
tgtttgcttgagtgaaggcagcaga

SEQ ID NO: 3750511 - DNA, 25 bp, Homo sapien
ctaggtgctgcatgctaggtggaga

SEQ ID NO: 3750512 - DNA, 25 bp, Homo sapien
tgtgtttgcttgagtgaaggcagca

SEQ ID NO: 3750513 - DNA, 25 bp, Homo sapien
tgctgcatgctaggtggagagagga

SEQ ID NO: 3750514 - DNA, 25 bp, Homo sapien
tctcttggaggatcaaatttacagt

SEQ ID NO: 3750515 - DNA, 25 bp, Homo sapien
gataatctcgatgttattcataagg

SEQ ID NO: 3750516 - DNA, 25 bp, Homo sapien
ggccacatttcgttccagaagcttt

SEQ ID NO: 3750517 - DNA, 25 bp, Homo sapien
gaagctttgttggatccacagtcgt

SEQ ID NO: 3750518 - DNA, 25 bp, Homo sapien
ctgtggggctggaatcaaagtcagc

SEQ ID NO: 3750519 - DNA, 25 bp, Homo sapien
gctggaatcaaagtcagcagcagaa

SEQ ID NO: 3750520 - DNA, 25 bp, Homo sapien
ccgctgctggctgataaactccatt

SEQ ID NO: 3750521 - DNA, 25 bp, Homo sapien
attcatggcaccagaatcaggtggg

SEQ ID NO: 3750522 - DNA, 25 bp, Homo sapien
ttgcctctttctagtattcctcttc

SEQ ID NO: 3750523 - DNA, 25 bp, Homo sapien
tagaataattccgaggaataactgg

SEQ ID NO: 3750524 - DNA, 25 bp, Homo sapien
cctttaacctggatgaagtaaacag

SEQ ID NO: 3750525 - DNA, 25 bp, Homo sapien
tgcattgagtaatctaagatgccac

SEQ ID NO: 3750526 - DNA, 25 bp, Homo sapien
gtaatacaatgatcaatctgcattg

SEQ ID NO: 3750527 - DNA, 25 bp, Homo sapien
gccttccgcctggcttttaagactc

SEQ ID NO: 3750528 - DNA, 25 bp, Homo sapien
agcaccctccagccttccgcctggc

SEQ ID NO: 3750529 - DNA, 25 bp, Homo sapien
tccagcatgaaggtcgtataagttg

SEQ ID NO: 3750530 - DNA, 25 bp, Homo sapien
ccagcatgaaggtcgtataagttga

SEQ ID NO: 3750531 - DNA, 25 bp, Homo sapien
cctgtgccgggctttctctgtgctg

SEQ ID NO: 3750532 - DNA, 25 bp, Homo sapien
ggatgatgacgccaccaagctggtc

SEQ ID NO: 3750533 - DNA, 25 bp, Homo sapien
tcctgaggctctgagcggagcctgt

SEQ ID NO: 3750534 - DNA, 25 bp, Homo sapien
gtagaagcctccccacatcctgagg

SEQ ID NO: 3750535 - DNA, 25 bp, Homo sapien
ttctccaccaggttgaacaacagga

SEQ ID NO: 3750536 - DNA, 25 bp, Homo sapien
tcttacagacatgcctcttggttcc

SEQ ID NO: 3750537 - DNA, 25 bp, Homo sapien
tttcctaggactccatgccaacgaa

SEQ ID NO: 3750538 - DNA, 25 bp, Homo sapien
cgaagaatgctgacttgctgccaag

SEQ ID NO: 3750539 - DNA, 25 bp, Homo sapien
gcgttgtaactgtttattggggtga

SEQ ID NO: 3750540 - DNA, 25 bp, Homo sapien
ggtgatatgcgactggcttcagggt

SEQ ID NO: 3750541 - DNA, 25 bp, Homo sapien
taactgtttattggggtgatatgcg

SEQ ID NO: 3750542 - DNA, 25 bp, Homo sapien
tttattggggtgatatgcgactggc

SEQ ID NO: 3750543 - DNA, 25 bp, Homo sapien
agtaattaagacaaagatctgctta

SEQ ID NO: 3750544 - DNA, 25 bp, Homo sapien
tcctgccacggagatggttcggcct

SEQ ID NO: 3750545 - DNA, 25 bp, Homo sapien
ggccttgtcgtgagcgggtgggcca

SEQ ID NO: 3750546 - DNA, 25 bp, Homo sapien
gacaaagatctgcttaacttgctct

SEQ ID NO: 3750547 - DNA, 25 bp, Homo sapien
gaaaagaatttttgcgatgacaaat

SEQ ID NO: 3750548 - DNA, 25 bp, Homo sapien
ttgcgatgacaaatggagcacatgt

SEQ ID NO: 3750549 - DNA, 25 bp, Homo sapien
cgatgacaaatggagcacatgtcag

SEQ ID NO: 3750550 - DNA, 25 bp, Homo sapien
tgaaaagaatttttgcgatgacaaa

SEQ ID NO: 3750551 - DNA, 25 bp, Homo sapien
gaaagcgggtgaaggcagagaagcc

SEQ ID NO: 3750552 - DNA, 25 bp, Homo sapien
cgtggaaagcgggtgaaggcagaga

SEQ ID NO: 3750553 - DNA, 25 bp, Homo sapien
ctgcgtggaaagcgggtgaaggcag

SEQ ID NO: 3750554 - DNA, 25 bp, Homo sapien
gcgtggaaagcgggtgaaggcagag

SEQ ID NO: 3750555 - DNA, 25 bp, Homo sapien
gaagatagatttggtgcatccgact

SEQ ID NO: 3750556 - DNA, 25 bp, Homo sapien
taatagggtcaaacagctggacggg

SEQ ID NO: 3750557 - DNA, 25 bp, Homo sapien
tcgccacggcgctggattgacggtt

SEQ ID NO: 3750558 - DNA, 25 bp, Homo sapien
tgcagacctgtaatgatcgccacgg

SEQ ID NO: 3750559 - DNA, 25 bp, Homo sapien
agcacataaaaataaattatccata

SEQ ID NO: 3750560 - DNA, 25 bp, Homo sapien
cacataaaaataaattatccatagg

SEQ ID NO: 3750561 - DNA, 25 bp, Homo sapien
ttgaaagcacataaaaataaattat

SEQ ID NO: 3750562 - DNA, 25 bp, Homo sapien
cataaaaataaattatccataggtt

SEQ ID NO: 3750563 - DNA, 25 bp, Homo sapien
tgaacacggacgttcctgactgttg

SEQ ID NO: 3750564 - DNA, 25 bp, Homo sapien
ccctgaacacggacgttcctgactg

SEQ ID NO: 3750565 - DNA, 25 bp, Homo sapien
cacggacgttcctgactgttgtcaa

SEQ ID NO: 3750566 - DNA, 25 bp, Homo sapien
gaacacggacgttcctgactgttgt

SEQ ID NO: 3750567 - DNA, 25 bp, Homo sapien
gagtctgagtcggaatctcttggac

SEQ ID NO: 3750568 - DNA, 25 bp, Homo sapien
aaagtaattgggcagaaccgtgtct

SEQ ID NO: 3750569 - DNA, 25 bp, Homo sapien
ttaacagtgaccactggcgctgcga

SEQ ID NO: 3750570 - DNA, 25 bp, Homo sapien
tctcttggacggaaccggatcttgc

SEQ ID NO: 3750571 - DNA, 25 bp, Homo sapien
tggtgccagatcttaaactaatgtg

SEQ ID NO: 3750572 - DNA, 25 bp, Homo sapien
aagaaggaactactgcagaatgtat

SEQ ID NO: 3750573 - DNA, 25 bp, Homo sapien
gcttcagtgaaatgtgccagtatct

SEQ ID NO: 3750574 - DNA, 25 bp, Homo sapien
taatggctgggaatttatggtgcca

SEQ ID NO: 3750575 - DNA, 25 bp, Homo sapien
agccttgcggctggaaatttgtctc

SEQ ID NO: 3750576 - DNA, 25 bp, Homo sapien
ggtattccgaggagcatctctgggc

SEQ ID NO: 3750577 - DNA, 25 bp, Homo sapien
tcttctgctccatgcaagccttgcg

SEQ ID NO: 3750578 - DNA, 25 bp, Homo sapien
ccttggcgagagtcctgctgggctt

SEQ ID NO: 3750579 - DNA, 25 bp, Homo sapien
cagtaactaaatggcttctcactgg

SEQ ID NO: 3750580 - DNA, 25 bp, Homo sapien
cctggctgaactgctgggtcacggc

SEQ ID NO: 3750581 - DNA, 25 bp, Homo sapien
gctgggtcacggctttcagtaacta

SEQ ID NO: 3750582 - DNA, 25 bp, Homo sapien
ggtggagcaatgccttttcgtggtc

SEQ ID NO: 3750583 - DNA, 25 bp, Homo sapien
tggcacctcatggtgatcaggacca

SEQ ID NO: 3750584 - DNA, 25 bp, Homo sapien
aatcatttgtgtccaggaacaaagc

SEQ ID NO: 3750585 - DNA, 25 bp, Homo sapien
tcaaaaaccatccatgtaaagagat

SEQ ID NO: 3750586 - DNA, 25 bp, Homo sapien
ctgcattggccgcaggctggctttg

SEQ ID NO: 3750587 - DNA, 25 bp, Homo sapien
gaagacatttcgggcagggctggtg

SEQ ID NO: 3750588 - DNA, 25 bp, Homo sapien
aagaagacatttcgggcagggctgg

SEQ ID NO: 3750589 - DNA, 25 bp, Homo sapien
taaagaagacatttcgggcagggct

SEQ ID NO: 3750590 - DNA, 25 bp, Homo sapien
ttaaagaagacatttcgggcagggc

SEQ ID NO: 3750591 - DNA, 25 bp, Homo sapien
acacgactaagatccaaggcctcca

SEQ ID NO: 3750592 - DNA, 25 bp, Homo sapien
tgatcacacgactaagatccaaggc

SEQ ID NO: 3750593 - DNA, 25 bp, Homo sapien
tctctgatcacacgactaagatcca

SEQ ID NO: 3750594 - DNA, 25 bp, Homo sapien
cttcgtctctgatcacacgactaag

SEQ ID NO: 3750595 - DNA, 25 bp, Homo sapien
ctccacttaatggtgctgttggtgc

SEQ ID NO: 3750596 - DNA, 25 bp, Homo sapien
ttaatggtgctgttggtgccagtct

SEQ ID NO: 3750597 - DNA, 25 bp, Homo sapien
acttaatggtgctgttggtgccagt

SEQ ID NO: 3750598 - DNA, 25 bp, Homo sapien
ccacttaatggtgctgttggtgcca

SEQ ID NO: 3750599 - DNA, 25 bp, Homo sapien
ggctctcgtaaaggcagcgggaaca

SEQ ID NO: 3750600 - DNA, 25 bp, Homo sapien
tgatccctggctctcgtaaaggcag

SEQ ID NO: 3750601 - DNA, 25 bp, Homo sapien
aatatttgatccctggctctcgtaa

SEQ ID NO: 3750602 - DNA, 25 bp, Homo sapien
tcaattttcatgaaactatccacat

SEQ ID NO: 3750603 - DNA, 25 bp, Homo sapien
agtacaatgtcatttgccgccactg

SEQ ID NO: 3750604 - DNA, 25 bp, Homo sapien
gctgctgcggaatagttttaaatgt

SEQ ID NO: 3750605 - DNA, 25 bp, Homo sapien
tttccctcataactagattattcag

SEQ ID NO: 3750606 - DNA, 25 bp, Homo sapien
tcagcaatgctgctgcggaatagtt

SEQ ID NO: 3750607 - DNA, 25 bp, Homo sapien
ctggcccgcgaaaggcctgcagttg

SEQ ID NO: 3750608 - DNA, 25 bp, Homo sapien
cctggcccgcgaaaggcctgcagtt

SEQ ID NO: 3750609 - DNA, 25 bp, Homo sapien
gcctgcagttgactgctgtgacacc

SEQ ID NO: 3750610 - DNA, 25 bp, Homo sapien
tgactgctgtgacaccgggcctgca

SEQ ID NO: 3750611 - DNA, 25 bp, Homo sapien
gggctgccgggcatgacacccagca

SEQ ID NO: 3750612 - DNA, 25 bp, Homo sapien
ggctgccgggcatgacacccagcat

SEQ ID NO: 3750613 - DNA, 25 bp, Homo sapien
tggggctgccgggcatgacacccag

SEQ ID NO: 3750614 - DNA, 25 bp, Homo sapien
gttcatgtgactcgattcaaggtca

SEQ ID NO: 3750615 - DNA, 25 bp, Homo sapien
ggtcatcatgttctgacatagccac

SEQ ID NO: 3750616 - DNA, 25 bp, Homo sapien
tgttctgacatagccacacgtagca

SEQ ID NO: 3750617 - DNA, 25 bp, Homo sapien
tcagttcatgtgactcgattcaagg

SEQ ID NO: 3750618 - DNA, 25 bp, Homo sapien
tcctgagagggttgtcaacagcctc

SEQ ID NO: 3750619 - DNA, 25 bp, Homo sapien
aacggtgtgtgcttgttctttgcag

SEQ ID NO: 3750620 - DNA, 25 bp, Homo sapien
cgcttggaacccctgtcctgaacgg

SEQ ID NO: 3750621 - DNA, 25 bp, Homo sapien
ctgggctgctgacgcttggaacccc

SEQ ID NO: 3750622 - DNA, 25 bp, Homo sapien
aatgtaaacattgtagggctctctg

SEQ ID NO: 3750623 - DNA, 25 bp, Homo sapien
ggtgtcttgatctagaccttgcggg

SEQ ID NO: 3750624 - DNA, 25 bp, Homo sapien
tcagtggtcatcaatagtcatccag

SEQ ID NO: 3750625 - DNA, 25 bp, Homo sapien
gtaaacattgtagggctctctgctg

SEQ ID NO: 3750626 - DNA, 25 bp, Homo sapien
ggcttggtcagagtggtcatgacca

SEQ ID NO: 3750627 - DNA, 25 bp, Homo sapien
gcttggtcagagtggtcatgaccat

SEQ ID NO: 3750628 - DNA, 25 bp, Homo sapien
cacacttggctgaatgtagacgtca

SEQ ID NO: 3750629 - DNA, 25 bp, Homo sapien
tgtctaaaggaaccgatgtagctgg

SEQ ID NO: 3750630 - DNA, 25 bp, Homo sapien
ccagatggccacacttggctgaatg

SEQ ID NO: 3750631 - DNA, 25 bp, Homo sapien
acgtcatcactttgattgagggcaa

SEQ ID NO: 3750632 - DNA, 25 bp, Homo sapien
catggtctctgtctgctgcactggt

SEQ ID NO: 3750633 - DNA, 25 bp, Homo sapien
tgtggagggagcatcttgaacttgt

SEQ ID NO: 3750634 - DNA, 25 bp, Homo sapien
tgtctcctttggaagagtcctgcac

SEQ ID NO: 3750635 - DNA, 25 bp, Homo sapien
tgaacttgtctcctttggaagagtc

SEQ ID NO: 3750636 - DNA, 25 bp, Homo sapien
catataggacttgtggcagtactgg

SEQ ID NO: 3750637 - DNA, 25 bp, Homo sapien
ggcagtactggcaagagagctaaac

SEQ ID NO: 3750638 - DNA, 25 bp, Homo sapien
cagtactggcaagagagctaaacag

SEQ ID NO: 3750639 - DNA, 25 bp, Homo sapien
atataggacttgtggcagtactggc

SEQ ID NO: 3750640 - DNA, 25 bp, Homo sapien
tcataatgagtgcattctgactgtg

SEQ ID NO: 3750641 - DNA, 25 bp, Homo sapien
tctgactgtgtggagagcttgaagt

SEQ ID NO: 3750642 - DNA, 25 bp, Homo sapien
gagcttgaagttcttgtagtgaaac

SEQ ID NO: 3750643 - DNA, 25 bp, Homo sapien
tcaaatctcataatgagtgcattct

SEQ ID NO: 3750644 - DNA, 25 bp, Homo sapien
catatagacgaagtttgcagctgaa

SEQ ID NO: 3750645 - DNA, 25 bp, Homo sapien
gagttttggacataagtctgtgagg

SEQ ID NO: 3750646 - DNA, 25 bp, Homo sapien
tttgaaacgatgcaacgacacctct

SEQ ID NO: 3750647 - DNA, 25 bp, Homo sapien
tgagttgccaataactttgaaacga

SEQ ID NO: 3750648 - DNA, 25 bp, Homo sapien
gtttctgtgcatgaattcccaagag

SEQ ID NO: 3750649 - DNA, 25 bp, Homo sapien
tttctgtgcatgaattcccaagagg

SEQ ID NO: 3750650 - DNA, 25 bp, Homo sapien
ttctgtgcatgaattcccaagaggc

SEQ ID NO: 3750651 - DNA, 25 bp, Homo sapien
tctgtgcatgaattcccaagaggct

SEQ ID NO: 3750652 - DNA, 25 bp, Homo sapien
gatgtgaacttgcacgtccccttcg

SEQ ID NO: 3750653 - DNA, 25 bp, Homo sapien
gttcataggaggctcacatttaggt

SEQ ID NO: 3750654 - DNA, 25 bp, Homo sapien
ggctcacatttaggtgtgcagatgt

SEQ ID NO: 3750655 - DNA, 25 bp, Homo sapien
tgtgcagatgtgaacttgcacgtcc

SEQ ID NO: 3750656 - DNA, 25 bp, Homo sapien
tctaggatgaccatcactggagcct

SEQ ID NO: 3750657 - DNA, 25 bp, Homo sapien
gaccatcactggagccttgtaagta

SEQ ID NO: 3750658 - DNA, 25 bp, Homo sapien
acggtttctggctctaggatgacca

SEQ ID NO: 3750659 - DNA, 25 bp, Homo sapien
tctggctctaggatgaccatcactg

SEQ ID NO: 3750660 - DNA, 25 bp, Homo sapien
cctcctgcagcaagtagatccggca

SEQ ID NO: 3750661 - DNA, 25 bp, Homo sapien
gcagcaagtagatccggcagagaag

SEQ ID NO: 3750662 - DNA, 25 bp, Homo sapien
aagtattgagcactacgtcgctgca

SEQ ID NO: 3750663 - DNA, 25 bp, Homo sapien
tggcctgcgggtattcccaccatgg

SEQ ID NO: 3750664 - DNA, 25 bp, Homo sapien
gactgtgtactaaaagtagtatctc

SEQ ID NO: 3750665 - DNA, 25 bp, Homo sapien
gctgacagcattacagggactgtgt

SEQ ID NO: 3750666 - DNA, 25 bp, Homo sapien
aaggaaataaagctgacagcattac

SEQ ID NO: 3750667 - DNA, 25 bp, Homo sapien
cagggactgtgtactaaaagtagta

SEQ ID NO: 3750668 - DNA, 25 bp, Homo sapien
gcagccgaaatttccaatgccctcg

SEQ ID NO: 3750669 - DNA, 25 bp, Homo sapien
gctctccgggttcgcagccgaaatt

SEQ ID NO: 3750670 - DNA, 25 bp, Homo sapien
gggttcgcagccgaaatttccaatg

SEQ ID NO: 3750671 - DNA, 25 bp, Homo sapien
gaaatttccaatgccctcggtgact

SEQ ID NO: 3750672 - DNA, 25 bp, Homo sapien
tagtcatggctgttaaaaggtcacc

SEQ ID NO: 3750673 - DNA, 25 bp, Homo sapien
catttactaggacagaagcgcgacc

SEQ ID NO: 3750674 - DNA, 25 bp, Homo sapien
tgtaatgatacatgccagcactctc

SEQ ID NO: 3750675 - DNA, 25 bp, Homo sapien
tcctgcgatgggctggaaagaaaat

SEQ ID NO: 3750676 - DNA, 25 bp, Homo sapien
tattaggatgacttgagagcttgac

SEQ ID NO: 3750677 - DNA, 25 bp, Homo sapien
tttctagcactggtgacaaacgtgc

SEQ ID NO: 3750678 - DNA, 25 bp, Homo sapien
taatgtttaatgcaagagtcggagc

SEQ ID NO: 3750679 - DNA, 25 bp, Homo sapien
tgataatgaatacaaacagggcgac

SEQ ID NO: 3750680 - DNA, 25 bp, Homo sapien
tgttgagtggctctcccatccccat

SEQ ID NO: 3750681 - DNA, 25 bp, Homo sapien
ggtgtctttgactcagtggtaaggc

SEQ ID NO: 3750682 - DNA, 25 bp, Homo sapien
ttgactcagtggtaaggcggctgcc

SEQ ID NO: 3750683 - DNA, 25 bp, Homo sapien
tccccagcagctgaatggggggcct

SEQ ID NO: 3750684 - DNA, 25 bp, Homo sapien
tcctggtgtctttgactcagtggta

SEQ ID NO: 3750685 - DNA, 25 bp, Homo sapien
caggcatgagatacgctggagctgc

SEQ ID NO: 3750686 - DNA, 25 bp, Homo sapien
catgagatacgctggagctgctgag

SEQ ID NO: 3750687 - DNA, 25 bp, Homo sapien
catttccaggcatgagatacgctgg

SEQ ID NO: 3750688 - DNA, 25 bp, Homo sapien
cagacatttccaggcatgagatacg

SEQ ID NO: 3750689 - DNA, 25 bp, Homo sapien
taacacttaggtgaagttccacttc

SEQ ID NO: 3750690 - DNA, 25 bp, Homo sapien
ggcacggtgcctcattacagcaact

SEQ ID NO: 3750691 - DNA, 25 bp, Homo sapien
tggctacaataggaatcccaactgg

SEQ ID NO: 3750692 - DNA, 25 bp, Homo sapien
aactggtacttcctccggcacggtg

SEQ ID NO: 3750693 - DNA, 25 bp, Homo sapien
gggacagttgaggcataaactgctt

SEQ ID NO: 3750694 - DNA, 25 bp, Homo sapien
gaaactcggacaatgagtagggcgc

SEQ ID NO: 3750695 - DNA, 25 bp, Homo sapien
atcaaagagaattcccggcggccga

SEQ ID NO: 3750696 - DNA, 25 bp, Homo sapien
gaaatttatagactttggcctctgc

SEQ ID NO: 3750697 - DNA, 25 bp, Homo sapien
gcggccgagagcgttcatgaaaaac

SEQ ID NO: 3750698 - DNA, 25 bp, Homo sapien
caggaggtccggtctgtgtcagcct

SEQ ID NO: 3750699 - DNA, 25 bp, Homo sapien
ctccccggtaacagcagccagtgga

SEQ ID NO: 3750700 - DNA, 25 bp, Homo sapien
tgctccaggaggtccggtctgtgtc

SEQ ID NO: 3750701 - DNA, 25 bp, Homo sapien
gtgtcagcctcctccccggtaacag

SEQ ID NO: 3750702 - DNA, 25 bp, Homo sapien
caggtctgtgcaggggcatgaacac

SEQ ID NO: 3750703 - DNA, 25 bp, Homo sapien
ccagccctgggagccatgacttggt

SEQ ID NO: 3750704 - DNA, 25 bp, Homo sapien
gccctgggagccatgacttggtcat

SEQ ID NO: 3750705 - DNA, 25 bp, Homo sapien
acccagccctgggagccatgacttg

SEQ ID NO: 3750706 - DNA, 25 bp, Homo sapien
gcttgtgaaaaacccccagctagtg

SEQ ID NO: 3750707 - DNA, 25 bp, Homo sapien
gatgcttatcagtcactcgccttga

SEQ ID NO: 3750708 - DNA, 25 bp, Homo sapien
taattcactcacagcttgagattga

SEQ ID NO: 3750709 - DNA, 25 bp, Homo sapien
gctattggagatcttaaaacataga

SEQ ID NO: 3750710 - DNA, 25 bp, Homo sapien
gccctgtggtgggttcacaaatggc

SEQ ID NO: 3750711 - DNA, 25 bp, Homo sapien
gtgtctgcaaacgtgtagaggccct

SEQ ID NO: 3750712 - DNA, 25 bp, Homo sapien
tgcaaacgtgtagaggccctgtggt

SEQ ID NO: 3750713 - DNA, 25 bp, Homo sapien
ccctgtggtgggttcacaaatggct

SEQ ID NO: 3750714 - DNA, 25 bp, Homo sapien
ggctgcatgtccaagtattgaaaag

SEQ ID NO: 3750715 - DNA, 25 bp, Homo sapien
aattaaaacatcatcgaccacaaga

SEQ ID NO: 3750716 - DNA, 25 bp, Homo sapien
caagagtctataaaaggcatgcaca

SEQ ID NO: 3750717 - DNA, 25 bp, Homo sapien
acaagaaaattctgatatcctcatg

SEQ ID NO: 3750718 - DNA, 25 bp, Homo sapien
tggagtgtgggccaatcggtcaaca

SEQ ID NO: 3750719 - DNA, 25 bp, Homo sapien
aatgcaggtctcgaggatgctgctg

SEQ ID NO: 3750720 - DNA, 25 bp, Homo sapien
aacagagttccagcgtctgcccaag

SEQ ID NO: 3750721 - DNA, 25 bp, Homo sapien
cccaaggcatcagggcgggtgtttt

SEQ ID NO: 3750722 - DNA, 25 bp, Homo sapien
acagccagagtcactagggtcccgt

SEQ ID NO: 3750723 - DNA, 25 bp, Homo sapien
tctgagtctacacagtgtggtgtca

SEQ ID NO: 3750724 - DNA, 25 bp, Homo sapien
actgccaggccatttaggcagtggt

SEQ ID NO: 3750725 - DNA, 25 bp, Homo sapien
ccagagtcactagggtcccgtccat

SEQ ID NO: 3750726 - DNA, 25 bp, Homo sapien
ggaattgggtgcagaatatcaggct

SEQ ID NO: 3750727 - DNA, 25 bp, Homo sapien
ggtgcagaatatcaggctcccttct

SEQ ID NO: 3750728 - DNA, 25 bp, Homo sapien
gttccctttacactagaagcttggc

SEQ ID NO: 3750729 - DNA, 25 bp, Homo sapien
tttacactagaagcttggcccttca

SEQ ID NO: 3750730 - DNA, 25 bp, Homo sapien
tccctgcttagcttttaagcctctt

SEQ ID NO: 3750731 - DNA, 25 bp, Homo sapien
tgggagcctgccaaaatccctgctt

SEQ ID NO: 3750732 - DNA, 25 bp, Homo sapien
cctgcttagcttttaagcctcttag

SEQ ID NO: 3750733 - DNA, 25 bp, Homo sapien
gagcctgccaaaatccctgcttagc

SEQ ID NO: 3750734 - DNA, 25 bp, Homo sapien
ctccttctcagcgggctctgaactt

SEQ ID NO: 3750735 - DNA, 25 bp, Homo sapien
cccctccttctcagcgggctctgaa

SEQ ID NO: 3750736 - DNA, 25 bp, Homo sapien
cttctcagcgggctctgaacttcca

SEQ ID NO: 3750737 - DNA, 25 bp, Homo sapien
ttctcagcgggctctgaacttccat

SEQ ID NO: 3750738 - DNA, 25 bp, Homo sapien
tcagcagtgtaggatgtccttcttc

SEQ ID NO: 3750739 - DNA, 25 bp, Homo sapien
cccagcggggtttctctgtggagac

SEQ ID NO: 3750740 - DNA, 25 bp, Homo sapien
ttctctagcctgatgcctggagccc

SEQ ID NO: 3750741 - DNA, 25 bp, Homo sapien
cccacggctcctttcagcagtgtag

SEQ ID NO: 3750742 - DNA, 25 bp, Homo sapien
agttgtacttactacattttctcca

SEQ ID NO: 3750743 - DNA, 25 bp, Homo sapien
tgattaaatccagttttagttgtac

SEQ ID NO: 3750744 - DNA, 25 bp, Homo sapien
tccagttttagttgtacttactaca

SEQ ID NO: 3750745 - DNA, 25 bp, Homo sapien
ttagtagcgatgattaaatccagtt

SEQ ID NO: 3750746 - DNA, 25 bp, Homo sapien
tgccttggcattcggccaacggctg

SEQ ID NO: 3750747 - DNA, 25 bp, Homo sapien
gttttccttgcgaaggtttgagctc

SEQ ID NO: 3750748 - DNA, 25 bp, Homo sapien
tggcattcggccaacggctgccaca

SEQ ID NO: 3750749 - DNA, 25 bp, Homo sapien
tttccttgcgaaggtttgagctcat

SEQ ID NO: 3750750 - DNA, 25 bp, Homo sapien
tccctatcctcaaaggagttgctga

SEQ ID NO: 3750751 - DNA, 25 bp, Homo sapien
ctccctatcctcaaaggagttgctg

SEQ ID NO: 3750752 - DNA, 25 bp, Homo sapien
tgtgcttccccgagccatccaggag

SEQ ID NO: 3750753 - DNA, 25 bp, Homo sapien
gatttagctgtagcccagatagggc

SEQ ID NO: 3750754 - DNA, 25 bp, Homo sapien
gaagtagaggatttagctgtagccc

SEQ ID NO: 3750755 - DNA, 25 bp, Homo sapien
ctgggaagtagaggatttagctgta

SEQ ID NO: 3750756 - DNA, 25 bp, Homo sapien
catattcacatccttgcctgtcttg

SEQ ID NO: 3750757 - DNA, 25 bp, Homo sapien
catctacaatcaagtccacagccac

SEQ ID NO: 3750758 - DNA, 25 bp, Homo sapien
actgctgtggttccattcaatggcg

SEQ ID NO: 3750759 - DNA, 25 bp, Homo sapien
tgcctgtcttgacaaatgcagccac

SEQ ID NO: 3750760 - DNA, 25 bp, Homo sapien
accttgttgctgtggcaacactggg

SEQ ID NO: 3750761 - DNA, 25 bp, Homo sapien
accagctggtcctcgtcaccttgtt

SEQ ID NO: 3750762 - DNA, 25 bp, Homo sapien
cactggggctttagaagtgtgccgc

SEQ ID NO: 3750763 - DNA, 25 bp, Homo sapien
gctgctaccaggatcaccagctggt

SEQ ID NO: 3750764 - DNA, 25 bp, Homo sapien
tttcagcattcgtgaaaaagatggc

SEQ ID NO: 3750765 - DNA, 25 bp, Homo sapien
caaatgtgataaccagttcaatttc

SEQ ID NO: 3750766 - DNA, 25 bp, Homo sapien
ccagttcaatttcagcattcgtgaa

SEQ ID NO: 3750767 - DNA, 25 bp, Homo sapien
cagcattcgtgaaaaagatggctgt

SEQ ID NO: 3750768 - DNA, 25 bp, Homo sapien
ggcttgcttttatatcgaaggctcc

SEQ ID NO: 3750769 - DNA, 25 bp, Homo sapien
ttttatatcgaaggctcccatttaa

SEQ ID NO: 3750770 - DNA, 25 bp, Homo sapien
tgcttttatatcgaaggctcccatt

SEQ ID NO: 3750771 - DNA, 25 bp, Homo sapien
atctggcttgcttttatatcgaagg

SEQ ID NO: 3750772 - DNA, 25 bp, Homo sapien
tcattttcgctctggtaccgtcacc

SEQ ID NO: 3750773 - DNA, 25 bp, Homo sapien
ttttcgctctggtaccgtcaccgag

SEQ ID NO: 3750774 - DNA, 25 bp, Homo sapien
ttcgctctggtaccgtcaccgagtg

SEQ ID NO: 3750775 - DNA, 25 bp, Homo sapien
gctctggtaccgtcaccgagtgcca

SEQ ID NO: 3750776 - DNA, 25 bp, Homo sapien
tattgtcaaacctgctgatatccac

SEQ ID NO: 3750777 - DNA, 25 bp, Homo sapien
tcatcaattgctattgtcaaacctg

SEQ ID NO: 3750778 - DNA, 25 bp, Homo sapien
gtttgtttcatcaattgctattgtc

SEQ ID NO: 3750779 - DNA, 25 bp, Homo sapien
caattgctattgtcaaacctgctga

SEQ ID NO: 3750780 - DNA, 25 bp, Homo sapien
tgcgagtttctctcggagaatggtg

SEQ ID NO: 3750781 - DNA, 25 bp, Homo sapien
ttccaggatgacacatgcgagtttc

SEQ ID NO: 3750782 - DNA, 25 bp, Homo sapien
gatgacacatgcgagtttctctcgg

SEQ ID NO: 3750783 - DNA, 25 bp, Homo sapien
cacatgcgagtttctctcggagaat

SEQ ID NO: 3750784 - DNA, 25 bp, Homo sapien
aaatgaggagtcgaggcaatccatg

SEQ ID NO: 3750785 - DNA, 25 bp, Homo sapien
gcacgtggaacctagtggagaaaat

SEQ ID NO: 3750786 - DNA, 25 bp, Homo sapien
taaatcactggattgctggtgacat

SEQ ID NO: 3750787 - DNA, 25 bp, Homo sapien
aaaattgaacagagccttccaagca

SEQ ID NO: 3750788 - DNA, 25 bp, Homo sapien
cacaggcacctgtagggtctgcaat

SEQ ID NO: 3750789 - DNA, 25 bp, Homo sapien
gaagtcccagaattacccgtgccat

SEQ ID NO: 3750790 - DNA, 25 bp, Homo sapien
taccatggcagttccttgtctcctg

SEQ ID NO: 3750791 - DNA, 25 bp, Homo sapien
ccgtgccatctgagatcccaaaata

SEQ ID NO: 3750792 - DNA, 25 bp, Homo sapien
gctgtaagacacattactcatgttt

SEQ ID NO: 3750793 - DNA, 25 bp, Homo sapien
gcaacatttgttctatgctgtttgc

SEQ ID NO: 3750794 - DNA, 25 bp, Homo sapien
tgttcacacagcgtacatgcataaa

SEQ ID NO: 3750795 - DNA, 25 bp, Homo sapien
taccacataaggaagcgggtcttgc

SEQ ID NO: 3750796 - DNA, 25 bp, Homo sapien
gtcaccaggaccagctaatattttt

SEQ ID NO: 3750797 - DNA, 25 bp, Homo sapien
gtgtgtcaccaggaccagctaatat

SEQ ID NO: 3750798 - DNA, 25 bp, Homo sapien
cctcccagatgcttggaccacaggt

SEQ ID NO: 3750799 - DNA, 25 bp, Homo sapien
tcagcctcccagatgcttggaccac

SEQ ID NO: 3750800 - DNA, 25 bp, Homo sapien
aacagacagagtcccgtccacattg

SEQ ID NO: 3750801 - DNA, 25 bp, Homo sapien
gaacagacagagtcccgtccacatt

SEQ ID NO: 3750802 - DNA, 25 bp, Homo sapien
ccagttgtctacaatggttcttacc

SEQ ID NO: 3750803 - DNA, 25 bp, Homo sapien
tgtctacaatggttcttacctgcca

SEQ ID NO: 3750804 - DNA, 25 bp, Homo sapien
gttgtctacaatggttcttacctgc

SEQ ID NO: 3750805 - DNA, 25 bp, Homo sapien
agttgtctacaatggttcttacctg

SEQ ID NO: 3750806 - DNA, 25 bp, Homo sapien
aggacacgctgacagaatcaacagc

SEQ ID NO: 3750807 - DNA, 25 bp, Homo sapien
atcaacagcaaggtagctcggcttc

SEQ ID NO: 3750808 - DNA, 25 bp, Homo sapien
tgctgagttagaggcagagttgggc

SEQ ID NO: 3750809 - DNA, 25 bp, Homo sapien
tgacagaatcaacagcaaggtagct

SEQ ID NO: 3750810 - DNA, 25 bp, Homo sapien
cactaattaagaaagtagggcctgc

SEQ ID NO: 3750811 - DNA, 25 bp, Homo sapien
tacggcaacccaaggtcaacacaag

SEQ ID NO: 3750812 - DNA, 25 bp, Homo sapien
gctgtaaattgggagctgaagcact

SEQ ID NO: 3750813 - DNA, 25 bp, Homo sapien
gaagcactgttcctccttaagtagg

SEQ ID NO: 3750814 - DNA, 25 bp, Homo sapien
ttctggtggtaaatgagacctgcag

SEQ ID NO: 3750815 - DNA, 25 bp, Homo sapien
tctggtggtaaatgagacctgcaga

SEQ ID NO: 3750816 - DNA, 25 bp, Homo sapien
tggatggccaatggcagacccaggt

SEQ ID NO: 3750817 - DNA, 25 bp, Homo sapien
gagcagtttcaggtggatggccaat

SEQ ID NO: 3750818 - DNA, 25 bp, Homo sapien
cagacccaggtgagcgtgttggcat

SEQ ID NO: 3750819 - DNA, 25 bp, Homo sapien
agtttcaggtggatggccaatggca

SEQ ID NO: 3750820 - DNA, 25 bp, Homo sapien
tgaattgcccgatgcaaattcattc

SEQ ID NO: 3750821 - DNA, 25 bp, Homo sapien
catttgcaagcgtacacagtctgga

SEQ ID NO: 3750822 - DNA, 25 bp, Homo sapien
tcaccttcagagcttcatttgcaag

SEQ ID NO: 3750823 - DNA, 25 bp, Homo sapien
tatcccttgaatttgccggatgaat

SEQ ID NO: 3750824 - DNA, 25 bp, Homo sapien
tttagaaggagcctaacattgagga

SEQ ID NO: 3750825 - DNA, 25 bp, Homo sapien
aaggctgcaattacgtctgaactca

SEQ ID NO: 3750826 - DNA, 25 bp, Homo sapien
ggatgtcaaaggctgcaattacgtc

SEQ ID NO: 3750827 - DNA, 25 bp, Homo sapien
ttagaaggagcctaacattgaggat

SEQ ID NO: 3750828 - DNA, 25 bp, Homo sapien
aaagagaatcccaaatacgtatgcc

SEQ ID NO: 3750829 - DNA, 25 bp, Homo sapien
tctttggagggacaagagatccctt

SEQ ID NO: 3750830 - DNA, 25 bp, Homo sapien
tacgtatgccatagtcatggtcagg

SEQ ID NO: 3750831 - DNA, 25 bp, Homo sapien
gagatcccttctagaccaccagtta

SEQ ID NO: 3750832 - DNA, 25 bp, Homo sapien
ttagttaatgtctttaatttgcatc

SEQ ID NO: 3750833 - DNA, 25 bp, Homo sapien
atgtctttaatttgcatccgtgcac

SEQ ID NO: 3750834 - DNA, 25 bp, Homo sapien
gttaatgtctttaatttgcatccgt

SEQ ID NO: 3750835 - DNA, 25 bp, Homo sapien
taatgtctttaatttgcatccgtgc

SEQ ID NO: 3750836 - DNA, 25 bp, Homo sapien
catcccagctgtagactcgcaatcg

SEQ ID NO: 3750837 - DNA, 25 bp, Homo sapien
gcagttttaattatcggcaccgcga

SEQ ID NO: 3750838 - DNA, 25 bp, Homo sapien
gactcgaggtccacctgtaaggaga

SEQ ID NO: 3750839 - DNA, 25 bp, Homo sapien
gcaatcgcaatcctcgggtggcagt

SEQ ID NO: 3750840 - DNA, 25 bp, Homo sapien
ttaatcctcccggtagccttcatgg

SEQ ID NO: 3750841 - DNA, 25 bp, Homo sapien
tactatcaccacttatagacaagac

SEQ ID NO: 3750842 - DNA, 25 bp, Homo sapien
tcccggtagccttcatggacgttga

SEQ ID NO: 3750843 - DNA, 25 bp, Homo sapien
tcatggacgttgatactatcaccac

SEQ ID NO: 3750844 - DNA, 25 bp, Homo sapien
cctctccaaggataaagacatcagt

SEQ ID NO: 3750845 - DNA, 25 bp, Homo sapien
ctctcctctccaaggataaagacat

SEQ ID NO: 3750846 - DNA, 25 bp, Homo sapien
ttctccatctcgattacacctctcc

SEQ ID NO: 3750847 - DNA, 25 bp, Homo sapien
ccatctcgattacacctctcctctc

SEQ ID NO: 3750848 - DNA, 25 bp, Homo sapien
gaataactgaatgtacttggatgca

SEQ ID NO: 3750849 - DNA, 25 bp, Homo sapien
catcaagcatgtattatgggtcaca

SEQ ID NO: 3750850 - DNA, 25 bp, Homo sapien
tcacagagtgatgcgtattccagtt

SEQ ID NO: 3750851 - DNA, 25 bp, Homo sapien
gaggctcccatggaaacactgatac

SEQ ID NO: 3750852 - DNA, 25 bp, Homo sapien
caacatcatgattaaggacatgtcc

SEQ ID NO: 3750853 - DNA, 25 bp, Homo sapien
aagggtgactaaatcaatgatgctc

SEQ ID NO: 3750854 - DNA, 25 bp, Homo sapien
tctgtagattctgaatggcctggca

SEQ ID NO: 3750855 - DNA, 25 bp, Homo sapien
tgtagtcatatgtttggtttccacc

SEQ ID NO: 3750856 - DNA, 25 bp, Homo sapien
tgttcccagcatcaaattctagcct

SEQ ID NO: 3750857 - DNA, 25 bp, Homo sapien
gttcccagcatcaaattctagcctg

SEQ ID NO: 3750858 - DNA, 25 bp, Homo sapien
tctgtgttcccagcatcaaattcta

SEQ ID NO: 3750859 - DNA, 25 bp, Homo sapien
tgtgttcccagcatcaaattctagc

SEQ ID NO: 3750860 - DNA, 25 bp, Homo sapien
caggagttccccagaagagataagg

SEQ ID NO: 3750861 - DNA, 25 bp, Homo sapien
cgagtggtcttagaattccatggaa

SEQ ID NO: 3750862 - DNA, 25 bp, Homo sapien
tgcagactgcatgagaacttaatcc

SEQ ID NO: 3750863 - DNA, 25 bp, Homo sapien
tatctacattggtgatgcagactgc

SEQ ID NO: 3750864 - DNA, 25 bp, Homo sapien
tcgcagaagcacttgctcactgtag

SEQ ID NO: 3750865 - DNA, 25 bp, Homo sapien
gaccgatctgttgaattccgtgcaa

SEQ ID NO: 3750866 - DNA, 25 bp, Homo sapien
tatcttccatatgcagaccgatctg

SEQ ID NO: 3750867 - DNA, 25 bp, Homo sapien
tccgtgcaatgaagataaacccaaa

SEQ ID NO: 3750868 - DNA, 25 bp, Homo sapien
tgtacaattgtggagagttttggtg

SEQ ID NO: 3750869 - DNA, 25 bp, Homo sapien
tccccagatccttagggattcaatc

SEQ ID NO: 3750870 - DNA, 25 bp, Homo sapien
tttcccttgattacttccccagatc

SEQ ID NO: 3750871 - DNA, 25 bp, Homo sapien
tggtgtactcccttaggaaaatatg

SEQ ID NO: 3750872 - DNA, 25 bp, Homo sapien
tggctgtcaatgatgtgctgtgatg

SEQ ID NO: 3750873 - DNA, 25 bp, Homo sapien
caggaggatagtggctgtcaatgat

SEQ ID NO: 3750874 - DNA, 25 bp, Homo sapien
cagtcagtggccctgtcattggcca

SEQ ID NO: 3750875 - DNA, 25 bp, Homo sapien
tgctgtgatgatttgcagtgggtct

SEQ ID NO: 3750876 - DNA, 25 bp, Homo sapien
tagctgatgtgcaaaataggaggag

SEQ ID NO: 3750877 - DNA, 25 bp, Homo sapien
ctaagcgtgaaggttttcagcatca

SEQ ID NO: 3750878 - DNA, 25 bp, Homo sapien
tccaaggaggtcttgtgatggatac

SEQ ID NO: 3750879 - DNA, 25 bp, Homo sapien
ggatacaaaggcttgcacacagtcg

SEQ ID NO: 3750880 - DNA, 25 bp, Homo sapien
ggtccaggcacgtgttgcctagcaa

SEQ ID NO: 3750881 - DNA, 25 bp, Homo sapien
agctgaagcaaaggagtggtcaggt

SEQ ID NO: 3750882 - DNA, 25 bp, Homo sapien
aagcaaaggagtggtcaggtgccag

SEQ ID NO: 3750883 - DNA, 25 bp, Homo sapien
caggtccaggcacgtgttgcctagc

SEQ ID NO: 3750884 - DNA, 25 bp, Homo sapien
gttggtcattcgatggtcccctgct

SEQ ID NO: 3750885 - DNA, 25 bp, Homo sapien
caaaaaggaggtggcttgatgagct

SEQ ID NO: 3750886 - DNA, 25 bp, Homo sapien
tagccatctgcggtccacgcagcat

SEQ ID NO: 3750887 - DNA, 25 bp, Homo sapien
gagcttggatgttggtcattcgatg

SEQ ID NO: 3750888 - DNA, 25 bp, Homo sapien
tgaatacttgagagcaagaacgatg

SEQ ID NO: 3750889 - DNA, 25 bp, Homo sapien
caagaacgatgttccttcgaacaag

SEQ ID NO: 3750890 - DNA, 25 bp, Homo sapien
ccttcgaacaagttttgctgggaat

SEQ ID NO: 3750891 - DNA, 25 bp, Homo sapien
ttgctcttggttgaatacttgagag

SEQ ID NO: 3750892 - DNA, 25 bp, Homo sapien
ggtcctctgaagcgtctgctgtttt

SEQ ID NO: 3750893 - DNA, 25 bp, Homo sapien
tcttcctacgctctctgtgttttct

SEQ ID NO: 3750894 - DNA, 25 bp, Homo sapien
ttcctcttcctacgctctctgtgtt

SEQ ID NO: 3750895 - DNA, 25 bp, Homo sapien
tcctacgctctctgtgttttctatt

SEQ ID NO: 3750896 - DNA, 25 bp, Homo sapien
tcccgacggcagtaatcctcgctgt

SEQ ID NO: 3750897 - DNA, 25 bp, Homo sapien
tctttctctcggctgcgtttggcct

SEQ ID NO: 3750898 - DNA, 25 bp, Homo sapien
ggccttctgatgcttttgagattcc

SEQ ID NO: 3750899 - DNA, 25 bp, Homo sapien
gatccatctggtccaggcaccttgt

SEQ ID NO: 3750900 - DNA, 25 bp, Homo sapien
tccaagtgcatcattgaacctcggg

SEQ ID NO: 3750901 - DNA, 25 bp, Homo sapien
tcatgtttgataaattccctggctt

SEQ ID NO: 3750902 - DNA, 25 bp, Homo sapien
tatagggctgttgatcctccaagtg

SEQ ID NO: 3750903 - DNA, 25 bp, Homo sapien
cctggctttccgagtaatttaactg

SEQ ID NO: 3750904 - DNA, 25 bp, Homo sapien
agtgtgcttgggctgaggctcagcg

SEQ ID NO: 3750905 - DNA, 25 bp, Homo sapien
tgcagagccagagatctgatgcttt

SEQ ID NO: 3750906 - DNA, 25 bp, Homo sapien
tgctttaccacgctgtgctggcctt

SEQ ID NO: 3750907 - DNA, 25 bp, Homo sapien
agatctgatgctttaccacgctgtg

SEQ ID NO: 3750908 - DNA, 25 bp, Homo sapien
gaccctgctgcaaattcatatggcg

SEQ ID NO: 3750909 - DNA, 25 bp, Homo sapien
tagcccgcaggacctcagagtgtga

SEQ ID NO: 3750910 - DNA, 25 bp, Homo sapien
gggacttgactctgctgtgcctgac

SEQ ID NO: 3750911 - DNA, 25 bp, Homo sapien
tcatatggcggagtcctagcccgca

SEQ ID NO: 3750912 - DNA, 25 bp, Homo sapien
ggcagatgtagtttccaactgagaa

SEQ ID NO: 3750913 - DNA, 25 bp, Homo sapien
atgtctgggcagatgtagtttccaa

SEQ ID NO: 3750914 - DNA, 25 bp, Homo sapien
tagtttccaactgagaatgctggca

SEQ ID NO: 3750915 - DNA, 25 bp, Homo sapien
tcccgtagctgtggcattatcactt

SEQ ID NO: 3750916 - DNA, 25 bp, Homo sapien
ttcttggcgtcacaagacttgggcc

SEQ ID NO: 3750917 - DNA, 25 bp, Homo sapien
gacttgggccgtaattagctgtgtg

SEQ ID NO: 3750918 - DNA, 25 bp, Homo sapien
gaggatcaaagactccagtgcatgt

SEQ ID NO: 3750919 - DNA, 25 bp, Homo sapien
gctttgtgcagtgaaatatgcccac

SEQ ID NO: 3750920 - DNA, 25 bp, Homo sapien
catcgattggcctctggtttgggtt

SEQ ID NO: 3750921 - DNA, 25 bp, Homo sapien
cgattggcctctggtttgggtttgg

SEQ ID NO: 3750922 - DNA, 25 bp, Homo sapien
tcatcgattggcctctggtttgggt

SEQ ID NO: 3750923 - DNA, 25 bp, Homo sapien
tcgattggcctctggtttgggtttg

SEQ ID NO: 3750924 - DNA, 25 bp, Homo sapien
tgctcttgagaataggcagaccagg

SEQ ID NO: 3750925 - DNA, 25 bp, Homo sapien
gatgctcttgagaataggcagacca

SEQ ID NO: 3750926 - DNA, 25 bp, Homo sapien
ctcttgagaataggcagaccaggaa

SEQ ID NO: 3750927 - DNA, 25 bp, Homo sapien
ttgagaataggcagaccaggaagga

SEQ ID NO: 3750928 - DNA, 25 bp, Homo sapien
tggattggtcagctgtatgcccggg

SEQ ID NO: 3750929 - DNA, 25 bp, Homo sapien
ggggctcatcctcaaaccctgtgag

SEQ ID NO: 3750930 - DNA, 25 bp, Homo sapien
gggtggattggtcagctgtatgccc

SEQ ID NO: 3750931 - DNA, 25 bp, Homo sapien
ggctcatcctcaaaccctgtgagct

SEQ ID NO: 3750932 - DNA, 25 bp, Homo sapien
gccatgcagccccggcttggagggg

SEQ ID NO: 3750933 - DNA, 25 bp, Homo sapien
gggccatgcagccccggcttggagg

SEQ ID NO: 3750934 - DNA, 25 bp, Homo sapien
gaggggtggactggtcagccgtata

SEQ ID NO: 3750935 - DNA, 25 bp, Homo sapien
aggggtggactggtcagccgtatac

SEQ ID NO: 3750936 - DNA, 25 bp, Homo sapien
tctctgcagaacgatggtgacttaa

SEQ ID NO: 3750937 - DNA, 25 bp, Homo sapien
gcagccgaaagatacatttgccgat

SEQ ID NO: 3750938 - DNA, 25 bp, Homo sapien
gaactgtaacccagtgtcttatggc

SEQ ID NO: 3750939 - DNA, 25 bp, Homo sapien
cctacttgtagatgtagcagccgaa

SEQ ID NO: 3750940 - DNA, 25 bp, Homo sapien
ccctctgcagccccttctgagacac

SEQ ID NO: 3750941 - DNA, 25 bp, Homo sapien
tctgcagccccttctgagacaccca

SEQ ID NO: 3750942 - DNA, 25 bp, Homo sapien
cccaggactttgagggggcagcctc

SEQ ID NO: 3750943 - DNA, 25 bp, Homo sapien
aaggcccaggactttgagggggcag

SEQ ID NO: 3750944 - DNA, 25 bp, Homo sapien
tattgactccgaatctaggtcctgg

SEQ ID NO: 3750945 - DNA, 25 bp, Homo sapien
gaacgtgtgtatgtggcctaggccc

SEQ ID NO: 3750946 - DNA, 25 bp, Homo sapien
tccaggtgcaccagatgagagcgag

SEQ ID NO: 3750947 - DNA, 25 bp, Homo sapien
cagccagcggtgaaaggtgcctatt

SEQ ID NO: 3750948 - DNA, 25 bp, Homo sapien
ctgttggaaaccgacaaatacgagt

SEQ ID NO: 3750949 - DNA, 25 bp, Homo sapien
actcgtatttgtcggtttccaacag

SEQ ID NO: 3750950 - DNA, 25 bp, Homo sapien
ttcagttctttgcagcgggcagcgc

SEQ ID NO: 3750951 - DNA, 25 bp, Homo sapien
tgtgtgaacccatacagggaagctc

SEQ ID NO: 3750952 - DNA, 25 bp, Homo sapien
gagctctttctttgcgcggcgtccg

SEQ ID NO: 3750953 - DNA, 25 bp, Homo sapien
agggaagctccctacaacactggcc

SEQ ID NO: 3750954 - DNA, 25 bp, Homo sapien
gattcctccacgtgtaggtggacag

SEQ ID NO: 3750955 - DNA, 25 bp, Homo sapien
gatctttgactgacgtttggaccat

SEQ ID NO: 3750956 - DNA, 25 bp, Homo sapien
gcaaggtcctgaccaccatgtggat

SEQ ID NO: 3750957 - DNA, 25 bp, Homo sapien
ccatgtggattcctccacgtgtagg

SEQ ID NO: 3750958 - DNA, 25 bp, Homo sapien
gatgtggcattctccctgccgcatg

SEQ ID NO: 3750959 - DNA, 25 bp, Homo sapien
ggaagccgatgtggcattctccctg

SEQ ID NO: 3750960 - DNA, 25 bp, Homo sapien
gtggcattctccctgccgcatgtca

SEQ ID NO: 3750961 - DNA, 25 bp, Homo sapien
agccgatgtggcattctccctgccg

SEQ ID NO: 3750962 - DNA, 25 bp, Homo sapien
gccacctcacaatctgtgcaccccc

SEQ ID NO: 3750963 - DNA, 25 bp, Homo sapien
ggccacctcacaatctgtgcacccc

SEQ ID NO: 3750964 - DNA, 25 bp, Homo sapien
tttccgaaatagctggcatctgcag

SEQ ID NO: 3750965 - DNA, 25 bp, Homo sapien
atctgcagcactctgggccggagac

SEQ ID NO: 3750966 - DNA, 25 bp, Homo sapien
tgaagatggtgtaggcgcatccagt

SEQ ID NO: 3750967 - DNA, 25 bp, Homo sapien
gacaggaggtgccagtttaaaggat

SEQ ID NO: 3750968 - DNA, 25 bp, Homo sapien
gatgtcgttcttggggccacggtct

SEQ ID NO: 3750969 - DNA, 25 bp, Homo sapien
tcatccactaactcgcctttgccac

SEQ ID NO: 3750970 - DNA, 25 bp, Homo sapien
ggtctgttcttactgactgctgaac

SEQ ID NO: 3750971 - DNA, 25 bp, Homo sapien
catgtgggatttgaggatgtcgttc

SEQ ID NO: 3750972 - DNA, 25 bp, Homo sapien
gctgcagcatgtacctgctccgcat

SEQ ID NO: 3750973 - DNA, 25 bp, Homo sapien
tctgctgcagcatgtacctgctccg

SEQ ID NO: 3750974 - DNA, 25 bp, Homo sapien
tgctgcagcatgtacctgctccgca

SEQ ID NO: 3750975 - DNA, 25 bp, Homo sapien
ctctgctgcagcatgtacctgctcc

SEQ ID NO: 3750976 - DNA, 25 bp, Homo sapien
gtcacccacgtaggtcttggctggg

SEQ ID NO: 3750977 - DNA, 25 bp, Homo sapien
gggcctctgataatttcactagcct

SEQ ID NO: 3750978 - DNA, 25 bp, Homo sapien
tcagtaatgacatgggtgccgcttc

SEQ ID NO: 3750979 - DNA, 25 bp, Homo sapien
tcaagggtcgtcacccacgtaggtc

SEQ ID NO: 3750980 - DNA, 25 bp, Homo sapien
cttcaggaaaggcatcttcagccgc

SEQ ID NO: 3750981 - DNA, 25 bp, Homo sapien
tacactgagtttctagcgcgtatag

SEQ ID NO: 3750982 - DNA, 25 bp, Homo sapien
ccctgacaggtcgatgagtagcaca

SEQ ID NO: 3750983 - DNA, 25 bp, Homo sapien
tagcacagtgctccattggtgacca

SEQ ID NO: 3750984 - DNA, 25 bp, Homo sapien
cctgcccgttctcactgggcacgca

SEQ ID NO: 3750985 - DNA, 25 bp, Homo sapien
cccgttctcactgggcacgcaagcc

SEQ ID NO: 3750986 - DNA, 25 bp, Homo sapien
cgttctcactgggcacgcaagccat

SEQ ID NO: 3750987 - DNA, 25 bp, Homo sapien
tgcccgttctcactgggcacgcaag

SEQ ID NO: 3750988 - DNA, 25 bp, Homo sapien
ctaaaggtcaacgcggaagttgtag

SEQ ID NO: 3750989 - DNA, 25 bp, Homo sapien
tcaacgcggaagttgtagggaggtc

SEQ ID NO: 3750990 - DNA, 25 bp, Homo sapien
aggtcaacgcggaagttgtagggag

SEQ ID NO: 3750991 - DNA, 25 bp, Homo sapien
gtaagaacctttacaagaacaatca

SEQ ID NO: 3750992 - DNA, 25 bp, Homo sapien
acctttacaagaacaatcacatcca

SEQ ID NO: 3750993 - DNA, 25 bp, Homo sapien
gaacctttacaagaacaatcacatc

SEQ ID NO: 3750994 - DNA, 25 bp, Homo sapien
aagaacctttacaagaacaatcaca

SEQ ID NO: 3750995 - DNA, 25 bp, Homo sapien
aataacgacggcatccacgtgacgg

SEQ ID NO: 3750996 - DNA, 25 bp, Homo sapien
ctggaagacttcctgaaatgggagc

SEQ ID NO: 3750997 - DNA, 25 bp, Homo sapien
gaataatgtttttggtgtacgtgca

SEQ ID NO: 3750998 - DNA, 25 bp, Homo sapien
taaaactgccaaatctttgcctgga

SEQ ID NO: 3750999 - DNA, 25 bp, Homo sapien
tatgtaaagctcacgttgtggctgc

SEQ ID NO: 3751000 - DNA, 25 bp, Homo sapien
gcaggacggcgatatttaacatgca

SEQ ID NO: 3751001 - DNA, 25 bp, Homo sapien
tgctcattttcctcgggcaaggtgg

SEQ ID NO: 3751002 - DNA, 25 bp, Homo sapien
gctggcgggaacaaagtgcctccct

SEQ ID NO: 3751003 - DNA, 25 bp, Homo sapien
gacctgacatgtcagatgagaaggg

SEQ ID NO: 3751004 - DNA, 25 bp, Homo sapien
ttgattgtagacctgacatgtcaga

SEQ ID NO: 3751005 - DNA, 25 bp, Homo sapien
ttgtagacctgacatgtcagatgag

SEQ ID NO: 3751006 - DNA, 25 bp, Homo sapien
ctttgtttgattgtagacctgacat

SEQ ID NO: 3751007 - DNA, 25 bp, Homo sapien
tctgcaggtcggtgacaaatacacg

SEQ ID NO: 3751008 - DNA, 25 bp, Homo sapien
caggtcggtgacaaatacacgggta

SEQ ID NO: 3751009 - DNA, 25 bp, Homo sapien
cacgggtaatagcattcagcttgcc

SEQ ID NO: 3751010 - DNA, 25 bp, Homo sapien
cttgcctaactgtaaaagtgaattc

SEQ ID NO: 3751011 - DNA, 25 bp, Homo sapien
aggacgatgtggaaaatggagtctt

SEQ ID NO: 3751012 - DNA, 25 bp, Homo sapien
ttcctgtgccttctgcggcactgat

SEQ ID NO: 3751013 - DNA, 25 bp, Homo sapien
taggcattacgtgtgaggacgatgt

SEQ ID NO: 3751014 - DNA, 25 bp, Homo sapien
cactgattgccgtgaataggcatta

SEQ ID NO: 3751015 - DNA, 25 bp, Homo sapien
ccaggaccaggatcctgattcccat

SEQ ID NO: 3751016 - DNA, 25 bp, Homo sapien
ggccgaggacggctgggtcttgctg

SEQ ID NO: 3751017 - DNA, 25 bp, Homo sapien
tttagaggaaaggaagcagcggtac

SEQ ID NO: 3751018 - DNA, 25 bp, Homo sapien
tgctggggaaagagacccaggacca

SEQ ID NO: 3751019 - DNA, 25 bp, Homo sapien
gggactgacggcttcttgcagttgt

SEQ ID NO: 3751020 - DNA, 25 bp, Homo sapien
cttcttgcagttgtcctttcccaaa

SEQ ID NO: 3751021 - DNA, 25 bp, Homo sapien
gcctgtcctggcacctagggactga

SEQ ID NO: 3751022 - DNA, 25 bp, Homo sapien
cctagggactgacggcttcttgcag

SEQ ID NO: 3751023 - DNA, 25 bp, Homo sapien
caattcataacgatcttgctttccc

SEQ ID NO: 3751024 - DNA, 25 bp, Homo sapien
ggcgctgctttcacattcaattcat

SEQ ID NO: 3751025 - DNA, 25 bp, Homo sapien
cttgctttcccagctgtggtcggct

SEQ ID NO: 3751026 - DNA, 25 bp, Homo sapien
tcaccgatggcgctgctttcacatt

SEQ ID NO: 3751027 - DNA, 25 bp, Homo sapien
gcgacttctgaagcgttgaataatt

SEQ ID NO: 3751028 - DNA, 25 bp, Homo sapien
gaaggaaagattgcgacttctgaag

SEQ ID NO: 3751029 - DNA, 25 bp, Homo sapien
gaataattgtgccagaggccagcag

SEQ ID NO: 3751030 - DNA, 25 bp, Homo sapien
caggtactgcgtctcagaaggaaag

SEQ ID NO: 3751031 - DNA, 25 bp, Homo sapien
cttggtaaagcaaacatctctggtt

SEQ ID NO: 3751032 - DNA, 25 bp, Homo sapien
catatccatagacgtccaagaaaat

SEQ ID NO: 3751033 - DNA, 25 bp, Homo sapien
aaaatatattactcagcggctttga

SEQ ID NO: 3751034 - DNA, 25 bp, Homo sapien
tactcagcggctttgaatctgtatt

SEQ ID NO: 3751035 - DNA, 25 bp, Homo sapien
gggctttatacattgttctggccag

SEQ ID NO: 3751036 - DNA, 25 bp, Homo sapien
tctgtagatcttggaaagtaggaca

SEQ ID NO: 3751037 - DNA, 25 bp, Homo sapien
gagcatccgtcttccctcttctgag

SEQ ID NO: 3751038 - DNA, 25 bp, Homo sapien
gccaatttcccttaacgttctgcag

SEQ ID NO: 3751039 - DNA, 25 bp, Homo sapien
acgaagtcgtcttgggcttgttcca

SEQ ID NO: 3751040 - DNA, 25 bp, Homo sapien
tcatcacgaagtcgtcttgggcttg

SEQ ID NO: 3751041 - DNA, 25 bp, Homo sapien
ttatttcatcacgaagtcgtcttgg

SEQ ID NO: 3751042 - DNA, 25 bp, Homo sapien
tcacgaagtcgtcttgggcttgttc

SEQ ID NO: 3751043 - DNA, 25 bp, Homo sapien
tcaggataacttgcccatccttcat

SEQ ID NO: 3751044 - DNA, 25 bp, Homo sapien
tcacccccttcaggataacttgccc

SEQ ID NO: 3751045 - DNA, 25 bp, Homo sapien
ccccttcaggataacttgcccatcc

SEQ ID NO: 3751046 - DNA, 25 bp, Homo sapien
ccttcaggataacttgcccatcctt

SEQ ID NO: 3751047 - DNA, 25 bp, Homo sapien
ggtcacctcttgcactgactccact

SEQ ID NO: 3751048 - DNA, 25 bp, Homo sapien
gagttcttgagtgctccccttccca

SEQ ID NO: 3751049 - DNA, 25 bp, Homo sapien
tccactcccgccgagttcttgagtg

SEQ ID NO: 3751050 - DNA, 25 bp, Homo sapien
gatttttgggtgtctgcgtcactgc

SEQ ID NO: 3751051 - DNA, 25 bp, Homo sapien
agaggaggctcagcacactcagagc

SEQ ID NO: 3751052 - DNA, 25 bp, Homo sapien
agagaggaggctcagcacactcaga

SEQ ID NO: 3751053 - DNA, 25 bp, Homo sapien
agcagagaggaggctcagcacactc

SEQ ID NO: 3751054 - DNA, 25 bp, Homo sapien
aggaggctcagcacactcagagcag

SEQ ID NO: 3751055 - DNA, 25 bp, Homo sapien
gcgtggcttaatcactgggcagacg

SEQ ID NO: 3751056 - DNA, 25 bp, Homo sapien
tgggcagacgaggacgtcctcttcc

SEQ ID NO: 3751057 - DNA, 25 bp, Homo sapien
agacgaggacgtcctcttcctccag

SEQ ID NO: 3751058 - DNA, 25 bp, Homo sapien
ctataagcagcgtggcttaatcact

SEQ ID NO: 3751059 - DNA, 25 bp, Homo sapien
tctgtccctgggtctagcaccaagt

SEQ ID NO: 3751060 - DNA, 25 bp, Homo sapien
cgtccatggacatctctggagtcgt

SEQ ID NO: 3751061 - DNA, 25 bp, Homo sapien
tagcaccaagtcagcgtccatggac

SEQ ID NO: 3751062 - DNA, 25 bp, Homo sapien
ggccgatgcgttgcaaactccctgg

SEQ ID NO: 3751063 - DNA, 25 bp, Homo sapien
gtagtccacaatcactgtggaagca

SEQ ID NO: 3751064 - DNA, 25 bp, Homo sapien
cgttgttgggctgcaacaccctggg

SEQ ID NO: 3751065 - DNA, 25 bp, Homo sapien
gggcagtcaggacgtagtccacaat

SEQ ID NO: 3751066 - DNA, 25 bp, Homo sapien
cagcggcgttgttgggctgcaacac

SEQ ID NO: 3751067 - DNA, 25 bp, Homo sapien
catctcggcgggggtttccttgaag

SEQ ID NO: 3751068 - DNA, 25 bp, Homo sapien
ccagcatctcggcgggggtttcctt

SEQ ID NO: 3751069 - DNA, 25 bp, Homo sapien
agcatctcggcgggggtttccttga

SEQ ID NO: 3751070 - DNA, 25 bp, Homo sapien
tccagcatctcggcgggggtttcct

SEQ ID NO: 3751071 - DNA, 25 bp, Homo sapien
tgggatgcaggcatcgccgtgttga

SEQ ID NO: 3751072 - DNA, 25 bp, Homo sapien
tctttccatcgtcccacttgttctt

SEQ ID NO: 3751073 - DNA, 25 bp, Homo sapien
tttctttccatcgtcccacttgttc

SEQ ID NO: 3751074 - DNA, 25 bp, Homo sapien
ggatgcaggcatcgccgtgttgatt

SEQ ID NO: 3751075 - DNA, 25 bp, Homo sapien
ggtgaggcaggcctgctcaaggtct

SEQ ID NO: 3751076 - DNA, 25 bp, Homo sapien
gcctgctcaaggtctggagtgatgc

SEQ ID NO: 3751077 - DNA, 25 bp, Homo sapien
tacatgctgagggtaggggtgaggc

SEQ ID NO: 3751078 - DNA, 25 bp, Homo sapien
caggcctgctcaaggtctggagtga

SEQ ID NO: 3751079 - DNA, 25 bp, Homo sapien
tgaaggcttctctcgccaatcttgc

SEQ ID NO: 3751080 - DNA, 25 bp, Homo sapien
tccccttttggtccataatcacagc

SEQ ID NO: 3751081 - DNA, 25 bp, Homo sapien
taatcacagctaatgggctggccac

SEQ ID NO: 3751082 - DNA, 25 bp, Homo sapien
gcagtctcaggacgaggagccaggc

SEQ ID NO: 3751083 - DNA, 25 bp, Homo sapien
tccttgattttgtagtgagggaaaa

SEQ ID NO: 3751084 - DNA, 25 bp, Homo sapien
tttccttgattttgtagtgagggaa

SEQ ID NO: 3751085 - DNA, 25 bp, Homo sapien
ttccttgattttgtagtgagggaaa

SEQ ID NO: 3751086 - DNA, 25 bp, Homo sapien
cagcaccgtgggcatcgttgcaggg

SEQ ID NO: 3751087 - DNA, 25 bp, Homo sapien
cgtgggcatcgttgcagggaataaa

SEQ ID NO: 3751088 - DNA, 25 bp, Homo sapien
tttgctgtaatgtgccagcaccgtg

SEQ ID NO: 3751089 - DNA, 25 bp, Homo sapien
ctttgctgtaatgtgccagcaccgt

SEQ ID NO: 3751090 - DNA, 25 bp, Homo sapien
ctgcaagctctactgtctctttgtg

SEQ ID NO: 3751091 - DNA, 25 bp, Homo sapien
gtgtacagcaaatctcccattggtc

SEQ ID NO: 3751092 - DNA, 25 bp, Homo sapien
ctctttgtgtacagcaaatctccca

SEQ ID NO: 3751093 - DNA, 25 bp, Homo sapien
tttgtgtacagcaaatctcccattg

SEQ ID NO: 3751094 - DNA, 25 bp, Homo sapien
cagccaggatatctgctggggttgg

SEQ ID NO: 3751095 - DNA, 25 bp, Homo sapien
ggttggaggggtgatgcaaggaaag

SEQ ID NO: 3751096 - DNA, 25 bp, Homo sapien
ccaggatatctgctggggttggagg

SEQ ID NO: 3751097 - DNA, 25 bp, Homo sapien
tcagccaggatatctgctggggttg

SEQ ID NO: 3751098 - DNA, 25 bp, Homo sapien
cgtcgggacgcaaagcgttctaggg

SEQ ID NO: 3751099 - DNA, 25 bp, Homo sapien
ggacctgcgggcgtcgggacgcaaa

SEQ ID NO: 3751100 - DNA, 25 bp, Homo sapien
aagtcgcaaacggtgcgcaccgcga

SEQ ID NO: 3751101 - DNA, 25 bp, Homo sapien
aaacggtgcgcaccgcgaggacctg

SEQ ID NO: 3751102 - DNA, 25 bp, Homo sapien
cagggccaggacagcaccaggcctt

SEQ ID NO: 3751103 - DNA, 25 bp, Homo sapien
agggccaggacagcaccaggccttt

SEQ ID NO: 3751104 - DNA, 25 bp, Homo sapien
ggccaggacagcaccaggcctttcc

SEQ ID NO: 3751105 - DNA, 25 bp, Homo sapien
ccaggacagcaccaggcctttccat

SEQ ID NO: 3751106 - DNA, 25 bp, Homo sapien
tgagagatgtagctggtgtccaacc

SEQ ID NO: 3751107 - DNA, 25 bp, Homo sapien
accagacgaccacatgctgtccttt

SEQ ID NO: 3751108 - DNA, 25 bp, Homo sapien
ctgtcctttgaaccaggctggatta

SEQ ID NO: 3751109 - DNA, 25 bp, Homo sapien
caaagagtatggttctgagagatgt

SEQ ID NO: 3751110 - DNA, 25 bp, Homo sapien
ccctgtgaacttgatatattttgca

SEQ ID NO: 3751111 - DNA, 25 bp, Homo sapien
ccagccagaagtaggggcatagcca

SEQ ID NO: 3751112 - DNA, 25 bp, Homo sapien
gcaacaatcataaaatccctgtgaa

SEQ ID NO: 3751113 - DNA, 25 bp, Homo sapien
tttgcaacaatcataaaatccctgt

SEQ ID NO: 3751114 - DNA, 25 bp, Homo sapien
caaggcccaacgcatacttgtaaaa

SEQ ID NO: 3751115 - DNA, 25 bp, Homo sapien
gacgttctcataaggatccactcga

SEQ ID NO: 3751116 - DNA, 25 bp, Homo sapien
ttttcaatataacatccccaaggcc

SEQ ID NO: 3751117 - DNA, 25 bp, Homo sapien
aacgagcagaatactttggcacagc

SEQ ID NO: 3751118 - DNA, 25 bp, Homo sapien
cgcaagggccaagatattgacacca

SEQ ID NO: 3751119 - DNA, 25 bp, Homo sapien
gggaaaaccgtggatgcctccgcaa

SEQ ID NO: 3751120 - DNA, 25 bp, Homo sapien
tggatgcctccgcaagggccaagat

SEQ ID NO: 3751121 - DNA, 25 bp, Homo sapien
ctccgcaagggccaagatattgaca

SEQ ID NO: 3751122 - DNA, 25 bp, Homo sapien
tcatcaattttaagagttagcctaa

SEQ ID NO: 3751123 - DNA, 25 bp, Homo sapien
gcctggctgactcatcaattttaag

SEQ ID NO: 3751124 - DNA, 25 bp, Homo sapien
tgtgcctggctgactcatcaatttt

SEQ ID NO: 3751125 - DNA, 25 bp, Homo sapien
catcaattttaagagttagcctaaa

SEQ ID NO: 3751126 - DNA, 25 bp, Homo sapien
agctgtggaagcaaccaggactagg

SEQ ID NO: 3751127 - DNA, 25 bp, Homo sapien
ggactgggactgtacagtggagact

SEQ ID NO: 3751128 - DNA, 25 bp, Homo sapien
atggggagcaccgtggcagtccaca

SEQ ID NO: 3751129 - DNA, 25 bp, Homo sapien
gccctttgctgcccagaaacacttg

SEQ ID NO: 3751130 - DNA, 25 bp, Homo sapien
gatgtcatgtgaactacgtgaagat

SEQ ID NO: 3751131 - DNA, 25 bp, Homo sapien
gaagttctgatgtcatgtgaactac

SEQ ID NO: 3751132 - DNA, 25 bp, Homo sapien
gttctgatgtcatgtgaactacgtg

SEQ ID NO: 3751133 - DNA, 25 bp, Homo sapien
tctgatgtcatgtgaactacgtgaa

SEQ ID NO: 3751134 - DNA, 25 bp, Homo sapien
caaattaaagtagtgttggacaaga

SEQ ID NO: 3751135 - DNA, 25 bp, Homo sapien
tcgtggtgaccatggcagtcatacc

SEQ ID NO: 3751136 - DNA, 25 bp, Homo sapien
caggtgcttcgatggaagaaaaccc

SEQ ID NO: 3751137 - DNA, 25 bp, Homo sapien
gaaacatgtttagagtcctcggaat

SEQ ID NO: 3751138 - DNA, 25 bp, Homo sapien
tactagtcaggatggctgggacgct

SEQ ID NO: 3751139 - DNA, 25 bp, Homo sapien
ggacatagacacactccacgctgta

SEQ ID NO: 3751140 - DNA, 25 bp, Homo sapien
cagacagggaggttacggaactagc

SEQ ID NO: 3751141 - DNA, 25 bp, Homo sapien
cttacagcaaacctaaggaagatca

SEQ ID NO: 3751142 - DNA, 25 bp, Homo sapien
gcttcccacagctcagctcataaat

SEQ ID NO: 3751143 - DNA, 25 bp, Homo sapien
cacagctcagctcataaatccccat

SEQ ID NO: 3751144 - DNA, 25 bp, Homo sapien
agaggctctgcaagcctgcttccca

SEQ ID NO: 3751145 - DNA, 25 bp, Homo sapien
cagaggctctgcaagcctgcttccc

SEQ ID NO: 3751146 - DNA, 25 bp, Homo sapien
ctgcatgaagcacgtgcctgcgtct

SEQ ID NO: 3751147 - DNA, 25 bp, Homo sapien
tgcatgaagcacgtgcctgcgtcta

SEQ ID NO: 3751148 - DNA, 25 bp, Homo sapien
catgtggctgcatccgatatatggg

SEQ ID NO: 3751149 - DNA, 25 bp, Homo sapien
ttacaagaagcacgtggctgcgtct

SEQ ID NO: 3751150 - DNA, 25 bp, Homo sapien
cggtatacagggttctcatcacgga

SEQ ID NO: 3751151 - DNA, 25 bp, Homo sapien
tcccattacaggaagcacatgtctg

SEQ ID NO: 3751152 - DNA, 25 bp, Homo sapien
ggacttactgcacactgactgtaac

SEQ ID NO: 3751153 - DNA, 25 bp, Homo sapien
gaagaaaagacgctccaacatcctc

SEQ ID NO: 3751154 - DNA, 25 bp, Homo sapien
ggaagcctctgtccgcaatgaagaa

SEQ ID NO: 3751155 - DNA, 25 bp, Homo sapien
cacaggacttactgcacactgactg

SEQ ID NO: 3751156 - DNA, 25 bp, Homo sapien
gaaaatctgcatgggcccagcttct

SEQ ID NO: 3751157 - DNA, 25 bp, Homo sapien
cttccggaaaatctgcatgggccca

SEQ ID NO: 3751158 - DNA, 25 bp, Homo sapien
gggcccagcttctgtcagtcctgat

SEQ ID NO: 3751159 - DNA, 25 bp, Homo sapien
ctgacacagcttccggaaaatctgc

SEQ ID NO: 3751160 - DNA, 25 bp, Homo sapien
tggacagtcagcacacgtctctcaa

SEQ ID NO: 3751161 - DNA, 25 bp, Homo sapien
ggacagtcagcacacgtctctcaat

SEQ ID NO: 3751162 - DNA, 25 bp, Homo sapien
tcctctcagacgagacaccaggctg

SEQ ID NO: 3751163 - DNA, 25 bp, Homo sapien
ctgcacacgtgtcctctcagacgag

SEQ ID NO: 3751164 - DNA, 25 bp, Homo sapien
tgggaatatgctttcccgtggggtc

SEQ ID NO: 3751165 - DNA, 25 bp, Homo sapien
ctgcggcgtcgcagttacatttggg

SEQ ID NO: 3751166 - DNA, 25 bp, Homo sapien
cccgtggggtcacagtgagggtttg

SEQ ID NO: 3751167 - DNA, 25 bp, Homo sapien
cctgagcaaacagggccccagactt

SEQ ID NO: 3751168 - DNA, 25 bp, Homo sapien
taatccgatgctctagtccacaagg

SEQ ID NO: 3751169 - DNA, 25 bp, Homo sapien
gtgcgccccgcttccaaatgattaa

SEQ ID NO: 3751170 - DNA, 25 bp, Homo sapien
tcatggtgtagagaggccggctatc

SEQ ID NO: 3751171 - DNA, 25 bp, Homo sapien
tgttcccaacatgctccggtggctg

SEQ ID NO: 3751172 - DNA, 25 bp, Homo sapien
gcaccacaggggctctgtactcgca

SEQ ID NO: 3751173 - DNA, 25 bp, Homo sapien
gctctgtactcgcaccataggggct

SEQ ID NO: 3751174 - DNA, 25 bp, Homo sapien
cacaggggctctgtactcgcaccat

SEQ ID NO: 3751175 - DNA, 25 bp, Homo sapien
caggggctctgtactcgcaccatag

SEQ ID NO: 3751176 - DNA, 25 bp, Homo sapien
ggctctgcaccgcaccatagaggct

SEQ ID NO: 3751177 - DNA, 25 bp, Homo sapien
tacatgcactgtagaggctctgcac

SEQ ID NO: 3751178 - DNA, 25 bp, Homo sapien
acatacactgtagggattctgcacc

SEQ ID NO: 3751179 - DNA, 25 bp, Homo sapien
gggctctgtacatgcactgtagagg

SEQ ID NO: 3751180 - DNA, 25 bp, Homo sapien
taggggttctgtacccgcaccatag

SEQ ID NO: 3751181 - DNA, 25 bp, Homo sapien
cgtaggggttctgtacccgcaccat

SEQ ID NO: 3751182 - DNA, 25 bp, Homo sapien
cgcaccatagggggtctgcaccctc

SEQ ID NO: 3751183 - DNA, 25 bp, Homo sapien
acccgcaccatagggggtctgcacc

SEQ ID NO: 3751184 - DNA, 25 bp, Homo sapien
gcaccggcacgcttccttctgcacc

SEQ ID NO: 3751185 - DNA, 25 bp, Homo sapien
tgcgtgccctgcaccggcacgcttc

SEQ ID NO: 3751186 - DNA, 25 bp, Homo sapien
ctgcaccggcacgcttccttctgca

SEQ ID NO: 3751187 - DNA, 25 bp, Homo sapien
tctcccatcggccctgcgtgccctg

SEQ ID NO: 3751188 - DNA, 25 bp, Homo sapien
ccaggcctgctgcactaaaaactgt

SEQ ID NO: 3751189 - DNA, 25 bp, Homo sapien
ctggtagtcgttttccaggcctgct

SEQ ID NO: 3751190 - DNA, 25 bp, Homo sapien
ctactggtagtcgttttccaggcct

SEQ ID NO: 3751191 - DNA, 25 bp, Homo sapien
caggcctgctgcactaaaaactgtc

SEQ ID NO: 3751192 - DNA, 25 bp, Homo sapien
ggagctttatttcgtgcagaccctg

SEQ ID NO: 3751193 - DNA, 25 bp, Homo sapien
gtggtgcgtttcatttcacaatcct

SEQ ID NO: 3751194 - DNA, 25 bp, Homo sapien
ttccccaaagggctgtccagtgtgg

SEQ ID NO: 3751195 - DNA, 25 bp, Homo sapien
cttgcccaggagctttatttcgtgc

SEQ ID NO: 3751196 - DNA, 25 bp, Homo sapien
gcagcacactgttttgagagacgga

SEQ ID NO: 3751197 - DNA, 25 bp, Homo sapien
tatgcgttaccctgccatcaatgga

SEQ ID NO: 3751198 - DNA, 25 bp, Homo sapien
tatactcctcggttgcttcagcatg

SEQ ID NO: 3751199 - DNA, 25 bp, Homo sapien
tcagcatgtgcggtatacaggatca

SEQ ID NO: 3751200 - DNA, 25 bp, Homo sapien
gaaacatgtacgctcttagaaatga

SEQ ID NO: 3751201 - DNA, 25 bp, Homo sapien
gctctcaaaaggcaactgggactcc

SEQ ID NO: 3751202 - DNA, 25 bp, Homo sapien
tgggagctgttcacaaaaagagaaa

SEQ ID NO: 3751203 - DNA, 25 bp, Homo sapien
gactcctggttaagggattccagaa

SEQ ID NO: 3751204 - DNA, 25 bp, Homo sapien
gcccaggagctgtcttgaagcacca

SEQ ID NO: 3751205 - DNA, 25 bp, Homo sapien
agctgtcttgaagcaccagggcagg

SEQ ID NO: 3751206 - DNA, 25 bp, Homo sapien
gagctgtcttgaagcaccagggcag

SEQ ID NO: 3751207 - DNA, 25 bp, Homo sapien
caggagctgtcttgaagcaccaggg

SEQ ID NO: 3751208 - DNA, 25 bp, Homo sapien
ctgcagctgcccttcgggaagctca

SEQ ID NO: 3751209 - DNA, 25 bp, Homo sapien
ggcacgtttcgagggcagaaactca

SEQ ID NO: 3751210 - DNA, 25 bp, Homo sapien
aaggcatcttcacgctttccatggg

SEQ ID NO: 3751211 - DNA, 25 bp, Homo sapien
gggcatccaatgacatcagacaact

SEQ ID NO: 3751212 - DNA, 25 bp, Homo sapien
tggcccgtggaccttgaggaaccat

SEQ ID NO: 3751213 - DNA, 25 bp, Homo sapien
gaggaaccatccgactggcactggt

SEQ ID NO: 3751214 - DNA, 25 bp, Homo sapien
caattatagtaacgtgaatgcggca

SEQ ID NO: 3751215 - DNA, 25 bp, Homo sapien
tcctccttgaaagatcaattatagt

SEQ ID NO: 3751216 - DNA, 25 bp, Homo sapien
tctcaaagcagaccaggtaccaagg

SEQ ID NO: 3751217 - DNA, 25 bp, Homo sapien
agggcctgaagaagatctgacgtca

SEQ ID NO: 3751218 - DNA, 25 bp, Homo sapien
ggaattcttacgttcagggcctgaa

SEQ ID NO: 3751219 - DNA, 25 bp, Homo sapien
gcatttagctggcatcccgaagtca

SEQ ID NO: 3751220 - DNA, 25 bp, Homo sapien
cacaggtctgcacagagtcatcctc

SEQ ID NO: 3751221 - DNA, 25 bp, Homo sapien
acaggtctgcacagagtcatcctcc

SEQ ID NO: 3751222 - DNA, 25 bp, Homo sapien
ggcacacaggtctgcacagagtcat

SEQ ID NO: 3751223 - DNA, 25 bp, Homo sapien
cacacaggtctgcacagagtcatcc

SEQ ID NO: 3751224 - DNA, 25 bp, Homo sapien
tcaacaaaaatggaccacgtgtccc

SEQ ID NO: 3751225 - DNA, 25 bp, Homo sapien
tcattcctttgttgaacgtactcaa

SEQ ID NO: 3751226 - DNA, 25 bp, Homo sapien
acaggttcacatgcgctggtgaaca

SEQ ID NO: 3751227 - DNA, 25 bp, Homo sapien
ggcccacaggttcacatgcgctggt

SEQ ID NO: 3751228 - DNA, 25 bp, Homo sapien
agccagcgctcagttctccgaatgc

SEQ ID NO: 3751229 - DNA, 25 bp, Homo sapien
tgccccgttttgaggaggtccagcc

SEQ ID NO: 3751230 - DNA, 25 bp, Homo sapien
cacagctgatgatggtttctgaaga

SEQ ID NO: 3751231 - DNA, 25 bp, Homo sapien
agaggcagaagagcccctcgacagc

SEQ ID NO: 3751232 - DNA, 25 bp, Homo sapien
tcttctacagcaggacgttcccgct

SEQ ID NO: 3751233 - DNA, 25 bp, Homo sapien
tatgaacactgtctgggatggcggc

SEQ ID NO: 3751234 - DNA, 25 bp, Homo sapien
caagacggtaaagctgaactgcaca

SEQ ID NO: 3751235 - DNA, 25 bp, Homo sapien
tgcccgtcctgactttgccgtcggt

SEQ ID NO: 3751236 - DNA, 25 bp, Homo sapien
gctgcatgcggatactcagtggaaa

SEQ ID NO: 3751237 - DNA, 25 bp, Homo sapien
catgcggatactcagtggaaagttc

SEQ ID NO: 3751238 - DNA, 25 bp, Homo sapien
ggcacgctgcatgcggatactcagt

SEQ ID NO: 3751239 - DNA, 25 bp, Homo sapien
cgccgggcacgctgcatgcggatac

SEQ ID NO: 3751240 - DNA, 25 bp, Homo sapien
gatttgtatatcatcatttttgtga

SEQ ID NO: 3751241 - DNA, 25 bp, Homo sapien
tgtttactcgaagatatcacttgcc

SEQ ID NO: 3751242 - DNA, 25 bp, Homo sapien
tgcctcaagccaattttgaccaaga

SEQ ID NO: 3751243 - DNA, 25 bp, Homo sapien
tatggaagtgatttgtatatcatca

SEQ ID NO: 3751244 - DNA, 25 bp, Homo sapien
ttgaatttttcataccagaacaaaa

SEQ ID NO: 3751245 - DNA, 25 bp, Homo sapien
gacaaattgatcgaaacattggaaa

SEQ ID NO: 3751246 - DNA, 25 bp, Homo sapien
ttttcataccagaacaaaatgaaag

SEQ ID NO: 3751247 - DNA, 25 bp, Homo sapien
aaatgaaagattgcctccttgattt

SEQ ID NO: 3751248 - DNA, 25 bp, Homo sapien
caaaaccatgatcaatattctcatg

SEQ ID NO: 3751249 - DNA, 25 bp, Homo sapien
tgttggcaatctgtcttttagggaa

SEQ ID NO: 3751250 - DNA, 25 bp, Homo sapien
tcaagtgattcagtgcaagcatctc

SEQ ID NO: 3751251 - DNA, 25 bp, Homo sapien
gccgatatttaggtatatcaagtga

SEQ ID NO: 3751252 - DNA, 25 bp, Homo sapien
gacatgccaagtcttcggtgcacgg

SEQ ID NO: 3751253 - DNA, 25 bp, Homo sapien
ccacacatagactgtatggcccatc

SEQ ID NO: 3751254 - DNA, 25 bp, Homo sapien
tgatgacctggtgctccacgtcctg

SEQ ID NO: 3751255 - DNA, 25 bp, Homo sapien
tgttgaatggaatactcttccctca

SEQ ID NO: 3751256 - DNA, 25 bp, Homo sapien
ctcattagactgtgaatggcaaatg

SEQ ID NO: 3751257 - DNA, 25 bp, Homo sapien
gcaggttctctgacctcgcagcatc

SEQ ID NO: 3751258 - DNA, 25 bp, Homo sapien
ggaagcagagtgcaggttctctgac

SEQ ID NO: 3751259 - DNA, 25 bp, Homo sapien
gcagagtgcaggttctctgacctcg

SEQ ID NO: 3751260 - DNA, 25 bp, Homo sapien
gagtgcaggttctctgacctcgcag

SEQ ID NO: 3751261 - DNA, 25 bp, Homo sapien
ctacactgatgagagacacctgagc

SEQ ID NO: 3751262 - DNA, 25 bp, Homo sapien
ctgagccctgagaagaaacggcttg

SEQ ID NO: 3751263 - DNA, 25 bp, Homo sapien
gccctgagaagaaacggcttggggc

SEQ ID NO: 3751264 - DNA, 25 bp, Homo sapien
cctgagaagaaacggcttggggctt

SEQ ID NO: 3751265 - DNA, 25 bp, Homo sapien
gacttggaggcctgggaatcccaac

SEQ ID NO: 3751266 - DNA, 25 bp, Homo sapien
gcgcaggagctgaaatctcctgtcc

SEQ ID NO: 3751267 - DNA, 25 bp, Homo sapien
cagggcataggatgcccgaagaccc

SEQ ID NO: 3751268 - DNA, 25 bp, Homo sapien
ctcctgtccggataacatcgaggga

SEQ ID NO: 3751269 - DNA, 25 bp, Homo sapien
ggaggcttccgagccttctcaaata

SEQ ID NO: 3751270 - DNA, 25 bp, Homo sapien
taaggggaggcttccgagccttctc

SEQ ID NO: 3751271 - DNA, 25 bp, Homo sapien
tctaaggggaggcttccgagccttc

SEQ ID NO: 3751272 - DNA, 25 bp, Homo sapien
ggggaggcttccgagccttctcaaa

SEQ ID NO: 3751273 - DNA, 25 bp, Homo sapien
ctccaaggattctgctgtctccagc

SEQ ID NO: 3751274 - DNA, 25 bp, Homo sapien
cagccccactgtttctttgggggtg

SEQ ID NO: 3751275 - DNA, 25 bp, Homo sapien
gagaaccctccaaggattctgctgt

SEQ ID NO: 3751276 - DNA, 25 bp, Homo sapien
gttcgtattgtctttcacgcgctgg

SEQ ID NO: 3751277 - DNA, 25 bp, Homo sapien
tggtggtagaggtgcaccttctctg

SEQ ID NO: 3751278 - DNA, 25 bp, Homo sapien
gatgtgtgtaactcgcaggggaata

SEQ ID NO: 3751279 - DNA, 25 bp, Homo sapien
gggaatattacatgtcagcgtcacc

SEQ ID NO: 3751280 - DNA, 25 bp, Homo sapien
gaatccttgtcaactgaggatggag

SEQ ID NO: 3751281 - DNA, 25 bp, Homo sapien
caatttcacgcgaggttgagatcca

SEQ ID NO: 3751282 - DNA, 25 bp, Homo sapien
gatgtactagataccctgggacgtg

SEQ ID NO: 3751283 - DNA, 25 bp, Homo sapien
tgcaggcttagagctcagatgtact

SEQ ID NO: 3751284 - DNA, 25 bp, Homo sapien
caaggtatcagtttgttgcgcagaa

SEQ ID NO: 3751285 - DNA, 25 bp, Homo sapien
taactgtaatgtctgagaagtcccc

SEQ ID NO: 3751286 - DNA, 25 bp, Homo sapien
gatgccgagttttccagtcgtagct

SEQ ID NO: 3751287 - DNA, 25 bp, Homo sapien
ggaactcagcatgttttgctcaatt

SEQ ID NO: 3751288 - DNA, 25 bp, Homo sapien
caaaggttctcaactgatgccgagt

SEQ ID NO: 3751289 - DNA, 25 bp, Homo sapien
taaaatgttatccgacaatccatct

SEQ ID NO: 3751290 - DNA, 25 bp, Homo sapien
aatgttatccgacaatccatcttcc

SEQ ID NO: 3751291 - DNA, 25 bp, Homo sapien
gttaaaatgttatccgacaatccat

SEQ ID NO: 3751292 - DNA, 25 bp, Homo sapien
agttaaaatgttatccgacaatcca

SEQ ID NO: 3751293 - DNA, 25 bp, Homo sapien
catttccactcaagccaactagatt

SEQ ID NO: 3751294 - DNA, 25 bp, Homo sapien
caactagattgcctgtcacatctga

SEQ ID NO: 3751295 - DNA, 25 bp, Homo sapien
tgaagtctggtgtcaatttaaatgc

SEQ ID NO: 3751296 - DNA, 25 bp, Homo sapien
caaccaaggcttcaaacttgtacag

SEQ ID NO: 3751297 - DNA, 25 bp, Homo sapien
aaatctgttgctttacgtaaggcgc

SEQ ID NO: 3751298 - DNA, 25 bp, Homo sapien
ttcaccacggtgttatcagaggcag

SEQ ID NO: 3751299 - DNA, 25 bp, Homo sapien
cctgggcatgcagaacagccaaggg

SEQ ID NO: 3751300 - DNA, 25 bp, Homo sapien
tagctggaaccggagcctgtcgtct

SEQ ID NO: 3751301 - DNA, 25 bp, Homo sapien
cacggcgtgagatgggaagacattt

SEQ ID NO: 3751302 - DNA, 25 bp, Homo sapien
aaattgcccttcagaggaatctcta

SEQ ID NO: 3751303 - DNA, 25 bp, Homo sapien
ttgatgttgctcaaatccaactttt

SEQ ID NO: 3751304 - DNA, 25 bp, Homo sapien
cagaggaatctctaggcagacaagc

SEQ ID NO: 3751305 - DNA, 25 bp, Homo sapien
ggctggcctcagtacactgctctgg

SEQ ID NO: 3751306 - DNA, 25 bp, Homo sapien
tcagagtactgatgggcaccgccat

SEQ ID NO: 3751307 - DNA, 25 bp, Homo sapien
tggtaaccgctgctcttgcagggct

SEQ ID NO: 3751308 - DNA, 25 bp, Homo sapien
tgagatctgcaacaggtcaccctca

SEQ ID NO: 3751309 - DNA, 25 bp, Homo sapien
ctagatagacgtcagttatttttct

SEQ ID NO: 3751310 - DNA, 25 bp, Homo sapien
ctggagggaatgtaagatgggagac

SEQ ID NO: 3751311 - DNA, 25 bp, Homo sapien
ggagggaatgtaagatgggagacat

SEQ ID NO: 3751312 - DNA, 25 bp, Homo sapien
tggagggaatgtaagatgggagaca

SEQ ID NO: 3751313 - DNA, 25 bp, Homo sapien
gaagcgcacgagacaaaaacatgac

SEQ ID NO: 3751314 - DNA, 25 bp, Homo sapien
agggtactcctcagttggccacagc

SEQ ID NO: 3751315 - DNA, 25 bp, Homo sapien
catgggggacgcttaacctcagggt

SEQ ID NO: 3751316 - DNA, 25 bp, Homo sapien
gggaagcgcacgagacaaaaacatg

SEQ ID NO: 3751317 - DNA, 25 bp, Homo sapien
gagggtccctgctcgcttagcatgt

SEQ ID NO: 3751318 - DNA, 25 bp, Homo sapien
tcactggcacgaacagtcacaggct

SEQ ID NO: 3751319 - DNA, 25 bp, Homo sapien
gcatgtgtgggtccttgtcccgccc

SEQ ID NO: 3751320 - DNA, 25 bp, Homo sapien
ctgggtgaacggaagaaatcagtgc

SEQ ID NO: 3751321 - DNA, 25 bp, Homo sapien
gcgggaagatacagcgacacagaat

SEQ ID NO: 3751322 - DNA, 25 bp, Homo sapien
gacacagaatgtacatcaatcacaa

SEQ ID NO: 3751323 - DNA, 25 bp, Homo sapien
gccatccactcgacatagttaaggg

SEQ ID NO: 3751324 - DNA, 25 bp, Homo sapien
taagggggcagaaagcttgttccca

SEQ ID NO: 3751325 - DNA, 25 bp, Homo sapien
ggcatctggaggtaggaccttcact

SEQ ID NO: 3751326 - DNA, 25 bp, Homo sapien
cggcaccttcggaggcatctggagg

SEQ ID NO: 3751327 - DNA, 25 bp, Homo sapien
gaggtaggaccttcactccaccagg

SEQ ID NO: 3751328 - DNA, 25 bp, Homo sapien
caccttcggaggcatctggaggtag

SEQ ID NO: 3751329 - DNA, 25 bp, Homo sapien
caaggaaagacgtgctcctcgagca

SEQ ID NO: 3751330 - DNA, 25 bp, Homo sapien
tcacatcttcacagtgtgtgaccga

SEQ ID NO: 3751331 - DNA, 25 bp, Homo sapien
cagtgtgtgaccgagaagggtaaat

SEQ ID NO: 3751332 - DNA, 25 bp, Homo sapien
aaagtacttggagacggccacacca

SEQ ID NO: 3751333 - DNA, 25 bp, Homo sapien
tcaccccgtgggtgcgccctgcatg

SEQ ID NO: 3751334 - DNA, 25 bp, Homo sapien
ggcaccagctgactctccggcagct

SEQ ID NO: 3751335 - DNA, 25 bp, Homo sapien
ctgacgtgcggaggacagggtcctc

SEQ ID NO: 3751336 - DNA, 25 bp, Homo sapien
catggcagggaatccaacaggcact

SEQ ID NO: 3751337 - DNA, 25 bp, Homo sapien
tgggtgcacaaacgtccttaaacca

SEQ ID NO: 3751338 - DNA, 25 bp, Homo sapien
ccaggagcacctcggtagtgtgctg

SEQ ID NO: 3751339 - DNA, 25 bp, Homo sapien
gatgagggtgcagcggtcaccctct

SEQ ID NO: 3751340 - DNA, 25 bp, Homo sapien
tcggtagtgtgctgacaccagggat

SEQ ID NO: 3751341 - DNA, 25 bp, Homo sapien
gagttactgtggactcggcattcac

SEQ ID NO: 3751342 - DNA, 25 bp, Homo sapien
cccgagaggagcgtttctggacaat

SEQ ID NO: 3751343 - DNA, 25 bp, Homo sapien
tgcatggagccaccgaggcgttctt

SEQ ID NO: 3751344 - DNA, 25 bp, Homo sapien
gacaatgatgaaggacgatgccagg

SEQ ID NO: 3751345 - DNA, 25 bp, Homo sapien
ccgggggagcacctttgctcggaag

SEQ ID NO: 3751346 - DNA, 25 bp, Homo sapien
ggggagcacctttgctcggaagccc

SEQ ID NO: 3751347 - DNA, 25 bp, Homo sapien
cactgaaatgccggccctgtggtcc

SEQ ID NO: 3751348 - DNA, 25 bp, Homo sapien
ctgtggtccgccccatccttgccgg

SEQ ID NO: 3751349 - DNA, 25 bp, Homo sapien
gaaatatcgacacagtcattagact

SEQ ID NO: 3751350 - DNA, 25 bp, Homo sapien
agttcccagaaatatcgacacagtc

SEQ ID NO: 3751351 - DNA, 25 bp, Homo sapien
cgagtccaacaacgcaaggccacat

SEQ ID NO: 3751352 - DNA, 25 bp, Homo sapien
cagtcattagactgcaccacacggc

SEQ ID NO: 3751353 - DNA, 25 bp, Homo sapien
ggctccggacctccgagaaccgcag

SEQ ID NO: 3751354 - DNA, 25 bp, Homo sapien
tgaagagccggcacggggaactctt

SEQ ID NO: 3751355 - DNA, 25 bp, Homo sapien
ttgctggaaaacgggatggtgaaga

SEQ ID NO: 3751356 - DNA, 25 bp, Homo sapien
gaactcttcgatagcctcgggctgg

SEQ ID NO: 3751357 - DNA, 25 bp, Homo sapien
aggaggctttggtagtgcctttgtc

SEQ ID NO: 3751358 - DNA, 25 bp, Homo sapien
ccaggaggctttggtagtgcctttg

SEQ ID NO: 3751359 - DNA, 25 bp, Homo sapien
caggaggctttggtagtgcctttgt

SEQ ID NO: 3751360 - DNA, 25 bp, Homo sapien
cccaggaggctttggtagtgccttt

SEQ ID NO: 3751361 - DNA, 25 bp, Homo sapien
ctggcggctactctgaggtcttcct

SEQ ID NO: 3751362 - DNA, 25 bp, Homo sapien
ggtcttcctggtcaccaagacctat

SEQ ID NO: 3751363 - DNA, 25 bp, Homo sapien
gtatcctggcggctactctgaggtc

SEQ ID NO: 3751364 - DNA, 25 bp, Homo sapien
agacctatcatgacctgccagccca

SEQ ID NO: 3751365 - DNA, 25 bp, Homo sapien
ggattgcaggcaaaaaccgtatgtg

SEQ ID NO: 3751366 - DNA, 25 bp, Homo sapien
gaatcttatattccgagtcagcctg

SEQ ID NO: 3751367 - DNA, 25 bp, Homo sapien
gagaaggcctgatccgaactaaacg

SEQ ID NO: 3751368 - DNA, 25 bp, Homo sapien
ggaattaaaacgtgctacagagctg

SEQ ID NO: 3751369 - DNA, 25 bp, Homo sapien
tgtgcggcacggagggaccacagcc

SEQ ID NO: 3751370 - DNA, 25 bp, Homo sapien
gcggcacggagggaccacagccggc

SEQ ID NO: 3751371 - DNA, 25 bp, Homo sapien
agagaagagtcagggtccccggcca

SEQ ID NO: 3751372 - DNA, 25 bp, Homo sapien
ctcagagaagagtcagggtccccgg

SEQ ID NO: 3751373 - DNA, 25 bp, Homo sapien
tttgccttgtagctctggtcgtgta

SEQ ID NO: 3751374 - DNA, 25 bp, Homo sapien
cttctagggcattagaagtcctggc

SEQ ID NO: 3751375 - DNA, 25 bp, Homo sapien
gctctggtcgtgtaaatcatattca

SEQ ID NO: 3751376 - DNA, 25 bp, Homo sapien
atgccaggtcgaagcctaaagctcc

SEQ ID NO: 3751377 - DNA, 25 bp, Homo sapien
gaagagtaaggcaacagtgtccaaa

SEQ ID NO: 3751378 - DNA, 25 bp, Homo sapien
gtccaaaggtctggcccagaggctt

SEQ ID NO: 3751379 - DNA, 25 bp, Homo sapien
agaagagtaaggcaacagtgtccaa

SEQ ID NO: 3751380 - DNA, 25 bp, Homo sapien
aacagtgtccaaaggtctggcccag

SEQ ID NO: 3751381 - DNA, 25 bp, Homo sapien
tgcatctcctacagcatttgtacac

SEQ ID NO: 3751382 - DNA, 25 bp, Homo sapien
gggatgctgcgagtcacctttgcat

SEQ ID NO: 3751383 - DNA, 25 bp, Homo sapien
tcatatacctttctggcagcaccaa

SEQ ID NO: 3751384 - DNA, 25 bp, Homo sapien
cggggctcctcatatacctttctgg

SEQ ID NO: 3751385 - DNA, 25 bp, Homo sapien
gtatgggttcatcgctcacgtccat

SEQ ID NO: 3751386 - DNA, 25 bp, Homo sapien
tttctcacccacttgtatgggttca

SEQ ID NO: 3751387 - DNA, 25 bp, Homo sapien
agcctttttctcacccacttgtatg

SEQ ID NO: 3751388 - DNA, 25 bp, Homo sapien
ctcacccacttgtatgggttcatcg

SEQ ID NO: 3751389 - DNA, 25 bp, Homo sapien
tgctggtgacgctgatggcgatggg

SEQ ID NO: 3751390 - DNA, 25 bp, Homo sapien
tgatgctggtgacgctgatggcgat

SEQ ID NO: 3751391 - DNA, 25 bp, Homo sapien
tgtgatgctggtgacgctgatggcg

SEQ ID NO: 3751392 - DNA, 25 bp, Homo sapien
tggtgacgctgatggcgatgggagg

SEQ ID NO: 3751393 - DNA, 25 bp, Homo sapien
gccctttcgtttttcacacgaggca

SEQ ID NO: 3751394 - DNA, 25 bp, Homo sapien
tgtcccctgaagagtccatgctcat

SEQ ID NO: 3751395 - DNA, 25 bp, Homo sapien
gaggcacgaagtttgtcccctgaag

SEQ ID NO: 3751396 - DNA, 25 bp, Homo sapien
tcacacgaggcacgaagtttgtccc

SEQ ID NO: 3751397 - DNA, 25 bp, Homo sapien
tctgacctggttctgatttggctga

SEQ ID NO: 3751398 - DNA, 25 bp, Homo sapien
tgatggacaagcacagcacgtgcac

SEQ ID NO: 3751399 - DNA, 25 bp, Homo sapien
cgtcccagtgttagaggcaggtcaa

SEQ ID NO: 3751400 - DNA, 25 bp, Homo sapien
ggttctgatctgaccagggcgtagg

SEQ ID NO: 3751401 - DNA, 25 bp, Homo sapien
gggcccatgtgatatactccaggca

SEQ ID NO: 3751402 - DNA, 25 bp, Homo sapien
gcccatgtgatatactccaggcagg

SEQ ID NO: 3751403 - DNA, 25 bp, Homo sapien
ccatgtgatatactccaggcagggc

SEQ ID NO: 3751404 - DNA, 25 bp, Homo sapien
cagggcccatgtgatatactccagg

SEQ ID NO: 3751405 - DNA, 25 bp, Homo sapien
tgaacgccccgggtcgcgcaccgag

SEQ ID NO: 3751406 - DNA, 25 bp, Homo sapien
gtgggactccatcccagtgctcctt

SEQ ID NO: 3751407 - DNA, 25 bp, Homo sapien
gaggtgggactccatcccagtgctc

SEQ ID NO: 3751408 - DNA, 25 bp, Homo sapien
gggcactgctgaacgccccgggtcg

SEQ ID NO: 3751409 - DNA, 25 bp, Homo sapien
tgagcatgggccactgcagtcgtgc

SEQ ID NO: 3751410 - DNA, 25 bp, Homo sapien
gcagtcgtgcggcactgctgaacgc

SEQ ID NO: 3751411 - DNA, 25 bp, Homo sapien
tctgagcatgggccgttgcagttgt

SEQ ID NO: 3751412 - DNA, 25 bp, Homo sapien
tgggccgttgcagttgtgaggcact

SEQ ID NO: 3751413 - DNA, 25 bp, Homo sapien
tctgtctcctgaaaacggatgcgtg

SEQ ID NO: 3751414 - DNA, 25 bp, Homo sapien
cctgaaaacggatgcgtgacagcac

SEQ ID NO: 3751415 - DNA, 25 bp, Homo sapien
gcacccaacagggtcggccaacgga

SEQ ID NO: 3751416 - DNA, 25 bp, Homo sapien
caacggagggccacagaggacatct

SEQ ID NO: 3751417 - DNA, 25 bp, Homo sapien
gatgtggcgggccaggagctcctgt

SEQ ID NO: 3751418 - DNA, 25 bp, Homo sapien
ccttgcgcacacggctggcgatgtg

SEQ ID NO: 3751419 - DNA, 25 bp, Homo sapien
aacctgataaaccttgcgcacacgg

SEQ ID NO: 3751420 - DNA, 25 bp, Homo sapien
tctacttcaacctggccaagaggaa

SEQ ID NO: 3751421 - DNA, 25 bp, Homo sapien
agagtagacatacagtaagcgccta

SEQ ID NO: 3751422 - DNA, 25 bp, Homo sapien
tagagtagacatacagtaagcgcct

SEQ ID NO: 3751423 - DNA, 25 bp, Homo sapien
ctagagtagacatacagtaagcgcc

SEQ ID NO: 3751424 - DNA, 25 bp, Homo sapien
aaggctgtcaccacggagggctcct

SEQ ID NO: 3751425 - DNA, 25 bp, Homo sapien
tctatcccaacactcagcactgtgg

SEQ ID NO: 3751426 - DNA, 25 bp, Homo sapien
tctcacagaaggctgtcaccacgga

SEQ ID NO: 3751427 - DNA, 25 bp, Homo sapien
agactcacggaggaccaggcaccta

SEQ ID NO: 3751428 - DNA, 25 bp, Homo sapien
ggccctctctgagatcagggctccg

SEQ ID NO: 3751429 - DNA, 25 bp, Homo sapien
tctctgagatcagggctccgacaag

SEQ ID NO: 3751430 - DNA, 25 bp, Homo sapien
gagatcagggctccgacaagcactg

SEQ ID NO: 3751431 - DNA, 25 bp, Homo sapien
tcagggctccgacaagcactgaggc

SEQ ID NO: 3751432 - DNA, 25 bp, Homo sapien
gggctggcggtgaccttggttacag

SEQ ID NO: 3751433 - DNA, 25 bp, Homo sapien
cgcgtgcaggattcccccagctact

SEQ ID NO: 3751434 - DNA, 25 bp, Homo sapien
agctactgctcggagtgccaagcac

SEQ ID NO: 3751435 - DNA, 25 bp, Homo sapien
tggcggtgaccttggttacaggcat

SEQ ID NO: 3751436 - DNA, 25 bp, Homo sapien
cataacacctgtctggtgaacgact

SEQ ID NO: 3751437 - DNA, 25 bp, Homo sapien
gaaatcacttctccgaatttcacaa

SEQ ID NO: 3751438 - DNA, 25 bp, Homo sapien
agggctgctaattgctggtaagaaa

SEQ ID NO: 3751439 - DNA, 25 bp, Homo sapien
ggattgcctctcattgctcctccca

SEQ ID NO: 3751440 - DNA, 25 bp, Homo sapien
acagccatgcttgcgccatgagaac

SEQ ID NO: 3751441 - DNA, 25 bp, Homo sapien
cacccacagccatgcttgcgccatg

SEQ ID NO: 3751442 - DNA, 25 bp, Homo sapien
ccacagccatgcttgcgccatgaga

SEQ ID NO: 3751443 - DNA, 25 bp, Homo sapien
ccatgcttgcgccatgagaactcac

SEQ ID NO: 3751444 - DNA, 25 bp, Homo sapien
cacctcatgccagatgccagatggc

SEQ ID NO: 3751445 - DNA, 25 bp, Homo sapien
tgccagatgccagatggcccgcggc

SEQ ID NO: 3751446 - DNA, 25 bp, Homo sapien
catgccagatgccagatggcccgcg

SEQ ID NO: 3751447 - DNA, 25 bp, Homo sapien
ctcatgccagatgccagatggcccg

SEQ ID NO: 3751448 - DNA, 25 bp, Homo sapien
gggcacaaagagtagacactgcctg

SEQ ID NO: 3751449 - DNA, 25 bp, Homo sapien
caaaaccccattcgcatccacagtt

SEQ ID NO: 3751450 - DNA, 25 bp, Homo sapien
aaagagtagacactgcctgaaacag

SEQ ID NO: 3751451 - DNA, 25 bp, Homo sapien
gaaacagtcactgcactgatgcagg

SEQ ID NO: 3751452 - DNA, 25 bp, Homo sapien
taatatgaaccagcacgtgctcctg

SEQ ID NO: 3751453 - DNA, 25 bp, Homo sapien
tcatgccgacagcaaatgcagtaat

SEQ ID NO: 3751454 - DNA, 25 bp, Homo sapien
gaagagaaactcatgccgacagcaa

SEQ ID NO: 3751455 - DNA, 25 bp, Homo sapien
aaatgcagtaatatgaaccagcacg

SEQ ID NO: 3751456 - DNA, 25 bp, Homo sapien
ttacaccggctggtgagtccttcct

SEQ ID NO: 3751457 - DNA, 25 bp, Homo sapien
aatgctgaccaaccaccttacaccg

SEQ ID NO: 3751458 - DNA, 25 bp, Homo sapien
caaccaccttacaccggctggtgag

SEQ ID NO: 3751459 - DNA, 25 bp, Homo sapien
catcctctcccgctgagttggggag

SEQ ID NO: 3751460 - DNA, 25 bp, Homo sapien
atgatgctaagtctttatcagcagc

SEQ ID NO: 3751461 - DNA, 25 bp, Homo sapien
cgtgaataaactaactcctcaggaa

SEQ ID NO: 3751462 - DNA, 25 bp, Homo sapien
ggagactctctgtgcaatgtatcga

SEQ ID NO: 3751463 - DNA, 25 bp, Homo sapien
gggtcattaacgctcatggcaatcc

SEQ ID NO: 3751464 - DNA, 25 bp, Homo sapien
caatagctccctgtgcgtttttttc

SEQ ID NO: 3751465 - DNA, 25 bp, Homo sapien
gacaccgagaagctgtaatcaatag

SEQ ID NO: 3751466 - DNA, 25 bp, Homo sapien
caagtgacaccgagaagctgtaatc

SEQ ID NO: 3751467 - DNA, 25 bp, Homo sapien
tgaacaagtgacaccgagaagctgt

SEQ ID NO: 3751468 - DNA, 25 bp, Homo sapien
gttttcactcgcagcctcatcaata

SEQ ID NO: 3751469 - DNA, 25 bp, Homo sapien
gagcttgttttcactcgcagcctca

SEQ ID NO: 3751470 - DNA, 25 bp, Homo sapien
gcttgttttcactcgcagcctcatc

SEQ ID NO: 3751471 - DNA, 25 bp, Homo sapien
actcgcagcctcatcaatacctaaa

SEQ ID NO: 3751472 - DNA, 25 bp, Homo sapien
atgatggaatccctctgattctggt

SEQ ID NO: 3751473 - DNA, 25 bp, Homo sapien
caatgatggaatccctctgattctg

SEQ ID NO: 3751474 - DNA, 25 bp, Homo sapien
tcaatgatggaatccctctgattct

SEQ ID NO: 3751475 - DNA, 25 bp, Homo sapien
gatggaatccctctgattctggtac

SEQ ID NO: 3751476 - DNA, 25 bp, Homo sapien
caatgacgcagtctaagaggcttct

SEQ ID NO: 3751477 - DNA, 25 bp, Homo sapien
taatttgacgatgagtttggtaacg

SEQ ID NO: 3751478 - DNA, 25 bp, Homo sapien
tggtaacgtgcaccaatgacgcagt

SEQ ID NO: 3751479 - DNA, 25 bp, Homo sapien
cacacagctcatcctaatttgacga

SEQ ID NO: 3751480 - DNA, 25 bp, Homo sapien
tgttagggctcctgcaggtgacctg

SEQ ID NO: 3751481 - DNA, 25 bp, Homo sapien
gggaattactgggaagccaccatgg

SEQ ID NO: 3751482 - DNA, 25 bp, Homo sapien
tatgcccagcttagcactgttaggg

SEQ ID NO: 3751483 - DNA, 25 bp, Homo sapien
tgaccaccgacaagggaggaagaga

SEQ ID NO: 3751484 - DNA, 25 bp, Homo sapien
gaggagctccatgggtccactgtct

SEQ ID NO: 3751485 - DNA, 25 bp, Homo sapien
aggagctccatgggtccactgtctg

SEQ ID NO: 3751486 - DNA, 25 bp, Homo sapien
ctgctttggtcctttggcgttgccc

SEQ ID NO: 3751487 - DNA, 25 bp, Homo sapien
tgctttggtcctttggcgttgcccg

SEQ ID NO: 3751488 - DNA, 25 bp, Homo sapien
ctttggtcctttggcgttgcccgag

SEQ ID NO: 3751489 - DNA, 25 bp, Homo sapien
gctttggtcctttggcgttgcccga

SEQ ID NO: 3751490 - DNA, 25 bp, Homo sapien
cttcacggccagtcctccggagtag

SEQ ID NO: 3751491 - DNA, 25 bp, Homo sapien
agtagttgcccacggctccgctgct

SEQ ID NO: 3751492 - DNA, 25 bp, Homo sapien
ccactctgtggcacgggatgaggat

SEQ ID NO: 3751493 - DNA, 25 bp, Homo sapien
agaccactctgtggcacgggatgag

SEQ ID NO: 3751494 - DNA, 25 bp, Homo sapien
gctccctcccaagcctggcttcccc

SEQ ID NO: 3751495 - DNA, 25 bp, Homo sapien
ctgagctccctcccaagcctggctt

SEQ ID NO: 3751496 - DNA, 25 bp, Homo sapien
tccctcccaagcctggcttccccaa

SEQ ID NO: 3751497 - DNA, 25 bp, Homo sapien
gagctccctcccaagcctggcttcc

SEQ ID NO: 3751498 - DNA, 25 bp, Homo sapien
gcccgaggtagctcccgctcccttg

SEQ ID NO: 3751499 - DNA, 25 bp, Homo sapien
cggggagcccgaggtagctcccgct

SEQ ID NO: 3751500 - DNA, 25 bp, Homo sapien
ggtagctcccgctcccttgagccag

SEQ ID NO: 3751501 - DNA, 25 bp, Homo sapien
gaggtagctcccgctcccttgagcc

SEQ ID NO: 3751502 - DNA, 25 bp, Homo sapien
tttaatacagcggtgcctccacgcc

SEQ ID NO: 3751503 - DNA, 25 bp, Homo sapien
catccgatgcagtgttacacgtgtg

SEQ ID NO: 3751504 - DNA, 25 bp, Homo sapien
tacacgtgtgtgtcgctcaaacatc

SEQ ID NO: 3751505 - DNA, 25 bp, Homo sapien
gccccgcatccgatgcagtgttaca

SEQ ID NO: 3751506 - DNA, 25 bp, Homo sapien
aggtgcaagctccatcgaacccgtg

SEQ ID NO: 3751507 - DNA, 25 bp, Homo sapien
ctttctagtgtggacggcctgggat

SEQ ID NO: 3751508 - DNA, 25 bp, Homo sapien
gaaaacctctgtaagcactgactgc

SEQ ID NO: 3751509 - DNA, 25 bp, Homo sapien
tatgcagagctacaggtttcccttc

SEQ ID NO: 3751510 - DNA, 25 bp, Homo sapien
gaatgctgggtaagaacatggcgct

SEQ ID NO: 3751511 - DNA, 25 bp, Homo sapien
caccgtggcaaggaatgctgggtaa

SEQ ID NO: 3751512 - DNA, 25 bp, Homo sapien
gctgtggttcacaccgtggcaagga

SEQ ID NO: 3751513 - DNA, 25 bp, Homo sapien
gcgctctagtgcacagctgggtgca

SEQ ID NO: 3751514 - DNA, 25 bp, Homo sapien
tacgtgacccgctgtgtgacttatc

SEQ ID NO: 3751515 - DNA, 25 bp, Homo sapien
caaccatacacatcgtgaggccaca

SEQ ID NO: 3751516 - DNA, 25 bp, Homo sapien
cagcgaaaaacgtctgaaatcggtt

SEQ ID NO: 3751517 - DNA, 25 bp, Homo sapien
tgtcccacaaaacagcacgtgtcta

SEQ ID NO: 3751518 - DNA, 25 bp, Homo sapien
agacagcctgcgagtcctgacggtg

SEQ ID NO: 3751519 - DNA, 25 bp, Homo sapien
gtgacgcggcgtgcggcacctgagg

SEQ ID NO: 3751520 - DNA, 25 bp, Homo sapien
agcctgcgagtcctgacggtgacgc

SEQ ID NO: 3751521 - DNA, 25 bp, Homo sapien
aaatgaccagacagcctgcgagtcc

SEQ ID NO: 3751522 - DNA, 25 bp, Homo sapien
agggcaccacctttggggcagagtg

SEQ ID NO: 3751523 - DNA, 25 bp, Homo sapien
tggggcagagtgcacccagcttttc

SEQ ID NO: 3751524 - DNA, 25 bp, Homo sapien
agccgtgcctggtgaccggccatca

SEQ ID NO: 3751525 - DNA, 25 bp, Homo sapien
ctgttcatgcagaggggaaagccgt

SEQ ID NO: 3751526 - DNA, 25 bp, Homo sapien
gaaagccgtgcctggtgaccggcca

SEQ ID NO: 3751527 - DNA, 25 bp, Homo sapien
tcatgcagaggggaaagccgtgcct

SEQ ID NO: 3751528 - DNA, 25 bp, Homo sapien
ccctctgttggaaagcactcgcggc

SEQ ID NO: 3751529 - DNA, 25 bp, Homo sapien
tgttggaaagcactcgcggctcgca

SEQ ID NO: 3751530 - DNA, 25 bp, Homo sapien
ttggaaagcactcgcggctcgcaca

SEQ ID NO: 3751531 - DNA, 25 bp, Homo sapien
tctgttggaaagcactcgcggctcg

SEQ ID NO: 3751532 - DNA, 25 bp, Homo sapien
gagggcggcctgtagggtctcaggg

SEQ ID NO: 3751533 - DNA, 25 bp, Homo sapien
gcagagggcggcctgtagggtctca

SEQ ID NO: 3751534 - DNA, 25 bp, Homo sapien
gcggcctgtagggtctcagggagca

SEQ ID NO: 3751535 - DNA, 25 bp, Homo sapien
gagccatcggggtgccgcccagcca

SEQ ID NO: 3751536 - DNA, 25 bp, Homo sapien
ggctttgacgggcaggtcccctgcc

SEQ ID NO: 3751537 - DNA, 25 bp, Homo sapien
ccctcagagcctgtgcctgatgaga

SEQ ID NO: 3751538 - DNA, 25 bp, Homo sapien
ctcgctggctgcagtcatgtggccc

SEQ ID NO: 3751539 - DNA, 25 bp, Homo sapien
agacctgaagatctcactgggaggc

SEQ ID NO: 3751540 - DNA, 25 bp, Homo sapien
ctgtgctcccaggccacacggattt

SEQ ID NO: 3751541 - DNA, 25 bp, Homo sapien
tgtgctcccaggccacacggatttg

SEQ ID NO: 3751542 - DNA, 25 bp, Homo sapien
gtgctcccaggccacacggatttgc

SEQ ID NO: 3751543 - DNA, 25 bp, Homo sapien
caagggcatggtccgagcaggccca

SEQ ID NO: 3751544 - DNA, 25 bp, Homo sapien
tgcaccaagggcatggtccgagcag

SEQ ID NO: 3751545 - DNA, 25 bp, Homo sapien
caccaagggcatggtccgagcaggc

SEQ ID NO: 3751546 - DNA, 25 bp, Homo sapien
actgcaccaagggcatggtccgagc

SEQ ID NO: 3751547 - DNA, 25 bp, Homo sapien
tgtcagagggaacctccgggcatct

SEQ ID NO: 3751548 - DNA, 25 bp, Homo sapien
tgctggcttttcatgtcggcctcgg

SEQ ID NO: 3751549 - DNA, 25 bp, Homo sapien
tcggcctcggcagagcttgtccttg

SEQ ID NO: 3751550 - DNA, 25 bp, Homo sapien
ccggtttgagccctgctgctgcggc

SEQ ID NO: 3751551 - DNA, 25 bp, Homo sapien
ctccctctgtattttcacgaacggc

SEQ ID NO: 3751552 - DNA, 25 bp, Homo sapien
tattttcacgaacggcgctgcagct

SEQ ID NO: 3751553 - DNA, 25 bp, Homo sapien
ccctctgtattttcacgaacggcgc

SEQ ID NO: 3751554 - DNA, 25 bp, Homo sapien
tctgtattttcacgaacggcgctgc

SEQ ID NO: 3751555 - DNA, 25 bp, Homo sapien
cagtgctgggaaatgcgacagggtg

SEQ ID NO: 3751556 - DNA, 25 bp, Homo sapien
gggtctcggtgtcggccttcaaagc

SEQ ID NO: 3751557 - DNA, 25 bp, Homo sapien
tggtccgccggtctgagtggctgcg

SEQ ID NO: 3751558 - DNA, 25 bp, Homo sapien
cagggccaaggctgaagaacacagc

SEQ ID NO: 3751559 - DNA, 25 bp, Homo sapien
tgccacaagtgtggttctgcaaaaa

SEQ ID NO: 3751560 - DNA, 25 bp, Homo sapien
cacaagtgtggttctgcaaaaacaa

SEQ ID NO: 3751561 - DNA, 25 bp, Homo sapien
ttttgccacaagtgtggttctgcaa

SEQ ID NO: 3751562 - DNA, 25 bp, Homo sapien
ttattttgccacaagtgtggttctg

SEQ ID NO: 3751563 - DNA, 25 bp, Homo sapien
acaggacacgtggaatgcaggtggg

SEQ ID NO: 3751564 - DNA, 25 bp, Homo sapien
tggaggcggccacaggacacgtgga

SEQ ID NO: 3751565 - DNA, 25 bp, Homo sapien
cacgtggaatgcaggtgggtttact

SEQ ID NO: 3751566 - DNA, 25 bp, Homo sapien
aatgcaggtgggtttactggacact

SEQ ID NO: 3751567 - DNA, 25 bp, Homo sapien
cttgcttggcccctccaaacgggat

SEQ ID NO: 3751568 - DNA, 25 bp, Homo sapien
caccagagaagcttaagtcgcagag

SEQ ID NO: 3751569 - DNA, 25 bp, Homo sapien
caagtaagttctctacaaggtgagc

SEQ ID NO: 3751570 - DNA, 25 bp, Homo sapien
cagagatggtttcagttgctagcac

SEQ ID NO: 3751571 - DNA, 25 bp, Homo sapien
gtgaagtccgagctggcgccaccgc

SEQ ID NO: 3751572 - DNA, 25 bp, Homo sapien
acagctacgggtgcatggacagcca

SEQ ID NO: 3751573 - DNA, 25 bp, Homo sapien
ccttgtaggccaggtcaggggatac

SEQ ID NO: 3751574 - DNA, 25 bp, Homo sapien
gatacagcaacatccgtaaatgcat

SEQ ID NO: 3751575 - DNA, 25 bp, Homo sapien
aaacccacacggtctgaggtctgag

SEQ ID NO: 3751576 - DNA, 25 bp, Homo sapien
cactgccccgatggcaacaagaaga

SEQ ID NO: 3751577 - DNA, 25 bp, Homo sapien
tcgggattggtctttcagtaaaatc

SEQ ID NO: 3751578 - DNA, 25 bp, Homo sapien
tgtgctgtgagaagcccaagtagca

SEQ ID NO: 3751579 - DNA, 25 bp, Homo sapien
agccaagtctcacacgtgcatccat

SEQ ID NO: 3751580 - DNA, 25 bp, Homo sapien
cagggatccagggccaattccaccg

SEQ ID NO: 3751581 - DNA, 25 bp, Homo sapien
cgccttggaggaccgcctgcttgct

SEQ ID NO: 3751582 - DNA, 25 bp, Homo sapien
gtctcacacgtgcatccatttcttc

SEQ ID NO: 3751583 - DNA, 25 bp, Homo sapien
ccttctgatgagagccacccgatcc

SEQ ID NO: 3751584 - DNA, 25 bp, Homo sapien
gggccttctgatgagagccacccga

SEQ ID NO: 3751585 - DNA, 25 bp, Homo sapien
ggccttctgatgagagccacccgat

SEQ ID NO: 3751586 - DNA, 25 bp, Homo sapien
gccttctgatgagagccacccgatc

SEQ ID NO: 3751587 - DNA, 25 bp, Homo sapien
gtggtgggaacactgccctccaata

SEQ ID NO: 3751588 - DNA, 25 bp, Homo sapien
tgccctccaatactcctgtgggtga

SEQ ID NO: 3751589 - DNA, 25 bp, Homo sapien
gaacactgccctccaatactcctgt

SEQ ID NO: 3751590 - DNA, 25 bp, Homo sapien
actgccctccaatactcctgtgggt

SEQ ID NO: 3751591 - DNA, 25 bp, Homo sapien
ggttccatggctgctccgttgcctg

SEQ ID NO: 3751592 - DNA, 25 bp, Homo sapien
catcagagtgaaggcagtgacccct

SEQ ID NO: 3751593 - DNA, 25 bp, Homo sapien
tgtgagccgcacttccacatcagag

SEQ ID NO: 3751594 - DNA, 25 bp, Homo sapien
aggcccttgtttccccagttcagct

SEQ ID NO: 3751595 - DNA, 25 bp, Homo sapien
gggaaagtgcctgacactcggtcag

SEQ ID NO: 3751596 - DNA, 25 bp, Homo sapien
ggcatggtcactcaggcctgacatc

SEQ ID NO: 3751597 - DNA, 25 bp, Homo sapien
cctgacactcggtcagggctacaga

SEQ ID NO: 3751598 - DNA, 25 bp, Homo sapien
gcatggtcactcaggcctgacatcc

SEQ ID NO: 3751599 - DNA, 25 bp, Homo sapien
acattctggatttaccctgtgcatg

SEQ ID NO: 3751600 - DNA, 25 bp, Homo sapien
ctgtgcatgccatccagggctgcat

SEQ ID NO: 3751601 - DNA, 25 bp, Homo sapien
gaacattctggatttaccctgtgca

SEQ ID NO: 3751602 - DNA, 25 bp, Homo sapien
tctgaacattctggatttaccctgt

SEQ ID NO: 3751603 - DNA, 25 bp, Homo sapien
gttgtaacgcgcatgcaccgaacac

SEQ ID NO: 3751604 - DNA, 25 bp, Homo sapien
gagacacgtgatgaagttgtaacgc

SEQ ID NO: 3751605 - DNA, 25 bp, Homo sapien
ggcactggtgctaaagggcacgcct

SEQ ID NO: 3751606 - DNA, 25 bp, Homo sapien
aaagggcacgcctccatggcttcct

SEQ ID NO: 3751607 - DNA, 25 bp, Homo sapien
gggtttagaccgctcgcccagtgct

SEQ ID NO: 3751608 - DNA, 25 bp, Homo sapien
gatctctgaactcgctaccaaaggc

SEQ ID NO: 3751609 - DNA, 25 bp, Homo sapien
tgctgctttcaggaagacgagtaaa

SEQ ID NO: 3751610 - DNA, 25 bp, Homo sapien
ctgggaccggcccttgcggccaagg

SEQ ID NO: 3751611 - DNA, 25 bp, Homo sapien
tgcagccctgcgctaggaaggagct

SEQ ID NO: 3751612 - DNA, 25 bp, Homo sapien
actggctgggtcctaggcaagcgca

SEQ ID NO: 3751613 - DNA, 25 bp, Homo sapien
gcagggcggtaagcggtgtgcagcc

SEQ ID NO: 3751614 - DNA, 25 bp, Homo sapien
caagcgcagcgtggcgaccgtcttg

SEQ ID NO: 3751615 - DNA, 25 bp, Homo sapien
tcacgtggtcagatgcgtgggccca

SEQ ID NO: 3751616 - DNA, 25 bp, Homo sapien
tatgtttccctttacgaagtgcctg

SEQ ID NO: 3751617 - DNA, 25 bp, Homo sapien
tgataaacagctggtcaagcacgtg

SEQ ID NO: 3751618 - DNA, 25 bp, Homo sapien
tgtcatgctatgatcactcgtgagg

SEQ ID NO: 3751619 - DNA, 25 bp, Homo sapien
agctgacttgaaagagagcctgtcc

SEQ ID NO: 3751620 - DNA, 25 bp, Homo sapien
gcaagctttcctcgagctgggctca

SEQ ID NO: 3751621 - DNA, 25 bp, Homo sapien
gacactagacgagaaggcaagcttt

SEQ ID NO: 3751622 - DNA, 25 bp, Homo sapien
caggaaacaggaaccgcaggtctgg

SEQ ID NO: 3751623 - DNA, 25 bp, Homo sapien
ccgtctttaccttctggaggagctg

SEQ ID NO: 3751624 - DNA, 25 bp, Homo sapien
agtgagtgccatccgccaggctgtg

SEQ ID NO: 3751625 - DNA, 25 bp, Homo sapien
tgccaggtgtcccgtaatcccgtct

SEQ ID NO: 3751626 - DNA, 25 bp, Homo sapien
gagctgcgaggcggcgtcattagct

SEQ ID NO: 3751627 - DNA, 25 bp, Homo sapien
atttctgaatagctcgccaactgtg

SEQ ID NO: 3751628 - DNA, 25 bp, Homo sapien
ccaactgtgaaggaagttctgcggt

SEQ ID NO: 3751629 - DNA, 25 bp, Homo sapien
agcttggagcgagtgaaggccgagc

SEQ ID NO: 3751630 - DNA, 25 bp, Homo sapien
cctcggactcgggtatcatttctga

SEQ ID NO: 3751631 - DNA, 25 bp, Homo sapien
gattaatgatttgccgacagctcca

SEQ ID NO: 3751632 - DNA, 25 bp, Homo sapien
gggccagaatgctgtgccccgagca

SEQ ID NO: 3751633 - DNA, 25 bp, Homo sapien
ttccagttgtgagaagagcttccag

SEQ ID NO: 3751634 - DNA, 25 bp, Homo sapien
tattgtcaccgtggtttaaagagag

SEQ ID NO: 3751635 - DNA, 25 bp, Homo sapien
tgtcctgggatggcggagatacagt

SEQ ID NO: 3751636 - DNA, 25 bp, Homo sapien
tcctgggatggcggagatacagtat

SEQ ID NO: 3751637 - DNA, 25 bp, Homo sapien
gtcctgggatggcggagatacagta

SEQ ID NO: 3751638 - DNA, 25 bp, Homo sapien
ctgtcctgggatggcggagatacag

SEQ ID NO: 3751639 - DNA, 25 bp, Homo sapien
taggcttgactctagaacgataagg

SEQ ID NO: 3751640 - DNA, 25 bp, Homo sapien
cttggaacatttaaccagagtgagc

SEQ ID NO: 3751641 - DNA, 25 bp, Homo sapien
ttggttgacgcttcaaatctctcag

SEQ ID NO: 3751642 - DNA, 25 bp, Homo sapien
cagagtgagctctaagtgtgcatgg

SEQ ID NO: 3751643 - DNA, 25 bp, Homo sapien
ccacaatgttggcagagcctgggtc

SEQ ID NO: 3751644 - DNA, 25 bp, Homo sapien
gctggagttaccctctgcaccaagt

SEQ ID NO: 3751645 - DNA, 25 bp, Homo sapien
tatcaccagaaacgggcatgctgct

SEQ ID NO: 3751646 - DNA, 25 bp, Homo sapien
aaaataatgtttgactccagtgcac

SEQ ID NO: 3751647 - DNA, 25 bp, Homo sapien
tagaagcagtgcctgttccggagca

SEQ ID NO: 3751648 - DNA, 25 bp, Homo sapien
tggattctagaagcagtgcctgttc

SEQ ID NO: 3751649 - DNA, 25 bp, Homo sapien
tgcctgttccggagcagctgccttg

SEQ ID NO: 3751650 - DNA, 25 bp, Homo sapien
gaaggaagtggattctagaagcagt

SEQ ID NO: 3751651 - DNA, 25 bp, Homo sapien
caggccctgcaggtaggggatccca

SEQ ID NO: 3751652 - DNA, 25 bp, Homo sapien
tgttcttgtcacctgctgacacatc

SEQ ID NO: 3751653 - DNA, 25 bp, Homo sapien
tgaggtggcgttggacttgttcttg

SEQ ID NO: 3751654 - DNA, 25 bp, Homo sapien
aagccaaagcccttgtgaggtggcg

SEQ ID NO: 3751655 - DNA, 25 bp, Homo sapien
cactggcgggtcttttaatgtgaag

SEQ ID NO: 3751656 - DNA, 25 bp, Homo sapien
gggtccatgcacgaagcctgtgatt

SEQ ID NO: 3751657 - DNA, 25 bp, Homo sapien
tcagtaaccatcaggcactggcggg

SEQ ID NO: 3751658 - DNA, 25 bp, Homo sapien
gctctgctgcagatctgaatactct

SEQ ID NO: 3751659 - DNA, 25 bp, Homo sapien
caccaatttggctgtttttccagtt

SEQ ID NO: 3751660 - DNA, 25 bp, Homo sapien
tttccagtttccttgttgaatttca

SEQ ID NO: 3751661 - DNA, 25 bp, Homo sapien
tttgctgcaccaatttggctgtttt

SEQ ID NO: 3751662 - DNA, 25 bp, Homo sapien
ccagtttccttgttgaatttcatta

SEQ ID NO: 3751663 - DNA, 25 bp, Homo sapien
tgcgccttccaagttggagagactg

SEQ ID NO: 3751664 - DNA, 25 bp, Homo sapien
tactactttgcattcaactgtgaaa

SEQ ID NO: 3751665 - DNA, 25 bp, Homo sapien
agtcttttaaaactcggaacagcag

SEQ ID NO: 3751666 - DNA, 25 bp, Homo sapien
cattattgcatagcgggtgcgcctt

SEQ ID NO: 3751667 - DNA, 25 bp, Homo sapien
gagccacacatgtggagctccggtg

SEQ ID NO: 3751668 - DNA, 25 bp, Homo sapien
cagagagccctaggtgcaggggctg

SEQ ID NO: 3751669 - DNA, 25 bp, Homo sapien
cagcagagccacacatgtggagctc

SEQ ID NO: 3751670 - DNA, 25 bp, Homo sapien
ccacacatgtggagctccggtgcat

SEQ ID NO: 3751671 - DNA, 25 bp, Homo sapien
tacatattgtgctccagcgagatcc

SEQ ID NO: 3751672 - DNA, 25 bp, Homo sapien
aaatcaaggccatcccatgaggagc

SEQ ID NO: 3751673 - DNA, 25 bp, Homo sapien
cgagatccattgtaccgaggtcagc

SEQ ID NO: 3751674 - DNA, 25 bp, Homo sapien
aaacacatccgagttagcgctgggc

SEQ ID NO: 3751675 - DNA, 25 bp, Homo sapien
taagagcagttgtacgggctcacaa

SEQ ID NO: 3751676 - DNA, 25 bp, Homo sapien
tatcagcttagggaaacaagttttg

SEQ ID NO: 3751677 - DNA, 25 bp, Homo sapien
ggctggcggcttttaaatttgcatc

SEQ ID NO: 3751678 - DNA, 25 bp, Homo sapien
tttcaggacataagcccaaaagtca

SEQ ID NO: 3751679 - DNA, 25 bp, Homo sapien
tgccacgccctttaacaaatactgg

SEQ ID NO: 3751680 - DNA, 25 bp, Homo sapien
ctggaaagacgtcaagtaacaatgg

SEQ ID NO: 3751681 - DNA, 25 bp, Homo sapien
ggttgtaaagaaccagcacgtctat

SEQ ID NO: 3751682 - DNA, 25 bp, Homo sapien
gaccattggtgacacgtgcggcact

SEQ ID NO: 3751683 - DNA, 25 bp, Homo sapien
ggcttgataggtggtttctaaagag

SEQ ID NO: 3751684 - DNA, 25 bp, Homo sapien
acacagagatcagtgccgctcaggg

SEQ ID NO: 3751685 - DNA, 25 bp, Homo sapien
gagaagcccgccgtggacaaagctg

SEQ ID NO: 3751686 - DNA, 25 bp, Homo sapien
gatctgtgaagcctgctttgctgcc

SEQ ID NO: 3751687 - DNA, 25 bp, Homo sapien
ctggagaccacacaagcccagcgtg

SEQ ID NO: 3751688 - DNA, 25 bp, Homo sapien
gtatcagctgttggcaagtctgctt

SEQ ID NO: 3751689 - DNA, 25 bp, Homo sapien
accacacaagcccagcgtgctggta

SEQ ID NO: 3751690 - DNA, 25 bp, Homo sapien
gcccagcgtgctggtatcagctgtt

SEQ ID NO: 3751691 - DNA, 25 bp, Homo sapien
cagagaggatgcagtcgtcgaagtt

SEQ ID NO: 3751692 - DNA, 25 bp, Homo sapien
tcacccacgtgagtatgaactgaat

SEQ ID NO: 3751693 - DNA, 25 bp, Homo sapien
aagctgaactaacttgtgtggcctg

SEQ ID NO: 3751694 - DNA, 25 bp, Homo sapien
cagtcttagcggtgagctgcgtctc

SEQ ID NO: 3751695 - DNA, 25 bp, Homo sapien
ctgactgaggttaaaggcgatttga

SEQ ID NO: 3751696 - DNA, 25 bp, Homo sapien
cattctgactgaggttaaaggcgat

SEQ ID NO: 3751697 - DNA, 25 bp, Homo sapien
gactggcattctgactgaggttaaa

SEQ ID NO: 3751698 - DNA, 25 bp, Homo sapien
ctggcgaagactggcattctgactg

SEQ ID NO: 3751699 - DNA, 25 bp, Homo sapien
gcagtgccgccagaatctctgcgtg

SEQ ID NO: 3751700 - DNA, 25 bp, Homo sapien
gaatctctgcgtgggtgcgagggtg

SEQ ID NO: 3751701 - DNA, 25 bp, Homo sapien
cagcagtgccgccagaatctctgcg

SEQ ID NO: 3751702 - DNA, 25 bp, Homo sapien
agtgccgccagaatctctgcgtggg

SEQ ID NO: 3751703 - DNA, 25 bp, Homo sapien
tcacttgcctgcaaacataggagct

SEQ ID NO: 3751704 - DNA, 25 bp, Homo sapien
atgacctcggtgtgatggtttcttc

SEQ ID NO: 3751705 - DNA, 25 bp, Homo sapien
tccacgctgtgctcagaaatgacct

SEQ ID NO: 3751706 - DNA, 25 bp, Homo sapien
tgcaaacataggagcttccacgctg

SEQ ID NO: 3751707 - DNA, 25 bp, Homo sapien
agtgactggtcccaggtccatccct

SEQ ID NO: 3751708 - DNA, 25 bp, Homo sapien
ggcaaccaggctgttcagtccctgc

SEQ ID NO: 3751709 - DNA, 25 bp, Homo sapien
tcagggcctcggaaaggagaaagac

SEQ ID NO: 3751710 - DNA, 25 bp, Homo sapien
gccacgctgtagagagctgctcagg

SEQ ID NO: 3751711 - DNA, 25 bp, Homo sapien
gctggcagcaatgctcaggcctctc

SEQ ID NO: 3751712 - DNA, 25 bp, Homo sapien
aggcctctcccatcaatgtgggtga

SEQ ID NO: 3751713 - DNA, 25 bp, Homo sapien
ttcaaagatgcgtcgggtcagccct

SEQ ID NO: 3751714 - DNA, 25 bp, Homo sapien
ccagggacccctccatgtggcagga

SEQ ID NO: 3751715 - DNA, 25 bp, Homo sapien
tctcttctgcaaaagcacctgctgt

SEQ ID NO: 3751716 - DNA, 25 bp, Homo sapien
gtgtcttgacaccataaccagaggg

SEQ ID NO: 3751717 - DNA, 25 bp, Homo sapien
acatcagtgcgtccctggcggatgg

SEQ ID NO: 3751718 - DNA, 25 bp, Homo sapien
tgccctgcagctctatctctctgtg

SEQ ID NO: 3751719 - DNA, 25 bp, Homo sapien
tggtgcatggctacggaatctgagc

SEQ ID NO: 3751720 - DNA, 25 bp, Homo sapien
gccgggacaactaactcagagccat

SEQ ID NO: 3751721 - DNA, 25 bp, Homo sapien
tacagtgaacaaggtagccgggaca

SEQ ID NO: 3751722 - DNA, 25 bp, Homo sapien
tcagattggcctagaacactgaggc

SEQ ID NO: 3751723 - DNA, 25 bp, Homo sapien
ttgtcggtagaagagtaaattggta

SEQ ID NO: 3751724 - DNA, 25 bp, Homo sapien
taatacacaatgctgttgatggagg

SEQ ID NO: 3751725 - DNA, 25 bp, Homo sapien
gtattcttacagttgtcggtagaag

SEQ ID NO: 3751726 - DNA, 25 bp, Homo sapien
ctggaaatcagtctaacatatcaag

SEQ ID NO: 3751727 - DNA, 25 bp, Homo sapien
taacctgggatgtcgtccttggcaa

SEQ ID NO: 3751728 - DNA, 25 bp, Homo sapien
catggtgaatccagtggcagcttta

SEQ ID NO: 3751729 - DNA, 25 bp, Homo sapien
tctgcactcacagatccacggatgg

SEQ ID NO: 3751730 - DNA, 25 bp, Homo sapien
tgccgtcagtttcggtgagtcccca

SEQ ID NO: 3751731 - DNA, 25 bp, Homo sapien
ccctcccagcagataaaaacagttg

SEQ ID NO: 3751732 - DNA, 25 bp, Homo sapien
agctgccaacggacaccacaggttg

SEQ ID NO: 3751733 - DNA, 25 bp, Homo sapien
caggttggccctcacaattaatgcc

SEQ ID NO: 3751734 - DNA, 25 bp, Homo sapien
tgaagtgtcaatatgccgaagagtg

SEQ ID NO: 3751735 - DNA, 25 bp, Homo sapien
tccatactcatcaagtgggtcaacg

SEQ ID NO: 3751736 - DNA, 25 bp, Homo sapien
tcatgaaatccatactcatcaagtg

SEQ ID NO: 3751737 - DNA, 25 bp, Homo sapien
catcaagtgggtcaacgcaagcagt

SEQ ID NO: 3751738 - DNA, 25 bp, Homo sapien
tactcatcaagtgggtcaacgcaag

SEQ ID NO: 3751739 - DNA, 25 bp, Homo sapien
catggttgggttccactgggcaaga

SEQ ID NO: 3751740 - DNA, 25 bp, Homo sapien
actgggcaggtagagaacaacggct

SEQ ID NO: 3751741 - DNA, 25 bp, Homo sapien
tgcttctgaatagcgcactgggcag

SEQ ID NO: 3751742 - DNA, 25 bp, Homo sapien
caagaaccaggcttagaagagtgac

SEQ ID NO: 3751743 - DNA, 25 bp, Homo sapien
cagatatcgtgcctcttagtgccaa

SEQ ID NO: 3751744 - DNA, 25 bp, Homo sapien
tttaggttaagtagtcaatgcccac

SEQ ID NO: 3751745 - DNA, 25 bp, Homo sapien
gtctagctacatgggaaagcctgag

SEQ ID NO: 3751746 - DNA, 25 bp, Homo sapien
tatagtcaaaacaaatcggtgccac

SEQ ID NO: 3751747 - DNA, 25 bp, Homo sapien
aagtttccgactccgtcttggccat

SEQ ID NO: 3751748 - DNA, 25 bp, Homo sapien
aaagcgacgcctattttgtataaag

SEQ ID NO: 3751749 - DNA, 25 bp, Homo sapien
ctatgtgttgggagaaactttgtga

SEQ ID NO: 3751750 - DNA, 25 bp, Homo sapien
gatcatgaaacgctgatgaaaaatg

SEQ ID NO: 3751751 - DNA, 25 bp, Homo sapien
tacagagagatgaccgcacggtcag

SEQ ID NO: 3751752 - DNA, 25 bp, Homo sapien
agagatgaccgcacggtcagagccc

SEQ ID NO: 3751753 - DNA, 25 bp, Homo sapien
cattacgatacagagagatgaccgc

SEQ ID NO: 3751754 - DNA, 25 bp, Homo sapien
cgatacagagagatgaccgcacggt

SEQ ID NO: 3751755 - DNA, 25 bp, Homo sapien
gggcaccacaccagggtcgttgcag

SEQ ID NO: 3751756 - DNA, 25 bp, Homo sapien
ccgttagcgtatgaagggacgccca

SEQ ID NO: 3751757 - DNA, 25 bp, Homo sapien
aaggtatcagtgatttgaaatcatt

SEQ ID NO: 3751758 - DNA, 25 bp, Homo sapien
ctgcgtgccatcagcgggcaccaca

SEQ ID NO: 3751759 - DNA, 25 bp, Homo sapien
cgccaacgggaatggactgcaaggt

SEQ ID NO: 3751760 - DNA, 25 bp, Homo sapien
caaactgtagcagcacacacggcat

SEQ ID NO: 3751761 - DNA, 25 bp, Homo sapien
gtgactgctgcatgttctcccgtgg

SEQ ID NO: 3751762 - DNA, 25 bp, Homo sapien
tgtcatctccgcagtgaaacagaag

SEQ ID NO: 3751763 - DNA, 25 bp, Homo sapien
tagcacctgaagcaacgtcaccttg

SEQ ID NO: 3751764 - DNA, 25 bp, Homo sapien
gaagtagctacatctaatggctctg

SEQ ID NO: 3751765 - DNA, 25 bp, Homo sapien
tatataccattctagatcatcgggc

SEQ ID NO: 3751766 - DNA, 25 bp, Homo sapien
aaatcgctgtcgaccactgtacaag

SEQ ID NO: 3751767 - DNA, 25 bp, Homo sapien
tatcagcaaagtaatgcagcgcagg

SEQ ID NO: 3751768 - DNA, 25 bp, Homo sapien
tgtgttcggagactaagcatgctgc

SEQ ID NO: 3751769 - DNA, 25 bp, Homo sapien
ttaaagcgtctatcacctgtcaggg

SEQ ID NO: 3751770 - DNA, 25 bp, Homo sapien
taaactctgcgtgcggagggctcat

SEQ ID NO: 3751771 - DNA, 25 bp, Homo sapien
tactggcctgcatatgatagccgga

SEQ ID NO: 3751772 - DNA, 25 bp, Homo sapien
gatagccggatatctggcctttcac

SEQ ID NO: 3751773 - DNA, 25 bp, Homo sapien
atgacccgctctggatactggcctg

SEQ ID NO: 3751774 - DNA, 25 bp, Homo sapien
ctatgtggtcgtgtcaggctctatt

SEQ ID NO: 3751775 - DNA, 25 bp, Homo sapien
tgtgtgcagattttccgctggttta

SEQ ID NO: 3751776 - DNA, 25 bp, Homo sapien
agattttccgctggtttaaagtgtg

SEQ ID NO: 3751777 - DNA, 25 bp, Homo sapien
gcagattttccgctggtttaaagtg

SEQ ID NO: 3751778 - DNA, 25 bp, Homo sapien
tgtgcagattttccgctggtttaaa

SEQ ID NO: 3751779 - DNA, 25 bp, Homo sapien
cacatcgcactgagtagggcaggca

SEQ ID NO: 3751780 - DNA, 25 bp, Homo sapien
atcgcactgagtagggcaggcacgt

SEQ ID NO: 3751781 - DNA, 25 bp, Homo sapien
cctactgtgcacatcgcactgagta

SEQ ID NO: 3751782 - DNA, 25 bp, Homo sapien
tgtgcacatcgcactgagtagggca

SEQ ID NO: 3751783 - DNA, 25 bp, Homo sapien
caggcgttgaggagttccaggccaa

SEQ ID NO: 3751784 - DNA, 25 bp, Homo sapien
tctggatggcagttggcacgtgtct

SEQ ID NO: 3751785 - DNA, 25 bp, Homo sapien
gagaaggcactccatccgatgacaa

SEQ ID NO: 3751786 - DNA, 25 bp, Homo sapien
tactggttctcataggcgctcatgg

SEQ ID NO: 3751787 - DNA, 25 bp, Homo sapien
tgctgatctacggttgccctttgcg

SEQ ID NO: 3751788 - DNA, 25 bp, Homo sapien
gacgggctgcaagttgtattcggaa

SEQ ID NO: 3751789 - DNA, 25 bp, Homo sapien
aattggcgacaacttctttgacggg

SEQ ID NO: 3751790 - DNA, 25 bp, Homo sapien
tcaaggccatcagtcccagtgaagg

SEQ ID NO: 3751791 - DNA, 25 bp, Homo sapien
cagataagatatggcacatccagtg

SEQ ID NO: 3751792 - DNA, 25 bp, Homo sapien
caagaaatgccaatgcgaaagtcgc

SEQ ID NO: 3751793 - DNA, 25 bp, Homo sapien
caggcgctactgtaactcttaaaac

SEQ ID NO: 3751794 - DNA, 25 bp, Homo sapien
tattatcataaagcttggacaccca

SEQ ID NO: 3751795 - DNA, 25 bp, Homo sapien
tgctgtccccgaagtgaaaacctaa

SEQ ID NO: 3751796 - DNA, 25 bp, Homo sapien
gacaggacgataacttggtggcgcc

SEQ ID NO: 3751797 - DNA, 25 bp, Homo sapien
cagttcaaatgcagtgtggccgcag

SEQ ID NO: 3751798 - DNA, 25 bp, Homo sapien
tgttaggccctttctgatgcagttc

SEQ ID NO: 3751799 - DNA, 25 bp, Homo sapien
tcgcctcttcgtgatggagcagcaa

SEQ ID NO: 3751800 - DNA, 25 bp, Homo sapien
taagcataatgtactaatgacaggt

SEQ ID NO: 3751801 - DNA, 25 bp, Homo sapien
taaagagtttattggtgctaaagcc

SEQ ID NO: 3751802 - DNA, 25 bp, Homo sapien
tccatgttttgcagtaataaagagt

SEQ ID NO: 3751803 - DNA, 25 bp, Homo sapien
tctgaacacattaaaaccacccgga

SEQ ID NO: 3751804 - DNA, 25 bp, Homo sapien
cccggaaaagtttaatgcgagtcat

SEQ ID NO: 3751805 - DNA, 25 bp, Homo sapien
gggatattgaactggccggcaaagc

SEQ ID NO: 3751806 - DNA, 25 bp, Homo sapien
caaatttctccaaacggaggacttg

SEQ ID NO: 3751807 - DNA, 25 bp, Homo sapien
cagccaggcgctgatcggtatttcc

SEQ ID NO: 3751808 - DNA, 25 bp, Homo sapien
ccaggcgctgatcggtatttccttc

SEQ ID NO: 3751809 - DNA, 25 bp, Homo sapien
ggcgctgatcggtatttccttctgt

SEQ ID NO: 3751810 - DNA, 25 bp, Homo sapien
tgcagccaggcgctgatcggtattt

SEQ ID NO: 3751811 - DNA, 25 bp, Homo sapien
tatagttccacaaaatatggcacca

SEQ ID NO: 3751812 - DNA, 25 bp, Homo sapien
gaaacacggatctttgctgccaaca

SEQ ID NO: 3751813 - DNA, 25 bp, Homo sapien
cttgcacagactgacaaagctttgc

SEQ ID NO: 3751814 - DNA, 25 bp, Homo sapien
catgcggccctagatgaatcagaaa

SEQ ID NO: 3751815 - DNA, 25 bp, Homo sapien
agatcagggccgcggcgcctctctt

SEQ ID NO: 3751816 - DNA, 25 bp, Homo sapien
ctgaaaggagatcagggccgcggcg

SEQ ID NO: 3751817 - DNA, 25 bp, Homo sapien
gggctggcatgtgcgaacccaccac

SEQ ID NO: 3751818 - DNA, 25 bp, Homo sapien
catgtgcgaacccaccactcgccat

SEQ ID NO: 3751819 - DNA, 25 bp, Homo sapien
attcgccaggtttatagtcaacgct

SEQ ID NO: 3751820 - DNA, 25 bp, Homo sapien
cattcgccaggtttatagtcaacgc

SEQ ID NO: 3751821 - DNA, 25 bp, Homo sapien
tccacaaaagcgcaggtatcagtag

SEQ ID NO: 3751822 - DNA, 25 bp, Homo sapien
cgctctgggcatccgcacagaggga

SEQ ID NO: 3751823 - DNA, 25 bp, Homo sapien
gatgtcgtggccccggccttctttc

SEQ ID NO: 3751824 - DNA, 25 bp, Homo sapien
gatgcttgtgctgcgccgatgtcgt

SEQ ID NO: 3751825 - DNA, 25 bp, Homo sapien
attattaatatacctaatagccttg

SEQ ID NO: 3751826 - DNA, 25 bp, Homo sapien
attaaggacaaatccctatttatca

SEQ ID NO: 3751827 - DNA, 25 bp, Homo sapien
ggacaaatccctatttatcaaatta

SEQ ID NO: 3751828 - DNA, 25 bp, Homo sapien
tacctaatagccttgttttcataaa

SEQ ID NO: 3751829 - DNA, 25 bp, Homo sapien
aaagttgcacaaaccccgactggag

SEQ ID NO: 3751830 - DNA, 25 bp, Homo sapien
gaaagttgcacaaaccccgactgga

SEQ ID NO: 3751831 - DNA, 25 bp, Homo sapien
tggaaagttgcacaaaccccgactg

SEQ ID NO: 3751832 - DNA, 25 bp, Homo sapien
agttgcacaaaccccgactggaggg

SEQ ID NO: 3751833 - DNA, 25 bp, Homo sapien
aagaaccagaccagggccttctgca

SEQ ID NO: 3751834 - DNA, 25 bp, Homo sapien
gcaaagaaccagaccagggccttct

SEQ ID NO: 3751835 - DNA, 25 bp, Homo sapien
tttgcaaagaaccagaccagggcct

SEQ ID NO: 3751836 - DNA, 25 bp, Homo sapien
gtcctttgcaaagaaccagaccagg

SEQ ID NO: 3751837 - DNA, 25 bp, Homo sapien
tgctggtttccgctgaggcccgtcc

SEQ ID NO: 3751838 - DNA, 25 bp, Homo sapien
ggacaagcgggaccacgctcctgtg

SEQ ID NO: 3751839 - DNA, 25 bp, Homo sapien
ggcccgtccgagaagccctctagtg

SEQ ID NO: 3751840 - DNA, 25 bp, Homo sapien
cctctagtggggacaagcgggacca

SEQ ID NO: 3751841 - DNA, 25 bp, Homo sapien
tgtgttgctggctgtttagcgggtg

SEQ ID NO: 3751842 - DNA, 25 bp, Homo sapien
tgttgctggctgtttagcgggtggg

SEQ ID NO: 3751843 - DNA, 25 bp, Homo sapien
atgtgttgctggctgtttagcgggt

SEQ ID NO: 3751844 - DNA, 25 bp, Homo sapien
ttgctggctgtttagcgggtggggg

SEQ ID NO: 3751845 - DNA, 25 bp, Homo sapien
cctgggatctcgatgctggcctgga

SEQ ID NO: 3751846 - DNA, 25 bp, Homo sapien
tgtttccctgggatctcgatgctgg

SEQ ID NO: 3751847 - DNA, 25 bp, Homo sapien
tgctgaaggttctgttgtatattaa

SEQ ID NO: 3751848 - DNA, 25 bp, Homo sapien
ggccacagttcagggtcacttgtac

SEQ ID NO: 3751849 - DNA, 25 bp, Homo sapien
tatcccggtacattcaaaaggtgat

SEQ ID NO: 3751850 - DNA, 25 bp, Homo sapien
tatatcccggtacattcaaaaggtg

SEQ ID NO: 3751851 - DNA, 25 bp, Homo sapien
actatatcccggtacattcaaaagg

SEQ ID NO: 3751852 - DNA, 25 bp, Homo sapien
atcccggtacattcaaaaggtgatt

SEQ ID NO: 3751853 - DNA, 25 bp, Homo sapien
caaatgaatggtatcaggtgaaaaa

SEQ ID NO: 3751854 - DNA, 25 bp, Homo sapien
tctgtgcttgttcagatttaaggcc

SEQ ID NO: 3751855 - DNA, 25 bp, Homo sapien
taaggcctacaaatttgcaccttat

SEQ ID NO: 3751856 - DNA, 25 bp, Homo sapien
acaaatgaatggtatcaggtgaaaa

SEQ ID NO: 3751857 - DNA, 25 bp, Homo sapien
gctaattaacggctggctgccggcg

SEQ ID NO: 3751858 - DNA, 25 bp, Homo sapien
tcatgacgagcatgggaagtatgct

SEQ ID NO: 3751859 - DNA, 25 bp, Homo sapien
gattagcccgtgacttcatgacgag

SEQ ID NO: 3751860 - DNA, 25 bp, Homo sapien
ggcaggagcctgttccgaaccgtgt

SEQ ID NO: 3751861 - DNA, 25 bp, Homo sapien
atgaaagcccatgccatttcccggg

SEQ ID NO: 3751862 - DNA, 25 bp, Homo sapien
agcccatgccatttcccggggattg

SEQ ID NO: 3751863 - DNA, 25 bp, Homo sapien
aatgaaagcccatgccatttcccgg

SEQ ID NO: 3751864 - DNA, 25 bp, Homo sapien
gaaagcccatgccatttcccgggga

SEQ ID NO: 3751865 - DNA, 25 bp, Homo sapien
gcagacgttccgagtcagactgatc

SEQ ID NO: 3751866 - DNA, 25 bp, Homo sapien
tgatcaatgaaattaactgtagctt

SEQ ID NO: 3751867 - DNA, 25 bp, Homo sapien
tgctgttgacctcagcagacgttcc

SEQ ID NO: 3751868 - DNA, 25 bp, Homo sapien
ttaactgtagctttaaactctggct

SEQ ID NO: 3751869 - DNA, 25 bp, Homo sapien
aaaatgcagcatgtaaacattggga

SEQ ID NO: 3751870 - DNA, 25 bp, Homo sapien
cctgaaaatgcagcatgtaaacatt

SEQ ID NO: 3751871 - DNA, 25 bp, Homo sapien
ctgagtaggaagtcaccagcaggag

SEQ ID NO: 3751872 - DNA, 25 bp, Homo sapien
aggagactctgtccctctggcaact

SEQ ID NO: 3751873 - DNA, 25 bp, Homo sapien
catctgcagacaggctgctgccagc

SEQ ID NO: 3751874 - DNA, 25 bp, Homo sapien
acatctgcagacaggctgctgccag

SEQ ID NO: 3751875 - DNA, 25 bp, Homo sapien
cacatctgcagacaggctgctgcca

SEQ ID NO: 3751876 - DNA, 25 bp, Homo sapien
ccacatctgcagacaggctgctgcc

SEQ ID NO: 3751877 - DNA, 25 bp, Homo sapien
tgtgctcactgacccagggactcac

SEQ ID NO: 3751878 - DNA, 25 bp, Homo sapien
gatgacatactgatactcattgggt

SEQ ID NO: 3751879 - DNA, 25 bp, Homo sapien
aattttgagagtatggattcactcc

SEQ ID NO: 3751880 - DNA, 25 bp, Homo sapien
cctttgtcccctgatgacatactga

SEQ ID NO: 3751881 - DNA, 25 bp, Homo sapien
tcaggactcctctggtaagatttga

SEQ ID NO: 3751882 - DNA, 25 bp, Homo sapien
tcataataatctttgtagcttcttg

SEQ ID NO: 3751883 - DNA, 25 bp, Homo sapien
caagtttgaaattgcatgcgtcagg

SEQ ID NO: 3751884 - DNA, 25 bp, Homo sapien
tgcgtcaggactttgctaattaaag

SEQ ID NO: 3751885 - DNA, 25 bp, Homo sapien
caaaaatgccataataactgttaat

SEQ ID NO: 3751886 - DNA, 25 bp, Homo sapien
aaaggagaccggctttgtcttcctg

SEQ ID NO: 3751887 - DNA, 25 bp, Homo sapien
cctcctaggtccctgcaggaaagtg

SEQ ID NO: 3751888 - DNA, 25 bp, Homo sapien
ggaagagcagaaccccttcctggct

SEQ ID NO: 3751889 - DNA, 25 bp, Homo sapien
ggcccgtgtacaccgcgagtgtgtc

SEQ ID NO: 3751890 - DNA, 25 bp, Homo sapien
caggctcggagacaatgggcgccct

SEQ ID NO: 3751891 - DNA, 25 bp, Homo sapien
tctcggataaaagggtcgtgtgctg

SEQ ID NO: 3751892 - DNA, 25 bp, Homo sapien
gaagttcctgcataggtgttgcctc

SEQ ID NO: 3751893 - DNA, 25 bp, Homo sapien
gagaatgtcagctgtccgtcagggc

SEQ ID NO: 3751894 - DNA, 25 bp, Homo sapien
ccgggcagccttgctgcgggaggcg

SEQ ID NO: 3751895 - DNA, 25 bp, Homo sapien
gcaaaattaatagccgtgcagaggg

SEQ ID NO: 3751896 - DNA, 25 bp, Homo sapien
tcgaggctgcacgttatccgaggat

SEQ ID NO: 3751897 - DNA, 25 bp, Homo sapien
tccgaggatgcaaaattaatagccg

SEQ ID NO: 3751898 - DNA, 25 bp, Homo sapien
tcaagaaaaaggtgaaacgtgtgta

SEQ ID NO: 3751899 - DNA, 25 bp, Homo sapien
tgtcttgtaggcgttttcattccaa

SEQ ID NO: 3751900 - DNA, 25 bp, Homo sapien
agccacagaattgcgttgtgttctc

SEQ ID NO: 3751901 - DNA, 25 bp, Homo sapien
tatgactttcatcgaagccacagaa

SEQ ID NO: 3751902 - DNA, 25 bp, Homo sapien
gtgtgggtaaatcgtttcattagca

SEQ ID NO: 3751903 - DNA, 25 bp, Homo sapien
gggtaaatcgtttcattagcagctt

SEQ ID NO: 3751904 - DNA, 25 bp, Homo sapien
gctggatccggagcctccgcgctga

SEQ ID NO: 3751905 - DNA, 25 bp, Homo sapien
ggcggtggtacccatcatgatgtgc

SEQ ID NO: 3751906 - DNA, 25 bp, Homo sapien
ggcaaagctcccttcggctgccgaa

SEQ ID NO: 3751907 - DNA, 25 bp, Homo sapien
cactctagttgttcctttgttggca

SEQ ID NO: 3751908 - DNA, 25 bp, Homo sapien
aggaagcagccatgcatttcctcca

SEQ ID NO: 3751909 - DNA, 25 bp, Homo sapien
tcttgctgggccgtgcgttgctctg

SEQ ID NO: 3751910 - DNA, 25 bp, Homo sapien
tcggggacagagagagtctcagtca

SEQ ID NO: 3751911 - DNA, 25 bp, Homo sapien
ctcggggacagagagagtctcagtc

SEQ ID NO: 3751912 - DNA, 25 bp, Homo sapien
cggggacagagagagtctcagtcat

SEQ ID NO: 3751913 - DNA, 25 bp, Homo sapien
tgttccgagtcacagagaccctgct

SEQ ID NO: 3751914 - DNA, 25 bp, Homo sapien
cttccctccgtatctgcttgtcaga

SEQ ID NO: 3751915 - DNA, 25 bp, Homo sapien
gaactcatggcttggtctgcgttgt

SEQ ID NO: 3751916 - DNA, 25 bp, Homo sapien
gtttggtcacctgcgtactcgccct

SEQ ID NO: 3751917 - DNA, 25 bp, Homo sapien
ggagccggtggcctagtggaggctg

SEQ ID NO: 3751918 - DNA, 25 bp, Homo sapien
acctccacagggatcggtgaggccc

SEQ ID NO: 3751919 - DNA, 25 bp, Homo sapien
ccacagggatcggtgaggccccatg

SEQ ID NO: 3751920 - DNA, 25 bp, Homo sapien
gggcagcagttcttcacgcagacat

SEQ ID NO: 3751921 - DNA, 25 bp, Homo sapien
cttggctggggggatgcatcccact

SEQ ID NO: 3751922 - DNA, 25 bp, Homo sapien
tgggaatcagcccacttcggataat

SEQ ID NO: 3751923 - DNA, 25 bp, Homo sapien
cagggcctcgttgtgagtgggaatc

SEQ ID NO: 3751924 - DNA, 25 bp, Homo sapien
ctgtcttgggacactatctccatcc

SEQ ID NO: 3751925 - DNA, 25 bp, Homo sapien
cacagtccgtgacgcaggggttcgt

SEQ ID NO: 3751926 - DNA, 25 bp, Homo sapien
gcagctctgggtggtcccgtcagcc

SEQ ID NO: 3751927 - DNA, 25 bp, Homo sapien
gcagtcggggttcacagtccgtgac

SEQ ID NO: 3751928 - DNA, 25 bp, Homo sapien
catcgctgtaggtacgcagaccaca

SEQ ID NO: 3751929 - DNA, 25 bp, Homo sapien
ggcaagtggcattgctcggaatagt

SEQ ID NO: 3751930 - DNA, 25 bp, Homo sapien
tagtaacggttcctgttagatctca

SEQ ID NO: 3751931 - DNA, 25 bp, Homo sapien
gaactgttctttactcggctggacg

SEQ ID NO: 3751932 - DNA, 25 bp, Homo sapien
tcggctggacgtcttgagtttgcag

SEQ ID NO: 3751933 - DNA, 25 bp, Homo sapien
ggagagagcggaccaagccctctct

SEQ ID NO: 3751934 - DNA, 25 bp, Homo sapien
gagagcggaccaagccctctcttct

SEQ ID NO: 3751935 - DNA, 25 bp, Homo sapien
gtcacctggcagctaatttggcgcc

SEQ ID NO: 3751936 - DNA, 25 bp, Homo sapien
aaatgtggaaatcgtgcctgtcacc

SEQ ID NO: 3751937 - DNA, 25 bp, Homo sapien
agcagctcagatccaaatgtggaaa

SEQ ID NO: 3751938 - DNA, 25 bp, Homo sapien
ttggcgcccatggagttgctggcct

SEQ ID NO: 3751939 - DNA, 25 bp, Homo sapien
ctgatcaggaggcaccgcctgctgc

SEQ ID NO: 3751940 - DNA, 25 bp, Homo sapien
caagctctgctccagatgggcttag

SEQ ID NO: 3751941 - DNA, 25 bp, Homo sapien
tctggatgagcagccctgatcagga

SEQ ID NO: 3751942 - DNA, 25 bp, Homo sapien
gatcgtggccgctcttggtgtcttg

SEQ ID NO: 3751943 - DNA, 25 bp, Homo sapien
tgttctcacacgtccgatccgtgga

SEQ ID NO: 3751944 - DNA, 25 bp, Homo sapien
gggttgttctcacacgtccgatccg

SEQ ID NO: 3751945 - DNA, 25 bp, Homo sapien
tgagggttgttctcacacgtccgat

SEQ ID NO: 3751946 - DNA, 25 bp, Homo sapien
gggtgactgagggttgttctcacac

SEQ ID NO: 3751947 - DNA, 25 bp, Homo sapien
tgttcccggcacgattgctgtccca

SEQ ID NO: 3751948 - DNA, 25 bp, Homo sapien
tctgatcccagttgtagactcaggg

SEQ ID NO: 3751949 - DNA, 25 bp, Homo sapien
gctgtcccactttcagacagccagt

SEQ ID NO: 3751950 - DNA, 25 bp, Homo sapien
ctcggcatgcatcacgtaggagatg

SEQ ID NO: 3751951 - DNA, 25 bp, Homo sapien
cccagcggtgtctctggtgctgcgt

SEQ ID NO: 3751952 - DNA, 25 bp, Homo sapien
tctctttcccatggcctcagttgtg

SEQ ID NO: 3751953 - DNA, 25 bp, Homo sapien
ggcaggctgagctcgtaagcccttg

SEQ ID NO: 3751954 - DNA, 25 bp, Homo sapien
taagcccttgtgatcaggcgtagct

SEQ ID NO: 3751955 - DNA, 25 bp, Homo sapien
cctgtccttcgtatttgtcagtccc

SEQ ID NO: 3751956 - DNA, 25 bp, Homo sapien
tgagaagtggcaggatacttttgac

SEQ ID NO: 3751957 - DNA, 25 bp, Homo sapien
cccttgagaagtggcaggatacttt

SEQ ID NO: 3751958 - DNA, 25 bp, Homo sapien
cttcgtatttgtcagtcccttgaga

SEQ ID NO: 3751959 - DNA, 25 bp, Homo sapien
gttgtgtactcggaaaagaggctga

SEQ ID NO: 3751960 - DNA, 25 bp, Homo sapien
aggctgatacatccccgtcagaggg

SEQ ID NO: 3751961 - DNA, 25 bp, Homo sapien
ctgttggacaccagtgggccctcgg

SEQ ID NO: 3751962 - DNA, 25 bp, Homo sapien
tgcctgttggacaccagtgggccct

SEQ ID NO: 3751963 - DNA, 25 bp, Homo sapien
cctctgccttcccatgcccagactc

SEQ ID NO: 3751964 - DNA, 25 bp, Homo sapien
cccgcggttcccctggcatcctggg

SEQ ID NO: 3751965 - DNA, 25 bp, Homo sapien
ttccggggtgggcggtgccctctgc

SEQ ID NO: 3751966 - DNA, 25 bp, Homo sapien
catgcccagactcccccgcggttcc

SEQ ID NO: 3751967 - DNA, 25 bp, Homo sapien
ctggttttacgctgcagtcctgttt

SEQ ID NO: 3751968 - DNA, 25 bp, Homo sapien
gcagtcctgtttgctgtggcccaac

SEQ ID NO: 3751969 - DNA, 25 bp, Homo sapien
ctgtggcccaacatgggaggatcga

SEQ ID NO: 3751970 - DNA, 25 bp, Homo sapien
cgagtgtgggatgtttatggcagcc

SEQ ID NO: 3751971 - DNA, 25 bp, Homo sapien
cccattgtagacatgggactgctcc

SEQ ID NO: 3751972 - DNA, 25 bp, Homo sapien
gaagctctaagagcaggtcttgctc

SEQ ID NO: 3751973 - DNA, 25 bp, Homo sapien
gtagacatgggactgctccacggcc

SEQ ID NO: 3751974 - DNA, 25 bp, Homo sapien
tgggtcccattgtagacatgggact

SEQ ID NO: 3751975 - DNA, 25 bp, Homo sapien
cagttagtgctaagaacctgcaggg

SEQ ID NO: 3751976 - DNA, 25 bp, Homo sapien
ctgcagggagccgtccatgctgaga

SEQ ID NO: 3751977 - DNA, 25 bp, Homo sapien
tccctgaggataggaggtgtttctc

SEQ ID NO: 3751978 - DNA, 25 bp, Homo sapien
cctgagtgggtgaggcggggctccc

SEQ ID NO: 3751979 - DNA, 25 bp, Homo sapien
taaatagagctgtatggtgaggctc

SEQ ID NO: 3751980 - DNA, 25 bp, Homo sapien
gctatcatacctgcaattccaagga

SEQ ID NO: 3751981 - DNA, 25 bp, Homo sapien
tgtacaatggtgtcggatgatgaat

SEQ ID NO: 3751982 - DNA, 25 bp, Homo sapien
aattgatcgcagattggacgcatgg

SEQ ID NO: 3751983 - DNA, 25 bp, Homo sapien
agttaccaagacatgggctgccagg

SEQ ID NO: 3751984 - DNA, 25 bp, Homo sapien
gccatcagttaccaagacatgggct

SEQ ID NO: 3751985 - DNA, 25 bp, Homo sapien
agccgccatcagttaccaagacatg

SEQ ID NO: 3751986 - DNA, 25 bp, Homo sapien
catcagttaccaagacatgggctgc

SEQ ID NO: 3751987 - DNA, 25 bp, Homo sapien
gggattggattggacgtgctgctgg

SEQ ID NO: 3751988 - DNA, 25 bp, Homo sapien
gcggctcgtcccctgacacgaggaa

SEQ ID NO: 3751989 - DNA, 25 bp, Homo sapien
ttttctcaatgaagcggctcgtccc

SEQ ID NO: 3751990 - DNA, 25 bp, Homo sapien
attggattggacgtgctgctggtcc

SEQ ID NO: 3751991 - DNA, 25 bp, Homo sapien
actcaaggagcttaacctgcagttg

SEQ ID NO: 3751992 - DNA, 25 bp, Homo sapien
taacctgcagttggcaaagcttctg

SEQ ID NO: 3751993 - DNA, 25 bp, Homo sapien
atggaaattgtcattgcagacagga

SEQ ID NO: 3751994 - DNA, 25 bp, Homo sapien
ggaaattgtcattgcagacaggaag

SEQ ID NO: 3751995 - DNA, 25 bp, Homo sapien
agaggccttctcgtgatgccgaaga

SEQ ID NO: 3751996 - DNA, 25 bp, Homo sapien
cagaggccttctcgtgatgccgaag

SEQ ID NO: 3751997 - DNA, 25 bp, Homo sapien
cagaagataattggggctggccaga

SEQ ID NO: 3751998 - DNA, 25 bp, Homo sapien
gcgtgattaaatccaactctgctga

SEQ ID NO: 3751999 - DNA, 25 bp, Homo sapien
aatgccagcatttataaggtcaacg

SEQ ID NO: 3752000 - DNA, 25 bp, Homo sapien
cctcatggctttgcacgagcgtgat

SEQ ID NO: 3752001 - DNA, 25 bp, Homo sapien
ttgtcaggttgttttcagaagcggg

SEQ ID NO: 3752002 - DNA, 25 bp, Homo sapien
agcagatggtcttcattaggaacac

SEQ ID NO: 3752003 - DNA, 25 bp, Homo sapien
tgtttcacccgtgcattccaagggc

SEQ ID NO: 3752004 - DNA, 25 bp, Homo sapien
taggaacacccattgtccacatatc

SEQ ID NO: 3752005 - DNA, 25 bp, Homo sapien
ttccaagggctgcaaatgattccag

SEQ ID NO: 3752006 - DNA, 25 bp, Homo sapien
tctgcacgagttttcactgctgggc

SEQ ID NO: 3752007 - DNA, 25 bp, Homo sapien
tctaaaaataaacgaccacatgggc

SEQ ID NO: 3752008 - DNA, 25 bp, Homo sapien
caagggcactgacaaatggatctcg

SEQ ID NO: 3752009 - DNA, 25 bp, Homo sapien
gagaaagtttatgcctctgcacgag

SEQ ID NO: 3752010 - DNA, 25 bp, Homo sapien
tcgtgctggcgctctacgataggca

SEQ ID NO: 3752011 - DNA, 25 bp, Homo sapien
agattgaaaggaccgcttttgtgga

SEQ ID NO: 3752012 - DNA, 25 bp, Homo sapien
cgtgctggcgctctacgataggcag

SEQ ID NO: 3752013 - DNA, 25 bp, Homo sapien
ggcagccggtggagattgaaaggac

SEQ ID NO: 3752014 - DNA, 25 bp, Homo sapien
aacccggtgcgctcgtggatgcaca

SEQ ID NO: 3752015 - DNA, 25 bp, Homo sapien
agccgctgggcagcggcatgaaccc

SEQ ID NO: 3752016 - DNA, 25 bp, Homo sapien
ggacgaccatgaaggaggagccgct

SEQ ID NO: 3752017 - DNA, 25 bp, Homo sapien
cgtggatgcacacggcgggcgtggt

SEQ ID NO: 3752018 - DNA, 25 bp, Homo sapien
actcactgccccgtttatttgtctt

SEQ ID NO: 3752019 - DNA, 25 bp, Homo sapien
gctaggatgacaccacgttgagcgc

SEQ ID NO: 3752020 - DNA, 25 bp, Homo sapien
ccagaagcgggcgatcccgcagtgt

SEQ ID NO: 3752021 - DNA, 25 bp, Homo sapien
ttgtctttggagcaggcgggccgcg

SEQ ID NO: 3752022 - DNA, 25 bp, Homo sapien
ggcggccgctcccatatatggcgca

SEQ ID NO: 3752023 - DNA, 25 bp, Homo sapien
agagggctgagttttgtgcgcctcc

SEQ ID NO: 3752024 - DNA, 25 bp, Homo sapien
gttttgtgcgcctccgtccgctgcg

SEQ ID NO: 3752025 - DNA, 25 bp, Homo sapien
ctggacgcgaggagccgcggtgcgt

SEQ ID NO: 3752026 - DNA, 25 bp, Homo sapien
tcgctgtgcgtaagaacaggccagg

SEQ ID NO: 3752027 - DNA, 25 bp, Homo sapien
ctttgtcactcgctgtgcgtaagaa

SEQ ID NO: 3752028 - DNA, 25 bp, Homo sapien
ccttctttgtcactcgctgtgcgta

SEQ ID NO: 3752029 - DNA, 25 bp, Homo sapien
cggcgtccgcttggtttttggagca

SEQ ID NO: 3752030 - DNA, 25 bp, Homo sapien
atacttcccaccctccgaggaggag

SEQ ID NO: 3752031 - DNA, 25 bp, Homo sapien
attgaagcctctccccgtaaatccg

SEQ ID NO: 3752032 - DNA, 25 bp, Homo sapien
cacccgtgcaaatcgcgttgggcgc

SEQ ID NO: 3752033 - DNA, 25 bp, Homo sapien
cgtaaatccgcacaaaaggaatact

SEQ ID NO: 3752034 - DNA, 25 bp, Homo sapien
gccatctgactgactccggcttgac

SEQ ID NO: 3752035 - DNA, 25 bp, Homo sapien
actgcctgctccggcacgacatggg

SEQ ID NO: 3752036 - DNA, 25 bp, Homo sapien
gactgactccggcttgacatctggg

SEQ ID NO: 3752037 - DNA, 25 bp, Homo sapien
tgtggcacgcgaagcgcttgatgcc

SEQ ID NO: 3752038 - DNA, 25 bp, Homo sapien
aggccggcacggtctgagcgtgacc

SEQ ID NO: 3752039 - DNA, 25 bp, Homo sapien
ctgcctgtgcttggcgcccgattct

SEQ ID NO: 3752040 - DNA, 25 bp, Homo sapien
tcagcactggcggcgggcacacgaa

SEQ ID NO: 3752041 - DNA, 25 bp, Homo sapien
caggcttgagcagggctagaggccc

SEQ ID NO: 3752042 - DNA, 25 bp, Homo sapien
ctgtttgtcaaacttggccgccttg

SEQ ID NO: 3752043 - DNA, 25 bp, Homo sapien
caggaggcgctgtttgtcaaacttg

SEQ ID NO: 3752044 - DNA, 25 bp, Homo sapien
cccaggaggcgctgtttgtcaaact

SEQ ID NO: 3752045 - DNA, 25 bp, Homo sapien
aaacttggccgccttggcaggaggc

SEQ ID NO: 3752046 - DNA, 25 bp, Homo sapien
cttttgcgcaccagaacgggtgtat

SEQ ID NO: 3752047 - DNA, 25 bp, Homo sapien
gaacgggtgtatacactctgttaag

SEQ ID NO: 3752048 - DNA, 25 bp, Homo sapien
gcaccagaacgggtgtatacactct

SEQ ID NO: 3752049 - DNA, 25 bp, Homo sapien
atcgccccacttttgcgcaccagaa

SEQ ID NO: 3752050 - DNA, 25 bp, Homo sapien
ctagctatgccctgggccgccttgc

SEQ ID NO: 3752051 - DNA, 25 bp, Homo sapien
gctatgccctgggccgccttgccgc

SEQ ID NO: 3752052 - DNA, 25 bp, Homo sapien
ttctacatggcccctagctatgccc

SEQ ID NO: 3752053 - DNA, 25 bp, Homo sapien
cttgccgcccagcagttttctcttc

SEQ ID NO: 3752054 - DNA, 25 bp, Homo sapien
tccgaggatttagctgaaggacccc

SEQ ID NO: 3752055 - DNA, 25 bp, Homo sapien
tccggggttccgaggatttagctga

SEQ ID NO: 3752056 - DNA, 25 bp, Homo sapien
aggatttagctgaaggaccccgcgt

SEQ ID NO: 3752057 - DNA, 25 bp, Homo sapien
ggttccgaggatttagctgaaggac

SEQ ID NO: 3752058 - DNA, 25 bp, Homo sapien
tgtcccatgctgggctgttccgcca

SEQ ID NO: 3752059 - DNA, 25 bp, Homo sapien
gggctgttccgccagctttgatgtg

SEQ ID NO: 3752060 - DNA, 25 bp, Homo sapien
ggttacggttgtgctgtgcagattc

SEQ ID NO: 3752061 - DNA, 25 bp, Homo sapien
agattcctcgggcccctgtcccatg

SEQ ID NO: 3752062 - DNA, 25 bp, Homo sapien
ttacattggcctcagagccgcagga

SEQ ID NO: 3752063 - DNA, 25 bp, Homo sapien
acattggcctcagagccgcaggagt

SEQ ID NO: 3752064 - DNA, 25 bp, Homo sapien
cctcagagccgcaggagtcggtgtt

SEQ ID NO: 3752065 - DNA, 25 bp, Homo sapien
attggcctcagagccgcaggagtcg

SEQ ID NO: 3752066 - DNA, 25 bp, Homo sapien
cagcttgggcttgcgaagttcctgg

SEQ ID NO: 3752067 - DNA, 25 bp, Homo sapien
cctgtcttctatggataggactcca

SEQ ID NO: 3752068 - DNA, 25 bp, Homo sapien
ctggtgagtaagttctgcagcttgg

SEQ ID NO: 3752069 - DNA, 25 bp, Homo sapien
ctccatggctggtgagtaagttctg

SEQ ID NO: 3752070 - DNA, 25 bp, Homo sapien
gccacacttagttcccggatggtca

SEQ ID NO: 3752071 - DNA, 25 bp, Homo sapien
gatggtcatgtgagccaatcacacc

SEQ ID NO: 3752072 - DNA, 25 bp, Homo sapien
tccaggacagatgccggcctatcaa

SEQ ID NO: 3752073 - DNA, 25 bp, Homo sapien
agatgccggcctatcaaagaagccc

SEQ ID NO: 3752074 - DNA, 25 bp, Homo sapien
tgccagggacattagtgggcacaga

SEQ ID NO: 3752075 - DNA, 25 bp, Homo sapien
tgtgcaagtgccagggacattagtg

SEQ ID NO: 3752076 - DNA, 25 bp, Homo sapien
tcccacgtgcaggccgagtcggtgc

SEQ ID NO: 3752077 - DNA, 25 bp, Homo sapien
agagggccttgcaatgtgcaagtgc

SEQ ID NO: 3752078 - DNA, 25 bp, Homo sapien
tgaaggcccccatagccatgctggt

SEQ ID NO: 3752079 - DNA, 25 bp, Homo sapien
gaggatgacgccctgatttctggct

SEQ ID NO: 3752080 - DNA, 25 bp, Homo sapien
ggcaagtgtcctgcatggccgtgca

SEQ ID NO: 3752081 - DNA, 25 bp, Homo sapien
gcactcctgggtgacgttacagctg

SEQ ID NO: 3752082 - DNA, 25 bp, Homo sapien
caaactgccctgaaccaccctcagg

SEQ ID NO: 3752083 - DNA, 25 bp, Homo sapien
ccaaactgccctgaaccaccctcag

SEQ ID NO: 3752084 - DNA, 25 bp, Homo sapien
gccaaactgccctgaaccaccctca

SEQ ID NO: 3752085 - DNA, 25 bp, Homo sapien
cggaagttcacattcgtagaaactg

SEQ ID NO: 3752086 - DNA, 25 bp, Homo sapien
gcaaagccacggaagttcacattcg

SEQ ID NO: 3752087 - DNA, 25 bp, Homo sapien
cacattcgtagaaactgtttgtatc

SEQ ID NO: 3752088 - DNA, 25 bp, Homo sapien
tgccagcaaagccacggaagttcac

SEQ ID NO: 3752089 - DNA, 25 bp, Homo sapien
tcaggactaagtacaccaggcaggt

SEQ ID NO: 3752090 - DNA, 25 bp, Homo sapien
tgccttgggctacatttcaggacta

SEQ ID NO: 3752091 - DNA, 25 bp, Homo sapien
gctcggagggacctcaccaaaggga

SEQ ID NO: 3752092 - DNA, 25 bp, Homo sapien
gagatttgtggatctcctgaacatg

SEQ ID NO: 3752093 - DNA, 25 bp, Homo sapien
ggttgctctgttcggcctgcatgag

SEQ ID NO: 3752094 - DNA, 25 bp, Homo sapien
cagaggagatgtcgcttggtttccg

SEQ ID NO: 3752095 - DNA, 25 bp, Homo sapien
gtggccctggttgctcgccctggtt

SEQ ID NO: 3752096 - DNA, 25 bp, Homo sapien
gatcagaggagatgtcgcttggttt

SEQ ID NO: 3752097 - DNA, 25 bp, Homo sapien
ggcagcccacaggtcttgaccagtg

SEQ ID NO: 3752098 - DNA, 25 bp, Homo sapien
gcttctcggccttgtgggtgctgac

SEQ ID NO: 3752099 - DNA, 25 bp, Homo sapien
ttctcggccttgtgggtgctgacta

SEQ ID NO: 3752100 - DNA, 25 bp, Homo sapien
acacaggcagcccacaggtcttgac

SEQ ID NO: 3752101 - DNA, 25 bp, Homo sapien
gagccacaggggaactgtagcgcat

SEQ ID NO: 3752102 - DNA, 25 bp, Homo sapien
ctgagagccacaggggaactgtagc

SEQ ID NO: 3752103 - DNA, 25 bp, Homo sapien
agagccacaggggaactgtagcgca

SEQ ID NO: 3752104 - DNA, 25 bp, Homo sapien
tcactgagagccacaggggaactgt

SEQ ID NO: 3752105 - DNA, 25 bp, Homo sapien
tcaggatcccccgtagagaggaggt

SEQ ID NO: 3752106 - DNA, 25 bp, Homo sapien
aagtgaaagtctcacggccgacggg

SEQ ID NO: 3752107 - DNA, 25 bp, Homo sapien
ctgggccttcggggaatgtcctgat

SEQ ID NO: 3752108 - DNA, 25 bp, Homo sapien
tccaagcagctgcaagtgaaagtct

SEQ ID NO: 3752109 - DNA, 25 bp, Homo sapien
tgagccttgagatagggactgaaga

SEQ ID NO: 3752110 - DNA, 25 bp, Homo sapien
cagctggcgagatgggggccgcttc

SEQ ID NO: 3752111 - DNA, 25 bp, Homo sapien
aggcagagcttggagaaatggccca

SEQ ID NO: 3752112 - DNA, 25 bp, Homo sapien
ccgcttctctcagggtggaggctcc

SEQ ID NO: 3752113 - DNA, 25 bp, Homo sapien
gcagagggagctgcctgcttctggg

SEQ ID NO: 3752114 - DNA, 25 bp, Homo sapien
ctgctgggcaccattgttctctagg

SEQ ID NO: 3752115 - DNA, 25 bp, Homo sapien
cttgccagtggcacctccctcggtg

SEQ ID NO: 3752116 - DNA, 25 bp, Homo sapien
cagtggcacctccctcggtgggtgg

SEQ ID NO: 3752117 - DNA, 25 bp, Homo sapien
gccagtggcacctccctcggtgggt

SEQ ID NO: 3752118 - DNA, 25 bp, Homo sapien
ttgccagtggcacctccctcggtgg

SEQ ID NO: 3752119 - DNA, 25 bp, Homo sapien
ggaagaggccgccgcatgttactcc

SEQ ID NO: 3752120 - DNA, 25 bp, Homo sapien
aaacagtatgtggctttcggcagct

SEQ ID NO: 3752121 - DNA, 25 bp, Homo sapien
gaatataggctctccagacgttggc

SEQ ID NO: 3752122 - DNA, 25 bp, Homo sapien
caagcgttgctttccctacttgtgt

SEQ ID NO: 3752123 - DNA, 25 bp, Homo sapien
tcacactggctatacgaatataggc

SEQ ID NO: 3752124 - DNA, 25 bp, Homo sapien
tggcaggtagatgtggaaggaagga

SEQ ID NO: 3752125 - DNA, 25 bp, Homo sapien
gtggaaggaaggaagaaaagcaagc

SEQ ID NO: 3752126 - DNA, 25 bp, Homo sapien
ctggcaggtagatgtggaaggaagg

SEQ ID NO: 3752127 - DNA, 25 bp, Homo sapien
gatgtggaaggaaggaagaaaagca

SEQ ID NO: 3752128 - DNA, 25 bp, Homo sapien
tgttggtagtaatggcctctctgtt

SEQ ID NO: 3752129 - DNA, 25 bp, Homo sapien
tcccacaagccataggaagcccttt

SEQ ID NO: 3752130 - DNA, 25 bp, Homo sapien
gctgttggtagtaatggcctctctg

SEQ ID NO: 3752131 - DNA, 25 bp, Homo sapien
acctcttgtcccacaagccatagga

SEQ ID NO: 3752132 - DNA, 25 bp, Homo sapien
aaggaccctgcttgcaatccgcaca

SEQ ID NO: 3752133 - DNA, 25 bp, Homo sapien
gagtaaggaccctgcttgcaatccg

SEQ ID NO: 3752134 - DNA, 25 bp, Homo sapien
gtaaggaccctgcttgcaatccgca

SEQ ID NO: 3752135 - DNA, 25 bp, Homo sapien
tgagtaaggaccctgcttgcaatcc

SEQ ID NO: 3752136 - DNA, 25 bp, Homo sapien
ggaaatgcatttcaggagccgggaa

SEQ ID NO: 3752137 - DNA, 25 bp, Homo sapien
ctgctagtttcagtccgaagacatt

SEQ ID NO: 3752138 - DNA, 25 bp, Homo sapien
gaagacatttgacgcctgtgcgggt

SEQ ID NO: 3752139 - DNA, 25 bp, Homo sapien
cctcggagtcgggaaggaaatgcat

SEQ ID NO: 3752140 - DNA, 25 bp, Homo sapien
ggcaggtgaggtcgcgtactcggaa

SEQ ID NO: 3752141 - DNA, 25 bp, Homo sapien
ggcacgttctccacacgacggattc

SEQ ID NO: 3752142 - DNA, 25 bp, Homo sapien
agccacgaccggagccatcagactt

SEQ ID NO: 3752143 - DNA, 25 bp, Homo sapien
aggtcgcgtactcggaaggtggctc

SEQ ID NO: 3752144 - DNA, 25 bp, Homo sapien
ctttactccatggaaacttcatccc

SEQ ID NO: 3752145 - DNA, 25 bp, Homo sapien
tgcagccagtactgtagcactttac

SEQ ID NO: 3752146 - DNA, 25 bp, Homo sapien
actttactccatggaaacttcatcc

SEQ ID NO: 3752147 - DNA, 25 bp, Homo sapien
agtactgtagcactttactccatgg

SEQ ID NO: 3752148 - DNA, 25 bp, Homo sapien
gaaggtggacccctcatcattcagc

SEQ ID NO: 3752149 - DNA, 25 bp, Homo sapien
cattcagctcagctggcttcgtccg

SEQ ID NO: 3752150 - DNA, 25 bp, Homo sapien
ctgtccatgggtttagggacaggag

SEQ ID NO: 3752151 - DNA, 25 bp, Homo sapien
agctggcttcgtccgggtctgacca

SEQ ID NO: 3752152 - DNA, 25 bp, Homo sapien
cctgtgatgccccatgactgggatg

SEQ ID NO: 3752153 - DNA, 25 bp, Homo sapien
gcctgtgatgccccatgactgggat

SEQ ID NO: 3752154 - DNA, 25 bp, Homo sapien
ctccagggcaccaagatgatagggg

SEQ ID NO: 3752155 - DNA, 25 bp, Homo sapien
accaagatgatagggggcctgtgat

SEQ ID NO: 3752156 - DNA, 25 bp, Homo sapien
tcctttgattctgtagcaataccat

SEQ ID NO: 3752157 - DNA, 25 bp, Homo sapien
cacttggagatgagattttaaacca

SEQ ID NO: 3752158 - DNA, 25 bp, Homo sapien
tacagccatcggtgtattttcctct

SEQ ID NO: 3752159 - DNA, 25 bp, Homo sapien
ttcatcaccgatggttttacagcca

SEQ ID NO: 3752160 - DNA, 25 bp, Homo sapien
tgtccacgcacgggccggcgtgttt

SEQ ID NO: 3752161 - DNA, 25 bp, Homo sapien
cgtgttttgcacgtaacagctcagt

SEQ ID NO: 3752162 - DNA, 25 bp, Homo sapien
ccggcgtgttttgcacgtaacagct

SEQ ID NO: 3752163 - DNA, 25 bp, Homo sapien
tttgcacgtaacagctcagtggtcc

SEQ ID NO: 3752164 - DNA, 25 bp, Homo sapien
caggggtgaccgctgtcctgtgtgg

SEQ ID NO: 3752165 - DNA, 25 bp, Homo sapien
agtcaccctccatgattgggtggcc

SEQ ID NO: 3752166 - DNA, 25 bp, Homo sapien
atgtgacccccatcgggctcccgtc

SEQ ID NO: 3752167 - DNA, 25 bp, Homo sapien
cctggagtcaccctccatgattggg

SEQ ID NO: 3752168 - DNA, 25 bp, Homo sapien
agtaattgacagatgtactcgggat

SEQ ID NO: 3752169 - DNA, 25 bp, Homo sapien
aaagtcctggctttcgaggagccct

SEQ ID NO: 3752170 - DNA, 25 bp, Homo sapien
ggatcccttgtccaaaagtcctggc

SEQ ID NO: 3752171 - DNA, 25 bp, Homo sapien
cttgagtctcacgcccaacagcaag

SEQ ID NO: 3752172 - DNA, 25 bp, Homo sapien
tgttcaaatagcagcccggtgtcct

SEQ ID NO: 3752173 - DNA, 25 bp, Homo sapien
ctgttcaaatagcagcccggtgtcc

SEQ ID NO: 3752174 - DNA, 25 bp, Homo sapien
caaagatgcatgctggtaaagacgg

SEQ ID NO: 3752175 - DNA, 25 bp, Homo sapien
ttcaagtgttgacgcctccaagaag

SEQ ID NO: 3752176 - DNA, 25 bp, Homo sapien
gcggctcccaggacaactttgtgac

SEQ ID NO: 3752177 - DNA, 25 bp, Homo sapien
gtacagaagggtgcacgcccacttt

SEQ ID NO: 3752178 - DNA, 25 bp, Homo sapien
gtcttgcagcatcagggcgtccgct

SEQ ID NO: 3752179 - DNA, 25 bp, Homo sapien
tcgaaatgaatgtggtgggacccag

SEQ ID NO: 3752180 - DNA, 25 bp, Homo sapien
tatttaggaccgtcacctcgtagcc

SEQ ID NO: 3752181 - DNA, 25 bp, Homo sapien
gtagccctgaatcaccctgctcatg

SEQ ID NO: 3752182 - DNA, 25 bp, Homo sapien
tcgttcaacgtaagcagccccagat

SEQ ID NO: 3752183 - DNA, 25 bp, Homo sapien
tcatctgcctttgcgaaggctgaca

SEQ ID NO: 3752184 - DNA, 25 bp, Homo sapien
ggctgacagatcttctcgttcaacg

SEQ ID NO: 3752185 - DNA, 25 bp, Homo sapien
gatgaggatgctggtcacttgatct

SEQ ID NO: 3752186 - DNA, 25 bp, Homo sapien
tgttcagaccaatgggcatccgtat

SEQ ID NO: 3752187 - DNA, 25 bp, Homo sapien
tctgtgttcagaccaatgggcatcc

SEQ ID NO: 3752188 - DNA, 25 bp, Homo sapien
cagaccaatgggcatccgtatcagc

SEQ ID NO: 3752189 - DNA, 25 bp, Homo sapien
caatgggcatccgtatcagctgctc

SEQ ID NO: 3752190 - DNA, 25 bp, Homo sapien
cagcggagaactcgcagccttgcgt

SEQ ID NO: 3752191 - DNA, 25 bp, Homo sapien
cggcaaccggagcagaccattgtgg

SEQ ID NO: 3752192 - DNA, 25 bp, Homo sapien
gcggtcgccgcagtaaccccggcca

SEQ ID NO: 3752193 - DNA, 25 bp, Homo sapien
cccggccacaacaagcagcggagaa

SEQ ID NO: 3752194 - DNA, 25 bp, Homo sapien
agtctcatactttcaggcagcgctg

SEQ ID NO: 3752195 - DNA, 25 bp, Homo sapien
gattctgactcatctgctagaggct

SEQ ID NO: 3752196 - DNA, 25 bp, Homo sapien
tggaccctccaacagagttgcggga

SEQ ID NO: 3752197 - DNA, 25 bp, Homo sapien
tgttccctcggaagtgacagggacc

SEQ ID NO: 3752198 - DNA, 25 bp, Homo sapien
gatagacatttctcattgcaaacgg

SEQ ID NO: 3752199 - DNA, 25 bp, Homo sapien
gacatttctcattgcaaacggagca

SEQ ID NO: 3752200 - DNA, 25 bp, Homo sapien
acatttctcattgcaaacggagcat

SEQ ID NO: 3752201 - DNA, 25 bp, Homo sapien
tagacatttctcattgcaaacggag

SEQ ID NO: 3752202 - DNA, 25 bp, Homo sapien
tcttgctgcggttttggatgttccg

SEQ ID NO: 3752203 - DNA, 25 bp, Homo sapien
caggtatcttgctgcggttttggat

SEQ ID NO: 3752204 - DNA, 25 bp, Homo sapien
gccaggtatcttgctgcggttttgg

SEQ ID NO: 3752205 - DNA, 25 bp, Homo sapien
tgcggttttggatgttccgtagcag

SEQ ID NO: 3752206 - DNA, 25 bp, Homo sapien
cacctacagtaaatacagttgttgg

SEQ ID NO: 3752207 - DNA, 25 bp, Homo sapien
atactatcgaataaaatacaatgga

SEQ ID NO: 3752208 - DNA, 25 bp, Homo sapien
tacatacgtaaaactcccactgttg

SEQ ID NO: 3752209 - DNA, 25 bp, Homo sapien
ttacttgaaatgagatcagtcagaa

SEQ ID NO: 3752210 - DNA, 25 bp, Homo sapien
cctcggtgccctaagatgagggctc

SEQ ID NO: 3752211 - DNA, 25 bp, Homo sapien
tgtttggagcagtcaagggagctcc

SEQ ID NO: 3752212 - DNA, 25 bp, Homo sapien
cactcccgacagtggctgcgctttt

SEQ ID NO: 3752213 - DNA, 25 bp, Homo sapien
tccagcctacggaggagtagaagtc

SEQ ID NO: 3752214 - DNA, 25 bp, Homo sapien
cacgacaaagtgacgggtagtcagc

SEQ ID NO: 3752215 - DNA, 25 bp, Homo sapien
ttccggctctaggtgatttcctgct

SEQ ID NO: 3752216 - DNA, 25 bp, Homo sapien
ttcagaggctcaggctgttccggct

SEQ ID NO: 3752217 - DNA, 25 bp, Homo sapien
gactcaaatcacagagacacgacaa

SEQ ID NO: 3752218 - DNA, 25 bp, Homo sapien
gatttcgtctacacctctataagga

SEQ ID NO: 3752219 - DNA, 25 bp, Homo sapien
tacccaatggttgcctcatgcatcc

SEQ ID NO: 3752220 - DNA, 25 bp, Homo sapien
tcatgctaccaaactgaaacctggg

SEQ ID NO: 3752221 - DNA, 25 bp, Homo sapien
taaaggccagcgaatcaaaagtggg

SEQ ID NO: 3752222 - DNA, 25 bp, Homo sapien
gcattcaaaccatcactttatagat

SEQ ID NO: 3752223 - DNA, 25 bp, Homo sapien
ccatcactttatagatgtcacatat

SEQ ID NO: 3752224 - DNA, 25 bp, Homo sapien
gcagttagtacccaagtgactgatg

SEQ ID NO: 3752225 - DNA, 25 bp, Homo sapien
aaataataggagaggtttagcatac

SEQ ID NO: 3752226 - DNA, 25 bp, Homo sapien
ggacttagaggttcaagcagctttg

SEQ ID NO: 3752227 - DNA, 25 bp, Homo sapien
tgggattgaactcgaatcaccttcc

SEQ ID NO: 3752228 - DNA, 25 bp, Homo sapien
cagttagtggtgcataaacaggtat

SEQ ID NO: 3752229 - DNA, 25 bp, Homo sapien
cacctgagagatacttcccttgaag

SEQ ID NO: 3752230 - DNA, 25 bp, Homo sapien
tgcaaaagttgaatcaaactgctcc

SEQ ID NO: 3752231 - DNA, 25 bp, Homo sapien
aagttgaatcaaactgctccttggc

SEQ ID NO: 3752232 - DNA, 25 bp, Homo sapien
taaaagacgtcatgggagtttgaaa

SEQ ID NO: 3752233 - DNA, 25 bp, Homo sapien
aaaagacgtcatgggagtttgaaag

SEQ ID NO: 3752234 - DNA, 25 bp, Homo sapien
tatcttgtacatctcagtaagatga

SEQ ID NO: 3752235 - DNA, 25 bp, Homo sapien
tacatctcagtaagatgagcagaca

SEQ ID NO: 3752236 - DNA, 25 bp, Homo sapien
gtgttatcttgtacatctcagtaag

SEQ ID NO: 3752237 - DNA, 25 bp, Homo sapien
tcttgtacatctcagtaagatgagc

SEQ ID NO: 3752238 - DNA, 25 bp, Homo sapien
gaagtgctgggaatgtttaaataag

SEQ ID NO: 3752239 - DNA, 25 bp, Homo sapien
taaaatctaaccttattctagtgcc

SEQ ID NO: 3752240 - DNA, 25 bp, Homo sapien
tggaaggagcgcctcggaaatgcct

SEQ ID NO: 3752241 - DNA, 25 bp, Homo sapien
gccaggctccctactacaggcttta

SEQ ID NO: 3752242 - DNA, 25 bp, Homo sapien
gacaccgttgcttcgtgtacagtct

SEQ ID NO: 3752243 - DNA, 25 bp, Homo sapien
gcagatgctgacaccgttgcttcgt

SEQ ID NO: 3752244 - DNA, 25 bp, Homo sapien
gatgctgacaccgttgcttcgtgta

SEQ ID NO: 3752245 - DNA, 25 bp, Homo sapien
cgttgcttcgtgtacagtctgtaga

SEQ ID NO: 3752246 - DNA, 25 bp, Homo sapien
caactcgaagcgggaggtggcttcc

SEQ ID NO: 3752247 - DNA, 25 bp, Homo sapien
acaactcgaagcgggaggtggcttc

SEQ ID NO: 3752248 - DNA, 25 bp, Homo sapien
tcgaagcgggaggtggcttccaggt

SEQ ID NO: 3752249 - DNA, 25 bp, Homo sapien
ctcgaagcgggaggtggcttccagg

SEQ ID NO: 3752250 - DNA, 25 bp, Homo sapien
ttaacatcgagctgtgtctgcttca

SEQ ID NO: 3752251 - DNA, 25 bp, Homo sapien
gctgtgtctgcttcactggagcctc

SEQ ID NO: 3752252 - DNA, 25 bp, Homo sapien
tgtgtctgcttcactggagcctctc

SEQ ID NO: 3752253 - DNA, 25 bp, Homo sapien
aacatcgagctgtgtctgcttcact

SEQ ID NO: 3752254 - DNA, 25 bp, Homo sapien
cgctggttgaaatgactaagtggaa

SEQ ID NO: 3752255 - DNA, 25 bp, Homo sapien
tgccaccataacatatacgttcttt

SEQ ID NO: 3752256 - DNA, 25 bp, Homo sapien
tgactaagtggaaacgggagatgca

SEQ ID NO: 3752257 - DNA, 25 bp, Homo sapien
tctttttccagtttgccgctggttg

SEQ ID NO: 3752258 - DNA, 25 bp, Homo sapien
gaaaggattcatggttcccacggcc

SEQ ID NO: 3752259 - DNA, 25 bp, Homo sapien
tccagactggatggaccactttggg

SEQ ID NO: 3752260 - DNA, 25 bp, Homo sapien
aataacccaggatgacgtgaacagt

SEQ ID NO: 3752261 - DNA, 25 bp, Homo sapien
aaatgcctccctctgcggagagtga

SEQ ID NO: 3752262 - DNA, 25 bp, Homo sapien
tgcttgtgcacagaggcatcacctc

SEQ ID NO: 3752263 - DNA, 25 bp, Homo sapien
taccaggtacagtcagccgcttcta

SEQ ID NO: 3752264 - DNA, 25 bp, Homo sapien
cacctccttggagggcgtgtgccct

SEQ ID NO: 3752265 - DNA, 25 bp, Homo sapien
tctcttccgctgaccttgacattct

SEQ ID NO: 3752266 - DNA, 25 bp, Homo sapien
tgccgtctgactccaagagctcttg

SEQ ID NO: 3752267 - DNA, 25 bp, Homo sapien
tactcaggttctttcgtgccgtctg

SEQ ID NO: 3752268 - DNA, 25 bp, Homo sapien
aatcagatgtaattccttagagacc

SEQ ID NO: 3752269 - DNA, 25 bp, Homo sapien
aaggaggtcccttccaggacactga

SEQ ID NO: 3752270 - DNA, 25 bp, Homo sapien
caagactcagtggttgcatggcgag

SEQ ID NO: 3752271 - DNA, 25 bp, Homo sapien
tacaggtcccggcatgttgtccaag

SEQ ID NO: 3752272 - DNA, 25 bp, Homo sapien
aatgctggaccaacacgtacggttc

SEQ ID NO: 3752273 - DNA, 25 bp, Homo sapien
ttagggtggtggcttcacacgccgt

SEQ ID NO: 3752274 - DNA, 25 bp, Homo sapien
gctgccgccgccagacagaagcaat

SEQ ID NO: 3752275 - DNA, 25 bp, Homo sapien
ggccgctacagctgcctcagccgcc

SEQ ID NO: 3752276 - DNA, 25 bp, Homo sapien
gccgctacagctgcctcagccgccc

SEQ ID NO: 3752277 - DNA, 25 bp, Homo sapien
caggaaatctctgtctccggcaaca

SEQ ID NO: 3752278 - DNA, 25 bp, Homo sapien
tctgaagactgaggctacctgctgt

SEQ ID NO: 3752279 - DNA, 25 bp, Homo sapien
agggattgaagacctggacaccggc

SEQ ID NO: 3752280 - DNA, 25 bp, Homo sapien
tgcaggcacgcacgctagtaagcat

SEQ ID NO: 3752281 - DNA, 25 bp, Homo sapien
agctaactctgccataacttcgttc

SEQ ID NO: 3752282 - DNA, 25 bp, Homo sapien
ctaactctgccataacttcgttcat

SEQ ID NO: 3752283 - DNA, 25 bp, Homo sapien
tttagctaactctgccataacttcg

SEQ ID NO: 3752284 - DNA, 25 bp, Homo sapien
ttagctaactctgccataacttcgt

SEQ ID NO: 3752285 - DNA, 25 bp, Homo sapien
ccagccctaatctaacccataaatc

SEQ ID NO: 3752286 - DNA, 25 bp, Homo sapien
cccagccctaatctaacccataaat

SEQ ID NO: 3752287 - DNA, 25 bp, Homo sapien
gcacccagccctaatctaacccata

SEQ ID NO: 3752288 - DNA, 25 bp, Homo sapien
cacccagccctaatctaacccataa

SEQ ID NO: 3752289 - DNA, 25 bp, Homo sapien
gagcacaaactaactactctgacca

SEQ ID NO: 3752290 - DNA, 25 bp, Homo sapien
tacgaccatatcatcaatacagaga

SEQ ID NO: 3752291 - DNA, 25 bp, Homo sapien
ccaaaaatgggtgactaactcttct

SEQ ID NO: 3752292 - DNA, 25 bp, Homo sapien
tgatccctttacttcacaagccaaa

SEQ ID NO: 3752293 - DNA, 25 bp, Homo sapien
cagaagagcccactagacatggcag

SEQ ID NO: 3752294 - DNA, 25 bp, Homo sapien
aaactcaggacggagcccagaagag

SEQ ID NO: 3752295 - DNA, 25 bp, Homo sapien
cctctgggccctaggaggtgtgaca

SEQ ID NO: 3752296 - DNA, 25 bp, Homo sapien
tccttttagtgatagaaataccaca

SEQ ID NO: 3752297 - DNA, 25 bp, Homo sapien
gttgatttggatctcaaatacaacc

SEQ ID NO: 3752298 - DNA, 25 bp, Homo sapien
gatccaagcaaccaatggcacagag

SEQ ID NO: 3752299 - DNA, 25 bp, Homo sapien
ccctctgccagataccatattttgg

SEQ ID NO: 3752300 - DNA, 25 bp, Homo sapien
taaatgacaaaggtgtactcctatt

SEQ ID NO: 3752301 - DNA, 25 bp, Homo sapien
aaaggtccccatgtcaagtatctca

SEQ ID NO: 3752302 - DNA, 25 bp, Homo sapien
aaggtccccatgtcaagtatctcac

SEQ ID NO: 3752303 - DNA, 25 bp, Homo sapien
taaaggtccccatgtcaagtatctc

SEQ ID NO: 3752304 - DNA, 25 bp, Homo sapien
gtaaaggtccccatgtcaagtatct

SEQ ID NO: 3752305 - DNA, 25 bp, Homo sapien
gtgggaacagagctaatttcatatt

SEQ ID NO: 3752306 - DNA, 25 bp, Homo sapien
tcagatacttcaggaacaccttcag

SEQ ID NO: 3752307 - DNA, 25 bp, Homo sapien
aaaacagaaaagtgggaacagagct

SEQ ID NO: 3752308 - DNA, 25 bp, Homo sapien
tttcagatacttcaggaacaccttc

SEQ ID NO: 3752309 - DNA, 25 bp, Homo sapien
ctctggggcatgtgcaccatctaat

SEQ ID NO: 3752310 - DNA, 25 bp, Homo sapien
gttcattagcgctgggtaggaagga

SEQ ID NO: 3752311 - DNA, 25 bp, Homo sapien
agatgttcattagcgctgggtagga

SEQ ID NO: 3752312 - DNA, 25 bp, Homo sapien
ttaagatgttcattagcgctgggta

SEQ ID NO: 3752313 - DNA, 25 bp, Homo sapien
gaggagttcctttcataaacagcat

SEQ ID NO: 3752314 - DNA, 25 bp, Homo sapien
cagcgtggttcttgaggagttcctt

SEQ ID NO: 3752315 - DNA, 25 bp, Homo sapien
ttgaggagttcctttcataaacagc

SEQ ID NO: 3752316 - DNA, 25 bp, Homo sapien
cacagcgtggttcttgaggagttcc

SEQ ID NO: 3752317 - DNA, 25 bp, Homo sapien
tgaaaaggccctccaagattggctc

SEQ ID NO: 3752318 - DNA, 25 bp, Homo sapien
tccccaaagttgctaaggccgcagg

SEQ ID NO: 3752319 - DNA, 25 bp, Homo sapien
cttgttcccaacagcactagaagga

SEQ ID NO: 3752320 - DNA, 25 bp, Homo sapien
ccccaaaggagagaatactgtagag

SEQ ID NO: 3752321 - DNA, 25 bp, Homo sapien
cctgtcgaacctcttcatctgagaa

SEQ ID NO: 3752322 - DNA, 25 bp, Homo sapien
ctgtcgaacctcttcatctgagaag

SEQ ID NO: 3752323 - DNA, 25 bp, Homo sapien
tgtcgaacctcttcatctgagaaga

SEQ ID NO: 3752324 - DNA, 25 bp, Homo sapien
cctctaatttgggagctttgggaca

SEQ ID NO: 3752325 - DNA, 25 bp, Homo sapien
ctctaatttgggagctttgggacaa

SEQ ID NO: 3752326 - DNA, 25 bp, Homo sapien
tgtcactcagtgctctggcgttggg

SEQ ID NO: 3752327 - DNA, 25 bp, Homo sapien
tgctctggcgttggggcagcacccg

SEQ ID NO: 3752328 - DNA, 25 bp, Homo sapien
cactcagtgctctggcgttggggca

SEQ ID NO: 3752329 - DNA, 25 bp, Homo sapien
cacttgtcactcagtgctctggcgt

SEQ ID NO: 3752330 - DNA, 25 bp, Homo sapien
cttccgacataattctagcccgtta

SEQ ID NO: 3752331 - DNA, 25 bp, Homo sapien
cgacataattctagcccgttaccct

SEQ ID NO: 3752332 - DNA, 25 bp, Homo sapien
ttttccttccgacataattctagcc

SEQ ID NO: 3752333 - DNA, 25 bp, Homo sapien
gctgaattttccttccgacataatt

SEQ ID NO: 3752334 - DNA, 25 bp, Homo sapien
tgtttcctttcataaagagcatcac

SEQ ID NO: 3752335 - DNA, 25 bp, Homo sapien
tcctttcataaagagcatcacagaa

SEQ ID NO: 3752336 - DNA, 25 bp, Homo sapien
agaagctttatttgtcagcactttg

SEQ ID NO: 3752337 - DNA, 25 bp, Homo sapien
acagaagctttatttgtcagcactt

SEQ ID NO: 3752338 - DNA, 25 bp, Homo sapien
tttgtttgctgaatccacattttgc

SEQ ID NO: 3752339 - DNA, 25 bp, Homo sapien
gtttgctgaatccacattttgcttc

SEQ ID NO: 3752340 - DNA, 25 bp, Homo sapien
ccagtactatttagtatttccagaa

SEQ ID NO: 3752341 - DNA, 25 bp, Homo sapien
tccagaatttgtttgctgaatccac

SEQ ID NO: 3752342 - DNA, 25 bp, Homo sapien
gagggctcagcagccggataacaac

SEQ ID NO: 3752343 - DNA, 25 bp, Homo sapien
agccggataacaaccacgctgccag

SEQ ID NO: 3752344 - DNA, 25 bp, Homo sapien
cagctccctccaccttagcaagaga

SEQ ID NO: 3752345 - DNA, 25 bp, Homo sapien
caggatgtagtagtgctcgtggacg

SEQ ID NO: 3752346 - DNA, 25 bp, Homo sapien
ctgcaaaaaagagaagacattttaa

SEQ ID NO: 3752347 - DNA, 25 bp, Homo sapien
ctccaatatatcgaatgtttcatat

SEQ ID NO: 3752348 - DNA, 25 bp, Homo sapien
cctccaatatatcgaatgtttcata

SEQ ID NO: 3752349 - DNA, 25 bp, Homo sapien
ccaatatatcgaatgtttcatattc

SEQ ID NO: 3752350 - DNA, 25 bp, Homo sapien
tcctccaatatatcgaatgtttcat

SEQ ID NO: 3752351 - DNA, 25 bp, Homo sapien
cacatacagctgagggtatgttggc

SEQ ID NO: 3752352 - DNA, 25 bp, Homo sapien
gctgagggtatgttggccaatttga

SEQ ID NO: 3752353 - DNA, 25 bp, Homo sapien
tgagtaagcttttaatccttgccga

SEQ ID NO: 3752354 - DNA, 25 bp, Homo sapien
gctcccctttcacatacagctgagg

SEQ ID NO: 3752355 - DNA, 25 bp, Homo sapien
tccatccaacaaccatttactgaac

SEQ ID NO: 3752356 - DNA, 25 bp, Homo sapien
atccatccaacaaccatttactgaa

SEQ ID NO: 3752357 - DNA, 25 bp, Homo sapien
cataaaaagtcgaagatctgacctc

SEQ ID NO: 3752358 - DNA, 25 bp, Homo sapien
caacataactagaagtagtactact

SEQ ID NO: 3752359 - DNA, 25 bp, Homo sapien
tctctcatggattgaggcaagagga

SEQ ID NO: 3752360 - DNA, 25 bp, Homo sapien
tcagcaacccacttttcggggcagt

SEQ ID NO: 3752361 - DNA, 25 bp, Homo sapien
cttgggagattacgtgaagcagcct

SEQ ID NO: 3752362 - DNA, 25 bp, Homo sapien
cactcaagaaggcacggagaggacc

SEQ ID NO: 3752363 - DNA, 25 bp, Homo sapien
gccctcaggtggaatctggactcaa

SEQ ID NO: 3752364 - DNA, 25 bp, Homo sapien
tcactgctgttaatgcgagccggca

SEQ ID NO: 3752365 - DNA, 25 bp, Homo sapien
taaatcaagtgactttcaaggttga

SEQ ID NO: 3752366 - DNA, 25 bp, Homo sapien
tggagccaatgaagcccctatttaa

SEQ ID NO: 3752367 - DNA, 25 bp, Homo sapien
agaatgaagtaatgtggctgggcgc

SEQ ID NO: 3752368 - DNA, 25 bp, Homo sapien
ttaggaaacgcagcaactggagcca

SEQ ID NO: 3752369 - DNA, 25 bp, Homo sapien
tgtatgtatatctgagaaccaaaag

SEQ ID NO: 3752370 - DNA, 25 bp, Homo sapien
aaaactccagtctcttaacactctc

SEQ ID NO: 3752371 - DNA, 25 bp, Homo sapien
gatggaaacatctaaacaatcacag

SEQ ID NO: 3752372 - DNA, 25 bp, Homo sapien
gagccataaaccctgaatacactat

SEQ ID NO: 3752373 - DNA, 25 bp, Homo sapien
gtataggcagcaattcaccattttc

SEQ ID NO: 3752374 - DNA, 25 bp, Homo sapien
tataggcagcaattcaccattttct

SEQ ID NO: 3752375 - DNA, 25 bp, Homo sapien
aatagttgggcaccaagtttaagat

SEQ ID NO: 3752376 - DNA, 25 bp, Homo sapien
atagttgggcaccaagtttaagatt

SEQ ID NO: 3752377 - DNA, 25 bp, Homo sapien
tttatttagcacgacattgtgaaat

SEQ ID NO: 3752378 - DNA, 25 bp, Homo sapien
tatttagcacgacattgtgaaatac

SEQ ID NO: 3752379 - DNA, 25 bp, Homo sapien
aatcatgaactgctcccaatgtaat

SEQ ID NO: 3752380 - DNA, 25 bp, Homo sapien
tcatgaactgctcccaatgtaatta

SEQ ID NO: 3752381 - DNA, 25 bp, Homo sapien
gaagactgcctttcttaactgctag

SEQ ID NO: 3752382 - DNA, 25 bp, Homo sapien
tactgttgtgtactgcattccgcca

SEQ ID NO: 3752383 - DNA, 25 bp, Homo sapien
tgcaatgtaaccagtgccgagctca

SEQ ID NO: 3752384 - DNA, 25 bp, Homo sapien
gccgagctcagcaatgacatcagaa

SEQ ID NO: 3752385 - DNA, 25 bp, Homo sapien
ggatcgcttggccccgagaagtcga

SEQ ID NO: 3752386 - DNA, 25 bp, Homo sapien
atcgcttggccccgagaagtcgagg

SEQ ID NO: 3752387 - DNA, 25 bp, Homo sapien
cgcttggccccgagaagtcgaggct

SEQ ID NO: 3752388 - DNA, 25 bp, Homo sapien
aggaggatcgcttggccccgagaag

SEQ ID NO: 3752389 - DNA, 25 bp, Homo sapien
ataagtaagtggaccaagtgtggtg

SEQ ID NO: 3752390 - DNA, 25 bp, Homo sapien
cgaccaaatcaatgtttattataag

SEQ ID NO: 3752391 - DNA, 25 bp, Homo sapien
tgaacgaccaaatcaatgtttatta

SEQ ID NO: 3752392 - DNA, 25 bp, Homo sapien
ttataagtaagtggaccaagtgtgg

SEQ ID NO: 3752393 - DNA, 25 bp, Homo sapien
tatgtcctgcaggagtcaaccaaag

SEQ ID NO: 3752394 - DNA, 25 bp, Homo sapien
ggctcaacaaaggataacgtcactg

SEQ ID NO: 3752395 - DNA, 25 bp, Homo sapien
taggaatggccatcaatccgtttgc

SEQ ID NO: 3752396 - DNA, 25 bp, Homo sapien
caaggaagttctcatggaccaatgc

SEQ ID NO: 3752397 - DNA, 25 bp, Homo sapien
caagcctaaggtttgggtgtcccag

SEQ ID NO: 3752398 - DNA, 25 bp, Homo sapien
cacattcatcaacaaggcggtcttc

SEQ ID NO: 3752399 - DNA, 25 bp, Homo sapien
ccccggagttagaaagtagagtcat

SEQ ID NO: 3752400 - DNA, 25 bp, Homo sapien
caagtcaagaggagtgaacagccct

SEQ ID NO: 3752401 - DNA, 25 bp, Homo sapien
tttaagaaaactgatcttaggtcag

SEQ ID NO: 3752402 - DNA, 25 bp, Homo sapien
gaaaactgatcttaggtcaggcatg

SEQ ID NO: 3752403 - DNA, 25 bp, Homo sapien
tgcaaataatcaacttacttttatt

SEQ ID NO: 3752404 - DNA, 25 bp, Homo sapien
gaaaagtagcaactgtcaaatttaa

SEQ ID NO: 3752405 - DNA, 25 bp, Homo sapien
aaataccaggtcatttcagaagccc

SEQ ID NO: 3752406 - DNA, 25 bp, Homo sapien
tgcagcgtgctacctcaaagccagt

SEQ ID NO: 3752407 - DNA, 25 bp, Homo sapien
cagtgtggcacgaggcttcaagcac

SEQ ID NO: 3752408 - DNA, 25 bp, Homo sapien
gctgcgctgacagatcctggttcaa

SEQ ID NO: 3752409 - DNA, 25 bp, Homo sapien
cagtcagaatttgcgggtcctggca

SEQ ID NO: 3752410 - DNA, 25 bp, Homo sapien
ccatatccaggttacaagcttgggc

SEQ ID NO: 3752411 - DNA, 25 bp, Homo sapien
aagcttgggctcaacgacacggcta

SEQ ID NO: 3752412 - DNA, 25 bp, Homo sapien
gatgaacactgtaccactgacaacc

SEQ ID NO: 3752413 - DNA, 25 bp, Homo sapien
cattgtactcagcacgatccctgcg

SEQ ID NO: 3752414 - DNA, 25 bp, Homo sapien
tcaaggtgagcagtcaaatctggcc

SEQ ID NO: 3752415 - DNA, 25 bp, Homo sapien
caagcgtggaaacccagctgcaaaa

SEQ ID NO: 3752416 - DNA, 25 bp, Homo sapien
taatcttgagacagaccaagcgtgg

SEQ ID NO: 3752417 - DNA, 25 bp, Homo sapien
actgtcgctaagggccacggctgcc

SEQ ID NO: 3752418 - DNA, 25 bp, Homo sapien
cgctcatctctgaaccgcccccagg

SEQ ID NO: 3752419 - DNA, 25 bp, Homo sapien
cttctcgctcatctctgaaccgccc

SEQ ID NO: 3752420 - DNA, 25 bp, Homo sapien
ctcatctctgaaccgcccccaggga

SEQ ID NO: 3752421 - DNA, 25 bp, Homo sapien
ctggggagcaaggggacaccgcagg

SEQ ID NO: 3752422 - DNA, 25 bp, Homo sapien
tggggagcaaggggacaccgcagga

SEQ ID NO: 3752423 - DNA, 25 bp, Homo sapien
catggatgttggacatgcacaagca

SEQ ID NO: 3752424 - DNA, 25 bp, Homo sapien
gaccaagtgactcggcatggatgtt

SEQ ID NO: 3752425 - DNA, 25 bp, Homo sapien
cacaagcagacggtgtctgcagcct

SEQ ID NO: 3752426 - DNA, 25 bp, Homo sapien
ttggacatgcacaagcagacggtgt

SEQ ID NO: 3752427 - DNA, 25 bp, Homo sapien
agagcagggatgccccgcaggtcat

SEQ ID NO: 3752428 - DNA, 25 bp, Homo sapien
caggcgagctcaggccttggtgcca

SEQ ID NO: 3752429 - DNA, 25 bp, Homo sapien
atgcccaccacgggccgtggcaggc

SEQ ID NO: 3752430 - DNA, 25 bp, Homo sapien
gagagcagggatgccccgcaggtca

SEQ ID NO: 3752431 - DNA, 25 bp, Homo sapien
aggaccttgaggcctccgcggacat

SEQ ID NO: 3752432 - DNA, 25 bp, Homo sapien
catgtgccccgtccactgaccagag

SEQ ID NO: 3752433 - DNA, 25 bp, Homo sapien
aaggaccttgaggcctccgcggaca

SEQ ID NO: 3752434 - DNA, 25 bp, Homo sapien
ggaccttgaggcctccgcggacatc

SEQ ID NO: 3752435 - DNA, 25 bp, Homo sapien
gcagcctgcgacagtttgtcagtga

SEQ ID NO: 3752436 - DNA, 25 bp, Homo sapien
tgcaatcattagcaaccggccacag

SEQ ID NO: 3752437 - DNA, 25 bp, Homo sapien
ggttaactgtgcagagtttgaagaa

SEQ ID NO: 3752438 - DNA, 25 bp, Homo sapien
ggtgtttcttccctgcaatcattag

SEQ ID NO: 3752439 - DNA, 25 bp, Homo sapien
gctgtcgttcagttggcgccttatt

SEQ ID NO: 3752440 - DNA, 25 bp, Homo sapien
catagggttcaatgctgtcgttcag

SEQ ID NO: 3752441 - DNA, 25 bp, Homo sapien
tcaatgctgtcgttcagttggcgcc

SEQ ID NO: 3752442 - DNA, 25 bp, Homo sapien
tcaatagccagcatagggttcaatg

SEQ ID NO: 3752443 - DNA, 25 bp, Homo sapien
aaagcaagcggttagacagccctgg

SEQ ID NO: 3752444 - DNA, 25 bp, Homo sapien
tcttcttgaacctaggctgcctgtg

SEQ ID NO: 3752445 - DNA, 25 bp, Homo sapien
gctgaagggaacgaagaactcctcc

SEQ ID NO: 3752446 - DNA, 25 bp, Homo sapien
cgtgggtcagcaacatagcaggagc

SEQ ID NO: 3752447 - DNA, 25 bp, Homo sapien
ggactggaaactgcgcttcgctacc

SEQ ID NO: 3752448 - DNA, 25 bp, Homo sapien
gaattctcaaaaggacatgggtcta

SEQ ID NO: 3752449 - DNA, 25 bp, Homo sapien
ttttcaatcgcatggtaagccttcc

SEQ ID NO: 3752450 - DNA, 25 bp, Homo sapien
agtccctcaggaaaacagctgctgc

SEQ ID NO: 3752451 - DNA, 25 bp, Homo sapien
aaggctcagccgtgtttcatttgca

SEQ ID NO: 3752452 - DNA, 25 bp, Homo sapien
cttgatgtaggtcgccctccagaaa

SEQ ID NO: 3752453 - DNA, 25 bp, Homo sapien
caggctatttccagtttccgacagg

SEQ ID NO: 3752454 - DNA, 25 bp, Homo sapien
ctgtagctcaaagggcgcatgcatg

SEQ ID NO: 3752455 - DNA, 25 bp, Homo sapien
ggtggcctggctggccagttagagc

SEQ ID NO: 3752456 - DNA, 25 bp, Homo sapien
caggtggcctggctggccagttaga

SEQ ID NO: 3752457 - DNA, 25 bp, Homo sapien
tggcctggctggccagttagagcca

SEQ ID NO: 3752458 - DNA, 25 bp, Homo sapien
ggcctggctggccagttagagccat

SEQ ID NO: 3752459 - DNA, 25 bp, Homo sapien
gatatggccatggactttacctagg

SEQ ID NO: 3752460 - DNA, 25 bp, Homo sapien
caccggtgcagtaaggcagcagcta

SEQ ID NO: 3752461 - DNA, 25 bp, Homo sapien
gatgggtcatctgaaagcacagctg

SEQ ID NO: 3752462 - DNA, 25 bp, Homo sapien
taattttttacgtcacggcaggcag

SEQ ID NO: 3752463 - DNA, 25 bp, Homo sapien
cagatcgctcatactgttgtttggg

SEQ ID NO: 3752464 - DNA, 25 bp, Homo sapien
ttaaggcccagatcgctcatactgt

SEQ ID NO: 3752465 - DNA, 25 bp, Homo sapien
ttacaggaaacaaagcgatgggccg

SEQ ID NO: 3752466 - DNA, 25 bp, Homo sapien
catcatgtacgtgtcacagtgctac

SEQ ID NO: 3752467 - DNA, 25 bp, Homo sapien
aactgagagtggtcgcttgaggcac

SEQ ID NO: 3752468 - DNA, 25 bp, Homo sapien
tggaatgaaccagatcccacacttc

SEQ ID NO: 3752469 - DNA, 25 bp, Homo sapien
aggaaaaggctgaaatgtaattata

SEQ ID NO: 3752470 - DNA, 25 bp, Homo sapien
cagtgtcaccctcatgcttccaagt

SEQ ID NO: 3752471 - DNA, 25 bp, Homo sapien
cctggtggtccatgcaggcaggaca

SEQ ID NO: 3752472 - DNA, 25 bp, Homo sapien
aggagagcgggcaatcccggcaggc

SEQ ID NO: 3752473 - DNA, 25 bp, Homo sapien
ggcaggagagcgggcaatcccggca

SEQ ID NO: 3752474 - DNA, 25 bp, Homo sapien
gcaggcaggagagcgggcaatcccg

SEQ ID NO: 3752475 - DNA, 25 bp, Homo sapien
gttgcaattgcccactgctccaagg

SEQ ID NO: 3752476 - DNA, 25 bp, Homo sapien
tcatgcacatctgcctactggaggg

SEQ ID NO: 3752477 - DNA, 25 bp, Homo sapien
attactacccatgtctgtgcccgtg

SEQ ID NO: 3752478 - DNA, 25 bp, Homo sapien
taaaacatcagagagtatcacacct

SEQ ID NO: 3752479 - DNA, 25 bp, Homo sapien
cccgaagctggacctttggaagtgg

SEQ ID NO: 3752480 - DNA, 25 bp, Homo sapien
aaaatgcaatagtcgggagctctcc

SEQ ID NO: 3752481 - DNA, 25 bp, Homo sapien
tgcagagtgttggtacaagaacccg

SEQ ID NO: 3752482 - DNA, 25 bp, Homo sapien
aagcctttgacattcccagtgggta

SEQ ID NO: 3752483 - DNA, 25 bp, Homo sapien
tagtgcatctgacatccacagaggg

SEQ ID NO: 3752484 - DNA, 25 bp, Homo sapien
cgttcaaacgcaaggcgactgctga

SEQ ID NO: 3752485 - DNA, 25 bp, Homo sapien
gagatgtgccttcattccacccagt

SEQ ID NO: 3752486 - DNA, 25 bp, Homo sapien
gaaggcacccaaaggctctatgtgg

SEQ ID NO: 3752487 - DNA, 25 bp, Homo sapien
ggcgattacccaggtgacttgtcaa

SEQ ID NO: 3752488 - DNA, 25 bp, Homo sapien
gaaattcatcacacggacagaagag

SEQ ID NO: 3752489 - DNA, 25 bp, Homo sapien
ggtacaaaagttccatcaacagatg

SEQ ID NO: 3752490 - DNA, 25 bp, Homo sapien
caattgtggcatagcctaacactgg

SEQ ID NO: 3752491 - DNA, 25 bp, Homo sapien
gcatctgtggctcggatatttctgg

SEQ ID NO: 3752492 - DNA, 25 bp, Homo sapien
tcgcgtctccagtaggagtcgaaga

SEQ ID NO: 3752493 - DNA, 25 bp, Homo sapien
ttctggaatgcctgagataaatcac

SEQ ID NO: 3752494 - DNA, 25 bp, Homo sapien
gagtcgaagagaagccatgtgcatc

SEQ ID NO: 3752495 - DNA, 25 bp, Homo sapien
cctcggcgccgtgtgcgtctgctga

SEQ ID NO: 3752496 - DNA, 25 bp, Homo sapien
caggaagaaggcagaacggtgattc

SEQ ID NO: 3752497 - DNA, 25 bp, Homo sapien
ggtgattccgactccagctgttcat

SEQ ID NO: 3752498 - DNA, 25 bp, Homo sapien
gaaggcagaacggtgattccgactc

SEQ ID NO: 3752499 - DNA, 25 bp, Homo sapien
agcccaagtaactgcccctccaggg

SEQ ID NO: 3752500 - DNA, 25 bp, Homo sapien
ggagcctggagtatcgggtttcagc

SEQ ID NO: 3752501 - DNA, 25 bp, Homo sapien
acagcatcttggccacccggccctg

SEQ ID NO: 3752502 - DNA, 25 bp, Homo sapien
ctggagtatcgggtttcagcaaaga

SEQ ID NO: 3752503 - DNA, 25 bp, Homo sapien
gaatagccgccctcagagacctgtg

SEQ ID NO: 3752504 - DNA, 25 bp, Homo sapien
caggacaaggatgtcaccgggaagc

SEQ ID NO: 3752505 - DNA, 25 bp, Homo sapien
cctgggacggtggcagatgcttcag

SEQ ID NO: 3752506 - DNA, 25 bp, Homo sapien
ggatgtcaccgggaagccacagtgt

SEQ ID NO: 3752507 - DNA, 25 bp, Homo sapien
gcaccaggaaagaaggagaccaagg

SEQ ID NO: 3752508 - DNA, 25 bp, Homo sapien
ctgttgcaccaggaaagaaggagac

SEQ ID NO: 3752509 - DNA, 25 bp, Homo sapien
gttgcaccaggaaagaaggagacca

SEQ ID NO: 3752510 - DNA, 25 bp, Homo sapien
tgcaccaggaaagaaggagaccaag

SEQ ID NO: 3752511 - DNA, 25 bp, Homo sapien
ccagcatgctgcccgcagaaaggac

SEQ ID NO: 3752512 - DNA, 25 bp, Homo sapien
ctaagccagcatgctgcccgcagaa

SEQ ID NO: 3752513 - DNA, 25 bp, Homo sapien
agccagcatgctgcccgcagaaagg

SEQ ID NO: 3752514 - DNA, 25 bp, Homo sapien
taagccagcatgctgcccgcagaaa

SEQ ID NO: 3752515 - DNA, 25 bp, Homo sapien
tcccagtgggaagctcccgaggtga

SEQ ID NO: 3752516 - DNA, 25 bp, Homo sapien
tagttccacattgtcaatcccagtg

SEQ ID NO: 3752517 - DNA, 25 bp, Homo sapien
tgtagctcccgtaggcataggtctg

SEQ ID NO: 3752518 - DNA, 25 bp, Homo sapien
cataggtctgggtataagtggaaaa

SEQ ID NO: 3752519 - DNA, 25 bp, Homo sapien
tgcccctgaacctctggggaagacc

SEQ ID NO: 3752520 - DNA, 25 bp, Homo sapien
ccatcatcggcctcatggtggagag

SEQ ID NO: 3752521 - DNA, 25 bp, Homo sapien
gatccactggcggtttccgctgatt

SEQ ID NO: 3752522 - DNA, 25 bp, Homo sapien
ggcggtttccgctgattctccaagg

SEQ ID NO: 3752523 - DNA, 25 bp, Homo sapien
caaggctcccacaccattggatgtt

SEQ ID NO: 3752524 - DNA, 25 bp, Homo sapien
tgtctccacagggtgaagcatctcc

SEQ ID NO: 3752525 - DNA, 25 bp, Homo sapien
aaggtgccacgaatgaccaccatga

SEQ ID NO: 3752526 - DNA, 25 bp, Homo sapien
tcatagactcaaacaaaaggtcaag

SEQ ID NO: 3752527 - DNA, 25 bp, Homo sapien
gggaattgcaaagccggcacaactg

SEQ ID NO: 3752528 - DNA, 25 bp, Homo sapien
gaggcgcgtgtctgctaaatggaat

SEQ ID NO: 3752529 - DNA, 25 bp, Homo sapien
ggcaaagaccggatggcagtttctg

SEQ ID NO: 3752530 - DNA, 25 bp, Homo sapien
tctttgttgcaaggaaacagccatg

SEQ ID NO: 3752531 - DNA, 25 bp, Homo sapien
tgccgtgagctgctatttcccatgc

SEQ ID NO: 3752532 - DNA, 25 bp, Homo sapien
tcaaatctgagccacatctgagctc

SEQ ID NO: 3752533 - DNA, 25 bp, Homo sapien
caaatctgagccacatctgagctca

SEQ ID NO: 3752534 - DNA, 25 bp, Homo sapien
atctgagccacatctgagctcagct

SEQ ID NO: 3752535 - DNA, 25 bp, Homo sapien
aaatctgagccacatctgagctcag

SEQ ID NO: 3752536 - DNA, 25 bp, Homo sapien
tcagacgctccttgtcaggcacaca

SEQ ID NO: 3752537 - DNA, 25 bp, Homo sapien
tctaggactttggaaaggagcacca

SEQ ID NO: 3752538 - DNA, 25 bp, Homo sapien
gaagtgtggcttgccaaggttcacc

SEQ ID NO: 3752539 - DNA, 25 bp, Homo sapien
tcttggtgtccacaggaagtgtggc

SEQ ID NO: 3752540 - DNA, 25 bp, Homo sapien
tcactgacttaagaggatataaaaa

SEQ ID NO: 3752541 - DNA, 25 bp, Homo sapien
aaaattcactctaaccaatgtggac

SEQ ID NO: 3752542 - DNA, 25 bp, Homo sapien
aaattcactctaaccaatgtggaca

SEQ ID NO: 3752543 - DNA, 25 bp, Homo sapien
aattcactctaaccaatgtggacac

SEQ ID NO: 3752544 - DNA, 25 bp, Homo sapien
ccgtggccaccttttctagagccat

SEQ ID NO: 3752545 - DNA, 25 bp, Homo sapien
cccgtggccaccttttctagagcca

SEQ ID NO: 3752546 - DNA, 25 bp, Homo sapien
gcccgtggccaccttttctagagcc

SEQ ID NO: 3752547 - DNA, 25 bp, Homo sapien
atcaacatcagacttggtgtttgaa

SEQ ID NO: 3752548 - DNA, 25 bp, Homo sapien
catcagacttggtgtttgaattaaa

SEQ ID NO: 3752549 - DNA, 25 bp, Homo sapien
caacatcagacttggtgtttgaatt

SEQ ID NO: 3752550 - DNA, 25 bp, Homo sapien
cagacttggtgtttgaattaaaaga

SEQ ID NO: 3752551 - DNA, 25 bp, Homo sapien
gatactgggtacagagatcccgcct

SEQ ID NO: 3752552 - DNA, 25 bp, Homo sapien
gatcccgcctgttcagagggtccag

SEQ ID NO: 3752553 - DNA, 25 bp, Homo sapien
gatccagagtggagcagaggtgcga

SEQ ID NO: 3752554 - DNA, 25 bp, Homo sapien
cgatgtggcagttcttgaaacagcc

SEQ ID NO: 3752555 - DNA, 25 bp, Homo sapien
ggcagctctcgctagtactatgcag

SEQ ID NO: 3752556 - DNA, 25 bp, Homo sapien
tgagctccaaccaggacatctgcag

SEQ ID NO: 3752557 - DNA, 25 bp, Homo sapien
tttgccaagagatgaaacgccccac

SEQ ID NO: 3752558 - DNA, 25 bp, Homo sapien
tctgaagccaacgtctgctgcagct

SEQ ID NO: 3752559 - DNA, 25 bp, Homo sapien
cgaaaagaaccaagcctggacccag

SEQ ID NO: 3752560 - DNA, 25 bp, Homo sapien
aagcctggacccagttgcctgactg

SEQ ID NO: 3752561 - DNA, 25 bp, Homo sapien
aaagaaccaagcctggacccagttg

SEQ ID NO: 3752562 - DNA, 25 bp, Homo sapien
gaaccaagcctggacccagttgcct

SEQ ID NO: 3752563 - DNA, 25 bp, Homo sapien
attcggagaccttcccaacactggg

SEQ ID NO: 3752564 - DNA, 25 bp, Homo sapien
gccaaatggatggaaatccaattcg

SEQ ID NO: 3752565 - DNA, 25 bp, Homo sapien
acaatgatggtgccaaatggatgga

SEQ ID NO: 3752566 - DNA, 25 bp, Homo sapien
tggaaatccaattcggagaccttcc

SEQ ID NO: 3752567 - DNA, 25 bp, Homo sapien
cagaattgttccgtgcatatgcata

SEQ ID NO: 3752568 - DNA, 25 bp, Homo sapien
gccagaattgttccgtgcatatgca

SEQ ID NO: 3752569 - DNA, 25 bp, Homo sapien
ttagccagaattgttccgtgcatat

SEQ ID NO: 3752570 - DNA, 25 bp, Homo sapien
ttgttccgtgcatatgcatattcca

SEQ ID NO: 3752571 - DNA, 25 bp, Homo sapien
ttctccttctgggtatatccacaaa

SEQ ID NO: 3752572 - DNA, 25 bp, Homo sapien
cattggagcattactcatgatagcc

SEQ ID NO: 3752573 - DNA, 25 bp, Homo sapien
gaaaatggtatgaaactttctgaga

SEQ ID NO: 3752574 - DNA, 25 bp, Homo sapien
aattgaaatcaacacctcagcgaga

SEQ ID NO: 3752575 - DNA, 25 bp, Homo sapien
tgccgggatgttccgaatggccatt

SEQ ID NO: 3752576 - DNA, 25 bp, Homo sapien
ggatgttccgaatggccattcccat

SEQ ID NO: 3752577 - DNA, 25 bp, Homo sapien
aaatgatgccgggatgttccgaatg

SEQ ID NO: 3752578 - DNA, 25 bp, Homo sapien
atttccaaatgatgccgggatgttc

SEQ ID NO: 3752579 - DNA, 25 bp, Homo sapien
gtgacaatgaccaccgcagcaaagg

SEQ ID NO: 3752580 - DNA, 25 bp, Homo sapien
cagctttagcacagaccttgcggga

SEQ ID NO: 3752581 - DNA, 25 bp, Homo sapien
tcaaatgccactcagaggcccggtg

SEQ ID NO: 3752582 - DNA, 25 bp, Homo sapien
acgtgcccatgagcgaaccagctgc

SEQ ID NO: 3752583 - DNA, 25 bp, Homo sapien
gatttcctgcacacggatcagcatg

SEQ ID NO: 3752584 - DNA, 25 bp, Homo sapien
ttcctgcacacggatcagcatggtg

SEQ ID NO: 3752585 - DNA, 25 bp, Homo sapien
ctgcacacggatcagcatggtggtg

SEQ ID NO: 3752586 - DNA, 25 bp, Homo sapien
atgatttcctgcacacggatcagca

SEQ ID NO: 3752587 - DNA, 25 bp, Homo sapien
ttacctgttacctggcgggccacca

SEQ ID NO: 3752588 - DNA, 25 bp, Homo sapien
gagtcgttcaatccagcctaattct

SEQ ID NO: 3752589 - DNA, 25 bp, Homo sapien
cctgcttttacggaggtgacattta

SEQ ID NO: 3752590 - DNA, 25 bp, Homo sapien
tccgatccaggctgttgttaagcag

SEQ ID NO: 3752591 - DNA, 25 bp, Homo sapien
aaaggaagcctgtgccgatgtttct

SEQ ID NO: 3752592 - DNA, 25 bp, Homo sapien
tgtccgttcatatgtgaagaagccc

SEQ ID NO: 3752593 - DNA, 25 bp, Homo sapien
caagtaggagtttcaatcaaaggaa

SEQ ID NO: 3752594 - DNA, 25 bp, Homo sapien
gccgatgtttctgtgtccgttcata

SEQ ID NO: 3752595 - DNA, 25 bp, Homo sapien
tgttgagagtgcacatcctggcctg

SEQ ID NO: 3752596 - DNA, 25 bp, Homo sapien
cggtggtgcctaatgacaaaatgac

SEQ ID NO: 3752597 - DNA, 25 bp, Homo sapien
ttgacaacatgcagtccccacggtg

SEQ ID NO: 3752598 - DNA, 25 bp, Homo sapien
gctgcacagggtagaactcgataag

SEQ ID NO: 3752599 - DNA, 25 bp, Homo sapien
cccacagccagacaacgagggagag

SEQ ID NO: 3752600 - DNA, 25 bp, Homo sapien
agccagacaacgagggagagaccag

SEQ ID NO: 3752601 - DNA, 25 bp, Homo sapien
tatctgaaccccagcggctatgctg

SEQ ID NO: 3752602 - DNA, 25 bp, Homo sapien
cagcacactcctgggcggcgatatc

SEQ ID NO: 3752603 - DNA, 25 bp, Homo sapien
atggacaggcgcctcaaatggcccc

SEQ ID NO: 3752604 - DNA, 25 bp, Homo sapien
tctcctactgagcattccatcctgg

SEQ ID NO: 3752605 - DNA, 25 bp, Homo sapien
ctggtggacttgacgacctgctcct

SEQ ID NO: 3752606 - DNA, 25 bp, Homo sapien
ttcagaagggccaggacggacccgc

SEQ ID NO: 3752607 - DNA, 25 bp, Homo sapien
ctggcaatctggactatgaatttcc

SEQ ID NO: 3752608 - DNA, 25 bp, Homo sapien
ccgtgcaaaccatggccaactcaat

SEQ ID NO: 3752609 - DNA, 25 bp, Homo sapien
caatcacctttcctagagtgccggg

SEQ ID NO: 3752610 - DNA, 25 bp, Homo sapien
cactttcctgaaaggcctccgtgca

SEQ ID NO: 3752611 - DNA, 25 bp, Homo sapien
tccatcccgtgtactagagaagtca

SEQ ID NO: 3752612 - DNA, 25 bp, Homo sapien
tccatcccgtgtactagcgaagtca

SEQ ID NO: 3752613 - DNA, 25 bp, Homo sapien
gtcatcatgcagaaggttacctcca

SEQ ID NO: 3752614 - DNA, 25 bp, Homo sapien
tccatcccgtgtactagtgaagtca

SEQ ID NO: 3752615 - DNA, 25 bp, Homo sapien
aaaatccatggagacatcggaatgt

SEQ ID NO: 3752616 - DNA, 25 bp, Homo sapien
gtaaaatccatggagacatcggaat

SEQ ID NO: 3752617 - DNA, 25 bp, Homo sapien
tgtaaaatccatggagacatcggaa

SEQ ID NO: 3752618 - DNA, 25 bp, Homo sapien
taaaatccatggagacatcggaatg

SEQ ID NO: 3752619 - DNA, 25 bp, Homo sapien
agtactggccgcgaccacctctgct

SEQ ID NO: 3752620 - DNA, 25 bp, Homo sapien
tagacataggatggacagggagttt

SEQ ID NO: 3752621 - DNA, 25 bp, Homo sapien
ttagacataggatggacagggagtt

SEQ ID NO: 3752622 - DNA, 25 bp, Homo sapien
agtgcaggagtactggccgcgacca

SEQ ID NO: 3752623 - DNA, 25 bp, Homo sapien
taatgttaatacgttctgatggcct

SEQ ID NO: 3752624 - DNA, 25 bp, Homo sapien
gacttaacagcaggatggttgtata

SEQ ID NO: 3752625 - DNA, 25 bp, Homo sapien
aagccagtcagacttaacagcagga

SEQ ID NO: 3752626 - DNA, 25 bp, Homo sapien
gatggcctgttaccatcagaccaac

SEQ ID NO: 3752627 - DNA, 25 bp, Homo sapien
aaacaccaaggatgacgagctcgct

SEQ ID NO: 3752628 - DNA, 25 bp, Homo sapien
aggatgacgagctcgctgccctcca

SEQ ID NO: 3752629 - DNA, 25 bp, Homo sapien
aggtcctgtcgcattctggggacct

SEQ ID NO: 3752630 - DNA, 25 bp, Homo sapien
accaaggatgacgagctcgctgccc

SEQ ID NO: 3752631 - DNA, 25 bp, Homo sapien
gctccttactttgaccagcgccatc

SEQ ID NO: 3752632 - DNA, 25 bp, Homo sapien
tgcctgctccttactttgaccagcg

SEQ ID NO: 3752633 - DNA, 25 bp, Homo sapien
cttactttgaccagcgccatcttgc

SEQ ID NO: 3752634 - DNA, 25 bp, Homo sapien
tttgaccagcgccatcttgcctgct

SEQ ID NO: 3752635 - DNA, 25 bp, Homo sapien
gccatctcacatggatggctggctc

SEQ ID NO: 3752636 - DNA, 25 bp, Homo sapien
tggggttccactcgtcaatcttaaa

SEQ ID NO: 3752637 - DNA, 25 bp, Homo sapien
aagctgttcatgggcttgacacagg

SEQ ID NO: 3752638 - DNA, 25 bp, Homo sapien
gaatgccatctctggatctcacaaa

SEQ ID NO: 3752639 - DNA, 25 bp, Homo sapien
ggatctgttccgtgcacttgtgctc

SEQ ID NO: 3752640 - DNA, 25 bp, Homo sapien
aacgagagggatttgcactgaggct

SEQ ID NO: 3752641 - DNA, 25 bp, Homo sapien
cagaacgcttttcgtagaaacgaga

SEQ ID NO: 3752642 - DNA, 25 bp, Homo sapien
atgtttacagaacgcttttcgtaga

SEQ ID NO: 3752643 - DNA, 25 bp, Homo sapien
tcgtagaaacgagagggatttgcac

SEQ ID NO: 3752644 - DNA, 25 bp, Homo sapien
agggagccaggtgcacctggtacac

SEQ ID NO: 3752645 - DNA, 25 bp, Homo sapien
cagggagccaggtgcacctggtaca

SEQ ID NO: 3752646 - DNA, 25 bp, Homo sapien
tcagggagccaggtgcacctggtac

SEQ ID NO: 3752647 - DNA, 25 bp, Homo sapien
ttggcaaatgtgtccttttagcacc

SEQ ID NO: 3752648 - DNA, 25 bp, Homo sapien
gcaccagtccaagtgaaatttggga

SEQ ID NO: 3752649 - DNA, 25 bp, Homo sapien
cgacatcctgactttacataaactg

SEQ ID NO: 3752650 - DNA, 25 bp, Homo sapien
tctgtcctgatcattatttggcaaa

SEQ ID NO: 3752651 - DNA, 25 bp, Homo sapien
agtgcctgaggaagagtgaattttc

SEQ ID NO: 3752652 - DNA, 25 bp, Homo sapien
gtttcccttcatgtcggaaagcatg

SEQ ID NO: 3752653 - DNA, 25 bp, Homo sapien
atccgcagtggaccccaccatgttt

SEQ ID NO: 3752654 - DNA, 25 bp, Homo sapien
tgtgtgctctcggtcatccgcagtg

SEQ ID NO: 3752655 - DNA, 25 bp, Homo sapien
ggaaagtgtagcaggaagcggaaca

SEQ ID NO: 3752656 - DNA, 25 bp, Homo sapien
attgaaggaggggaaagtgtagcag

SEQ ID NO: 3752657 - DNA, 25 bp, Homo sapien
gaaggaggggaaagtgtagcaggaa

SEQ ID NO: 3752658 - DNA, 25 bp, Homo sapien
aggggaaagtgtagcaggaagcgga

SEQ ID NO: 3752659 - DNA, 25 bp, Homo sapien
cctcgccctcggtgggtgagcaagg

SEQ ID NO: 3752660 - DNA, 25 bp, Homo sapien
gtcatcacatggagacgccagctgc

SEQ ID NO: 3752661 - DNA, 25 bp, Homo sapien
cagctgccaaaaatactcccctcgc

SEQ ID NO: 3752662 - DNA, 25 bp, Homo sapien
catggagacgccagctgccaaaaat

SEQ ID NO: 3752663 - DNA, 25 bp, Homo sapien
gacaatttccattaagcccaagctc

SEQ ID NO: 3752664 - DNA, 25 bp, Homo sapien
cactgttgcaaggagtaacagctgt

SEQ ID NO: 3752665 - DNA, 25 bp, Homo sapien
gctgttaggggcactataactgcca

SEQ ID NO: 3752666 - DNA, 25 bp, Homo sapien
gcttcattgctgatccactgttgca

SEQ ID NO: 3752667 - DNA, 25 bp, Homo sapien
cacgatgcctccaatcgagttggac

SEQ ID NO: 3752668 - DNA, 25 bp, Homo sapien
ccaatcgagttggacaattctggtg

SEQ ID NO: 3752669 - DNA, 25 bp, Homo sapien
gagatctgcagatcacgatgcctcc

SEQ ID NO: 3752670 - DNA, 25 bp, Homo sapien
cgagttggacaattctggtgtccac

SEQ ID NO: 3752671 - DNA, 25 bp, Homo sapien
agatgccagatacgcgtgtttggac

SEQ ID NO: 3752672 - DNA, 25 bp, Homo sapien
gaattctgccgtttggaaagcgcca

SEQ ID NO: 3752673 - DNA, 25 bp, Homo sapien
agcactggaattctgccgtttggaa

SEQ ID NO: 3752674 - DNA, 25 bp, Homo sapien
gcagatgccagatacgcgtgtttgg

SEQ ID NO: 3752675 - DNA, 25 bp, Homo sapien
catcccctatggctggagggaagca

SEQ ID NO: 3752676 - DNA, 25 bp, Homo sapien
gggtcaggggacacatcaatagcca

SEQ ID NO: 3752677 - DNA, 25 bp, Homo sapien
aggccacatcccctatggctggagg

SEQ ID NO: 3752678 - DNA, 25 bp, Homo sapien
cacatcccctatggctggagggaag

SEQ ID NO: 3752679 - DNA, 25 bp, Homo sapien
tcattactgttgacagctgtgggag

SEQ ID NO: 3752680 - DNA, 25 bp, Homo sapien
gggagccctgaggaatctacaaaaa

SEQ ID NO: 3752681 - DNA, 25 bp, Homo sapien
actctcattactgttgacagctgtg

SEQ ID NO: 3752682 - DNA, 25 bp, Homo sapien
ccctgaggaatctacaaaaagtatc

SEQ ID NO: 3752683 - DNA, 25 bp, Homo sapien
gtccttggagcaagtcagacttgac

SEQ ID NO: 3752684 - DNA, 25 bp, Homo sapien
cttattggaaagagtcagttccagt

SEQ ID NO: 3752685 - DNA, 25 bp, Homo sapien
ctttccttattacgcgctagttgac

SEQ ID NO: 3752686 - DNA, 25 bp, Homo sapien
ttacgcgctagttgacagtccttgg

SEQ ID NO: 3752687 - DNA, 25 bp, Homo sapien
tctgtgggcacctcccttactgagg

SEQ ID NO: 3752688 - DNA, 25 bp, Homo sapien
ctggttcacccagcgttacaggacg

SEQ ID NO: 3752689 - DNA, 25 bp, Homo sapien
tgacgacgtcttctccgaatctctg

SEQ ID NO: 3752690 - DNA, 25 bp, Homo sapien
ttcttcagagggtgttgacgacgtc

SEQ ID NO: 3752691 - DNA, 25 bp, Homo sapien
tccacaggtgagtttgtgccaaaga

SEQ ID NO: 3752692 - DNA, 25 bp, Homo sapien
tcctggagctcatcgaggacaggag

SEQ ID NO: 3752693 - DNA, 25 bp, Homo sapien
gagctctggagctaagaccgctttg

SEQ ID NO: 3752694 - DNA, 25 bp, Homo sapien
ggtcatagtcacactcaaagaggca

SEQ ID NO: 3752695 - DNA, 25 bp, Homo sapien
tctggggagtcaacagggggatgct

SEQ ID NO: 3752696 - DNA, 25 bp, Homo sapien
tcagacgccagctaaggcagtggag

SEQ ID NO: 3752697 - DNA, 25 bp, Homo sapien
tggagcctgaccgagagggctctgg

SEQ ID NO: 3752698 - DNA, 25 bp, Homo sapien
cgccagctaaggcagtggagcctga

SEQ ID NO: 3752699 - DNA, 25 bp, Homo sapien
agggcacagtctcgcttttggaaga

SEQ ID NO: 3752700 - DNA, 25 bp, Homo sapien
cccaagatcttgactgaaactgtta

SEQ ID NO: 3752701 - DNA, 25 bp, Homo sapien
gatggcttgtcattagccaacatgt

SEQ ID NO: 3752702 - DNA, 25 bp, Homo sapien
tcacacaacacaacggacttcgatg

SEQ ID NO: 3752703 - DNA, 25 bp, Homo sapien
ttcctccaggcaggacacctgggcc

SEQ ID NO: 3752704 - DNA, 25 bp, Homo sapien
tgcagcatcagctgtgtgccctctt

SEQ ID NO: 3752705 - DNA, 25 bp, Homo sapien
gggccctcctgctctccactagtgt

SEQ ID NO: 3752706 - DNA, 25 bp, Homo sapien
ccctcctgctctccactagtgtcat

SEQ ID NO: 3752707 - DNA, 25 bp, Homo sapien
ttgaatggaattgagaacaccttgg

SEQ ID NO: 3752708 - DNA, 25 bp, Homo sapien
acttacaaagtgcttttgcctgcgt

SEQ ID NO: 3752709 - DNA, 25 bp, Homo sapien
gtcagccaagcgaccacctctttta

SEQ ID NO: 3752710 - DNA, 25 bp, Homo sapien
gcctgcgttagctcattgaatggaa

SEQ ID NO: 3752711 - DNA, 25 bp, Homo sapien
accaatgtttcagtgttgaccacca

SEQ ID NO: 3752712 - DNA, 25 bp, Homo sapien
aagaagggttgacacaggccaaggt

SEQ ID NO: 3752713 - DNA, 25 bp, Homo sapien
ccaatgtttcagtgttgaccaccat

SEQ ID NO: 3752714 - DNA, 25 bp, Homo sapien
ggaagaagggttgacacaggccaag

SEQ ID NO: 3752715 - DNA, 25 bp, Homo sapien
cttccttatcctgattagtctcctt

SEQ ID NO: 3752716 - DNA, 25 bp, Homo sapien
gcagggctgccatatccagtccttc

SEQ ID NO: 3752717 - DNA, 25 bp, Homo sapien
tgagtgctggtggagcgaccagcag

SEQ ID NO: 3752718 - DNA, 25 bp, Homo sapien
ttatcctgattagtctccttcctcc

SEQ ID NO: 3752719 - DNA, 25 bp, Homo sapien
ccaggaggagggtttgcgtgggaga

SEQ ID NO: 3752720 - DNA, 25 bp, Homo sapien
gagggtttgcgtgggagaagccatc

SEQ ID NO: 3752721 - DNA, 25 bp, Homo sapien
ggagaagccatcttcgaaaccttct

SEQ ID NO: 3752722 - DNA, 25 bp, Homo sapien
tcgaaaccttctaccatgaggaaca

SEQ ID NO: 3752723 - DNA, 25 bp, Homo sapien
tcattcctcattgcctacaggattc

SEQ ID NO: 3752724 - DNA, 25 bp, Homo sapien
tcctcattgcctacaggattctgac

SEQ ID NO: 3752725 - DNA, 25 bp, Homo sapien
attcctcattgcctacaggattctg

SEQ ID NO: 3752726 - DNA, 25 bp, Homo sapien
ttcctcattgcctacaggattctga

SEQ ID NO: 3752727 - DNA, 25 bp, Homo sapien
ggtcgtcttcaaactgtactctcat

SEQ ID NO: 3752728 - DNA, 25 bp, Homo sapien
gggcacagaggtcgtcttcaaactg

SEQ ID NO: 3752729 - DNA, 25 bp, Homo sapien
gcacagaggtcgtcttcaaactgta

SEQ ID NO: 3752730 - DNA, 25 bp, Homo sapien
cagaggtcgtcttcaaactgtactc

SEQ ID NO: 3752731 - DNA, 25 bp, Homo sapien
agctaccactgtattctgccccacg

SEQ ID NO: 3752732 - DNA, 25 bp, Homo sapien
accactgtattctgccccacgacag

SEQ ID NO: 3752733 - DNA, 25 bp, Homo sapien
caagctaccactgtattctgcccca

SEQ ID NO: 3752734 - DNA, 25 bp, Homo sapien
ctccaagctaccactgtattctgcc

SEQ ID NO: 3752735 - DNA, 25 bp, Homo sapien
ttctctccatccgtattcttctgta

SEQ ID NO: 3752736 - DNA, 25 bp, Homo sapien
ggaccttctctccatccgtattctt

SEQ ID NO: 3752737 - DNA, 25 bp, Homo sapien
tctgttcccatggtaatgtctgccg

SEQ ID NO: 3752738 - DNA, 25 bp, Homo sapien
tgtctgccggccaaccaactacata

SEQ ID NO: 3752739 - DNA, 25 bp, Homo sapien
agaatattaagagaggcagtaaggc

SEQ ID NO: 3752740 - DNA, 25 bp, Homo sapien
tcaattgacaatgaagactttccgt

SEQ ID NO: 3752741 - DNA, 25 bp, Homo sapien
gaaaactgccttaagtcgagaatat

SEQ ID NO: 3752742 - DNA, 25 bp, Homo sapien
tgaagactttccgtgaaaactgcct

SEQ ID NO: 3752743 - DNA, 25 bp, Homo sapien
ctcagcctttctacctggtggtggt

SEQ ID NO: 3752744 - DNA, 25 bp, Homo sapien
ttattggtttttcccggcagccaga

SEQ ID NO: 3752745 - DNA, 25 bp, Homo sapien
cctttctacctggtggtggtgtgtg

SEQ ID NO: 3752746 - DNA, 25 bp, Homo sapien
tggtttttcccggcagccagaacat

SEQ ID NO: 3752747 - DNA, 25 bp, Homo sapien
aagaggcactcaactgcccagcaat

SEQ ID NO: 3752748 - DNA, 25 bp, Homo sapien
tgcctgcacctttccccggtaaaga

SEQ ID NO: 3752749 - DNA, 25 bp, Homo sapien
gcaataccaggactggagctctggc

SEQ ID NO: 3752750 - DNA, 25 bp, Homo sapien
ccagcaataccaggactggagctct

SEQ ID NO: 3752751 - DNA, 25 bp, Homo sapien
tgccagacctgagctactgccatga

SEQ ID NO: 3752752 - DNA, 25 bp, Homo sapien
taagtatctactggatgccagacct

SEQ ID NO: 3752753 - DNA, 25 bp, Homo sapien
aggtgggccctgcatgggatattca

SEQ ID NO: 3752754 - DNA, 25 bp, Homo sapien
gaggctcgaagcctcataactgctg

SEQ ID NO: 3752755 - DNA, 25 bp, Homo sapien
aggggaagggttggtgagctgctcc

SEQ ID NO: 3752756 - DNA, 25 bp, Homo sapien
aggagccaggtctcatggtgcatct

SEQ ID NO: 3752757 - DNA, 25 bp, Homo sapien
caggagccaggtctcatggtgcatc

SEQ ID NO: 3752758 - DNA, 25 bp, Homo sapien
cagcttcagttgtggagggccttct

SEQ ID NO: 3752759 - DNA, 25 bp, Homo sapien
tgcatctacaccacagacggctggg

SEQ ID NO: 3752760 - DNA, 25 bp, Homo sapien
ctgctgtgtgcttcgtgcccggcgt

SEQ ID NO: 3752761 - DNA, 25 bp, Homo sapien
tctggaggacacgtcaccagcttca

SEQ ID NO: 3752762 - DNA, 25 bp, Homo sapien
tgaccttgaaccattcagcccattt

SEQ ID NO: 3752763 - DNA, 25 bp, Homo sapien
cagcccatttcgtggtctctgggtc

SEQ ID NO: 3752764 - DNA, 25 bp, Homo sapien
tcccatttgaaccatctccagggag

SEQ ID NO: 3752765 - DNA, 25 bp, Homo sapien
cagggccctggcctaacatgcatgt

SEQ ID NO: 3752766 - DNA, 25 bp, Homo sapien
tttgtgcaaattcacgggcatctgc

SEQ ID NO: 3752767 - DNA, 25 bp, Homo sapien
aagttcattactcagcatccatcca

SEQ ID NO: 3752768 - DNA, 25 bp, Homo sapien
gaagaacattgctcagtcacaccgt

SEQ ID NO: 3752769 - DNA, 25 bp, Homo sapien
caccgtctcaaacagcggcaagttt

SEQ ID NO: 3752770 - DNA, 25 bp, Homo sapien
gcaaaatgtctaattatgatgtaat

SEQ ID NO: 3752771 - DNA, 25 bp, Homo sapien
aataaaattcactggcattcaaaaa

SEQ ID NO: 3752772 - DNA, 25 bp, Homo sapien
ttctttagaacttgtatatttgaca

SEQ ID NO: 3752773 - DNA, 25 bp, Homo sapien
tgtaattaaggagcattttagagct

SEQ ID NO: 3752774 - DNA, 25 bp, Homo sapien
ggattcctgttctcccgaatggacg

SEQ ID NO: 3752775 - DNA, 25 bp, Homo sapien
caaagtcgactgttccgaagccctc

SEQ ID NO: 3752776 - DNA, 25 bp, Homo sapien
ggcaaagttgacatccaagggagca

SEQ ID NO: 3752777 - DNA, 25 bp, Homo sapien
acgccatccgatggcaaagttgaca

SEQ ID NO: 3752778 - DNA, 25 bp, Homo sapien
ggaatggtgtcgcagccagagaccc

SEQ ID NO: 3752779 - DNA, 25 bp, Homo sapien
gggacgcaaccttcggacaattgtc

SEQ ID NO: 3752780 - DNA, 25 bp, Homo sapien
gcctgacagagctctaagggaggaa

SEQ ID NO: 3752781 - DNA, 25 bp, Homo sapien
aggcaggaaaggcagtgtccgtgga

SEQ ID NO: 3752782 - DNA, 25 bp, Homo sapien
tgccacctgatattcaggagtagag

SEQ ID NO: 3752783 - DNA, 25 bp, Homo sapien
cctgatattcaggagtagagagcag

SEQ ID NO: 3752784 - DNA, 25 bp, Homo sapien
gcttgtccgtttttgccacctgata

SEQ ID NO: 3752785 - DNA, 25 bp, Homo sapien
cagccagcttgtccgtttttgccac

SEQ ID NO: 3752786 - DNA, 25 bp, Homo sapien
gaaatcctgttgattggggaaatcc

SEQ ID NO: 3752787 - DNA, 25 bp, Homo sapien
atgctgactggtagatctggatgag

SEQ ID NO: 3752788 - DNA, 25 bp, Homo sapien
attgaagaaatagcccagaaaattc

SEQ ID NO: 3752789 - DNA, 25 bp, Homo sapien
tccaatcaacatcccagtaaatgaa

SEQ ID NO: 3752790 - DNA, 25 bp, Homo sapien
tggcagccattgtgcacacccagct

SEQ ID NO: 3752791 - DNA, 25 bp, Homo sapien
tggcagccattgtgcacatccagct

SEQ ID NO: 3752792 - DNA, 25 bp, Homo sapien
tgatcaccgaccgtggcagccattg

SEQ ID NO: 3752793 - DNA, 25 bp, Homo sapien
ggcagccattgtgcacacccagctt

SEQ ID NO: 3752794 - DNA, 25 bp, Homo sapien
cttcccctcaaaaggccacagacag

SEQ ID NO: 3752795 - DNA, 25 bp, Homo sapien
ccctcaaaaggccacagacagtgag

SEQ ID NO: 3752796 - DNA, 25 bp, Homo sapien
ttcccctcaaaaggccacagacagt

SEQ ID NO: 3752797 - DNA, 25 bp, Homo sapien
tcccctcaaaaggccacagacagtg

SEQ ID NO: 3752798 - DNA, 25 bp, Homo sapien
agctgacacgatccgcgtttctgaa

SEQ ID NO: 3752799 - DNA, 25 bp, Homo sapien
gacacgatccgcgtttctgaaaata

SEQ ID NO: 3752800 - DNA, 25 bp, Homo sapien
ctgcattcagctgacacgatccgcg

SEQ ID NO: 3752801 - DNA, 25 bp, Homo sapien
cattcagctgacacgatccgcgttt

SEQ ID NO: 3752802 - DNA, 25 bp, Homo sapien
gatgtggaatcttcggacgtgggaa

SEQ ID NO: 3752803 - DNA, 25 bp, Homo sapien
tggaatcttcggacgtgggaaggaa

SEQ ID NO: 3752804 - DNA, 25 bp, Homo sapien
gaatcttcggacgtgggaaggaagc

SEQ ID NO: 3752805 - DNA, 25 bp, Homo sapien
cctgatgtggaatcttcggacgtgg

SEQ ID NO: 3752806 - DNA, 25 bp, Homo sapien
ctcctgctcaatgtgcacggccagc

SEQ ID NO: 3752807 - DNA, 25 bp, Homo sapien
tagtcggagagaggtacctgtgcct

SEQ ID NO: 3752808 - DNA, 25 bp, Homo sapien
gagccagctcccctgtcataatcgg

SEQ ID NO: 3752809 - DNA, 25 bp, Homo sapien
tgcggacagcctcaaatgcgatgga

SEQ ID NO: 3752810 - DNA, 25 bp, Homo sapien
taatcggagtcatgaaacagtcgcc

SEQ ID NO: 3752811 - DNA, 25 bp, Homo sapien
acttcatgacaagggtctgagttat

SEQ ID NO: 3752812 - DNA, 25 bp, Homo sapien
cagaaaggatccatgctgtgagctc

SEQ ID NO: 3752813 - DNA, 25 bp, Homo sapien
ctgagttattgcatcagaaaggatc

SEQ ID NO: 3752814 - DNA, 25 bp, Homo sapien
gggtctgagttattgcatcagaaag

SEQ ID NO: 3752815 - DNA, 25 bp, Homo sapien
ccaactgcgtttggctggaacagca

SEQ ID NO: 3752816 - DNA, 25 bp, Homo sapien
tcctgaccaactgcgtttggctgga

SEQ ID NO: 3752817 - DNA, 25 bp, Homo sapien
tggttgtggctctctccgagcaaag

SEQ ID NO: 3752818 - DNA, 25 bp, Homo sapien
cagagccaatgaagctgggcatttc

SEQ ID NO: 3752819 - DNA, 25 bp, Homo sapien
ctgaccgtgccccttaacgccggcg

SEQ ID NO: 3752820 - DNA, 25 bp, Homo sapien
cttaacgccggcgtgtcctctgtac

SEQ ID NO: 3752821 - DNA, 25 bp, Homo sapien
gcttctgaccgtgccccttaacgcc

SEQ ID NO: 3752822 - DNA, 25 bp, Homo sapien
tgccccttaacgccggcgtgtcctc

SEQ ID NO: 3752823 - DNA, 25 bp, Homo sapien
cacaattctggttagatcccactgg

SEQ ID NO: 3752824 - DNA, 25 bp, Homo sapien
ttctggttagatcccactggcctgt

SEQ ID NO: 3752825 - DNA, 25 bp, Homo sapien
gaagtcactttggaagacttttata

SEQ ID NO: 3752826 - DNA, 25 bp, Homo sapien
ggcttcagttagttgctggaagtca

SEQ ID NO: 3752827 - DNA, 25 bp, Homo sapien
gaccaggattccttgtgtgggcagt

SEQ ID NO: 3752828 - DNA, 25 bp, Homo sapien
gggtagaccccacctttggcatcaa

SEQ ID NO: 3752829 - DNA, 25 bp, Homo sapien
tgatgctggtgacaccatcgtcagc

SEQ ID NO: 3752830 - DNA, 25 bp, Homo sapien
acaaccatatgcgtcctgatgctgg

SEQ ID NO: 3752831 - DNA, 25 bp, Homo sapien
caagaagcccttggatggtgagcta

SEQ ID NO: 3752832 - DNA, 25 bp, Homo sapien
aacgtatttgcaagtgtggctggtg

SEQ ID NO: 3752833 - DNA, 25 bp, Homo sapien
cctgtgctatttggctgtaactctg

SEQ ID NO: 3752834 - DNA, 25 bp, Homo sapien
gtgctgaattggctacctgtgctat

SEQ ID NO: 3752835 - DNA, 25 bp, Homo sapien
gtgagtccttgtcagcttggaaatt

SEQ ID NO: 3752836 - DNA, 25 bp, Homo sapien
ggatgggttattcaagtcagaagac

SEQ ID NO: 3752837 - DNA, 25 bp, Homo sapien
gaagacacatggatcaagagcagga

SEQ ID NO: 3752838 - DNA, 25 bp, Homo sapien
ccttgtcagcttggaaattcagaaa

SEQ ID NO: 3752839 - DNA, 25 bp, Homo sapien
agggggctgttgatgtagagaaaga

SEQ ID NO: 3752840 - DNA, 25 bp, Homo sapien
atccagcaattacagacagggggct

SEQ ID NO: 3752841 - DNA, 25 bp, Homo sapien
cagcaattacagacagggggctgtt

SEQ ID NO: 3752842 - DNA, 25 bp, Homo sapien
aaaaatccagcaattacagacaggg

SEQ ID NO: 3752843 - DNA, 25 bp, Homo sapien
gagttgagcctgtgtgctcgtgaca

SEQ ID NO: 3752844 - DNA, 25 bp, Homo sapien
agctggtgttgtatgagttgagcct

SEQ ID NO: 3752845 - DNA, 25 bp, Homo sapien
gataagaacgatcacgcaggctctc

SEQ ID NO: 3752846 - DNA, 25 bp, Homo sapien
ggcatttccacaggacgtctgataa

SEQ ID NO: 3752847 - DNA, 25 bp, Homo sapien
tggctgagcaaacccggctcagctc

SEQ ID NO: 3752848 - DNA, 25 bp, Homo sapien
aggcgctggctgagcaaacccggct

SEQ ID NO: 3752849 - DNA, 25 bp, Homo sapien
gctggctgagcaaacccggctcagc

SEQ ID NO: 3752850 - DNA, 25 bp, Homo sapien
ctctgaggcgctggctgagcaaacc

SEQ ID NO: 3752851 - DNA, 25 bp, Homo sapien
ggcttctctgcagaacgtgccgggc

SEQ ID NO: 3752852 - DNA, 25 bp, Homo sapien
agggcttctctgcagaacgtgccgg

SEQ ID NO: 3752853 - DNA, 25 bp, Homo sapien
caagggcttctctgcagaacgtgcc

SEQ ID NO: 3752854 - DNA, 25 bp, Homo sapien
ccaagggcttctctgcagaacgtgc

SEQ ID NO: 3752855 - DNA, 25 bp, Homo sapien
aattggggtttgtgcaatgccatcc

SEQ ID NO: 3752856 - DNA, 25 bp, Homo sapien
atggaatccggaccaagggcaaaag

SEQ ID NO: 3752857 - DNA, 25 bp, Homo sapien
catggaatccggaccaagggcaaaa

SEQ ID NO: 3752858 - DNA, 25 bp, Homo sapien
tggagccccctttaacacttggaga

SEQ ID NO: 3752859 - DNA, 25 bp, Homo sapien
tcatggaatccggaccaagggcaaa

SEQ ID NO: 3752860 - DNA, 25 bp, Homo sapien
cctggaccacaaactgcagagagcc

SEQ ID NO: 3752861 - DNA, 25 bp, Homo sapien
gaacctggaccacaaactgcagaga

SEQ ID NO: 3752862 - DNA, 25 bp, Homo sapien
tggaccacaaactgcagagagcccc

SEQ ID NO: 3752863 - DNA, 25 bp, Homo sapien
aacctggaccacaaactgcagagag

SEQ ID NO: 3752864 - DNA, 25 bp, Homo sapien
tggcgcagggctgacttccaggagc

SEQ ID NO: 3752865 - DNA, 25 bp, Homo sapien
cgtggcgcagggctgacttccagga

SEQ ID NO: 3752866 - DNA, 25 bp, Homo sapien
ccagcgcagctgatgcctgttggtg

SEQ ID NO: 3752867 - DNA, 25 bp, Homo sapien
agccagcgcagctgatgcctgttgg

SEQ ID NO: 3752868 - DNA, 25 bp, Homo sapien
tggaacagcgacgaagccacaggac

SEQ ID NO: 3752869 - DNA, 25 bp, Homo sapien
aacagcgacgaagccacaggacggg

SEQ ID NO: 3752870 - DNA, 25 bp, Homo sapien
tgctcatgacggagacctggtcccg

SEQ ID NO: 3752871 - DNA, 25 bp, Homo sapien
gggaggtgctcatgacggagacctg

SEQ ID NO: 3752872 - DNA, 25 bp, Homo sapien
gaggtgctcatgacagagccaaagg

SEQ ID NO: 3752873 - DNA, 25 bp, Homo sapien
gagcaggtgcttatgacagagccac

SEQ ID NO: 3752874 - DNA, 25 bp, Homo sapien
ggaacagcaatgaagccacaggaag

SEQ ID NO: 3752875 - DNA, 25 bp, Homo sapien
agaaggaggtgctcatgacagagcc

SEQ ID NO: 3752876 - DNA, 25 bp, Homo sapien
tgtggcaaggagctcatccgcccca

SEQ ID NO: 3752877 - DNA, 25 bp, Homo sapien
gcatgtggcaaggagctcatccgcc

SEQ ID NO: 3752878 - DNA, 25 bp, Homo sapien
agcacagcatcccgggtctcactgg

SEQ ID NO: 3752879 - DNA, 25 bp, Homo sapien
cagcacagcatcccgggtctcactg

SEQ ID NO: 3752880 - DNA, 25 bp, Homo sapien
tatttgggcttgatgtgagtcttcc

SEQ ID NO: 3752881 - DNA, 25 bp, Homo sapien
tgcttcacatttagcgtcctgtgtg

SEQ ID NO: 3752882 - DNA, 25 bp, Homo sapien
aaagcttcactccagagctgacatc

SEQ ID NO: 3752883 - DNA, 25 bp, Homo sapien
gacatctcttgtgatctgaaggtag

SEQ ID NO: 3752884 - DNA, 25 bp, Homo sapien
tcactctttgtccacagggaaaggt

SEQ ID NO: 3752885 - DNA, 25 bp, Homo sapien
catttggtgattctttggatgctgg

SEQ ID NO: 3752886 - DNA, 25 bp, Homo sapien
gcatccccctcatgatgtcctcaca

SEQ ID NO: 3752887 - DNA, 25 bp, Homo sapien
taaagtcccattcactctttgtcca

SEQ ID NO: 3752888 - DNA, 25 bp, Homo sapien
gctggactctctcaccaaggtgcga

SEQ ID NO: 3752889 - DNA, 25 bp, Homo sapien
ctggactctctcaccaaggtgcgac

SEQ ID NO: 3752890 - DNA, 25 bp, Homo sapien
tccatggggcttttgacagggttcc

SEQ ID NO: 3752891 - DNA, 25 bp, Homo sapien
ggttcctaggttgtgctggtctcag

SEQ ID NO: 3752892 - DNA, 25 bp, Homo sapien
acacactcactcgtgcgtggcttcc

SEQ ID NO: 3752893 - DNA, 25 bp, Homo sapien
cccgcgtgtcaggcgccatagcagg

SEQ ID NO: 3752894 - DNA, 25 bp, Homo sapien
agagccttgcacagttgaccccgtc

SEQ ID NO: 3752895 - DNA, 25 bp, Homo sapien
gagccttgcacagttgaccccgtca

SEQ ID NO: 3752896 - DNA, 25 bp, Homo sapien
caaggggagctcaacgtctgccctg

SEQ ID NO: 3752897 - DNA, 25 bp, Homo sapien
tgtggacaaggggagctcaacgtct

SEQ ID NO: 3752898 - DNA, 25 bp, Homo sapien
gtggcagctttttctgggttcggct

SEQ ID NO: 3752899 - DNA, 25 bp, Homo sapien
ctggcctgtgcccatgggaactctg

SEQ ID NO: 3752900 - DNA, 25 bp, Homo sapien
actttccggctcgtgggctgggcca

SEQ ID NO: 3752901 - DNA, 25 bp, Homo sapien
tgcagacacatccaagcatgatctt

SEQ ID NO: 3752902 - DNA, 25 bp, Homo sapien
cttgttggaatgatgtgtctgtcgg

SEQ ID NO: 3752903 - DNA, 25 bp, Homo sapien
atgatgtgtctgtcgggtccaaggc

SEQ ID NO: 3752904 - DNA, 25 bp, Homo sapien
ggtcgggagtgctgagtaatccaac

SEQ ID NO: 3752905 - DNA, 25 bp, Homo sapien
caaccttggtaccacgtctgtgcat

SEQ ID NO: 3752906 - DNA, 25 bp, Homo sapien
cctggacactcccagtttcgctgca

SEQ ID NO: 3752907 - DNA, 25 bp, Homo sapien
ctggtatctacagctcttgccctgg

SEQ ID NO: 3752908 - DNA, 25 bp, Homo sapien
gtgcttggttcccagagcatctgct

SEQ ID NO: 3752909 - DNA, 25 bp, Homo sapien
gccttccataaacggagtgtgcttg

SEQ ID NO: 3752910 - DNA, 25 bp, Homo sapien
agggtctgccactgcactggggaca

SEQ ID NO: 3752911 - DNA, 25 bp, Homo sapien
gcagggcagggtctgccactgcact

SEQ ID NO: 3752912 - DNA, 25 bp, Homo sapien
gcagggtctgccactgcactgggga

SEQ ID NO: 3752913 - DNA, 25 bp, Homo sapien
aggcagggcagggtctgccactgca

SEQ ID NO: 3752914 - DNA, 25 bp, Homo sapien
aaagccttgcttcactttgaggatg

SEQ ID NO: 3752915 - DNA, 25 bp, Homo sapien
gcgactccggcacatggcggcagct

SEQ ID NO: 3752916 - DNA, 25 bp, Homo sapien
ctagcaggttcctgactggcagcaa

SEQ ID NO: 3752917 - DNA, 25 bp, Homo sapien
ttgcatggctctaaggcgctagcag

SEQ ID NO: 3752918 - DNA, 25 bp, Homo sapien
aaaaaatgtgaccacctcctgcggg

SEQ ID NO: 3752919 - DNA, 25 bp, Homo sapien
aaatgtgaccacctcctgcgggtac

SEQ ID NO: 3752920 - DNA, 25 bp, Homo sapien
ttgctctgaaaaaatgtgaccacct

SEQ ID NO: 3752921 - DNA, 25 bp, Homo sapien
tctgaaaaaatgtgaccacctcctg

SEQ ID NO: 3752922 - DNA, 25 bp, Homo sapien
gagattgcgagctcctctgtgaatg

SEQ ID NO: 3752923 - DNA, 25 bp, Homo sapien
aatgaaatagcccatgcccgctggg

SEQ ID NO: 3752924 - DNA, 25 bp, Homo sapien
aatggcatgtaggtgcaggtcccag

SEQ ID NO: 3752925 - DNA, 25 bp, Homo sapien
cactgacgtcgctctcaggattgag

SEQ ID NO: 3752926 - DNA, 25 bp, Homo sapien
ttaacagtccacaggctttatgaag

SEQ ID NO: 3752927 - DNA, 25 bp, Homo sapien
cttggtgtcactgttgatagctatc

SEQ ID NO: 3752928 - DNA, 25 bp, Homo sapien
tcctttgccaaaatggttgtccctc

SEQ ID NO: 3752929 - DNA, 25 bp, Homo sapien
cacgacaggagctgtgggcatccat

SEQ ID NO: 3752930 - DNA, 25 bp, Homo sapien
tccctctcatggcaaggaggccagg

SEQ ID NO: 3752931 - DNA, 25 bp, Homo sapien
agacactccctctcatggcaaggag

SEQ ID NO: 3752932 - DNA, 25 bp, Homo sapien
acagactttccaaggacatggcctc

SEQ ID NO: 3752933 - DNA, 25 bp, Homo sapien
aacagactttccaaggacatggcct

SEQ ID NO: 3752934 - DNA, 25 bp, Homo sapien
tgcggacgcacaggtcctgcgcctg

SEQ ID NO: 3752935 - DNA, 25 bp, Homo sapien
caggtgagaactcgtcgtgaagatg

SEQ ID NO: 3752936 - DNA, 25 bp, Homo sapien
gagggagacgtgctctgaggacagt

SEQ ID NO: 3752937 - DNA, 25 bp, Homo sapien
tcgtcgtgaagatgccgcgggcaca

SEQ ID NO: 3752938 - DNA, 25 bp, Homo sapien
tcactccccattgagaaaggcctgc

SEQ ID NO: 3752939 - DNA, 25 bp, Homo sapien
ggttctttggacctgcaacccagca

SEQ ID NO: 3752940 - DNA, 25 bp, Homo sapien
gatcatcagcttctcttgaggtgac

SEQ ID NO: 3752941 - DNA, 25 bp, Homo sapien
tgtgtgaagcaggaccactgcggct

SEQ ID NO: 3752942 - DNA, 25 bp, Homo sapien
cctggttccatgcatcaatgtacct

SEQ ID NO: 3752943 - DNA, 25 bp, Homo sapien
atgtacctgtcctccgggccaggca

SEQ ID NO: 3752944 - DNA, 25 bp, Homo sapien
actccgggatgagagtgtccgcatc

SEQ ID NO: 3752945 - DNA, 25 bp, Homo sapien
gagagtgtccgcatctacacagcac

SEQ ID NO: 3752946 - DNA, 25 bp, Homo sapien
catctcccattttgggtgccagctc

SEQ ID NO: 3752947 - DNA, 25 bp, Homo sapien
ccccttgggcttttgggtgccatct

SEQ ID NO: 3752948 - DNA, 25 bp, Homo sapien
ccttgggcttttgggtgccatctcc

SEQ ID NO: 3752949 - DNA, 25 bp, Homo sapien
tagagctgtcctgtccttgggtccc

SEQ ID NO: 3752950 - DNA, 25 bp, Homo sapien
gactgtgccgatatgaagctgttcc

SEQ ID NO: 3752951 - DNA, 25 bp, Homo sapien
cgccgcgaccttggtttgcaaacca

SEQ ID NO: 3752952 - DNA, 25 bp, Homo sapien
tgggcactgctagaataatccacaa

SEQ ID NO: 3752953 - DNA, 25 bp, Homo sapien
tatctcctccacacataaaagttgg

SEQ ID NO: 3752954 - DNA, 25 bp, Homo sapien
ctttctctcagcagtgacctggacc

SEQ ID NO: 3752955 - DNA, 25 bp, Homo sapien
ttctctcagcagtgacctggaccat

SEQ ID NO: 3752956 - DNA, 25 bp, Homo sapien
tttctctcagcagtgacctggacca

SEQ ID NO: 3752957 - DNA, 25 bp, Homo sapien
ggtgcgtctggtcggctgcatcttt

SEQ ID NO: 3752958 - DNA, 25 bp, Homo sapien
gccattccctcagggtgcgtctggt

SEQ ID NO: 3752959 - DNA, 25 bp, Homo sapien
gaggacagtaacaagatctgcccag

SEQ ID NO: 3752960 - DNA, 25 bp, Homo sapien
agggaactgccagcagcggccattc

SEQ ID NO: 3752961 - DNA, 25 bp, Homo sapien
gctgggcatcttcagtaccactcaa

SEQ ID NO: 3752962 - DNA, 25 bp, Homo sapien
atcttcagtaccactcaatgcttgg

SEQ ID NO: 3752963 - DNA, 25 bp, Homo sapien
accctgggggatttgctgggcatct

SEQ ID NO: 3752964 - DNA, 25 bp, Homo sapien
ttgctgggcatcttcagtaccactc

SEQ ID NO: 3752965 - DNA, 25 bp, Homo sapien
gctggggcgagttctcccacttcca

SEQ ID NO: 3752966 - DNA, 25 bp, Homo sapien
gaaggtggccgctctactggctggg

SEQ ID NO: 3752967 - DNA, 25 bp, Homo sapien
ctgctatgcggacccctcctggctc

SEQ ID NO: 3752968 - DNA, 25 bp, Homo sapien
ccacataatgaggactcggagaacc

SEQ ID NO: 3752969 - DNA, 25 bp, Homo sapien
aatgttcagtctcatcgatggcccc

SEQ ID NO: 3752970 - DNA, 25 bp, Homo sapien
gatcacgacccgattcctgcaggat

SEQ ID NO: 3752971 - DNA, 25 bp, Homo sapien
gaagcacttctaccatgatcacgac

SEQ ID NO: 3752972 - DNA, 25 bp, Homo sapien
gagtgcagcgatcttcaggtcccat

SEQ ID NO: 3752973 - DNA, 25 bp, Homo sapien
tgtggagttggaaggacctgtgacg

SEQ ID NO: 3752974 - DNA, 25 bp, Homo sapien
gagttggaaggacctgtgacggtgc

SEQ ID NO: 3752975 - DNA, 25 bp, Homo sapien
cagagccagactccggaggagcaag

SEQ ID NO: 3752976 - DNA, 25 bp, Homo sapien
caagtgccgattgtggatcagcgag

SEQ ID NO: 3752977 - DNA, 25 bp, Homo sapien
ggccatttttgacacgagctgccct

SEQ ID NO: 3752978 - DNA, 25 bp, Homo sapien
aggccatttttgacacgagctgccc

SEQ ID NO: 3752979 - DNA, 25 bp, Homo sapien
cctggtcccgacactgtcgctgtta

SEQ ID NO: 3752980 - DNA, 25 bp, Homo sapien
tgttaacacctcaccttccgtgttg

SEQ ID NO: 3752981 - DNA, 25 bp, Homo sapien
gacactgtcgctgttaacacctcac

SEQ ID NO: 3752982 - DNA, 25 bp, Homo sapien
ctcagccctggtcccgacactgtcg

SEQ ID NO: 3752983 - DNA, 25 bp, Homo sapien
gacattccccatgatcttaagcagc

SEQ ID NO: 3752984 - DNA, 25 bp, Homo sapien
tacttagtagtcctgggtggaacca

SEQ ID NO: 3752985 - DNA, 25 bp, Homo sapien
aatcccgatgattgcaataagggcc

SEQ ID NO: 3752986 - DNA, 25 bp, Homo sapien
gtctttgtcccctagtaaacagtga

SEQ ID NO: 3752987 - DNA, 25 bp, Homo sapien
cacctggaccgtggatcacttacag

SEQ ID NO: 3752988 - DNA, 25 bp, Homo sapien
tgtgtcatcacctaagacgattggc

SEQ ID NO: 3752989 - DNA, 25 bp, Homo sapien
ccaggattcccgcagtgttgaggaa

SEQ ID NO: 3752990 - DNA, 25 bp, Homo sapien
tgccaccggtcctacttcaaaagaa

SEQ ID NO: 3752991 - DNA, 25 bp, Homo sapien
catcagcagaaagccggttgctgcc

SEQ ID NO: 3752992 - DNA, 25 bp, Homo sapien
agcatcagcagaaagccggttgctg

SEQ ID NO: 3752993 - DNA, 25 bp, Homo sapien
atcagcatcagcagaaagccggttg

SEQ ID NO: 3752994 - DNA, 25 bp, Homo sapien
tggctaaggggccacggaagcggga

SEQ ID NO: 3752995 - DNA, 25 bp, Homo sapien
tccagaacactcctggacagcccct

SEQ ID NO: 3752996 - DNA, 25 bp, Homo sapien
gaacactcctggacagcccctagcc

SEQ ID NO: 3752997 - DNA, 25 bp, Homo sapien
cagaacactcctggacagcccctag

SEQ ID NO: 3752998 - DNA, 25 bp, Homo sapien
gtccagaacactcctggacagcccc

SEQ ID NO: 3752999 - DNA, 25 bp, Homo sapien
atttacactgggatatattgctttg

SEQ ID NO: 3753000 - DNA, 25 bp, Homo sapien
cactgggatatattgctttgataat

SEQ ID NO: 3753001 - DNA, 25 bp, Homo sapien
gagataagatgcttactataatgta

SEQ ID NO: 3753002 - DNA, 25 bp, Homo sapien
tagagataagatgcttactataatg

SEQ ID NO: 3753003 - DNA, 25 bp, Homo sapien
cagagtgatgcttgggcgatgtcca

SEQ ID NO: 3753004 - DNA, 25 bp, Homo sapien
tctccagcgagatgcctgcgggctg

SEQ ID NO: 3753005 - DNA, 25 bp, Homo sapien
tgttgaaaaccgctgtgaaagggac

SEQ ID NO: 3753006 - DNA, 25 bp, Homo sapien
atgaccaaatgctttgcccgcgtgg

SEQ ID NO: 3753007 - DNA, 25 bp, Homo sapien
ggagtgccgtgtggccgggcccatt

SEQ ID NO: 3753008 - DNA, 25 bp, Homo sapien
cttgaacttctacagccccagcgga

SEQ ID NO: 3753009 - DNA, 25 bp, Homo sapien
cagcggaggcctttggtcaattttc

SEQ ID NO: 3753010 - DNA, 25 bp, Homo sapien
tcatgtggccactgggagtgccgtg

SEQ ID NO: 3753011 - DNA, 25 bp, Homo sapien
ttgacggtcggggactctggagcag

SEQ ID NO: 3753012 - DNA, 25 bp, Homo sapien
ctgggctgccgcgtttttgacggtc

SEQ ID NO: 3753013 - DNA, 25 bp, Homo sapien
tccaccctgggctgccgcgtttttg

SEQ ID NO: 3753014 - DNA, 25 bp, Homo sapien
tggaagcccggtcattccaccctgg

SEQ ID NO: 3753015 - DNA, 25 bp, Homo sapien
ctgagcgtaaggcaatggcctcatc

SEQ ID NO: 3753016 - DNA, 25 bp, Homo sapien
ttagggatctgagcgtaaggcaatg

SEQ ID NO: 3753017 - DNA, 25 bp, Homo sapien
tgtttctttagggatctgagcgtaa

SEQ ID NO: 3753018 - DNA, 25 bp, Homo sapien
gatctgagcgtaaggcaatggcctc

SEQ ID NO: 3753019 - DNA, 25 bp, Homo sapien
gttcctgcaggcttcgctgtgacga

SEQ ID NO: 3753020 - DNA, 25 bp, Homo sapien
gattcacagagcagggttcctgcag

SEQ ID NO: 3753021 - DNA, 25 bp, Homo sapien
gctaagatgggtgttgacagcgagg

SEQ ID NO: 3753022 - DNA, 25 bp, Homo sapien
cgctgtgacgatttctccttgtgct

SEQ ID NO: 3753023 - DNA, 25 bp, Homo sapien
cttctcaaagtgagggttggtggtg

SEQ ID NO: 3753024 - DNA, 25 bp, Homo sapien
ttcttctcaaagtgagggttggtgg

SEQ ID NO: 3753025 - DNA, 25 bp, Homo sapien
ctcaaagtgagggttggtggtggtg

SEQ ID NO: 3753026 - DNA, 25 bp, Homo sapien
cttcttctcaaagtgagggttggtg

SEQ ID NO: 3753027 - DNA, 25 bp, Homo sapien
gggaggacgcatcggtcttctttga

SEQ ID NO: 3753028 - DNA, 25 bp, Homo sapien
gacgcatcggtcttctttgagtaag

SEQ ID NO: 3753029 - DNA, 25 bp, Homo sapien
tgagggaggacgcatcggtcttctt

SEQ ID NO: 3753030 - DNA, 25 bp, Homo sapien
gcatcggtcttctttgagtaagtag

SEQ ID NO: 3753031 - DNA, 25 bp, Homo sapien
tcggtcacatcagcctgtgtcactt

SEQ ID NO: 3753032 - DNA, 25 bp, Homo sapien
gtgtcactttctcccgtgcaccgtc

SEQ ID NO: 3753033 - DNA, 25 bp, Homo sapien
gcggggctcggtcacatcagcctgt

SEQ ID NO: 3753034 - DNA, 25 bp, Homo sapien
tttctcccgtgcaccgtcctctgac

SEQ ID NO: 3753035 - DNA, 25 bp, Homo sapien
gcctttatccgctgtgacaggtggc

SEQ ID NO: 3753036 - DNA, 25 bp, Homo sapien
ctgtgacaggtggccgaaaagccat

SEQ ID NO: 3753037 - DNA, 25 bp, Homo sapien
gcaatgcctttatccgctgtgacag

SEQ ID NO: 3753038 - DNA, 25 bp, Homo sapien
attcttttctggcacacggagggca

SEQ ID NO: 3753039 - DNA, 25 bp, Homo sapien
gctgcacttcgggacactgcaatgg

SEQ ID NO: 3753040 - DNA, 25 bp, Homo sapien
tgctgcacttcgggacactgcaatg

SEQ ID NO: 3753041 - DNA, 25 bp, Homo sapien
atgctgcacttcgggacactgcaat

SEQ ID NO: 3753042 - DNA, 25 bp, Homo sapien
gtgggaccttggctgacgcccagtg

SEQ ID NO: 3753043 - DNA, 25 bp, Homo sapien
gaccttggctgacgcccagtgcgca

SEQ ID NO: 3753044 - DNA, 25 bp, Homo sapien
caggtgggaccttggctgacgccca

SEQ ID NO: 3753045 - DNA, 25 bp, Homo sapien
tgggaccttggctgacgcccagtgc

SEQ ID NO: 3753046 - DNA, 25 bp, Homo sapien
tgcggagagccagatcttcatcctg

SEQ ID NO: 3753047 - DNA, 25 bp, Homo sapien
atcttcatcctggagcgcatagaac

SEQ ID NO: 3753048 - DNA, 25 bp, Homo sapien
tcaagtgcggagagccagatcttca

SEQ ID NO: 3753049 - DNA, 25 bp, Homo sapien
cctggagcgcatagaacgggcagat

SEQ ID NO: 3753050 - DNA, 25 bp, Homo sapien
tttaacttgatcaaagagaggctcc

SEQ ID NO: 3753051 - DNA, 25 bp, Homo sapien
tgcagctctgcggagtgtacagtgg

SEQ ID NO: 3753052 - DNA, 25 bp, Homo sapien
ggagtcccatctgttgattctgttg

SEQ ID NO: 3753053 - DNA, 25 bp, Homo sapien
tgttgtttaacttgatcaaagagag

SEQ ID NO: 3753054 - DNA, 25 bp, Homo sapien
gcaggctcttgtccaaacaattgtt

SEQ ID NO: 3753055 - DNA, 25 bp, Homo sapien
tgtccaaacaattgttagaatctac

SEQ ID NO: 3753056 - DNA, 25 bp, Homo sapien
gctcttgtccaaacaattgttagaa

SEQ ID NO: 3753057 - DNA, 25 bp, Homo sapien
cttggccacaggcagacgctggcag

SEQ ID NO: 3753058 - DNA, 25 bp, Homo sapien
aaaagagaactatcatgccatccag

SEQ ID NO: 3753059 - DNA, 25 bp, Homo sapien
gatacctgcactcctgtttatcaca

SEQ ID NO: 3753060 - DNA, 25 bp, Homo sapien
ccactactggacatttactcaaagg

SEQ ID NO: 3753061 - DNA, 25 bp, Homo sapien
gacactgcgggtcagataccacatg

SEQ ID NO: 3753062 - DNA, 25 bp, Homo sapien
tcagaacatgctcaggccttggctg

SEQ ID NO: 3753063 - DNA, 25 bp, Homo sapien
tggaaggaaccaacacgcccaccac

SEQ ID NO: 3753064 - DNA, 25 bp, Homo sapien
atcccttggcctggggtatcctggc

SEQ ID NO: 3753065 - DNA, 25 bp, Homo sapien
ttggaaggaaccaacacgcccacca

SEQ ID NO: 3753066 - DNA, 25 bp, Homo sapien
ctgagaagtcctgtgcatgcattcc

SEQ ID NO: 3753067 - DNA, 25 bp, Homo sapien
gctgagaagtcctgtgcatgcattc

SEQ ID NO: 3753068 - DNA, 25 bp, Homo sapien
gaggctgagaagtcctgtgcatgca

SEQ ID NO: 3753069 - DNA, 25 bp, Homo sapien
ggctgagaagtcctgtgcatgcatt

SEQ ID NO: 3753070 - DNA, 25 bp, Homo sapien
cctgaatcgtttgcggtgacccaca

SEQ ID NO: 3753071 - DNA, 25 bp, Homo sapien
tgaaactcggtatggcagggccaca

SEQ ID NO: 3753072 - DNA, 25 bp, Homo sapien
cattcatcctcatgggagagacgca

SEQ ID NO: 3753073 - DNA, 25 bp, Homo sapien
gagagacgcaccatcttcgaatgtg

SEQ ID NO: 3753074 - DNA, 25 bp, Homo sapien
tcctgagggcttcgtgtctgcagca

SEQ ID NO: 3753075 - DNA, 25 bp, Homo sapien
gattgcacggactttgcacccaggg

SEQ ID NO: 3753076 - DNA, 25 bp, Homo sapien
ccttggcgtacacccgattggcagt

SEQ ID NO: 3753077 - DNA, 25 bp, Homo sapien
cctttgggaacacgtgacctctgcc

SEQ ID NO: 3753078 - DNA, 25 bp, Homo sapien
ctccaccggtgatttgaacacagac

SEQ ID NO: 3753079 - DNA, 25 bp, Homo sapien
ggtcagggtgggagacactttccac

SEQ ID NO: 3753080 - DNA, 25 bp, Homo sapien
tctcccactccaccggtgatttgaa

SEQ ID NO: 3753081 - DNA, 25 bp, Homo sapien
gctgcggctcttggcgggtcagggt

SEQ ID NO: 3753082 - DNA, 25 bp, Homo sapien
tgcaggtggcagatctcctggtctc

SEQ ID NO: 3753083 - DNA, 25 bp, Homo sapien
gacacggctgggcttgccgtttgcc

SEQ ID NO: 3753084 - DNA, 25 bp, Homo sapien
ctcctggcgcgaggaagtgcctgaa

SEQ ID NO: 3753085 - DNA, 25 bp, Homo sapien
gaatcccgggtttagcctctgctca

SEQ ID NO: 3753086 - DNA, 25 bp, Homo sapien
ggaggtaacaggcagcggagcatgc

SEQ ID NO: 3753087 - DNA, 25 bp, Homo sapien
aggtaacaggcagcggagcatgcgg

SEQ ID NO: 3753088 - DNA, 25 bp, Homo sapien
ttggaggtaacaggcagcggagcat

SEQ ID NO: 3753089 - DNA, 25 bp, Homo sapien
gtaacaggcagcggagcatgcggtc

SEQ ID NO: 3753090 - DNA, 25 bp, Homo sapien
gggagggcccgcacattctgcttct

SEQ ID NO: 3753091 - DNA, 25 bp, Homo sapien
tgttttttggttgaagcaggatact

SEQ ID NO: 3753092 - DNA, 25 bp, Homo sapien
ctgcgggagctgacagcgactccag

SEQ ID NO: 3753093 - DNA, 25 bp, Homo sapien
ctgagcagctgctctcgtgctgcgg

SEQ ID NO: 3753094 - DNA, 25 bp, Homo sapien
tgggctggaacagccactgaggacg

SEQ ID NO: 3753095 - DNA, 25 bp, Homo sapien
gactccggagtccttgaggaaatgc

SEQ ID NO: 3753096 - DNA, 25 bp, Homo sapien
aagcagaaggggagactccggagtc

SEQ ID NO: 3753097 - DNA, 25 bp, Homo sapien
ggacggcccagagtcaaagcagaag

SEQ ID NO: 3753098 - DNA, 25 bp, Homo sapien
agggctttgatgttggacagttcga

SEQ ID NO: 3753099 - DNA, 25 bp, Homo sapien
ggcagatttagctccaagggctttg

SEQ ID NO: 3753100 - DNA, 25 bp, Homo sapien
actaaaaagtctgagtggaattctg

SEQ ID NO: 3753101 - DNA, 25 bp, Homo sapien
tggacagttcgatgcggaggagaat

SEQ ID NO: 3753102 - DNA, 25 bp, Homo sapien
tgctgagcagcctgttgccaggagc

SEQ ID NO: 3753103 - DNA, 25 bp, Homo sapien
tcgcttcctggaatggtggtgctga

SEQ ID NO: 3753104 - DNA, 25 bp, Homo sapien
taaaacctgcgtgtcattgacggct

SEQ ID NO: 3753105 - DNA, 25 bp, Homo sapien
tcggagacctatatgtgggcaggaa

SEQ ID NO: 3753106 - DNA, 25 bp, Homo sapien
tcttatattttactgtcatgttgac

SEQ ID NO: 3753107 - DNA, 25 bp, Homo sapien
ttcttatattttactgtcatgttga

SEQ ID NO: 3753108 - DNA, 25 bp, Homo sapien
gtcccacccaggcccactcagccat

SEQ ID NO: 3753109 - DNA, 25 bp, Homo sapien
tgtgctcctcacgtcccacccaggc

SEQ ID NO: 3753110 - DNA, 25 bp, Homo sapien
ctgtgctcctcacgtcccacccagg

SEQ ID NO: 3753111 - DNA, 25 bp, Homo sapien
cacgtcccacccaggcccactcagc

SEQ ID NO: 3753112 - DNA, 25 bp, Homo sapien
agtgaaacaggcatctcggggcatc

SEQ ID NO: 3753113 - DNA, 25 bp, Homo sapien
tctgccaggtgagcgtgtgcgtgta

SEQ ID NO: 3753114 - DNA, 25 bp, Homo sapien
gaccaaagcacatgagatggattca

SEQ ID NO: 3753115 - DNA, 25 bp, Homo sapien
aaattggctatggaccaaagcacat

SEQ ID NO: 3753116 - DNA, 25 bp, Homo sapien
aagatgtagagattggaaacaggtg

SEQ ID NO: 3753117 - DNA, 25 bp, Homo sapien
gaagatgtagagattggaaacaggt

SEQ ID NO: 3753118 - DNA, 25 bp, Homo sapien
gatgtagagattggaaacaggtggg

SEQ ID NO: 3753119 - DNA, 25 bp, Homo sapien
tttcagggcaggtgtctctggctcc

SEQ ID NO: 3753120 - DNA, 25 bp, Homo sapien
gtggtccattgcctgtctgaggctg

SEQ ID NO: 3753121 - DNA, 25 bp, Homo sapien
ggctgtgtcatgtggtccattgcct

SEQ ID NO: 3753122 - DNA, 25 bp, Homo sapien
tgtgtcatgtggtccattgcctgtc

SEQ ID NO: 3753123 - DNA, 25 bp, Homo sapien
catgtggtccattgcctgtctgagg

SEQ ID NO: 3753124 - DNA, 25 bp, Homo sapien
tcaaagacagttctgtgagcagcgg

SEQ ID NO: 3753125 - DNA, 25 bp, Homo sapien
cacatcatgcggtttgtggccccag

SEQ ID NO: 3753126 - DNA, 25 bp, Homo sapien
cagggcacggtgaccctgggatgct

SEQ ID NO: 3753127 - DNA, 25 bp, Homo sapien
ctgggatgctgatgtggccacatca

SEQ ID NO: 3753128 - DNA, 25 bp, Homo sapien
caatgtgatcaaagaacacgaagac

SEQ ID NO: 3753129 - DNA, 25 bp, Homo sapien
tgatcaaagaacacgaagacttgca

SEQ ID NO: 3753130 - DNA, 25 bp, Homo sapien
cttgcaacccattaggtgttaccgg

SEQ ID NO: 3753131 - DNA, 25 bp, Homo sapien
gaacacgaagacttgcaacccatta

SEQ ID NO: 3753132 - DNA, 25 bp, Homo sapien
aacgagatggctgcacaacggaaca

SEQ ID NO: 3753133 - DNA, 25 bp, Homo sapien
tcctccgtcaggacttctttttgga

SEQ ID NO: 3753134 - DNA, 25 bp, Homo sapien
ccaggggaacgaccatcactgtgtg

SEQ ID NO: 3753135 - DNA, 25 bp, Homo sapien
tttcctgagatcctgccggagcgga

SEQ ID NO: 3753136 - DNA, 25 bp, Homo sapien
agaaaatgcctgagcgccgagtcaa

SEQ ID NO: 3753137 - DNA, 25 bp, Homo sapien
catttggcaagaggaccaggtccca

SEQ ID NO: 3753138 - DNA, 25 bp, Homo sapien
tcagctctgcccgcgtgatgggcaa

SEQ ID NO: 3753139 - DNA, 25 bp, Homo sapien
tgatgggcaagtggcttggaccatt

SEQ ID NO: 3753140 - DNA, 25 bp, Homo sapien
tgactctggtgcgatggatgtctga

SEQ ID NO: 3753141 - DNA, 25 bp, Homo sapien
gatgtctgagggccgatgcgtctga

SEQ ID NO: 3753142 - DNA, 25 bp, Homo sapien
ctgagggccgatgcgtctgagagtc

SEQ ID NO: 3753143 - DNA, 25 bp, Homo sapien
ctgactctggtgcgatggatgtctg

SEQ ID NO: 3753144 - DNA, 25 bp, Homo sapien
tatcgtgggtgtagccagcatctga

SEQ ID NO: 3753145 - DNA, 25 bp, Homo sapien
gcaatctatcgtgggtgtagccagc

SEQ ID NO: 3753146 - DNA, 25 bp, Homo sapien
gccctcacggccaatcctgtaaaag

SEQ ID NO: 3753147 - DNA, 25 bp, Homo sapien
caccggaagcaatctatcgtgggtg

SEQ ID NO: 3753148 - DNA, 25 bp, Homo sapien
gcagatgtctgtacgctgggaaaag

SEQ ID NO: 3753149 - DNA, 25 bp, Homo sapien
aggccaagtggcgagatttccatac

SEQ ID NO: 3753150 - DNA, 25 bp, Homo sapien
gatcccctttatgcgggagcctgag

SEQ ID NO: 3753151 - DNA, 25 bp, Homo sapien
tacgctgggaaaaggatacgatccc

SEQ ID NO: 3753152 - DNA, 25 bp, Homo sapien
gtcatcataagggaggggtcgtgtc

SEQ ID NO: 3753153 - DNA, 25 bp, Homo sapien
cctcccagggatggtcatcataagg

SEQ ID NO: 3753154 - DNA, 25 bp, Homo sapien
ccagcacagtcagcggggtccaggg

SEQ ID NO: 3753155 - DNA, 25 bp, Homo sapien
agcacagtcagcggggtccagggag

SEQ ID NO: 3753156 - DNA, 25 bp, Homo sapien
ggatggacgccgactcagtcacctt

SEQ ID NO: 3753157 - DNA, 25 bp, Homo sapien
ttttcctggatccataattcaggag

SEQ ID NO: 3753158 - DNA, 25 bp, Homo sapien
tcagacaggatggacgccgactcag

SEQ ID NO: 3753159 - DNA, 25 bp, Homo sapien
tggatccataattcaggaggagcct

SEQ ID NO: 3753160 - DNA, 25 bp, Homo sapien
aagtgcgcaggtgacttcgtccaca

SEQ ID NO: 3753161 - DNA, 25 bp, Homo sapien
tctggaagccctccccaattggcca

SEQ ID NO: 3753162 - DNA, 25 bp, Homo sapien
actagtccacggcactgttgaaagt

SEQ ID NO: 3753163 - DNA, 25 bp, Homo sapien
tgacttcgtccacaggtaaaactct

SEQ ID NO: 3753164 - DNA, 25 bp, Homo sapien
gccgggggcagggtagcaagccaat

SEQ ID NO: 3753165 - DNA, 25 bp, Homo sapien
cgggggcagggtagcaagccaattt

SEQ ID NO: 3753166 - DNA, 25 bp, Homo sapien
ggggcagggtagcaagccaatttct

SEQ ID NO: 3753167 - DNA, 25 bp, Homo sapien
ggcagggtagcaagccaatttcttg

SEQ ID NO: 3753168 - DNA, 25 bp, Homo sapien
cagagagccacatgtggcggcggcc

SEQ ID NO: 3753169 - DNA, 25 bp, Homo sapien
ctgggctgtcgccactgaaggttac

SEQ ID NO: 3753170 - DNA, 25 bp, Homo sapien
tcgggaaggtccctgcctgttctgg

SEQ ID NO: 3753171 - DNA, 25 bp, Homo sapien
tgtgggcaggacacgtagtttccca

SEQ ID NO: 3753172 - DNA, 25 bp, Homo sapien
tgtcgtgggtgagagggcgcctggg

SEQ ID NO: 3753173 - DNA, 25 bp, Homo sapien
tgttgtgccgcagcgccggtgtcgt

SEQ ID NO: 3753174 - DNA, 25 bp, Homo sapien
gccgcagcgccggtgtcgtgggtga

SEQ ID NO: 3753175 - DNA, 25 bp, Homo sapien
ccagcttgggaatctgttgtgccgc

SEQ ID NO: 3753176 - DNA, 25 bp, Homo sapien
tgtaaagaggaaaggaggcccagca

SEQ ID NO: 3753177 - DNA, 25 bp, Homo sapien
aaaggaggcccagcagcttgggtga

SEQ ID NO: 3753178 - DNA, 25 bp, Homo sapien
tggtgcaaagggcatgtgctgtcct

SEQ ID NO: 3753179 - DNA, 25 bp, Homo sapien
tgagggtggctggtgcaaagggcat

SEQ ID NO: 3753180 - DNA, 25 bp, Homo sapien
cacatcagcagtccggaacacagta

SEQ ID NO: 3753181 - DNA, 25 bp, Homo sapien
taatggcctttccagcgaccggata

SEQ ID NO: 3753182 - DNA, 25 bp, Homo sapien
gaccggatatctggccacatcagca

SEQ ID NO: 3753183 - DNA, 25 bp, Homo sapien
tcagcagtccggaacacagtagaag

SEQ ID NO: 3753184 - DNA, 25 bp, Homo sapien
ggaggacagcctgtgttcaggagca

SEQ ID NO: 3753185 - DNA, 25 bp, Homo sapien
agcctgtgttcaggagcatgcaggc

SEQ ID NO: 3753186 - DNA, 25 bp, Homo sapien
catgcaggcctgtgtttgcccaggg

SEQ ID NO: 3753187 - DNA, 25 bp, Homo sapien
ctaggggaggacagcctgtgttcag

SEQ ID NO: 3753188 - DNA, 25 bp, Homo sapien
caaatagacgcgtttggtgcatgaa

SEQ ID NO: 3753189 - DNA, 25 bp, Homo sapien
atgtgtttcaggactcggtagagga

SEQ ID NO: 3753190 - DNA, 25 bp, Homo sapien
gtcttccggtcccaacactcaaata

SEQ ID NO: 3753191 - DNA, 25 bp, Homo sapien
ccctgatgggcgctcgttggagacg

SEQ ID NO: 3753192 - DNA, 25 bp, Homo sapien
tcaagcagggaccagatttagaagt

SEQ ID NO: 3753193 - DNA, 25 bp, Homo sapien
gcagggaccagatttagaagtgtgc

SEQ ID NO: 3753194 - DNA, 25 bp, Homo sapien
cttcaagcagggaccagatttagaa

SEQ ID NO: 3753195 - DNA, 25 bp, Homo sapien
caagcagggaccagatttagaagtg

SEQ ID NO: 3753196 - DNA, 25 bp, Homo sapien
tggcggtacgtgctgccatccccgg

SEQ ID NO: 3753197 - DNA, 25 bp, Homo sapien
aggcacatggcggtacgtgctgcca

SEQ ID NO: 3753198 - DNA, 25 bp, Homo sapien
acatggcggtacgtgctgccatccc

SEQ ID NO: 3753199 - DNA, 25 bp, Homo sapien
tcaatcaggcacatggcggtacgtg

SEQ ID NO: 3753200 - DNA, 25 bp, Homo sapien
cctcagggacagtctgtgaccggcc

SEQ ID NO: 3753201 - DNA, 25 bp, Homo sapien
agggacagtctgtgaccggcccagc

SEQ ID NO: 3753202 - DNA, 25 bp, Homo sapien
ggaccctcagggacagtctgtgacc

SEQ ID NO: 3753203 - DNA, 25 bp, Homo sapien
gacagtctgtgaccggcccagcagg

SEQ ID NO: 3753204 - DNA, 25 bp, Homo sapien
tctgtgttctctatgagatggtgca

SEQ ID NO: 3753205 - DNA, 25 bp, Homo sapien
ctgtgcactgtggttaggaccctct

SEQ ID NO: 3753206 - DNA, 25 bp, Homo sapien
gcgtgttggtcgacagttctctgtg

SEQ ID NO: 3753207 - DNA, 25 bp, Homo sapien
gaccctcttcaacgatgctctggcg

SEQ ID NO: 3753208 - DNA, 25 bp, Homo sapien
aattctaccacgcagcctttcatgt

SEQ ID NO: 3753209 - DNA, 25 bp, Homo sapien
taccacgcagcctttcatgttgctg

SEQ ID NO: 3753210 - DNA, 25 bp, Homo sapien
tttcatgttgctgtcggctttcctc

SEQ ID NO: 3753211 - DNA, 25 bp, Homo sapien
tgttgctgtcggctttcctcattag

SEQ ID NO: 3753212 - DNA, 25 bp, Homo sapien
gcaggtctgagctgtgagcagcgtg

SEQ ID NO: 3753213 - DNA, 25 bp, Homo sapien
gagcagcgtggcccaacccaggctt

SEQ ID NO: 3753214 - DNA, 25 bp, Homo sapien
ggaaaccctgcccataggacaggat

SEQ ID NO: 3753215 - DNA, 25 bp, Homo sapien
caggatgcaggttgaagttgaaata

SEQ ID NO: 3753216 - DNA, 25 bp, Homo sapien
cttgggccgccacaaaggcatttga

SEQ ID NO: 3753217 - DNA, 25 bp, Homo sapien
ggcatttgagctcattaatgcagta

SEQ ID NO: 3753218 - DNA, 25 bp, Homo sapien
taatgcagtagacgtgctccctttc

SEQ ID NO: 3753219 - DNA, 25 bp, Homo sapien
cactgtgacagcttggagtaccaga

SEQ ID NO: 3753220 - DNA, 25 bp, Homo sapien
atggccctggtcgtccccttgctga

SEQ ID NO: 3753221 - DNA, 25 bp, Homo sapien
tagcgagatgggcatctgtcaccca

SEQ ID NO: 3753222 - DNA, 25 bp, Homo sapien
ggctgatatcttgcggtagcgagat

SEQ ID NO: 3753223 - DNA, 25 bp, Homo sapien
tcttccgcaggtggctgccataaca

SEQ ID NO: 3753224 - DNA, 25 bp, Homo sapien
cagtaaacggatttggatatcctcc

SEQ ID NO: 3753225 - DNA, 25 bp, Homo sapien
taccgttgcatgtttatcagtaaac

SEQ ID NO: 3753226 - DNA, 25 bp, Homo sapien
actgggctccttgtgttaccgttgc

SEQ ID NO: 3753227 - DNA, 25 bp, Homo sapien
tgaagtgcgctcctcttgcctttgt

SEQ ID NO: 3753228 - DNA, 25 bp, Homo sapien
cttttgggtgagcatcccttgggca

SEQ ID NO: 3753229 - DNA, 25 bp, Homo sapien
tcccttgggcagagtggtcagatgc

SEQ ID NO: 3753230 - DNA, 25 bp, Homo sapien
gacgccagcacgctccttttgggtg

SEQ ID NO: 3753231 - DNA, 25 bp, Homo sapien
gcccatgacgccagcacgctccttt

SEQ ID NO: 3753232 - DNA, 25 bp, Homo sapien
gtttttctggattgcaggccagcat

SEQ ID NO: 3753233 - DNA, 25 bp, Homo sapien
tgtttttctggattgcaggccagca

SEQ ID NO: 3753234 - DNA, 25 bp, Homo sapien
tttttctggattgcaggccagcatg

SEQ ID NO: 3753235 - DNA, 25 bp, Homo sapien
tttgtttttctggattgcaggccag

SEQ ID NO: 3753236 - DNA, 25 bp, Homo sapien
caggcttgatcaggttccatggata

SEQ ID NO: 3753237 - DNA, 25 bp, Homo sapien
aaggacagtcgcttgggttcccagg

SEQ ID NO: 3753238 - DNA, 25 bp, Homo sapien
ggaaggtgcggccacaggcttgatc

SEQ ID NO: 3753239 - DNA, 25 bp, Homo sapien
tacctgacagacgaaaaggacagtc

SEQ ID NO: 3753240 - DNA, 25 bp, Homo sapien
tgtctgctggtttcgtgaaaggaag

SEQ ID NO: 3753241 - DNA, 25 bp, Homo sapien
ccattgagattatgagaaagaggca

SEQ ID NO: 3753242 - DNA, 25 bp, Homo sapien
gaatgcagagcgtggtattgtacaa

SEQ ID NO: 3753243 - DNA, 25 bp, Homo sapien
gcaaggccgccgtgatagacatgca

SEQ ID NO: 3753244 - DNA, 25 bp, Homo sapien
acagacaaagctgcacggtggacac

SEQ ID NO: 3753245 - DNA, 25 bp, Homo sapien
gcagcacagggcgtgcagggcattc

SEQ ID NO: 3753246 - DNA, 25 bp, Homo sapien
gacaaagctgcacggtggacacgct

SEQ ID NO: 3753247 - DNA, 25 bp, Homo sapien
tgcacggtggacacgctcagagggc

SEQ ID NO: 3753248 - DNA, 25 bp, Homo sapien
gcacagcgggtatcccacagtgcgt

SEQ ID NO: 3753249 - DNA, 25 bp, Homo sapien
ctgagagggtcggtctggtcccacc

SEQ ID NO: 3753250 - DNA, 25 bp, Homo sapien
tcctgagagggtcggtctggtccca

SEQ ID NO: 3753251 - DNA, 25 bp, Homo sapien
cacagtgcgtctgtcctgagagggt

SEQ ID NO: 3753252 - DNA, 25 bp, Homo sapien
tgctgttagactcttctccgtcacg

SEQ ID NO: 3753253 - DNA, 25 bp, Homo sapien
aaatgaagataacgctgtcttgtcc

SEQ ID NO: 3753254 - DNA, 25 bp, Homo sapien
tgtccatctgttccgaaaagaaacg

SEQ ID NO: 3753255 - DNA, 25 bp, Homo sapien
tccgtcacgtgacgctcacgaaatg

SEQ ID NO: 3753256 - DNA, 25 bp, Homo sapien
aatatcataggtgtgcctttctgga

SEQ ID NO: 3753257 - DNA, 25 bp, Homo sapien
taatcagaaacatgccataagtata

SEQ ID NO: 3753258 - DNA, 25 bp, Homo sapien
tggaggcagtgtaccacaatatcat

SEQ ID NO: 3753259 - DNA, 25 bp, Homo sapien
gatgctgggataagtgggcactttt

SEQ ID NO: 3753260 - DNA, 25 bp, Homo sapien
acacacaccgataggagatggaggc

SEQ ID NO: 3753261 - DNA, 25 bp, Homo sapien
ataggagatggaggcagtgcacacc

SEQ ID NO: 3753262 - DNA, 25 bp, Homo sapien
gataggagatggaggcagtgcacac

SEQ ID NO: 3753263 - DNA, 25 bp, Homo sapien
cacacacaccgataggagatggagg

SEQ ID NO: 3753264 - DNA, 25 bp, Homo sapien
ctcggcttccgcttgcccttgagtg

SEQ ID NO: 3753265 - DNA, 25 bp, Homo sapien
ttccgcttgcccttgagtgcggagc

SEQ ID NO: 3753266 - DNA, 25 bp, Homo sapien
cttgagtgcggagcccggagcctcc

SEQ ID NO: 3753267 - DNA, 25 bp, Homo sapien
cttgcccttgagtgcggagcccgga

SEQ ID NO: 3753268 - DNA, 25 bp, Homo sapien
cgggcggagcgagggtccttggagc

SEQ ID NO: 3753269 - DNA, 25 bp, Homo sapien
tgcctgcgtgtggtccgggcggagc

SEQ ID NO: 3753270 - DNA, 25 bp, Homo sapien
tgggtcccaggaagctcggcgtgca

SEQ ID NO: 3753271 - DNA, 25 bp, Homo sapien
gtctggcggtggctgcgcgtggcca

SEQ ID NO: 3753272 - DNA, 25 bp, Homo sapien
gcttgtttgtgtgacagctgtcttc

SEQ ID NO: 3753273 - DNA, 25 bp, Homo sapien
tgcttgtttgtgtgacagctgtctt

SEQ ID NO: 3753274 - DNA, 25 bp, Homo sapien
ttctttgccttcgctctttcaacca

SEQ ID NO: 3753275 - DNA, 25 bp, Homo sapien
gccttcgctctttcaaccatcctca

SEQ ID NO: 3753276 - DNA, 25 bp, Homo sapien
tcgctggcacggctttcattcaggg

SEQ ID NO: 3753277 - DNA, 25 bp, Homo sapien
ctcatcatcgcgcagctggcgagtg

SEQ ID NO: 3753278 - DNA, 25 bp, Homo sapien
gggcctcatcatcgcgcagctggcg

SEQ ID NO: 3753279 - DNA, 25 bp, Homo sapien
cgcgcagctggcgagtgttcagaaa

SEQ ID NO: 3753280 - DNA, 25 bp, Homo sapien
gcagccgggcatgaccttggggtaa

SEQ ID NO: 3753281 - DNA, 25 bp, Homo sapien
cagtgtgctctgagtactcccatga

SEQ ID NO: 3753282 - DNA, 25 bp, Homo sapien
cttggggtaaaagccagccatagcc

SEQ ID NO: 3753283 - DNA, 25 bp, Homo sapien
tgtgctctgagtactcccatgagcc

SEQ ID NO: 3753284 - DNA, 25 bp, Homo sapien
ccaggcccatgcatgagagggtgag

SEQ ID NO: 3753285 - DNA, 25 bp, Homo sapien
gccaggcccatgcatgagagggtga

SEQ ID NO: 3753286 - DNA, 25 bp, Homo sapien
ggccaggcccatgcatgagagggtg

SEQ ID NO: 3753287 - DNA, 25 bp, Homo sapien
gatccctgtgtcgtttccatccttc

SEQ ID NO: 3753288 - DNA, 25 bp, Homo sapien
gacgaagtgggttgactatcctctg

SEQ ID NO: 3753289 - DNA, 25 bp, Homo sapien
tttcttgcagggtcaccgatgccca

SEQ ID NO: 3753290 - DNA, 25 bp, Homo sapien
caggtctgagtgtctgagtgacttc

SEQ ID NO: 3753291 - DNA, 25 bp, Homo sapien
cagcgtgcggaccacatgaacagat

SEQ ID NO: 3753292 - DNA, 25 bp, Homo sapien
aatggaagggacgttatctgcttcg

SEQ ID NO: 3753293 - DNA, 25 bp, Homo sapien
tgaacagataatcgcctgccttcag

SEQ ID NO: 3753294 - DNA, 25 bp, Homo sapien
cagcttcaaaagacaatctcgtcag

SEQ ID NO: 3753295 - DNA, 25 bp, Homo sapien
ttcagacagtccaccaagagactgg

SEQ ID NO: 3753296 - DNA, 25 bp, Homo sapien
aaagacgaagtcttatgggcctggg

SEQ ID NO: 3753297 - DNA, 25 bp, Homo sapien
tgagttcatggtaagaaggtggccc

SEQ ID NO: 3753298 - DNA, 25 bp, Homo sapien
aagagactggcccaatactccctgg

SEQ ID NO: 3753299 - DNA, 25 bp, Homo sapien
tttcatgaccgagcaacctgttgtg

SEQ ID NO: 3753300 - DNA, 25 bp, Homo sapien
gaagcagcggagagttttcatgacc

SEQ ID NO: 3753301 - DNA, 25 bp, Homo sapien
cctgagtcagggcacttgggcatta

SEQ ID NO: 3753302 - DNA, 25 bp, Homo sapien
ggaactgattgcctggatccctgag

SEQ ID NO: 3753303 - DNA, 25 bp, Homo sapien
ggatcctgaccattcccctgagagc

SEQ ID NO: 3753304 - DNA, 25 bp, Homo sapien
gcttcgacggggcttttggtgacac

SEQ ID NO: 3753305 - DNA, 25 bp, Homo sapien
tcatagaaggtgggggccacgtccc

SEQ ID NO: 3753306 - DNA, 25 bp, Homo sapien
gaaagctgcagcttcgacggggctt

SEQ ID NO: 3753307 - DNA, 25 bp, Homo sapien
gacacaaacggagctcgtgatccac

SEQ ID NO: 3753308 - DNA, 25 bp, Homo sapien
ggttccaccgcattgagaagacaca

SEQ ID NO: 3753309 - DNA, 25 bp, Homo sapien
gggtgttcagtggttccaccgcatt

SEQ ID NO: 3753310 - DNA, 25 bp, Homo sapien
caaacggagctcgtgatccacaggg

SEQ ID NO: 3753311 - DNA, 25 bp, Homo sapien
tcagttctggacacaagggaaaagc

SEQ ID NO: 3753312 - DNA, 25 bp, Homo sapien
gaggctccagtgcacagctggtaaa

SEQ ID NO: 3753313 - DNA, 25 bp, Homo sapien
agacataagattgcacactggaggc

SEQ ID NO: 3753314 - DNA, 25 bp, Homo sapien
gctttgcttcggtgaaacatcaaca

SEQ ID NO: 3753315 - DNA, 25 bp, Homo sapien
gcaccgccaaatggtcctgcatcaa

SEQ ID NO: 3753316 - DNA, 25 bp, Homo sapien
aacgctcttccgttcgttcctgtgg

SEQ ID NO: 3753317 - DNA, 25 bp, Homo sapien
tgagtgcatctgcatcttgaacgtc

SEQ ID NO: 3753318 - DNA, 25 bp, Homo sapien
tctattagtagatcctgagtgcatc

SEQ ID NO: 3753319 - DNA, 25 bp, Homo sapien
agaatcagcgtcaagtggaaaggaa

SEQ ID NO: 3753320 - DNA, 25 bp, Homo sapien
tcagaatcagcgtcaagtggaaagg

SEQ ID NO: 3753321 - DNA, 25 bp, Homo sapien
cagaatcagcgtcaagtggaaagga

SEQ ID NO: 3753322 - DNA, 25 bp, Homo sapien
cttcagaatcagcgtcaagtggaaa

SEQ ID NO: 3753323 - DNA, 25 bp, Homo sapien
ctgagggcacttgaaggtcaccgcc

SEQ ID NO: 3753324 - DNA, 25 bp, Homo sapien
gcactgagggcacttgaaggtcacc

SEQ ID NO: 3753325 - DNA, 25 bp, Homo sapien
gagggcacttgaaggtcaccgccat

SEQ ID NO: 3753326 - DNA, 25 bp, Homo sapien
cactgagggcacttgaaggtcaccg

SEQ ID NO: 3753327 - DNA, 25 bp, Homo sapien
ggagcccctgatagccctttggaga

SEQ ID NO: 3753328 - DNA, 25 bp, Homo sapien
atagccctttggagatgctggacac

SEQ ID NO: 3753329 - DNA, 25 bp, Homo sapien
cccctgatagccctttggagatgct

SEQ ID NO: 3753330 - DNA, 25 bp, Homo sapien
aggaaggagcccctgatagcccttt

SEQ ID NO: 3753331 - DNA, 25 bp, Homo sapien
aaccacaacagggatgccttccctg

SEQ ID NO: 3753332 - DNA, 25 bp, Homo sapien
tcaaccacaacagggatgccttccc

SEQ ID NO: 3753333 - DNA, 25 bp, Homo sapien
ccttccctgtccttgattagggtgt

SEQ ID NO: 3753334 - DNA, 25 bp, Homo sapien
ttagggtgttctggcccttcaagtc

SEQ ID NO: 3753335 - DNA, 25 bp, Homo sapien
tgagaactgttgtcatctgctgcag

SEQ ID NO: 3753336 - DNA, 25 bp, Homo sapien
cctgcgcaggttgagaactgttgtc

SEQ ID NO: 3753337 - DNA, 25 bp, Homo sapien
taggccgtgccatctgaatggatgg

SEQ ID NO: 3753338 - DNA, 25 bp, Homo sapien
gggccgtctgtcaatgagaacctgc

SEQ ID NO: 3753339 - DNA, 25 bp, Homo sapien
tctgcatcctcgtcactttgcacca

SEQ ID NO: 3753340 - DNA, 25 bp, Homo sapien
tccgggctcttgacgtctttgtctg

SEQ ID NO: 3753341 - DNA, 25 bp, Homo sapien
tttgggggcaggtcccgatgaccaa

SEQ ID NO: 3753342 - DNA, 25 bp, Homo sapien
aggtcccgatgaccaacctctgcat

SEQ ID NO: 3753343 - DNA, 25 bp, Homo sapien
gacaatcattctgtattcgggatgg

SEQ ID NO: 3753344 - DNA, 25 bp, Homo sapien
cctcatggaatgagagagctgcgct

SEQ ID NO: 3753345 - DNA, 25 bp, Homo sapien
ggctgtgaagcggaacctcatggaa

SEQ ID NO: 3753346 - DNA, 25 bp, Homo sapien
tccggaggtgctttgggacagacaa

SEQ ID NO: 3753347 - DNA, 25 bp, Homo sapien
cttctttcctttgcgctcgaaccgt

SEQ ID NO: 3753348 - DNA, 25 bp, Homo sapien
gctcgaaccgtttagaggaccagat

SEQ ID NO: 3753349 - DNA, 25 bp, Homo sapien
taattcctgtagttataattgcact

SEQ ID NO: 3753350 - DNA, 25 bp, Homo sapien
taattgcacttaaaagacaacgtct

SEQ ID NO: 3753351 - DNA, 25 bp, Homo sapien
ggctgctgcatccaattaccggatt

SEQ ID NO: 3753352 - DNA, 25 bp, Homo sapien
gcagcattctcatctgctggtctag

SEQ ID NO: 3753353 - DNA, 25 bp, Homo sapien
atccaattaccggattaagtttctg

SEQ ID NO: 3753354 - DNA, 25 bp, Homo sapien
gctggtctagtcatgagtttggcat

SEQ ID NO: 3753355 - DNA, 25 bp, Homo sapien
atacttgtcatatggggccagatgc

SEQ ID NO: 3753356 - DNA, 25 bp, Homo sapien
attctccattgtggtggatgcacag

SEQ ID NO: 3753357 - DNA, 25 bp, Homo sapien
ccattgtggtggatgcacagagtat

SEQ ID NO: 3753358 - DNA, 25 bp, Homo sapien
ttctttatcgacctgattaaaggac

SEQ ID NO: 3753359 - DNA, 25 bp, Homo sapien
gacctgattaaaggactgctgtttc

SEQ ID NO: 3753360 - DNA, 25 bp, Homo sapien
acagagtagtatcttcctgcttcct

SEQ ID NO: 3753361 - DNA, 25 bp, Homo sapien
ctacagagtagtatcttcctgcttc

SEQ ID NO: 3753362 - DNA, 25 bp, Homo sapien
gagtagtatcttcctgcttccttac

SEQ ID NO: 3753363 - DNA, 25 bp, Homo sapien
agagtagtatcttcctgcttcctta

SEQ ID NO: 3753364 - DNA, 25 bp, Homo sapien
gtgttttcaccaagagattgtctgg

SEQ ID NO: 3753365 - DNA, 25 bp, Homo sapien
cattttcattggacccatcagtgtt

SEQ ID NO: 3753366 - DNA, 25 bp, Homo sapien
gattgtctggttgagtgaagagatc

SEQ ID NO: 3753367 - DNA, 25 bp, Homo sapien
gatcatgggcatcagttgagctttg

SEQ ID NO: 3753368 - DNA, 25 bp, Homo sapien
gaatccaggggaatcccacgctgcc

SEQ ID NO: 3753369 - DNA, 25 bp, Homo sapien
aggattcatgggctgtaattccacc

SEQ ID NO: 3753370 - DNA, 25 bp, Homo sapien
tgggctgtaattccaccagagaatc

SEQ ID NO: 3753371 - DNA, 25 bp, Homo sapien
ttctgcacatgcaagtggggaaggt

SEQ ID NO: 3753372 - DNA, 25 bp, Homo sapien
aagtagatgacaggtcctctctgag

SEQ ID NO: 3753373 - DNA, 25 bp, Homo sapien
tcctgcaaataactacgtacaaagt

SEQ ID NO: 3753374 - DNA, 25 bp, Homo sapien
tctctgagtgatgtaaagggcaatg

SEQ ID NO: 3753375 - DNA, 25 bp, Homo sapien
ccaggatggccgtagtggtgaccac

SEQ ID NO: 3753376 - DNA, 25 bp, Homo sapien
tatatttaccgaagctgcccatggc

SEQ ID NO: 3753377 - DNA, 25 bp, Homo sapien
tcaggcttccgacattcttcaaggg

SEQ ID NO: 3753378 - DNA, 25 bp, Homo sapien
tagtgcagacacaggtgctatggga

SEQ ID NO: 3753379 - DNA, 25 bp, Homo sapien
tcaaaacaggagaactggccaagcc

SEQ ID NO: 3753380 - DNA, 25 bp, Homo sapien
cttttcggtactgctgtgctttctc

SEQ ID NO: 3753381 - DNA, 25 bp, Homo sapien
ggagactttagagtgtcacttctga

SEQ ID NO: 3753382 - DNA, 25 bp, Homo sapien
gcttttcggtactgctgtgctttct

SEQ ID NO: 3753383 - DNA, 25 bp, Homo sapien
agggagactttagagtgtcacttct

SEQ ID NO: 3753384 - DNA, 25 bp, Homo sapien
aaagtagacgttgccagcacctgct

SEQ ID NO: 3753385 - DNA, 25 bp, Homo sapien
tgggcgtggcaacaatatcgctgag

SEQ ID NO: 3753386 - DNA, 25 bp, Homo sapien
tcgagaagatagcttgcagggccag

SEQ ID NO: 3753387 - DNA, 25 bp, Homo sapien
ggcacgggctatgtcactaaacaga

SEQ ID NO: 3753388 - DNA, 25 bp, Homo sapien
gttgagggtgcttgtcctccttggt

SEQ ID NO: 3753389 - DNA, 25 bp, Homo sapien
ggttgagggtgcttgtcctccttgg

SEQ ID NO: 3753390 - DNA, 25 bp, Homo sapien
ctgggttgagggtgcttgtcctcct

SEQ ID NO: 3753391 - DNA, 25 bp, Homo sapien
tgggttgagggtgcttgtcctcctt

SEQ ID NO: 3753392 - DNA, 25 bp, Homo sapien
aggggcacacggcagagcgggggct

SEQ ID NO: 3753393 - DNA, 25 bp, Homo sapien
caggctgccacccgggacatagcct

SEQ ID NO: 3753394 - DNA, 25 bp, Homo sapien
gctgccacccgggacatagcctgcc

SEQ ID NO: 3753395 - DNA, 25 bp, Homo sapien
gggaggacgggagcgaggggcacac

SEQ ID NO: 3753396 - DNA, 25 bp, Homo sapien
gccgtgttctcatttcctcgagtca

SEQ ID NO: 3753397 - DNA, 25 bp, Homo sapien
gagctcagccgtgttctcatttcct

SEQ ID NO: 3753398 - DNA, 25 bp, Homo sapien
tcagccgtgttctcatttcctcgag

SEQ ID NO: 3753399 - DNA, 25 bp, Homo sapien
ggggcttgagcaggagctcagccgt

SEQ ID NO: 3753400 - DNA, 25 bp, Homo sapien
aaagggggacaggactcctaggcag

SEQ ID NO: 3753401 - DNA, 25 bp, Homo sapien
caggggatgagcatgcattcctgca

SEQ ID NO: 3753402 - DNA, 25 bp, Homo sapien
gactcctaggcaggggatgagcatg

SEQ ID NO: 3753403 - DNA, 25 bp, Homo sapien
taggcaggggatgagcatgcattcc

SEQ ID NO: 3753404 - DNA, 25 bp, Homo sapien
aagcagagcgagagttcccagtgcc

SEQ ID NO: 3753405 - DNA, 25 bp, Homo sapien
agcagaggcatgaccaagaccttca

SEQ ID NO: 3753406 - DNA, 25 bp, Homo sapien
agaatgccagcttgccacagcagag

SEQ ID NO: 3753407 - DNA, 25 bp, Homo sapien
aagaccttcaggaatccatggagga

SEQ ID NO: 3753408 - DNA, 25 bp, Homo sapien
ctgatcattccacaggatttctggc

SEQ ID NO: 3753409 - DNA, 25 bp, Homo sapien
caaatccttgagctccttctcctga

SEQ ID NO: 3753410 - DNA, 25 bp, Homo sapien
tctcctgatcattccacaggatttc

SEQ ID NO: 3753411 - DNA, 25 bp, Homo sapien
gatcattccacaggatttctggcat

SEQ ID NO: 3753412 - DNA, 25 bp, Homo sapien
ggtgccataagctgatcagtcctct

SEQ ID NO: 3753413 - DNA, 25 bp, Homo sapien
tctagttctcagatcaggagtctgg

SEQ ID NO: 3753414 - DNA, 25 bp, Homo sapien
tggcagtaacagcagagagattcct

SEQ ID NO: 3753415 - DNA, 25 bp, Homo sapien
gagattcctgctagaacaccaactg

SEQ ID NO: 3753416 - DNA, 25 bp, Homo sapien
atggcactccccaccgctggcatct

SEQ ID NO: 3753417 - DNA, 25 bp, Homo sapien
attgctgtgccactgccttgtctca

SEQ ID NO: 3753418 - DNA, 25 bp, Homo sapien
tgcgccagcattgctgtgccactgc

SEQ ID NO: 3753419 - DNA, 25 bp, Homo sapien
gctggcatctacctgcttccttaca

SEQ ID NO: 3753420 - DNA, 25 bp, Homo sapien
aacaatgacactccttgtgcttcca

SEQ ID NO: 3753421 - DNA, 25 bp, Homo sapien
caacaatgacactccttgtgcttcc

SEQ ID NO: 3753422 - DNA, 25 bp, Homo sapien
ggcgtgtggcccttcccttgacagc

SEQ ID NO: 3753423 - DNA, 25 bp, Homo sapien
gggcgtgtggcccttcccttgacag

SEQ ID NO: 3753424 - DNA, 25 bp, Homo sapien
atgtcagagcccgtgtagagaggca

SEQ ID NO: 3753425 - DNA, 25 bp, Homo sapien
gagcccgtgtagagaggcagaggca

SEQ ID NO: 3753426 - DNA, 25 bp, Homo sapien
ttctcgccagttcccgtacttggga

SEQ ID NO: 3753427 - DNA, 25 bp, Homo sapien
tctggaggtttctcgccagttcccg

SEQ ID NO: 3753428 - DNA, 25 bp, Homo sapien
ccgtacttgggagacacagagctga

SEQ ID NO: 3753429 - DNA, 25 bp, Homo sapien
cagttcccgtacttgggagacacag

SEQ ID NO: 3753430 - DNA, 25 bp, Homo sapien
tgtggaacagcttcaacactgcagg

SEQ ID NO: 3753431 - DNA, 25 bp, Homo sapien
tgtggccgcacatgcgaagtcctgc

SEQ ID NO: 3753432 - DNA, 25 bp, Homo sapien
gaagtcctgccagattgtggaacag

SEQ ID NO: 3753433 - DNA, 25 bp, Homo sapien
tctgggcgtttgtcctgtggccgca

SEQ ID NO: 3753434 - DNA, 25 bp, Homo sapien
attttcactagcacactgctccacg

SEQ ID NO: 3753435 - DNA, 25 bp, Homo sapien
cacaggggcatcggtgctgacaaat

SEQ ID NO: 3753436 - DNA, 25 bp, Homo sapien
atcattttcactagcacactgctcc

SEQ ID NO: 3753437 - DNA, 25 bp, Homo sapien
ttttcactagcacactgctccacgg

SEQ ID NO: 3753438 - DNA, 25 bp, Homo sapien
cgcttggctgacaatgtgctgctgc

SEQ ID NO: 3753439 - DNA, 25 bp, Homo sapien
gggatttaccaagcagaagttccaa

SEQ ID NO: 3753440 - DNA, 25 bp, Homo sapien
tcactgctgattcgactgccaacgc

SEQ ID NO: 3753441 - DNA, 25 bp, Homo sapien
gactgccaacgcttggctgacaatg

SEQ ID NO: 3753442 - DNA, 25 bp, Homo sapien
tctataaaatgcaagggttaaggtg

SEQ ID NO: 3753443 - DNA, 25 bp, Homo sapien
tccaaaatggctcaatcagaaaaca

SEQ ID NO: 3753444 - DNA, 25 bp, Homo sapien
cactgagggatggtggcaactcttc

SEQ ID NO: 3753445 - DNA, 25 bp, Homo sapien
tgatcttaagatgagaggctgtgtt

SEQ ID NO: 3753446 - DNA, 25 bp, Homo sapien
gaagcggccctgagagtaggggcca

SEQ ID NO: 3753447 - DNA, 25 bp, Homo sapien
agaagcggccctgagagtaggggcc

SEQ ID NO: 3753448 - DNA, 25 bp, Homo sapien
agcggccctgagagtaggggccagc

SEQ ID NO: 3753449 - DNA, 25 bp, Homo sapien
aagcggccctgagagtaggggccag

SEQ ID NO: 3753450 - DNA, 25 bp, Homo sapien
cccgcgaggcccacagacatgggtg

SEQ ID NO: 3753451 - DNA, 25 bp, Homo sapien
tgtttcgtgacacaggctcctgttc

SEQ ID NO: 3753452 - DNA, 25 bp, Homo sapien
cagaaggaggcgttggacactgcaa

SEQ ID NO: 3753453 - DNA, 25 bp, Homo sapien
tgtttcgtgacacaggctcctgttt

SEQ ID NO: 3753454 - DNA, 25 bp, Homo sapien
tattgcaggaggattccggaaactt

SEQ ID NO: 3753455 - DNA, 25 bp, Homo sapien
tttattgcaggaggattccggaaac

SEQ ID NO: 3753456 - DNA, 25 bp, Homo sapien
tcagggaggaatgagtctcatctca

SEQ ID NO: 3753457 - DNA, 25 bp, Homo sapien
agtctcatctcaaccaactcagaag

SEQ ID NO: 3753458 - DNA, 25 bp, Homo sapien
gagagagggtttagaaagggctcag

SEQ ID NO: 3753459 - DNA, 25 bp, Homo sapien
cctgtaagcaactgtctgtggcagc

SEQ ID NO: 3753460 - DNA, 25 bp, Homo sapien
ggaaactaggatacatggatgcaga

SEQ ID NO: 3753461 - DNA, 25 bp, Homo sapien
ccacaagccagggaacaccgggagc

SEQ ID NO: 3753462 - DNA, 25 bp, Homo sapien
cgtgaccataattcacatcctcctt

SEQ ID NO: 3753463 - DNA, 25 bp, Homo sapien
tattcacgtgaccataattcacatc

SEQ ID NO: 3753464 - DNA, 25 bp, Homo sapien
ccttattcacgtgaccataattcac

SEQ ID NO: 3753465 - DNA, 25 bp, Homo sapien
aaatccccttattcacgtgaccata

SEQ ID NO: 3753466 - DNA, 25 bp, Homo sapien
cagtgtgggtggccttttcctttgg

SEQ ID NO: 3753467 - DNA, 25 bp, Homo sapien
cacagcagtgtgggtggccttttcc

SEQ ID NO: 3753468 - DNA, 25 bp, Homo sapien
cagcagtgtgggtggccttttcctt

SEQ ID NO: 3753469 - DNA, 25 bp, Homo sapien
tttggggttaaaaggaggcagagca

SEQ ID NO: 3753470 - DNA, 25 bp, Homo sapien
gtgcagataaagctgagcgccctgt

SEQ ID NO: 3753471 - DNA, 25 bp, Homo sapien
agataaagctgagcgccctgtccga

SEQ ID NO: 3753472 - DNA, 25 bp, Homo sapien
ggaggtgcagataaagctgagcgcc

SEQ ID NO: 3753473 - DNA, 25 bp, Homo sapien
ctgggaggtgcagataaagctgagc

SEQ ID NO: 3753474 - DNA, 25 bp, Homo sapien
ccacggagcgtggaattcccgagaa

SEQ ID NO: 3753475 - DNA, 25 bp, Homo sapien
tgggtaagacatagccccccacgga

SEQ ID NO: 3753476 - DNA, 25 bp, Homo sapien
gagaacggtatagactgggtaagac

SEQ ID NO: 3753477 - DNA, 25 bp, Homo sapien
gttttccaatttcaagaaatgtaga

SEQ ID NO: 3753478 - DNA, 25 bp, Homo sapien
gagccacgctgatgggtggcaggca

SEQ ID NO: 3753479 - DNA, 25 bp, Homo sapien
caggctgtcggacccagggctttgg

SEQ ID NO: 3753480 - DNA, 25 bp, Homo sapien
aagctcgggccttctgcggatggac

SEQ ID NO: 3753481 - DNA, 25 bp, Homo sapien
atggacgttgaagccgtaggtgcct

SEQ ID NO: 3753482 - DNA, 25 bp, Homo sapien
ctagttggccagctgagcgaggaca

SEQ ID NO: 3753483 - DNA, 25 bp, Homo sapien
cgaggacatcgtcactgaaggaaga

SEQ ID NO: 3753484 - DNA, 25 bp, Homo sapien
agtgggcagcacgaaacacatgtgt

SEQ ID NO: 3753485 - DNA, 25 bp, Homo sapien
cacatgtgtagagaggacgccaggt

SEQ ID NO: 3753486 - DNA, 25 bp, Homo sapien
agtaccccagtggtgagctggcggt

SEQ ID NO: 3753487 - DNA, 25 bp, Homo sapien
accccagtggtgagctggcggtctc

SEQ ID NO: 3753488 - DNA, 25 bp, Homo sapien
cagtggtgagctggcggtctcggtg

SEQ ID NO: 3753489 - DNA, 25 bp, Homo sapien
gggcggggccaccatggagataggg

SEQ ID NO: 3753490 - DNA, 25 bp, Homo sapien
actcacctgtgaagccgtacccatt

SEQ ID NO: 3753491 - DNA, 25 bp, Homo sapien
aaacgcactcacctgtgaagccgta

SEQ ID NO: 3753492 - DNA, 25 bp, Homo sapien
gtacccattccccacaatccaggta

SEQ ID NO: 3753493 - DNA, 25 bp, Homo sapien
acccattccccacaatccaggtagt

SEQ ID NO: 3753494 - DNA, 25 bp, Homo sapien
caatccaggtaataaacgcactcac

SEQ ID NO: 3753495 - DNA, 25 bp, Homo sapien
acaatccaggtaataaacgcactca

SEQ ID NO: 3753496 - DNA, 25 bp, Homo sapien
caatccaggtaataaacgcactcac

SEQ ID NO: 3753497 - DNA, 25 bp, Homo sapien
acaatccaggtaataaacgcactca

SEQ ID NO: 3753498 - DNA, 25 bp, Homo sapien
ctgtgaagccgtccccctccctaca

SEQ ID NO: 3753499 - DNA, 25 bp, Homo sapien
caatccaggtaataaacgcactcac

SEQ ID NO: 3753500 - DNA, 25 bp, Homo sapien
acaatccaggtaataaacgcactca

SEQ ID NO: 3753501 - DNA, 25 bp, Homo sapien
gcgggctgccgtgcagaaagtcagt

SEQ ID NO: 3753502 - DNA, 25 bp, Homo sapien
agaagggtggcggtgcgggctgccg

SEQ ID NO: 3753503 - DNA, 25 bp, Homo sapien
ctgagcacatgtgcgtgtccacacc

SEQ ID NO: 3753504 - DNA, 25 bp, Homo sapien
cagtgttattccagtatcctgagca

SEQ ID NO: 3753505 - DNA, 25 bp, Homo sapien
ggcggtgggggctgccgtgcccagc

SEQ ID NO: 3753506 - DNA, 25 bp, Homo sapien
gaagagcggcggtgggggctgccgt

SEQ ID NO: 3753507 - DNA, 25 bp, Homo sapien
agcggcggtgggggctgccgtgccc

SEQ ID NO: 3753508 - DNA, 25 bp, Homo sapien
ctgaagagcggcggtgggggctgcc

SEQ ID NO: 3753509 - DNA, 25 bp, Homo sapien
tggcaaagtcattgggcacaaaagc

SEQ ID NO: 3753510 - DNA, 25 bp, Homo sapien
cagtgacggttatttgaagacagca

SEQ ID NO: 3753511 - DNA, 25 bp, Homo sapien
cacacttaagagactggctggcaaa

SEQ ID NO: 3753512 - DNA, 25 bp, Homo sapien
aaatgcaaacatatctgcacaccgt

SEQ ID NO: 3753513 - DNA, 25 bp, Homo sapien
gcgagagccatgagcaacaggcaat

SEQ ID NO: 3753514 - DNA, 25 bp, Homo sapien
gccatgagcaacaggcaatccaccg

SEQ ID NO: 3753515 - DNA, 25 bp, Homo sapien
ctggcgagagccatgagcaacaggc

SEQ ID NO: 3753516 - DNA, 25 bp, Homo sapien
cagctgctggcgagagccatgagca

SEQ ID NO: 3753517 - DNA, 25 bp, Homo sapien
gatgaaattccaaaagcactcccat

SEQ ID NO: 3753518 - DNA, 25 bp, Homo sapien
gaagagagaacgtgttctgtctcct

SEQ ID NO: 3753519 - DNA, 25 bp, Homo sapien
caggagtgaagagagaacgtgttct

SEQ ID NO: 3753520 - DNA, 25 bp, Homo sapien
tccaaaagcactcccatcaaagtca

SEQ ID NO: 3753521 - DNA, 25 bp, Homo sapien
tacgcatccagcagactctcaaatg

SEQ ID NO: 3753522 - DNA, 25 bp, Homo sapien
actcccacgtgtgaggatgaggccc

SEQ ID NO: 3753523 - DNA, 25 bp, Homo sapien
gcagcaaggatgcaggtcaagcccc

SEQ ID NO: 3753524 - DNA, 25 bp, Homo sapien
gcaaggatgcaggtcaagccccagg

SEQ ID NO: 3753525 - DNA, 25 bp, Homo sapien
tcagacggaagtgccgcttcgatga

SEQ ID NO: 3753526 - DNA, 25 bp, Homo sapien
gccgcttcgatgacaaatcggaaga

SEQ ID NO: 3753527 - DNA, 25 bp, Homo sapien
acaaatcggaagaggaacagaagcc

SEQ ID NO: 3753528 - DNA, 25 bp, Homo sapien
ttttccatcagacggaagtgccgct

SEQ ID NO: 3753529 - DNA, 25 bp, Homo sapien
ccgacgtgtccaggcgctcgtccag

SEQ ID NO: 3753530 - DNA, 25 bp, Homo sapien
cgacgtgtccaggcgctcgtccagg

SEQ ID NO: 3753531 - DNA, 25 bp, Homo sapien
cgtgtccaggcgctcgtccaggcag

SEQ ID NO: 3753532 - DNA, 25 bp, Homo sapien
gacgtgtccaggcgctcgtccaggc

SEQ ID NO: 3753533 - DNA, 25 bp, Homo sapien
taggttccaacgcaatttccacaaa

SEQ ID NO: 3753534 - DNA, 25 bp, Homo sapien
tctctgaaaccccacatgggtaatg

SEQ ID NO: 3753535 - DNA, 25 bp, Homo sapien
gttaggttccaacgcaatttccaca

SEQ ID NO: 3753536 - DNA, 25 bp, Homo sapien
cccacatgggtaatgcttccatggg

SEQ ID NO: 3753537 - DNA, 25 bp, Homo sapien
gcagggagctgtcctcgaccttcct

SEQ ID NO: 3753538 - DNA, 25 bp, Homo sapien
gtgggcagcccctcaggactgacag

SEQ ID NO: 3753539 - DNA, 25 bp, Homo sapien
ccaggccatccgacaggtgttcggg

SEQ ID NO: 3753540 - DNA, 25 bp, Homo sapien
tgtgtcaccctcaatgcgctgcggg

SEQ ID NO: 3753541 - DNA, 25 bp, Homo sapien
tgttcacagcagatcctctcctgga

SEQ ID NO: 3753542 - DNA, 25 bp, Homo sapien
agggctcccgatgaataaacacagc

SEQ ID NO: 3753543 - DNA, 25 bp, Homo sapien
atgttcacagcagatcctctcctgg

SEQ ID NO: 3753544 - DNA, 25 bp, Homo sapien
ggctcccgatgaataaacacagctg

SEQ ID NO: 3753545 - DNA, 25 bp, Homo sapien
ggtcctcggccagcacagggcttgt

SEQ ID NO: 3753546 - DNA, 25 bp, Homo sapien
gtgcagcccccagaggcagggccgg

SEQ ID NO: 3753547 - DNA, 25 bp, Homo sapien
cagcacagggcttgtgtgcagcccc

SEQ ID NO: 3753548 - DNA, 25 bp, Homo sapien
ccagcccgtcctttccccaggctct

SEQ ID NO: 3753549 - DNA, 25 bp, Homo sapien
tcagcacttcgcaggtgcacagatg

SEQ ID NO: 3753550 - DNA, 25 bp, Homo sapien
tgtgcatgatgggtaatgaagccac

SEQ ID NO: 3753551 - DNA, 25 bp, Homo sapien
ccagccttgaaggacggtgtccatc

SEQ ID NO: 3753552 - DNA, 25 bp, Homo sapien
tgctgattgactgcatgaacatgct

SEQ ID NO: 3753553 - DNA, 25 bp, Homo sapien
gaggcttcctcatgggcgcctgaga

SEQ ID NO: 3753554 - DNA, 25 bp, Homo sapien
cctgtgcctgtgcgatgctgcaggt

SEQ ID NO: 3753555 - DNA, 25 bp, Homo sapien
ctcagtgccgaggatccctgtgcct

SEQ ID NO: 3753556 - DNA, 25 bp, Homo sapien
tcactcagtgccgaggatccctgtg

SEQ ID NO: 3753557 - DNA, 25 bp, Homo sapien
tccaccagaggcctccccgcctgct

SEQ ID NO: 3753558 - DNA, 25 bp, Homo sapien
aggcctccccgcctgctgcagatcc

SEQ ID NO: 3753559 - DNA, 25 bp, Homo sapien
cctccccgcctgctgcagatccctc

SEQ ID NO: 3753560 - DNA, 25 bp, Homo sapien
atgccctccaccagaggcctccccg

SEQ ID NO: 3753561 - DNA, 25 bp, Homo sapien
gcacttcctcggtggaaaacagaca

SEQ ID NO: 3753562 - DNA, 25 bp, Homo sapien
gccggtgtcctgagcattgtttaaa

SEQ ID NO: 3753563 - DNA, 25 bp, Homo sapien
aaccagcctcttctcgggaactgca

SEQ ID NO: 3753564 - DNA, 25 bp, Homo sapien
tgctgagccagtgttctgcgcagga

SEQ ID NO: 3753565 - DNA, 25 bp, Homo sapien
tctggaccacgcagagtctgaggcc

SEQ ID NO: 3753566 - DNA, 25 bp, Homo sapien
atgcagctgggacggaccccaggcc

SEQ ID NO: 3753567 - DNA, 25 bp, Homo sapien
tggctatgacggcatcctctctgga

SEQ ID NO: 3753568 - DNA, 25 bp, Homo sapien
caggcctccgcctgagcttggctat

SEQ ID NO: 3753569 - DNA, 25 bp, Homo sapien
ccggaagcagcatgtcccttttgct

SEQ ID NO: 3753570 - DNA, 25 bp, Homo sapien
ctgggcctccggaagcagcatgtcc

SEQ ID NO: 3753571 - DNA, 25 bp, Homo sapien
cctccggaagcagcatgtccctttt

SEQ ID NO: 3753572 - DNA, 25 bp, Homo sapien
gctgggcctccggaagcagcatgtc

SEQ ID NO: 3753573 - DNA, 25 bp, Homo sapien
tgtgcttgtcattagcggacaccag

SEQ ID NO: 3753574 - DNA, 25 bp, Homo sapien
gctgcccattaccagacctgaggtc

SEQ ID NO: 3753575 - DNA, 25 bp, Homo sapien
ggcttttttcagcgcctgccatgtg

SEQ ID NO: 3753576 - DNA, 25 bp, Homo sapien
ggccacccgtagtgctgtgcttgtc

SEQ ID NO: 3753577 - DNA, 25 bp, Homo sapien
accctgggccaccttgtgcatgaac

SEQ ID NO: 3753578 - DNA, 25 bp, Homo sapien
ccaccccttggagctggcttggaaa

SEQ ID NO: 3753579 - DNA, 25 bp, Homo sapien
cctcctgctttggaccctgggccac

SEQ ID NO: 3753580 - DNA, 25 bp, Homo sapien
tgtgaggtgcttgcctgtggcggtg

SEQ ID NO: 3753581 - DNA, 25 bp, Homo sapien
gtggtcatcgccagcagctccgtgt

SEQ ID NO: 3753582 - DNA, 25 bp, Homo sapien
ccagggctagggtctgcacgagact

SEQ ID NO: 3753583 - DNA, 25 bp, Homo sapien
agacttccccagtggtcatcgccag

SEQ ID NO: 3753584 - DNA, 25 bp, Homo sapien
tccgtgtcggactctgctgactggg

SEQ ID NO: 3753585 - DNA, 25 bp, Homo sapien
ccggcaggcaggaactgaacctcct

SEQ ID NO: 3753586 - DNA, 25 bp, Homo sapien
catctgtctatgttcccttgacttc

SEQ ID NO: 3753587 - DNA, 25 bp, Homo sapien
caggcaggaactgaacctccttgct

SEQ ID NO: 3753588 - DNA, 25 bp, Homo sapien
agctgatgccatctgtctatgttcc

SEQ ID NO: 3753589 - DNA, 25 bp, Homo sapien
tgctcagttccagagcaaggaggtg

SEQ ID NO: 3753590 - DNA, 25 bp, Homo sapien
cagtgacccttgaggccttgggacc

SEQ ID NO: 3753591 - DNA, 25 bp, Homo sapien
aggaggtggcgaccttcctgcaccg

SEQ ID NO: 3753592 - DNA, 25 bp, Homo sapien
ggagaagccagacagcctctagctc

SEQ ID NO: 3753593 - DNA, 25 bp, Homo sapien
cctggggctacacagttcctcagat

SEQ ID NO: 3753594 - DNA, 25 bp, Homo sapien
tggggctacacagttcctcagatca

SEQ ID NO: 3753595 - DNA, 25 bp, Homo sapien
acctggggctacacagttcctcaga

SEQ ID NO: 3753596 - DNA, 25 bp, Homo sapien
cacctggggctacacagttcctcag

SEQ ID NO: 3753597 - DNA, 25 bp, Homo sapien
catggtggcatcagtggccttttgg

SEQ ID NO: 3753598 - DNA, 25 bp, Homo sapien
cactgaattcagtgagctgcaaggt

SEQ ID NO: 3753599 - DNA, 25 bp, Homo sapien
aggccatggtggcatcagtggcctt

SEQ ID NO: 3753600 - DNA, 25 bp, Homo sapien
gtgtcaccgagaagaaacaggccat

SEQ ID NO: 3753601 - DNA, 25 bp, Homo sapien
tctctccgactcttggcaggaaaaa

SEQ ID NO: 3753602 - DNA, 25 bp, Homo sapien
aaagagaagtagactgcctgtctgc

SEQ ID NO: 3753603 - DNA, 25 bp, Homo sapien
actgctctctccgactcttggcagg

SEQ ID NO: 3753604 - DNA, 25 bp, Homo sapien
gaaaaagagaagtagactgcctgtc

SEQ ID NO: 3753605 - DNA, 25 bp, Homo sapien
tgtttcctgagctcggtcacccctt

SEQ ID NO: 3753606 - DNA, 25 bp, Homo sapien
tgctgtttcctgagctcggtcaccc

SEQ ID NO: 3753607 - DNA, 25 bp, Homo sapien
tcatgcaactactgtgccttctctt

SEQ ID NO: 3753608 - DNA, 25 bp, Homo sapien
ctttgctgtttcctgagctcggtca

SEQ ID NO: 3753609 - DNA, 25 bp, Homo sapien
ctttgggggtttctccagtgagcat

SEQ ID NO: 3753610 - DNA, 25 bp, Homo sapien
tgtttcctggctgtcggagatgaga

SEQ ID NO: 3753611 - DNA, 25 bp, Homo sapien
tgagggtgacgatgagtgtcttata

SEQ ID NO: 3753612 - DNA, 25 bp, Homo sapien
gtcttatatgtggtagccttggtga

SEQ ID NO: 3753613 - DNA, 25 bp, Homo sapien
tgatggttgtttcctggctgtcgga

SEQ ID NO: 3753614 - DNA, 25 bp, Homo sapien
agtgtctgttcattatccgcatttc

SEQ ID NO: 3753615 - DNA, 25 bp, Homo sapien
gttcattatccgcatttccatgaga

SEQ ID NO: 3753616 - DNA, 25 bp, Homo sapien
ggacaatttaatcagtgtctgttca

SEQ ID NO: 3753617 - DNA, 25 bp, Homo sapien
tctgttcattatccgcatttccatg

SEQ ID NO: 3753618 - DNA, 25 bp, Homo sapien
atcatagcccctgtgcccatctgta

SEQ ID NO: 3753619 - DNA, 25 bp, Homo sapien
tgtgcccatctgtacgttcccactc

SEQ ID NO: 3753620 - DNA, 25 bp, Homo sapien
gcccatctgtacgttcccactcatg

SEQ ID NO: 3753621 - DNA, 25 bp, Homo sapien
catctgtacgttcccactcatgcag

SEQ ID NO: 3753622 - DNA, 25 bp, Homo sapien
cagctttgaagttttactgttattt

SEQ ID NO: 3753623 - DNA, 25 bp, Homo sapien
tggggtgggggcacgtcaggattag

SEQ ID NO: 3753624 - DNA, 25 bp, Homo sapien
gtcaggattagcaacaaccagctcc

SEQ ID NO: 3753625 - DNA, 25 bp, Homo sapien
ggcacgtcaggattagcaacaacca

SEQ ID NO: 3753626 - DNA, 25 bp, Homo sapien
caggtgagtctggtgtggaaggtcc

SEQ ID NO: 3753627 - DNA, 25 bp, Homo sapien
tgagtctggtgtggaaggtccattg

SEQ ID NO: 3753628 - DNA, 25 bp, Homo sapien
caggcaggtgagtctggtgtggaag

SEQ ID NO: 3753629 - DNA, 25 bp, Homo sapien
ctgcaggcaggtgagtctggtgtgg

SEQ ID NO: 3753630 - DNA, 25 bp, Homo sapien
ccattggctacaggcaggtgagcct

SEQ ID NO: 3753631 - DNA, 25 bp, Homo sapien
gtccattggctacaggcaggtgagc

SEQ ID NO: 3753632 - DNA, 25 bp, Homo sapien
aaggtccattggctacaggcaggtg

SEQ ID NO: 3753633 - DNA, 25 bp, Homo sapien
gtggaaggtccattggctacaggca

SEQ ID NO: 3753634 - DNA, 25 bp, Homo sapien
tgtggaagatccattggctgcagac

SEQ ID NO: 3753635 - DNA, 25 bp, Homo sapien
aaggtccattggctacaggcaggtg

SEQ ID NO: 3753636 - DNA, 25 bp, Homo sapien
tccattggctacaggcaggtgagcc

SEQ ID NO: 3753637 - DNA, 25 bp, Homo sapien
tggtgtggaagatccattggctgca

SEQ ID NO: 3753638 - DNA, 25 bp, Homo sapien
ctgcaggtgcacgcagggtgtgtga

SEQ ID NO: 3753639 - DNA, 25 bp, Homo sapien
tgcaggtgcacgcagggtgtgtgat

SEQ ID NO: 3753640 - DNA, 25 bp, Homo sapien
aggtgcacgcagggtgtgtgataaa

SEQ ID NO: 3753641 - DNA, 25 bp, Homo sapien
caggtgcacgcagggtgtgtgataa

SEQ ID NO: 3753642 - DNA, 25 bp, Homo sapien
gagcacagccgtgctctgagcccgt

SEQ ID NO: 3753643 - DNA, 25 bp, Homo sapien
ggagcacagccgtgctctgagcccg

SEQ ID NO: 3753644 - DNA, 25 bp, Homo sapien
tctgagcccgtcctgcagatctctg

SEQ ID NO: 3753645 - DNA, 25 bp, Homo sapien
cgtgctctgagcccgtcctgcagat

SEQ ID NO: 3753646 - DNA, 25 bp, Homo sapien
attttgcaacttctagctcactttt

SEQ ID NO: 3753647 - DNA, 25 bp, Homo sapien
cattttgcaacttctagctcacttt

SEQ ID NO: 3753648 - DNA, 25 bp, Homo sapien
gacggtagggttctcacgtggatgg

SEQ ID NO: 3753649 - DNA, 25 bp, Homo sapien
gacgctagggttctcacattgttgt

SEQ ID NO: 3753650 - DNA, 25 bp, Homo sapien
tcacgtggacgctagggttctcaca

SEQ ID NO: 3753651 - DNA, 25 bp, Homo sapien
gttctcacgtggacgctagggttct

SEQ ID NO: 3753652 - DNA, 25 bp, Homo sapien
cccggagcatagctgagctctgagc

SEQ ID NO: 3753653 - DNA, 25 bp, Homo sapien
tccccggagcatagctgagctctga

SEQ ID NO: 3753654 - DNA, 25 bp, Homo sapien
ggtccccggagcatagctgagctct

SEQ ID NO: 3753655 - DNA, 25 bp, Homo sapien
cacggtccccggagcatagctgagc

SEQ ID NO: 3753656 - DNA, 25 bp, Homo sapien
cttcgctgaccctccagactgcggg

SEQ ID NO: 3753657 - DNA, 25 bp, Homo sapien
gcaagaaagccacttcgctgaccct

SEQ ID NO: 3753658 - DNA, 25 bp, Homo sapien
tcgctgaccctccagactgcggggg

SEQ ID NO: 3753659 - DNA, 25 bp, Homo sapien
cgcagcaagaaagccacttcgctga

SEQ ID NO: 3753660 - DNA, 25 bp, Homo sapien
tgtggtgttgtaggtggactcccta

SEQ ID NO: 3753661 - DNA, 25 bp, Homo sapien
ctcctgtggtgttgtaggtggactc

SEQ ID NO: 3753662 - DNA, 25 bp, Homo sapien
gggtgcaggtggactccatatctgg

SEQ ID NO: 3753663 - DNA, 25 bp, Homo sapien
ggtggctccctatctggtgcctgcg

SEQ ID NO: 3753664 - DNA, 25 bp, Homo sapien
gaagctgcggcagcgaacgtgtgga

SEQ ID NO: 3753665 - DNA, 25 bp, Homo sapien
cagcgaacgtgtggatgggaagttc

SEQ ID NO: 3753666 - DNA, 25 bp, Homo sapien
tcggttgtgggatgagccagcactt

SEQ ID NO: 3753667 - DNA, 25 bp, Homo sapien
tcctcaggagggagacgcgagtaaa

SEQ ID NO: 3753668 - DNA, 25 bp, Homo sapien
ggtcctaggcacattgcacaggtga

SEQ ID NO: 3753669 - DNA, 25 bp, Homo sapien
gcatggacatggaactccgtgggat

SEQ ID NO: 3753670 - DNA, 25 bp, Homo sapien
ggctgttgacctttgatgactggaa

SEQ ID NO: 3753671 - DNA, 25 bp, Homo sapien
tcacaatgagaagtggcgttgacaa

SEQ ID NO: 3753672 - DNA, 25 bp, Homo sapien
ttgctcttggctccaccaggtcagg

SEQ ID NO: 3753673 - DNA, 25 bp, Homo sapien
caggagccacgcctgggctattgtg

SEQ ID NO: 3753674 - DNA, 25 bp, Homo sapien
tgatggttgccctgcgttcatggca

SEQ ID NO: 3753675 - DNA, 25 bp, Homo sapien
agcacagcatgtagctcccttctgg

SEQ ID NO: 3753676 - DNA, 25 bp, Homo sapien
ctgtgggaccggcttccccagggct

SEQ ID NO: 3753677 - DNA, 25 bp, Homo sapien
cccagggctgcactcccagccgcac

SEQ ID NO: 3753678 - DNA, 25 bp, Homo sapien
ttacacccctgcctctctgtgggac

SEQ ID NO: 3753679 - DNA, 25 bp, Homo sapien
cctctctgtgggaccggcttcccca

SEQ ID NO: 3753680 - DNA, 25 bp, Homo sapien
ctgtgggggtatttgcacacagagg

SEQ ID NO: 3753681 - DNA, 25 bp, Homo sapien
gggtatttgcacacagagggctgtc

SEQ ID NO: 3753682 - DNA, 25 bp, Homo sapien
gtgggggtatttgcacacagagggc

SEQ ID NO: 3753683 - DNA, 25 bp, Homo sapien
tatttgcacacagagggctgtcccg

SEQ ID NO: 3753684 - DNA, 25 bp, Homo sapien
tgcaggacgtccctatgctcacaga

SEQ ID NO: 3753685 - DNA, 25 bp, Homo sapien
gagcctgaaccatggcacaggatga

SEQ ID NO: 3753686 - DNA, 25 bp, Homo sapien
ccaagccacggagctagctgtatct

SEQ ID NO: 3753687 - DNA, 25 bp, Homo sapien
aggatgatttaggtcccctgcctgc

SEQ ID NO: 3753688 - DNA, 25 bp, Homo sapien
tgcaaagcccgagtgattacatggg

SEQ ID NO: 3753689 - DNA, 25 bp, Homo sapien
gtttgcaaagcccgagtgattacat

SEQ ID NO: 3753690 - DNA, 25 bp, Homo sapien
tttgcaaagcccgagtgattacatg

SEQ ID NO: 3753691 - DNA, 25 bp, Homo sapien
ttgcaaagcccgagtgattacatgg

SEQ ID NO: 3753692 - DNA, 25 bp, Homo sapien
gaatgcgtcctggttggacatcagt

SEQ ID NO: 3753693 - DNA, 25 bp, Homo sapien
catggttgaagttgctagctctgac

SEQ ID NO: 3753694 - DNA, 25 bp, Homo sapien
gctggttggaagaaaggcggctgaa

SEQ ID NO: 3753695 - DNA, 25 bp, Homo sapien
gggtgtgcatacaggacagagttca

SEQ ID NO: 3753696 - DNA, 25 bp, Homo sapien
tgaattcagaacagccgacggctga

SEQ ID NO: 3753697 - DNA, 25 bp, Homo sapien
agcagcctgtgaacgaatctgaatt

SEQ ID NO: 3753698 - DNA, 25 bp, Homo sapien
ctgaggaggccgcattgtcgtcagc

SEQ ID NO: 3753699 - DNA, 25 bp, Homo sapien
gaggccgcattgtcgtcagcagcct

SEQ ID NO: 3753700 - DNA, 25 bp, Homo sapien
tatcaggctgcccaaggttctccag

SEQ ID NO: 3753701 - DNA, 25 bp, Homo sapien
acagcagggtaagcaggagtcccga

SEQ ID NO: 3753702 - DNA, 25 bp, Homo sapien
agccgctcgaagtcgtagcttttag

SEQ ID NO: 3753703 - DNA, 25 bp, Homo sapien
cagacggggctcatcaatatcaggc

SEQ ID NO: 3753704 - DNA, 25 bp, Homo sapien
tctacattgaatgccgacggaaggt

SEQ ID NO: 3753705 - DNA, 25 bp, Homo sapien
tgctctgctaaacgctgcacacatc

SEQ ID NO: 3753706 - DNA, 25 bp, Homo sapien
gcagcaaacattctctacattgaat

SEQ ID NO: 3753707 - DNA, 25 bp, Homo sapien
gaatgccgacggaaggtctgctctg

SEQ ID NO: 3753708 - DNA, 25 bp, Homo sapien
tgtgaggtggcaaacaacggagcct

SEQ ID NO: 3753709 - DNA, 25 bp, Homo sapien
tggtacacgtaaggcacgaatcccc

SEQ ID NO: 3753710 - DNA, 25 bp, Homo sapien
cacaggttactgcaaaggacgggag

SEQ ID NO: 3753711 - DNA, 25 bp, Homo sapien
taaaagcaacctatcccaatgtgag

SEQ ID NO: 3753712 - DNA, 25 bp, Homo sapien
caatggatcagaggtcagagtctag

SEQ ID NO: 3753713 - DNA, 25 bp, Homo sapien
gattttcaacaagtgtaccaggaca

SEQ ID NO: 3753714 - DNA, 25 bp, Homo sapien
cagagtctagaaggacacttacggt

SEQ ID NO: 3753715 - DNA, 25 bp, Homo sapien
tatggtattggcatgaggacagaca

SEQ ID NO: 3753716 - DNA, 25 bp, Homo sapien
gcgcacatctcaacaccagggataa

SEQ ID NO: 3753717 - DNA, 25 bp, Homo sapien
tcccagctgacgagttctagaaaca

SEQ ID NO: 3753718 - DNA, 25 bp, Homo sapien
actgctgcgagaggcaatttggcaa

SEQ ID NO: 3753719 - DNA, 25 bp, Homo sapien
tgaacaggtcacatgcggagaggaa

SEQ ID NO: 3753720 - DNA, 25 bp, Homo sapien
gggagtgcttctgcccacggtacag

SEQ ID NO: 3753721 - DNA, 25 bp, Homo sapien
tggccatcccatggagacatcgggt

SEQ ID NO: 3753722 - DNA, 25 bp, Homo sapien
ggctgtctggctgtgcaatcctcat

SEQ ID NO: 3753723 - DNA, 25 bp, Homo sapien
catcagcccgcttcagtctcaagtg

SEQ ID NO: 3753724 - DNA, 25 bp, Homo sapien
aactcaacggtggaaatgatgtccg

SEQ ID NO: 3753725 - DNA, 25 bp, Homo sapien
tctccagagtaattaaactcaacgg

SEQ ID NO: 3753726 - DNA, 25 bp, Homo sapien
aaataacaactctgccgcccttgtc

SEQ ID NO: 3753727 - DNA, 25 bp, Homo sapien
tgttcacgctgaaaaataacaactc

SEQ ID NO: 3753728 - DNA, 25 bp, Homo sapien
gccagacttctctgcaggaagtgct

SEQ ID NO: 3753729 - DNA, 25 bp, Homo sapien
acacttcatggcagggcaggacggc

SEQ ID NO: 3753730 - DNA, 25 bp, Homo sapien
gaagagagaattcacacccctgcca

SEQ ID NO: 3753731 - DNA, 25 bp, Homo sapien
agagagaattcacacccctgccaga

SEQ ID NO: 3753732 - DNA, 25 bp, Homo sapien
gacgcctgtgaaccttgctgcagct

SEQ ID NO: 3753733 - DNA, 25 bp, Homo sapien
atggatgaacacgtgcactgccgcc

SEQ ID NO: 3753734 - DNA, 25 bp, Homo sapien
ctaagacgcacacgtggacgcctgt

SEQ ID NO: 3753735 - DNA, 25 bp, Homo sapien
agcttcaccctcttggcggctgcaa

SEQ ID NO: 3753736 - DNA, 25 bp, Homo sapien
gccttccgaatcctccacgctcctt

SEQ ID NO: 3753737 - DNA, 25 bp, Homo sapien
cttccgaatcctccacgctccttcg

SEQ ID NO: 3753738 - DNA, 25 bp, Homo sapien
tccgaatcctccacgctccttcgat

SEQ ID NO: 3753739 - DNA, 25 bp, Homo sapien
tagccttccgaatcctccacgctcc

SEQ ID NO: 3753740 - DNA, 25 bp, Homo sapien
ctgcagagtccaatgtgcagggcat

SEQ ID NO: 3753741 - DNA, 25 bp, Homo sapien
cgccgcactgagtctgacaggcagg

SEQ ID NO: 3753742 - DNA, 25 bp, Homo sapien
ctgtccgccgcactgagtctgacag

SEQ ID NO: 3753743 - DNA, 25 bp, Homo sapien
agagtccaatgtgcagggcattcct

SEQ ID NO: 3753744 - DNA, 25 bp, Homo sapien
tgaaaaagaccaggaggaaagtagc

SEQ ID NO: 3753745 - DNA, 25 bp, Homo sapien
ctagagggagagtgaaaaagaccag

SEQ ID NO: 3753746 - DNA, 25 bp, Homo sapien
aaaagaccaggaggaaagtagcagg

SEQ ID NO: 3753747 - DNA, 25 bp, Homo sapien
agagtgaaaaagaccaggaggaaag

SEQ ID NO: 3753748 - DNA, 25 bp, Homo sapien
gtctgttacagaagtggagaaacat

SEQ ID NO: 3753749 - DNA, 25 bp, Homo sapien
gtggagaaacatgcttgggaagaca

SEQ ID NO: 3753750 - DNA, 25 bp, Homo sapien
agaaacatgcttgggaagacatatg

SEQ ID NO: 3753751 - DNA, 25 bp, Homo sapien
cagaagtggagaaacatgcttggga

SEQ ID NO: 3753752 - DNA, 25 bp, Homo sapien
cgaatgcagcctgccgtgttttctg

SEQ ID NO: 3753753 - DNA, 25 bp, Homo sapien
ctgccgaatgcagcctgccgtgttt

SEQ ID NO: 3753754 - DNA, 25 bp, Homo sapien
agcaggtctgccgaatgcagcctgc

SEQ ID NO: 3753755 - DNA, 25 bp, Homo sapien
tctgccgaatgcagcctgccgtgtt

SEQ ID NO: 3753756 - DNA, 25 bp, Homo sapien
aggtctgccgaattcagcctgtcga

SEQ ID NO: 3753757 - DNA, 25 bp, Homo sapien
aattcagcctgtcgaatgtagcctg

SEQ ID NO: 3753758 - DNA, 25 bp, Homo sapien
gaagcaggtctgccaaacgcagcct

SEQ ID NO: 3753759 - DNA, 25 bp, Homo sapien
tgccaaacgcagcctgccgtgttct

SEQ ID NO: 3753760 - DNA, 25 bp, Homo sapien
cacttctaggtatgcatctggagca

SEQ ID NO: 3753761 - DNA, 25 bp, Homo sapien
cgactcttcgactccacttctaggt

SEQ ID NO: 3753762 - DNA, 25 bp, Homo sapien
caggtctgccgaatgcagccttgct

SEQ ID NO: 3753763 - DNA, 25 bp, Homo sapien
ttgatttccgactcttcgactccac

SEQ ID NO: 3753764 - DNA, 25 bp, Homo sapien
tcccctagaatgagggcggctttta

SEQ ID NO: 3753765 - DNA, 25 bp, Homo sapien
tcaaactccggttcatgactttgaa

SEQ ID NO: 3753766 - DNA, 25 bp, Homo sapien
aacattatattctcccctagaatga

SEQ ID NO: 3753767 - DNA, 25 bp, Homo sapien
caaatagtcaaactccggttcatga

SEQ ID NO: 3753768 - DNA, 25 bp, Homo sapien
agcattctgttgtggtaaccaccta

SEQ ID NO: 3753769 - DNA, 25 bp, Homo sapien
attctgttgtggtaaccacctaatt

SEQ ID NO: 3753770 - DNA, 25 bp, Homo sapien
cattctgttgtggtaaccacctaat

SEQ ID NO: 3753771 - DNA, 25 bp, Homo sapien
gcattctgttgtggtaaccacctaa

SEQ ID NO: 3753772 - DNA, 25 bp, Homo sapien
cctcattctccatatgaaaagaaaa

SEQ ID NO: 3753773 - DNA, 25 bp, Homo sapien
gaaaaactataacatgcatcactac

SEQ ID NO: 3753774 - DNA, 25 bp, Homo sapien
taacatgcatcactactgtttgagt

SEQ ID NO: 3753775 - DNA, 25 bp, Homo sapien
aataaaaacctcattctccatatga

SEQ ID NO: 3753776 - DNA, 25 bp, Homo sapien
tatcccgttcacttattttccataa

SEQ ID NO: 3753777 - DNA, 25 bp, Homo sapien
tcctaaatgggtctcgaagtcttcc

SEQ ID NO: 3753778 - DNA, 25 bp, Homo sapien
caggttataaccttctgctctttta

SEQ ID NO: 3753779 - DNA, 25 bp, Homo sapien
ccgtagcgccgtgatcctaaatggg

SEQ ID NO: 3753780 - DNA, 25 bp, Homo sapien
ttcttaacttctcaacagcattgga

SEQ ID NO: 3753781 - DNA, 25 bp, Homo sapien
gacagcagactgaaacgtttattct

SEQ ID NO: 3753782 - DNA, 25 bp, Homo sapien
gcagactgaaacgtttattcttaac

SEQ ID NO: 3753783 - DNA, 25 bp, Homo sapien
cagcattggataaagcaaaggcaac

SEQ ID NO: 3753784 - DNA, 25 bp, Homo sapien
gaatcacgaggcagacctcacagca

SEQ ID NO: 3753785 - DNA, 25 bp, Homo sapien
ctttcaggaatcacgaggcagacct

SEQ ID NO: 3753786 - DNA, 25 bp, Homo sapien
atgagtgcaaacgactttcaggaat

SEQ ID NO: 3753787 - DNA, 25 bp, Homo sapien
gaggcagacctcacagcagacctca

SEQ ID NO: 3753788 - DNA, 25 bp, Homo sapien
agatacataaatagcccactctgaa

SEQ ID NO: 3753789 - DNA, 25 bp, Homo sapien
ggctcagatacataaatagcccact

SEQ ID NO: 3753790 - DNA, 25 bp, Homo sapien
ttaggctcagatacataaatagccc

SEQ ID NO: 3753791 - DNA, 25 bp, Homo sapien
ccagttaggctcagatacataaata

SEQ ID NO: 3753792 - DNA, 25 bp, Homo sapien
ctgcaggccgcctatggtcagaggt

SEQ ID NO: 3753793 - DNA, 25 bp, Homo sapien
ccaaaagggagagccttgaaagctt

SEQ ID NO: 3753794 - DNA, 25 bp, Homo sapien
tcaggcgtgaggaatagcatcacac

SEQ ID NO: 3753795 - DNA, 25 bp, Homo sapien
tagggaagcccaattcgcacagaaa

SEQ ID NO: 3753796 - DNA, 25 bp, Homo sapien
tcgacatgttcctgctgaagagaag

SEQ ID NO: 3753797 - DNA, 25 bp, Homo sapien
gcttccattaccgaggtcgacatgt

SEQ ID NO: 3753798 - DNA, 25 bp, Homo sapien
gatcagctggcagggtaacaaactg

SEQ ID NO: 3753799 - DNA, 25 bp, Homo sapien
taataattctgtacaggcaataccc

SEQ ID NO: 3753800 - DNA, 25 bp, Homo sapien
gcagaaagatatgtttcatgatcac

SEQ ID NO: 3753801 - DNA, 25 bp, Homo sapien
agcatttgcaaaaattcgccgtgga

SEQ ID NO: 3753802 - DNA, 25 bp, Homo sapien
gactcgcttctaccataagatccat

SEQ ID NO: 3753803 - DNA, 25 bp, Homo sapien
tatgtttcatgatcactatttactg

SEQ ID NO: 3753804 - DNA, 25 bp, Homo sapien
taagtgccataaattaattctcagg

SEQ ID NO: 3753805 - DNA, 25 bp, Homo sapien
gtgatttctaagtgccataaattaa

SEQ ID NO: 3753806 - DNA, 25 bp, Homo sapien
tctgtgatttctaagtgccataaat

SEQ ID NO: 3753807 - DNA, 25 bp, Homo sapien
taaagcttctatctgtgatttctaa

SEQ ID NO: 3753808 - DNA, 25 bp, Homo sapien
gcaccctcgggaagacgccagtgtc

SEQ ID NO: 3753809 - DNA, 25 bp, Homo sapien
ctaaagagcaccctcgggaagacgc

SEQ ID NO: 3753810 - DNA, 25 bp, Homo sapien
ctatctaaagagcaccctcgggaag

SEQ ID NO: 3753811 - DNA, 25 bp, Homo sapien
aaagagcaccctcgggaagacgcca

SEQ ID NO: 3753812 - DNA, 25 bp, Homo sapien
gttagcaggcttgatgtccacgatg

SEQ ID NO: 3753813 - DNA, 25 bp, Homo sapien
ttagcaggcttgatgtccacgatgt

SEQ ID NO: 3753814 - DNA, 25 bp, Homo sapien
gcgcatgtcacacaggcggatggtc

SEQ ID NO: 3753815 - DNA, 25 bp, Homo sapien
gcactggtgcgggtggaactcggct

SEQ ID NO: 3753816 - DNA, 25 bp, Homo sapien
tgcagtgatgacttcggtcagctcc

SEQ ID NO: 3753817 - DNA, 25 bp, Homo sapien
gctactgctgtagacgaacacgttg

SEQ ID NO: 3753818 - DNA, 25 bp, Homo sapien
gagatgctttaaaagacgccaggcg

SEQ ID NO: 3753819 - DNA, 25 bp, Homo sapien
ggaagaactctctaagtctttggag

SEQ ID NO: 3753820 - DNA, 25 bp, Homo sapien
tccccagttgtgcaaaggcacttgg

SEQ ID NO: 3753821 - DNA, 25 bp, Homo sapien
gaacaagtggctctaaatgagatgc

SEQ ID NO: 3753822 - DNA, 25 bp, Homo sapien
ggagcctgtgtttgtcggcttagca

SEQ ID NO: 3753823 - DNA, 25 bp, Homo sapien
tgtgtttgtcggcttagcatctgaa

SEQ ID NO: 3753824 - DNA, 25 bp, Homo sapien
tcggcttagcatctgaaattaactt

SEQ ID NO: 3753825 - DNA, 25 bp, Homo sapien
ttttttcttgatgcaggagcctgtg

SEQ ID NO: 3753826 - DNA, 25 bp, Homo sapien
tgtaccgcccactatgactgaattt

SEQ ID NO: 3753827 - DNA, 25 bp, Homo sapien
tagtctctggtcatcatgtaccgcc

SEQ ID NO: 3753828 - DNA, 25 bp, Homo sapien
ttgctgcgcaggtactcgtggacct

SEQ ID NO: 3753829 - DNA, 25 bp, Homo sapien
gaaccgttccagcaacactcaaact

SEQ ID NO: 3753830 - DNA, 25 bp, Homo sapien
tgaccacgctgtgtctgggcatgac

SEQ ID NO: 3753831 - DNA, 25 bp, Homo sapien
tatcatccatcaatcaaaaggtctg

SEQ ID NO: 3753832 - DNA, 25 bp, Homo sapien
gcatttaacacatagccggcctgta

SEQ ID NO: 3753833 - DNA, 25 bp, Homo sapien
tgcaacgcggtcattccagtgaggt

SEQ ID NO: 3753834 - DNA, 25 bp, Homo sapien
tttaaacgtgtgctgtgcctcaccc

SEQ ID NO: 3753835 - DNA, 25 bp, Homo sapien
tgagatggatggatgctgtgctccc

SEQ ID NO: 3753836 - DNA, 25 bp, Homo sapien
tctcggtgtccgctctcagaggtaa

SEQ ID NO: 3753837 - DNA, 25 bp, Homo sapien
tcacacttgctggatctgtcacacg

SEQ ID NO: 3753838 - DNA, 25 bp, Homo sapien
ttccacactgcaaacaagggcgctg

SEQ ID NO: 3753839 - DNA, 25 bp, Homo sapien
tatggccgacactgactggaattgc

SEQ ID NO: 3753840 - DNA, 25 bp, Homo sapien
taaattctcgacagatagtgccagc

SEQ ID NO: 3753841 - DNA, 25 bp, Homo sapien
gacctagaacacaagaaggcgctgc

SEQ ID NO: 3753842 - DNA, 25 bp, Homo sapien
tggctgctggcaaatacctagtgtc

SEQ ID NO: 3753843 - DNA, 25 bp, Homo sapien
tcaaggtgccatgagaaagaagcgg

SEQ ID NO: 3753844 - DNA, 25 bp, Homo sapien
gcccccatggtcatgcgcggtgaga

SEQ ID NO: 3753845 - DNA, 25 bp, Homo sapien
tgcgcggtgagaggcctttcacgct

SEQ ID NO: 3753846 - DNA, 25 bp, Homo sapien
caagatcaactgtaatggctttcaa

SEQ ID NO: 3753847 - DNA, 25 bp, Homo sapien
tagaaatagtaaaaatccactgggc

SEQ ID NO: 3753848 - DNA, 25 bp, Homo sapien
tgtctctgctgtcgaaaaattctac

SEQ ID NO: 3753849 - DNA, 25 bp, Homo sapien
caaatgaggcaacggatagaaatag

SEQ ID NO: 3753850 - DNA, 25 bp, Homo sapien
tcttgttgaagtccagactgtccac

SEQ ID NO: 3753851 - DNA, 25 bp, Homo sapien
ggtttgctgctctctctcgaggcct

SEQ ID NO: 3753852 - DNA, 25 bp, Homo sapien
ctgaagaagttgttataggacccgg

SEQ ID NO: 3753853 - DNA, 25 bp, Homo sapien
tacaagttattggtggcagccacgg

SEQ ID NO: 3753854 - DNA, 25 bp, Homo sapien
tgaccttttgggagcagtgtccgtc

SEQ ID NO: 3753855 - DNA, 25 bp, Homo sapien
aaatgtccggcttaactatgcaaga

SEQ ID NO: 3753856 - DNA, 25 bp, Homo sapien
cttaatggagcggacaatgatgcct

SEQ ID NO: 3753857 - DNA, 25 bp, Homo sapien
caagacttggtcctcacgttcgcgt

SEQ ID NO: 3753858 - DNA, 25 bp, Homo sapien
cgctgcagtgaaggcccaagtgtga

SEQ ID NO: 3753859 - DNA, 25 bp, Homo sapien
catctagacagggtgacgggcgatc

SEQ ID NO: 3753860 - DNA, 25 bp, Homo sapien
taaatcccacggaagcaagctctgg

SEQ ID NO: 3753861 - DNA, 25 bp, Homo sapien
ttattgagcgctcacacccgaaggg

SEQ ID NO: 3753862 - DNA, 25 bp, Homo sapien
gaacaggggatcagtacacacctct

SEQ ID NO: 3753863 - DNA, 25 bp, Homo sapien
aggggaacaggggatcagtacacac

SEQ ID NO: 3753864 - DNA, 25 bp, Homo sapien
caggggatcagtacacacctctatc

SEQ ID NO: 3753865 - DNA, 25 bp, Homo sapien
gacggggatcagcacacaccatctc

SEQ ID NO: 3753866 - DNA, 25 bp, Homo sapien
cagggggacgggggatcagcagtac

SEQ ID NO: 3753867 - DNA, 25 bp, Homo sapien
gggggacgggggatcagcagtacac

SEQ ID NO: 3753868 - DNA, 25 bp, Homo sapien
agggggacgggggatcagcagtaca

SEQ ID NO: 3753869 - DNA, 25 bp, Homo sapien
ggggacgggggatcagcagtacaca

SEQ ID NO: 3753870 - DNA, 25 bp, Homo sapien
ctccacagtgggatggcggatcagc

SEQ ID NO: 3753871 - DNA, 25 bp, Homo sapien
tccacagtgggatggcggatcagca

SEQ ID NO: 3753872 - DNA, 25 bp, Homo sapien
cttcatctccacagtgggatggcgg

SEQ ID NO: 3753873 - DNA, 25 bp, Homo sapien
ccttcatctccacagtgggatggcg

SEQ ID NO: 3753874 - DNA, 25 bp, Homo sapien
tctccacagggggaccggggatcag

SEQ ID NO: 3753875 - DNA, 25 bp, Homo sapien
ggacgggggatcagcacacaccttc

SEQ ID NO: 3753876 - DNA, 25 bp, Homo sapien
tccacagggggaccggggatcagca

SEQ ID NO: 3753877 - DNA, 25 bp, Homo sapien
cttcatctccacagggggaccgggg

SEQ ID NO: 3753878 - DNA, 25 bp, Homo sapien
taatgtgaactcaagtggcactgtg

SEQ ID NO: 3753879 - DNA, 25 bp, Homo sapien
ggaccagggttgactaatgcttaaa

SEQ ID NO: 3753880 - DNA, 25 bp, Homo sapien
gattcagggtaatgacggacatcct

SEQ ID NO: 3753881 - DNA, 25 bp, Homo sapien
ctagaactgtcttaaggaccagggt

SEQ ID NO: 3753882 - DNA, 25 bp, Homo sapien
tcgccacagaagatgcggctacagc

SEQ ID NO: 3753883 - DNA, 25 bp, Homo sapien
agcacagcaacgacaggacagctcg

SEQ ID NO: 3753884 - DNA, 25 bp, Homo sapien
gccctcatacagcaagcccatcctg

SEQ ID NO: 3753885 - DNA, 25 bp, Homo sapien
aggacgagcagagccacgccctcat

SEQ ID NO: 3753886 - DNA, 25 bp, Homo sapien
agctcaaagccaagcccagtatcac

SEQ ID NO: 3753887 - DNA, 25 bp, Homo sapien
tgaggggcgtatggggcacagaggc

SEQ ID NO: 3753888 - DNA, 25 bp, Homo sapien
acagaggcacggagctcaaagccaa

SEQ ID NO: 3753889 - DNA, 25 bp, Homo sapien
gggcacagaggcacggagctcaaag

SEQ ID NO: 3753890 - DNA, 25 bp, Homo sapien
agccctgggtgtcctgtaggcagcc

SEQ ID NO: 3753891 - DNA, 25 bp, Homo sapien
tgtcctgtaggcagccccgcactgt

SEQ ID NO: 3753892 - DNA, 25 bp, Homo sapien
ctaaaagatcaaggagccctgggtg

SEQ ID NO: 3753893 - DNA, 25 bp, Homo sapien
gcagccccgcactgtcaccagagat

SEQ ID NO: 3753894 - DNA, 25 bp, Homo sapien
cacagcttcgggggtgccgcagttc

SEQ ID NO: 3753895 - DNA, 25 bp, Homo sapien
tacaaaatcatcgtacaggccagcc

SEQ ID NO: 3753896 - DNA, 25 bp, Homo sapien
tcaggaaatgcgtgcaggaactcag

SEQ ID NO: 3753897 - DNA, 25 bp, Homo sapien
ccagagcacacaaggcggaaggtga

SEQ ID NO: 3753898 - DNA, 25 bp, Homo sapien
gacatcaagtgtgggttcccgtcct

SEQ ID NO: 3753899 - DNA, 25 bp, Homo sapien
gagagctttcttaggactggaccgc

SEQ ID NO: 3753900 - DNA, 25 bp, Homo sapien
ccaaacctgtttcccgtgcgtgatg

SEQ ID NO: 3753901 - DNA, 25 bp, Homo sapien
tgatgatgacttcacgaaacgcggt

SEQ ID NO: 3753902 - DNA, 25 bp, Homo sapien
tcatcaccgggcagctagtcttgta

SEQ ID NO: 3753903 - DNA, 25 bp, Homo sapien
cagcgatggacggtccctgcaaatc

SEQ ID NO: 3753904 - DNA, 25 bp, Homo sapien
aaatctgcaagggacccagtctcca

SEQ ID NO: 3753905 - DNA, 25 bp, Homo sapien
tgagtttcaggtccaggaacacagc

SEQ ID NO: 3753906 - DNA, 25 bp, Homo sapien
ccagctgagtttcaggtccaggaac

SEQ ID NO: 3753907 - DNA, 25 bp, Homo sapien
tatatgaagcaaccgaggtgcccac

SEQ ID NO: 3753908 - DNA, 25 bp, Homo sapien
tagatgtctccctagcagaaaggaa

SEQ ID NO: 3753909 - DNA, 25 bp, Homo sapien
gtgcccacgcatagagactcgagag

SEQ ID NO: 3753910 - DNA, 25 bp, Homo sapien
gactcgagagaacgacagtgctgcc

SEQ ID NO: 3753911 - DNA, 25 bp, Homo sapien
tttaatatactagtcatgatgtgtg

SEQ ID NO: 3753912 - DNA, 25 bp, Homo sapien
taatgtctactgtgaaaatttggta

SEQ ID NO: 3753913 - DNA, 25 bp, Homo sapien
aaaattatctgcaaccttaattcag

SEQ ID NO: 3753914 - DNA, 25 bp, Homo sapien
tatctgcaaccttaattcagctgaa

SEQ ID NO: 3753915 - DNA, 25 bp, Homo sapien
ctcccgtgtgcgtggctttctccta

SEQ ID NO: 3753916 - DNA, 25 bp, Homo sapien
gccgggacctgagcgctgcccgtgt

SEQ ID NO: 3753917 - DNA, 25 bp, Homo sapien
tttcctgggccgggacctgagcgct

SEQ ID NO: 3753918 - DNA, 25 bp, Homo sapien
gtggctttctcctagctcttgggca

SEQ ID NO: 3753919 - DNA, 25 bp, Homo sapien
gttaggtaggttggccagagggctc

SEQ ID NO: 3753920 - DNA, 25 bp, Homo sapien
caggtgggttaggtaggttggccag

SEQ ID NO: 3753921 - DNA, 25 bp, Homo sapien
taggtaggttggccagagggctcac

SEQ ID NO: 3753922 - DNA, 25 bp, Homo sapien
ttaggtaggttggccagagggctca

SEQ ID NO: 3753923 - DNA, 25 bp, Homo sapien
acagactggaaagaccggaatgcca

SEQ ID NO: 3753924 - DNA, 25 bp, Homo sapien
tgaagagccagagcgggaagccaaa

SEQ ID NO: 3753925 - DNA, 25 bp, Homo sapien
ggctctagtcctggcgtgcagacag

SEQ ID NO: 3753926 - DNA, 25 bp, Homo sapien
ctgtgggttctgaagagcgttcgcc

SEQ ID NO: 3753927 - DNA, 25 bp, Homo sapien
ttcctggctgcttatactcactcac

SEQ ID NO: 3753928 - DNA, 25 bp, Homo sapien
gaactcaagggatggctcacctcgg

SEQ ID NO: 3753929 - DNA, 25 bp, Homo sapien
cctttcctggctgcttatactcact

SEQ ID NO: 3753930 - DNA, 25 bp, Homo sapien
ctgatctcgaactcaagggatggct

SEQ ID NO: 3753931 - DNA, 25 bp, Homo sapien
taactctcagcaatgaaggaaccaa

SEQ ID NO: 3753932 - DNA, 25 bp, Homo sapien
gacacgtttcttcccgcctcaggga

SEQ ID NO: 3753933 - DNA, 25 bp, Homo sapien
tgctgtctggcctgacgagtctgcc

SEQ ID NO: 3753934 - DNA, 25 bp, Homo sapien
taaacggagtcaaagcagggcttct

SEQ ID NO: 3753935 - DNA, 25 bp, Homo sapien
tcatgtcacgtgacttccctaggac

SEQ ID NO: 3753936 - DNA, 25 bp, Homo sapien
ttctgaggatttggccgcagctgtg

SEQ ID NO: 3753937 - DNA, 25 bp, Homo sapien
cagtgtttgccgctgtcagtacccc

SEQ ID NO: 3753938 - DNA, 25 bp, Homo sapien
catgtccctgttttgagccgttttc

SEQ ID NO: 3753939 - DNA, 25 bp, Homo sapien
tgagaactttgacgacggactgtgt

SEQ ID NO: 3753940 - DNA, 25 bp, Homo sapien
tgacgacggactgtgttctgtattt

SEQ ID NO: 3753941 - DNA, 25 bp, Homo sapien
tgcagatgagatgcgcgatgtgttt

SEQ ID NO: 3753942 - DNA, 25 bp, Homo sapien
tcttgggtgttcgttgctggtgaga

SEQ ID NO: 3753943 - DNA, 25 bp, Homo sapien
gctgcagtccgtccttatataggag

SEQ ID NO: 3753944 - DNA, 25 bp, Homo sapien
cgggccgcgttctggactggctcct

SEQ ID NO: 3753945 - DNA, 25 bp, Homo sapien
tatataggagcctcgccctctttgg

SEQ ID NO: 3753946 - DNA, 25 bp, Homo sapien
cctctttggggatgcagtgacctgg

SEQ ID NO: 3753947 - DNA, 25 bp, Homo sapien
tcagtgggtgacagtcacagctgga

SEQ ID NO: 3753948 - DNA, 25 bp, Homo sapien
cagtgggtgacagtcacagctggaa

SEQ ID NO: 3753949 - DNA, 25 bp, Homo sapien
tcacagctggaagtgcccgtgtcac

SEQ ID NO: 3753950 - DNA, 25 bp, Homo sapien
tgacagtcacagctggaagtgcccg

SEQ ID NO: 3753951 - DNA, 25 bp, Homo sapien
ctgaggctgcgtgcaataggccctg

SEQ ID NO: 3753952 - DNA, 25 bp, Homo sapien
aatgggagccttgcagccagaccca

SEQ ID NO: 3753953 - DNA, 25 bp, Homo sapien
gacctcggaacagagaacaatggga

SEQ ID NO: 3753954 - DNA, 25 bp, Homo sapien
ctctcctctgagtgtaccctctggg

SEQ ID NO: 3753955 - DNA, 25 bp, Homo sapien
agacccacggatggaagcagcaagc

SEQ ID NO: 3753956 - DNA, 25 bp, Homo sapien
cgccctgagtgtccgcgcggcagga

SEQ ID NO: 3753957 - DNA, 25 bp, Homo sapien
taggcgattccttgggccgccctga

SEQ ID NO: 3753958 - DNA, 25 bp, Homo sapien
ggccactgtgggctcggcgtgggcg

SEQ ID NO: 3753959 - DNA, 25 bp, Homo sapien
gggtggatcccatgtaggcgattcc

SEQ ID NO: 3753960 - DNA, 25 bp, Homo sapien
ctttgctcagggaagcgggcactga

SEQ ID NO: 3753961 - DNA, 25 bp, Homo sapien
cagagtccagacgagcctttgctca

SEQ ID NO: 3753962 - DNA, 25 bp, Homo sapien
ttgggaaaggactgctgaaacctct

SEQ ID NO: 3753963 - DNA, 25 bp, Homo sapien
gaagccgcgttactcctgacattgt

SEQ ID NO: 3753964 - DNA, 25 bp, Homo sapien
tgttccaatttcactagagggtcgt

SEQ ID NO: 3753965 - DNA, 25 bp, Homo sapien
ggatttcctcaagggtgaacgcgga

SEQ ID NO: 3753966 - DNA, 25 bp, Homo sapien
ggctagattcgcaagaccatccgtt

SEQ ID NO: 3753967 - DNA, 25 bp, Homo sapien
cagcctgcctaatgcccgagtagag

SEQ ID NO: 3753968 - DNA, 25 bp, Homo sapien
gcgcggactccgatcgccgcagttg

SEQ ID NO: 3753969 - DNA, 25 bp, Homo sapien
ggagcgcccgggatgcaggaggaga

SEQ ID NO: 3753970 - DNA, 25 bp, Homo sapien
ccgcagctgaagcacatcccgcagc

SEQ ID NO: 3753971 - DNA, 25 bp, Homo sapien
agttgccctctggcgccatgtcgca

SEQ ID NO: 3753972 - DNA, 25 bp, Homo sapien
ggccgcggcgctccgacctccgctt

SEQ ID NO: 3753973 - DNA, 25 bp, Homo sapien
tgggccgcggcgctccgacctccgc

SEQ ID NO: 3753974 - DNA, 25 bp, Homo sapien
gcggcgctccgacctccgctttccc

SEQ ID NO: 3753975 - DNA, 25 bp, Homo sapien
ggcgctccgacctccgctttcccac

SEQ ID NO: 3753976 - DNA, 25 bp, Homo sapien
gcgagcatatctggcctatcaggaa

SEQ ID NO: 3753977 - DNA, 25 bp, Homo sapien
tctggtagtaccaaagccccatcct

SEQ ID NO: 3753978 - DNA, 25 bp, Homo sapien
gactcactggctaaggctgcactgg

SEQ ID NO: 3753979 - DNA, 25 bp, Homo sapien
tgagaaccgtcatcaacactgtgat

SEQ ID NO: 3753980 - DNA, 25 bp, Homo sapien
tttttcaactggcactaatgacacg

SEQ ID NO: 3753981 - DNA, 25 bp, Homo sapien
tcaactggcactaatgacacggatg

SEQ ID NO: 3753982 - DNA, 25 bp, Homo sapien
tttcaactggcactaatgacacgga

SEQ ID NO: 3753983 - DNA, 25 bp, Homo sapien
aatggatttaggtttagaatggaag

SEQ ID NO: 3753984 - DNA, 25 bp, Homo sapien
ttcattgtccactgttgctgccgga

SEQ ID NO: 3753985 - DNA, 25 bp, Homo sapien
agcttcattgtccactgttgctgcc

SEQ ID NO: 3753986 - DNA, 25 bp, Homo sapien
tcattgtccactgttgctgccggaa

SEQ ID NO: 3753987 - DNA, 25 bp, Homo sapien
gcttcattgtccactgttgctgccg

SEQ ID NO: 3753988 - DNA, 25 bp, Homo sapien
aacagatattctccaaattagctcc

SEQ ID NO: 3753989 - DNA, 25 bp, Homo sapien
agctccttttgggattcctacatct

SEQ ID NO: 3753990 - DNA, 25 bp, Homo sapien
ctctccactgtttccaaacagatat

SEQ ID NO: 3753991 - DNA, 25 bp, Homo sapien
tgggattcctacatctgctttatct

SEQ ID NO: 3753992 - DNA, 25 bp, Homo sapien
tctctatatcctggttagcagttgg

SEQ ID NO: 3753993 - DNA, 25 bp, Homo sapien
actaatgtaccacttgtgatgcccc

SEQ ID NO: 3753994 - DNA, 25 bp, Homo sapien
tgtcaggctggtcgttgctttggct

SEQ ID NO: 3753995 - DNA, 25 bp, Homo sapien
gccaccgcacaggtagattgtaaaa

SEQ ID NO: 3753996 - DNA, 25 bp, Homo sapien
accgcgcccggccctattcaggtct

SEQ ID NO: 3753997 - DNA, 25 bp, Homo sapien
caagccattctcctattctcctgcc

SEQ ID NO: 3753998 - DNA, 25 bp, Homo sapien
ttcaagccattctcctattctcctg

SEQ ID NO: 3753999 - DNA, 25 bp, Homo sapien
ccaccgcgcccggccctattcaggt

SEQ ID NO: 3754000 - DNA, 25 bp, Homo sapien
ctttagtcacctgagccagcctcat

SEQ ID NO: 3754001 - DNA, 25 bp, Homo sapien
cctcttcctgtagctgtgtcttggc

SEQ ID NO: 3754002 - DNA, 25 bp, Homo sapien
tgtgtcttggcaaacagcacggccc

SEQ ID NO: 3754003 - DNA, 25 bp, Homo sapien
agcacggccccctctttagtcacct

SEQ ID NO: 3754004 - DNA, 25 bp, Homo sapien
gttactagagatgcaacttttcccc

SEQ ID NO: 3754005 - DNA, 25 bp, Homo sapien
catgtgtccaaggtgctcgggcgca

SEQ ID NO: 3754006 - DNA, 25 bp, Homo sapien
ctaaagacctgggacggctagaaag

SEQ ID NO: 3754007 - DNA, 25 bp, Homo sapien
ccaggccacaggtgagtttaaacat

SEQ ID NO: 3754008 - DNA, 25 bp, Homo sapien
tggttcagggaagggaacagagggc

SEQ ID NO: 3754009 - DNA, 25 bp, Homo sapien
ctggttcagggaagggaacagaggg

SEQ ID NO: 3754010 - DNA, 25 bp, Homo sapien
ccaatttggatcattatatcgtttc

SEQ ID NO: 3754011 - DNA, 25 bp, Homo sapien
cattatatcgtttctatgatgagtc

SEQ ID NO: 3754012 - DNA, 25 bp, Homo sapien
ggtgcatagcactgacaaggaaatt

SEQ ID NO: 3754013 - DNA, 25 bp, Homo sapien
gtatccaatttggatcattatatcg

SEQ ID NO: 3754014 - DNA, 25 bp, Homo sapien
acacagcagccgtgcagcctgtgcc

SEQ ID NO: 3754015 - DNA, 25 bp, Homo sapien
ccacacagcagccgtgcagcctgtg

SEQ ID NO: 3754016 - DNA, 25 bp, Homo sapien
caccacacagcagccgtgcagcctg

SEQ ID NO: 3754017 - DNA, 25 bp, Homo sapien
acagcagccgtgcagcctgtgccca

SEQ ID NO: 3754018 - DNA, 25 bp, Homo sapien
ctgggcgtctctctgcaatgcctgc

SEQ ID NO: 3754019 - DNA, 25 bp, Homo sapien
ctctctgcaatgcctgcctctcccg

SEQ ID NO: 3754020 - DNA, 25 bp, Homo sapien
tgggcgtctctctgcaatgcctgcc

SEQ ID NO: 3754021 - DNA, 25 bp, Homo sapien
tctgcaatgcctgcctctcccgcac

SEQ ID NO: 3754022 - DNA, 25 bp, Homo sapien
ctgcaggtctgagcgcctgatgagt

SEQ ID NO: 3754023 - DNA, 25 bp, Homo sapien
ttaggaagctgcaggtctgagcgcc

SEQ ID NO: 3754024 - DNA, 25 bp, Homo sapien
ccacatgcagcaggttaggaagctg

SEQ ID NO: 3754025 - DNA, 25 bp, Homo sapien
tctgagcgcctgatgagtgtgggtt

SEQ ID NO: 3754026 - DNA, 25 bp, Homo sapien
ccaagtgtggtaggtttcatcacca

SEQ ID NO: 3754027 - DNA, 25 bp, Homo sapien
tcagaaaacgccgtgctgctgggct

SEQ ID NO: 3754028 - DNA, 25 bp, Homo sapien
gcaggaatcatgaccagtggcccaa

SEQ ID NO: 3754029 - DNA, 25 bp, Homo sapien
tctcacaggatgcaacccagatgct

SEQ ID NO: 3754030 - DNA, 25 bp, Homo sapien
actcagcgtcgcctccttggggatc

SEQ ID NO: 3754031 - DNA, 25 bp, Homo sapien
gactccggaccctggagcatgttcc

SEQ ID NO: 3754032 - DNA, 25 bp, Homo sapien
tcctgcgttccggactcagcgtcgc

SEQ ID NO: 3754033 - DNA, 25 bp, Homo sapien
aagaagaacggtctccctcctgcgt

SEQ ID NO: 3754034 - DNA, 25 bp, Homo sapien
agcgggaggaaggtccgcacccact

SEQ ID NO: 3754035 - DNA, 25 bp, Homo sapien
cacttgttggtgttcagcccacgta

SEQ ID NO: 3754036 - DNA, 25 bp, Homo sapien
ggccacacggatgcgcgctttgtga

SEQ ID NO: 3754037 - DNA, 25 bp, Homo sapien
cgtataatctccatccacgccacca

SEQ ID NO: 3754038 - DNA, 25 bp, Homo sapien
gcctgttgcgagagaaatgcttttt

SEQ ID NO: 3754039 - DNA, 25 bp, Homo sapien
gtgcggcctcacccttaactcttgg

SEQ ID NO: 3754040 - DNA, 25 bp, Homo sapien
tttttggagtctggcattgagcaga

SEQ ID NO: 3754041 - DNA, 25 bp, Homo sapien
ttaactcttggcgtcccatccccga

SEQ ID NO: 3754042 - DNA, 25 bp, Homo sapien
actctgggcggcgtccgacggaccg

SEQ ID NO: 3754043 - DNA, 25 bp, Homo sapien
gcgagcgactctgggcggcgtccga

SEQ ID NO: 3754044 - DNA, 25 bp, Homo sapien
gcgtccgacggaccggatcggccat

SEQ ID NO: 3754045 - DNA, 25 bp, Homo sapien
gaggctccccgcgagcgactctggg

SEQ ID NO: 3754046 - DNA, 25 bp, Homo sapien
caaaccagatatgcgcttggccagg

SEQ ID NO: 3754047 - DNA, 25 bp, Homo sapien
acagcttgcctaggagagcctcctg

SEQ ID NO: 3754048 - DNA, 25 bp, Homo sapien
gacaaggagtgacattcccggcttc

SEQ ID NO: 3754049 - DNA, 25 bp, Homo sapien
taggttctgcaagcgaatcccaggt

SEQ ID NO: 3754050 - DNA, 25 bp, Homo sapien
gggggtgtcggccttgctggcccag

SEQ ID NO: 3754051 - DNA, 25 bp, Homo sapien
catactcccaacaccagaagatgca

SEQ ID NO: 3754052 - DNA, 25 bp, Homo sapien
tcccatactcccaacaccagaagat

SEQ ID NO: 3754053 - DNA, 25 bp, Homo sapien
ccagccaagtctcccatactcccaa

SEQ ID NO: 3754054 - DNA, 25 bp, Homo sapien
cactgaaagctcgtggcgcggtggg

SEQ ID NO: 3754055 - DNA, 25 bp, Homo sapien
gtgcactgaaagctcgtggcgcggt

SEQ ID NO: 3754056 - DNA, 25 bp, Homo sapien
ctcgtggcgcggtgggggcgcacag

SEQ ID NO: 3754057 - DNA, 25 bp, Homo sapien
tcgtggcgcggtgggggcgcacagc

SEQ ID NO: 3754058 - DNA, 25 bp, Homo sapien
tgtgtctctgtggcgtgctcatcat

SEQ ID NO: 3754059 - DNA, 25 bp, Homo sapien
tctctgtggcgtgctcatcatccat

SEQ ID NO: 3754060 - DNA, 25 bp, Homo sapien
tgtctctgtggcgtgctcatcatcc

SEQ ID NO: 3754061 - DNA, 25 bp, Homo sapien
ctgtgtctctgtggcgtgctcatca

SEQ ID NO: 3754062 - DNA, 25 bp, Homo sapien
gggctgctgtcacactacatcttct

SEQ ID NO: 3754063 - DNA, 25 bp, Homo sapien
tggctggggtgtccacgccaagctc

SEQ ID NO: 3754064 - DNA, 25 bp, Homo sapien
gggtgtccacgccaagctcccagca

SEQ ID NO: 3754065 - DNA, 25 bp, Homo sapien
agcaggtgtcacccgggctgctgtc

SEQ ID NO: 3754066 - DNA, 25 bp, Homo sapien
ctgtgagcttggctcgaagatcctc

SEQ ID NO: 3754067 - DNA, 25 bp, Homo sapien
gggcctctgccttgtcccccttggc

SEQ ID NO: 3754068 - DNA, 25 bp, Homo sapien
tgagcttggctcgaagatcctcgtt

SEQ ID NO: 3754069 - DNA, 25 bp, Homo sapien
gagcttggctcgaagatcctcgttg

SEQ ID NO: 3754070 - DNA, 25 bp, Homo sapien
ctggggaccaggagatggaaaggag

SEQ ID NO: 3754071 - DNA, 25 bp, Homo sapien
accaggagatggaaaggagagggca

SEQ ID NO: 3754072 - DNA, 25 bp, Homo sapien
tggaaaggagagggcaaaggtcatg

SEQ ID NO: 3754073 - DNA, 25 bp, Homo sapien
caggagatggaaaggagagggcaaa

SEQ ID NO: 3754074 - DNA, 25 bp, Homo sapien
tgccttcgttcccagccccttcctg

SEQ ID NO: 3754075 - DNA, 25 bp, Homo sapien
acctgggcacacttcttaatggctc

SEQ ID NO: 3754076 - DNA, 25 bp, Homo sapien
caggaacctgggcacacttcttaat

SEQ ID NO: 3754077 - DNA, 25 bp, Homo sapien
ctccagatgctctctccctcgcctt

SEQ ID NO: 3754078 - DNA, 25 bp, Homo sapien
tctggtatccgagaagcgagactcc

SEQ ID NO: 3754079 - DNA, 25 bp, Homo sapien
gagcaggtgctagacgcacatttac

SEQ ID NO: 3754080 - DNA, 25 bp, Homo sapien
atttactgatcgtgtccccatgcca

SEQ ID NO: 3754081 - DNA, 25 bp, Homo sapien
tttgggatttatgggcgcctggcac

SEQ ID NO: 3754082 - DNA, 25 bp, Homo sapien
agacgccggccctggaaccttgccg

SEQ ID NO: 3754083 - DNA, 25 bp, Homo sapien
tgtgccaagagagcacatcctctcc

SEQ ID NO: 3754084 - DNA, 25 bp, Homo sapien
ttcctccggtgccttctgcacgttg

SEQ ID NO: 3754085 - DNA, 25 bp, Homo sapien
tacaactaaacatgccccgcagggt

SEQ ID NO: 3754086 - DNA, 25 bp, Homo sapien
gaataacatggacgagcttgtgcca

SEQ ID NO: 3754087 - DNA, 25 bp, Homo sapien
caatttggcttgcaagaacgtctcc

SEQ ID NO: 3754088 - DNA, 25 bp, Homo sapien
gaggcgctgtgatcacttggcaaaa

SEQ ID NO: 3754089 - DNA, 25 bp, Homo sapien
caagacccaggtacagggctgcagt

SEQ ID NO: 3754090 - DNA, 25 bp, Homo sapien
ctcctggaaactcctttaatgttgg

SEQ ID NO: 3754091 - DNA, 25 bp, Homo sapien
aatccactgtcccccgggactggca

SEQ ID NO: 3754092 - DNA, 25 bp, Homo sapien
atgttggaaatccactgtcccccgg

SEQ ID NO: 3754093 - DNA, 25 bp, Homo sapien
tgtcgttctcaggacagaagacgcc

SEQ ID NO: 3754094 - DNA, 25 bp, Homo sapien
ggacagaagacgcccgggcgcaggg

SEQ ID NO: 3754095 - DNA, 25 bp, Homo sapien
cgggcgcagggggacccacacctct

SEQ ID NO: 3754096 - DNA, 25 bp, Homo sapien
tctcaggacagaagacgcccgggcg

SEQ ID NO: 3754097 - DNA, 25 bp, Homo sapien
acggctggattccagaatggcttgg

SEQ ID NO: 3754098 - DNA, 25 bp, Homo sapien
cggtggggcagggtcggtctgttct

SEQ ID NO: 3754099 - DNA, 25 bp, Homo sapien
agatgccgcctaggccaccagtggg

SEQ ID NO: 3754100 - DNA, 25 bp, Homo sapien
agaactggattctcccccacgggtg

SEQ ID NO: 3754101 - DNA, 25 bp, Homo sapien
ctccgaaaggtgtgatagccgtgaa

SEQ ID NO: 3754102 - DNA, 25 bp, Homo sapien
tacagttccaagagttggggctcag

SEQ ID NO: 3754103 - DNA, 25 bp, Homo sapien
ctgggatcttgtaggactttccggg

SEQ ID NO: 3754104 - DNA, 25 bp, Homo sapien
ggatcttgtaggactttccgggcac

SEQ ID NO: 3754105 - DNA, 25 bp, Homo sapien
tgggatcttgtaggactttccgggc

SEQ ID NO: 3754106 - DNA, 25 bp, Homo sapien
gggatcttgtaggactttccgggca

SEQ ID NO: 3754107 - DNA, 25 bp, Homo sapien
cagagctgtgtagtatgaacagtgc

SEQ ID NO: 3754108 - DNA, 25 bp, Homo sapien
gtgctcagcgctaatttgaacagat

SEQ ID NO: 3754109 - DNA, 25 bp, Homo sapien
gattgcagagctgtgtagtatgaac

SEQ ID NO: 3754110 - DNA, 25 bp, Homo sapien
tagtatgaacagtgctcagcgctaa

SEQ ID NO: 3754111 - DNA, 25 bp, Homo sapien
tccatttcaaaccagccgtaatttc

SEQ ID NO: 3754112 - DNA, 25 bp, Homo sapien
gagaggactccaggatgatgcagaa

SEQ ID NO: 3754113 - DNA, 25 bp, Homo sapien
cgagtcacaggtcaacatctccatt

SEQ ID NO: 3754114 - DNA, 25 bp, Homo sapien
tgctggcaccgagtcacaggtcaac

SEQ ID NO: 3754115 - DNA, 25 bp, Homo sapien
gaccgcggtcttatgctgctcatgc

SEQ ID NO: 3754116 - DNA, 25 bp, Homo sapien
tcggacagcagcacggtcttgacct

SEQ ID NO: 3754117 - DNA, 25 bp, Homo sapien
ttgagctccgtgagcaagaccgcgg

SEQ ID NO: 3754118 - DNA, 25 bp, Homo sapien
cttttggcgcccttgagctcggaga

SEQ ID NO: 3754119 - DNA, 25 bp, Homo sapien
ccttgatcttgtccgcttggatcac

SEQ ID NO: 3754120 - DNA, 25 bp, Homo sapien
gatctctgcggccttgatcttgtcc

SEQ ID NO: 3754121 - DNA, 25 bp, Homo sapien
gctgcggatctctgcggccttgatc

SEQ ID NO: 3754122 - DNA, 25 bp, Homo sapien
gcggccttgatcttgtccgcttgga

SEQ ID NO: 3754123 - DNA, 25 bp, Homo sapien
tgcgggtgatctcctcctggtgcag

SEQ ID NO: 3754124 - DNA, 25 bp, Homo sapien
tcttgatgcgggtgatctcctcctg

SEQ ID NO: 3754125 - DNA, 25 bp, Homo sapien
gatgcgggtgatctcctcctggtgc

SEQ ID NO: 3754126 - DNA, 25 bp, Homo sapien
tgatgcgggtgatctcctcctggtg

SEQ ID NO: 3754127 - DNA, 25 bp, Homo sapien
cagcctgcggatctcccgctcgcac

SEQ ID NO: 3754128 - DNA, 25 bp, Homo sapien
ctgcggatctcccgctcgcactcct

SEQ ID NO: 3754129 - DNA, 25 bp, Homo sapien
agcctgcggatctcccgctcgcact

SEQ ID NO: 3754130 - DNA, 25 bp, Homo sapien
gcctgcggatctcccgctcgcactc

SEQ ID NO: 3754131 - DNA, 25 bp, Homo sapien
ccacaaaaccggcagctcatctggt

SEQ ID NO: 3754132 - DNA, 25 bp, Homo sapien
tcattgatccacaaaaccggcagct

SEQ ID NO: 3754133 - DNA, 25 bp, Homo sapien
attgatccacaaaaccggcagctca

SEQ ID NO: 3754134 - DNA, 25 bp, Homo sapien
aaaaccggcagctcatctggtccag

SEQ ID NO: 3754135 - DNA, 25 bp, Homo sapien
cttctgcgatgaacaagtctagaag

SEQ ID NO: 3754136 - DNA, 25 bp, Homo sapien
ccttctgcgatgaacaagtctagaa

SEQ ID NO: 3754137 - DNA, 25 bp, Homo sapien
tgagacggtactctccaggacaggg

SEQ ID NO: 3754138 - DNA, 25 bp, Homo sapien
agccccttgagacggtactctccag

SEQ ID NO: 3754139 - DNA, 25 bp, Homo sapien
gagaagccccttgagacggtactct

SEQ ID NO: 3754140 - DNA, 25 bp, Homo sapien
ggagagaagccccttgagacggtac

SEQ ID NO: 3754141 - DNA, 25 bp, Homo sapien
catactcttcatcccctgaactccc

SEQ ID NO: 3754142 - DNA, 25 bp, Homo sapien
cccatactcttcatcccctgaactc

SEQ ID NO: 3754143 - DNA, 25 bp, Homo sapien
ttccccatactcttcatcccctgaa

SEQ ID NO: 3754144 - DNA, 25 bp, Homo sapien
ctcttcatcccctgaactcccgtct

SEQ ID NO: 3754145 - DNA, 25 bp, Homo sapien
tacaaggagaacagaacacaatcac

SEQ ID NO: 3754146 - DNA, 25 bp, Homo sapien
aggagaacagaacacaatcacacag

SEQ ID NO: 3754147 - DNA, 25 bp, Homo sapien
gagaacagaacacaatcacacaggc

SEQ ID NO: 3754148 - DNA, 25 bp, Homo sapien
gaacagaacacaatcacacaggcgg

SEQ ID NO: 3754149 - DNA, 25 bp, Homo sapien
tgctcatctagagcctctttttgga

SEQ ID NO: 3754150 - DNA, 25 bp, Homo sapien
gctgctcatctagagcctctttttg

SEQ ID NO: 3754151 - DNA, 25 bp, Homo sapien
gagcatgcccggcttgaacccctaa

SEQ ID NO: 3754152 - DNA, 25 bp, Homo sapien
tctctgagcatgcccggcttgaacc

SEQ ID NO: 3754153 - DNA, 25 bp, Homo sapien
ctgcatgaggaagttcccgtctggg

SEQ ID NO: 3754154 - DNA, 25 bp, Homo sapien
cttcccgagtggtctgaagcgtctc

SEQ ID NO: 3754155 - DNA, 25 bp, Homo sapien
ggcttcccgagtggtctgaagcgtc

SEQ ID NO: 3754156 - DNA, 25 bp, Homo sapien
agggcttcccgagtggtctgaagcg

SEQ ID NO: 3754157 - DNA, 25 bp, Homo sapien
cccgagtggtctgaagcgtctcctg

SEQ ID NO: 3754158 - DNA, 25 bp, Homo sapien
cccagggccggactccgggccagca

SEQ ID NO: 3754159 - DNA, 25 bp, Homo sapien
tccgggccagcaagtgccatgaact

SEQ ID NO: 3754160 - DNA, 25 bp, Homo sapien
gcaagtgccatgaactgcagcagaa

SEQ ID NO: 3754161 - DNA, 25 bp, Homo sapien
gcagcagaagggtgatgaggccggg

SEQ ID NO: 3754162 - DNA, 25 bp, Homo sapien
aatgcattgcggtcctccagtttgc

SEQ ID NO: 3754163 - DNA, 25 bp, Homo sapien
ctcttccgacagcaatgcattgcgg

SEQ ID NO: 3754164 - DNA, 25 bp, Homo sapien
cgcgattttaagctggaagcgccgg

SEQ ID NO: 3754165 - DNA, 25 bp, Homo sapien
ggataatcgcacttaactccgcgat

SEQ ID NO: 3754166 - DNA, 25 bp, Homo sapien
cgggatatcgagttacctggaaatc

SEQ ID NO: 3754167 - DNA, 25 bp, Homo sapien
tcgagttacctggaaatctcagtgg

SEQ ID NO: 3754168 - DNA, 25 bp, Homo sapien
cctccgggatatcgagttacctgga

SEQ ID NO: 3754169 - DNA, 25 bp, Homo sapien
gatatcgagttacctggaaatctca

SEQ ID NO: 3754170 - DNA, 25 bp, Homo sapien
cttgttttccattcggcgtaaagca

SEQ ID NO: 3754171 - DNA, 25 bp, Homo sapien
cagcagaggcttgtactgactctca

SEQ ID NO: 3754172 - DNA, 25 bp, Homo sapien
ccattcggcgtaaagcatgagacaa

SEQ ID NO: 3754173 - DNA, 25 bp, Homo sapien
aaatcctcgttcttccgactgaggc

SEQ ID NO: 3754174 - DNA, 25 bp, Homo sapien
ttctccctcaacccgggctgccact

SEQ ID NO: 3754175 - DNA, 25 bp, Homo sapien
cacatcacaagttggggagtgaagg

SEQ ID NO: 3754176 - DNA, 25 bp, Homo sapien
agcccacatcacaagttggggagtg

SEQ ID NO: 3754177 - DNA, 25 bp, Homo sapien
tctgctcaggcctcagaacagccca

SEQ ID NO: 3754178 - DNA, 25 bp, Homo sapien
caaggtcattcaaggaactgggtct

SEQ ID NO: 3754179 - DNA, 25 bp, Homo sapien
tccgtatgattccagctctctgtct

SEQ ID NO: 3754180 - DNA, 25 bp, Homo sapien
tcaagaaatcgacttctctctcatc

SEQ ID NO: 3754181 - DNA, 25 bp, Homo sapien
gaagcttcaagaaatcgacttctct

SEQ ID NO: 3754182 - DNA, 25 bp, Homo sapien
catctatgaggttttgctgctccac

SEQ ID NO: 3754183 - DNA, 25 bp, Homo sapien
agttcatctatgaggttttgctgct

SEQ ID NO: 3754184 - DNA, 25 bp, Homo sapien
cttagacagttcatctatgaggttt

SEQ ID NO: 3754185 - DNA, 25 bp, Homo sapien
ttcatctatgaggttttgctgctcc

SEQ ID NO: 3754186 - DNA, 25 bp, Homo sapien
tcttcacgtagccggcggtctcaag

SEQ ID NO: 3754187 - DNA, 25 bp, Homo sapien
tcacgtagccggcggtctcaagggt

SEQ ID NO: 3754188 - DNA, 25 bp, Homo sapien
ctcttcacgtagccggcggtctcaa

SEQ ID NO: 3754189 - DNA, 25 bp, Homo sapien
ttcacgtagccggcggtctcaaggg

SEQ ID NO: 3754190 - DNA, 25 bp, Homo sapien
ggagcggaggcgtggggaagcgggc

SEQ ID NO: 3754191 - DNA, 25 bp, Homo sapien
acactgaagggcgtcagccacccgt

SEQ ID NO: 3754192 - DNA, 25 bp, Homo sapien
ggtggcactgcaacaacaaaatcca

SEQ ID NO: 3754193 - DNA, 25 bp, Homo sapien
tgccgcggccgcttctgtctggtct

SEQ ID NO: 3754194 - DNA, 25 bp, Homo sapien
aaaatccacccgaaaggctgccgcg

SEQ ID NO: 3754195 - DNA, 25 bp, Homo sapien
ggccgtgatggtgaacctcttgggc

SEQ ID NO: 3754196 - DNA, 25 bp, Homo sapien
ccgtgatggtgaacctcttgggctg

SEQ ID NO: 3754197 - DNA, 25 bp, Homo sapien
ctctccggggaacccatgctgtggt

SEQ ID NO: 3754198 - DNA, 25 bp, Homo sapien
ctgctctccggggaacccatgctgt

SEQ ID NO: 3754199 - DNA, 25 bp, Homo sapien
tggcgcccttaaaatactaaggaga

SEQ ID NO: 3754200 - DNA, 25 bp, Homo sapien
tggcgtccacatctgtgtggggact

SEQ ID NO: 3754201 - DNA, 25 bp, Homo sapien
cctgcaggggtggcgtccacatctg

SEQ ID NO: 3754202 - DNA, 25 bp, Homo sapien
tgtgtggggactggcgcccttaaaa

SEQ ID NO: 3754203 - DNA, 25 bp, Homo sapien
agctccaccggtttcagtccacggt

SEQ ID NO: 3754204 - DNA, 25 bp, Homo sapien
aagaggttgtgtaagtggtagagca

SEQ ID NO: 3754205 - DNA, 25 bp, Homo sapien
ggttgtgtaagtggtagagcagctc

SEQ ID NO: 3754206 - DNA, 25 bp, Homo sapien
cagctccaccggtttcagtccacgg

SEQ ID NO: 3754207 - DNA, 25 bp, Homo sapien
tgcttccggaatcttaacagcttgt

SEQ ID NO: 3754208 - DNA, 25 bp, Homo sapien
gcttccggaatcttaacagcttgtc

SEQ ID NO: 3754209 - DNA, 25 bp, Homo sapien
tttgcttccggaatcttaacagctt

SEQ ID NO: 3754210 - DNA, 25 bp, Homo sapien
tctttgcttccggaatcttaacagc

SEQ ID NO: 3754211 - DNA, 25 bp, Homo sapien
caaagaaggtctccacaaccaccgg

SEQ ID NO: 3754212 - DNA, 25 bp, Homo sapien
gaggagccgtcggattccagggaag

SEQ ID NO: 3754213 - DNA, 25 bp, Homo sapien
tccgtcctgtctgtttggtaagaga

SEQ ID NO: 3754214 - DNA, 25 bp, Homo sapien
agggaagcctcttcgtcgtatccaa

SEQ ID NO: 3754215 - DNA, 25 bp, Homo sapien
ccaagcccaggacccggcaggagac

SEQ ID NO: 3754216 - DNA, 25 bp, Homo sapien
caggacccggcaggagaccctcgtt

SEQ ID NO: 3754217 - DNA, 25 bp, Homo sapien
cccaggacccggcaggagaccctcg

SEQ ID NO: 3754218 - DNA, 25 bp, Homo sapien
ctccaagcccaggacccggcaggag

SEQ ID NO: 3754219 - DNA, 25 bp, Homo sapien
ccaagcccaggacccggcaggagac

SEQ ID NO: 3754220 - DNA, 25 bp, Homo sapien
caggacccggcaggagaccctcgtt

SEQ ID NO: 3754221 - DNA, 25 bp, Homo sapien
cccaggacccggcaggagaccctcg

SEQ ID NO: 3754222 - DNA, 25 bp, Homo sapien
ctccaagcccaggacccggcaggag

SEQ ID NO: 3754223 - DNA, 25 bp, Homo sapien
agctgccggaacctcagctccgtct

SEQ ID NO: 3754224 - DNA, 25 bp, Homo sapien
ctgccggaacctcagctccgtctcc

SEQ ID NO: 3754225 - DNA, 25 bp, Homo sapien
ggtcagctgccggaacctcagctcc

SEQ ID NO: 3754226 - DNA, 25 bp, Homo sapien
tcagctgccggaacctcagctccgt

SEQ ID NO: 3754227 - DNA, 25 bp, Homo sapien
gcaacaaagcgtaggcacgctgcag

SEQ ID NO: 3754228 - DNA, 25 bp, Homo sapien
tcctgcaacaaagcgtaggcacgct

SEQ ID NO: 3754229 - DNA, 25 bp, Homo sapien
ctgcaacaaagcgtaggcacgctgc

SEQ ID NO: 3754230 - DNA, 25 bp, Homo sapien
ctcctgcaacaaagcgtaggcacgc

SEQ ID NO: 3754231 - DNA, 25 bp, Homo sapien
cttaacttctcgctctgcgtccagc

SEQ ID NO: 3754232 - DNA, 25 bp, Homo sapien
tcgctctgcgtccagcgtccctcca

SEQ ID NO: 3754233 - DNA, 25 bp, Homo sapien
taacttctcgctctgcgtccagcgt

SEQ ID NO: 3754234 - DNA, 25 bp, Homo sapien
gctctgcgtccagcgtccctccaac

SEQ ID NO: 3754235 - DNA, 25 bp, Homo sapien
tcccagcaccgggatccccaatccc

SEQ ID NO: 3754236 - DNA, 25 bp, Homo sapien
atccccaatccctggttttgatcgg

SEQ ID NO: 3754237 - DNA, 25 bp, Homo sapien
aatccctggttttgatcggcttcca

SEQ ID NO: 3754238 - DNA, 25 bp, Homo sapien
cccaatccctggttttgatcggctt

SEQ ID NO: 3754239 - DNA, 25 bp, Homo sapien
cccaggacccttactcacacctgtg

SEQ ID NO: 3754240 - DNA, 25 bp, Homo sapien
caagtttcaacaccgagctcgatgc

SEQ ID NO: 3754241 - DNA, 25 bp, Homo sapien
acaccgagctcgatgctgccacggg

SEQ ID NO: 3754242 - DNA, 25 bp, Homo sapien
ttcaacaccgagctcgatgctgcca

SEQ ID NO: 3754243 - DNA, 25 bp, Homo sapien
tccacaagtttcaacaccgagctcg

SEQ ID NO: 3754244 - DNA, 25 bp, Homo sapien
gacgtccccaatgaggtgccaggaa

SEQ ID NO: 3754245 - DNA, 25 bp, Homo sapien
gaggcttcctcgatttccacagtga

SEQ ID NO: 3754246 - DNA, 25 bp, Homo sapien
gagacaaatctctccgagcctgagg

SEQ ID NO: 3754247 - DNA, 25 bp, Homo sapien
caatcgtggatgtgagcccttgggt

SEQ ID NO: 3754248 - DNA, 25 bp, Homo sapien
tcctgagttcgagcaacccacttgc

SEQ ID NO: 3754249 - DNA, 25 bp, Homo sapien
caaactcctgagttcgagcaaccca

SEQ ID NO: 3754250 - DNA, 25 bp, Homo sapien
aactcctgagttcgagcaacccact

SEQ ID NO: 3754251 - DNA, 25 bp, Homo sapien
ctcctgagttcgagcaacccacttg

SEQ ID NO: 3754252 - DNA, 25 bp, Homo sapien
cttcggcttgtagctgctcacgggt

SEQ ID NO: 3754253 - DNA, 25 bp, Homo sapien
tccaggtcctctatccgcgcctgtg

SEQ ID NO: 3754254 - DNA, 25 bp, Homo sapien
tgccctctgcacttcggcttgtagc

SEQ ID NO: 3754255 - DNA, 25 bp, Homo sapien
tctgcacttcggcttgtagctgctc

SEQ ID NO: 3754256 - DNA, 25 bp, Homo sapien
gctcttgatttctccggtacagtgc

SEQ ID NO: 3754257 - DNA, 25 bp, Homo sapien
ctcttgatttctccggtacagtgcc

SEQ ID NO: 3754258 - DNA, 25 bp, Homo sapien
tcttgatttctccggtacagtgcct

SEQ ID NO: 3754259 - DNA, 25 bp, Homo sapien
gtcctgcacctcgtgtctgagccga

SEQ ID NO: 3754260 - DNA, 25 bp, Homo sapien
tgtctgagccgagcctcttccgtct

SEQ ID NO: 3754261 - DNA, 25 bp, Homo sapien
gaactccagcagctcgttttggtct

SEQ ID NO: 3754262 - DNA, 25 bp, Homo sapien
acctcgtgtctgagccgagcctctt

SEQ ID NO: 3754263 - DNA, 25 bp, Homo sapien
gtggaagctgatggcgggtgacttc

SEQ ID NO: 3754264 - DNA, 25 bp, Homo sapien
atggcgggtgacttcctctccctct

SEQ ID NO: 3754265 - DNA, 25 bp, Homo sapien
ctgatggcgggtgacttcctctccc

SEQ ID NO: 3754266 - DNA, 25 bp, Homo sapien
ggtggaagctgatggcgggtgactt

SEQ ID NO: 3754267 - DNA, 25 bp, Homo sapien
ggcgttatcgcccaggatgtccagc

SEQ ID NO: 3754268 - DNA, 25 bp, Homo sapien
gcgttatcgcccaggatgtccagct

SEQ ID NO: 3754269 - DNA, 25 bp, Homo sapien
agaacacaggtgcggtcagaagcag

SEQ ID NO: 3754270 - DNA, 25 bp, Homo sapien
aacacaggtgcggtcagaagcagtg

SEQ ID NO: 3754271 - DNA, 25 bp, Homo sapien
gaacacaggtgcggtcagaagcagt

SEQ ID NO: 3754272 - DNA, 25 bp, Homo sapien
acacaggtgcggtcagaagcagtgc

SEQ ID NO: 3754273 - DNA, 25 bp, Homo sapien
cttttcggccaaggtcaggactgtc

SEQ ID NO: 3754274 - DNA, 25 bp, Homo sapien
ttttcggccaaggtcaggactgtcc

SEQ ID NO: 3754275 - DNA, 25 bp, Homo sapien
aggactgtcctggcttgtatgacaa

SEQ ID NO: 3754276 - DNA, 25 bp, Homo sapien
gactgtcctggcttgtatgacaacc

SEQ ID NO: 3754277 - DNA, 25 bp, Homo sapien
gggactaggagcaggtagtgggctg

SEQ ID NO: 3754278 - DNA, 25 bp, Homo sapien
actaggagcaggtagtgggctgggt

SEQ ID NO: 3754279 - DNA, 25 bp, Homo sapien
aacagagaacgctgcctgcagactc

SEQ ID NO: 3754280 - DNA, 25 bp, Homo sapien
tgcctgcagactcaccataccttcc

SEQ ID NO: 3754281 - DNA, 25 bp, Homo sapien
agggacactagcttggggcaccgta

SEQ ID NO: 3754282 - DNA, 25 bp, Homo sapien
gcaccgtaggagagacacatctgca

SEQ ID NO: 3754283 - DNA, 25 bp, Homo sapien
tgtccaggaagtctacccctgacac

SEQ ID NO: 3754284 - DNA, 25 bp, Homo sapien
cttggggcaccgtaggagagacaca

SEQ ID NO: 3754285 - DNA, 25 bp, Homo sapien
tcttccgctgcagcgccgcctctgt

SEQ ID NO: 3754286 - DNA, 25 bp, Homo sapien
gccgcctctgtctcctcaatctgct

SEQ ID NO: 3754287 - DNA, 25 bp, Homo sapien
agatccaccatcttccgctgcagcg

SEQ ID NO: 3754288 - DNA, 25 bp, Homo sapien
ttctcgctctccagatccaccatct

SEQ ID NO: 3754289 - DNA, 25 bp, Homo sapien
ggccatgcctcggtctcggatgtcc

SEQ ID NO: 3754290 - DNA, 25 bp, Homo sapien
acaggagggccatgcctcggtctcg

SEQ ID NO: 3754291 - DNA, 25 bp, Homo sapien
agggccatgcctcggtctcggatgt

SEQ ID NO: 3754292 - DNA, 25 bp, Homo sapien
tgaaacacaggagggccatgcctcg

SEQ ID NO: 3754293 - DNA, 25 bp, Homo sapien
gcctgtttccggtagtccagctcct

SEQ ID NO: 3754294 - DNA, 25 bp, Homo sapien
agcccttctgcttactgaacagctc

SEQ ID NO: 3754295 - DNA, 25 bp, Homo sapien
cttgttggcctggtccaaggcctgt

SEQ ID NO: 3754296 - DNA, 25 bp, Homo sapien
ccaaggcctgtttccggtagtccag

SEQ ID NO: 3754297 - DNA, 25 bp, Homo sapien
ccatgccagcaatcagcatgagcag

SEQ ID NO: 3754298 - DNA, 25 bp, Homo sapien
ccagcagagaggaacctgtccatgc

SEQ ID NO: 3754299 - DNA, 25 bp, Homo sapien
cagcagagaggaacctgtccatgcc

SEQ ID NO: 3754300 - DNA, 25 bp, Homo sapien
agcagagaggaacctgtccatgcca

SEQ ID NO: 3754301 - DNA, 25 bp, Homo sapien
aaactcggagcatcccaaacaaggg

SEQ ID NO: 3754302 - DNA, 25 bp, Homo sapien
agaaaaaaacctcggtgctcacagg

SEQ ID NO: 3754303 - DNA, 25 bp, Homo sapien
agagaggcccacacatcaaacagga

SEQ ID NO: 3754304 - DNA, 25 bp, Homo sapien
ccatgaacgacataggagagaaccg

SEQ ID NO: 3754305 - DNA, 25 bp, Homo sapien
tcatcaggacctccgtggtgacacg

SEQ ID NO: 3754306 - DNA, 25 bp, Homo sapien
agaccacggtctcccacacccatgt

SEQ ID NO: 3754307 - DNA, 25 bp, Homo sapien
ggatgagcctccctgccttcggcag

SEQ ID NO: 3754308 - DNA, 25 bp, Homo sapien
agagaggcaaagtcggcactagccc

SEQ ID NO: 3754309 - DNA, 25 bp, Homo sapien
caaattctcacactacagaggctct

SEQ ID NO: 3754310 - DNA, 25 bp, Homo sapien
caagtgctggcttggaattaacctc

SEQ ID NO: 3754311 - DNA, 25 bp, Homo sapien
tgcttttgggcctcagttacacttt

SEQ ID NO: 3754312 - DNA, 25 bp, Homo sapien
gtgcctttaagatgagctccagctt

SEQ ID NO: 3754313 - DNA, 25 bp, Homo sapien
gaccctagaagcagagacgctgacc

SEQ ID NO: 3754314 - DNA, 25 bp, Homo sapien
tccccagtctgtgagaagaccctag

SEQ ID NO: 3754315 - DNA, 25 bp, Homo sapien
cccagtctgtgagaagaccctagaa

SEQ ID NO: 3754316 - DNA, 25 bp, Homo sapien
aagcagagacgctgaccaggccagc

SEQ ID NO: 3754317 - DNA, 25 bp, Homo sapien
cctggcgcttccactgctccacggc

SEQ ID NO: 3754318 - DNA, 25 bp, Homo sapien
gcagctcactcatgacctggcgctt

SEQ ID NO: 3754319 - DNA, 25 bp, Homo sapien
tgcagggcatcatacagcatggctt

SEQ ID NO: 3754320 - DNA, 25 bp, Homo sapien
agctcagccaccttagccccggcct

SEQ ID NO: 3754321 - DNA, 25 bp, Homo sapien
ctgctgagccagctgcagcagctcc

SEQ ID NO: 3754322 - DNA, 25 bp, Homo sapien
gagccagctgcagcagctccatgcg

SEQ ID NO: 3754323 - DNA, 25 bp, Homo sapien
gctgagccagctgcagcagctccat

SEQ ID NO: 3754324 - DNA, 25 bp, Homo sapien
tgagccagctgcagcagctccatgc

SEQ ID NO: 3754325 - DNA, 25 bp, Homo sapien
tgtgaatttcaactaagccttcgct

SEQ ID NO: 3754326 - DNA, 25 bp, Homo sapien
ttatgtgaatttcaactaagccttc

SEQ ID NO: 3754327 - DNA, 25 bp, Homo sapien
caactaagccttcgctagtggtgtt

SEQ ID NO: 3754328 - DNA, 25 bp, Homo sapien
tttcaactaagccttcgctagtggt

SEQ ID NO: 3754329 - DNA, 25 bp, Homo sapien
cagagcatggccaacattaacccac

SEQ ID NO: 3754330 - DNA, 25 bp, Homo sapien
accaaagaggcccaggaggctaatg

SEQ ID NO: 3754331 - DNA, 25 bp, Homo sapien
ccaggaggctaatgaggagccagca

SEQ ID NO: 3754332 - DNA, 25 bp, Homo sapien
ccagcagagcatggccaacattaac

SEQ ID NO: 3754333 - DNA, 25 bp, Homo sapien
aggacacaagcctttgctgcactgc

SEQ ID NO: 3754334 - DNA, 25 bp, Homo sapien
ctgacgaggacacaagcctttgctg

SEQ ID NO: 3754335 - DNA, 25 bp, Homo sapien
ggacacaagcctttgctgcactgct

SEQ ID NO: 3754336 - DNA, 25 bp, Homo sapien
acgaggacacaagcctttgctgcac

SEQ ID NO: 3754337 - DNA, 25 bp, Homo sapien
ctggcatggccatggcccgtggctc

SEQ ID NO: 3754338 - DNA, 25 bp, Homo sapien
aacagatcgtcgcagagcagctggc

SEQ ID NO: 3754339 - DNA, 25 bp, Homo sapien
tagtcacagtactcgggaaacccaa

SEQ ID NO: 3754340 - DNA, 25 bp, Homo sapien
tcatttccttggtaacagatcgtcg

SEQ ID NO: 3754341 - DNA, 25 bp, Homo sapien
gttcctttatttgtctcttctgagc

SEQ ID NO: 3754342 - DNA, 25 bp, Homo sapien
atttgtctcttctgagcttctattc

SEQ ID NO: 3754343 - DNA, 25 bp, Homo sapien
ctttatttgtctcttctgagcttct

SEQ ID NO: 3754344 - DNA, 25 bp, Homo sapien
tgtctcttctgagcttctattcttt

SEQ ID NO: 3754345 - DNA, 25 bp, Homo sapien
gacgcgacgtcccattttgtccctg

SEQ ID NO: 3754346 - DNA, 25 bp, Homo sapien
ttcctccacgggacgggcgtgcaga

SEQ ID NO: 3754347 - DNA, 25 bp, Homo sapien
tccctgctttctggtcccactggag

SEQ ID NO: 3754348 - DNA, 25 bp, Homo sapien
cactggaggaaaagggtccgattca

SEQ ID NO: 3754349 - DNA, 25 bp, Homo sapien
agaagcccccgagaagtcggcagag

SEQ ID NO: 3754350 - DNA, 25 bp, Homo sapien
cacatcccacgtggacggcagctcc

SEQ ID NO: 3754351 - DNA, 25 bp, Homo sapien
gcttggcagggaatgctacacatcc

SEQ ID NO: 3754352 - DNA, 25 bp, Homo sapien
cagagccagttctagttctggcaca

SEQ ID NO: 3754353 - DNA, 25 bp, Homo sapien
ccagtggcagctactgtgagaacca

SEQ ID NO: 3754354 - DNA, 25 bp, Homo sapien
ccaggttcccctgaatgaaggtcac

SEQ ID NO: 3754355 - DNA, 25 bp, Homo sapien
agcaacatattgcagcatcggaggg

SEQ ID NO: 3754356 - DNA, 25 bp, Homo sapien
aaatcttcctccagacaccagtggc

SEQ ID NO: 3754357 - DNA, 25 bp, Homo sapien
tctggcatccgtgttccagccagct

SEQ ID NO: 3754358 - DNA, 25 bp, Homo sapien
tctggagattcactatggaggcagc

SEQ ID NO: 3754359 - DNA, 25 bp, Homo sapien
ggcagcctctggcatccgtgttcca

SEQ ID NO: 3754360 - DNA, 25 bp, Homo sapien
cttggtccacggctcgtgcagcgtc

SEQ ID NO: 3754361 - DNA, 25 bp, Homo sapien
gaagatggagctgccgccctctcct

SEQ ID NO: 3754362 - DNA, 25 bp, Homo sapien
gtgaagatggagctgccgccctctc

SEQ ID NO: 3754363 - DNA, 25 bp, Homo sapien
ctgagtccagggtggtggtcgcacc

SEQ ID NO: 3754364 - DNA, 25 bp, Homo sapien
gagtccagggtggtggtcgcacctc

SEQ ID NO: 3754365 - DNA, 25 bp, Homo sapien
cccaggggacctgcaagacggagcc

SEQ ID NO: 3754366 - DNA, 25 bp, Homo sapien
gccgccgcccccttcgcacctcctc

SEQ ID NO: 3754367 - DNA, 25 bp, Homo sapien
ctgaagaacgcgccccaggggacct

SEQ ID NO: 3754368 - DNA, 25 bp, Homo sapien
ggacctgcaagacggagccgccgcc

SEQ ID NO: 3754369 - DNA, 25 bp, Homo sapien
cgtgtgccaagcagcgggcgtcctt

SEQ ID NO: 3754370 - DNA, 25 bp, Homo sapien
tgccgcacagttagagatgttatgc

SEQ ID NO: 3754371 - DNA, 25 bp, Homo sapien
tggctgcgctgtccttgccgcacag

SEQ ID NO: 3754372 - DNA, 25 bp, Homo sapien
ggtctcccgctccttctagaatgaa

SEQ ID NO: 3754373 - DNA, 25 bp, Homo sapien
gaagtcttctgtgcggagctgtaca

SEQ ID NO: 3754374 - DNA, 25 bp, Homo sapien
tctgcctggtgcaacgtgacgcttg

SEQ ID NO: 3754375 - DNA, 25 bp, Homo sapien
cagggatgccgtccatggatgtcca

SEQ ID NO: 3754376 - DNA, 25 bp, Homo sapien
tcaaactcacgctggagactgcaca

SEQ ID NO: 3754377 - DNA, 25 bp, Homo sapien
gctgtgcaccaagaaacacgaggac

SEQ ID NO: 3754378 - DNA, 25 bp, Homo sapien
caccaagaaacacgaggacgatgct

SEQ ID NO: 3754379 - DNA, 25 bp, Homo sapien
caagaaacacgaggacgatgctgtg

SEQ ID NO: 3754380 - DNA, 25 bp, Homo sapien
tgcaccaagaaacacgaggacgatg

SEQ ID NO: 3754381 - DNA, 25 bp, Homo sapien
gcacacaccagcaccaggaccaagg

SEQ ID NO: 3754382 - DNA, 25 bp, Homo sapien
cagcagcaagagcgaggcacacacc

SEQ ID NO: 3754383 - DNA, 25 bp, Homo sapien
agcagcaagagcgaggcacacacca

SEQ ID NO: 3754384 - DNA, 25 bp, Homo sapien
acaccagcaccaggaccaaggccat

SEQ ID NO: 3754385 - DNA, 25 bp, Homo sapien
ggacgaaatgagcaagcagctgctg

SEQ ID NO: 3754386 - DNA, 25 bp, Homo sapien
cacagatgtaacaatgaagggacga

SEQ ID NO: 3754387 - DNA, 25 bp, Homo sapien
gatgggatgggccacgaagtcagag

SEQ ID NO: 3754388 - DNA, 25 bp, Homo sapien
ggatgggccacgaagtcagaggtca

SEQ ID NO: 3754389 - DNA, 25 bp, Homo sapien
ctgaaaaagagtggagaaaacgccg

SEQ ID NO: 3754390 - DNA, 25 bp, Homo sapien
aacgccgtttagtgcgacgacctgg

SEQ ID NO: 3754391 - DNA, 25 bp, Homo sapien
ggaatgtgtgtgacccaccacaggt

SEQ ID NO: 3754392 - DNA, 25 bp, Homo sapien
aaagtgggcctctgctaagttcaaa

SEQ ID NO: 3754393 - DNA, 25 bp, Homo sapien
tacacattgggaccatgccaggagc

SEQ ID NO: 3754394 - DNA, 25 bp, Homo sapien
tgatttcaacctagggagccatgcc

SEQ ID NO: 3754395 - DNA, 25 bp, Homo sapien
tctttagatccgaaacagctggccc

SEQ ID NO: 3754396 - DNA, 25 bp, Homo sapien
tggcatgccgccgtaagaaaacagg

SEQ ID NO: 3754397 - DNA, 25 bp, Homo sapien
ctgttcttatgcacgtgcagaagtt

SEQ ID NO: 3754398 - DNA, 25 bp, Homo sapien
gtccctttcctaactgtctgatctc

SEQ ID NO: 3754399 - DNA, 25 bp, Homo sapien
gtccacggcaaatatcaccaactgt

SEQ ID NO: 3754400 - DNA, 25 bp, Homo sapien
tgtgtgggaccgtccacggcaaata

SEQ ID NO: 3754401 - DNA, 25 bp, Homo sapien
agcagcttcccaccccttcgtcctc

SEQ ID NO: 3754402 - DNA, 25 bp, Homo sapien
caccatgacctcgagtactggcggg

SEQ ID NO: 3754403 - DNA, 25 bp, Homo sapien
agtcaccatgacctcgagtactggc

SEQ ID NO: 3754404 - DNA, 25 bp, Homo sapien
tactggcggggcccgagccagcaga

SEQ ID NO: 3754405 - DNA, 25 bp, Homo sapien
cacgccagacaagaaagccctgact

SEQ ID NO: 3754406 - DNA, 25 bp, Homo sapien
cggagaaaccgctgtgggaatcccg

SEQ ID NO: 3754407 - DNA, 25 bp, Homo sapien
ctccgaaaccctgggcgagtgtgga

SEQ ID NO: 3754408 - DNA, 25 bp, Homo sapien
cgcccacgcaaactgctgctgatct

SEQ ID NO: 3754409 - DNA, 25 bp, Homo sapien
gctcgccctcgggacacactgggcg

SEQ ID NO: 3754410 - DNA, 25 bp, Homo sapien
ctggcccctgggtgctcgcttagtc

SEQ ID NO: 3754411 - DNA, 25 bp, Homo sapien
gcgggtgctgaacgccccattctgg

SEQ ID NO: 3754412 - DNA, 25 bp, Homo sapien
acgcgtggctgctcgccctcgggac

SEQ ID NO: 3754413 - DNA, 25 bp, Homo sapien
ggaaccacacccgtccaggaaggca

SEQ ID NO: 3754414 - DNA, 25 bp, Homo sapien
gggccgcgacgctctgggaaccaca

SEQ ID NO: 3754415 - DNA, 25 bp, Homo sapien
cttcgcagatgacccgggccagggt

SEQ ID NO: 3754416 - DNA, 25 bp, Homo sapien
tgtgaccccgcgaggctgttccacg

SEQ ID NO: 3754417 - DNA, 25 bp, Homo sapien
ggcgggagacagactgcgagcgcgc

SEQ ID NO: 3754418 - DNA, 25 bp, Homo sapien
gggagacagactgcgagcgcgcggg

SEQ ID NO: 3754419 - DNA, 25 bp, Homo sapien
ggacgcgtgcgtggggacggcggga

SEQ ID NO: 3754420 - DNA, 25 bp, Homo sapien
cgcgtgagccgggacgcgtgcgtgg

SEQ ID NO: 3754421 - DNA, 25 bp, Homo sapien
tggtaggggcggcacaagcgggggc

SEQ ID NO: 3754422 - DNA, 25 bp, Homo sapien
gggtctctggtaggggcggcacaag

SEQ ID NO: 3754423 - DNA, 25 bp, Homo sapien
gggggtctctggtaggggcggcaca

SEQ ID NO: 3754424 - DNA, 25 bp, Homo sapien
tctctggtaggggcggcacaagcgg

SEQ ID NO: 3754425 - DNA, 25 bp, Homo sapien
cgtgatccgggggatgcttttcttg

SEQ ID NO: 3754426 - DNA, 25 bp, Homo sapien
tgcttttcttgccctggaaggacat

SEQ ID NO: 3754427 - DNA, 25 bp, Homo sapien
gggggatgcttttcttgccctggaa

SEQ ID NO: 3754428 - DNA, 25 bp, Homo sapien
gatccgggggatgcttttcttgccc

SEQ ID NO: 3754429 - DNA, 25 bp, Homo sapien
tgcactcatccggatggaggtgaaa

SEQ ID NO: 3754430 - DNA, 25 bp, Homo sapien
atccggatggaggtgaaagttcccg

SEQ ID NO: 3754431 - DNA, 25 bp, Homo sapien
ctcatccggatggaggtgaaagttc

SEQ ID NO: 3754432 - DNA, 25 bp, Homo sapien
cactcatccggatggaggtgaaagt

SEQ ID NO: 3754433 - DNA, 25 bp, Homo sapien
gtgtggtagtgccacaggtcatatt

SEQ ID NO: 3754434 - DNA, 25 bp, Homo sapien
gcaaagcccgtgttggtgaaagtgt

SEQ ID NO: 3754435 - DNA, 25 bp, Homo sapien
tagtgccacaggtcatatttatatc

SEQ ID NO: 3754436 - DNA, 25 bp, Homo sapien
ctgctgctcagacctcgctgagggc

SEQ ID NO: 3754437 - DNA, 25 bp, Homo sapien
taaaaggactggtcgtcattcacga

SEQ ID NO: 3754438 - DNA, 25 bp, Homo sapien
tcagcgtaaaaggactggtcgtcat

SEQ ID NO: 3754439 - DNA, 25 bp, Homo sapien
acatcagcgtaaaaggactggtcgt

SEQ ID NO: 3754440 - DNA, 25 bp, Homo sapien
gactggtcgtcattcacgatcctcc

SEQ ID NO: 3754441 - DNA, 25 bp, Homo sapien
tggactagctcctcgggagtgccag

SEQ ID NO: 3754442 - DNA, 25 bp, Homo sapien
cagctcaggacggtcactgcagggt

SEQ ID NO: 3754443 - DNA, 25 bp, Homo sapien
cttttttgactagaggacggagcag

SEQ ID NO: 3754444 - DNA, 25 bp, Homo sapien
aaagcatcactcagcgcagctcagg

SEQ ID NO: 3754445 - DNA, 25 bp, Homo sapien
tgccttggtgccctgacagaagtcg

SEQ ID NO: 3754446 - DNA, 25 bp, Homo sapien
cagaagtcgtcagccggtgtcatgc

SEQ ID NO: 3754447 - DNA, 25 bp, Homo sapien
tgcagccttgtgtggacgtcaacgc

SEQ ID NO: 3754448 - DNA, 25 bp, Homo sapien
atggtggttcctcctgctagcgctg

SEQ ID NO: 3754449 - DNA, 25 bp, Homo sapien
aggggcagcagacgctggctgcccc

SEQ ID NO: 3754450 - DNA, 25 bp, Homo sapien
agagaggggcagcagacgctggctg

SEQ ID NO: 3754451 - DNA, 25 bp, Homo sapien
cagagagaggggcagcagacgctgg

SEQ ID NO: 3754452 - DNA, 25 bp, Homo sapien
agaggggcagcagacgctggctgcc

SEQ ID NO: 3754453 - DNA, 25 bp, Homo sapien
cactggtccctggttcccacctctg

SEQ ID NO: 3754454 - DNA, 25 bp, Homo sapien
tgtgaaggcagcatggtcagcagct

SEQ ID NO: 3754455 - DNA, 25 bp, Homo sapien
aaggcagcatggtcagcagcttccc

SEQ ID NO: 3754456 - DNA, 25 bp, Homo sapien
ccactggtccctggttcccacctct

SEQ ID NO: 3754457 - DNA, 25 bp, Homo sapien
ctctcatgccatcgggtgatgtcca

SEQ ID NO: 3754458 - DNA, 25 bp, Homo sapien
tcacacccgtgtcggggaagacgtg

SEQ ID NO: 3754459 - DNA, 25 bp, Homo sapien
atgtccacgtgcagggagtagtcgc

SEQ ID NO: 3754460 - DNA, 25 bp, Homo sapien
agtagtcgcagcaggccgcgctgtc

SEQ ID NO: 3754461 - DNA, 25 bp, Homo sapien
gcactggcaccggtccttgtatgcc

SEQ ID NO: 3754462 - DNA, 25 bp, Homo sapien
cggtccttgtatgccatgaagacca

SEQ ID NO: 3754463 - DNA, 25 bp, Homo sapien
tggcaccggtccttgtatgccatga

SEQ ID NO: 3754464 - DNA, 25 bp, Homo sapien
caccggtccttgtatgccatgaaga

SEQ ID NO: 3754465 - DNA, 25 bp, Homo sapien
ctccacgatgtccccgttctcagcg

SEQ ID NO: 3754466 - DNA, 25 bp, Homo sapien
acgatgtccccgttctcagcgtgca

SEQ ID NO: 3754467 - DNA, 25 bp, Homo sapien
ccacgatgtccccgttctcagcgtg

SEQ ID NO: 3754468 - DNA, 25 bp, Homo sapien
ggatgatgctgaagatctcgtacat

SEQ ID NO: 3754469 - DNA, 25 bp, Homo sapien
cagtgatgccgagctccagcaaccg

SEQ ID NO: 3754470 - DNA, 25 bp, Homo sapien
ctcggggccagtgatgccgagctcc

SEQ ID NO: 3754471 - DNA, 25 bp, Homo sapien
tgatgccgagctccagcaaccgctt

SEQ ID NO: 3754472 - DNA, 25 bp, Homo sapien
ccctcggggccagtgatgccgagct

SEQ ID NO: 3754473 - DNA, 25 bp, Homo sapien
tggtgacgtacagcgggcagtttgc

SEQ ID NO: 3754474 - DNA, 25 bp, Homo sapien
tgacgtacagcgggcagtttgcctg

SEQ ID NO: 3754475 - DNA, 25 bp, Homo sapien
gtgacagctcggtacaccgcctcag

SEQ ID NO: 3754476 - DNA, 25 bp, Homo sapien
cttggcgatggtgacagctcggtac

SEQ ID NO: 3754477 - DNA, 25 bp, Homo sapien
tgggatgagcgtccccatgttttgc

SEQ ID NO: 3754478 - DNA, 25 bp, Homo sapien
agcgtccccatgttttgcctcaggg

SEQ ID NO: 3754479 - DNA, 25 bp, Homo sapien
aatgggatgagcgtccccatgtttt

SEQ ID NO: 3754480 - DNA, 25 bp, Homo sapien
gatgagcgtccccatgttttgcctc

SEQ ID NO: 3754481 - DNA, 25 bp, Homo sapien
atgagaggtgccccaccgaccacct

SEQ ID NO: 3754482 - DNA, 25 bp, Homo sapien
acagcttgtgcccagtctagagtcc

SEQ ID NO: 3754483 - DNA, 25 bp, Homo sapien
gcttgtgcccagtctagagtccctg

SEQ ID NO: 3754484 - DNA, 25 bp, Homo sapien
tgtgcccagtctagagtccctggcc

SEQ ID NO: 3754485 - DNA, 25 bp, Homo sapien
caggtgaggtggtccgccgtggtgg

SEQ ID NO: 3754486 - DNA, 25 bp, Homo sapien
ctccagtagtgtgaaccgtcggtgc

SEQ ID NO: 3754487 - DNA, 25 bp, Homo sapien
tagtgtgaaccgtcggtgcccaggc

SEQ ID NO: 3754488 - DNA, 25 bp, Homo sapien
cggtgatgggctccccaaacacgac

SEQ ID NO: 3754489 - DNA, 25 bp, Homo sapien
gatcagcgcgaagttgtccttgccc

SEQ ID NO: 3754490 - DNA, 25 bp, Homo sapien
ttctcccagaccatcgacatgcgct

SEQ ID NO: 3754491 - DNA, 25 bp, Homo sapien
ccctcggggatcagcgcgaagttgt

SEQ ID NO: 3754492 - DNA, 25 bp, Homo sapien
tgcgctcctcaatgccgttggtgcc

SEQ ID NO: 3754493 - DNA, 25 bp, Homo sapien
tgcactggtgagtcagggagcccat

SEQ ID NO: 3754494 - DNA, 25 bp, Homo sapien
cgagagtggagcttcagtggcaaca

SEQ ID NO: 3754495 - DNA, 25 bp, Homo sapien
ggagcactaacatcacagcgtggag

SEQ ID NO: 3754496 - DNA, 25 bp, Homo sapien
tgtccgggcaacactagagtctgct

SEQ ID NO: 3754497 - DNA, 25 bp, Homo sapien
gcagcatttgtactggtcaccgcga

SEQ ID NO: 3754498 - DNA, 25 bp, Homo sapien
ggtcaccgcgacgaactcattctcg

SEQ ID NO: 3754499 - DNA, 25 bp, Homo sapien
tttggcagcatttgtactggtcacc

SEQ ID NO: 3754500 - DNA, 25 bp, Homo sapien
tttgtactggtcaccgcgacgaact

SEQ ID NO: 3754501 - DNA, 25 bp, Homo sapien
gaggcccgagggtccagtgcctcca

SEQ ID NO: 3754502 - DNA, 25 bp, Homo sapien
gcccaacagtcccatccccgttgag

SEQ ID NO: 3754503 - DNA, 25 bp, Homo sapien
ccatccccgttgagccgctggagca

SEQ ID NO: 3754504 - DNA, 25 bp, Homo sapien
agaggcccgagggtccagtgcctcc

SEQ ID NO: 3754505 - DNA, 25 bp, Homo sapien
ctgacttatgaccacggcaggcgct

SEQ ID NO: 3754506 - DNA, 25 bp, Homo sapien
agcgccactcggccctgacttatga

SEQ ID NO: 3754507 - DNA, 25 bp, Homo sapien
cttgtagacaaagtccgggaatgtt

SEQ ID NO: 3754508 - DNA, 25 bp, Homo sapien
ctcttgtagacaaagtccgggaatg

SEQ ID NO: 3754509 - DNA, 25 bp, Homo sapien
ctgcacaacacccttgcgggtgccg

SEQ ID NO: 3754510 - DNA, 25 bp, Homo sapien
ctgctgcaccgtcagacacggatga

SEQ ID NO: 3754511 - DNA, 25 bp, Homo sapien
tcagacacggatgatgccgggcaag

SEQ ID NO: 3754512 - DNA, 25 bp, Homo sapien
agcgtggcgtcaccacagtaagaga

SEQ ID NO: 3754513 - DNA, 25 bp, Homo sapien
tgccgggcaagcgtggcgtcaccac

SEQ ID NO: 3754514 - DNA, 25 bp, Homo sapien
ggggggtgctcaacccaagttcaca

SEQ ID NO: 3754515 - DNA, 25 bp, Homo sapien
gggctgccctgggggggtgctcaac

SEQ ID NO: 3754516 - DNA, 25 bp, Homo sapien
tgccctgggggggtgctcaacccaa

SEQ ID NO: 3754517 - DNA, 25 bp, Homo sapien
cagtgccagcttcaggaatttgggg

SEQ ID NO: 3754518 - DNA, 25 bp, Homo sapien
ggcagagacagggcatgaggggctg

SEQ ID NO: 3754519 - DNA, 25 bp, Homo sapien
tgggggcagagacagggcatgaggg

SEQ ID NO: 3754520 - DNA, 25 bp, Homo sapien
agacagggcatgaggggctgagcct

SEQ ID NO: 3754521 - DNA, 25 bp, Homo sapien
gagacagggcatgaggggctgagcc

SEQ ID NO: 3754522 - DNA, 25 bp, Homo sapien
cacaggagggacggagatcttgcct

SEQ ID NO: 3754523 - DNA, 25 bp, Homo sapien
caggcaccatcacctcgtggacggg

SEQ ID NO: 3754524 - DNA, 25 bp, Homo sapien
acgggcccgtcatacagtccacggg

SEQ ID NO: 3754525 - DNA, 25 bp, Homo sapien
ccccgactgatgtaggttgcgcaca

SEQ ID NO: 3754526 - DNA, 25 bp, Homo sapien
caggtggtgccatgatcttctgtgc

SEQ ID NO: 3754527 - DNA, 25 bp, Homo sapien
tcttctgtgctgtgcgtcgggcgat

SEQ ID NO: 3754528 - DNA, 25 bp, Homo sapien
gcgatgtggtcatcagcctgagacc

SEQ ID NO: 3754529 - DNA, 25 bp, Homo sapien
ccaggtggtgccatgatcttctgtg

SEQ ID NO: 3754530 - DNA, 25 bp, Homo sapien
gcaccttcgagaaacttctacaaaa

SEQ ID NO: 3754531 - DNA, 25 bp, Homo sapien
aagaccgccaagcaccttcgagaaa

SEQ ID NO: 3754532 - DNA, 25 bp, Homo sapien
gggaaggcaagaccgccaagcacct

SEQ ID NO: 3754533 - DNA, 25 bp, Homo sapien
gccaagcaccttcgagaaacttcta

SEQ ID NO: 3754534 - DNA, 25 bp, Homo sapien
tctccccaggttcagcccttctctt

SEQ ID NO: 3754535 - DNA, 25 bp, Homo sapien
ctggcagtgacatctccccaggttc

SEQ ID NO: 3754536 - DNA, 25 bp, Homo sapien
cctggcagtgacatctccccaggtt

SEQ ID NO: 3754537 - DNA, 25 bp, Homo sapien
atctccccaggttcagcccttctct

SEQ ID NO: 3754538 - DNA, 25 bp, Homo sapien
caagaagcctggtgtccagctgctc

SEQ ID NO: 3754539 - DNA, 25 bp, Homo sapien
ccacactgtgagcccggcaggttcc

SEQ ID NO: 3754540 - DNA, 25 bp, Homo sapien
gacagtgtcttcctaaaggatcgca

SEQ ID NO: 3754541 - DNA, 25 bp, Homo sapien
gatgggtccctgaagtctcagcagc

SEQ ID NO: 3754542 - DNA, 25 bp, Homo sapien
caggttcctggctacagtgtcctca

SEQ ID NO: 3754543 - DNA, 25 bp, Homo sapien
caaaacttccctggatgagggctac

SEQ ID NO: 3754544 - DNA, 25 bp, Homo sapien
tggcggtggtgtgtgcttcacttcc

SEQ ID NO: 3754545 - DNA, 25 bp, Homo sapien
ctgtgagagggtgcgctcctccctg

SEQ ID NO: 3754546 - DNA, 25 bp, Homo sapien
cgggctgtccggtgagaatgtaggc

SEQ ID NO: 3754547 - DNA, 25 bp, Homo sapien
ctgcaggagtcgtcggaccagccca

SEQ ID NO: 3754548 - DNA, 25 bp, Homo sapien
tcatggcagaaactagccttccagc

SEQ ID NO: 3754549 - DNA, 25 bp, Homo sapien
gcacccaaatcaccaccaggaaggg

SEQ ID NO: 3754550 - DNA, 25 bp, Homo sapien
aagggtggcccggtctctgcgaggg

SEQ ID NO: 3754551 - DNA, 25 bp, Homo sapien
tactcggtggaagtctggcgatgtc

SEQ ID NO: 3754552 - DNA, 25 bp, Homo sapien
agagctcccggaccatggctttggg

SEQ ID NO: 3754553 - DNA, 25 bp, Homo sapien
ttctgcgtacgtcctgtgtctgcct

SEQ ID NO: 3754554 - DNA, 25 bp, Homo sapien
aaccgctcgatgttgcatgttctgc

SEQ ID NO: 3754555 - DNA, 25 bp, Homo sapien
attacaatgtgagaaccgctcgatg

SEQ ID NO: 3754556 - DNA, 25 bp, Homo sapien
ggacacctgtggagggcatttcccg

SEQ ID NO: 3754557 - DNA, 25 bp, Homo sapien
ctcaccccttgagctgctttggaga

SEQ ID NO: 3754558 - DNA, 25 bp, Homo sapien
ccgcctagatggaggaagcgctgct

SEQ ID NO: 3754559 - DNA, 25 bp, Homo sapien
atttcacacctcaggctcgtggtgg

SEQ ID NO: 3754560 - DNA, 25 bp, Homo sapien
agaggccgtcatccaaagccacagg

SEQ ID NO: 3754561 - DNA, 25 bp, Homo sapien
aggcccgatggggatgcccagacac

SEQ ID NO: 3754562 - DNA, 25 bp, Homo sapien
agggccggggcacttcaatagccca

SEQ ID NO: 3754563 - DNA, 25 bp, Homo sapien
agagatgcgagctcccgggcagtct

SEQ ID NO: 3754564 - DNA, 25 bp, Homo sapien
ttctcaggccggcccgagtttgcag

SEQ ID NO: 3754565 - DNA, 25 bp, Homo sapien
ggcccgagtttgcagacttgtctgt

SEQ ID NO: 3754566 - DNA, 25 bp, Homo sapien
ggccggcccgagtttgcagacttgt

SEQ ID NO: 3754567 - DNA, 25 bp, Homo sapien
tcaggccggcccgagtttgcagact

SEQ ID NO: 3754568 - DNA, 25 bp, Homo sapien
acagtgcctgtggtcgctatggcaa

SEQ ID NO: 3754569 - DNA, 25 bp, Homo sapien
tgtgactgtgacaccgtggctgagc

SEQ ID NO: 3754570 - DNA, 25 bp, Homo sapien
tgtgccgtctcagcgagaagacagt

SEQ ID NO: 3754571 - DNA, 25 bp, Homo sapien
gaccaccctgccatgtgtgactgtg

SEQ ID NO: 3754572 - DNA, 25 bp, Homo sapien
agttgggtgggctgggcgtgtggct

SEQ ID NO: 3754573 - DNA, 25 bp, Homo sapien
ctgggcgtgtggctcttgcacccag

SEQ ID NO: 3754574 - DNA, 25 bp, Homo sapien
ctggaggagttgggtgggctgggcg

SEQ ID NO: 3754575 - DNA, 25 bp, Homo sapien
tgggcgtgtggctcttgcacccagc

SEQ ID NO: 3754576 - DNA, 25 bp, Homo sapien
tcggcgtcctctttggatgcctctt

SEQ ID NO: 3754577 - DNA, 25 bp, Homo sapien
tgtcaaaggggcagtcggcgtcctc

SEQ ID NO: 3754578 - DNA, 25 bp, Homo sapien
gatgcctctttggagccacggctgt

SEQ ID NO: 3754579 - DNA, 25 bp, Homo sapien
aaattgtcgaccttgtcgttgagcc

SEQ ID NO: 3754580 - DNA, 25 bp, Homo sapien
tcagggcggcgcagcatttagagtc

SEQ ID NO: 3754581 - DNA, 25 bp, Homo sapien
tcgggtcctgccaaatggccctggt

SEQ ID NO: 3754582 - DNA, 25 bp, Homo sapien
gtagagtcgggtcctgccaaatggc

SEQ ID NO: 3754583 - DNA, 25 bp, Homo sapien
tttagagtctgaccgggtagagtcg

SEQ ID NO: 3754584 - DNA, 25 bp, Homo sapien
cccctggcagagcaccggagcccac

SEQ ID NO: 3754585 - DNA, 25 bp, Homo sapien
ctgtgaaaatggctccgggttgagg

SEQ ID NO: 3754586 - DNA, 25 bp, Homo sapien
tcccctggcagagcaccggagccca

SEQ ID NO: 3754587 - DNA, 25 bp, Homo sapien
tggctccgggttgaggggtgggatc

SEQ ID NO: 3754588 - DNA, 25 bp, Homo sapien
cagcaggggccccagccacccctgt

SEQ ID NO: 3754589 - DNA, 25 bp, Homo sapien
agcagcaggggccccagccacccct

SEQ ID NO: 3754590 - DNA, 25 bp, Homo sapien
agcaggggccccagccacccctgtt

SEQ ID NO: 3754591 - DNA, 25 bp, Homo sapien
tgcagcagcaggggccccagccacc

SEQ ID NO: 3754592 - DNA, 25 bp, Homo sapien
tttcactggccaaggcaatgacccc

SEQ ID NO: 3754593 - DNA, 25 bp, Homo sapien
cgtgtggttgggctgtagctgtgtc

SEQ ID NO: 3754594 - DNA, 25 bp, Homo sapien
ttcactggccaaggcaatgacccca

SEQ ID NO: 3754595 - DNA, 25 bp, Homo sapien
tgagaagggtggttctgcgtgtggt

SEQ ID NO: 3754596 - DNA, 25 bp, Homo sapien
ccagtccttaagaggctcggaaacg

SEQ ID NO: 3754597 - DNA, 25 bp, Homo sapien
tgcacctggagggttccttccggct

SEQ ID NO: 3754598 - DNA, 25 bp, Homo sapien
tgctgggtgccgtgttcagatgcgg

SEQ ID NO: 3754599 - DNA, 25 bp, Homo sapien
cggaaacgccagctggcccagaaat

SEQ ID NO: 3754600 - DNA, 25 bp, Homo sapien
tcttttagggaggacgtgggcactc

SEQ ID NO: 3754601 - DNA, 25 bp, Homo sapien
ggctgtgccgccatcagactgggcc

SEQ ID NO: 3754602 - DNA, 25 bp, Homo sapien
tagggaggacgtgggcactcctgcc

SEQ ID NO: 3754603 - DNA, 25 bp, Homo sapien
tggctgtgccgccatcagactgggc

SEQ ID NO: 3754604 - DNA, 25 bp, Homo sapien
tttggcaaggtaaggcagggcctgg

SEQ ID NO: 3754605 - DNA, 25 bp, Homo sapien
tttatcctgcagtgaacttcgacca

SEQ ID NO: 3754606 - DNA, 25 bp, Homo sapien
atccttcgggccattgggaagggca

SEQ ID NO: 3754607 - DNA, 25 bp, Homo sapien
ttcgaccacttccagatccttcggg

SEQ ID NO: 3754608 - DNA, 25 bp, Homo sapien
gacttggtgtcccttggtgtccctg

SEQ ID NO: 3754609 - DNA, 25 bp, Homo sapien
ggtgtccactctgctgcttgcacgg

SEQ ID NO: 3754610 - DNA, 25 bp, Homo sapien
gtccactctgctgcttgcacggcat

SEQ ID NO: 3754611 - DNA, 25 bp, Homo sapien
aggtgtccactctgctgcttgcacg

SEQ ID NO: 3754612 - DNA, 25 bp, Homo sapien
caggcccacaggtgtccactctgct

SEQ ID NO: 3754613 - DNA, 25 bp, Homo sapien
cttctcaggggcgctggtgcggtga

SEQ ID NO: 3754614 - DNA, 25 bp, Homo sapien
ggcttctcaggggcgctggtgcggt

SEQ ID NO: 3754615 - DNA, 25 bp, Homo sapien
acatggccggcagggaccacttggc

SEQ ID NO: 3754616 - DNA, 25 bp, Homo sapien
gaccacttggctcggggcttctcag

SEQ ID NO: 3754617 - DNA, 25 bp, Homo sapien
ggcagtgcggagaccctcatgggtt

SEQ ID NO: 3754618 - DNA, 25 bp, Homo sapien
ccagttccactggtttggagccttt

SEQ ID NO: 3754619 - DNA, 25 bp, Homo sapien
ctcatgggttgctgatggcaggagc

SEQ ID NO: 3754620 - DNA, 25 bp, Homo sapien
ggccggtggtcatgggaggtcctgg

SEQ ID NO: 3754621 - DNA, 25 bp, Homo sapien
cctagaacggtctccgacttccgtg

SEQ ID NO: 3754622 - DNA, 25 bp, Homo sapien
ttgcccagcttggaaccttcctcct

SEQ ID NO: 3754623 - DNA, 25 bp, Homo sapien
gggaccagacgttgacctttgccta

SEQ ID NO: 3754624 - DNA, 25 bp, Homo sapien
agacgttgacctttgcctagaacgg

SEQ ID NO: 3754625 - DNA, 25 bp, Homo sapien
gccccaggaggcgtagggcattgac

SEQ ID NO: 3754626 - DNA, 25 bp, Homo sapien
ctgtggtgggtagtggagggtctga

SEQ ID NO: 3754627 - DNA, 25 bp, Homo sapien
cccaggaggcgtagggcattgacct

SEQ ID NO: 3754628 - DNA, 25 bp, Homo sapien
tgaggccccaggaggcgtagggcat

SEQ ID NO: 3754629 - DNA, 25 bp, Homo sapien
cccaggaggcgtagggcatcgacct

SEQ ID NO: 3754630 - DNA, 25 bp, Homo sapien
gccccaggaggcgtagggcattgac

SEQ ID NO: 3754631 - DNA, 25 bp, Homo sapien
ctgtggtgggtagtggagggtctga

SEQ ID NO: 3754632 - DNA, 25 bp, Homo sapien
catcgacctgcctgtggtgagtagt

SEQ ID NO: 3754633 - DNA, 25 bp, Homo sapien
ccagcaggatgagatggggatgtga

SEQ ID NO: 3754634 - DNA, 25 bp, Homo sapien
cccaggaggcatagggcattgacct

SEQ ID NO: 3754635 - DNA, 25 bp, Homo sapien
aggcgtgggtcggaggccccaggag

SEQ ID NO: 3754636 - DNA, 25 bp, Homo sapien
tgagggggaggcgtgggtcggaggc

SEQ ID NO: 3754637 - DNA, 25 bp, Homo sapien
tctgatcagacagtgccaaagtcca

SEQ ID NO: 3754638 - DNA, 25 bp, Homo sapien
ggctggttagcaggccgccatgtcc

SEQ ID NO: 3754639 - DNA, 25 bp, Homo sapien
agacttctgatcagacagtgccaaa

SEQ ID NO: 3754640 - DNA, 25 bp, Homo sapien
ttggctggttagcaggccgccatgt

SEQ ID NO: 3754641 - DNA, 25 bp, Homo sapien
ccatgccagaggtgacgtcttggcc

SEQ ID NO: 3754642 - DNA, 25 bp, Homo sapien
cctcgagccggtgtttggccttaga

SEQ ID NO: 3754643 - DNA, 25 bp, Homo sapien
aggtgacgtcttggccatctctcgc

SEQ ID NO: 3754644 - DNA, 25 bp, Homo sapien
tggacttggtggtagccatgccaga

SEQ ID NO: 3754645 - DNA, 25 bp, Homo sapien
gtgacatagtgctgattcccggcgc

SEQ ID NO: 3754646 - DNA, 25 bp, Homo sapien
tcgtggagggtgcacgcattgtgcc

SEQ ID NO: 3754647 - DNA, 25 bp, Homo sapien
ggtgacatagtgctgattcccggcg

SEQ ID NO: 3754648 - DNA, 25 bp, Homo sapien
gtggagggtgcacgcattgtgccgg

SEQ ID NO: 3754649 - DNA, 25 bp, Homo sapien
cattgccaggaggagctatcgggcc

SEQ ID NO: 3754650 - DNA, 25 bp, Homo sapien
ctgtgaagggaagcgtcccaggcct

SEQ ID NO: 3754651 - DNA, 25 bp, Homo sapien
tggcccggtatttcctaagtcagga

SEQ ID NO: 3754652 - DNA, 25 bp, Homo sapien
ttcccaggtcataggagacgagacg

SEQ ID NO: 3754653 - DNA, 25 bp, Homo sapien
tcaaccctgcccgtcagcgtggtgg

SEQ ID NO: 3754654 - DNA, 25 bp, Homo sapien
ctgcccgtcagcgtggtgggtcttt

SEQ ID NO: 3754655 - DNA, 25 bp, Homo sapien
tcagcgtggtgggtctttgttcccg

SEQ ID NO: 3754656 - DNA, 25 bp, Homo sapien
cttgtccccatctgcgtcaaccctg

SEQ ID NO: 3754657 - DNA, 25 bp, Homo sapien
ggcaggagaagccacaattgtttcg

SEQ ID NO: 3754658 - DNA, 25 bp, Homo sapien
caggagaagccacaattgtttcgga

SEQ ID NO: 3754659 - DNA, 25 bp, Homo sapien
ccacaggactcagctgtgggctgct

SEQ ID NO: 3754660 - DNA, 25 bp, Homo sapien
gcaggagaagccacaattgtttcgg

SEQ ID NO: 3754661 - DNA, 25 bp, Homo sapien
caggtctgcccctgtgggtggtcct

SEQ ID NO: 3754662 - DNA, 25 bp, Homo sapien
gccaggcggccttggagtcctccag

SEQ ID NO: 3754663 - DNA, 25 bp, Homo sapien
gggccaggcggccttggagtcctcc

SEQ ID NO: 3754664 - DNA, 25 bp, Homo sapien
tcctccaggtctgcccctgtgggtg

SEQ ID NO: 3754665 - DNA, 25 bp, Homo sapien
ccagcccagggcagctgatgggtcc

SEQ ID NO: 3754666 - DNA, 25 bp, Homo sapien
cccagggcagctgatgggtcccctg

SEQ ID NO: 3754667 - DNA, 25 bp, Homo sapien
agcccagggcagctgatgggtcccc

SEQ ID NO: 3754668 - DNA, 25 bp, Homo sapien
ctgcaggtgtagaggagcccccagc

SEQ ID NO: 3754669 - DNA, 25 bp, Homo sapien
caggtggagtccgtgcactgaggag

SEQ ID NO: 3754670 - DNA, 25 bp, Homo sapien
ggcaggtggagtccgtgcactgagg

SEQ ID NO: 3754671 - DNA, 25 bp, Homo sapien
gggcaggtggagtccgtgcactgag

SEQ ID NO: 3754672 - DNA, 25 bp, Homo sapien
aggtggagtccgtgcactgaggaga

SEQ ID NO: 3754673 - DNA, 25 bp, Homo sapien
cccctcctcggcactgtggtgtttg

SEQ ID NO: 3754674 - DNA, 25 bp, Homo sapien
gtctgcccacgggcggagaccttca

SEQ ID NO: 3754675 - DNA, 25 bp, Homo sapien
tgatgaactggtcatcctcaacccc

SEQ ID NO: 3754676 - DNA, 25 bp, Homo sapien
tagcatttctaggataaaattcctt

SEQ ID NO: 3754677 - DNA, 25 bp, Homo sapien
tcctgcagggcccattttcccacct

SEQ ID NO: 3754678 - DNA, 25 bp, Homo sapien
cctggatggaaggagggtcctgcag

SEQ ID NO: 3754679 - DNA, 25 bp, Homo sapien
tggatggaaggagggtcctgcaggg

SEQ ID NO: 3754680 - DNA, 25 bp, Homo sapien
cattttcccacctgccccagggctt

SEQ ID NO: 3754681 - DNA, 25 bp, Homo sapien
tcaggaagatgtgtggctgtcctga

SEQ ID NO: 3754682 - DNA, 25 bp, Homo sapien
gtcaggaagatgtgtggctgtcctg

SEQ ID NO: 3754683 - DNA, 25 bp, Homo sapien
tgctgctcgcaccttctactgttct

SEQ ID NO: 3754684 - DNA, 25 bp, Homo sapien
gtctgctgctcgcaccttctactgt

SEQ ID NO: 3754685 - DNA, 25 bp, Homo sapien
gctgctcgcaccttctactgttctc

SEQ ID NO: 3754686 - DNA, 25 bp, Homo sapien
tctgctgctcgcaccttctactgtt

SEQ ID NO: 3754687 - DNA, 25 bp, Homo sapien
cccacctcaccgcccttgcggccat

SEQ ID NO: 3754688 - DNA, 25 bp, Homo sapien
tgagtgtggcagggaggagcagggg

SEQ ID NO: 3754689 - DNA, 25 bp, Homo sapien
ctgagtgtggcagggaggagcaggg

SEQ ID NO: 3754690 - DNA, 25 bp, Homo sapien
ggacaccctcgctgtgatgggccag

SEQ ID NO: 3754691 - DNA, 25 bp, Homo sapien
accctcgctgtgatgggccaggcct

SEQ ID NO: 3754692 - DNA, 25 bp, Homo sapien
tggacaccctcgctgtgatgggcca

SEQ ID NO: 3754693 - DNA, 25 bp, Homo sapien
acaccctcgctgtgatgggccaggc

SEQ ID NO: 3754694 - DNA, 25 bp, Homo sapien
gtggttgttggggttggagctgcag

SEQ ID NO: 3754695 - DNA, 25 bp, Homo sapien
tctgcggcctcgtccgcgcagccct

SEQ ID NO: 3754696 - DNA, 25 bp, Homo sapien
ggttgttggggttggagctgcagtt

SEQ ID NO: 3754697 - DNA, 25 bp, Homo sapien
ttcctctgcggcctcgtccgcgcag

SEQ ID NO: 3754698 - DNA, 25 bp, Homo sapien
taaggccatgggttcatatccggca

SEQ ID NO: 3754699 - DNA, 25 bp, Homo sapien
tgcaaggcagcactagcaaataagg

SEQ ID NO: 3754700 - DNA, 25 bp, Homo sapien
catgggttcatatccggcaggccgg

SEQ ID NO: 3754701 - DNA, 25 bp, Homo sapien
cactagcaaataaggccatgggttc

SEQ ID NO: 3754702 - DNA, 25 bp, Homo sapien
tgtctggttggtacccccaggccat

SEQ ID NO: 3754703 - DNA, 25 bp, Homo sapien
tggttacagacgcagagggagggag

SEQ ID NO: 3754704 - DNA, 25 bp, Homo sapien
agtccagggtgatgtgcagggctcg

SEQ ID NO: 3754705 - DNA, 25 bp, Homo sapien
ctcgctgtggttctctttgggctgc

SEQ ID NO: 3754706 - DNA, 25 bp, Homo sapien
cacaacttgcggatcttatggaaaa

SEQ ID NO: 3754707 - DNA, 25 bp, Homo sapien
tgtggccacacccagcgtggatggt

SEQ ID NO: 3754708 - DNA, 25 bp, Homo sapien
tgtttaagtcgatgtgcacctccca

SEQ ID NO: 3754709 - DNA, 25 bp, Homo sapien
ctcgtgtgagtcctgaatccgggcg

SEQ ID NO: 3754710 - DNA, 25 bp, Homo sapien
cctttccctagcaatggtgtgttgc

SEQ ID NO: 3754711 - DNA, 25 bp, Homo sapien
agccgcctttccctagcaatggtgt

SEQ ID NO: 3754712 - DNA, 25 bp, Homo sapien
gtgtgggatgggcatttgattcaga

SEQ ID NO: 3754713 - DNA, 25 bp, Homo sapien
gcatttgattcagacgccacattac

SEQ ID NO: 3754714 - DNA, 25 bp, Homo sapien
cagggacagtacctgctgcctgggc

SEQ ID NO: 3754715 - DNA, 25 bp, Homo sapien
cagagacatggtgggcacgggtacg

SEQ ID NO: 3754716 - DNA, 25 bp, Homo sapien
ggatgccggacctcccatggctgct

SEQ ID NO: 3754717 - DNA, 25 bp, Homo sapien
tccaggaggaacttggttcctcggc

SEQ ID NO: 3754718 - DNA, 25 bp, Homo sapien
aggtcctcatccctgcggcatgatg

SEQ ID NO: 3754719 - DNA, 25 bp, Homo sapien
cctgcggcatgatgcgtcagtgacg

SEQ ID NO: 3754720 - DNA, 25 bp, Homo sapien
cgtcagtgacggtgggtggctctgc

SEQ ID NO: 3754721 - DNA, 25 bp, Homo sapien
tcatccctgcggcatgatgcgtcag

SEQ ID NO: 3754722 - DNA, 25 bp, Homo sapien
tgggccccagaattacctccaggct

SEQ ID NO: 3754723 - DNA, 25 bp, Homo sapien
gggccccagaattacctccaggctc

SEQ ID NO: 3754724 - DNA, 25 bp, Homo sapien
tctgatttgtgtggactcgaaaatt

SEQ ID NO: 3754725 - DNA, 25 bp, Homo sapien
gactcgaaaattgctgaccgaaaag

SEQ ID NO: 3754726 - DNA, 25 bp, Homo sapien
ttctgtgtttcgctgtgggtccacc

SEQ ID NO: 3754727 - DNA, 25 bp, Homo sapien
cgctgtgggtccaccttctgatttg

SEQ ID NO: 3754728 - DNA, 25 bp, Homo sapien
atccacaaacttgtgcatccatggg

SEQ ID NO: 3754729 - DNA, 25 bp, Homo sapien
gcatccatgggaaggcagactgctg

SEQ ID NO: 3754730 - DNA, 25 bp, Homo sapien
ctggccaagacacgcagcccagaat

SEQ ID NO: 3754731 - DNA, 25 bp, Homo sapien
ccaagacacgcagcccagaatccac

SEQ ID NO: 3754732 - DNA, 25 bp, Homo sapien
tctccagcggctctcgtggagggcc

SEQ ID NO: 3754733 - DNA, 25 bp, Homo sapien
tccagcggctctcgtggagggccct

SEQ ID NO: 3754734 - DNA, 25 bp, Homo sapien
cggctctcgtggagggccctgactc

SEQ ID NO: 3754735 - DNA, 25 bp, Homo sapien
cagcggctctcgtggagggccctga

SEQ ID NO: 3754736 - DNA, 25 bp, Homo sapien
gccacgggcaggcaggtgattggcc

SEQ ID NO: 3754737 - DNA, 25 bp, Homo sapien
ctgccatccagcaaggcggtgggca

SEQ ID NO: 3754738 - DNA, 25 bp, Homo sapien
caggtgattggccactgagctctca

SEQ ID NO: 3754739 - DNA, 25 bp, Homo sapien
gccatccagcaaggcggtgggcaca

SEQ ID NO: 3754740 - DNA, 25 bp, Homo sapien
aggtcgaataaagtcccctgcaggc

SEQ ID NO: 3754741 - DNA, 25 bp, Homo sapien
tcaaggtcgaataaagtcccctgca

SEQ ID NO: 3754742 - DNA, 25 bp, Homo sapien
ctgccgctgtcccaaaggcagttgc

SEQ ID NO: 3754743 - DNA, 25 bp, Homo sapien
aaggcagttgcaaagcaaggctctg

SEQ ID NO: 3754744 - DNA, 25 bp, Homo sapien
gctgaaatagccatcgtcagagaag

SEQ ID NO: 3754745 - DNA, 25 bp, Homo sapien
tagccatcgtcagagaagttgcccc

SEQ ID NO: 3754746 - DNA, 25 bp, Homo sapien
gtcagagaagttgccccgcggcctc

SEQ ID NO: 3754747 - DNA, 25 bp, Homo sapien
tcctggttgggctgaaatagccatc

SEQ ID NO: 3754748 - DNA, 25 bp, Homo sapien
cgggatcagggaggcgcctccctct

SEQ ID NO: 3754749 - DNA, 25 bp, Homo sapien
ggcctcccggctgggtcttggccat

SEQ ID NO: 3754750 - DNA, 25 bp, Homo sapien
aaagccactgatcagcgtgttgctc

SEQ ID NO: 3754751 - DNA, 25 bp, Homo sapien
ccaaagccactgatcagcgtgttgc

SEQ ID NO: 3754752 - DNA, 25 bp, Homo sapien
ccccaaagccactgatcagcgtgtt

SEQ ID NO: 3754753 - DNA, 25 bp, Homo sapien
agccactgatcagcgtgttgctctg

SEQ ID NO: 3754754 - DNA, 25 bp, Homo sapien
tgtgggatgcgcttaaaagcctcag

SEQ ID NO: 3754755 - DNA, 25 bp, Homo sapien
gaggctgtgggatgcgcttaaaagc

SEQ ID NO: 3754756 - DNA, 25 bp, Homo sapien
cacgtgccctttcagttggccagct

SEQ ID NO: 3754757 - DNA, 25 bp, Homo sapien
tggtcggcgtctgctcttcaccacc

SEQ ID NO: 3754758 - DNA, 25 bp, Homo sapien
ttgggtgccctcgagcatggtagcc

SEQ ID NO: 3754759 - DNA, 25 bp, Homo sapien
tctggatgggtatccctggacatgg

SEQ ID NO: 3754760 - DNA, 25 bp, Homo sapien
tgttatcgaatgcaggagagagccg

SEQ ID NO: 3754761 - DNA, 25 bp, Homo sapien
tgaacagcagtagagccttgggccc

SEQ ID NO: 3754762 - DNA, 25 bp, Homo sapien
tctttcttccaaggccacgaggagg

SEQ ID NO: 3754763 - DNA, 25 bp, Homo sapien
tgattctaaactcagacttgcagag

SEQ ID NO: 3754764 - DNA, 25 bp, Homo sapien
tgggctctgcaggtgaccgtgcctc

SEQ ID NO: 3754765 - DNA, 25 bp, Homo sapien
ggcacagcttgaccatggacttctt

SEQ ID NO: 3754766 - DNA, 25 bp, Homo sapien
gtgcaggacggcaggcaggtcagag

SEQ ID NO: 3754767 - DNA, 25 bp, Homo sapien
atggccatcttgtgcacacaggtgg

SEQ ID NO: 3754768 - DNA, 25 bp, Homo sapien
taggaatggccatcttgtgcacaca

SEQ ID NO: 3754769 - DNA, 25 bp, Homo sapien
gaatggccatcttgtgcacacaggt

SEQ ID NO: 3754770 - DNA, 25 bp, Homo sapien
ccagggcaggaggttaggaatggcc

SEQ ID NO: 3754771 - DNA, 25 bp, Homo sapien
tccttggctcagtcttgtgtcctga

SEQ ID NO: 3754772 - DNA, 25 bp, Homo sapien
cagtcttgtgtcctgagtgacttgc

SEQ ID NO: 3754773 - DNA, 25 bp, Homo sapien
cttgtgtcctgagtgacttgcagca

SEQ ID NO: 3754774 - DNA, 25 bp, Homo sapien
ctccttggctcagtcttgtgtcctg

SEQ ID NO: 3754775 - DNA, 25 bp, Homo sapien
ctctgggtcagcctcttgccctgca

SEQ ID NO: 3754776 - DNA, 25 bp, Homo sapien
tgcacgttgcgtggggcaggtttca

SEQ ID NO: 3754777 - DNA, 25 bp, Homo sapien
gggtcagcctcttgccctgcacgtt

SEQ ID NO: 3754778 - DNA, 25 bp, Homo sapien
tgggtcagcctcttgccctgcacgt

SEQ ID NO: 3754779 - DNA, 25 bp, Homo sapien
gtgccgtgctccccgcttgctgatg

SEQ ID NO: 3754780 - DNA, 25 bp, Homo sapien
ttgctgatgtttgccgttcgctgct

SEQ ID NO: 3754781 - DNA, 25 bp, Homo sapien
ccgcttgctgatgtttgccgttcgc

SEQ ID NO: 3754782 - DNA, 25 bp, Homo sapien
ctgatgtttgccgttcgctgctcac

SEQ ID NO: 3754783 - DNA, 25 bp, Homo sapien
tggggatggccacggaggaggggct

SEQ ID NO: 3754784 - DNA, 25 bp, Homo sapien
ctggggatggccacggaggaggggc

SEQ ID NO: 3754785 - DNA, 25 bp, Homo sapien
gggatggccacggaggaggggctgg

SEQ ID NO: 3754786 - DNA, 25 bp, Homo sapien
ggatggccacggaggaggggctggg

SEQ ID NO: 3754787 - DNA, 25 bp, Homo sapien
gatcttcggggtctgctggcagcgg

SEQ ID NO: 3754788 - DNA, 25 bp, Homo sapien
tggatcttcggggtctgctggcagc

SEQ ID NO: 3754789 - DNA, 25 bp, Homo sapien
cttcggtggatcttcggggtctgct

SEQ ID NO: 3754790 - DNA, 25 bp, Homo sapien
gcaggcccttcggtggatcttcggg

SEQ ID NO: 3754791 - DNA, 25 bp, Homo sapien
taaacatcagtcatcttgtgtgtct

SEQ ID NO: 3754792 - DNA, 25 bp, Homo sapien
cttgtaaacatcagtcatcttgtgt

SEQ ID NO: 3754793 - DNA, 25 bp, Homo sapien
gtctgaagtgatgttttatctccaa

SEQ ID NO: 3754794 - DNA, 25 bp, Homo sapien
cagtcatcttgtgtgtctgaagtga

SEQ ID NO: 3754795 - DNA, 25 bp, Homo sapien
cattctatcccttctctgacttcgg

SEQ ID NO: 3754796 - DNA, 25 bp, Homo sapien
tatcccttctctgacttcggtgaaa

SEQ ID NO: 3754797 - DNA, 25 bp, Homo sapien
caccagagctgcatggcgttgggcg

SEQ ID NO: 3754798 - DNA, 25 bp, Homo sapien
ggcgttgggcgagccccttcattcc

SEQ ID NO: 3754799 - DNA, 25 bp, Homo sapien
tggtgtctcctgagtgaccgtgcag

SEQ ID NO: 3754800 - DNA, 25 bp, Homo sapien
ccgtgggcgccatagaaagcagaga

SEQ ID NO: 3754801 - DNA, 25 bp, Homo sapien
gtgcgctgctgagtcctgtagataa

SEQ ID NO: 3754802 - DNA, 25 bp, Homo sapien
agggccaggccgttgtgcaaagacc

SEQ ID NO: 3754803 - DNA, 25 bp, Homo sapien
aaggcgcccagcactttccgcgcaa

SEQ ID NO: 3754804 - DNA, 25 bp, Homo sapien
actttccgcgcaaggtcgcgcctgg

SEQ ID NO: 3754805 - DNA, 25 bp, Homo sapien
gattcttcagtgacaagcgccaggg

SEQ ID NO: 3754806 - DNA, 25 bp, Homo sapien
gcccggtagcaaaaactgattcttc

SEQ ID NO: 3754807 - DNA, 25 bp, Homo sapien
atagctaagtttcagttcccagccc

SEQ ID NO: 3754808 - DNA, 25 bp, Homo sapien
ttgaaggggtggtggtcgacgggca

SEQ ID NO: 3754809 - DNA, 25 bp, Homo sapien
tggtcgacgggcaagtagagaccgc

SEQ ID NO: 3754810 - DNA, 25 bp, Homo sapien
caacggtagcatccgtttttccgcg

SEQ ID NO: 3754811 - DNA, 25 bp, Homo sapien
acgggcaagtagagaccgcgagggt

SEQ ID NO: 3754812 - DNA, 25 bp, Homo sapien
ccacgctgagcgcgagtgtgtctgt

SEQ ID NO: 3754813 - DNA, 25 bp, Homo sapien
gcagcagcccgacaatggaggccac

SEQ ID NO: 3754814 - DNA, 25 bp, Homo sapien
atggagacgccggtacggaatcccg

SEQ ID NO: 3754815 - DNA, 25 bp, Homo sapien
cagccaacgcggtcgccatggagac

SEQ ID NO: 3754816 - DNA, 25 bp, Homo sapien
cagaagggcagcctttgcggtcagc

SEQ ID NO: 3754817 - DNA, 25 bp, Homo sapien
ccatccgggcgaggctgagttgggt

SEQ ID NO: 3754818 - DNA, 25 bp, Homo sapien
cggctggagctaggcgacagggcac

SEQ ID NO: 3754819 - DNA, 25 bp, Homo sapien
agttgggtccgacgctctgggcctc

SEQ ID NO: 3754820 - DNA, 25 bp, Homo sapien
gaggggaggcttcaaacctcagaac

SEQ ID NO: 3754821 - DNA, 25 bp, Homo sapien
cctcagaacagggaaagtatcttaa

SEQ ID NO: 3754822 - DNA, 25 bp, Homo sapien
ttcaaacctcagaacagggaaagta

SEQ ID NO: 3754823 - DNA, 25 bp, Homo sapien
caaacctcagaacagggaaagtatc

SEQ ID NO: 3754824 - DNA, 25 bp, Homo sapien
cacttgttttctccgaatcacggaa

SEQ ID NO: 3754825 - DNA, 25 bp, Homo sapien
cgcgggctttttcacggtcagttca

SEQ ID NO: 3754826 - DNA, 25 bp, Homo sapien
agcctgcattccatggaagcccgcg

SEQ ID NO: 3754827 - DNA, 25 bp, Homo sapien
cattccatggaagcccgcgggcttt

SEQ ID NO: 3754828 - DNA, 25 bp, Homo sapien
ttccagggacagcagctcatcctcc

SEQ ID NO: 3754829 - DNA, 25 bp, Homo sapien
ccgttctcttccagggacagcagct

SEQ ID NO: 3754830 - DNA, 25 bp, Homo sapien
gcagctcatcctccttggtctggag

SEQ ID NO: 3754831 - DNA, 25 bp, Homo sapien
ctcatcctccttggtctggagtcac

SEQ ID NO: 3754832 - DNA, 25 bp, Homo sapien
ggcaagctcctagtctgaccagcac

SEQ ID NO: 3754833 - DNA, 25 bp, Homo sapien
ggtggcaggcaagctcctagtctga

SEQ ID NO: 3754834 - DNA, 25 bp, Homo sapien
gaacttcgtaggagctgcttccctc

SEQ ID NO: 3754835 - DNA, 25 bp, Homo sapien
agcagccacagagggaacttcgtag

SEQ ID NO: 3754836 - DNA, 25 bp, Homo sapien
ctaaaatcggtgaggaggaaaagat

SEQ ID NO: 3754837 - DNA, 25 bp, Homo sapien
taaagacctcctccaaacggcacag

SEQ ID NO: 3754838 - DNA, 25 bp, Homo sapien
cagaccactttcactcaagtctaaa

SEQ ID NO: 3754839 - DNA, 25 bp, Homo sapien
gctggggattctaaagacctcctcc

SEQ ID NO: 3754840 - DNA, 25 bp, Homo sapien
aaatggcttgttgtaaccctgctgg

SEQ ID NO: 3754841 - DNA, 25 bp, Homo sapien
ggataaatggcttgttgtaaccctg

SEQ ID NO: 3754842 - DNA, 25 bp, Homo sapien
atggcttgttgtaaccctgctgggt

SEQ ID NO: 3754843 - DNA, 25 bp, Homo sapien
caggggataaatggcttgttgtaac

SEQ ID NO: 3754844 - DNA, 25 bp, Homo sapien
gtatttatatccatatctgtatttc

SEQ ID NO: 3754845 - DNA, 25 bp, Homo sapien
tgtatttatatccatatctgtattt

SEQ ID NO: 3754846 - DNA, 25 bp, Homo sapien
tatgtatttatatccatatctgtat

SEQ ID NO: 3754847 - DNA, 25 bp, Homo sapien
ttatatgtatttatatccatatctg

SEQ ID NO: 3754848 - DNA, 25 bp, Homo sapien
agtgtctcggccgtttctccagtgc

SEQ ID NO: 3754849 - DNA, 25 bp, Homo sapien
cgaaatcgcctgcttactgagcaaa

SEQ ID NO: 3754850 - DNA, 25 bp, Homo sapien
tgacttcctgaagagccggcactct

SEQ ID NO: 3754851 - DNA, 25 bp, Homo sapien
cctttggagccggaactgacttcct

SEQ ID NO: 3754852 - DNA, 25 bp, Homo sapien
agcgctttaattctattgtaccgga

SEQ ID NO: 3754853 - DNA, 25 bp, Homo sapien
ggttcggaagcaactgaaagaaatc

SEQ ID NO: 3754854 - DNA, 25 bp, Homo sapien
ccagccaagtcaggttcggaagcaa

SEQ ID NO: 3754855 - DNA, 25 bp, Homo sapien
tctattgtaccggaggtccagccaa

SEQ ID NO: 3754856 - DNA, 25 bp, Homo sapien
gaatgcaaggaaactcctggaaggg

SEQ ID NO: 3754857 - DNA, 25 bp, Homo sapien
gagctcaggaaaggaggacgtctcc

SEQ ID NO: 3754858 - DNA, 25 bp, Homo sapien
tgtgacgtttccaccatgggcagga

SEQ ID NO: 3754859 - DNA, 25 bp, Homo sapien
tgggcaggattacaccccacaagtg

SEQ ID NO: 3754860 - DNA, 25 bp, Homo sapien
ggctcggcagatgtaccagctgagc

SEQ ID NO: 3754861 - DNA, 25 bp, Homo sapien
tgtaccagctgagccccggaacact

SEQ ID NO: 3754862 - DNA, 25 bp, Homo sapien
ggcagatgtaccagctgagccccgg

SEQ ID NO: 3754863 - DNA, 25 bp, Homo sapien
tggctcccatgcagctcccaaaaca

SEQ ID NO: 3754864 - DNA, 25 bp, Homo sapien
tcggttttgcctgagagggattgcg

SEQ ID NO: 3754865 - DNA, 25 bp, Homo sapien
gttcggttttgcctgagagggattg

SEQ ID NO: 3754866 - DNA, 25 bp, Homo sapien
ggttttgcctgagagggattgcggg

SEQ ID NO: 3754867 - DNA, 25 bp, Homo sapien
cctgagagggattgcggggggtgca

SEQ ID NO: 3754868 - DNA, 25 bp, Homo sapien
tgagttttatctgattcatggctaa

SEQ ID NO: 3754869 - DNA, 25 bp, Homo sapien
gtttttatactgtctacatggtagc

SEQ ID NO: 3754870 - DNA, 25 bp, Homo sapien
agccactatgcgtggtctcaactgt

SEQ ID NO: 3754871 - DNA, 25 bp, Homo sapien
atgtatacatgcgtatacatgtctg

SEQ ID NO: 3754872 - DNA, 25 bp, Homo sapien
aaactgtcagcattctatataccat

SEQ ID NO: 3754873 - DNA, 25 bp, Homo sapien
aactgtcagcattctatataccatt

SEQ ID NO: 3754874 - DNA, 25 bp, Homo sapien
actgtcagcattctatataccattc

SEQ ID NO: 3754875 - DNA, 25 bp, Homo sapien
aaaactgtcagcattctatatacca

SEQ ID NO: 3754876 - DNA, 25 bp, Homo sapien
tgtcttaggttcagtgctttcagcg

SEQ ID NO: 3754877 - DNA, 25 bp, Homo sapien
taggttcagtgctttcagcgtggtt

SEQ ID NO: 3754878 - DNA, 25 bp, Homo sapien
tccagagggcagtgtcttaggttca

SEQ ID NO: 3754879 - DNA, 25 bp, Homo sapien
agtgctttcagcgtggttacgctcc

SEQ ID NO: 3754880 - DNA, 25 bp, Homo sapien
gctggatagccaccaatcccttctg

SEQ ID NO: 3754881 - DNA, 25 bp, Homo sapien
tggatagccaccaatcccttctgca

SEQ ID NO: 3754882 - DNA, 25 bp, Homo sapien
aagcgctggatagccaccaatccct

SEQ ID NO: 3754883 - DNA, 25 bp, Homo sapien
caggaagcgctggatagccaccaat

SEQ ID NO: 3754884 - DNA, 25 bp, Homo sapien
cttgagaagttggatttctggggag

SEQ ID NO: 3754885 - DNA, 25 bp, Homo sapien
gttggatttctggggagagagtgtt

SEQ ID NO: 3754886 - DNA, 25 bp, Homo sapien
tggatttctggggagagagtgttct

SEQ ID NO: 3754887 - DNA, 25 bp, Homo sapien
gatttctggggagagagtgttctac

SEQ ID NO: 3754888 - DNA, 25 bp, Homo sapien
tgtacactgtgtcaactcagcagag

SEQ ID NO: 3754889 - DNA, 25 bp, Homo sapien
tgtgcccagatttatagaaccaagg

SEQ ID NO: 3754890 - DNA, 25 bp, Homo sapien
tcacagagatgactgggtcggcctg

SEQ ID NO: 3754891 - DNA, 25 bp, Homo sapien
ttaaagagaagacaggttctgccct

SEQ ID NO: 3754892 - DNA, 25 bp, Homo sapien
ctaatgcagcatcaagtcattcctg

SEQ ID NO: 3754893 - DNA, 25 bp, Homo sapien
ggtgataactgtttcatttgattga

SEQ ID NO: 3754894 - DNA, 25 bp, Homo sapien
gattgatcacaataaacttctacca

SEQ ID NO: 3754895 - DNA, 25 bp, Homo sapien
ctgcgggtggcttggaggtgataac

SEQ ID NO: 3754896 - DNA, 25 bp, Homo sapien
tcttgtacctcgttaggaataagga

SEQ ID NO: 3754897 - DNA, 25 bp, Homo sapien
tgtacctcgttaggaataaggaata

SEQ ID NO: 3754898 - DNA, 25 bp, Homo sapien
gaacaggttagtgagcacccaccaa

SEQ ID NO: 3754899 - DNA, 25 bp, Homo sapien
ccaacaaggtgattagataaaacat

SEQ ID NO: 3754900 - DNA, 25 bp, Homo sapien
gccatccctctgtgacttattcaaa

SEQ ID NO: 3754901 - DNA, 25 bp, Homo sapien
ctgtgacttattcaaaaagccagtg

SEQ ID NO: 3754902 - DNA, 25 bp, Homo sapien
tcaacgccatccctctgtgacttat

SEQ ID NO: 3754903 - DNA, 25 bp, Homo sapien
tccctctgtgacttattcaaaaagc

SEQ ID NO: 3754904 - DNA, 25 bp, Homo sapien
tcaagagctgatctcccagaacgtc

SEQ ID NO: 3754905 - DNA, 25 bp, Homo sapien
ttagacgcgtggtctccagacaact

SEQ ID NO: 3754906 - DNA, 25 bp, Homo sapien
gaggtaattccctcgtcaagagctg

SEQ ID NO: 3754907 - DNA, 25 bp, Homo sapien
caaggccgccttgagatttggaggt

SEQ ID NO: 3754908 - DNA, 25 bp, Homo sapien
atgtgtaggcgcacgccctaccacg

SEQ ID NO: 3754909 - DNA, 25 bp, Homo sapien
tgattcgagtttttctctcatgtag

SEQ ID NO: 3754910 - DNA, 25 bp, Homo sapien
tcccatatgtgtaggcgcacgccct

SEQ ID NO: 3754911 - DNA, 25 bp, Homo sapien
cctaccacgcccatgattcgagttt

SEQ ID NO: 3754912 - DNA, 25 bp, Homo sapien
tgggcactggcctttaacctgctgc

SEQ ID NO: 3754913 - DNA, 25 bp, Homo sapien
tgactgtctcagtagagcagagagg

SEQ ID NO: 3754914 - DNA, 25 bp, Homo sapien
ctgcacgggaacagcagtgactgtc

SEQ ID NO: 3754915 - DNA, 25 bp, Homo sapien
ttaacctgctgcttttggaagggca

SEQ ID NO: 3754916 - DNA, 25 bp, Homo sapien
agtgactgtccctcgtcttccccat

SEQ ID NO: 3754917 - DNA, 25 bp, Homo sapien
tgcacgggaacagcagtgactgtcc

SEQ ID NO: 3754918 - DNA, 25 bp, Homo sapien
gaacagcagtgactgtccctcgtct

SEQ ID NO: 3754919 - DNA, 25 bp, Homo sapien
atcttccccgtctgcacgggaacag

SEQ ID NO: 3754920 - DNA, 25 bp, Homo sapien
aaaccaaacacttcgcccagaggag

SEQ ID NO: 3754921 - DNA, 25 bp, Homo sapien
tctccctgcccatgagagggagctg

SEQ ID NO: 3754922 - DNA, 25 bp, Homo sapien
acagccaagcagcatgcccggtggc

SEQ ID NO: 3754923 - DNA, 25 bp, Homo sapien
agcagaggggatagccagtaacatg

SEQ ID NO: 3754924 - DNA, 25 bp, Homo sapien
gacacattcaggcagggtcagatac

SEQ ID NO: 3754925 - DNA, 25 bp, Homo sapien
gcaggcaaggccatcagaaggcgcc

SEQ ID NO: 3754926 - DNA, 25 bp, Homo sapien
gcaaggccatcagaaggcgcctggc

SEQ ID NO: 3754927 - DNA, 25 bp, Homo sapien
aggcagggtcagatactgggtcccc

SEQ ID NO: 3754928 - DNA, 25 bp, Homo sapien
gtgctgcagcaggtcggaatcccat

SEQ ID NO: 3754929 - DNA, 25 bp, Homo sapien
tgacgtgcctggagttcaggtgcat

SEQ ID NO: 3754930 - DNA, 25 bp, Homo sapien
tcgcccgggctggacgatgtgacgt

SEQ ID NO: 3754931 - DNA, 25 bp, Homo sapien
ctggacagagatgcccgcggaagca

SEQ ID NO: 3754932 - DNA, 25 bp, Homo sapien
aaggagggcctgtggatcatccgct

SEQ ID NO: 3754933 - DNA, 25 bp, Homo sapien
tactttcccgggacgcttgacagtc

SEQ ID NO: 3754934 - DNA, 25 bp, Homo sapien
caattagcacgactagaagctgcag

SEQ ID NO: 3754935 - DNA, 25 bp, Homo sapien
cttgacagtcggcttgggaaatgca

SEQ ID NO: 3754936 - DNA, 25 bp, Homo sapien
tccagtctttttgctcggatcgcca

SEQ ID NO: 3754937 - DNA, 25 bp, Homo sapien
catttggtacggtgacaagaggtcg

SEQ ID NO: 3754938 - DNA, 25 bp, Homo sapien
tgacaagaggtcgggtaagatgctc

SEQ ID NO: 3754939 - DNA, 25 bp, Homo sapien
tgctcggatcgccatttggtacggt

SEQ ID NO: 3754940 - DNA, 25 bp, Homo sapien
ctccctgatgaccgtgtcagggcct

SEQ ID NO: 3754941 - DNA, 25 bp, Homo sapien
cctgatgaccgtgtcagggcctgga

SEQ ID NO: 3754942 - DNA, 25 bp, Homo sapien
tccctgatgaccgtgtcagggcctg

SEQ ID NO: 3754943 - DNA, 25 bp, Homo sapien
ccctgatgaccgtgtcagggcctgg

SEQ ID NO: 3754944 - DNA, 25 bp, Homo sapien
cgcaaggtggtggcactggcggcag

SEQ ID NO: 3754945 - DNA, 25 bp, Homo sapien
tcgcaaggtggtggcactggcggca

SEQ ID NO: 3754946 - DNA, 25 bp, Homo sapien
ctcgcaaggtggtggcactggcggc

SEQ ID NO: 3754947 - DNA, 25 bp, Homo sapien
gaaagtaaagacgaggccctcgctc

SEQ ID NO: 3754948 - DNA, 25 bp, Homo sapien
gaaggagagattgtcggaacccaga

SEQ ID NO: 3754949 - DNA, 25 bp, Homo sapien
gcagctcacaaagaagccgggaaag

SEQ ID NO: 3754950 - DNA, 25 bp, Homo sapien
ggctgtggtccatgccagccggact

SEQ ID NO: 3754951 - DNA, 25 bp, Homo sapien
ggggcggtgcaagagccctgtgcca

SEQ ID NO: 3754952 - DNA, 25 bp, Homo sapien
gcggtgcaagagccctgtgccagtc

SEQ ID NO: 3754953 - DNA, 25 bp, Homo sapien
ggtttattcatgttggggagggagc

SEQ ID NO: 3754954 - DNA, 25 bp, Homo sapien
cacaggggcggtgcaagagccctgt

SEQ ID NO: 3754955 - DNA, 25 bp, Homo sapien
ggcaggagtttgctgagctcttcct

SEQ ID NO: 3754956 - DNA, 25 bp, Homo sapien
tgctcctccgcggaggcaggagttt

SEQ ID NO: 3754957 - DNA, 25 bp, Homo sapien
ctctccactcctgcagtgccctttt

SEQ ID NO: 3754958 - DNA, 25 bp, Homo sapien
tcctcatcctctgggctcgctctct

SEQ ID NO: 3754959 - DNA, 25 bp, Homo sapien
ccagggtttgtacgtcaagtgtcaa

SEQ ID NO: 3754960 - DNA, 25 bp, Homo sapien
aaatataaacacgaacacaccggcg

SEQ ID NO: 3754961 - DNA, 25 bp, Homo sapien
caaaatatgggctcaagtcatggct

SEQ ID NO: 3754962 - DNA, 25 bp, Homo sapien
tatgtatttggagggaagcccaccc

SEQ ID NO: 3754963 - DNA, 25 bp, Homo sapien
gcttgtggcgatttctctttgcttg

SEQ ID NO: 3754964 - DNA, 25 bp, Homo sapien
ttccaggcggattcagtggtacttt

SEQ ID NO: 3754965 - DNA, 25 bp, Homo sapien
tcatttctttacttgcttgtggcga

SEQ ID NO: 3754966 - DNA, 25 bp, Homo sapien
ggtttcatttttccaggcggattca

SEQ ID NO: 3754967 - DNA, 25 bp, Homo sapien
aatttccagatcctcggcagccttc

SEQ ID NO: 3754968 - DNA, 25 bp, Homo sapien
ggaggacgtgctgttttatcttctc

SEQ ID NO: 3754969 - DNA, 25 bp, Homo sapien
ccatggaatcttctttgctcacgca

SEQ ID NO: 3754970 - DNA, 25 bp, Homo sapien
tctttgctcacgcatttggaggacg

SEQ ID NO: 3754971 - DNA, 25 bp, Homo sapien
ttttaggctgtgcacagtggcccag

SEQ ID NO: 3754972 - DNA, 25 bp, Homo sapien
tgcacagtggcccagcaatttggga

SEQ ID NO: 3754973 - DNA, 25 bp, Homo sapien
gctgtgcacagtggcccagcaattt

SEQ ID NO: 3754974 - DNA, 25 bp, Homo sapien
tgtgcacagtggcccagcaatttgg

SEQ ID NO: 3754975 - DNA, 25 bp, Homo sapien
gtgaataaacagcactggcggtggc

SEQ ID NO: 3754976 - DNA, 25 bp, Homo sapien
gcagttctgcttaggaggctcctgg

SEQ ID NO: 3754977 - DNA, 25 bp, Homo sapien
caaatatataggagccacttccgtg

SEQ ID NO: 3754978 - DNA, 25 bp, Homo sapien
tcctggtcaggaggccttggatccc

SEQ ID NO: 3754979 - DNA, 25 bp, Homo sapien
ggtatccaggttcactgccagggac

SEQ ID NO: 3754980 - DNA, 25 bp, Homo sapien
cagttcgggcagcaaagcactttcc

SEQ ID NO: 3754981 - DNA, 25 bp, Homo sapien
ggatactccaagtaccaggaggtgg

SEQ ID NO: 3754982 - DNA, 25 bp, Homo sapien
tgtgtccttctacagctggatgggc

SEQ ID NO: 3754983 - DNA, 25 bp, Homo sapien
cttgggtagcttgagaggacaggcc

SEQ ID NO: 3754984 - DNA, 25 bp, Homo sapien
ccttgggtagcttgagaggacaggc

SEQ ID NO: 3754985 - DNA, 25 bp, Homo sapien
gccttgggtagcttgagaggacagg

SEQ ID NO: 3754986 - DNA, 25 bp, Homo sapien
ttgggtagcttgagaggacaggcca

SEQ ID NO: 3754987 - DNA, 25 bp, Homo sapien
ctgtgttcgggcatggtacactgac

SEQ ID NO: 3754988 - DNA, 25 bp, Homo sapien
cccgtgacagtgctgcgtgctctgg

SEQ ID NO: 3754989 - DNA, 25 bp, Homo sapien
gagagagggaaacagcggaaatggt

SEQ ID NO: 3754990 - DNA, 25 bp, Homo sapien
tcgcaccagcctgacctgtgttcgg

SEQ ID NO: 3754991 - DNA, 25 bp, Homo sapien
taaaggcagatacaaactccttggg

SEQ ID NO: 3754992 - DNA, 25 bp, Homo sapien
agatacaaactccttgggctgagga

SEQ ID NO: 3754993 - DNA, 25 bp, Homo sapien
tcagaagtggggtccgagtcaggtt

SEQ ID NO: 3754994 - DNA, 25 bp, Homo sapien
tatctaaaggcagatacaaactcct

SEQ ID NO: 3754995 - DNA, 25 bp, Homo sapien
cctaggtggcacgaaagtcaatgga

SEQ ID NO: 3754996 - DNA, 25 bp, Homo sapien
cactgctctgcatgtaaccagggcg

SEQ ID NO: 3754997 - DNA, 25 bp, Homo sapien
gctttgcattcagacctacccaggt

SEQ ID NO: 3754998 - DNA, 25 bp, Homo sapien
tacagtgtcaccgtagggccagttg

SEQ ID NO: 3754999 - DNA, 25 bp, Homo sapien
gaaaggctggcaggacttagggcgt

SEQ ID NO: 3755000 - DNA, 25 bp, Homo sapien
ctgcaagccgcatcacggcgcggtc

SEQ ID NO: 3755001 - DNA, 25 bp, Homo sapien
acttagggcgtcaccacgtctctgg

SEQ ID NO: 3755002 - DNA, 25 bp, Homo sapien
gctggcaggacttagggcgtcacca

SEQ ID NO: 3755003 - DNA, 25 bp, Homo sapien
tcaatacttcatcctgtagctctgt

SEQ ID NO: 3755004 - DNA, 25 bp, Homo sapien
ggcaggccaagcgaaaggtttccag

SEQ ID NO: 3755005 - DNA, 25 bp, Homo sapien
tcctgattctccatattttgtgtta

SEQ ID NO: 3755006 - DNA, 25 bp, Homo sapien
gcccgtcgacgatctttgttcaagg

SEQ ID NO: 3755007 - DNA, 25 bp, Homo sapien
gaaaacaacaggctgcgcgaaatca

SEQ ID NO: 3755008 - DNA, 25 bp, Homo sapien
gacgtggacctgtctaaggaaaaca

SEQ ID NO: 3755009 - DNA, 25 bp, Homo sapien
ggaaagaagactgagcggctcctgt

SEQ ID NO: 3755010 - DNA, 25 bp, Homo sapien
ttaatacggctgaaatcttccacag

SEQ ID NO: 3755011 - DNA, 25 bp, Homo sapien
gcctgagtgtgagcactctgtcaca

SEQ ID NO: 3755012 - DNA, 25 bp, Homo sapien
ctaagtgaaggaaagctgtgagtac

SEQ ID NO: 3755013 - DNA, 25 bp, Homo sapien
cctcctagccaaaggtggtgctgca

SEQ ID NO: 3755014 - DNA, 25 bp, Homo sapien
cgggaatcgggtgacctggtctcct

SEQ ID NO: 3755015 - DNA, 25 bp, Homo sapien
gaaaggagggcttgtcactgggcag

SEQ ID NO: 3755016 - DNA, 25 bp, Homo sapien
aggagggcttgtcactgggcaggga

SEQ ID NO: 3755017 - DNA, 25 bp, Homo sapien
gggaaaggagggcttgtcactgggc

SEQ ID NO: 3755018 - DNA, 25 bp, Homo sapien
ccaggggaaaggagggcttgtcact

SEQ ID NO: 3755019 - DNA, 25 bp, Homo sapien
cagaagagacgtgcaggttacagcc

SEQ ID NO: 3755020 - DNA, 25 bp, Homo sapien
tcaaaggactgggatcacaacggac

SEQ ID NO: 3755021 - DNA, 25 bp, Homo sapien
taaaaccacgtagacaggaggcatc

SEQ ID NO: 3755022 - DNA, 25 bp, Homo sapien
gaaaccaggcttaagtcagtcagta

SEQ ID NO: 3755023 - DNA, 25 bp, Homo sapien
gcactccctgagaacacggaggtga

SEQ ID NO: 3755024 - DNA, 25 bp, Homo sapien
gcactccccgagaacacggaggtga

SEQ ID NO: 3755025 - DNA, 25 bp, Homo sapien
gagcaggatgggatctgacaccacg

SEQ ID NO: 3755026 - DNA, 25 bp, Homo sapien
ggagcaggatgggatctgacaccac

SEQ ID NO: 3755027 - DNA, 25 bp, Homo sapien
caggatgggatctgagaccacgcac

SEQ ID NO: 3755028 - DNA, 25 bp, Homo sapien
gagaacacggaggtgagaggaaact

SEQ ID NO: 3755029 - DNA, 25 bp, Homo sapien
gcaggatgggatctgagaccacgca

SEQ ID NO: 3755030 - DNA, 25 bp, Homo sapien
agaacacggaggtgagaggaaactc

SEQ ID NO: 3755031 - DNA, 25 bp, Homo sapien
aacacggaggtgagaggaaatgctg

SEQ ID NO: 3755032 - DNA, 25 bp, Homo sapien
aggatgggatctgacaccacgcact

SEQ ID NO: 3755033 - DNA, 25 bp, Homo sapien
acgcactccccgagaacacggaggt

SEQ ID NO: 3755034 - DNA, 25 bp, Homo sapien
ggagcaggatgggatctgacaccac

SEQ ID NO: 3755035 - DNA, 25 bp, Homo sapien
tactgaagacatgaaccgctcgtgc

SEQ ID NO: 3755036 - DNA, 25 bp, Homo sapien
tagcaccacacgatgttttaagcgg

SEQ ID NO: 3755037 - DNA, 25 bp, Homo sapien
tatcttgaattggtaggcaaccgca

SEQ ID NO: 3755038 - DNA, 25 bp, Homo sapien
taagcggatccttgacatgcttgcg

SEQ ID NO: 3755039 - DNA, 25 bp, Homo sapien
agactattttcagggtctggtacca

SEQ ID NO: 3755040 - DNA, 25 bp, Homo sapien
cagactattttcagggtctggtacc

SEQ ID NO: 3755041 - DNA, 25 bp, Homo sapien
ccccagactattttcagggtctggt

SEQ ID NO: 3755042 - DNA, 25 bp, Homo sapien
ggcacggctggtcccccagactatt

SEQ ID NO: 3755043 - DNA, 25 bp, Homo sapien
aacatagacggtactcactcagtag

SEQ ID NO: 3755044 - DNA, 25 bp, Homo sapien
caacatagacggtactcactcagta

SEQ ID NO: 3755045 - DNA, 25 bp, Homo sapien
tcaacatagacggtactcactcagt

SEQ ID NO: 3755046 - DNA, 25 bp, Homo sapien
tgtgtcctgagacccggaccgagcg

SEQ ID NO: 3755047 - DNA, 25 bp, Homo sapien
gcccacgccgggttctgcgctgtgt

SEQ ID NO: 3755048 - DNA, 25 bp, Homo sapien
ctgcgctgtgtgtcctgagacccgg

SEQ ID NO: 3755049 - DNA, 25 bp, Homo sapien
cacgccgggttctgcgctgtgtgtc

SEQ ID NO: 3755050 - DNA, 25 bp, Homo sapien
cactggtgtgtcagcaggtgcagca

SEQ ID NO: 3755051 - DNA, 25 bp, Homo sapien
cctgtgctggatctagggaggcact

SEQ ID NO: 3755052 - DNA, 25 bp, Homo sapien
tggagggccgagagcagagccctgt

SEQ ID NO: 3755053 - DNA, 25 bp, Homo sapien
agaggccaggtgttcgtgctgtccc

SEQ ID NO: 3755054 - DNA, 25 bp, Homo sapien
tgagctgaggtgtagaccccaggca

SEQ ID NO: 3755055 - DNA, 25 bp, Homo sapien
ctgagctgaggtgtagaccccaggc

SEQ ID NO: 3755056 - DNA, 25 bp, Homo sapien
gagctgaggtgtagaccccaggcag

SEQ ID NO: 3755057 - DNA, 25 bp, Homo sapien
aacggcttggccagacatggatctc

SEQ ID NO: 3755058 - DNA, 25 bp, Homo sapien
cctggtgaggttctccacgaagagg

SEQ ID NO: 3755059 - DNA, 25 bp, Homo sapien
tggcttgaagttaacccttgaggtc

SEQ ID NO: 3755060 - DNA, 25 bp, Homo sapien
ccccatgttgatccaaacggcttgg

SEQ ID NO: 3755061 - DNA, 25 bp, Homo sapien
ccccgattaaagtgcaggtgtcctt

SEQ ID NO: 3755062 - DNA, 25 bp, Homo sapien
tccagagtccccgattaaagtgcag

SEQ ID NO: 3755063 - DNA, 25 bp, Homo sapien
catcagcccaggtatcccctcctgt

SEQ ID NO: 3755064 - DNA, 25 bp, Homo sapien
gggacctcatcagcccaggtatccc

SEQ ID NO: 3755065 - DNA, 25 bp, Homo sapien
gccagacagatgcacccagcagctg

SEQ ID NO: 3755066 - DNA, 25 bp, Homo sapien
ccagacagatgcacccagcagctgg

SEQ ID NO: 3755067 - DNA, 25 bp, Homo sapien
gaccgaggccgaatgagccagagtt

SEQ ID NO: 3755068 - DNA, 25 bp, Homo sapien
aaggcgccccgttctccagggtcag

SEQ ID NO: 3755069 - DNA, 25 bp, Homo sapien
acacctgaccgtccggctagaacag

SEQ ID NO: 3755070 - DNA, 25 bp, Homo sapien
gccagggcggagtgagggagcccgc

SEQ ID NO: 3755071 - DNA, 25 bp, Homo sapien
ctgctgcggtgaccttggccccggg

SEQ ID NO: 3755072 - DNA, 25 bp, Homo sapien
gcttctgagccggacttgcagcgcc

SEQ ID NO: 3755073 - DNA, 25 bp, Homo sapien
ccgggccgggcttctgagccggact

SEQ ID NO: 3755074 - DNA, 25 bp, Homo sapien
agccggacttgcagcgcctgacgag

SEQ ID NO: 3755075 - DNA, 25 bp, Homo sapien
cccgacttccccgagcaccagcacg

SEQ ID NO: 3755076 - DNA, 25 bp, Homo sapien
ccccgacttccccgagcaccagcac

SEQ ID NO: 3755077 - DNA, 25 bp, Homo sapien
cccccgacttccccgagcaccagca

SEQ ID NO: 3755078 - DNA, 25 bp, Homo sapien
acccgcgggcgaggagtgggaggtg

SEQ ID NO: 3755079 - DNA, 25 bp, Homo sapien
aggtctcgggcgtgtctcttcgggt

SEQ ID NO: 3755080 - DNA, 25 bp, Homo sapien
gtgtctcttcgggttgccgggccca

SEQ ID NO: 3755081 - DNA, 25 bp, Homo sapien
gcgcctccgccagtttacaaaggaa

SEQ ID NO: 3755082 - DNA, 25 bp, Homo sapien
gtgaccaccagcgcgccgttgacga

SEQ ID NO: 3755083 - DNA, 25 bp, Homo sapien
tcgccgcagctcaccgtgaccacca

SEQ ID NO: 3755084 - DNA, 25 bp, Homo sapien
tttttcgtgcagtccagcaggatcc

SEQ ID NO: 3755085 - DNA, 25 bp, Homo sapien
agtccagcaggatccccgcgaagct

SEQ ID NO: 3755086 - DNA, 25 bp, Homo sapien
ttttagagccatccgctgggccttg

SEQ ID NO: 3755087 - DNA, 25 bp, Homo sapien
tgcccttttagagccatccgctggg

SEQ ID NO: 3755088 - DNA, 25 bp, Homo sapien
gctgtgacccacaggtaacaccgag

SEQ ID NO: 3755089 - DNA, 25 bp, Homo sapien
caggtaacaccgagccttggcaggt

SEQ ID NO: 3755090 - DNA, 25 bp, Homo sapien
gggttagtcccttcccaggcagatc

SEQ ID NO: 3755091 - DNA, 25 bp, Homo sapien
tttgggaccctgagtcacacctgca

SEQ ID NO: 3755092 - DNA, 25 bp, Homo sapien
tcagtgcccagggactggacaagcc

SEQ ID NO: 3755093 - DNA, 25 bp, Homo sapien
tgaggaggccccacaaacggagcca

SEQ ID NO: 3755094 - DNA, 25 bp, Homo sapien
gctggtgcacacgcccgctggtgca

SEQ ID NO: 3755095 - DNA, 25 bp, Homo sapien
acgcccgctggtgcacgcaggcacc

SEQ ID NO: 3755096 - DNA, 25 bp, Homo sapien
gctggtgcacgcaggcaccctgagc

SEQ ID NO: 3755097 - DNA, 25 bp, Homo sapien
tgcacacgcccgctggtgcacgcag

SEQ ID NO: 3755098 - DNA, 25 bp, Homo sapien
ccaacaagctgctgtgagcgcgtca

SEQ ID NO: 3755099 - DNA, 25 bp, Homo sapien
tccacagggaacacgcgtaactggt

SEQ ID NO: 3755100 - DNA, 25 bp, Homo sapien
catggaaaacgggtccacagaatcc

SEQ ID NO: 3755101 - DNA, 25 bp, Homo sapien
cacagaatccacgtttccacaggga

SEQ ID NO: 3755102 - DNA, 25 bp, Homo sapien
ctggcaccctcaggtcctgccctgc

SEQ ID NO: 3755103 - DNA, 25 bp, Homo sapien
caggtcctgccctgctgggccacac

SEQ ID NO: 3755104 - DNA, 25 bp, Homo sapien
tggcaccctcaggtcctgccctgct

SEQ ID NO: 3755105 - DNA, 25 bp, Homo sapien
gtcctgccctgctgggccacacgag

SEQ ID NO: 3755106 - DNA, 25 bp, Homo sapien
tggagaatgccgtcctgcaggagcc

SEQ ID NO: 3755107 - DNA, 25 bp, Homo sapien
cagaagaatgccgtcctgcaggagc

SEQ ID NO: 3755108 - DNA, 25 bp, Homo sapien
agccctggagaatgccgtcctgcag

SEQ ID NO: 3755109 - DNA, 25 bp, Homo sapien
tcagggaagacaacccctagggcca

SEQ ID NO: 3755110 - DNA, 25 bp, Homo sapien
cgacccatgctccggcaggtctggg

SEQ ID NO: 3755111 - DNA, 25 bp, Homo sapien
tccggcaggtctgggcagcgagcca

SEQ ID NO: 3755112 - DNA, 25 bp, Homo sapien
ccccgacccatgctccggcaggtct

SEQ ID NO: 3755113 - DNA, 25 bp, Homo sapien
cccatgctccggcaggtctgggcag

SEQ ID NO: 3755114 - DNA, 25 bp, Homo sapien
acaggggactcatcgacctggggca

SEQ ID NO: 3755115 - DNA, 25 bp, Homo sapien
cagcggagccaacgggggtaggcca

SEQ ID NO: 3755116 - DNA, 25 bp, Homo sapien
atcgacctggggcagcggagccaac

SEQ ID NO: 3755117 - DNA, 25 bp, Homo sapien
ccatggctgtcgttgacaggggact

SEQ ID NO: 3755118 - DNA, 25 bp, Homo sapien
gagggggggagctggaccccagctg

SEQ ID NO: 3755119 - DNA, 25 bp, Homo sapien
gcaggagggggggagctggacccca

SEQ ID NO: 3755120 - DNA, 25 bp, Homo sapien
gcgggcaggagggggggagctggac

SEQ ID NO: 3755121 - DNA, 25 bp, Homo sapien
cccgcgggcaggagggggggagctg

SEQ ID NO: 3755122 - DNA, 25 bp, Homo sapien
cgggcagcggcggcacgaggggcgg

SEQ ID NO: 3755123 - DNA, 25 bp, Homo sapien
ggcgggcagcggcggcacgaggggc

SEQ ID NO: 3755124 - DNA, 25 bp, Homo sapien
ccggcgggcagcggcggcacgaggg

SEQ ID NO: 3755125 - DNA, 25 bp, Homo sapien
ttccggcgggcagcggcggcacgag

SEQ ID NO: 3755126 - DNA, 25 bp, Homo sapien
ccgggtcgcggttgcgggacagacg

SEQ ID NO: 3755127 - DNA, 25 bp, Homo sapien
ccgccgcgtgcgcttgatggtcctg

SEQ ID NO: 3755128 - DNA, 25 bp, Homo sapien
acagcttgtacgtgtcccggagcca

SEQ ID NO: 3755129 - DNA, 25 bp, Homo sapien
gggcacccacagcttgtacgtgtcc

SEQ ID NO: 3755130 - DNA, 25 bp, Homo sapien
ccggcacaggccgtgtcagtttcaa

SEQ ID NO: 3755131 - DNA, 25 bp, Homo sapien
gtgatgcactccgacacgctctgtg

SEQ ID NO: 3755132 - DNA, 25 bp, Homo sapien
ggagatcttgatgaccgggctccgc

SEQ ID NO: 3755133 - DNA, 25 bp, Homo sapien
ggcagctgacgagaaaagccaagcc

SEQ ID NO: 3755134 - DNA, 25 bp, Homo sapien
ttcaaactgggttaagagctccctg

SEQ ID NO: 3755135 - DNA, 25 bp, Homo sapien
gagaccttcgcttctcgccaagacg

SEQ ID NO: 3755136 - DNA, 25 bp, Homo sapien
tagtcggagaaccaaaccacgagac

SEQ ID NO: 3755137 - DNA, 25 bp, Homo sapien
ggccacgtgtcttgcggcatttgca

SEQ ID NO: 3755138 - DNA, 25 bp, Homo sapien
tgcaacggagccgatctcgtggtgc

SEQ ID NO: 3755139 - DNA, 25 bp, Homo sapien
gcggtgactgctccttgacaagtgc

SEQ ID NO: 3755140 - DNA, 25 bp, Homo sapien
tggtgcctgcggtgactgctccttg

SEQ ID NO: 3755141 - DNA, 25 bp, Homo sapien
acggagccgatctcgtggtgcctgc

SEQ ID NO: 3755142 - DNA, 25 bp, Homo sapien
catggcctgtgcacagcggaccttt

SEQ ID NO: 3755143 - DNA, 25 bp, Homo sapien
gccgggcagcttcctgattattatc

SEQ ID NO: 3755144 - DNA, 25 bp, Homo sapien
caggaagctcaaggacgctgttcta

SEQ ID NO: 3755145 - DNA, 25 bp, Homo sapien
tctggcccggagactccagtgagca

SEQ ID NO: 3755146 - DNA, 25 bp, Homo sapien
tggctgggaggaagcggcaaggacc

SEQ ID NO: 3755147 - DNA, 25 bp, Homo sapien
ggctcagaattacaggcctctgttt

SEQ ID NO: 3755148 - DNA, 25 bp, Homo sapien
ctcagaattacaggcctctgtttcc

SEQ ID NO: 3755149 - DNA, 25 bp, Homo sapien
caggctcagaattacaggcctctgt

SEQ ID NO: 3755150 - DNA, 25 bp, Homo sapien
gcagcagcagtacatcgtctagaaa

SEQ ID NO: 3755151 - DNA, 25 bp, Homo sapien
gctacagagaagaaagggccggcaa

SEQ ID NO: 3755152 - DNA, 25 bp, Homo sapien
ggctgccatgggagaaactgcaacc

SEQ ID NO: 3755153 - DNA, 25 bp, Homo sapien
caagccgggatcaatgctacagaga

SEQ ID NO: 3755154 - DNA, 25 bp, Homo sapien
cggggacagacgatcccgtcagccc

SEQ ID NO: 3755155 - DNA, 25 bp, Homo sapien
gcggggacagacgatcccgtcagcc

SEQ ID NO: 3755156 - DNA, 25 bp, Homo sapien
tggcggggacagacgatcccgtcag

SEQ ID NO: 3755157 - DNA, 25 bp, Homo sapien
gggacagacgatcccgtcagccccg

SEQ ID NO: 3755158 - DNA, 25 bp, Homo sapien
ggccccggatggccacctcaggcaa

SEQ ID NO: 3755159 - DNA, 25 bp, Homo sapien
cccggatggccacctcaggcaaaaa

SEQ ID NO: 3755160 - DNA, 25 bp, Homo sapien
ccccggatggccacctcaggcaaaa

SEQ ID NO: 3755161 - DNA, 25 bp, Homo sapien
gccccggatggccacctcaggcaaa

SEQ ID NO: 3755162 - DNA, 25 bp, Homo sapien
agatctgtgcggagccccaggtgtc

SEQ ID NO: 3755163 - DNA, 25 bp, Homo sapien
ggaccagcccctcaaggtctgagca

SEQ ID NO: 3755164 - DNA, 25 bp, Homo sapien
gagagtgcagggtcttccatgcttg

SEQ ID NO: 3755165 - DNA, 25 bp, Homo sapien
cagagatttaactcagggtcgagta

SEQ ID NO: 3755166 - DNA, 25 bp, Homo sapien
cccgaacagagatcggaagctccag

SEQ ID NO: 3755167 - DNA, 25 bp, Homo sapien
aacagagatcggaagctccaggaca

SEQ ID NO: 3755168 - DNA, 25 bp, Homo sapien
cacagggtccccgaacagagatcgg

SEQ ID NO: 3755169 - DNA, 25 bp, Homo sapien
ggtccccgaacagagatcggaagct

SEQ ID NO: 3755170 - DNA, 25 bp, Homo sapien
gagtggtgggaagaaatacactcag

SEQ ID NO: 3755171 - DNA, 25 bp, Homo sapien
gaaatacactcagcgggaggagccg

SEQ ID NO: 3755172 - DNA, 25 bp, Homo sapien
agaaatacactcagcgggaggagcc

SEQ ID NO: 3755173 - DNA, 25 bp, Homo sapien
agttcctccatggaaccccagcgcg

SEQ ID NO: 3755174 - DNA, 25 bp, Homo sapien
catggaaccccagcgcgcgaggcag

SEQ ID NO: 3755175 - DNA, 25 bp, Homo sapien
agccagcaagtcacgagtcccgact

SEQ ID NO: 3755176 - DNA, 25 bp, Homo sapien
cgactgcctcgtgagccagggcagc

SEQ ID NO: 3755177 - DNA, 25 bp, Homo sapien
ccaggacactgcgaggcagggaaca

SEQ ID NO: 3755178 - DNA, 25 bp, Homo sapien
ctccaggacactgcgaggcagggaa

SEQ ID NO: 3755179 - DNA, 25 bp, Homo sapien
gagaccaagctgagtctgcgagaca

SEQ ID NO: 3755180 - DNA, 25 bp, Homo sapien
caagctgagtctgcgagacagctgc

SEQ ID NO: 3755181 - DNA, 25 bp, Homo sapien
ctcaagtgcacagagaccccgcacc

SEQ ID NO: 3755182 - DNA, 25 bp, Homo sapien
ggaagaatcccacacgtgcaattgg

SEQ ID NO: 3755183 - DNA, 25 bp, Homo sapien
gaatcccacacgtgcaattgggttt

SEQ ID NO: 3755184 - DNA, 25 bp, Homo sapien
agagaccccgcacccaagggctggg

SEQ ID NO: 3755185 - DNA, 25 bp, Homo sapien
caggtgccaggtgcccagcgggccc

SEQ ID NO: 3755186 - DNA, 25 bp, Homo sapien
aggtgccaggtgcccagcgggcccc

SEQ ID NO: 3755187 - DNA, 25 bp, Homo sapien
gtgccaggtgcccagcgggccccac

SEQ ID NO: 3755188 - DNA, 25 bp, Homo sapien
gccaggtgcccagcgggccccacgc

SEQ ID NO: 3755189 - DNA, 25 bp, Homo sapien
cagcactggtcactcgtagcagcat

SEQ ID NO: 3755190 - DNA, 25 bp, Homo sapien
acacagcactggtcactcgtagcag

SEQ ID NO: 3755191 - DNA, 25 bp, Homo sapien
tgtactgttgaagcccggtttccca

SEQ ID NO: 3755192 - DNA, 25 bp, Homo sapien
acagcactggtcactcgtagcagca

SEQ ID NO: 3755193 - DNA, 25 bp, Homo sapien
tcagggcggtgaccagcgtcccccc

SEQ ID NO: 3755194 - DNA, 25 bp, Homo sapien
gctcagggcggtgaccagcgtcccc

SEQ ID NO: 3755195 - DNA, 25 bp, Homo sapien
tggggctcagggcggtgaccagcgt

SEQ ID NO: 3755196 - DNA, 25 bp, Homo sapien
gggctcagggcggtgaccagcgtcc

SEQ ID NO: 3755197 - DNA, 25 bp, Homo sapien
gggtctcaggattgaagggcaaggg

SEQ ID NO: 3755198 - DNA, 25 bp, Homo sapien
tcagggtctcaggattgaagggcaa

SEQ ID NO: 3755199 - DNA, 25 bp, Homo sapien
ctcagggtctcaggattgaagggca

SEQ ID NO: 3755200 - DNA, 25 bp, Homo sapien
gtctcaggattgaagggcaagggct

SEQ ID NO: 3755201 - DNA, 25 bp, Homo sapien
ctgtaatgcaaagtatgcaccccca

SEQ ID NO: 3755202 - DNA, 25 bp, Homo sapien
gtgaggactcctcacctgctcttgc

SEQ ID NO: 3755203 - DNA, 25 bp, Homo sapien
tgcaaagtatgcacccccagtgagg

SEQ ID NO: 3755204 - DNA, 25 bp, Homo sapien
cagcagggcctaggctgcggggctt

SEQ ID NO: 3755205 - DNA, 25 bp, Homo sapien
tggggtcctggccacggtgccgtcc

SEQ ID NO: 3755206 - DNA, 25 bp, Homo sapien
gccacggtgccgtccaggcaggatt

SEQ ID NO: 3755207 - DNA, 25 bp, Homo sapien
tcctggccacggtgccgtccaggca

SEQ ID NO: 3755208 - DNA, 25 bp, Homo sapien
cacggtgccgtccaggcaggatttg

SEQ ID NO: 3755209 - DNA, 25 bp, Homo sapien
ttgtttgtggtgtggtgcccgcagc

SEQ ID NO: 3755210 - DNA, 25 bp, Homo sapien
gtttgtggtgtggtgcccgcagccg

SEQ ID NO: 3755211 - DNA, 25 bp, Homo sapien
ggcttgtttgtggtgtggtgcccgc

SEQ ID NO: 3755212 - DNA, 25 bp, Homo sapien
gcttgtttgtggtgtggtgcccgca

SEQ ID NO: 3755213 - DNA, 25 bp, Homo sapien
tccaaaggcggcattctcccctcca

SEQ ID NO: 3755214 - DNA, 25 bp, Homo sapien
cccctccaccgagcccgtgtgttca

SEQ ID NO: 3755215 - DNA, 25 bp, Homo sapien
aggcggcattctcccctccaccgag

SEQ ID NO: 3755216 - DNA, 25 bp, Homo sapien
cagggggcttgcaagacaggagcca

SEQ ID NO: 3755217 - DNA, 25 bp, Homo sapien
tgccactggcccctcggcctggagc

SEQ ID NO: 3755218 - DNA, 25 bp, Homo sapien
gcctggagccaggctccattgtgga

SEQ ID NO: 3755219 - DNA, 25 bp, Homo sapien
ctggagccaggctccattgtggagt

SEQ ID NO: 3755220 - DNA, 25 bp, Homo sapien
tccattgtggagtgggtagtggcca

SEQ ID NO: 3755221 - DNA, 25 bp, Homo sapien
gtgtcctccgcctgcacttgcctgg

SEQ ID NO: 3755222 - DNA, 25 bp, Homo sapien
caccatggtggctttgcagagcctg

SEQ ID NO: 3755223 - DNA, 25 bp, Homo sapien
ggtgcagctccagcgcaaagcccaa

SEQ ID NO: 3755224 - DNA, 25 bp, Homo sapien
tccctggaaacactgtcaccatggt

SEQ ID NO: 3755225 - DNA, 25 bp, Homo sapien
cccatgctgttgacgcaggagccca

SEQ ID NO: 3755226 - DNA, 25 bp, Homo sapien
tcagattggccaaggcccatgctgt

SEQ ID NO: 3755227 - DNA, 25 bp, Homo sapien
ccatcccggggatgtaggtggcatc

SEQ ID NO: 3755228 - DNA, 25 bp, Homo sapien
aggtcttctgggcatgccttggagc

SEQ ID NO: 3755229 - DNA, 25 bp, Homo sapien
cagctgctttatacccagagaagcc

SEQ ID NO: 3755230 - DNA, 25 bp, Homo sapien
tcagctgctttatacccagagaagc

SEQ ID NO: 3755231 - DNA, 25 bp, Homo sapien
cagctcctgggaggaaactccacat

SEQ ID NO: 3755232 - DNA, 25 bp, Homo sapien
ctcagctcctgggaggaaactccac

SEQ ID NO: 3755233 - DNA, 25 bp, Homo sapien
tcagctcctgggaggaaactccaca

SEQ ID NO: 3755234 - DNA, 25 bp, Homo sapien
ctctcagctcctgggaggaaactcc

SEQ ID NO: 3755235 - DNA, 25 bp, Homo sapien
gctcccagggaggacacgccaggca

SEQ ID NO: 3755236 - DNA, 25 bp, Homo sapien
gaatcctggtcatgcgtccagcaag

SEQ ID NO: 3755237 - DNA, 25 bp, Homo sapien
tggtcatgcgtccagcaagctccca

SEQ ID NO: 3755238 - DNA, 25 bp, Homo sapien
cccagggaggacacgccaggcactg

SEQ ID NO: 3755239 - DNA, 25 bp, Homo sapien
tgaggcttgatctaccacgggagct

SEQ ID NO: 3755240 - DNA, 25 bp, Homo sapien
tgtgtactgagttatcctgggtgcc

SEQ ID NO: 3755241 - DNA, 25 bp, Homo sapien
ggctgacgcagagaaagcgctctcg

SEQ ID NO: 3755242 - DNA, 25 bp, Homo sapien
gaaggccgcattcctgaaaccctga

SEQ ID NO: 3755243 - DNA, 25 bp, Homo sapien
tcttctcgggctgtaattaaccgtc

SEQ ID NO: 3755244 - DNA, 25 bp, Homo sapien
tctcccggagataagggattgtgcc

SEQ ID NO: 3755245 - DNA, 25 bp, Homo sapien
ttaaccgtcttgttagccctggctg

SEQ ID NO: 3755246 - DNA, 25 bp, Homo sapien
tgtccggtgtttcagcctggagcca

SEQ ID NO: 3755247 - DNA, 25 bp, Homo sapien
tggcggtgacacgaagggttgggac

SEQ ID NO: 3755248 - DNA, 25 bp, Homo sapien
caaaggcgtgagtcccataggaagt

SEQ ID NO: 3755249 - DNA, 25 bp, Homo sapien
cgagacaaaggcgtgagtcccatag

SEQ ID NO: 3755250 - DNA, 25 bp, Homo sapien
accaaaagcccgagacaaaggcgtg

SEQ ID NO: 3755251 - DNA, 25 bp, Homo sapien
gcctgggcctccagatggaggtctg

SEQ ID NO: 3755252 - DNA, 25 bp, Homo sapien
ggaggtctgggctttgcccaccagc

SEQ ID NO: 3755253 - DNA, 25 bp, Homo sapien
cctccagatggaggtctgggctttg

SEQ ID NO: 3755254 - DNA, 25 bp, Homo sapien
gatggaggtctgggctttgcccacc

SEQ ID NO: 3755255 - DNA, 25 bp, Homo sapien
gcagcaggtggcttcctgagccgct

SEQ ID NO: 3755256 - DNA, 25 bp, Homo sapien
ggtggcttcctgagccgctgtccct

SEQ ID NO: 3755257 - DNA, 25 bp, Homo sapien
cgctgtccctgcggggagtagaggc

SEQ ID NO: 3755258 - DNA, 25 bp, Homo sapien
gtccctgcggggagtagaggcgtac

SEQ ID NO: 3755259 - DNA, 25 bp, Homo sapien
tctcccagacaactgtgcagctgct

SEQ ID NO: 3755260 - DNA, 25 bp, Homo sapien
gcctctctcccagacaactgtgcag

SEQ ID NO: 3755261 - DNA, 25 bp, Homo sapien
tctctcccagacaactgtgcagctg

SEQ ID NO: 3755262 - DNA, 25 bp, Homo sapien
gggcctctctcccagacaactgtgc

SEQ ID NO: 3755263 - DNA, 25 bp, Homo sapien
gggtccgagcacgtcctgcccatct

SEQ ID NO: 3755264 - DNA, 25 bp, Homo sapien
tgggagccgtctgtcccggcctcat

SEQ ID NO: 3755265 - DNA, 25 bp, Homo sapien
cggccacgcactcctgggagaggtc

SEQ ID NO: 3755266 - DNA, 25 bp, Homo sapien
cataatcactctggggtccgagcac

SEQ ID NO: 3755267 - DNA, 25 bp, Homo sapien
tccccaactgcggtacgggcaccat

SEQ ID NO: 3755268 - DNA, 25 bp, Homo sapien
gcccccgacgatgcagctccaggga

SEQ ID NO: 3755269 - DNA, 25 bp, Homo sapien
ggcaccatcaaagcccccgacgatg

SEQ ID NO: 3755270 - DNA, 25 bp, Homo sapien
ccaactgcggtacgggcaccatcaa

SEQ ID NO: 3755271 - DNA, 25 bp, Homo sapien
gaaaccgagacttccatctgcctgg

SEQ ID NO: 3755272 - DNA, 25 bp, Homo sapien
gccacaggccgatggctcctttggg

SEQ ID NO: 3755273 - DNA, 25 bp, Homo sapien
acggaacctgcaccaaggcgatggc

SEQ ID NO: 3755274 - DNA, 25 bp, Homo sapien
tagggtccagtccactggcactcag

SEQ ID NO: 3755275 - DNA, 25 bp, Homo sapien
tttcctctctgggcggctctaaggg

SEQ ID NO: 3755276 - DNA, 25 bp, Homo sapien
ctttcctctctgggcggctctaagg

SEQ ID NO: 3755277 - DNA, 25 bp, Homo sapien
cctctctgggcggctctaagggctt

SEQ ID NO: 3755278 - DNA, 25 bp, Homo sapien
tcctctctgggcggctctaagggct

SEQ ID NO: 3755279 - DNA, 25 bp, Homo sapien
tcccaagcagggtcagcgtgccagg

SEQ ID NO: 3755280 - DNA, 25 bp, Homo sapien
ggcaggctcgatcgggcaaggagag

SEQ ID NO: 3755281 - DNA, 25 bp, Homo sapien
agagtcccaagcagggtcagcgtgc

SEQ ID NO: 3755282 - DNA, 25 bp, Homo sapien
ggcaaggagagtcccaagcagggtc

SEQ ID NO: 3755283 - DNA, 25 bp, Homo sapien
ggccagaccggtgtccagccagcag

SEQ ID NO: 3755284 - DNA, 25 bp, Homo sapien
agaccggtgtccagccagcaggcag

SEQ ID NO: 3755285 - DNA, 25 bp, Homo sapien
tgggccagaccggtgtccagccagc

SEQ ID NO: 3755286 - DNA, 25 bp, Homo sapien
gccagaccggtgtccagccagcagg

SEQ ID NO: 3755287 - DNA, 25 bp, Homo sapien
tctttgtccagaagtggcctcttgt

SEQ ID NO: 3755288 - DNA, 25 bp, Homo sapien
ccagtggtttgtttgagcccctcga

SEQ ID NO: 3755289 - DNA, 25 bp, Homo sapien
ctttagctccgtggcaagcaccaaa

SEQ ID NO: 3755290 - DNA, 25 bp, Homo sapien
cctcgagtttccaatctgcctttag

SEQ ID NO: 3755291 - DNA, 25 bp, Homo sapien
atgccccccctgctagacctcaggg

SEQ ID NO: 3755292 - DNA, 25 bp, Homo sapien
cccctgctagacctcagggctgaca

SEQ ID NO: 3755293 - DNA, 25 bp, Homo sapien
gctgacaagccccctgcgaggggct

SEQ ID NO: 3755294 - DNA, 25 bp, Homo sapien
cccccctgctagacctcagggctga

SEQ ID NO: 3755295 - DNA, 25 bp, Homo sapien
acagtcggatgtgagtggcctccag

SEQ ID NO: 3755296 - DNA, 25 bp, Homo sapien
cacagtcggatgtgagtggcctcca

SEQ ID NO: 3755297 - DNA, 25 bp, Homo sapien
agtcggatgtgagtggcctccaggc

SEQ ID NO: 3755298 - DNA, 25 bp, Homo sapien
tcacagtcggatgtgagtggcctcc

SEQ ID NO: 3755299 - DNA, 25 bp, Homo sapien
ccccagtgtcttggcatttgcaagc

SEQ ID NO: 3755300 - DNA, 25 bp, Homo sapien
acagccgctcggcaacaatgcagac

SEQ ID NO: 3755301 - DNA, 25 bp, Homo sapien
caatgatgacagtgggcctccttcc

SEQ ID NO: 3755302 - DNA, 25 bp, Homo sapien
tccaggagtggtcccgttggagaca

SEQ ID NO: 3755303 - DNA, 25 bp, Homo sapien
cggacatgctcaattcagcggtcat

SEQ ID NO: 3755304 - DNA, 25 bp, Homo sapien
gacacgctcagttcagcggtcgttt

SEQ ID NO: 3755305 - DNA, 25 bp, Homo sapien
cattcacggaatccctctgaggtgg

SEQ ID NO: 3755306 - DNA, 25 bp, Homo sapien
ctcagttcagtggtcggtgcattca

SEQ ID NO: 3755307 - DNA, 25 bp, Homo sapien
ccaactgcacgtcgaaatgaaaact

SEQ ID NO: 3755308 - DNA, 25 bp, Homo sapien
gcagcccaactgcacgtcgaaatga

SEQ ID NO: 3755309 - DNA, 25 bp, Homo sapien
gacgtgcagcccaactgcacgtcga

SEQ ID NO: 3755310 - DNA, 25 bp, Homo sapien
ttatgcccgacacacgacgtgcagc

SEQ ID NO: 3755311 - DNA, 25 bp, Homo sapien
gcactgactggacacgggatacagg

SEQ ID NO: 3755312 - DNA, 25 bp, Homo sapien
actggacacgggatacaggccagcc

SEQ ID NO: 3755313 - DNA, 25 bp, Homo sapien
ccagatatgtccattggtgggagca

SEQ ID NO: 3755314 - DNA, 25 bp, Homo sapien
tgggcagcacgtctccccagatatg

SEQ ID NO: 3755315 - DNA, 25 bp, Homo sapien
cctcctgggagttagcacgaggcca

SEQ ID NO: 3755316 - DNA, 25 bp, Homo sapien
gaacatttggtaatgaacatggcag

SEQ ID NO: 3755317 - DNA, 25 bp, Homo sapien
gagttagcacgaggccacagtgttg

SEQ ID NO: 3755318 - DNA, 25 bp, Homo sapien
ggtccccgctgaacatttggtaatg

SEQ ID NO: 3755319 - DNA, 25 bp, Homo sapien
tgagccagctccggggccttcaccc

SEQ ID NO: 3755320 - DNA, 25 bp, Homo sapien
ccttgctgttgcctgtgggctgagc

SEQ ID NO: 3755321 - DNA, 25 bp, Homo sapien
atggctgccttgctgttgcctgtgg

SEQ ID NO: 3755322 - DNA, 25 bp, Homo sapien
gctgccttgctgttgcctgtgggct

SEQ ID NO: 3755323 - DNA, 25 bp, Homo sapien
atttccatttcctggagcgatggaa

SEQ ID NO: 3755324 - DNA, 25 bp, Homo sapien
gggcatccaggcctccgcagcccag

SEQ ID NO: 3755325 - DNA, 25 bp, Homo sapien
cctggagcgatggaacagacagcat

SEQ ID NO: 3755326 - DNA, 25 bp, Homo sapien
ccatttcctggagcgatggaacaga

SEQ ID NO: 3755327 - DNA, 25 bp, Homo sapien
gacactgtgctcaggaaagcgagct

SEQ ID NO: 3755328 - DNA, 25 bp, Homo sapien
catcatttccgcaatggatgcagct

SEQ ID NO: 3755329 - DNA, 25 bp, Homo sapien
ttggctgcctctcagcgggccaggg

SEQ ID NO: 3755330 - DNA, 25 bp, Homo sapien
ggccagggcgacttctcatcatttc

SEQ ID NO: 3755331 - DNA, 25 bp, Homo sapien
agatgcggccctgtccactcgtgct

SEQ ID NO: 3755332 - DNA, 25 bp, Homo sapien
gggcaccagggagctctccgggacc

SEQ ID NO: 3755333 - DNA, 25 bp, Homo sapien
cccaaagccagatgcggccctgtcc

SEQ ID NO: 3755334 - DNA, 25 bp, Homo sapien
ctgcagagccgagtccactcctggg

SEQ ID NO: 3755335 - DNA, 25 bp, Homo sapien
gctctccagatgggctggtgagact

SEQ ID NO: 3755336 - DNA, 25 bp, Homo sapien
cacagttaggggctgtcgtcagcac

SEQ ID NO: 3755337 - DNA, 25 bp, Homo sapien
gctgcttatgaccagcacagttagg

SEQ ID NO: 3755338 - DNA, 25 bp, Homo sapien
gctgtcgtcagcaccgccactggta

SEQ ID NO: 3755339 - DNA, 25 bp, Homo sapien
atcagggccctccggtgggctgacc

SEQ ID NO: 3755340 - DNA, 25 bp, Homo sapien
tcagggccctccggtgggctgaccc

SEQ ID NO: 3755341 - DNA, 25 bp, Homo sapien
gatcagggccctccggtgggctgac

SEQ ID NO: 3755342 - DNA, 25 bp, Homo sapien
ccacctgcctgagagggtcaggaca

SEQ ID NO: 3755343 - DNA, 25 bp, Homo sapien
gggacagccaggaagaagtacccag

SEQ ID NO: 3755344 - DNA, 25 bp, Homo sapien
ctcggtgcaggcgaaagcaccaggg

SEQ ID NO: 3755345 - DNA, 25 bp, Homo sapien
ccaggggtgaggtggccgagcagag

SEQ ID NO: 3755346 - DNA, 25 bp, Homo sapien
cccagaagagcttcactaggtcctt

SEQ ID NO: 3755347 - DNA, 25 bp, Homo sapien
caagagcctttgctgaagggacatc

SEQ ID NO: 3755348 - DNA, 25 bp, Homo sapien
tcactaggtccttcaagagcctttg

SEQ ID NO: 3755349 - DNA, 25 bp, Homo sapien
agcccagaagagcttcactaggtcc

SEQ ID NO: 3755350 - DNA, 25 bp, Homo sapien
agggaggtcccagccgccaggctgg

SEQ ID NO: 3755351 - DNA, 25 bp, Homo sapien
ctggtgcactggagggcctgtttcc

SEQ ID NO: 3755352 - DNA, 25 bp, Homo sapien
gaggtgctctgtcagggaggtccca

SEQ ID NO: 3755353 - DNA, 25 bp, Homo sapien
ccagccgccaggctggtgcactgga

SEQ ID NO: 3755354 - DNA, 25 bp, Homo sapien
gcaagagaaagagacgggaacaggt

SEQ ID NO: 3755355 - DNA, 25 bp, Homo sapien
aaagctggagtctcagaacagggac

SEQ ID NO: 3755356 - DNA, 25 bp, Homo sapien
gaaccgagagggtctgacttcatca

SEQ ID NO: 3755357 - DNA, 25 bp, Homo sapien
acaggtgagcggtgctccagaaagc

SEQ ID NO: 3755358 - DNA, 25 bp, Homo sapien
gacctgtggcaacagttctccatgc

SEQ ID NO: 3755359 - DNA, 25 bp, Homo sapien
gacttcagtcgtctgggaccgggac

SEQ ID NO: 3755360 - DNA, 25 bp, Homo sapien
ccctaggctgtgtgtgatccagggt

SEQ ID NO: 3755361 - DNA, 25 bp, Homo sapien
ggctgcactggtccctaggctgtgt

SEQ ID NO: 3755362 - DNA, 25 bp, Homo sapien
tcatctcgcccacagagcacggtct

SEQ ID NO: 3755363 - DNA, 25 bp, Homo sapien
cggactgctgggacctgtttcctca

SEQ ID NO: 3755364 - DNA, 25 bp, Homo sapien
tttcctcagccggactgctgggacc

SEQ ID NO: 3755365 - DNA, 25 bp, Homo sapien
cacagagcacggtctccagagaagc

SEQ ID NO: 3755366 - DNA, 25 bp, Homo sapien
tggttggttcttgatcagcaccata

SEQ ID NO: 3755367 - DNA, 25 bp, Homo sapien
ttggttggttcttgatcagcaccat

SEQ ID NO: 3755368 - DNA, 25 bp, Homo sapien
tctggaaacacaatagcaaggtctg

SEQ ID NO: 3755369 - DNA, 25 bp, Homo sapien
cattctttagagaaatcactccaag

SEQ ID NO: 3755370 - DNA, 25 bp, Homo sapien
cactttgtttcatcgtcatcctaga

SEQ ID NO: 3755371 - DNA, 25 bp, Homo sapien
tcctgtgcagattggacactttgtt

SEQ ID NO: 3755372 - DNA, 25 bp, Homo sapien
tccaggaaggatggtgccagtctga

SEQ ID NO: 3755373 - DNA, 25 bp, Homo sapien
tgatggtctttgtgcacggctgtga

SEQ ID NO: 3755374 - DNA, 25 bp, Homo sapien
gggcagatgtcttcccagaagtgtt

SEQ ID NO: 3755375 - DNA, 25 bp, Homo sapien
gatttactcgggaacattcattgca

SEQ ID NO: 3755376 - DNA, 25 bp, Homo sapien
tgctccggcggcgcctcttaaaggg

SEQ ID NO: 3755377 - DNA, 25 bp, Homo sapien
cgggtgcgctctcttgcggctctga

SEQ ID NO: 3755378 - DNA, 25 bp, Homo sapien
acctcactcacgaggagcggctgcg

SEQ ID NO: 3755379 - DNA, 25 bp, Homo sapien
acggagcgtggaccgtgcagcttcc

SEQ ID NO: 3755380 - DNA, 25 bp, Homo sapien
gatccgctgggaaagttcccgcagc

SEQ ID NO: 3755381 - DNA, 25 bp, Homo sapien
cgcgcgcagccattagatccgctgg

SEQ ID NO: 3755382 - DNA, 25 bp, Homo sapien
cattagatccgctgggaaagttccc

SEQ ID NO: 3755383 - DNA, 25 bp, Homo sapien
gcgcatcgcgggctcggcgggtcgg

SEQ ID NO: 3755384 - DNA, 25 bp, Homo sapien
aagagcgagcccacgttggccgtga

SEQ ID NO: 3755385 - DNA, 25 bp, Homo sapien
tcgtcgaagagcgagcccacgttgg

SEQ ID NO: 3755386 - DNA, 25 bp, Homo sapien
gtcgaagagcgagcccacgttggcc

SEQ ID NO: 3755387 - DNA, 25 bp, Homo sapien
gcgagcccacgttggccgtgaccag

SEQ ID NO: 3755388 - DNA, 25 bp, Homo sapien
tcaggatttgtggttccagtgacca

SEQ ID NO: 3755389 - DNA, 25 bp, Homo sapien
ttgtggttccagtgaccatggacct

SEQ ID NO: 3755390 - DNA, 25 bp, Homo sapien
cagtgaccatggacctggggttcag

SEQ ID NO: 3755391 - DNA, 25 bp, Homo sapien
gttccagtgaccatggacctggggt

SEQ ID NO: 3755392 - DNA, 25 bp, Homo sapien
gttcaggggtcaaggacaagtgttc

SEQ ID NO: 3755393 - DNA, 25 bp, Homo sapien
tctggaaccagggttccaggttcag

SEQ ID NO: 3755394 - DNA, 25 bp, Homo sapien
tccagaattgggtttggggcctgat

SEQ ID NO: 3755395 - DNA, 25 bp, Homo sapien
gacaagtgttcagggccataagctg

SEQ ID NO: 3755396 - DNA, 25 bp, Homo sapien
ctccccagcaggtcagtataataca

SEQ ID NO: 3755397 - DNA, 25 bp, Homo sapien
ccccagcaggtcagtataatacatg

SEQ ID NO: 3755398 - DNA, 25 bp, Homo sapien
ttcctccccagcaggtcagtataat

SEQ ID NO: 3755399 - DNA, 25 bp, Homo sapien
tcctccccagcaggtcagtataata

SEQ ID NO: 3755400 - DNA, 25 bp, Homo sapien
cagacacaaccccagtggggacagc

SEQ ID NO: 3755401 - DNA, 25 bp, Homo sapien
cgcaacactgtctgcacagggtcag

SEQ ID NO: 3755402 - DNA, 25 bp, Homo sapien
gcacagggtcagacacaaccccagt

SEQ ID NO: 3755403 - DNA, 25 bp, Homo sapien
aaccccagtggggacagccccgcag

SEQ ID NO: 3755404 - DNA, 25 bp, Homo sapien
cccactctcacagccgttctgcaaa

SEQ ID NO: 3755405 - DNA, 25 bp, Homo sapien
gccagcgagcacttgccgagcccac

SEQ ID NO: 3755406 - DNA, 25 bp, Homo sapien
tcacagccgttctgcaaacccgggt

SEQ ID NO: 3755407 - DNA, 25 bp, Homo sapien
agcacttgccgagcccactctcaca

SEQ ID NO: 3755408 - DNA, 25 bp, Homo sapien
catctgggccaaaaggtaatgcctc

SEQ ID NO: 3755409 - DNA, 25 bp, Homo sapien
taatgcctcggcctggatctgttcc

SEQ ID NO: 3755410 - DNA, 25 bp, Homo sapien
tagggtcagacttaaaactggccag

SEQ ID NO: 3755411 - DNA, 25 bp, Homo sapien
tacaaactgtgcacatcagggagtg

SEQ ID NO: 3755412 - DNA, 25 bp, Homo sapien
cggagacccacacacaacggcgcac

SEQ ID NO: 3755413 - DNA, 25 bp, Homo sapien
agacccacacacaacggcgcacaca

SEQ ID NO: 3755414 - DNA, 25 bp, Homo sapien
atgcacggagacccacacacaacgg

SEQ ID NO: 3755415 - DNA, 25 bp, Homo sapien
catgcacggagacccacacacaacg

SEQ ID NO: 3755416 - DNA, 25 bp, Homo sapien
tagtttggtcaacagtagtgtcccg

SEQ ID NO: 3755417 - DNA, 25 bp, Homo sapien
gctggaatcgttggacttcaggcca

SEQ ID NO: 3755418 - DNA, 25 bp, Homo sapien
tttggaaatcagaccgagccccgca

SEQ ID NO: 3755419 - DNA, 25 bp, Homo sapien
cacagacacgtttacatggagcgga

SEQ ID NO: 3755420 - DNA, 25 bp, Homo sapien
tctcatggagccattaagggcaact

SEQ ID NO: 3755421 - DNA, 25 bp, Homo sapien
cacaggtggtaccaggtgaacacca

SEQ ID NO: 3755422 - DNA, 25 bp, Homo sapien
gagaaacacataggaacccttagcc

SEQ ID NO: 3755423 - DNA, 25 bp, Homo sapien
gaaaaatgtctggtgtttcagccaa

SEQ ID NO: 3755424 - DNA, 25 bp, Homo sapien
ctgctgccgtgtgatgcgccgctgt

SEQ ID NO: 3755425 - DNA, 25 bp, Homo sapien
ccgctgtgccgatgagaggcgacct

SEQ ID NO: 3755426 - DNA, 25 bp, Homo sapien
gcggccggaaggacggccctctatc

SEQ ID NO: 3755427 - DNA, 25 bp, Homo sapien
gatgagaggcgacctgagagcagca

SEQ ID NO: 3755428 - DNA, 25 bp, Homo sapien
cagggcggagcccacggtgaggagg

SEQ ID NO: 3755429 - DNA, 25 bp, Homo sapien
agcccacggtgaggagggcccagca

SEQ ID NO: 3755430 - DNA, 25 bp, Homo sapien
agcaggtgggcgtgcactgtgccca

SEQ ID NO: 3755431 - DNA, 25 bp, Homo sapien
tggagaatgttccaacgccccgaac

SEQ ID NO: 3755432 - DNA, 25 bp, Homo sapien
acaggtcagggttgcgatgtgtcca

SEQ ID NO: 3755433 - DNA, 25 bp, Homo sapien
accaggtgtcgtccaaatgccaaaa

SEQ ID NO: 3755434 - DNA, 25 bp, Homo sapien
aggcagacatcaggcggccgccctt

SEQ ID NO: 3755435 - DNA, 25 bp, Homo sapien
gtgtccaggccggtgcaaacgccag

SEQ ID NO: 3755436 - DNA, 25 bp, Homo sapien
tcaggtaagaggaccaatccctccc

SEQ ID NO: 3755437 - DNA, 25 bp, Homo sapien
ggccataggacacgagattagtaca

SEQ ID NO: 3755438 - DNA, 25 bp, Homo sapien
ggctccacagaagctacggttcaga

SEQ ID NO: 3755439 - DNA, 25 bp, Homo sapien
aaaggaacggcctcaagcctggaga

SEQ ID NO: 3755440 - DNA, 25 bp, Homo sapien
tgtttacaactgtcacccacggctc

SEQ ID NO: 3755441 - DNA, 25 bp, Homo sapien
aggctctggcgcacgtatccgtaac

SEQ ID NO: 3755442 - DNA, 25 bp, Homo sapien
ttcccacagaggaagtcaactgggt

SEQ ID NO: 3755443 - DNA, 25 bp, Homo sapien
agtgacttcacaggagcccgtcgtc

SEQ ID NO: 3755444 - DNA, 25 bp, Homo sapien
catgccaagtgacgcctccagatgt

SEQ ID NO: 3755445 - DNA, 25 bp, Homo sapien
aaattcagcgggagggaagcacaga

SEQ ID NO: 3755446 - DNA, 25 bp, Homo sapien
gaaattcagcgggagggaagcacag

SEQ ID NO: 3755447 - DNA, 25 bp, Homo sapien
aagtcaatcatacttgtttcagaaa

SEQ ID NO: 3755448 - DNA, 25 bp, Homo sapien
tcaaaagtcaatcatacttgtttca

SEQ ID NO: 3755449 - DNA, 25 bp, Homo sapien
ttctgacgcgcaggagagaaccgtg

SEQ ID NO: 3755450 - DNA, 25 bp, Homo sapien
caaaggttccgtctggtatggccgc

SEQ ID NO: 3755451 - DNA, 25 bp, Homo sapien
caacagctctggttacagggaccct

SEQ ID NO: 3755452 - DNA, 25 bp, Homo sapien
tgagcacggcatacaaacaacaaag

SEQ ID NO: 3755453 - DNA, 25 bp, Homo sapien
caatgtgaaaccatccgtgcaggag

SEQ ID NO: 3755454 - DNA, 25 bp, Homo sapien
cttcgagcctccacttgtagaccgt

SEQ ID NO: 3755455 - DNA, 25 bp, Homo sapien
cacttgtagaccgtgtccttttcca

SEQ ID NO: 3755456 - DNA, 25 bp, Homo sapien
catgggtctcgtcgaggggctcccc

SEQ ID NO: 3755457 - DNA, 25 bp, Homo sapien
ggttagaggctacattactacacag

SEQ ID NO: 3755458 - DNA, 25 bp, Homo sapien
ggaaaactgctaatacaactgatca

SEQ ID NO: 3755459 - DNA, 25 bp, Homo sapien
gacagcgtatgtgcaaaagggaaac

SEQ ID NO: 3755460 - DNA, 25 bp, Homo sapien
ttaataatcacacgcggttagaggc

SEQ ID NO: 3755461 - DNA, 25 bp, Homo sapien
aactgggccagcaaagacaaccacc

SEQ ID NO: 3755462 - DNA, 25 bp, Homo sapien
atggagaacctcatacagcctgcag

SEQ ID NO: 3755463 - DNA, 25 bp, Homo sapien
aatgttaaataactgcctgtcacta

SEQ ID NO: 3755464 - DNA, 25 bp, Homo sapien
tcactaagagcaataacaaagggca

SEQ ID NO: 3755465 - DNA, 25 bp, Homo sapien
aagggtgccagcacgtcacaggagc

SEQ ID NO: 3755466 - DNA, 25 bp, Homo sapien
ccttcctcgctgtggccaatgcaaa

SEQ ID NO: 3755467 - DNA, 25 bp, Homo sapien
ctgtggccaatgcaaaggcacagct

SEQ ID NO: 3755468 - DNA, 25 bp, Homo sapien
gaaagggtgccagcacgtcacagga

SEQ ID NO: 3755469 - DNA, 25 bp, Homo sapien
cggcgcgagcagcccacatggccac

SEQ ID NO: 3755470 - DNA, 25 bp, Homo sapien
caaacaccacaatgtaggtgaggac

SEQ ID NO: 3755471 - DNA, 25 bp, Homo sapien
ccacaatgtaggtgaggacggcagt

SEQ ID NO: 3755472 - DNA, 25 bp, Homo sapien
caacaaacaccacaatgtaggtgag

SEQ ID NO: 3755473 - DNA, 25 bp, Homo sapien
caccacaatgtaggtgaggacggca

SEQ ID NO: 3755474 - DNA, 25 bp, Homo sapien
aacaggggagatggcccgagtcctt

SEQ ID NO: 3755475 - DNA, 25 bp, Homo sapien
aggggagatggcccgagtccttgtg

SEQ ID NO: 3755476 - DNA, 25 bp, Homo sapien
gagatggcccgagtccttgtggatg

SEQ ID NO: 3755477 - DNA, 25 bp, Homo sapien
gggagatggcccgagtccttgtgga

SEQ ID NO: 3755478 - DNA, 25 bp, Homo sapien
ctacgcgtagcacagccccggaaca

SEQ ID NO: 3755479 - DNA, 25 bp, Homo sapien
cagggtcactacacgtagcacagcc

SEQ ID NO: 3755480 - DNA, 25 bp, Homo sapien
agccccgcaggacgcaccacaggcc

SEQ ID NO: 3755481 - DNA, 25 bp, Homo sapien
cagggtcactacacgtagcacagcg

SEQ ID NO: 3755482 - DNA, 25 bp, Homo sapien
caacactagtcggggccactgtgac

SEQ ID NO: 3755483 - DNA, 25 bp, Homo sapien
cactagtcggggccactgtgacggc

SEQ ID NO: 3755484 - DNA, 25 bp, Homo sapien
aacactagtcggggccactgtgacg

SEQ ID NO: 3755485 - DNA, 25 bp, Homo sapien
cccaacactagtcggggccactgtg

SEQ ID NO: 3755486 - DNA, 25 bp, Homo sapien
aattcccgaagccagttcttctgca

SEQ ID NO: 3755487 - DNA, 25 bp, Homo sapien
aaattcccgaagccagttcttctgc

SEQ ID NO: 3755488 - DNA, 25 bp, Homo sapien
aaaattcccgaagccagttcttctg

SEQ ID NO: 3755489 - DNA, 25 bp, Homo sapien
ggagggagcccccaggttctctgat

SEQ ID NO: 3755490 - DNA, 25 bp, Homo sapien
gagggagcccccaggttctctgatt

SEQ ID NO: 3755491 - DNA, 25 bp, Homo sapien
ctggagggagcccccaggttctctg

SEQ ID NO: 3755492 - DNA, 25 bp, Homo sapien
gggagcccccaggttctctgattct

SEQ ID NO: 3755493 - DNA, 25 bp, Homo sapien
cagcctgtctcttcacagtggcatc

SEQ ID NO: 3755494 - DNA, 25 bp, Homo sapien
agagcacagcacagtaccgggctcc

SEQ ID NO: 3755495 - DNA, 25 bp, Homo sapien
agagtgcgctgcacggaccggacct

SEQ ID NO: 3755496 - DNA, 25 bp, Homo sapien
gaccggacctggtgaggagcacacc

SEQ ID NO: 3755497 - DNA, 25 bp, Homo sapien
gggccacacgccaacgtccactggc

SEQ ID NO: 3755498 - DNA, 25 bp, Homo sapien
ttgggaagtccagcacatggtccag

SEQ ID NO: 3755499 - DNA, 25 bp, Homo sapien
tctctgtgctcaggtcacatgtccc

SEQ ID NO: 3755500 - DNA, 25 bp, Homo sapien
gccaacgtccactggcaggccctct

SEQ ID NO: 3755501 - DNA, 25 bp, Homo sapien
gatttcccagcttacaaaaaaggca

SEQ ID NO: 3755502 - DNA, 25 bp, Homo sapien
taagctgtacgcacatgtgtctgct

SEQ ID NO: 3755503 - DNA, 25 bp, Homo sapien
cacagccacgcaggcaaacacatat

SEQ ID NO: 3755504 - DNA, 25 bp, Homo sapien
gacccacttgtggactgcacacctg

SEQ ID NO: 3755505 - DNA, 25 bp, Homo sapien
cgccaggacccaaggtgatggatgc

SEQ ID NO: 3755506 - DNA, 25 bp, Homo sapien
ccaggacccaaggtgatggatgctg

SEQ ID NO: 3755507 - DNA, 25 bp, Homo sapien
agggcgccaggacccaaggtgatgg

SEQ ID NO: 3755508 - DNA, 25 bp, Homo sapien
ggcgccaggacccaaggtgatggat

SEQ ID NO: 3755509 - DNA, 25 bp, Homo sapien
ggcagccagcaagggacgacgggct

SEQ ID NO: 3755510 - DNA, 25 bp, Homo sapien
agcggccacggtccagggcgcagct

SEQ ID NO: 3755511 - DNA, 25 bp, Homo sapien
cagccagcaagggacgacgggctca

SEQ ID NO: 3755512 - DNA, 25 bp, Homo sapien
aggagcccagcggccacggtccagg

SEQ ID NO: 3755513 - DNA, 25 bp, Homo sapien
agggtctggcagagacggggcccca

SEQ ID NO: 3755514 - DNA, 25 bp, Homo sapien
gtcgtcggagccgtccacagagcca

SEQ ID NO: 3755515 - DNA, 25 bp, Homo sapien
cactgtcagggtcgtcggagccgtc

SEQ ID NO: 3755516 - DNA, 25 bp, Homo sapien
cagggtcgtcggagccgtccacaga

SEQ ID NO: 3755517 - DNA, 25 bp, Homo sapien
tgtcagggtcgtcggagccgtccac

SEQ ID NO: 3755518 - DNA, 25 bp, Homo sapien
aactcctgacagtgcaaggccatga

SEQ ID NO: 3755519 - DNA, 25 bp, Homo sapien
ctcctgacagtgcaaggccatgaag

SEQ ID NO: 3755520 - DNA, 25 bp, Homo sapien
catgaagtgcggcttgtgtgtgtgc

SEQ ID NO: 3755521 - DNA, 25 bp, Homo sapien
aaactcctgacagtgcaaggccatg

SEQ ID NO: 3755522 - DNA, 25 bp, Homo sapien
cccccaacatgggaatgtgccaagg

SEQ ID NO: 3755523 - DNA, 25 bp, Homo sapien
caacatgggaatgtgccaaggccac

SEQ ID NO: 3755524 - DNA, 25 bp, Homo sapien
gagacgagcccccaacatgggaatg

SEQ ID NO: 3755525 - DNA, 25 bp, Homo sapien
gacgagcccccaacatgggaatgtg

SEQ ID NO: 3755526 - DNA, 25 bp, Homo sapien
ctctgcgatgttgggggctggtccc

SEQ ID NO: 3755527 - DNA, 25 bp, Homo sapien
cccacagagtgtggcagctttgtga

SEQ ID NO: 3755528 - DNA, 25 bp, Homo sapien
gcggcgtcggcccacagagcgtggc

SEQ ID NO: 3755529 - DNA, 25 bp, Homo sapien
tttgtgaagctctgcgatgttgggg

SEQ ID NO: 3755530 - DNA, 25 bp, Homo sapien
gctctcctctccgggcctgcgtcat

SEQ ID NO: 3755531 - DNA, 25 bp, Homo sapien
ccgctctcctctccgggcctgcgtc

SEQ ID NO: 3755532 - DNA, 25 bp, Homo sapien
atccgctctcctctccgggcctgcg

SEQ ID NO: 3755533 - DNA, 25 bp, Homo sapien
cgatccgctctcctctccgggcctg

SEQ ID NO: 3755534 - DNA, 25 bp, Homo sapien
catctccgcaaagcatggctgcaca

SEQ ID NO: 3755535 - DNA, 25 bp, Homo sapien
ccatctccgcaaagcatggctgcac

SEQ ID NO: 3755536 - DNA, 25 bp, Homo sapien
accatctccgcaaagcatggctgca

SEQ ID NO: 3755537 - DNA, 25 bp, Homo sapien
tagttttcatccaggtagactcgag

SEQ ID NO: 3755538 - DNA, 25 bp, Homo sapien
catcgcatcactcgacaatagttct

SEQ ID NO: 3755539 - DNA, 25 bp, Homo sapien
ccaggtagactcgagccctgttata

SEQ ID NO: 3755540 - DNA, 25 bp, Homo sapien
gagccctgttatattctttcatcgc

SEQ ID NO: 3755541 - DNA, 25 bp, Homo sapien
gattgtacagactccactactggtg

SEQ ID NO: 3755542 - DNA, 25 bp, Homo sapien
ggattcccgggattgtacagactcc

SEQ ID NO: 3755543 - DNA, 25 bp, Homo sapien
gcactggatgcccaaacaagtgaga

SEQ ID NO: 3755544 - DNA, 25 bp, Homo sapien
ggcccttgaacccaaacagcaatga

SEQ ID NO: 3755545 - DNA, 25 bp, Homo sapien
gctctggtgtgagtgggggccccgt

SEQ ID NO: 3755546 - DNA, 25 bp, Homo sapien
agcacaggggtgagggccttggctc

SEQ ID NO: 3755547 - DNA, 25 bp, Homo sapien
cttggctctggtgtgagtgggggcc

SEQ ID NO: 3755548 - DNA, 25 bp, Homo sapien
ctacatcctgagcacaggggtgagg

SEQ ID NO: 3755549 - DNA, 25 bp, Homo sapien
gtctaatttgctgctcccccagtgg

SEQ ID NO: 3755550 - DNA, 25 bp, Homo sapien
ctgctcccccagtggtgtttttctt

SEQ ID NO: 3755551 - DNA, 25 bp, Homo sapien
taatttgctgctcccccagtggtgt

SEQ ID NO: 3755552 - DNA, 25 bp, Homo sapien
ttgctgctcccccagtggtgttttt

SEQ ID NO: 3755553 - DNA, 25 bp, Homo sapien
ctgaagaaggtagccaggtgtggag

SEQ ID NO: 3755554 - DNA, 25 bp, Homo sapien
ctggaaaaccctgaaagccaggtgt

SEQ ID NO: 3755555 - DNA, 25 bp, Homo sapien
tctttctggaactagactcatgtgc

SEQ ID NO: 3755556 - DNA, 25 bp, Homo sapien
gagaacaaccccagagctcgtacag

SEQ ID NO: 3755557 - DNA, 25 bp, Homo sapien
tggcgactgttttgctggaaccacc

SEQ ID NO: 3755558 - DNA, 25 bp, Homo sapien
tcgggtggacctgagcccttaagca

SEQ ID NO: 3755559 - DNA, 25 bp, Homo sapien
gcagactattttggcatctcacaga

SEQ ID NO: 3755560 - DNA, 25 bp, Homo sapien
tctcacagattttgaaggttctagc

SEQ ID NO: 3755561 - DNA, 25 bp, Homo sapien
ggttctagcttttcacataatttaa

SEQ ID NO: 3755562 - DNA, 25 bp, Homo sapien
aataccttgtaattctctttgactt

SEQ ID NO: 3755563 - DNA, 25 bp, Homo sapien
tgagaggcacctttcctttgacggg

SEQ ID NO: 3755564 - DNA, 25 bp, Homo sapien
agtacacagcggcttcttgagggga

SEQ ID NO: 3755565 - DNA, 25 bp, Homo sapien
gtgcttcctcccctgagaggcacct

SEQ ID NO: 3755566 - DNA, 25 bp, Homo sapien
cccgcgctgaaggctgccgtacgat

SEQ ID NO: 3755567 - DNA, 25 bp, Homo sapien
gacatctcagagacgtaattgggaa

SEQ ID NO: 3755568 - DNA, 25 bp, Homo sapien
tctcagagacgtaattgggaagcgt

SEQ ID NO: 3755569 - DNA, 25 bp, Homo sapien
gaagcgtgtgtgctgaagaatgggc

SEQ ID NO: 3755570 - DNA, 25 bp, Homo sapien
tgccaggcccacgtcactgtcgggc

SEQ ID NO: 3755571 - DNA, 25 bp, Homo sapien
acctggcctaaagcctcactcaggg

SEQ ID NO: 3755572 - DNA, 25 bp, Homo sapien
ggcctaaagcctcactcagggccgt

SEQ ID NO: 3755573 - DNA, 25 bp, Homo sapien
tggctgtgggagagatcaggtccgt

SEQ ID NO: 3755574 - DNA, 25 bp, Homo sapien
atcaggtccgtgcccaggcagggaa

SEQ ID NO: 3755575 - DNA, 25 bp, Homo sapien
gatgtgttctcggagctccctgcgt

SEQ ID NO: 3755576 - DNA, 25 bp, Homo sapien
gacaagacacgggatttctgtgctg

SEQ ID NO: 3755577 - DNA, 25 bp, Homo sapien
tctctgggcgctgactgatgtgttc

SEQ ID NO: 3755578 - DNA, 25 bp, Homo sapien
tcaggaaagccgttaccctgcgtcc

SEQ ID NO: 3755579 - DNA, 25 bp, Homo sapien
ctgcacctccaacccctccttctgt

SEQ ID NO: 3755580 - DNA, 25 bp, Homo sapien
ctggctggctgcacctccaacccct

SEQ ID NO: 3755581 - DNA, 25 bp, Homo sapien
cagctggctggctgcacctccaacc

SEQ ID NO: 3755582 - DNA, 25 bp, Homo sapien
tggcccagctggctggctgcacctc

SEQ ID NO: 3755583 - DNA, 25 bp, Homo sapien
gccggggagcaggtcattacctgcc

SEQ ID NO: 3755584 - DNA, 25 bp, Homo sapien
cgcgtcccacgggactgcaggtgct

SEQ ID NO: 3755585 - DNA, 25 bp, Homo sapien
cagccccagccgcacatcatcgcgt

SEQ ID NO: 3755586 - DNA, 25 bp, Homo sapien
gcacatcatcgcgtcccacgggact

SEQ ID NO: 3755587 - DNA, 25 bp, Homo sapien
tgatggatcggctgcccacgaggca

SEQ ID NO: 3755588 - DNA, 25 bp, Homo sapien
gtgtgacacggcactcgatcacgcc

SEQ ID NO: 3755589 - DNA, 25 bp, Homo sapien
gatcacgcctgtcggccgcctgatg

SEQ ID NO: 3755590 - DNA, 25 bp, Homo sapien
cacagagcctgttacggatttccca

SEQ ID NO: 3755591 - DNA, 25 bp, Homo sapien
gctgcggcttagacaatccaggtca

SEQ ID NO: 3755592 - DNA, 25 bp, Homo sapien
cagaacgagcttcaacagtaatggc

SEQ ID NO: 3755593 - DNA, 25 bp, Homo sapien
gatggttggaagaacagccgacatt

SEQ ID NO: 3755594 - DNA, 25 bp, Homo sapien
ccaggtcatactggaaacgtctgct

SEQ ID NO: 3755595 - DNA, 25 bp, Homo sapien
taagcctgttaatgctcgattcaaa

SEQ ID NO: 3755596 - DNA, 25 bp, Homo sapien
tccactgaacagcttaatctctgct

SEQ ID NO: 3755597 - DNA, 25 bp, Homo sapien
gcatgccgccagttcattaccgaga

SEQ ID NO: 3755598 - DNA, 25 bp, Homo sapien
gaggagaaattacatcgtgtccggg

SEQ ID NO: 3755599 - DNA, 25 bp, Homo sapien
caacacatccttggctgatgatggg

SEQ ID NO: 3755600 - DNA, 25 bp, Homo sapien
gaatacggccccaacacatccttgg

SEQ ID NO: 3755601 - DNA, 25 bp, Homo sapien
tccttggctgatgatgggatcaaca

SEQ ID NO: 3755602 - DNA, 25 bp, Homo sapien
catgctggaggagccgcagaatacg

SEQ ID NO: 3755603 - DNA, 25 bp, Homo sapien
gccagagcccaagacggcagcgtgg

SEQ ID NO: 3755604 - DNA, 25 bp, Homo sapien
cagagcccaagacggcagcgtggtg

SEQ ID NO: 3755605 - DNA, 25 bp, Homo sapien
ccagagcccaagacggcagcgtggt

SEQ ID NO: 3755606 - DNA, 25 bp, Homo sapien
tggccagagcccaagacggcagcgt

SEQ ID NO: 3755607 - DNA, 25 bp, Homo sapien
cacaaatatgcacccggcactttct

SEQ ID NO: 3755608 - DNA, 25 bp, Homo sapien
attccacaaatatgcacccggcact

SEQ ID NO: 3755609 - DNA, 25 bp, Homo sapien
gccacatatgttctcagacatgtga

SEQ ID NO: 3755610 - DNA, 25 bp, Homo sapien
cagacatgtgagatacatgagtgac

SEQ ID NO: 3755611 - DNA, 25 bp, Homo sapien
tacatctgagggcggcaaggtgacc

SEQ ID NO: 3755612 - DNA, 25 bp, Homo sapien
aacagcctgcggcaggcttctccaa

SEQ ID NO: 3755613 - DNA, 25 bp, Homo sapien
ctgaaatggaacgagatggcctgta

SEQ ID NO: 3755614 - DNA, 25 bp, Homo sapien
agcagtcctggcttctcgcctgcta

SEQ ID NO: 3755615 - DNA, 25 bp, Homo sapien
cgagtgcgcccgttaacatttccga

SEQ ID NO: 3755616 - DNA, 25 bp, Homo sapien
gataaattccaccagacgagtgcgc

SEQ ID NO: 3755617 - DNA, 25 bp, Homo sapien
tcgctggccacgataaattccacca

SEQ ID NO: 3755618 - DNA, 25 bp, Homo sapien
tttccgattaccacggtgaggagca

SEQ ID NO: 3755619 - DNA, 25 bp, Homo sapien
acccagctgacagagctccagcccc

SEQ ID NO: 3755620 - DNA, 25 bp, Homo sapien
cacagctgtagcccccttggtctct

SEQ ID NO: 3755621 - DNA, 25 bp, Homo sapien
tggagacctactccaccctcaccct

SEQ ID NO: 3755622 - DNA, 25 bp, Homo sapien
ttgtccatatgcctcacccaaacat

SEQ ID NO: 3755623 - DNA, 25 bp, Homo sapien
tcccactggaaaccacggatctctc

SEQ ID NO: 3755624 - DNA, 25 bp, Homo sapien
ccagcatcttgtccatatgcctcac

SEQ ID NO: 3755625 - DNA, 25 bp, Homo sapien
tccaatgttgtgaaggttctggccc

SEQ ID NO: 3755626 - DNA, 25 bp, Homo sapien
ctttgtacacaatgtaatgtgaggg

SEQ ID NO: 3755627 - DNA, 25 bp, Homo sapien
atagttttaggtctttgactcattt

SEQ ID NO: 3755628 - DNA, 25 bp, Homo sapien
ttgggttaactttgtacacaatgta

SEQ ID NO: 3755629 - DNA, 25 bp, Homo sapien
ggagcccaaccgttaccaggtcaca

SEQ ID NO: 3755630 - DNA, 25 bp, Homo sapien
caaagagggcgaatctcaccatcta

SEQ ID NO: 3755631 - DNA, 25 bp, Homo sapien
gcagtggttgcctttgtcaaaactc

SEQ ID NO: 3755632 - DNA, 25 bp, Homo sapien
gggtgatcagaatattctacactgg

SEQ ID NO: 3755633 - DNA, 25 bp, Homo sapien
ggcattgagtggaccagacccttcc

SEQ ID NO: 3755634 - DNA, 25 bp, Homo sapien
gggcattgagtggaccagacccttc

SEQ ID NO: 3755635 - DNA, 25 bp, Homo sapien
ccagcagggacgcaagtcccacggg

SEQ ID NO: 3755636 - DNA, 25 bp, Homo sapien
gtcccgcgggctgggcattgagtgg

SEQ ID NO: 3755637 - DNA, 25 bp, Homo sapien
aagctccaggcatgcggtgagccgt

SEQ ID NO: 3755638 - DNA, 25 bp, Homo sapien
cagggacgcaagtcccacgggccag

SEQ ID NO: 3755639 - DNA, 25 bp, Homo sapien
gcacaggatgtcaggcagaggtaac

SEQ ID NO: 3755640 - DNA, 25 bp, Homo sapien
tgaggcacaggatgtcaggcagagg

SEQ ID NO: 3755641 - DNA, 25 bp, Homo sapien
gaggcacaggatgtcaggcagaggt

SEQ ID NO: 3755642 - DNA, 25 bp, Homo sapien
ggcacaggatgtcaggcagaggtaa

SEQ ID NO: 3755643 - DNA, 25 bp, Homo sapien
ttttaaggactcatgaagaaaataa

SEQ ID NO: 3755644 - DNA, 25 bp, Homo sapien
tggtagatgttttttaaggactcat

SEQ ID NO: 3755645 - DNA, 25 bp, Homo sapien
ctttaaagtcaaactggtagatgtt

SEQ ID NO: 3755646 - DNA, 25 bp, Homo sapien
atgttttttaaggactcatgaagaa

SEQ ID NO: 3755647 - DNA, 25 bp, Homo sapien
accggccggctcctgcaattctgtg

SEQ ID NO: 3755648 - DNA, 25 bp, Homo sapien
aattctgtgcggctgatcctgccac

SEQ ID NO: 3755649 - DNA, 25 bp, Homo sapien
tgccacgggcctcatagaagggctt

SEQ ID NO: 3755650 - DNA, 25 bp, Homo sapien
gcagacgccgtgtctccaaaacgga

SEQ ID NO: 3755651 - DNA, 25 bp, Homo sapien
cctgggaaaaggtccaatgtaattg

SEQ ID NO: 3755652 - DNA, 25 bp, Homo sapien
tggcattcgttgagctttctggatc

SEQ ID NO: 3755653 - DNA, 25 bp, Homo sapien
taaggaatcacctcgcctataagga

SEQ ID NO: 3755654 - DNA, 25 bp, Homo sapien
tctgcagtttgaatacaaggtggcc

SEQ ID NO: 3755655 - DNA, 25 bp, Homo sapien
gcttgacaaaaacgtagattctgct

SEQ ID NO: 3755656 - DNA, 25 bp, Homo sapien
tctgctgttactggatgaggtatcc

SEQ ID NO: 3755657 - DNA, 25 bp, Homo sapien
agtgaatgttccaggcgagcttgac

SEQ ID NO: 3755658 - DNA, 25 bp, Homo sapien
gcttgccagatctgttcattcctga

SEQ ID NO: 3755659 - DNA, 25 bp, Homo sapien
ctgcagtttctggggtattatccac

SEQ ID NO: 3755660 - DNA, 25 bp, Homo sapien
gcagtttctggggtattatccaccc

SEQ ID NO: 3755661 - DNA, 25 bp, Homo sapien
tgcagtttctggggtattatccacc

SEQ ID NO: 3755662 - DNA, 25 bp, Homo sapien
tctctaaggtatccgagtagatctc

SEQ ID NO: 3755663 - DNA, 25 bp, Homo sapien
agtagtcctgcggaaacttctcctt

SEQ ID NO: 3755664 - DNA, 25 bp, Homo sapien
gccagcgacctttctatacttctta

SEQ ID NO: 3755665 - DNA, 25 bp, Homo sapien
tccagcatgggcgtgctctctaagg

SEQ ID NO: 3755666 - DNA, 25 bp, Homo sapien
cccaaacctgcgtccagctgccagc

SEQ ID NO: 3755667 - DNA, 25 bp, Homo sapien
tcttccgtctcagtgcctgggctgc

SEQ ID NO: 3755668 - DNA, 25 bp, Homo sapien
atatcacagcctggacgcccccaaa

SEQ ID NO: 3755669 - DNA, 25 bp, Homo sapien
gccagctcttccgtctcagtgcctg

SEQ ID NO: 3755670 - DNA, 25 bp, Homo sapien
gctggacgtgtgactggtgacaaat

SEQ ID NO: 3755671 - DNA, 25 bp, Homo sapien
tgaggcccctctactagtgacagtg

SEQ ID NO: 3755672 - DNA, 25 bp, Homo sapien
aggagaaaaggtaccgtccctgcag

SEQ ID NO: 3755673 - DNA, 25 bp, Homo sapien
taagaactgcacctatggtcccttg

SEQ ID NO: 3755674 - DNA, 25 bp, Homo sapien
tctactcgtcgaggaggatccgtcc

SEQ ID NO: 3755675 - DNA, 25 bp, Homo sapien
tgcgtgctgcaccagacacttgtct

SEQ ID NO: 3755676 - DNA, 25 bp, Homo sapien
ccagaagaattgagcataaggtaca

SEQ ID NO: 3755677 - DNA, 25 bp, Homo sapien
aaggcatccccaggctactggtctg

SEQ ID NO: 3755678 - DNA, 25 bp, Homo sapien
cagtctgcaatgcaccacctcgtcc

SEQ ID NO: 3755679 - DNA, 25 bp, Homo sapien
accacctcgtccggatgaagccttt

SEQ ID NO: 3755680 - DNA, 25 bp, Homo sapien
caccacctcgtccggatgaagcctt

SEQ ID NO: 3755681 - DNA, 25 bp, Homo sapien
cagctgggggtcctcatgcaaaatc

SEQ ID NO: 3755682 - DNA, 25 bp, Homo sapien
agtagagcctccaatgaggtgtgtg

SEQ ID NO: 3755683 - DNA, 25 bp, Homo sapien
tgcaaaatcagtagagcctccaatg

SEQ ID NO: 3755684 - DNA, 25 bp, Homo sapien
gggtcctcatgcaaaatcagtagag

SEQ ID NO: 3755685 - DNA, 25 bp, Homo sapien
caggaggcgccaggaatgagtgcgt

SEQ ID NO: 3755686 - DNA, 25 bp, Homo sapien
gcgccaggaatgagtgcgtgcaggc

SEQ ID NO: 3755687 - DNA, 25 bp, Homo sapien
accccgatgacgctgcctggtgaac

SEQ ID NO: 3755688 - DNA, 25 bp, Homo sapien
tgtggcccagctgccacaatgaccc

SEQ ID NO: 3755689 - DNA, 25 bp, Homo sapien
attcccgagtacacggaagggcttg

SEQ ID NO: 3755690 - DNA, 25 bp, Homo sapien
tgccttgtgccggattcccgagtac

SEQ ID NO: 3755691 - DNA, 25 bp, Homo sapien
cagattggaagcatcatggaaaaga

SEQ ID NO: 3755692 - DNA, 25 bp, Homo sapien
gcttgtttcccaggcgaccagattg

SEQ ID NO: 3755693 - DNA, 25 bp, Homo sapien
caggccctcgcacgcttagtcggga

SEQ ID NO: 3755694 - DNA, 25 bp, Homo sapien
gaaggtcggcgtctgaggatgccag

SEQ ID NO: 3755695 - DNA, 25 bp, Homo sapien
tcgcacgcttagtcgggagtgtaac

SEQ ID NO: 3755696 - DNA, 25 bp, Homo sapien
ttagtcgggagtgtaactccgcatt

SEQ ID NO: 3755697 - DNA, 25 bp, Homo sapien
atccctgcctcggtgtcagtgccag

SEQ ID NO: 3755698 - DNA, 25 bp, Homo sapien
gtgccagctccagagatatccggga

SEQ ID NO: 3755699 - DNA, 25 bp, Homo sapien
tgtgctgcttccctacggtgggcag

SEQ ID NO: 3755700 - DNA, 25 bp, Homo sapien
ctccagagatatccgggaggccgga

SEQ ID NO: 3755701 - DNA, 25 bp, Homo sapien
ccccgcagctgatacgggacatgga

SEQ ID NO: 3755702 - DNA, 25 bp, Homo sapien
cggccccgcagctgatacgggacat

SEQ ID NO: 3755703 - DNA, 25 bp, Homo sapien
gccccgcagctgatacgggacatgg

SEQ ID NO: 3755704 - DNA, 25 bp, Homo sapien
cccgcagctgatacgggacatggac

SEQ ID NO: 3755705 - DNA, 25 bp, Homo sapien
agacagccggcagcgagtcccatga

SEQ ID NO: 3755706 - DNA, 25 bp, Homo sapien
gtccggcagactccgttcacaggat

SEQ ID NO: 3755707 - DNA, 25 bp, Homo sapien
tgaccgagcaccgtggctggagctc

SEQ ID NO: 3755708 - DNA, 25 bp, Homo sapien
tgtctgccaccaaagggccgggaac

SEQ ID NO: 3755709 - DNA, 25 bp, Homo sapien
ctgtgagttctggagagtaaccccc

SEQ ID NO: 3755710 - DNA, 25 bp, Homo sapien
tgtgagttctggagagtaaccccca

SEQ ID NO: 3755711 - DNA, 25 bp, Homo sapien
cctgtgagttctggagagtaacccc

SEQ ID NO: 3755712 - DNA, 25 bp, Homo sapien
gtgagttctggagagtaacccccat

SEQ ID NO: 3755713 - DNA, 25 bp, Homo sapien
tatgtggtcttgttctgcgttgccc

SEQ ID NO: 3755714 - DNA, 25 bp, Homo sapien
ggccaccaatggctgtggacccgct

SEQ ID NO: 3755715 - DNA, 25 bp, Homo sapien
ctccaccctcgggttggagagccaa

SEQ ID NO: 3755716 - DNA, 25 bp, Homo sapien
agccaagtggccgtgaggcaccagc

SEQ ID NO: 3755717 - DNA, 25 bp, Homo sapien
actgggccagggcagcgtgagagcc

SEQ ID NO: 3755718 - DNA, 25 bp, Homo sapien
ccagggcagcgtgagagcctcacgc

SEQ ID NO: 3755719 - DNA, 25 bp, Homo sapien
agggcagcgtgagagcctcacgcat

SEQ ID NO: 3755720 - DNA, 25 bp, Homo sapien
tgggccagggcagcgtgagagcctc

SEQ ID NO: 3755721 - DNA, 25 bp, Homo sapien
agggcgctgaagccggccagccctc

SEQ ID NO: 3755722 - DNA, 25 bp, Homo sapien
ggcgctgaagccggccagccctcat

SEQ ID NO: 3755723 - DNA, 25 bp, Homo sapien
gggcgctgaagccggccagccctca

SEQ ID NO: 3755724 - DNA, 25 bp, Homo sapien
tccacgacggacttggaatccagcc

SEQ ID NO: 3755725 - DNA, 25 bp, Homo sapien
caaagtaggaaaccttctcgaatcg

SEQ ID NO: 3755726 - DNA, 25 bp, Homo sapien
cttctcgaatcgctgatcaatgatt

SEQ ID NO: 3755727 - DNA, 25 bp, Homo sapien
ccagccggaagttgaaatcaccaaa

SEQ ID NO: 3755728 - DNA, 25 bp, Homo sapien
cgggaggcggatggcattgaaagtg

SEQ ID NO: 3755729 - DNA, 25 bp, Homo sapien
gcattgaaagtgccagtaaggggcc

SEQ ID NO: 3755730 - DNA, 25 bp, Homo sapien
cccgggaggcggatggcattgaaag

SEQ ID NO: 3755731 - DNA, 25 bp, Homo sapien
atcccgggaggcggatggcattgaa

SEQ ID NO: 3755732 - DNA, 25 bp, Homo sapien
acggatccctctgccgacagcaaaa

SEQ ID NO: 3755733 - DNA, 25 bp, Homo sapien
attccaacacggatccctctgccga

SEQ ID NO: 3755734 - DNA, 25 bp, Homo sapien
atccctctgccgacagcaaaacatg

SEQ ID NO: 3755735 - DNA, 25 bp, Homo sapien
cccggattccaacacggatccctct

SEQ ID NO: 3755736 - DNA, 25 bp, Homo sapien
ggtggcgctgtgacggcactccagc

SEQ ID NO: 3755737 - DNA, 25 bp, Homo sapien
aaaatcgctgagatcaagttggaca

SEQ ID NO: 3755738 - DNA, 25 bp, Homo sapien
cttgtgtgccgacggcggaagccac

SEQ ID NO: 3755739 - DNA, 25 bp, Homo sapien
gctctgacagtttctacgtgttatg

SEQ ID NO: 3755740 - DNA, 25 bp, Homo sapien
tggccccgctgtgggctgtcagctc

SEQ ID NO: 3755741 - DNA, 25 bp, Homo sapien
gctgtgggctgtcagctcatgccca

SEQ ID NO: 3755742 - DNA, 25 bp, Homo sapien
tgtggccccgctgtgggctgtcagc

SEQ ID NO: 3755743 - DNA, 25 bp, Homo sapien
ccgctgtgggctgtcagctcatgcc

SEQ ID NO: 3755744 - DNA, 25 bp, Homo sapien
ccagagaccgatccatttgacagcc

SEQ ID NO: 3755745 - DNA, 25 bp, Homo sapien
ggccagagaccgatccatttgacag

SEQ ID NO: 3755746 - DNA, 25 bp, Homo sapien
cagagaccgatccatttgacagcct

SEQ ID NO: 3755747 - DNA, 25 bp, Homo sapien
gccagagaccgatccatttgacagc

SEQ ID NO: 3755748 - DNA, 25 bp, Homo sapien
tgagaccacagcggccacacaagcc

SEQ ID NO: 3755749 - DNA, 25 bp, Homo sapien
agcggccacgcaagccccacaggcc

SEQ ID NO: 3755750 - DNA, 25 bp, Homo sapien
ataggagttgcccaacgccccacag

SEQ ID NO: 3755751 - DNA, 25 bp, Homo sapien
caggcaaaccccggtgaggtgcttt

SEQ ID NO: 3755752 - DNA, 25 bp, Homo sapien
ggaatcttcgaactctggcttcagg

SEQ ID NO: 3755753 - DNA, 25 bp, Homo sapien
tggaccccttcagcagcgcagaggg

SEQ ID NO: 3755754 - DNA, 25 bp, Homo sapien
ggtgatgggaatcttcgaactctgg

SEQ ID NO: 3755755 - DNA, 25 bp, Homo sapien
tggccctctgcgtggaccccttcag

SEQ ID NO: 3755756 - DNA, 25 bp, Homo sapien
gcaagcaggacaccagcgtgatggg

SEQ ID NO: 3755757 - DNA, 25 bp, Homo sapien
gtctgtcacccgactcgcccacgtg

SEQ ID NO: 3755758 - DNA, 25 bp, Homo sapien
gtggcaatgatgcaccccgtggagc

SEQ ID NO: 3755759 - DNA, 25 bp, Homo sapien
tgatgggggcggaggcagatgggtg

SEQ ID NO: 3755760 - DNA, 25 bp, Homo sapien
gtgaaaaatcgggttcctgggctgc

SEQ ID NO: 3755761 - DNA, 25 bp, Homo sapien
agtgaaaaatcgggttcctgggctg

SEQ ID NO: 3755762 - DNA, 25 bp, Homo sapien
tgaaaaatcgggttcctgggctgcc

SEQ ID NO: 3755763 - DNA, 25 bp, Homo sapien
tgcactggttgaaagtcacctggtc

SEQ ID NO: 3755764 - DNA, 25 bp, Homo sapien
gttccgagaacagggatgcactggg

SEQ ID NO: 3755765 - DNA, 25 bp, Homo sapien
gctgagcccaagctggctggacagc

SEQ ID NO: 3755766 - DNA, 25 bp, Homo sapien
gcaagtccacgggaatgttcctccc

SEQ ID NO: 3755767 - DNA, 25 bp, Homo sapien
ggcctggtaactgcatgggcagctg

SEQ ID NO: 3755768 - DNA, 25 bp, Homo sapien
cagcgcagaacagtaagacccacgt

SEQ ID NO: 3755769 - DNA, 25 bp, Homo sapien
cattcctttgcaaatggcagacaaa

SEQ ID NO: 3755770 - DNA, 25 bp, Homo sapien
tgagggcattataagccagggcctg

SEQ ID NO: 3755771 - DNA, 25 bp, Homo sapien
cccagattcatgttcacccagagcc

SEQ ID NO: 3755772 - DNA, 25 bp, Homo sapien
tgtgctagtgttcagtggaccacgt

SEQ ID NO: 3755773 - DNA, 25 bp, Homo sapien
gggccttgcaggtgtaactagttaa

SEQ ID NO: 3755774 - DNA, 25 bp, Homo sapien
aggagacagtcactccggcgctgcc

SEQ ID NO: 3755775 - DNA, 25 bp, Homo sapien
aggccaccatggccgggcccaccat

SEQ ID NO: 3755776 - DNA, 25 bp, Homo sapien
ggccaccatggccgggcccaccatg

SEQ ID NO: 3755777 - DNA, 25 bp, Homo sapien
tctcagggtaggcagggtaggcgag

SEQ ID NO: 3755778 - DNA, 25 bp, Homo sapien
ctgccaaggcgtctcagggtaggca

SEQ ID NO: 3755779 - DNA, 25 bp, Homo sapien
cagcatgtgttgctcttgtggctga

SEQ ID NO: 3755780 - DNA, 25 bp, Homo sapien
agggtaggcagggtaggcgaggctg

SEQ ID NO: 3755781 - DNA, 25 bp, Homo sapien
actcagggctccgaagaagccatct

SEQ ID NO: 3755782 - DNA, 25 bp, Homo sapien
caggtgtccagagcgccctgcctgg

SEQ ID NO: 3755783 - DNA, 25 bp, Homo sapien
aatcaccaggtgtccagagcgccct

SEQ ID NO: 3755784 - DNA, 25 bp, Homo sapien
acgtgcaggcaacgccgaggcccta

SEQ ID NO: 3755785 - DNA, 25 bp, Homo sapien
ttgtgggcactgagctctccgagct

SEQ ID NO: 3755786 - DNA, 25 bp, Homo sapien
gagctctccgagcttggcagaagtc

SEQ ID NO: 3755787 - DNA, 25 bp, Homo sapien
agaacctcaccgaacaagggaagtg

SEQ ID NO: 3755788 - DNA, 25 bp, Homo sapien
aaacaagaatgcctagaacctcacc

SEQ ID NO: 3755789 - DNA, 25 bp, Homo sapien
tccctcgagagctgttcgactgtga

SEQ ID NO: 3755790 - DNA, 25 bp, Homo sapien
gcaagggctgcaggcggcttgaccg

SEQ ID NO: 3755791 - DNA, 25 bp, Homo sapien
cttgaccgggaaccgtctcaacagg

SEQ ID NO: 3755792 - DNA, 25 bp, Homo sapien
tcgactgtgacaacgggcaagggct

SEQ ID NO: 3755793 - DNA, 25 bp, Homo sapien
tggctgctccccaacaaagcgtggc

SEQ ID NO: 3755794 - DNA, 25 bp, Homo sapien
aaagccagtgcgacaccagcaggct

SEQ ID NO: 3755795 - DNA, 25 bp, Homo sapien
aacaaagcgtggctgcaaccgtgag

SEQ ID NO: 3755796 - DNA, 25 bp, Homo sapien
ggctgcaaccgtgaggacaccccgg

SEQ ID NO: 3755797 - DNA, 25 bp, Homo sapien
tgcagaaagacagcaacggagataa

SEQ ID NO: 3755798 - DNA, 25 bp, Homo sapien
acagcaacggagataagtcccaggg

SEQ ID NO: 3755799 - DNA, 25 bp, Homo sapien
cagaaagacagcaacggagataagt

SEQ ID NO: 3755800 - DNA, 25 bp, Homo sapien
aagacagcaacggagataagtccca

SEQ ID NO: 3755801 - DNA, 25 bp, Homo sapien
gactcacgaaatatgagcttcacca

SEQ ID NO: 3755802 - DNA, 25 bp, Homo sapien
gcccggaccgtctgcatggtggctt

SEQ ID NO: 3755803 - DNA, 25 bp, Homo sapien
ggaccgtctgcatggtggcttttgt

SEQ ID NO: 3755804 - DNA, 25 bp, Homo sapien
cttccggtcgttgtccgactcacga

SEQ ID NO: 3755805 - DNA, 25 bp, Homo sapien
aggccccgtgcgtcacctgcccagt

SEQ ID NO: 3755806 - DNA, 25 bp, Homo sapien
gggcaggcagggcggctctgaagga

SEQ ID NO: 3755807 - DNA, 25 bp, Homo sapien
caggccccgtgcgtcacctgcccag

SEQ ID NO: 3755808 - DNA, 25 bp, Homo sapien
aggcagggcggctctgaaggaagct

SEQ ID NO: 3755809 - DNA, 25 bp, Homo sapien
tgccgttgttgtctcggaaaacctc

SEQ ID NO: 3755810 - DNA, 25 bp, Homo sapien
gagtttcttttctaactggagcata

SEQ ID NO: 3755811 - DNA, 25 bp, Homo sapien
cgcggtgccgttgttgtctcggaaa

SEQ ID NO: 3755812 - DNA, 25 bp, Homo sapien
aacctcctggttgaagtagtcgaag

SEQ ID NO: 3755813 - DNA, 25 bp, Homo sapien
gacttgcactggctcagaactgagt

SEQ ID NO: 3755814 - DNA, 25 bp, Homo sapien
acttgcactggctcagaactgagtc

SEQ ID NO: 3755815 - DNA, 25 bp, Homo sapien
tgacttgcactggctcagaactgag

SEQ ID NO: 3755816 - DNA, 25 bp, Homo sapien
aagctgatgggtcgagtgtcatgct

SEQ ID NO: 3755817 - DNA, 25 bp, Homo sapien
tcgagtgtcatgctgcccgtggaca

SEQ ID NO: 3755818 - DNA, 25 bp, Homo sapien
gctgcccgtggacaggacagtgata

SEQ ID NO: 3755819 - DNA, 25 bp, Homo sapien
acagtgatacggagcctccacccaa

SEQ ID NO: 3755820 - DNA, 25 bp, Homo sapien
caggtccagcagccggggctgtctc

SEQ ID NO: 3755821 - DNA, 25 bp, Homo sapien
gatttcaaaaccaacagcaggtcca

SEQ ID NO: 3755822 - DNA, 25 bp, Homo sapien
caggggccacctctccgtggaccga

SEQ ID NO: 3755823 - DNA, 25 bp, Homo sapien
gcagccggggctgtctctcactggc

SEQ ID NO: 3755824 - DNA, 25 bp, Homo sapien
tggctcgttgcacacggcatcacgt

SEQ ID NO: 3755825 - DNA, 25 bp, Homo sapien
caagggaaccatagctggctcggga

SEQ ID NO: 3755826 - DNA, 25 bp, Homo sapien
gatgccgaggtttccagatcttgga

SEQ ID NO: 3755827 - DNA, 25 bp, Homo sapien
ctcgggagcgccctaggaactgatg

SEQ ID NO: 3755828 - DNA, 25 bp, Homo sapien
catggctgcggtgctgtgtgtttaa

SEQ ID NO: 3755829 - DNA, 25 bp, Homo sapien
tccatcctgcggacggagagtttgc

SEQ ID NO: 3755830 - DNA, 25 bp, Homo sapien
tgggcacaactgactcggcatgccg

SEQ ID NO: 3755831 - DNA, 25 bp, Homo sapien
tgtgtttaaccggaccgtggagatg

SEQ ID NO: 3755832 - DNA, 25 bp, Homo sapien
aatttctgtcagacgggtacaagac

SEQ ID NO: 3755833 - DNA, 25 bp, Homo sapien
aaatttctgtcagacgggtacaaga

SEQ ID NO: 3755834 - DNA, 25 bp, Homo sapien
taaatttctgtcagacgggtacaag

SEQ ID NO: 3755835 - DNA, 25 bp, Homo sapien
ttaaatttctgtcagacgggtacaa

SEQ ID NO: 3755836 - DNA, 25 bp, Homo sapien
caaggcagcggctgatcctgcccat

SEQ ID NO: 3755837 - DNA, 25 bp, Homo sapien
tgatcaccaatttcgcatggtctcc

SEQ ID NO: 3755838 - DNA, 25 bp, Homo sapien
gccgtgtggacaatgacaaggcagc

SEQ ID NO: 3755839 - DNA, 25 bp, Homo sapien
atctgtcaggagctgtcccggccgc

SEQ ID NO: 3755840 - DNA, 25 bp, Homo sapien
tacacacgaccatgatacaaacgca

SEQ ID NO: 3755841 - DNA, 25 bp, Homo sapien
ggcagaggtacacacgaccatgata

SEQ ID NO: 3755842 - DNA, 25 bp, Homo sapien
tgatacaaacgcaaggctgcgcagg

SEQ ID NO: 3755843 - DNA, 25 bp, Homo sapien
gggcaggcagaggtacacacgacca

SEQ ID NO: 3755844 - DNA, 25 bp, Homo sapien
tgctgctcccacgtcggcactgtgc

SEQ ID NO: 3755845 - DNA, 25 bp, Homo sapien
ctgctcccacgtcggcactgtgcca

SEQ ID NO: 3755846 - DNA, 25 bp, Homo sapien
cgtgctgctcccacgtcggcactgt

SEQ ID NO: 3755847 - DNA, 25 bp, Homo sapien
gtgctgctcccacgtcggcactgtg

SEQ ID NO: 3755848 - DNA, 25 bp, Homo sapien
caataggaacaaccccaaggcaagt

SEQ ID NO: 3755849 - DNA, 25 bp, Homo sapien
aaggaaattcgtgtgtggtttgaag

SEQ ID NO: 3755850 - DNA, 25 bp, Homo sapien
actgaatgggattcctcggccggca

SEQ ID NO: 3755851 - DNA, 25 bp, Homo sapien
gctcacatgcatatgcctgctcaca

SEQ ID NO: 3755852 - DNA, 25 bp, Homo sapien
agacatgagcctaggcccgcacagg

SEQ ID NO: 3755853 - DNA, 25 bp, Homo sapien
gggtcaggatcatcgacgttcctct

SEQ ID NO: 3755854 - DNA, 25 bp, Homo sapien
tttgataacaatgaagacaacgaca

SEQ ID NO: 3755855 - DNA, 25 bp, Homo sapien
caggatcatcgacgttcctctctgc

SEQ ID NO: 3755856 - DNA, 25 bp, Homo sapien
gccagggacccacgacatcgcactg

SEQ ID NO: 3755857 - DNA, 25 bp, Homo sapien
gacccacgacatcgcactggcctgt

SEQ ID NO: 3755858 - DNA, 25 bp, Homo sapien
ggacccacgacatcgcactggcctg

SEQ ID NO: 3755859 - DNA, 25 bp, Homo sapien
cagggacccacgacatcgcactggc

SEQ ID NO: 3755860 - DNA, 25 bp, Homo sapien
ggtcactgatgcttacggccggggc

SEQ ID NO: 3755861 - DNA, 25 bp, Homo sapien
gtcactgatgcttacggccggggct

SEQ ID NO: 3755862 - DNA, 25 bp, Homo sapien
gggtcactgatgcttacggccgggg

SEQ ID NO: 3755863 - DNA, 25 bp, Homo sapien
tcactgatgcttacggccggggctc

SEQ ID NO: 3755864 - DNA, 25 bp, Homo sapien
cctggggctgctggggctgctccac

SEQ ID NO: 3755865 - DNA, 25 bp, Homo sapien
gcctggggctgctggggctgctcca

SEQ ID NO: 3755866 - DNA, 25 bp, Homo sapien
cacgtaggcctttgagggcctgggg

SEQ ID NO: 3755867 - DNA, 25 bp, Homo sapien
ggggctgctggggctgctccacctc

SEQ ID NO: 3755868 - DNA, 25 bp, Homo sapien
cagcaaagctcccgctcaggtgagc

SEQ ID NO: 3755869 - DNA, 25 bp, Homo sapien
ttgtcccggatcagcattcctccaa

SEQ ID NO: 3755870 - DNA, 25 bp, Homo sapien
cacgtccttaatgaagttgtcccgg

SEQ ID NO: 3755871 - DNA, 25 bp, Homo sapien
aggtgagccagaatgacagctctgc

SEQ ID NO: 3755872 - DNA, 25 bp, Homo sapien
tttctctgttggtgacgccagagaa

SEQ ID NO: 3755873 - DNA, 25 bp, Homo sapien
ttggtgacgccagagaagcactcat

SEQ ID NO: 3755874 - DNA, 25 bp, Homo sapien
tgttggtgacgccagagaagcactc

SEQ ID NO: 3755875 - DNA, 25 bp, Homo sapien
tctctgttggtgacgccagagaagc

SEQ ID NO: 3755876 - DNA, 25 bp, Homo sapien
gatgtccagttcatacagtctgtcc

SEQ ID NO: 3755877 - DNA, 25 bp, Homo sapien
aacgagatgtccagttcatacagtc

SEQ ID NO: 3755878 - DNA, 25 bp, Homo sapien
tccttaaagacagacaactccttgt

SEQ ID NO: 3755879 - DNA, 25 bp, Homo sapien
ctgtccttaaagacagacaactcct

SEQ ID NO: 3755880 - DNA, 25 bp, Homo sapien
ccagctcccaatcttgctcccagct

SEQ ID NO: 3755881 - DNA, 25 bp, Homo sapien
tccagctcccaatcttgctcccagc

SEQ ID NO: 3755882 - DNA, 25 bp, Homo sapien
cacatctgccagtggaagtcccctg

SEQ ID NO: 3755883 - DNA, 25 bp, Homo sapien
catctgccagtggaagtcccctgcg

SEQ ID NO: 3755884 - DNA, 25 bp, Homo sapien
tcggggtccacggatctttctggaa

SEQ ID NO: 3755885 - DNA, 25 bp, Homo sapien
atgggcaccctgggaacgctgaggg

SEQ ID NO: 3755886 - DNA, 25 bp, Homo sapien
gcaccctgggaacgctgagggtcgg

SEQ ID NO: 3755887 - DNA, 25 bp, Homo sapien
tgggcaccctgggaacgctgagggt

SEQ ID NO: 3755888 - DNA, 25 bp, Homo sapien
tgggcaccctgggaacgctgagggt

SEQ ID NO: 3755889 - DNA, 25 bp, Homo sapien
aatgccgagggttggggtccatgga

SEQ ID NO: 3755890 - DNA, 25 bp, Homo sapien
ctggaatgccattgggtgcgtgggc

SEQ ID NO: 3755891 - DNA, 25 bp, Homo sapien
tggaatgccactgggcgcgtgggca

SEQ ID NO: 3755892 - DNA, 25 bp, Homo sapien
agggcagacgcagcgggaaagcgga

SEQ ID NO: 3755893 - DNA, 25 bp, Homo sapien
cagccaaatgccgaagaggaagcca

SEQ ID NO: 3755894 - DNA, 25 bp, Homo sapien
aggaaggccaacgtgtcctgacagg

SEQ ID NO: 3755895 - DNA, 25 bp, Homo sapien
gcgcgtgagcacctgggaacgctga

SEQ ID NO: 3755896 - DNA, 25 bp, Homo sapien
ccaggccgtggcaaggacgccttcc

SEQ ID NO: 3755897 - DNA, 25 bp, Homo sapien
ggccaggccgtggcaaggacgcctt

SEQ ID NO: 3755898 - DNA, 25 bp, Homo sapien
ggccgtggcaaggacgccttcccac

SEQ ID NO: 3755899 - DNA, 25 bp, Homo sapien
aggccgtggcaaggacgccttccca

SEQ ID NO: 3755900 - DNA, 25 bp, Homo sapien
ccgtggcctccgtgtcagtgctgag

SEQ ID NO: 3755901 - DNA, 25 bp, Homo sapien
cgtggcctccgtgtcagtgctgagt

SEQ ID NO: 3755902 - DNA, 25 bp, Homo sapien
agtgtccgtcccactcttcatcggg

SEQ ID NO: 3755903 - DNA, 25 bp, Homo sapien
gagtgtccgtcccactcttcgtggg

SEQ ID NO: 3755904 - DNA, 25 bp, Homo sapien
tccacctgtgcaacccggctttaaa

SEQ ID NO: 3755905 - DNA, 25 bp, Homo sapien
acaaggctgagtgcacacgggacat

SEQ ID NO: 3755906 - DNA, 25 bp, Homo sapien
agtaacagcaccctgtggagtccca

SEQ ID NO: 3755907 - DNA, 25 bp, Homo sapien
cacagtgaggcacacacaaggctga

SEQ ID NO: 3755908 - DNA, 25 bp, Homo sapien
tacgcagggcctgcgtgtcatgcat

SEQ ID NO: 3755909 - DNA, 25 bp, Homo sapien
gcttggttaaaaacgtagctacgca

SEQ ID NO: 3755910 - DNA, 25 bp, Homo sapien
gcagtcactgcttggttaaaaacgt

SEQ ID NO: 3755911 - DNA, 25 bp, Homo sapien
gcagagaacagctgcacatgctttc

SEQ ID NO: 3755912 - DNA, 25 bp, Homo sapien
aaaatatcatacagcacctgtcgcg

SEQ ID NO: 3755913 - DNA, 25 bp, Homo sapien
tgtgattgggtttcgggtccatccc

SEQ ID NO: 3755914 - DNA, 25 bp, Homo sapien
cctgtcgcgactgggatctgattct

SEQ ID NO: 3755915 - DNA, 25 bp, Homo sapien
gggccttcaccagagtctcaagagt

SEQ ID NO: 3755916 - DNA, 25 bp, Homo sapien
agtccacgcacacacggactgatca

SEQ ID NO: 3755917 - DNA, 25 bp, Homo sapien
ggccagggcacagctcatctgggct

SEQ ID NO: 3755918 - DNA, 25 bp, Homo sapien
gctgtgtctctgagccattggcccc

SEQ ID NO: 3755919 - DNA, 25 bp, Homo sapien
ctcctccgcggccttgctgtgtctc

SEQ ID NO: 3755920 - DNA, 25 bp, Homo sapien
gtccccgactcactgcttcctgggc

SEQ ID NO: 3755921 - DNA, 25 bp, Homo sapien
ggtgtggcacacgtggtctccgctt

SEQ ID NO: 3755922 - DNA, 25 bp, Homo sapien
tgacctggcccggatcagctcgaaa

SEQ ID NO: 3755923 - DNA, 25 bp, Homo sapien
acctcggggagcatccaggtgctca

SEQ ID NO: 3755924 - DNA, 25 bp, Homo sapien
tcgaaacgcctgtaagtgcaggcag

SEQ ID NO: 3755925 - DNA, 25 bp, Homo sapien
agctccttggcagacggggacatga

SEQ ID NO: 3755926 - DNA, 25 bp, Homo sapien
gggacatgaggatgcggtcacacca

SEQ ID NO: 3755927 - DNA, 25 bp, Homo sapien
caccgggtgttcatgtactgctcac

SEQ ID NO: 3755928 - DNA, 25 bp, Homo sapien
actgctcaccctggcgggcgtcctc

SEQ ID NO: 3755929 - DNA, 25 bp, Homo sapien
agaccagacccagcgctccacatcc

SEQ ID NO: 3755930 - DNA, 25 bp, Homo sapien
cagaccagacccagcgctccacatc

SEQ ID NO: 3755931 - DNA, 25 bp, Homo sapien
ccagaccagacccagcgctccacat

SEQ ID NO: 3755932 - DNA, 25 bp, Homo sapien
gaccagacccagcgctccacatccc

SEQ ID NO: 3755933 - DNA, 25 bp, Homo sapien
tgtcaagtcccggatccagagaacc

SEQ ID NO: 3755934 - DNA, 25 bp, Homo sapien
gtgaatggaaaacgggctgcaacgc

SEQ ID NO: 3755935 - DNA, 25 bp, Homo sapien
cccaccctgagcataaagtgtcaag

SEQ ID NO: 3755936 - DNA, 25 bp, Homo sapien
cccatggggagagcctgtccaaact

SEQ ID NO: 3755937 - DNA, 25 bp, Homo sapien
cccaatgtggtcataggtgacaacc

SEQ ID NO: 3755938 - DNA, 25 bp, Homo sapien
catgcagacgttgggcccaatgtgg

SEQ ID NO: 3755939 - DNA, 25 bp, Homo sapien
tgtggtcataggtgacaaccttctc

SEQ ID NO: 3755940 - DNA, 25 bp, Homo sapien
cttgtggtctcccatgcagacgttg

SEQ ID NO: 3755941 - DNA, 25 bp, Homo sapien
agctcggcccttgtgcacagccacg

SEQ ID NO: 3755942 - DNA, 25 bp, Homo sapien
cagggcagccatgaaccgggctggg

SEQ ID NO: 3755943 - DNA, 25 bp, Homo sapien
ctcggcccttgtgcacagccacggc

SEQ ID NO: 3755944 - DNA, 25 bp, Homo sapien
ggcagccatgaaccgggctgggagg

SEQ ID NO: 3755945 - DNA, 25 bp, Homo sapien
agcacagcacatgccgccgcctccc

SEQ ID NO: 3755946 - DNA, 25 bp, Homo sapien
cgccgcctcccgttgcacccccaga

SEQ ID NO: 3755947 - DNA, 25 bp, Homo sapien
aggacggtgtcagcacggcgcacgc

SEQ ID NO: 3755948 - DNA, 25 bp, Homo sapien
gtcagcacggcgcacgcgggacagc

SEQ ID NO: 3755949 - DNA, 25 bp, Homo sapien
ccccgggcatgattcggaaggccag

SEQ ID NO: 3755950 - DNA, 25 bp, Homo sapien
ggcatgattcggaaggccaggaaca

SEQ ID NO: 3755951 - DNA, 25 bp, Homo sapien
catgattcggaaggccaggaacacg

SEQ ID NO: 3755952 - DNA, 25 bp, Homo sapien
ctgccccgggcatgattcggaaggc

SEQ ID NO: 3755953 - DNA, 25 bp, Homo sapien
actgcacgacacaacacttgtgcac

SEQ ID NO: 3755954 - DNA, 25 bp, Homo sapien
tgcacgacacaacacttgtgcacat

SEQ ID NO: 3755955 - DNA, 25 bp, Homo sapien
ctgcacgacacaacacttgtgcaca

SEQ ID NO: 3755956 - DNA, 25 bp, Homo sapien
gcacgacacaacacttgtgcacatg

SEQ ID NO: 3755957 - DNA, 25 bp, Homo sapien
gaaaagctgcgtaaaagctgaactg

SEQ ID NO: 3755958 - DNA, 25 bp, Homo sapien
ctgcgtaaaagctgaactggaggga

SEQ ID NO: 3755959 - DNA, 25 bp, Homo sapien
aggaaaagctgcgtaaaagctgaac

SEQ ID NO: 3755960 - DNA, 25 bp, Homo sapien
aaagctgcgtaaaagctgaactgga

SEQ ID NO: 3755961 - DNA, 25 bp, Homo sapien
ctgtcacggaattcgtaatttgtta

SEQ ID NO: 3755962 - DNA, 25 bp, Homo sapien
tgtcacggaattcgtaatttgttaa

SEQ ID NO: 3755963 - DNA, 25 bp, Homo sapien
tattacacagaagaacggcatggga

SEQ ID NO: 3755964 - DNA, 25 bp, Homo sapien
ttttacccacgatggcgaggccatg

SEQ ID NO: 3755965 - DNA, 25 bp, Homo sapien
gtattcggtccacggctacagggag

SEQ ID NO: 3755966 - DNA, 25 bp, Homo sapien
tacagggaggctcacgaagtgtcct

SEQ ID NO: 3755967 - DNA, 25 bp, Homo sapien
ttattgcttaggaaccagaccggtc

SEQ ID NO: 3755968 - DNA, 25 bp, Homo sapien
ccaagaacagattccgcagcggaca

SEQ ID NO: 3755969 - DNA, 25 bp, Homo sapien
cggactccgtgttgaaccgcggaca

SEQ ID NO: 3755970 - DNA, 25 bp, Homo sapien
acatgggttgtctgtagcggagcaa

SEQ ID NO: 3755971 - DNA, 25 bp, Homo sapien
aagaagcaggactcggacgccgaga

SEQ ID NO: 3755972 - DNA, 25 bp, Homo sapien
gaggacgacgacgaatacaaccggc

SEQ ID NO: 3755973 - DNA, 25 bp, Homo sapien
cacgcggctgctcaagaagcacaaa

SEQ ID NO: 3755974 - DNA, 25 bp, Homo sapien
gaagcacaaaccctcgaacttggcg

SEQ ID NO: 3755975 - DNA, 25 bp, Homo sapien
gctcgtgacaacagaagaactcggt

SEQ ID NO: 3755976 - DNA, 25 bp, Homo sapien
gaagaactcggaccattctctgtgt

SEQ ID NO: 3755977 - DNA, 25 bp, Homo sapien
gcagcgtctccgtcacgagaaggaa

SEQ ID NO: 3755978 - DNA, 25 bp, Homo sapien
tctgtgctttcggtaggtgctgctc

SEQ ID NO: 3755979 - DNA, 25 bp, Homo sapien
gaggctgaggaacggcgtcccctga

SEQ ID NO: 3755980 - DNA, 25 bp, Homo sapien
tgaggaacggcgtcccctgaaatct

SEQ ID NO: 3755981 - DNA, 25 bp, Homo sapien
gaggaacggcgtcccctgaaatctc

SEQ ID NO: 3755982 - DNA, 25 bp, Homo sapien
gtgcatgaaaatgccccgcagcagg

SEQ ID NO: 3755983 - DNA, 25 bp, Homo sapien
acccacacggttcctggagtccaat

SEQ ID NO: 3755984 - DNA, 25 bp, Homo sapien
cggttcctggagtccaatgtgtgca

SEQ ID NO: 3755985 - DNA, 25 bp, Homo sapien
ccagggacgcgtccccaaagcacga

SEQ ID NO: 3755986 - DNA, 25 bp, Homo sapien
ggagaggtggcgctgttccctcagg

SEQ ID NO: 3755987 - DNA, 25 bp, Homo sapien
gagaggtggcgctgttccctcaggg

SEQ ID NO: 3755988 - DNA, 25 bp, Homo sapien
tgtgggcatctggtgtccttgtccc

SEQ ID NO: 3755989 - DNA, 25 bp, Homo sapien
caggtgtgggcatctggtgtccttg

SEQ ID NO: 3755990 - DNA, 25 bp, Homo sapien
ttgtctgagctctgtccgccactgg

SEQ ID NO: 3755991 - DNA, 25 bp, Homo sapien
cggcttctgtcacgcagacacggct

SEQ ID NO: 3755992 - DNA, 25 bp, Homo sapien
caagacccgggataaatgggcaaag

SEQ ID NO: 3755993 - DNA, 25 bp, Homo sapien
gcaaagaagcaacgccctgagagct

SEQ ID NO: 3755994 - DNA, 25 bp, Homo sapien
gggcgccgggagccctttgcacctg

SEQ ID NO: 3755995 - DNA, 25 bp, Homo sapien
gcgccgggagccctttgcacctggg

SEQ ID NO: 3755996 - DNA, 25 bp, Homo sapien
cgggcgccgggagccctttgcacct

SEQ ID NO: 3755997 - DNA, 25 bp, Homo sapien
ggcgccgggagccctttgcacctgg

SEQ ID NO: 3755998 - DNA, 25 bp, Homo sapien
aaaaaggcagttctgcacccccatc

SEQ ID NO: 3755999 - DNA, 25 bp, Homo sapien
cttggcgcgggcacaaagagggtaa

SEQ ID NO: 3756000 - DNA, 25 bp, Homo sapien
cgcgggcacaaagagggtaaacagg

SEQ ID NO: 3756001 - DNA, 25 bp, Homo sapien
cgggcacaaagagggtaaacaggca

SEQ ID NO: 3756002 - DNA, 25 bp, Homo sapien
gctccagcgcctccctgggtgtagc

SEQ ID NO: 3756003 - DNA, 25 bp, Homo sapien
ctccagcgcctccctgggtgtagcg

SEQ ID NO: 3756004 - DNA, 25 bp, Homo sapien
aggaatggctgccccggcacccaga

SEQ ID NO: 3756005 - DNA, 25 bp, Homo sapien
gcaccggtttggaagcaccccattg

SEQ ID NO: 3756006 - DNA, 25 bp, Homo sapien
caccccattgtttgaaggaatggct

SEQ ID NO: 3756007 - DNA, 25 bp, Homo sapien
agagaccgaggcggcatcaggctct

SEQ ID NO: 3756008 - DNA, 25 bp, Homo sapien
ccccgaattcgaggcggacggcgca

SEQ ID NO: 3756009 - DNA, 25 bp, Homo sapien
cgttttagcagcttcgcgagacccc

SEQ ID NO: 3756010 - DNA, 25 bp, Homo sapien
tagcagtgacatgcggtgaagcatc

SEQ ID NO: 3756011 - DNA, 25 bp, Homo sapien
gcagtcctgcgggaatgctgaccgt

SEQ ID NO: 3756012 - DNA, 25 bp, Homo sapien
ctcggcccacctccgggtcacaccg

SEQ ID NO: 3756013 - DNA, 25 bp, Homo sapien
ccgcctcggcccacctcaggatcac

SEQ ID NO: 3756014 - DNA, 25 bp, Homo sapien
acctcaggatcacaccgtccagccc

SEQ ID NO: 3756015 - DNA, 25 bp, Homo sapien
cccacctcaggatcacaccgtccag

SEQ ID NO: 3756016 - DNA, 25 bp, Homo sapien
aggatcacaccgtccagcccagccg

SEQ ID NO: 3756017 - DNA, 25 bp, Homo sapien
caggatcacaccgtccagcccagcc

SEQ ID NO: 3756018 - DNA, 25 bp, Homo sapien
ctcaggatcacaccgtccagcccag

SEQ ID NO: 3756019 - DNA, 25 bp, Homo sapien
gatcacaccgtccagcccagccgcc

SEQ ID NO: 3756020 - DNA, 25 bp, Homo sapien
agagaacctgatcccgtggacgcgg

SEQ ID NO: 3756021 - DNA, 25 bp, Homo sapien
gacgcggtgggaccataggaccata

SEQ ID NO: 3756022 - DNA, 25 bp, Homo sapien
taatcacttccagggttgacaggtg

SEQ ID NO: 3756023 - DNA, 25 bp, Homo sapien
tgtcctgctcatcgaggaattccaa

SEQ ID NO: 3756024 - DNA, 25 bp, Homo sapien
tggggccgctcagttgcccatcccc

SEQ ID NO: 3756025 - DNA, 25 bp, Homo sapien
ttcctgggatgaccccgcatgctgg

SEQ ID NO: 3756026 - DNA, 25 bp, Homo sapien
gtgggttcctgggatgaccccgcat

SEQ ID NO: 3756027 - DNA, 25 bp, Homo sapien
gatgaccccgcatgctgggccgaca

SEQ ID NO: 3756028 - DNA, 25 bp, Homo sapien
cagaaatcaatttccaatacgtctt

SEQ ID NO: 3756029 - DNA, 25 bp, Homo sapien
tccaatacgtcttcacccgtaagaa

SEQ ID NO: 3756030 - DNA, 25 bp, Homo sapien
ccggctgtcctcgttttatgatgac

SEQ ID NO: 3756031 - DNA, 25 bp, Homo sapien
gatggaaacaaccagtttaattatc

SEQ ID NO: 3756032 - DNA, 25 bp, Homo sapien
cactgcaccggtggaggtggcctct

SEQ ID NO: 3756033 - DNA, 25 bp, Homo sapien
tcactgcaccggtggaggtggcctc

SEQ ID NO: 3756034 - DNA, 25 bp, Homo sapien
agcccgggcctctcggatgtcagag

SEQ ID NO: 3756035 - DNA, 25 bp, Homo sapien
tcagcctgcaagtcccgagcgcaga

SEQ ID NO: 3756036 - DNA, 25 bp, Homo sapien
agtcccgagcgcagaaaccatgcag

SEQ ID NO: 3756037 - DNA, 25 bp, Homo sapien
cagcccgggcctctcggatgtcaga

SEQ ID NO: 3756038 - DNA, 25 bp, Homo sapien
tcgaggctccgaaatctgcatatgt

SEQ ID NO: 3756039 - DNA, 25 bp, Homo sapien
aagtgtatcctttgatgggccccgg

SEQ ID NO: 3756040 - DNA, 25 bp, Homo sapien
cagtcgtcgtggacccatacgagga

SEQ ID NO: 3756041 - DNA, 25 bp, Homo sapien
cagttgtgggcagcaactggtgccc

SEQ ID NO: 3756042 - DNA, 25 bp, Homo sapien
ggtgtgcaaactcccaacaaataga

SEQ ID NO: 3756043 - DNA, 25 bp, Homo sapien
tgccgtaaagcgctaaggacaccac

SEQ ID NO: 3756044 - DNA, 25 bp, Homo sapien
tgccggtgatctagagccttgagtg

SEQ ID NO: 3756045 - DNA, 25 bp, Homo sapien
ggccggttacctcaatcaaatccaa

SEQ ID NO: 3756046 - DNA, 25 bp, Homo sapien
cagcagtcggcgtggcagcttatag

SEQ ID NO: 3756047 - DNA, 25 bp, Homo sapien
gagcaaatttgcatcggtgtcacgg

SEQ ID NO: 3756048 - DNA, 25 bp, Homo sapien
cacatgtgcgaagtggatccttgaa

SEQ ID NO: 3756049 - DNA, 25 bp, Homo sapien
ttctcggaactgtggctggtccctc

SEQ ID NO: 3756050 - DNA, 25 bp, Homo sapien
ctgggaacacccaccgagaccagag

SEQ ID NO: 3756051 - DNA, 25 bp, Homo sapien
tgggaacacccaccgagaccagagc

SEQ ID NO: 3756052 - DNA, 25 bp, Homo sapien
ccctgggaacgcccattgagagcag

SEQ ID NO: 3756053 - DNA, 25 bp, Homo sapien
ctgggaacgcccattgagagcagag

SEQ ID NO: 3756054 - DNA, 25 bp, Homo sapien
cctgggaacgcccattgagagcaga

SEQ ID NO: 3756055 - DNA, 25 bp, Homo sapien
caccctgggaacgcccattgagagc

SEQ ID NO: 3756056 - DNA, 25 bp, Homo sapien
tgcagctaggagagccccacagcac

SEQ ID NO: 3756057 - DNA, 25 bp, Homo sapien
ggccactgggcaattcggaaatcag

SEQ ID NO: 3756058 - DNA, 25 bp, Homo sapien
attcggaaatcagctgggactggtg

SEQ ID NO: 3756059 - DNA, 25 bp, Homo sapien
ggcaattcggaaatcagctgggact

SEQ ID NO: 3756060 - DNA, 25 bp, Homo sapien
cactgggcaattcggaaatcagctg

SEQ ID NO: 3756061 - DNA, 25 bp, Homo sapien
gggatgtcgtagaccacagcaggcc

SEQ ID NO: 3756062 - DNA, 25 bp, Homo sapien
ggggatgtcgtagaccacagcaggc

SEQ ID NO: 3756063 - DNA, 25 bp, Homo sapien
gggggatgtcgtagaccacagcagg

SEQ ID NO: 3756064 - DNA, 25 bp, Homo sapien
acagactcagtgcagtcgggctggg

SEQ ID NO: 3756065 - DNA, 25 bp, Homo sapien
tatgcaagttcagagacccacgtca

SEQ ID NO: 3756066 - DNA, 25 bp, Homo sapien
cacagctttccgtgcagctccagaa

SEQ ID NO: 3756067 - DNA, 25 bp, Homo sapien
gctttcacaaaacccttgcggcagg

SEQ ID NO: 3756068 - DNA, 25 bp, Homo sapien
caatttttgtgccatacgtcaagtc

SEQ ID NO: 3756069 - DNA, 25 bp, Homo sapien
tgtgagcactcgtggccacgggaac

SEQ ID NO: 3756070 - DNA, 25 bp, Homo sapien
ttcacagtgtggagcgaagccagga

SEQ ID NO: 3756071 - DNA, 25 bp, Homo sapien
gctgactgccctgcgctcggtgtga

SEQ ID NO: 3756072 - DNA, 25 bp, Homo sapien
cccatggcaggtgtgagcactcgtg

SEQ ID NO: 3756073 - DNA, 25 bp, Homo sapien
agcagcaatgacgatgacggctgca

SEQ ID NO: 3756074 - DNA, 25 bp, Homo sapien
ggcagcagcaatgacgatgacggct

SEQ ID NO: 3756075 - DNA, 25 bp, Homo sapien
tcaggcagcagcaatgacgatgacg

SEQ ID NO: 3756076 - DNA, 25 bp, Homo sapien
agcaatgacgatgacggctgcaggt

SEQ ID NO: 3756077 - DNA, 25 bp, Homo sapien
ggattctcgcctgcagccatgtttc

SEQ ID NO: 3756078 - DNA, 25 bp, Homo sapien
tttgaattggcgcgtttttccttga

SEQ ID NO: 3756079 - DNA, 25 bp, Homo sapien
ctgtgccccctattgagccggtgct

SEQ ID NO: 3756080 - DNA, 25 bp, Homo sapien
cttgaacgggggacatggattctcg

SEQ ID NO: 3756081 - DNA, 25 bp, Homo sapien
ctcctgggttctgcacatgacctga

SEQ ID NO: 3756082 - DNA, 25 bp, Homo sapien
tctcctgggttctgcacatgacctg

SEQ ID NO: 3756083 - DNA, 25 bp, Homo sapien
gggtcttttgcctttatcgtcgctc

SEQ ID NO: 3756084 - DNA, 25 bp, Homo sapien
cattcatcagcagtccattttgaca

SEQ ID NO: 3756085 - DNA, 25 bp, Homo sapien
agtcattgttcagaaaactgcgtag

SEQ ID NO: 3756086 - DNA, 25 bp, Homo sapien
tggtaaatcagcgtattagaaatag

SEQ ID NO: 3756087 - DNA, 25 bp, Homo sapien
gcttacggcccccaaggctgccgta

SEQ ID NO: 3756088 - DNA, 25 bp, Homo sapien
tacggcccccaaggctgccgtactg

SEQ ID NO: 3756089 - DNA, 25 bp, Homo sapien
gcccccaaggctgccgtactgcagc

SEQ ID NO: 3756090 - DNA, 25 bp, Homo sapien
caaggctgccgtactgcagccccat

SEQ ID NO: 3756091 - DNA, 25 bp, Homo sapien
ggctgcacaaggtgtttccctccaa

SEQ ID NO: 3756092 - DNA, 25 bp, Homo sapien
cactgggctgcacaaggtgtttccc

SEQ ID NO: 3756093 - DNA, 25 bp, Homo sapien
ttccctccaagagtggagaagagtg

SEQ ID NO: 3756094 - DNA, 25 bp, Homo sapien
cacaaggtgtttccctccaagagtg

SEQ ID NO: 3756095 - DNA, 25 bp, Homo sapien
ccagggacctgtctgactcgaattc

SEQ ID NO: 3756096 - DNA, 25 bp, Homo sapien
gcccagggacctgtctgactcgaat

SEQ ID NO: 3756097 - DNA, 25 bp, Homo sapien
gggcccagggacctgtctgactcga

SEQ ID NO: 3756098 - DNA, 25 bp, Homo sapien
cgagggcccagggacctgtctgact

SEQ ID NO: 3756099 - DNA, 25 bp, Homo sapien
tccccacctgcatgcggggcgtcct

SEQ ID NO: 3756100 - DNA, 25 bp, Homo sapien
catgcggggcgtcctctgtatggct

SEQ ID NO: 3756101 - DNA, 25 bp, Homo sapien
gggcctgattgtgggtccccacctg

SEQ ID NO: 3756102 - DNA, 25 bp, Homo sapien
cctgcatgcggggcgtcctctgtat

SEQ ID NO: 3756103 - DNA, 25 bp, Homo sapien
gccctggcctcgggcctgagacaag

SEQ ID NO: 3756104 - DNA, 25 bp, Homo sapien
ccctggcctcgggcctgagacaaga

SEQ ID NO: 3756105 - DNA, 25 bp, Homo sapien
cctgagacaagagcccaagtgggag

SEQ ID NO: 3756106 - DNA, 25 bp, Homo sapien
gcaggaaggtaacgccagagagaat

SEQ ID NO: 3756107 - DNA, 25 bp, Homo sapien
cacatataaacacgcgtgaacggca

SEQ ID NO: 3756108 - DNA, 25 bp, Homo sapien
gcatgaaggtaacgccagtgagaag

SEQ ID NO: 3756109 - DNA, 25 bp, Homo sapien
attcagggaaatgcgcatatgcaga

SEQ ID NO: 3756110 - DNA, 25 bp, Homo sapien
tctttgtgcataaaacgggccccag

SEQ ID NO: 3756111 - DNA, 25 bp, Homo sapien
ttcccagagccgtgaagacagcaag

SEQ ID NO: 3756112 - DNA, 25 bp, Homo sapien
gaggcaggcaacttcagtacacggt

SEQ ID NO: 3756113 - DNA, 25 bp, Homo sapien
tcactcgtgtttggcggtctctggc

SEQ ID NO: 3756114 - DNA, 25 bp, Homo sapien
gaagggaattaaccagccgtgagga

SEQ ID NO: 3756115 - DNA, 25 bp, Homo sapien
ccacattgtcgaaatccaggaagga

SEQ ID NO: 3756116 - DNA, 25 bp, Homo sapien
tcttagacagcacgcggaggtttcc

SEQ ID NO: 3756117 - DNA, 25 bp, Homo sapien
tggcctggtgcgtggaaagacctca

SEQ ID NO: 3756118 - DNA, 25 bp, Homo sapien
gttgttgggccatctgtgccatgga

SEQ ID NO: 3756119 - DNA, 25 bp, Homo sapien
gcgtgcagcctgaggacatcctgta

SEQ ID NO: 3756120 - DNA, 25 bp, Homo sapien
ccgcgtctctgtgggaactgctagt

SEQ ID NO: 3756121 - DNA, 25 bp, Homo sapien
tttgcttttggtcggaggcgcctcc

SEQ ID NO: 3756122 - DNA, 25 bp, Homo sapien
tttgtgtccagtcccgacgtcagga

SEQ ID NO: 3756123 - DNA, 25 bp, Homo sapien
tccaagccccgtagacactaaacga

SEQ ID NO: 3756124 - DNA, 25 bp, Homo sapien
tctgcagccaaagctgggagcgtcg

SEQ ID NO: 3756125 - DNA, 25 bp, Homo sapien
ctcgagaagtgacggtttgtgtcca

SEQ ID NO: 3756126 - DNA, 25 bp, Homo sapien
cagtgtttgtcgtatcctgacattc

SEQ ID NO: 3756127 - DNA, 25 bp, Homo sapien
ttttcgcagaatcagatcacgtgtg

SEQ ID NO: 3756128 - DNA, 25 bp, Homo sapien
gacattctcgggtaattttcgcaga

SEQ ID NO: 3756129 - DNA, 25 bp, Homo sapien
cacgtgtgctgagccagacgtgccg

SEQ ID NO: 3756130 - DNA, 25 bp, Homo sapien
gaacggatgtctcctcaaagtccat

SEQ ID NO: 3756131 - DNA, 25 bp, Homo sapien
catgaggaagaccatagagaccact

SEQ ID NO: 3756132 - DNA, 25 bp, Homo sapien
catgatctcgagactttacgaacgg

SEQ ID NO: 3756133 - DNA, 25 bp, Homo sapien
tgacgtgtaaacctcttttccagaa

SEQ ID NO: 3756134 - DNA, 25 bp, Homo sapien
tgtgaccacacgagctttctctcca

SEQ ID NO: 3756135 - DNA, 25 bp, Homo sapien
cccctcgtgcagcaggaatcctgta

SEQ ID NO: 3756136 - DNA, 25 bp, Homo sapien
ccggcgcaatggtgccgaaagccaa

SEQ ID NO: 3756137 - DNA, 25 bp, Homo sapien
tgacgcacagaatccggcagaagac

SEQ ID NO: 3756138 - DNA, 25 bp, Homo sapien
agctgatagcaggaaccacctccgt

SEQ ID NO: 3756139 - DNA, 25 bp, Homo sapien
ccacctccgttaggcagaaatgatg

SEQ ID NO: 3756140 - DNA, 25 bp, Homo sapien
gaaccagggaaagtgttccagtcta

SEQ ID NO: 3756141 - DNA, 25 bp, Homo sapien
gcacgaagccgcaggtgcactcatg

SEQ ID NO: 3756142 - DNA, 25 bp, Homo sapien
tgcccttgcacaggccgggtttggc

SEQ ID NO: 3756143 - DNA, 25 bp, Homo sapien
gtctctgcccttgcacaggccgggt

SEQ ID NO: 3756144 - DNA, 25 bp, Homo sapien
aggcacagcagctgcgtcgtgcgtt

SEQ ID NO: 3756145 - DNA, 25 bp, Homo sapien
ctgcgtcgtgcgtttgggcctgctc

SEQ ID NO: 3756146 - DNA, 25 bp, Homo sapien
gctttcttcctctagggagcgttaa

SEQ ID NO: 3756147 - DNA, 25 bp, Homo sapien
ccctgccagcgtgtaccaagtgtga

SEQ ID NO: 3756148 - DNA, 25 bp, Homo sapien
caagtgtgagtttacccatcgggag

SEQ ID NO: 3756149 - DNA, 25 bp, Homo sapien
tatttcattagtagtggcggcgacg

SEQ ID NO: 3756150 - DNA, 25 bp, Homo sapien
gggcaccagacatgtcgcggcttct

SEQ ID NO: 3756151 - DNA, 25 bp, Homo sapien
ttttctccccaaacgagagctgcgg

SEQ ID NO: 3756152 - DNA, 25 bp, Homo sapien
tctggagcacgttctggactctggc

SEQ ID NO: 3756153 - DNA, 25 bp, Homo sapien
tcatggtgctaagaatcagatcaac

SEQ ID NO: 3756154 - DNA, 25 bp, Homo sapien
gttggaccccggctgctcttcctga

SEQ ID NO: 3756155 - DNA, 25 bp, Homo sapien
tgctgccgctgtagggctcggccac

SEQ ID NO: 3756156 - DNA, 25 bp, Homo sapien
tcccatcggagactctggtggatcc

SEQ ID NO: 3756157 - DNA, 25 bp, Homo sapien
cctgagctcggcgttgcggttggac

SEQ ID NO: 3756158 - DNA, 25 bp, Homo sapien
cgtcggggacacagccgtggtccat

SEQ ID NO: 3756159 - DNA, 25 bp, Homo sapien
ctccagggaaacacttcgggactca

SEQ ID NO: 3756160 - DNA, 25 bp, Homo sapien
ccgctggtgtttcaggggaggcgtc

SEQ ID NO: 3756161 - DNA, 25 bp, Homo sapien
gcagccgaggccaggcgagagagcc

SEQ ID NO: 3756162 - DNA, 25 bp, Homo sapien
ccaggtcccggagatctgcagagtc

SEQ ID NO: 3756163 - DNA, 25 bp, Homo sapien
agtccccaggtcccggagatctgca

SEQ ID NO: 3756164 - DNA, 25 bp, Homo sapien
cagactgtcctgcaaacggctgagc

SEQ ID NO: 3756165 - DNA, 25 bp, Homo sapien
tgcagagtctcaaagccacagggct

SEQ ID NO: 3756166 - DNA, 25 bp, Homo sapien
ggaagatgctaagtcctgcagccgc

SEQ ID NO: 3756167 - DNA, 25 bp, Homo sapien
ggcctgactcgccttgagccggcct

SEQ ID NO: 3756168 - DNA, 25 bp, Homo sapien
ttatgagcagctgccgtcattacag

SEQ ID NO: 3756169 - DNA, 25 bp, Homo sapien
tgccccaggttttttatgagcagct

SEQ ID NO: 3756170 - DNA, 25 bp, Homo sapien
agctcccggtgagcaggacagggct

SEQ ID NO: 3756171 - DNA, 25 bp, Homo sapien
tcccggtgagcaggacagggctgca

SEQ ID NO: 3756172 - DNA, 25 bp, Homo sapien
tggagctcccggtgagcaggacagg

SEQ ID NO: 3756173 - DNA, 25 bp, Homo sapien
ctggagctcccggtgagcaggacag

SEQ ID NO: 3756174 - DNA, 25 bp, Homo sapien
agatggccccgtcgataaatatcaa

SEQ ID NO: 3756175 - DNA, 25 bp, Homo sapien
agaagcctgagacgtagctgacggg

SEQ ID NO: 3756176 - DNA, 25 bp, Homo sapien
gccggcaccgttggccggtgacact

SEQ ID NO: 3756177 - DNA, 25 bp, Homo sapien
gtgcagaggccgctgctcgcacagc

SEQ ID NO: 3756178 - DNA, 25 bp, Homo sapien
tggacggccagtgtgcgggcagtag

SEQ ID NO: 3756179 - DNA, 25 bp, Homo sapien
ctggtgtggacgatgagcttgtgga

SEQ ID NO: 3756180 - DNA, 25 bp, Homo sapien
gcagtaggtccccatgacatagcct

SEQ ID NO: 3756181 - DNA, 25 bp, Homo sapien
gggcctggtgtggacgatgagcttg

SEQ ID NO: 3756182 - DNA, 25 bp, Homo sapien
gagtgccggctttagcagtgtccag

SEQ ID NO: 3756183 - DNA, 25 bp, Homo sapien
ttccacacccgagggcatgaagagc

SEQ ID NO: 3756184 - DNA, 25 bp, Homo sapien
gtgacagtgtcagtcaaggctgcag

SEQ ID NO: 3756185 - DNA, 25 bp, Homo sapien
ccttcataagagcacgagggttgga

SEQ ID NO: 3756186 - DNA, 25 bp, Homo sapien
gaagaggccgtgcaagtctccctgc

SEQ ID NO: 3756187 - DNA, 25 bp, Homo sapien
aaggtgttgcatggggagtctccga

SEQ ID NO: 3756188 - DNA, 25 bp, Homo sapien
gggagtctccgaagaggccgtgcaa

SEQ ID NO: 3756189 - DNA, 25 bp, Homo sapien
agtctccgaagaggccgtgcaagtc

SEQ ID NO: 3756190 - DNA, 25 bp, Homo sapien
gaacggccagtttggtgccagctgt

SEQ ID NO: 3756191 - DNA, 25 bp, Homo sapien
gctgtggagctttctttcgtctgga

SEQ ID NO: 3756192 - DNA, 25 bp, Homo sapien
tggaagtcaccagaaccatccgcta

SEQ ID NO: 3756193 - DNA, 25 bp, Homo sapien
tgctgggcctctggaacggccagtt

SEQ ID NO: 3756194 - DNA, 25 bp, Homo sapien
cagccacggctgtgggaaaaccctc

SEQ ID NO: 3756195 - DNA, 25 bp, Homo sapien
agcagccacggctgtgggaaaaccc

SEQ ID NO: 3756196 - DNA, 25 bp, Homo sapien
gcagccacggctgtgggaaaaccct

SEQ ID NO: 3756197 - DNA, 25 bp, Homo sapien
gtggtttccatgaagcgagctgctc

SEQ ID NO: 3756198 - DNA, 25 bp, Homo sapien
catgaagcgagctgctctggcgtct

SEQ ID NO: 3756199 - DNA, 25 bp, Homo sapien
agcgtctgcgcctgcacagtgcggt

SEQ ID NO: 3756200 - DNA, 25 bp, Homo sapien
tgcacagtgcggtcttctgagccca

SEQ ID NO: 3756201 - DNA, 25 bp, Homo sapien
ttctccaaaggtccttgtgcgccat

SEQ ID NO: 3756202 - DNA, 25 bp, Homo sapien
cgatccgcgggggttgggccagcga

SEQ ID NO: 3756203 - DNA, 25 bp, Homo sapien
ggttgggccagcgaagggcacgatg

SEQ ID NO: 3756204 - DNA, 25 bp, Homo sapien
gtttctccaaaggtccttgtgcgcc

SEQ ID NO: 3756205 - DNA, 25 bp, Homo sapien
atttcagccgcgagtggttcccgtg

SEQ ID NO: 3756206 - DNA, 25 bp, Homo sapien
tctggtgactgtggtgtccggcccc

SEQ ID NO: 3756207 - DNA, 25 bp, Homo sapien
tcgatgggccggtacgtccatctgc

SEQ ID NO: 3756208 - DNA, 25 bp, Homo sapien
tgtgcaccgtgcgccatctgtgcct

SEQ ID NO: 3756209 - DNA, 25 bp, Homo sapien
gaagggcctctgcacgcaggctttg

SEQ ID NO: 3756210 - DNA, 25 bp, Homo sapien
ctcggaagggcctctgcacgcaggc

SEQ ID NO: 3756211 - DNA, 25 bp, Homo sapien
cctctgcacgcaggctttggggctt

SEQ ID NO: 3756212 - DNA, 25 bp, Homo sapien
ggaagggcctctgcacgcaggcttt

SEQ ID NO: 3756213 - DNA, 25 bp, Homo sapien
tctgaagacccacgcccatgagggc

SEQ ID NO: 3756214 - DNA, 25 bp, Homo sapien
agccactcgggtggagacgggaagc

SEQ ID NO: 3756215 - DNA, 25 bp, Homo sapien
ctcgggtggagacgggaagcccagg

SEQ ID NO: 3756216 - DNA, 25 bp, Homo sapien
tagccacttctgaagacccacgccc

SEQ ID NO: 3756217 - DNA, 25 bp, Homo sapien
ggtccgtcagcatccgtggcagctg

SEQ ID NO: 3756218 - DNA, 25 bp, Homo sapien
cgactcttcctccagtgaagaggct

SEQ ID NO: 3756219 - DNA, 25 bp, Homo sapien
gatacgccgcttttgtgtggccagg

SEQ ID NO: 3756220 - DNA, 25 bp, Homo sapien
agcaggaatctccggcatcccgctt

SEQ ID NO: 3756221 - DNA, 25 bp, Homo sapien
gtcggcggcctctggtaatttgttg

SEQ ID NO: 3756222 - DNA, 25 bp, Homo sapien
gaggattgcaagacggaggtaaaaa

SEQ ID NO: 3756223 - DNA, 25 bp, Homo sapien
ggtcaataaatccaggtcccaagaa

SEQ ID NO: 3756224 - DNA, 25 bp, Homo sapien
tgcctaggaaagtcgggaacaaata

SEQ ID NO: 3756225 - DNA, 25 bp, Homo sapien
cagctccgggacttggcttgcgtgc

SEQ ID NO: 3756226 - DNA, 25 bp, Homo sapien
gtgggcccaccgaccaagctcacgg

SEQ ID NO: 3756227 - DNA, 25 bp, Homo sapien
gctccagcgtttcctcacagacgag

SEQ ID NO: 3756228 - DNA, 25 bp, Homo sapien
agacgagcatggcagctccgggact

SEQ ID NO: 3756229 - DNA, 25 bp, Homo sapien
agcgttgcagcatcagcccagatcc

SEQ ID NO: 3756230 - DNA, 25 bp, Homo sapien
aaggccctgccgttggtctcggcga

SEQ ID NO: 3756231 - DNA, 25 bp, Homo sapien
cacttgtccttgaggccgtaaggcc

SEQ ID NO: 3756232 - DNA, 25 bp, Homo sapien
tgaacaaatgcctgcacggggtgtg

SEQ ID NO: 3756233 - DNA, 25 bp, Homo sapien
acggtagcgtcaccgcctcatgaca

SEQ ID NO: 3756234 - DNA, 25 bp, Homo sapien
tactcacacaccgtgcacgcgtgtg

SEQ ID NO: 3756235 - DNA, 25 bp, Homo sapien
gtcgccctttatcaggactagcagg

SEQ ID NO: 3756236 - DNA, 25 bp, Homo sapien
ttagcaatgcgtacagggaggcgtc

SEQ ID NO: 3756237 - DNA, 25 bp, Homo sapien
caggcgcagccctcggtggagaaaa

SEQ ID NO: 3756238 - DNA, 25 bp, Homo sapien
ggcgcagccctcggtggagaaaagg

SEQ ID NO: 3756239 - DNA, 25 bp, Homo sapien
ggcaggcgcagccctcggtggagaa

SEQ ID NO: 3756240 - DNA, 25 bp, Homo sapien
aggcgcagccctcggtggagaaaag

SEQ ID NO: 3756241 - DNA, 25 bp, Homo sapien
agtgcgtccatatgctcagccatca

SEQ ID NO: 3756242 - DNA, 25 bp, Homo sapien
gactcgcaggacgaggcgtgaggca

SEQ ID NO: 3756243 - DNA, 25 bp, Homo sapien
ccacagagcagctggcgtgagactc

SEQ ID NO: 3756244 - DNA, 25 bp, Homo sapien
gtgaccggtttcacgtgccctgcaa

SEQ ID NO: 3756245 - DNA, 25 bp, Homo sapien
tatgaaagccaaaatcctcattaat

SEQ ID NO: 3756246 - DNA, 25 bp, Homo sapien
atatattttggaagtctatgaaagc

SEQ ID NO: 3756247 - DNA, 25 bp, Homo sapien
gaaagccaaaatcctcattaatttc

SEQ ID NO: 3756248 - DNA, 25 bp, Homo sapien
gtctatgaaagccaaaatcctcatt

SEQ ID NO: 3756249 - DNA, 25 bp, Homo sapien
gagcacgacggctccatctgggctg

SEQ ID NO: 3756250 - DNA, 25 bp, Homo sapien
tgagcacgacggctccatctgggct

SEQ ID NO: 3756251 - DNA, 25 bp, Homo sapien
ttggtgttgagcacgacggctccat

SEQ ID NO: 3756252 - DNA, 25 bp, Homo sapien
gtgttgagcacgacggctccatctg

SEQ ID NO: 3756253 - DNA, 25 bp, Homo sapien
gcatcttcgagggtcagcccaggtg

SEQ ID NO: 3756254 - DNA, 25 bp, Homo sapien
cttcgagggtcagcccaggtgccgt

SEQ ID NO: 3756255 - DNA, 25 bp, Homo sapien
tggagcatcttcgagggtcagccca

SEQ ID NO: 3756256 - DNA, 25 bp, Homo sapien
ccctggagcatcttcgagggtcagc

SEQ ID NO: 3756257 - DNA, 25 bp, Homo sapien
gccagagggcgtgttgataatcaga

SEQ ID NO: 3756258 - DNA, 25 bp, Homo sapien
ggcacaaaatcctcgtgtagagctg

SEQ ID NO: 3756259 - DNA, 25 bp, Homo sapien
aacacggcttctgtgggtggacgac

SEQ ID NO: 3756260 - DNA, 25 bp, Homo sapien
tgtagagctgcatccgagcacagcc

SEQ ID NO: 3756261 - DNA, 25 bp, Homo sapien
gtgtccccgccagccagtggctgca

SEQ ID NO: 3756262 - DNA, 25 bp, Homo sapien
agtgtccccgccagccagtggctgc

SEQ ID NO: 3756263 - DNA, 25 bp, Homo sapien
tgtccccgccagccagtggctgcac

SEQ ID NO: 3756264 - DNA, 25 bp, Homo sapien
gagggtattgaaagaaggcaggagt

SEQ ID NO: 3756265 - DNA, 25 bp, Homo sapien
tggagggtattgaaagaaggcagga

SEQ ID NO: 3756266 - DNA, 25 bp, Homo sapien
gtggagggtattgaaagaaggcagg

SEQ ID NO: 3756267 - DNA, 25 bp, Homo sapien
ggtattgaaagaaggcaggagtagg

SEQ ID NO: 3756268 - DNA, 25 bp, Homo sapien
aggccaaggccgtgggtctcgtagg

SEQ ID NO: 3756269 - DNA, 25 bp, Homo sapien
ctcaggccaaggccgtgggtctcgt

SEQ ID NO: 3756270 - DNA, 25 bp, Homo sapien
aaggccgtgggtctcgtaggcctct

SEQ ID NO: 3756271 - DNA, 25 bp, Homo sapien
tcgtaggcctctacccgctgggcct

SEQ ID NO: 3756272 - DNA, 25 bp, Homo sapien
ctggcacacgcatccaggcttacag

SEQ ID NO: 3756273 - DNA, 25 bp, Homo sapien
cggcacagggttctgtcggcctgta

SEQ ID NO: 3756274 - DNA, 25 bp, Homo sapien
tccaggcttacagggggacggcaca

SEQ ID NO: 3756275 - DNA, 25 bp, Homo sapien
ggacggcacagggttctgtcggcct

SEQ ID NO: 3756276 - DNA, 25 bp, Homo sapien
cagggtgcctcggccaggcctctgc

SEQ ID NO: 3756277 - DNA, 25 bp, Homo sapien
caggcctctgcgtccagcgcaaggc

SEQ ID NO: 3756278 - DNA, 25 bp, Homo sapien
aggcctctgcgtccagcgcaaggcc

SEQ ID NO: 3756279 - DNA, 25 bp, Homo sapien
gctttacagtgaggaagcggctcac

SEQ ID NO: 3756280 - DNA, 25 bp, Homo sapien
atgcagaggcggaggatacgttcct

SEQ ID NO: 3756281 - DNA, 25 bp, Homo sapien
tacatagttacataggtgaagagct

SEQ ID NO: 3756282 - DNA, 25 bp, Homo sapien
tgttgctgccccaggtgcgattcct

SEQ ID NO: 3756283 - DNA, 25 bp, Homo sapien
gggatggctcttccagccgggcggc

SEQ ID NO: 3756284 - DNA, 25 bp, Homo sapien
gatggctcttccagccgggcggccg

SEQ ID NO: 3756285 - DNA, 25 bp, Homo sapien
atggctcttccagccgggcggccgc

SEQ ID NO: 3756286 - DNA, 25 bp, Homo sapien
ggatggctcttccagccgggcggcc

SEQ ID NO: 3756287 - DNA, 25 bp, Homo sapien
ggggccggaggcaggcgcgtaacca

SEQ ID NO: 3756288 - DNA, 25 bp, Homo sapien
gggccggaggcaggcgcgtaaccat

SEQ ID NO: 3756289 - DNA, 25 bp, Homo sapien
ctcccgcggcgacagcggggacccg

SEQ ID NO: 3756290 - DNA, 25 bp, Homo sapien
ctccattcgcgagggcagcggccga

SEQ ID NO: 3756291 - DNA, 25 bp, Homo sapien
tcccggagacagacgcgctgcgctc

SEQ ID NO: 3756292 - DNA, 25 bp, Homo sapien
cgcgctcccggagacagacgcgctg

SEQ ID NO: 3756293 - DNA, 25 bp, Homo sapien
ggggacccgctctccattcgcgagg

SEQ ID NO: 3756294 - DNA, 25 bp, Homo sapien
gacggcggccaggaggtcgcgctcc

SEQ ID NO: 3756295 - DNA, 25 bp, Homo sapien
gaaggtcaaagtcccagacggcggc

SEQ ID NO: 3756296 - DNA, 25 bp, Homo sapien
gcggccaggaggtcgcgctcccggg

SEQ ID NO: 3756297 - DNA, 25 bp, Homo sapien
ggcggccaggaggtcgcgctcccgg

SEQ ID NO: 3756298 - DNA, 25 bp, Homo sapien
ggaggaggcgtccagggggaggcga

SEQ ID NO: 3756299 - DNA, 25 bp, Homo sapien
tggaggaggcgtccagggggaggcg

SEQ ID NO: 3756300 - DNA, 25 bp, Homo sapien
ctggaggaggcgtccagggggaggc

SEQ ID NO: 3756301 - DNA, 25 bp, Homo sapien
gctgcaaagttgcggaagcgtgagc

SEQ ID NO: 3756302 - DNA, 25 bp, Homo sapien
caaagttgcggaagcgtgagcgccg

SEQ ID NO: 3756303 - DNA, 25 bp, Homo sapien
tgcaaagttgcggaagcgtgagcgc

SEQ ID NO: 3756304 - DNA, 25 bp, Homo sapien
gcaaagttgcggaagcgtgagcgcc

SEQ ID NO: 3756305 - DNA, 25 bp, Homo sapien
ccggcactgagcccggaagcccggt

SEQ ID NO: 3756306 - DNA, 25 bp, Homo sapien
gcctgggagtccccatacgggtggc

SEQ ID NO: 3756307 - DNA, 25 bp, Homo sapien
accagctcgccattccacaactttt

SEQ ID NO: 3756308 - DNA, 25 bp, Homo sapien
ctgagcccggaagcccggtcaccag

SEQ ID NO: 3756309 - DNA, 25 bp, Homo sapien
gtctgtccgcactgcctttcatcaa

SEQ ID NO: 3756310 - DNA, 25 bp, Homo sapien
tgaaatgccacactctccaggcaga

SEQ ID NO: 3756311 - DNA, 25 bp, Homo sapien
gaggtggtagcaggaagctccacca

SEQ ID NO: 3756312 - DNA, 25 bp, Homo sapien
gatcgagctcagcaggctttcacag

SEQ ID NO: 3756313 - DNA, 25 bp, Homo sapien
cactctccaggcagatcgagctcag

SEQ ID NO: 3756314 - DNA, 25 bp, Homo sapien
cggcacagggcctgaaccctgaagg

SEQ ID NO: 3756315 - DNA, 25 bp, Homo sapien
caatggtgccatcggcacagggcct

SEQ ID NO: 3756316 - DNA, 25 bp, Homo sapien
aaccctgaagggacgatgagctcat

SEQ ID NO: 3756317 - DNA, 25 bp, Homo sapien
ggcctgaaccctgaagggacgatga

SEQ ID NO: 3756318 - DNA, 25 bp, Homo sapien
atcccggcattgagaacatgcaggg

SEQ ID NO: 3756319 - DNA, 25 bp, Homo sapien
agcccaagcttgtcctcgcactcaa

SEQ ID NO: 3756320 - DNA, 25 bp, Homo sapien
ctcgcactcaatcccggcattgaga

SEQ ID NO: 3756321 - DNA, 25 bp, Homo sapien
actcaatcccggcattgagaacatg

SEQ ID NO: 3756322 - DNA, 25 bp, Homo sapien
gcctcgtctccttggaggtttcgaa

SEQ ID NO: 3756323 - DNA, 25 bp, Homo sapien
aggaagtgttagacccaaggagctc

SEQ ID NO: 3756324 - DNA, 25 bp, Homo sapien
cgaaggcactctgtcctttcagaag

SEQ ID NO: 3756325 - DNA, 25 bp, Homo sapien
aagtgttagacccaaggagctccct

SEQ ID NO: 3756326 - DNA, 25 bp, Homo sapien
gagtctcccacaacctgcctttggg

SEQ ID NO: 3756327 - DNA, 25 bp, Homo sapien
tggttctcttcagggcggacttcac

SEQ ID NO: 3756328 - DNA, 25 bp, Homo sapien
tgcctttgggccaggacccgatcct

SEQ ID NO: 3756329 - DNA, 25 bp, Homo sapien
ttcctaacaactcagagctccgagt

SEQ ID NO: 3756330 - DNA, 25 bp, Homo sapien
gccctgtgagaggccctgcgtcccg

SEQ ID NO: 3756331 - DNA, 25 bp, Homo sapien
cccctcccacctcctgaatgcccat

SEQ ID NO: 3756332 - DNA, 25 bp, Homo sapien
ctgtgagaggccctgcgtcccgggc

SEQ ID NO: 3756333 - DNA, 25 bp, Homo sapien
gcccctcccacctcctgaatgccca

SEQ ID NO: 3756334 - DNA, 25 bp, Homo sapien
ggggccaggtctgcagctccaactg

SEQ ID NO: 3756335 - DNA, 25 bp, Homo sapien
ctgcacggtgaggtgtccggggcca

SEQ ID NO: 3756336 - DNA, 25 bp, Homo sapien
gggccaggtctgcagctccaactgg

SEQ ID NO: 3756337 - DNA, 25 bp, Homo sapien
cacggtgaggtgtccggggccaggt

SEQ ID NO: 3756338 - DNA, 25 bp, Homo sapien
aggaatcttcctccctgcgggtgag

SEQ ID NO: 3756339 - DNA, 25 bp, Homo sapien
tcctccctgcgggtgaggtgtccgg

SEQ ID NO: 3756340 - DNA, 25 bp, Homo sapien
gaatcttcctccctgcgggtgaggt

SEQ ID NO: 3756341 - DNA, 25 bp, Homo sapien
atcttcctccctgcgggtgaggtgt

SEQ ID NO: 3756342 - DNA, 25 bp, Homo sapien
gcagcagtgagaggtgggaaagtga

SEQ ID NO: 3756343 - DNA, 25 bp, Homo sapien
tgagaggtgggaaagtgacctcttc

SEQ ID NO: 3756344 - DNA, 25 bp, Homo sapien
cagcagtgagaggtgggaaagtgac

SEQ ID NO: 3756345 - DNA, 25 bp, Homo sapien
gaggtgggaaagtgacctcttcaaa

SEQ ID NO: 3756346 - DNA, 25 bp, Homo sapien
ttccggggagtgtttagaatctgcc

SEQ ID NO: 3756347 - DNA, 25 bp, Homo sapien
gacagcagacactttgctttccggg

SEQ ID NO: 3756348 - DNA, 25 bp, Homo sapien
gaggagcgggcgtcgctgtggggcc

SEQ ID NO: 3756349 - DNA, 25 bp, Homo sapien
ctttccggggagtgtttagaatctg

SEQ ID NO: 3756350 - DNA, 25 bp, Homo sapien
tgcatcccgggacgaggagcctgga

SEQ ID NO: 3756351 - DNA, 25 bp, Homo sapien
atcccgggacgaggagcctggacct

SEQ ID NO: 3756352 - DNA, 25 bp, Homo sapien
tggacctgtgcgagggcgaaggcac

SEQ ID NO: 3756353 - DNA, 25 bp, Homo sapien
agcctggacctgtgcgagggcgaag

SEQ ID NO: 3756354 - DNA, 25 bp, Homo sapien
tcttgtccgtccagccaagacgagg

SEQ ID NO: 3756355 - DNA, 25 bp, Homo sapien
tagagagtgtccaccgtggacagag

SEQ ID NO: 3756356 - DNA, 25 bp, Homo sapien
ggctagagagtgtccaccgtggaca

SEQ ID NO: 3756357 - DNA, 25 bp, Homo sapien
ggccacacttcttgtccgtccagcc

SEQ ID NO: 3756358 - DNA, 25 bp, Homo sapien
atgacggccgtgcacgcgtacacca

SEQ ID NO: 3756359 - DNA, 25 bp, Homo sapien
ctctggtgcacgatgtaggtgacga

SEQ ID NO: 3756360 - DNA, 25 bp, Homo sapien
gaggcagagcagcatgacggccgtg

SEQ ID NO: 3756361 - DNA, 25 bp, Homo sapien
tctggtgcacgatgtaggtgacgaa

SEQ ID NO: 3756362 - DNA, 25 bp, Homo sapien
ttcaggagcgtgtgccggcccttgc

SEQ ID NO: 3756363 - DNA, 25 bp, Homo sapien
aattcaggagcgtgtgccggccctt

SEQ ID NO: 3756364 - DNA, 25 bp, Homo sapien
tgtgccggcccttgcggctgatgcg

SEQ ID NO: 3756365 - DNA, 25 bp, Homo sapien
gcccttgcggctgatgcggatggcg

SEQ ID NO: 3756366 - DNA, 25 bp, Homo sapien
tgcgattgatgccgccggcgaacac

SEQ ID NO: 3756367 - DNA, 25 bp, Homo sapien
ggtacttggtgcgattgatgccgcc

SEQ ID NO: 3756368 - DNA, 25 bp, Homo sapien
cctggcacaggatggggtacttggt

SEQ ID NO: 3756369 - DNA, 25 bp, Homo sapien
acttggtgcgattgatgccgccggc

SEQ ID NO: 3756370 - DNA, 25 bp, Homo sapien
cagtaagtgtcaggttagcgccggc

SEQ ID NO: 3756371 - DNA, 25 bp, Homo sapien
gacagtaagtgtcaggttagcgccg

SEQ ID NO: 3756372 - DNA, 25 bp, Homo sapien
tggggacagtaagtgtcaggttagc

SEQ ID NO: 3756373 - DNA, 25 bp, Homo sapien
gggacagtaagtgtcaggttagcgc

SEQ ID NO: 3756374 - DNA, 25 bp, Homo sapien
aatgctcggtgctctccagctctcc

SEQ ID NO: 3756375 - DNA, 25 bp, Homo sapien
caatgctcggtgctctccagctctc

SEQ ID NO: 3756376 - DNA, 25 bp, Homo sapien
tcaatgctcggtgctctccagctct

SEQ ID NO: 3756377 - DNA, 25 bp, Homo sapien
ccaggccgggggcacggcctcctgg

SEQ ID NO: 3756378 - DNA, 25 bp, Homo sapien
aggccgggggcacggcctcctggca

SEQ ID NO: 3756379 - DNA, 25 bp, Homo sapien
gccgggggcacggcctcctggcagt

SEQ ID NO: 3756380 - DNA, 25 bp, Homo sapien
cgggggcacggcctcctggcagtct

SEQ ID NO: 3756381 - DNA, 25 bp, Homo sapien
gaggcaggaggtacgtctgacctta

SEQ ID NO: 3756382 - DNA, 25 bp, Homo sapien
accttcaggtgcgtgccagcgactc

SEQ ID NO: 3756383 - DNA, 25 bp, Homo sapien
cgtctgaccttagccaccttcaggt

SEQ ID NO: 3756384 - DNA, 25 bp, Homo sapien
cttcaggtgcgtgccagcgactcct

SEQ ID NO: 3756385 - DNA, 25 bp, Homo sapien
caggcacttacaggcgggacgtcaa

SEQ ID NO: 3756386 - DNA, 25 bp, Homo sapien
atggtgacggcctctcgcaggcact

SEQ ID NO: 3756387 - DNA, 25 bp, Homo sapien
tacttggtggcaaagtgcagacgtg

SEQ ID NO: 3756388 - DNA, 25 bp, Homo sapien
gcgtttcccgggcacttgctgtggt

SEQ ID NO: 3756389 - DNA, 25 bp, Homo sapien
gcttctgttcgcctcgcagagcacg

SEQ ID NO: 3756390 - DNA, 25 bp, Homo sapien
gcgttagatcaatgagagggcttct

SEQ ID NO: 3756391 - DNA, 25 bp, Homo sapien
ggcgggaatgcggaactggcctggc

SEQ ID NO: 3756392 - DNA, 25 bp, Homo sapien
tggcctggcctcagcgttagatcaa

SEQ ID NO: 3756393 - DNA, 25 bp, Homo sapien
tcctgcgtttgcttattacgagggc

SEQ ID NO: 3756394 - DNA, 25 bp, Homo sapien
ctatggaaacttcctgcgtttgctt

SEQ ID NO: 3756395 - DNA, 25 bp, Homo sapien
gaaacttcctgcgtttgcttattac

SEQ ID NO: 3756396 - DNA, 25 bp, Homo sapien
gcgtttgcttattacgagggccaca

SEQ ID NO: 3756397 - DNA, 25 bp, Homo sapien
ggccctgcaggtcgccgttcctcat

SEQ ID NO: 3756398 - DNA, 25 bp, Homo sapien
tgtgggtgggatgagccccccacgg

SEQ ID NO: 3756399 - DNA, 25 bp, Homo sapien
gccggcattcgtgtggccctgcagg

SEQ ID NO: 3756400 - DNA, 25 bp, Homo sapien
atgagccccccacggggccggcatt

SEQ ID NO: 3756401 - DNA, 25 bp, Homo sapien
caggtcgccgttcctcattcaccag

SEQ ID NO: 3756402 - DNA, 25 bp, Homo sapien
atgagccccccacggggacggcatt

SEQ ID NO: 3756403 - DNA, 25 bp, Homo sapien
gtggggtcacgccaggatgctctta

SEQ ID NO: 3756404 - DNA, 25 bp, Homo sapien
ctggataggtgtccaccaagggaga

SEQ ID NO: 3756405 - DNA, 25 bp, Homo sapien
gaagtcctcagtggggtcacgccag

SEQ ID NO: 3756406 - DNA, 25 bp, Homo sapien
tcctcagtggggtcacgccaggatg

SEQ ID NO: 3756407 - DNA, 25 bp, Homo sapien
ctctgcatgcacaacccgctgtggt

SEQ ID NO: 3756408 - DNA, 25 bp, Homo sapien
gcccaggcacggacactgtgagctg

SEQ ID NO: 3756409 - DNA, 25 bp, Homo sapien
gcacaacccgctgtggtccctgtgg

SEQ ID NO: 3756410 - DNA, 25 bp, Homo sapien
tgtgagctgcagaccaacgtcccct

SEQ ID NO: 3756411 - DNA, 25 bp, Homo sapien
tggggacccatgggcctgtgcactc

SEQ ID NO: 3756412 - DNA, 25 bp, Homo sapien
tgtggggacccatgggcctgtgcac

SEQ ID NO: 3756413 - DNA, 25 bp, Homo sapien
ctgtggggacccatgggcctgtgca

SEQ ID NO: 3756414 - DNA, 25 bp, Homo sapien
gggacccatgggcctgtgcactcac

SEQ ID NO: 3756415 - DNA, 25 bp, Homo sapien
cttgagcggctcagctttcctcccc

SEQ ID NO: 3756416 - DNA, 25 bp, Homo sapien
ccccttctgcacagagacgggagca

SEQ ID NO: 3756417 - DNA, 25 bp, Homo sapien
gcagagacccttgagcggctcagct

SEQ ID NO: 3756418 - DNA, 25 bp, Homo sapien
gacgctgagctgcagagacccttga

SEQ ID NO: 3756419 - DNA, 25 bp, Homo sapien
ctcggcccgggcttgcaacttcaag

SEQ ID NO: 3756420 - DNA, 25 bp, Homo sapien
cccgggcttgcaacttcaagaatga

SEQ ID NO: 3756421 - DNA, 25 bp, Homo sapien
gcgtctgtatcccagggcaggcagc

SEQ ID NO: 3756422 - DNA, 25 bp, Homo sapien
ttcaagaatgagaacggcaggcggc

SEQ ID NO: 3756423 - DNA, 25 bp, Homo sapien
cacctgcttgtagatgttcctggcg

SEQ ID NO: 3756424 - DNA, 25 bp, Homo sapien
ggtcactcctatccacagcatggtg

SEQ ID NO: 3756425 - DNA, 25 bp, Homo sapien
tagaatagtgcagcacgatgcccac

SEQ ID NO: 3756426 - DNA, 25 bp, Homo sapien
catggtggacagtgtagaatagtgc

SEQ ID NO: 3756427 - DNA, 25 bp, Homo sapien
taaatttctgctggcgtggataacg

SEQ ID NO: 3756428 - DNA, 25 bp, Homo sapien
gcctggagaggcgtctgtgcccttc

SEQ ID NO: 3756429 - DNA, 25 bp, Homo sapien
taacgtgtgggccatgtagagttct

SEQ ID NO: 3756430 - DNA, 25 bp, Homo sapien
cgcaagattcttggaactcaggaac

SEQ ID NO: 3756431 - DNA, 25 bp, Homo sapien
caccagcgcagcaacattttacatg

SEQ ID NO: 3756432 - DNA, 25 bp, Homo sapien
tttctcaaaacgtcggctgctcagg

SEQ ID NO: 3756433 - DNA, 25 bp, Homo sapien
ggctccttcatgcacggcggctgag

SEQ ID NO: 3756434 - DNA, 25 bp, Homo sapien
caggagcgtcctgagttcacgcagc

SEQ ID NO: 3756435 - DNA, 25 bp, Homo sapien
cacactcctgcttgaggggagaggt

SEQ ID NO: 3756436 - DNA, 25 bp, Homo sapien
agctggaacgttcgggccgcagagg

SEQ ID NO: 3756437 - DNA, 25 bp, Homo sapien
cccacggagtccaatccctgcagag

SEQ ID NO: 3756438 - DNA, 25 bp, Homo sapien
gatggcggctgtgaccttggcccct

SEQ ID NO: 3756439 - DNA, 25 bp, Homo sapien
agatccaaagcgcccccctcaggct

SEQ ID NO: 3756440 - DNA, 25 bp, Homo sapien
cggatgctgctggaatttggagaaa

SEQ ID NO: 3756441 - DNA, 25 bp, Homo sapien
gatgctgctggaatttggagaaaac

SEQ ID NO: 3756442 - DNA, 25 bp, Homo sapien
ggatgctgctggaatttggagaaaa

SEQ ID NO: 3756443 - DNA, 25 bp, Homo sapien
atgctgctggaatttggagaaaacg

SEQ ID NO: 3756444 - DNA, 25 bp, Homo sapien
gacgtcctgtgctcacgaattggaa

SEQ ID NO: 3756445 - DNA, 25 bp, Homo sapien
tgtgcagagacatgaccttccgctt

SEQ ID NO: 3756446 - DNA, 25 bp, Homo sapien
tacactggagacagcaacgctttgc

SEQ ID NO: 3756447 - DNA, 25 bp, Homo sapien
cagatgcaatcgtgactccagtggc

SEQ ID NO: 3756448 - DNA, 25 bp, Homo sapien
gtccacagagcaggaaagatgaggt

SEQ ID NO: 3756449 - DNA, 25 bp, Homo sapien
ggaaagatgaggtccagggagcggg

SEQ ID NO: 3756450 - DNA, 25 bp, Homo sapien
gtcagggcagtccacagagcaggaa

SEQ ID NO: 3756451 - DNA, 25 bp, Homo sapien
gggtcagggcagtccacagagcagg

SEQ ID NO: 3756452 - DNA, 25 bp, Homo sapien
cttttccctcgttggccctgtggtg

SEQ ID NO: 3756453 - DNA, 25 bp, Homo sapien
cccaggacaggagaactttggagac

SEQ ID NO: 3756454 - DNA, 25 bp, Homo sapien
gagacggcacctggagtcttggacc

SEQ ID NO: 3756455 - DNA, 25 bp, Homo sapien
ttggaccctgctggatgtcttttcc

SEQ ID NO: 3756456 - DNA, 25 bp, Homo sapien
gagtgtgaggctccgtagctgtggc

SEQ ID NO: 3756457 - DNA, 25 bp, Homo sapien
tgcagacatcactctgcggcaaagg

SEQ ID NO: 3756458 - DNA, 25 bp, Homo sapien
ccatgcagacatcactctgcggcaa

SEQ ID NO: 3756459 - DNA, 25 bp, Homo sapien
agacatcactctgcggcaaagggat

SEQ ID NO: 3756460 - DNA, 25 bp, Homo sapien
atcactctgcggcaaagggattggg

SEQ ID NO: 3756461 - DNA, 25 bp, Homo sapien
ccagataaccgatgcggcccgcaga

SEQ ID NO: 3756462 - DNA, 25 bp, Homo sapien
ccaaataactgacgcagcctgcaga

SEQ ID NO: 3756463 - DNA, 25 bp, Homo sapien
gcctgcagaccccagataaccgatg

SEQ ID NO: 3756464 - DNA, 25 bp, Homo sapien
tgcacttgatcagaaagggtggccg

SEQ ID NO: 3756465 - DNA, 25 bp, Homo sapien
tcaaataaccgatgcggcccacaga

SEQ ID NO: 3756466 - DNA, 25 bp, Homo sapien
gacctcaaataaccgatgcggccca

SEQ ID NO: 3756467 - DNA, 25 bp, Homo sapien
gacgtagcccgtagactccaaataa

SEQ ID NO: 3756468 - DNA, 25 bp, Homo sapien
taaccgacgtagcccgtagactcca

SEQ ID NO: 3756469 - DNA, 25 bp, Homo sapien
ctctgggtaagtccccgtgcctgtg

SEQ ID NO: 3756470 - DNA, 25 bp, Homo sapien
caaagtgtgagatgccaggtcctgg

SEQ ID NO: 3756471 - DNA, 25 bp, Homo sapien
tgctgtcagtagacaacaggaccgg

SEQ ID NO: 3756472 - DNA, 25 bp, Homo sapien
gagacggaggtactcatggtgtcta

SEQ ID NO: 3756473 - DNA, 25 bp, Homo sapien
ttttcacaggaaagacggtggattc

SEQ ID NO: 3756474 - DNA, 25 bp, Homo sapien
gggccttcgatgcactgaggtcatt

SEQ ID NO: 3756475 - DNA, 25 bp, Homo sapien
cagtcgcactcatggagttgcggcc

SEQ ID NO: 3756476 - DNA, 25 bp, Homo sapien
ggattccaggtgtggacccgaggct

SEQ ID NO: 3756477 - DNA, 25 bp, Homo sapien
ttcatcgtgagaggccctgccacac

SEQ ID NO: 3756478 - DNA, 25 bp, Homo sapien
gtctcttcatcgtgagaggccctgc

SEQ ID NO: 3756479 - DNA, 25 bp, Homo sapien
agtgtctgcgtctcttcatcgtgag

SEQ ID NO: 3756480 - DNA, 25 bp, Homo sapien
ctgcgtctcttcatcgtgagaggcc

SEQ ID NO: 3756481 - DNA, 25 bp, Homo sapien
tggatggggacagcgatggtgagaa

SEQ ID NO: 3756482 - DNA, 25 bp, Homo sapien
gggacagcgatggtgagaagcgtcc

SEQ ID NO: 3756483 - DNA, 25 bp, Homo sapien
cagcgatggtgagaagcgtccccat

SEQ ID NO: 3756484 - DNA, 25 bp, Homo sapien
gacagcgatggtgagaagcgtcccc

SEQ ID NO: 3756485 - DNA, 25 bp, Homo sapien
tcttggccgtccacggcctgagtgc

SEQ ID NO: 3756486 - DNA, 25 bp, Homo sapien
cctcttggccgtccacggcctgagt

SEQ ID NO: 3756487 - DNA, 25 bp, Homo sapien
gatgctgagctgacaactggcagcc

SEQ ID NO: 3756488 - DNA, 25 bp, Homo sapien
ccattccagatgctgagctgacaac

SEQ ID NO: 3756489 - DNA, 25 bp, Homo sapien
gcccctggctacaggcgggactgct

SEQ ID NO: 3756490 - DNA, 25 bp, Homo sapien
gagagctccgttggctgcggacttc

SEQ ID NO: 3756491 - DNA, 25 bp, Homo sapien
tcacgggtgggccccgggagagctc

SEQ ID NO: 3756492 - DNA, 25 bp, Homo sapien
ctgtgcgtcccaccgggtccccagg

SEQ ID NO: 3756493 - DNA, 25 bp, Homo sapien
cagccagtgccggcctcgctggcct

SEQ ID NO: 3756494 - DNA, 25 bp, Homo sapien
ccgcgggcctctgcgcctggagagg

SEQ ID NO: 3756495 - DNA, 25 bp, Homo sapien
cgcgggcctctgcgcctggagaggg

SEQ ID NO: 3756496 - DNA, 25 bp, Homo sapien
ctcccgcgggcctctgcgcctggag

SEQ ID NO: 3756497 - DNA, 25 bp, Homo sapien
ggcgttgacccccttgcagacgccg

SEQ ID NO: 3756498 - DNA, 25 bp, Homo sapien
aaggcgttgacccccttgcagacgc

SEQ ID NO: 3756499 - DNA, 25 bp, Homo sapien
ggaggaaggcgttgacccccttgca

SEQ ID NO: 3756500 - DNA, 25 bp, Homo sapien
aggaaggcgttgacccccttgcaga

SEQ ID NO: 3756501 - DNA, 25 bp, Homo sapien
gtcctctgtcccgtaattcctgatg

SEQ ID NO: 3756502 - DNA, 25 bp, Homo sapien
taattcctgatgttcgtggcagccg

SEQ ID NO: 3756503 - DNA, 25 bp, Homo sapien
ccgtgaccccacagatgataaaggg

SEQ ID NO: 3756504 - DNA, 25 bp, Homo sapien
cagccgtgaccccacagatgataaa

SEQ ID NO: 3756505 - DNA, 25 bp, Homo sapien
atgagcacgaagagtcccagggtca

SEQ ID NO: 3756506 - DNA, 25 bp, Homo sapien
tggccgtgaacaggaacagcgtgaa

SEQ ID NO: 3756507 - DNA, 25 bp, Homo sapien
aaggcgccgtacaggcagctgaaga

SEQ ID NO: 3756508 - DNA, 25 bp, Homo sapien
cagctgcacgtaggtgcccaggaag

SEQ ID NO: 3756509 - DNA, 25 bp, Homo sapien
tcctctgctgggtgccggctaaagt

SEQ ID NO: 3756510 - DNA, 25 bp, Homo sapien
aagtagggcggcttagttctgccct

SEQ ID NO: 3756511 - DNA, 25 bp, Homo sapien
ttctgccctgaaggcacccgtgcag

SEQ ID NO: 3756512 - DNA, 25 bp, Homo sapien
tcgcagtgcatcttggcgcagcacg

SEQ ID NO: 3756513 - DNA, 25 bp, Homo sapien
tggccgggcccgagcgctgcctccc

SEQ ID NO: 3756514 - DNA, 25 bp, Homo sapien
ctcgggctgggtgaccatggggaag

SEQ ID NO: 3756515 - DNA, 25 bp, Homo sapien
cagcaggccagcgtgtgtgtccccg

SEQ ID NO: 3756516 - DNA, 25 bp, Homo sapien
gggactgtgtcctccgcagcatctc

SEQ ID NO: 3756517 - DNA, 25 bp, Homo sapien
cggtcccgtcggtgccaaacggcag

SEQ ID NO: 3756518 - DNA, 25 bp, Homo sapien
gtcggtgccaaacggcaggccttct

SEQ ID NO: 3756519 - DNA, 25 bp, Homo sapien
ttccagggtcccgttcggatgttgc

SEQ ID NO: 3756520 - DNA, 25 bp, Homo sapien
cgttcggatgttgccggtcccgtcg

SEQ ID NO: 3756521 - DNA, 25 bp, Homo sapien
tcagtgggtcctttgatggaatccc

SEQ ID NO: 3756522 - DNA, 25 bp, Homo sapien
cacaggacagaaaccggatgaccgt

SEQ ID NO: 3756523 - DNA, 25 bp, Homo sapien
ccccgctgaggtctttcacaaggaa

SEQ ID NO: 3756524 - DNA, 25 bp, Homo sapien
gaccagcacgcggaattgggataag

SEQ ID NO: 3756525 - DNA, 25 bp, Homo sapien
ctagggacgggccacttgctttcac

SEQ ID NO: 3756526 - DNA, 25 bp, Homo sapien
tactgagtgccagtctccggagagc

SEQ ID NO: 3756527 - DNA, 25 bp, Homo sapien
tctccaatgcaaacccagtgtgtgg

SEQ ID NO: 3756528 - DNA, 25 bp, Homo sapien
cgtttgcagggtgaaacaatctcca

SEQ ID NO: 3756529 - DNA, 25 bp, Homo sapien
tcctccgacggcccgtctggtcgac

SEQ ID NO: 3756530 - DNA, 25 bp, Homo sapien
gtcctccgacggcccgtctggtcga

SEQ ID NO: 3756531 - DNA, 25 bp, Homo sapien
tgtggacggttctgcacctacagtg

SEQ ID NO: 3756532 - DNA, 25 bp, Homo sapien
gggatgctattaaccagcctcacaa

SEQ ID NO: 3756533 - DNA, 25 bp, Homo sapien
tacagtgcgtacacagcacagcgtg

SEQ ID NO: 3756534 - DNA, 25 bp, Homo sapien
gattcgggttcacatcagctatgga

SEQ ID NO: 3756535 - DNA, 25 bp, Homo sapien
acaggcagaatttctggccgaaggt

SEQ ID NO: 3756536 - DNA, 25 bp, Homo sapien
aatttctggccgaaggtgcctgtgc

SEQ ID NO: 3756537 - DNA, 25 bp, Homo sapien
cagtccttggtcttgaatacaacag

SEQ ID NO: 3756538 - DNA, 25 bp, Homo sapien
tcaaaggctacagaacagtccttgg

SEQ ID NO: 3756539 - DNA, 25 bp, Homo sapien
aggcccagaggagccagcacggcgg

SEQ ID NO: 3756540 - DNA, 25 bp, Homo sapien
gcccagaggagccagcacggcgggc

SEQ ID NO: 3756541 - DNA, 25 bp, Homo sapien
caggcccagaggagccagcacggcg

SEQ ID NO: 3756542 - DNA, 25 bp, Homo sapien
ccagaggagccagcacggcgggcat

SEQ ID NO: 3756543 - DNA, 25 bp, Homo sapien
ggcctggacagccagtgttgggagt

SEQ ID NO: 3756544 - DNA, 25 bp, Homo sapien
cctggacagccagtgttgggagttg

SEQ ID NO: 3756545 - DNA, 25 bp, Homo sapien
gaggcctggacagccagtgttggga

SEQ ID NO: 3756546 - DNA, 25 bp, Homo sapien
tggacagccagtgttgggagttgcc

SEQ ID NO: 3756547 - DNA, 25 bp, Homo sapien
ttgcaggaccgtctgtgggcagcca

SEQ ID NO: 3756548 - DNA, 25 bp, Homo sapien
tgagtccttgcaggaccgtctgtgg

SEQ ID NO: 3756549 - DNA, 25 bp, Homo sapien
tgcttgtcctctggaagtcggccgc

SEQ ID NO: 3756550 - DNA, 25 bp, Homo sapien
gtccttgcaggaccgtctgtgggca

SEQ ID NO: 3756551 - DNA, 25 bp, Homo sapien
aggtgtgaggtccaagtcggcgccc

SEQ ID NO: 3756552 - DNA, 25 bp, Homo sapien
gtgtgaggtccaagtcggcgcccac

SEQ ID NO: 3756553 - DNA, 25 bp, Homo sapien
ggtgtgaggtccaagtcggcgccca

SEQ ID NO: 3756554 - DNA, 25 bp, Homo sapien
gaggtgtgaggtccaagtcggcgcc

SEQ ID NO: 3756555 - DNA, 25 bp, Homo sapien
gtcctgggatgggagtgggaaggaa

SEQ ID NO: 3756556 - DNA, 25 bp, Homo sapien
gtgggaaggaaaggcaggccctggc

SEQ ID NO: 3756557 - DNA, 25 bp, Homo sapien
ggaaggaaaggcaggccctggcaac

SEQ ID NO: 3756558 - DNA, 25 bp, Homo sapien
cctgggatgggagtgggaaggaaag

SEQ ID NO: 3756559 - DNA, 25 bp, Homo sapien
gccctgcaccactctgtggcttgtt

SEQ ID NO: 3756560 - DNA, 25 bp, Homo sapien
ttgtccctggccgatgtcagccctg

SEQ ID NO: 3756561 - DNA, 25 bp, Homo sapien
tgctttgtccctggccgatgtcagc

SEQ ID NO: 3756562 - DNA, 25 bp, Homo sapien
cctgcaccactctgtggcttgttca

SEQ ID NO: 3756563 - DNA, 25 bp, Homo sapien
gctgcctgctgaggtttgctgccgc

SEQ ID NO: 3756564 - DNA, 25 bp, Homo sapien
atcctcggaaggcaccgcctggagc

SEQ ID NO: 3756565 - DNA, 25 bp, Homo sapien
ttcctcacatcctcggaaggcaccg

SEQ ID NO: 3756566 - DNA, 25 bp, Homo sapien
ttcctccccagttgaccaatgagcc

SEQ ID NO: 3756567 - DNA, 25 bp, Homo sapien
ctctctcccccggtttgcctgtggg

SEQ ID NO: 3756568 - DNA, 25 bp, Homo sapien
cctgccgccagcttggccctctctc

SEQ ID NO: 3756569 - DNA, 25 bp, Homo sapien
tctctcccccggtttgcctgtgggc

SEQ ID NO: 3756570 - DNA, 25 bp, Homo sapien
gcccctgccgccagcttggccctct

SEQ ID NO: 3756571 - DNA, 25 bp, Homo sapien
agtcacaaggttcttatttctgctt

SEQ ID NO: 3756572 - DNA, 25 bp, Homo sapien
tttctgcttcccgtggatgaccatc

SEQ ID NO: 3756573 - DNA, 25 bp, Homo sapien
ttatttctgcttcccgtggatgacc

SEQ ID NO: 3756574 - DNA, 25 bp, Homo sapien
gagtcacaaggttcttatttctgct

SEQ ID NO: 3756575 - DNA, 25 bp, Homo sapien
cactgtgatatttcacccctccttc

SEQ ID NO: 3756576 - DNA, 25 bp, Homo sapien
actgtgatatttcacccctccttcc

SEQ ID NO: 3756577 - DNA, 25 bp, Homo sapien
ctggcgcgccgatcacagggaaggg

SEQ ID NO: 3756578 - DNA, 25 bp, Homo sapien
gggtgcgcggtccagggcagaacag

SEQ ID NO: 3756579 - DNA, 25 bp, Homo sapien
atgctgcgtagtgccgtgggccctc

SEQ ID NO: 3756580 - DNA, 25 bp, Homo sapien
cagaaaccagggactgctcggtgtg

SEQ ID NO: 3756581 - DNA, 25 bp, Homo sapien
gtgaggcgaagggtgacgtgaaggt

SEQ ID NO: 3756582 - DNA, 25 bp, Homo sapien
tgtgaggcgaagggtgacgtgaagg

SEQ ID NO: 3756583 - DNA, 25 bp, Homo sapien
ctgtgaggcgaagggtgacgtgaag

SEQ ID NO: 3756584 - DNA, 25 bp, Homo sapien
tgaggcgaagggtgacgtgaaggtg

SEQ ID NO: 3756585 - DNA, 25 bp, Homo sapien
caggtgaccggggaggtggccgtca

SEQ ID NO: 3756586 - DNA, 25 bp, Homo sapien
aggtgaccggggaggtggccgtcag

SEQ ID NO: 3756587 - DNA, 25 bp, Homo sapien
agtaccaaacaatttcctggttatg

SEQ ID NO: 3756588 - DNA, 25 bp, Homo sapien
ctcacagtaccaaacaatttcctgg

SEQ ID NO: 3756589 - DNA, 25 bp, Homo sapien
cacagtaccaaacaatttcctggtt

SEQ ID NO: 3756590 - DNA, 25 bp, Homo sapien
ggatggaggctggtctatccctcac

SEQ ID NO: 3756591 - DNA, 25 bp, Homo sapien
ttatgccacagcgtattgtcctggc

SEQ ID NO: 3756592 - DNA, 25 bp, Homo sapien
ctcgtaaagatccgccgcggccggg

SEQ ID NO: 3756593 - DNA, 25 bp, Homo sapien
ttgccgtcctcctcgtaaagatccg

SEQ ID NO: 3756594 - DNA, 25 bp, Homo sapien
cagcggctcgaagtcgtagaagtcc

SEQ ID NO: 3756595 - DNA, 25 bp, Homo sapien
agtcgtagaagtccaggtctttgcc

SEQ ID NO: 3756596 - DNA, 25 bp, Homo sapien
gtgaaaatcctaacgcgggggctga

SEQ ID NO: 3756597 - DNA, 25 bp, Homo sapien
gcgggggctgagaacggcggtggga

SEQ ID NO: 3756598 - DNA, 25 bp, Homo sapien
cgccgccgtcccgtgcgcattcggg

SEQ ID NO: 3756599 - DNA, 25 bp, Homo sapien
ggaacccctcggccatggagggcgc

SEQ ID NO: 3756600 - DNA, 25 bp, Homo sapien
agaagcgccagggtatgcagatggc

SEQ ID NO: 3756601 - DNA, 25 bp, Homo sapien
cctggcttgtccactccatcccagc

SEQ ID NO: 3756602 - DNA, 25 bp, Homo sapien
tgtagggtgggcggtccatgagcag

SEQ ID NO: 3756603 - DNA, 25 bp, Homo sapien
tgcttccgggcctggcttgtccact

SEQ ID NO: 3756604 - DNA, 25 bp, Homo sapien
atccctagcagggcgtgcctgggtg

SEQ ID NO: 3756605 - DNA, 25 bp, Homo sapien
tccctagcagggcgtgcctgggtga

SEQ ID NO: 3756606 - DNA, 25 bp, Homo sapien
catccctagcagggcgtgcctgggt

SEQ ID NO: 3756607 - DNA, 25 bp, Homo sapien
ccctagcagggcgtgcctgggtgag

SEQ ID NO: 3756608 - DNA, 25 bp, Homo sapien
tttgttccaggcaattcacacggag

SEQ ID NO: 3756609 - DNA, 25 bp, Homo sapien
aggacacagtcacggcggttccctc

SEQ ID NO: 3756610 - DNA, 25 bp, Homo sapien
agtcacggcggttccctccatgtgg

SEQ ID NO: 3756611 - DNA, 25 bp, Homo sapien
cacgcgctgccaacatttgttccag

SEQ ID NO: 3756612 - DNA, 25 bp, Homo sapien
tggcagcgtttcaacgcgtgggtca

SEQ ID NO: 3756613 - DNA, 25 bp, Homo sapien
tagaccacgtctcattttgtttcaa

SEQ ID NO: 3756614 - DNA, 25 bp, Homo sapien
gaaacggacgactcgtggcagcgtt

SEQ ID NO: 3756615 - DNA, 25 bp, Homo sapien
ttcaagagtcgtcctgctgttccct

SEQ ID NO: 3756616 - DNA, 25 bp, Homo sapien
cagccaggccccggcacccccaccg

SEQ ID NO: 3756617 - DNA, 25 bp, Homo sapien
gcccggcaggacccccagccaggcc

SEQ ID NO: 3756618 - DNA, 25 bp, Homo sapien
ggccgtgagcccggcaggaccccca

SEQ ID NO: 3756619 - DNA, 25 bp, Homo sapien
caggacccccagccaggccccggca

SEQ ID NO: 3756620 - DNA, 25 bp, Homo sapien
tcgctgaggccgcggtcccgcaggg

SEQ ID NO: 3756621 - DNA, 25 bp, Homo sapien
tcctgctcgctgaggccgcggtccc

SEQ ID NO: 3756622 - DNA, 25 bp, Homo sapien
cctgctcgctgaggccgcggtcccg

SEQ ID NO: 3756623 - DNA, 25 bp, Homo sapien
tgaggccgcggtcccgcagggagag

SEQ ID NO: 3756624 - DNA, 25 bp, Homo sapien
gctccatgaaacacacgttcccgct

SEQ ID NO: 3756625 - DNA, 25 bp, Homo sapien
gaaggccagggtgtcgggcgtgatg

SEQ ID NO: 3756626 - DNA, 25 bp, Homo sapien
gctctggaagatggcggcgtgggcc

SEQ ID NO: 3756627 - DNA, 25 bp, Homo sapien
ggtgtcgggcgtgatgcacaggctc

SEQ ID NO: 3756628 - DNA, 25 bp, Homo sapien
tcaaaggtgttcccggtcacgtcga

SEQ ID NO: 3756629 - DNA, 25 bp, Homo sapien
ctcaaaggtgttcccggtcacgtcg

SEQ ID NO: 3756630 - DNA, 25 bp, Homo sapien
ggacgaagccgggtgtgccccagag

SEQ ID NO: 3756631 - DNA, 25 bp, Homo sapien
gggtgtgccccagaggccgtcccta

SEQ ID NO: 3756632 - DNA, 25 bp, Homo sapien
aggccgtccctatagcccagtgaac

SEQ ID NO: 3756633 - DNA, 25 bp, Homo sapien
cagaggccgtccctatagcccagtg

SEQ ID NO: 3756634 - DNA, 25 bp, Homo sapien
gatggactgatcgactctgaaggcc

SEQ ID NO: 3756635 - DNA, 25 bp, Homo sapien
tgatgacaaacgtagccaaagcctc

SEQ ID NO: 3756636 - DNA, 25 bp, Homo sapien
tgtagcgtttcacccgacgggataa

SEQ ID NO: 3756637 - DNA, 25 bp, Homo sapien
ttatgacatgactaggaacgcaagc

SEQ ID NO: 3756638 - DNA, 25 bp, Homo sapien
gattagaacaatcctgaggccggtg

SEQ ID NO: 3756639 - DNA, 25 bp, Homo sapien
tacttttcagcagaggacaccgtcg

SEQ ID NO: 3756640 - DNA, 25 bp, Homo sapien
catcggatgggaggaaccaacactt

SEQ ID NO: 3756641 - DNA, 25 bp, Homo sapien
cctaagtgtccagctcgagtcagaa

SEQ ID NO: 3756642 - DNA, 25 bp, Homo sapien
tctgtgagcccagacgcttgctaag

SEQ ID NO: 3756643 - DNA, 25 bp, Homo sapien
gatgaatgccaagcaaacaggccag

SEQ ID NO: 3756644 - DNA, 25 bp, Homo sapien
tgtgtagaccagaaccagcaagagg

SEQ ID NO: 3756645 - DNA, 25 bp, Homo sapien
gcttgctaagcctgcatgtcgtgga

SEQ ID NO: 3756646 - DNA, 25 bp, Homo sapien
gtggtatcagcaaccttcccactca

SEQ ID NO: 3756647 - DNA, 25 bp, Homo sapien
actgcctgatacacacccggtggta

SEQ ID NO: 3756648 - DNA, 25 bp, Homo sapien
cacacccggtggtatcagcaacctt

SEQ ID NO: 3756649 - DNA, 25 bp, Homo sapien
gttattggttgacactgcctgatac

SEQ ID NO: 3756650 - DNA, 25 bp, Homo sapien
aggattccatggagatgtgagtgaa

SEQ ID NO: 3756651 - DNA, 25 bp, Homo sapien
ctatgggtcagggaggattccatgg

SEQ ID NO: 3756652 - DNA, 25 bp, Homo sapien
acattagcaaaactacagcaagttt

SEQ ID NO: 3756653 - DNA, 25 bp, Homo sapien
cattagcaaaactacagcaagtttc

SEQ ID NO: 3756654 - DNA, 25 bp, Homo sapien
tactgtggcggctcgcaggattcat

SEQ ID NO: 3756655 - DNA, 25 bp, Homo sapien
gctcacgaaccaaggtgaggactac

SEQ ID NO: 3756656 - DNA, 25 bp, Homo sapien
aaccaaggtgaggactactgtggcg

SEQ ID NO: 3756657 - DNA, 25 bp, Homo sapien
cgcaggattcatggtggctgctgac

SEQ ID NO: 3756658 - DNA, 25 bp, Homo sapien
tgtctgctgcggctgcccagcgtcg

SEQ ID NO: 3756659 - DNA, 25 bp, Homo sapien
cccagcgtcgatgagggcggctctc

SEQ ID NO: 3756660 - DNA, 25 bp, Homo sapien
tgctgcggctgcccagcgtcgatga

SEQ ID NO: 3756661 - DNA, 25 bp, Homo sapien
gcccagcgtcgatgagggcggctct

SEQ ID NO: 3756662 - DNA, 25 bp, Homo sapien
taaaaccaagctcactggtccacgt

SEQ ID NO: 3756663 - DNA, 25 bp, Homo sapien
gacaaaatcccatcaaagacgtgcg

SEQ ID NO: 3756664 - DNA, 25 bp, Homo sapien
ttcaggtggaatcagcagaacagac

SEQ ID NO: 3756665 - DNA, 25 bp, Homo sapien
tgaagagaaggagtcgagcctccca

SEQ ID NO: 3756666 - DNA, 25 bp, Homo sapien
tgtgaacacgcacctgggggctccc

SEQ ID NO: 3756667 - DNA, 25 bp, Homo sapien
aggacactgtgaacacgcacctggg

SEQ ID NO: 3756668 - DNA, 25 bp, Homo sapien
ggctcccaggaccgcctgggcccag

SEQ ID NO: 3756669 - DNA, 25 bp, Homo sapien
agcccgggcctcaggaggacactgt

SEQ ID NO: 3756670 - DNA, 25 bp, Homo sapien
gcaaacgcggtcaagccaagtggtt

SEQ ID NO: 3756671 - DNA, 25 bp, Homo sapien
tctccaaactgaaaaggccacctct

SEQ ID NO: 3756672 - DNA, 25 bp, Homo sapien
gttttcagttcaacactggttgaag

SEQ ID NO: 3756673 - DNA, 25 bp, Homo sapien
taggaagcgggttacactctcccga

SEQ ID NO: 3756674 - DNA, 25 bp, Homo sapien
tggacgtgaaaacttccccacgaga

SEQ ID NO: 3756675 - DNA, 25 bp, Homo sapien
aaaacttccccacgagatgcgattc

SEQ ID NO: 3756676 - DNA, 25 bp, Homo sapien
cacgtgaagtggacgtgaaaacttc

SEQ ID NO: 3756677 - DNA, 25 bp, Homo sapien
ctggccacgcacgtgaagtggacgt

SEQ ID NO: 3756678 - DNA, 25 bp, Homo sapien
agccgggtcgaggaggtggacgttg

SEQ ID NO: 3756679 - DNA, 25 bp, Homo sapien
tcccacggcgcctgcgatcgcgatg

SEQ ID NO: 3756680 - DNA, 25 bp, Homo sapien
gatcgcgatgggcatcccggtagct

SEQ ID NO: 3756681 - DNA, 25 bp, Homo sapien
cccggtagctctcgcctcgagtggg

SEQ ID NO: 3756682 - DNA, 25 bp, Homo sapien
gggaggccgatcaggcatgaaatga

SEQ ID NO: 3756683 - DNA, 25 bp, Homo sapien
ctggagggaggccgatcaggcatga

SEQ ID NO: 3756684 - DNA, 25 bp, Homo sapien
tggagggaggccgatcaggcatgaa

SEQ ID NO: 3756685 - DNA, 25 bp, Homo sapien
gagggaggccgatcaggcatgaaat

SEQ ID NO: 3756686 - DNA, 25 bp, Homo sapien
ctgggcttggccgtcagcggaggga

SEQ ID NO: 3756687 - DNA, 25 bp, Homo sapien
gcttggccgtcagcggagggaacag

SEQ ID NO: 3756688 - DNA, 25 bp, Homo sapien
ctgggagcaccgagtggccctgcct

SEQ ID NO: 3756689 - DNA, 25 bp, Homo sapien
tgtcctgggagcaccgagtggccct

SEQ ID NO: 3756690 - DNA, 25 bp, Homo sapien
caaggacctcggaggccccagggca

SEQ ID NO: 3756691 - DNA, 25 bp, Homo sapien
gtatttgagccaccggcgaagagca

SEQ ID NO: 3756692 - DNA, 25 bp, Homo sapien
gtcaggagacagcgatacatggaga

SEQ ID NO: 3756693 - DNA, 25 bp, Homo sapien
gggtggggcccactctccaagcctg

SEQ ID NO: 3756694 - DNA, 25 bp, Homo sapien
ctgagacgctatccttgcagccgcg

SEQ ID NO: 3756695 - DNA, 25 bp, Homo sapien
tctccaggtctctgcatggccgcgg

SEQ ID NO: 3756696 - DNA, 25 bp, Homo sapien
tccggctggcaccataaggaagggc

SEQ ID NO: 3756697 - DNA, 25 bp, Homo sapien
ccctcgaggtgcagagccatacggg

SEQ ID NO: 3756698 - DNA, 25 bp, Homo sapien
ccatgtgtggaatctgacctgttta

SEQ ID NO: 3756699 - DNA, 25 bp, Homo sapien
tcacatccaagagctctaagtgccc

SEQ ID NO: 3756700 - DNA, 25 bp, Homo sapien
tgttgccagcttctaacgttgtgcg

SEQ ID NO: 3756701 - DNA, 25 bp, Homo sapien
tgcaaggactatgctttctccgctg

SEQ ID NO: 3756702 - DNA, 25 bp, Homo sapien
gccgcccgcgcagttgggcctagat

SEQ ID NO: 3756703 - DNA, 25 bp, Homo sapien
cagttgggcctagatctgtgctggc

SEQ ID NO: 3756704 - DNA, 25 bp, Homo sapien
gcgcagttgggcctagatctgtgct

SEQ ID NO: 3756705 - DNA, 25 bp, Homo sapien
gcccgcgcagttgggcctagatctg

SEQ ID NO: 3756706 - DNA, 25 bp, Homo sapien
agcagcgcctcgaggtcttggctca

SEQ ID NO: 3756707 - DNA, 25 bp, Homo sapien
aggtcttggctcagcctgggttcca

SEQ ID NO: 3756708 - DNA, 25 bp, Homo sapien
gggtcctccgcctgcatccggctca

SEQ ID NO: 3756709 - DNA, 25 bp, Homo sapien
tgtgggctctgccacgtactcgagg

SEQ ID NO: 3756710 - DNA, 25 bp, Homo sapien
gaaggactcgatggagaggaccctc

SEQ ID NO: 3756711 - DNA, 25 bp, Homo sapien
ttctcttcacacagcgcgatgatgc

SEQ ID NO: 3756712 - DNA, 25 bp, Homo sapien
caggaggatgtgagctgcagcttct

SEQ ID NO: 3756713 - DNA, 25 bp, Homo sapien
agaggctccggcacacgcgacagga

SEQ ID NO: 3756714 - DNA, 25 bp, Homo sapien
cgtttattgaaatgcccatgagact

SEQ ID NO: 3756715 - DNA, 25 bp, Homo sapien
cagacttctgaagctgagcctgagt

SEQ ID NO: 3756716 - DNA, 25 bp, Homo sapien
ttctgaagctgagcctgagtcacct

SEQ ID NO: 3756717 - DNA, 25 bp, Homo sapien
ttcagttgtgaaacatcaacccatc

SEQ ID NO: 3756718 - DNA, 25 bp, Homo sapien
cagctggcttttcccgcgggtcagc

SEQ ID NO: 3756719 - DNA, 25 bp, Homo sapien
tcggcagaacctccgggtcagtgct

SEQ ID NO: 3756720 - DNA, 25 bp, Homo sapien
aataattccgatatgggcagctggc

SEQ ID NO: 3756721 - DNA, 25 bp, Homo sapien
gtggctctcgccatttctcaccggg

SEQ ID NO: 3756722 - DNA, 25 bp, Homo sapien
cgctagcatctcgagggtctgcagg

SEQ ID NO: 3756723 - DNA, 25 bp, Homo sapien
tgaagtctcgggctgtcctggactg

SEQ ID NO: 3756724 - DNA, 25 bp, Homo sapien
ggaattctctcatcgtccctgggag

SEQ ID NO: 3756725 - DNA, 25 bp, Homo sapien
acagggaacccgtcccagctggtgt

SEQ ID NO: 3756726 - DNA, 25 bp, Homo sapien
cccacagctcgtactcccggaaggg

SEQ ID NO: 3756727 - DNA, 25 bp, Homo sapien
acagctcgtactcccggaagggccg

SEQ ID NO: 3756728 - DNA, 25 bp, Homo sapien
ctgggtgctcagggcgtgtctgcag

SEQ ID NO: 3756729 - DNA, 25 bp, Homo sapien
tgggtgctcagggcgtgtctgcagt

SEQ ID NO: 3756730 - DNA, 25 bp, Homo sapien
aagcggcagggagaacacggtaact

SEQ ID NO: 3756731 - DNA, 25 bp, Homo sapien
tccgttcaccggagacactgtcctg

SEQ ID NO: 3756732 - DNA, 25 bp, Homo sapien
ggcagacccgtgcaatgctgaagat

SEQ ID NO: 3756733 - DNA, 25 bp, Homo sapien
tacggcacagtcaccggtttcaagg

SEQ ID NO: 3756734 - DNA, 25 bp, Homo sapien
ccagccctccccgagggtagcgctg

SEQ ID NO: 3756735 - DNA, 25 bp, Homo sapien
cctccccgagggtagcgctgcccca

SEQ ID NO: 3756736 - DNA, 25 bp, Homo sapien
ccccagccgacacagtggctgcagc

SEQ ID NO: 3756737 - DNA, 25 bp, Homo sapien
agccctccccgagggtagcgctgcc

SEQ ID NO: 3756738 - DNA, 25 bp, Homo sapien
agcctccccattgcacgggcacgca

SEQ ID NO: 3756739 - DNA, 25 bp, Homo sapien
gcctccccattgcacgggcacgcac

SEQ ID NO: 3756740 - DNA, 25 bp, Homo sapien
ctgcggagcctcagtcaggccgggc

SEQ ID NO: 3756741 - DNA, 25 bp, Homo sapien
tgcggagcctcagtcaggccgggca

SEQ ID NO: 3756742 - DNA, 25 bp, Homo sapien
ggcgggtatgcatgctgccccgcac

SEQ ID NO: 3756743 - DNA, 25 bp, Homo sapien
ggtatgcatgctgccccgcacttgg

SEQ ID NO: 3756744 - DNA, 25 bp, Homo sapien
tcagggcgggtatgcatgctgcccc

SEQ ID NO: 3756745 - DNA, 25 bp, Homo sapien
gagcttgggtcagggcgggtatgca

SEQ ID NO: 3756746 - DNA, 25 bp, Homo sapien
caaccagcacggagtccagacacag

SEQ ID NO: 3756747 - DNA, 25 bp, Homo sapien
ccgtcctcagcaaccagcacggagt

SEQ ID NO: 3756748 - DNA, 25 bp, Homo sapien
ctcagcaaccagcacggagtccaga

SEQ ID NO: 3756749 - DNA, 25 bp, Homo sapien
gtggctggaagagcacagccccgtc

SEQ ID NO: 3756750 - DNA, 25 bp, Homo sapien
cctggcgagccggtgctggactcgg

SEQ ID NO: 3756751 - DNA, 25 bp, Homo sapien
ccctggcgagccggtgctggactcg

SEQ ID NO: 3756752 - DNA, 25 bp, Homo sapien
ctggcgagccggtgctggactcggc

SEQ ID NO: 3756753 - DNA, 25 bp, Homo sapien
cctctgccagctcgggagccagaaa

SEQ ID NO: 3756754 - DNA, 25 bp, Homo sapien
agccagaaagaacgagtcataggaa

SEQ ID NO: 3756755 - DNA, 25 bp, Homo sapien
gccagaaagaacgagtcataggaac

SEQ ID NO: 3756756 - DNA, 25 bp, Homo sapien
tgggggcagggctggggcagggtgg

SEQ ID NO: 3756757 - DNA, 25 bp, Homo sapien
ctgggggcagggctggggcagggtg

SEQ ID NO: 3756758 - DNA, 25 bp, Homo sapien
ctgctggacagatgggggacgtggc

SEQ ID NO: 3756759 - DNA, 25 bp, Homo sapien
ctccctcgagtcctgatggggggct

SEQ ID NO: 3756760 - DNA, 25 bp, Homo sapien
tgactccctcgagtcctgatggggg

SEQ ID NO: 3756761 - DNA, 25 bp, Homo sapien
gatgggggacgtggcatccccgagg

SEQ ID NO: 3756762 - DNA, 25 bp, Homo sapien
gagccacggccctgctggcagatac

SEQ ID NO: 3756763 - DNA, 25 bp, Homo sapien
cggccagagccacggccctgctggc

SEQ ID NO: 3756764 - DNA, 25 bp, Homo sapien
ccctgtcttggtgccccggccagag

SEQ ID NO: 3756765 - DNA, 25 bp, Homo sapien
caagccctgtcttggtgccccggcc

SEQ ID NO: 3756766 - DNA, 25 bp, Homo sapien
gtgcacatggccagtgccgtccaca

SEQ ID NO: 3756767 - DNA, 25 bp, Homo sapien
agtgcacatggccagtgccgtccac

SEQ ID NO: 3756768 - DNA, 25 bp, Homo sapien
tgcacatggccagtgccgtccacac

SEQ ID NO: 3756769 - DNA, 25 bp, Homo sapien
ctagtgcacatggccagtgccgtcc

SEQ ID NO: 3756770 - DNA, 25 bp, Homo sapien
cttagttctcgtgagccaggaggcg

SEQ ID NO: 3756771 - DNA, 25 bp, Homo sapien
caggtgccttatacacatccctggt

SEQ ID NO: 3756772 - DNA, 25 bp, Homo sapien
tgtttagcccttagttctcgtgagc

SEQ ID NO: 3756773 - DNA, 25 bp, Homo sapien
acatccctggttgtttagcccttag

SEQ ID NO: 3756774 - DNA, 25 bp, Homo sapien
atccgcctccaggtcgtggtccagg

SEQ ID NO: 3756775 - DNA, 25 bp, Homo sapien
aggaacctgcaggtcgaactctccc

SEQ ID NO: 3756776 - DNA, 25 bp, Homo sapien
ctgcatccgcctccaggtcgtggtc

SEQ ID NO: 3756777 - DNA, 25 bp, Homo sapien
ccctgcatccgcctccaggtcgtgg

SEQ ID NO: 3756778 - DNA, 25 bp, Homo sapien
gcggtccacagaacggcggccacac

SEQ ID NO: 3756779 - DNA, 25 bp, Homo sapien
ctgcggtccacagaacggcggccac

SEQ ID NO: 3756780 - DNA, 25 bp, Homo sapien
tgcggtccacagaacggcggccaca

SEQ ID NO: 3756781 - DNA, 25 bp, Homo sapien
cggtccacagaacggcggccacaca

SEQ ID NO: 3756782 - DNA, 25 bp, Homo sapien
aggagggtcttgagcctgcgtggca

SEQ ID NO: 3756783 - DNA, 25 bp, Homo sapien
tggttgcgggggacgctgaacttgg

SEQ ID NO: 3756784 - DNA, 25 bp, Homo sapien
ccagcttgtggttgcgggggacgct

SEQ ID NO: 3756785 - DNA, 25 bp, Homo sapien
ttgatggcctcagccgcggacggcc

SEQ ID NO: 3756786 - DNA, 25 bp, Homo sapien
ccggctgtccatgcctcgctggagg

SEQ ID NO: 3756787 - DNA, 25 bp, Homo sapien
gtgggcaaggattttccggctgtcc

SEQ ID NO: 3756788 - DNA, 25 bp, Homo sapien
ggcagatggaagctctgaggtgggc

SEQ ID NO: 3756789 - DNA, 25 bp, Homo sapien
ggattttccggctgtccatgcctcg

SEQ ID NO: 3756790 - DNA, 25 bp, Homo sapien
tgggcttcagttcaaccactgagaa

SEQ ID NO: 3756791 - DNA, 25 bp, Homo sapien
ctgggcttcagttcaaccactgaga

SEQ ID NO: 3756792 - DNA, 25 bp, Homo sapien
gctgggtggcttcttcaccgcaggg

SEQ ID NO: 3756793 - DNA, 25 bp, Homo sapien
cgttctgcgcgaggacaatgggctt

SEQ ID NO: 3756794 - DNA, 25 bp, Homo sapien
gtgtcgctgttcaccggcaggaagc

SEQ ID NO: 3756795 - DNA, 25 bp, Homo sapien
gcttgaagtgcgtggcctcggaggt

SEQ ID NO: 3756796 - DNA, 25 bp, Homo sapien
ctcctgggccaaggcaggctggtcc

SEQ ID NO: 3756797 - DNA, 25 bp, Homo sapien
ctctggccgcccctctcctcggact

SEQ ID NO: 3756798 - DNA, 25 bp, Homo sapien
tcggactcctcctgggccaaggcag

SEQ ID NO: 3756799 - DNA, 25 bp, Homo sapien
gccgcccctctcctcggactcctcc

SEQ ID NO: 3756800 - DNA, 25 bp, Homo sapien
gcaccggcccgtcaggcgtcttcag

SEQ ID NO: 3756801 - DNA, 25 bp, Homo sapien
tgggctgagtcacgctgcactgacg

SEQ ID NO: 3756802 - DNA, 25 bp, Homo sapien
cactgacgccccaagaggctctggg

SEQ ID NO: 3756803 - DNA, 25 bp, Homo sapien
ggctgagtcacgctgcactgacgcc

SEQ ID NO: 3756804 - DNA, 25 bp, Homo sapien
acgctgcactgacgccccaagaggc

SEQ ID NO: 3756805 - DNA, 25 bp, Homo sapien
tggagagccgggagctgccgatgag

SEQ ID NO: 3756806 - DNA, 25 bp, Homo sapien
gggcagcgcagatgccttcgtgggc

SEQ ID NO: 3756807 - DNA, 25 bp, Homo sapien
gagccgggagctgccgatgaggccc

SEQ ID NO: 3756808 - DNA, 25 bp, Homo sapien
cagcgcagatgccttcgtgggcggg

SEQ ID NO: 3756809 - DNA, 25 bp, Homo sapien
tctggtcatcacgttccccggcagg

SEQ ID NO: 3756810 - DNA, 25 bp, Homo sapien
cagacagagcctccggtctgcgggc

SEQ ID NO: 3756811 - DNA, 25 bp, Homo sapien
aactccaggtgggatcggctcagcc

SEQ ID NO: 3756812 - DNA, 25 bp, Homo sapien
gggacactgtctggactctggtcat

SEQ ID NO: 3756813 - DNA, 25 bp, Homo sapien
gatcagagcctccagcccattgtcc

SEQ ID NO: 3756814 - DNA, 25 bp, Homo sapien
tcctggatgaggcgcgtggcctcct

SEQ ID NO: 3756815 - DNA, 25 bp, Homo sapien
ctcctgcagcgacgggcaggccgtc

SEQ ID NO: 3756816 - DNA, 25 bp, Homo sapien
gtccaggtagccatcgaaggcaaat

SEQ ID NO: 3756817 - DNA, 25 bp, Homo sapien
aaacggacaaggctgatctcggctg

SEQ ID NO: 3756818 - DNA, 25 bp, Homo sapien
acggacaaggctgatctcggctggg

SEQ ID NO: 3756819 - DNA, 25 bp, Homo sapien
tgaaacggacaaggctgatctcggc

SEQ ID NO: 3756820 - DNA, 25 bp, Homo sapien
atgaaacggacaaggctgatctcgg

SEQ ID NO: 3756821 - DNA, 25 bp, Homo sapien
tggagacaagtgagatggtggcagg

SEQ ID NO: 3756822 - DNA, 25 bp, Homo sapien
atggagacaagtgagatggtggcag

SEQ ID NO: 3756823 - DNA, 25 bp, Homo sapien
gaaatggcgccacagaaagtggcaa

SEQ ID NO: 3756824 - DNA, 25 bp, Homo sapien
gttgaccaccttaaagaggttctgc

SEQ ID NO: 3756825 - DNA, 25 bp, Homo sapien
gagggtgacgcctgcccgttgacca

SEQ ID NO: 3756826 - DNA, 25 bp, Homo sapien
tcacagaacttctcggaaatggcgc

SEQ ID NO: 3756827 - DNA, 25 bp, Homo sapien
acgacgagaatgcaggtcagtcccc

SEQ ID NO: 3756828 - DNA, 25 bp, Homo sapien
gacgacgagaatgcaggtcagtccc

SEQ ID NO: 3756829 - DNA, 25 bp, Homo sapien
ctgacgacgagaatgcaggtcagtc

SEQ ID NO: 3756830 - DNA, 25 bp, Homo sapien
tgacgacgagaatgcaggtcagtcc

SEQ ID NO: 3756831 - DNA, 25 bp, Homo sapien
ggctttggctgccctcgagctgtga

SEQ ID NO: 3756832 - DNA, 25 bp, Homo sapien
cgggggctttggctgccctcgagct

SEQ ID NO: 3756833 - DNA, 25 bp, Homo sapien
ggctgccctcgagctgtgacccagc

SEQ ID NO: 3756834 - DNA, 25 bp, Homo sapien
ctttggctgccctcgagctgtgacc

SEQ ID NO: 3756835 - DNA, 25 bp, Homo sapien
ccaggcggtgcagcgacggcctctt

SEQ ID NO: 3756836 - DNA, 25 bp, Homo sapien
caggcggtgcagcgacggcctcttg

SEQ ID NO: 3756837 - DNA, 25 bp, Homo sapien
acgcaggttacgtggacagtggctc

SEQ ID NO: 3756838 - DNA, 25 bp, Homo sapien
gaaagaaagagacgcaggttacgtg

SEQ ID NO: 3756839 - DNA, 25 bp, Homo sapien
aagagacgcaggttacgtggacagt

SEQ ID NO: 3756840 - DNA, 25 bp, Homo sapien
cttgaaagaaagagacgcaggttac

SEQ ID NO: 3756841 - DNA, 25 bp, Homo sapien
gctgcgctctctcggcttttacgga

SEQ ID NO: 3756842 - DNA, 25 bp, Homo sapien
aagtttccccgtgacagtgcgtccg

SEQ ID NO: 3756843 - DNA, 25 bp, Homo sapien
tcacgtagttgtggacgtcggcccc

SEQ ID NO: 3756844 - DNA, 25 bp, Homo sapien
gagtccacatccgacaccgaggtgg

SEQ ID NO: 3756845 - DNA, 25 bp, Homo sapien
gccccacccggcagtgccaaggcct

SEQ ID NO: 3756846 - DNA, 25 bp, Homo sapien
ctgcagtgaccaggaagctctgctg

SEQ ID NO: 3756847 - DNA, 25 bp, Homo sapien
tgctggaaggagacgccctgcccca

SEQ ID NO: 3756848 - DNA, 25 bp, Homo sapien
aagctctgctggaaggagacgccct

SEQ ID NO: 3756849 - DNA, 25 bp, Homo sapien
caggagcaccagtgcagacgagcct

SEQ ID NO: 3756850 - DNA, 25 bp, Homo sapien
agacgagcctgtccctagacgtgga

SEQ ID NO: 3756851 - DNA, 25 bp, Homo sapien
gaacgcaacctggtcacgagcatgg

SEQ ID NO: 3756852 - DNA, 25 bp, Homo sapien
atcgcccgggcgaccatgagagaaa

SEQ ID NO: 3756853 - DNA, 25 bp, Homo sapien
tgctgggcaggcgtttttggtgttt

SEQ ID NO: 3756854 - DNA, 25 bp, Homo sapien
ggcccagtctagacttgctgggcag

SEQ ID NO: 3756855 - DNA, 25 bp, Homo sapien
cccggtctaagacctcctctccctg

SEQ ID NO: 3756856 - DNA, 25 bp, Homo sapien
ctgacccaggatggcactgctggcc

SEQ ID NO: 3756857 - DNA, 25 bp, Homo sapien
tgctggccagaaagcccggaccagg

SEQ ID NO: 3756858 - DNA, 25 bp, Homo sapien
tgcacccaggactccccggtctaag

SEQ ID NO: 3756859 - DNA, 25 bp, Homo sapien
gacaccgggtcatgttctggactga

SEQ ID NO: 3756860 - DNA, 25 bp, Homo sapien
gaggctgtagcaccatgcgggtctt

SEQ ID NO: 3756861 - DNA, 25 bp, Homo sapien
aaggcttcacagagcttaacccctg

SEQ ID NO: 3756862 - DNA, 25 bp, Homo sapien
tgcgggtctttcacgtggcccagaa

SEQ ID NO: 3756863 - DNA, 25 bp, Homo sapien
gggcggagtgctcccggctggacgc

SEQ ID NO: 3756864 - DNA, 25 bp, Homo sapien
tgggggtggagtgctccccgctgga

SEQ ID NO: 3756865 - DNA, 25 bp, Homo sapien
tccccgctggacgccatgcgtttgg

SEQ ID NO: 3756866 - DNA, 25 bp, Homo sapien
tccccgctggactctgccagtttgg

SEQ ID NO: 3756867 - DNA, 25 bp, Homo sapien
tttgggggccgagtgctccccgctg

SEQ ID NO: 3756868 - DNA, 25 bp, Homo sapien
ttgggggccgagtgctccccgctgg

SEQ ID NO: 3756869 - DNA, 25 bp, Homo sapien
ccccgctggactctgtgcgtttggg

SEQ ID NO: 3756870 - DNA, 25 bp, Homo sapien
ccgtgcgtttgggggccgagtgctc

SEQ ID NO: 3756871 - DNA, 25 bp, Homo sapien
ttttgggctgcggatgtgaaagtct

SEQ ID NO: 3756872 - DNA, 25 bp, Homo sapien
agagaacggccctcgctgcaccgtg

SEQ ID NO: 3756873 - DNA, 25 bp, Homo sapien
caagagaaacgtgaggctgtggcca

SEQ ID NO: 3756874 - DNA, 25 bp, Homo sapien
cgctgcaccgtgtgcgttttgggct

SEQ ID NO: 3756875 - DNA, 25 bp, Homo sapien
agcgctgaagggaggaaatgcccac

SEQ ID NO: 3756876 - DNA, 25 bp, Homo sapien
cagcgctgaagggaggaaatgccca

SEQ ID NO: 3756877 - DNA, 25 bp, Homo sapien
tcagcgctgaagggaggaaatgccc

SEQ ID NO: 3756878 - DNA, 25 bp, Homo sapien
gaaaggtctgtgtaccctgacgcat

SEQ ID NO: 3756879 - DNA, 25 bp, Homo sapien
acatcaggtcctcagtcacgtgggc

SEQ ID NO: 3756880 - DNA, 25 bp, Homo sapien
tgaggttggtaaacgcaggtgtccc

SEQ ID NO: 3756881 - DNA, 25 bp, Homo sapien
tttaacagcaggagacgcggatgcc

SEQ ID NO: 3756882 - DNA, 25 bp, Homo sapien
ctggggacgaaacacagcgcctaag

SEQ ID NO: 3756883 - DNA, 25 bp, Homo sapien
ggggacgaaacacagcgcctaagcc

SEQ ID NO: 3756884 - DNA, 25 bp, Homo sapien
tggggacgaaacacagcgcctaagc

SEQ ID NO: 3756885 - DNA, 25 bp, Homo sapien
tctgtaagagtttctggtagaactt

SEQ ID NO: 3756886 - DNA, 25 bp, Homo sapien
ctgtaagagtttctggtagaacttc

SEQ ID NO: 3756887 - DNA, 25 bp, Homo sapien
ccagggtctcggacctgtgcccaca

SEQ ID NO: 3756888 - DNA, 25 bp, Homo sapien
ctgcagccagggtctcggacctgtg

SEQ ID NO: 3756889 - DNA, 25 bp, Homo sapien
gcagccagggtctcggacctgtgcc

SEQ ID NO: 3756890 - DNA, 25 bp, Homo sapien
agggtctcggacctgtgcccacagg

SEQ ID NO: 3756891 - DNA, 25 bp, Homo sapien
gacagcatggtcttgacgtcggaac

SEQ ID NO: 3756892 - DNA, 25 bp, Homo sapien
tcatttcttctagctgccctttcag

SEQ ID NO: 3756893 - DNA, 25 bp, Homo sapien
cagatacttcttgaccaagctgagg

SEQ ID NO: 3756894 - DNA, 25 bp, Homo sapien
tgaggaattgcaccctggatttcat

SEQ ID NO: 3756895 - DNA, 25 bp, Homo sapien
ggggcagagcggggcccggagccca

SEQ ID NO: 3756896 - DNA, 25 bp, Homo sapien
cagagcggggcccggagcccacttg

SEQ ID NO: 3756897 - DNA, 25 bp, Homo sapien
ggcagagcggggcccggagcccact

SEQ ID NO: 3756898 - DNA, 25 bp, Homo sapien
agagcggggcccggagcccacttgc

SEQ ID NO: 3756899 - DNA, 25 bp, Homo sapien
cttcacacggacagatttacagcat

SEQ ID NO: 3756900 - DNA, 25 bp, Homo sapien
tcctggcattggaccctcaaatcag

SEQ ID NO: 3756901 - DNA, 25 bp, Homo sapien
ggacacgggcgcttggtcactctgc

SEQ ID NO: 3756902 - DNA, 25 bp, Homo sapien
tttacagcatccaacagtgggaggc

SEQ ID NO: 3756903 - DNA, 25 bp, Homo sapien
gccgcgatgttcacgatcactggga

SEQ ID NO: 3756904 - DNA, 25 bp, Homo sapien
ggtgcggccgcgatgttcacgatca

SEQ ID NO: 3756905 - DNA, 25 bp, Homo sapien
cagcgtgtcgcagggtgcggccgcg

SEQ ID NO: 3756906 - DNA, 25 bp, Homo sapien
tgttcacgatcactgggagggtgca

SEQ ID NO: 3756907 - DNA, 25 bp, Homo sapien
ccggccgcccgggtgcttgttgacg

SEQ ID NO: 3756908 - DNA, 25 bp, Homo sapien
ccgggtgcttgttgacgttgtagaa

SEQ ID NO: 3756909 - DNA, 25 bp, Homo sapien
ccgcccgggtgcttgttgacgttgt

SEQ ID NO: 3756910 - DNA, 25 bp, Homo sapien
agccccagcggcgtgccggcctgca

SEQ ID NO: 3756911 - DNA, 25 bp, Homo sapien
gtccagagcctgctgcagctcccag

SEQ ID NO: 3756912 - DNA, 25 bp, Homo sapien
cagagcctgctgcagctcccagtgc

SEQ ID NO: 3756913 - DNA, 25 bp, Homo sapien
agtgggtccagagcctgctgcagct

SEQ ID NO: 3756914 - DNA, 25 bp, Homo sapien
cagtgggtccagagcctgctgcagc

SEQ ID NO: 3756915 - DNA, 25 bp, Homo sapien
caggtggccacagccccagccccag

SEQ ID NO: 3756916 - DNA, 25 bp, Homo sapien
ctggggtccgaggacacaggtggcc

SEQ ID NO: 3756917 - DNA, 25 bp, Homo sapien
tggggtccgaggacacaggtggcca

SEQ ID NO: 3756918 - DNA, 25 bp, Homo sapien
gccacagccccagccccaggctgcc

SEQ ID NO: 3756919 - DNA, 25 bp, Homo sapien
aatgctgcacgctcaaaggttctgg

SEQ ID NO: 3756920 - DNA, 25 bp, Homo sapien
tcttcactgggtgaaaccgcgccac

SEQ ID NO: 3756921 - DNA, 25 bp, Homo sapien
tttgtgacgtctccactcgcaggac

SEQ ID NO: 3756922 - DNA, 25 bp, Homo sapien
tttctgaacgcagccctatgcaggg

SEQ ID NO: 3756923 - DNA, 25 bp, Homo sapien
gaaggtgtagaggaattgctgcaca

SEQ ID NO: 3756924 - DNA, 25 bp, Homo sapien
ttgatgcggtcgaggaggaagtgca

SEQ ID NO: 3756925 - DNA, 25 bp, Homo sapien
ctggtcagcgtgctgttgatgcggt

SEQ ID NO: 3756926 - DNA, 25 bp, Homo sapien
gctgcacataaccctccaggaaggc

SEQ ID NO: 3756927 - DNA, 25 bp, Homo sapien
agggaccacctcgttcttcatggtg

SEQ ID NO: 3756928 - DNA, 25 bp, Homo sapien
tggtggctaaaccaggcccatgggc

SEQ ID NO: 3756929 - DNA, 25 bp, Homo sapien
cttgggtcgccagggaccacctcgt

SEQ ID NO: 3756930 - DNA, 25 bp, Homo sapien
tcttcatggtggctaaaccaggccc

SEQ ID NO: 3756931 - DNA, 25 bp, Homo sapien
cagaggctccgcctgtagatcttgg

SEQ ID NO: 3756932 - DNA, 25 bp, Homo sapien
ttccgagggaagtccacagcgtagc

SEQ ID NO: 3756933 - DNA, 25 bp, Homo sapien
tagatcttggtgaaggtcgaggtgg

SEQ ID NO: 3756934 - DNA, 25 bp, Homo sapien
ccgctgttccgagggaagtccacag

SEQ ID NO: 3756935 - DNA, 25 bp, Homo sapien
tggaggagggcggcacctcccactg

SEQ ID NO: 3756936 - DNA, 25 bp, Homo sapien
gaggagggcggcacctcccactgtg

SEQ ID NO: 3756937 - DNA, 25 bp, Homo sapien
ggaggagggcggcacctcccactgt

SEQ ID NO: 3756938 - DNA, 25 bp, Homo sapien
gttgaagggtctggcatcctcctcg

SEQ ID NO: 3756939 - DNA, 25 bp, Homo sapien
gagcctcttacagagggcgttgaag

SEQ ID NO: 3756940 - DNA, 25 bp, Homo sapien
ctctgagagcctcttacagagggcg

SEQ ID NO: 3756941 - DNA, 25 bp, Homo sapien
ggtctgtgccgcgagggttgccctc

SEQ ID NO: 3756942 - DNA, 25 bp, Homo sapien
gcgctccttgtgtggcggcagcacc

SEQ ID NO: 3756943 - DNA, 25 bp, Homo sapien
agctggtgagtgctgtactccgtca

SEQ ID NO: 3756944 - DNA, 25 bp, Homo sapien
agtagggccccttctcactggtctt

SEQ ID NO: 3756945 - DNA, 25 bp, Homo sapien
gccgtagaagtcctcgaggaagcag

SEQ ID NO: 3756946 - DNA, 25 bp, Homo sapien
ttctggggccccgactcgcaggtga

SEQ ID NO: 3756947 - DNA, 25 bp, Homo sapien
ggccccgactcgcaggtgacctggg

SEQ ID NO: 3756948 - DNA, 25 bp, Homo sapien
tcgcaggtgacctgggcgcagatcc

SEQ ID NO: 3756949 - DNA, 25 bp, Homo sapien
tgggcgcagatcctcgccctcctca

SEQ ID NO: 3756950 - DNA, 25 bp, Homo sapien
tctctgcccgtctgttcctctggaa

SEQ ID NO: 3756951 - DNA, 25 bp, Homo sapien
ttcctctggaagcagccgctgaggg

SEQ ID NO: 3756952 - DNA, 25 bp, Homo sapien
cctctggaagcagccgctgagggcc

SEQ ID NO: 3756953 - DNA, 25 bp, Homo sapien
cttctctgcccgtctgttcctctgg

SEQ ID NO: 3756954 - DNA, 25 bp, Homo sapien
agtgctcttgtccatgacgcccagg

SEQ ID NO: 3756955 - DNA, 25 bp, Homo sapien
gaagtggaccgggtggcacttttga

SEQ ID NO: 3756956 - DNA, 25 bp, Homo sapien
cagtgctcttgtccatgacgcccag

SEQ ID NO: 3756957 - DNA, 25 bp, Homo sapien
cccgtgagttcaggaagtggaccgg

SEQ ID NO: 3756958 - DNA, 25 bp, Homo sapien
tacttgtcctgaacgtaattgggca

SEQ ID NO: 3756959 - DNA, 25 bp, Homo sapien
ggtgtggctggtcacaatctctgca

SEQ ID NO: 3756960 - DNA, 25 bp, Homo sapien
tggccgaaagagactcagaagagct

SEQ ID NO: 3756961 - DNA, 25 bp, Homo sapien
aataagctgcaggttttggccgaaa

SEQ ID NO: 3756962 - DNA, 25 bp, Homo sapien
tccttgggctcaagtttgctttcag

SEQ ID NO: 3756963 - DNA, 25 bp, Homo sapien
agtcctgttccttgggctcaagttt

SEQ ID NO: 3756964 - DNA, 25 bp, Homo sapien
tcgtggccgggagtcctgttccttg

SEQ ID NO: 3756965 - DNA, 25 bp, Homo sapien
gcagtgatggggttcgtggccggga

SEQ ID NO: 3756966 - DNA, 25 bp, Homo sapien
ccgcaggctcgaggtgggtctcagg

SEQ ID NO: 3756967 - DNA, 25 bp, Homo sapien
tgagggtgcgcccaggacgatgtgg

SEQ ID NO: 3756968 - DNA, 25 bp, Homo sapien
aggacgagcggccatcccggagacc

SEQ ID NO: 3756969 - DNA, 25 bp, Homo sapien
ctgtacacgggtgcgtgaccaggac

SEQ ID NO: 3756970 - DNA, 25 bp, Homo sapien
gcttttagaagtgggtctccggcga

SEQ ID NO: 3756971 - DNA, 25 bp, Homo sapien
ggcctgttctgagcgatccgcagct

SEQ ID NO: 3756972 - DNA, 25 bp, Homo sapien
gcagcagtgccgagctctgtcccgg

SEQ ID NO: 3756973 - DNA, 25 bp, Homo sapien
atggacgagcgtggtgcttttagaa

SEQ ID NO: 3756974 - DNA, 25 bp, Homo sapien
ggctgtcgcgaagtttctctgctca

SEQ ID NO: 3756975 - DNA, 25 bp, Homo sapien
aggtgctccagcccgctcaggatct

SEQ ID NO: 3756976 - DNA, 25 bp, Homo sapien
ggatctgcatggctgtcgcgaagtt

SEQ ID NO: 3756977 - DNA, 25 bp, Homo sapien
tcgcgaagtttctctgctcatagca

SEQ ID NO: 3756978 - DNA, 25 bp, Homo sapien
tctgctatctttgcaggcagaattc

SEQ ID NO: 3756979 - DNA, 25 bp, Homo sapien
atgacctctgctatctttgcaggca

SEQ ID NO: 3756980 - DNA, 25 bp, Homo sapien
gacctctgctatctttgcaggcaga

SEQ ID NO: 3756981 - DNA, 25 bp, Homo sapien
tatctttgcaggcagaattctccag

SEQ ID NO: 3756982 - DNA, 25 bp, Homo sapien
caaagccgcccggccacgtaaagtg

SEQ ID NO: 3756983 - DNA, 25 bp, Homo sapien
ccgcccggccacgtaaagtgctggt

SEQ ID NO: 3756984 - DNA, 25 bp, Homo sapien
agccgcccggccacgtaaagtgctg

SEQ ID NO: 3756985 - DNA, 25 bp, Homo sapien
gcccggccacgtaaagtgctggtac

SEQ ID NO: 3756986 - DNA, 25 bp, Homo sapien
cctggatggttggacttggctcaca

SEQ ID NO: 3756987 - DNA, 25 bp, Homo sapien
gggtctacccggctctctgaattag

SEQ ID NO: 3756988 - DNA, 25 bp, Homo sapien
tgaattagcttccagtcccgaatgt

SEQ ID NO: 3756989 - DNA, 25 bp, Homo sapien
ctgctgctgaaatggtgagtccctt

SEQ ID NO: 3756990 - DNA, 25 bp, Homo sapien
gacacaggctgtcgctcttcaggaa

SEQ ID NO: 3756991 - DNA, 25 bp, Homo sapien
agacacaggctgtcgctcttcagga

SEQ ID NO: 3756992 - DNA, 25 bp, Homo sapien
cagacacaggctgtcgctcttcagg

SEQ ID NO: 3756993 - DNA, 25 bp, Homo sapien
acacaggctgtcgctcttcaggaag

SEQ ID NO: 3756994 - DNA, 25 bp, Homo sapien
tgggccccgttggtcatggtgaagc

SEQ ID NO: 3756995 - DNA, 25 bp, Homo sapien
tccacctgtgggccccgttggtcat

SEQ ID NO: 3756996 - DNA, 25 bp, Homo sapien
ggcagggtgggctgcgcccggaagc

SEQ ID NO: 3756997 - DNA, 25 bp, Homo sapien
ggtgaagccgcctgtctccagctgc

SEQ ID NO: 3756998 - DNA, 25 bp, Homo sapien
tggtaggttttacagccagccccag

SEQ ID NO: 3756999 - DNA, 25 bp, Homo sapien
acaacggcaggcgatgagatgagac

SEQ ID NO: 3757000 - DNA, 25 bp, Homo sapien
tgtgccttaccaggtggaagagcct

SEQ ID NO: 3757001 - DNA, 25 bp, Homo sapien
tgcaaggtagttggtcccaggtgct

SEQ ID NO: 3757002 - DNA, 25 bp, Homo sapien
acaccacatgcccagtgtgagggac

SEQ ID NO: 3757003 - DNA, 25 bp, Homo sapien
cctggatgggctcacacacacgccg

SEQ ID NO: 3757004 - DNA, 25 bp, Homo sapien
ggcgtccattacggcaaagaaaggc

SEQ ID NO: 3757005 - DNA, 25 bp, Homo sapien
tccattacggcaaagaaaggccaag

SEQ ID NO: 3757006 - DNA, 25 bp, Homo sapien
tatctgcggcgagtgtggaaatgtc

SEQ ID NO: 3757007 - DNA, 25 bp, Homo sapien
tggaaatgtcggcaccgctgaagcg

SEQ ID NO: 3757008 - DNA, 25 bp, Homo sapien
gacctggtggaagttggccctgcta

SEQ ID NO: 3757009 - DNA, 25 bp, Homo sapien
gaatgtagccttcatcctccgtagc

SEQ ID NO: 3757010 - DNA, 25 bp, Homo sapien
agcagaaacacgcaaacctccaaga

SEQ ID NO: 3757011 - DNA, 25 bp, Homo sapien
tccaagactcttgtgcccgtcctgg

SEQ ID NO: 3757012 - DNA, 25 bp, Homo sapien
ccccacagtcggattcggatctgga

SEQ ID NO: 3757013 - DNA, 25 bp, Homo sapien
ttgataacggccgggcctgagacgc

SEQ ID NO: 3757014 - DNA, 25 bp, Homo sapien
gaggtcagctttggcccttcgttgc

SEQ ID NO: 3757015 - DNA, 25 bp, Homo sapien
cagggtctcggaccggaggtctcgg

SEQ ID NO: 3757016 - DNA, 25 bp, Homo sapien
ggcgcagacaggcacaaaactcctg

SEQ ID NO: 3757017 - DNA, 25 bp, Homo sapien
cagggaggagctactctgaagtttg

SEQ ID NO: 3757018 - DNA, 25 bp, Homo sapien
tgctccagcagcaggccttgggcac

SEQ ID NO: 3757019 - DNA, 25 bp, Homo sapien
caagggctgttctaagctggggggc

SEQ ID NO: 3757020 - DNA, 25 bp, Homo sapien
ggagcaggcccagcccaaggtgcct

SEQ ID NO: 3757021 - DNA, 25 bp, Homo sapien
gcaggccttgggcacctgggggtct

SEQ ID NO: 3757022 - DNA, 25 bp, Homo sapien
tgaccgctggaatgttgatttgcac

SEQ ID NO: 3757023 - DNA, 25 bp, Homo sapien
tattcagaaattggtgccaggacgg

SEQ ID NO: 3757024 - DNA, 25 bp, Homo sapien
ggtccaagaacctgagcaagggcaa

SEQ ID NO: 3757025 - DNA, 25 bp, Homo sapien
tgcagcgatttgtcacaggtcacag

SEQ ID NO: 3757026 - DNA, 25 bp, Homo sapien
tgagcacctgtaaggggccttcgtg

SEQ ID NO: 3757027 - DNA, 25 bp, Homo sapien
ctgtaaggggccttcgtgcggccat

SEQ ID NO: 3757028 - DNA, 25 bp, Homo sapien
agcacctgtaaggggccttcgtgcg

SEQ ID NO: 3757029 - DNA, 25 bp, Homo sapien
cacctgtaaggggccttcgtgcggc

SEQ ID NO: 3757030 - DNA, 25 bp, Homo sapien
ctgagttgtgacacacgtctggcag

SEQ ID NO: 3757031 - DNA, 25 bp, Homo sapien
tgagttgtgacacacgtctggcagg

SEQ ID NO: 3757032 - DNA, 25 bp, Homo sapien
cagagtttagcgcagattgacccaa

SEQ ID NO: 3757033 - DNA, 25 bp, Homo sapien
ccgtgggtctgtgcaaatagcctgt

SEQ ID NO: 3757034 - DNA, 25 bp, Homo sapien
tttttgtcaatggagggcgagcctg

SEQ ID NO: 3757035 - DNA, 25 bp, Homo sapien
taagaactgatggacagacgcccgt

SEQ ID NO: 3757036 - DNA, 25 bp, Homo sapien
ctcctgtccagcacaattggactcc

SEQ ID NO: 3757037 - DNA, 25 bp, Homo sapien
tcctgtccagcacaattggactcca

SEQ ID NO: 3757038 - DNA, 25 bp, Homo sapien
gctcctgtccagcacaattggactc

SEQ ID NO: 3757039 - DNA, 25 bp, Homo sapien
agctcctgtccagcacaattggact

SEQ ID NO: 3757040 - DNA, 25 bp, Homo sapien
ccgcgggaatgggtgtcggaattca

SEQ ID NO: 3757041 - DNA, 25 bp, Homo sapien
cgcgctcgcagaagtagcttttaaa

SEQ ID NO: 3757042 - DNA, 25 bp, Homo sapien
gaattcacgcgctcgcagaagtagc

SEQ ID NO: 3757043 - DNA, 25 bp, Homo sapien
gtgtcggaattcacgcgctcgcaga

SEQ ID NO: 3757044 - DNA, 25 bp, Homo sapien
cccggggctggggcgcggcgcgcga

SEQ ID NO: 3757045 - DNA, 25 bp, Homo sapien
gggctggggcgcggcgcgcgaggat

SEQ ID NO: 3757046 - DNA, 25 bp, Homo sapien
ccggggctggggcgcggcgcgcgag

SEQ ID NO: 3757047 - DNA, 25 bp, Homo sapien
ggggctggggcgcggcgcgcgagga

SEQ ID NO: 3757048 - DNA, 25 bp, Homo sapien
gggcgtctccgggtgtccgcggctc

SEQ ID NO: 3757049 - DNA, 25 bp, Homo sapien
cgagttcccccagcgcgctgggcga

SEQ ID NO: 3757050 - DNA, 25 bp, Homo sapien
cgtctccgggtgtccgcggctcggg

SEQ ID NO: 3757051 - DNA, 25 bp, Homo sapien
cggcaacccgagttcccccagcgcg

SEQ ID NO: 3757052 - DNA, 25 bp, Homo sapien
gcgcggccgacacgcggcggtaggt

SEQ ID NO: 3757053 - DNA, 25 bp, Homo sapien
agcgcgcgccacacggccggttgca

SEQ ID NO: 3757054 - DNA, 25 bp, Homo sapien
gctccgtctcccgggcgctccaggg

SEQ ID NO: 3757055 - DNA, 25 bp, Homo sapien
tctcccgggcgctccagggcgtgcg

SEQ ID NO: 3757056 - DNA, 25 bp, Homo sapien
ctttaaggaacttgtagcggcggcg

SEQ ID NO: 3757057 - DNA, 25 bp, Homo sapien
gtttgcgcccgttgtcgcccagcag

SEQ ID NO: 3757058 - DNA, 25 bp, Homo sapien
ttccggatctgctcgtcgaagggcc

SEQ ID NO: 3757059 - DNA, 25 bp, Homo sapien
gtgcgcctcgcgaaacttgtcttta

SEQ ID NO: 3757060 - DNA, 25 bp, Homo sapien
cggtcctcggggatgcaggtggcga

SEQ ID NO: 3757061 - DNA, 25 bp, Homo sapien
tccaggtggggtccgcgtcgcggtc

SEQ ID NO: 3757062 - DNA, 25 bp, Homo sapien
tgcagcagggcggtgttcagcgacg

SEQ ID NO: 3757063 - DNA, 25 bp, Homo sapien
gggacgggctgaagcggagcgtcca

SEQ ID NO: 3757064 - DNA, 25 bp, Homo sapien
gatgttcgcgatgtcgcccaggtgc

SEQ ID NO: 3757065 - DNA, 25 bp, Homo sapien
gcgctgcccagaatgaagcccacgg

SEQ ID NO: 3757066 - DNA, 25 bp, Homo sapien
tgctccacgtgctggttcaaggtca

SEQ ID NO: 3757067 - DNA, 25 bp, Homo sapien
gacactgtctggtcgaaggcgccgc

SEQ ID NO: 3757068 - DNA, 25 bp, Homo sapien
acaatccttttattgaacataccca

SEQ ID NO: 3757069 - DNA, 25 bp, Homo sapien
caatccttttattgaacatacccaa

SEQ ID NO: 3757070 - DNA, 25 bp, Homo sapien
atccttttattgaacatacccaaga

SEQ ID NO: 3757071 - DNA, 25 bp, Homo sapien
aatccttttattgaacatacccaag

SEQ ID NO: 3757072 - DNA, 25 bp, Homo sapien
cagacctgggcaagccgttcatttc

SEQ ID NO: 3757073 - DNA, 25 bp, Homo sapien
tgggcaagccgttcatttccccagg

SEQ ID NO: 3757074 - DNA, 25 bp, Homo sapien
cctttagcactagcgggaactattc

SEQ ID NO: 3757075 - DNA, 25 bp, Homo sapien
caggagcagcctttagcactagcgg

SEQ ID NO: 3757076 - DNA, 25 bp, Homo sapien
aggaacaccacgagcatgcatttcc

SEQ ID NO: 3757077 - DNA, 25 bp, Homo sapien
gcatgcatttccgaaacgccagcac

SEQ ID NO: 3757078 - DNA, 25 bp, Homo sapien
gaacaccacgagcatgcatttccga

SEQ ID NO: 3757079 - DNA, 25 bp, Homo sapien
cacgagcatgcatttccgaaacgcc

SEQ ID NO: 3757080 - DNA, 25 bp, Homo sapien
ctgagcaaagaggttggagcccggg

SEQ ID NO: 3757081 - DNA, 25 bp, Homo sapien
gagcaaagaggttggagcccgggag

SEQ ID NO: 3757082 - DNA, 25 bp, Homo sapien
tgagcaaagaggttggagcccggga

SEQ ID NO: 3757083 - DNA, 25 bp, Homo sapien
gcaaagaggttggagcccgggaggc

SEQ ID NO: 3757084 - DNA, 25 bp, Homo sapien
ggtaggacggtgtcttccgcgcact

SEQ ID NO: 3757085 - DNA, 25 bp, Homo sapien
cggccggagttaggcggaggcgcag

SEQ ID NO: 3757086 - DNA, 25 bp, Homo sapien
acgccgcccgcggaaatcagaaaga

SEQ ID NO: 3757087 - DNA, 25 bp, Homo sapien
ggagcagccccgactcccggccagg

SEQ ID NO: 3757088 - DNA, 25 bp, Homo sapien
acgtgaccgggtgggaggcagccat

SEQ ID NO: 3757089 - DNA, 25 bp, Homo sapien
ccgacgtgaccgggtgggaggcagc

SEQ ID NO: 3757090 - DNA, 25 bp, Homo sapien
gcgtggggcgcggggaccgacgtga

SEQ ID NO: 3757091 - DNA, 25 bp, Homo sapien
gaccgacgtgaccgggtgggaggca

SEQ ID NO: 3757092 - DNA, 25 bp, Homo sapien
ccgggacggtcatagccacgcgcgg

SEQ ID NO: 3757093 - DNA, 25 bp, Homo sapien
tgctcccacgaacctgagtcccgag

SEQ ID NO: 3757094 - DNA, 25 bp, Homo sapien
cacgaacctgagtcccgagctgtct

SEQ ID NO: 3757095 - DNA, 25 bp, Homo sapien
gagtcccgagctgtctgcgtctccg

SEQ ID NO: 3757096 - DNA, 25 bp, Homo sapien
cgtcggcggcgggactggtgcgtcc

SEQ ID NO: 3757097 - DNA, 25 bp, Homo sapien
ggagcctctgcattcgggcgcgggc

SEQ ID NO: 3757098 - DNA, 25 bp, Homo sapien
agccgccggtgactgtggcgcccaa

SEQ ID NO: 3757099 - DNA, 25 bp, Homo sapien
tgactccatcccgagctggaagggc

SEQ ID NO: 3757100 - DNA, 25 bp, Homo sapien
ccaggcggcggcgtttataagccca

SEQ ID NO: 3757101 - DNA, 25 bp, Homo sapien
gctaatgcccagataagcagcgcct

SEQ ID NO: 3757102 - DNA, 25 bp, Homo sapien
cgggagcccggtttgcatacacggc

SEQ ID NO: 3757103 - DNA, 25 bp, Homo sapien
taattgccttcgattcagaggcaca

SEQ ID NO: 3757104 - DNA, 25 bp, Homo sapien
ctgcgggccacgaggtggggaggag

SEQ ID NO: 3757105 - DNA, 25 bp, Homo sapien
gaggtggggaggaggagaggcgcat

SEQ ID NO: 3757106 - DNA, 25 bp, Homo sapien
ccacgaggtggggaggaggagaggc

SEQ ID NO: 3757107 - DNA, 25 bp, Homo sapien
acgaggtggggaggaggagaggcgc

SEQ ID NO: 3757108 - DNA, 25 bp, Homo sapien
tttgaggacccggcggcctccttga

SEQ ID NO: 3757109 - DNA, 25 bp, Homo sapien
gcagatttgaggacccggcggcctc

SEQ ID NO: 3757110 - DNA, 25 bp, Homo sapien
cagatttgaggacccggcggcctcc

SEQ ID NO: 3757111 - DNA, 25 bp, Homo sapien
aggacccggcggcctccttgatgct

SEQ ID NO: 3757112 - DNA, 25 bp, Homo sapien
gctccaggtgacccggaatgggctt

SEQ ID NO: 3757113 - DNA, 25 bp, Homo sapien
ttgagcctagacgctgagcaggcac

SEQ ID NO: 3757114 - DNA, 25 bp, Homo sapien
cctagacgctgagcaggcaccggct

SEQ ID NO: 3757115 - DNA, 25 bp, Homo sapien
caggtgacccggaatgggcttgagc

SEQ ID NO: 3757116 - DNA, 25 bp, Homo sapien
cgcaaggtatttggctccttactca

SEQ ID NO: 3757117 - DNA, 25 bp, Homo sapien
ggcccgcaaggtatttggctcctta

SEQ ID NO: 3757118 - DNA, 25 bp, Homo sapien
caaggtatttggctccttactcaac

SEQ ID NO: 3757119 - DNA, 25 bp, Homo sapien
cccgcaaggtatttggctccttact

SEQ ID NO: 3757120 - DNA, 25 bp, Homo sapien
gccagaagacgttgagtagaaagct

SEQ ID NO: 3757121 - DNA, 25 bp, Homo sapien
cagaagacgttgagtagaaagctgg

SEQ ID NO: 3757122 - DNA, 25 bp, Homo sapien
tagaaagctgggggcgcatggagag

SEQ ID NO: 3757123 - DNA, 25 bp, Homo sapien
gaaagctgggggcgcatggagagac

SEQ ID NO: 3757124 - DNA, 25 bp, Homo sapien
caaaatgcatcccccgtctgtggca

SEQ ID NO: 3757125 - DNA, 25 bp, Homo sapien
tgcatcccccgtctgtggcatagca

SEQ ID NO: 3757126 - DNA, 25 bp, Homo sapien
tggtcccagcgaaggccggcctggg

SEQ ID NO: 3757127 - DNA, 25 bp, Homo sapien
ccgcagatgccagggcctcttgtgc

SEQ ID NO: 3757128 - DNA, 25 bp, Homo sapien
aagaacggtccatcaacgcgggagt

SEQ ID NO: 3757129 - DNA, 25 bp, Homo sapien
taaatatattctcagggccgggtgc

SEQ ID NO: 3757130 - DNA, 25 bp, Homo sapien
tcagcaagctgtgggtacagtcccg

SEQ ID NO: 3757131 - DNA, 25 bp, Homo sapien
tcaggtttcatgcacgcagtcagga

SEQ ID NO: 3757132 - DNA, 25 bp, Homo sapien
agttcaggaccaagacggtgtggtt

SEQ ID NO: 3757133 - DNA, 25 bp, Homo sapien
cgggagagttcaggaccaagacggt

SEQ ID NO: 3757134 - DNA, 25 bp, Homo sapien
tcaggaccaagacggtgtggtttgt

SEQ ID NO: 3757135 - DNA, 25 bp, Homo sapien
ggagagttcaggaccaagacggtgt

SEQ ID NO: 3757136 - DNA, 25 bp, Homo sapien
tctgggactgacgtccagcggtcag

SEQ ID NO: 3757137 - DNA, 25 bp, Homo sapien
acgtccagcggtcagccagaggacc

SEQ ID NO: 3757138 - DNA, 25 bp, Homo sapien
gactgacgtccagcggtcagccaga

SEQ ID NO: 3757139 - DNA, 25 bp, Homo sapien
ccaaactctgggactgacgtccagc

SEQ ID NO: 3757140 - DNA, 25 bp, Homo sapien
gtatcaggtccagccactgagaccc

SEQ ID NO: 3757141 - DNA, 25 bp, Homo sapien
ggcttgccaagacatgcccacgtat

SEQ ID NO: 3757142 - DNA, 25 bp, Homo sapien
gcttgccaagacatgcccacgtatc

SEQ ID NO: 3757143 - DNA, 25 bp, Homo sapien
ccacgtatcaggtccagccactgag

SEQ ID NO: 3757144 - DNA, 25 bp, Homo sapien
cagcccgcagctggggtgtccgagg

SEQ ID NO: 3757145 - DNA, 25 bp, Homo sapien
ccaccccaacgagctcggctgctcc

SEQ ID NO: 3757146 - DNA, 25 bp, Homo sapien
ccccaccccaacgagctcggctgct

SEQ ID NO: 3757147 - DNA, 25 bp, Homo sapien
accccaacgagctcggctgctcccc

SEQ ID NO: 3757148 - DNA, 25 bp, Homo sapien
caggacagtgttggacacgctggct

SEQ ID NO: 3757149 - DNA, 25 bp, Homo sapien
cagtggccaggacagtgttggacac

SEQ ID NO: 3757150 - DNA, 25 bp, Homo sapien
tggccaggacagtgttggacacgct

SEQ ID NO: 3757151 - DNA, 25 bp, Homo sapien
ggtctggttcccagtggccaggaca

SEQ ID NO: 3757152 - DNA, 25 bp, Homo sapien
tccagggaccggagggtcgggctgc

SEQ ID NO: 3757153 - DNA, 25 bp, Homo sapien
ccttgagaccatcccagaccctgcc

SEQ ID NO: 3757154 - DNA, 25 bp, Homo sapien
gacaattgtatctgcgcttctcaca

SEQ ID NO: 3757155 - DNA, 25 bp, Homo sapien
caatggctgttcaaagcttgctgga

SEQ ID NO: 3757156 - DNA, 25 bp, Homo sapien
cccgtgtttctggaatctgttgaca

SEQ ID NO: 3757157 - DNA, 25 bp, Homo sapien
caatgtgtcgttttacaagcaggaa

SEQ ID NO: 3757158 - DNA, 25 bp, Homo sapien
gaggaagtgtcggggctgcggcttg

SEQ ID NO: 3757159 - DNA, 25 bp, Homo sapien
gcggcttgccgggatgtaggagcac

SEQ ID NO: 3757160 - DNA, 25 bp, Homo sapien
ggctgcggcttgccgggatgtagga

SEQ ID NO: 3757161 - DNA, 25 bp, Homo sapien
cttgccgggatgtaggagcacaggc

SEQ ID NO: 3757162 - DNA, 25 bp, Homo sapien
catgggattcaagagggacagcccc

SEQ ID NO: 3757163 - DNA, 25 bp, Homo sapien
taagcttaggaatcgcctttatgga

SEQ ID NO: 3757164 - DNA, 25 bp, Homo sapien
ggctatgtgggagagtcagctatct

SEQ ID NO: 3757165 - DNA, 25 bp, Homo sapien
ctcttcgagagggtgtcagtgagca

SEQ ID NO: 3757166 - DNA, 25 bp, Homo sapien
gaagacgccttccaggagaacggca

SEQ ID NO: 3757167 - DNA, 25 bp, Homo sapien
tgagctgtgccgtcccaagaaggac

SEQ ID NO: 3757168 - DNA, 25 bp, Homo sapien
caagaaggacatgtgtgacctcgag

SEQ ID NO: 3757169 - DNA, 25 bp, Homo sapien
gacctcgaggagttctgtgacggcc

SEQ ID NO: 3757170 - DNA, 25 bp, Homo sapien
agtgtgcgcacggtacctgctgcca

SEQ ID NO: 3757171 - DNA, 25 bp, Homo sapien
tctgtgggtgtccagagcggtcaca

SEQ ID NO: 3757172 - DNA, 25 bp, Homo sapien
ccccgtgtgtgggaacctgtttgtg

SEQ ID NO: 3757173 - DNA, 25 bp, Homo sapien
aggactgccggaaccgctgctgcaa

SEQ ID NO: 3757174 - DNA, 25 bp, Homo sapien
tcagcagggactggtgcaaatgggt

SEQ ID NO: 3757175 - DNA, 25 bp, Homo sapien
tcaaatcgaatgctctgtgttctgt

SEQ ID NO: 3757176 - DNA, 25 bp, Homo sapien
ggtcgcagtcaccgcacagtgagcc

SEQ ID NO: 3757177 - DNA, 25 bp, Homo sapien
gggtccagaattttcaaatcgaatg

SEQ ID NO: 3757178 - DNA, 25 bp, Homo sapien
gaagcacaaatatgcatctgttgtg

SEQ ID NO: 3757179 - DNA, 25 bp, Homo sapien
acaaatatgcatctgttgtgtggca

SEQ ID NO: 3757180 - DNA, 25 bp, Homo sapien
gcacaaatatgcatctgttgtgtgg

SEQ ID NO: 3757181 - DNA, 25 bp, Homo sapien
atgaagcacaaatatgcatctgttg

SEQ ID NO: 3757182 - DNA, 25 bp, Homo sapien
tttctgtcaatgttggccccgccta

SEQ ID NO: 3757183 - DNA, 25 bp, Homo sapien
taatgggcacctttaaagaaagcac

SEQ ID NO: 3757184 - DNA, 25 bp, Homo sapien
tgcggaccgtacattctccctgagc

SEQ ID NO: 3757185 - DNA, 25 bp, Homo sapien
taaatactccgttccagagcgaggt

SEQ ID NO: 3757186 - DNA, 25 bp, Homo sapien
ggccagtgctccctacttcgaggtt

SEQ ID NO: 3757187 - DNA, 25 bp, Homo sapien
acagccaggcgcaggagctatgcct

SEQ ID NO: 3757188 - DNA, 25 bp, Homo sapien
gtacctaaccaaggcggccagtgct

SEQ ID NO: 3757189 - DNA, 25 bp, Homo sapien
cacgacaggagcttcagctacacag

SEQ ID NO: 3757190 - DNA, 25 bp, Homo sapien
ggcgcagcctgtcggccaccgtccg

SEQ ID NO: 3757191 - DNA, 25 bp, Homo sapien
gcgggcgggcgcagcctgtcggcca

SEQ ID NO: 3757192 - DNA, 25 bp, Homo sapien
cgcgggcgggcgcagcctgtcggcc

SEQ ID NO: 3757193 - DNA, 25 bp, Homo sapien
gcgggcgcagcctgtcggccaccgt

SEQ ID NO: 3757194 - DNA, 25 bp, Homo sapien
gcgcaacgaagcgaaagggcgcggc

SEQ ID NO: 3757195 - DNA, 25 bp, Homo sapien
ctcgaagaactggtgctcccgcggg

SEQ ID NO: 3757196 - DNA, 25 bp, Homo sapien
aagaactggtgctcccgcgggaagc

SEQ ID NO: 3757197 - DNA, 25 bp, Homo sapien
ggatcccgctctacaggcagcggct

SEQ ID NO: 3757198 - DNA, 25 bp, Homo sapien
cactggatcctacaactactttttc

SEQ ID NO: 3757199 - DNA, 25 bp, Homo sapien
aggcacgtcggccacctgcatgatc

SEQ ID NO: 3757200 - DNA, 25 bp, Homo sapien
gtagaggtggcgctgcacgtcccca

SEQ ID NO: 3757201 - DNA, 25 bp, Homo sapien
cacctgcatgatcacgtcctggagg

SEQ ID NO: 3757202 - DNA, 25 bp, Homo sapien
gcatgatcacgtcctggaggtagag

SEQ ID NO: 3757203 - DNA, 25 bp, Homo sapien
ggaaggcccgcttgcaaaaggagca

SEQ ID NO: 3757204 - DNA, 25 bp, Homo sapien
catttccgtgcagcgtgtggtagtg

SEQ ID NO: 3757205 - DNA, 25 bp, Homo sapien
tggtagtggtgctcgtagtcgtcca

SEQ ID NO: 3757206 - DNA, 25 bp, Homo sapien
tctggaagagcgaatcgtgccactc

SEQ ID NO: 3757207 - DNA, 25 bp, Homo sapien
tcaccatgtgatccttccggtctct

SEQ ID NO: 3757208 - DNA, 25 bp, Homo sapien
ggtacaggtgcatcctcaccatgtg

SEQ ID NO: 3757209 - DNA, 25 bp, Homo sapien
tgatccttccggtctctgctggtct

SEQ ID NO: 3757210 - DNA, 25 bp, Homo sapien
tggcttatcaaaccggaagtccgcg

SEQ ID NO: 3757211 - DNA, 25 bp, Homo sapien
ggcatagtctgattttatagtgtgg

SEQ ID NO: 3757212 - DNA, 25 bp, Homo sapien
ggatttccctgtaagtagcatattt

SEQ ID NO: 3757213 - DNA, 25 bp, Homo sapien
ttcttactattttggcatagtctga

SEQ ID NO: 3757214 - DNA, 25 bp, Homo sapien
agaaactggatttccctgtaagtag

SEQ ID NO: 3757215 - DNA, 25 bp, Homo sapien
acaggctcagagcagatttccatgg

SEQ ID NO: 3757216 - DNA, 25 bp, Homo sapien
ctatgtctgtagatccgcctctcac

SEQ ID NO: 3757217 - DNA, 25 bp, Homo sapien
aattcagtatgagaagagctgcggc

SEQ ID NO: 3757218 - DNA, 25 bp, Homo sapien
gttgagaacgggtttcagaaagagc

SEQ ID NO: 3757219 - DNA, 25 bp, Homo sapien
gaatcctcagcaccgaacacatgtt

SEQ ID NO: 3757220 - DNA, 25 bp, Homo sapien
tctgaattcagtatgagaagagctg

SEQ ID NO: 3757221 - DNA, 25 bp, Homo sapien
caatggctcaaaaacagagtatgcg

SEQ ID NO: 3757222 - DNA, 25 bp, Homo sapien
tgatgctattaaggcagacgcctgg

SEQ ID NO: 3757223 - DNA, 25 bp, Homo sapien
cggaagccgattttcttacccagcg

SEQ ID NO: 3757224 - DNA, 25 bp, Homo sapien
agacgcctgggttgtgactgaagca

SEQ ID NO: 3757225 - DNA, 25 bp, Homo sapien
gtgacgctagaaaggcagacagtac

SEQ ID NO: 3757226 - DNA, 25 bp, Homo sapien
ggcagacagtacaggtcatgctaga

SEQ ID NO: 3757227 - DNA, 25 bp, Homo sapien
cggcacaggtgacgctagaaaggca

SEQ ID NO: 3757228 - DNA, 25 bp, Homo sapien
cagtacaggtcatgctagaaaggca

SEQ ID NO: 3757229 - DNA, 25 bp, Homo sapien
catcgttccacctgtttggagtctt

SEQ ID NO: 3757230 - DNA, 25 bp, Homo sapien
ggtgatgtttttccccacttgttca

SEQ ID NO: 3757231 - DNA, 25 bp, Homo sapien
taagttcatcgttccacctgtttgg

SEQ ID NO: 3757232 - DNA, 25 bp, Homo sapien
gggaacattaagttcatcgttccac

SEQ ID NO: 3757233 - DNA, 25 bp, Homo sapien
aagaactccgcagagagggcggctc

SEQ ID NO: 3757234 - DNA, 25 bp, Homo sapien
tgtatttgccaaccaacaacccagg

SEQ ID NO: 3757235 - DNA, 25 bp, Homo sapien
actctgggaacatgcggaatgcaga

SEQ ID NO: 3757236 - DNA, 25 bp, Homo sapien
cagcctgagacctagttcctgtggg

SEQ ID NO: 3757237 - DNA, 25 bp, Homo sapien
agcggcaccctgaccaaagcagatg

SEQ ID NO: 3757238 - DNA, 25 bp, Homo sapien
ttttaaatcctcgagcggcaccctg

SEQ ID NO: 3757239 - DNA, 25 bp, Homo sapien
accaaagcagatggtagagggtatt

SEQ ID NO: 3757240 - DNA, 25 bp, Homo sapien
tcgagcggcaccctgaccaaagcag

SEQ ID NO: 3757241 - DNA, 25 bp, Homo sapien
gcggccacaccagaaggtcggagaa

SEQ ID NO: 3757242 - DNA, 25 bp, Homo sapien
gccacgcccagcagtggtgactgcc

SEQ ID NO: 3757243 - DNA, 25 bp, Homo sapien
ccagaaggtcggagaaaggcccaag

SEQ ID NO: 3757244 - DNA, 25 bp, Homo sapien
agaaaggcccaaggcggatgccacg

SEQ ID NO: 3757245 - DNA, 25 bp, Homo sapien
acagcttctgatgacagctgctaat

SEQ ID NO: 3757246 - DNA, 25 bp, Homo sapien
ctgatgacagctgctaatgccattt

SEQ ID NO: 3757247 - DNA, 25 bp, Homo sapien
cttctgatgacagctgctaatgcca

SEQ ID NO: 3757248 - DNA, 25 bp, Homo sapien
agcttctgatgacagctgctaatgc

SEQ ID NO: 3757249 - DNA, 25 bp, Homo sapien
tgtgtccaggtcgtttccaaaatct

SEQ ID NO: 3757250 - DNA, 25 bp, Homo sapien
acaggccgtccacatctccttccca

SEQ ID NO: 3757251 - DNA, 25 bp, Homo sapien
tcccaatagtgtgtccaggtcgttt

SEQ ID NO: 3757252 - DNA, 25 bp, Homo sapien
tagtgtgtccaggtcgtttccaaaa

SEQ ID NO: 3757253 - DNA, 25 bp, Homo sapien
cacctgtgcgtgttcccggggatgc

SEQ ID NO: 3757254 - DNA, 25 bp, Homo sapien
cctctccacctgtgcgtgttcccgg

SEQ ID NO: 3757255 - DNA, 25 bp, Homo sapien
gctcggagtcgtccatgcacagctg

SEQ ID NO: 3757256 - DNA, 25 bp, Homo sapien
agctcggagtcgtccatgcacagct

SEQ ID NO: 3757257 - DNA, 25 bp, Homo sapien
ctgtgaaggaggacggagaccggca

SEQ ID NO: 3757258 - DNA, 25 bp, Homo sapien
aaggaggacggagaccggcactggc

SEQ ID NO: 3757259 - DNA, 25 bp, Homo sapien
aggacggagaccggcactggcaccc

SEQ ID NO: 3757260 - DNA, 25 bp, Homo sapien
tgaaggaggacggagaccggcactg

SEQ ID NO: 3757261 - DNA, 25 bp, Homo sapien
ccagaggatgaagggaccggggttg

SEQ ID NO: 3757262 - DNA, 25 bp, Homo sapien
acacaggcacagcccgtccgtgtga

SEQ ID NO: 3757263 - DNA, 25 bp, Homo sapien
gtccgtgtgaggagcgggcgaaggg

SEQ ID NO: 3757264 - DNA, 25 bp, Homo sapien
cgggggtatcgaccggctgccagtg

SEQ ID NO: 3757265 - DNA, 25 bp, Homo sapien
tgctgggcttctaagggcattggcc

SEQ ID NO: 3757266 - DNA, 25 bp, Homo sapien
gggcattggccagatgaacaagcac

SEQ ID NO: 3757267 - DNA, 25 bp, Homo sapien
acgcagaactgaattggccctgatg

SEQ ID NO: 3757268 - DNA, 25 bp, Homo sapien
cattggccagatgaacaagcacacg

SEQ ID NO: 3757269 - DNA, 25 bp, Homo sapien
tggctccattacaaactgtccgcag

SEQ ID NO: 3757270 - DNA, 25 bp, Homo sapien
tgtactacacggagatggaccccga

SEQ ID NO: 3757271 - DNA, 25 bp, Homo sapien
ttcggtgtcctgaagccatggctcc

SEQ ID NO: 3757272 - DNA, 25 bp, Homo sapien
ggtttatgctctggagcgcgctccg

SEQ ID NO: 3757273 - DNA, 25 bp, Homo sapien
caccccccagcgtgacgcagcattc

SEQ ID NO: 3757274 - DNA, 25 bp, Homo sapien
gcgcaccccccagcgtgacgcagca

SEQ ID NO: 3757275 - DNA, 25 bp, Homo sapien
ctgcgcgcaccccccagcgtgacgc

SEQ ID NO: 3757276 - DNA, 25 bp, Homo sapien
gcgcgcaccccccagcgtgacgcag

SEQ ID NO: 3757277 - DNA, 25 bp, Homo sapien
cagcctgaggagtcttgcacgctgt

SEQ ID NO: 3757278 - DNA, 25 bp, Homo sapien
agcctgaggagtcttgcacgctgtg

SEQ ID NO: 3757279 - DNA, 25 bp, Homo sapien
gcctgaggagtcttgcacgctgtgt

SEQ ID NO: 3757280 - DNA, 25 bp, Homo sapien
agctcagctgaagcacttccttcct

SEQ ID NO: 3757281 - DNA, 25 bp, Homo sapien
caacttggaagggtgtcgtgggcag

SEQ ID NO: 3757282 - DNA, 25 bp, Homo sapien
ctgaaccgtgctcacaaccaaggca

SEQ ID NO: 3757283 - DNA, 25 bp, Homo sapien
ccttcctcaggtgggcgtgacaaat

SEQ ID NO: 3757284 - DNA, 25 bp, Homo sapien
gccagggatcccaccctgggtagct

SEQ ID NO: 3757285 - DNA, 25 bp, Homo sapien
gcccactcgggcctggatctgagcg

SEQ ID NO: 3757286 - DNA, 25 bp, Homo sapien
gtagctcaggtgactggctctgcag

SEQ ID NO: 3757287 - DNA, 25 bp, Homo sapien
ttggggcgtgtcaggacagaggtcg

SEQ ID NO: 3757288 - DNA, 25 bp, Homo sapien
tctggggtccgcgtctctgtagaga

SEQ ID NO: 3757289 - DNA, 25 bp, Homo sapien
gtagagagtgctcagggagctgcag

SEQ ID NO: 3757290 - DNA, 25 bp, Homo sapien
caggcccaggccaattggggctttg

SEQ ID NO: 3757291 - DNA, 25 bp, Homo sapien
tgatcccagtatctggcacccggcc

SEQ ID NO: 3757292 - DNA, 25 bp, Homo sapien
aaaggtggtcggtggtgactgccaa

SEQ ID NO: 3757293 - DNA, 25 bp, Homo sapien
ctagaaaggtggtcggtggtgactg

SEQ ID NO: 3757294 - DNA, 25 bp, Homo sapien
ggtccccaagctacccagaagccac

SEQ ID NO: 3757295 - DNA, 25 bp, Homo sapien
gggtccccaagctacccagaagcca

SEQ ID NO: 3757296 - DNA, 25 bp, Homo sapien
ccagagctgcggggccacggctggg

SEQ ID NO: 3757297 - DNA, 25 bp, Homo sapien
gggggctcaggggtgaatggcagca

SEQ ID NO: 3757298 - DNA, 25 bp, Homo sapien
gctggggggctcaggggtgaatggc

SEQ ID NO: 3757299 - DNA, 25 bp, Homo sapien
gtgtcccagagctgcggggccacgg

SEQ ID NO: 3757300 - DNA, 25 bp, Homo sapien
ccacagcagcacaaccaccaggctg

SEQ ID NO: 3757301 - DNA, 25 bp, Homo sapien
ttgggtgctgggactgcacctgcct

SEQ ID NO: 3757302 - DNA, 25 bp, Homo sapien
tgggactgcacctgcctcccacagc

SEQ ID NO: 3757303 - DNA, 25 bp, Homo sapien
acagcagcacaaccaccaggctggt

SEQ ID NO: 3757304 - DNA, 25 bp, Homo sapien
ctggggctgcatggggtggaggtgg

SEQ ID NO: 3757305 - DNA, 25 bp, Homo sapien
ccacagtccacgcgggtggaggaca

SEQ ID NO: 3757306 - DNA, 25 bp, Homo sapien
cacagtccacgcgggtggaggacac

SEQ ID NO: 3757307 - DNA, 25 bp, Homo sapien
ggccacagtccacgcgggtggagga

SEQ ID NO: 3757308 - DNA, 25 bp, Homo sapien
gccacagtccacgcgggtggaggac

SEQ ID NO: 3757309 - DNA, 25 bp, Homo sapien
gagggccagtgtttgacttgcatct

SEQ ID NO: 3757310 - DNA, 25 bp, Homo sapien
gggccagtgtttgacttgcatcttg

SEQ ID NO: 3757311 - DNA, 25 bp, Homo sapien
agggccagtgtttgacttgcatctt

SEQ ID NO: 3757312 - DNA, 25 bp, Homo sapien
gctggtcgtccttctccggaggctc

SEQ ID NO: 3757313 - DNA, 25 bp, Homo sapien
tcaagagtttcggcttctggacagg

SEQ ID NO: 3757314 - DNA, 25 bp, Homo sapien
gtggtcaagagtttcggcttctgga

SEQ ID NO: 3757315 - DNA, 25 bp, Homo sapien
gctccaccacacgggcgccccaggc

SEQ ID NO: 3757316 - DNA, 25 bp, Homo sapien
ctggaaggatggggcccctgccctg

SEQ ID NO: 3757317 - DNA, 25 bp, Homo sapien
tggaaggatggggcccctgccctga

SEQ ID NO: 3757318 - DNA, 25 bp, Homo sapien
ggaaggatggggcccctgccctgac

SEQ ID NO: 3757319 - DNA, 25 bp, Homo sapien
tcaggacatggcccagggtgtcctc

SEQ ID NO: 3757320 - DNA, 25 bp, Homo sapien
ggacatggcccagggtgtcctcggt

SEQ ID NO: 3757321 - DNA, 25 bp, Homo sapien
ctcaggacatggcccagggtgtcct

SEQ ID NO: 3757322 - DNA, 25 bp, Homo sapien
caggacatggcccagggtgtcctcg

SEQ ID NO: 3757323 - DNA, 25 bp, Homo sapien
tcctcaggcggagggtggtacaggc

SEQ ID NO: 3757324 - DNA, 25 bp, Homo sapien
tcctcctcaggcggagggtggtaca

SEQ ID NO: 3757325 - DNA, 25 bp, Homo sapien
cacctggtgatttggcatcacccac

SEQ ID NO: 3757326 - DNA, 25 bp, Homo sapien
tgatttggcatcacccacaaccggg

SEQ ID NO: 3757327 - DNA, 25 bp, Homo sapien
tagggagggtcccagtcccaacagc

SEQ ID NO: 3757328 - DNA, 25 bp, Homo sapien
tgctggggtttatttgtctagctgg

SEQ ID NO: 3757329 - DNA, 25 bp, Homo sapien
ggggtttatttgtctagctggggca

SEQ ID NO: 3757330 - DNA, 25 bp, Homo sapien
gcctgctggggtttatttgtctagc

SEQ ID NO: 3757331 - DNA, 25 bp, Homo sapien
ttgggctgcctagggcaagaccctc

SEQ ID NO: 3757332 - DNA, 25 bp, Homo sapien
tcagccctgagcgtgttgatccctc

SEQ ID NO: 3757333 - DNA, 25 bp, Homo sapien
caagggagaagctggcagcccatct

SEQ ID NO: 3757334 - DNA, 25 bp, Homo sapien
taggacagaacctcaaaggtcactg

SEQ ID NO: 3757335 - DNA, 25 bp, Homo sapien
gctcccagatggtagccaaggcttt

SEQ ID NO: 3757336 - DNA, 25 bp, Homo sapien
tgaaagcctcacttgccctggcagg

SEQ ID NO: 3757337 - DNA, 25 bp, Homo sapien
tcgtggcctaacatcagcggtgtac

SEQ ID NO: 3757338 - DNA, 25 bp, Homo sapien
tgtgctcactagtggtcagccttgg

SEQ ID NO: 3757339 - DNA, 25 bp, Homo sapien
agggcccagcatggaagccgcatct

SEQ ID NO: 3757340 - DNA, 25 bp, Homo sapien
tctcagagggctgcgtctagttatc

SEQ ID NO: 3757341 - DNA, 25 bp, Homo sapien
ggctgcgtctagttatctggttcca

SEQ ID NO: 3757342 - DNA, 25 bp, Homo sapien
taggctggggaatggactttgtctt

SEQ ID NO: 3757343 - DNA, 25 bp, Homo sapien
agcacgtggagtctgcgtgggtcat

SEQ ID NO: 3757344 - DNA, 25 bp, Homo sapien
gcacgtggagtctgcgtgggtcatg

SEQ ID NO: 3757345 - DNA, 25 bp, Homo sapien
gcgtttgccggtgtctcctccactt

SEQ ID NO: 3757346 - DNA, 25 bp, Homo sapien
cagctcagtgcagacgccagagagc

SEQ ID NO: 3757347 - DNA, 25 bp, Homo sapien
ctcagtgtgcgtaggtggtctagat

SEQ ID NO: 3757348 - DNA, 25 bp, Homo sapien
cgtaggtggtctagattgtggtcat

SEQ ID NO: 3757349 - DNA, 25 bp, Homo sapien
aagtgcagcctgtcagttttagaag

SEQ ID NO: 3757350 - DNA, 25 bp, Homo sapien
accagtgagaaccagctgcccctgc

SEQ ID NO: 3757351 - DNA, 25 bp, Homo sapien
gcagcctgtcagttttagaagcaag

SEQ ID NO: 3757352 - DNA, 25 bp, Homo sapien
tgtcagttttagaagcaagtaaatc

SEQ ID NO: 3757353 - DNA, 25 bp, Homo sapien
ctcctggccagcccgttcctggttc

SEQ ID NO: 3757354 - DNA, 25 bp, Homo sapien
gtcctcctggccagcccgttcctgg

SEQ ID NO: 3757355 - DNA, 25 bp, Homo sapien
cctcctggccagcccgttcctggtt

SEQ ID NO: 3757356 - DNA, 25 bp, Homo sapien
tcctcctggccagcccgttcctggt

SEQ ID NO: 3757357 - DNA, 25 bp, Homo sapien
aagatggaacaggaagggtctggct

SEQ ID NO: 3757358 - DNA, 25 bp, Homo sapien
gcaagatggaacaggaagggtctgg

SEQ ID NO: 3757359 - DNA, 25 bp, Homo sapien
atggaacaggaagggtctggctttg

SEQ ID NO: 3757360 - DNA, 25 bp, Homo sapien
gatggaacaggaagggtctggcttt

SEQ ID NO: 3757361 - DNA, 25 bp, Homo sapien
gctgtgaaagcctccagcatcgcca

SEQ ID NO: 3757362 - DNA, 25 bp, Homo sapien
cagcgagccgtcagttcgcgtgtgc

SEQ ID NO: 3757363 - DNA, 25 bp, Homo sapien
gcctgcgtgtgcgcgtgtagtcaca

SEQ ID NO: 3757364 - DNA, 25 bp, Homo sapien
agcatcgccagcgagccgtcagttc

SEQ ID NO: 3757365 - DNA, 25 bp, Homo sapien
cgggaggtctggagctctcggagga

SEQ ID NO: 3757366 - DNA, 25 bp, Homo sapien
agtccgagggcttctgagtagccgg

SEQ ID NO: 3757367 - DNA, 25 bp, Homo sapien
ctctcggaggaggccggaggcggag

SEQ ID NO: 3757368 - DNA, 25 bp, Homo sapien
gcgcggtccgggcagtccgagggct

SEQ ID NO: 3757369 - DNA, 25 bp, Homo sapien
gcctccccgacgctgccggtcgact

SEQ ID NO: 3757370 - DNA, 25 bp, Homo sapien
ctccccgacgctgccggtcgactcc

SEQ ID NO: 3757371 - DNA, 25 bp, Homo sapien
gggcctccccgacgctgccggtcga

SEQ ID NO: 3757372 - DNA, 25 bp, Homo sapien
tccccgacgctgccggtcgactcca

SEQ ID NO: 3757373 - DNA, 25 bp, Homo sapien
ccgccgcccaccaccagcacccggg

SEQ ID NO: 3757374 - DNA, 25 bp, Homo sapien
cgccgcccaccaccagcacccgggg

SEQ ID NO: 3757375 - DNA, 25 bp, Homo sapien
gccgccgcccaccaccagcacccgg

SEQ ID NO: 3757376 - DNA, 25 bp, Homo sapien
ggaaggcggagtggccgcagagcct

SEQ ID NO: 3757377 - DNA, 25 bp, Homo sapien
cgggaaggcggagtggccgcagagc

SEQ ID NO: 3757378 - DNA, 25 bp, Homo sapien
caggacccgcaggtgcgggaaggcg

SEQ ID NO: 3757379 - DNA, 25 bp, Homo sapien
tgcgggaaggcggagtggccgcaga

SEQ ID NO: 3757380 - DNA, 25 bp, Homo sapien
gaagcagcgctccgagcggatgcgg

SEQ ID NO: 3757381 - DNA, 25 bp, Homo sapien
aagcagcgctccgagcggatgcggc

SEQ ID NO: 3757382 - DNA, 25 bp, Homo sapien
agcgctccgagcggatgcggccccc

SEQ ID NO: 3757383 - DNA, 25 bp, Homo sapien
gcagcgctccgagcggatgcggccc

SEQ ID NO: 3757384 - DNA, 25 bp, Homo sapien
gttggggccggcgagttcgggcgca

SEQ ID NO: 3757385 - DNA, 25 bp, Homo sapien
ggccggcgagttcgggcgcagccgg

SEQ ID NO: 3757386 - DNA, 25 bp, Homo sapien
cggccgggcaggtcggctgcgcgca

SEQ ID NO: 3757387 - DNA, 25 bp, Homo sapien
cgagttcgggcgcagccggttgggt

SEQ ID NO: 3757388 - DNA, 25 bp, Homo sapien
tgaactctggcggattaagcgagcg

SEQ ID NO: 3757389 - DNA, 25 bp, Homo sapien
cggattaagcgagcggggattccct

SEQ ID NO: 3757390 - DNA, 25 bp, Homo sapien
tctgagccctgagtttcggggcggt

SEQ ID NO: 3757391 - DNA, 25 bp, Homo sapien
agtttcggggcggtgaactctggcg

SEQ ID NO: 3757392 - DNA, 25 bp, Homo sapien
tggagccgtaggtcgccttccctgg

SEQ ID NO: 3757393 - DNA, 25 bp, Homo sapien
aatcagggcggccttgtggagccgt

SEQ ID NO: 3757394 - DNA, 25 bp, Homo sapien
ccttgtggagccgtaggtcgccttc

SEQ ID NO: 3757395 - DNA, 25 bp, Homo sapien
ccccgtggggcagaatcagggcggc

SEQ ID NO: 3757396 - DNA, 25 bp, Homo sapien
cagtgcgcgcccacctccaccacgc

SEQ ID NO: 3757397 - DNA, 25 bp, Homo sapien
ggatccagtgcgcgcccacctccac

SEQ ID NO: 3757398 - DNA, 25 bp, Homo sapien
gatccagtgcgcgcccacctccacc

SEQ ID NO: 3757399 - DNA, 25 bp, Homo sapien
tgcgcgcccacctccaccacgccac

SEQ ID NO: 3757400 - DNA, 25 bp, Homo sapien
gctggcgtagctcacggagggcagg

SEQ ID NO: 3757401 - DNA, 25 bp, Homo sapien
acgtgacccccggtctccaccagct

SEQ ID NO: 3757402 - DNA, 25 bp, Homo sapien
gcagcccgtactcagcagccagctg

SEQ ID NO: 3757403 - DNA, 25 bp, Homo sapien
tcacgctggccccggagctggcgta

SEQ ID NO: 3757404 - DNA, 25 bp, Homo sapien
tctctgcagcgtgcaggaactcccg

SEQ ID NO: 3757405 - DNA, 25 bp, Homo sapien
cttcttgaggtactccccgacgctg

SEQ ID NO: 3757406 - DNA, 25 bp, Homo sapien
agaaggagttcaggacggccagctt

SEQ ID NO: 3757407 - DNA, 25 bp, Homo sapien
ggaactcccgggtctggtctatcag

SEQ ID NO: 3757408 - DNA, 25 bp, Homo sapien
cggcagcacggtatactccccaaag

SEQ ID NO: 3757409 - DNA, 25 bp, Homo sapien
gcagcacggtatactccccaaaggg

SEQ ID NO: 3757410 - DNA, 25 bp, Homo sapien
cccggcagcacggtatactccccaa

SEQ ID NO: 3757411 - DNA, 25 bp, Homo sapien
agcacggtatactccccaaagggtg

SEQ ID NO: 3757412 - DNA, 25 bp, Homo sapien
gcggggcaggggctcaggcacgcac

SEQ ID NO: 3757413 - DNA, 25 bp, Homo sapien
agcctggtgggaggactggcggggc

SEQ ID NO: 3757414 - DNA, 25 bp, Homo sapien
tcagccagccccggtgccctgggga

SEQ ID NO: 3757415 - DNA, 25 bp, Homo sapien
cggtgccctggggagcctggtggga

SEQ ID NO: 3757416 - DNA, 25 bp, Homo sapien
caggagcaagagaagtctttactct

SEQ ID NO: 3757417 - DNA, 25 bp, Homo sapien
ctctgcagttgaagcccctcataaa

SEQ ID NO: 3757418 - DNA, 25 bp, Homo sapien
ttgaagcccctcataaatacaggag

SEQ ID NO: 3757419 - DNA, 25 bp, Homo sapien
acaggagcaagagaagtctttactc

SEQ ID NO: 3757420 - DNA, 25 bp, Homo sapien
ctgcacctggtacctggcagccacc

SEQ ID NO: 3757421 - DNA, 25 bp, Homo sapien
caccacagagttcctgactcacaaa

SEQ ID NO: 3757422 - DNA, 25 bp, Homo sapien
caacaccaggggtgacgggacagcc

SEQ ID NO: 3757423 - DNA, 25 bp, Homo sapien
cgggacagcccgaggagggtctcat

SEQ ID NO: 3757424 - DNA, 25 bp, Homo sapien
tcacaaatgcccattgcctggccag

SEQ ID NO: 3757425 - DNA, 25 bp, Homo sapien
ctgcggggagctctccatcgctcag

SEQ ID NO: 3757426 - DNA, 25 bp, Homo sapien
agggccagcaaggaggtcagctcca

SEQ ID NO: 3757427 - DNA, 25 bp, Homo sapien
catcaaaggtagctgcggggagctc

SEQ ID NO: 3757428 - DNA, 25 bp, Homo sapien
ggaggtcagctccactctgtggttt

SEQ ID NO: 3757429 - DNA, 25 bp, Homo sapien
tagaaagacggaagtgctggtttcg

SEQ ID NO: 3757430 - DNA, 25 bp, Homo sapien
tgctggtttcgtagaggcccagtcc

SEQ ID NO: 3757431 - DNA, 25 bp, Homo sapien
gaagtgctggtttcgtagaggccca

SEQ ID NO: 3757432 - DNA, 25 bp, Homo sapien
aagacggaagtgctggtttcgtaga

SEQ ID NO: 3757433 - DNA, 25 bp, Homo sapien
tcatgcagtttgtgagtccttgata

SEQ ID NO: 3757434 - DNA, 25 bp, Homo sapien
tcacactctaccgacactggaaagg

SEQ ID NO: 3757435 - DNA, 25 bp, Homo sapien
aaaaactacagtgtcctccggcagg

SEQ ID NO: 3757436 - DNA, 25 bp, Homo sapien
gaaggacccgttccagtggatggtc

SEQ ID NO: 3757437 - DNA, 25 bp, Homo sapien
acgatgacatggtgcgccgggaacc

SEQ ID NO: 3757438 - DNA, 25 bp, Homo sapien
aaaatgtgagcttcgtacacaagca

SEQ ID NO: 3757439 - DNA, 25 bp, Homo sapien
tagaacgaaaatgtgagcttcgtac

SEQ ID NO: 3757440 - DNA, 25 bp, Homo sapien
tcgtacacaagcaaacgccccagag

SEQ ID NO: 3757441 - DNA, 25 bp, Homo sapien
gagcttcgtacacaagcaaacgccc

SEQ ID NO: 3757442 - DNA, 25 bp, Homo sapien
tgtgggacaatgacagacacctccc

SEQ ID NO: 3757443 - DNA, 25 bp, Homo sapien
tccaagtgagtgctggcaatcgcta

SEQ ID NO: 3757444 - DNA, 25 bp, Homo sapien
cagatgttcatgtgtggacgacgac

SEQ ID NO: 3757445 - DNA, 25 bp, Homo sapien
ccaaggctgcctgagtcaatgagat

SEQ ID NO: 3757446 - DNA, 25 bp, Homo sapien
aaaaagaccgctgtagatctatgtg

SEQ ID NO: 3757447 - DNA, 25 bp, Homo sapien
aaagaccgctgtagatctatgtgtg

SEQ ID NO: 3757448 - DNA, 25 bp, Homo sapien
caaaaaagaccgctgtagatctatg

SEQ ID NO: 3757449 - DNA, 25 bp, Homo sapien
gaaacaaaaaagaccgctgtagatc

SEQ ID NO: 3757450 - DNA, 25 bp, Homo sapien
cccaaagcctatcttcctgattgct

SEQ ID NO: 3757451 - DNA, 25 bp, Homo sapien
gcctatcttcctgattgcttctgcc

SEQ ID NO: 3757452 - DNA, 25 bp, Homo sapien
ttgttggtcccaaagcctatcttcc

SEQ ID NO: 3757453 - DNA, 25 bp, Homo sapien
ctcaaactccaggaagattttgttg

SEQ ID NO: 3757454 - DNA, 25 bp, Homo sapien
aagccaatgagcttccggaaccagg

SEQ ID NO: 3757455 - DNA, 25 bp, Homo sapien
gaaccaggcgtcctgtagctcaggg

SEQ ID NO: 3757456 - DNA, 25 bp, Homo sapien
gcttccggaaccaggcgtcctgtag

SEQ ID NO: 3757457 - DNA, 25 bp, Homo sapien
atgagcttccggaaccaggcgtcct

SEQ ID NO: 3757458 - DNA, 25 bp, Homo sapien
cctccatcagatgaaggcctatgag

SEQ ID NO: 3757459 - DNA, 25 bp, Homo sapien
gccactcgcagaacttctcagggag

SEQ ID NO: 3757460 - DNA, 25 bp, Homo sapien
atgagccagccactcgcagaacttc

SEQ ID NO: 3757461 - DNA, 25 bp, Homo sapien
cagtgaacagacacactgctgcgtc

SEQ ID NO: 3757462 - DNA, 25 bp, Homo sapien
ccaaccctttgcaggtatataaaag

SEQ ID NO: 3757463 - DNA, 25 bp, Homo sapien
gagcaggtggctctacacacagtca

SEQ ID NO: 3757464 - DNA, 25 bp, Homo sapien
gggtcccactgatgtcctaagcaag

SEQ ID NO: 3757465 - DNA, 25 bp, Homo sapien
tatataaaaggatgggacagctacc

SEQ ID NO: 3757466 - DNA, 25 bp, Homo sapien
aagtccggcaatgaacccacagaga

SEQ ID NO: 3757467 - DNA, 25 bp, Homo sapien
agtacttcttcatccgacagagtct

SEQ ID NO: 3757468 - DNA, 25 bp, Homo sapien
tccgacagagtctccatgaactcag

SEQ ID NO: 3757469 - DNA, 25 bp, Homo sapien
tccatgaactcagactcaagtccgg

SEQ ID NO: 3757470 - DNA, 25 bp, Homo sapien
aagattgagcagtttaacgtgaaag

SEQ ID NO: 3757471 - DNA, 25 bp, Homo sapien
taaagattgagcagtttaacgtgaa

SEQ ID NO: 3757472 - DNA, 25 bp, Homo sapien
tttaaagattgagcagtttaacgtg

SEQ ID NO: 3757473 - DNA, 25 bp, Homo sapien
gattgagcagtttaacgtgaaagat

SEQ ID NO: 3757474 - DNA, 25 bp, Homo sapien
actgcccacggccacgtagctgtag

SEQ ID NO: 3757475 - DNA, 25 bp, Homo sapien
cgctgtgccagcgagaccgcaggac

SEQ ID NO: 3757476 - DNA, 25 bp, Homo sapien
accgcaggacgctcttgggcgcggg

SEQ ID NO: 3757477 - DNA, 25 bp, Homo sapien
cacgtagctgtaggaccccctagtg

SEQ ID NO: 3757478 - DNA, 25 bp, Homo sapien
tctgcagcgggacccacgccccccg

SEQ ID NO: 3757479 - DNA, 25 bp, Homo sapien
cagcgggacccacgccccccgactg

SEQ ID NO: 3757480 - DNA, 25 bp, Homo sapien
cccccgactggggcacgccacatac

SEQ ID NO: 3757481 - DNA, 25 bp, Homo sapien
cacgccccccgactggggcacgcca

SEQ ID NO: 3757482 - DNA, 25 bp, Homo sapien
cgcatccaccaatgggtgggaaagg

SEQ ID NO: 3757483 - DNA, 25 bp, Homo sapien
acgcatccaccaatgggtgggaaag

SEQ ID NO: 3757484 - DNA, 25 bp, Homo sapien
aaacactgaatagtgatctggcctc

SEQ ID NO: 3757485 - DNA, 25 bp, Homo sapien
tgtaaacactgaatagtgatctggc

SEQ ID NO: 3757486 - DNA, 25 bp, Homo sapien
aaacgtgcgatgtgtggcttccccc

SEQ ID NO: 3757487 - DNA, 25 bp, Homo sapien
gatgtgtggcttcccccgcaaacag

SEQ ID NO: 3757488 - DNA, 25 bp, Homo sapien
gtcgtggagtaaaacgtgcgatgtg

SEQ ID NO: 3757489 - DNA, 25 bp, Homo sapien
ggcttcccccgcaaacaggatctgg

SEQ ID NO: 3757490 - DNA, 25 bp, Homo sapien
ctgcggggcccacagactgaggagg

SEQ ID NO: 3757491 - DNA, 25 bp, Homo sapien
tccatcccgacagcagagccccgtg

SEQ ID NO: 3757492 - DNA, 25 bp, Homo sapien
actgaggaggcggtcggcctccctc

SEQ ID NO: 3757493 - DNA, 25 bp, Homo sapien
gcctccctccatcccgacagcagag

SEQ ID NO: 3757494 - DNA, 25 bp, Homo sapien
tagagcctgggcctgggctgctgca

SEQ ID NO: 3757495 - DNA, 25 bp, Homo sapien
ctagagcctgggcctgggctgctgc

SEQ ID NO: 3757496 - DNA, 25 bp, Homo sapien
agagcctgggcctgggctgctgcac

SEQ ID NO: 3757497 - DNA, 25 bp, Homo sapien
ggtggaacagagtaggctgggccca

SEQ ID NO: 3757498 - DNA, 25 bp, Homo sapien
gtggaacagagtaggctgggcccag

SEQ ID NO: 3757499 - DNA, 25 bp, Homo sapien
acgggtggaacagagtaggctgggc

SEQ ID NO: 3757500 - DNA, 25 bp, Homo sapien
ccccgacacgggtggaacagagtag

SEQ ID NO: 3757501 - DNA, 25 bp, Homo sapien
tcaagccagactgaaatctgtcaga

SEQ ID NO: 3757502 - DNA, 25 bp, Homo sapien
tgtcagaagaaatgagggtcccagc

SEQ ID NO: 3757503 - DNA, 25 bp, Homo sapien
ctgtcagaagaaatgagggtcccag

SEQ ID NO: 3757504 - DNA, 25 bp, Homo sapien
agccagactgaaatctgtcagaaga

SEQ ID NO: 3757505 - DNA, 25 bp, Homo sapien
gaggaccctcattaacatccccaaa

SEQ ID NO: 3757506 - DNA, 25 bp, Homo sapien
cagacacaagaactgagaaggtggc

SEQ ID NO: 3757507 - DNA, 25 bp, Homo sapien
tgtctcagctcaagtcaaccctggc

SEQ ID NO: 3757508 - DNA, 25 bp, Homo sapien
aaccctggccagactccaataacag

SEQ ID NO: 3757509 - DNA, 25 bp, Homo sapien
cgcctccggcgaagcccggagtggg

SEQ ID NO: 3757510 - DNA, 25 bp, Homo sapien
gacgaatggtgggtcgagcgtcggg

SEQ ID NO: 3757511 - DNA, 25 bp, Homo sapien
gcgccgctgcgacccgcctctgagg

SEQ ID NO: 3757512 - DNA, 25 bp, Homo sapien
acggcctgcgcgtgcgcacgacgtt

SEQ ID NO: 3757513 - DNA, 25 bp, Homo sapien
tccccggaaacgctcccgcagctga

SEQ ID NO: 3757514 - DNA, 25 bp, Homo sapien
gtccccggaaacgctcccgcagctg

SEQ ID NO: 3757515 - DNA, 25 bp, Homo sapien
cgtccccggaaacgctcccgcagct

SEQ ID NO: 3757516 - DNA, 25 bp, Homo sapien
ccccggaaacgctcccgcagctgac

SEQ ID NO: 3757517 - DNA, 25 bp, Homo sapien
acagcgcgcgcggggtcaatctcat

SEQ ID NO: 3757518 - DNA, 25 bp, Homo sapien
gaaccagcgcgccacgtcgcgaccg

SEQ ID NO: 3757519 - DNA, 25 bp, Homo sapien
ggcggcgctgcacagcgcgcgcggg

SEQ ID NO: 3757520 - DNA, 25 bp, Homo sapien
cgcgaccgcacagggggaagttctc

SEQ ID NO: 3757521 - DNA, 25 bp, Homo sapien
ggagaagcaggcgacggccgaaacc

SEQ ID NO: 3757522 - DNA, 25 bp, Homo sapien
agcccagaacgaccgggagaagcag

SEQ ID NO: 3757523 - DNA, 25 bp, Homo sapien
cagaaaagtctatcttgtcaagaac

SEQ ID NO: 3757524 - DNA, 25 bp, Homo sapien
tgtcaagaacatgtggaaacggagg

SEQ ID NO: 3757525 - DNA, 25 bp, Homo sapien
ggagccgacgcaggagtggccatca

SEQ ID NO: 3757526 - DNA, 25 bp, Homo sapien
gtggccatcacaacacctagacggg

SEQ ID NO: 3757527 - DNA, 25 bp, Homo sapien
ccatcacaacacctagacgggctgg

SEQ ID NO: 3757528 - DNA, 25 bp, Homo sapien
ccagtacacgcggagccgacgcagg

SEQ ID NO: 3757529 - DNA, 25 bp, Homo sapien
gatacagtccaccagcttcaggctg

SEQ ID NO: 3757530 - DNA, 25 bp, Homo sapien
ctcgatgatacagtccaccagcttc

SEQ ID NO: 3757531 - DNA, 25 bp, Homo sapien
cttcaggctgctctgcatcttcttc

SEQ ID NO: 3757532 - DNA, 25 bp, Homo sapien
gatgatacagtccaccagcttcagg

SEQ ID NO: 3757533 - DNA, 25 bp, Homo sapien
ttcaggcagaggggcctcccctgct

SEQ ID NO: 3757534 - DNA, 25 bp, Homo sapien
tcaggcagaggggcctcccctgctc

SEQ ID NO: 3757535 - DNA, 25 bp, Homo sapien
tgtaagatccgccaagtccatcttg

SEQ ID NO: 3757536 - DNA, 25 bp, Homo sapien
taagatccgccaagtccatcttgtt

SEQ ID NO: 3757537 - DNA, 25 bp, Homo sapien
gctctgtaagatccgccaagtccat

SEQ ID NO: 3757538 - DNA, 25 bp, Homo sapien
ctgctctgtaagatccgccaagtcc

SEQ ID NO: 3757539 - DNA, 25 bp, Homo sapien
ctgaaggcgtctgagagaaaggcct

SEQ ID NO: 3757540 - DNA, 25 bp, Homo sapien
acactgctgaaggcgtctgagagaa

SEQ ID NO: 3757541 - DNA, 25 bp, Homo sapien
aggcgtctgagagaaaggcctttac

SEQ ID NO: 3757542 - DNA, 25 bp, Homo sapien
actgctgaaggcgtctgagagaaag

SEQ ID NO: 3757543 - DNA, 25 bp, Homo sapien
ccacttcccacaggagacgtgcact

SEQ ID NO: 3757544 - DNA, 25 bp, Homo sapien
catatgagaaacgatgctggcacgc

SEQ ID NO: 3757545 - DNA, 25 bp, Homo sapien
ggtgtccaggtcacgaaccacacat

SEQ ID NO: 3757546 - DNA, 25 bp, Homo sapien
ggtcacgaaccacacattagatggg

SEQ ID NO: 3757547 - DNA, 25 bp, Homo sapien
tctccttctaagtgttgcataattt

SEQ ID NO: 3757548 - DNA, 25 bp, Homo sapien
tcctttacacagttggtaaaaatga

SEQ ID NO: 3757549 - DNA, 25 bp, Homo sapien
ttctccttctaagtgttgcataatt

SEQ ID NO: 3757550 - DNA, 25 bp, Homo sapien
tacacagttggtaaaaatgacattt

SEQ ID NO: 3757551 - DNA, 25 bp, Homo sapien
tatgcccgtcccctcccatcaaaaa

SEQ ID NO: 3757552 - DNA, 25 bp, Homo sapien
ggtcacagatgtcagactgagctct

SEQ ID NO: 3757553 - DNA, 25 bp, Homo sapien
caagtatccggtgttgggaaactgg

SEQ ID NO: 3757554 - DNA, 25 bp, Homo sapien
aaactggagttctgtccaggtcaca

SEQ ID NO: 3757555 - DNA, 25 bp, Homo sapien
cggtggcttctcccaatcagttcag

SEQ ID NO: 3757556 - DNA, 25 bp, Homo sapien
agcggtggcttctcccaatcagttc

SEQ ID NO: 3757557 - DNA, 25 bp, Homo sapien
gcggtggcttctcccaatcagttca

SEQ ID NO: 3757558 - DNA, 25 bp, Homo sapien
tgaccatgatacagtactccaggtt

SEQ ID NO: 3757559 - DNA, 25 bp, Homo sapien
ccaatgaccatgatacagtactcca

SEQ ID NO: 3757560 - DNA, 25 bp, Homo sapien
gggaccccaatgaccatgatacagt

SEQ ID NO: 3757561 - DNA, 25 bp, Homo sapien
tgaggtgctgcctccggagggagtt

SEQ ID NO: 3757562 - DNA, 25 bp, Homo sapien
tttcctgaggtgatcagccgcacgc

SEQ ID NO: 3757563 - DNA, 25 bp, Homo sapien
ggtgatcagccgcacgcgccagtac

SEQ ID NO: 3757564 - DNA, 25 bp, Homo sapien
ctgaggtgatcagccgcacgcgcca

SEQ ID NO: 3757565 - DNA, 25 bp, Homo sapien
tcctgaggtgatcagccgcacgcgc

SEQ ID NO: 3757566 - DNA, 25 bp, Homo sapien
tgaacgagacaagatgtgctctggg

SEQ ID NO: 3757567 - DNA, 25 bp, Homo sapien
tgtgaactggactgaacgagacaag

SEQ ID NO: 3757568 - DNA, 25 bp, Homo sapien
agcacatcagccacacgcgccagta

SEQ ID NO: 3757569 - DNA, 25 bp, Homo sapien
aagactggcagtgctcctcgggcac

SEQ ID NO: 3757570 - DNA, 25 bp, Homo sapien
accgtttcagcaagaatggtctcaa

SEQ ID NO: 3757571 - DNA, 25 bp, Homo sapien
ccgtttcagcaagaatggtctcaat

SEQ ID NO: 3757572 - DNA, 25 bp, Homo sapien
cgtttcagcaagaatggtctcaatc

SEQ ID NO: 3757573 - DNA, 25 bp, Homo sapien
ggacaacacagacgaaccttgagga

SEQ ID NO: 3757574 - DNA, 25 bp, Homo sapien
cactgtcagactgcggaggtcagac

SEQ ID NO: 3757575 - DNA, 25 bp, Homo sapien
ggtgctggctgcataaccctataaa

SEQ ID NO: 3757576 - DNA, 25 bp, Homo sapien
cccagctcagggtgtgtcccaagga

SEQ ID NO: 3757577 - DNA, 25 bp, Homo sapien
agattcttcaacaaatgcaccagaa

SEQ ID NO: 3757578 - DNA, 25 bp, Homo sapien
aacaaatgcaccagaacctaactcc

SEQ ID NO: 3757579 - DNA, 25 bp, Homo sapien
ttcaacaaatgcaccagaacctaac

SEQ ID NO: 3757580 - DNA, 25 bp, Homo sapien
ttcttcaacaaatgcaccagaacct

SEQ ID NO: 3757581 - DNA, 25 bp, Homo sapien
caagtagggagacgtatgtaacaaa

SEQ ID NO: 3757582 - DNA, 25 bp, Homo sapien
aatgtatactaaacacagaagctgc

SEQ ID NO: 3757583 - DNA, 25 bp, Homo sapien
gaacaagtagggagacgtatgtaac

SEQ ID NO: 3757584 - DNA, 25 bp, Homo sapien
caaatgtatactaaacacagaagct

SEQ ID NO: 3757585 - DNA, 25 bp, Homo sapien
tcacagctctggtgatcccaggctc

SEQ ID NO: 3757586 - DNA, 25 bp, Homo sapien
agctctggtgatcccaggctcgcca

SEQ ID NO: 3757587 - DNA, 25 bp, Homo sapien
ctggtgatcccaggctcgccaccca

SEQ ID NO: 3757588 - DNA, 25 bp, Homo sapien
acagctctggtgatcccaggctcgc

SEQ ID NO: 3757589 - DNA, 25 bp, Homo sapien
cctgcagagctcttgacagagtgct

SEQ ID NO: 3757590 - DNA, 25 bp, Homo sapien
acagcgtgccttccccaaaggtttg

SEQ ID NO: 3757591 - DNA, 25 bp, Homo sapien
aagccacacagaggtcggcaggtgc

SEQ ID NO: 3757592 - DNA, 25 bp, Homo sapien
ggtttggcgcaaagactatgacgac

SEQ ID NO: 3757593 - DNA, 25 bp, Homo sapien
tgaccactgcatggccctggacagt

SEQ ID NO: 3757594 - DNA, 25 bp, Homo sapien
gcgtcaggtcccaacagcttgtctt

SEQ ID NO: 3757595 - DNA, 25 bp, Homo sapien
ctggcacccaatgctccgaggaagg

SEQ ID NO: 3757596 - DNA, 25 bp, Homo sapien
tgtgtgggcacagagggcatgatca

SEQ ID NO: 3757597 - DNA, 25 bp, Homo sapien
gagccagcacgccaggagtgtccaa

SEQ ID NO: 3757598 - DNA, 25 bp, Homo sapien
actttcaatccgaggagccagcacg

SEQ ID NO: 3757599 - DNA, 25 bp, Homo sapien
agcacgccaggagtgtccaacagga

SEQ ID NO: 3757600 - DNA, 25 bp, Homo sapien
tcaggcctgtctccacactttcaat

SEQ ID NO: 3757601 - DNA, 25 bp, Homo sapien
tctctgccctggtccgtcaaatggg

SEQ ID NO: 3757602 - DNA, 25 bp, Homo sapien
caaagacactaaccaagaggacggc

SEQ ID NO: 3757603 - DNA, 25 bp, Homo sapien
caaagacaccgtgccgtgaggaaga

SEQ ID NO: 3757604 - DNA, 25 bp, Homo sapien
tgaggaagaggccagccactgacaa

SEQ ID NO: 3757605 - DNA, 25 bp, Homo sapien
tgtggaagcagcagccgaggtgagc

SEQ ID NO: 3757606 - DNA, 25 bp, Homo sapien
ctgtggaagcagcagccgaggtgag

SEQ ID NO: 3757607 - DNA, 25 bp, Homo sapien
gtggaagcagcagccgaggtgagca

SEQ ID NO: 3757608 - DNA, 25 bp, Homo sapien
ctggtgtttgttgagggtgtacagc

SEQ ID NO: 3757609 - DNA, 25 bp, Homo sapien
cccgaccaggtggtccagcaccgtt

SEQ ID NO: 3757610 - DNA, 25 bp, Homo sapien
ggtgtacagcaggtagtcagccatg

SEQ ID NO: 3757611 - DNA, 25 bp, Homo sapien
aggtagtcagccatggtctcctccc

SEQ ID NO: 3757612 - DNA, 25 bp, Homo sapien
aaatgaggtgactaggaggaggggc

SEQ ID NO: 3757613 - DNA, 25 bp, Homo sapien
atgaggtgactaggaggaggggccc

SEQ ID NO: 3757614 - DNA, 25 bp, Homo sapien
ttaaatgaggtgactaggaggaggg

SEQ ID NO: 3757615 - DNA, 25 bp, Homo sapien
aatgaggtgactaggaggaggggcc

SEQ ID NO: 3757616 - DNA, 25 bp, Homo sapien
tcagcctgccgagtgcctccaattg

SEQ ID NO: 3757617 - DNA, 25 bp, Homo sapien
gcctgccgagtgcctccaattgcag

SEQ ID NO: 3757618 - DNA, 25 bp, Homo sapien
agtgcctccaattgcaggcgcgcgc

SEQ ID NO: 3757619 - DNA, 25 bp, Homo sapien
gccgagtgcctccaattgcaggcgc

SEQ ID NO: 3757620 - DNA, 25 bp, Homo sapien
gtgatacctgtgtgcctgaggccca

SEQ ID NO: 3757621 - DNA, 25 bp, Homo sapien
cacgcaggtgaaaaagggagaccaa

SEQ ID NO: 3757622 - DNA, 25 bp, Homo sapien
ggtccatcgtaatcaagttgctcaa

SEQ ID NO: 3757623 - DNA, 25 bp, Homo sapien
tgagtgaacccgaagacacagcaac

SEQ ID NO: 3757624 - DNA, 25 bp, Homo sapien
gaacatcacacacctgggactgttg

SEQ ID NO: 3757625 - DNA, 25 bp, Homo sapien
aaatgacgagttaatgggtgcagta

SEQ ID NO: 3757626 - DNA, 25 bp, Homo sapien
ctaaatgacgagttaatgggtgcag

SEQ ID NO: 3757627 - DNA, 25 bp, Homo sapien
tcacacacctgggactgttgtgggg

SEQ ID NO: 3757628 - DNA, 25 bp, Homo sapien
aatctaacttctcggaggcaccaag

SEQ ID NO: 3757629 - DNA, 25 bp, Homo sapien
tgaatcagcagcctcaagggtgccc

SEQ ID NO: 3757630 - DNA, 25 bp, Homo sapien
aggttctaaatctaacttctcggag

SEQ ID NO: 3757631 - DNA, 25 bp, Homo sapien
tcagcagcctcaagggtgccctggt

SEQ ID NO: 3757632 - DNA, 25 bp, Homo sapien
gcaaagcaagacatgagctcagagc

SEQ ID NO: 3757633 - DNA, 25 bp, Homo sapien
caaagcaagacatgagctcagagcc

SEQ ID NO: 3757634 - DNA, 25 bp, Homo sapien
aaagcaagacatgagctcagagccc

SEQ ID NO: 3757635 - DNA, 25 bp, Homo sapien
aggctggtgccctcggacctggtca

SEQ ID NO: 3757636 - DNA, 25 bp, Homo sapien
tctcgtggctcccacgagggcaggc

SEQ ID NO: 3757637 - DNA, 25 bp, Homo sapien
cccacgagggcaggctcaaccttga

SEQ ID NO: 3757638 - DNA, 25 bp, Homo sapien
cagcatgagccggtaacagaggact

SEQ ID NO: 3757639 - DNA, 25 bp, Homo sapien
cgtcacccagtgattgtaacgggca

SEQ ID NO: 3757640 - DNA, 25 bp, Homo sapien
aacgggcactctgactcctcacagt

SEQ ID NO: 3757641 - DNA, 25 bp, Homo sapien
cgctgctaagcgtcacccagtgatt

SEQ ID NO: 3757642 - DNA, 25 bp, Homo sapien
gattgtaacgggcactctgactcct

SEQ ID NO: 3757643 - DNA, 25 bp, Homo sapien
taaggatggcactcggtaacttcca

SEQ ID NO: 3757644 - DNA, 25 bp, Homo sapien
tctccacccggctgggtgtttgagc

SEQ ID NO: 3757645 - DNA, 25 bp, Homo sapien
gcactcggtaacttccaggcagcca

SEQ ID NO: 3757646 - DNA, 25 bp, Homo sapien
tctgtttgctgctaaggatggcact

SEQ ID NO: 3757647 - DNA, 25 bp, Homo sapien
gcttcatccactctatccggggtag

SEQ ID NO: 3757648 - DNA, 25 bp, Homo sapien
ggtcctggaaactaaaagaggagca

SEQ ID NO: 3757649 - DNA, 25 bp, Homo sapien
agcacagcagaccatctgcaaacat

SEQ ID NO: 3757650 - DNA, 25 bp, Homo sapien
actctatccggggtaggacaggcag

SEQ ID NO: 3757651 - DNA, 25 bp, Homo sapien
ccttgccgcagcgggaggagtaaca

SEQ ID NO: 3757652 - DNA, 25 bp, Homo sapien
accggagcccttgccgcagcgggag

SEQ ID NO: 3757653 - DNA, 25 bp, Homo sapien
gagcccttgccgcagcgggaggagt

SEQ ID NO: 3757654 - DNA, 25 bp, Homo sapien
tgccgcagcgggaggagtaacagct

SEQ ID NO: 3757655 - DNA, 25 bp, Homo sapien
tgacaccgcgcggccagccaggccg

SEQ ID NO: 3757656 - DNA, 25 bp, Homo sapien
ccagcactgacaccgcgcggccagc

SEQ ID NO: 3757657 - DNA, 25 bp, Homo sapien
gcactgacaccgcgcggccagccag

SEQ ID NO: 3757658 - DNA, 25 bp, Homo sapien
cccagcactgacaccgcgcggccag

SEQ ID NO: 3757659 - DNA, 25 bp, Homo sapien
cttcagcacgcgctctacgttgtca

SEQ ID NO: 3757660 - DNA, 25 bp, Homo sapien
acactcttcagcacgcgctctacgt

SEQ ID NO: 3757661 - DNA, 25 bp, Homo sapien
cgcgctctacgttgtcacaggcact

SEQ ID NO: 3757662 - DNA, 25 bp, Homo sapien
agcacgcgctctacgttgtcacagg

SEQ ID NO: 3757663 - DNA, 25 bp, Homo sapien
acgggctgccgcaggatagttaggc

SEQ ID NO: 3757664 - DNA, 25 bp, Homo sapien
ggcaaagtctcagccggggggtggc

SEQ ID NO: 3757665 - DNA, 25 bp, Homo sapien
tcagggcaaagtctcagccgggggg

SEQ ID NO: 3757666 - DNA, 25 bp, Homo sapien
gcaaagtctcagccggggggtggcc

SEQ ID NO: 3757667 - DNA, 25 bp, Homo sapien
agggcaaagtctcagccggggggtg

SEQ ID NO: 3757668 - DNA, 25 bp, Homo sapien
tgtaggactgcaagacactggaccg

SEQ ID NO: 3757669 - DNA, 25 bp, Homo sapien
tgagagcagctttaacacacaggcc

SEQ ID NO: 3757670 - DNA, 25 bp, Homo sapien
cagcaaagccatgtgcagggcgtcc

SEQ ID NO: 3757671 - DNA, 25 bp, Homo sapien
cactacccgtgagctagaaggtgct

SEQ ID NO: 3757672 - DNA, 25 bp, Homo sapien
acggtgcacgcatttccctgaaggc

SEQ ID NO: 3757673 - DNA, 25 bp, Homo sapien
agcaactgccaatcccgctgaagag

SEQ ID NO: 3757674 - DNA, 25 bp, Homo sapien
tcagtggagccaggagctaactcag

SEQ ID NO: 3757675 - DNA, 25 bp, Homo sapien
aaggacttgcctccagcactggaca

SEQ ID NO: 3757676 - DNA, 25 bp, Homo sapien
taaccacctgcccagaagagtggat

SEQ ID NO: 3757677 - DNA, 25 bp, Homo sapien
actccaggatgttagggtcccctca

SEQ ID NO: 3757678 - DNA, 25 bp, Homo sapien
aagagtggatctcacagcccaggaa

SEQ ID NO: 3757679 - DNA, 25 bp, Homo sapien
actgagcccctgaggaatctgaccc

SEQ ID NO: 3757680 - DNA, 25 bp, Homo sapien
acttcgggcgctggacccacgcgcg

SEQ ID NO: 3757681 - DNA, 25 bp, Homo sapien
tacagctaccgggcgtggacttcgg

SEQ ID NO: 3757682 - DNA, 25 bp, Homo sapien
aggcaacgggacaggccccggcatc

SEQ ID NO: 3757683 - DNA, 25 bp, Homo sapien
gcgcggcccgcgtctctgtctcgtg

SEQ ID NO: 3757684 - DNA, 25 bp, Homo sapien
ggtttagccccacgaagatgaactg

SEQ ID NO: 3757685 - DNA, 25 bp, Homo sapien
agatgaactgggcacccgcaacgtg

SEQ ID NO: 3757686 - DNA, 25 bp, Homo sapien
gtgctgggctctgctactggcggcc

SEQ ID NO: 3757687 - DNA, 25 bp, Homo sapien
ctgggcacccgcaacgtgctgggct

SEQ ID NO: 3757688 - DNA, 25 bp, Homo sapien
tggggatcgcaagggtcgaccccat

SEQ ID NO: 3757689 - DNA, 25 bp, Homo sapien
gcctctggggatcgcaagggtcgac

SEQ ID NO: 3757690 - DNA, 25 bp, Homo sapien
ctctggggatcgcaagggtcgaccc

SEQ ID NO: 3757691 - DNA, 25 bp, Homo sapien
ggatcgcaagggtcgaccccatcct

SEQ ID NO: 3757692 - DNA, 25 bp, Homo sapien
cgccctgggctgagaagacgccgtc

SEQ ID NO: 3757693 - DNA, 25 bp, Homo sapien
aagacgccgtcggcccaggtggcat

SEQ ID NO: 3757694 - DNA, 25 bp, Homo sapien
ctgagaagacgccgtcggcccaggt

SEQ ID NO: 3757695 - DNA, 25 bp, Homo sapien
ccgccctgggctgagaagacgccgt

SEQ ID NO: 3757696 - DNA, 25 bp, Homo sapien
ttcatcacatatttgcagggcaccc

SEQ ID NO: 3757697 - DNA, 25 bp, Homo sapien
tcacttattcatcacatatttgcag

SEQ ID NO: 3757698 - DNA, 25 bp, Homo sapien
tattcatcacatatttgcagggcac

SEQ ID NO: 3757699 - DNA, 25 bp, Homo sapien
cttattcatcacatatttgcagggc

SEQ ID NO: 3757700 - DNA, 25 bp, Homo sapien
gggtgacaggaagacgtgcttccat

SEQ ID NO: 3757701 - DNA, 25 bp, Homo sapien
gaaaggcagtgtttcactccggaac

SEQ ID NO: 3757702 - DNA, 25 bp, Homo sapien
ccctgtgaggctccacgcttggctt

SEQ ID NO: 3757703 - DNA, 25 bp, Homo sapien
cctttaaaatgaagccgatgggtga

SEQ ID NO: 3757704 - DNA, 25 bp, Homo sapien
tccatggtacaatcaggtctcaggg

SEQ ID NO: 3757705 - DNA, 25 bp, Homo sapien
tgccgctggactcattgtgctgctg

SEQ ID NO: 3757706 - DNA, 25 bp, Homo sapien
taaacagaagcggtgaaagtaggca

SEQ ID NO: 3757707 - DNA, 25 bp, Homo sapien
gatttgctttctgatgtgccgctgg

SEQ ID NO: 3757708 - DNA, 25 bp, Homo sapien
ccacccccgctagggctctcttgct

SEQ ID NO: 3757709 - DNA, 25 bp, Homo sapien
tcctttgtgtccacggctctcaact

SEQ ID NO: 3757710 - DNA, 25 bp, Homo sapien
tgaggctccgcagccccgatgtcct

SEQ ID NO: 3757711 - DNA, 25 bp, Homo sapien
tctgtgatatcccacccccgctagg

SEQ ID NO: 3757712 - DNA, 25 bp, Homo sapien
gaggcagagtgcgaggtaggggtct

SEQ ID NO: 3757713 - DNA, 25 bp, Homo sapien
cagaggcagagtgcgaggtaggggt

SEQ ID NO: 3757714 - DNA, 25 bp, Homo sapien
aggggtggtagaaggctgggtcaag

SEQ ID NO: 3757715 - DNA, 25 bp, Homo sapien
caggaattccacttgtccacgggga

SEQ ID NO: 3757716 - DNA, 25 bp, Homo sapien
tgggtcaagggtcacccaggaattc

SEQ ID NO: 3757717 - DNA, 25 bp, Homo sapien
ccccgccatgggtaggggtctctga

SEQ ID NO: 3757718 - DNA, 25 bp, Homo sapien
agggcggggcccatgcatctcctga

SEQ ID NO: 3757719 - DNA, 25 bp, Homo sapien
ggtcctcagcgctgagccttcgtcg

SEQ ID NO: 3757720 - DNA, 25 bp, Homo sapien
ggaggctgcgcggatgcacccaggg

SEQ ID NO: 3757721 - DNA, 25 bp, Homo sapien
gggcccgccgtgaccttggtctcca

SEQ ID NO: 3757722 - DNA, 25 bp, Homo sapien
cgccgtgaccttggtctccacgcga

SEQ ID NO: 3757723 - DNA, 25 bp, Homo sapien
gtgaccttggtctccacgcgaagac

SEQ ID NO: 3757724 - DNA, 25 bp, Homo sapien
cgtgaccttggtctccacgcgaaga

SEQ ID NO: 3757725 - DNA, 25 bp, Homo sapien
tggcagtcccatcggagtgaaaatt

SEQ ID NO: 3757726 - DNA, 25 bp, Homo sapien
tcccatcggagtgaaaatttgcaat

SEQ ID NO: 3757727 - DNA, 25 bp, Homo sapien
cgctctggcagtcccatcggagtga

SEQ ID NO: 3757728 - DNA, 25 bp, Homo sapien
aagaaacaccagcggaggcaggtag

SEQ ID NO: 3757729 - DNA, 25 bp, Homo sapien
gctaccacaccaggccaaaaatatc

SEQ ID NO: 3757730 - DNA, 25 bp, Homo sapien
cacaccaggccaaaaatatctttca

SEQ ID NO: 3757731 - DNA, 25 bp, Homo sapien
gagactcgccctgtcaccaacgctg

SEQ ID NO: 3757732 - DNA, 25 bp, Homo sapien
tggagactcgccctgtcaccaacgc

SEQ ID NO: 3757733 - DNA, 25 bp, Homo sapien
ccagggccgtccaagcccagggtga

SEQ ID NO: 3757734 - DNA, 25 bp, Homo sapien
cagggccgtccaagcccagggtgac

SEQ ID NO: 3757735 - DNA, 25 bp, Homo sapien
caggctgtccgtgggcacctctgtg

SEQ ID NO: 3757736 - DNA, 25 bp, Homo sapien
tccgtgggcacctctgtgtaaaggg

SEQ ID NO: 3757737 - DNA, 25 bp, Homo sapien
tgggctgtgtgagagcatctctgta

SEQ ID NO: 3757738 - DNA, 25 bp, Homo sapien
tgtaaagggcgtgaagctctcctgc

SEQ ID NO: 3757739 - DNA, 25 bp, Homo sapien
gaagcaggcggccatgtggagggac

SEQ ID NO: 3757740 - DNA, 25 bp, Homo sapien
gtttcacatttgtccccgtcatggc

SEQ ID NO: 3757741 - DNA, 25 bp, Homo sapien
atttgtccccgtcatggccttgtct

SEQ ID NO: 3757742 - DNA, 25 bp, Homo sapien
acatttgtccccgtcatggccttgt

SEQ ID NO: 3757743 - DNA, 25 bp, Homo sapien
ggtctgcccgatttcagctacgagg

SEQ ID NO: 3757744 - DNA, 25 bp, Homo sapien
gaaagcaaagtcacatcagtcccct

SEQ ID NO: 3757745 - DNA, 25 bp, Homo sapien
tgttctgtccaagcagtggccctga

SEQ ID NO: 3757746 - DNA, 25 bp, Homo sapien
cagtaaggaccctcagacatggctg

SEQ ID NO: 3757747 - DNA, 25 bp, Homo sapien
acagcggagggcggagaaggctgtg

SEQ ID NO: 3757748 - DNA, 25 bp, Homo sapien
cagcggagggcggagaaggctgtgg

SEQ ID NO: 3757749 - DNA, 25 bp, Homo sapien
ggaaccacggatcagttagcgacat

SEQ ID NO: 3757750 - DNA, 25 bp, Homo sapien
ggagacgggacttgagaactgactt

SEQ ID NO: 3757751 - DNA, 25 bp, Homo sapien
gctgtgaagccatgcagtcctggtc

SEQ ID NO: 3757752 - DNA, 25 bp, Homo sapien
gcacatcactgacgccaaagctggt

SEQ ID NO: 3757753 - DNA, 25 bp, Homo sapien
ggcttcagcaagctctcgctgctta

SEQ ID NO: 3757754 - DNA, 25 bp, Homo sapien
tgggcttcagcaagctctcgctgct

SEQ ID NO: 3757755 - DNA, 25 bp, Homo sapien
gggcttcagcaagctctcgctgctt

SEQ ID NO: 3757756 - DNA, 25 bp, Homo sapien
ctgggcttcagcaagctctcgctgc

SEQ ID NO: 3757757 - DNA, 25 bp, Homo sapien
agaaccaaccagaggcgcaggagga

SEQ ID NO: 3757758 - DNA, 25 bp, Homo sapien
cagacaggtccagttagaggggcca

SEQ ID NO: 3757759 - DNA, 25 bp, Homo sapien
cagacagacaggtccagttagaggg

SEQ ID NO: 3757760 - DNA, 25 bp, Homo sapien
cagaaccaaccagaggcgcaggagg

SEQ ID NO: 3757761 - DNA, 25 bp, Homo sapien
tctggcaccatgagccaaggctgca

SEQ ID NO: 3757762 - DNA, 25 bp, Homo sapien
ctcccagagggaggactcgttgccc

SEQ ID NO: 3757763 - DNA, 25 bp, Homo sapien
caggacacgttgtgaagccagggct

SEQ ID NO: 3757764 - DNA, 25 bp, Homo sapien
tcgcacgtgctgtgtctgtacgcca

SEQ ID NO: 3757765 - DNA, 25 bp, Homo sapien
tgcaggacacagaggcggtccaccc

SEQ ID NO: 3757766 - DNA, 25 bp, Homo sapien
tgcagctgcggatggtgggctcggt

SEQ ID NO: 3757767 - DNA, 25 bp, Homo sapien
gcaggccaggtacttcctgacgacg

SEQ ID NO: 3757768 - DNA, 25 bp, Homo sapien
accagccggagctcccggaaagtgc

SEQ ID NO: 3757769 - DNA, 25 bp, Homo sapien
cctctgcgtccagccgcaggtcgca

SEQ ID NO: 3757770 - DNA, 25 bp, Homo sapien
cagccgctgcggaagttgttgtcca

SEQ ID NO: 3757771 - DNA, 25 bp, Homo sapien
gccgctgcggaagttgttgtccagt

SEQ ID NO: 3757772 - DNA, 25 bp, Homo sapien
tgagcagaccacctctgcgtccagc

SEQ ID NO: 3757773 - DNA, 25 bp, Homo sapien
tgggaacatcaggtggcagcctcac

SEQ ID NO: 3757774 - DNA, 25 bp, Homo sapien
cctagatggcctgcgggttctgagc

SEQ ID NO: 3757775 - DNA, 25 bp, Homo sapien
tgaggcagctcagacttgcagcggc

SEQ ID NO: 3757776 - DNA, 25 bp, Homo sapien
tcctcatatgcacaacaaggccagg

SEQ ID NO: 3757777 - DNA, 25 bp, Homo sapien
gaaccagcgtgagagctgaggccct

SEQ ID NO: 3757778 - DNA, 25 bp, Homo sapien
tcgttgcccgcacagcggaaggcct

SEQ ID NO: 3757779 - DNA, 25 bp, Homo sapien
gcccaccagtcgggcctcggtgtgt

SEQ ID NO: 3757780 - DNA, 25 bp, Homo sapien
ccagggccgcatcacagacggtgcc

SEQ ID NO: 3757781 - DNA, 25 bp, Homo sapien
tcccggcacaccacgtgggccgtgg

SEQ ID NO: 3757782 - DNA, 25 bp, Homo sapien
cggccgacccagaacatggctgtct

SEQ ID NO: 3757783 - DNA, 25 bp, Homo sapien
gccagaggcacctttagggcacgaa

SEQ ID NO: 3757784 - DNA, 25 bp, Homo sapien
gcacgaagggatttgacagagaaca

SEQ ID NO: 3757785 - DNA, 25 bp, Homo sapien
cacagctctccagaagaatttgatc

SEQ ID NO: 3757786 - DNA, 25 bp, Homo sapien
agatggcagcgtccccgtccccaaa

SEQ ID NO: 3757787 - DNA, 25 bp, Homo sapien
ggccaccgcgttgccacagttgagc

SEQ ID NO: 3757788 - DNA, 25 bp, Homo sapien
ctgctgccgttgaccatcctgaact

SEQ ID NO: 3757789 - DNA, 25 bp, Homo sapien
tggcatctgctatgtcccagtgggt

SEQ ID NO: 3757790 - DNA, 25 bp, Homo sapien
cacaagtaggactctgtcccctcac

SEQ ID NO: 3757791 - DNA, 25 bp, Homo sapien
ccacaagtaggactctgtcccctca

SEQ ID NO: 3757792 - DNA, 25 bp, Homo sapien
gcagaccgcggaggctgtgtttccc

SEQ ID NO: 3757793 - DNA, 25 bp, Homo sapien
gagcagaccgcggaggctgtgtttc

SEQ ID NO: 3757794 - DNA, 25 bp, Homo sapien
gaggctgtgtttcccggggcacagg

SEQ ID NO: 3757795 - DNA, 25 bp, Homo sapien
ctgagcagaccgcggaggctgtgtt

SEQ ID NO: 3757796 - DNA, 25 bp, Homo sapien
cctcctggtccaccgtcctggctgc

SEQ ID NO: 3757797 - DNA, 25 bp, Homo sapien
ctcctggtccaccgtcctggctgca

SEQ ID NO: 3757798 - DNA, 25 bp, Homo sapien
tcaggcgggtttcggtgcccagaca

SEQ ID NO: 3757799 - DNA, 25 bp, Homo sapien
tgtccttccctcagtcgcagggcgt

SEQ ID NO: 3757800 - DNA, 25 bp, Homo sapien
tcgcggacacgttgcactgagtcag

SEQ ID NO: 3757801 - DNA, 25 bp, Homo sapien
aggtcccaggcatcgtccaggacgc

SEQ ID NO: 3757802 - DNA, 25 bp, Homo sapien
ccgggatcccgtggcgacgggccat

SEQ ID NO: 3757803 - DNA, 25 bp, Homo sapien
catgggggacgcggttccgacctca

SEQ ID NO: 3757804 - DNA, 25 bp, Homo sapien
ggatcccgtggcgacgggccatggg

SEQ ID NO: 3757805 - DNA, 25 bp, Homo sapien
tggagagacagagtcagggcgcccg

SEQ ID NO: 3757806 - DNA, 25 bp, Homo sapien
cacacggtgccccacgcgcccccgt

SEQ ID NO: 3757807 - DNA, 25 bp, Homo sapien
cggtgccccacgcgcccccgtgcag

SEQ ID NO: 3757808 - DNA, 25 bp, Homo sapien
cacggtgccccacgcgcccccgtgc

SEQ ID NO: 3757809 - DNA, 25 bp, Homo sapien
ctgcagaccacgtgcgcgtcccgca

SEQ ID NO: 3757810 - DNA, 25 bp, Homo sapien
ggcactgccacagcgcagactcgtg

SEQ ID NO: 3757811 - DNA, 25 bp, Homo sapien
gaagacgccggcgtcctccttgtgc

SEQ ID NO: 3757812 - DNA, 25 bp, Homo sapien
agctcgtccagccagatgcgccctg

SEQ ID NO: 3757813 - DNA, 25 bp, Homo sapien
tgccccggctccgaagtgtgcggcc

SEQ ID NO: 3757814 - DNA, 25 bp, Homo sapien
tcattccatacccaacggccgctca

SEQ ID NO: 3757815 - DNA, 25 bp, Homo sapien
cattccatacccaacggccgctcac

SEQ ID NO: 3757816 - DNA, 25 bp, Homo sapien
tagaaacagtatagagcttcttcag

SEQ ID NO: 3757817 - DNA, 25 bp, Homo sapien
aatttaaactagagctactacacaa

SEQ ID NO: 3757818 - DNA, 25 bp, Homo sapien
gaaatgaaatcagcccagcagaaac

SEQ ID NO: 3757819 - DNA, 25 bp, Homo sapien
gcagaaacatctgcacgcccaggtt

SEQ ID NO: 3757820 - DNA, 25 bp, Homo sapien
cacagtcaggccagggagtgccctg

SEQ ID NO: 3757821 - DNA, 25 bp, Homo sapien
gcacagtcaggccagggagtgccct

SEQ ID NO: 3757822 - DNA, 25 bp, Homo sapien
caagcacagtcaggccagggagtgc

SEQ ID NO: 3757823 - DNA, 25 bp, Homo sapien
ctgcaaggcaagcacagtcaggcca

SEQ ID NO: 3757824 - DNA, 25 bp, Homo sapien
ccaggtcccattgtagaacacgtcc

SEQ ID NO: 3757825 - DNA, 25 bp, Homo sapien
ggtcccattgtagaacacgtccagc

SEQ ID NO: 3757826 - DNA, 25 bp, Homo sapien
tcccattgtagaacacgtccagcca

SEQ ID NO: 3757827 - DNA, 25 bp, Homo sapien
gcaggtcccacctcgcagcctcaga

SEQ ID NO: 3757828 - DNA, 25 bp, Homo sapien
tcagggcattgctgcacatggcgcc

SEQ ID NO: 3757829 - DNA, 25 bp, Homo sapien
cagctgcttgcagatgatggacaag

SEQ ID NO: 3757830 - DNA, 25 bp, Homo sapien
gatgatggacaaggagaggtccttc

SEQ ID NO: 3757831 - DNA, 25 bp, Homo sapien
ccttcagggcattgctgcacatggc

SEQ ID NO: 3757832 - DNA, 25 bp, Homo sapien
ttctccagccagccccactccccac

SEQ ID NO: 3757833 - DNA, 25 bp, Homo sapien
tgttctccagccagccccactcccc

SEQ ID NO: 3757834 - DNA, 25 bp, Homo sapien
ctgttctccagccagccccactccc

SEQ ID NO: 3757835 - DNA, 25 bp, Homo sapien
ctccagccagccccactccccacac

SEQ ID NO: 3757836 - DNA, 25 bp, Homo sapien
ccaggcggtcccggtgcccgcagag

SEQ ID NO: 3757837 - DNA, 25 bp, Homo sapien
gcggtcccggtgcccgcagagggga

SEQ ID NO: 3757838 - DNA, 25 bp, Homo sapien
aggcggtcccggtgcccgcagaggg

SEQ ID NO: 3757839 - DNA, 25 bp, Homo sapien
caggcggtcccggtgcccgcagagg

SEQ ID NO: 3757840 - DNA, 25 bp, Homo sapien
agcctgcggcactcgatgttgtcca

SEQ ID NO: 3757841 - DNA, 25 bp, Homo sapien
agttgggcagcctgcggcactcgat

SEQ ID NO: 3757842 - DNA, 25 bp, Homo sapien
gcaagagtgcgggtgccatgggtgg

SEQ ID NO: 3757843 - DNA, 25 bp, Homo sapien
ctgctctcgaaggtcgcaagagtgc

SEQ ID NO: 3757844 - DNA, 25 bp, Homo sapien
tgcgggttaaacagcagctctgaga

SEQ ID NO: 3757845 - DNA, 25 bp, Homo sapien
cctgtcaggacagataaacctcttc

SEQ ID NO: 3757846 - DNA, 25 bp, Homo sapien
gcatcccctgtaagtgacctgtcag

SEQ ID NO: 3757847 - DNA, 25 bp, Homo sapien
gaaggctgtggatcctagtgacccc

SEQ ID NO: 3757848 - DNA, 25 bp, Homo sapien
gcagcctgtggcctgtcctctgaca

SEQ ID NO: 3757849 - DNA, 25 bp, Homo sapien
ctgggcagccgagccaggaggagca

SEQ ID NO: 3757850 - DNA, 25 bp, Homo sapien
agcctgtggcctgtcctctgacaat

SEQ ID NO: 3757851 - DNA, 25 bp, Homo sapien
aggaggagcagttgaggggctcccc

SEQ ID NO: 3757852 - DNA, 25 bp, Homo sapien
ggatgggaaggaggacagcgacaag

SEQ ID NO: 3757853 - DNA, 25 bp, Homo sapien
atgggaaggaggacagcgacaagga

SEQ ID NO: 3757854 - DNA, 25 bp, Homo sapien
gatgggaaggaggacagcgacaagg

SEQ ID NO: 3757855 - DNA, 25 bp, Homo sapien
gggatgggaaggaggacagcgacaa

SEQ ID NO: 3757856 - DNA, 25 bp, Homo sapien
cccgcgtgccagagctccacgcgcc

SEQ ID NO: 3757857 - DNA, 25 bp, Homo sapien
cgtcctcctcgtgcgcgcggtctcc

SEQ ID NO: 3757858 - DNA, 25 bp, Homo sapien
acagggacgcctcgctgccccggca

SEQ ID NO: 3757859 - DNA, 25 bp, Homo sapien
gcgtccccaccgctccgcagggcag

SEQ ID NO: 3757860 - DNA, 25 bp, Homo sapien
tcagcctatcccagaaaaatcccag

SEQ ID NO: 3757861 - DNA, 25 bp, Homo sapien
tcacaagaggtgaccagagcacaga

SEQ ID NO: 3757862 - DNA, 25 bp, Homo sapien
cctcatggaggacctgcgagtcgga

SEQ ID NO: 3757863 - DNA, 25 bp, Homo sapien
ggtttcagctgtgcagagcacccca

SEQ ID NO: 3757864 - DNA, 25 bp, Homo sapien
tgagaaaggagaggtcttgagccag

SEQ ID NO: 3757865 - DNA, 25 bp, Homo sapien
caggcagtggggggcctgggccagg

SEQ ID NO: 3757866 - DNA, 25 bp, Homo sapien
ggcagtggggggcctgggccaggct

SEQ ID NO: 3757867 - DNA, 25 bp, Homo sapien
ctgcaggcagtggggggcctgggcc

SEQ ID NO: 3757868 - DNA, 25 bp, Homo sapien
tgcaggcagtggggggcctgggcca

SEQ ID NO: 3757869 - DNA, 25 bp, Homo sapien
tctgcatggcttgtgtgactcgagg

SEQ ID NO: 3757870 - DNA, 25 bp, Homo sapien
gaagggatcccaggacgacactgac

SEQ ID NO: 3757871 - DNA, 25 bp, Homo sapien
gaccacccagaatgtccggaaggga

SEQ ID NO: 3757872 - DNA, 25 bp, Homo sapien
tgtgtgactcgaggcagaatcagaa

SEQ ID NO: 3757873 - DNA, 25 bp, Homo sapien
ctgaggcaaggtgagcatggtcaca

SEQ ID NO: 3757874 - DNA, 25 bp, Homo sapien
aggcaaggtgagcatggtcacacac

SEQ ID NO: 3757875 - DNA, 25 bp, Homo sapien
acacacaggccctcagtgtggatgt

SEQ ID NO: 3757876 - DNA, 25 bp, Homo sapien
caggccctcagtgtggatgtggcca

SEQ ID NO: 3757877 - DNA, 25 bp, Homo sapien
ggagatacctcggatcttcccagac

SEQ ID NO: 3757878 - DNA, 25 bp, Homo sapien
tcggcctccatgatttcctcgtaca

SEQ ID NO: 3757879 - DNA, 25 bp, Homo sapien
tgatttcctcgtacagtcctgctgg

SEQ ID NO: 3757880 - DNA, 25 bp, Homo sapien
tgacatcatagatggcttctccagg

SEQ ID NO: 3757881 - DNA, 25 bp, Homo sapien
aggaaacgcagcctcgtcatatccc

SEQ ID NO: 3757882 - DNA, 25 bp, Homo sapien
gcacgtatagactgtccctccagga

SEQ ID NO: 3757883 - DNA, 25 bp, Homo sapien
caggaggttagacacctcccctgaa

SEQ ID NO: 3757884 - DNA, 25 bp, Homo sapien
gcctcgtcatatccctgagaaacag

SEQ ID NO: 3757885 - DNA, 25 bp, Homo sapien
tcaggttgctttacaacgtcatctc

SEQ ID NO: 3757886 - DNA, 25 bp, Homo sapien
gacagccagctggtgtatctcatcc

SEQ ID NO: 3757887 - DNA, 25 bp, Homo sapien
atcctcaggttgctttacaacgtca

SEQ ID NO: 3757888 - DNA, 25 bp, Homo sapien
atgaagagctgtgatttcgacagcc

SEQ ID NO: 3757889 - DNA, 25 bp, Homo sapien
catggaggacattgcaagagaaagg

SEQ ID NO: 3757890 - DNA, 25 bp, Homo sapien
catccaaggtgttctcacgaaatcc

SEQ ID NO: 3757891 - DNA, 25 bp, Homo sapien
acatggaggacattgcaagagaaag

SEQ ID NO: 3757892 - DNA, 25 bp, Homo sapien
gagaaaggcatccaaggtgttctca

SEQ ID NO: 3757893 - DNA, 25 bp, Homo sapien
ttacacagcacaactgtccacagca

SEQ ID NO: 3757894 - DNA, 25 bp, Homo sapien
caaattaggtatagactgggctttc

SEQ ID NO: 3757895 - DNA, 25 bp, Homo sapien
gaatgagacaagacctccactggct

SEQ ID NO: 3757896 - DNA, 25 bp, Homo sapien
gatggcaccatgtgtctctaaacca

SEQ ID NO: 3757897 - DNA, 25 bp, Homo sapien
tcaacactggactgaagggtcccag

SEQ ID NO: 3757898 - DNA, 25 bp, Homo sapien
catagacgctgcgatcctttcaggg

SEQ ID NO: 3757899 - DNA, 25 bp, Homo sapien
ctaatgagatgaagccgccagcagc

SEQ ID NO: 3757900 - DNA, 25 bp, Homo sapien
cacgtgccttggaaagactaatgag

SEQ ID NO: 3757901 - DNA, 25 bp, Homo sapien
accggtcaagaacagcagagtgccc

SEQ ID NO: 3757902 - DNA, 25 bp, Homo sapien
aacgttttgggatcctcaggcagca

SEQ ID NO: 3757903 - DNA, 25 bp, Homo sapien
tgtcctagggctacggggatcctca

SEQ ID NO: 3757904 - DNA, 25 bp, Homo sapien
ccctcatcttccaacgttttgggat

SEQ ID NO: 3757905 - DNA, 25 bp, Homo sapien
tcctcaaagcccaatgagagtccct

SEQ ID NO: 3757906 - DNA, 25 bp, Homo sapien
cctggggagatcaattccagagctg

SEQ ID NO: 3757907 - DNA, 25 bp, Homo sapien
gcacacaagggccatgtgcaaccct

SEQ ID NO: 3757908 - DNA, 25 bp, Homo sapien
gttactgacatctcccattagcatg

SEQ ID NO: 3757909 - DNA, 25 bp, Homo sapien
tagcatgtgttacattaatgtgcca

SEQ ID NO: 3757910 - DNA, 25 bp, Homo sapien
gactctctgggacctgtcggcttgc

SEQ ID NO: 3757911 - DNA, 25 bp, Homo sapien
gctgtcctgctgacactctctggga

SEQ ID NO: 3757912 - DNA, 25 bp, Homo sapien
ctgagactctctgggacctgtcggc

SEQ ID NO: 3757913 - DNA, 25 bp, Homo sapien
gagactctctgggacctgtcggctt

SEQ ID NO: 3757914 - DNA, 25 bp, Homo sapien
ctcgccatcctgctgagactctctg

SEQ ID NO: 3757915 - DNA, 25 bp, Homo sapien
gccatcctgctgagactctctggga

SEQ ID NO: 3757916 - DNA, 25 bp, Homo sapien
ccatcctgctgagactctctgggac

SEQ ID NO: 3757917 - DNA, 25 bp, Homo sapien
ctgtcctcttgctcgccatcctgct

SEQ ID NO: 3757918 - DNA, 25 bp, Homo sapien
gcttgctcgctgtcctgctgagact

SEQ ID NO: 3757919 - DNA, 25 bp, Homo sapien
tccgcttgctcgctgtcctgctgag

SEQ ID NO: 3757920 - DNA, 25 bp, Homo sapien
ccgcttgctcgctgtcctgctgaga

SEQ ID NO: 3757921 - DNA, 25 bp, Homo sapien
ctgtccgcttgctcgctgtcctgct

SEQ ID NO: 3757922 - DNA, 25 bp, Homo sapien
cgcctctacgctgtgtggttgtctg

SEQ ID NO: 3757923 - DNA, 25 bp, Homo sapien
tcagagaaaccctgcaggacaaacg

SEQ ID NO: 3757924 - DNA, 25 bp, Homo sapien
caggacaaacgcctctacgctgtgt

SEQ ID NO: 3757925 - DNA, 25 bp, Homo sapien
agaaaccctgcaggacaaacgcctc

SEQ ID NO: 3757926 - DNA, 25 bp, Homo sapien
ctacaagtgccatcaggtaaaggag

SEQ ID NO: 3757927 - DNA, 25 bp, Homo sapien
caagtgccatcaggtaaaggaggaa

SEQ ID NO: 3757928 - DNA, 25 bp, Homo sapien
aaagcagcagccctggagtggaagg

SEQ ID NO: 3757929 - DNA, 25 bp, Homo sapien
aagcagcagccctggagtggaaggt

SEQ ID NO: 3757930 - DNA, 25 bp, Homo sapien
cgatgtctaaaagggccaggttggt

SEQ ID NO: 3757931 - DNA, 25 bp, Homo sapien
agaaagaagtacactggcgtgtgga

SEQ ID NO: 3757932 - DNA, 25 bp, Homo sapien
caccactctgctgttgtccatggat

SEQ ID NO: 3757933 - DNA, 25 bp, Homo sapien
ccatggatgtgcagacgatgtctaa

SEQ ID NO: 3757934 - DNA, 25 bp, Homo sapien
tccttgttccgcagggagtaggtga

SEQ ID NO: 3757935 - DNA, 25 bp, Homo sapien
taagtccttgttccgcagggagtag

SEQ ID NO: 3757936 - DNA, 25 bp, Homo sapien
tgataagtccttgttccgcagggag

SEQ ID NO: 3757937 - DNA, 25 bp, Homo sapien
ctactgataagtccttgttccgcag

SEQ ID NO: 3757938 - DNA, 25 bp, Homo sapien
aggaccacgaaacctcacacaggga

SEQ ID NO: 3757939 - DNA, 25 bp, Homo sapien
taaagccccatgtatttcctgcagg

SEQ ID NO: 3757940 - DNA, 25 bp, Homo sapien
caccctttatggtgccaggaccacg

SEQ ID NO: 3757941 - DNA, 25 bp, Homo sapien
ttgacctcacaccaagaggagttgg

SEQ ID NO: 3757942 - DNA, 25 bp, Homo sapien
accagacaaggacataacaacagca

SEQ ID NO: 3757943 - DNA, 25 bp, Homo sapien
cattagagactgctatgaacaactg

SEQ ID NO: 3757944 - DNA, 25 bp, Homo sapien
tcacaatggatatcacagaactatc

SEQ ID NO: 3757945 - DNA, 25 bp, Homo sapien
cagaactatcaaggatcattagaga

SEQ ID NO: 3757946 - DNA, 25 bp, Homo sapien
ggtgtttattccacgtgtccatggg

SEQ ID NO: 3757947 - DNA, 25 bp, Homo sapien
tacccagggtgatatttgtgcctgc

SEQ ID NO: 3757948 - DNA, 25 bp, Homo sapien
tggtttatggtgcagtacccagggt

SEQ ID NO: 3757949 - DNA, 25 bp, Homo sapien
gatgtcacctcccagtaaagttttc

SEQ ID NO: 3757950 - DNA, 25 bp, Homo sapien
catggatatcttacacggtgggcat

SEQ ID NO: 3757951 - DNA, 25 bp, Homo sapien
catctaatggtgatatccttcctcg

SEQ ID NO: 3757952 - DNA, 25 bp, Homo sapien
tactaggtatggtattcttgggcag

SEQ ID NO: 3757953 - DNA, 25 bp, Homo sapien
ggtgggcatcccttttgtgtaacta

SEQ ID NO: 3757954 - DNA, 25 bp, Homo sapien
ggttgccactgtcatagaactatgg

SEQ ID NO: 3757955 - DNA, 25 bp, Homo sapien
taattgtctactacctctctgtgtc

SEQ ID NO: 3757956 - DNA, 25 bp, Homo sapien
gaaaaacatcactggctgtcaccaa

SEQ ID NO: 3757957 - DNA, 25 bp, Homo sapien
taataccacagaatagtcctggcca

SEQ ID NO: 3757958 - DNA, 25 bp, Homo sapien
gttagaatgtcaccactcctctgtg

SEQ ID NO: 3757959 - DNA, 25 bp, Homo sapien
gacatgcacctatctctgtaagtca

SEQ ID NO: 3757960 - DNA, 25 bp, Homo sapien
gagcttcttatcctgccattctaga

SEQ ID NO: 3757961 - DNA, 25 bp, Homo sapien
caatggtgccctgtagatgtatctt

SEQ ID NO: 3757962 - DNA, 25 bp, Homo sapien
gggccctgctgccagcccgggagac

SEQ ID NO: 3757963 - DNA, 25 bp, Homo sapien
ggtgccgctggggccctgctgccag

SEQ ID NO: 3757964 - DNA, 25 bp, Homo sapien
cctgctgccagcccgggagacaatc

SEQ ID NO: 3757965 - DNA, 25 bp, Homo sapien
gccctgctgccagcccgggagacaa

SEQ ID NO: 3757966 - DNA, 25 bp, Homo sapien
gccacggtgactccgagggcagaca

SEQ ID NO: 3757967 - DNA, 25 bp, Homo sapien
ccaactggaagaggttcccgatgat

SEQ ID NO: 3757968 - DNA, 25 bp, Homo sapien
tcccgatgatgggaagcgggaaagg

SEQ ID NO: 3757969 - DNA, 25 bp, Homo sapien
tgtgcacctgcctccacatggacac

SEQ ID NO: 3757970 - DNA, 25 bp, Homo sapien
gaaaagctgtctttgtccagcccga

SEQ ID NO: 3757971 - DNA, 25 bp, Homo sapien
caaggttctggacccggttctggcg

SEQ ID NO: 3757972 - DNA, 25 bp, Homo sapien
tgctctagagaacccagagggacgt

SEQ ID NO: 3757973 - DNA, 25 bp, Homo sapien
gcccgcttccggaatcaaggttctg

SEQ ID NO: 3757974 - DNA, 25 bp, Homo sapien
tgcgagcccacgtacagcgtgaaca

SEQ ID NO: 3757975 - DNA, 25 bp, Homo sapien
tctgcccgagaactcgtccttgtag

SEQ ID NO: 3757976 - DNA, 25 bp, Homo sapien
tcgtccttgtagtccagcagcgctt

SEQ ID NO: 3757977 - DNA, 25 bp, Homo sapien
ttgtagccgtgcatcaccaccatgc

SEQ ID NO: 3757978 - DNA, 25 bp, Homo sapien
gcttccgacgcctcagcgtgggtga

SEQ ID NO: 3757979 - DNA, 25 bp, Homo sapien
ctgtaccccggcggttgaacaggag

SEQ ID NO: 3757980 - DNA, 25 bp, Homo sapien
gagcaaagccctgaagcgagcagtg

SEQ ID NO: 3757981 - DNA, 25 bp, Homo sapien
ggacctcggtggacgaagccacctg

SEQ ID NO: 3757982 - DNA, 25 bp, Homo sapien
taaatagggcaagagcacgagctca

SEQ ID NO: 3757983 - DNA, 25 bp, Homo sapien
tccctagagagggaacaggccgctt

SEQ ID NO: 3757984 - DNA, 25 bp, Homo sapien
tctactttgaaaccgcagggcaggc

SEQ ID NO: 3757985 - DNA, 25 bp, Homo sapien
gaatgcgcagataaagacgagccag

SEQ ID NO: 3757986 - DNA, 25 bp, Homo sapien
tcatgttgagtggaggacatcccga

SEQ ID NO: 3757987 - DNA, 25 bp, Homo sapien
ggacatcccgagatgacccatttag

SEQ ID NO: 3757988 - DNA, 25 bp, Homo sapien
gggcgggagggcacatgagatgagg

SEQ ID NO: 3757989 - DNA, 25 bp, Homo sapien
gagatgacccatttagacagagttc

SEQ ID NO: 3757990 - DNA, 25 bp, Homo sapien
gaagctgtgctcgtgtgttccagaa

SEQ ID NO: 3757991 - DNA, 25 bp, Homo sapien
ggtgaagctgtgctcgtgtgttcca

SEQ ID NO: 3757992 - DNA, 25 bp, Homo sapien
gctgtgctcgtgtgttccagaagca

SEQ ID NO: 3757993 - DNA, 25 bp, Homo sapien
tgtgctcgtgtgttccagaagcaag

SEQ ID NO: 3757994 - DNA, 25 bp, Homo sapien
gcttcattagctgattgaccactga

SEQ ID NO: 3757995 - DNA, 25 bp, Homo sapien
ggcattctgcggtaaacaagggtca

SEQ ID NO: 3757996 - DNA, 25 bp, Homo sapien
tacttcctgcatataagacatcctg

SEQ ID NO: 3757997 - DNA, 25 bp, Homo sapien
taaaaatgttcgcatattcccacgc

SEQ ID NO: 3757998 - DNA, 25 bp, Homo sapien
cattttggggagaaatgggctacag

SEQ ID NO: 3757999 - DNA, 25 bp, Homo sapien
ggccagcagaaggttattctaaata

SEQ ID NO: 3758000 - DNA, 25 bp, Homo sapien
cagaaggttattctaaatacccatt

SEQ ID NO: 3758001 - DNA, 25 bp, Homo sapien
gggagaaatgggctacagagggcct

SEQ ID NO: 3758002 - DNA, 25 bp, Homo sapien
tggtcagggaaaaccgccggatgtc

SEQ ID NO: 3758003 - DNA, 25 bp, Homo sapien
tcctgagtgcttccagcaggaagtg

SEQ ID NO: 3758004 - DNA, 25 bp, Homo sapien
tggatccggctctcattgccctgtt

SEQ ID NO: 3758005 - DNA, 25 bp, Homo sapien
ccatcccatagttccggagggtggt

SEQ ID NO: 3758006 - DNA, 25 bp, Homo sapien
ctggtctgcaagaggactgggccct

SEQ ID NO: 3758007 - DNA, 25 bp, Homo sapien
cgctggtctgcaagaggactgggcc

SEQ ID NO: 3758008 - DNA, 25 bp, Homo sapien
gccctgctaggcagcagatacgcac

SEQ ID NO: 3758009 - DNA, 25 bp, Homo sapien
gactgggccctgctaggcagcagat

SEQ ID NO: 3758010 - DNA, 25 bp, Homo sapien
actgaggttcaccaaggcctgtgag

SEQ ID NO: 3758011 - DNA, 25 bp, Homo sapien
gaaggtgccctgaaaactgccagtt

SEQ ID NO: 3758012 - DNA, 25 bp, Homo sapien
tcagatgcagtctaggagtcccagc

SEQ ID NO: 3758013 - DNA, 25 bp, Homo sapien
caagtcacgtgtttaatggccaccc

SEQ ID NO: 3758014 - DNA, 25 bp, Homo sapien
agaggatgtcggctatgacgttgca

SEQ ID NO: 3758015 - DNA, 25 bp, Homo sapien
aaacttctcatcattgtagtcaaaa

SEQ ID NO: 3758016 - DNA, 25 bp, Homo sapien
tagtcaaaatgcttgcggaagagga

SEQ ID NO: 3758017 - DNA, 25 bp, Homo sapien
agtgctgagtaggtggaagttctca

SEQ ID NO: 3758018 - DNA, 25 bp, Homo sapien
tcaccctttcagacacatactcttt

SEQ ID NO: 3758019 - DNA, 25 bp, Homo sapien
cttcaccctttcagacacatactct

SEQ ID NO: 3758020 - DNA, 25 bp, Homo sapien
ggcttccaggcaagtagtgtagaaa

SEQ ID NO: 3758021 - DNA, 25 bp, Homo sapien
ttcaccctttcagacacatactctt

SEQ ID NO: 3758022 - DNA, 25 bp, Homo sapien
ccatttccacgagcaggcagtcggt

SEQ ID NO: 3758023 - DNA, 25 bp, Homo sapien
gttggggtccagagattgatggtgc

SEQ ID NO: 3758024 - DNA, 25 bp, Homo sapien
tggggtccagagattgatggtgctc

SEQ ID NO: 3758025 - DNA, 25 bp, Homo sapien
tctccatttccacgagcaggcagtc

SEQ ID NO: 3758026 - DNA, 25 bp, Homo sapien
tatttcatgagaatcaggagcccat

SEQ ID NO: 3758027 - DNA, 25 bp, Homo sapien
tgtgtacaagcgctctgcactgtgc

SEQ ID NO: 3758028 - DNA, 25 bp, Homo sapien
caggtcggccacagtcacggtgata

SEQ ID NO: 3758029 - DNA, 25 bp, Homo sapien
cggtgataccgtccattgtgtacaa

SEQ ID NO: 3758030 - DNA, 25 bp, Homo sapien
catctattcaatcacgcttttatcc

SEQ ID NO: 3758031 - DNA, 25 bp, Homo sapien
aatcacgcttttatccatctgccca

SEQ ID NO: 3758032 - DNA, 25 bp, Homo sapien
cacccatctattcaatcacgctttt

SEQ ID NO: 3758033 - DNA, 25 bp, Homo sapien
tattcaatcacgcttttatccatct

SEQ ID NO: 3758034 - DNA, 25 bp, Homo sapien
ctgccaagatatgaatgggacaaat

SEQ ID NO: 3758035 - DNA, 25 bp, Homo sapien
tatgaatgggacaaatttcagggat

SEQ ID NO: 3758036 - DNA, 25 bp, Homo sapien
ccaagatatgaatgggacaaatttc

SEQ ID NO: 3758037 - DNA, 25 bp, Homo sapien
tgggacaaatttcagggattggttc

SEQ ID NO: 3758038 - DNA, 25 bp, Homo sapien
gaaccgctgaatctcatgcaccaca

SEQ ID NO: 3758039 - DNA, 25 bp, Homo sapien
atgtagggcatctcttgcctatcct

SEQ ID NO: 3758040 - DNA, 25 bp, Homo sapien
gcagggattcggcttggcccaatca

SEQ ID NO: 3758041 - DNA, 25 bp, Homo sapien
gaaaatggtgtctcgggttgcttca

SEQ ID NO: 3758042 - DNA, 25 bp, Homo sapien
tggcaggaaggcgattagctgatag

SEQ ID NO: 3758043 - DNA, 25 bp, Homo sapien
tggtgttcatgctgtgtgctgcagg

SEQ ID NO: 3758044 - DNA, 25 bp, Homo sapien
caggaaggcgattagctgataggat

SEQ ID NO: 3758045 - DNA, 25 bp, Homo sapien
aggcgattagctgataggatggtgt

SEQ ID NO: 3758046 - DNA, 25 bp, Homo sapien
tgaaagccctaatcttctcacagga

SEQ ID NO: 3758047 - DNA, 25 bp, Homo sapien
tctcacaggattaaccccagggctg

SEQ ID NO: 3758048 - DNA, 25 bp, Homo sapien
ccagttgaaggagttgcttagtgaa

SEQ ID NO: 3758049 - DNA, 25 bp, Homo sapien
tgtgatagtttgttcctggcattag

SEQ ID NO: 3758050 - DNA, 25 bp, Homo sapien
tctggatcaggaaattcttggttgt

SEQ ID NO: 3758051 - DNA, 25 bp, Homo sapien
ctggatcaggaaattcttggttgtc

SEQ ID NO: 3758052 - DNA, 25 bp, Homo sapien
gtttgtaacgtggtgggatacagcc

SEQ ID NO: 3758053 - DNA, 25 bp, Homo sapien
ccaatatgtatagggctgaggtcga

SEQ ID NO: 3758054 - DNA, 25 bp, Homo sapien
agaaacaactccatgcgagccaggc

SEQ ID NO: 3758055 - DNA, 25 bp, Homo sapien
cctttgggtcaacgagaggcttcaa

SEQ ID NO: 3758056 - DNA, 25 bp, Homo sapien
ttttcaaatactcatatgcaaagaa

SEQ ID NO: 3758057 - DNA, 25 bp, Homo sapien
attttcaaatactcatatgcaaaga

SEQ ID NO: 3758058 - DNA, 25 bp, Homo sapien
tattttcaaatactcatatgcaaag

SEQ ID NO: 3758059 - DNA, 25 bp, Homo sapien
tgatcctagatggaagagcttttca

SEQ ID NO: 3758060 - DNA, 25 bp, Homo sapien
ccacctcaatatgattctgacactg

SEQ ID NO: 3758061 - DNA, 25 bp, Homo sapien
caaattccccacctcaatatgattc

SEQ ID NO: 3758062 - DNA, 25 bp, Homo sapien
tgaagttgtgtgatcctagatggaa

SEQ ID NO: 3758063 - DNA, 25 bp, Homo sapien
tttggccaggtttcttgaagatcag

SEQ ID NO: 3758064 - DNA, 25 bp, Homo sapien
tagcatgctgttcaggttactgtag

SEQ ID NO: 3758065 - DNA, 25 bp, Homo sapien
tcaggtaacttgatgctgccagctt

SEQ ID NO: 3758066 - DNA, 25 bp, Homo sapien
ttgtaccagtagcatgctgttcagg

SEQ ID NO: 3758067 - DNA, 25 bp, Homo sapien
gatgggtgtaaattcccaccctgga

SEQ ID NO: 3758068 - DNA, 25 bp, Homo sapien
acagctactgaagggacagcggaag

SEQ ID NO: 3758069 - DNA, 25 bp, Homo sapien
gcctttcccatactgggtccaccca

SEQ ID NO: 3758070 - DNA, 25 bp, Homo sapien
ctggacactaacctcctgcaggcca

SEQ ID NO: 3758071 - DNA, 25 bp, Homo sapien
actgcagtaccgcagagatgtggga

SEQ ID NO: 3758072 - DNA, 25 bp, Homo sapien
taacaatccatgagcatccccactg

SEQ ID NO: 3758073 - DNA, 25 bp, Homo sapien
aaaggagatttgtgccctggacagc

SEQ ID NO: 3758074 - DNA, 25 bp, Homo sapien
gatggcccatatctgacctcacgtg

SEQ ID NO: 3758075 - DNA, 25 bp, Homo sapien
tcctccctgcgcgtggctgcggccg

SEQ ID NO: 3758076 - DNA, 25 bp, Homo sapien
gctcctccctgcgcgtggctgcggc

SEQ ID NO: 3758077 - DNA, 25 bp, Homo sapien
cgggctcctccctgcgcgtggctgc

SEQ ID NO: 3758078 - DNA, 25 bp, Homo sapien
ctcaggctggagaagggccgcggga

SEQ ID NO: 3758079 - DNA, 25 bp, Homo sapien
ccgcggggtgggctcgagccaccat

SEQ ID NO: 3758080 - DNA, 25 bp, Homo sapien
ggggccgcggggtgggctcgagcca

SEQ ID NO: 3758081 - DNA, 25 bp, Homo sapien
ctgccacgggaggggccgcggggtg

SEQ ID NO: 3758082 - DNA, 25 bp, Homo sapien
gggccgcggggtgggctcgagccac

SEQ ID NO: 3758083 - DNA, 25 bp, Homo sapien
acaaggccggaggttgaggaggtct

SEQ ID NO: 3758084 - DNA, 25 bp, Homo sapien
tccctgaaacaaggccggaggttga

SEQ ID NO: 3758085 - DNA, 25 bp, Homo sapien
ctgacaaccggtggagaaaccgcac

SEQ ID NO: 3758086 - DNA, 25 bp, Homo sapien
cggccccgcagctgacaaccggtgg

SEQ ID NO: 3758087 - DNA, 25 bp, Homo sapien
cgccctgggctgagaagacgccgtc

SEQ ID NO: 3758088 - DNA, 25 bp, Homo sapien
aagacgccgtcggcccaggtggcat

SEQ ID NO: 3758089 - DNA, 25 bp, Homo sapien
ctgagaagacgccgtcggcccaggt

SEQ ID NO: 3758090 - DNA, 25 bp, Homo sapien
ccgccctgggctgagaagacgccgt

SEQ ID NO: 3758091 - DNA, 25 bp, Homo sapien
ttcatcacatatttgcagggcaccc

SEQ ID NO: 3758092 - DNA, 25 bp, Homo sapien
tattcatcacatatttgcagggcac

SEQ ID NO: 3758093 - DNA, 25 bp, Homo sapien
tcacttattcatcacatatttgcag

SEQ ID NO: 3758094 - DNA, 25 bp, Homo sapien
cttattcatcacatatttgcagggc

SEQ ID NO: 3758095 - DNA, 25 bp, Homo sapien
gggtgacaggaagacgtgcttccat

SEQ ID NO: 3758096 - DNA, 25 bp, Homo sapien
ccctgtgaggctccacgcttggctt

SEQ ID NO: 3758097 - DNA, 25 bp, Homo sapien
cctttaaaatgaagccgatgggtga

SEQ ID NO: 3758098 - DNA, 25 bp, Homo sapien
gaaaggcagtgtttcactccggaac

SEQ ID NO: 3758099 - DNA, 25 bp, Homo sapien
tctcttcctattgggctgcggcacc

SEQ ID NO: 3758100 - DNA, 25 bp, Homo sapien
tccttggagagagaggtactcaaca

SEQ ID NO: 3758101 - DNA, 25 bp, Homo sapien
gccacccagtgtgatgcattcagca

SEQ ID NO: 3758102 - DNA, 25 bp, Homo sapien
taagttgaccaagcacgtctcttcc

SEQ ID NO: 3758103 - DNA, 25 bp, Homo sapien
gttggccggactcccagcacgagcg

SEQ ID NO: 3758104 - DNA, 25 bp, Homo sapien
gctggagactctgtacacctcggtc

SEQ ID NO: 3758105 - DNA, 25 bp, Homo sapien
cggtcaccgtcccaaagctgttggc

SEQ ID NO: 3758106 - DNA, 25 bp, Homo sapien
agctgttggccggactcccagcacg

SEQ ID NO: 3758107 - DNA, 25 bp, Homo sapien
cagaggcagagtgcgaggtaggggt

SEQ ID NO: 3758108 - DNA, 25 bp, Homo sapien
gaggcagagtgcgaggtaggggtct

SEQ ID NO: 3758109 - DNA, 25 bp, Homo sapien
aggggtggtagaaggctgggtcaag

SEQ ID NO: 3758110 - DNA, 25 bp, Homo sapien
caggaattccacttgtccacgggga

SEQ ID NO: 3758111 - DNA, 25 bp, Homo sapien
tgggtcaagggtcacccaggaattc

SEQ ID NO: 3758112 - DNA, 25 bp, Homo sapien
ccccgccatgggtaggggtctctga

SEQ ID NO: 3758113 - DNA, 25 bp, Homo sapien
agggcggggcccatgcatctcctga

SEQ ID NO: 3758114 - DNA, 25 bp, Homo sapien
ggaggctgcgcggatgcacccaggg

SEQ ID NO: 3758115 - DNA, 25 bp, Homo sapien
ggtcctcagcgctgagccttcgtcg

SEQ ID NO: 3758116 - DNA, 25 bp, Homo sapien
gggcccgccgtgaccttggtctcca

SEQ ID NO: 3758117 - DNA, 25 bp, Homo sapien
cgccgtgaccttggtctccacgcga

SEQ ID NO: 3758118 - DNA, 25 bp, Homo sapien
gtgaccttggtctccacgcgaagac

SEQ ID NO: 3758119 - DNA, 25 bp, Homo sapien
cgtgaccttggtctccacgcgaaga

SEQ ID NO: 3758120 - DNA, 25 bp, Homo sapien
tggcagtcccatcggagtgaaaatt

SEQ ID NO: 3758121 - DNA, 25 bp, Homo sapien
cgctctggcagtcccatcggagtga

SEQ ID NO: 3758122 - DNA, 25 bp, Homo sapien
tcccatcggagtgaaaatttgcaat

SEQ ID NO: 3758123 - DNA, 25 bp, Homo sapien
aagaaacaccagcggaggcaggtag

SEQ ID NO: 3758124 - DNA, 25 bp, Homo sapien
cagccagagaatcccaacgaatggt

SEQ ID NO: 3758125 - DNA, 25 bp, Homo sapien
gcagccagagaatcccaacgaatgg

SEQ ID NO: 3758126 - DNA, 25 bp, Homo sapien
gccagagaatcccaacgaatggtct

SEQ ID NO: 3758127 - DNA, 25 bp, Homo sapien
agccagagaatcccaacgaatggtc

SEQ ID NO: 3758128 - DNA, 25 bp, Homo sapien
agtgcaacccgccaggcaggggcgg

SEQ ID NO: 3758129 - DNA, 25 bp, Homo sapien
ccaggcaggggcggccaccgggagc

SEQ ID NO: 3758130 - DNA, 25 bp, Homo sapien
aggcaggggcggccaccgggagcat

SEQ ID NO: 3758131 - DNA, 25 bp, Homo sapien
ccccagtgcaacccgccaggcaggg

SEQ ID NO: 3758132 - DNA, 25 bp, Homo sapien
aaaggtgctgacatttttgtggctt

SEQ ID NO: 3758133 - DNA, 25 bp, Homo sapien
tctttagagttttcctcaaaggtgc

SEQ ID NO: 3758134 - DNA, 25 bp, Homo sapien
cactgaacatctttagagttttcct

SEQ ID NO: 3758135 - DNA, 25 bp, Homo sapien
tttcctcaaaggtgctgacattttt

SEQ ID NO: 3758136 - DNA, 25 bp, Homo sapien
tctgtgctctgaggttggcctctgc

SEQ ID NO: 3758137 - DNA, 25 bp, Homo sapien
ggaagatccacctggcgagtattca

SEQ ID NO: 3758138 - DNA, 25 bp, Homo sapien
gatccacctggcgagtattcacagt

SEQ ID NO: 3758139 - DNA, 25 bp, Homo sapien
tggccccatgttggaagatccacct

SEQ ID NO: 3758140 - DNA, 25 bp, Homo sapien
caggggaccggcactcagcacacca

SEQ ID NO: 3758141 - DNA, 25 bp, Homo sapien
caccaaggacctgcaccagcaccgg

SEQ ID NO: 3758142 - DNA, 25 bp, Homo sapien
ggaccggcactcagcacaccaagga

SEQ ID NO: 3758143 - DNA, 25 bp, Homo sapien
acaccaaggacctgcaccagcaccg

SEQ ID NO: 3758144 - DNA, 25 bp, Homo sapien
tatcatgccattctctcccggactg

SEQ ID NO: 3758145 - DNA, 25 bp, Homo sapien
gaaggacagatttgctggctataat

SEQ ID NO: 3758146 - DNA, 25 bp, Homo sapien
ccttggagaggacctttttgtattg

SEQ ID NO: 3758147 - DNA, 25 bp, Homo sapien
tagggctgagctagtatgatgatca

SEQ ID NO: 3758148 - DNA, 25 bp, Homo sapien
ctttctgttcgttttggctgagcca

SEQ ID NO: 3758149 - DNA, 25 bp, Homo sapien
tgaacatctgcaccggcctaattaa

SEQ ID NO: 3758150 - DNA, 25 bp, Homo sapien
ggacctttctgttcgttttggctga

SEQ ID NO: 3758151 - DNA, 25 bp, Homo sapien
tgaggacagccatgaacatctgcac

SEQ ID NO: 3758152 - DNA, 25 bp, Homo sapien
ggcccagtgagactgaatgtgaaca

SEQ ID NO: 3758153 - DNA, 25 bp, Homo sapien
ggctgtgaatacctgtgccgggacc

SEQ ID NO: 3758154 - DNA, 25 bp, Homo sapien
gggctgggcccagtgagactgaatg

SEQ ID NO: 3758155 - DNA, 25 bp, Homo sapien
ggatggctgtgaatacctgtgccgg

SEQ ID NO: 3758156 - DNA, 25 bp, Homo sapien
gattggcttaatgaggatgtctgtg

SEQ ID NO: 3758157 - DNA, 25 bp, Homo sapien
tgatgaggacggctgtgaacatctg

SEQ ID NO: 3758158 - DNA, 25 bp, Homo sapien
ggcccattgagctcagcattgaaca

SEQ ID NO: 3758159 - DNA, 25 bp, Homo sapien
gcattgaacacctggattggcttaa

SEQ ID NO: 3758160 - DNA, 25 bp, Homo sapien
aaacagatttgctggcctcgatgag

SEQ ID NO: 3758161 - DNA, 25 bp, Homo sapien
tgctatggacatctgagctcgctgt

SEQ ID NO: 3758162 - DNA, 25 bp, Homo sapien
tgtcatgcggatgacagagaactcc

SEQ ID NO: 3758163 - DNA, 25 bp, Homo sapien
gatgaggacgactgtgaaaacctgt

SEQ ID NO: 3758164 - DNA, 25 bp, Homo sapien
gcggggacacagaaacctccagcga

SEQ ID NO: 3758165 - DNA, 25 bp, Homo sapien
tccagcgaagcgtggaaaagcagca

SEQ ID NO: 3758166 - DNA, 25 bp, Homo sapien
gaaacctccagcgaagcgtggaaaa

SEQ ID NO: 3758167 - DNA, 25 bp, Homo sapien
cacagaaacctccagcgaagcgtgg

SEQ ID NO: 3758168 - DNA, 25 bp, Homo sapien
gaaagcgcgaccacgttggctgttt

SEQ ID NO: 3758169 - DNA, 25 bp, Homo sapien
actcgggccgagtgaaccgtgattc

SEQ ID NO: 3758170 - DNA, 25 bp, Homo sapien
catccacgtggttcacagacgacac

SEQ ID NO: 3758171 - DNA, 25 bp, Homo sapien
gtgattccgggttccacgctccttc

SEQ ID NO: 3758172 - DNA, 25 bp, Homo sapien
gacattctgtgctccagcgattctc

SEQ ID NO: 3758173 - DNA, 25 bp, Homo sapien
tactgctcctgattatgggagaatc

SEQ ID NO: 3758174 - DNA, 25 bp, Homo sapien
cagtttgagtacttaccagtttgag

SEQ ID NO: 3758175 - DNA, 25 bp, Homo sapien
ggtctctttccctgtcattctggct

SEQ ID NO: 3758176 - DNA, 25 bp, Homo sapien
gttcagaagtctgttacagagcact

SEQ ID NO: 3758177 - DNA, 25 bp, Homo sapien
gagcacgtactatgtgttcagaagt

SEQ ID NO: 3758178 - DNA, 25 bp, Homo sapien
cattacatgatgtgagttaatcctc

SEQ ID NO: 3758179 - DNA, 25 bp, Homo sapien
tcaggatttaaatgaagggcctagc

SEQ ID NO: 3758180 - DNA, 25 bp, Homo sapien
tcaaagtggaagccaccaatcgcca

SEQ ID NO: 3758181 - DNA, 25 bp, Homo sapien
caaagtggaagccaccaatcgccat

SEQ ID NO: 3758182 - DNA, 25 bp, Homo sapien
ggcatttctctgatcattgacaagg

SEQ ID NO: 3758183 - DNA, 25 bp, Homo sapien
ccattctgcatggtgtaagttggta

SEQ ID NO: 3758184 - DNA, 25 bp, Homo sapien
tctctgtatccttgctgatagctca

SEQ ID NO: 3758185 - DNA, 25 bp, Homo sapien
tacgtgcttgttgaccattgaccat

SEQ ID NO: 3758186 - DNA, 25 bp, Homo sapien
tccctgcacggttcgcctcctccaa

SEQ ID NO: 3758187 - DNA, 25 bp, Homo sapien
cagcggagcccagcgctgaatcgca

SEQ ID NO: 3758188 - DNA, 25 bp, Homo sapien
cccagcggagcccagcgctgaatcg

SEQ ID NO: 3758189 - DNA, 25 bp, Homo sapien
cacggctgccgcttccctgcacggt

SEQ ID NO: 3758190 - DNA, 25 bp, Homo sapien
gacagcgccctggacacgcccttcc

SEQ ID NO: 3758191 - DNA, 25 bp, Homo sapien
ggctggaatttaagctccggcagac

SEQ ID NO: 3758192 - DNA, 25 bp, Homo sapien
gtgcagcgggccttccgggagacca

SEQ ID NO: 3758193 - DNA, 25 bp, Homo sapien
tgtgaggctggaatttaagctccgg

SEQ ID NO: 3758194 - DNA, 25 bp, Homo sapien
aatatgaccagatggattcctgctt

SEQ ID NO: 3758195 - DNA, 25 bp, Homo sapien
tttaaaatatgaccagatggattcc

SEQ ID NO: 3758196 - DNA, 25 bp, Homo sapien
tcctgcttccatgaattcaatggaa

SEQ ID NO: 3758197 - DNA, 25 bp, Homo sapien
ggattcctgcttccatgaattcaat

SEQ ID NO: 3758198 - DNA, 25 bp, Homo sapien
taaatcgagcttccgtgtggcgagc

SEQ ID NO: 3758199 - DNA, 25 bp, Homo sapien
cctgccggatctgcgtgcctggaat

SEQ ID NO: 3758200 - DNA, 25 bp, Homo sapien
ggcgagctatgacctgctggttact

SEQ ID NO: 3758201 - DNA, 25 bp, Homo sapien
ggcccttcccgagttgagctgcgaa

SEQ ID NO: 3758202 - DNA, 25 bp, Homo sapien
ctcccgttcccgcacctgccgcctg

SEQ ID NO: 3758203 - DNA, 25 bp, Homo sapien
gcgttcgggttccagcttctccgcc

SEQ ID NO: 3758204 - DNA, 25 bp, Homo sapien
gttcccgcacctgccgcctgcagct

SEQ ID NO: 3758205 - DNA, 25 bp, Homo sapien
gcagctccgcgttcgggttccagct

SEQ ID NO: 3758206 - DNA, 25 bp, Homo sapien
gagttcttccagctgcgtgcggagc

SEQ ID NO: 3758207 - DNA, 25 bp, Homo sapien
agctcctggcggttgctcgtgtcgc

SEQ ID NO: 3758208 - DNA, 25 bp, Homo sapien
gctcgtgtcgctctgagcagccgtc

SEQ ID NO: 3758209 - DNA, 25 bp, Homo sapien
gttactgagttcttccagctgcgtg

SEQ ID NO: 3758210 - DNA, 25 bp, Homo sapien
ctccatgtctcccacagcggagtac

SEQ ID NO: 3758211 - DNA, 25 bp, Homo sapien
agactaacgtcattagggtaggtct

SEQ ID NO: 3758212 - DNA, 25 bp, Homo sapien
ctaacgtcattagggtaggtctgat

SEQ ID NO: 3758213 - DNA, 25 bp, Homo sapien
cattagggtaggtctgataataata

SEQ ID NO: 3758214 - DNA, 25 bp, Homo sapien
cgtcattagggtaggtctgataata

SEQ ID NO: 3758215 - DNA, 25 bp, Homo sapien
cctatcagtaccagggtgagtgtca

SEQ ID NO: 3758216 - DNA, 25 bp, Homo sapien
ggactttcaatatcctgatcttgct

SEQ ID NO: 3758217 - DNA, 25 bp, Homo sapien
gaccctcttgtctacacttaacatt

SEQ ID NO: 3758218 - DNA, 25 bp, Homo sapien
tacttataactggtcgttagaattc

SEQ ID NO: 3758219 - DNA, 25 bp, Homo sapien
tccagctaatgacgaaccttctaag

SEQ ID NO: 3758220 - DNA, 25 bp, Homo sapien
aaggacgtatcttgtgctgctaatg

SEQ ID NO: 3758221 - DNA, 25 bp, Homo sapien
tgacgaaccttctaaggacgtatct

SEQ ID NO: 3758222 - DNA, 25 bp, Homo sapien
aaccttctaaggacgtatcttgtgc

SEQ ID NO: 3758223 - DNA, 25 bp, Homo sapien
gagaatgaaatcgatagcgaccact

SEQ ID NO: 3758224 - DNA, 25 bp, Homo sapien
gaatgaaatcgatagcgaccacttt

SEQ ID NO: 3758225 - DNA, 25 bp, Homo sapien
aaatcgatagcgaccactttccaca

SEQ ID NO: 3758226 - DNA, 25 bp, Homo sapien
actcgagaatgaaatcgatagcgac

SEQ ID NO: 3758227 - DNA, 25 bp, Homo sapien
tcgtttttgtttcgtgctataagtc

SEQ ID NO: 3758228 - DNA, 25 bp, Homo sapien
cgtgctataagtctgataaggttgc

SEQ ID NO: 3758229 - DNA, 25 bp, Homo sapien
tcatcgtttttttgtagaagaatcc

SEQ ID NO: 3758230 - DNA, 25 bp, Homo sapien
gtctttcccgttgcagcttgtatgt

SEQ ID NO: 3758231 - DNA, 25 bp, Homo sapien
ttaaaaggagattccataggatttc

SEQ ID NO: 3758232 - DNA, 25 bp, Homo sapien
cttaaagatgaattgagatgttttc

SEQ ID NO: 3758233 - DNA, 25 bp, Homo sapien
ttgagatgttttcattaaaaggaga

SEQ ID NO: 3758234 - DNA, 25 bp, Homo sapien
ggagattccataggatttccactaa

SEQ ID NO: 3758235 - DNA, 25 bp, Homo sapien
tactggtaatgccttcatcgtaact

SEQ ID NO: 3758236 - DNA, 25 bp, Homo sapien
tcatcgtaactaccctcggtatgag

SEQ ID NO: 3758237 - DNA, 25 bp, Homo sapien
taccctcggtatgagagtctgtaat

SEQ ID NO: 3758238 - DNA, 25 bp, Homo sapien
tctggttcaccatcagtctctgtga

SEQ ID NO: 3758239 - DNA, 25 bp, Homo sapien
agggatttgaagagtattctccata

SEQ ID NO: 3758240 - DNA, 25 bp, Homo sapien
gatttgaagagtattctccatatca

SEQ ID NO: 3758241 - DNA, 25 bp, Homo sapien
atttgaagagtattctccatatcat

SEQ ID NO: 3758242 - DNA, 25 bp, Homo sapien
ggatttgaagagtattctccatatc

SEQ ID NO: 3758243 - DNA, 25 bp, Homo sapien
gataacacagtgtctccaactttca

SEQ ID NO: 3758244 - DNA, 25 bp, Homo sapien
tccaacacagctattactgccaggg

SEQ ID NO: 3758245 - DNA, 25 bp, Homo sapien
gccagggtgaatgtaataagataac

SEQ ID NO: 3758246 - DNA, 25 bp, Homo sapien
catgctcaggttcataagggtcaca

SEQ ID NO: 3758247 - DNA, 25 bp, Homo sapien
ttgtcaaggaaaaggtgagctctaa

SEQ ID NO: 3758248 - DNA, 25 bp, Homo sapien
tgtcaaggaaaaggtgagctctaac

SEQ ID NO: 3758249 - DNA, 25 bp, Homo sapien
gatggaccaacaaatgattcatctt

SEQ ID NO: 3758250 - DNA, 25 bp, Homo sapien
ttccttcttagttaatgatggacca

SEQ ID NO: 3758251 - DNA, 25 bp, Homo sapien
catctttgtagtctgtattctgtaa

SEQ ID NO: 3758252 - DNA, 25 bp, Homo sapien
atatttttgattctccagtatctta

SEQ ID NO: 3758253 - DNA, 25 bp, Homo sapien
tatcatctttgtagtctgtattctg

SEQ ID NO: 3758254 - DNA, 25 bp, Homo sapien
atcttatcatctttgtagtctgtat

SEQ ID NO: 3758255 - DNA, 25 bp, Homo sapien
tttcagaatgaacagatgcaggagc

SEQ ID NO: 3758256 - DNA, 25 bp, Homo sapien
tgaacagatgcaggagcatcatctc

SEQ ID NO: 3758257 - DNA, 25 bp, Homo sapien
aacagatgcaggagcatcatctctt

SEQ ID NO: 3758258 - DNA, 25 bp, Homo sapien
cagatgcaggagcatcatctctttg

SEQ ID NO: 3758259 - DNA, 25 bp, Homo sapien
ttttcaacatcttctgacctttgtc

SEQ ID NO: 3758260 - DNA, 25 bp, Homo sapien
tctttttcaacatcttctgaccttt

SEQ ID NO: 3758261 - DNA, 25 bp, Homo sapien
tcaacacatctttttcaacatcttc

SEQ ID NO: 3758262 - DNA, 25 bp, Homo sapien
tttcaacatcttctgacctttgtcg

SEQ ID NO: 3758263 - DNA, 25 bp, Homo sapien
tgtgtttgccaaggctgaagctgta

SEQ ID NO: 3758264 - DNA, 25 bp, Homo sapien
ggagaaggtgagtctctttaattga

SEQ ID NO: 3758265 - DNA, 25 bp, Homo sapien
ttaattgaggatggtttgtctgtct

SEQ ID NO: 3758266 - DNA, 25 bp, Homo sapien
gcatgtgtttgccaaggctgaagct

SEQ ID NO: 3758267 - DNA, 25 bp, Homo sapien
tacccaaggaatggttcctaggtca

SEQ ID NO: 3758268 - DNA, 25 bp, Homo sapien
cccaaggaatggttcctaggtcatc

SEQ ID NO: 3758269 - DNA, 25 bp, Homo sapien
ccaaggaatggttcctaggtcatct

SEQ ID NO: 3758270 - DNA, 25 bp, Homo sapien
caaggaatggttcctaggtcatctt

SEQ ID NO: 3758271 - DNA, 25 bp, Homo sapien
ttttctgtgcatactactatgaata

SEQ ID NO: 3758272 - DNA, 25 bp, Homo sapien
tattttctgtgcatactactatgaa

SEQ ID NO: 3758273 - DNA, 25 bp, Homo sapien
attttctgtgcatactactatgaat

SEQ ID NO: 3758274 - DNA, 25 bp, Homo sapien
gtattttctgtgcatactactatga

SEQ ID NO: 3758275 - DNA, 25 bp, Homo sapien
attagttctttaatatgatttaggc

SEQ ID NO: 3758276 - DNA, 25 bp, Homo sapien
tttctggcacaacttcattgcctgc

SEQ ID NO: 3758277 - DNA, 25 bp, Homo sapien
tgtgacatgtcacctgttcattagt

SEQ ID NO: 3758278 - DNA, 25 bp, Homo sapien
tggcaatttaggacattttcaataa

SEQ ID NO: 3758279 - DNA, 25 bp, Homo sapien
ttccctgatccataaaagacatcat

SEQ ID NO: 3758280 - DNA, 25 bp, Homo sapien
cacttccctgatccataaaagacat

SEQ ID NO: 3758281 - DNA, 25 bp, Homo sapien
agcacttccctgatccataaaagac

SEQ ID NO: 3758282 - DNA, 25 bp, Homo sapien
cttccctgatccataaaagacatca

SEQ ID NO: 3758283 - DNA, 25 bp, Homo sapien
tttgaaacacccctctcatcaatag

SEQ ID NO: 3758284 - DNA, 25 bp, Homo sapien
tctctaacctaaaactaatatgagt

SEQ ID NO: 3758285 - DNA, 25 bp, Homo sapien
tctatcaccatgagaaattccaagt

SEQ ID NO: 3758286 - DNA, 25 bp, Homo sapien
tttttgaaatactccactgcaataa

SEQ ID NO: 3758287 - DNA, 25 bp, Homo sapien
tagaatctaagcttgtttcacctcc

SEQ ID NO: 3758288 - DNA, 25 bp, Homo sapien
agcatccccacactatcagagtctt

SEQ ID NO: 3758289 - DNA, 25 bp, Homo sapien
gagtcttctgtagaatctaagcttg

SEQ ID NO: 3758290 - DNA, 25 bp, Homo sapien
ccacactatcagagtcttctgtaga

SEQ ID NO: 3758291 - DNA, 25 bp, Homo sapien
atctttctggccacagtttagactc

SEQ ID NO: 3758292 - DNA, 25 bp, Homo sapien
cacatctttctggccacagtttaga

SEQ ID NO: 3758293 - DNA, 25 bp, Homo sapien
catctttctggccacagtttagact

SEQ ID NO: 3758294 - DNA, 25 bp, Homo sapien
tctttctggccacagtttagactca

SEQ ID NO: 3758295 - DNA, 25 bp, Homo sapien
ttttttctctagccagagcacgcac

SEQ ID NO: 3758296 - DNA, 25 bp, Homo sapien
gagaaatcttccacctggcctgctt

SEQ ID NO: 3758297 - DNA, 25 bp, Homo sapien
ttctctagccagagcacgcactcaa

SEQ ID NO: 3758298 - DNA, 25 bp, Homo sapien
ttttctctagccagagcacgcactc

SEQ ID NO: 3758299 - DNA, 25 bp, Homo sapien
tctttcctaaactgcgtgagaactt

SEQ ID NO: 3758300 - DNA, 25 bp, Homo sapien
ttcctaaactgcgtgagaactttcc

SEQ ID NO: 3758301 - DNA, 25 bp, Homo sapien
cctaaactgcgtgagaactttcctg

SEQ ID NO: 3758302 - DNA, 25 bp, Homo sapien
ctttcctaaactgcgtgagaacttt

SEQ ID NO: 3758303 - DNA, 25 bp, Homo sapien
tcaggttcctctttcagttgcaccc

SEQ ID NO: 3758304 - DNA, 25 bp, Homo sapien
tcagttgcacccagggttctttcca

SEQ ID NO: 3758305 - DNA, 25 bp, Homo sapien
tgcacccagggttctttccagagga

SEQ ID NO: 3758306 - DNA, 25 bp, Homo sapien
aggttcctctttcagttgcacccag

SEQ ID NO: 3758307 - DNA, 25 bp, Homo sapien
tggacttcccggtgtccaaagcact

SEQ ID NO: 3758308 - DNA, 25 bp, Homo sapien
ggcagagcggtgtggacttcccggt

SEQ ID NO: 3758309 - DNA, 25 bp, Homo sapien
tgccgactctttgcaaggagagtga

SEQ ID NO: 3758310 - DNA, 25 bp, Homo sapien
ctgagttctgatgctatgccgactc

SEQ ID NO: 3758311 - DNA, 25 bp, Homo sapien
ggcggcgtaggcgaaatccccgcgc

SEQ ID NO: 3758312 - DNA, 25 bp, Homo sapien
gcttttgcccgggtgcggaggccac

SEQ ID NO: 3758313 - DNA, 25 bp, Homo sapien
gcccgggtgcggaggccaccgagga

SEQ ID NO: 3758314 - DNA, 25 bp, Homo sapien
agagcgccccgtccggaggagccgg

SEQ ID NO: 3758315 - DNA, 25 bp, Homo sapien
ccgcgcggaggcgtccgggggcgcg

SEQ ID NO: 3758316 - DNA, 25 bp, Homo sapien
ccaccacggactcccctgggacgtg

SEQ ID NO: 3758317 - DNA, 25 bp, Homo sapien
ctgccgcgcggaggcgtccgggggc

SEQ ID NO: 3758318 - DNA, 25 bp, Homo sapien
ggccccgcttgagcgggcccaggct

SEQ ID NO: 3758319 - DNA, 25 bp, Homo sapien
ggcgccgggatgccttgcatctgcc

SEQ ID NO: 3758320 - DNA, 25 bp, Homo sapien
gcccggtattcttcctcgctgaggg

SEQ ID NO: 3758321 - DNA, 25 bp, Homo sapien
agaaactccgggctcgccaggagct

SEQ ID NO: 3758322 - DNA, 25 bp, Homo sapien
gagaggttgcgcctgctgcagaaac

SEQ ID NO: 3758323 - DNA, 25 bp, Homo sapien
agcgaggcggcctcttccgaggcct

SEQ ID NO: 3758324 - DNA, 25 bp, Homo sapien
catttccacgtagaagaccagagcg

SEQ ID NO: 3758325 - DNA, 25 bp, Homo sapien
ggcgtgtggctctcgttcatttcca

SEQ ID NO: 3758326 - DNA, 25 bp, Homo sapien
tgacgatggattcccgcgtgcggca

SEQ ID NO: 3758327 - DNA, 25 bp, Homo sapien
tccccggcgtgatggcctgacgatg

SEQ ID NO: 3758328 - DNA, 25 bp, Homo sapien
gctcccacgcgtcggcagcagggag

SEQ ID NO: 3758329 - DNA, 25 bp, Homo sapien
ctctccagggatcccgcgggaacgg

SEQ ID NO: 3758330 - DNA, 25 bp, Homo sapien
cgctctctgggctcccacgcgtcgg

SEQ ID NO: 3758331 - DNA, 25 bp, Homo sapien
ccgcgggaacgggaagccgctctct

SEQ ID NO: 3758332 - DNA, 25 bp, Homo sapien
tgctgtccgaaggtgtcgggagggc

SEQ ID NO: 3758333 - DNA, 25 bp, Homo sapien
tgtccgaaggtgtcgggagggccat

SEQ ID NO: 3758334 - DNA, 25 bp, Homo sapien
ggagggtgctgtccgaaggtgtcgg

SEQ ID NO: 3758335 - DNA, 25 bp, Homo sapien
gggagggtgctgtccgaaggtgtcg

SEQ ID NO: 3758336 - DNA, 25 bp, Homo sapien
gtccaaacgagtctccgtcgccgtc

SEQ ID NO: 3758337 - DNA, 25 bp, Homo sapien
aaacgagtctccgtcgccgtcctcg

SEQ ID NO: 3758338 - DNA, 25 bp, Homo sapien
ccaaacgagtctccgtcgccgtcct

SEQ ID NO: 3758339 - DNA, 25 bp, Homo sapien
acgagtctccgtcgccgtcctcgtc

SEQ ID NO: 3758340 - DNA, 25 bp, Homo sapien
cgatgcctggaaagcgatccttctc

SEQ ID NO: 3758341 - DNA, 25 bp, Homo sapien
gatccttctcaaaggctcggaggag

SEQ ID NO: 3758342 - DNA, 25 bp, Homo sapien
ggtgctgcctcagctggcgtgacct

SEQ ID NO: 3758343 - DNA, 25 bp, Homo sapien
ggtgcctggcccttcgattctgaaa

SEQ ID NO: 3758344 - DNA, 25 bp, Homo sapien
aggccgcctgcctgcgcgggcgccc

SEQ ID NO: 3758345 - DNA, 25 bp, Homo sapien
ccgcctgcctgcgcgggcgccctgc

SEQ ID NO: 3758346 - DNA, 25 bp, Homo sapien
gcctgcctgcgcgggcgccctgcca

SEQ ID NO: 3758347 - DNA, 25 bp, Homo sapien
ccgggggccgcgctgcacaggccgc

SEQ ID NO: 3758348 - DNA, 25 bp, Homo sapien
agaaactccgggctcgccaggagct

SEQ ID NO: 3758349 - DNA, 25 bp, Homo sapien
agcgaggcggcctcttccgaggcct

SEQ ID NO: 3758350 - DNA, 25 bp, Homo sapien
gagaggttgcgcctgctgcagaaac

SEQ ID NO: 3758351 - DNA, 25 bp, Homo sapien
gcccggtattcttcctcgctgaggg

SEQ ID NO: 3758352 - DNA, 25 bp, Homo sapien
catttccacgtagaagaccagagcg

SEQ ID NO: 3758353 - DNA, 25 bp, Homo sapien
ggcgtgtggctctcgttcatttcca

SEQ ID NO: 3758354 - DNA, 25 bp, Homo sapien
tgacgatggattcccgcgtgcggca

SEQ ID NO: 3758355 - DNA, 25 bp, Homo sapien
tccccggcgtgatggcctgacgatg

SEQ ID NO: 3758356 - DNA, 25 bp, Homo sapien
ctctccagggatcccgcgggaacgg

SEQ ID NO: 3758357 - DNA, 25 bp, Homo sapien
cgctctctgggctcccacgcgtcgg

SEQ ID NO: 3758358 - DNA, 25 bp, Homo sapien
gctcccacgcgtcggcagcagggag

SEQ ID NO: 3758359 - DNA, 25 bp, Homo sapien
ccgcgggaacgggaagccgctctct

SEQ ID NO: 3758360 - DNA, 25 bp, Homo sapien
tgctgtccgaaggtgtcgggagggc

SEQ ID NO: 3758361 - DNA, 25 bp, Homo sapien
tgtccgaaggtgtcgggagggccat

SEQ ID NO: 3758362 - DNA, 25 bp, Homo sapien
ggagggtgctgtccgaaggtgtcgg

SEQ ID NO: 3758363 - DNA, 25 bp, Homo sapien
gggagggtgctgtccgaaggtgtcg

SEQ ID NO: 3758364 - DNA, 25 bp, Homo sapien
gtccaaacgagtctccgtcgccgtc

SEQ ID NO: 3758365 - DNA, 25 bp, Homo sapien
aaacgagtctccgtcgccgtcctcg

SEQ ID NO: 3758366 - DNA, 25 bp, Homo sapien
ccaaacgagtctccgtcgccgtcct

SEQ ID NO: 3758367 - DNA, 25 bp, Homo sapien
acgagtctccgtcgccgtcctcgtc

SEQ ID NO: 3758368 - DNA, 25 bp, Homo sapien
cgatgcctggaaagcgatccttctc

SEQ ID NO: 3758369 - DNA, 25 bp, Homo sapien
gatccttctcaaaggctcggaggag

SEQ ID NO: 3758370 - DNA, 25 bp, Homo sapien
ggtgctgcctcagctggcgtgacct

SEQ ID NO: 3758371 - DNA, 25 bp, Homo sapien
ggtgcctggcccttcgattctgaaa

SEQ ID NO: 3758372 - DNA, 25 bp, Homo sapien
agaaactccgggctcgccaggagct

SEQ ID NO: 3758373 - DNA, 25 bp, Homo sapien
agcgaggcggcctcttccgaggcct

SEQ ID NO: 3758374 - DNA, 25 bp, Homo sapien
gagaggttgcgcctgctgcagaaac

SEQ ID NO: 3758375 - DNA, 25 bp, Homo sapien
gcccggtattcttcctcgctgaggg

SEQ ID NO: 3758376 - DNA, 25 bp, Homo sapien
catttccacgtagaagaccagagcg

SEQ ID NO: 3758377 - DNA, 25 bp, Homo sapien
ggcgtgtggctctcgttcatttcca

SEQ ID NO: 3758378 - DNA, 25 bp, Homo sapien
tccccggcgtgatggcctgacgatg

SEQ ID NO: 3758379 - DNA, 25 bp, Homo sapien
tgacgatggattcccgcgtgcggca

SEQ ID NO: 3758380 - DNA, 25 bp, Homo sapien
gctcccacgcgtcggcagcagggag

SEQ ID NO: 3758381 - DNA, 25 bp, Homo sapien
cgctctctgggctcccacgcgtcgg

SEQ ID NO: 3758382 - DNA, 25 bp, Homo sapien
ctctccagggatcccgcgggaacgg

SEQ ID NO: 3758383 - DNA, 25 bp, Homo sapien
ccgcgggaacgggaagccgctctct

SEQ ID NO: 3758384 - DNA, 25 bp, Homo sapien
tgctgtccgaaggtgtcgggagggc

SEQ ID NO: 3758385 - DNA, 25 bp, Homo sapien
tgtccgaaggtgtcgggagggccat

SEQ ID NO: 3758386 - DNA, 25 bp, Homo sapien
ggagggtgctgtccgaaggtgtcgg

SEQ ID NO: 3758387 - DNA, 25 bp, Homo sapien
gggagggtgctgtccgaaggtgtcg

SEQ ID NO: 3758388 - DNA, 25 bp, Homo sapien
gtccaaacgagtctccgtcgccgtc

SEQ ID NO: 3758389 - DNA, 25 bp, Homo sapien
aaacgagtctccgtcgccgtcctcg

SEQ ID NO: 3758390 - DNA, 25 bp, Homo sapien
acgagtctccgtcgccgtcctcgtc

SEQ ID NO: 3758391 - DNA, 25 bp, Homo sapien
ccaaacgagtctccgtcgccgtcct

SEQ ID NO: 3758392 - DNA, 25 bp, Homo sapien
gatccttctcaaaggctcggaggag

SEQ ID NO: 3758393 - DNA, 25 bp, Homo sapien
ggtgctgcctcagctggcgtgacct

SEQ ID NO: 3758394 - DNA, 25 bp, Homo sapien
ggtgcctggcccttcgattctgaaa

SEQ ID NO: 3758395 - DNA, 25 bp, Homo sapien
cgatgcctggaaagcgatccttctc

SEQ ID NO: 3758396 - DNA, 25 bp, Homo sapien
agaaactccgggctcgccaggagct

SEQ ID NO: 3758397 - DNA, 25 bp, Homo sapien
agcgaggcggcctcttccgaggcct

SEQ ID NO: 3758398 - DNA, 25 bp, Homo sapien
gagaggttgcgcctgctgcagaaac

SEQ ID NO: 3758399 - DNA, 25 bp, Homo sapien
gcccggtattcttcctcgctgaggg

SEQ ID NO: 3758400 - DNA, 25 bp, Homo sapien
ggcgtgtggctctcgttcatttcca

SEQ ID NO: 3758401 - DNA, 25 bp, Homo sapien
catttccacgtagaagaccagagcg

SEQ ID NO: 3758402 - DNA, 25 bp, Homo sapien
tccccggcgtgatggcctgacgatg

SEQ ID NO: 3758403 - DNA, 25 bp, Homo sapien
tgacgatggattcccgcgtgcggca

SEQ ID NO: 3758404 - DNA, 25 bp, Homo sapien
gctcccacgcgtcggcagcagggag

SEQ ID NO: 3758405 - DNA, 25 bp, Homo sapien
ctctccagggatcccgcgggaacgg

SEQ ID NO: 3758406 - DNA, 25 bp, Homo sapien
ccgcgggaacgggaagccgctctct

SEQ ID NO: 3758407 - DNA, 25 bp, Homo sapien
cgctctctgggctcccacgcgtcgg

SEQ ID NO: 3758408 - DNA, 25 bp, Homo sapien
tgctgtccgaaggtgtcgggagggc

SEQ ID NO: 3758409 - DNA, 25 bp, Homo sapien
tgtccgaaggtgtcgggagggccat

SEQ ID NO: 3758410 - DNA, 25 bp, Homo sapien
ggagggtgctgtccgaaggtgtcgg

SEQ ID NO: 3758411 - DNA, 25 bp, Homo sapien
gggagggtgctgtccgaaggtgtcg

SEQ ID NO: 3758412 - DNA, 25 bp, Homo sapien
gtccaaacgagtctccgtcgccgtc

SEQ ID NO: 3758413 - DNA, 25 bp, Homo sapien
aaacgagtctccgtcgccgtcctcg

SEQ ID NO: 3758414 - DNA, 25 bp, Homo sapien
acgagtctccgtcgccgtcctcgtc

SEQ ID NO: 3758415 - DNA, 25 bp, Homo sapien
ccaaacgagtctccgtcgccgtcct

SEQ ID NO: 3758416 - DNA, 25 bp, Homo sapien
cgatgcctggaaagcgatccttctc

SEQ ID NO: 3758417 - DNA, 25 bp, Homo sapien
gatccttctcaaaggctcggaggag

SEQ ID NO: 3758418 - DNA, 25 bp, Homo sapien
ggtgctgcctcagctggcgtgacct

SEQ ID NO: 3758419 - DNA, 25 bp, Homo sapien
ggtgcctggcccttcgattctgaaa

SEQ ID NO: 3758420 - DNA, 25 bp, Homo sapien
gccggtgtgggcgaaggcgacccac

SEQ ID NO: 3758421 - DNA, 25 bp, Homo sapien
gcgccggtgtgggcgaaggcgaccc

SEQ ID NO: 3758422 - DNA, 25 bp, Homo sapien
cgccggtgtgggcgaaggcgaccca

SEQ ID NO: 3758423 - DNA, 25 bp, Homo sapien
agcgaggcggcctcttccgaggcct

SEQ ID NO: 3758424 - DNA, 25 bp, Homo sapien
gcccggtattcttcctcgctgaggg

SEQ ID NO: 3758425 - DNA, 25 bp, Homo sapien
agaaactccgggctcgccaggagct

SEQ ID NO: 3758426 - DNA, 25 bp, Homo sapien
gagaggttgcgcctgctgcagaaac

SEQ ID NO: 3758427 - DNA, 25 bp, Homo sapien
catttccacgtagaagaccagagcg

SEQ ID NO: 3758428 - DNA, 25 bp, Homo sapien
ggcgtgtggctctcgttcatttcca

SEQ ID NO: 3758429 - DNA, 25 bp, Homo sapien
tgacgatggattcccgcgtgcggca

SEQ ID NO: 3758430 - DNA, 25 bp, Homo sapien
tccccggcgtgatggcctgacgatg

SEQ ID NO: 3758431 - DNA, 25 bp, Homo sapien
gctcccacgcgtcggcagcagggag

SEQ ID NO: 3758432 - DNA, 25 bp, Homo sapien
ctctccagggatcccgcgggaacgg

SEQ ID NO: 3758433 - DNA, 25 bp, Homo sapien
ccgcgggaacgggaagccgctctct

SEQ ID NO: 3758434 - DNA, 25 bp, Homo sapien
cgctctctgggctcccacgcgtcgg

SEQ ID NO: 3758435 - DNA, 25 bp, Homo sapien
tgctgtccgaaggtgtcgggagggc

SEQ ID NO: 3758436 - DNA, 25 bp, Homo sapien
tgtccgaaggtgtcgggagggccat

SEQ ID NO: 3758437 - DNA, 25 bp, Homo sapien
ggagggtgctgtccgaaggtgtcgg

SEQ ID NO: 3758438 - DNA, 25 bp, Homo sapien
gggagggtgctgtccgaaggtgtcg

SEQ ID NO: 3758439 - DNA, 25 bp, Homo sapien
gtccaaacgagtctccgtcgccgtc

SEQ ID NO: 3758440 - DNA, 25 bp, Homo sapien
acgagtctccgtcgccgtcctcgtc

SEQ ID NO: 3758441 - DNA, 25 bp, Homo sapien
aaacgagtctccgtcgccgtcctcg

SEQ ID NO: 3758442 - DNA, 25 bp, Homo sapien
ccaaacgagtctccgtcgccgtcct

SEQ ID NO: 3758443 - DNA, 25 bp, Homo sapien
cgatgcctggaaagcgatccttctc

SEQ ID NO: 3758444 - DNA, 25 bp, Homo sapien
gatccttctcaaaggctcggaggag

SEQ ID NO: 3758445 - DNA, 25 bp, Homo sapien
ggtgctgcctcagctggcgtgacct

SEQ ID NO: 3758446 - DNA, 25 bp, Homo sapien
ggtgcctggcccttcgattctgaaa

SEQ ID NO: 3758447 - DNA, 25 bp, Homo sapien
ccgcctgcctgcgcgggcgccctgc

SEQ ID NO: 3758448 - DNA, 25 bp, Homo sapien
ccgggggccgcgctgcacaggccgc

SEQ ID NO: 3758449 - DNA, 25 bp, Homo sapien
aggccgcctgcctgcgcgggcgccc

SEQ ID NO: 3758450 - DNA, 25 bp, Homo sapien
gcctgcctgcgcgggcgccctgcca

SEQ ID NO: 3758451 - DNA, 25 bp, Homo sapien
agaaactccgggctcgccaggagct

SEQ ID NO: 3758452 - DNA, 25 bp, Homo sapien
agcgaggcggcctcttccgaggcct

SEQ ID NO: 3758453 - DNA, 25 bp, Homo sapien
gagaggttgcgcctgctgcagaaac

SEQ ID NO: 3758454 - DNA, 25 bp, Homo sapien
gcccggtattcttcctcgctgaggg

SEQ ID NO: 3758455 - DNA, 25 bp, Homo sapien
catttccacgtagaagaccagagcg

SEQ ID NO: 3758456 - DNA, 25 bp, Homo sapien
ggcgtgtggctctcgttcatttcca

SEQ ID NO: 3758457 - DNA, 25 bp, Homo sapien
tccccggcgtgatggcctgacgatg

SEQ ID NO: 3758458 - DNA, 25 bp, Homo sapien
tgacgatggattcccgcgtgcggca

SEQ ID NO: 3758459 - DNA, 25 bp, Homo sapien
gctcccacgcgtcggcagcagggag

SEQ ID NO: 3758460 - DNA, 25 bp, Homo sapien
ctctccagggatcccgcgggaacgg

SEQ ID NO: 3758461 - DNA, 25 bp, Homo sapien
cgctctctgggctcccacgcgtcgg

SEQ ID NO: 3758462 - DNA, 25 bp, Homo sapien
ccgcgggaacgggaagccgctctct

SEQ ID NO: 3758463 - DNA, 25 bp, Homo sapien
tgctgtccgaaggtgtcgggagggc

SEQ ID NO: 3758464 - DNA, 25 bp, Homo sapien
tgtccgaaggtgtcgggagggccat

SEQ ID NO: 3758465 - DNA, 25 bp, Homo sapien
ggagggtgctgtccgaaggtgtcgg

SEQ ID NO: 3758466 - DNA, 25 bp, Homo sapien
gggagggtgctgtccgaaggtgtcg

SEQ ID NO: 3758467 - DNA, 25 bp, Homo sapien
acgagtctccgtcgccgtcctcgtc

SEQ ID NO: 3758468 - DNA, 25 bp, Homo sapien
gtccaaacgagtctccgtcgccgtc

SEQ ID NO: 3758469 - DNA, 25 bp, Homo sapien
aaacgagtctccgtcgccgtcctcg

SEQ ID NO: 3758470 - DNA, 25 bp, Homo sapien
ccaaacgagtctccgtcgccgtcct

SEQ ID NO: 3758471 - DNA, 25 bp, Homo sapien
gatccttctcaaaggctcggaggag

SEQ ID NO: 3758472 - DNA, 25 bp, Homo sapien
cgatgcctggaaagcgatccttctc

SEQ ID NO: 3758473 - DNA, 25 bp, Homo sapien
ggtgctgcctcagctggcgtgacct

SEQ ID NO: 3758474 - DNA, 25 bp, Homo sapien
ggtgcctggcccttcgattctgaaa

SEQ ID NO: 3758475 - DNA, 25 bp, Homo sapien
gcccggtattcttcctcgctgaggg

SEQ ID NO: 3758476 - DNA, 25 bp, Homo sapien
agcgaggcggcctcttccgaggcct

SEQ ID NO: 3758477 - DNA, 25 bp, Homo sapien
agaaactccgggctcgccaggagct

SEQ ID NO: 3758478 - DNA, 25 bp, Homo sapien
gagaggttgcgcctgctgcagaaac

SEQ ID NO: 3758479 - DNA, 25 bp, Homo sapien
gacaacgaaactctggtcttcactg

SEQ ID NO: 3758480 - DNA, 25 bp, Homo sapien
ctgtggacatgccacactaccaggt

SEQ ID NO: 3758481 - DNA, 25 bp, Homo sapien
ggacatgccacactaccaggtgctc

SEQ ID NO: 3758482 - DNA, 25 bp, Homo sapien
cttaaggacaacgaaactctggtct

SEQ ID NO: 3758483 - DNA, 25 bp, Homo sapien
ttcctcaatggcctgcagccacgtc

SEQ ID NO: 3758484 - DNA, 25 bp, Homo sapien
caatggcctgcagccacgtctccca

SEQ ID NO: 3758485 - DNA, 25 bp, Homo sapien
ctcaatggcctgcagccacgtctcc

SEQ ID NO: 3758486 - DNA, 25 bp, Homo sapien
atggcctgcagccacgtctcccagg

SEQ ID NO: 3758487 - DNA, 25 bp, Homo sapien
taggaggagcaggagcttccttcgc

SEQ ID NO: 3758488 - DNA, 25 bp, Homo sapien
accttcactttggcttcggctttag

SEQ ID NO: 3758489 - DNA, 25 bp, Homo sapien
actttggcttcggctttaggaggag

SEQ ID NO: 3758490 - DNA, 25 bp, Homo sapien
ggaggagcaggagcttccttcgctt

SEQ ID NO: 3758491 - DNA, 25 bp, Homo sapien
acatgcggatcttcttttttgcgtg

SEQ ID NO: 3758492 - DNA, 25 bp, Homo sapien
tcttcttttttgcgtgtggctgcgg

SEQ ID NO: 3758493 - DNA, 25 bp, Homo sapien
cttttttgcgtgtggctgcggacac

SEQ ID NO: 3758494 - DNA, 25 bp, Homo sapien
cggatcttcttttttgcgtgtggct

SEQ ID NO: 3758495 - DNA, 25 bp, Homo sapien
ttttcttctatcttcttccggccga

SEQ ID NO: 3758496 - DNA, 25 bp, Homo sapien
gtgaacacaagcgtgttgttttctt

SEQ ID NO: 3758497 - DNA, 25 bp, Homo sapien
cacagtgaacacaagcgtgttgttt

SEQ ID NO: 3758498 - DNA, 25 bp, Homo sapien
tgttgttttcttctatcttcttccg

SEQ ID NO: 3758499 - DNA, 25 bp, Homo sapien
ttgttacaacatcgaaagcatcata

SEQ ID NO: 3758500 - DNA, 25 bp, Homo sapien
cttgttctctttatcaggacaaatc

SEQ ID NO: 3758501 - DNA, 25 bp, Homo sapien
gttctctttatcaggacaaatcagg

SEQ ID NO: 3758502 - DNA, 25 bp, Homo sapien
aattttgttacaacatcgaaagcat

SEQ ID NO: 3758503 - DNA, 25 bp, Homo sapien
tctatctgggctctcaaccaattgg

SEQ ID NO: 3758504 - DNA, 25 bp, Homo sapien
gctctcaaccaattggatggtgcct

SEQ ID NO: 3758505 - DNA, 25 bp, Homo sapien
cttccttgttattctatctgggctc

SEQ ID NO: 3758506 - DNA, 25 bp, Homo sapien
gttattctatctgggctctcaacca

SEQ ID NO: 3758507 - DNA, 25 bp, Homo sapien
tagcacagctggtctatatctctta

SEQ ID NO: 3758508 - DNA, 25 bp, Homo sapien
taacaaatgacaaattgctggagga

SEQ ID NO: 3758509 - DNA, 25 bp, Homo sapien
agctggtctatatctcttagaactg

SEQ ID NO: 3758510 - DNA, 25 bp, Homo sapien
catactagagaactgaaaaccacaa

SEQ ID NO: 3758511 - DNA, 25 bp, Homo sapien
attagatcgtgtgattatatttgac

SEQ ID NO: 3758512 - DNA, 25 bp, Homo sapien
cagccctttgagttcggttgagttt

SEQ ID NO: 3758513 - DNA, 25 bp, Homo sapien
ttgacgcgctgttcagccctttgag

SEQ ID NO: 3758514 - DNA, 25 bp, Homo sapien
tatttgacaggtcttaattgacgcg

SEQ ID NO: 3758515 - DNA, 25 bp, Homo sapien
catgtgtgaggtcattatcccaggt

SEQ ID NO: 3758516 - DNA, 25 bp, Homo sapien
taatttttggaaaacagcagattgg

SEQ ID NO: 3758517 - DNA, 25 bp, Homo sapien
aacagcagattggagacagatgggc

SEQ ID NO: 3758518 - DNA, 25 bp, Homo sapien
ccatgtgtgaggtcattatcccagg

SEQ ID NO: 3758519 - DNA, 25 bp, Homo sapien
ttcacaaatctccttacaagtccca

SEQ ID NO: 3758520 - DNA, 25 bp, Homo sapien
acttcacaaatctccttacaagtcc

SEQ ID NO: 3758521 - DNA, 25 bp, Homo sapien
acaaatctccttacaagtcccacag

SEQ ID NO: 3758522 - DNA, 25 bp, Homo sapien
tgacttcacaaatctccttacaagt

SEQ ID NO: 3758523 - DNA, 25 bp, Homo sapien
ggcagccaaacagctggcagaggcc

SEQ ID NO: 3758524 - DNA, 25 bp, Homo sapien
gggcagccaaacagctggcagaggc

SEQ ID NO: 3758525 - DNA, 25 bp, Homo sapien
gatgcccactccatagaggactcca

SEQ ID NO: 3758526 - DNA, 25 bp, Homo sapien
ctgatgcccactccatagaggactc

SEQ ID NO: 3758527 - DNA, 25 bp, Homo sapien
tgatgcccactccatagaggactcc

SEQ ID NO: 3758528 - DNA, 25 bp, Homo sapien
tgcccactccatagaggactccaca

SEQ ID NO: 3758529 - DNA, 25 bp, Homo sapien
tggcttcatcttatctgtgcgatag

SEQ ID NO: 3758530 - DNA, 25 bp, Homo sapien
gcttcatcttatctgtgcgataggg

SEQ ID NO: 3758531 - DNA, 25 bp, Homo sapien
ggcttcatcttatctgtgcgatagg

SEQ ID NO: 3758532 - DNA, 25 bp, Homo sapien
attaacaagcgtatagtgacacatg

SEQ ID NO: 3758533 - DNA, 25 bp, Homo sapien
aaattaacaagcgtatagtgacaca

SEQ ID NO: 3758534 - DNA, 25 bp, Homo sapien
acaaattaacaagcgtatagtgaca

SEQ ID NO: 3758535 - DNA, 25 bp, Homo sapien
cacaaattaacaagcgtatagtgac

SEQ ID NO: 3758536 - DNA, 25 bp, Homo sapien
taggccacctcctcctcggcatact

SEQ ID NO: 3758537 - DNA, 25 bp, Homo sapien
aggccacctcctcctcggcatactc

SEQ ID NO: 3758538 - DNA, 25 bp, Homo sapien
gccacctcctcctcggcatactcct

SEQ ID NO: 3758539 - DNA, 25 bp, Homo sapien
ctaggccacctcctcctcggcatac

SEQ ID NO: 3758540 - DNA, 25 bp, Homo sapien
cctcggccgtggcatcctgatattg

SEQ ID NO: 3758541 - DNA, 25 bp, Homo sapien
cctgatattgctgatattcagacac

SEQ ID NO: 3758542 - DNA, 25 bp, Homo sapien
tcggccgtggcatcctgatattgct

SEQ ID NO: 3758543 - DNA, 25 bp, Homo sapien
atcctgatattgctgatattcagac

SEQ ID NO: 3758544 - DNA, 25 bp, Homo sapien
tgtaaactgctctgagacacgcttg

SEQ ID NO: 3758545 - DNA, 25 bp, Homo sapien
ggccttgcgcctgaacattgctgta

SEQ ID NO: 3758546 - DNA, 25 bp, Homo sapien
tgctgtaaactgctctgagacacgc

SEQ ID NO: 3758547 - DNA, 25 bp, Homo sapien
actgctctgagacacgcttgaagag

SEQ ID NO: 3758548 - DNA, 25 bp, Homo sapien
tattcccaatgaaggtggctgacat

SEQ ID NO: 3758549 - DNA, 25 bp, Homo sapien
ggatggccgtattattcccaatgaa

SEQ ID NO: 3758550 - DNA, 25 bp, Homo sapien
cgtattattcccaatgaaggtggct

SEQ ID NO: 3758551 - DNA, 25 bp, Homo sapien
ctggatggccgtattattcccaatg

SEQ ID NO: 3758552 - DNA, 25 bp, Homo sapien
ttggggagccagtcagcaaagtaac

SEQ ID NO: 3758553 - DNA, 25 bp, Homo sapien
gccagtcagcaaagtaactgctgtt

SEQ ID NO: 3758554 - DNA, 25 bp, Homo sapien
gttgttggggagccagtcagcaaag

SEQ ID NO: 3758555 - DNA, 25 bp, Homo sapien
tgttggggagccagtcagcaaagta

SEQ ID NO: 3758556 - DNA, 25 bp, Homo sapien
cttgaatgttgaacatttgttcatc

SEQ ID NO: 3758557 - DNA, 25 bp, Homo sapien
tatcttgaatgttgaacatttgttc

SEQ ID NO: 3758558 - DNA, 25 bp, Homo sapien
cttatcttgaatgttgaacatttgt

SEQ ID NO: 3758559 - DNA, 25 bp, Homo sapien
tcttgaatgttgaacatttgttcat

SEQ ID NO: 3758560 - DNA, 25 bp, Homo sapien
cgcgccttcggtgtagtgtcccttg

SEQ ID NO: 3758561 - DNA, 25 bp, Homo sapien
cggatcttactgagcagaagggtac

SEQ ID NO: 3758562 - DNA, 25 bp, Homo sapien
cttactgagcagaagggtacccatc

SEQ ID NO: 3758563 - DNA, 25 bp, Homo sapien
ctcccggatcttactgagcagaagg

SEQ ID NO: 3758564 - DNA, 25 bp, Homo sapien
tgtctggcctgaagacctgcccgaa

SEQ ID NO: 3758565 - DNA, 25 bp, Homo sapien
tggcctgaagacctgcccgaagggc

SEQ ID NO: 3758566 - DNA, 25 bp, Homo sapien
tctggcctgaagacctgcccgaagg

SEQ ID NO: 3758567 - DNA, 25 bp, Homo sapien
ttgtctggcctgaagacctgcccga

SEQ ID NO: 3758568 - DNA, 25 bp, Homo sapien
cgctggcctcgttgtagtacacgtt

SEQ ID NO: 3758569 - DNA, 25 bp, Homo sapien
aggtggctgtccccgtggtaggtgc

SEQ ID NO: 3758570 - DNA, 25 bp, Homo sapien
cctcgttgtagtacacgttgatgcg

SEQ ID NO: 3758571 - DNA, 25 bp, Homo sapien
cgttgtagtacacgttgatgcgctc

SEQ ID NO: 3758572 - DNA, 25 bp, Homo sapien
gcccaggggccgcaatgcatgggca

SEQ ID NO: 3758573 - DNA, 25 bp, Homo sapien
ccaggggccgcaatgcatgggcacc

SEQ ID NO: 3758574 - DNA, 25 bp, Homo sapien
cgccactgccaacaccttccccggc

SEQ ID NO: 3758575 - DNA, 25 bp, Homo sapien
gggccgcaatgcatgggcaccgccc

SEQ ID NO: 3758576 - DNA, 25 bp, Homo sapien
ggctaggccctcagagccccggctg

SEQ ID NO: 3758577 - DNA, 25 bp, Homo sapien
ccggcaggcccgggctaggccctca

SEQ ID NO: 3758578 - DNA, 25 bp, Homo sapien
caggcccgggctaggccctcagagc

SEQ ID NO: 3758579 - DNA, 25 bp, Homo sapien
taggccctcagagccccggctgcca

SEQ ID NO: 3758580 - DNA, 25 bp, Homo sapien
ccgatctgcgtgagcacgatctccc

SEQ ID NO: 3758581 - DNA, 25 bp, Homo sapien
gcccgatctgcgtgagcacgatctc

SEQ ID NO: 3758582 - DNA, 25 bp, Homo sapien
tgcccgatctgcgtgagcacgatct

SEQ ID NO: 3758583 - DNA, 25 bp, Homo sapien
gatctgcgtgagcacgatctccctc

SEQ ID NO: 3758584 - DNA, 25 bp, Homo sapien
gattaggacggcaggagaaacgtga

SEQ ID NO: 3758585 - DNA, 25 bp, Homo sapien
catctgttggaaagctcaggtgtcc

SEQ ID NO: 3758586 - DNA, 25 bp, Homo sapien
tgtggatcccctggcgctgaacatc

SEQ ID NO: 3758587 - DNA, 25 bp, Homo sapien
cgcctcggattcggctcccagaata

SEQ ID NO: 3758588 - DNA, 25 bp, Homo sapien
gccacatgactaggctgcaaagttt

SEQ ID NO: 3758589 - DNA, 25 bp, Homo sapien
tatatatccctagggcatgacaaaa

SEQ ID NO: 3758590 - DNA, 25 bp, Homo sapien
gacaacatgaatgacctttgcttcg

SEQ ID NO: 3758591 - DNA, 25 bp, Homo sapien
gtgcttagacatttttccaacagaa

SEQ ID NO: 3758592 - DNA, 25 bp, Homo sapien
cacaggagctatcttatgtacagaa

SEQ ID NO: 3758593 - DNA, 25 bp, Homo sapien
cacaatctccattgtcagggcccag

SEQ ID NO: 3758594 - DNA, 25 bp, Homo sapien
tcaggaccaaggcaccaatgctcat

SEQ ID NO: 3758595 - DNA, 25 bp, Homo sapien
gggcccagtgctttactcctaagat

SEQ ID NO: 3758596 - DNA, 25 bp, Homo sapien
cctgaatttggactgggtttggcct

SEQ ID NO: 3758597 - DNA, 25 bp, Homo sapien
tctcaccggggtgcttggtacacag

SEQ ID NO: 3758598 - DNA, 25 bp, Homo sapien
tcaatactgatattgcagccgcaat

SEQ ID NO: 3758599 - DNA, 25 bp, Homo sapien
atacagcatccagactctcaccggg

SEQ ID NO: 3758600 - DNA, 25 bp, Homo sapien
ttagaacgtccaggaccaagccttg

SEQ ID NO: 3758601 - DNA, 25 bp, Homo sapien
tcctcctgtggcagataggcaagcg

SEQ ID NO: 3758602 - DNA, 25 bp, Homo sapien
cagtcctcctgtggcagataggcaa

SEQ ID NO: 3758603 - DNA, 25 bp, Homo sapien
agtcctcctgtggcagataggcaag

SEQ ID NO: 3758604 - DNA, 25 bp, Homo sapien
gtcctcctgtggcagataggcaagc

SEQ ID NO: 3758605 - DNA, 25 bp, Homo sapien
tctgagctcaggttgccccagaggc

SEQ ID NO: 3758606 - DNA, 25 bp, Homo sapien
ctctgagctcaggttgccccagagg

SEQ ID NO: 3758607 - DNA, 25 bp, Homo sapien
ttgtgcacactgtagagggctggaa

SEQ ID NO: 3758608 - DNA, 25 bp, Homo sapien
attgtgcacactgtagagggctgga

SEQ ID NO: 3758609 - DNA, 25 bp, Homo sapien
tgaggccaggagaggccagtcagag

SEQ ID NO: 3758610 - DNA, 25 bp, Homo sapien
ctgaggccaggagaggccagtcaga

SEQ ID NO: 3758611 - DNA, 25 bp, Homo sapien
gaggccaggagaggccagtcagagg

SEQ ID NO: 3758612 - DNA, 25 bp, Homo sapien
aggccaggagaggccagtcagaggc

SEQ ID NO: 3758613 - DNA, 25 bp, Homo sapien
tgggcgacagcttgaacaggaggta

SEQ ID NO: 3758614 - DNA, 25 bp, Homo sapien
ctgggcgacagcttgaacaggaggt

SEQ ID NO: 3758615 - DNA, 25 bp, Homo sapien
gcgacagcttgaacaggaggtaggt

SEQ ID NO: 3758616 - DNA, 25 bp, Homo sapien
ggcgacagcttgaacaggaggtagg

SEQ ID NO: 3758617 - DNA, 25 bp, Homo sapien
agcaacaaaggtgttgcctggccgc

SEQ ID NO: 3758618 - DNA, 25 bp, Homo sapien
aaggtgttgcctggccgcccccagg

SEQ ID NO: 3758619 - DNA, 25 bp, Homo sapien
caaaggtgttgcctggccgccccca

SEQ ID NO: 3758620 - DNA, 25 bp, Homo sapien
caacaaaggtgttgcctggccgccc

SEQ ID NO: 3758621 - DNA, 25 bp, Homo sapien
atctccttgtttagagtggggagtc

SEQ ID NO: 3758622 - DNA, 25 bp, Homo sapien
catctccttgtttagagtggggagt

SEQ ID NO: 3758623 - DNA, 25 bp, Homo sapien
ctcctcatcactccaagttgacatc

SEQ ID NO: 3758624 - DNA, 25 bp, Homo sapien
tggtcatcagctccaaggcaggact

SEQ ID NO: 3758625 - DNA, 25 bp, Homo sapien
ctctcctgcctcttgaagcccagct

SEQ ID NO: 3758626 - DNA, 25 bp, Homo sapien
tctcctgcctcttgaagcccagctc

SEQ ID NO: 3758627 - DNA, 25 bp, Homo sapien
tgagaagtgtggtcatcagctccaa

SEQ ID NO: 3758628 - DNA, 25 bp, Homo sapien
ctgcaagtcagagagcgggtccagc

SEQ ID NO: 3758629 - DNA, 25 bp, Homo sapien
aagtcagagagcgggtccagcttca

SEQ ID NO: 3758630 - DNA, 25 bp, Homo sapien
gcaagtcagagagcgggtccagctt

SEQ ID NO: 3758631 - DNA, 25 bp, Homo sapien
tgcaagtcagagagcgggtccagct

SEQ ID NO: 3758632 - DNA, 25 bp, Homo sapien
gtctccagggcaggtactgcagctc

SEQ ID NO: 3758633 - DNA, 25 bp, Homo sapien
cgtgtctccagggcaggtactgcag

SEQ ID NO: 3758634 - DNA, 25 bp, Homo sapien
cagggcaggtactgcagctccacca

SEQ ID NO: 3758635 - DNA, 25 bp, Homo sapien
ccagggcaggtactgcagctccacc

SEQ ID NO: 3758636 - DNA, 25 bp, Homo sapien
caccaccttgggtggaagcacgaca

SEQ ID NO: 3758637 - DNA, 25 bp, Homo sapien
aggagcaccaccttgggtggaagca

SEQ ID NO: 3758638 - DNA, 25 bp, Homo sapien
ccttgggtggaagcacgacagtgca

SEQ ID NO: 3758639 - DNA, 25 bp, Homo sapien
gggtggaagcacgacagtgcactca

SEQ ID NO: 3758640 - DNA, 25 bp, Homo sapien
tgccccacaagatgcacttatgtgt

SEQ ID NO: 3758641 - DNA, 25 bp, Homo sapien
cccacaagatgcacttatgtgtgcc

SEQ ID NO: 3758642 - DNA, 25 bp, Homo sapien
acaagatgcacttatgtgtgccacc

SEQ ID NO: 3758643 - DNA, 25 bp, Homo sapien
cacaagatgcacttatgtgtgccac

SEQ ID NO: 3758644 - DNA, 25 bp, Homo sapien
ggctgttacactgtcgtggtgtagc

SEQ ID NO: 3758645 - DNA, 25 bp, Homo sapien
cactgtcgtggtgtagctgctgcca

SEQ ID NO: 3758646 - DNA, 25 bp, Homo sapien
tgttacactgtcgtggtgtagctgc

SEQ ID NO: 3758647 - DNA, 25 bp, Homo sapien
cacggggctgttacactgtcgtggt

SEQ ID NO: 3758648 - DNA, 25 bp, Homo sapien
gcccagctctggggcagaccagtgg

SEQ ID NO: 3758649 - DNA, 25 bp, Homo sapien
ctaatgaagaggagcccggggctgg

SEQ ID NO: 3758650 - DNA, 25 bp, Homo sapien
tggggcagaccagtggcaatcgatc

SEQ ID NO: 3758651 - DNA, 25 bp, Homo sapien
taatgaagaggagcccggggctgga

SEQ ID NO: 3758652 - DNA, 25 bp, Homo sapien
agattgttgttggtgaggcaggtga

SEQ ID NO: 3758653 - DNA, 25 bp, Homo sapien
ctgagattgttgttggtgaggcagg

SEQ ID NO: 3758654 - DNA, 25 bp, Homo sapien
ttggtgaggcaggtgaagtttggcc

SEQ ID NO: 3758655 - DNA, 25 bp, Homo sapien
gattgttgttggtgaggcaggtgaa

SEQ ID NO: 3758656 - DNA, 25 bp, Homo sapien
cgagcagacacaggtgcagatgcag

SEQ ID NO: 3758657 - DNA, 25 bp, Homo sapien
ccaagacagagactcccgagcagac

SEQ ID NO: 3758658 - DNA, 25 bp, Homo sapien
cccccaagacagagactcccgagca

SEQ ID NO: 3758659 - DNA, 25 bp, Homo sapien
ccgagcagacacaggtgcagatgca

SEQ ID NO: 3758660 - DNA, 25 bp, Homo sapien
cataacactttgtggtctctttcta

SEQ ID NO: 3758661 - DNA, 25 bp, Homo sapien
tagccatcgctctatcgcgcgtgtg

SEQ ID NO: 3758662 - DNA, 25 bp, Homo sapien
tttgccagagattaatatagttagt

SEQ ID NO: 3758663 - DNA, 25 bp, Homo sapien
cgtctatcctaatcctagttttgca

SEQ ID NO: 3758664 - DNA, 25 bp, Homo sapien
aggaagcgtttgtcggcgcggcacg

SEQ ID NO: 3758665 - DNA, 25 bp, Homo sapien
tgtgccccgctttcggtcaggcctc

SEQ ID NO: 3758666 - DNA, 25 bp, Homo sapien
ggcacgtcgtgtgctagcccgggag

SEQ ID NO: 3758667 - DNA, 25 bp, Homo sapien
aagccgcggagtcgcgtgagcaccg

SEQ ID NO: 3758668 - DNA, 25 bp, Homo sapien
tgggtgtgccgtcatctaacataaa

SEQ ID NO: 3758669 - DNA, 25 bp, Homo sapien
aaggcttcagcattccactgggtgt

SEQ ID NO: 3758670 - DNA, 25 bp, Homo sapien
aagagagaaataatcgagttgtagc

SEQ ID NO: 3758671 - DNA, 25 bp, Homo sapien
tagcacccacagattgagatcatcc

SEQ ID NO: 3758672 - DNA, 25 bp, Homo sapien
aacacgctactgtattgccagggaa

SEQ ID NO: 3758673 - DNA, 25 bp, Homo sapien
gggaagatggatatcgaaggtatca

SEQ ID NO: 3758674 - DNA, 25 bp, Homo sapien
taaatctttttggattcctcaaaca

SEQ ID NO: 3758675 - DNA, 25 bp, Homo sapien
gaaggtatcattggttgatattccc

SEQ ID NO: 3758676 - DNA, 25 bp, Homo sapien
cgtttgctcttctcacgggacagca

SEQ ID NO: 3758677 - DNA, 25 bp, Homo sapien
gggctcttcgtttgctcttctcacg

SEQ ID NO: 3758678 - DNA, 25 bp, Homo sapien
tcttcgtttgctcttctcacgggac

SEQ ID NO: 3758679 - DNA, 25 bp, Homo sapien
tcagggctcttcgtttgctcttctc

SEQ ID NO: 3758680 - DNA, 25 bp, Homo sapien
tccactgctgtcagtgtccttactg

SEQ ID NO: 3758681 - DNA, 25 bp, Homo sapien
tgtccttactgtcttccgggttaga

SEQ ID NO: 3758682 - DNA, 25 bp, Homo sapien
tccaagatcaggtgagatcaggtgt

SEQ ID NO: 3758683 - DNA, 25 bp, Homo sapien
caggtgtgttcagggtgatatgacc

SEQ ID NO: 3758684 - DNA, 25 bp, Homo sapien
caagatcaggtgagatcaggtgtgt

SEQ ID NO: 3758685 - DNA, 25 bp, Homo sapien
gtgtgttcagggtgatatgaccgta

SEQ ID NO: 3758686 - DNA, 25 bp, Homo sapien
cataaccaaagaggtcctcgttggg

SEQ ID NO: 3758687 - DNA, 25 bp, Homo sapien
ctctaggagcttgacctcacagtga

SEQ ID NO: 3758688 - DNA, 25 bp, Homo sapien
gagcttgacctcacagtgaatattg

SEQ ID NO: 3758689 - DNA, 25 bp, Homo sapien
atgaatcgctagatgcccagtatgg

SEQ ID NO: 3758690 - DNA, 25 bp, Homo sapien
gatgcccagtatggacaactctgag

SEQ ID NO: 3758691 - DNA, 25 bp, Homo sapien
taactccagcctactgtagctttct

SEQ ID NO: 3758692 - DNA, 25 bp, Homo sapien
tgttcttaacaaagcctaccctcag

SEQ ID NO: 3758693 - DNA, 25 bp, Homo sapien
ggaaatatacagcttcaaccccctc

SEQ ID NO: 3758694 - DNA, 25 bp, Homo sapien
tcaggagacatggtattaccaaagc

SEQ ID NO: 3758695 - DNA, 25 bp, Homo sapien
tagagacagacgtgtgcttggacct

SEQ ID NO: 3758696 - DNA, 25 bp, Homo sapien
tgtgacttgtagaccaaagaactgg

SEQ ID NO: 3758697 - DNA, 25 bp, Homo sapien
gtctgtcataagaagcccctgggca

SEQ ID NO: 3758698 - DNA, 25 bp, Homo sapien
gatactgtaattcatgggcaaggca

SEQ ID NO: 3758699 - DNA, 25 bp, Homo sapien
tggctaagtaggaagggcacattgc

SEQ ID NO: 3758700 - DNA, 25 bp, Homo sapien
taagcagccgctgaccaaagcttgg

SEQ ID NO: 3758701 - DNA, 25 bp, Homo sapien
cactcttggtggatacttgtgaaat

SEQ ID NO: 3758702 - DNA, 25 bp, Homo sapien
taccctggaatagcgtacatgctcc

SEQ ID NO: 3758703 - DNA, 25 bp, Homo sapien
ctcttttcagacacagcggtttttg

SEQ ID NO: 3758704 - DNA, 25 bp, Homo sapien
tgctgctggaacacatcctactgct

SEQ ID NO: 3758705 - DNA, 25 bp, Homo sapien
aatgctcctccgaagtttttcaggg

SEQ ID NO: 3758706 - DNA, 25 bp, Homo sapien
acctgccgccggaaaagatgaagct

SEQ ID NO: 3758707 - DNA, 25 bp, Homo sapien
ttgacaaactactgccaaatggtgc

SEQ ID NO: 3758708 - DNA, 25 bp, Homo sapien
aaaagtattctccaggtttgtcagg

SEQ ID NO: 3758709 - DNA, 25 bp, Homo sapien
tggagatgtcagaaccgagaacact

SEQ ID NO: 3758710 - DNA, 25 bp, Homo sapien
gatccacccctatgagagcaagtaa

SEQ ID NO: 3758711 - DNA, 25 bp, Homo sapien
ggagtacggcatccggtgcatgtca

SEQ ID NO: 3758712 - DNA, 25 bp, Homo sapien
cataactgtagggtacagggcatgg

SEQ ID NO: 3758713 - DNA, 25 bp, Homo sapien
gattgactcaactgtagggtacagg

SEQ ID NO: 3758714 - DNA, 25 bp, Homo sapien
taaggtgtctggtgcatgtcactag

SEQ ID NO: 3758715 - DNA, 25 bp, Homo sapien
ggtgtctggtgcatgtcactaggtt

SEQ ID NO: 3758716 - DNA, 25 bp, Homo sapien
ggagtacggcatccggtgcatgtca

SEQ ID NO: 3758717 - DNA, 25 bp, Homo sapien
cataactgtagggtacagggcatgg

SEQ ID NO: 3758718 - DNA, 25 bp, Homo sapien
gattgactcaactgtagggtacagg

SEQ ID NO: 3758719 - DNA, 25 bp, Homo sapien
taaggtgtctggtgcatgtcactag

SEQ ID NO: 3758720 - DNA, 25 bp, Homo sapien
aacagcacctttgcctggtccatga

SEQ ID NO: 3758721 - DNA, 25 bp, Homo sapien
ggaggaacagcacctttgcctggtc

SEQ ID NO: 3758722 - DNA, 25 bp, Homo sapien
gaggaacagcacctttgcctggtcc

SEQ ID NO: 3758723 - DNA, 25 bp, Homo sapien
ggaacagcacctttgcctggtccat

SEQ ID NO: 3758724 - DNA, 25 bp, Homo sapien
gacccctagagcaagcaagctgggc

SEQ ID NO: 3758725 - DNA, 25 bp, Homo sapien
tgtgcccacgaaagtccgagtcccg

SEQ ID NO: 3758726 - DNA, 25 bp, Homo sapien
tgcagagcagaaacaccactggacc

SEQ ID NO: 3758727 - DNA, 25 bp, Homo sapien
aaagtccgagtcccgtttggagatg

SEQ ID NO: 3758728 - DNA, 25 bp, Homo sapien
agctgtcccagacatctttccaggg

SEQ ID NO: 3758729 - DNA, 25 bp, Homo sapien
cttcccgggattaaagctgtcccag

SEQ ID NO: 3758730 - DNA, 25 bp, Homo sapien
gtatgattatctgtactaagtaatg

SEQ ID NO: 3758731 - DNA, 25 bp, Homo sapien
tgtaggagtcacttccttcccggga

SEQ ID NO: 3758732 - DNA, 25 bp, Homo sapien
caaacgacgcagctggaggacttct

SEQ ID NO: 3758733 - DNA, 25 bp, Homo sapien
gaatcgcattccttttcgtagcaag

SEQ ID NO: 3758734 - DNA, 25 bp, Homo sapien
cttcttggttggacaccgtgggcca

SEQ ID NO: 3758735 - DNA, 25 bp, Homo sapien
aatgtttcatagtcagtgcctggcc

SEQ ID NO: 3758736 - DNA, 25 bp, Homo sapien
tactaacttcgaaggccgtatacca

SEQ ID NO: 3758737 - DNA, 25 bp, Homo sapien
ccaaagtccttctgagcgaaattca

SEQ ID NO: 3758738 - DNA, 25 bp, Homo sapien
taaaaggatgagatctagcaatggc

SEQ ID NO: 3758739 - DNA, 25 bp, Homo sapien
catgccaatcgtggctgctgtgaga

SEQ ID NO: 3758740 - DNA, 25 bp, Homo sapien
acgaccaccactccgacgatcaggt

SEQ ID NO: 3758741 - DNA, 25 bp, Homo sapien
tgatggggatgacgccgatgtccac

SEQ ID NO: 3758742 - DNA, 25 bp, Homo sapien
aaaaacccgtctcgcaggtgcatgc

SEQ ID NO: 3758743 - DNA, 25 bp, Homo sapien
aaggcttcttgttccgacccatcca

SEQ ID NO: 3758744 - DNA, 25 bp, Homo sapien
tgagcactgcccgacagtctcctcc

SEQ ID NO: 3758745 - DNA, 25 bp, Homo sapien
ttcctggcgacagcacctgtcggtg

SEQ ID NO: 3758746 - DNA, 25 bp, Homo sapien
acttggctctctctgacctgcctga

SEQ ID NO: 3758747 - DNA, 25 bp, Homo sapien
gctttatttaatagccgtggtttca

SEQ ID NO: 3758748 - DNA, 25 bp, Homo sapien
tctagcacagcatcactccacctgg

SEQ ID NO: 3758749 - DNA, 25 bp, Homo sapien
agccttctctctcggtggcttctgc

SEQ ID NO: 3758750 - DNA, 25 bp, Homo sapien
cagccttctctctcggtggcttctg

SEQ ID NO: 3758751 - DNA, 25 bp, Homo sapien
tagcacagcatcactccacctggcc

SEQ ID NO: 3758752 - DNA, 25 bp, Homo sapien
gggatcgagtcatctttcagcagga

SEQ ID NO: 3758753 - DNA, 25 bp, Homo sapien
gaaacacgtggagaagagccaccag

SEQ ID NO: 3758754 - DNA, 25 bp, Homo sapien
ttaagggccctgacattcacagagc

SEQ ID NO: 3758755 - DNA, 25 bp, Homo sapien
gaggattaagtctgcccaactggca

SEQ ID NO: 3758756 - DNA, 25 bp, Homo sapien
tggccgagggtgtgcttgctccact

SEQ ID NO: 3758757 - DNA, 25 bp, Homo sapien
tggctctccggaggaatcagcttgg

SEQ ID NO: 3758758 - DNA, 25 bp, Homo sapien
tggagagtcccattccacagcgctg

SEQ ID NO: 3758759 - DNA, 25 bp, Homo sapien
ttctcagcatggagcagccgatggt

SEQ ID NO: 3758760 - DNA, 25 bp, Homo sapien
catttgttacagaataagcaccacg

SEQ ID NO: 3758761 - DNA, 25 bp, Homo sapien
gaataagcaccacggtctagaagcc

SEQ ID NO: 3758762 - DNA, 25 bp, Homo sapien
tggcaggtaacagcagcgacatttg

SEQ ID NO: 3758763 - DNA, 25 bp, Homo sapien
accacggtctagaagcccacagagg

SEQ ID NO: 3758764 - DNA, 25 bp, Homo sapien
tctccggcagcaccattgacatact

SEQ ID NO: 3758765 - DNA, 25 bp, Homo sapien
ggcagcaccattgacatactcagca

SEQ ID NO: 3758766 - DNA, 25 bp, Homo sapien
tcccacacctcagaagaacctactg

SEQ ID NO: 3758767 - DNA, 25 bp, Homo sapien
ctgaatctccggcagcaccattgac

SEQ ID NO: 3758768 - DNA, 25 bp, Homo sapien
tatgggctctgatgaccgaggtctc

SEQ ID NO: 3758769 - DNA, 25 bp, Homo sapien
ccgtaacgcttttatgggctctgat

SEQ ID NO: 3758770 - DNA, 25 bp, Homo sapien
cagctccatggcttcgtccagtgcc

SEQ ID NO: 3758771 - DNA, 25 bp, Homo sapien
ctaccacgtagagggcatcatggcg

SEQ ID NO: 3758772 - DNA, 25 bp, Homo sapien
taatgacagcctgcgtaagcttccc

SEQ ID NO: 3758773 - DNA, 25 bp, Homo sapien
tggagtaatgacagcctgcgtaagc

SEQ ID NO: 3758774 - DNA, 25 bp, Homo sapien
gtaagcttccccataatgccgctca

SEQ ID NO: 3758775 - DNA, 25 bp, Homo sapien
cataatgccgctcaagccgtttcct

SEQ ID NO: 3758776 - DNA, 25 bp, Homo sapien
cgcgttcagggtggtatggccgtag

SEQ ID NO: 3758777 - DNA, 25 bp, Homo sapien
gagatcagacgagattgggcgcgtt

SEQ ID NO: 3758778 - DNA, 25 bp, Homo sapien
cgttcagggtggtatggccgtagac

SEQ ID NO: 3758779 - DNA, 25 bp, Homo sapien
ggcgcgttcagggtggtatggccgt

SEQ ID NO: 3758780 - DNA, 25 bp, Homo sapien
aacagccaagtcctgcctctatttt

SEQ ID NO: 3758781 - DNA, 25 bp, Homo sapien
tgaaacagccaagtcctgcctctat

SEQ ID NO: 3758782 - DNA, 25 bp, Homo sapien
gtcaagatctcaccaggaacctcaa

SEQ ID NO: 3758783 - DNA, 25 bp, Homo sapien
acctcaactgccactgttgtgaaac

SEQ ID NO: 3758784 - DNA, 25 bp, Homo sapien
tgcccatctgttgggggggggccgc

SEQ ID NO: 3758785 - DNA, 25 bp, Homo sapien
ccatctgttgggggggggccgccag

SEQ ID NO: 3758786 - DNA, 25 bp, Homo sapien
catctgttgggggggggccgccagc

SEQ ID NO: 3758787 - DNA, 25 bp, Homo sapien
ctgcccatctgttgggggggggccg

SEQ ID NO: 3758788 - DNA, 25 bp, Homo sapien
tgtgagctcagttctccgcaggaac

SEQ ID NO: 3758789 - DNA, 25 bp, Homo sapien
aggaaccccaagtagcctgtgcgtg

SEQ ID NO: 3758790 - DNA, 25 bp, Homo sapien
cgtaaatagtgaaataaccgctggc

SEQ ID NO: 3758791 - DNA, 25 bp, Homo sapien
tgggtgtctccaaaacttagtcttg

SEQ ID NO: 3758792 - DNA, 25 bp, Homo sapien
ttggcaattataatccgaacccctg

SEQ ID NO: 3758793 - DNA, 25 bp, Homo sapien
tctccaaggtgtgagtcccccagcg

SEQ ID NO: 3758794 - DNA, 25 bp, Homo sapien
ggcaattataatccgaacccctgga

SEQ ID NO: 3758795 - DNA, 25 bp, Homo sapien
tgtgagtcccccagcggtccttttg

SEQ ID NO: 3758796 - DNA, 25 bp, Homo sapien
agcctgcctcagatcagctcatcta

SEQ ID NO: 3758797 - DNA, 25 bp, Homo sapien
tatataaggaatcaaaggtttattc

SEQ ID NO: 3758798 - DNA, 25 bp, Homo sapien
ctgcctcagatcagctcatctaaca

SEQ ID NO: 3758799 - DNA, 25 bp, Homo sapien
ataaggaatcaaaggtttattctgg

SEQ ID NO: 3758800 - DNA, 25 bp, Homo sapien
ccatcaggggcagactatgagggga

SEQ ID NO: 3758801 - DNA, 25 bp, Homo sapien
ggatcctctttccactaagcggact

SEQ ID NO: 3758802 - DNA, 25 bp, Homo sapien
gggcagactatgaggggatcctctt

SEQ ID NO: 3758803 - DNA, 25 bp, Homo sapien
gactatgaggggatcctctttccac

SEQ ID NO: 3758804 - DNA, 25 bp, Homo sapien
agctgtccgggaaagctgattctga

SEQ ID NO: 3758805 - DNA, 25 bp, Homo sapien
acgaggtcacgagcctggcagctgt

SEQ ID NO: 3758806 - DNA, 25 bp, Homo sapien
tcctagatgtgtttgctgtccagtt

SEQ ID NO: 3758807 - DNA, 25 bp, Homo sapien
tcaccaattcacacgaggtcacgag

SEQ ID NO: 3758808 - DNA, 25 bp, Homo sapien
cagaaagagcagcccagcagcagag

SEQ ID NO: 3758809 - DNA, 25 bp, Homo sapien
aagagcagcccagcagcagaggaaa

SEQ ID NO: 3758810 - DNA, 25 bp, Homo sapien
gaaagagcagcccagcagcagagga

SEQ ID NO: 3758811 - DNA, 25 bp, Homo sapien
ctgcagaaagagcagcccagcagca

SEQ ID NO: 3758812 - DNA, 25 bp, Homo sapien
agcagtgtggtaggtggcaccggcc

SEQ ID NO: 3758813 - DNA, 25 bp, Homo sapien
gtggcaccggcctgacgtcctccac

SEQ ID NO: 3758814 - DNA, 25 bp, Homo sapien
tggtaggtggcaccggcctgacgtc

SEQ ID NO: 3758815 - DNA, 25 bp, Homo sapien
agtgtggtaggtggcaccggcctga

SEQ ID NO: 3758816 - DNA, 25 bp, Homo sapien
ccagacatgtggctgcactgctcct

SEQ ID NO: 3758817 - DNA, 25 bp, Homo sapien
tgccagacatgtggctgcactgctc

SEQ ID NO: 3758818 - DNA, 25 bp, Homo sapien
gtgccagacatgtggctgcactgct

SEQ ID NO: 3758819 - DNA, 25 bp, Homo sapien
agacatgtggctgcactgctcctgc

SEQ ID NO: 3758820 - DNA, 25 bp, Homo sapien
ggggaggatcctctgtggcggaaac

SEQ ID NO: 3758821 - DNA, 25 bp, Homo sapien
cttctccggttgctgcagacagaag

SEQ ID NO: 3758822 - DNA, 25 bp, Homo sapien
tgctgtgtcttctccggttgctgca

SEQ ID NO: 3758823 - DNA, 25 bp, Homo sapien
cagacagaagcacccgtgccgggga

SEQ ID NO: 3758824 - DNA, 25 bp, Homo sapien
tgggatgtcggcaggacatggccat

SEQ ID NO: 3758825 - DNA, 25 bp, Homo sapien
tctgagcggccaagtggagtcaaaa

SEQ ID NO: 3758826 - DNA, 25 bp, Homo sapien
tgactccttcctccgtgccaggagg

SEQ ID NO: 3758827 - DNA, 25 bp, Homo sapien
ggagtcaaaagccagcgaaccgtgg

SEQ ID NO: 3758828 - DNA, 25 bp, Homo sapien
aggaggcccgcagatgtgccctgat

SEQ ID NO: 3758829 - DNA, 25 bp, Homo sapien
gtgccacttttcttgctgcctccaa

SEQ ID NO: 3758830 - DNA, 25 bp, Homo sapien
tgtcagctccagatccggaactttg

SEQ ID NO: 3758831 - DNA, 25 bp, Homo sapien
tccaacgtgcattactgctgcccaa

SEQ ID NO: 3758832 - DNA, 25 bp, Homo sapien
tgctgcccaaatcggctccacgaac

SEQ ID NO: 3758833 - DNA, 25 bp, Homo sapien
tgcagacggagctggtgctgtcctc

SEQ ID NO: 3758834 - DNA, 25 bp, Homo sapien
aaaaccagcgtgacagaccagatgc

SEQ ID NO: 3758835 - DNA, 25 bp, Homo sapien
accagatgcagacggagctggtgct

SEQ ID NO: 3758836 - DNA, 25 bp, Homo sapien
tcaatctcaaaaaccagcgtgacag

SEQ ID NO: 3758837 - DNA, 25 bp, Homo sapien
agcaagactgggacgccgctgagat

SEQ ID NO: 3758838 - DNA, 25 bp, Homo sapien
gcaagactgggacgccgctgagatt

SEQ ID NO: 3758839 - DNA, 25 bp, Homo sapien
tggtgagggcatcggagagcaagac

SEQ ID NO: 3758840 - DNA, 25 bp, Homo sapien
catcggagagcaagactgggacgcc

SEQ ID NO: 3758841 - DNA, 25 bp, Homo sapien
acgtagacagtggttgggtcaggtc

SEQ ID NO: 3758842 - DNA, 25 bp, Homo sapien
tccacgtagacagtggttgggtcag

SEQ ID NO: 3758843 - DNA, 25 bp, Homo sapien
cagtggttgggtcaggtcctgaggt

SEQ ID NO: 3758844 - DNA, 25 bp, Homo sapien
gggctctcatgtccacgtagacagt

SEQ ID NO: 3758845 - DNA, 25 bp, Homo sapien
agagatgaaccaaactggcaaatga

SEQ ID NO: 3758846 - DNA, 25 bp, Homo sapien
ggtgaagaattaagtacaacagaga

SEQ ID NO: 3758847 - DNA, 25 bp, Homo sapien
agaattaagtacaacagagatgaac

SEQ ID NO: 3758848 - DNA, 25 bp, Homo sapien
gccatggagggtcaattaaaaataa

SEQ ID NO: 3758849 - DNA, 25 bp, Homo sapien
ctgaacgtgacattgcccggccggc

SEQ ID NO: 3758850 - DNA, 25 bp, Homo sapien
tcggctacgcgtgaggcctgaacgt

SEQ ID NO: 3758851 - DNA, 25 bp, Homo sapien
cccgggaagacagcgtcggctacgc

SEQ ID NO: 3758852 - DNA, 25 bp, Homo sapien
cgtgaggcctgaacgtgacattgcc

SEQ ID NO: 3758853 - DNA, 25 bp, Homo sapien
ctgtcccacggctggatgcgggcaa

SEQ ID NO: 3758854 - DNA, 25 bp, Homo sapien
tacgacccgacagtgaaaaatggga

SEQ ID NO: 3758855 - DNA, 25 bp, Homo sapien
tctgcactcaactgctagtctgtcc

SEQ ID NO: 3758856 - DNA, 25 bp, Homo sapien
taaccactgtacaaggctaaaagaa

SEQ ID NO: 3758857 - DNA, 25 bp, Homo sapien
ctgcagcagtggaaacggagttaag

SEQ ID NO: 3758858 - DNA, 25 bp, Homo sapien
cagacactagagacagcagctgcag

SEQ ID NO: 3758859 - DNA, 25 bp, Homo sapien
acttctctagggtaattatggctac

SEQ ID NO: 3758860 - DNA, 25 bp, Homo sapien
caataaaggtgtgtatgctccaaac

SEQ ID NO: 3758861 - DNA, 25 bp, Homo sapien
tcatggtaattccagaggcttcggc

SEQ ID NO: 3758862 - DNA, 25 bp, Homo sapien
tgcgtaagggcaggacgagaacaca

SEQ ID NO: 3758863 - DNA, 25 bp, Homo sapien
caagtgcctgagtagacgtaaaagc

SEQ ID NO: 3758864 - DNA, 25 bp, Homo sapien
cagcagctgcatcacggtggcttcc

SEQ ID NO: 3758865 - DNA, 25 bp, Homo sapien
taaagttcctgctgacggtggctca

SEQ ID NO: 3758866 - DNA, 25 bp, Homo sapien
cctgctgacggtggctcattccctg

SEQ ID NO: 3758867 - DNA, 25 bp, Homo sapien
agttcctgctgacggtggctcattc

SEQ ID NO: 3758868 - DNA, 25 bp, Homo sapien
caggaaagggcataaagttcctgct

SEQ ID NO: 3758869 - DNA, 25 bp, Homo sapien
cagatgcgtgccaatgaaccgggct

SEQ ID NO: 3758870 - DNA, 25 bp, Homo sapien
tgcgtgccaatgaaccgggctaatt

SEQ ID NO: 3758871 - DNA, 25 bp, Homo sapien
agatgcgtgccaatgaaccgggcta

SEQ ID NO: 3758872 - DNA, 25 bp, Homo sapien
gatgcgtgccaatgaaccgggctaa

SEQ ID NO: 3758873 - DNA, 25 bp, Homo sapien
gctgagtttgctccctatctcctgg

SEQ ID NO: 3758874 - DNA, 25 bp, Homo sapien
cctaagccctgctgcacacgggtga

SEQ ID NO: 3758875 - DNA, 25 bp, Homo sapien
gagtttgctccctatctcctggaga

SEQ ID NO: 3758876 - DNA, 25 bp, Homo sapien
cgtgatgcccttgacacatcctaag

SEQ ID NO: 3758877 - DNA, 25 bp, Homo sapien
acagtcagtcgggggtgcggggctc

SEQ ID NO: 3758878 - DNA, 25 bp, Homo sapien
cagtcagtcgggggtgcggggctcc

SEQ ID NO: 3758879 - DNA, 25 bp, Homo sapien
ttagaacagtcagtcgggggtgcgg

SEQ ID NO: 3758880 - DNA, 25 bp, Homo sapien
ctgttagaacagtcagtcgggggtg

SEQ ID NO: 3758881 - DNA, 25 bp, Homo sapien
tcctattaagaatacagaaccgtgc

SEQ ID NO: 3758882 - DNA, 25 bp, Homo sapien
tcccacggcgcacattcattcaata

SEQ ID NO: 3758883 - DNA, 25 bp, Homo sapien
gacggtggcacgcttcagaagcctt

SEQ ID NO: 3758884 - DNA, 25 bp, Homo sapien
tgtcttctgcacaagaacatattgc

SEQ ID NO: 3758885 - DNA, 25 bp, Homo sapien
catgctggctaacacggtgaaaccc

SEQ ID NO: 3758886 - DNA, 25 bp, Homo sapien
taggaggcaaaggaaggcggatcat

SEQ ID NO: 3758887 - DNA, 25 bp, Homo sapien
gaggtcaggagatcaaaaccatgct

SEQ ID NO: 3758888 - DNA, 25 bp, Homo sapien
ctttaggaggcaaaggaaggcggat

SEQ ID NO: 3758889 - DNA, 25 bp, Homo sapien
agcactgtgatgtcgccgaatctca

SEQ ID NO: 3758890 - DNA, 25 bp, Homo sapien
cagcactgtgatgtcgccgaatctc

SEQ ID NO: 3758891 - DNA, 25 bp, Homo sapien
gcactgtgatgtcgccgaatctcac

SEQ ID NO: 3758892 - DNA, 25 bp, Homo sapien
gaacgactgtgtgagtgcgatccga

SEQ ID NO: 3758893 - DNA, 25 bp, Homo sapien
tgcaaccgaacgaggtgctgacggc

SEQ ID NO: 3758894 - DNA, 25 bp, Homo sapien
ccaggtccttaaacagctttgagaa

SEQ ID NO: 3758895 - DNA, 25 bp, Homo sapien
caggtcctcactcgggacaagtcca

SEQ ID NO: 3758896 - DNA, 25 bp, Homo sapien
gcaaggaggacgcacagctcgagct

SEQ ID NO: 3758897 - DNA, 25 bp, Homo sapien
gacattcgtgctcagtgtacagaca

SEQ ID NO: 3758898 - DNA, 25 bp, Homo sapien
gacgcacagctcgagctggctttga

SEQ ID NO: 3758899 - DNA, 25 bp, Homo sapien
gcacacggacaaccgacaagggtcc

SEQ ID NO: 3758900 - DNA, 25 bp, Homo sapien
tgactcacggcaagaagccacaagg

SEQ ID NO: 3758901 - DNA, 25 bp, Homo sapien
catcacggagtaggagcaaaacgtg

SEQ ID NO: 3758902 - DNA, 25 bp, Homo sapien
gagggactctgtttgcgagcccagc

SEQ ID NO: 3758903 - DNA, 25 bp, Homo sapien
aaacgtgtctcggactttgtactga

SEQ ID NO: 3758904 - DNA, 25 bp, Homo sapien
taggtgatgtgctcgtatgatgcca

SEQ ID NO: 3758905 - DNA, 25 bp, Homo sapien
catgagctgccataagaggcctacg

SEQ ID NO: 3758906 - DNA, 25 bp, Homo sapien
gaattgtcagcacacaacgggcttg

SEQ ID NO: 3758907 - DNA, 25 bp, Homo sapien
gacaccgagggacgactttctagca

SEQ ID NO: 3758908 - DNA, 25 bp, Homo sapien
agtcacctgctagcggatacctgga

SEQ ID NO: 3758909 - DNA, 25 bp, Homo sapien
tgaagtcagaaaacacgagctctcc

SEQ ID NO: 3758910 - DNA, 25 bp, Homo sapien
tgtgttgaccgaggttccagggaac

SEQ ID NO: 3758911 - DNA, 25 bp, Homo sapien
gatcccgtgtccatctgcagtcagt

SEQ ID NO: 3758912 - DNA, 25 bp, Homo sapien
gactctcacgacaccaggctttggg

SEQ ID NO: 3758913 - DNA, 25 bp, Homo sapien
tgcaagaaagtggtcggctctcagc

SEQ ID NO: 3758914 - DNA, 25 bp, Homo sapien
gaagaaagctttaggatgaggacac

SEQ ID NO: 3758915 - DNA, 25 bp, Homo sapien
tttgggaagattctaggcaggtgca

SEQ ID NO: 3758916 - DNA, 25 bp, Homo sapien
tgaaatacggtcaccctacaagggc

SEQ ID NO: 3758917 - DNA, 25 bp, Homo sapien
cagcttggcgcatatacctgaggcc

SEQ ID NO: 3758918 - DNA, 25 bp, Homo sapien
tgcaagggcaatcaacagaatactg

SEQ ID NO: 3758919 - DNA, 25 bp, Homo sapien
tacaagggccgttgttcagaacaga

SEQ ID NO: 3758920 - DNA, 25 bp, Homo sapien
taatggaacggcagaaggcactggt

SEQ ID NO: 3758921 - DNA, 25 bp, Homo sapien
tgcagcttaatggaacggcagaagg

SEQ ID NO: 3758922 - DNA, 25 bp, Homo sapien
cactgcagcttaatggaacggcaga

SEQ ID NO: 3758923 - DNA, 25 bp, Homo sapien
agcttaatggaacggcagaaggcac

SEQ ID NO: 3758924 - DNA, 25 bp, Homo sapien
aatgaaatgtatgctggcctggtgc

SEQ ID NO: 3758925 - DNA, 25 bp, Homo sapien
gggctgcactgaacgcaaggctgtt

SEQ ID NO: 3758926 - DNA, 25 bp, Homo sapien
gctgcactgaatgcatgggacttca

SEQ ID NO: 3758927 - DNA, 25 bp, Homo sapien
tacctacaagacaataaagccgcat

SEQ ID NO: 3758928 - DNA, 25 bp, Homo sapien
cagctagcatcccagttgtggacac

SEQ ID NO: 3758929 - DNA, 25 bp, Homo sapien
gttgtggacacgctgaagtcgagat

SEQ ID NO: 3758930 - DNA, 25 bp, Homo sapien
gcagatctgggcaggccgcttcttt

SEQ ID NO: 3758931 - DNA, 25 bp, Homo sapien
cgagatatgcaagagtgtctgggtt

SEQ ID NO: 3758932 - DNA, 25 bp, Homo sapien
cgtcatcagacaggcagagcgactc

SEQ ID NO: 3758933 - DNA, 25 bp, Homo sapien
tccctggaccgcagcaacttacaga

SEQ ID NO: 3758934 - DNA, 25 bp, Homo sapien
agcaacttacagatcagctgtgtcg

SEQ ID NO: 3758935 - DNA, 25 bp, Homo sapien
gatcagctgtgtcgtcatcagacag

SEQ ID NO: 3758936 - DNA, 25 bp, Homo sapien
ggtggaggccccgacattcccaggc

SEQ ID NO: 3758937 - DNA, 25 bp, Homo sapien
ggccccgacattcccaggcatgtta

SEQ ID NO: 3758938 - DNA, 25 bp, Homo sapien
tggaggccccgacattcccaggcat

SEQ ID NO: 3758939 - DNA, 25 bp, Homo sapien
gaggccccgacattcccaggcatgt

SEQ ID NO: 3758940 - DNA, 25 bp, Homo sapien
ggacggacggttattggcacacagc

SEQ ID NO: 3758941 - DNA, 25 bp, Homo sapien
caacgtcgtcgcgatgttctgtggg

SEQ ID NO: 3758942 - DNA, 25 bp, Homo sapien
cacagcctgcgtacaggcaaccata

SEQ ID NO: 3758943 - DNA, 25 bp, Homo sapien
cacaatcatcttgacggtaggcaac

SEQ ID NO: 3758944 - DNA, 25 bp, Homo sapien
caggtcagcgagttcgctatcgcac

SEQ ID NO: 3758945 - DNA, 25 bp, Homo sapien
tctccatcagcatcacggcgatctt

SEQ ID NO: 3758946 - DNA, 25 bp, Homo sapien
tagaccaaggccacgtggtcgccgt

SEQ ID NO: 3758947 - DNA, 25 bp, Homo sapien
ttgtgcagctgcacgcaggtcagcg

SEQ ID NO: 3758948 - DNA, 25 bp, Homo sapien
ctgcgggccgatcacagggacaagc

SEQ ID NO: 3758949 - DNA, 25 bp, Homo sapien
tgcgggccgatcacagggacaagca

SEQ ID NO: 3758950 - DNA, 25 bp, Homo sapien
caaaacgtccacaagacagccgatg

SEQ ID NO: 3758951 - DNA, 25 bp, Homo sapien
ctctaccaaaacgtccacaagacag

SEQ ID NO: 3758952 - DNA, 25 bp, Homo sapien
gtccacaagacagccgatgagcgca

SEQ ID NO: 3758953 - DNA, 25 bp, Homo sapien
caagacagccgatgagcgcagcgag

SEQ ID NO: 3758954 - DNA, 25 bp, Homo sapien
tgtggggaaagtatactctccctga

SEQ ID NO: 3758955 - DNA, 25 bp, Homo sapien
ctgtggggaaagtatactctccctg

SEQ ID NO: 3758956 - DNA, 25 bp, Homo sapien
tggggaaagtatactctccctgagg

SEQ ID NO: 3758957 - DNA, 25 bp, Homo sapien
gggaaagtatactctccctgaggac

SEQ ID NO: 3758958 - DNA, 25 bp, Homo sapien
ccttgccgccaacgtcctctgagct

SEQ ID NO: 3758959 - DNA, 25 bp, Homo sapien
cattcaagtccaccccgactccagg

SEQ ID NO: 3758960 - DNA, 25 bp, Homo sapien
caggggcaggtctcccaacaaggaa

SEQ ID NO: 3758961 - DNA, 25 bp, Homo sapien
cttcaagtgaacatgggacagagac

SEQ ID NO: 3758962 - DNA, 25 bp, Homo sapien
gggtgctgatgggacccattcaagt

SEQ ID NO: 3758963 - DNA, 25 bp, Homo sapien
gcatgctgtcctttatctttgataa

SEQ ID NO: 3758964 - DNA, 25 bp, Homo sapien
taggtacttgcaaagcatgagtgta

SEQ ID NO: 3758965 - DNA, 25 bp, Homo sapien
caaagcatgagtgtaacatgcatgc

SEQ ID NO: 3758966 - DNA, 25 bp, Homo sapien
catgagtgtaacatgcatgctgtcc

SEQ ID NO: 3758967 - DNA, 25 bp, Homo sapien
gacactatgaatgccgtgaggacga

SEQ ID NO: 3758968 - DNA, 25 bp, Homo sapien
gagcgaaggacccatgcctgatctg

SEQ ID NO: 3758969 - DNA, 25 bp, Homo sapien
tgtactgagtttccgctggacggtg

SEQ ID NO: 3758970 - DNA, 25 bp, Homo sapien
aagcaatagctcaagcgtgcctgcc

SEQ ID NO: 3758971 - DNA, 25 bp, Homo sapien
caatggctgggatcaactcagcatc

SEQ ID NO: 3758972 - DNA, 25 bp, Homo sapien
tgacaacgtcaagacgacacgcgct

SEQ ID NO: 3758973 - DNA, 25 bp, Homo sapien
ggaaacagtcttgagcagatacagt

SEQ ID NO: 3758974 - DNA, 25 bp, Homo sapien
gatacagtgaacgaccaatggctgg

SEQ ID NO: 3758975 - DNA, 25 bp, Homo sapien
tttagggctcggtgtggtgactcac

SEQ ID NO: 3758976 - DNA, 25 bp, Homo sapien
tctgcaataaacataacttctggtg

SEQ ID NO: 3758977 - DNA, 25 bp, Homo sapien
ccccttgaggccagtagccagggaa

SEQ ID NO: 3758978 - DNA, 25 bp, Homo sapien
tactcttaagtactacggtggaaca

SEQ ID NO: 3758979 - DNA, 25 bp, Homo sapien
ctccactgcaagacctctgagagga

SEQ ID NO: 3758980 - DNA, 25 bp, Homo sapien
cactgcaagacctctgagaggaaca

SEQ ID NO: 3758981 - DNA, 25 bp, Homo sapien
tccactgcaagacctctgagaggaa

SEQ ID NO: 3758982 - DNA, 25 bp, Homo sapien
tctccactgcaagacctctgagagg

SEQ ID NO: 3758983 - DNA, 25 bp, Homo sapien
gaacagagcacgggcatgaggatca

SEQ ID NO: 3758984 - DNA, 25 bp, Homo sapien
gcatgaggatcaggctgtgcggttg

SEQ ID NO: 3758985 - DNA, 25 bp, Homo sapien
aggctgtgcggttggatcaggctgt

SEQ ID NO: 3758986 - DNA, 25 bp, Homo sapien
ctgtgcggttggatcaggctgtgcg

SEQ ID NO: 3758987 - DNA, 25 bp, Homo sapien
cagggtgggctttgaatccgggctg

SEQ ID NO: 3758988 - DNA, 25 bp, Homo sapien
ggtgggctttgaatccgggctggtg

SEQ ID NO: 3758989 - DNA, 25 bp, Homo sapien
gcagggtgggctttgaatccgggct

SEQ ID NO: 3758990 - DNA, 25 bp, Homo sapien
agggtgggctttgaatccgggctgg

SEQ ID NO: 3758991 - DNA, 25 bp, Homo sapien
tgtcggggatggtcgcagatggtcg

SEQ ID NO: 3758992 - DNA, 25 bp, Homo sapien
ggatggtcgcagatggtcggggaca

SEQ ID NO: 3758993 - DNA, 25 bp, Homo sapien
ggtcgcagatggtcggggacagtcg

SEQ ID NO: 3758994 - DNA, 25 bp, Homo sapien
cagatggtcggggacagtcggaaaa

SEQ ID NO: 3758995 - DNA, 25 bp, Homo sapien
cttgcgtgcctggtcgttatcttcg

SEQ ID NO: 3758996 - DNA, 25 bp, Homo sapien
ttatcttcgatctgacccaggtctc

SEQ ID NO: 3758997 - DNA, 25 bp, Homo sapien
gcctggtcgttatcttcgatctgac

SEQ ID NO: 3758998 - DNA, 25 bp, Homo sapien
gtcgttatcttcgatctgacccagg

SEQ ID NO: 3758999 - DNA, 25 bp, Homo sapien
tagaaagtgagagcaccgtggccgt

SEQ ID NO: 3759000 - DNA, 25 bp, Homo sapien
tgtccttcaggagaatgagcttttg

SEQ ID NO: 3759001 - DNA, 25 bp, Homo sapien
gtgtgaacccaatgtgcttagaaag

SEQ ID NO: 3759002 - DNA, 25 bp, Homo sapien
caccgtggccgtgtccttcaggaga

SEQ ID NO: 3759003 - DNA, 25 bp, Homo sapien
cttctgtcgaggcttaggcaagttt

SEQ ID NO: 3759004 - DNA, 25 bp, Homo sapien
ccaaggccaggcaataaactccaac

SEQ ID NO: 3759005 - DNA, 25 bp, Homo sapien
atggatcccaccaagcggggttttg

SEQ ID NO: 3759006 - DNA, 25 bp, Homo sapien
ggcaagtttgtgacgcaggtgtggg

SEQ ID NO: 3759007 - DNA, 25 bp, Homo sapien
gaaacaagacacaggggaccagtgc

SEQ ID NO: 3759008 - DNA, 25 bp, Homo sapien
catgatctgaatgaagtaaggaggc

SEQ ID NO: 3759009 - DNA, 25 bp, Homo sapien
gatctgaatgaagtaaggaggccag

SEQ ID NO: 3759010 - DNA, 25 bp, Homo sapien
caagacacaggggaccagtgcccag

SEQ ID NO: 3759011 - DNA, 25 bp, Homo sapien
tctgctcagccacgatcacgatcct

SEQ ID NO: 3759012 - DNA, 25 bp, Homo sapien
gaaactgtcctcttccgtggagtca

SEQ ID NO: 3759013 - DNA, 25 bp, Homo sapien
cacggtcaccgagaacacggctatc

SEQ ID NO: 3759014 - DNA, 25 bp, Homo sapien
gatcacgatcctctcgtcgtgcagc

SEQ ID NO: 3759015 - DNA, 25 bp, Homo sapien
cagtggccacgatgtcgtcggcgtt

SEQ ID NO: 3759016 - DNA, 25 bp, Homo sapien
aacttcatgggttctacggccagcg

SEQ ID NO: 3759017 - DNA, 25 bp, Homo sapien
gcaagcctgtccttatgaatgggta

SEQ ID NO: 3759018 - DNA, 25 bp, Homo sapien
gtattcactgatcggagccccggag

SEQ ID NO: 3759019 - DNA, 25 bp, Homo sapien
agataacacccagaagtctcacagg

SEQ ID NO: 3759020 - DNA, 25 bp, Homo sapien
accacaatgtaaaagacgagtgaag

SEQ ID NO: 3759021 - DNA, 25 bp, Homo sapien
cgagtgaagagtcaaggtacatttt

SEQ ID NO: 3759022 - DNA, 25 bp, Homo sapien
gcagtaactgattacttggtttaca

SEQ ID NO: 3759023 - DNA, 25 bp, Homo sapien
ccccgatctcatccgttctgcacag

SEQ ID NO: 3759024 - DNA, 25 bp, Homo sapien
aggacgtgcccgtcgcaactgcaca

SEQ ID NO: 3759025 - DNA, 25 bp, Homo sapien
tcttggtcatgccagagaggccata

SEQ ID NO: 3759026 - DNA, 25 bp, Homo sapien
gaaccccgtctggcttcactgaaca

SEQ ID NO: 3759027 - DNA, 25 bp, Homo sapien
tgcacggtgagcacggacagcttct

SEQ ID NO: 3759028 - DNA, 25 bp, Homo sapien
gagtccacacgaatgaccccatagg

SEQ ID NO: 3759029 - DNA, 25 bp, Homo sapien
caggcatcacgaggccgacatcctg

SEQ ID NO: 3759030 - DNA, 25 bp, Homo sapien
ggacagcttctcttccgagtccaca

SEQ ID NO: 3759031 - DNA, 25 bp, Homo sapien
gggctggttactgtcatccgtgggc

SEQ ID NO: 3759032 - DNA, 25 bp, Homo sapien
ccgggggctggttactgtcatccgt

SEQ ID NO: 3759033 - DNA, 25 bp, Homo sapien
cggcccgggggctggttactgtcat

SEQ ID NO: 3759034 - DNA, 25 bp, Homo sapien
gcccgggggctggttactgtcatcc

SEQ ID NO: 3759035 - DNA, 25 bp, Homo sapien
ttgaatatgcaggagcagataagcc

SEQ ID NO: 3759036 - DNA, 25 bp, Homo sapien
tgaatatgcaggagcagataagcca

SEQ ID NO: 3759037 - DNA, 25 bp, Homo sapien
gaatatgcaggagcagataagccat

SEQ ID NO: 3759038 - DNA, 25 bp, Homo sapien
cacaatcacagatgtgcagtcagca

SEQ ID NO: 3759039 - DNA, 25 bp, Homo sapien
tcacagatgtgcagtcagcacacat

SEQ ID NO: 3759040 - DNA, 25 bp, Homo sapien
aatcacagatgtgcagtcagcacac

SEQ ID NO: 3759041 - DNA, 25 bp, Homo sapien
caatcacagatgtgcagtcagcaca

SEQ ID NO: 3759042 - DNA, 25 bp, Homo sapien
cacgcattccggttccagacaaaat

SEQ ID NO: 3759043 - DNA, 25 bp, Homo sapien
gacaaaatgcgaagttaccaggaag

SEQ ID NO: 3759044 - DNA, 25 bp, Homo sapien
acacacgacgttccctgtgctggcg

SEQ ID NO: 3759045 - DNA, 25 bp, Homo sapien
gcgtcgaagcacctgcacaacgttg

SEQ ID NO: 3759046 - DNA, 25 bp, Homo sapien
cttggccacctttctatttccaggg

SEQ ID NO: 3759047 - DNA, 25 bp, Homo sapien
tctcatcatctaattcaccacaaaa

SEQ ID NO: 3759048 - DNA, 25 bp, Homo sapien
ctatttccaggggaggttatgggct

SEQ ID NO: 3759049 - DNA, 25 bp, Homo sapien
aactctttctcataagccttggcca

SEQ ID NO: 3759050 - DNA, 25 bp, Homo sapien
cagtctctgctttgataccaggagc

SEQ ID NO: 3759051 - DNA, 25 bp, Homo sapien
gtctctgctttgataccaggagcag

SEQ ID NO: 3759052 - DNA, 25 bp, Homo sapien
tctgctttgataccaggagcagggg

SEQ ID NO: 3759053 - DNA, 25 bp, Homo sapien
ctctgctttgataccaggagcaggg

SEQ ID NO: 3759054 - DNA, 25 bp, Homo sapien
tggttaacgtgcagaagaggctgtc

SEQ ID NO: 3759055 - DNA, 25 bp, Homo sapien
aagatggttaacgtgcagaagaggc

SEQ ID NO: 3759056 - DNA, 25 bp, Homo sapien
ctggaagatggttaacgtgcagaag

SEQ ID NO: 3759057 - DNA, 25 bp, Homo sapien
ggttaacgtgcagaagaggctgtcc

SEQ ID NO: 3759058 - DNA, 25 bp, Homo sapien
tccctggaagatggttaacgtgcag

SEQ ID NO: 3759059 - DNA, 25 bp, Homo sapien
tggaagatggttaacgtgcagaaga

SEQ ID NO: 3759060 - DNA, 25 bp, Homo sapien
aagatggttaacgtgcagaagaggc

SEQ ID NO: 3759061 - DNA, 25 bp, Homo sapien
ggttaacgtgcagaagaggctgtcc

SEQ ID NO: 3759062 - DNA, 25 bp, Homo sapien
tggttaacgtgcagaagaggctgtc

SEQ ID NO: 3759063 - DNA, 25 bp, Homo sapien
aagatggttaacgtgcagaagaggc

SEQ ID NO: 3759064 - DNA, 25 bp, Homo sapien
ctggaagatggttaacgtgcagaag

SEQ ID NO: 3759065 - DNA, 25 bp, Homo sapien
ggttaacgtgcagaagaggctgtcc

SEQ ID NO: 3759066 - DNA, 25 bp, Homo sapien
tgctgtaacccatggtgggccgtgt

SEQ ID NO: 3759067 - DNA, 25 bp, Homo sapien
gttgagcccaatcacgccaatcaga

SEQ ID NO: 3759068 - DNA, 25 bp, Homo sapien
tcggtccttcggtgtgttgagccca

SEQ ID NO: 3759069 - DNA, 25 bp, Homo sapien
cgtgcaacaccaggcaagacagtgg

SEQ ID NO: 3759070 - DNA, 25 bp, Homo sapien
accagccttggatgggccgttgaca

SEQ ID NO: 3759071 - DNA, 25 bp, Homo sapien
cttggatgggccgttgacagccgac

SEQ ID NO: 3759072 - DNA, 25 bp, Homo sapien
gccgacacaacttctctgcaggagc

SEQ ID NO: 3759073 - DNA, 25 bp, Homo sapien
gggccgttgacagccgacacaactt

SEQ ID NO: 3759074 - DNA, 25 bp, Homo sapien
acagatgacctcctgtcgaaggcct

SEQ ID NO: 3759075 - DNA, 25 bp, Homo sapien
gaagacattgagaaatgcatcgcaa

SEQ ID NO: 3759076 - DNA, 25 bp, Homo sapien
tcgaaggcctttactttggaagaca

SEQ ID NO: 3759077 - DNA, 25 bp, Homo sapien
aatgcatcgcaagaagaaatagacc

SEQ ID NO: 3759078 - DNA, 25 bp, Homo sapien
tctgtgtgctactaatgcccaatgc

SEQ ID NO: 3759079 - DNA, 25 bp, Homo sapien
gtccgccactatcagcattcgcaga

SEQ ID NO: 3759080 - DNA, 25 bp, Homo sapien
tatcagcattcgcagagaggagagg

SEQ ID NO: 3759081 - DNA, 25 bp, Homo sapien
tgcatatccctcgatttcacacacg

SEQ ID NO: 3759082 - DNA, 25 bp, Homo sapien
gaaataagttaacatgtgccaccgt

SEQ ID NO: 3759083 - DNA, 25 bp, Homo sapien
taacatgtgccaccgtcagatcgtc

SEQ ID NO: 3759084 - DNA, 25 bp, Homo sapien
taagttaacatgtgccaccgtcaga

SEQ ID NO: 3759085 - DNA, 25 bp, Homo sapien
tagaaataagttaacatgtgccacc

SEQ ID NO: 3759086 - DNA, 25 bp, Homo sapien
gagagggttcaccttcatcagcgag

SEQ ID NO: 3759087 - DNA, 25 bp, Homo sapien
tacgggatgctgatcacatgcatca

SEQ ID NO: 3759088 - DNA, 25 bp, Homo sapien
cagcgagtacgggatgctgatcaca

SEQ ID NO: 3759089 - DNA, 25 bp, Homo sapien
gttcaccttcatcagcgagtacggg

SEQ ID NO: 3759090 - DNA, 25 bp, Homo sapien
cagctgtaccccggagcacggagca

SEQ ID NO: 3759091 - DNA, 25 bp, Homo sapien
agctgtaccccggagcacggagcag

SEQ ID NO: 3759092 - DNA, 25 bp, Homo sapien
tgccagctgtaccccggagcacgga

SEQ ID NO: 3759093 - DNA, 25 bp, Homo sapien
tgtaccccggagcacggagcaggca

SEQ ID NO: 3759094 - DNA, 25 bp, Homo sapien
atccagggcactcgtgactgtgaga

SEQ ID NO: 3759095 - DNA, 25 bp, Homo sapien
aaaagtgcccaagcccggcacgtca

SEQ ID NO: 3759096 - DNA, 25 bp, Homo sapien
tcgtgactgtgagacagtcgtttcc

SEQ ID NO: 3759097 - DNA, 25 bp, Homo sapien
gctacttccccacgaaaagtgccca

SEQ ID NO: 3759098 - DNA, 25 bp, Homo sapien
agagcccgacgtccttcttgaaatc

SEQ ID NO: 3759099 - DNA, 25 bp, Homo sapien
gccagagcccgacgtccttcttgaa

SEQ ID NO: 3759100 - DNA, 25 bp, Homo sapien
atgccagagcccgacgtccttcttg

SEQ ID NO: 3759101 - DNA, 25 bp, Homo sapien
gatgccatgccagagcccgacgtcc

SEQ ID NO: 3759102 - DNA, 25 bp, Homo sapien
cgtgtagccacacgcctgcgtcagg

SEQ ID NO: 3759103 - DNA, 25 bp, Homo sapien
agcgcagtcctcgtcaccgtcacac

SEQ ID NO: 3759104 - DNA, 25 bp, Homo sapien
cactgccatccttacacgtcttgta

SEQ ID NO: 3759105 - DNA, 25 bp, Homo sapien
ctggcagtgtgtcagcagcgcagtc

SEQ ID NO: 3759106 - DNA, 25 bp, Homo sapien
ggcactcgtgtaaccgtcagaaaca

SEQ ID NO: 3759107 - DNA, 25 bp, Homo sapien
tccctgaattttggcactcgtgtaa

SEQ ID NO: 3759108 - DNA, 25 bp, Homo sapien
gaattttggcactcgtgtaaccgtc

SEQ ID NO: 3759109 - DNA, 25 bp, Homo sapien
taaccgtcagaaacacacgttagtg

SEQ ID NO: 3759110 - DNA, 25 bp, Homo sapien
cgttattggcatctttaatgtgtgg

SEQ ID NO: 3759111 - DNA, 25 bp, Homo sapien
gcagtgtcgttattggcatctttaa

SEQ ID NO: 3759112 - DNA, 25 bp, Homo sapien
ctcaatatacgcagtgtcgttattg

SEQ ID NO: 3759113 - DNA, 25 bp, Homo sapien
ttaatgtgtgggaaccagtctcggg

SEQ ID NO: 3759114 - DNA, 25 bp, Homo sapien
tgtgacaaaccacagcagctttggc

SEQ ID NO: 3759115 - DNA, 25 bp, Homo sapien
acaaaccacagcagctttggccaac

SEQ ID NO: 3759116 - DNA, 25 bp, Homo sapien
tgacaaaccacagcagctttggcca

SEQ ID NO: 3759117 - DNA, 25 bp, Homo sapien
ctgtgacaaaccacagcagctttgg

SEQ ID NO: 3759118 - DNA, 25 bp, Homo sapien
caagcaagaaacctatctgctggct

SEQ ID NO: 3759119 - DNA, 25 bp, Homo sapien
caggcgtcactagtcaaggctacag

SEQ ID NO: 3759120 - DNA, 25 bp, Homo sapien
ttggaagtcctttatggcaggcgtc

SEQ ID NO: 3759121 - DNA, 25 bp, Homo sapien
taaactgtgggatctctcccgttgg

SEQ ID NO: 3759122 - DNA, 25 bp, Homo sapien
aatcacttgtggcttccctagcatt

SEQ ID NO: 3759123 - DNA, 25 bp, Homo sapien
tctatcccatgaccactggttggca

SEQ ID NO: 3759124 - DNA, 25 bp, Homo sapien
ggtctgtgcgttctccacagctttc

SEQ ID NO: 3759125 - DNA, 25 bp, Homo sapien
taaatgccttgttaaggtctgtgcg

SEQ ID NO: 3759126 - DNA, 25 bp, Homo sapien
ctgtctgatgcacacgtggagtgct

SEQ ID NO: 3759127 - DNA, 25 bp, Homo sapien
cacgtggagtgctggctgcaaatcc

SEQ ID NO: 3759128 - DNA, 25 bp, Homo sapien
cacctcacgggaagtctgagctgtc

SEQ ID NO: 3759129 - DNA, 25 bp, Homo sapien
tgagaaagcacctcacgggaagtct

SEQ ID NO: 3759130 - DNA, 25 bp, Homo sapien
tcccttggggcgcgtgctgctggct

SEQ ID NO: 3759131 - DNA, 25 bp, Homo sapien
cagtcccttggggcgcgtgctgctg

SEQ ID NO: 3759132 - DNA, 25 bp, Homo sapien
gtcccttggggcgcgtgctgctggc

SEQ ID NO: 3759133 - DNA, 25 bp, Homo sapien
agtcccttggggcgcgtgctgctgg

SEQ ID NO: 3759134 - DNA, 25 bp, Homo sapien
cagcaggcagccgtagaaagccgcc

SEQ ID NO: 3759135 - DNA, 25 bp, Homo sapien
acctcgatgggcacggggaccacct

SEQ ID NO: 3759136 - DNA, 25 bp, Homo sapien
ctggtgagcggcacctcgatgggca

SEQ ID NO: 3759137 - DNA, 25 bp, Homo sapien
gccatgaaggcagccggatcattgt

SEQ ID NO: 3759138 - DNA, 25 bp, Homo sapien
gccctgcagcagtcttccctgtgta

SEQ ID NO: 3759139 - DNA, 25 bp, Homo sapien
agctgcctggatgtggcaccaaccc

SEQ ID NO: 3759140 - DNA, 25 bp, Homo sapien
ccctgcagcagtcttccctgtgtag

SEQ ID NO: 3759141 - DNA, 25 bp, Homo sapien
atggacaagtttggtacattttcat

SEQ ID NO: 3759142 - DNA, 25 bp, Homo sapien
tccttatggacaagtttggtacatt

SEQ ID NO: 3759143 - DNA, 25 bp, Homo sapien
ttatggacaagtttggtacattttc

SEQ ID NO: 3759144 - DNA, 25 bp, Homo sapien
ccttatggacaagtttggtacattt

SEQ ID NO: 3759145 - DNA, 25 bp, Homo sapien
ctgctgtccaggcgaaaggcttcag

SEQ ID NO: 3759146 - DNA, 25 bp, Homo sapien
cgtgctcccgtatctctactgacat

SEQ ID NO: 3759147 - DNA, 25 bp, Homo sapien
catatttcatcaaaccgtgctcccg

SEQ ID NO: 3759148 - DNA, 25 bp, Homo sapien
gaaacttcaagtatctggaggccat

SEQ ID NO: 3759149 - DNA, 25 bp, Homo sapien
gaaaagtagcgccttcacccctgac

SEQ ID NO: 3759150 - DNA, 25 bp, Homo sapien
atctccaggccggaccatgggttcc

SEQ ID NO: 3759151 - DNA, 25 bp, Homo sapien
taatttgtgtagaatgctgtaagcg

SEQ ID NO: 3759152 - DNA, 25 bp, Homo sapien
taagcgaccttcatacttcttgtcc

SEQ ID NO: 3759153 - DNA, 25 bp, Homo sapien
cctgctttgtgcctaatttgtgtag

SEQ ID NO: 3759154 - DNA, 25 bp, Homo sapien
caagcatgtagatttcttgaaacat

SEQ ID NO: 3759155 - DNA, 25 bp, Homo sapien
tcaagcatgtagatttcttgaaaca

SEQ ID NO: 3759156 - DNA, 25 bp, Homo sapien
caggcagggcgccttgggcgagatg

SEQ ID NO: 3759157 - DNA, 25 bp, Homo sapien
gggcttcccgttggtgtccatggtg

SEQ ID NO: 3759158 - DNA, 25 bp, Homo sapien
agcgacggcggccagttcgtgacca

SEQ ID NO: 3759159 - DNA, 25 bp, Homo sapien
cttgggcgagatggtgccccacctc

SEQ ID NO: 3759160 - DNA, 25 bp, Homo sapien
tggttggttcggatccggttgttga

SEQ ID NO: 3759161 - DNA, 25 bp, Homo sapien
ccaggagcattcaggggcaaaggca

SEQ ID NO: 3759162 - DNA, 25 bp, Homo sapien
tctaaaaagacccaggagcattcag

SEQ ID NO: 3759163 - DNA, 25 bp, Homo sapien
ttgtctaaaaagacccaggagcatt

SEQ ID NO: 3759164 - DNA, 25 bp, Homo sapien
taaaaagacccaggagcattcaggg

SEQ ID NO: 3759165 - DNA, 25 bp, Homo sapien
gtcatcgacaaagaattctcgtaaa

SEQ ID NO: 3759166 - DNA, 25 bp, Homo sapien
tttcggtcgtttgagggtattgaca

SEQ ID NO: 3759167 - DNA, 25 bp, Homo sapien
ggatttttgctgacacccggctact

SEQ ID NO: 3759168 - DNA, 25 bp, Homo sapien
gggtattgacaagctgctggatttt

SEQ ID NO: 3759169 - DNA, 25 bp, Homo sapien
ggcagagcccttgttcgcccccgca

SEQ ID NO: 3759170 - DNA, 25 bp, Homo sapien
gaggcagagcccttgttcgcccccg

SEQ ID NO: 3759171 - DNA, 25 bp, Homo sapien
ctgaggcagagcccttgttcgcccc

SEQ ID NO: 3759172 - DNA, 25 bp, Homo sapien
tgaggcagagcccttgttcgccccc

SEQ ID NO: 3759173 - DNA, 25 bp, Homo sapien
atttttcctacaaggaataactgtg

SEQ ID NO: 3759174 - DNA, 25 bp, Homo sapien
catttttcctacaaggaataactgt

SEQ ID NO: 3759175 - DNA, 25 bp, Homo sapien
acatttttcctacaaggaataactg

SEQ ID NO: 3759176 - DNA, 25 bp, Homo sapien
ttggagaatatttgcatttttgtgg

SEQ ID NO: 3759177 - DNA, 25 bp, Homo sapien
ggagaatatttgcatttttgtggct

SEQ ID NO: 3759178 - DNA, 25 bp, Homo sapien
atttgcatttttgtggctaggccac

SEQ ID NO: 3759179 - DNA, 25 bp, Homo sapien
aatatttgcatttttgtggctaggc

SEQ ID NO: 3759180 - DNA, 25 bp, Homo sapien
cagaaccgattgtaccccaggaaga

SEQ ID NO: 3759181 - DNA, 25 bp, Homo sapien
tccatgagaggctcccgaagatctg

SEQ ID NO: 3759182 - DNA, 25 bp, Homo sapien
acatccagtcatgggcacggaacgg

SEQ ID NO: 3759183 - DNA, 25 bp, Homo sapien
ggacgtcagcacaaaccgtttacca

SEQ ID NO: 3759184 - DNA, 25 bp, Homo sapien
cgttgccgtacttgggcgctgtccg

SEQ ID NO: 3759185 - DNA, 25 bp, Homo sapien
tctccatgagctcggcgttgccgta

SEQ ID NO: 3759186 - DNA, 25 bp, Homo sapien
tatcgagtgctctgaggtgtacgtg

SEQ ID NO: 3759187 - DNA, 25 bp, Homo sapien
tgcggtctctccacctgtatcgagt

SEQ ID NO: 3759188 - DNA, 25 bp, Homo sapien
ctgtaaagaaacacatcatgagatt

SEQ ID NO: 3759189 - DNA, 25 bp, Homo sapien
aacacatcatgagattttctggtgg

SEQ ID NO: 3759190 - DNA, 25 bp, Homo sapien
agattttctggtggttgtgatgttt

SEQ ID NO: 3759191 - DNA, 25 bp, Homo sapien
aaagaaacacatcatgagattttct

SEQ ID NO: 3759192 - DNA, 25 bp, Homo sapien
catgacgtccgccagcctgtgggca

SEQ ID NO: 3759193 - DNA, 25 bp, Homo sapien
ccccgctctgcgtagaggacgagga

SEQ ID NO: 3759194 - DNA, 25 bp, Homo sapien
ggctgatccagtgctccatattgat

SEQ ID NO: 3759195 - DNA, 25 bp, Homo sapien
tatgtgggtctgagccatgacgtcc

SEQ ID NO: 3759196 - DNA, 25 bp, Homo sapien
gtgactaatacgacacggatgatac

SEQ ID NO: 3759197 - DNA, 25 bp, Homo sapien
actaatacgacacggatgatacagc

SEQ ID NO: 3759198 - DNA, 25 bp, Homo sapien
tgactaatacgacacggatgataca

SEQ ID NO: 3759199 - DNA, 25 bp, Homo sapien
gactaatacgacacggatgatacag

SEQ ID NO: 3759200 - DNA, 25 bp, Homo sapien
gtgactaatacgacacggatgatac

SEQ ID NO: 3759201 - DNA, 25 bp, Homo sapien
actaatacgacacggatgatacagc

SEQ ID NO: 3759202 - DNA, 25 bp, Homo sapien
tgactaatacgacacggatgataca

SEQ ID NO: 3759203 - DNA, 25 bp, Homo sapien
gactaatacgacacggatgatacag

SEQ ID NO: 3759204 - DNA, 25 bp, Homo sapien
gaccagcggtgactaatatgacacg

SEQ ID NO: 3759205 - DNA, 25 bp, Homo sapien
accagcggtgactaatatgacacgg

SEQ ID NO: 3759206 - DNA, 25 bp, Homo sapien
tagtgtcgacacctgagaggcataa

SEQ ID NO: 3759207 - DNA, 25 bp, Homo sapien
caaaatgttgccgagtctggagcac

SEQ ID NO: 3759208 - DNA, 25 bp, Homo sapien
gaggcataactcacaacaacccgga

SEQ ID NO: 3759209 - DNA, 25 bp, Homo sapien
tgggttgacgccgaacttagtgtcg

SEQ ID NO: 3759210 - DNA, 25 bp, Homo sapien
cacgttatcaaatttgtggccatag

SEQ ID NO: 3759211 - DNA, 25 bp, Homo sapien
taagaagtattcctcagcttttatg

SEQ ID NO: 3759212 - DNA, 25 bp, Homo sapien
tccatgggacctgtagttatgtccc

SEQ ID NO: 3759213 - DNA, 25 bp, Homo sapien
gatacaggcctatacagattgtttc

SEQ ID NO: 3759214 - DNA, 25 bp, Homo sapien
taacttcccttgatgtaaagcctgc

SEQ ID NO: 3759215 - DNA, 25 bp, Homo sapien
aaaacgtggtatatcatggtgaatg

SEQ ID NO: 3759216 - DNA, 25 bp, Homo sapien
gagaacatactcgtttaattcctat

SEQ ID NO: 3759217 - DNA, 25 bp, Homo sapien
tacttcattgtggttgagaacatac

SEQ ID NO: 3759218 - DNA, 25 bp, Homo sapien
gcttcttcggaagctttccagctct

SEQ ID NO: 3759219 - DNA, 25 bp, Homo sapien
ttaatattgcacattgtgggtaacg

SEQ ID NO: 3759220 - DNA, 25 bp, Homo sapien
ggtaacgtgttgagcacgctcagga

SEQ ID NO: 3759221 - DNA, 25 bp, Homo sapien
gtcatcgtgaccatgggcaggcttg

SEQ ID NO: 3759222 - DNA, 25 bp, Homo sapien
catttgctagcacggcgttcactct

SEQ ID NO: 3759223 - DNA, 25 bp, Homo sapien
tgctagcacggcgttcactctcttg

SEQ ID NO: 3759224 - DNA, 25 bp, Homo sapien
aggagcccaagggagcacgttggca

SEQ ID NO: 3759225 - DNA, 25 bp, Homo sapien
ccaagggagcacgttggcagaaaga

SEQ ID NO: 3759226 - DNA, 25 bp, Homo sapien
ggtgcccggcacattcaggaggccg

SEQ ID NO: 3759227 - DNA, 25 bp, Homo sapien
gccgtgtcggggagcgtgtccctta

SEQ ID NO: 3759228 - DNA, 25 bp, Homo sapien
tgcccggcacattcaggaggccgtg

SEQ ID NO: 3759229 - DNA, 25 bp, Homo sapien
ccggcacattcaggaggccgtgtcg

SEQ ID NO: 3759230 - DNA, 25 bp, Homo sapien
cacgaccagggacctgcgtttggaa

SEQ ID NO: 3759231 - DNA, 25 bp, Homo sapien
ctctttgtgtttggccagagccgcc

SEQ ID NO: 3759232 - DNA, 25 bp, Homo sapien
gcctggacagcttccgtgtggacgt

SEQ ID NO: 3759233 - DNA, 25 bp, Homo sapien
gtgtaggcgtccatcgaggtctgca

SEQ ID NO: 3759234 - DNA, 25 bp, Homo sapien
tccccatcgtcacatggactccacg

SEQ ID NO: 3759235 - DNA, 25 bp, Homo sapien
gactcgtgtagattccccatcgtca

SEQ ID NO: 3759236 - DNA, 25 bp, Homo sapien
catcgtcacatggactccacgccat

SEQ ID NO: 3759237 - DNA, 25 bp, Homo sapien
ctgagactcgtgtagattccccatc

SEQ ID NO: 3759238 - DNA, 25 bp, Homo sapien
cactcgtgtagattctccaccgtca

SEQ ID NO: 3759239 - DNA, 25 bp, Homo sapien
tccaccgtcacatggactccacagc

SEQ ID NO: 3759240 - DNA, 25 bp, Homo sapien
ctgacactcgtgtagattctccacc

SEQ ID NO: 3759241 - DNA, 25 bp, Homo sapien
gacactcgtgtagattctccaccgt

SEQ ID NO: 3759242 - DNA, 25 bp, Homo sapien
tccactggacatcggtatacaactg

SEQ ID NO: 3759243 - DNA, 25 bp, Homo sapien
ggacatcggtatacaactgttgtga

SEQ ID NO: 3759244 - DNA, 25 bp, Homo sapien
ggtccactgggcatctatatacatc

SEQ ID NO: 3759245 - DNA, 25 bp, Homo sapien
gcgaagagtctatcttccactggac

SEQ ID NO: 3759246 - DNA, 25 bp, Homo sapien
ggaacacatcttgtttcaactgagg

SEQ ID NO: 3759247 - DNA, 25 bp, Homo sapien
ctccaacaaggaacacatcttgttt

SEQ ID NO: 3759248 - DNA, 25 bp, Homo sapien
acacatcttgtttcaactgaggcaa

SEQ ID NO: 3759249 - DNA, 25 bp, Homo sapien
tccaacaaggaacacatcttgtttc

SEQ ID NO: 3759250 - DNA, 25 bp, Homo sapien
cagcgtgtgacggagtgctcagaac

SEQ ID NO: 3759251 - DNA, 25 bp, Homo sapien
atgatggcagatgaccccgtgacag

SEQ ID NO: 3759252 - DNA, 25 bp, Homo sapien
ggctactgccctcatactggacagg

SEQ ID NO: 3759253 - DNA, 25 bp, Homo sapien
tagaggaggaacttatacggtgacc

SEQ ID NO: 3759254 - DNA, 25 bp, Homo sapien
gagctgaagtgtcggtctcctccac

SEQ ID NO: 3759255 - DNA, 25 bp, Homo sapien
taaggtgcacggatgaacagaaaac

SEQ ID NO: 3759256 - DNA, 25 bp, Homo sapien
gggtttatcaacacccctgcagcat

SEQ ID NO: 3759257 - DNA, 25 bp, Homo sapien
catgatccgaaggtaaacacagggt

SEQ ID NO: 3759258 - DNA, 25 bp, Homo sapien
attcaggctctcaggtgtgtcctct

SEQ ID NO: 3759259 - DNA, 25 bp, Homo sapien
ttccatccgcacacattttcctggg

SEQ ID NO: 3759260 - DNA, 25 bp, Homo sapien
tctgaggccataaaatctcctctcc

SEQ ID NO: 3759261 - DNA, 25 bp, Homo sapien
cccaggaggtggcaccagcttttca

SEQ ID NO: 3759262 - DNA, 25 bp, Homo sapien
ttcttgcggcaaagcttggtccacc

SEQ ID NO: 3759263 - DNA, 25 bp, Homo sapien
tgaccgatagcgctcatctcgtgac

SEQ ID NO: 3759264 - DNA, 25 bp, Homo sapien
accgtcggcggtggtagcgagaggc

SEQ ID NO: 3759265 - DNA, 25 bp, Homo sapien
atctcgtgaccctgaagaccgtcgg

SEQ ID NO: 3759266 - DNA, 25 bp, Homo sapien
caaggaaggcttcaacggggctgtt

SEQ ID NO: 3759267 - DNA, 25 bp, Homo sapien
tttcgtttgcccgaagagccctctc

SEQ ID NO: 3759268 - DNA, 25 bp, Homo sapien
taatttctccagataacacacatgg

SEQ ID NO: 3759269 - DNA, 25 bp, Homo sapien
ggcatgttcaccctctaacctggag

SEQ ID NO: 3759270 - DNA, 25 bp, Homo sapien
tttggggaactgtgattgaaaacca

SEQ ID NO: 3759271 - DNA, 25 bp, Homo sapien
ggaactgtgattgaaaaccagctct

SEQ ID NO: 3759272 - DNA, 25 bp, Homo sapien
cgttcacagtcacgttcagtttggg

SEQ ID NO: 3759273 - DNA, 25 bp, Homo sapien
ctctgcgctgctgagggctcacgtt

SEQ ID NO: 3759274 - DNA, 25 bp, Homo sapien
tggatgagggttctcatccggcagc

SEQ ID NO: 3759275 - DNA, 25 bp, Homo sapien
agctccagtcgacgctcactggatg

SEQ ID NO: 3759276 - DNA, 25 bp, Homo sapien
tgagctccagtcgacgctcactgga

SEQ ID NO: 3759277 - DNA, 25 bp, Homo sapien
cctgagctccagtcgacgctcactg

SEQ ID NO: 3759278 - DNA, 25 bp, Homo sapien
ggagcacggctgatctggaacacag

SEQ ID NO: 3759279 - DNA, 25 bp, Homo sapien
gcagctaagcgtggtaccctgtgaa

SEQ ID NO: 3759280 - DNA, 25 bp, Homo sapien
agctccctgtggcagaacacgtctc

SEQ ID NO: 3759281 - DNA, 25 bp, Homo sapien
ggtgattcacctgtcactacagcaa

SEQ ID NO: 3759282 - DNA, 25 bp, Homo sapien
acaaccaacggccagcccaggtgaa

SEQ ID NO: 3759283 - DNA, 25 bp, Homo sapien
gcctctgctgacacgaggaatcaga

SEQ ID NO: 3759284 - DNA, 25 bp, Homo sapien
ctgacacgaggaatcagaacaacca

SEQ ID NO: 3759285 - DNA, 25 bp, Homo sapien
aacggccagcccaggtgaacaggcc

SEQ ID NO: 3759286 - DNA, 25 bp, Homo sapien
agcagagttcctcatgtggatgcag

SEQ ID NO: 3759287 - DNA, 25 bp, Homo sapien
ctggacacggccaagtgcacggcct

SEQ ID NO: 3759288 - DNA, 25 bp, Homo sapien
caagtgcacggcctgagcagagttc

SEQ ID NO: 3759289 - DNA, 25 bp, Homo sapien
tcctcatgtggatgcagcggcatgg

SEQ ID NO: 3759290 - DNA, 25 bp, Homo sapien
agggacagcggcgtggccatcggga

SEQ ID NO: 3759291 - DNA, 25 bp, Homo sapien
ggacagcggcgtggccatcgggagc

SEQ ID NO: 3759292 - DNA, 25 bp, Homo sapien
ctgtcgggagggacagcggcgtggc

SEQ ID NO: 3759293 - DNA, 25 bp, Homo sapien
tcgggagggacagcggcgtggccat

SEQ ID NO: 3759294 - DNA, 25 bp, Homo sapien
caagctgtccggctattgaaggaaa

SEQ ID NO: 3759295 - DNA, 25 bp, Homo sapien
aagcagtgaggccttgttatccaag

SEQ ID NO: 3759296 - DNA, 25 bp, Homo sapien
gagtccttgtaacttgcacctgggc

SEQ ID NO: 3759297 - DNA, 25 bp, Homo sapien
gcttggagaggaataccagatcttc

SEQ ID NO: 3759298 - DNA, 25 bp, Homo sapien
gcgggtggcccttttctaatgtgta

SEQ ID NO: 3759299 - DNA, 25 bp, Homo sapien
cggcgggtggcccttttctaatgtg

SEQ ID NO: 3759300 - DNA, 25 bp, Homo sapien
acgtctgtacgggatggcactcggc

SEQ ID NO: 3759301 - DNA, 25 bp, Homo sapien
cctacacgtctgtacgggatggcac

SEQ ID NO: 3759302 - DNA, 25 bp, Homo sapien
gggctggctctcagcaaagcagcgc

SEQ ID NO: 3759303 - DNA, 25 bp, Homo sapien
ctggctctcagcaaagcagcgctca

SEQ ID NO: 3759304 - DNA, 25 bp, Homo sapien
tggctctcagcaaagcagcgctcac

SEQ ID NO: 3759305 - DNA, 25 bp, Homo sapien
tgtggggctggctctcagcaaagca

SEQ ID NO: 3759306 - DNA, 25 bp, Homo sapien
tgggcagagcggaatgttctcctcg

SEQ ID NO: 3759307 - DNA, 25 bp, Homo sapien
gaatgttctcctcggcgctccttca

SEQ ID NO: 3759308 - DNA, 25 bp, Homo sapien
tcggacgtcgcacaccccgatgtgg

SEQ ID NO: 3759309 - DNA, 25 bp, Homo sapien
aaacagaggccggttccctgcggtg

SEQ ID NO: 3759310 - DNA, 25 bp, Homo sapien
caccgaaccacggcagctccattcg

SEQ ID NO: 3759311 - DNA, 25 bp, Homo sapien
tacaccgaaccacggcagctccatt

SEQ ID NO: 3759312 - DNA, 25 bp, Homo sapien
ctacaccgaaccacggcagctccat

SEQ ID NO: 3759313 - DNA, 25 bp, Homo sapien
cgaaccacggcagctccattcgctg

SEQ ID NO: 3759314 - DNA, 25 bp, Homo sapien
cttctgcagcacatgagggcacctg

SEQ ID NO: 3759315 - DNA, 25 bp, Homo sapien
agggcacctgcagaggggaactcac

SEQ ID NO: 3759316 - DNA, 25 bp, Homo sapien
tctgcagcacatgagggcacctgca

SEQ ID NO: 3759317 - DNA, 25 bp, Homo sapien
tgagggcacctgcagaggggaactc

SEQ ID NO: 3759318 - DNA, 25 bp, Homo sapien
gcgggggcagctgtcgccccatggc

SEQ ID NO: 3759319 - DNA, 25 bp, Homo sapien
cgggggcagctgtcgccccatggct

SEQ ID NO: 3759320 - DNA, 25 bp, Homo sapien
gagaatgagggagggggcgcaggcc

SEQ ID NO: 3759321 - DNA, 25 bp, Homo sapien
ctgcgagaagagaatgagggagggg

SEQ ID NO: 3759322 - DNA, 25 bp, Homo sapien
agaagagaatgagggagggggcgca

SEQ ID NO: 3759323 - DNA, 25 bp, Homo sapien
gaatgagggagggggcgcaggccat

SEQ ID NO: 3759324 - DNA, 25 bp, Homo sapien
aggctgcggaaggtaggctccaatt

SEQ ID NO: 3759325 - DNA, 25 bp, Homo sapien
ctgcggaaggtaggctccaattaac

SEQ ID NO: 3759326 - DNA, 25 bp, Homo sapien
ggctccaattaactttgacctcttc

SEQ ID NO: 3759327 - DNA, 25 bp, Homo sapien
gaaggtaggctccaattaactttga

SEQ ID NO: 3759328 - DNA, 25 bp, Homo sapien
gaaacttacgatgattctatcccaa

SEQ ID NO: 3759329 - DNA, 25 bp, Homo sapien
tgcagaagacgacggcttgatgtgc

SEQ ID NO: 3759330 - DNA, 25 bp, Homo sapien
gcaaaggggaaacttacgatgattc

SEQ ID NO: 3759331 - DNA, 25 bp, Homo sapien
tctatcccaaaatgcagaagacgac

SEQ ID NO: 3759332 - DNA, 25 bp, Homo sapien
ttccaggcgtcttctttgtccgagg

SEQ ID NO: 3759333 - DNA, 25 bp, Homo sapien
ggaacagttccaggcgtcttctttg

SEQ ID NO: 3759334 - DNA, 25 bp, Homo sapien
tgctggcttcgtgccgggaacagtt

SEQ ID NO: 3759335 - DNA, 25 bp, Homo sapien
tgtccgaggaatttacactgcaacc

SEQ ID NO: 3759336 - DNA, 25 bp, Homo sapien
ctcactccaaggaccgcgggttcca

SEQ ID NO: 3759337 - DNA, 25 bp, Homo sapien
gcatggccgtccgtgtccccctgca

SEQ ID NO: 3759338 - DNA, 25 bp, Homo sapien
gtccgtgtccccctgcagaccagac

SEQ ID NO: 3759339 - DNA, 25 bp, Homo sapien
tcactccaaggaccgcgggttccag

SEQ ID NO: 3759340 - DNA, 25 bp, Homo sapien
ctggcccctgacaccgaccctcacc

SEQ ID NO: 3759341 - DNA, 25 bp, Homo sapien
caccactgctgccaacaccgtattt

SEQ ID NO: 3759342 - DNA, 25 bp, Homo sapien
cactgctgccaacaccgtatttcct

SEQ ID NO: 3759343 - DNA, 25 bp, Homo sapien
tgctgccaacaccgtatttcctcat

SEQ ID NO: 3759344 - DNA, 25 bp, Homo sapien
agcaggactgccagcggccagacga

SEQ ID NO: 3759345 - DNA, 25 bp, Homo sapien
cagaaaggaacggtgtcaaagaggc

SEQ ID NO: 3759346 - DNA, 25 bp, Homo sapien
tcagagtaaaaaccctcccaagcca

SEQ ID NO: 3759347 - DNA, 25 bp, Homo sapien
agatcccagttcttatcggattggg

SEQ ID NO: 3759348 - DNA, 25 bp, Homo sapien
ttagcatgacctttggtactgccat

SEQ ID NO: 3759349 - DNA, 25 bp, Homo sapien
tctttcacgttcaaggtgactggta

SEQ ID NO: 3759350 - DNA, 25 bp, Homo sapien
gactggtatcgtacagtgcgtgacc

SEQ ID NO: 3759351 - DNA, 25 bp, Homo sapien
tacagtgcgtgacctttagcatgac

SEQ ID NO: 3759352 - DNA, 25 bp, Homo sapien
caaaatgggtctcacagtatcgact

SEQ ID NO: 3759353 - DNA, 25 bp, Homo sapien
tgtttaagcctcacagtctgcggtg

SEQ ID NO: 3759354 - DNA, 25 bp, Homo sapien
ggtgcagtccatccttttccatgtg

SEQ ID NO: 3759355 - DNA, 25 bp, Homo sapien
tctgcggtgtctgttacggtaccca

SEQ ID NO: 3759356 - DNA, 25 bp, Homo sapien
cctcactgccccatgaggaggttca

SEQ ID NO: 3759357 - DNA, 25 bp, Homo sapien
cagttttaagggcaggatcattttc

SEQ ID NO: 3759358 - DNA, 25 bp, Homo sapien
ccatgaggaggttcacgggctcttc

SEQ ID NO: 3759359 - DNA, 25 bp, Homo sapien
gatcattttcccacacgtttgcttc

SEQ ID NO: 3759360 - DNA, 25 bp, Homo sapien
gacgtgtgacaacggaaggactctg

SEQ ID NO: 3759361 - DNA, 25 bp, Homo sapien
gatgcattttactgactacacggcc

SEQ ID NO: 3759362 - DNA, 25 bp, Homo sapien
tataaagtggtaccatggacacacc

SEQ ID NO: 3759363 - DNA, 25 bp, Homo sapien
cagactagagcgtgacaggactgct

SEQ ID NO: 3759364 - DNA, 25 bp, Homo sapien
cagatgctactcctgcacgtgggtg

SEQ ID NO: 3759365 - DNA, 25 bp, Homo sapien
gctcctgtacgggtttgctgaccaa

SEQ ID NO: 3759366 - DNA, 25 bp, Homo sapien
caggaactcacctttgtccgggaga

SEQ ID NO: 3759367 - DNA, 25 bp, Homo sapien
gaaacaatctggtcttacctgcgcc

SEQ ID NO: 3759368 - DNA, 25 bp, Homo sapien
tcaacagccggaagcagttctgcca

SEQ ID NO: 3759369 - DNA, 25 bp, Homo sapien
gggctgctcccgagactgtgctgaa

SEQ ID NO: 3759370 - DNA, 25 bp, Homo sapien
cagcgctcaacagccggaagcagtt

SEQ ID NO: 3759371 - DNA, 25 bp, Homo sapien
accgatctgtgcacgccaagcagct

SEQ ID NO: 3759372 - DNA, 25 bp, Homo sapien
cctgtaatgacgcagaaggagagca

SEQ ID NO: 3759373 - DNA, 25 bp, Homo sapien
acagccagacgccacttctccaaga

SEQ ID NO: 3759374 - DNA, 25 bp, Homo sapien
ttctccaagaaccaagcacgtgcct

SEQ ID NO: 3759375 - DNA, 25 bp, Homo sapien
cctagagatcgcctgtaatgacgca

SEQ ID NO: 3759376 - DNA, 25 bp, Homo sapien
cacacgtgacacttctcggagagag

SEQ ID NO: 3759377 - DNA, 25 bp, Homo sapien
gaagaactgggttggccctgacaca

SEQ ID NO: 3759378 - DNA, 25 bp, Homo sapien
tgtgatgacacagccgaagcgctgg

SEQ ID NO: 3759379 - DNA, 25 bp, Homo sapien
gacaagagacaatgacacccagctg

SEQ ID NO: 3759380 - DNA, 25 bp, Homo sapien
acccctcgcccaggagagatggtag

SEQ ID NO: 3759381 - DNA, 25 bp, Homo sapien
attcccattagaaaggctgccctga

SEQ ID NO: 3759382 - DNA, 25 bp, Homo sapien
tcacaggactgagcattgagcattg

SEQ ID NO: 3759383 - DNA, 25 bp, Homo sapien
caagtcgcagctgttgatgctgccc

SEQ ID NO: 3759384 - DNA, 25 bp, Homo sapien
cagagaggtgcattctgacaggcgt

SEQ ID NO: 3759385 - DNA, 25 bp, Homo sapien
gcagcaccagatggatgtgtgccga

SEQ ID NO: 3759386 - DNA, 25 bp, Homo sapien
tattccaattctacagcgcaaagca

SEQ ID NO: 3759387 - DNA, 25 bp, Homo sapien
cacggagcacgcgtgtgaagattca

SEQ ID NO: 3759388 - DNA, 25 bp, Homo sapien
gccaacacagttgggctcgaaccgc

SEQ ID NO: 3759389 - DNA, 25 bp, Homo sapien
cctctgtcaccaaagttgagaagga

SEQ ID NO: 3759390 - DNA, 25 bp, Homo sapien
ggatctgttatctcggtcccagggt

SEQ ID NO: 3759391 - DNA, 25 bp, Homo sapien
agtgcgaggactcgggaactgccca

SEQ ID NO: 3759392 - DNA, 25 bp, Homo sapien
tgcagatggggccctcacgctgcag

SEQ ID NO: 3759393 - DNA, 25 bp, Homo sapien
taagtgcctttctagggtgtacgaa

SEQ ID NO: 3759394 - DNA, 25 bp, Homo sapien
gctcagctccacatccaggcttttg

SEQ ID NO: 3759395 - DNA, 25 bp, Homo sapien
ccagggacgcttggagagaacctga

SEQ ID NO: 3759396 - DNA, 25 bp, Homo sapien
gagcgtcggtcttgctctgacctga

SEQ ID NO: 3759397 - DNA, 25 bp, Homo sapien
ctggggcacccacgagaaaactacg

SEQ ID NO: 3759398 - DNA, 25 bp, Homo sapien
aaactacggaagctgtgaagacgga

SEQ ID NO: 3759399 - DNA, 25 bp, Homo sapien
aggtgtgcatgtggccgggagaacc

SEQ ID NO: 3759400 - DNA, 25 bp, Homo sapien
cccacgagaaaactacggaagctgt

SEQ ID NO: 3759401 - DNA, 25 bp, Homo sapien
gggaggcgctcggtgccctgaaggc

SEQ ID NO: 3759402 - DNA, 25 bp, Homo sapien
ggcggcgcaaccttggctgccaggg

SEQ ID NO: 3759403 - DNA, 25 bp, Homo sapien
gcactatgggcaccgtcattttaga

SEQ ID NO: 3759404 - DNA, 25 bp, Homo sapien
ccacgagcaaacgagggaggcgctc

SEQ ID NO: 3759405 - DNA, 25 bp, Homo sapien
gggccaactccaaagcgggcgatct

SEQ ID NO: 3759406 - DNA, 25 bp, Homo sapien
cactcgctgtctgggtctaagaaaa

SEQ ID NO: 3759407 - DNA, 25 bp, Homo sapien
tctcctgaggacaaaactgctccag

SEQ ID NO: 3759408 - DNA, 25 bp, Homo sapien
tattaattctcctcatggtcccaag

SEQ ID NO: 3759409 - DNA, 25 bp, Homo sapien
acggaacgacgccaccattgcagtt

SEQ ID NO: 3759410 - DNA, 25 bp, Homo sapien
gcaaaacccgagactcacggaacga

SEQ ID NO: 3759411 - DNA, 25 bp, Homo sapien
gataattcgctttctcatccgtgaa

SEQ ID NO: 3759412 - DNA, 25 bp, Homo sapien
ataaagtcggattaactcatctcca

SEQ ID NO: 3759413 - DNA, 25 bp, Homo sapien
ctgtggttgaggaaagaggccacac

SEQ ID NO: 3759414 - DNA, 25 bp, Homo sapien
tatctgaacgtcacacaaaagggtt

SEQ ID NO: 3759415 - DNA, 25 bp, Homo sapien
tggttctcagctccgacctctgtga

SEQ ID NO: 3759416 - DNA, 25 bp, Homo sapien
ggtggatgtacgctaatggttctca

SEQ ID NO: 3759417 - DNA, 25 bp, Homo sapien
ttagcaccgcaggtgccaaggacgg

SEQ ID NO: 3759418 - DNA, 25 bp, Homo sapien
ggatgctgatggcaccagagggtgg

SEQ ID NO: 3759419 - DNA, 25 bp, Homo sapien
tcaagcaggggcgattctactggga

SEQ ID NO: 3759420 - DNA, 25 bp, Homo sapien
ggaagcagggatctgacgcttagca

SEQ ID NO: 3759421 - DNA, 25 bp, Homo sapien
cactctgaaagcagatacattgagg

SEQ ID NO: 3759422 - DNA, 25 bp, Homo sapien
atacattgaggaatttttgaagtcc

SEQ ID NO: 3759423 - DNA, 25 bp, Homo sapien
gaattttgatccttcaattcttgga

SEQ ID NO: 3759424 - DNA, 25 bp, Homo sapien
ctgaaagcagatacattgaggaatt

SEQ ID NO: 3759425 - DNA, 25 bp, Homo sapien
ccttcgtcgaaagtggctttgccat

SEQ ID NO: 3759426 - DNA, 25 bp, Homo sapien
aaaaaacctgtacagacgcaaggtg

SEQ ID NO: 3759427 - DNA, 25 bp, Homo sapien
gggaattcggctgagcacaccttcg

SEQ ID NO: 3759428 - DNA, 25 bp, Homo sapien
caaggtgttcacagggaattcggct

SEQ ID NO: 3759429 - DNA, 25 bp, Homo sapien
ctggatggggcactgacacttcaca

SEQ ID NO: 3759430 - DNA, 25 bp, Homo sapien
acttcacatcagtgtgatgcaggca

SEQ ID NO: 3759431 - DNA, 25 bp, Homo sapien
atggggcactgacacttcacatcag

SEQ ID NO: 3759432 - DNA, 25 bp, Homo sapien
tgatgcaggcagcacagaagcccct

SEQ ID NO: 3759433 - DNA, 25 bp, Homo sapien
gggaggttgacgattccgcccagcc

SEQ ID NO: 3759434 - DNA, 25 bp, Homo sapien
aagtttcgcattgaaatctggccgg

SEQ ID NO: 3759435 - DNA, 25 bp, Homo sapien
tgagccaccagagatcgaacccggg

SEQ ID NO: 3759436 - DNA, 25 bp, Homo sapien
atctggccgggcgttccaggccgaa

SEQ ID NO: 3759437 - DNA, 25 bp, Homo sapien
ccagctcggccaggcgcgcccgcac

SEQ ID NO: 3759438 - DNA, 25 bp, Homo sapien
cagctccagctcggccaggcgcgcc

SEQ ID NO: 3759439 - DNA, 25 bp, Homo sapien
tccagctccagctcggccaggcgcg

SEQ ID NO: 3759440 - DNA, 25 bp, Homo sapien
gctccagctcggccaggcgcgcccg

SEQ ID NO: 3759441 - DNA, 25 bp, Homo sapien
caggggcagcgccatgccctccagg

SEQ ID NO: 3759442 - DNA, 25 bp, Homo sapien
tctttgttcgcaggcggaggtctcg

SEQ ID NO: 3759443 - DNA, 25 bp, Homo sapien
gcaggcggaggtctcggcggctcct

SEQ ID NO: 3759444 - DNA, 25 bp, Homo sapien
ctcctctttgttcgcaggcggaggt

SEQ ID NO: 3759445 - DNA, 25 bp, Homo sapien
gctcctcgcgcccggcggaaccgca

SEQ ID NO: 3759446 - DNA, 25 bp, Homo sapien
tcatagcacgttctcgctgacatta

SEQ ID NO: 3759447 - DNA, 25 bp, Homo sapien
cgctgacattactctgcaggaaaag

SEQ ID NO: 3759448 - DNA, 25 bp, Homo sapien
ctgacattactctgcaggaaaagcc

SEQ ID NO: 3759449 - DNA, 25 bp, Homo sapien
ctcgctgacattactctgcaggaaa

SEQ ID NO: 3759450 - DNA, 25 bp, Homo sapien
tcacattcatcaaaacgcagcgtca

SEQ ID NO: 3759451 - DNA, 25 bp, Homo sapien
gggccgagcatgtcctcatggccag

SEQ ID NO: 3759452 - DNA, 25 bp, Homo sapien
cgtcatgcctaggaactgagggtgt

SEQ ID NO: 3759453 - DNA, 25 bp, Homo sapien
gaaacactgactgtgtctgatctac

SEQ ID NO: 3759454 - DNA, 25 bp, Homo sapien
tggggcagacaccagccacctccag

SEQ ID NO: 3759455 - DNA, 25 bp, Homo sapien
gggcagacaccagccacctccagga

SEQ ID NO: 3759456 - DNA, 25 bp, Homo sapien
tgtggggcagacaccagccacctcc

SEQ ID NO: 3759457 - DNA, 25 bp, Homo sapien
ctgtggggcagacaccagccacctc

SEQ ID NO: 3759458 - DNA, 25 bp, Homo sapien
ctggaggcgcgtactctggagactc

SEQ ID NO: 3759459 - DNA, 25 bp, Homo sapien
cagatggcgtggagtggacgctgga

SEQ ID NO: 3759460 - DNA, 25 bp, Homo sapien
cccttgctgtggctcgatgaccttc

SEQ ID NO: 3759461 - DNA, 25 bp, Homo sapien
tgaccttcgctggacggtcacccgg

SEQ ID NO: 3759462 - DNA, 25 bp, Homo sapien
tagatgtcacggtgttcctgaagca

SEQ ID NO: 3759463 - DNA, 25 bp, Homo sapien
gtcacggtgttcctgaagcacgagg

SEQ ID NO: 3759464 - DNA, 25 bp, Homo sapien
gtggtagatgtcacggtgttcctga

SEQ ID NO: 3759465 - DNA, 25 bp, Homo sapien
gatgtcacggtgttcctgaagcacg

SEQ ID NO: 3759466 - DNA, 25 bp, Homo sapien
ctgcaccacggttaaagcatgaagg

SEQ ID NO: 3759467 - DNA, 25 bp, Homo sapien
ccacggttaaagcatgaaggtgctg

SEQ ID NO: 3759468 - DNA, 25 bp, Homo sapien
gttaaagcatgaaggtgctggcctg

SEQ ID NO: 3759469 - DNA, 25 bp, Homo sapien
cggttaaagcatgaaggtgctggcc

SEQ ID NO: 3759470 - DNA, 25 bp, Homo sapien
tgggaagagctcctatagtgcctgt

SEQ ID NO: 3759471 - DNA, 25 bp, Homo sapien
ggccgtcctgggaagagctcctata

SEQ ID NO: 3759472 - DNA, 25 bp, Homo sapien
tcctgggaagagctcctatagtgcc

SEQ ID NO: 3759473 - DNA, 25 bp, Homo sapien
ggaagagctcctatagtgcctgtgt

SEQ ID NO: 3759474 - DNA, 25 bp, Homo sapien
gccagagcggctgccagaccgagac

SEQ ID NO: 3759475 - DNA, 25 bp, Homo sapien
gacctctagcagatcacactgtggg

SEQ ID NO: 3759476 - DNA, 25 bp, Homo sapien
gggacgattgcggacctctagcaga

SEQ ID NO: 3759477 - DNA, 25 bp, Homo sapien
tgccagaccgagacaacgtgaccat

SEQ ID NO: 3759478 - DNA, 25 bp, Homo sapien
agacagccacgcattcctctgtctt

SEQ ID NO: 3759479 - DNA, 25 bp, Homo sapien
tgaactcctcaagcacgcagaccat

SEQ ID NO: 3759480 - DNA, 25 bp, Homo sapien
tttgtgtacactgcaatgtctggca

SEQ ID NO: 3759481 - DNA, 25 bp, Homo sapien
gttgccctccagacagccacgcatt

SEQ ID NO: 3759482 - DNA, 25 bp, Homo sapien
tccgccacgcctccagagcagggct

SEQ ID NO: 3759483 - DNA, 25 bp, Homo sapien
ccgaggccaccatcagactccacct

SEQ ID NO: 3759484 - DNA, 25 bp, Homo sapien
gccgaggccaccatcagactccacc

SEQ ID NO: 3759485 - DNA, 25 bp, Homo sapien
gcctccgccacgcctccagagcagg

SEQ ID NO: 3759486 - DNA, 25 bp, Homo sapien
tcggggccgtcagcatgcacgccat

SEQ ID NO: 3759487 - DNA, 25 bp, Homo sapien
cgggccatggcgctgtgtcagggtt

SEQ ID NO: 3759488 - DNA, 25 bp, Homo sapien
catggcgctgtgtcagggttagggt

SEQ ID NO: 3759489 - DNA, 25 bp, Homo sapien
ctggagacgggccatggcgctgtgt

SEQ ID NO: 3759490 - DNA, 25 bp, Homo sapien
cccggctcacggctgcgccacgtac

SEQ ID NO: 3759491 - DNA, 25 bp, Homo sapien
tccccggctcacggctgcgccacgt

SEQ ID NO: 3759492 - DNA, 25 bp, Homo sapien
atccccggctcacggctgcgccacg

SEQ ID NO: 3759493 - DNA, 25 bp, Homo sapien
tcatccccggctcacggctgcgcca

SEQ ID NO: 3759494 - DNA, 25 bp, Homo sapien
tttgtgccctcgaagccggccaggg

SEQ ID NO: 3759495 - DNA, 25 bp, Homo sapien
gggcctccgaggactgttccaggaa

SEQ ID NO: 3759496 - DNA, 25 bp, Homo sapien
ctgtttaatccgctgaggagccctg

SEQ ID NO: 3759497 - DNA, 25 bp, Homo sapien
ctcgtggctgatcaatgcgggccga

SEQ ID NO: 3759498 - DNA, 25 bp, Homo sapien
ctgcccgcagcacccgccgtgtctc

SEQ ID NO: 3759499 - DNA, 25 bp, Homo sapien
tgcacgcaccgaggcagcgtccaga

SEQ ID NO: 3759500 - DNA, 25 bp, Homo sapien
gcagcgtccagactcgagacatcct

SEQ ID NO: 3759501 - DNA, 25 bp, Homo sapien
ccagccacgggcgaaatcacagcca

SEQ ID NO: 3759502 - DNA, 25 bp, Homo sapien
accgaggcagcgtccagactcgaga

SEQ ID NO: 3759503 - DNA, 25 bp, Homo sapien
cttggagggccccagccgaaggagc

SEQ ID NO: 3759504 - DNA, 25 bp, Homo sapien
acggcagaagccggcctggagccgc

SEQ ID NO: 3759505 - DNA, 25 bp, Homo sapien
ggccccagccgaaggagctggtgca

SEQ ID NO: 3759506 - DNA, 25 bp, Homo sapien
ccaagccgagacccctggctggagg

SEQ ID NO: 3759507 - DNA, 25 bp, Homo sapien
ttgcaaggcccatgcgcccttcgac

SEQ ID NO: 3759508 - DNA, 25 bp, Homo sapien
gctgcgtttcctcgccaggtgtcca

SEQ ID NO: 3759509 - DNA, 25 bp, Homo sapien
caggcagatgttgccgctgcgtttc

SEQ ID NO: 3759510 - DNA, 25 bp, Homo sapien
cacaggctgcgcaggcagatgttgc

SEQ ID NO: 3759511 - DNA, 25 bp, Homo sapien
tgaagggtcgttctctgctagggac

SEQ ID NO: 3759512 - DNA, 25 bp, Homo sapien
tccaagagatgtgtctgtcggcgtc

SEQ ID NO: 3759513 - DNA, 25 bp, Homo sapien
ggatgcggattgggccacactttga

SEQ ID NO: 3759514 - DNA, 25 bp, Homo sapien
gacagccatcggctccttctcaaag

SEQ ID NO: 3759515 - DNA, 25 bp, Homo sapien
aatcagagcagaattgaatgaactt

SEQ ID NO: 3759516 - DNA, 25 bp, Homo sapien
tcagagcagaattgaatgaacttga

SEQ ID NO: 3759517 - DNA, 25 bp, Homo sapien
ttataaagatctcaaattagcaatc

SEQ ID NO: 3759518 - DNA, 25 bp, Homo sapien
aaagttataaagatctcaaattagc

SEQ ID NO: 3759519 - DNA, 25 bp, Homo sapien
tcctttggggatcagctgtgcacag

SEQ ID NO: 3759520 - DNA, 25 bp, Homo sapien
ggaaccacagcaattagccactcta

SEQ ID NO: 3759521 - DNA, 25 bp, Homo sapien
agtactccgatgtccccaggacaga

SEQ ID NO: 3759522 - DNA, 25 bp, Homo sapien
agtaagccagcagtactccgatgtc

SEQ ID NO: 3759523 - DNA, 25 bp, Homo sapien
gaaggcctgcgcaccccggtggggc

SEQ ID NO: 3759524 - DNA, 25 bp, Homo sapien
cttgctgacctgcaggaaggcctgc

SEQ ID NO: 3759525 - DNA, 25 bp, Homo sapien
tgcaggaaggcctgcgcaccccggt

SEQ ID NO: 3759526 - DNA, 25 bp, Homo sapien
acaggcccagctcggcatccaggct

SEQ ID NO: 3759527 - DNA, 25 bp, Homo sapien
tcgaatggcatctaaacagggcagg

SEQ ID NO: 3759528 - DNA, 25 bp, Homo sapien
caggtccggtctttcgggctcgaat

SEQ ID NO: 3759529 - DNA, 25 bp, Homo sapien
ttttcctcccatggaacggccagca

SEQ ID NO: 3759530 - DNA, 25 bp, Homo sapien
tgcagcccatatggcagttccaaga

SEQ ID NO: 3759531 - DNA, 25 bp, Homo sapien
gctggaaccatataaagttgctact

SEQ ID NO: 3759532 - DNA, 25 bp, Homo sapien
tggtgacgatcactcagggcatctc

SEQ ID NO: 3759533 - DNA, 25 bp, Homo sapien
tggcatgaccaaatacaactgtaag

SEQ ID NO: 3759534 - DNA, 25 bp, Homo sapien
tgcagtcatccacaaaaatgggtca

SEQ ID NO: 3759535 - DNA, 25 bp, Homo sapien
tgtcaagggtaccataaaactctgt

SEQ ID NO: 3759536 - DNA, 25 bp, Homo sapien
ggcgggaccgcctgagtttctaata

SEQ ID NO: 3759537 - DNA, 25 bp, Homo sapien
gcctaagtgggtgttggtgacatcc

SEQ ID NO: 3759538 - DNA, 25 bp, Homo sapien
cagtgacaggcgtttttgcagcaag

SEQ ID NO: 3759539 - DNA, 25 bp, Homo sapien
taaacacagtgagcttcggctggga

SEQ ID NO: 3759540 - DNA, 25 bp, Homo sapien
tccaacgagaagacacggtgatcct

SEQ ID NO: 3759541 - DNA, 25 bp, Homo sapien
ctgctccggccgaggaaatcctggt

SEQ ID NO: 3759542 - DNA, 25 bp, Homo sapien
aaacggcacgttacaccgacaggag

SEQ ID NO: 3759543 - DNA, 25 bp, Homo sapien
gaccagtggagagacagtgaactca

SEQ ID NO: 3759544 - DNA, 25 bp, Homo sapien
cacacgtgggaagtctgcaagtaac

SEQ ID NO: 3759545 - DNA, 25 bp, Homo sapien
gccctcagggagcacagttaatcat

SEQ ID NO: 3759546 - DNA, 25 bp, Homo sapien
aataggcagtgtagaatagagaccc

SEQ ID NO: 3759547 - DNA, 25 bp, Homo sapien
tagacagttttacactgaatgacac

SEQ ID NO: 3759548 - DNA, 25 bp, Homo sapien
tcgcctcgattgtctgcagccctgt

SEQ ID NO: 3759549 - DNA, 25 bp, Homo sapien
aaaccctcgaggagcgaccacatga

SEQ ID NO: 3759550 - DNA, 25 bp, Homo sapien
ttacatgtaagcttgattccagtct

SEQ ID NO: 3759551 - DNA, 25 bp, Homo sapien
gacgtttacggccacccgccagtga

SEQ ID NO: 3759552 - DNA, 25 bp, Homo sapien
tcactctcagagaacgacgactcca

SEQ ID NO: 3759553 - DNA, 25 bp, Homo sapien
cgtcgcccggatacactgaactggt

SEQ ID NO: 3759554 - DNA, 25 bp, Homo sapien
actgcagagatcctaatatagcaac

SEQ ID NO: 3759555 - DNA, 25 bp, Homo sapien
taacctgagatactgctgggggtaa

SEQ ID NO: 3759556 - DNA, 25 bp, Homo sapien
aagcatcatcacacgattttacaag

SEQ ID NO: 3759557 - DNA, 25 bp, Homo sapien
tcaaaatgataagcatcatcacacg

SEQ ID NO: 3759558 - DNA, 25 bp, Homo sapien
gcatctctgattctataacctgaga

SEQ ID NO: 3759559 - DNA, 25 bp, Homo sapien
tgctggctaggcagtaactacagtg

SEQ ID NO: 3759560 - DNA, 25 bp, Homo sapien
acacagcacagttggcatggaccgc

SEQ ID NO: 3759561 - DNA, 25 bp, Homo sapien
tctggcagggtcaatcatgcttagc

SEQ ID NO: 3759562 - DNA, 25 bp, Homo sapien
tacagtgtattgaccggagggcagc

SEQ ID NO: 3759563 - DNA, 25 bp, Homo sapien
taagactttccaattcccttttgca

SEQ ID NO: 3759564 - DNA, 25 bp, Homo sapien
aagactttccaattcccttttgcag

SEQ ID NO: 3759565 - DNA, 25 bp, Homo sapien
caacacaccgatgtaagagaaaaaa

SEQ ID NO: 3759566 - DNA, 25 bp, Homo sapien
tcagttcaacacaccgatgtaagag

SEQ ID NO: 3759567 - DNA, 25 bp, Homo sapien
gagatccacgcagtaactgagtaac

SEQ ID NO: 3759568 - DNA, 25 bp, Homo sapien
agtttatctacatcccgctcaacag

SEQ ID NO: 3759569 - DNA, 25 bp, Homo sapien
tgtacaagcgaagcacactccaagt

SEQ ID NO: 3759570 - DNA, 25 bp, Homo sapien
taaaactagcgacaggagatccacg

SEQ ID NO: 3759571 - DNA, 25 bp, Homo sapien
tttatcctccaccagccaaagaggg

SEQ ID NO: 3759572 - DNA, 25 bp, Homo sapien
ccctcgtcttggaggtaaaagagca

SEQ ID NO: 3759573 - DNA, 25 bp, Homo sapien
ccttgttcttcagaagtgcagcact

SEQ ID NO: 3759574 - DNA, 25 bp, Homo sapien
tctggaagtgaatcaatgaggccct

SEQ ID NO: 3759575 - DNA, 25 bp, Homo sapien
taccaacggcttaggtggaagcaca

SEQ ID NO: 3759576 - DNA, 25 bp, Homo sapien
taacatgtcagtgggcaacaaagtg

SEQ ID NO: 3759577 - DNA, 25 bp, Homo sapien
tgcaggttcactccgcccaggagat

SEQ ID NO: 3759578 - DNA, 25 bp, Homo sapien
tgtggttaacacagcgctctgcgac

SEQ ID NO: 3759579 - DNA, 25 bp, Homo sapien
ggagtgctctgctctcggctgagac

SEQ ID NO: 3759580 - DNA, 25 bp, Homo sapien
gctccaggtgtggacttgagggctg

SEQ ID NO: 3759581 - DNA, 25 bp, Homo sapien
gcttccccatggccgagggcgaggg

SEQ ID NO: 3759582 - DNA, 25 bp, Homo sapien
ctccttcccacaaccaacagtgttt

SEQ ID NO: 3759583 - DNA, 25 bp, Homo sapien
ttactcgttctctgacaaatctctg

SEQ ID NO: 3759584 - DNA, 25 bp, Homo sapien
caaatctctgcgtagctgggctttc

SEQ ID NO: 3759585 - DNA, 25 bp, Homo sapien
tctctgcgtagctgggctttcgcaa

SEQ ID NO: 3759586 - DNA, 25 bp, Homo sapien
ctctgacaaatctctgcgtagctgg

SEQ ID NO: 3759587 - DNA, 25 bp, Homo sapien
gggttacctgtgtgaaatggtgtct

SEQ ID NO: 3759588 - DNA, 25 bp, Homo sapien
acagacaatcctgggttacctgtgt

SEQ ID NO: 3759589 - DNA, 25 bp, Homo sapien
atcctgggttacctgtgtgaaatgg

SEQ ID NO: 3759590 - DNA, 25 bp, Homo sapien
ctggaaacagacaatcctgggttac

SEQ ID NO: 3759591 - DNA, 25 bp, Homo sapien
cagacagacgcaaataaaaacccac

SEQ ID NO: 3759592 - DNA, 25 bp, Homo sapien
caacacagacagacgcaaataaaaa

SEQ ID NO: 3759593 - DNA, 25 bp, Homo sapien
acaacacagacagacgcaaataaaa

SEQ ID NO: 3759594 - DNA, 25 bp, Homo sapien
cacagacagacgcaaataaaaaccc

SEQ ID NO: 3759595 - DNA, 25 bp, Homo sapien
tcgcggctgtcgtgcaggaaggcag

SEQ ID NO: 3759596 - DNA, 25 bp, Homo sapien
accagagcctcgcggctgtcgtgca

SEQ ID NO: 3759597 - DNA, 25 bp, Homo sapien
gattaaaaaacgagcaggtgcagga

SEQ ID NO: 3759598 - DNA, 25 bp, Homo sapien
aggaaggcaggcacgaggtacgtac

SEQ ID NO: 3759599 - DNA, 25 bp, Homo sapien
atttacacgcggtcgcagtgagggc

SEQ ID NO: 3759600 - DNA, 25 bp, Homo sapien
ccctctgtttctccgccaccttggg

SEQ ID NO: 3759601 - DNA, 25 bp, Homo sapien
gggcggaaggaagtctgtccacact

SEQ ID NO: 3759602 - DNA, 25 bp, Homo sapien
cgtggcggctccgttcacctgcacc

SEQ ID NO: 3759603 - DNA, 25 bp, Homo sapien
tgctgatacagcacaagaagccggc

SEQ ID NO: 3759604 - DNA, 25 bp, Homo sapien
aagccggcaccgagggctctctgga

SEQ ID NO: 3759605 - DNA, 25 bp, Homo sapien
ggatcgctcgtacgttgctgataca

SEQ ID NO: 3759606 - DNA, 25 bp, Homo sapien
gctctctggagaccactacaggaag

SEQ ID NO: 3759607 - DNA, 25 bp, Homo sapien
tgagaaaaaacaatcggcgcctcca

SEQ ID NO: 3759608 - DNA, 25 bp, Homo sapien
tatctgctgagtgtcgaatcctaac

SEQ ID NO: 3759609 - DNA, 25 bp, Homo sapien
ccaggaagcaggtgtgcgaatgccc

SEQ ID NO: 3759610 - DNA, 25 bp, Homo sapien
ggcactaagcggagctggtaccagt

SEQ ID NO: 3759611 - DNA, 25 bp, Homo sapien
gctagatagcctgttttcaaacaag

SEQ ID NO: 3759612 - DNA, 25 bp, Homo sapien
cccagctcgaagcttggcgacggag

SEQ ID NO: 3759613 - DNA, 25 bp, Homo sapien
tggatggtcctattatcaagctaga

SEQ ID NO: 3759614 - DNA, 25 bp, Homo sapien
aattgccggcagctccaggtaatgg

SEQ ID NO: 3759615 - DNA, 25 bp, Homo sapien
tggaaaatgatctatcaacccgctt

SEQ ID NO: 3759616 - DNA, 25 bp, Homo sapien
tcaacccgctttaacaagctggcag

SEQ ID NO: 3759617 - DNA, 25 bp, Homo sapien
caagctggcagtcattttgcgagta

SEQ ID NO: 3759618 - DNA, 25 bp, Homo sapien
attttgcgagtacgcagttcctcgg

SEQ ID NO: 3759619 - DNA, 25 bp, Homo sapien
gctggaccaggatttgtccaggtct

SEQ ID NO: 3759620 - DNA, 25 bp, Homo sapien
tggaccaggatttgtccaggtctcc

SEQ ID NO: 3759621 - DNA, 25 bp, Homo sapien
tcctccagcattccttgtatggaat

SEQ ID NO: 3759622 - DNA, 25 bp, Homo sapien
ttgtatggaattccacatctgcaag

SEQ ID NO: 3759623 - DNA, 25 bp, Homo sapien
tgcagtgcatgcgacagcaagttcc

SEQ ID NO: 3759624 - DNA, 25 bp, Homo sapien
tgctccgtggaagatgcttactctg

SEQ ID NO: 3759625 - DNA, 25 bp, Homo sapien
tgtgccacagcacaacacgcctgtg

SEQ ID NO: 3759626 - DNA, 25 bp, Homo sapien
tgcacacccgtgtgtaggctgcagt

SEQ ID NO: 3759627 - DNA, 25 bp, Homo sapien
cagcctcaggaaccacattctggac

SEQ ID NO: 3759628 - DNA, 25 bp, Homo sapien
ggtgagaattttcccggcgcagatt

SEQ ID NO: 3759629 - DNA, 25 bp, Homo sapien
gacactgattaagtggtgacttcac

SEQ ID NO: 3759630 - DNA, 25 bp, Homo sapien
gagacctaggactctaggatggcca

SEQ ID NO: 3759631 - DNA, 25 bp, Homo sapien
aaaccactccctgccgcagtgctca

SEQ ID NO: 3759632 - DNA, 25 bp, Homo sapien
agagagggtctccattggtgcaaga

SEQ ID NO: 3759633 - DNA, 25 bp, Homo sapien
ggtctccattggtgcaagatctgca

SEQ ID NO: 3759634 - DNA, 25 bp, Homo sapien
tgctggtgtgcgcttcctaaaccac

SEQ ID NO: 3759635 - DNA, 25 bp, Homo sapien
tgtggactccggacaccattaatta

SEQ ID NO: 3759636 - DNA, 25 bp, Homo sapien
tgcactaggaatcgcatgccgcaga

SEQ ID NO: 3759637 - DNA, 25 bp, Homo sapien
gacctgcttgccttgtttgtggact

SEQ ID NO: 3759638 - DNA, 25 bp, Homo sapien
gaatccgtgttctagtttgacctgc

SEQ ID NO: 3759639 - DNA, 25 bp, Homo sapien
aggagacgccgcaggcttgaacgct

SEQ ID NO: 3759640 - DNA, 25 bp, Homo sapien
cgctggagacgtaaacccatttata

SEQ ID NO: 3759641 - DNA, 25 bp, Homo sapien
aggcttgaacgctggagacgtaaac

SEQ ID NO: 3759642 - DNA, 25 bp, Homo sapien
aagtcagaggagacgccgcaggctt

SEQ ID NO: 3759643 - DNA, 25 bp, Homo sapien
agctcagacacccatgaatctacga

SEQ ID NO: 3759644 - DNA, 25 bp, Homo sapien
aactcatacttaacctgaaaagctc

SEQ ID NO: 3759645 - DNA, 25 bp, Homo sapien
cccggtgtacgcttcagctcagaca

SEQ ID NO: 3759646 - DNA, 25 bp, Homo sapien
aatctacgaccatcttctgttcatg

SEQ ID NO: 3759647 - DNA, 25 bp, Homo sapien
gggtctaaatccattctttggcaaa

SEQ ID NO: 3759648 - DNA, 25 bp, Homo sapien
tgggtcaagatagctgtgcgttgct

SEQ ID NO: 3759649 - DNA, 25 bp, Homo sapien
tgtgtttatagctattgcctttgct

SEQ ID NO: 3759650 - DNA, 25 bp, Homo sapien
gtagaacgacgtcgcgtagcgctgc

SEQ ID NO: 3759651 - DNA, 25 bp, Homo sapien
tttgacttcttctcgaaggtatttg

SEQ ID NO: 3759652 - DNA, 25 bp, Homo sapien
ttgacttcttctcgaaggtatttgt

SEQ ID NO: 3759653 - DNA, 25 bp, Homo sapien
gtaaattatctcctttaaatagtgc

SEQ ID NO: 3759654 - DNA, 25 bp, Homo sapien
tcattatatgcaaattcacagttta

SEQ ID NO: 3759655 - DNA, 25 bp, Homo sapien
tgttgtgcatcagcttctgtttcaa

SEQ ID NO: 3759656 - DNA, 25 bp, Homo sapien
ttcaaatgtaataaaccaattatca

SEQ ID NO: 3759657 - DNA, 25 bp, Homo sapien
aagcagtcacacaacttacagcttc

SEQ ID NO: 3759658 - DNA, 25 bp, Homo sapien
cttcccctactctcaagataccatt

SEQ ID NO: 3759659 - DNA, 25 bp, Homo sapien
tcccctactctcaagataccattaa

SEQ ID NO: 3759660 - DNA, 25 bp, Homo sapien
cccctactctcaagataccattaag

SEQ ID NO: 3759661 - DNA, 25 bp, Homo sapien
cctgggaaacaaccgcctgagggat

SEQ ID NO: 3759662 - DNA, 25 bp, Homo sapien
gatggactagatttactctcccaga

SEQ ID NO: 3759663 - DNA, 25 bp, Homo sapien
gattccacctagaaagttggttcca

SEQ ID NO: 3759664 - DNA, 25 bp, Homo sapien
aacacgagtgtgatccctgagaggg

SEQ ID NO: 3759665 - DNA, 25 bp, Homo sapien
ctttgagttaatacagatgtccaaa

SEQ ID NO: 3759666 - DNA, 25 bp, Homo sapien
caagtcttaaaaattaggatctatg

SEQ ID NO: 3759667 - DNA, 25 bp, Homo sapien
cataagaaatatgctggtcctcggc

SEQ ID NO: 3759668 - DNA, 25 bp, Homo sapien
cttaagactttcattgctcaagttt

SEQ ID NO: 3759669 - DNA, 25 bp, Homo sapien
gcaactcagtttaggcatctggaca

SEQ ID NO: 3759670 - DNA, 25 bp, Homo sapien
taacccactcggactgaaaagcctg

SEQ ID NO: 3759671 - DNA, 25 bp, Homo sapien
catgtgagagatgagaccaacaaca

SEQ ID NO: 3759672 - DNA, 25 bp, Homo sapien
aaagaggtagcatgaacgacgaggc

SEQ ID NO: 3759673 - DNA, 25 bp, Homo sapien
tatttcacgcaatattactatgcag

SEQ ID NO: 3759674 - DNA, 25 bp, Homo sapien
tagattcagatatttcacgcaatat

SEQ ID NO: 3759675 - DNA, 25 bp, Homo sapien
tcatccacttggactaaaggtaaag

SEQ ID NO: 3759676 - DNA, 25 bp, Homo sapien
tactatgcagcgattttgatttggc

SEQ ID NO: 3759677 - DNA, 25 bp, Homo sapien
tagccaccgttgtgattggcacata

SEQ ID NO: 3759678 - DNA, 25 bp, Homo sapien
caatcaagtccacatcagtgctgag

SEQ ID NO: 3759679 - DNA, 25 bp, Homo sapien
tgatgtggtcgaggttagccaccgt

SEQ ID NO: 3759680 - DNA, 25 bp, Homo sapien
ggcacatactggtcactatccatct

SEQ ID NO: 3759681 - DNA, 25 bp, Homo sapien
ggagtgcaaaagtaaaagtatactg

SEQ ID NO: 3759682 - DNA, 25 bp, Homo sapien
tggcatggtattgctttggagttaa

SEQ ID NO: 3759683 - DNA, 25 bp, Homo sapien
tttttgcaaaatctcggccttggag

SEQ ID NO: 3759684 - DNA, 25 bp, Homo sapien
gtactttctacaatcaaaatttatg

SEQ ID NO: 3759685 - DNA, 25 bp, Homo sapien
aggaagtctgactcggcagcacagg

SEQ ID NO: 3759686 - DNA, 25 bp, Homo sapien
gtgaggaagtctgactcggcagcac

SEQ ID NO: 3759687 - DNA, 25 bp, Homo sapien
gggcactttagacgcattccagaca

SEQ ID NO: 3759688 - DNA, 25 bp, Homo sapien
gcattccagacagtgaccaccgaga

SEQ ID NO: 3759689 - DNA, 25 bp, Homo sapien
ggctgtctggttgagactcatttcc

SEQ ID NO: 3759690 - DNA, 25 bp, Homo sapien
ctggctgtctggttgagactcattt

SEQ ID NO: 3759691 - DNA, 25 bp, Homo sapien
tcctggctgtctggttgagactcat

SEQ ID NO: 3759692 - DNA, 25 bp, Homo sapien
ttcctggctgtctggttgagactca

SEQ ID NO: 3759693 - DNA, 25 bp, Homo sapien
agtagcgcgatcttgcaaccttggc

SEQ ID NO: 3759694 - DNA, 25 bp, Homo sapien
tggagggcctatctagtacaacggg

SEQ ID NO: 3759695 - DNA, 25 bp, Homo sapien
tactgagtgcctcttgtaagaccag

SEQ ID NO: 3759696 - DNA, 25 bp, Homo sapien
tgttcacctttgtactggagggcct

SEQ ID NO: 3759697 - DNA, 25 bp, Homo sapien
gatcccaggtgtaaaaattctaagc

SEQ ID NO: 3759698 - DNA, 25 bp, Homo sapien
attagccccaacaagagagttggtt

SEQ ID NO: 3759699 - DNA, 25 bp, Homo sapien
tgttccacttaaagaacacagggag

SEQ ID NO: 3759700 - DNA, 25 bp, Homo sapien
tctaatgttgaaaccaggattaact

SEQ ID NO: 3759701 - DNA, 25 bp, Homo sapien
tctgtcatttactgtagccatcttc

SEQ ID NO: 3759702 - DNA, 25 bp, Homo sapien
tggttaactgtttggctccagagac

SEQ ID NO: 3759703 - DNA, 25 bp, Homo sapien
ccagagaccgagttttcagcctatc

SEQ ID NO: 3759704 - DNA, 25 bp, Homo sapien
gatcatcgatcaccactagcattaa

SEQ ID NO: 3759705 - DNA, 25 bp, Homo sapien
ggtgccaattacttgcttgatgcag

SEQ ID NO: 3759706 - DNA, 25 bp, Homo sapien
ctggaactgattaactgctggaggc

SEQ ID NO: 3759707 - DNA, 25 bp, Homo sapien
gaaccaaggcgaggacagaaaacac

SEQ ID NO: 3759708 - DNA, 25 bp, Homo sapien
gaagcgatcacaacatatggagcag

SEQ ID NO: 3759709 - DNA, 25 bp, Homo sapien
gaagcctgcaagttatcactctggt

SEQ ID NO: 3759710 - DNA, 25 bp, Homo sapien
catattctgagggacccagagcgag

SEQ ID NO: 3759711 - DNA, 25 bp, Homo sapien
tcgctattttcaggcagagagtcat

SEQ ID NO: 3759712 - DNA, 25 bp, Homo sapien
actcctgcgggtctggcaatgcggc

SEQ ID NO: 3759713 - DNA, 25 bp, Homo sapien
gcaatgcggcattctcatggccctg

SEQ ID NO: 3759714 - DNA, 25 bp, Homo sapien
tcagctctgaaaccttagttgctgg

SEQ ID NO: 3759715 - DNA, 25 bp, Homo sapien
ccacggtctgcgtggtggccagcca

SEQ ID NO: 3759716 - DNA, 25 bp, Homo sapien
cccacacttctgcattagggttcag

SEQ ID NO: 3759717 - DNA, 25 bp, Homo sapien
gcagcactgcttgcttccagatgta

SEQ ID NO: 3759718 - DNA, 25 bp, Homo sapien
attcccaatagagcttcagtatcac

SEQ ID NO: 3759719 - DNA, 25 bp, Homo sapien
cattcccaatagagcttcagtatca

SEQ ID NO: 3759720 - DNA, 25 bp, Homo sapien
ccattcccaatagagcttcagtatc

SEQ ID NO: 3759721 - DNA, 25 bp, Homo sapien
tgaccatgaagctgctagtccagtg

SEQ ID NO: 3759722 - DNA, 25 bp, Homo sapien
ctgtggaacatgggctaaacctcac

SEQ ID NO: 3759723 - DNA, 25 bp, Homo sapien
cagtgttctggacaacggactctca

SEQ ID NO: 3759724 - DNA, 25 bp, Homo sapien
gacaacggactctcagatcactggg

SEQ ID NO: 3759725 - DNA, 25 bp, Homo sapien
atccccaaacaacaccgtcctctga

SEQ ID NO: 3759726 - DNA, 25 bp, Homo sapien
ccaaacaacaccgtcctctgacacc

SEQ ID NO: 3759727 - DNA, 25 bp, Homo sapien
gccatccccaaacaacaccgtcctc

SEQ ID NO: 3759728 - DNA, 25 bp, Homo sapien
ccccaaacaacaccgtcctctgaca

SEQ ID NO: 3759729 - DNA, 25 bp, Homo sapien
gaaactctgccaatccacttttgag

SEQ ID NO: 3759730 - DNA, 25 bp, Homo sapien
caaggcctgtggcttatggtgcaga

SEQ ID NO: 3759731 - DNA, 25 bp, Homo sapien
gactgtattagtccagagatagccc

SEQ ID NO: 3759732 - DNA, 25 bp, Homo sapien
tatctgtccgctagggtgggatcaa

SEQ ID NO: 3759733 - DNA, 25 bp, Homo sapien
aatgtgcagtgtcagtacggaagcc

SEQ ID NO: 3759734 - DNA, 25 bp, Homo sapien
tatgaccctgtttgtgcccagaccc

SEQ ID NO: 3759735 - DNA, 25 bp, Homo sapien
tgtaaactctggtcgacaacaactg

SEQ ID NO: 3759736 - DNA, 25 bp, Homo sapien
cactgctgaggtgaacgctgaccac

SEQ ID NO: 3759737 - DNA, 25 bp, Homo sapien
tcctccacagatttttgtaacaggc

SEQ ID NO: 3759738 - DNA, 25 bp, Homo sapien
cctccacagatttttgtaacaggcc

SEQ ID NO: 3759739 - DNA, 25 bp, Homo sapien
tttcctccacagatttttgtaacag

SEQ ID NO: 3759740 - DNA, 25 bp, Homo sapien
ttgtaacaggccagttttttcactg

SEQ ID NO: 3759741 - DNA, 25 bp, Homo sapien
tactccgtctcagcacgaatacatt

SEQ ID NO: 3759742 - DNA, 25 bp, Homo sapien
ctactccgtctcagcacgaatacat

SEQ ID NO: 3759743 - DNA, 25 bp, Homo sapien
agaagtggtttgagatataggacca

SEQ ID NO: 3759744 - DNA, 25 bp, Homo sapien
aagtggtttgagatataggaccatt

SEQ ID NO: 3759745 - DNA, 25 bp, Homo sapien
tggaacttgtctgagaagtggtttg

SEQ ID NO: 3759746 - DNA, 25 bp, Homo sapien
gatggaacttgtctgagaagtggtt

SEQ ID NO: 3759747 - DNA, 25 bp, Homo sapien
actccaatatagagtcctttatcaa

SEQ ID NO: 3759748 - DNA, 25 bp, Homo sapien
tcaaaaaaagcaatggactccccac

SEQ ID NO: 3759749 - DNA, 25 bp, Homo sapien
tccaatatagagtcctttatcaaaa

SEQ ID NO: 3759750 - DNA, 25 bp, Homo sapien
caatatagagtcctttatcaaaaaa

SEQ ID NO: 3759751 - DNA, 25 bp, Homo sapien
cacaaccttagcgtcctgatcagaa

SEQ ID NO: 3759752 - DNA, 25 bp, Homo sapien
gcggttcagccacaaccttagcgtc

SEQ ID NO: 3759753 - DNA, 25 bp, Homo sapien
tcctgatcagaagtcatgggctcca

SEQ ID NO: 3759754 - DNA, 25 bp, Homo sapien
tcctggactctctgcgtctgcggtt

SEQ ID NO: 3759755 - DNA, 25 bp, Homo sapien
gaagtgtaatgctaacctcaggatg

SEQ ID NO: 3759756 - DNA, 25 bp, Homo sapien
tgtaagaatattacggcagggcgca

SEQ ID NO: 3759757 - DNA, 25 bp, Homo sapien
tggtcatagtggtggtataaccacc

SEQ ID NO: 3759758 - DNA, 25 bp, Homo sapien
ccactggatttaaccaatcaaggaa

SEQ ID NO: 3759759 - DNA, 25 bp, Homo sapien
aaagaatattcctaccaccaagtag

SEQ ID NO: 3759760 - DNA, 25 bp, Homo sapien
tctcaaaaaccttgttaatgaaata

SEQ ID NO: 3759761 - DNA, 25 bp, Homo sapien
tcgcaataatctgcttgtgataaat

SEQ ID NO: 3759762 - DNA, 25 bp, Homo sapien
tagtggagctccctattcgcaataa

SEQ ID NO: 3759763 - DNA, 25 bp, Homo sapien
tacaggtttttcatggtatagtgga

SEQ ID NO: 3759764 - DNA, 25 bp, Homo sapien
cctcggatgcaatgaagaatccctg

SEQ ID NO: 3759765 - DNA, 25 bp, Homo sapien
gatttcgggaacatctggactgaga

SEQ ID NO: 3759766 - DNA, 25 bp, Homo sapien
tccaggtgatgttgaagtaacacac

SEQ ID NO: 3759767 - DNA, 25 bp, Homo sapien
tgctatcgggactcaaaaagatctt

SEQ ID NO: 3759768 - DNA, 25 bp, Homo sapien
taatgtttaacagcataaagacgtc

SEQ ID NO: 3759769 - DNA, 25 bp, Homo sapien
gacgtccttagaccaaaagcttgag

SEQ ID NO: 3759770 - DNA, 25 bp, Homo sapien
gacatccatgtttatgaagaggaag

SEQ ID NO: 3759771 - DNA, 25 bp, Homo sapien
gcttgagaaccactccactaataca

SEQ ID NO: 3759772 - DNA, 25 bp, Homo sapien
gtactggcatagaccagacaaacag

SEQ ID NO: 3759773 - DNA, 25 bp, Homo sapien
ccaatacggaacatatatctagaat

SEQ ID NO: 3759774 - DNA, 25 bp, Homo sapien
gcaaaatgaaccaaagaactaaatg

SEQ ID NO: 3759775 - DNA, 25 bp, Homo sapien
tgggacaactaaatgtcaacatgaa

SEQ ID NO: 3759776 - DNA, 25 bp, Homo sapien
tttctggtacgaaagggtaatgtga

SEQ ID NO: 3759777 - DNA, 25 bp, Homo sapien
tctggtacgaaagggtaatgtgaaa

SEQ ID NO: 3759778 - DNA, 25 bp, Homo sapien
ttctggtacgaaagggtaatgtgaa

SEQ ID NO: 3759779 - DNA, 25 bp, Homo sapien
gccacggtgcctggcataaaatctt

SEQ ID NO: 3759780 - DNA, 25 bp, Homo sapien
ggtgcctggcataaaatctttttaa

SEQ ID NO: 3759781 - DNA, 25 bp, Homo sapien
cacggtgcctggcataaaatctttt

SEQ ID NO: 3759782 - DNA, 25 bp, Homo sapien
cggtgcctggcataaaatcttttta

SEQ ID NO: 3759783 - DNA, 25 bp, Homo sapien
tcactgctgcactcaggctcactta

SEQ ID NO: 3759784 - DNA, 25 bp, Homo sapien
aacttcctgttgatgtttcacatgc

SEQ ID NO: 3759785 - DNA, 25 bp, Homo sapien
caaagtatacccagagtccagagga

SEQ ID NO: 3759786 - DNA, 25 bp, Homo sapien
gatctcgcagatggcaaacaaagta

SEQ ID NO: 3759787 - DNA, 25 bp, Homo sapien
ttgagattattgatagtctccataa

SEQ ID NO: 3759788 - DNA, 25 bp, Homo sapien
tattttcttgagattattgatagtc

SEQ ID NO: 3759789 - DNA, 25 bp, Homo sapien
tcttgagattattgatagtctccat

SEQ ID NO: 3759790 - DNA, 25 bp, Homo sapien
tttcttgagattattgatagtctcc

SEQ ID NO: 3759791 - DNA, 25 bp, Homo sapien
tagagcatgcttttaagattgcagc

SEQ ID NO: 3759792 - DNA, 25 bp, Homo sapien
gagttccgcagacaactgccttctt

SEQ ID NO: 3759793 - DNA, 25 bp, Homo sapien
tactggtggttacgttttatagagc

SEQ ID NO: 3759794 - DNA, 25 bp, Homo sapien
ctgctcatggcagaggtttgggata

SEQ ID NO: 3759795 - DNA, 25 bp, Homo sapien
ttgaaatatttcaattatctggcta

SEQ ID NO: 3759796 - DNA, 25 bp, Homo sapien
aattatctggctaaatgactattat

SEQ ID NO: 3759797 - DNA, 25 bp, Homo sapien
ggcaagagaatagcgactcaggagg

SEQ ID NO: 3759798 - DNA, 25 bp, Homo sapien
tatttcaattatctggctaaatgac

SEQ ID NO: 3759799 - DNA, 25 bp, Homo sapien
gccaaggcaggcagatcacctgagg

SEQ ID NO: 3759800 - DNA, 25 bp, Homo sapien
gtcttggctgggcgcgatggctcat

SEQ ID NO: 3759801 - DNA, 25 bp, Homo sapien
gcctgtaatcccatcactttgggag

SEQ ID NO: 3759802 - DNA, 25 bp, Homo sapien
agatacttgggaggccgtggcagga

SEQ ID NO: 3759803 - DNA, 25 bp, Homo sapien
gccgcccagtaacacccacatgtga

SEQ ID NO: 3759804 - DNA, 25 bp, Homo sapien
ttgccgcccagtaacacccacatgt

SEQ ID NO: 3759805 - DNA, 25 bp, Homo sapien
cttgccgcccagtaacacccacatg

SEQ ID NO: 3759806 - DNA, 25 bp, Homo sapien
cgcccagtaacacccacatgtgacc

SEQ ID NO: 3759807 - DNA, 25 bp, Homo sapien
tttcttaccgtaatctcagtggccc

SEQ ID NO: 3759808 - DNA, 25 bp, Homo sapien
ggccctttagcaatacttaacagaa

SEQ ID NO: 3759809 - DNA, 25 bp, Homo sapien
tcagtggccctcctttatgccaggc

SEQ ID NO: 3759810 - DNA, 25 bp, Homo sapien
gatgacgggccttacagaaaaatcc

SEQ ID NO: 3759811 - DNA, 25 bp, Homo sapien
acggcgaggagagagacggcaggga

SEQ ID NO: 3759812 - DNA, 25 bp, Homo sapien
gggactccagatccccaacgctcct

SEQ ID NO: 3759813 - DNA, 25 bp, Homo sapien
tcccgttcgcatgagaacacacagc

SEQ ID NO: 3759814 - DNA, 25 bp, Homo sapien
aaatgtctcaaccccgggactccag

SEQ ID NO: 3759815 - DNA, 25 bp, Homo sapien
ccatcctcctgcaatgcgaccttca

SEQ ID NO: 3759816 - DNA, 25 bp, Homo sapien
cgttgcctgcccaggaggataaagt

SEQ ID NO: 3759817 - DNA, 25 bp, Homo sapien
tcctgcaatgcgaccttcaccggct

SEQ ID NO: 3759818 - DNA, 25 bp, Homo sapien
atcaccatcctcctgcaatgcgacc

SEQ ID NO: 3759819 - DNA, 25 bp, Homo sapien
tgatgagtctacacttgaataaaat

SEQ ID NO: 3759820 - DNA, 25 bp, Homo sapien
cactcactttccgagcatttttgaa

SEQ ID NO: 3759821 - DNA, 25 bp, Homo sapien
gactgcacagttgacaggtaagtcc

SEQ ID NO: 3759822 - DNA, 25 bp, Homo sapien
tacagactttacactccagactgca

SEQ ID NO: 3759823 - DNA, 25 bp, Homo sapien
aaagaaatggagaggtgccccagct

SEQ ID NO: 3759824 - DNA, 25 bp, Homo sapien
gacgctgcgctgctctggaagtcga

SEQ ID NO: 3759825 - DNA, 25 bp, Homo sapien
agacgctgcgctgctctggaagtcg

SEQ ID NO: 3759826 - DNA, 25 bp, Homo sapien
gaaatggagaggtgccccagctcca

SEQ ID NO: 3759827 - DNA, 25 bp, Homo sapien
aaactgctggcagtgtgatagtgga

SEQ ID NO: 3759828 - DNA, 25 bp, Homo sapien
ctgctggcagtgtgatagtggacct

SEQ ID NO: 3759829 - DNA, 25 bp, Homo sapien
tgaaactgctggcagtgtgatagtg

SEQ ID NO: 3759830 - DNA, 25 bp, Homo sapien
actgctggcagtgtgatagtggacc

SEQ ID NO: 3759831 - DNA, 25 bp, Homo sapien
caaaacccttgcaaggcgggaggca

SEQ ID NO: 3759832 - DNA, 25 bp, Homo sapien
catgagtctatttgctgagggcgct

SEQ ID NO: 3759833 - DNA, 25 bp, Homo sapien
gaagtgccaatgttctgagcgcgga

SEQ ID NO: 3759834 - DNA, 25 bp, Homo sapien
gcataatctgttttcggccacggca

SEQ ID NO: 3759835 - DNA, 25 bp, Homo sapien
taccaagtcttaagttcatcagtac

SEQ ID NO: 3759836 - DNA, 25 bp, Homo sapien
agtaggacctagaactcttaactct

SEQ ID NO: 3759837 - DNA, 25 bp, Homo sapien
cagtactttaccctagttctgaaag

SEQ ID NO: 3759838 - DNA, 25 bp, Homo sapien
cattaacctaggaattataacaggg

SEQ ID NO: 3759839 - DNA, 25 bp, Homo sapien
cagaagttcattagcacaggtgcct

SEQ ID NO: 3759840 - DNA, 25 bp, Homo sapien
tagaaacaccccttatcagcagctc

SEQ ID NO: 3759841 - DNA, 25 bp, Homo sapien
tgtcatgatccacgcacaggaacgg

SEQ ID NO: 3759842 - DNA, 25 bp, Homo sapien
gaatgactcgtactcaacccataga

SEQ ID NO: 3759843 - DNA, 25 bp, Homo sapien
ggagttctgacccacttcagggttg

SEQ ID NO: 3759844 - DNA, 25 bp, Homo sapien
tcctgtccacgaagagctggctact

SEQ ID NO: 3759845 - DNA, 25 bp, Homo sapien
tattgcagaagcttgattccaaccg

SEQ ID NO: 3759846 - DNA, 25 bp, Homo sapien
tcaagccaacattcaatcaacggag

SEQ ID NO: 3759847 - DNA, 25 bp, Homo sapien
tatcattgttatagctctgggccca

SEQ ID NO: 3759848 - DNA, 25 bp, Homo sapien
tgcagagtacccttgagagcatcct

SEQ ID NO: 3759849 - DNA, 25 bp, Homo sapien
gctaatctcggaaatggtggccaga

SEQ ID NO: 3759850 - DNA, 25 bp, Homo sapien
cacatggtgtaagatgcttggtacc

SEQ ID NO: 3759851 - DNA, 25 bp, Homo sapien
caagccgggcgggtgcgctgtgcga

SEQ ID NO: 3759852 - DNA, 25 bp, Homo sapien
tccaagccgggcgggtgcgctgtgc

SEQ ID NO: 3759853 - DNA, 25 bp, Homo sapien
ccaagccgggcgggtgcgctgtgcg

SEQ ID NO: 3759854 - DNA, 25 bp, Homo sapien
ctccaagccgggcgggtgcgctgtg

SEQ ID NO: 3759855 - DNA, 25 bp, Homo sapien
aagtatcttttcttgctgggtgcag

SEQ ID NO: 3759856 - DNA, 25 bp, Homo sapien
gcacctataattctacctattcagg

SEQ ID NO: 3759857 - DNA, 25 bp, Homo sapien
tacatagaaaggcttaccattcatt

SEQ ID NO: 3759858 - DNA, 25 bp, Homo sapien
gaaaggcttaccattcattccaaag

SEQ ID NO: 3759859 - DNA, 25 bp, Homo sapien
tgttaaacaacaacagtatggccgg

SEQ ID NO: 3759860 - DNA, 25 bp, Homo sapien
tgaaattctttctccgtattaaaca

SEQ ID NO: 3759861 - DNA, 25 bp, Homo sapien
ttgcctcaatggtgcgtctgcctgc

SEQ ID NO: 3759862 - DNA, 25 bp, Homo sapien
gataaacgtcgagtcacttggctga

SEQ ID NO: 3759863 - DNA, 25 bp, Homo sapien
cactgagggcattacacatggctga

SEQ ID NO: 3759864 - DNA, 25 bp, Homo sapien
tggctgagaccatacgcatcttccg

SEQ ID NO: 3759865 - DNA, 25 bp, Homo sapien
tctcggcaatggttcttagccaggg

SEQ ID NO: 3759866 - DNA, 25 bp, Homo sapien
caccggtacagaaacctctcggcaa

SEQ ID NO: 3759867 - DNA, 25 bp, Homo sapien
tcagagtgacgtttttcctcacaag

SEQ ID NO: 3759868 - DNA, 25 bp, Homo sapien
cgtttcactgggatccgggttcaga

SEQ ID NO: 3759869 - DNA, 25 bp, Homo sapien
cagttctgctgggttgtataatggg

SEQ ID NO: 3759870 - DNA, 25 bp, Homo sapien
gctactacaggagtcggtaaaatac

SEQ ID NO: 3759871 - DNA, 25 bp, Homo sapien
ccagctctgcttgcagacgcctctg

SEQ ID NO: 3759872 - DNA, 25 bp, Homo sapien
tcctcactccgatggcatccttttc

SEQ ID NO: 3759873 - DNA, 25 bp, Homo sapien
caacttgaccagcaagtatggtggt

SEQ ID NO: 3759874 - DNA, 25 bp, Homo sapien
gaccctcttaactttgcagctcctg

SEQ ID NO: 3759875 - DNA, 25 bp, Homo sapien
aatgggcaggatgtacccactgcgg

SEQ ID NO: 3759876 - DNA, 25 bp, Homo sapien
atcaaggagcccgtgagtacaactt

SEQ ID NO: 3759877 - DNA, 25 bp, Homo sapien
ccgacctctgctgtatcaggattcg

SEQ ID NO: 3759878 - DNA, 25 bp, Homo sapien
caggattcgattcttggtgttaaac

SEQ ID NO: 3759879 - DNA, 25 bp, Homo sapien
aagacaacgctgaaggctcggtgca

SEQ ID NO: 3759880 - DNA, 25 bp, Homo sapien
caggaaacgtgactttcgtgtccga

SEQ ID NO: 3759881 - DNA, 25 bp, Homo sapien
cgtagaaaagcctgtgattgtggca

SEQ ID NO: 3759882 - DNA, 25 bp, Homo sapien
catgcctggagtctgtacgattgtc

SEQ ID NO: 3759883 - DNA, 25 bp, Homo sapien
ccatttgtgtgagtgcatgcctgga

SEQ ID NO: 3759884 - DNA, 25 bp, Homo sapien
tgtccttcgtgctttttgtcctcag

SEQ ID NO: 3759885 - DNA, 25 bp, Homo sapien
tgttttcgttcagatggcaattcct

SEQ ID NO: 3759886 - DNA, 25 bp, Homo sapien
ttctcaatgttttcgttcagatggc

SEQ ID NO: 3759887 - DNA, 25 bp, Homo sapien
gcaattcctcttggtgtcggcacca

SEQ ID NO: 3759888 - DNA, 25 bp, Homo sapien
ggtgtcggcaccaataaccttatca

SEQ ID NO: 3759889 - DNA, 25 bp, Homo sapien
acccagtcaagatttatgtcagaca

SEQ ID NO: 3759890 - DNA, 25 bp, Homo sapien
cccagtcaagatttatgtcagacat

SEQ ID NO: 3759891 - DNA, 25 bp, Homo sapien
gagactcctgggtatcagatgtgga

SEQ ID NO: 3759892 - DNA, 25 bp, Homo sapien
ctcctgggtatcagatgtggaactc

SEQ ID NO: 3759893 - DNA, 25 bp, Homo sapien
ctggagactcctgggtatcagatgt

SEQ ID NO: 3759894 - DNA, 25 bp, Homo sapien
gactcctgggtatcagatgtggaac

SEQ ID NO: 3759895 - DNA, 25 bp, Homo sapien
tggtgtgctggccacttggtcgtgc

SEQ ID NO: 3759896 - DNA, 25 bp, Homo sapien
gctggcctgtctcccaccgggtgga

SEQ ID NO: 3759897 - DNA, 25 bp, Homo sapien
ggtggatgcccagcgagctctggat

SEQ ID NO: 3759898 - DNA, 25 bp, Homo sapien
tggccacttggtcgtgctggcctgt

SEQ ID NO: 3759899 - DNA, 25 bp, Homo sapien
tgtatgacaaagacatgggggttgt

SEQ ID NO: 3759900 - DNA, 25 bp, Homo sapien
atgtgctattgtcctccacataatg

SEQ ID NO: 3759901 - DNA, 25 bp, Homo sapien
ctgtgtatgacaaagacatgggggt

SEQ ID NO: 3759902 - DNA, 25 bp, Homo sapien
acatgggggttgtttggagtctgtg

SEQ ID NO: 3759903 - DNA, 25 bp, Homo sapien
tcctacagcataagtgtgtcatgtc

SEQ ID NO: 3759904 - DNA, 25 bp, Homo sapien
tccttttaatctgcgtcagggcatg

SEQ ID NO: 3759905 - DNA, 25 bp, Homo sapien
catgtgattgagcagcacgtgacca

SEQ ID NO: 3759906 - DNA, 25 bp, Homo sapien
ggcttgtcacctggcgtgggaacac

SEQ ID NO: 3759907 - DNA, 25 bp, Homo sapien
tattctttcgaccagttcaggttca

SEQ ID NO: 3759908 - DNA, 25 bp, Homo sapien
ctttcgaccagttcaggttcacagc

SEQ ID NO: 3759909 - DNA, 25 bp, Homo sapien
tagactttattctttcgaccagttc

SEQ ID NO: 3759910 - DNA, 25 bp, Homo sapien
ctttattctttcgaccagttcaggt

SEQ ID NO: 3759911 - DNA, 25 bp, Homo sapien
actgcgggtacgacctggacgtgtc

SEQ ID NO: 3759912 - DNA, 25 bp, Homo sapien
cactgcgggtacgacctggacgtgt

SEQ ID NO: 3759913 - DNA, 25 bp, Homo sapien
cactgcgggtacgacctggacttgt

SEQ ID NO: 3759914 - DNA, 25 bp, Homo sapien
gcactgcgggtacgacctggacttg

SEQ ID NO: 3759915 - DNA, 25 bp, Homo sapien
tgcgggtacgacctggacgtgtccc

SEQ ID NO: 3759916 - DNA, 25 bp, Homo sapien
ctgcgggtacgacctggacgtgtcc

SEQ ID NO: 3759917 - DNA, 25 bp, Homo sapien
attagaaggccacctctactttgtc

SEQ ID NO: 3759918 - DNA, 25 bp, Homo sapien
cagcaattattagaaggccacctct

SEQ ID NO: 3759919 - DNA, 25 bp, Homo sapien
caattattagaaggccacctctact

SEQ ID NO: 3759920 - DNA, 25 bp, Homo sapien
ttattagaaggccacctctactttg

SEQ ID NO: 3759921 - DNA, 25 bp, Homo sapien
gctatatctaggagagggatactcc

SEQ ID NO: 3759922 - DNA, 25 bp, Homo sapien
taaggagtttatcaggtcaaaagac

SEQ ID NO: 3759923 - DNA, 25 bp, Homo sapien
ggtagcagtctaagggtcccatgtc

SEQ ID NO: 3759924 - DNA, 25 bp, Homo sapien
tgtccaattcagtagccatggcaac

SEQ ID NO: 3759925 - DNA, 25 bp, Homo sapien
taaaatacttgctaaacagtcttgt

SEQ ID NO: 3759926 - DNA, 25 bp, Homo sapien
tcaataaaatacttgctaaacagtc

SEQ ID NO: 3759927 - DNA, 25 bp, Homo sapien
caataaaatacttgctaaacagtct

SEQ ID NO: 3759928 - DNA, 25 bp, Homo sapien
tttcaataaaatacttgctaaacag

SEQ ID NO: 3759929 - DNA, 25 bp, Homo sapien
tgcccaaagttaaccataaatgagt

SEQ ID NO: 3759930 - DNA, 25 bp, Homo sapien
aattgcccaaagttaaccataaatg

SEQ ID NO: 3759931 - DNA, 25 bp, Homo sapien
aaagttaaccataaatgagtcattc

SEQ ID NO: 3759932 - DNA, 25 bp, Homo sapien
cccaaagttaaccataaatgagtca

SEQ ID NO: 3759933 - DNA, 25 bp, Homo sapien
cattttatgaacacctctgtgctca

SEQ ID NO: 3759934 - DNA, 25 bp, Homo sapien
tgtcacatgagagggacgctgctca

SEQ ID NO: 3759935 - DNA, 25 bp, Homo sapien
catccggcataactgtgggtgtcac

SEQ ID NO: 3759936 - DNA, 25 bp, Homo sapien
gcaactcttaccgagtgggactcaa

SEQ ID NO: 3759937 - DNA, 25 bp, Homo sapien
ttgaacctgctctgctagtttaatc

SEQ ID NO: 3759938 - DNA, 25 bp, Homo sapien
tgaaggagcgagacaatagtttcct

SEQ ID NO: 3759939 - DNA, 25 bp, Homo sapien
ctaatatgaaagttaattaagactg

SEQ ID NO: 3759940 - DNA, 25 bp, Homo sapien
ctgttttgaaggagcgagacaatag

SEQ ID NO: 3759941 - DNA, 25 bp, Homo sapien
aatgtttatcacagcctactaaaaa

SEQ ID NO: 3759942 - DNA, 25 bp, Homo sapien
ctggcaaatagcaagtcctctgcaa

SEQ ID NO: 3759943 - DNA, 25 bp, Homo sapien
tatcacagcctactaaaaacagagt

SEQ ID NO: 3759944 - DNA, 25 bp, Homo sapien
cctctgcaagtgctccggaaatgtt

SEQ ID NO: 3759945 - DNA, 25 bp, Homo sapien
caaatgtcgcttagaaacagaacac

SEQ ID NO: 3759946 - DNA, 25 bp, Homo sapien
cacatatccagggtgtgtgatacaa

SEQ ID NO: 3759947 - DNA, 25 bp, Homo sapien
taatgatagtaccaaatgatagaac

SEQ ID NO: 3759948 - DNA, 25 bp, Homo sapien
tacaataatctctcacaaatgtcgc

SEQ ID NO: 3759949 - DNA, 25 bp, Homo sapien
gattcaaatgatttaagttatccca

SEQ ID NO: 3759950 - DNA, 25 bp, Homo sapien
tatattttctcatggtcaacaaact

SEQ ID NO: 3759951 - DNA, 25 bp, Homo sapien
tggtcaacaaactgattcaaatgat

SEQ ID NO: 3759952 - DNA, 25 bp, Homo sapien
ctgattcaaatgatttaagttatcc

SEQ ID NO: 3759953 - DNA, 25 bp, Homo sapien
aaccatggcgttatcttaatttcac

SEQ ID NO: 3759954 - DNA, 25 bp, Homo sapien
ataattttaaaccatggcgttatct

SEQ ID NO: 3759955 - DNA, 25 bp, Homo sapien
aaaccatggcgttatcttaatttca

SEQ ID NO: 3759956 - DNA, 25 bp, Homo sapien
cttcctttgacacataacaatagct

SEQ ID NO: 3759957 - DNA, 25 bp, Homo sapien
cctttgacacataacaatagctttt

SEQ ID NO: 3759958 - DNA, 25 bp, Homo sapien
tcttcctttgacacataacaatagc

SEQ ID NO: 3759959 - DNA, 25 bp, Homo sapien
gttcttcctttgacacataacaata

SEQ ID NO: 3759960 - DNA, 25 bp, Homo sapien
gagctttgtagtgaattcgtgttaa

SEQ ID NO: 3759961 - DNA, 25 bp, Homo sapien
taatcaatttcatgttcaccccaga

SEQ ID NO: 3759962 - DNA, 25 bp, Homo sapien
gataccatcagactgagctttgtag

SEQ ID NO: 3759963 - DNA, 25 bp, Homo sapien
tcatgttcaccccagataccatcag

SEQ ID NO: 3759964 - DNA, 25 bp, Homo sapien
ttaggtgagaactggaaaacctgtc

SEQ ID NO: 3759965 - DNA, 25 bp, Homo sapien
tgtcagttaaattctacaagagctg

SEQ ID NO: 3759966 - DNA, 25 bp, Homo sapien
tagtgcttaacagatcaatccatcc

SEQ ID NO: 3759967 - DNA, 25 bp, Homo sapien
ccccgtattgagctaagttttgaca

SEQ ID NO: 3759968 - DNA, 25 bp, Homo sapien
ttgtggggctaactcataactccgg

SEQ ID NO: 3759969 - DNA, 25 bp, Homo sapien
caagatggtttgtggggctaactca

SEQ ID NO: 3759970 - DNA, 25 bp, Homo sapien
tcataactccggaggttaccaagca

SEQ ID NO: 3759971 - DNA, 25 bp, Homo sapien
ggctaactcataactccggaggtta

SEQ ID NO: 3759972 - DNA, 25 bp, Homo sapien
tttcagcttgtatggttgtgtagga

SEQ ID NO: 3759973 - DNA, 25 bp, Homo sapien
cctcaagctcggctggattgcttaa

SEQ ID NO: 3759974 - DNA, 25 bp, Homo sapien
tcggctggattgcttaatggatgac

SEQ ID NO: 3759975 - DNA, 25 bp, Homo sapien
tccaagggcgtcactttcctcaagc

SEQ ID NO: 3759976 - DNA, 25 bp, Homo sapien
tggatgactacaacacgtattcgta

SEQ ID NO: 3759977 - DNA, 25 bp, Homo sapien
atacagagacagatcaacttttctt

SEQ ID NO: 3759978 - DNA, 25 bp, Homo sapien
ttgctgtagcagaagcttattttcg

SEQ ID NO: 3759979 - DNA, 25 bp, Homo sapien
aggtaatcttagcatctgatctttg

SEQ ID NO: 3759980 - DNA, 25 bp, Homo sapien
taatcttagcatctgatctttgctg

SEQ ID NO: 3759981 - DNA, 25 bp, Homo sapien
gtagcagaagcttattttcggtgtt

SEQ ID NO: 3759982 - DNA, 25 bp, Homo sapien
tgaaagcaaaagaaataacaattat

SEQ ID NO: 3759983 - DNA, 25 bp, Homo sapien
ctgaaagcaaaagaaataacaatta

SEQ ID NO: 3759984 - DNA, 25 bp, Homo sapien
ggcagtcaagttccctatcaaggac

SEQ ID NO: 3759985 - DNA, 25 bp, Homo sapien
tagtctctgcatggctatggtgagg

SEQ ID NO: 3759986 - DNA, 25 bp, Homo sapien
caaggacattcagttctcggaaagt

SEQ ID NO: 3759987 - DNA, 25 bp, Homo sapien
tcggaaagtggtgaaggcacatgct

SEQ ID NO: 3759988 - DNA, 25 bp, Homo sapien
caggcatgaagtgaagagaaatcgc

SEQ ID NO: 3759989 - DNA, 25 bp, Homo sapien
tcggaaatgcctacacaaatcgctt

SEQ ID NO: 3759990 - DNA, 25 bp, Homo sapien
tctgaagaagccgagtaacaggcat

SEQ ID NO: 3759991 - DNA, 25 bp, Homo sapien
aatacggtattactgaagactgcac

SEQ ID NO: 3759992 - DNA, 25 bp, Homo sapien
tctcaatgttctcgttcaggtgaca

SEQ ID NO: 3759993 - DNA, 25 bp, Homo sapien
ctcaatgttctcgttcaggtgacaa

SEQ ID NO: 3759994 - DNA, 25 bp, Homo sapien
tggttagtgtttatttcaggcatca

SEQ ID NO: 3759995 - DNA, 25 bp, Homo sapien
gagttgaacctgttgcttgtcgagg

SEQ ID NO: 3759996 - DNA, 25 bp, Homo sapien
ctctgccaggagttgaacctgttgc

SEQ ID NO: 3759997 - DNA, 25 bp, Homo sapien
cctgttgcttgtcgaggtggttagt

SEQ ID NO: 3759998 - DNA, 25 bp, Homo sapien
gggtcatcatttctcctacaggttt

SEQ ID NO: 3759999 - DNA, 25 bp, Homo sapien
cggctgctcagcactatctgggtca

SEQ ID NO: 3760000 - DNA, 25 bp, Homo sapien
tcacagtcatgctcctgaaggccaa

SEQ ID NO: 3760001 - DNA, 25 bp, Homo sapien
tgaaggccaagctcaacgttccgct

SEQ ID NO: 3760002 - DNA, 25 bp, Homo sapien
cactgtccaaatttaggcctgaagc

SEQ ID NO: 3760003 - DNA, 25 bp, Homo sapien
tcagctcacaggacgtaacaacagg

SEQ ID NO: 3760004 - DNA, 25 bp, Homo sapien
tatctgtatccagcagcgtctaagc

SEQ ID NO: 3760005 - DNA, 25 bp, Homo sapien
tacaaagttctagacccacataggg

SEQ ID NO: 3760006 - DNA, 25 bp, Homo sapien
cactaagataggtttcgttactaca

SEQ ID NO: 3760007 - DNA, 25 bp, Homo sapien
actgtctaggtctgcgtcagcgcac

SEQ ID NO: 3760008 - DNA, 25 bp, Homo sapien
caatgatgaaagtacctaacaatga

SEQ ID NO: 3760009 - DNA, 25 bp, Homo sapien
ccctgttaagtgatgcgggccgaac

SEQ ID NO: 3760010 - DNA, 25 bp, Homo sapien
cctcttgcacggacgcaggtgtatg

SEQ ID NO: 3760011 - DNA, 25 bp, Homo sapien
tagtagacgcgggaacacatcatcc

SEQ ID NO: 3760012 - DNA, 25 bp, Homo sapien
tttccgctgacaaagaatggcaacg

SEQ ID NO: 3760013 - DNA, 25 bp, Homo sapien
tgtgcgcagacgacgatcttttccg

SEQ ID NO: 3760014 - DNA, 25 bp, Homo sapien
agacaaccgccggtcccggatggcg

SEQ ID NO: 3760015 - DNA, 25 bp, Homo sapien
ggatggcgcccgctttgagcacagt

SEQ ID NO: 3760016 - DNA, 25 bp, Homo sapien
gggccgcgcagccaatcgctcgcgc

SEQ ID NO: 3760017 - DNA, 25 bp, Homo sapien
ttgagcacagtctgcggcgcgcacc

SEQ ID NO: 3760018 - DNA, 25 bp, Homo sapien
gctgcgaacggtgcctaacgtcaga

SEQ ID NO: 3760019 - DNA, 25 bp, Homo sapien
aatctcgccaagcttcgcctggtgg

SEQ ID NO: 3760020 - DNA, 25 bp, Homo sapien
gtacgcgcttgacgacacaatctcg

SEQ ID NO: 3760021 - DNA, 25 bp, Homo sapien
tcgaggctcgcgttccatggaggaa

SEQ ID NO: 3760022 - DNA, 25 bp, Homo sapien
caggtgtggcgagaacacgtaaaca

SEQ ID NO: 3760023 - DNA, 25 bp, Homo sapien
gatgtggcaagaactgcagcaccca

SEQ ID NO: 3760024 - DNA, 25 bp, Homo sapien
tatttttgactgtacctcgaatgcc

SEQ ID NO: 3760025 - DNA, 25 bp, Homo sapien
actgctgtcagtgcgttcttgggaa

SEQ ID NO: 3760026 - DNA, 25 bp, Homo sapien
tttttactgctaaccatcagctgag

SEQ ID NO: 3760027 - DNA, 25 bp, Homo sapien
ccttgaagtggcacgaacatattta

SEQ ID NO: 3760028 - DNA, 25 bp, Homo sapien
cagttctttccagtaaaagcggtat

SEQ ID NO: 3760029 - DNA, 25 bp, Homo sapien
cattattggcaacaagtactgagaa

SEQ ID NO: 3760030 - DNA, 25 bp, Homo sapien
acttccaaagttagagtcaatcctc

SEQ ID NO: 3760031 - DNA, 25 bp, Homo sapien
ttattatgctagtgcagtgattcag

SEQ ID NO: 3760032 - DNA, 25 bp, Homo sapien
cagttacatcttcgggcagccatag

SEQ ID NO: 3760033 - DNA, 25 bp, Homo sapien
taagtctatggagtattctgaatcc

SEQ ID NO: 3760034 - DNA, 25 bp, Homo sapien
tctcaacaacagtgggctgacaata

SEQ ID NO: 3760035 - DNA, 25 bp, Homo sapien
tctagttatgacagtcctgggcggc

SEQ ID NO: 3760036 - DNA, 25 bp, Homo sapien
cagcagaggcagactagaattagca

SEQ ID NO: 3760037 - DNA, 25 bp, Homo sapien
ggtagatctcctagatgacttgctg

SEQ ID NO: 3760038 - DNA, 25 bp, Homo sapien
ccccaagcaattatgacagtaatat

SEQ ID NO: 3760039 - DNA, 25 bp, Homo sapien
acatttatcgactcagtttgctgtc

SEQ ID NO: 3760040 - DNA, 25 bp, Homo sapien
gtgcagtggtcagaacacataaaac

SEQ ID NO: 3760041 - DNA, 25 bp, Homo sapien
ctcaaggatagggaggtctgagcag

SEQ ID NO: 3760042 - DNA, 25 bp, Homo sapien
ctgatttaataacggaaacattcca

SEQ ID NO: 3760043 - DNA, 25 bp, Homo sapien
aaacattccaagaattaccaaaatg

SEQ ID NO: 3760044 - DNA, 25 bp, Homo sapien
ataactgatttaataacggaaacat

SEQ ID NO: 3760045 - DNA, 25 bp, Homo sapien
tcactataactgatttaataacgga

SEQ ID NO: 3760046 - DNA, 25 bp, Homo sapien
aacctccactttgtaagaaacatat

SEQ ID NO: 3760047 - DNA, 25 bp, Homo sapien
ctccactttgtaagaaacatatgat

SEQ ID NO: 3760048 - DNA, 25 bp, Homo sapien
cctccactttgtaagaaacatatga

SEQ ID NO: 3760049 - DNA, 25 bp, Homo sapien
ccactttgtaagaaacatatgatac

SEQ ID NO: 3760050 - DNA, 25 bp, Homo sapien
ctgtgaagtgcaataaagtgataca

SEQ ID NO: 3760051 - DNA, 25 bp, Homo sapien
agtgcaataaagtgatacacatgaa

SEQ ID NO: 3760052 - DNA, 25 bp, Homo sapien
tgtgaagtgcaataaagtgatacac

SEQ ID NO: 3760053 - DNA, 25 bp, Homo sapien
gaagtgcaataaagtgatacacatg

SEQ ID NO: 3760054 - DNA, 25 bp, Homo sapien
ccatgcgcaaaaatgagtcttagta

SEQ ID NO: 3760055 - DNA, 25 bp, Homo sapien
gagaatttaggaagcgacatgtcaa

SEQ ID NO: 3760056 - DNA, 25 bp, Homo sapien
gacaggattctccacagcttctgca

SEQ ID NO: 3760057 - DNA, 25 bp, Homo sapien
taattccctatcaaaccatgcgcaa

SEQ ID NO: 3760058 - DNA, 25 bp, Homo sapien
aaaacgtcatgtgaagactggcggg

SEQ ID NO: 3760059 - DNA, 25 bp, Homo sapien
tgggacactgcgatttacaaagctt

SEQ ID NO: 3760060 - DNA, 25 bp, Homo sapien
taaaaagaacgctaagtgtgcagac

SEQ ID NO: 3760061 - DNA, 25 bp, Homo sapien
gccaaggaatgcctagacgctgaga

SEQ ID NO: 3760062 - DNA, 25 bp, Homo sapien
tgggcttcaaatgcgcggttagcgc

SEQ ID NO: 3760063 - DNA, 25 bp, Homo sapien
taatctcgtgatacgtcggcctcgg

SEQ ID NO: 3760064 - DNA, 25 bp, Homo sapien
tgtttacgtaaagaccatcatgcga

SEQ ID NO: 3760065 - DNA, 25 bp, Homo sapien
gctttctgtagagcgttgagacggc

SEQ ID NO: 3760066 - DNA, 25 bp, Homo sapien
ctcggcggcaggagtacgtgaccaa

SEQ ID NO: 3760067 - DNA, 25 bp, Homo sapien
tgcggaggagccgaacactgaccgc

SEQ ID NO: 3760068 - DNA, 25 bp, Homo sapien
gcttcaggacgctggtgagtcactg

SEQ ID NO: 3760069 - DNA, 25 bp, Homo sapien
tttttccttcccagccaatggtgat

SEQ ID NO: 3760070 - DNA, 25 bp, Homo sapien
acagcggtgtcctgcgcgtcttcgg

SEQ ID NO: 3760071 - DNA, 25 bp, Homo sapien
gagacagcggtgtcctgcgcgtctt

SEQ ID NO: 3760072 - DNA, 25 bp, Homo sapien
tcagtgcggagacagcggtgtcctg

SEQ ID NO: 3760073 - DNA, 25 bp, Homo sapien
gcggagacagcggtgtcctgcgcgt

SEQ ID NO: 3760074 - DNA, 25 bp, Homo sapien
ggcggtgcgcgacctgggctggctc

SEQ ID NO: 3760075 - DNA, 25 bp, Homo sapien
ggctccgggggtggcgggcgcagct

SEQ ID NO: 3760076 - DNA, 25 bp, Homo sapien
ctggcggtgcgcgacctgggctggc

SEQ ID NO: 3760077 - DNA, 25 bp, Homo sapien
ggtgcgcgacctgggctggctccgg

SEQ ID NO: 3760078 - DNA, 25 bp, Homo sapien
caggtgagtgccgccatcttcctac

SEQ ID NO: 3760079 - DNA, 25 bp, Homo sapien
tgacaggtgagtgccgccatcttcc

SEQ ID NO: 3760080 - DNA, 25 bp, Homo sapien
gtgacaggtgagtgccgccatcttc

SEQ ID NO: 3760081 - DNA, 25 bp, Homo sapien
ctgtgacaggtgagtgccgccatct

SEQ ID NO: 3760082 - DNA, 25 bp, Homo sapien
atgccccgaagaggagtcgggacac

SEQ ID NO: 3760083 - DNA, 25 bp, Homo sapien
tcaggcgccgagtcgttccccggat

SEQ ID NO: 3760084 - DNA, 25 bp, Homo sapien
aggcgccgagtcgttccccggatgc

SEQ ID NO: 3760085 - DNA, 25 bp, Homo sapien
agtcgggacactgcagggctcaagg

SEQ ID NO: 3760086 - DNA, 25 bp, Homo sapien
tgcagaagatgtcggagtccaggaa

SEQ ID NO: 3760087 - DNA, 25 bp, Homo sapien
gccgtggtgcagaagggttcagggt

SEQ ID NO: 3760088 - DNA, 25 bp, Homo sapien
aatgcagagggtccgtggtggtgca

SEQ ID NO: 3760089 - DNA, 25 bp, Homo sapien
aggagtagtccgtggcggtgccaga

SEQ ID NO: 3760090 - DNA, 25 bp, Homo sapien
taaaatcgtgcatgataaagccagc

SEQ ID NO: 3760091 - DNA, 25 bp, Homo sapien
tgtccacggagtgaatgctgtccac

SEQ ID NO: 3760092 - DNA, 25 bp, Homo sapien
cagggaagtgcctagtcaagtacgc

SEQ ID NO: 3760093 - DNA, 25 bp, Homo sapien
ccatgaatgtgcttgcgtgcccgta

SEQ ID NO: 3760094 - DNA, 25 bp, Homo sapien
catgatagcccagggacattggtga

SEQ ID NO: 3760095 - DNA, 25 bp, Homo sapien
cgagggtagccttacagtactgagg

SEQ ID NO: 3760096 - DNA, 25 bp, Homo sapien
gaagcctttccgtacagcatcagta

SEQ ID NO: 3760097 - DNA, 25 bp, Homo sapien
ctgtagacggagctccttgaggccc

SEQ ID NO: 3760098 - DNA, 25 bp, Homo sapien
tatatgtgctcatgacgtgcctgtg

SEQ ID NO: 3760099 - DNA, 25 bp, Homo sapien
gactcacgtgcgacctcatcagaga

SEQ ID NO: 3760100 - DNA, 25 bp, Homo sapien
catgtgacatgtttccgtgctgccg

SEQ ID NO: 3760101 - DNA, 25 bp, Homo sapien
cacatggcgggaatgttgttcctca

SEQ ID NO: 3760102 - DNA, 25 bp, Homo sapien
agtggctgaacgcagcactgtgttg

SEQ ID NO: 3760103 - DNA, 25 bp, Homo sapien
gacctcccggtggtcagtggctgaa

SEQ ID NO: 3760104 - DNA, 25 bp, Homo sapien
tagccatagtaatacagacctcccg

SEQ ID NO: 3760105 - DNA, 25 bp, Homo sapien
gccagctccgtcagcgatagccata

SEQ ID NO: 3760106 - DNA, 25 bp, Homo sapien
ttggatgtggtgctccccgacgtcc

SEQ ID NO: 3760107 - DNA, 25 bp, Homo sapien
ggggagcgctgcttcccatgcatgt

SEQ ID NO: 3760108 - DNA, 25 bp, Homo sapien
atgagctccgccacatgggcctgac

SEQ ID NO: 3760109 - DNA, 25 bp, Homo sapien
tcccatgcatgttagcttggatgtg

SEQ ID NO: 3760110 - DNA, 25 bp, Homo sapien
agaattcattggaagggcagtcgga

SEQ ID NO: 3760111 - DNA, 25 bp, Homo sapien
gaggggcccgcatgactgccctgct

SEQ ID NO: 3760112 - DNA, 25 bp, Homo sapien
catgagaattcattggaagggcagt

SEQ ID NO: 3760113 - DNA, 25 bp, Homo sapien
ttctcatgagaattcattggaaggg

SEQ ID NO: 3760114 - DNA, 25 bp, Homo sapien
cctgcactttgttggtgttggtggt

SEQ ID NO: 3760115 - DNA, 25 bp, Homo sapien
tctacactggttagttggcactgtg

SEQ ID NO: 3760116 - DNA, 25 bp, Homo sapien
tattagcgagcatagacacctgcac

SEQ ID NO: 3760117 - DNA, 25 bp, Homo sapien
ctcattgttacgctgagtcctgcag

SEQ ID NO: 3760118 - DNA, 25 bp, Homo sapien
gcttccattcacctgaaccacgggg

SEQ ID NO: 3760119 - DNA, 25 bp, Homo sapien
cttccattcacctgaaccacggggg

SEQ ID NO: 3760120 - DNA, 25 bp, Homo sapien
tgagggcctcgcagtgcggtttagg

SEQ ID NO: 3760121 - DNA, 25 bp, Homo sapien
agagctgtgcatccgcgccacagca

SEQ ID NO: 3760122 - DNA, 25 bp, Homo sapien
aaatgtgtagagctgtgcatccgcg

SEQ ID NO: 3760123 - DNA, 25 bp, Homo sapien
agtgcggtttaggtcctgagatgtg

SEQ ID NO: 3760124 - DNA, 25 bp, Homo sapien
gtggccacggcatcgccaaggacat

SEQ ID NO: 3760125 - DNA, 25 bp, Homo sapien
gtgtccagcgtgttagcgcccagac

SEQ ID NO: 3760126 - DNA, 25 bp, Homo sapien
ccaaggacatccgtgagcctccgat

SEQ ID NO: 3760127 - DNA, 25 bp, Homo sapien
caccatgtcattctgagggaccctc

SEQ ID NO: 3760128 - DNA, 25 bp, Homo sapien
cctgaaagcttggtggttgtctttt

SEQ ID NO: 3760129 - DNA, 25 bp, Homo sapien
tcagtgttacatcccctacccatat

SEQ ID NO: 3760130 - DNA, 25 bp, Homo sapien
acatggagatgaggacggcctgcag

SEQ ID NO: 3760131 - DNA, 25 bp, Homo sapien
ctaccaggtggtgactttgcagaca

SEQ ID NO: 3760132 - DNA, 25 bp, Homo sapien
gtggtccatgctctatggtccatgg

SEQ ID NO: 3760133 - DNA, 25 bp, Homo sapien
tcggcggtccatgctcggtggtcct

SEQ ID NO: 3760134 - DNA, 25 bp, Homo sapien
ggtgctcggcagtccatgatctgtg

SEQ ID NO: 3760135 - DNA, 25 bp, Homo sapien
tgctcggcggtggttggtgctcggc

SEQ ID NO: 3760136 - DNA, 25 bp, Homo sapien
ggtccgtgctcggtggtccatggga

SEQ ID NO: 3760137 - DNA, 25 bp, Homo sapien
acggtggtccatgatctgtggtcca

SEQ ID NO: 3760138 - DNA, 25 bp, Homo sapien
cttggtggtccgtgctcggtggtcc

SEQ ID NO: 3760139 - DNA, 25 bp, Homo sapien
tgcacggtggtccatgatctgtggt

SEQ ID NO: 3760140 - DNA, 25 bp, Homo sapien
gagtgaagaccaccccgtgtgcaat

SEQ ID NO: 3760141 - DNA, 25 bp, Homo sapien
aatggtatgctgctcggcatggagt

SEQ ID NO: 3760142 - DNA, 25 bp, Homo sapien
gtttgatcatcactagggccacagg

SEQ ID NO: 3760143 - DNA, 25 bp, Homo sapien
tcacctgtgggtttgaccggcaagc

SEQ ID NO: 3760144 - DNA, 25 bp, Homo sapien
gtgtcttgtatattcagtcctttca

SEQ ID NO: 3760145 - DNA, 25 bp, Homo sapien
tacagttttgataaagaggctctca

SEQ ID NO: 3760146 - DNA, 25 bp, Homo sapien
gtatctgtacgttaatgtttcttgc

SEQ ID NO: 3760147 - DNA, 25 bp, Homo sapien
tcctttcaatacgtccacctggagg

SEQ ID NO: 3760148 - DNA, 25 bp, Homo sapien
tggtgccctttactgccacagctgc

SEQ ID NO: 3760149 - DNA, 25 bp, Homo sapien
cactgcacatacaaaggtctgagcc

SEQ ID NO: 3760150 - DNA, 25 bp, Homo sapien
tgaaagtctgggtgtcttaggatga

SEQ ID NO: 3760151 - DNA, 25 bp, Homo sapien
tagtggccactgagttccaggcaca

SEQ ID NO: 3760152 - DNA, 25 bp, Homo sapien
tctaatgtgagctcatccactgctg

SEQ ID NO: 3760153 - DNA, 25 bp, Homo sapien
gggcaccttgctgttcgctgctgtg

SEQ ID NO: 3760154 - DNA, 25 bp, Homo sapien
gagctctcaggagccggggcacctt

SEQ ID NO: 3760155 - DNA, 25 bp, Homo sapien
tgctgtgtcgtcttctaatgtgagc

SEQ ID NO: 3760156 - DNA, 25 bp, Homo sapien
tgtcctgtatgctgatgtgtccaga

SEQ ID NO: 3760157 - DNA, 25 bp, Homo sapien
tttcataagagccatgctgttgggc

SEQ ID NO: 3760158 - DNA, 25 bp, Homo sapien
taagtcatactgtcaaccacacgtg

SEQ ID NO: 3760159 - DNA, 25 bp, Homo sapien
tgatctcgtctgaaacagtgtttgg

SEQ ID NO: 3760160 - DNA, 25 bp, Homo sapien
actgaaggtatctccagttcttgca

SEQ ID NO: 3760161 - DNA, 25 bp, Homo sapien
tgcatagctacttcaggaaagggtg

SEQ ID NO: 3760162 - DNA, 25 bp, Homo sapien
gtgaaatgccgaccgtgggcgacac

SEQ ID NO: 3760163 - DNA, 25 bp, Homo sapien
gcaggcactgaaggtatctccagtt

SEQ ID NO: 3760164 - DNA, 25 bp, Homo sapien
ggaatttgaatttgcaccctatgaa

SEQ ID NO: 3760165 - DNA, 25 bp, Homo sapien
aggtcagcatcatccttaaccgccg

SEQ ID NO: 3760166 - DNA, 25 bp, Homo sapien
gccggaactcttgcaggaatttgaa

SEQ ID NO: 3760167 - DNA, 25 bp, Homo sapien
tgaatttgcaccctatgaaatgcat

SEQ ID NO: 3760168 - DNA, 25 bp, Homo sapien
agcagtgtccgttttaatctgcaca

SEQ ID NO: 3760169 - DNA, 25 bp, Homo sapien
tcaaatatcacagggtggaaattgc

SEQ ID NO: 3760170 - DNA, 25 bp, Homo sapien
ggtggaaattgcttcgctcagcagt

SEQ ID NO: 3760171 - DNA, 25 bp, Homo sapien
gctatggcagttatcagcactttca

SEQ ID NO: 3760172 - DNA, 25 bp, Homo sapien
gatgcgtcagtctggtgtcaccgtt

SEQ ID NO: 3760173 - DNA, 25 bp, Homo sapien
ggtgtcaccgttggaactgcagaaa

SEQ ID NO: 3760174 - DNA, 25 bp, Homo sapien
accatgggctttgatgcgtcagtct

SEQ ID NO: 3760175 - DNA, 25 bp, Homo sapien
ttgatggtggaccatgggctttgat

SEQ ID NO: 3760176 - DNA, 25 bp, Homo sapien
tgagctcacagacccacttggagac

SEQ ID NO: 3760177 - DNA, 25 bp, Homo sapien
agtcacggcttctgcactggataac

SEQ ID NO: 3760178 - DNA, 25 bp, Homo sapien
gacgccttgcagagaagtgactgag

SEQ ID NO: 3760179 - DNA, 25 bp, Homo sapien
tgcacacaggggtagacagtcacgg

SEQ ID NO: 3760180 - DNA, 25 bp, Homo sapien
tgaccaccccagttcgattctccaa

SEQ ID NO: 3760181 - DNA, 25 bp, Homo sapien
cccagttcgattctccaaacctgag

SEQ ID NO: 3760182 - DNA, 25 bp, Homo sapien
agttcgattctccaaacctgagagt

SEQ ID NO: 3760183 - DNA, 25 bp, Homo sapien
tgggcagagaatggatcaggagctc

SEQ ID NO: 3760184 - DNA, 25 bp, Homo sapien
agtacccagagggccgacatctgtt

SEQ ID NO: 3760185 - DNA, 25 bp, Homo sapien
tggcagtacccagagggccgacatc

SEQ ID NO: 3760186 - DNA, 25 bp, Homo sapien
tacccagagggccgacatctgttgc

SEQ ID NO: 3760187 - DNA, 25 bp, Homo sapien
gcagtacccagagggccgacatctg

SEQ ID NO: 3760188 - DNA, 25 bp, Homo sapien
gagcagcgtccgcatcttcatctct

SEQ ID NO: 3760189 - DNA, 25 bp, Homo sapien
gcagcgtccgcatcttcatctctct

SEQ ID NO: 3760190 - DNA, 25 bp, Homo sapien
cagcgtccgcatcttcatctctctc

SEQ ID NO: 3760191 - DNA, 25 bp, Homo sapien
agagcagcgtccgcatcttcatctc

SEQ ID NO: 3760192 - DNA, 25 bp, Homo sapien
ctggggggtgcagccacgtcttcac

SEQ ID NO: 3760193 - DNA, 25 bp, Homo sapien
tttgctctcaaggtcaggggcactg

SEQ ID NO: 3760194 - DNA, 25 bp, Homo sapien
ggggcactggggggtgcagccacgt

SEQ ID NO: 3760195 - DNA, 25 bp, Homo sapien
ttgctctcaaggtcaggggcactgg

SEQ ID NO: 3760196 - DNA, 25 bp, Homo sapien
gcaggaatggaagatcccctgtatg

SEQ ID NO: 3760197 - DNA, 25 bp, Homo sapien
cacagcccctgtatagggaccaatc

SEQ ID NO: 3760198 - DNA, 25 bp, Homo sapien
ggttgacagctgactccttcttttt

SEQ ID NO: 3760199 - DNA, 25 bp, Homo sapien
tcccctgtatggagaggccgctgtt

SEQ ID NO: 3760200 - DNA, 25 bp, Homo sapien
agccgctgactccagcaggccttga

SEQ ID NO: 3760201 - DNA, 25 bp, Homo sapien
aaggcagccgctgactccagcaggc

SEQ ID NO: 3760202 - DNA, 25 bp, Homo sapien
tcccagggcggcaaggcagccgctg

SEQ ID NO: 3760203 - DNA, 25 bp, Homo sapien
ctgactccagcaggccttgaaacct

SEQ ID NO: 3760204 - DNA, 25 bp, Homo sapien
agctgctggcagcaatagcagaacc

SEQ ID NO: 3760205 - DNA, 25 bp, Homo sapien
tccaaagcgggcgaatttcgaaaca

SEQ ID NO: 3760206 - DNA, 25 bp, Homo sapien
tgtatcattccaaagcgggcgaatt

SEQ ID NO: 3760207 - DNA, 25 bp, Homo sapien
ggcgaatttcgaaacatccagctgc

SEQ ID NO: 3760208 - DNA, 25 bp, Homo sapien
tcgctttgcgcatgggctctggcct

SEQ ID NO: 3760209 - DNA, 25 bp, Homo sapien
tctccctgagctgcagttcggcttt

SEQ ID NO: 3760210 - DNA, 25 bp, Homo sapien
caagcagggacgtggcttcaggaac

SEQ ID NO: 3760211 - DNA, 25 bp, Homo sapien
caggcattcggatgccgccagcgag

SEQ ID NO: 3760212 - DNA, 25 bp, Homo sapien
gctttccaaggtatgaatgcccggg

SEQ ID NO: 3760213 - DNA, 25 bp, Homo sapien
cacgctttgcgtagatgagggatga

SEQ ID NO: 3760214 - DNA, 25 bp, Homo sapien
cgcgcctcacgctttatgtacatga

SEQ ID NO: 3760215 - DNA, 25 bp, Homo sapien
gaattggcacaacctgaagtcagct

SEQ ID NO: 3760216 - DNA, 25 bp, Homo sapien
tgttagctgagagggcgatgccaac

SEQ ID NO: 3760217 - DNA, 25 bp, Homo sapien
cgtggccatgtcagctccaaggagg

SEQ ID NO: 3760218 - DNA, 25 bp, Homo sapien
ttgctggctggcacgtttgcacgcg

SEQ ID NO: 3760219 - DNA, 25 bp, Homo sapien
tccatgttagctgcgagggccatgc

SEQ ID NO: 3760220 - DNA, 25 bp, Homo sapien
ggtgcaggacgagcactgggggtgc

SEQ ID NO: 3760221 - DNA, 25 bp, Homo sapien
tgcaggacgagcactgggggtgcac

SEQ ID NO: 3760222 - DNA, 25 bp, Homo sapien
ctgagaagacagcgggaatggcggg

SEQ ID NO: 3760223 - DNA, 25 bp, Homo sapien
gagaagacagcgggaatggcgggtc

SEQ ID NO: 3760224 - DNA, 25 bp, Homo sapien
gggctccctggtatgacttcctttg

SEQ ID NO: 3760225 - DNA, 25 bp, Homo sapien
tttgtgttgcaggaggaaccgatgc

SEQ ID NO: 3760226 - DNA, 25 bp, Homo sapien
ggctttgtagtgctttcctcgttca

SEQ ID NO: 3760227 - DNA, 25 bp, Homo sapien
caggaggaaccgatgcaccttcctt

SEQ ID NO: 3760228 - DNA, 25 bp, Homo sapien
tgcaaagtaggacagaatgagcccc

SEQ ID NO: 3760229 - DNA, 25 bp, Homo sapien
agaatgagccccagtgccgtcatct

SEQ ID NO: 3760230 - DNA, 25 bp, Homo sapien
tctgggccgtgtcctttgatctggt

SEQ ID NO: 3760231 - DNA, 25 bp, Homo sapien
tttgaggcaaacatcgatgacatct

SEQ ID NO: 3760232 - DNA, 25 bp, Homo sapien
ttgctgtgacgagggtgcgtcttca

SEQ ID NO: 3760233 - DNA, 25 bp, Homo sapien
cggggaattgatcactattttgaaa

SEQ ID NO: 3760234 - DNA, 25 bp, Homo sapien
catgctgacagggaagaacgtagtc

SEQ ID NO: 3760235 - DNA, 25 bp, Homo sapien
tcagaaatcgtagacttcggggaat

SEQ ID NO: 3760236 - DNA, 25 bp, Homo sapien
catgaaattgcatgagagatttggc

SEQ ID NO: 3760237 - DNA, 25 bp, Homo sapien
ggcttcatgaaattgcatgagagat

SEQ ID NO: 3760238 - DNA, 25 bp, Homo sapien
tttggcttcatgaaattgcatgaga

SEQ ID NO: 3760239 - DNA, 25 bp, Homo sapien
gtgagaaaaagcagctcccggggcc

SEQ ID NO: 3760240 - DNA, 25 bp, Homo sapien
tctgctcctccctctccggcctccc

SEQ ID NO: 3760241 - DNA, 25 bp, Homo sapien
tgctcctccctctccggcctccccc

SEQ ID NO: 3760242 - DNA, 25 bp, Homo sapien
atctgctcctccctctccggcctcc

SEQ ID NO: 3760243 - DNA, 25 bp, Homo sapien
ctgctcctccctctccggcctcccc

SEQ ID NO: 3760244 - DNA, 25 bp, Homo sapien
gcaggacgcagaagcttcgacatgg

SEQ ID NO: 3760245 - DNA, 25 bp, Homo sapien
gcttcgacatggactggctgtgtgc

SEQ ID NO: 3760246 - DNA, 25 bp, Homo sapien
atgtgccctcgagccctgtttaatt

SEQ ID NO: 3760247 - DNA, 25 bp, Homo sapien
tgccctcgagccctgtttaattcct

SEQ ID NO: 3760248 - DNA, 25 bp, Homo sapien
gtgctgggggcccgcaatgcttagg

SEQ ID NO: 3760249 - DNA, 25 bp, Homo sapien
cgagctgaccatgaggttgtctctt

SEQ ID NO: 3760250 - DNA, 25 bp, Homo sapien
gaccatgaggttgtctctttcactg

SEQ ID NO: 3760251 - DNA, 25 bp, Homo sapien
gctgggggcccgcaatgcttagggg

SEQ ID NO: 3760252 - DNA, 25 bp, Homo sapien
aatttatcataaggcccaagaaatg

SEQ ID NO: 3760253 - DNA, 25 bp, Homo sapien
ctgcccataaccctgaccccttgtt

SEQ ID NO: 3760254 - DNA, 25 bp, Homo sapien
tttgctgtctatggggtaatttatc

SEQ ID NO: 3760255 - DNA, 25 bp, Homo sapien
gagatgctctttagggcgctgacag

SEQ ID NO: 3760256 - DNA, 25 bp, Homo sapien
tgtgaatctctagaggccagcgcgg

SEQ ID NO: 3760257 - DNA, 25 bp, Homo sapien
aattagccaatctcataagccggtc

SEQ ID NO: 3760258 - DNA, 25 bp, Homo sapien
gtttgatctgtctgcggttcccgca

SEQ ID NO: 3760259 - DNA, 25 bp, Homo sapien
tagatctctagagatgtggccacca

SEQ ID NO: 3760260 - DNA, 25 bp, Homo sapien
ctcggattcagaatttgtgggagaa

SEQ ID NO: 3760261 - DNA, 25 bp, Homo sapien
gggagaagtttgacgggtcaccagc

SEQ ID NO: 3760262 - DNA, 25 bp, Homo sapien
tgggagaagtttgacgggtcaccag

SEQ ID NO: 3760263 - DNA, 25 bp, Homo sapien
tctcggattcagaatttgtgggaga

SEQ ID NO: 3760264 - DNA, 25 bp, Homo sapien
gaaatcctcaggcttcaacacgagc

SEQ ID NO: 3760265 - DNA, 25 bp, Homo sapien
tgagggcgaaatcctcaggcttcaa

SEQ ID NO: 3760266 - DNA, 25 bp, Homo sapien
gcgaaatcctcaggcttcaacacga

SEQ ID NO: 3760267 - DNA, 25 bp, Homo sapien
ctggacctgagggcgaaatcctcag

SEQ ID NO: 3760268 - DNA, 25 bp, Homo sapien
tggaaactcttctgtcgctatcggc

SEQ ID NO: 3760269 - DNA, 25 bp, Homo sapien
cactgtggaatcctaggacctggcc

SEQ ID NO: 3760270 - DNA, 25 bp, Homo sapien
tgacagatccctccacggaaaggct

SEQ ID NO: 3760271 - DNA, 25 bp, Homo sapien
cgtgatctggtgtggcgtgcctcct

SEQ ID NO: 3760272 - DNA, 25 bp, Homo sapien
tgaatacagcgccttggctctcagg

SEQ ID NO: 3760273 - DNA, 25 bp, Homo sapien
gaaaagagcctgaccccgtatgaat

SEQ ID NO: 3760274 - DNA, 25 bp, Homo sapien
gaaacagcgtgatttggagcccact

SEQ ID NO: 3760275 - DNA, 25 bp, Homo sapien
tgacagcagctcgaggtacatggat

SEQ ID NO: 3760276 - DNA, 25 bp, Homo sapien
ttattttgtgcttgctttctaatga

SEQ ID NO: 3760277 - DNA, 25 bp, Homo sapien
gtagctaacccttacacaacccaga

SEQ ID NO: 3760278 - DNA, 25 bp, Homo sapien
tggtctccttattacctggtaggga

SEQ ID NO: 3760279 - DNA, 25 bp, Homo sapien
agacttggtctccttattacctggt

SEQ ID NO: 3760280 - DNA, 25 bp, Homo sapien
cgcgtgggccgggtgtttccagact

SEQ ID NO: 3760281 - DNA, 25 bp, Homo sapien
catgggccaggtgtttccgggctcc

SEQ ID NO: 3760282 - DNA, 25 bp, Homo sapien
tcagtggctcttagtatcggccacc

SEQ ID NO: 3760283 - DNA, 25 bp, Homo sapien
taaaccaaacgccatgacggactga

SEQ ID NO: 3760284 - DNA, 25 bp, Homo sapien
tccacaggaagagtcggcgctaact

SEQ ID NO: 3760285 - DNA, 25 bp, Homo sapien
ccagcgatctggaaagaggcacgtt

SEQ ID NO: 3760286 - DNA, 25 bp, Homo sapien
cgtccaaacattgcacactcgcgtg

SEQ ID NO: 3760287 - DNA, 25 bp, Homo sapien
taactcaacagtgcatgtgcccctg

SEQ ID NO: 3760288 - DNA, 25 bp, Homo sapien
gctgctgctccggtggtttcctcac

SEQ ID NO: 3760289 - DNA, 25 bp, Homo sapien
acagtacatggagggcgtgtctcca

SEQ ID NO: 3760290 - DNA, 25 bp, Homo sapien
catggagggcgtgtctccagggctg

SEQ ID NO: 3760291 - DNA, 25 bp, Homo sapien
tcacagactggtaggtgtgcgcccc

SEQ ID NO: 3760292 - DNA, 25 bp, Homo sapien
cacagactggtaggtgtgcgccccc

SEQ ID NO: 3760293 - DNA, 25 bp, Homo sapien
gctcctccgcccagtggtggcgttg

SEQ ID NO: 3760294 - DNA, 25 bp, Homo sapien
gttgataatctccaggtccgcgctg

SEQ ID NO: 3760295 - DNA, 25 bp, Homo sapien
ccacgacccagttcatgctgaaggg

SEQ ID NO: 3760296 - DNA, 25 bp, Homo sapien
acgtgcttgcagagccgggatgggc

SEQ ID NO: 3760297 - DNA, 25 bp, Homo sapien
gctgcacctgcgtcaaccttctaat

SEQ ID NO: 3760298 - DNA, 25 bp, Homo sapien
aatgaacagagccacgtggaagtga

SEQ ID NO: 3760299 - DNA, 25 bp, Homo sapien
tcaggactggccagttcacgtgtca

SEQ ID NO: 3760300 - DNA, 25 bp, Homo sapien
ggtgataatatagctccgtccagat

SEQ ID NO: 3760301 - DNA, 25 bp, Homo sapien
gcccagctggccgggtgtctccctc

SEQ ID NO: 3760302 - DNA, 25 bp, Homo sapien
cgctctgtgacaggtgacttctcta

SEQ ID NO: 3760303 - DNA, 25 bp, Homo sapien
tgtgaagatcaaaccaggcaaataa

SEQ ID NO: 3760304 - DNA, 25 bp, Homo sapien
tacttcacgaggtgatgtgaagatc

SEQ ID NO: 3760305 - DNA, 25 bp, Homo sapien
tcaaaccaggcaaataagagcactt

SEQ ID NO: 3760306 - DNA, 25 bp, Homo sapien
gtccccttggctaggctgtagcacc

SEQ ID NO: 3760307 - DNA, 25 bp, Homo sapien
ggaactcttattacatgcattcaga

SEQ ID NO: 3760308 - DNA, 25 bp, Homo sapien
gtagcacccaactagattaactgcg

SEQ ID NO: 3760309 - DNA, 25 bp, Homo sapien
ggtattgctgggaaggcacattcaa

SEQ ID NO: 3760310 - DNA, 25 bp, Homo sapien
gtactcgcggagtaacctggcagcc

SEQ ID NO: 3760311 - DNA, 25 bp, Homo sapien
gaatcctggtgcgaagccggcccag

SEQ ID NO: 3760312 - DNA, 25 bp, Homo sapien
aagccggcccagtactcgcggagta

SEQ ID NO: 3760313 - DNA, 25 bp, Homo sapien
atcctggtgcgaagccggcccagta

SEQ ID NO: 3760314 - DNA, 25 bp, Homo sapien
gttttcagaactccttcagacaccg

SEQ ID NO: 3760315 - DNA, 25 bp, Homo sapien
tcagcatcgcctcctgtgggcggcc

SEQ ID NO: 3760316 - DNA, 25 bp, Homo sapien
caacactagtgattctgttttcaga

SEQ ID NO: 3760317 - DNA, 25 bp, Homo sapien
gggcctcttgggtgagcccaacact

SEQ ID NO: 3760318 - DNA, 25 bp, Homo sapien
taaaatcgtaggactttgcccatta

SEQ ID NO: 3760319 - DNA, 25 bp, Homo sapien
cctaaattgccactagccaacatgg

SEQ ID NO: 3760320 - DNA, 25 bp, Homo sapien
caacatggatgaagtctgcgaggga

SEQ ID NO: 3760321 - DNA, 25 bp, Homo sapien
gacctggcctattgctatatgcaga

SEQ ID NO: 3760322 - DNA, 25 bp, Homo sapien
ttgtgccggtaggaggcgggcagct

SEQ ID NO: 3760323 - DNA, 25 bp, Homo sapien
gaggagaggccggttgtgccggtag

SEQ ID NO: 3760324 - DNA, 25 bp, Homo sapien
cgacaccctccatgcggtggctcat

SEQ ID NO: 3760325 - DNA, 25 bp, Homo sapien
atgacgcgtgcgaggtggcccgtgt

SEQ ID NO: 3760326 - DNA, 25 bp, Homo sapien
agtgggacaggagcgcgccctgcag

SEQ ID NO: 3760327 - DNA, 25 bp, Homo sapien
acacgggctccacgaagtgggacag

SEQ ID NO: 3760328 - DNA, 25 bp, Homo sapien
aagtgggacaggagcgcgccctgca

SEQ ID NO: 3760329 - DNA, 25 bp, Homo sapien
caggtacacgggctccacgaagtgg

SEQ ID NO: 3760330 - DNA, 25 bp, Homo sapien
cctgtcagtcttcccatcgtgcgga

SEQ ID NO: 3760331 - DNA, 25 bp, Homo sapien
gtctgcggcctggtcctgaggacct

SEQ ID NO: 3760332 - DNA, 25 bp, Homo sapien
tccgtctgcggcctggtcctgagga

SEQ ID NO: 3760333 - DNA, 25 bp, Homo sapien
ctgaggacctgtcagtcttcccatc

SEQ ID NO: 3760334 - DNA, 25 bp, Homo sapien
ctgggactgggctccacaggcccat

SEQ ID NO: 3760335 - DNA, 25 bp, Homo sapien
ggagctccctgggagtgccccagac

SEQ ID NO: 3760336 - DNA, 25 bp, Homo sapien
gacactgttgcctgggactgggctc

SEQ ID NO: 3760337 - DNA, 25 bp, Homo sapien
ttgcctgggactgggctccacaggc

SEQ ID NO: 3760338 - DNA, 25 bp, Homo sapien
gccactggatgtgcgagcttctacc

SEQ ID NO: 3760339 - DNA, 25 bp, Homo sapien
tggtcgtaagccacagagcacctgt

SEQ ID NO: 3760340 - DNA, 25 bp, Homo sapien
gcgcctgtcactgaggacccttcat

SEQ ID NO: 3760341 - DNA, 25 bp, Homo sapien
tggtcatttctacaagtcacggtgc

SEQ ID NO: 3760342 - DNA, 25 bp, Homo sapien
tccctggatcttggatggtggctct

SEQ ID NO: 3760343 - DNA, 25 bp, Homo sapien
tccttgatgttcaccgataagtcag

SEQ ID NO: 3760344 - DNA, 25 bp, Homo sapien
tccacagattccacagtgtgtctcc

SEQ ID NO: 3760345 - DNA, 25 bp, Homo sapien
ataagtcagagaatggcaacaaatc

SEQ ID NO: 3760346 - DNA, 25 bp, Homo sapien
ggagcggttgagggatttggcttct

SEQ ID NO: 3760347 - DNA, 25 bp, Homo sapien
atggaaggaaagacaggtctccggt

SEQ ID NO: 3760348 - DNA, 25 bp, Homo sapien
gaaagacaggtctccggtgggttga

SEQ ID NO: 3760349 - DNA, 25 bp, Homo sapien
caggtctccggtgggttgacgacac

SEQ ID NO: 3760350 - DNA, 25 bp, Homo sapien
agacaggtctccggtgggttgacga

SEQ ID NO: 3760351 - DNA, 25 bp, Homo sapien
cagggaacaggaccgcccttgcctg

SEQ ID NO: 3760352 - DNA, 25 bp, Homo sapien
caggtgcgccggcatcaggcaggga

SEQ ID NO: 3760353 - DNA, 25 bp, Homo sapien
gcccttgcctgttttggacgctttg

SEQ ID NO: 3760354 - DNA, 25 bp, Homo sapien
cgctttggttttccgccgtgacgcg

SEQ ID NO: 3760355 - DNA, 25 bp, Homo sapien
cctgcaacacgctggtaaaatgtaa

SEQ ID NO: 3760356 - DNA, 25 bp, Homo sapien
tgtaaaattccttcgcacgagagtg

SEQ ID NO: 3760357 - DNA, 25 bp, Homo sapien
cacgagagtgaagaggatgatcccc

SEQ ID NO: 3760358 - DNA, 25 bp, Homo sapien
tgatccccaggtgcgtctctccatt

SEQ ID NO: 3760359 - DNA, 25 bp, Homo sapien
gacatgcggcgtctcctccttgtgc

SEQ ID NO: 3760360 - DNA, 25 bp, Homo sapien
ttgaactgggacgtctcctcctcgt

SEQ ID NO: 3760361 - DNA, 25 bp, Homo sapien
gggcgtctccttgaactgggacgtc

SEQ ID NO: 3760362 - DNA, 25 bp, Homo sapien
atggtttctgggacatgcggcgtct

SEQ ID NO: 3760363 - DNA, 25 bp, Homo sapien
ttgcagatggtgcgcttgtcaccct

SEQ ID NO: 3760364 - DNA, 25 bp, Homo sapien
cgcttgtcaccctctgccgtctcca

SEQ ID NO: 3760365 - DNA, 25 bp, Homo sapien
cttgcagatggtgcgcttgtcaccc

SEQ ID NO: 3760366 - DNA, 25 bp, Homo sapien
ggtgcaggagggcagagccgcgaag

SEQ ID NO: 3760367 - DNA, 25 bp, Homo sapien
agggcagagccgcgaaggcagcggg

SEQ ID NO: 3760368 - DNA, 25 bp, Homo sapien
gagccgcgaaggcagcggggctgct

SEQ ID NO: 3760369 - DNA, 25 bp, Homo sapien
gcagcggggctgctgattgtttcat

SEQ ID NO: 3760370 - DNA, 25 bp, Homo sapien
tggctgctcaaacagaactgcgtct

SEQ ID NO: 3760371 - DNA, 25 bp, Homo sapien
agttcccagggcatcatcaatcacg

SEQ ID NO: 3760372 - DNA, 25 bp, Homo sapien
caccaaggtgttgccaatggcgctg

SEQ ID NO: 3760373 - DNA, 25 bp, Homo sapien
gcaaatatgaccacgggttcccggc

SEQ ID NO: 3760374 - DNA, 25 bp, Homo sapien
ccttggaggtcagaactcagacgca

SEQ ID NO: 3760375 - DNA, 25 bp, Homo sapien
catgcagagaacagcgtggcagcac

SEQ ID NO: 3760376 - DNA, 25 bp, Homo sapien
gacagtacctggaactgaacccctg

SEQ ID NO: 3760377 - DNA, 25 bp, Homo sapien
cagccaagcggcactgatgagccct

SEQ ID NO: 3760378 - DNA, 25 bp, Homo sapien
tttgttacagagagacaaccctgcc

SEQ ID NO: 3760379 - DNA, 25 bp, Homo sapien
tccagcatctcgtgggtttgcacct

SEQ ID NO: 3760380 - DNA, 25 bp, Homo sapien
tgagtggccactgagtgcttggacc

SEQ ID NO: 3760381 - DNA, 25 bp, Homo sapien
cagacctgctggcatcgcgtgggtt

SEQ ID NO: 3760382 - DNA, 25 bp, Homo sapien
tgtgcccagacctggcattgcgtgg

SEQ ID NO: 3760383 - DNA, 25 bp, Homo sapien
agacctggcattgcgtgggttcgca

SEQ ID NO: 3760384 - DNA, 25 bp, Homo sapien
gcccagacctggcattgcgtgggtt

SEQ ID NO: 3760385 - DNA, 25 bp, Homo sapien
atgtaggtttgtacctgtgcccaga

SEQ ID NO: 3760386 - DNA, 25 bp, Homo sapien
tgtacccggacctgccggtgacaca

SEQ ID NO: 3760387 - DNA, 25 bp, Homo sapien
tgcccggacctgctggcgttgcatg

SEQ ID NO: 3760388 - DNA, 25 bp, Homo sapien
ttcgcacctgtgtttagtccaccat

SEQ ID NO: 3760389 - DNA, 25 bp, Homo sapien
cggtgacacataggtttgcacctgt

SEQ ID NO: 3760390 - DNA, 25 bp, Homo sapien
tggagtccagaagccggtctgtgta

SEQ ID NO: 3760391 - DNA, 25 bp, Homo sapien
gcctggagtccagaagccggtctgt

SEQ ID NO: 3760392 - DNA, 25 bp, Homo sapien
gtccagaagccggtctgtgtagatc

SEQ ID NO: 3760393 - DNA, 25 bp, Homo sapien
tccagaagccggtctgtgtagatcc

SEQ ID NO: 3760394 - DNA, 25 bp, Homo sapien
tagtcaggtttttgtggaaagccca

SEQ ID NO: 3760395 - DNA, 25 bp, Homo sapien
catcactgacctcaccagaagtggg

SEQ ID NO: 3760396 - DNA, 25 bp, Homo sapien
tttcagggcgtcagaccaatgtggg

SEQ ID NO: 3760397 - DNA, 25 bp, Homo sapien
cctcagggcctcaaatccacgttgg

SEQ ID NO: 3760398 - DNA, 25 bp, Homo sapien
ccggactcgatcttggtgcgcaggt

SEQ ID NO: 3760399 - DNA, 25 bp, Homo sapien
ctggcgatcttgtccgtgcaggaca

SEQ ID NO: 3760400 - DNA, 25 bp, Homo sapien
agcaggacgccgtcccaggtctgca

SEQ ID NO: 3760401 - DNA, 25 bp, Homo sapien
tgcccgcggaacttcctgacgaggt

SEQ ID NO: 3760402 - DNA, 25 bp, Homo sapien
gcgtttggcacgaggaaggggcttc

SEQ ID NO: 3760403 - DNA, 25 bp, Homo sapien
tgggcgtttggcacgaggaaggggc

SEQ ID NO: 3760404 - DNA, 25 bp, Homo sapien
atggctgggcgtttggcacgaggaa

SEQ ID NO: 3760405 - DNA, 25 bp, Homo sapien
gctgggcgtttggcacgaggaaggg

SEQ ID NO: 3760406 - DNA, 25 bp, Homo sapien
gaaaactagagtcttggatgcccct

SEQ ID NO: 3760407 - DNA, 25 bp, Homo sapien
cattggtaaacactggcctgggacc

SEQ ID NO: 3760408 - DNA, 25 bp, Homo sapien
tcgcttgagatgaatggagtagccc

SEQ ID NO: 3760409 - DNA, 25 bp, Homo sapien
gagtctgcggtctctgtcgcgaaag

SEQ ID NO: 3760410 - DNA, 25 bp, Homo sapien
gagaataacatcatggccctcaggg

SEQ ID NO: 3760411 - DNA, 25 bp, Homo sapien
gggaatgtggtcctctgaattggag

SEQ ID NO: 3760412 - DNA, 25 bp, Homo sapien
tgaattggaggggcagtgccgctgg

SEQ ID NO: 3760413 - DNA, 25 bp, Homo sapien
ctctgcatttgtgagaataacatca

SEQ ID NO: 3760414 - DNA, 25 bp, Homo sapien
gagatggaagaggatgttctctcgc

SEQ ID NO: 3760415 - DNA, 25 bp, Homo sapien
gaatatcgatcgctctgagtcctcg

SEQ ID NO: 3760416 - DNA, 25 bp, Homo sapien
gagagtggagtcttgcgtctccaca

SEQ ID NO: 3760417 - DNA, 25 bp, Homo sapien
gcagccggtagccaccttcttttaa

SEQ ID NO: 3760418 - DNA, 25 bp, Homo sapien
acaggaagtccttgcggcatccagc

SEQ ID NO: 3760419 - DNA, 25 bp, Homo sapien
gtccttgcggcatccagcagtcttc

SEQ ID NO: 3760420 - DNA, 25 bp, Homo sapien
tcttgctgttttcacacgttctgcc

SEQ ID NO: 3760421 - DNA, 25 bp, Homo sapien
tctgccccatgggtgatggattgtg

SEQ ID NO: 3760422 - DNA, 25 bp, Homo sapien
tagaggaagtgcaggaacgcccgcc

SEQ ID NO: 3760423 - DNA, 25 bp, Homo sapien
acgacctccgcgtggcagtcattca

SEQ ID NO: 3760424 - DNA, 25 bp, Homo sapien
gtcactgaggtgctcgccgctgatg

SEQ ID NO: 3760425 - DNA, 25 bp, Homo sapien
tgatgcacttggtccccgaggacag

SEQ ID NO: 3760426 - DNA, 25 bp, Homo sapien
cagtgacagccagggagaattcggg

SEQ ID NO: 3760427 - DNA, 25 bp, Homo sapien
cagccagggagaattcggggccggg

SEQ ID NO: 3760428 - DNA, 25 bp, Homo sapien
accgagcactggggaagtaacctgc

SEQ ID NO: 3760429 - DNA, 25 bp, Homo sapien
gaccgagcactggggaagtaacctg

SEQ ID NO: 3760430 - DNA, 25 bp, Homo sapien
gatgacgcggtcagaaacggctgca

SEQ ID NO: 3760431 - DNA, 25 bp, Homo sapien
gagacgcgaagcctggaccgaggga

SEQ ID NO: 3760432 - DNA, 25 bp, Homo sapien
accgagggagatgacgcggtcagaa

SEQ ID NO: 3760433 - DNA, 25 bp, Homo sapien
cccaacacaggagacgcgaagcctg

SEQ ID NO: 3760434 - DNA, 25 bp, Homo sapien
tggctgacaaggtctcctcactggc

SEQ ID NO: 3760435 - DNA, 25 bp, Homo sapien
ggctgacaaggtctcctcactggca

SEQ ID NO: 3760436 - DNA, 25 bp, Homo sapien
cgaggatggctgacaaggtctcctc

SEQ ID NO: 3760437 - DNA, 25 bp, Homo sapien
ggatggctgacaaggtctcctcact

SEQ ID NO: 3760438 - DNA, 25 bp, Homo sapien
gagggaacaacgctgaactactgtg

SEQ ID NO: 3760439 - DNA, 25 bp, Homo sapien
ttttccagtgaaacgagaggattcg

SEQ ID NO: 3760440 - DNA, 25 bp, Homo sapien
gattcgggagggaacaacgctgaac

SEQ ID NO: 3760441 - DNA, 25 bp, Homo sapien
tccagtgaaacgagaggattcggga

SEQ ID NO: 3760442 - DNA, 25 bp, Homo sapien
acgctcccccggaagacggcctgag

SEQ ID NO: 3760443 - DNA, 25 bp, Homo sapien
tctcccggaagacggcctgagccag

SEQ ID NO: 3760444 - DNA, 25 bp, Homo sapien
gtcccccggaagacggcctgagcca

SEQ ID NO: 3760445 - DNA, 25 bp, Homo sapien
tcccccggaagacggcctgagccag

SEQ ID NO: 3760446 - DNA, 25 bp, Homo sapien
gtcccccggaagacggcctgagcca

SEQ ID NO: 3760447 - DNA, 25 bp, Homo sapien
tctcccggaagacggcctgagtcag

SEQ ID NO: 3760448 - DNA, 25 bp, Homo sapien
acgctcccccggaagacggcctgag

SEQ ID NO: 3760449 - DNA, 25 bp, Homo sapien
tctcccggaagacggcctgagccag

SEQ ID NO: 3760450 - DNA, 25 bp, Homo sapien
tccacagggccgattgatcaaattt

SEQ ID NO: 3760451 - DNA, 25 bp, Homo sapien
tcaaatttagccctcattcatcttc

SEQ ID NO: 3760452 - DNA, 25 bp, Homo sapien
ctcagcatgcccctcgcggctgggt

SEQ ID NO: 3760453 - DNA, 25 bp, Homo sapien
ctggctgactggagaggacgccttc

SEQ ID NO: 3760454 - DNA, 25 bp, Homo sapien
ccagcgctttatggcgggcgtgcat

SEQ ID NO: 3760455 - DNA, 25 bp, Homo sapien
tcgcggaacttctgtgtgaccagct

SEQ ID NO: 3760456 - DNA, 25 bp, Homo sapien
catgggcgtgaggtccgtcgtcacc

SEQ ID NO: 3760457 - DNA, 25 bp, Homo sapien
tttggtcatgacgattcctgccagc

SEQ ID NO: 3760458 - DNA, 25 bp, Homo sapien
gaaagacacaagcacaggcctccac

SEQ ID NO: 3760459 - DNA, 25 bp, Homo sapien
ctgaaagacacaagcacaggcctcc

SEQ ID NO: 3760460 - DNA, 25 bp, Homo sapien
aagacacaagcacaggcctccacgt

SEQ ID NO: 3760461 - DNA, 25 bp, Homo sapien
gacacaagcacaggcctccacgttg

SEQ ID NO: 3760462 - DNA, 25 bp, Homo sapien
tccacatttccaccgggcgtgtgtg

SEQ ID NO: 3760463 - DNA, 25 bp, Homo sapien
tttccaccgggcgtgtgtggacgct

SEQ ID NO: 3760464 - DNA, 25 bp, Homo sapien
ttgatgttgatactgtgcagcattg

SEQ ID NO: 3760465 - DNA, 25 bp, Homo sapien
ctgtgcagcattgggcctggtttcc

SEQ ID NO: 3760466 - DNA, 25 bp, Homo sapien
ttgacccttgcactgaactggtgac

SEQ ID NO: 3760467 - DNA, 25 bp, Homo sapien
gacccttgcactgaactggtgacca

SEQ ID NO: 3760468 - DNA, 25 bp, Homo sapien
tgaccttgacccttgcactgaactg

SEQ ID NO: 3760469 - DNA, 25 bp, Homo sapien
tgccttgaccttgacccttgcactg

SEQ ID NO: 3760470 - DNA, 25 bp, Homo sapien
actcaaggatggctgcaggcttcac

SEQ ID NO: 3760471 - DNA, 25 bp, Homo sapien
gaactcaaggatggctgcaggcttc

SEQ ID NO: 3760472 - DNA, 25 bp, Homo sapien
tgaactcaaggatggctgcaggctt

SEQ ID NO: 3760473 - DNA, 25 bp, Homo sapien
aactcaaggatggctgcaggcttca

SEQ ID NO: 3760474 - DNA, 25 bp, Homo sapien
tcatctgcaatccactgcctttaga

SEQ ID NO: 3760475 - DNA, 25 bp, Homo sapien
ctcagtctctaaaactccttcctag

SEQ ID NO: 3760476 - DNA, 25 bp, Homo sapien
ttcctgcatgattacctagcagttc

SEQ ID NO: 3760477 - DNA, 25 bp, Homo sapien
tctcaatccattatgtcctgccctg

SEQ ID NO: 3760478 - DNA, 25 bp, Homo sapien
gcgtgatttctcagcacggtgccag

SEQ ID NO: 3760479 - DNA, 25 bp, Homo sapien
aatctgtccagctctcgtgcaagtc

SEQ ID NO: 3760480 - DNA, 25 bp, Homo sapien
ggatagctccagcacttgtttctga

SEQ ID NO: 3760481 - DNA, 25 bp, Homo sapien
gctggtcgatcctggtccaatggaa

SEQ ID NO: 3760482 - DNA, 25 bp, Homo sapien
tgtgactgctgacacaaacattgtc

SEQ ID NO: 3760483 - DNA, 25 bp, Homo sapien
caaagcacgcttgcctctgggtcag

SEQ ID NO: 3760484 - DNA, 25 bp, Homo sapien
tcgtcagactggatgcccaaggaca

SEQ ID NO: 3760485 - DNA, 25 bp, Homo sapien
caaggacaaggactcagtgtcactc

SEQ ID NO: 3760486 - DNA, 25 bp, Homo sapien
gacaaaaggcttgtgacctgaggcc

SEQ ID NO: 3760487 - DNA, 25 bp, Homo sapien
gaaggacatcgacattgaagccaga

SEQ ID NO: 3760488 - DNA, 25 bp, Homo sapien
tgtgtgtagaaaacgcagtcctctg

SEQ ID NO: 3760489 - DNA, 25 bp, Homo sapien
gagagatcccacattcagccttgag

SEQ ID NO: 3760490 - DNA, 25 bp, Homo sapien
tgccgcgcttctgagaggagtgact

SEQ ID NO: 3760491 - DNA, 25 bp, Homo sapien
gctgacggcccacttgccaggatgt

SEQ ID NO: 3760492 - DNA, 25 bp, Homo sapien
ctgctccacgggacaaaatgtgatg

SEQ ID NO: 3760493 - DNA, 25 bp, Homo sapien
aatgacgtgtggctgctcggagcct

SEQ ID NO: 3760494 - DNA, 25 bp, Homo sapien
tgttgctaagatacataacatcctt

SEQ ID NO: 3760495 - DNA, 25 bp, Homo sapien
gcctttgttgctaagatacataaca

SEQ ID NO: 3760496 - DNA, 25 bp, Homo sapien
aagcctttgttgctaagatacataa

SEQ ID NO: 3760497 - DNA, 25 bp, Homo sapien
ccaaagcctttgttgctaagataca

SEQ ID NO: 3760498 - DNA, 25 bp, Homo sapien
gagggaaggagagagggaggggaga

SEQ ID NO: 3760499 - DNA, 25 bp, Homo sapien
ggagagggagggaaggagagaggga

SEQ ID NO: 3760500 - DNA, 25 bp, Homo sapien
agagggagggaaggagagagggagg

SEQ ID NO: 3760501 - DNA, 25 bp, Homo sapien
agggaaggagagagggaggggagag

SEQ ID NO: 3760502 - DNA, 25 bp, Homo sapien
cctctcggagtgtcggcagggcaat

SEQ ID NO: 3760503 - DNA, 25 bp, Homo sapien
cggagtgtcggcagggcaatgtctt

SEQ ID NO: 3760504 - DNA, 25 bp, Homo sapien
tgatgcctctcggagtgtcggcagg

SEQ ID NO: 3760505 - DNA, 25 bp, Homo sapien
tcggagtgtcggcagggcaatgtct

SEQ ID NO: 3760506 - DNA, 25 bp, Homo sapien
tctggtgcagagctcgacatatgac

SEQ ID NO: 3760507 - DNA, 25 bp, Homo sapien
acgtttgtcgctgttggttggctga

SEQ ID NO: 3760508 - DNA, 25 bp, Homo sapien
catggcgttatgtctggtgcagagc

SEQ ID NO: 3760509 - DNA, 25 bp, Homo sapien
ttctgtttgaggtcatggcgttatg

SEQ ID NO: 3760510 - DNA, 25 bp, Homo sapien
ggcccggtggaggaccctggaggca

SEQ ID NO: 3760511 - DNA, 25 bp, Homo sapien
gaccctggaggcagaggtccttttc

SEQ ID NO: 3760512 - DNA, 25 bp, Homo sapien
aggaccctggaggcagaggtccttt

SEQ ID NO: 3760513 - DNA, 25 bp, Homo sapien
ctggaggcagaggtccttttccttg

SEQ ID NO: 3760514 - DNA, 25 bp, Homo sapien
cacctggaatctccgtcttcagcgt

SEQ ID NO: 3760515 - DNA, 25 bp, Homo sapien
agcgtcttccatccctgagattcca

SEQ ID NO: 3760516 - DNA, 25 bp, Homo sapien
gaatctccgtcttcagcgtcttcca

SEQ ID NO: 3760517 - DNA, 25 bp, Homo sapien
gggccgcatcattccacctggaatc

SEQ ID NO: 3760518 - DNA, 25 bp, Homo sapien
aactttctggcttgcagtgtcctgg

SEQ ID NO: 3760519 - DNA, 25 bp, Homo sapien
tccttggagcatgcgaaccttggtg

SEQ ID NO: 3760520 - DNA, 25 bp, Homo sapien
gcaggcggcaagtttcactgactct

SEQ ID NO: 3760521 - DNA, 25 bp, Homo sapien
gtcctggatttgcaggcggcaagtt

SEQ ID NO: 3760522 - DNA, 25 bp, Homo sapien
ctgtggcctgaatgtgagtttctct

SEQ ID NO: 3760523 - DNA, 25 bp, Homo sapien
ggcctgaatgtgagtttctcttcac

SEQ ID NO: 3760524 - DNA, 25 bp, Homo sapien
cacattttggcttcaacactgaaca

SEQ ID NO: 3760525 - DNA, 25 bp, Homo sapien
aggtcagagtgagcccccggcaggc

SEQ ID NO: 3760526 - DNA, 25 bp, Homo sapien
gaggccagaacgtcatttggaattc

SEQ ID NO: 3760527 - DNA, 25 bp, Homo sapien
gttggggccgttcatccattcctca

SEQ ID NO: 3760528 - DNA, 25 bp, Homo sapien
catttggaattcttcggcctttaca

SEQ ID NO: 3760529 - DNA, 25 bp, Homo sapien
tcggcctttacatccaatgatacag

SEQ ID NO: 3760530 - DNA, 25 bp, Homo sapien
tccaacatgacgaagtagcgtacag

SEQ ID NO: 3760531 - DNA, 25 bp, Homo sapien
agaagccgccccgaggttccaacat

SEQ ID NO: 3760532 - DNA, 25 bp, Homo sapien
tgacgaagtagcgtacagttaaggg

SEQ ID NO: 3760533 - DNA, 25 bp, Homo sapien
gccccgaggttccaacatgacgaag

SEQ ID NO: 3760534 - DNA, 25 bp, Homo sapien
taacgtggccttgtcgcagcccttg

SEQ ID NO: 3760535 - DNA, 25 bp, Homo sapien
cacccataacgtggccttgtcgcag

SEQ ID NO: 3760536 - DNA, 25 bp, Homo sapien
ttcctcacccataacgtggccttgt

SEQ ID NO: 3760537 - DNA, 25 bp, Homo sapien
agcttcctcacccataacgtggcct

SEQ ID NO: 3760538 - DNA, 25 bp, Homo sapien
tccttgggcagtactgagggctccg

SEQ ID NO: 3760539 - DNA, 25 bp, Homo sapien
ttatataaacaagatcacttctggg

SEQ ID NO: 3760540 - DNA, 25 bp, Homo sapien
gaagacatccctttcttaggcgcta

SEQ ID NO: 3760541 - DNA, 25 bp, Homo sapien
gatgttgctggtgcatccatctgcc

SEQ ID NO: 3760542 - DNA, 25 bp, Homo sapien
cttagcttgtacttacttcctggaa

SEQ ID NO: 3760543 - DNA, 25 bp, Homo sapien
tgtacttacttcctggaacatgact

SEQ ID NO: 3760544 - DNA, 25 bp, Homo sapien
gtacttacttcctggaacatgactt

SEQ ID NO: 3760545 - DNA, 25 bp, Homo sapien
gcttgtacttacttcctggaacatg

SEQ ID NO: 3760546 - DNA, 25 bp, Homo sapien
tctctcttgcagagagcaagcccat

SEQ ID NO: 3760547 - DNA, 25 bp, Homo sapien
tccggaagatccctgcctatcctgc

SEQ ID NO: 3760548 - DNA, 25 bp, Homo sapien
ctcttgcagagagcaagcccatgat

SEQ ID NO: 3760549 - DNA, 25 bp, Homo sapien
tgatgttgtcctcatccggaagatc

SEQ ID NO: 3760550 - DNA, 25 bp, Homo sapien
ggcacggcgcctctggtagcacagc

SEQ ID NO: 3760551 - DNA, 25 bp, Homo sapien
ctcacagcgcctccccatggcacgg

SEQ ID NO: 3760552 - DNA, 25 bp, Homo sapien
ctcccgacggcacggcgcctctggt

SEQ ID NO: 3760553 - DNA, 25 bp, Homo sapien
agctcagcgtctcctcacagcgcct

SEQ ID NO: 3760554 - DNA, 25 bp, Homo sapien
tccccactgcacagcgcctcctcac

SEQ ID NO: 3760555 - DNA, 25 bp, Homo sapien
agcgcctccccacggcacagcgcct

SEQ ID NO: 3760556 - DNA, 25 bp, Homo sapien
gcctccccacggcacagcgcctccc

SEQ ID NO: 3760557 - DNA, 25 bp, Homo sapien
tccccacggcacagcgcctccccac

SEQ ID NO: 3760558 - DNA, 25 bp, Homo sapien
agttcagcgcctccccaaggcacag

SEQ ID NO: 3760559 - DNA, 25 bp, Homo sapien
gcctcgtcacagtttagtgcctgcc

SEQ ID NO: 3760560 - DNA, 25 bp, Homo sapien
agtgcctgcccacagttcagcgcct

SEQ ID NO: 3760561 - DNA, 25 bp, Homo sapien
tgcacagtgcctcgtcacagtttag

SEQ ID NO: 3760562 - DNA, 25 bp, Homo sapien
tgcacagcgcctcgtcacagtttag

SEQ ID NO: 3760563 - DNA, 25 bp, Homo sapien
acagcgcctcgtcacagtttagtgc

SEQ ID NO: 3760564 - DNA, 25 bp, Homo sapien
ctgcacagcgcctcgtcacagttta

SEQ ID NO: 3760565 - DNA, 25 bp, Homo sapien
gcacagcgcctcgtcacagtttagt

SEQ ID NO: 3760566 - DNA, 25 bp, Homo sapien
tcagtgtctcaccagtactcagcgc

SEQ ID NO: 3760567 - DNA, 25 bp, Homo sapien
cagttcagtgtctcaccagtactca

SEQ ID NO: 3760568 - DNA, 25 bp, Homo sapien
tcctcacagttcagtgtctcaccag

SEQ ID NO: 3760569 - DNA, 25 bp, Homo sapien
agtgtctcaccagtactcagcgcct

SEQ ID NO: 3760570 - DNA, 25 bp, Homo sapien
gggggcacggattgcagggaagttg

SEQ ID NO: 3760571 - DNA, 25 bp, Homo sapien
ctgggggcacggattgcagggaagt

SEQ ID NO: 3760572 - DNA, 25 bp, Homo sapien
ggggcacggattgcagggaagttgc

SEQ ID NO: 3760573 - DNA, 25 bp, Homo sapien
tgggggcacggattgcagggaagtt

SEQ ID NO: 3760574 - DNA, 25 bp, Homo sapien
ttattccattcaaacccgcgtcctg

SEQ ID NO: 3760575 - DNA, 25 bp, Homo sapien
tattccattcaaacccgcgtcctgt

SEQ ID NO: 3760576 - DNA, 25 bp, Homo sapien
tcaaccacgtaacgttcagttattc

SEQ ID NO: 3760577 - DNA, 25 bp, Homo sapien
ctgaaaatcaaccacgtaacgttca

SEQ ID NO: 3760578 - DNA, 25 bp, Homo sapien
ccccatggtatggtggtggctattt

SEQ ID NO: 3760579 - DNA, 25 bp, Homo sapien
tattcatccgaagaagtcgaagtct

SEQ ID NO: 3760580 - DNA, 25 bp, Homo sapien
gattggctgcaacacttggctttgg

SEQ ID NO: 3760581 - DNA, 25 bp, Homo sapien
tcagagagcttttagggtttttcag

SEQ ID NO: 3760582 - DNA, 25 bp, Homo sapien
ccctctctctagattttgagttgtc

SEQ ID NO: 3760583 - DNA, 25 bp, Homo sapien
cctctctctagattttgagttgtcc

SEQ ID NO: 3760584 - DNA, 25 bp, Homo sapien
ttccctctctctagattttgagttg

SEQ ID NO: 3760585 - DNA, 25 bp, Homo sapien
tctctctagattttgagttgtccat

SEQ ID NO: 3760586 - DNA, 25 bp, Homo sapien
ccactgagtagtccagcttttcaga

SEQ ID NO: 3760587 - DNA, 25 bp, Homo sapien
cttttcagagtggttggtgtcagtg

SEQ ID NO: 3760588 - DNA, 25 bp, Homo sapien
gctgggctcaactacaccaaatgct

SEQ ID NO: 3760589 - DNA, 25 bp, Homo sapien
ggcaggctgggctcaactacaccaa

SEQ ID NO: 3760590 - DNA, 25 bp, Homo sapien
aaaccaggccacctagtcaagtgag

SEQ ID NO: 3760591 - DNA, 25 bp, Homo sapien
ggaccagctagttctcaattaggca

SEQ ID NO: 3760592 - DNA, 25 bp, Homo sapien
aaagctcaactgtcttgggccgcac

SEQ ID NO: 3760593 - DNA, 25 bp, Homo sapien
actttgaggaagaactacattgccc

SEQ ID NO: 3760594 - DNA, 25 bp, Homo sapien
ctacgggactaaggagaagccattt

SEQ ID NO: 3760595 - DNA, 25 bp, Homo sapien
gaaacatccatcgatagcaggtgcc

SEQ ID NO: 3760596 - DNA, 25 bp, Homo sapien
cacgtgggtccggaattgaatcagc

SEQ ID NO: 3760597 - DNA, 25 bp, Homo sapien
caaagcatcgcttctcttgagaggc

SEQ ID NO: 3760598 - DNA, 25 bp, Homo sapien
tttgctggcttctaccgaaacacca

SEQ ID NO: 3760599 - DNA, 25 bp, Homo sapien
gagagcactgagcagacgtgcagca

SEQ ID NO: 3760600 - DNA, 25 bp, Homo sapien
gagcaagcctttggcggagagcact

SEQ ID NO: 3760601 - DNA, 25 bp, Homo sapien
tccctccgggatggttctgaagctt

SEQ ID NO: 3760602 - DNA, 25 bp, Homo sapien
tggcaggagacccgagcctgccaag

SEQ ID NO: 3760603 - DNA, 25 bp, Homo sapien
agacccgagcctgccaaggttgcac

SEQ ID NO: 3760604 - DNA, 25 bp, Homo sapien
gtatcccagcgacgggggacacgcc

SEQ ID NO: 3760605 - DNA, 25 bp, Homo sapien
tgggtgagcaaggtatcccagcgac

SEQ ID NO: 3760606 - DNA, 25 bp, Homo sapien
tgatggagattgtggtctaaatgcc

SEQ ID NO: 3760607 - DNA, 25 bp, Homo sapien
tttggacggcaagactgatggagat

SEQ ID NO: 3760608 - DNA, 25 bp, Homo sapien
atggcttcccgagaggcagaaggca

SEQ ID NO: 3760609 - DNA, 25 bp, Homo sapien
tgaccaccggatgttccacaagtac

SEQ ID NO: 3760610 - DNA, 25 bp, Homo sapien
ttctgccagacacacgtagcgcagc

SEQ ID NO: 3760611 - DNA, 25 bp, Homo sapien
atgtcgaacagctcctgcagtgcgg

SEQ ID NO: 3760612 - DNA, 25 bp, Homo sapien
tggccgggcatctggatgtcgaaca

SEQ ID NO: 3760613 - DNA, 25 bp, Homo sapien
tgcggcattggcgtcctcctggccc

SEQ ID NO: 3760614 - DNA, 25 bp, Homo sapien
tcgcccgtaggccgcggacagaagc

SEQ ID NO: 3760615 - DNA, 25 bp, Homo sapien
ccatggccaggtgcgcctggcaggc

SEQ ID NO: 3760616 - DNA, 25 bp, Homo sapien
gcctggcaggcgttggggaactgca

SEQ ID NO: 3760617 - DNA, 25 bp, Homo sapien
cctggtcggaggtgaagtccgtgcc

SEQ ID NO: 3760618 - DNA, 25 bp, Homo sapien
tccgccgcgcgcatcttggccttct

SEQ ID NO: 3760619 - DNA, 25 bp, Homo sapien
gaaggacctgagtgccagctccgcc

SEQ ID NO: 3760620 - DNA, 25 bp, Homo sapien
aaggacctgagtgccagctccgccg

SEQ ID NO: 3760621 - DNA, 25 bp, Homo sapien
agctccgccgcgcgcatcttggcct

SEQ ID NO: 3760622 - DNA, 25 bp, Homo sapien
cagtttgcacaagtggcccccattc

SEQ ID NO: 3760623 - DNA, 25 bp, Homo sapien
tgcaccagcgcgttcttgggcgcca

SEQ ID NO: 3760624 - DNA, 25 bp, Homo sapien
acactgtccggtactgcaggcccgg

SEQ ID NO: 3760625 - DNA, 25 bp, Homo sapien
accgctaccgcgaagaccggggcat

SEQ ID NO: 3760626 - DNA, 25 bp, Homo sapien
ggagggcggtggccgcgcggccagg

SEQ ID NO: 3760627 - DNA, 25 bp, Homo sapien
ccggagggcggtggccgcgcggcca

SEQ ID NO: 3760628 - DNA, 25 bp, Homo sapien
ggcggtggccgcgcggccaggttgc

SEQ ID NO: 3760629 - DNA, 25 bp, Homo sapien
ggtggccgcgcggccaggttgccca

SEQ ID NO: 3760630 - DNA, 25 bp, Homo sapien
aacgctttgccgctagctgcgctga

SEQ ID NO: 3760631 - DNA, 25 bp, Homo sapien
tagctgcgctgaatgcctcttcctg

SEQ ID NO: 3760632 - DNA, 25 bp, Homo sapien
tcttcctgactcaatgtcctacgac

SEQ ID NO: 3760633 - DNA, 25 bp, Homo sapien
atgtcctacgactctcagaattaaa

SEQ ID NO: 3760634 - DNA, 25 bp, Homo sapien
ttagaatgaggcatctgtgaactgt

SEQ ID NO: 3760635 - DNA, 25 bp, Homo sapien
tctgaggtctttgtgggcggcacca

SEQ ID NO: 3760636 - DNA, 25 bp, Homo sapien
aatgaggcatctgtgaactgtggct

SEQ ID NO: 3760637 - DNA, 25 bp, Homo sapien
tcagagagctgcacgtatccttcca

SEQ ID NO: 3760638 - DNA, 25 bp, Homo sapien
gcccacttcccgcaggtataggcat

SEQ ID NO: 3760639 - DNA, 25 bp, Homo sapien
aacgtggagttgttcggtccactca

SEQ ID NO: 3760640 - DNA, 25 bp, Homo sapien
gagttgttcggtccactcagcccag

SEQ ID NO: 3760641 - DNA, 25 bp, Homo sapien
atgggcttccagatgcggctcccag

SEQ ID NO: 3760642 - DNA, 25 bp, Homo sapien
gaaggttgacaatatgcttacttta

SEQ ID NO: 3760643 - DNA, 25 bp, Homo sapien
agggtgtcgtcatcctccgtgtttg

SEQ ID NO: 3760644 - DNA, 25 bp, Homo sapien
ggtgtcgtcatcctccgtgtttgtg

SEQ ID NO: 3760645 - DNA, 25 bp, Homo sapien
aggtgcttgaaaggagcgaggaagg

SEQ ID NO: 3760646 - DNA, 25 bp, Homo sapien
tgctcatccaacacggtgcagagcg

SEQ ID NO: 3760647 - DNA, 25 bp, Homo sapien
cactgattaagacgccccaggtgga

SEQ ID NO: 3760648 - DNA, 25 bp, Homo sapien
actgcagaggagacgccaacagaga

SEQ ID NO: 3760649 - DNA, 25 bp, Homo sapien
catgtgccattatgaacctggacca

SEQ ID NO: 3760650 - DNA, 25 bp, Homo sapien
tttagggggcatctgggtgcacatc

SEQ ID NO: 3760651 - DNA, 25 bp, Homo sapien
agcagcccttgcctggaaccacgtg

SEQ ID NO: 3760652 - DNA, 25 bp, Homo sapien
tggaaccacgtgcagccatgaagtg

SEQ ID NO: 3760653 - DNA, 25 bp, Homo sapien
cagttggcatctgcaacactgaggt

SEQ ID NO: 3760654 - DNA, 25 bp, Homo sapien
gagaattactacactgtcagggctg

SEQ ID NO: 3760655 - DNA, 25 bp, Homo sapien
catattacgaccgtttgggagaatt

SEQ ID NO: 3760656 - DNA, 25 bp, Homo sapien
gatatgccagcagtttttcatgcaa

SEQ ID NO: 3760657 - DNA, 25 bp, Homo sapien
ggaaagagatactcactggaataat

SEQ ID NO: 3760658 - DNA, 25 bp, Homo sapien
agaccatccctatctgcgtcctggg

SEQ ID NO: 3760659 - DNA, 25 bp, Homo sapien
tcctgggcagctgcgggaatccaat

SEQ ID NO: 3760660 - DNA, 25 bp, Homo sapien
caatgagacaaggaccgggagtgca

SEQ ID NO: 3760661 - DNA, 25 bp, Homo sapien
gcagctgcgggaatccaatgagaca

SEQ ID NO: 3760662 - DNA, 25 bp, Homo sapien
tggggcccctgaccacgattggaaa

SEQ ID NO: 3760663 - DNA, 25 bp, Homo sapien
gctggggcccctgaccacgattgga

SEQ ID NO: 3760664 - DNA, 25 bp, Homo sapien
ccgctggggcccctgaccacgattg

SEQ ID NO: 3760665 - DNA, 25 bp, Homo sapien
tcactgtctccaccggaaccttaac

SEQ ID NO: 3760666 - DNA, 25 bp, Homo sapien
agggcaggtgccagcgctgttcggg

SEQ ID NO: 3760667 - DNA, 25 bp, Homo sapien
gccttggaatcctctgacacttgga

SEQ ID NO: 3760668 - DNA, 25 bp, Homo sapien
gggcctccggtgatggtcccagctc

SEQ ID NO: 3760669 - DNA, 25 bp, Homo sapien
gctgttcggggcctccggtgatggt

SEQ ID NO: 3760670 - DNA, 25 bp, Homo sapien
tgaagaccgcggtgcattttaaacg

SEQ ID NO: 3760671 - DNA, 25 bp, Homo sapien
gaccgcggtgcattttaaacggcac

SEQ ID NO: 3760672 - DNA, 25 bp, Homo sapien
gcaaggaggctacactgtgtatccc

SEQ ID NO: 3760673 - DNA, 25 bp, Homo sapien
ttttaaacggcaccagcaaggaggc

SEQ ID NO: 3760674 - DNA, 25 bp, Homo sapien
agagatgctgcccatttgccggctg

SEQ ID NO: 3760675 - DNA, 25 bp, Homo sapien
tgcagagatgctgcccatttgccgg

SEQ ID NO: 3760676 - DNA, 25 bp, Homo sapien
agatgctgcccatttgccggctgcc

SEQ ID NO: 3760677 - DNA, 25 bp, Homo sapien
atgctgcccatttgccggctgccat

SEQ ID NO: 3760678 - DNA, 25 bp, Homo sapien
gatcgttgcgtcttcagaaactgct

SEQ ID NO: 3760679 - DNA, 25 bp, Homo sapien
tggaggatcgttgcgtcttcagaaa

SEQ ID NO: 3760680 - DNA, 25 bp, Homo sapien
tcttcagaaactgctcccagctccg

SEQ ID NO: 3760681 - DNA, 25 bp, Homo sapien
cctgcgtggaggatcgttgcgtctt

SEQ ID NO: 3760682 - DNA, 25 bp, Homo sapien
ctgaaataaagaaggctttggcggg

SEQ ID NO: 3760683 - DNA, 25 bp, Homo sapien
tttcccaggttgtctgaaataaaga

SEQ ID NO: 3760684 - DNA, 25 bp, Homo sapien
tgtgttggctagggatgttcccttt

SEQ ID NO: 3760685 - DNA, 25 bp, Homo sapien
tggctagggatgttcccttttccca

SEQ ID NO: 3760686 - DNA, 25 bp, Homo sapien
ggttcgatgacaccaacgccctttc

SEQ ID NO: 3760687 - DNA, 25 bp, Homo sapien
tcctacttcacagatgatgaatggg

SEQ ID NO: 3760688 - DNA, 25 bp, Homo sapien
gcacgtcccaggactggacgaggat

SEQ ID NO: 3760689 - DNA, 25 bp, Homo sapien
gaggattgccggctttcctacttca

SEQ ID NO: 3760690 - DNA, 25 bp, Homo sapien
aaagtccactgagtagcctctgatg

SEQ ID NO: 3760691 - DNA, 25 bp, Homo sapien
catactgatttgctgttctcgggac

SEQ ID NO: 3760692 - DNA, 25 bp, Homo sapien
caggactggcacagaccgagcggac

SEQ ID NO: 3760693 - DNA, 25 bp, Homo sapien
cagcacaggaacagccgggcagcac

SEQ ID NO: 3760694 - DNA, 25 bp, Homo sapien
aagcaggacgatgacctgcagtcac

SEQ ID NO: 3760695 - DNA, 25 bp, Homo sapien
gaagcaggacgatgacctgcagtca

SEQ ID NO: 3760696 - DNA, 25 bp, Homo sapien
ggaagcaggacgatgacctgcagtc

SEQ ID NO: 3760697 - DNA, 25 bp, Homo sapien
tctccggcgtccttctgagccactg

SEQ ID NO: 3760698 - DNA, 25 bp, Homo sapien
ttctacaagtgccattggaaggggt

SEQ ID NO: 3760699 - DNA, 25 bp, Homo sapien
tacaagtgccattggaaggggtccc

SEQ ID NO: 3760700 - DNA, 25 bp, Homo sapien
gtccgacgtctccggcgtccttctg

SEQ ID NO: 3760701 - DNA, 25 bp, Homo sapien
caagcgaaccttcttccactgagct

SEQ ID NO: 3760702 - DNA, 25 bp, Homo sapien
gagtgccgcctgatcacttggtgag

SEQ ID NO: 3760703 - DNA, 25 bp, Homo sapien
gagcttctgccttgagacgtctgtg

SEQ ID NO: 3760704 - DNA, 25 bp, Homo sapien
ctgcgtaaacaagcgaaccttcttc

SEQ ID NO: 3760705 - DNA, 25 bp, Homo sapien
tcagggggctgccctgcacagccat

SEQ ID NO: 3760706 - DNA, 25 bp, Homo sapien
gctcagggggctgccctgcacagcc

SEQ ID NO: 3760707 - DNA, 25 bp, Homo sapien
cggctcagggggctgccctgcacag

SEQ ID NO: 3760708 - DNA, 25 bp, Homo sapien
cagctcggctcagggggctgccctg

SEQ ID NO: 3760709 - DNA, 25 bp, Homo sapien
ggctgctgttgtggaagtcaggaga

SEQ ID NO: 3760710 - DNA, 25 bp, Homo sapien
gagagtccacgctgttagtgttgac

SEQ ID NO: 3760711 - DNA, 25 bp, Homo sapien
ccacgctgttagtgttgactgtttg

SEQ ID NO: 3760712 - DNA, 25 bp, Homo sapien
gaagtcaggagagtccacgctgtta

SEQ ID NO: 3760713 - DNA, 25 bp, Homo sapien
tgacagggaggtggtctaatctaaa

SEQ ID NO: 3760714 - DNA, 25 bp, Homo sapien
gcagggaacatgttgacagggaggt

SEQ ID NO: 3760715 - DNA, 25 bp, Homo sapien
atccagttagaacactcggagagct

SEQ ID NO: 3760716 - DNA, 25 bp, Homo sapien
ggtggtctaatctaaatccagttag

SEQ ID NO: 3760717 - DNA, 25 bp, Homo sapien
ctgagctgacggcactggtcttggg

SEQ ID NO: 3760718 - DNA, 25 bp, Homo sapien
agaggagcccgtaggtcacaatggc

SEQ ID NO: 3760719 - DNA, 25 bp, Homo sapien
gcccgtaggtcacaatggccttggt

SEQ ID NO: 3760720 - DNA, 25 bp, Homo sapien
gcagggagaggagcccgtaggtcac

SEQ ID NO: 3760721 - DNA, 25 bp, Homo sapien
ctgggagccatctactctggaaacc

SEQ ID NO: 3760722 - DNA, 25 bp, Homo sapien
gggagccatctactctggaaaccat

SEQ ID NO: 3760723 - DNA, 25 bp, Homo sapien
tgggagccatctactctggaaacca

SEQ ID NO: 3760724 - DNA, 25 bp, Homo sapien
cttgcccagcactgcttggtcctgg

SEQ ID NO: 3760725 - DNA, 25 bp, Homo sapien
ggcagtgtggctgctgcgtgttcat

SEQ ID NO: 3760726 - DNA, 25 bp, Homo sapien
tgcccagcactgcttggtcctggca

SEQ ID NO: 3760727 - DNA, 25 bp, Homo sapien
cccagcactgcttggtcctggcagt

SEQ ID NO: 3760728 - DNA, 25 bp, Homo sapien
ttatgcaggaattcttatattgctt

SEQ ID NO: 3760729 - DNA, 25 bp, Homo sapien
aattcttatattgcttactgtttgg

SEQ ID NO: 3760730 - DNA, 25 bp, Homo sapien
gaattcttatattgcttactgtttg

SEQ ID NO: 3760731 - DNA, 25 bp, Homo sapien
gcaggaattcttatattgcttactg

SEQ ID NO: 3760732 - DNA, 25 bp, Homo sapien
gcaggttcttcactatggggctcct

SEQ ID NO: 3760733 - DNA, 25 bp, Homo sapien
ggcaggttcttcactatggggctcc

SEQ ID NO: 3760734 - DNA, 25 bp, Homo sapien
aggcaggttcttcactatggggctc

SEQ ID NO: 3760735 - DNA, 25 bp, Homo sapien
cagatggaggcaggtccttcactgt

SEQ ID NO: 3760736 - DNA, 25 bp, Homo sapien
agatggaggcaggtccttcatcatg

SEQ ID NO: 3760737 - DNA, 25 bp, Homo sapien
gcagatggaggcaggtccttcatca

SEQ ID NO: 3760738 - DNA, 25 bp, Homo sapien
gacagaggcagtctcctcatgatgg

SEQ ID NO: 3760739 - DNA, 25 bp, Homo sapien
ggcagtctcctcatgatggggctcc

SEQ ID NO: 3760740 - DNA, 25 bp, Homo sapien
gctcagagattgctttttggagcca

SEQ ID NO: 3760741 - DNA, 25 bp, Homo sapien
tctttaaaactggtagcatctggct

SEQ ID NO: 3760742 - DNA, 25 bp, Homo sapien
ctggctcagagattgctttttggag

SEQ ID NO: 3760743 - DNA, 25 bp, Homo sapien
cagagcccacgatatacccccacat

SEQ ID NO: 3760744 - DNA, 25 bp, Homo sapien
tcaagagaacatgagcacagacttc

SEQ ID NO: 3760745 - DNA, 25 bp, Homo sapien
ggcaggtctgtaccggtttcctgaa

SEQ ID NO: 3760746 - DNA, 25 bp, Homo sapien
taagctatgagccaagtgttaactg

SEQ ID NO: 3760747 - DNA, 25 bp, Homo sapien
cactctggtccaagataagctatga

SEQ ID NO: 3760748 - DNA, 25 bp, Homo sapien
tgtgttcacatctaccgtttgctgg

SEQ ID NO: 3760749 - DNA, 25 bp, Homo sapien
ggatggtgcctcctgcacctgcaaa

SEQ ID NO: 3760750 - DNA, 25 bp, Homo sapien
cagcaccggactctgatgtcggatg

SEQ ID NO: 3760751 - DNA, 25 bp, Homo sapien
atctaccgtttgctggctccttttg

SEQ ID NO: 3760752 - DNA, 25 bp, Homo sapien
cctctgggtgtagtttgatccgaga

SEQ ID NO: 3760753 - DNA, 25 bp, Homo sapien
caccttcagatttggccgctgccac

SEQ ID NO: 3760754 - DNA, 25 bp, Homo sapien
tttgatccgagacagcagctttcca

SEQ ID NO: 3760755 - DNA, 25 bp, Homo sapien
tccagctgcgggaattcagtggcat

SEQ ID NO: 3760756 - DNA, 25 bp, Homo sapien
gagactggctctgacatagcgctgt

SEQ ID NO: 3760757 - DNA, 25 bp, Homo sapien
tcttcctgaaacgaaagccgtctgt

SEQ ID NO: 3760758 - DNA, 25 bp, Homo sapien
caccgcagggattgaaacgttcttc

SEQ ID NO: 3760759 - DNA, 25 bp, Homo sapien
gtcgaacacattaagctcaccaggg

SEQ ID NO: 3760760 - DNA, 25 bp, Homo sapien
gagccagtaacacctggagctgtga

SEQ ID NO: 3760761 - DNA, 25 bp, Homo sapien
tgctttatcctcaaggcacctgtgg

SEQ ID NO: 3760762 - DNA, 25 bp, Homo sapien
cacctgtgggctaagaggagccagt

SEQ ID NO: 3760763 - DNA, 25 bp, Homo sapien
tcgtaattgatgactggtgccttct

SEQ ID NO: 3760764 - DNA, 25 bp, Homo sapien
aaattccaggctcctgaagacgcct

SEQ ID NO: 3760765 - DNA, 25 bp, Homo sapien
tgcctgattgacagcccagaagctg

SEQ ID NO: 3760766 - DNA, 25 bp, Homo sapien
gctttcagtgtcctgcgtggtgact

SEQ ID NO: 3760767 - DNA, 25 bp, Homo sapien
aagacgcctgggctgcctgattgac

SEQ ID NO: 3760768 - DNA, 25 bp, Homo sapien
cggtaccaaagcaggtccatggatg

SEQ ID NO: 3760769 - DNA, 25 bp, Homo sapien
actgcacccggtaccaaagcaggtc

SEQ ID NO: 3760770 - DNA, 25 bp, Homo sapien
cccggtaccaaagcaggtccatgga

SEQ ID NO: 3760771 - DNA, 25 bp, Homo sapien
gcacccggtaccaaagcaggtccat

SEQ ID NO: 3760772 - DNA, 25 bp, Homo sapien
caagaacggacacaatagctgttgc

SEQ ID NO: 3760773 - DNA, 25 bp, Homo sapien
aaactgcaatcgtgaggaaacttcc

SEQ ID NO: 3760774 - DNA, 25 bp, Homo sapien
gaatagcctggtgagatctgcaata

SEQ ID NO: 3760775 - DNA, 25 bp, Homo sapien
tttcacagcgaaaggagacttctcg

SEQ ID NO: 3760776 - DNA, 25 bp, Homo sapien
tcagttgctgcaaaaagccagtctg

SEQ ID NO: 3760777 - DNA, 25 bp, Homo sapien
gaaataatgcatctggcgctggaca

SEQ ID NO: 3760778 - DNA, 25 bp, Homo sapien
gatgtggtctctaacagtgtagccc

SEQ ID NO: 3760779 - DNA, 25 bp, Homo sapien
tgtacgcgggcattatgtagccagc

SEQ ID NO: 3760780 - DNA, 25 bp, Homo sapien
ttgccccatttaacccgcatcctgc

SEQ ID NO: 3760781 - DNA, 25 bp, Homo sapien
gaaagtgtgtatgtgatgatgacgc

SEQ ID NO: 3760782 - DNA, 25 bp, Homo sapien
catttaacccgcatcctgcgttgtt

SEQ ID NO: 3760783 - DNA, 25 bp, Homo sapien
cctgcgttgttggaaagtgtgtatg

SEQ ID NO: 3760784 - DNA, 25 bp, Homo sapien
ttaggtccgtgcaggctcaaaagtg

SEQ ID NO: 3760785 - DNA, 25 bp, Homo sapien
ggctcaaaagtgctcaaatccaaat

SEQ ID NO: 3760786 - DNA, 25 bp, Homo sapien
gctcaaatccaaattaagctccaga

SEQ ID NO: 3760787 - DNA, 25 bp, Homo sapien
gtccgtgcaggctcaaaagtgctca

SEQ ID NO: 3760788 - DNA, 25 bp, Homo sapien
gcaaagtcaacgaggtagggattcc

SEQ ID NO: 3760789 - DNA, 25 bp, Homo sapien
gctacatctgtgagcccggtctgaa

SEQ ID NO: 3760790 - DNA, 25 bp, Homo sapien
tattgaacacctaccccatggtggg

SEQ ID NO: 3760791 - DNA, 25 bp, Homo sapien
tgaggacacccattgccgaatgatt

SEQ ID NO: 3760792 - DNA, 25 bp, Homo sapien
gacaccaagacgtcgatactgtcca

SEQ ID NO: 3760793 - DNA, 25 bp, Homo sapien
tggataccaagacatggagctgtct

SEQ ID NO: 3760794 - DNA, 25 bp, Homo sapien
ggacaccaagacgtcgatactgtcc

SEQ ID NO: 3760795 - DNA, 25 bp, Homo sapien
cactggacaacaagacatcgatgct

SEQ ID NO: 3760796 - DNA, 25 bp, Homo sapien
ccaacatatggatggtgtctacact

SEQ ID NO: 3760797 - DNA, 25 bp, Homo sapien
tacactggacaccaagatgtcaatg

SEQ ID NO: 3760798 - DNA, 25 bp, Homo sapien
gtctacactggataccaagaagttt

SEQ ID NO: 3760799 - DNA, 25 bp, Homo sapien
tgcttgtgaccagcgtgcattctcg

SEQ ID NO: 3760800 - DNA, 25 bp, Homo sapien
gaccagcgtgcattctcgacataca

SEQ ID NO: 3760801 - DNA, 25 bp, Homo sapien
tgcattctcgacatacacgcttcag

SEQ ID NO: 3760802 - DNA, 25 bp, Homo sapien
tacacgcttcagaccaaatgtctgc

SEQ ID NO: 3760803 - DNA, 25 bp, Homo sapien
gatggatccgaaactccccgatcag

SEQ ID NO: 3760804 - DNA, 25 bp, Homo sapien
tgagaggccaacccgttagaaaagc

SEQ ID NO: 3760805 - DNA, 25 bp, Homo sapien
tccagcagcgagagcgatggatccg

SEQ ID NO: 3760806 - DNA, 25 bp, Homo sapien
cagatcagaagatactgtgttggcc

SEQ ID NO: 3760807 - DNA, 25 bp, Homo sapien
ctgtggaaacgtagcctgtgaggac

SEQ ID NO: 3760808 - DNA, 25 bp, Homo sapien
tgtttgccttggaatgcgtctgctt

SEQ ID NO: 3760809 - DNA, 25 bp, Homo sapien
tggaatgcgtctgcttcatctgtgg

SEQ ID NO: 3760810 - DNA, 25 bp, Homo sapien
tgaggacggagctctgcactccaag

SEQ ID NO: 3760811 - DNA, 25 bp, Homo sapien
gatggagccttccatgtaacatctg

SEQ ID NO: 3760812 - DNA, 25 bp, Homo sapien
ggagccttccatgtaacatctgcat

SEQ ID NO: 3760813 - DNA, 25 bp, Homo sapien
ggacctccccaaggggtgtcagatg

SEQ ID NO: 3760814 - DNA, 25 bp, Homo sapien
gtgtcagatggagccttccatgtaa

SEQ ID NO: 3760815 - DNA, 25 bp, Homo sapien
cacttgggaaaagctcgcattggca

SEQ ID NO: 3760816 - DNA, 25 bp, Homo sapien
ttccacttcagaagaggctctactg

SEQ ID NO: 3760817 - DNA, 25 bp, Homo sapien
ctgggaattccacttcagaagaggc

SEQ ID NO: 3760818 - DNA, 25 bp, Homo sapien
tgagcacttgggaaaagctcgcatt

SEQ ID NO: 3760819 - DNA, 25 bp, Homo sapien
cagaggcttcgtctggaatagcacc

SEQ ID NO: 3760820 - DNA, 25 bp, Homo sapien
atttgcttaaagaacctgccagagg

SEQ ID NO: 3760821 - DNA, 25 bp, Homo sapien
cggtctcattcatctctatcacgag

SEQ ID NO: 3760822 - DNA, 25 bp, Homo sapien
tctggaatagcacctcggtctcatt

SEQ ID NO: 3760823 - DNA, 25 bp, Homo sapien
ttgcttcttcggcaaggtcggccct

SEQ ID NO: 3760824 - DNA, 25 bp, Homo sapien
tgcctcccattaggttagatcctcg

SEQ ID NO: 3760825 - DNA, 25 bp, Homo sapien
ggcttttggacaagccctgcgccat

SEQ ID NO: 3760826 - DNA, 25 bp, Homo sapien
tagatcctcgaatgaggcttttgga

SEQ ID NO: 3760827 - DNA, 25 bp, Homo sapien
gagccactaccaccttttaatcacg

SEQ ID NO: 3760828 - DNA, 25 bp, Homo sapien
gccactaccaccttttaatcacgac

SEQ ID NO: 3760829 - DNA, 25 bp, Homo sapien
agccactaccaccttttaatcacga

SEQ ID NO: 3760830 - DNA, 25 bp, Homo sapien
tgagccactaccaccttttaatcac

SEQ ID NO: 3760831 - DNA, 25 bp, Homo sapien
tcaccacacacgcattcctagaagt

SEQ ID NO: 3760832 - DNA, 25 bp, Homo sapien
tattttatggatatgcaggttgaag

SEQ ID NO: 3760833 - DNA, 25 bp, Homo sapien
aagggaggctagtccacgttcacca

SEQ ID NO: 3760834 - DNA, 25 bp, Homo sapien
tctgtcagcggacgggaccctcatg

SEQ ID NO: 3760835 - DNA, 25 bp, Homo sapien
tttttccccagacggcaatgtcgct

SEQ ID NO: 3760836 - DNA, 25 bp, Homo sapien
tagatttgctcgtgcactttacggc

SEQ ID NO: 3760837 - DNA, 25 bp, Homo sapien
tcgctgatggcgagattccgggcca

SEQ ID NO: 3760838 - DNA, 25 bp, Homo sapien
agcctcggcgctgcaaagtaattcc

SEQ ID NO: 3760839 - DNA, 25 bp, Homo sapien
tttctcggtggccaacgtggtcagg

SEQ ID NO: 3760840 - DNA, 25 bp, Homo sapien
tcagtctatgccaccgagggcacgt

SEQ ID NO: 3760841 - DNA, 25 bp, Homo sapien
aatttgaaccccatgatcacagccg

SEQ ID NO: 3760842 - DNA, 25 bp, Homo sapien
gaatagcaccattttacccagaagg

SEQ ID NO: 3760843 - DNA, 25 bp, Homo sapien
ttcctgaccgtggagtagagccgtc

SEQ ID NO: 3760844 - DNA, 25 bp, Homo sapien
ttttcacacgggacgtggactagct

SEQ ID NO: 3760845 - DNA, 25 bp, Homo sapien
ttgcctgagagaccacccttctgga

SEQ ID NO: 3760846 - DNA, 25 bp, Homo sapien
tgctcaggacggtcatgaaacccca

SEQ ID NO: 3760847 - DNA, 25 bp, Homo sapien
ggccgggcacagcaggtggtggcag

SEQ ID NO: 3760848 - DNA, 25 bp, Homo sapien
ggtggcaggaggataatgccggggc

SEQ ID NO: 3760849 - DNA, 25 bp, Homo sapien
ccgggcacagcaggtggtggcagga

SEQ ID NO: 3760850 - DNA, 25 bp, Homo sapien
ggtggtggcaggaggataatgccgg

SEQ ID NO: 3760851 - DNA, 25 bp, Homo sapien
tattacctgttcgtgggtgtgggca

SEQ ID NO: 3760852 - DNA, 25 bp, Homo sapien
cctatggtgactgtgctgcactcca

SEQ ID NO: 3760853 - DNA, 25 bp, Homo sapien
aagagagtttcagtgagctcccgcg

SEQ ID NO: 3760854 - DNA, 25 bp, Homo sapien
gcagtcagcagaacggccagtgcta

SEQ ID NO: 3760855 - DNA, 25 bp, Homo sapien
catctcccgatagccattccgatgg

SEQ ID NO: 3760856 - DNA, 25 bp, Homo sapien
gcatccatcggctaatgccaggcaa

SEQ ID NO: 3760857 - DNA, 25 bp, Homo sapien
gcaaagccggataagccctctgcat

SEQ ID NO: 3760858 - DNA, 25 bp, Homo sapien
gatggaaggccctgacaaacgactc

SEQ ID NO: 3760859 - DNA, 25 bp, Homo sapien
gagagatgctgcgcaggtgtataca

SEQ ID NO: 3760860 - DNA, 25 bp, Homo sapien
ggagagatgctgcgcaggtgtatac

SEQ ID NO: 3760861 - DNA, 25 bp, Homo sapien
tgggagagatgctgcgcaggtgtat

SEQ ID NO: 3760862 - DNA, 25 bp, Homo sapien
gggagagatgctgcgcaggtgtata

SEQ ID NO: 3760863 - DNA, 25 bp, Homo sapien
aaatgcgtgggttgcagttgaagcc

SEQ ID NO: 3760864 - DNA, 25 bp, Homo sapien
cagatgtgaattgccgtccagtaag

SEQ ID NO: 3760865 - DNA, 25 bp, Homo sapien
ttgaagccacagatgtgaattgccg

SEQ ID NO: 3760866 - DNA, 25 bp, Homo sapien
gaattgccgtccagtaagtgtaggg

SEQ ID NO: 3760867 - DNA, 25 bp, Homo sapien
tgtaccaaatagacaggtgctctga

SEQ ID NO: 3760868 - DNA, 25 bp, Homo sapien
caaatcgaaggtcctgccgggcttc

SEQ ID NO: 3760869 - DNA, 25 bp, Homo sapien
tgtctccgggacacaatgtaccaaa

SEQ ID NO: 3760870 - DNA, 25 bp, Homo sapien
aggtccagcgatggccaaatcgaag

SEQ ID NO: 3760871 - DNA, 25 bp, Homo sapien
ggagcttcctggaccccgtgactct

SEQ ID NO: 3760872 - DNA, 25 bp, Homo sapien
taaagcagctgcaagcagctgagtt

SEQ ID NO: 3760873 - DNA, 25 bp, Homo sapien
gactctggaaccctcacgtctccat

SEQ ID NO: 3760874 - DNA, 25 bp, Homo sapien
cttttaaagcagctgcaagcagctg

SEQ ID NO: 3760875 - DNA, 25 bp, Homo sapien
tcttgcccatgcaaccaggattgcc

SEQ ID NO: 3760876 - DNA, 25 bp, Homo sapien
tcccgatgtggcctagagccgcttt

SEQ ID NO: 3760877 - DNA, 25 bp, Homo sapien
caggattgccacatcgtgtctttgc

SEQ ID NO: 3760878 - DNA, 25 bp, Homo sapien
gaatctcatgcaccgtaccctagaa

SEQ ID NO: 3760879 - DNA, 25 bp, Homo sapien
tgtgagcgtgttcggctcatgctgc

SEQ ID NO: 3760880 - DNA, 25 bp, Homo sapien
tccgggcccctagatctggccattc

SEQ ID NO: 3760881 - DNA, 25 bp, Homo sapien
ccattctcctgtgagcgtgttcggc

SEQ ID NO: 3760882 - DNA, 25 bp, Homo sapien
gtgttcggctcatgctgccaatcca

SEQ ID NO: 3760883 - DNA, 25 bp, Homo sapien
ctcgcaggcgtgaacccagtgcggt

SEQ ID NO: 3760884 - DNA, 25 bp, Homo sapien
tggctttagcatgggtctctgcacc

SEQ ID NO: 3760885 - DNA, 25 bp, Homo sapien
ccagtgcggtgggatgggtggtgcc

SEQ ID NO: 3760886 - DNA, 25 bp, Homo sapien
tctttctcccaacgtgctttgagct

SEQ ID NO: 3760887 - DNA, 25 bp, Homo sapien
acaatccttccatcaatctgtcggg

SEQ ID NO: 3760888 - DNA, 25 bp, Homo sapien
tggccacaatccttccatcaatctg

SEQ ID NO: 3760889 - DNA, 25 bp, Homo sapien
aatccttccatcaatctgtcgggac

SEQ ID NO: 3760890 - DNA, 25 bp, Homo sapien
aatctgtcgggacccaaagcaaact

SEQ ID NO: 3760891 - DNA, 25 bp, Homo sapien
agggcactgctgacttcgaggctgc

SEQ ID NO: 3760892 - DNA, 25 bp, Homo sapien
aaaatgaaaggacggtcagcccctg

SEQ ID NO: 3760893 - DNA, 25 bp, Homo sapien
gcatggaggcttcgtgcttgtgcct

SEQ ID NO: 3760894 - DNA, 25 bp, Homo sapien
gcttgtgcctcttagctctgcccag

SEQ ID NO: 3760895 - DNA, 25 bp, Homo sapien
agcgaacacacggtccagctgcggg

SEQ ID NO: 3760896 - DNA, 25 bp, Homo sapien
ctagatggagcttgggaccacggct

SEQ ID NO: 3760897 - DNA, 25 bp, Homo sapien
gcaaccaaacttctcaccagtcaac

SEQ ID NO: 3760898 - DNA, 25 bp, Homo sapien
acagaaaagcagcaccgatggtcca

SEQ ID NO: 3760899 - DNA, 25 bp, Homo sapien
acacacagcctgtgtcatgaacccc

SEQ ID NO: 3760900 - DNA, 25 bp, Homo sapien
gcccatcgtgtggcaccagacacac

SEQ ID NO: 3760901 - DNA, 25 bp, Homo sapien
ttgctgtttcttgcccatcgtgtgg

SEQ ID NO: 3760902 - DNA, 25 bp, Homo sapien
cacctgcacctgcgaggtgctgggt

SEQ ID NO: 3760903 - DNA, 25 bp, Homo sapien
ctgggctgattaaccacggctttct

SEQ ID NO: 3760904 - DNA, 25 bp, Homo sapien
cgaggtgctgggtagaatgcccagt

SEQ ID NO: 3760905 - DNA, 25 bp, Homo sapien
tgggctgattaaccacggctttctc

SEQ ID NO: 3760906 - DNA, 25 bp, Homo sapien
tatacacacaggtactcgtttacag

SEQ ID NO: 3760907 - DNA, 25 bp, Homo sapien
tcacgccgcacacaggtacctatgt

SEQ ID NO: 3760908 - DNA, 25 bp, Homo sapien
tcactgcaagcgactttgaaacctg

SEQ ID NO: 3760909 - DNA, 25 bp, Homo sapien
ggctttatttctaggacagacttga

SEQ ID NO: 3760910 - DNA, 25 bp, Homo sapien
ctccagtgaggcagcatgtcacaga

SEQ ID NO: 3760911 - DNA, 25 bp, Homo sapien
tcaacagaaggcgaattccttggcc

SEQ ID NO: 3760912 - DNA, 25 bp, Homo sapien
gacacctctgaggttaccgctggtg

SEQ ID NO: 3760913 - DNA, 25 bp, Homo sapien
gaggaaggacgaacttctcaacaga

SEQ ID NO: 3760914 - DNA, 25 bp, Homo sapien
tatcaagtccacagattaagctggg

SEQ ID NO: 3760915 - DNA, 25 bp, Homo sapien
agcaaagaaggtagagagagctccc

SEQ ID NO: 3760916 - DNA, 25 bp, Homo sapien
tttcagactgcctcattcacgtagc

SEQ ID NO: 3760917 - DNA, 25 bp, Homo sapien
gagagtgtcttggatccacattgga

SEQ ID NO: 3760918 - DNA, 25 bp, Homo sapien
caatcaaacgcagaaagatggcacc

SEQ ID NO: 3760919 - DNA, 25 bp, Homo sapien
aagagtcacccttctgcggctggaa

SEQ ID NO: 3760920 - DNA, 25 bp, Homo sapien
gcggctggaacatcgcctggatgaa

SEQ ID NO: 3760921 - DNA, 25 bp, Homo sapien
tctatgcctgataccgagctcggaa

SEQ ID NO: 3760922 - DNA, 25 bp, Homo sapien
cctccaggggagaacgtatggtgga

SEQ ID NO: 3760923 - DNA, 25 bp, Homo sapien
gagaacgtatggtggaaaggtgcgg

SEQ ID NO: 3760924 - DNA, 25 bp, Homo sapien
gaacgtatggtggaaaggtgcggac

SEQ ID NO: 3760925 - DNA, 25 bp, Homo sapien
gggagaacgtatggtggaaaggtgc

SEQ ID NO: 3760926 - DNA, 25 bp, Homo sapien
ccatggtcggggcatccacgatcag

SEQ ID NO: 3760927 - DNA, 25 bp, Homo sapien
tcagggcatccatggtcggggcatc

SEQ ID NO: 3760928 - DNA, 25 bp, Homo sapien
gggcatccacgatcagggcatccat

SEQ ID NO: 3760929 - DNA, 25 bp, Homo sapien
gtcggggcatccacgatcagggcat

SEQ ID NO: 3760930 - DNA, 25 bp, Homo sapien
gggcatccatggtcaaggcatccac

SEQ ID NO: 3760931 - DNA, 25 bp, Homo sapien
catccatggtcaaggcatccacgga

SEQ ID NO: 3760932 - DNA, 25 bp, Homo sapien
gtagggtgtccactgttggggcatc

SEQ ID NO: 3760933 - DNA, 25 bp, Homo sapien
ccatggtcaaggcatccacggaggg

SEQ ID NO: 3760934 - DNA, 25 bp, Homo sapien
cactaagcactgttaaaagggttcg

SEQ ID NO: 3760935 - DNA, 25 bp, Homo sapien
actgttaaaagggttcgctgctgag

SEQ ID NO: 3760936 - DNA, 25 bp, Homo sapien
taaaagggttcgctgctgagggtct

SEQ ID NO: 3760937 - DNA, 25 bp, Homo sapien
ggttcgctgctgagggtctacagct

SEQ ID NO: 3760938 - DNA, 25 bp, Homo sapien
ctgtggtggggtgccatccacgcat

SEQ ID NO: 3760939 - DNA, 25 bp, Homo sapien
tgtggtggggtgccatccacgcatc

SEQ ID NO: 3760940 - DNA, 25 bp, Homo sapien
gtggtggggtgccatccacgcatcc

SEQ ID NO: 3760941 - DNA, 25 bp, Homo sapien
tggtggggtgccatccacgcatcca

SEQ ID NO: 3760942 - DNA, 25 bp, Homo sapien
ttccggaagatcctgacagcaagcc

SEQ ID NO: 3760943 - DNA, 25 bp, Homo sapien
ccattgcttggaccgaaacgggtcg

SEQ ID NO: 3760944 - DNA, 25 bp, Homo sapien
tgatgctgagctacacacaattccg

SEQ ID NO: 3760945 - DNA, 25 bp, Homo sapien
caaatatccgtggagaaacgggtgg

SEQ ID NO: 3760946 - DNA, 25 bp, Homo sapien
ttcagacaggtttgcattggccaca

SEQ ID NO: 3760947 - DNA, 25 bp, Homo sapien
tcaatgaccaagtggaagataggcc

SEQ ID NO: 3760948 - DNA, 25 bp, Homo sapien
tggtggccatcggacagaatccagg

SEQ ID NO: 3760949 - DNA, 25 bp, Homo sapien
tattgtgtcttagccagagagctgg

SEQ ID NO: 3760950 - DNA, 25 bp, Homo sapien
tcactgcaatccttgtgggtcacag

SEQ ID NO: 3760951 - DNA, 25 bp, Homo sapien
tgggtcacagtgagaaaagttcagt

SEQ ID NO: 3760952 - DNA, 25 bp, Homo sapien
caaagctgatcggtgtccaaggaac

SEQ ID NO: 3760953 - DNA, 25 bp, Homo sapien
ctgctgaatgcacaccacgggtggt

SEQ ID NO: 3760954 - DNA, 25 bp, Homo sapien
atttgcttaggcacaaactgtagta

SEQ ID NO: 3760955 - DNA, 25 bp, Homo sapien
tatctatctagtcaatactcagtca

SEQ ID NO: 3760956 - DNA, 25 bp, Homo sapien
cagctactacagaacccagataaat

SEQ ID NO: 3760957 - DNA, 25 bp, Homo sapien
caagaattatttgatgtcgacccga

SEQ ID NO: 3760958 - DNA, 25 bp, Homo sapien
cataaagccagaccgaaaaagctgt

SEQ ID NO: 3760959 - DNA, 25 bp, Homo sapien
tcagtaaaaagtccagggtgaccat

SEQ ID NO: 3760960 - DNA, 25 bp, Homo sapien
tcaggttcttgtgattccacgcagc

SEQ ID NO: 3760961 - DNA, 25 bp, Homo sapien
gacggagatgcatactatagccaaa

SEQ ID NO: 3760962 - DNA, 25 bp, Homo sapien
ggctggggtcctcgtctttttctga

SEQ ID NO: 3760963 - DNA, 25 bp, Homo sapien
cttgtgcttctgcaccaagcacgaa

SEQ ID NO: 3760964 - DNA, 25 bp, Homo sapien
tgcttctgcaccaagcacgaatctg

SEQ ID NO: 3760965 - DNA, 25 bp, Homo sapien
tgtgcttctgcaccaagcacgaatc

SEQ ID NO: 3760966 - DNA, 25 bp, Homo sapien
gattgcacacgcatggattccctgc

SEQ ID NO: 3760967 - DNA, 25 bp, Homo sapien
actccttgtctgtcccgttgtaccg

SEQ ID NO: 3760968 - DNA, 25 bp, Homo sapien
caccgtgagccgtaactgctttgaa

SEQ ID NO: 3760969 - DNA, 25 bp, Homo sapien
tctctgtcatcagtgcgattgcaca

SEQ ID NO: 3760970 - DNA, 25 bp, Homo sapien
cgtggctccgagcacagccccacag

SEQ ID NO: 3760971 - DNA, 25 bp, Homo sapien
ccgtggctccgagcacagccccaca

SEQ ID NO: 3760972 - DNA, 25 bp, Homo sapien
gccagcccattagctctccctgctt

SEQ ID NO: 3760973 - DNA, 25 bp, Homo sapien
gctgcccgaggatttttgtcatgca

SEQ ID NO: 3760974 - DNA, 25 bp, Homo sapien
tcgtgttcccgcaggaaagctgccc

SEQ ID NO: 3760975 - DNA, 25 bp, Homo sapien
catggtctgccgcatctggggtatc

SEQ ID NO: 3760976 - DNA, 25 bp, Homo sapien
agctccacgaagagctgtgcagggc

SEQ ID NO: 3760977 - DNA, 25 bp, Homo sapien
ctgaggagatgataccacgcgtgtc

SEQ ID NO: 3760978 - DNA, 25 bp, Homo sapien
tcctcatcagggcttcaccaggatc

SEQ ID NO: 3760979 - DNA, 25 bp, Homo sapien
atgataccacgcgtgtctcccaggg

SEQ ID NO: 3760980 - DNA, 25 bp, Homo sapien
ctttgctgcttctggtaacatgcat

SEQ ID NO: 3760981 - DNA, 25 bp, Homo sapien
tctggtaacatgcatttgcctgcag

SEQ ID NO: 3760982 - DNA, 25 bp, Homo sapien
gctcagggcacgtggaaggaggtgt

SEQ ID NO: 3760983 - DNA, 25 bp, Homo sapien
gatagaatcgggacagggccaactt

SEQ ID NO: 3760984 - DNA, 25 bp, Homo sapien
gccttgttcaggaggtttgggttca

SEQ ID NO: 3760985 - DNA, 25 bp, Homo sapien
tcattcaagtcggaaagcccctgaa

SEQ ID NO: 3760986 - DNA, 25 bp, Homo sapien
tctgctgtctgcaagatttcagaag

SEQ ID NO: 3760987 - DNA, 25 bp, Homo sapien
aagcaatgggccttgttcaggaggt

SEQ ID NO: 3760988 - DNA, 25 bp, Homo sapien
gtccaggatccatccctgaaggttt

SEQ ID NO: 3760989 - DNA, 25 bp, Homo sapien
aggtgcttctgagtccaggatccat

SEQ ID NO: 3760990 - DNA, 25 bp, Homo sapien
gcttctgagtccaggatccatccct

SEQ ID NO: 3760991 - DNA, 25 bp, Homo sapien
tgagtccaggatccatccctgaagg

SEQ ID NO: 3760992 - DNA, 25 bp, Homo sapien
tgggagtggggtcttcatgactcac

SEQ ID NO: 3760993 - DNA, 25 bp, Homo sapien
gtctgggagtggggtcttcatgact

SEQ ID NO: 3760994 - DNA, 25 bp, Homo sapien
tctgggagtggggtcttcatgactc

SEQ ID NO: 3760995 - DNA, 25 bp, Homo sapien
ttatggggttaggatgagcagatgt

SEQ ID NO: 3760996 - DNA, 25 bp, Homo sapien
cctctgcatggaaggttacacagct

SEQ ID NO: 3760997 - DNA, 25 bp, Homo sapien
agctccacgcctgcaccgggaggga

SEQ ID NO: 3760998 - DNA, 25 bp, Homo sapien
ggagggagaccttgcgactcgccat

SEQ ID NO: 3760999 - DNA, 25 bp, Homo sapien
gaagcctctgcatggaaggttacac

SEQ ID NO: 3761000 - DNA, 25 bp, Homo sapien
cattgtcttttgaatccggtttcct

SEQ ID NO: 3761001 - DNA, 25 bp, Homo sapien
cagtggtcttctcacaagcaggcat

SEQ ID NO: 3761002 - DNA, 25 bp, Homo sapien
tcttgatttgtagcgtctttggcca

SEQ ID NO: 3761003 - DNA, 25 bp, Homo sapien
tttcctaatgtagcctttgagacgt

SEQ ID NO: 3761004 - DNA, 25 bp, Homo sapien
aaaattaatcttgttacttgatgaa

SEQ ID NO: 3761005 - DNA, 25 bp, Homo sapien
tggtgtttgaaaatcgatcccgtgg

SEQ ID NO: 3761006 - DNA, 25 bp, Homo sapien
tgtttgaaaatcgatcccgtggcct

SEQ ID NO: 3761007 - DNA, 25 bp, Homo sapien
ttgaaaatcgatcccgtggcctggt

SEQ ID NO: 3761008 - DNA, 25 bp, Homo sapien
gccagggtcttcacggctgctttac

SEQ ID NO: 3761009 - DNA, 25 bp, Homo sapien
gagattgcagctggcaacacggctc

SEQ ID NO: 3761010 - DNA, 25 bp, Homo sapien
gcccctgtgggaggaatgagacagg

SEQ ID NO: 3761011 - DNA, 25 bp, Homo sapien
cagggagcggcgtttagagattgca

SEQ ID NO: 3761012 - DNA, 25 bp, Homo sapien
aatattgcaagaggtgacattttgc

SEQ ID NO: 3761013 - DNA, 25 bp, Homo sapien
gttgacgttgacataaaataattca

SEQ ID NO: 3761014 - DNA, 25 bp, Homo sapien
gacattttgctgtatgtgttcagat

SEQ ID NO: 3761015 - DNA, 25 bp, Homo sapien
ccaaacgaatgttgacgttgacata

SEQ ID NO: 3761016 - DNA, 25 bp, Homo sapien
gggtccagagaaatcgtctccatct

SEQ ID NO: 3761017 - DNA, 25 bp, Homo sapien
agttcagcggcatgagagcacccct

SEQ ID NO: 3761018 - DNA, 25 bp, Homo sapien
catctgcccccttgtcgaagttcag

SEQ ID NO: 3761019 - DNA, 25 bp, Homo sapien
tccagagaaatcgtctccatctgcc

SEQ ID NO: 3761020 - DNA, 25 bp, Homo sapien
acttcttgtttatgcaggcaagtgg

SEQ ID NO: 3761021 - DNA, 25 bp, Homo sapien
gtgacttcttgtttatgcaggcaag

SEQ ID NO: 3761022 - DNA, 25 bp, Homo sapien
aagtgacttcttgtttatgcaggca

SEQ ID NO: 3761023 - DNA, 25 bp, Homo sapien
gacttcttgtttatgcaggcaagtg

SEQ ID NO: 3761024 - DNA, 25 bp, Homo sapien
ggcactgataccctaaccgtaagct

SEQ ID NO: 3761025 - DNA, 25 bp, Homo sapien
caccctggagacgtgatggttttct

SEQ ID NO: 3761026 - DNA, 25 bp, Homo sapien
caccctgttagagggcaccacgtgg

SEQ ID NO: 3761027 - DNA, 25 bp, Homo sapien
tctggcccttattgaggtagagata

SEQ ID NO: 3761028 - DNA, 25 bp, Homo sapien
ctaagggccaaacggacaatcagtt

SEQ ID NO: 3761029 - DNA, 25 bp, Homo sapien
acagacgcactgcactgattcacac

SEQ ID NO: 3761030 - DNA, 25 bp, Homo sapien
gttaaacagacgcactgcactgatt

SEQ ID NO: 3761031 - DNA, 25 bp, Homo sapien
caaacggacaatcagttaaacagac

SEQ ID NO: 3761032 - DNA, 25 bp, Homo sapien
gcccggggaaggacagcgagggcgc

SEQ ID NO: 3761033 - DNA, 25 bp, Homo sapien
gcaggaaccgagtcacccctgttta

SEQ ID NO: 3761034 - DNA, 25 bp, Homo sapien
ttagatatggatacacgaatcccat

SEQ ID NO: 3761035 - DNA, 25 bp, Homo sapien
tctgcaggaaccgagtcacccctgt

SEQ ID NO: 3761036 - DNA, 25 bp, Homo sapien
gtcacccctgtttagatatggatac

SEQ ID NO: 3761037 - DNA, 25 bp, Homo sapien
aaaattgtacaacactaggtcccag

SEQ ID NO: 3761038 - DNA, 25 bp, Homo sapien
gaacgttgctttgccgcgatgtaaa

SEQ ID NO: 3761039 - DNA, 25 bp, Homo sapien
taacagtctccataacctccaagtg

SEQ ID NO: 3761040 - DNA, 25 bp, Homo sapien
caagtgctactattttccgaacgcc

SEQ ID NO: 3761041 - DNA, 25 bp, Homo sapien
ggagccagatgtcaccacactggga

SEQ ID NO: 3761042 - DNA, 25 bp, Homo sapien
ggtagccccggcatgctttatttca

SEQ ID NO: 3761043 - DNA, 25 bp, Homo sapien
gatacatacagctgcctttgtggca

SEQ ID NO: 3761044 - DNA, 25 bp, Homo sapien
tcagagtcacacatagaaaaggagc

SEQ ID NO: 3761045 - DNA, 25 bp, Homo sapien
tccttaacagtctctcatacacacg

SEQ ID NO: 3761046 - DNA, 25 bp, Homo sapien
ttaacagtctctcatacacacgtgg

SEQ ID NO: 3761047 - DNA, 25 bp, Homo sapien
taatagagccacactaaattcctta

SEQ ID NO: 3761048 - DNA, 25 bp, Homo sapien
cagtgtcttcagttagcacctaata

SEQ ID NO: 3761049 - DNA, 25 bp, Homo sapien
tagcattgactaacttcagcgcggc

SEQ ID NO: 3761050 - DNA, 25 bp, Homo sapien
tatttctccaaggacgagccctgtg

SEQ ID NO: 3761051 - DNA, 25 bp, Homo sapien
gcatgactgacgcttcctggcaagg

SEQ ID NO: 3761052 - DNA, 25 bp, Homo sapien
caatgtttacaaatcgacgggcacc

SEQ ID NO: 3761053 - DNA, 25 bp, Homo sapien
gctcacaacggacaagcccggagac

SEQ ID NO: 3761054 - DNA, 25 bp, Homo sapien
gccagcaccccaaagtgaagctgct

SEQ ID NO: 3761055 - DNA, 25 bp, Homo sapien
gggatctgaactcccgagcgccctg

SEQ ID NO: 3761056 - DNA, 25 bp, Homo sapien
caagcccggagaccccatgagaggc

SEQ ID NO: 3761057 - DNA, 25 bp, Homo sapien
cctcctcttggacttgcatttgagt

SEQ ID NO: 3761058 - DNA, 25 bp, Homo sapien
gacttgcatttgagttgactgctca

SEQ ID NO: 3761059 - DNA, 25 bp, Homo sapien
tgcatttgagttgactgctcagccc

SEQ ID NO: 3761060 - DNA, 25 bp, Homo sapien
cttggacttgcatttgagttgactg

SEQ ID NO: 3761061 - DNA, 25 bp, Homo sapien
cccagcgcagggaggctacttttgc

SEQ ID NO: 3761062 - DNA, 25 bp, Homo sapien
tctatgacttgctcccactgggctg

SEQ ID NO: 3761063 - DNA, 25 bp, Homo sapien
aggaaagcgcgctccgtctctctgt

SEQ ID NO: 3761064 - DNA, 25 bp, Homo sapien
aagcttgaggttgcaaacccgggag

SEQ ID NO: 3761065 - DNA, 25 bp, Homo sapien
ggtacaatgctggaccaaggccgag

SEQ ID NO: 3761066 - DNA, 25 bp, Homo sapien
cgaagtatagatttggagggcctgc

SEQ ID NO: 3761067 - DNA, 25 bp, Homo sapien
tccgcggacggattcagagctagaa

SEQ ID NO: 3761068 - DNA, 25 bp, Homo sapien
gagccaacagtgtgagttccgcgga

SEQ ID NO: 3761069 - DNA, 25 bp, Homo sapien
ctggtataaacaaaagcgactggct

SEQ ID NO: 3761070 - DNA, 25 bp, Homo sapien
ttgaatcaaatccaattgttcattg

SEQ ID NO: 3761071 - DNA, 25 bp, Homo sapien
ttcttgaagtgctgagtaagtgcta

SEQ ID NO: 3761072 - DNA, 25 bp, Homo sapien
cttaaattctccaataacttattag

SEQ ID NO: 3761073 - DNA, 25 bp, Homo sapien
ccatatcccttagaaggcagtagga

SEQ ID NO: 3761074 - DNA, 25 bp, Homo sapien
cagtagaatccaaggctagcgtgaa

SEQ ID NO: 3761075 - DNA, 25 bp, Homo sapien
tgaaaatatgttgagagtctcaagt

SEQ ID NO: 3761076 - DNA, 25 bp, Homo sapien
cccaatgtaggtatcagtagaatcc

SEQ ID NO: 3761077 - DNA, 25 bp, Homo sapien
tgacatacctcaatctctcccccat

SEQ ID NO: 3761078 - DNA, 25 bp, Homo sapien
tttgacatacctcaatctctccccc

SEQ ID NO: 3761079 - DNA, 25 bp, Homo sapien
ttgacatacctcaatctctccccca

SEQ ID NO: 3761080 - DNA, 25 bp, Homo sapien
tcactgaataatgatagttacacaa

SEQ ID NO: 3761081 - DNA, 25 bp, Homo sapien
tagttacacaacctggaatcttcaa

SEQ ID NO: 3761082 - DNA, 25 bp, Homo sapien
taggctcggttccagaaatcttgag

SEQ ID NO: 3761083 - DNA, 25 bp, Homo sapien
cttgagtgttgatgcccagaagact

SEQ ID NO: 3761084 - DNA, 25 bp, Homo sapien
ctttgtttactctgggatctgaagc

SEQ ID NO: 3761085 - DNA, 25 bp, Homo sapien
ggatctgaagcagaaacgcatccct

SEQ ID NO: 3761086 - DNA, 25 bp, Homo sapien
tctgaagcagaaacgcatccctggg

SEQ ID NO: 3761087 - DNA, 25 bp, Homo sapien
tgtttactctgggatctgaagcaga

SEQ ID NO: 3761088 - DNA, 25 bp, Homo sapien
tggccagcggaggacatgtgcttga

SEQ ID NO: 3761089 - DNA, 25 bp, Homo sapien
tgttcttcgtgcacaggattctggc

SEQ ID NO: 3761090 - DNA, 25 bp, Homo sapien
cggaggacatgtgcttgaagctgct

SEQ ID NO: 3761091 - DNA, 25 bp, Homo sapien
tcttcgtgcacaggattctggccag

SEQ ID NO: 3761092 - DNA, 25 bp, Homo sapien
acacctgggtgtaacatgcccctgc

SEQ ID NO: 3761093 - DNA, 25 bp, Homo sapien
aacctgcgcacacctgggtgtaaca

SEQ ID NO: 3761094 - DNA, 25 bp, Homo sapien
gcgcacacctgggtgtaacatgccc

SEQ ID NO: 3761095 - DNA, 25 bp, Homo sapien
tgggtgtaacatgcccctgcctggc

SEQ ID NO: 3761096 - DNA, 25 bp, Homo sapien
tgtcgtggaaccagctgtctcctga

SEQ ID NO: 3761097 - DNA, 25 bp, Homo sapien
ctctgtcgtggaaccagctgtctcc

SEQ ID NO: 3761098 - DNA, 25 bp, Homo sapien
tctgtcgtggaaccagctgtctcct

SEQ ID NO: 3761099 - DNA, 25 bp, Homo sapien
tcgtggaaccagctgtctcctgagg

SEQ ID NO: 3761100 - DNA, 25 bp, Homo sapien
gaatcaacaaagactttcagattcc

SEQ ID NO: 3761101 - DNA, 25 bp, Homo sapien
cagattccttctcatgtcgctcagc

SEQ ID NO: 3761102 - DNA, 25 bp, Homo sapien
caacaaagactttcagattccttct

SEQ ID NO: 3761103 - DNA, 25 bp, Homo sapien
gattccttctcatgtcgctcagcat

SEQ ID NO: 3761104 - DNA, 25 bp, Homo sapien
cccgaagagttagcaggaatttgac

SEQ ID NO: 3761105 - DNA, 25 bp, Homo sapien
tgaatgccattcacgtccaccaggg

SEQ ID NO: 3761106 - DNA, 25 bp, Homo sapien
tatttgaattggatcccgaagagtt

SEQ ID NO: 3761107 - DNA, 25 bp, Homo sapien
tttgacgagtgaagacgagttggtc

SEQ ID NO: 3761108 - DNA, 25 bp, Homo sapien
tccagtctctggctggtgtatgaag

SEQ ID NO: 3761109 - DNA, 25 bp, Homo sapien
ctccagtctctggctggtgtatgaa

SEQ ID NO: 3761110 - DNA, 25 bp, Homo sapien
cagtctctggctggtgtatgaagtg

SEQ ID NO: 3761111 - DNA, 25 bp, Homo sapien
agtctctggctggtgtatgaagtgc

SEQ ID NO: 3761112 - DNA, 25 bp, Homo sapien
ttgggccattccacgctgagcagag

SEQ ID NO: 3761113 - DNA, 25 bp, Homo sapien
gctatagcagtggaaggtcaccagc

SEQ ID NO: 3761114 - DNA, 25 bp, Homo sapien
cagagctatagcagtggaaggtcac

SEQ ID NO: 3761115 - DNA, 25 bp, Homo sapien
cttgggccattccacgctgagcaga

SEQ ID NO: 3761116 - DNA, 25 bp, Homo sapien
gactttgaggagtcatgtctggaca

SEQ ID NO: 3761117 - DNA, 25 bp, Homo sapien
caaaggtttctgcatcactaggggt

SEQ ID NO: 3761118 - DNA, 25 bp, Homo sapien
gagatgctggactttgggctgaatt

SEQ ID NO: 3761119 - DNA, 25 bp, Homo sapien
tgtctggacacgatgtgaatgagga

SEQ ID NO: 3761120 - DNA, 25 bp, Homo sapien
gagcccttgtggtttcaacccagcc

SEQ ID NO: 3761121 - DNA, 25 bp, Homo sapien
agggctcaggccttcggcttgcttt

SEQ ID NO: 3761122 - DNA, 25 bp, Homo sapien
tggctgatgagacaagagcccttgt

SEQ ID NO: 3761123 - DNA, 25 bp, Homo sapien
ttgtggtttcaacccagccgtgcac

SEQ ID NO: 3761124 - DNA, 25 bp, Homo sapien
agggtgctctgcagcttattgcagt

SEQ ID NO: 3761125 - DNA, 25 bp, Homo sapien
ctgctctctgatcgctactcttcga

SEQ ID NO: 3761126 - DNA, 25 bp, Homo sapien
cttcttgcattttggtcaccaccat

SEQ ID NO: 3761127 - DNA, 25 bp, Homo sapien
tgcattttggtcaccaccataggga

SEQ ID NO: 3761128 - DNA, 25 bp, Homo sapien
ggattaaaagttactgttctggcca

SEQ ID NO: 3761129 - DNA, 25 bp, Homo sapien
taggaagcacggctgatatgggctt

SEQ ID NO: 3761130 - DNA, 25 bp, Homo sapien
ctggaggaatcctgtgaccgggaaa

SEQ ID NO: 3761131 - DNA, 25 bp, Homo sapien
gttttcaccaatcttcgttagccag

SEQ ID NO: 3761132 - DNA, 25 bp, Homo sapien
tcgagcagcaggataaaaaccaatt

SEQ ID NO: 3761133 - DNA, 25 bp, Homo sapien
caagctcgagcagcaggataaaaac

SEQ ID NO: 3761134 - DNA, 25 bp, Homo sapien
tcacaagctcgagcagcaggataaa

SEQ ID NO: 3761135 - DNA, 25 bp, Homo sapien
tgcttcacaagctcgagcagcagga

SEQ ID NO: 3761136 - DNA, 25 bp, Homo sapien
tgaactgtgaggtcctgtgtcacct

SEQ ID NO: 3761137 - DNA, 25 bp, Homo sapien
cttcaaacttctgcttgtacagttt

SEQ ID NO: 3761138 - DNA, 25 bp, Homo sapien
gagggccaagtccataaatgtgtga

SEQ ID NO: 3761139 - DNA, 25 bp, Homo sapien
cctgtgtcacatacttcaaacttct

SEQ ID NO: 3761140 - DNA, 25 bp, Homo sapien
ttattaacttccacaggtagattta

SEQ ID NO: 3761141 - DNA, 25 bp, Homo sapien
taacttccacaggtagatttaaaga

SEQ ID NO: 3761142 - DNA, 25 bp, Homo sapien
tccacaggtagatttaaagacaacc

SEQ ID NO: 3761143 - DNA, 25 bp, Homo sapien
ctacgctgatgtcatggacatattt

SEQ ID NO: 3761144 - DNA, 25 bp, Homo sapien
aagagacccttctttccgtacagca

SEQ ID NO: 3761145 - DNA, 25 bp, Homo sapien
ttctttccgtacagcaccacgtgtc

SEQ ID NO: 3761146 - DNA, 25 bp, Homo sapien
tttctgttacgttttgtgtcagagg

SEQ ID NO: 3761147 - DNA, 25 bp, Homo sapien
tacgttttgtgtcagaggtgaagag

SEQ ID NO: 3761148 - DNA, 25 bp, Homo sapien
gccaggcggagggtcagcggttgag

SEQ ID NO: 3761149 - DNA, 25 bp, Homo sapien
gctgaaatacggcagaagagactag

SEQ ID NO: 3761150 - DNA, 25 bp, Homo sapien
cagcggttgaggctggacgggcctc

SEQ ID NO: 3761151 - DNA, 25 bp, Homo sapien
tggacgggcctcaggcgctccagca

SEQ ID NO: 3761152 - DNA, 25 bp, Homo sapien
tccctccgcgctctctgccgggcca

SEQ ID NO: 3761153 - DNA, 25 bp, Homo sapien
tcccgggcttcctccctccgcgctc

SEQ ID NO: 3761154 - DNA, 25 bp, Homo sapien
ctccgcgctctctgccgggccacca

SEQ ID NO: 3761155 - DNA, 25 bp, Homo sapien
tccgcgctctctgccgggccaccat

SEQ ID NO: 3761156 - DNA, 25 bp, Homo sapien
tttgctagatggctgcggagacaat

SEQ ID NO: 3761157 - DNA, 25 bp, Homo sapien
gcagataatccagtatcaacgcggg

SEQ ID NO: 3761158 - DNA, 25 bp, Homo sapien
gaagctcgaatataggatgacagcg

SEQ ID NO: 3761159 - DNA, 25 bp, Homo sapien
gatgacagcgtaattggccacagga

SEQ ID NO: 3761160 - DNA, 25 bp, Homo sapien
tcctgagcaaaggtgctggggcgca

SEQ ID NO: 3761161 - DNA, 25 bp, Homo sapien
ttgagggttgttgatgctccttcta

SEQ ID NO: 3761162 - DNA, 25 bp, Homo sapien
tttggaagacattcagctcccttgt

SEQ ID NO: 3761163 - DNA, 25 bp, Homo sapien
tggcttgagggttgttgatgctcct

SEQ ID NO: 3761164 - DNA, 25 bp, Homo sapien
gtgaccaatacctgacaatgccggg

SEQ ID NO: 3761165 - DNA, 25 bp, Homo sapien
tacagcacgaggtgtaggttggccc

SEQ ID NO: 3761166 - DNA, 25 bp, Homo sapien
gaggcagagattaggacccgtcaac

SEQ ID NO: 3761167 - DNA, 25 bp, Homo sapien
gctcagacggaaataggaacatgct

SEQ ID NO: 3761168 - DNA, 25 bp, Homo sapien
ttacaggactggtgtccagacagga

SEQ ID NO: 3761169 - DNA, 25 bp, Homo sapien
ccacaggccgtctgagatggcagta

SEQ ID NO: 3761170 - DNA, 25 bp, Homo sapien
tgtccagacaggaagcggtcagtcc

SEQ ID NO: 3761171 - DNA, 25 bp, Homo sapien
tgtgcaggtttcttcccgacttccc

SEQ ID NO: 3761172 - DNA, 25 bp, Homo sapien
taaccactctggagctagaaaacca

SEQ ID NO: 3761173 - DNA, 25 bp, Homo sapien
gcagcaacgtgattctagcagaggt

SEQ ID NO: 3761174 - DNA, 25 bp, Homo sapien
tttgctggtatttgcgaagggcctc

SEQ ID NO: 3761175 - DNA, 25 bp, Homo sapien
cacgttggattcgttaggcacttcc

SEQ ID NO: 3761176 - DNA, 25 bp, Homo sapien
gagactctaaatggactcaccctgc

SEQ ID NO: 3761177 - DNA, 25 bp, Homo sapien
gaatgcacgtctgaaattctcgaga

SEQ ID NO: 3761178 - DNA, 25 bp, Homo sapien
ccttcagttggatctgctgcaacaa

SEQ ID NO: 3761179 - DNA, 25 bp, Homo sapien
tcaccctgcccttcggttgttgtgg

SEQ ID NO: 3761180 - DNA, 25 bp, Homo sapien
agatgattttgccaatgtttctgta

SEQ ID NO: 3761181 - DNA, 25 bp, Homo sapien
gatgattttgccaatgtttctgtag

SEQ ID NO: 3761182 - DNA, 25 bp, Homo sapien
atgattttgccaatgtttctgtaga

SEQ ID NO: 3761183 - DNA, 25 bp, Homo sapien
tgattttgccaatgtttctgtagaa

SEQ ID NO: 3761184 - DNA, 25 bp, Homo sapien
ggtttagaagctgcctgttctgtgc

SEQ ID NO: 3761185 - DNA, 25 bp, Homo sapien
tccggcctccagaacggaagtcaat

SEQ ID NO: 3761186 - DNA, 25 bp, Homo sapien
gaatctgcgggaccctccatcttgg

SEQ ID NO: 3761187 - DNA, 25 bp, Homo sapien
ttctcattttgtctggtctgcggcc

SEQ ID NO: 3761188 - DNA, 25 bp, Homo sapien
ccagtaggcgtaaatatgcatgtga

SEQ ID NO: 3761189 - DNA, 25 bp, Homo sapien
ctagaggttgagttctttgtgccat

SEQ ID NO: 3761190 - DNA, 25 bp, Homo sapien
tctgtcaccctcactagaggttgag

SEQ ID NO: 3761191 - DNA, 25 bp, Homo sapien
catctctcttttcgggcacgggacc

SEQ ID NO: 3761192 - DNA, 25 bp, Homo sapien
gagacactgtttctcgtagccacac

SEQ ID NO: 3761193 - DNA, 25 bp, Homo sapien
tgtccgggggcttctgtttccagag

SEQ ID NO: 3761194 - DNA, 25 bp, Homo sapien
ttcatgagggtttctgcatccggcc

SEQ ID NO: 3761195 - DNA, 25 bp, Homo sapien
tctcgtagccacacccgattcatga

SEQ ID NO: 3761196 - DNA, 25 bp, Homo sapien
gagcgtcataaccttagatgtccct

SEQ ID NO: 3761197 - DNA, 25 bp, Homo sapien
aaggcagatgctgtgagcgtcataa

SEQ ID NO: 3761198 - DNA, 25 bp, Homo sapien
cacgaaggctctgggatcctcgaat

SEQ ID NO: 3761199 - DNA, 25 bp, Homo sapien
gaatgctcaggtatgacatggaaaa

SEQ ID NO: 3761200 - DNA, 25 bp, Homo sapien
tctttggcaaatgccgccctgctaa

SEQ ID NO: 3761201 - DNA, 25 bp, Homo sapien
ctgacgtctgtgctgctctcggtcc

SEQ ID NO: 3761202 - DNA, 25 bp, Homo sapien
tgatattgctgcaaactgacgtctg

SEQ ID NO: 3761203 - DNA, 25 bp, Homo sapien
ccaaatggccaactgccctgctctc

SEQ ID NO: 3761204 - DNA, 25 bp, Homo sapien
cccgggtaatggtcatattcagagt

SEQ ID NO: 3761205 - DNA, 25 bp, Homo sapien
gcttcctttgcaggggaacctgaat

SEQ ID NO: 3761206 - DNA, 25 bp, Homo sapien
atggtcatattcagagtacattggg

SEQ ID NO: 3761207 - DNA, 25 bp, Homo sapien
gggctcttcaccctgatgcaagaac

SEQ ID NO: 3761208 - DNA, 25 bp, Homo sapien
cgcaggtctcgttgctggaagtttg

SEQ ID NO: 3761209 - DNA, 25 bp, Homo sapien
cgatgctataggaagaactaagcgc

SEQ ID NO: 3761210 - DNA, 25 bp, Homo sapien
agtttgaacgtttggcagcaggtgc

SEQ ID NO: 3761211 - DNA, 25 bp, Homo sapien
ccttggtcgtctctcatgggacgat

SEQ ID NO: 3761212 - DNA, 25 bp, Homo sapien
aagtgcgtggccctggtcagacagc

SEQ ID NO: 3761213 - DNA, 25 bp, Homo sapien
agtgtgatgtcccaatcaggtgtga

SEQ ID NO: 3761214 - DNA, 25 bp, Homo sapien
gaaaagtaaagagtcataaagtgtg

SEQ ID NO: 3761215 - DNA, 25 bp, Homo sapien
gtcagacagcaaacatgtggagagc

SEQ ID NO: 3761216 - DNA, 25 bp, Homo sapien
atgaagaagggagaccgacaccaac

SEQ ID NO: 3761217 - DNA, 25 bp, Homo sapien
agaagacaaaggcccatctgccaat

SEQ ID NO: 3761218 - DNA, 25 bp, Homo sapien
aagggagaccgacaccaactgccag

SEQ ID NO: 3761219 - DNA, 25 bp, Homo sapien
aagacaaaggcccatctgccaatct

SEQ ID NO: 3761220 - DNA, 25 bp, Homo sapien
gtctgctgtcccgagggatactgcc

SEQ ID NO: 3761221 - DNA, 25 bp, Homo sapien
ccacttaagacctggcatcccatgt

SEQ ID NO: 3761222 - DNA, 25 bp, Homo sapien
ccgagggatactgcccggccactta

SEQ ID NO: 3761223 - DNA, 25 bp, Homo sapien
atactgcccggccacttaagacctg

SEQ ID NO: 3761224 - DNA, 25 bp, Homo sapien
gtccggcccagatcctacagaaatg

SEQ ID NO: 3761225 - DNA, 25 bp, Homo sapien
cccgaatcggttctgtggaggaagc

SEQ ID NO: 3761226 - DNA, 25 bp, Homo sapien
gatccgtgcaggttgtgagaaaccc

SEQ ID NO: 3761227 - DNA, 25 bp, Homo sapien
tagaagctgttttcccgtggacacc

SEQ ID NO: 3761228 - DNA, 25 bp, Homo sapien
gacttcggggatgccgtgagatcca

SEQ ID NO: 3761229 - DNA, 25 bp, Homo sapien
agatcccacagcagcggacttcggg

SEQ ID NO: 3761230 - DNA, 25 bp, Homo sapien
tgcctgggaacggtttgcctctccc

SEQ ID NO: 3761231 - DNA, 25 bp, Homo sapien
cacgcgtgtgcgtgtagcacagttt

SEQ ID NO: 3761232 - DNA, 25 bp, Homo sapien
ctaaggacacgttccagaattactg

SEQ ID NO: 3761233 - DNA, 25 bp, Homo sapien
ttccagaattactggagtctcctga

SEQ ID NO: 3761234 - DNA, 25 bp, Homo sapien
actgggtgagctttaggtgctgcac

SEQ ID NO: 3761235 - DNA, 25 bp, Homo sapien
tgaatgctgagatgaatagactggg

SEQ ID NO: 3761236 - DNA, 25 bp, Homo sapien
aaactgaacggaggcccgcagagtc

SEQ ID NO: 3761237 - DNA, 25 bp, Homo sapien
acggaggcccgcagagtctccccgg

SEQ ID NO: 3761238 - DNA, 25 bp, Homo sapien
cccgcagagtctccccgggaaatag

SEQ ID NO: 3761239 - DNA, 25 bp, Homo sapien
gaggcccgcagagtctccccgggaa

SEQ ID NO: 3761240 - DNA, 25 bp, Homo sapien
agctcagtcctttcggtgaaatcgg

SEQ ID NO: 3761241 - DNA, 25 bp, Homo sapien
gaggatgcgttccatctgggttatg

SEQ ID NO: 3761242 - DNA, 25 bp, Homo sapien
tgcgttccatctgggttatgctttc

SEQ ID NO: 3761243 - DNA, 25 bp, Homo sapien
aaatcggtgaaatcggtggttctca

SEQ ID NO: 3761244 - DNA, 25 bp, Homo sapien
tatttatttgggatgcgcggaggct

SEQ ID NO: 3761245 - DNA, 25 bp, Homo sapien
tgttctttatgttccgcgcggtgac

SEQ ID NO: 3761246 - DNA, 25 bp, Homo sapien
gaggctctgaatggagaaagtcgtc

SEQ ID NO: 3761247 - DNA, 25 bp, Homo sapien
aaagtcgtcgatgcctgcactggtc

SEQ ID NO: 3761248 - DNA, 25 bp, Homo sapien
gatgagggaggaaattaaacagagc

SEQ ID NO: 3761249 - DNA, 25 bp, Homo sapien
gtgggaaagactcatcatcaaccag

SEQ ID NO: 3761250 - DNA, 25 bp, Homo sapien
atcttctagtgggaaagactcatca

SEQ ID NO: 3761251 - DNA, 25 bp, Homo sapien
gagggaggaaattaaacagagcaag

SEQ ID NO: 3761252 - DNA, 25 bp, Homo sapien
caccttctgttgagcagagcacctg

SEQ ID NO: 3761253 - DNA, 25 bp, Homo sapien
tgacttcaaggaatgtacaacggct

SEQ ID NO: 3761254 - DNA, 25 bp, Homo sapien
gtaacgttattcagcacaccttctg

SEQ ID NO: 3761255 - DNA, 25 bp, Homo sapien
cgggaacagagcctgtaacgttatt

SEQ ID NO: 3761256 - DNA, 25 bp, Homo sapien
aaagttttgtatgctttctccatct

SEQ ID NO: 3761257 - DNA, 25 bp, Homo sapien
tatctgaacagtcaatcccaggcag

SEQ ID NO: 3761258 - DNA, 25 bp, Homo sapien
ggatgaaaacctaacacacgggcac

SEQ ID NO: 3761259 - DNA, 25 bp, Homo sapien
tatgctgcactttgagtcccagaga

SEQ ID NO: 3761260 - DNA, 25 bp, Homo sapien
tccctgatggagctgtatctgaaca

SEQ ID NO: 3761261 - DNA, 25 bp, Homo sapien
cactaatgccgatgtcctaatgaga

SEQ ID NO: 3761262 - DNA, 25 bp, Homo sapien
cctaatgagatcaaaaccattacac

SEQ ID NO: 3761263 - DNA, 25 bp, Homo sapien
aaccattacactttcctttcatctg

SEQ ID NO: 3761264 - DNA, 25 bp, Homo sapien
taattgctgccccactaatgccgat

SEQ ID NO: 3761265 - DNA, 25 bp, Homo sapien
tatgtattagttacacattagggat

SEQ ID NO: 3761266 - DNA, 25 bp, Homo sapien
tgaattggctttaacgactgagccg

SEQ ID NO: 3761267 - DNA, 25 bp, Homo sapien
tagggatagttgtgcacttggaaga

SEQ ID NO: 3761268 - DNA, 25 bp, Homo sapien
gaagacatgattcgtctgaattggc

SEQ ID NO: 3761269 - DNA, 25 bp, Homo sapien
tccctcgtgtcgttggtggccacag

SEQ ID NO: 3761270 - DNA, 25 bp, Homo sapien
agcagaatgtaaccgaccagggcac

SEQ ID NO: 3761271 - DNA, 25 bp, Homo sapien
ctccttaggtgatttctctgtttac

SEQ ID NO: 3761272 - DNA, 25 bp, Homo sapien
tacaagtaggagtactgatcttact

SEQ ID NO: 3761273 - DNA, 25 bp, Homo sapien
ctcctgtttggtaggattagagcta

SEQ ID NO: 3761274 - DNA, 25 bp, Homo sapien
gatagttcaataaactgcttaagaa

SEQ ID NO: 3761275 - DNA, 25 bp, Homo sapien
cttcttttacaagccgatctccggc

SEQ ID NO: 3761276 - DNA, 25 bp, Homo sapien
gatcgcctgagaccatgtagatagt

SEQ ID NO: 3761277 - DNA, 25 bp, Homo sapien
gatagctcggggtaaacagccctgt

SEQ ID NO: 3761278 - DNA, 25 bp, Homo sapien
gccgtcttctctacctgttgcacga

SEQ ID NO: 3761279 - DNA, 25 bp, Homo sapien
tgatgacgtgtgcatgtggtgcctt

SEQ ID NO: 3761280 - DNA, 25 bp, Homo sapien
aacagccctgtgttacgtctttcct

SEQ ID NO: 3761281 - DNA, 25 bp, Homo sapien
taccagtgcttttaagaacctcctc

SEQ ID NO: 3761282 - DNA, 25 bp, Homo sapien
cttccctgcgaggtttcccatcatt

SEQ ID NO: 3761283 - DNA, 25 bp, Homo sapien
tgcttttaagaacctcctccacatc

SEQ ID NO: 3761284 - DNA, 25 bp, Homo sapien
cacatctcgtaaaatgaagtggtta

SEQ ID NO: 3761285 - DNA, 25 bp, Homo sapien
gcgatgcctactgttcggagagaac

SEQ ID NO: 3761286 - DNA, 25 bp, Homo sapien
cattggtgttcgtttatggtaaaga

SEQ ID NO: 3761287 - DNA, 25 bp, Homo sapien
ggagagaacaatcacaggctaacct

SEQ ID NO: 3761288 - DNA, 25 bp, Homo sapien
tctgaatgcctgtcggaaatgctgg

SEQ ID NO: 3761289 - DNA, 25 bp, Homo sapien
aaccagtcggatcaggtgttctgtg

SEQ ID NO: 3761290 - DNA, 25 bp, Homo sapien
tcaaaggtcggagatagatacaaat

SEQ ID NO: 3761291 - DNA, 25 bp, Homo sapien
gtgtctctagtaattcaacctccag

SEQ ID NO: 3761292 - DNA, 25 bp, Homo sapien
tggctgcacaagagaaaaccagtcg

SEQ ID NO: 3761293 - DNA, 25 bp, Homo sapien
gctgatcacttgcagagcaccggga

SEQ ID NO: 3761294 - DNA, 25 bp, Homo sapien
ggttgtttaaaggacgctggctctc

SEQ ID NO: 3761295 - DNA, 25 bp, Homo sapien
gatgaagcagcactaacacacgatg

SEQ ID NO: 3761296 - DNA, 25 bp, Homo sapien
tgaacagtgagcagtgaactccgac

SEQ ID NO: 3761297 - DNA, 25 bp, Homo sapien
cccacttggtgtgtgagtagaggca

SEQ ID NO: 3761298 - DNA, 25 bp, Homo sapien
tatcagctgattggtgggtccccaa

SEQ ID NO: 3761299 - DNA, 25 bp, Homo sapien
tagtcctaagaaagagagttcccga

SEQ ID NO: 3761300 - DNA, 25 bp, Homo sapien
gggccaaaatcaatcaccggtatgt

SEQ ID NO: 3761301 - DNA, 25 bp, Homo sapien
gggagactttccaatcccatccgga

SEQ ID NO: 3761302 - DNA, 25 bp, Homo sapien
cagggagactttccaatcccatccg

SEQ ID NO: 3761303 - DNA, 25 bp, Homo sapien
gactttccaatcccatccggacaca

SEQ ID NO: 3761304 - DNA, 25 bp, Homo sapien
gagactttccaatcccatccggaca

SEQ ID NO: 3761305 - DNA, 25 bp, Homo sapien
acagaaagagggatgcacgcatgca

SEQ ID NO: 3761306 - DNA, 25 bp, Homo sapien
tgtgacctgctgagccctgtgtgtc

SEQ ID NO: 3761307 - DNA, 25 bp, Homo sapien
tgaagtactactccttctgggaaag

SEQ ID NO: 3761308 - DNA, 25 bp, Homo sapien
tgctgagccatgcatcttcctgaag

SEQ ID NO: 3761309 - DNA, 25 bp, Homo sapien
cacatcatataaaaactggctaaat

SEQ ID NO: 3761310 - DNA, 25 bp, Homo sapien
acatcatataaaaactggctaaatt

SEQ ID NO: 3761311 - DNA, 25 bp, Homo sapien
catcatataaaaactggctaaatta

SEQ ID NO: 3761312 - DNA, 25 bp, Homo sapien
atcatataaaaactggctaaattaa

SEQ ID NO: 3761313 - DNA, 25 bp, Homo sapien
ctgatgggctccattccagctcttt

SEQ ID NO: 3761314 - DNA, 25 bp, Homo sapien
cagctctttctccagatggtttgtt

SEQ ID NO: 3761315 - DNA, 25 bp, Homo sapien
atgggctccattccagctctttctc

SEQ ID NO: 3761316 - DNA, 25 bp, Homo sapien
agctctttctccagatggtttgttc

SEQ ID NO: 3761317 - DNA, 25 bp, Homo sapien
aggggcctgctcattcccggcatgc

SEQ ID NO: 3761318 - DNA, 25 bp, Homo sapien
aagaacaggggcctgctcattcccg

SEQ ID NO: 3761319 - DNA, 25 bp, Homo sapien
gggcctgctcattcccggcatgctg

SEQ ID NO: 3761320 - DNA, 25 bp, Homo sapien
cgaagaacaggggcctgctcattcc

SEQ ID NO: 3761321 - DNA, 25 bp, Homo sapien
gggcgtttgcccaggggtgtctgtg

SEQ ID NO: 3761322 - DNA, 25 bp, Homo sapien
gagggcgtttgcccaggggtgtctg

SEQ ID NO: 3761323 - DNA, 25 bp, Homo sapien
ctgcttttctcagccgccaactcct

SEQ ID NO: 3761324 - DNA, 25 bp, Homo sapien
gccgccaactcctcatggcatcttc

SEQ ID NO: 3761325 - DNA, 25 bp, Homo sapien
ctgtgtcgagacaccttctcctggg

SEQ ID NO: 3761326 - DNA, 25 bp, Homo sapien
gctatcagcctgtccctattgcaag

SEQ ID NO: 3761327 - DNA, 25 bp, Homo sapien
gcagacagatgtttgataaccacag

SEQ ID NO: 3761328 - DNA, 25 bp, Homo sapien
tgttttggtagacaaatgacaagct

SEQ ID NO: 3761329 - DNA, 25 bp, Homo sapien
cctcaacgagattgtagtgcttaac

SEQ ID NO: 3761330 - DNA, 25 bp, Homo sapien
ccactaatttattagggacaagatc

SEQ ID NO: 3761331 - DNA, 25 bp, Homo sapien
gacaagatcaatagcctcaacgaga

SEQ ID NO: 3761332 - DNA, 25 bp, Homo sapien
taacttgaatcgaatttatgccatg

SEQ ID NO: 3761333 - DNA, 25 bp, Homo sapien
tattcttattcgagggcatgtacat

SEQ ID NO: 3761334 - DNA, 25 bp, Homo sapien
gtgagtctcaagtcttttcgtgctg

SEQ ID NO: 3761335 - DNA, 25 bp, Homo sapien
gcctcagtaagcaaaatatctgcgt

SEQ ID NO: 3761336 - DNA, 25 bp, Homo sapien
tgggaacagctaatggtttctcaca

SEQ ID NO: 3761337 - DNA, 25 bp, Homo sapien
gggtgaatgcagaattaatgacatt

SEQ ID NO: 3761338 - DNA, 25 bp, Homo sapien
aattaatgacattggacatcaactt

SEQ ID NO: 3761339 - DNA, 25 bp, Homo sapien
ggacatcaactttccaatgttaatt

SEQ ID NO: 3761340 - DNA, 25 bp, Homo sapien
gacattggacatcaactttccaatg

SEQ ID NO: 3761341 - DNA, 25 bp, Homo sapien
ctattttattatgacccgaaaatgc

SEQ ID NO: 3761342 - DNA, 25 bp, Homo sapien
gacccgaaaatgctcgggctgcgtt

SEQ ID NO: 3761343 - DNA, 25 bp, Homo sapien
atcttctgtgaaatgcatgtccaag

SEQ ID NO: 3761344 - DNA, 25 bp, Homo sapien
tcttctgtgaaatgcatgtccaagc

SEQ ID NO: 3761345 - DNA, 25 bp, Homo sapien
attgacaggttcaccttctgggcct

SEQ ID NO: 3761346 - DNA, 25 bp, Homo sapien
tctattgacaggttcaccttctggg

SEQ ID NO: 3761347 - DNA, 25 bp, Homo sapien
tttgctgagggtctattgacaggtt

SEQ ID NO: 3761348 - DNA, 25 bp, Homo sapien
cctttgctgagggtctattgacagg

SEQ ID NO: 3761349 - DNA, 25 bp, Homo sapien
cattgtgcaattccacgaagagcca

SEQ ID NO: 3761350 - DNA, 25 bp, Homo sapien
tgtctgacagatttggtggtcccca

SEQ ID NO: 3761351 - DNA, 25 bp, Homo sapien
aagtcatctgccgttgtcatagagg

SEQ ID NO: 3761352 - DNA, 25 bp, Homo sapien
gcaagatggctttcaggcatgcacc

SEQ ID NO: 3761353 - DNA, 25 bp, Homo sapien
catccttgtcctctgttgtacagag

SEQ ID NO: 3761354 - DNA, 25 bp, Homo sapien
tccttgtcctctgttgtacagagct

SEQ ID NO: 3761355 - DNA, 25 bp, Homo sapien
caatgctggcattctaatctctggc

SEQ ID NO: 3761356 - DNA, 25 bp, Homo sapien
cttgtcctctgttgtacagagcttc

SEQ ID NO: 3761357 - DNA, 25 bp, Homo sapien
tgtagcctcatcgtcctagcaatgg

SEQ ID NO: 3761358 - DNA, 25 bp, Homo sapien
tgtatttacagctctttcgtgccca

SEQ ID NO: 3761359 - DNA, 25 bp, Homo sapien
tataacactggacagtctttctggc

SEQ ID NO: 3761360 - DNA, 25 bp, Homo sapien
tggatcagatcgcagcaggtgcatt

SEQ ID NO: 3761361 - DNA, 25 bp, Homo sapien
gtagagggacgctggatgggattcc

SEQ ID NO: 3761362 - DNA, 25 bp, Homo sapien
gagagtagagggacgctggatggga

SEQ ID NO: 3761363 - DNA, 25 bp, Homo sapien
gaggagagtagagggacgctggatg

SEQ ID NO: 3761364 - DNA, 25 bp, Homo sapien
cagaggagagtagagggacgctgga

SEQ ID NO: 3761365 - DNA, 25 bp, Homo sapien
gcctccacctactagtgccatggga

SEQ ID NO: 3761366 - DNA, 25 bp, Homo sapien
ggcaccatggcatgtcaccagaggg

SEQ ID NO: 3761367 - DNA, 25 bp, Homo sapien
tgccatgggaacaactaagatgctg

SEQ ID NO: 3761368 - DNA, 25 bp, Homo sapien
ggacacagcagtctcgatgcctcca

SEQ ID NO: 3761369 - DNA, 25 bp, Homo sapien
cagatattggataaggtgtggttgt

SEQ ID NO: 3761370 - DNA, 25 bp, Homo sapien
aatttaatgtgtatggcacaattgc

SEQ ID NO: 3761371 - DNA, 25 bp, Homo sapien
gcacaattgctgtacagatattgga

SEQ ID NO: 3761372 - DNA, 25 bp, Homo sapien
tgtcattgtcctaatcattatgatg

SEQ ID NO: 3761373 - DNA, 25 bp, Homo sapien
ctttgactgatgtttctctccaggg

SEQ ID NO: 3761374 - DNA, 25 bp, Homo sapien
cacatcagcttcattatccgtgaac

SEQ ID NO: 3761375 - DNA, 25 bp, Homo sapien
catcagcttcattatccgtgaacac

SEQ ID NO: 3761376 - DNA, 25 bp, Homo sapien
ctctccagggctctcacatcagctt

SEQ ID NO: 3761377 - DNA, 25 bp, Homo sapien
cagcgtgctgagtccatgagtgatg

SEQ ID NO: 3761378 - DNA, 25 bp, Homo sapien
tcctgcggacagcagcagcgtgctg

SEQ ID NO: 3761379 - DNA, 25 bp, Homo sapien
gaaccgactcttttgggagtagcat

SEQ ID NO: 3761380 - DNA, 25 bp, Homo sapien
tgagtgatgacgatgaaggcagtcc

SEQ ID NO: 3761381 - DNA, 25 bp, Homo sapien
ctagcctgttccccttgctccctgg

SEQ ID NO: 3761382 - DNA, 25 bp, Homo sapien
tagcctgttccccttgctccctgga

SEQ ID NO: 3761383 - DNA, 25 bp, Homo sapien
cctagcctgttccccttgctccctg

SEQ ID NO: 3761384 - DNA, 25 bp, Homo sapien
tgtttcagcctccctagtagctggg

SEQ ID NO: 3761385 - DNA, 25 bp, Homo sapien
agtggcacgatttgggttcactgca

SEQ ID NO: 3761386 - DNA, 25 bp, Homo sapien
gtgcagtggcacgatttgggttcac

SEQ ID NO: 3761387 - DNA, 25 bp, Homo sapien
gtttcagcctccctagtagctggga

SEQ ID NO: 3761388 - DNA, 25 bp, Homo sapien
cacacgcattttgaaaggcaagaca

SEQ ID NO: 3761389 - DNA, 25 bp, Homo sapien
tctgagttgatgagcacattcttgc

SEQ ID NO: 3761390 - DNA, 25 bp, Homo sapien
gcttatcatcgcatactcttgttga

SEQ ID NO: 3761391 - DNA, 25 bp, Homo sapien
tcaggaaatggcgagttaagcaaat

SEQ ID NO: 3761392 - DNA, 25 bp, Homo sapien
cactttaccgaacaggaatgacaga

SEQ ID NO: 3761393 - DNA, 25 bp, Homo sapien
ggccactgccagacattaaatcaca

SEQ ID NO: 3761394 - DNA, 25 bp, Homo sapien
tttgactcgaaaggtttccacaggc

SEQ ID NO: 3761395 - DNA, 25 bp, Homo sapien
taaatcacacaagggcactttaccg

SEQ ID NO: 3761396 - DNA, 25 bp, Homo sapien
ggaaacacaaagtacaatcgcccca

SEQ ID NO: 3761397 - DNA, 25 bp, Homo sapien
tgctcatcagaacgaattctaacgg

SEQ ID NO: 3761398 - DNA, 25 bp, Homo sapien
cactcttcatgtaacgctgtgaaag

SEQ ID NO: 3761399 - DNA, 25 bp, Homo sapien
taacgggtcgctgaatgtgaagctc

SEQ ID NO: 3761400 - DNA, 25 bp, Homo sapien
ccatccttcctcatggtcgcgcacc

SEQ ID NO: 3761401 - DNA, 25 bp, Homo sapien
tccttcctcatggtcgcgcacccgg

SEQ ID NO: 3761402 - DNA, 25 bp, Homo sapien
gcggtttcctccctcgccatccttc

SEQ ID NO: 3761403 - DNA, 25 bp, Homo sapien
caacaaagcgcggtttcctccctcg

SEQ ID NO: 3761404 - DNA, 25 bp, Homo sapien
aagcgcggtttcctccctcgcgatc

SEQ ID NO: 3761405 - DNA, 25 bp, Homo sapien
atacttcctcgggatcgtgcacccg

SEQ ID NO: 3761406 - DNA, 25 bp, Homo sapien
ctcgggatcgtgcacgcggttcacg

SEQ ID NO: 3761407 - DNA, 25 bp, Homo sapien
gacttcctcatggtcgcgcacccgt

SEQ ID NO: 3761408 - DNA, 25 bp, Homo sapien
gtcgcgcacccggttggatttcaca

SEQ ID NO: 3761409 - DNA, 25 bp, Homo sapien
ctcgtggtcgcgcacccggttggat

SEQ ID NO: 3761410 - DNA, 25 bp, Homo sapien
cgtggtcgcgcacccggttggattt

SEQ ID NO: 3761411 - DNA, 25 bp, Homo sapien
gcgcacccggttggatttcacagtc

SEQ ID NO: 3761412 - DNA, 25 bp, Homo sapien
agcaccctccggagttcctgacact

SEQ ID NO: 3761413 - DNA, 25 bp, Homo sapien
ccccatggcgcgaaaggcggcttca

SEQ ID NO: 3761414 - DNA, 25 bp, Homo sapien
gatcaagggtcttcatgttttgaca

SEQ ID NO: 3761415 - DNA, 25 bp, Homo sapien
gcggcttcagtggatcaagggtctt

SEQ ID NO: 3761416 - DNA, 25 bp, Homo sapien
ggtgttgctaggtgacaaaggcaaa

SEQ ID NO: 3761417 - DNA, 25 bp, Homo sapien
tgaggtgttgctaggtgacaaaggc

SEQ ID NO: 3761418 - DNA, 25 bp, Homo sapien
tcaggaagccgggatgaggtgttgc

SEQ ID NO: 3761419 - DNA, 25 bp, Homo sapien
ccgggatgaggtgttgctaggtgac

SEQ ID NO: 3761420 - DNA, 25 bp, Homo sapien
atgctgctgtctatgtggatttgcc

SEQ ID NO: 3761421 - DNA, 25 bp, Homo sapien
tatgtccacttttctggcactgatt

SEQ ID NO: 3761422 - DNA, 25 bp, Homo sapien
gaagaattcggatcatataccatga

SEQ ID NO: 3761423 - DNA, 25 bp, Homo sapien
ggatttgcccagatttctgttctca

SEQ ID NO: 3761424 - DNA, 25 bp, Homo sapien
gggtcctccacctttcattggtgtc

SEQ ID NO: 3761425 - DNA, 25 bp, Homo sapien
caaaggctcgtattatgattagggc

SEQ ID NO: 3761426 - DNA, 25 bp, Homo sapien
tccacctttcattggtgtcaaaggc

SEQ ID NO: 3761427 - DNA, 25 bp, Homo sapien
cattggtgtcaaaggctcgtattat

SEQ ID NO: 3761428 - DNA, 25 bp, Homo sapien
tattagatctacactacgccaggca

SEQ ID NO: 3761429 - DNA, 25 bp, Homo sapien
gagctatgtcaaaatagatcaggac

SEQ ID NO: 3761430 - DNA, 25 bp, Homo sapien
ccatgaaggcaagctgcgttacaca

SEQ ID NO: 3761431 - DNA, 25 bp, Homo sapien
ttcgtaacacgaccgctattagatc

SEQ ID NO: 3761432 - DNA, 25 bp, Homo sapien
caggaaggctcaaaatgggcttaaa

SEQ ID NO: 3761433 - DNA, 25 bp, Homo sapien
taatcatcatgatacggcgtcaaat

SEQ ID NO: 3761434 - DNA, 25 bp, Homo sapien
aatcaccaggtattatcagagccag

SEQ ID NO: 3761435 - DNA, 25 bp, Homo sapien
gcgtcaaatgtagccttatcgaaat

SEQ ID NO: 3761436 - DNA, 25 bp, Homo sapien
cagctccttggatacaatgtcacaa

SEQ ID NO: 3761437 - DNA, 25 bp, Homo sapien
tcacgggaaaggtcaacagagacag

SEQ ID NO: 3761438 - DNA, 25 bp, Homo sapien
gatttctccagtgcgtttcaaggcc

SEQ ID NO: 3761439 - DNA, 25 bp, Homo sapien
tgtcacaaatcttggcctgagcaag

SEQ ID NO: 3761440 - DNA, 25 bp, Homo sapien
gattgtctgataatcaccaaagccc

SEQ ID NO: 3761441 - DNA, 25 bp, Homo sapien
gtttgtggaggtggatacgctttac

SEQ ID NO: 3761442 - DNA, 25 bp, Homo sapien
tctgtatgaacagtgagctcagtgg

SEQ ID NO: 3761443 - DNA, 25 bp, Homo sapien
gctcagtggattcacgaccaaattg

SEQ ID NO: 3761444 - DNA, 25 bp, Homo sapien
tctgctgggtcacaggacctgactt

SEQ ID NO: 3761445 - DNA, 25 bp, Homo sapien
accctgacagggtgcatcatagact

SEQ ID NO: 3761446 - DNA, 25 bp, Homo sapien
acaccgtgactctttgatcttccca

SEQ ID NO: 3761447 - DNA, 25 bp, Homo sapien
gggtgcatcatagactccagcagcc

SEQ ID NO: 3761448 - DNA, 25 bp, Homo sapien
taaagatagacagagttcaggagga

SEQ ID NO: 3761449 - DNA, 25 bp, Homo sapien
aaatcgtggaagaataatcattgtc

SEQ ID NO: 3761450 - DNA, 25 bp, Homo sapien
cagtgtttcattctccggtaaagat

SEQ ID NO: 3761451 - DNA, 25 bp, Homo sapien
tgtcatgcaaaaacatatcctgagc

SEQ ID NO: 3761452 - DNA, 25 bp, Homo sapien
tgccacgtgtagcatcagccccaca

SEQ ID NO: 3761453 - DNA, 25 bp, Homo sapien
gcacactcagatgtcaacttcccat

SEQ ID NO: 3761454 - DNA, 25 bp, Homo sapien
ccaaggctgcacactcagatgtcaa

SEQ ID NO: 3761455 - DNA, 25 bp, Homo sapien
tcagatgtcaacttcccattcccaa

SEQ ID NO: 3761456 - DNA, 25 bp, Homo sapien
gctgtagtctacctgatctggctct

SEQ ID NO: 3761457 - DNA, 25 bp, Homo sapien
ggctctagtctagctattttagaga

SEQ ID NO: 3761458 - DNA, 25 bp, Homo sapien
ctagctattttagagactggagaaa

SEQ ID NO: 3761459 - DNA, 25 bp, Homo sapien
ggctcctcccagacaaagttttgct

SEQ ID NO: 3761460 - DNA, 25 bp, Homo sapien
caggagaatgactgggactgagatt

SEQ ID NO: 3761461 - DNA, 25 bp, Homo sapien
tgccacgttgaccacctgcggtggg

SEQ ID NO: 3761462 - DNA, 25 bp, Homo sapien
cacataagcattgctgacttggctc

SEQ ID NO: 3761463 - DNA, 25 bp, Homo sapien
aatgggagggaaacagctgtctggg

SEQ ID NO: 3761464 - DNA, 25 bp, Homo sapien
cttgagagctccacataagcattgc

SEQ ID NO: 3761465 - DNA, 25 bp, Homo sapien
gagggcaatcgtgtttccccaggcc

SEQ ID NO: 3761466 - DNA, 25 bp, Homo sapien
ctgcccatcggccaagcagcatcct

SEQ ID NO: 3761467 - DNA, 25 bp, Homo sapien
ctgcgggtctctcgcctcagggtat

SEQ ID NO: 3761468 - DNA, 25 bp, Homo sapien
tcgcctcagggtatctccccatttt

SEQ ID NO: 3761469 - DNA, 25 bp, Homo sapien
cagtgtgacagttcctctcggtaag

SEQ ID NO: 3761470 - DNA, 25 bp, Homo sapien
gaattctcttttcgacagtgtgaca

SEQ ID NO: 3761471 - DNA, 25 bp, Homo sapien
catggaatgtccaacagcaaatggg

SEQ ID NO: 3761472 - DNA, 25 bp, Homo sapien
tgctcctaggaaacgtcattgaggt

SEQ ID NO: 3761473 - DNA, 25 bp, Homo sapien
cctggaagcaggttccactgagcta

SEQ ID NO: 3761474 - DNA, 25 bp, Homo sapien
tgagctatccatggggccaaccctg

SEQ ID NO: 3761475 - DNA, 25 bp, Homo sapien
gctggaagcaggttccactgtgact

SEQ ID NO: 3761476 - DNA, 25 bp, Homo sapien
tgcaggttccgctgcgacttccacg

SEQ ID NO: 3761477 - DNA, 25 bp, Homo sapien
tctgataagatcaggacttggtttt

SEQ ID NO: 3761478 - DNA, 25 bp, Homo sapien
gaagattccaaatccttcccgatcc

SEQ ID NO: 3761479 - DNA, 25 bp, Homo sapien
agctcccagtctgataagatcagga

SEQ ID NO: 3761480 - DNA, 25 bp, Homo sapien
gattccaaatccttcccgatccttg

SEQ ID NO: 3761481 - DNA, 25 bp, Homo sapien
tgcataagcccactcaaattagtag

SEQ ID NO: 3761482 - DNA, 25 bp, Homo sapien
tacagaagtttacaaagtgtgtctc

SEQ ID NO: 3761483 - DNA, 25 bp, Homo sapien
tgtatttcaggaccaccatcttcca

SEQ ID NO: 3761484 - DNA, 25 bp, Homo sapien
ccagattttgaagggagtatgctac

SEQ ID NO: 3761485 - DNA, 25 bp, Homo sapien
tctggtgctccctcagataagcatg

SEQ ID NO: 3761486 - DNA, 25 bp, Homo sapien
gaggtgctccgattctctggtgctc

SEQ ID NO: 3761487 - DNA, 25 bp, Homo sapien
cgtttggtgtcgtccacacaggcag

SEQ ID NO: 3761488 - DNA, 25 bp, Homo sapien
agaggtggaggtgctccgattctct

SEQ ID NO: 3761489 - DNA, 25 bp, Homo sapien
cagtgtgtgcaccattgattaacca

SEQ ID NO: 3761490 - DNA, 25 bp, Homo sapien
aagcagggtatgtcacagtgtgtgc

SEQ ID NO: 3761491 - DNA, 25 bp, Homo sapien
tgattaaccacgaaaacagtaatgg

SEQ ID NO: 3761492 - DNA, 25 bp, Homo sapien
tgaaatggctcctccgaaatccgtt

SEQ ID NO: 3761493 - DNA, 25 bp, Homo sapien
tgttcctaactgtcaggagttcagg

SEQ ID NO: 3761494 - DNA, 25 bp, Homo sapien
tggaacctggtgcagtccatccgag

SEQ ID NO: 3761495 - DNA, 25 bp, Homo sapien
cgtctaccatagaggcggcttcggg

SEQ ID NO: 3761496 - DNA, 25 bp, Homo sapien
tccatccgagctgctggacaggctg

SEQ ID NO: 3761497 - DNA, 25 bp, Homo sapien
ttgatattttaaggcctgaagacat

SEQ ID NO: 3761498 - DNA, 25 bp, Homo sapien
acttgatattttaaggcctgaagac

SEQ ID NO: 3761499 - DNA, 25 bp, Homo sapien
tacttgatattttaaggcctgaaga

SEQ ID NO: 3761500 - DNA, 25 bp, Homo sapien
attacttgatattttaaggcctgaa

SEQ ID NO: 3761501 - DNA, 25 bp, Homo sapien
tagagccccactagggacatgctga

SEQ ID NO: 3761502 - DNA, 25 bp, Homo sapien
gtgaaaccctgaacctgacgattgg

SEQ ID NO: 3761503 - DNA, 25 bp, Homo sapien
tgatgcattaggctatccatgacgg

SEQ ID NO: 3761504 - DNA, 25 bp, Homo sapien
taccttgcagcctaatgtggactca

SEQ ID NO: 3761505 - DNA, 25 bp, Homo sapien
tgcctgtcccctcaatgcttgggct

SEQ ID NO: 3761506 - DNA, 25 bp, Homo sapien
cccctcaatgcttgggctaatccag

SEQ ID NO: 3761507 - DNA, 25 bp, Homo sapien
gaggtccagggtcttgtcggcaacc

SEQ ID NO: 3761508 - DNA, 25 bp, Homo sapien
ctcagtctactattgctggcccatg

SEQ ID NO: 3761509 - DNA, 25 bp, Homo sapien
cccacttgaggaaagcgacatccca

SEQ ID NO: 3761510 - DNA, 25 bp, Homo sapien
cacttgaggaaagcgacatcccaga

SEQ ID NO: 3761511 - DNA, 25 bp, Homo sapien
tccccacttgaggaaagcgacatcc

SEQ ID NO: 3761512 - DNA, 25 bp, Homo sapien
tgaggaaagcgacatcccagagaga

SEQ ID NO: 3761513 - DNA, 25 bp, Homo sapien
gaggggccactgtgcatgaggcctg

SEQ ID NO: 3761514 - DNA, 25 bp, Homo sapien
tgcgcagaggggcttcgaggcgttt

SEQ ID NO: 3761515 - DNA, 25 bp, Homo sapien
caagggtcactctctgaaggtggga

SEQ ID NO: 3761516 - DNA, 25 bp, Homo sapien
tgctccgggatgcagcatgcgcaga

SEQ ID NO: 3761517 - DNA, 25 bp, Homo sapien
agaaatgaagtgagcggactccgct

SEQ ID NO: 3761518 - DNA, 25 bp, Homo sapien
ggcctcagacagcctccgtgagaaa

SEQ ID NO: 3761519 - DNA, 25 bp, Homo sapien
acggcaccgagcgtgggcctcagac

SEQ ID NO: 3761520 - DNA, 25 bp, Homo sapien
tttattccacactctcaccacggca

SEQ ID NO: 3761521 - DNA, 25 bp, Homo sapien
ttatctccactgacgaccgctgatg

SEQ ID NO: 3761522 - DNA, 25 bp, Homo sapien
cactgacgaccgctgatgagtgcgg

SEQ ID NO: 3761523 - DNA, 25 bp, Homo sapien
gccagctatcttatctccactgacg

SEQ ID NO: 3761524 - DNA, 25 bp, Homo sapien
accgctgatgagtgcgggcagcctc

SEQ ID NO: 3761525 - DNA, 25 bp, Homo sapien
cctcctgttgaattccaagaacgtg

SEQ ID NO: 3761526 - DNA, 25 bp, Homo sapien
caagaacgtgttgagaaagcagcat

SEQ ID NO: 3761527 - DNA, 25 bp, Homo sapien
atcaggaacccagcgtactgcgtgt

SEQ ID NO: 3761528 - DNA, 25 bp, Homo sapien
aacccagcgtactgcgtgttttcag

SEQ ID NO: 3761529 - DNA, 25 bp, Homo sapien
gcagcaccagtcatcttgaacgtgg

SEQ ID NO: 3761530 - DNA, 25 bp, Homo sapien
tacagccgcgtagcaccaagccaat

SEQ ID NO: 3761531 - DNA, 25 bp, Homo sapien
ccttgcagatcagctacagccgcgt

SEQ ID NO: 3761532 - DNA, 25 bp, Homo sapien
catcttgaacgtggccatcagcttg

SEQ ID NO: 3761533 - DNA, 25 bp, Homo sapien
ttcgggggcaattctcgcccaagca

SEQ ID NO: 3761534 - DNA, 25 bp, Homo sapien
caccgaggctgaaataacccatttc

SEQ ID NO: 3761535 - DNA, 25 bp, Homo sapien
catttcggtggaaacgtctatgcgg

SEQ ID NO: 3761536 - DNA, 25 bp, Homo sapien
acgtctatgcggaatggcctcctcc

SEQ ID NO: 3761537 - DNA, 25 bp, Homo sapien
gggtgatgtgaagaccgcatctcac

SEQ ID NO: 3761538 - DNA, 25 bp, Homo sapien
attctccaggcagcacaacccattg

SEQ ID NO: 3761539 - DNA, 25 bp, Homo sapien
caggccagcgaacggtgctctcctt

SEQ ID NO: 3761540 - DNA, 25 bp, Homo sapien
acccattgtgccagtgagcgccagt

SEQ ID NO: 3761541 - DNA, 25 bp, Homo sapien
cagcccctctgttattggaaatgac

SEQ ID NO: 3761542 - DNA, 25 bp, Homo sapien
tttgacttggatcaattcgctggtg

SEQ ID NO: 3761543 - DNA, 25 bp, Homo sapien
ggatcaattcgctggtgtcgtttgc

SEQ ID NO: 3761544 - DNA, 25 bp, Homo sapien
tgtcgtttgcctccaccgtctttct

SEQ ID NO: 3761545 - DNA, 25 bp, Homo sapien
ttcccgaagggcgatgggcatccac

SEQ ID NO: 3761546 - DNA, 25 bp, Homo sapien
gcatccacggctcatctttaagtga

SEQ ID NO: 3761547 - DNA, 25 bp, Homo sapien
tctaagcacggcacgcagtagtctc

SEQ ID NO: 3761548 - DNA, 25 bp, Homo sapien
ggtgtgacacgcagctctaagcacg

SEQ ID NO: 3761549 - DNA, 25 bp, Homo sapien
tgtcatcaaaaacactatctccatc

SEQ ID NO: 3761550 - DNA, 25 bp, Homo sapien
ctgtcatcaaaaacactatctccat

SEQ ID NO: 3761551 - DNA, 25 bp, Homo sapien
cagagccttcgctgtgtgatccgtc

SEQ ID NO: 3761552 - DNA, 25 bp, Homo sapien
gagccttcgctgtgtgatccgtctg

SEQ ID NO: 3761553 - DNA, 25 bp, Homo sapien
ccttcgctgtgtgatccgtctggga

SEQ ID NO: 3761554 - DNA, 25 bp, Homo sapien
agccttcgctgtgtgatccgtctgg

SEQ ID NO: 3761555 - DNA, 25 bp, Homo sapien
cggtctctggcaatagcaaagcagg

SEQ ID NO: 3761556 - DNA, 25 bp, Homo sapien
caaaatagcactccattccacaggt

SEQ ID NO: 3761557 - DNA, 25 bp, Homo sapien
gaaagcagagctgagtgtcggtctc

SEQ ID NO: 3761558 - DNA, 25 bp, Homo sapien
gtacccaccgtcatccaaaatagca

SEQ ID NO: 3761559 - DNA, 25 bp, Homo sapien
cagactgggtccatcagtgagacca

SEQ ID NO: 3761560 - DNA, 25 bp, Homo sapien
agctggctggccgaactgctaacag

SEQ ID NO: 3761561 - DNA, 25 bp, Homo sapien
cacattcagagctcctgagtgccga

SEQ ID NO: 3761562 - DNA, 25 bp, Homo sapien
tccaaacacccaggtgcctgatggt

SEQ ID NO: 3761563 - DNA, 25 bp, Homo sapien
tcatagagatcctggagagcgaggc

SEQ ID NO: 3761564 - DNA, 25 bp, Homo sapien
cgaggcttcggcaagtgactggcca

SEQ ID NO: 3761565 - DNA, 25 bp, Homo sapien
tattcccggagaagcatgcattaga

SEQ ID NO: 3761566 - DNA, 25 bp, Homo sapien
ttattctcagccgtttccagagcaa

SEQ ID NO: 3761567 - DNA, 25 bp, Homo sapien
tgcggccatgtgaagagtagaccca

SEQ ID NO: 3761568 - DNA, 25 bp, Homo sapien
acaggttccacggaggacacaggag

SEQ ID NO: 3761569 - DNA, 25 bp, Homo sapien
ccagcagggccacaatattcgaaat

SEQ ID NO: 3761570 - DNA, 25 bp, Homo sapien
tcagagctgcatcccatgagtcctt

SEQ ID NO: 3761571 - DNA, 25 bp, Homo sapien
tccaggaagaataacaaggagccac

SEQ ID NO: 3761572 - DNA, 25 bp, Homo sapien
agaataacaaggagccaccgcgggt

SEQ ID NO: 3761573 - DNA, 25 bp, Homo sapien
caccagaggaggctcgtccaggaag

SEQ ID NO: 3761574 - DNA, 25 bp, Homo sapien
ggaagaataacaaggagccaccgcg

SEQ ID NO: 3761575 - DNA, 25 bp, Homo sapien
caacggcacgtgactgtgctttctg

SEQ ID NO: 3761576 - DNA, 25 bp, Homo sapien
tagaaaaccgtgaccgtagaaggca

SEQ ID NO: 3761577 - DNA, 25 bp, Homo sapien
tctgtagaagaagtaacgcatcatt

SEQ ID NO: 3761578 - DNA, 25 bp, Homo sapien
cccagcaggccaagcgggcaggaaa

SEQ ID NO: 3761579 - DNA, 25 bp, Homo sapien
gtgcttagctgtctgcagtgcctgc

SEQ ID NO: 3761580 - DNA, 25 bp, Homo sapien
tgcctgcctgtttgggcggtgatta

SEQ ID NO: 3761581 - DNA, 25 bp, Homo sapien
cttcctgcgtgcttaagtcgtatga

SEQ ID NO: 3761582 - DNA, 25 bp, Homo sapien
gcggtgattagtgtaggtcgcactt

SEQ ID NO: 3761583 - DNA, 25 bp, Homo sapien
aagagagccccacacatctctgagc

SEQ ID NO: 3761584 - DNA, 25 bp, Homo sapien
ttatgctcctggattttaggaggcc

SEQ ID NO: 3761585 - DNA, 25 bp, Homo sapien
ggccaaagttagaggagtcgctgct

SEQ ID NO: 3761586 - DNA, 25 bp, Homo sapien
cacttgtttttatgctcctggattt

SEQ ID NO: 3761587 - DNA, 25 bp, Homo sapien
gatggaacccccatatgcttggccc

SEQ ID NO: 3761588 - DNA, 25 bp, Homo sapien
ctttccattgatggaacccccatat

SEQ ID NO: 3761589 - DNA, 25 bp, Homo sapien
ccattgatggaacccccatatgctt

SEQ ID NO: 3761590 - DNA, 25 bp, Homo sapien
cctcctccccggcttcctgtatgat

SEQ ID NO: 3761591 - DNA, 25 bp, Homo sapien
ctccagctccctcattaccttcagg

SEQ ID NO: 3761592 - DNA, 25 bp, Homo sapien
cagctccctcattaccttcaggaga

SEQ ID NO: 3761593 - DNA, 25 bp, Homo sapien
agcagctctgggactgtagcatttc

SEQ ID NO: 3761594 - DNA, 25 bp, Homo sapien
agctctgggactgtagcatttctcc

SEQ ID NO: 3761595 - DNA, 25 bp, Homo sapien
gaggaaggttagcagtccccacagt

SEQ ID NO: 3761596 - DNA, 25 bp, Homo sapien
ccctcttatcgcctgggctgtctgg

SEQ ID NO: 3761597 - DNA, 25 bp, Homo sapien
cagttggtgtcctgctcttcaggca

SEQ ID NO: 3761598 - DNA, 25 bp, Homo sapien
tctgtcgtgagtgatgggaaccact

SEQ ID NO: 3761599 - DNA, 25 bp, Homo sapien
ggaaaggcggttgtcctcaggcctc

SEQ ID NO: 3761600 - DNA, 25 bp, Homo sapien
gattccaaatcaacagtccagggac

SEQ ID NO: 3761601 - DNA, 25 bp, Homo sapien
ttaggatgagaatccagcatgggga

SEQ ID NO: 3761602 - DNA, 25 bp, Homo sapien
tctcatgggaaaggcggttgtcctc

SEQ ID NO: 3761603 - DNA, 25 bp, Homo sapien
gagtctcctgcggtcgttcagggct

SEQ ID NO: 3761604 - DNA, 25 bp, Homo sapien
ctgtaaaagagtctcctgcggtcgt

SEQ ID NO: 3761605 - DNA, 25 bp, Homo sapien
tgcggtcgttcagggctgccatgaa

SEQ ID NO: 3761606 - DNA, 25 bp, Homo sapien
taaaagagtctcctgcggtcgttca

SEQ ID NO: 3761607 - DNA, 25 bp, Homo sapien
cttcaaacctaaagtctcgatgagg

SEQ ID NO: 3761608 - DNA, 25 bp, Homo sapien
cagctggctgctttagtgactcgaa

SEQ ID NO: 3761609 - DNA, 25 bp, Homo sapien
gtctcgatgaggaaagcagctccct

SEQ ID NO: 3761610 - DNA, 25 bp, Homo sapien
tggacagccaattcctgcaagatta

SEQ ID NO: 3761611 - DNA, 25 bp, Homo sapien
ccctgatgtcagaacgcaagcccag

SEQ ID NO: 3761612 - DNA, 25 bp, Homo sapien
gcttcccctgatgtcagaacgcaag

SEQ ID NO: 3761613 - DNA, 25 bp, Homo sapien
tgctgtgtgatttcacagcttcccc

SEQ ID NO: 3761614 - DNA, 25 bp, Homo sapien
tgtgaggcatgaagccctgtccttg

SEQ ID NO: 3761615 - DNA, 25 bp, Homo sapien
gaaatgaatgttcagggtgaccctg

SEQ ID NO: 3761616 - DNA, 25 bp, Homo sapien
aatgaatgttcagggtgaccctggc

SEQ ID NO: 3761617 - DNA, 25 bp, Homo sapien
ggtgaccctggctcaagaaattgca

SEQ ID NO: 3761618 - DNA, 25 bp, Homo sapien
gaccctggctcaagaaattgcaaac

SEQ ID NO: 3761619 - DNA, 25 bp, Homo sapien
aaaggccagagagcgcccttcagtg

SEQ ID NO: 3761620 - DNA, 25 bp, Homo sapien
agacatggccccacgcaatccagga

SEQ ID NO: 3761621 - DNA, 25 bp, Homo sapien
cacgtgtaactcgacccaaactctg

SEQ ID NO: 3761622 - DNA, 25 bp, Homo sapien
gattccccaattccacgtgtaactc

SEQ ID NO: 3761623 - DNA, 25 bp, Homo sapien
tcttcgcagatcatccaggcagggt

SEQ ID NO: 3761624 - DNA, 25 bp, Homo sapien
ttttggaaccctatttcttcgcaga

SEQ ID NO: 3761625 - DNA, 25 bp, Homo sapien
tgggatctgcccttttggaacccta

SEQ ID NO: 3761626 - DNA, 25 bp, Homo sapien
tataaggcattgtcttgggatctgc

SEQ ID NO: 3761627 - DNA, 25 bp, Homo sapien
ctgccagatcatatacccccgtttt

SEQ ID NO: 3761628 - DNA, 25 bp, Homo sapien
gcctgctggattctgccaccctcca

SEQ ID NO: 3761629 - DNA, 25 bp, Homo sapien
ccatcccatgggtgatatgtaagga

SEQ ID NO: 3761630 - DNA, 25 bp, Homo sapien
gggtttcttcaagctttcagttgga

SEQ ID NO: 3761631 - DNA, 25 bp, Homo sapien
gctgatctattaatccccaagaagt

SEQ ID NO: 3761632 - DNA, 25 bp, Homo sapien
tactggttgctgatctattaatccc

SEQ ID NO: 3761633 - DNA, 25 bp, Homo sapien
gtaaacctcatgaagagaactgaga

SEQ ID NO: 3761634 - DNA, 25 bp, Homo sapien
ccccaagaagtaaacctcatgaaga

SEQ ID NO: 3761635 - DNA, 25 bp, Homo sapien
cctccatggctgtagagttgatgaa

SEQ ID NO: 3761636 - DNA, 25 bp, Homo sapien
agagtgggcatattactctcaccct

SEQ ID NO: 3761637 - DNA, 25 bp, Homo sapien
aaggagagtgggcatattactctca

SEQ ID NO: 3761638 - DNA, 25 bp, Homo sapien
tggctgtagagttgatgaaagaaac

SEQ ID NO: 3761639 - DNA, 25 bp, Homo sapien
gatagagaggacatcttactctcac

SEQ ID NO: 3761640 - DNA, 25 bp, Homo sapien
ggagatagagaggacatcttactct

SEQ ID NO: 3761641 - DNA, 25 bp, Homo sapien
gagaggacatcttactctcaccctc

SEQ ID NO: 3761642 - DNA, 25 bp, Homo sapien
tagagaggacatcttactctcaccc

SEQ ID NO: 3761643 - DNA, 25 bp, Homo sapien
tgccatggctgtacagttggtgaga

SEQ ID NO: 3761644 - DNA, 25 bp, Homo sapien
agagattggacagcttactctcacc

SEQ ID NO: 3761645 - DNA, 25 bp, Homo sapien
gaaacagtgggtgcatattcccctc

SEQ ID NO: 3761646 - DNA, 25 bp, Homo sapien
ggctgtagagttggcgatattactc

SEQ ID NO: 3761647 - DNA, 25 bp, Homo sapien
aagcatgacccctgaagcttgacag

SEQ ID NO: 3761648 - DNA, 25 bp, Homo sapien
ctgggtaacgatgctcctggagctc

SEQ ID NO: 3761649 - DNA, 25 bp, Homo sapien
gggtgcaccgacgtaagcatgaccc

SEQ ID NO: 3761650 - DNA, 25 bp, Homo sapien
gtgaggacctgggtaacgatgctcc

SEQ ID NO: 3761651 - DNA, 25 bp, Homo sapien
tatccaccagcaagtcaatggctag

SEQ ID NO: 3761652 - DNA, 25 bp, Homo sapien
taagtcagaactcctcaccgtgtag

SEQ ID NO: 3761653 - DNA, 25 bp, Homo sapien
tagaaacgacctagatatccaccag

SEQ ID NO: 3761654 - DNA, 25 bp, Homo sapien
tgaatctcgaacacatcacactgag

SEQ ID NO: 3761655 - DNA, 25 bp, Homo sapien
ctcacaacaaagaaaggtgggaggg

SEQ ID NO: 3761656 - DNA, 25 bp, Homo sapien
tctggtcccagtctaaagaagtaac

SEQ ID NO: 3761657 - DNA, 25 bp, Homo sapien
aatggaccatttgggatctggtccc

SEQ ID NO: 3761658 - DNA, 25 bp, Homo sapien
agtgccacgtccacgctgctgtttg

SEQ ID NO: 3761659 - DNA, 25 bp, Homo sapien
atctggcctggccttcccagcaatg

SEQ ID NO: 3761660 - DNA, 25 bp, Homo sapien
tcctcgatggtcttcccagaggagg

SEQ ID NO: 3761661 - DNA, 25 bp, Homo sapien
cactcatgtcctgcttcctcgatgg

SEQ ID NO: 3761662 - DNA, 25 bp, Homo sapien
agtagaaactcacagagacctgctg

SEQ ID NO: 3761663 - DNA, 25 bp, Homo sapien
actgacctcactgcaaagtccacag

SEQ ID NO: 3761664 - DNA, 25 bp, Homo sapien
tgcaaagcttttccaggtgtctctg

SEQ ID NO: 3761665 - DNA, 25 bp, Homo sapien
gataaaagttcccagatcccaggga

SEQ ID NO: 3761666 - DNA, 25 bp, Homo sapien
tcttgttcctcagaacgataaaagt

SEQ ID NO: 3761667 - DNA, 25 bp, Homo sapien
atgtacatgctaccaggtgacctgt

SEQ ID NO: 3761668 - DNA, 25 bp, Homo sapien
ttctgtccacccgaaaaatctcagc

SEQ ID NO: 3761669 - DNA, 25 bp, Homo sapien
ctctgatctgtatacgggtccctgg

SEQ ID NO: 3761670 - DNA, 25 bp, Homo sapien
tccctggtttattctgtccacccga

SEQ ID NO: 3761671 - DNA, 25 bp, Homo sapien
ctgatctgtatacgggtccctggtt

SEQ ID NO: 3761672 - DNA, 25 bp, Homo sapien
tagagctcaatttaatggcaaagat

SEQ ID NO: 3761673 - DNA, 25 bp, Homo sapien
acatgagctgttcatattgtcattt

SEQ ID NO: 3761674 - DNA, 25 bp, Homo sapien
aaagcagaaaatggtcctatagagc

SEQ ID NO: 3761675 - DNA, 25 bp, Homo sapien
tttctctgggacctaatatggggga

SEQ ID NO: 3761676 - DNA, 25 bp, Homo sapien
gggataggcctgcggcattctgagc

SEQ ID NO: 3761677 - DNA, 25 bp, Homo sapien
acaagagtgcaacagggcgctgggc

SEQ ID NO: 3761678 - DNA, 25 bp, Homo sapien
tgcaacagggcgctgggcaccttgg

SEQ ID NO: 3761679 - DNA, 25 bp, Homo sapien
aagagtgcaacagggcgctgggcac

SEQ ID NO: 3761680 - DNA, 25 bp, Homo sapien
ccacttctcagggatcagtctcagg

SEQ ID NO: 3761681 - DNA, 25 bp, Homo sapien
tgcggtgatcaccaggaagtaagga

SEQ ID NO: 3761682 - DNA, 25 bp, Homo sapien
ctgaatgcggtgatcaccaggaagt

SEQ ID NO: 3761683 - DNA, 25 bp, Homo sapien
acttctcagggatcagtctcaggcc

SEQ ID NO: 3761684 - DNA, 25 bp, Homo sapien
ccttgaaatgggcactggtggattt

SEQ ID NO: 3761685 - DNA, 25 bp, Homo sapien
ccttttttccaggctgtgttgggag

SEQ ID NO: 3761686 - DNA, 25 bp, Homo sapien
gatttcaattccagccttccggaag

SEQ ID NO: 3761687 - DNA, 25 bp, Homo sapien
cgtccacagggaagcgtatctgggc

SEQ ID NO: 3761688 - DNA, 25 bp, Homo sapien
ctcaggtccacaggcagtggaagga

SEQ ID NO: 3761689 - DNA, 25 bp, Homo sapien
tggctgagctcccagaaattggact

SEQ ID NO: 3761690 - DNA, 25 bp, Homo sapien
ttctgccgccagaaggcgaagggca

SEQ ID NO: 3761691 - DNA, 25 bp, Homo sapien
gctcagtgcatgagagcagcgctct

SEQ ID NO: 3761692 - DNA, 25 bp, Homo sapien
ttagcccttctattctccagcgcag

SEQ ID NO: 3761693 - DNA, 25 bp, Homo sapien
tcccataagcccgtgcttctatggg

SEQ ID NO: 3761694 - DNA, 25 bp, Homo sapien
gcccttcttcgtgggtgagcactga

SEQ ID NO: 3761695 - DNA, 25 bp, Homo sapien
catcctccggtgagccgtcgagtgg

SEQ ID NO: 3761696 - DNA, 25 bp, Homo sapien
tcccatcgcagggtaactggcacca

SEQ ID NO: 3761697 - DNA, 25 bp, Homo sapien
acctggaggatccactctccgtccg

SEQ ID NO: 3761698 - DNA, 25 bp, Homo sapien
gaggatccactctccgtccgtcctt

SEQ ID NO: 3761699 - DNA, 25 bp, Homo sapien
tccgtccttcccgacctcaggctgc

SEQ ID NO: 3761700 - DNA, 25 bp, Homo sapien
ctccgtccgtccttcccgacctcag

SEQ ID NO: 3761701 - DNA, 25 bp, Homo sapien
tgtggcgctcccgtcatctctagag

SEQ ID NO: 3761702 - DNA, 25 bp, Homo sapien
cgaggctcgcgcacctgcgatgcgg

SEQ ID NO: 3761703 - DNA, 25 bp, Homo sapien
tgcgatgcggccccactagcaggga

SEQ ID NO: 3761704 - DNA, 25 bp, Homo sapien
tggcgcgccccgcaaacgatgtgac

SEQ ID NO: 3761705 - DNA, 25 bp, Homo sapien
tcctcgccatggacgcggacgactc

SEQ ID NO: 3761706 - DNA, 25 bp, Homo sapien
ccaagggctccttgcggaagttcct

SEQ ID NO: 3761707 - DNA, 25 bp, Homo sapien
catcggcgtgctgaccagcggcggg

SEQ ID NO: 3761708 - DNA, 25 bp, Homo sapien
aagaagcccgcgcccggaagcggca

SEQ ID NO: 3761709 - DNA, 25 bp, Homo sapien
tccaggtttccccaatgtgagatgc

SEQ ID NO: 3761710 - DNA, 25 bp, Homo sapien
gactttgaccaggattttgacagag

SEQ ID NO: 3761711 - DNA, 25 bp, Homo sapien
gagtcccatgggattgttttctgac

SEQ ID NO: 3761712 - DNA, 25 bp, Homo sapien
tacatatgtaaatgatctgatccga

SEQ ID NO: 3761713 - DNA, 25 bp, Homo sapien
tgtgacgccaaaagcccacgttgcg

SEQ ID NO: 3761714 - DNA, 25 bp, Homo sapien
gacagcccgccagtaaatgctggta

SEQ ID NO: 3761715 - DNA, 25 bp, Homo sapien
ccacgttgcgggctgtgaaagccct

SEQ ID NO: 3761716 - DNA, 25 bp, Homo sapien
tgaaagccctcattgcaggtgtgca

SEQ ID NO: 3761717 - DNA, 25 bp, Homo sapien
acccttcgagttgaagagtccaggc

SEQ ID NO: 3761718 - DNA, 25 bp, Homo sapien
tagagtgaccatagcgtaaggtcct

SEQ ID NO: 3761719 - DNA, 25 bp, Homo sapien
cacgggctgtgtttgatgggtaatt

SEQ ID NO: 3761720 - DNA, 25 bp, Homo sapien
tgggtaattcatccattagagtgac

SEQ ID NO: 3761721 - DNA, 25 bp, Homo sapien
tgggaaatcctagtgaacgggtcca

SEQ ID NO: 3761722 - DNA, 25 bp, Homo sapien
aatcctagtgaacgggtccatttct

SEQ ID NO: 3761723 - DNA, 25 bp, Homo sapien
cagaaggtgggaaatcctagtgaac

SEQ ID NO: 3761724 - DNA, 25 bp, Homo sapien
tcctagtgaacgggtccatttcttc

SEQ ID NO: 3761725 - DNA, 25 bp, Homo sapien
ctctgagtgtcagggcgatggcatc

SEQ ID NO: 3761726 - DNA, 25 bp, Homo sapien
agtatctccaacatcggcgaacgtc

SEQ ID NO: 3761727 - DNA, 25 bp, Homo sapien
cctttgactctcaggatgcggagca

SEQ ID NO: 3761728 - DNA, 25 bp, Homo sapien
gcaattcttggtgggcggtcctttg

SEQ ID NO: 3761729 - DNA, 25 bp, Homo sapien
tgccttccactaacacgcgtgcgtg

SEQ ID NO: 3761730 - DNA, 25 bp, Homo sapien
tgcgtgctcaccgagctggctgact

SEQ ID NO: 3761731 - DNA, 25 bp, Homo sapien
gtagctgttcccgacctgactctac

SEQ ID NO: 3761732 - DNA, 25 bp, Homo sapien
cctgactctacagggtctttaccag

SEQ ID NO: 3761733 - DNA, 25 bp, Homo sapien
cctagagagccgttcagagctgacc

SEQ ID NO: 3761734 - DNA, 25 bp, Homo sapien
tggtgtttcccaagtctaagcctag

SEQ ID NO: 3761735 - DNA, 25 bp, Homo sapien
tagtttggaacgctggtgtttccca

SEQ ID NO: 3761736 - DNA, 25 bp, Homo sapien
tattaaggaatgttgtagctttagg

SEQ ID NO: 3761737 - DNA, 25 bp, Homo sapien
cgcgtgctccaggaatactctgaaa

SEQ ID NO: 3761738 - DNA, 25 bp, Homo sapien
ttggaagcagcgtccgggatagcgc

SEQ ID NO: 3761739 - DNA, 25 bp, Homo sapien
ccgttaggggtgcatggttgactcc

SEQ ID NO: 3761740 - DNA, 25 bp, Homo sapien
aaagctgatgccgttaggggtgcat

SEQ ID NO: 3761741 - DNA, 25 bp, Homo sapien
gatgtcctgccctgtgtaacctacg

SEQ ID NO: 3761742 - DNA, 25 bp, Homo sapien
tactcattagaaacgcagccagcga

SEQ ID NO: 3761743 - DNA, 25 bp, Homo sapien
ggccacagcgtttgatccgaggtgc

SEQ ID NO: 3761744 - DNA, 25 bp, Homo sapien
taacctacggattcacgaagtgtcg

SEQ ID NO: 3761745 - DNA, 25 bp, Homo sapien
ccaatagagaaggtatctgggaaag

SEQ ID NO: 3761746 - DNA, 25 bp, Homo sapien
tgtttccgtgggagagatccagccg

SEQ ID NO: 3761747 - DNA, 25 bp, Homo sapien
cagctgccgactgtgcccaatagag

SEQ ID NO: 3761748 - DNA, 25 bp, Homo sapien
cagccgtggctgtcgacagcagctg

SEQ ID NO: 3761749 - DNA, 25 bp, Homo sapien
taggtctgcacgtctgtcgctgagc

SEQ ID NO: 3761750 - DNA, 25 bp, Homo sapien
tgccctcgtgggaaggatccttctg

SEQ ID NO: 3761751 - DNA, 25 bp, Homo sapien
cacataggtacctggccctggtgag

SEQ ID NO: 3761752 - DNA, 25 bp, Homo sapien
caaactctcggaggtaatgcgggtc

SEQ ID NO: 3761753 - DNA, 25 bp, Homo sapien
tctctcccgactctctgctgctgga

SEQ ID NO: 3761754 - DNA, 25 bp, Homo sapien
tgtctgggccctgtgtccgctcacg

SEQ ID NO: 3761755 - DNA, 25 bp, Homo sapien
ctggagcctgtgtgcaatacaacct

SEQ ID NO: 3761756 - DNA, 25 bp, Homo sapien
tgtgaggcctttcgggtgcagctgc

SEQ ID NO: 3761757 - DNA, 25 bp, Homo sapien
aatgactcagaagttggacggcagg

SEQ ID NO: 3761758 - DNA, 25 bp, Homo sapien
tgggagcccattccgcttacgtcac

SEQ ID NO: 3761759 - DNA, 25 bp, Homo sapien
cttgccgagcccgtagaggttccgg

SEQ ID NO: 3761760 - DNA, 25 bp, Homo sapien
tcatgggcaggcttggtttagaaca

SEQ ID NO: 3761761 - DNA, 25 bp, Homo sapien
cagagccctgtttactgacggccga

SEQ ID NO: 3761762 - DNA, 25 bp, Homo sapien
gcgtcctcaggaaatcagggtgtga

SEQ ID NO: 3761763 - DNA, 25 bp, Homo sapien
tgacggccgaacagtgtgaatcctg

SEQ ID NO: 3761764 - DNA, 25 bp, Homo sapien
gaactgggctcgtctggccatagaa

SEQ ID NO: 3761765 - DNA, 25 bp, Homo sapien
tgaaaagcataaggagactcccacg

SEQ ID NO: 3761766 - DNA, 25 bp, Homo sapien
tgagctcgggtattccacagtaaag

SEQ ID NO: 3761767 - DNA, 25 bp, Homo sapien
gcttctcggagaaacagccggctcc

SEQ ID NO: 3761768 - DNA, 25 bp, Homo sapien
taaagtgagcgacatcacctgtctg

SEQ ID NO: 3761769 - DNA, 25 bp, Homo sapien
ggtgtggtccttacagccgtgtgcc

SEQ ID NO: 3761770 - DNA, 25 bp, Homo sapien
gataccggagcgcatttcccagtgg

SEQ ID NO: 3761771 - DNA, 25 bp, Homo sapien
ggtgtacacgggctcaagaaccgct

SEQ ID NO: 3761772 - DNA, 25 bp, Homo sapien
gctgtgactttggttaacaccctga

SEQ ID NO: 3761773 - DNA, 25 bp, Homo sapien
ggggtcacgtccgtgacttggccac

SEQ ID NO: 3761774 - DNA, 25 bp, Homo sapien
tcagctgcagacaggacggtggcca

SEQ ID NO: 3761775 - DNA, 25 bp, Homo sapien
tggccaccgtgacatgtggggtcac

SEQ ID NO: 3761776 - DNA, 25 bp, Homo sapien
ctgcagacaggacggtggccaccgt

SEQ ID NO: 3761777 - DNA, 25 bp, Homo sapien
tcggctgccgtgagggataccagtc

SEQ ID NO: 3761778 - DNA, 25 bp, Homo sapien
ggtgaatgccattagggtccggcca

SEQ ID NO: 3761779 - DNA, 25 bp, Homo sapien
gctttgctgcgggttccatgctgta

SEQ ID NO: 3761780 - DNA, 25 bp, Homo sapien
tcctttagcaccttgtagatgtcca

SEQ ID NO: 3761781 - DNA, 25 bp, Homo sapien
caaaaccgtgaactggagggactgg

SEQ ID NO: 3761782 - DNA, 25 bp, Homo sapien
aagttcaggctacgggaatcacagg

SEQ ID NO: 3761783 - DNA, 25 bp, Homo sapien
tagagatcctgaacgttggccagca

SEQ ID NO: 3761784 - DNA, 25 bp, Homo sapien
tgtgtttctggcaagaccgctcgct

SEQ ID NO: 3761785 - DNA, 25 bp, Homo sapien
ctctgtaacgatgaagcaagcgctt

SEQ ID NO: 3761786 - DNA, 25 bp, Homo sapien
ccaagaaagagctagcgcggaggct

SEQ ID NO: 3761787 - DNA, 25 bp, Homo sapien
gactcctgccagagtagacacggct

SEQ ID NO: 3761788 - DNA, 25 bp, Homo sapien
cacttgcttctcaggacggtttcca

SEQ ID NO: 3761789 - DNA, 25 bp, Homo sapien
tagaatgaggtaaaacgagcctgcc

SEQ ID NO: 3761790 - DNA, 25 bp, Homo sapien
tattgtctcgggctcctgtgcagtc

SEQ ID NO: 3761791 - DNA, 25 bp, Homo sapien
cgagcctgccagtacaaagtgaaaa

SEQ ID NO: 3761792 - DNA, 25 bp, Homo sapien
cagtcaagggctttggcgacactca

SEQ ID NO: 3761793 - DNA, 25 bp, Homo sapien
cattggatgatccaggatgggtcct

SEQ ID NO: 3761794 - DNA, 25 bp, Homo sapien
gttctcgggtccgaggatggccagg

SEQ ID NO: 3761795 - DNA, 25 bp, Homo sapien
tcattggatgatccaggatgggtcc

SEQ ID NO: 3761796 - DNA, 25 bp, Homo sapien
tcgggttctcgggtccgaggatggc

SEQ ID NO: 3761797 - DNA, 25 bp, Homo sapien
ggcaggcgtggtcagcaaggactgg

SEQ ID NO: 3761798 - DNA, 25 bp, Homo sapien
ttccagtcccagacgctgtctcccc

SEQ ID NO: 3761799 - DNA, 25 bp, Homo sapien
agcaaggactggcttctgcgtgagc

SEQ ID NO: 3761800 - DNA, 25 bp, Homo sapien
tgagcgctgttagagtcagcacgag

SEQ ID NO: 3761801 - DNA, 25 bp, Homo sapien
agcttgtcgtggctgacagcaaaga

SEQ ID NO: 3761802 - DNA, 25 bp, Homo sapien
tgtgggcctgcttcatctcatccga

SEQ ID NO: 3761803 - DNA, 25 bp, Homo sapien
ccaggagcttgtcgtggctgacagc

SEQ ID NO: 3761804 - DNA, 25 bp, Homo sapien
gaggccgtacaagaagtggtccatt

SEQ ID NO: 3761805 - DNA, 25 bp, Homo sapien
tgcatgtttcaaccacagggatgtg

SEQ ID NO: 3761806 - DNA, 25 bp, Homo sapien
gatgctgtgagcaaaagcggctcca

SEQ ID NO: 3761807 - DNA, 25 bp, Homo sapien
ttctcgcccggatgtcaggaagcgt

SEQ ID NO: 3761808 - DNA, 25 bp, Homo sapien
catgcatgccgggaacttggaaaac

SEQ ID NO: 3761809 - DNA, 25 bp, Homo sapien
gacagaaagtttggcttcgtcgatg

SEQ ID NO: 3761810 - DNA, 25 bp, Homo sapien
tgtgaattttccagacttagcccag

SEQ ID NO: 3761811 - DNA, 25 bp, Homo sapien
cgacaggagcatctacggttgagaa

SEQ ID NO: 3761812 - DNA, 25 bp, Homo sapien
gagcgtctctattgtatttgggtcc

SEQ ID NO: 3761813 - DNA, 25 bp, Homo sapien
tgagttttgcgcctccaccataagc

SEQ ID NO: 3761814 - DNA, 25 bp, Homo sapien
tgaaaatcccattgtggctgagttt

SEQ ID NO: 3761815 - DNA, 25 bp, Homo sapien
tttggcagtcatcaaacgtgcaagg

SEQ ID NO: 3761816 - DNA, 25 bp, Homo sapien
cataagcaccgcctttttctcgaat

SEQ ID NO: 3761817 - DNA, 25 bp, Homo sapien
gcacatttctaggaacagggccaat

SEQ ID NO: 3761818 - DNA, 25 bp, Homo sapien
tgaagacgcccgtggtgagatcagc

SEQ ID NO: 3761819 - DNA, 25 bp, Homo sapien
caaacagttggcttagattacaggg

SEQ ID NO: 3761820 - DNA, 25 bp, Homo sapien
gaacggtaacatcacattcaagctg

SEQ ID NO: 3761821 - DNA, 25 bp, Homo sapien
ctgtggtgggagaagtcacgaccat

SEQ ID NO: 3761822 - DNA, 25 bp, Homo sapien
tcaaataggccaggtgggaaatcaa

SEQ ID NO: 3761823 - DNA, 25 bp, Homo sapien
accatctcgtgtgggtcctccagga

SEQ ID NO: 3761824 - DNA, 25 bp, Homo sapien
caaggaaggagtgggcgtgttccca

SEQ ID NO: 3761825 - DNA, 25 bp, Homo sapien
cagagtctggctcacgaggttctcc

SEQ ID NO: 3761826 - DNA, 25 bp, Homo sapien
ggtccccaaaggtgcacgtctgtga

SEQ ID NO: 3761827 - DNA, 25 bp, Homo sapien
ttctccaatcaggacaggctgccca

SEQ ID NO: 3761828 - DNA, 25 bp, Homo sapien
gtgtcatacacacccaactgacggg

SEQ ID NO: 3761829 - DNA, 25 bp, Homo sapien
cattcacccacgtaattcaccggga

SEQ ID NO: 3761830 - DNA, 25 bp, Homo sapien
tgcattcacccacgtaattcaccgg

SEQ ID NO: 3761831 - DNA, 25 bp, Homo sapien
acagttcggatgcattcacccacgt

SEQ ID NO: 3761832 - DNA, 25 bp, Homo sapien
cggatgcattcacccacgtaattca

SEQ ID NO: 3761833 - DNA, 25 bp, Homo sapien
gacacggtatggtcagaggcggctg

SEQ ID NO: 3761834 - DNA, 25 bp, Homo sapien
gtcactccacacaatttctcactgt

SEQ ID NO: 3761835 - DNA, 25 bp, Homo sapien
gtcccatctccgtgacactctgcag

SEQ ID NO: 3761836 - DNA, 25 bp, Homo sapien
gcgcgagagcaaggcactgcagttc

SEQ ID NO: 3761837 - DNA, 25 bp, Homo sapien
ccaatcttgacgtgatgccttaacg

SEQ ID NO: 3761838 - DNA, 25 bp, Homo sapien
tcttgacgtgatgccttaacgtata

SEQ ID NO: 3761839 - DNA, 25 bp, Homo sapien
agtcctccaatcttgacgtgatgcc

SEQ ID NO: 3761840 - DNA, 25 bp, Homo sapien
cctccaatcttgacgtgatgcctta

SEQ ID NO: 3761841 - DNA, 25 bp, Homo sapien
actggcatcgactcagctcgggagc

SEQ ID NO: 3761842 - DNA, 25 bp, Homo sapien
gctgagtcgcggaaaggatctgtca

SEQ ID NO: 3761843 - DNA, 25 bp, Homo sapien
tacgttcaaagaagggtgagttgcc

SEQ ID NO: 3761844 - DNA, 25 bp, Homo sapien
tgagttgcccgggaggagaccaccc

SEQ ID NO: 3761845 - DNA, 25 bp, Homo sapien
tgaccagcttcctaatgacctggga

SEQ ID NO: 3761846 - DNA, 25 bp, Homo sapien
catggggaacgtgggcatctccacc

SEQ ID NO: 3761847 - DNA, 25 bp, Homo sapien
catgaccagcttcctaatgacctgg

SEQ ID NO: 3761848 - DNA, 25 bp, Homo sapien
agccatggggaacgtgggcatctcc

SEQ ID NO: 3761849 - DNA, 25 bp, Homo sapien
tgaggcatctgctgaggagtcgcat

SEQ ID NO: 3761850 - DNA, 25 bp, Homo sapien
cctttttactccgaccgatgcttct

SEQ ID NO: 3761851 - DNA, 25 bp, Homo sapien
ttcgaccgctttttctgtctgaggc

SEQ ID NO: 3761852 - DNA, 25 bp, Homo sapien
tccgaccgatgcttctaaggaagtc

SEQ ID NO: 3761853 - DNA, 25 bp, Homo sapien
tttaacaagtgtttcttgatacgcg

SEQ ID NO: 3761854 - DNA, 25 bp, Homo sapien
caagtgtttcttgatacgcgggagc

SEQ ID NO: 3761855 - DNA, 25 bp, Homo sapien
tgtttcttgatacgcgggagcttcc

SEQ ID NO: 3761856 - DNA, 25 bp, Homo sapien
tgatacgcgggagcttcctcaggat

SEQ ID NO: 3761857 - DNA, 25 bp, Homo sapien
tgatccatcccgctgaaggtctcct

SEQ ID NO: 3761858 - DNA, 25 bp, Homo sapien
tccggcctgccctgatggatgcgta

SEQ ID NO: 3761859 - DNA, 25 bp, Homo sapien
gtcaggaattccattggcgagctcc

SEQ ID NO: 3761860 - DNA, 25 bp, Homo sapien
tggatgcgtacaggtgcccagagtc

SEQ ID NO: 3761861 - DNA, 25 bp, Homo sapien
catggaaagttgattaagttttcag

SEQ ID NO: 3761862 - DNA, 25 bp, Homo sapien
acaaagatctctagtacaccccaag

SEQ ID NO: 3761863 - DNA, 25 bp, Homo sapien
gaatggacaactcttgcaaataaag

SEQ ID NO: 3761864 - DNA, 25 bp, Homo sapien
tataagtccatatgaactacaagta

SEQ ID NO: 3761865 - DNA, 25 bp, Homo sapien
aaatatttcactccatagctgcatc

SEQ ID NO: 3761866 - DNA, 25 bp, Homo sapien
tggcaggtttcgatccaggcagaga

SEQ ID NO: 3761867 - DNA, 25 bp, Homo sapien
tcactccatagctgcatcatgtctg

SEQ ID NO: 3761868 - DNA, 25 bp, Homo sapien
atcatgtctggcaggtttcgatcca

SEQ ID NO: 3761869 - DNA, 25 bp, Homo sapien
gggccgaatcgaacagtgacagaca

SEQ ID NO: 3761870 - DNA, 25 bp, Homo sapien
ggaattagggccgaatcgaacagtg

SEQ ID NO: 3761871 - DNA, 25 bp, Homo sapien
tagggccgaatcgaacagtgacaga

SEQ ID NO: 3761872 - DNA, 25 bp, Homo sapien
cgaatcgaacagtgacagacactgg

SEQ ID NO: 3761873 - DNA, 25 bp, Homo sapien
gcactcatccctccggtcttcaatt

SEQ ID NO: 3761874 - DNA, 25 bp, Homo sapien
tcccggtagtcaagaaggccgcagc

SEQ ID NO: 3761875 - DNA, 25 bp, Homo sapien
tgctcgtaggtgtccatgtgtgagt

SEQ ID NO: 3761876 - DNA, 25 bp, Homo sapien
agcctgctcccggtagtcaagaagg

SEQ ID NO: 3761877 - DNA, 25 bp, Homo sapien
gaagttagcgtccagaggcacaaga

SEQ ID NO: 3761878 - DNA, 25 bp, Homo sapien
ggtgtcacagccacatagctttctg

SEQ ID NO: 3761879 - DNA, 25 bp, Homo sapien
gcagagaagcatcgccccgattaca

SEQ ID NO: 3761880 - DNA, 25 bp, Homo sapien
tgctcgaatgtctggtagcctgggc

SEQ ID NO: 3761881 - DNA, 25 bp, Homo sapien
cacaagggtatgttgcgactcgtac

SEQ ID NO: 3761882 - DNA, 25 bp, Homo sapien
caccatacttacacactaacattgt

SEQ ID NO: 3761883 - DNA, 25 bp, Homo sapien
gttgtgattcactgaaggtaattcc

SEQ ID NO: 3761884 - DNA, 25 bp, Homo sapien
ggtaattcctactgatgcattagaa

SEQ ID NO: 3761885 - DNA, 25 bp, Homo sapien
gcccggaaatacaccatgccattgg

SEQ ID NO: 3761886 - DNA, 25 bp, Homo sapien
gagaaggcccggaaatacaccatgc

SEQ ID NO: 3761887 - DNA, 25 bp, Homo sapien
gggagtgtgttcaggctggagaagg

SEQ ID NO: 3761888 - DNA, 25 bp, Homo sapien
gggctgggcgcagtactgaacaggg

SEQ ID NO: 3761889 - DNA, 25 bp, Homo sapien
cccgggaaaagcgtagcgttcacag

SEQ ID NO: 3761890 - DNA, 25 bp, Homo sapien
ccgggaaaagcgtagcgttcacagt

SEQ ID NO: 3761891 - DNA, 25 bp, Homo sapien
gggaaaagcgtagcgttcacagtga

SEQ ID NO: 3761892 - DNA, 25 bp, Homo sapien
ggaaaagcgtagcgttcacagtgac

SEQ ID NO: 3761893 - DNA, 25 bp, Homo sapien
caggtatggtgggttcaatatcgga

SEQ ID NO: 3761894 - DNA, 25 bp, Homo sapien
cggaaactttcaacgctggcagaca

SEQ ID NO: 3761895 - DNA, 25 bp, Homo sapien
gctttgttgactccgtaattctaga

SEQ ID NO: 3761896 - DNA, 25 bp, Homo sapien
tgtcaggaccacgtccaactctgtg

SEQ ID NO: 3761897 - DNA, 25 bp, Homo sapien
gacaagcctgacaatttctcacaga

SEQ ID NO: 3761898 - DNA, 25 bp, Homo sapien
catcatagtactgggcctttctagc

SEQ ID NO: 3761899 - DNA, 25 bp, Homo sapien
ctcaactgagttctgacaactgtgg

SEQ ID NO: 3761900 - DNA, 25 bp, Homo sapien
tgaagccaccacatcatagtactgg

SEQ ID NO: 3761901 - DNA, 25 bp, Homo sapien
cgtgatacttgtcatctggcctcat

SEQ ID NO: 3761902 - DNA, 25 bp, Homo sapien
tgtgcctgcttctcgtgatacttgt

SEQ ID NO: 3761903 - DNA, 25 bp, Homo sapien
ctttctcgtagatctgctgcctgtc

SEQ ID NO: 3761904 - DNA, 25 bp, Homo sapien
ccgggggacagagcctcgaccttct

SEQ ID NO: 3761905 - DNA, 25 bp, Homo sapien
gataaagtcagcttatgctggttat

SEQ ID NO: 3761906 - DNA, 25 bp, Homo sapien
cgataaagtcagcttatgctggtta

SEQ ID NO: 3761907 - DNA, 25 bp, Homo sapien
ataaagtcagcttatgctggttatt

SEQ ID NO: 3761908 - DNA, 25 bp, Homo sapien
tctgaatttagctaactgatttccc

SEQ ID NO: 3761909 - DNA, 25 bp, Homo sapien
ctgtctgaatttagctaactgattt

SEQ ID NO: 3761910 - DNA, 25 bp, Homo sapien
ccccatcatggttccagcaagaagc

SEQ ID NO: 3761911 - DNA, 25 bp, Homo sapien
tgaatttagctaactgatttcccaa

SEQ ID NO: 3761912 - DNA, 25 bp, Homo sapien
cagttaagctagtaacaagacaaaa

SEQ ID NO: 3761913 - DNA, 25 bp, Homo sapien
ccaacagcccagacttgatactaaa

SEQ ID NO: 3761914 - DNA, 25 bp, Homo sapien
gcagctggtaccacagtacaacctc

SEQ ID NO: 3761915 - DNA, 25 bp, Homo sapien
caacagattactagttataaaccct

SEQ ID NO: 3761916 - DNA, 25 bp, Homo sapien
aagcctcaattcgatcatcttcaaa

SEQ ID NO: 3761917 - DNA, 25 bp, Homo sapien
atgaagtaaagcctcaattcgatca

SEQ ID NO: 3761918 - DNA, 25 bp, Homo sapien
catcagcccaaagctggtagactga

SEQ ID NO: 3761919 - DNA, 25 bp, Homo sapien
ccaaagctggtagactgatgtttca

SEQ ID NO: 3761920 - DNA, 25 bp, Homo sapien
aagaacaaagatgggccagacacaa

SEQ ID NO: 3761921 - DNA, 25 bp, Homo sapien
taaagaatacaatgaagaacaaaga

SEQ ID NO: 3761922 - DNA, 25 bp, Homo sapien
tacaatgaagaacaaagatgggcca

SEQ ID NO: 3761923 - DNA, 25 bp, Homo sapien
tgaagaacaaagatgggccagacac

SEQ ID NO: 3761924 - DNA, 25 bp, Homo sapien
tttctccgcaatcccttggaggccg

SEQ ID NO: 3761925 - DNA, 25 bp, Homo sapien
tctatgaggcttctgacggtctcaa

SEQ ID NO: 3761926 - DNA, 25 bp, Homo sapien
tcaactacttcatcaatcgttctgt

SEQ ID NO: 3761927 - DNA, 25 bp, Homo sapien
actaaagtaggcctccctcgtgtag

SEQ ID NO: 3761928 - DNA, 25 bp, Homo sapien
taatgtgaaggcttcaaatgtgtcg

SEQ ID NO: 3761929 - DNA, 25 bp, Homo sapien
atcaggagaaaagtctgtgccaagg

SEQ ID NO: 3761930 - DNA, 25 bp, Homo sapien
caatcaaggctttgtaaaagggaga

SEQ ID NO: 3761931 - DNA, 25 bp, Homo sapien
gaaggcttcaaatgtgtcggtgatg

SEQ ID NO: 3761932 - DNA, 25 bp, Homo sapien
acgctgatggttgtttgtttagagg

SEQ ID NO: 3761933 - DNA, 25 bp, Homo sapien
tccggtaagaggaagctaacgctga

SEQ ID NO: 3761934 - DNA, 25 bp, Homo sapien
gatctgtagcaaatgaatccgggcc

SEQ ID NO: 3761935 - DNA, 25 bp, Homo sapien
gaatccgggccacatgttatctgga

SEQ ID NO: 3761936 - DNA, 25 bp, Homo sapien
tgtctgagctggcaccacggtgctt

SEQ ID NO: 3761937 - DNA, 25 bp, Homo sapien
tgcttcctcgtgaatttgtttcaga

SEQ ID NO: 3761938 - DNA, 25 bp, Homo sapien
caccacggtgcttggttcaattttc

SEQ ID NO: 3761939 - DNA, 25 bp, Homo sapien
tctaatggaaaattaccgtacgtga

SEQ ID NO: 3761940 - DNA, 25 bp, Homo sapien
tattggaagagcacttctccgtgcc

SEQ ID NO: 3761941 - DNA, 25 bp, Homo sapien
caaccaagctagatgtgaggcaaca

SEQ ID NO: 3761942 - DNA, 25 bp, Homo sapien
tgctaaatgtgagagaagccatgcc

SEQ ID NO: 3761943 - DNA, 25 bp, Homo sapien
tccgtgccaaggagagggcttcaag

SEQ ID NO: 3761944 - DNA, 25 bp, Homo sapien
tagtgagtggcatgaaactgcttaa

SEQ ID NO: 3761945 - DNA, 25 bp, Homo sapien
cactgagtacgtgtggtcaggaaga

SEQ ID NO: 3761946 - DNA, 25 bp, Homo sapien
taagctccgggatgcacagtgggtc

SEQ ID NO: 3761947 - DNA, 25 bp, Homo sapien
taagctgctcccatgtaagctccgg

SEQ ID NO: 3761948 - DNA, 25 bp, Homo sapien
tcatctcattaaagacgactccttt

SEQ ID NO: 3761949 - DNA, 25 bp, Homo sapien
tctcatgttccagccgccatccttc

SEQ ID NO: 3761950 - DNA, 25 bp, Homo sapien
gtctgggggtcgctcggattctcat

SEQ ID NO: 3761951 - DNA, 25 bp, Homo sapien
aaacgctcccttcatctcattaaag

SEQ ID NO: 3761952 - DNA, 25 bp, Homo sapien
aaaggtggcatccaaatacaccgag

SEQ ID NO: 3761953 - DNA, 25 bp, Homo sapien
taaacatgggaaaaaggtggcatcc

SEQ ID NO: 3761954 - DNA, 25 bp, Homo sapien
agaaatccagctcgcgtaaacatgg

SEQ ID NO: 3761955 - DNA, 25 bp, Homo sapien
catccaaatacaccgagaggagatt

SEQ ID NO: 3761956 - DNA, 25 bp, Homo sapien
tggaaaatggatacagagtataatc

SEQ ID NO: 3761957 - DNA, 25 bp, Homo sapien
aatggatacagagtataatcactag

SEQ ID NO: 3761958 - DNA, 25 bp, Homo sapien
ttttgtgtggaaaatggatacagag

SEQ ID NO: 3761959 - DNA, 25 bp, Homo sapien
cttgggattttgtgtggaaaatgga

SEQ ID NO: 3761960 - DNA, 25 bp, Homo sapien
tgtgaggaacaccagtactgtccat

SEQ ID NO: 3761961 - DNA, 25 bp, Homo sapien
gcacggatatttctgagacccacaa

SEQ ID NO: 3761962 - DNA, 25 bp, Homo sapien
caaaggacggtatgctcaagaatgt

SEQ ID NO: 3761963 - DNA, 25 bp, Homo sapien
tactgtccatgggagtagtacggaa

SEQ ID NO: 3761964 - DNA, 25 bp, Homo sapien
ctctggccaggtgtaaatacctggc

SEQ ID NO: 3761965 - DNA, 25 bp, Homo sapien
tctggccaggtgtaaatacctggct

SEQ ID NO: 3761966 - DNA, 25 bp, Homo sapien
cactgcagtcaggaacagctcggga

SEQ ID NO: 3761967 - DNA, 25 bp, Homo sapien
ggaacagctcgggaacagatgtcac

SEQ ID NO: 3761968 - DNA, 25 bp, Homo sapien
ataagctgcctaaatcacagagcca

SEQ ID NO: 3761969 - DNA, 25 bp, Homo sapien
catgtcacatataatcctgtgaggg

SEQ ID NO: 3761970 - DNA, 25 bp, Homo sapien
cctgtgagggaggtattctcatact

SEQ ID NO: 3761971 - DNA, 25 bp, Homo sapien
ctcatttacagacgaaaaaaccgag

SEQ ID NO: 3761972 - DNA, 25 bp, Homo sapien
ggtgaatccatggatcttgtctcct

SEQ ID NO: 3761973 - DNA, 25 bp, Homo sapien
tcttgtctcctagtttatactgcag

SEQ ID NO: 3761974 - DNA, 25 bp, Homo sapien
tagtttatactgcagagccctctca

SEQ ID NO: 3761975 - DNA, 25 bp, Homo sapien
tggtttacggtgaatccatggatct

SEQ ID NO: 3761976 - DNA, 25 bp, Homo sapien
caaaacagttcaattccgggaggcg

SEQ ID NO: 3761977 - DNA, 25 bp, Homo sapien
gaactaggagcaaagctgtcagcga

SEQ ID NO: 3761978 - DNA, 25 bp, Homo sapien
cacgggctcgtggattaccatgaac

SEQ ID NO: 3761979 - DNA, 25 bp, Homo sapien
cgttaaagcccacgctaatggaggg

SEQ ID NO: 3761980 - DNA, 25 bp, Homo sapien
ccgctcagccgcctcagcacacaca

SEQ ID NO: 3761981 - DNA, 25 bp, Homo sapien
cgctcagccgcctcagcacacacag

SEQ ID NO: 3761982 - DNA, 25 bp, Homo sapien
tgcgcatgacgagcacctggctggc

SEQ ID NO: 3761983 - DNA, 25 bp, Homo sapien
cgagcacctggctggcgaggaaccc

SEQ ID NO: 3761984 - DNA, 25 bp, Homo sapien
atgacgagcacctggctggcgagga

SEQ ID NO: 3761985 - DNA, 25 bp, Homo sapien
cgcatgacgagcacctggctggcga

SEQ ID NO: 3761986 - DNA, 25 bp, Homo sapien
tagaagcacttccctgccctggaaa

SEQ ID NO: 3761987 - DNA, 25 bp, Homo sapien
agaagcacttccctgccctggaaac

SEQ ID NO: 3761988 - DNA, 25 bp, Homo sapien
ttagaagcacttccctgccctggaa

SEQ ID NO: 3761989 - DNA, 25 bp, Homo sapien
gtttgttggagaggcactgaagagc

SEQ ID NO: 3761990 - DNA, 25 bp, Homo sapien
tttgttggagaggcactgaagagca

SEQ ID NO: 3761991 - DNA, 25 bp, Homo sapien
gttgtttgttggagaggcactgaag

SEQ ID NO: 3761992 - DNA, 25 bp, Homo sapien
ttgtttgttggagaggcactgaaga

SEQ ID NO: 3761993 - DNA, 25 bp, Homo sapien
cgaccaaaggcacgggaggagagga

SEQ ID NO: 3761994 - DNA, 25 bp, Homo sapien
ctgccaccgaccaaaggcacgggag

SEQ ID NO: 3761995 - DNA, 25 bp, Homo sapien
gagaggatgagcacgctctccaggt

SEQ ID NO: 3761996 - DNA, 25 bp, Homo sapien
ccaccgaccaaaggcacgggaggag

SEQ ID NO: 3761997 - DNA, 25 bp, Homo sapien
cactgcactgccaccgaccaaaggc

SEQ ID NO: 3761998 - DNA, 25 bp, Homo sapien
cactgccaccgaccaaaggcacggg

SEQ ID NO: 3761999 - DNA, 25 bp, Homo sapien
tgcactgccaccgaccaaaggcacg

SEQ ID NO: 3762000 - DNA, 25 bp, Homo sapien
aaaggcacgggcggagaggatgagc

SEQ ID NO: 3762001 - DNA, 25 bp, Homo sapien
aatagatccttgctcaaatccattt

SEQ ID NO: 3762002 - DNA, 25 bp, Homo sapien
cgtgcccagtatttccagtgtaaaa

SEQ ID NO: 3762003 - DNA, 25 bp, Homo sapien
caccagggtcgggaagtccataagg

SEQ ID NO: 3762004 - DNA, 25 bp, Homo sapien
cctccagagagtgcgcctgtacgtg

SEQ ID NO: 3762005 - DNA, 25 bp, Homo sapien
gtgttgtgcagaggccgtgagaggt

SEQ ID NO: 3762006 - DNA, 25 bp, Homo sapien
ttagcgagcgactcctgcaggaggt

SEQ ID NO: 3762007 - DNA, 25 bp, Homo sapien
tgtgcagaggccgtgagaggtgact

SEQ ID NO: 3762008 - DNA, 25 bp, Homo sapien
ggtgactttagcgagcgactcctgc

SEQ ID NO: 3762009 - DNA, 25 bp, Homo sapien
tctcctctgcagatagagtaaccag

SEQ ID NO: 3762010 - DNA, 25 bp, Homo sapien
gagtaaccagggcacctgttgattg

SEQ ID NO: 3762011 - DNA, 25 bp, Homo sapien
ctgttgattgggggcctcaccagca

SEQ ID NO: 3762012 - DNA, 25 bp, Homo sapien
gaggtgcaggcgcagaggtcctggg

SEQ ID NO: 3762013 - DNA, 25 bp, Homo sapien
tcttcaccggcaggtcacccctgga

SEQ ID NO: 3762014 - DNA, 25 bp, Homo sapien
agagccaggtcgtctgagccccagt

SEQ ID NO: 3762015 - DNA, 25 bp, Homo sapien
cccctggacccgttggctttgctgg

SEQ ID NO: 3762016 - DNA, 25 bp, Homo sapien
tctgctctgtcgctcttcaccggca

SEQ ID NO: 3762017 - DNA, 25 bp, Homo sapien
agacatgggccagccgggcattcct

SEQ ID NO: 3762018 - DNA, 25 bp, Homo sapien
aatgagactgatttcaagacatggg

SEQ ID NO: 3762019 - DNA, 25 bp, Homo sapien
ggtcatctctttcccggattgttca

SEQ ID NO: 3762020 - DNA, 25 bp, Homo sapien
ggtgtcctggcaacagcgtgggtgc

SEQ ID NO: 3762021 - DNA, 25 bp, Homo sapien
cgcagtcccgttcctggctgacagt

SEQ ID NO: 3762022 - DNA, 25 bp, Homo sapien
ccaggggtatccaggtctcagagca

SEQ ID NO: 3762023 - DNA, 25 bp, Homo sapien
tgtgggagcgggactccagtgcact

SEQ ID NO: 3762024 - DNA, 25 bp, Homo sapien
cacaggtgcacacgggtacagtggc

SEQ ID NO: 3762025 - DNA, 25 bp, Homo sapien
agaccccagaggacacgtggtgctc

SEQ ID NO: 3762026 - DNA, 25 bp, Homo sapien
cacggcgccgaccacacagacccca

SEQ ID NO: 3762027 - DNA, 25 bp, Homo sapien
cagaggacacgtggtgctctgggcc

SEQ ID NO: 3762028 - DNA, 25 bp, Homo sapien
acgcacggcgccgaccacacagacc

SEQ ID NO: 3762029 - DNA, 25 bp, Homo sapien
caggaagctgcgtcattagttcggg

SEQ ID NO: 3762030 - DNA, 25 bp, Homo sapien
cacaccgatgtgaaagcgaggatgg

SEQ ID NO: 3762031 - DNA, 25 bp, Homo sapien
acccgcacgtggagagagtctgcag

SEQ ID NO: 3762032 - DNA, 25 bp, Homo sapien
gaaggatgaacgcatttgtgtgtca

SEQ ID NO: 3762033 - DNA, 25 bp, Homo sapien
gtcctggctgcagccacgatgggtg

SEQ ID NO: 3762034 - DNA, 25 bp, Homo sapien
tgtcctggctgcagccacgatgggt

SEQ ID NO: 3762035 - DNA, 25 bp, Homo sapien
tgtgtcctggctgcagccacgatgg

SEQ ID NO: 3762036 - DNA, 25 bp, Homo sapien
ctgtgtcctggctgcagccacgatg

SEQ ID NO: 3762037 - DNA, 25 bp, Homo sapien
tggaccatgtccgaagggtccagag

SEQ ID NO: 3762038 - DNA, 25 bp, Homo sapien
agatcccacatgtgtagaatacaga

SEQ ID NO: 3762039 - DNA, 25 bp, Homo sapien
gaagatcccacatgtgtagaataca

SEQ ID NO: 3762040 - DNA, 25 bp, Homo sapien
atcctgagggcagcgtgtggaccat

SEQ ID NO: 3762041 - DNA, 25 bp, Homo sapien
tgcagggcacttagaggactcctgt

SEQ ID NO: 3762042 - DNA, 25 bp, Homo sapien
cttagaggactcctgtgctgacctc

SEQ ID NO: 3762043 - DNA, 25 bp, Homo sapien
tctacgaagggacgcggagaataac

SEQ ID NO: 3762044 - DNA, 25 bp, Homo sapien
tctcaggcagccttctacgaaggga

SEQ ID NO: 3762045 - DNA, 25 bp, Homo sapien
cagctggcatctcaccgacaggtgt

SEQ ID NO: 3762046 - DNA, 25 bp, Homo sapien
gaagaccttcccctgaggaagccaa

SEQ ID NO: 3762047 - DNA, 25 bp, Homo sapien
caccgacaggtgtcttctggaaacc

SEQ ID NO: 3762048 - DNA, 25 bp, Homo sapien
agccaagtcacctgagctttcttcc

SEQ ID NO: 3762049 - DNA, 25 bp, Homo sapien
tcagtggtttttacttagcgattac

SEQ ID NO: 3762050 - DNA, 25 bp, Homo sapien
ggtgaggtggtcattggcttctgtc

SEQ ID NO: 3762051 - DNA, 25 bp, Homo sapien
cagggcactcggtggaggtgaggtg

SEQ ID NO: 3762052 - DNA, 25 bp, Homo sapien
gcgattaccggcaatttcaccatta

SEQ ID NO: 3762053 - DNA, 25 bp, Homo sapien
tgagatcacaccattgcactccagc

SEQ ID NO: 3762054 - DNA, 25 bp, Homo sapien
gagaatcacctgagccagggaggtt

SEQ ID NO: 3762055 - DNA, 25 bp, Homo sapien
gggagaatcacctgagccagggagg

SEQ ID NO: 3762056 - DNA, 25 bp, Homo sapien
gaggctgcagtgagctgagatcaca

SEQ ID NO: 3762057 - DNA, 25 bp, Homo sapien
tttctcttttattccatacactctc

SEQ ID NO: 3762058 - DNA, 25 bp, Homo sapien
tcattttctcttttattccatacac

SEQ ID NO: 3762059 - DNA, 25 bp, Homo sapien
cattttctcttttattccatacact

SEQ ID NO: 3762060 - DNA, 25 bp, Homo sapien
ctcttttattccatacactctcttt

SEQ ID NO: 3762061 - DNA, 25 bp, Homo sapien
tctacttcccggctgtaaggtgaaa

SEQ ID NO: 3762062 - DNA, 25 bp, Homo sapien
gactatctgcagcaaggcttttgcc

SEQ ID NO: 3762063 - DNA, 25 bp, Homo sapien
tgatgttaaccccttctgagaggtg

SEQ ID NO: 3762064 - DNA, 25 bp, Homo sapien
ccggcatgagtgaaactgtgacgca

SEQ ID NO: 3762065 - DNA, 25 bp, Homo sapien
cacaggactcgagggctgctggaaa

SEQ ID NO: 3762066 - DNA, 25 bp, Homo sapien
tgtgtgtcactcaattaaaataact

SEQ ID NO: 3762067 - DNA, 25 bp, Homo sapien
ttaaaataactagcaacaccacagg

SEQ ID NO: 3762068 - DNA, 25 bp, Homo sapien
gggctgggcctaaagatgtacattt

SEQ ID NO: 3762069 - DNA, 25 bp, Homo sapien
cagcacttggaagaaggcgtctctc

SEQ ID NO: 3762070 - DNA, 25 bp, Homo sapien
gtctaaagcgaagagcagcacttgg

SEQ ID NO: 3762071 - DNA, 25 bp, Homo sapien
gaaactcgtatgtgctctaagggac

SEQ ID NO: 3762072 - DNA, 25 bp, Homo sapien
gccacaggactagtgatgtcgagaa

SEQ ID NO: 3762073 - DNA, 25 bp, Homo sapien
caaactgctgagcattagtgtcacc

SEQ ID NO: 3762074 - DNA, 25 bp, Homo sapien
taccccagaccggttagatcacaag

SEQ ID NO: 3762075 - DNA, 25 bp, Homo sapien
tctatgagggtattgcttggctgaa

SEQ ID NO: 3762076 - DNA, 25 bp, Homo sapien
gcattggcagttgttaaagctccct

SEQ ID NO: 3762077 - DNA, 25 bp, Homo sapien
ggagctactgaatcggaatgttgtg

SEQ ID NO: 3762078 - DNA, 25 bp, Homo sapien
gagagtttgttggaaacacagactc

SEQ ID NO: 3762079 - DNA, 25 bp, Homo sapien
tcccaggccgtgtgcttcggtgcca

SEQ ID NO: 3762080 - DNA, 25 bp, Homo sapien
caattcttagtctctaagtgtggtc

SEQ ID NO: 3762081 - DNA, 25 bp, Homo sapien
cacagtcttcattgctaggaaccag

SEQ ID NO: 3762082 - DNA, 25 bp, Homo sapien
gttcacggaaatgcggtcaattagg

SEQ ID NO: 3762083 - DNA, 25 bp, Homo sapien
cagcaagcgagtgttcacggaaatg

SEQ ID NO: 3762084 - DNA, 25 bp, Homo sapien
cattgctaggaaccagcaagcgagt

SEQ ID NO: 3762085 - DNA, 25 bp, Homo sapien
gtgccaagtgcagtgtttgctggaa

SEQ ID NO: 3762086 - DNA, 25 bp, Homo sapien
ctgcttatgagcatccagggacagg

SEQ ID NO: 3762087 - DNA, 25 bp, Homo sapien
gccaagtgcagtgtttgctggaagg

SEQ ID NO: 3762088 - DNA, 25 bp, Homo sapien
actgtagccactctgcttatgagca

SEQ ID NO: 3762089 - DNA, 25 bp, Homo sapien
tctggtctcgctcccgacttgagga

SEQ ID NO: 3762090 - DNA, 25 bp, Homo sapien
cagctgacgctgatgtcggagtctc

SEQ ID NO: 3762091 - DNA, 25 bp, Homo sapien
ccttttatccggagcacgtggatcc

SEQ ID NO: 3762092 - DNA, 25 bp, Homo sapien
gcagatttcaacatggagcagcagg

SEQ ID NO: 3762093 - DNA, 25 bp, Homo sapien
gaagttctgagcactcttacgatgg

SEQ ID NO: 3762094 - DNA, 25 bp, Homo sapien
cattattagcaggtgcactgagact

SEQ ID NO: 3762095 - DNA, 25 bp, Homo sapien
aaaattgtgtcagatcagctcccag

SEQ ID NO: 3762096 - DNA, 25 bp, Homo sapien
cccaggagaggtaaacattattagc

SEQ ID NO: 3762097 - DNA, 25 bp, Homo sapien
tgctggcagtgaactagaggacccg

SEQ ID NO: 3762098 - DNA, 25 bp, Homo sapien
cgcaccgatgcagttcctaaaagaa

SEQ ID NO: 3762099 - DNA, 25 bp, Homo sapien
tggtttcatcacaaccgcaccgatg

SEQ ID NO: 3762100 - DNA, 25 bp, Homo sapien
taaaagaaacacacgacagccgatt

SEQ ID NO: 3762101 - DNA, 25 bp, Homo sapien
aggtgccacgtccacaccgggtgag

SEQ ID NO: 3762102 - DNA, 25 bp, Homo sapien
agggctgcacggaaacgtggacttc

SEQ ID NO: 3762103 - DNA, 25 bp, Homo sapien
gacttcggcagaacatgtgtgcgcc

SEQ ID NO: 3762104 - DNA, 25 bp, Homo sapien
gcccgcaggtgagaccgtctgcata

SEQ ID NO: 3762105 - DNA, 25 bp, Homo sapien
tgacaccgaggcttctccatgctcc

SEQ ID NO: 3762106 - DNA, 25 bp, Homo sapien
gctccaccaccgagagggcttccat

SEQ ID NO: 3762107 - DNA, 25 bp, Homo sapien
cttctccatgctccaccaccgagag

SEQ ID NO: 3762108 - DNA, 25 bp, Homo sapien
tccatgctccaccaccgagagggct

SEQ ID NO: 3762109 - DNA, 25 bp, Homo sapien
tgattaccacggctcgattgacacg

SEQ ID NO: 3762110 - DNA, 25 bp, Homo sapien
aatgttccacgcagctcagtgggca

SEQ ID NO: 3762111 - DNA, 25 bp, Homo sapien
gattgacacgtttagctcctgtggg

SEQ ID NO: 3762112 - DNA, 25 bp, Homo sapien
cggtgggcaaggacgaaaccttcat

SEQ ID NO: 3762113 - DNA, 25 bp, Homo sapien
caggtctgtggacaactgggtattt

SEQ ID NO: 3762114 - DNA, 25 bp, Homo sapien
gacaactgggtatttgcaagtccac

SEQ ID NO: 3762115 - DNA, 25 bp, Homo sapien
aggcatatctccctcgcttgggaca

SEQ ID NO: 3762116 - DNA, 25 bp, Homo sapien
atatctccctcgcttgggacatcca

SEQ ID NO: 3762117 - DNA, 25 bp, Homo sapien
ttcccggcaacctctgcgtgggcag

SEQ ID NO: 3762118 - DNA, 25 bp, Homo sapien
tatttcccggcaacctctgcgtggg

SEQ ID NO: 3762119 - DNA, 25 bp, Homo sapien
gacctgtatttccaggcagcctctg

SEQ ID NO: 3762120 - DNA, 25 bp, Homo sapien
gccacggacctgtatttccaggcag

SEQ ID NO: 3762121 - DNA, 25 bp, Homo sapien
gacgggacagattggatcgcacctg

SEQ ID NO: 3762122 - DNA, 25 bp, Homo sapien
gacagattggatcgcacctgtcaca

SEQ ID NO: 3762123 - DNA, 25 bp, Homo sapien
ccccggacgggacagattggatcgc

SEQ ID NO: 3762124 - DNA, 25 bp, Homo sapien
agattggatcgcacctgtcacagcc

SEQ ID NO: 3762125 - DNA, 25 bp, Homo sapien
tgctatggaaactgcgatccccccg

SEQ ID NO: 3762126 - DNA, 25 bp, Homo sapien
tccatttccccctggttgaaataca

SEQ ID NO: 3762127 - DNA, 25 bp, Homo sapien
cgatccccccggtgtggatggagct

SEQ ID NO: 3762128 - DNA, 25 bp, Homo sapien
ggttgaaatacattagttgctatgg

SEQ ID NO: 3762129 - DNA, 25 bp, Homo sapien
aatgggcgtcgtggctggagagggc

SEQ ID NO: 3762130 - DNA, 25 bp, Homo sapien
accgacgcagcaccactgggtcaga

SEQ ID NO: 3762131 - DNA, 25 bp, Homo sapien
atgacagcacacagcacgaccgtca

SEQ ID NO: 3762132 - DNA, 25 bp, Homo sapien
aattgcagagcacggttggcgttgc

SEQ ID NO: 3762133 - DNA, 25 bp, Homo sapien
taagagagagtttagcacgcagctc

SEQ ID NO: 3762134 - DNA, 25 bp, Homo sapien
ctagtcgggagaatgaacggtctgt

SEQ ID NO: 3762135 - DNA, 25 bp, Homo sapien
caggttaggtcccttctggagccgg

SEQ ID NO: 3762136 - DNA, 25 bp, Homo sapien
attcaacgggaagccagcaggtctc

SEQ ID NO: 3762137 - DNA, 25 bp, Homo sapien
tggaataccggaagcgcagcaccca

SEQ ID NO: 3762138 - DNA, 25 bp, Homo sapien
aaaagagacattcgtttctgttgat

SEQ ID NO: 3762139 - DNA, 25 bp, Homo sapien
cgtttctgttgattcattggagaga

SEQ ID NO: 3762140 - DNA, 25 bp, Homo sapien
ttcttctggaataccggaagcgcag

SEQ ID NO: 3762141 - DNA, 25 bp, Homo sapien
tacgttcatgacttggccatcctga

SEQ ID NO: 3762142 - DNA, 25 bp, Homo sapien
tagcggacagtcctggagataaaaa

SEQ ID NO: 3762143 - DNA, 25 bp, Homo sapien
ttcagccacaaaacccgtacgttca

SEQ ID NO: 3762144 - DNA, 25 bp, Homo sapien
gagcaactacattactagcggacag

SEQ ID NO: 3762145 - DNA, 25 bp, Homo sapien
tcgggagtaggtcccttgagagccc

SEQ ID NO: 3762146 - DNA, 25 bp, Homo sapien
tcatagatgcgaagtttgggaagct

SEQ ID NO: 3762147 - DNA, 25 bp, Homo sapien
gattcacctccagtgtgactccggg

SEQ ID NO: 3762148 - DNA, 25 bp, Homo sapien
catgcccaaccaaaatctcttcata

SEQ ID NO: 3762149 - DNA, 25 bp, Homo sapien
cacatgcacagcacacggagctgct

SEQ ID NO: 3762150 - DNA, 25 bp, Homo sapien
aggaagcgaggaagccacatgcaca

SEQ ID NO: 3762151 - DNA, 25 bp, Homo sapien
cctggtgcagggtcttgccatagcc

SEQ ID NO: 3762152 - DNA, 25 bp, Homo sapien
cagggtcttgccatagccaagggct

SEQ ID NO: 3762153 - DNA, 25 bp, Homo sapien
taaatgtgcctccacgctttctaga

SEQ ID NO: 3762154 - DNA, 25 bp, Homo sapien
caggctgcttttcgtcttgaccaca

SEQ ID NO: 3762155 - DNA, 25 bp, Homo sapien
gaggccgattccacacattagcatg

SEQ ID NO: 3762156 - DNA, 25 bp, Homo sapien
tactgctcctttcttccgaggccga

SEQ ID NO: 3762157 - DNA, 25 bp, Homo sapien
tgtgtcttgcgtgttttcatctcct

SEQ ID NO: 3762158 - DNA, 25 bp, Homo sapien
accctatcgtaaataatctgggagc

SEQ ID NO: 3762159 - DNA, 25 bp, Homo sapien
actaattatgtctgcctcagaaaag

SEQ ID NO: 3762160 - DNA, 25 bp, Homo sapien
tgtgagctccttaaaaccggagtct

SEQ ID NO: 3762161 - DNA, 25 bp, Homo sapien
ctccaggtctccttcaaggaatgtg

SEQ ID NO: 3762162 - DNA, 25 bp, Homo sapien
tggaaactgccggacaaggccaagc

SEQ ID NO: 3762163 - DNA, 25 bp, Homo sapien
tggctggaaactgccggacaaggcc

SEQ ID NO: 3762164 - DNA, 25 bp, Homo sapien
tctccttcaaggaatgtggctggaa

SEQ ID NO: 3762165 - DNA, 25 bp, Homo sapien
catgtttgaagcaggtacggctcgt

SEQ ID NO: 3762166 - DNA, 25 bp, Homo sapien
catttcctgtggtatagcctcatcc

SEQ ID NO: 3762167 - DNA, 25 bp, Homo sapien
ctcctgcaatccaggtacttcctgt

SEQ ID NO: 3762168 - DNA, 25 bp, Homo sapien
gtacttcctgtggtatagcctcatt

SEQ ID NO: 3762169 - DNA, 25 bp, Homo sapien
agcagaggagatcttggagcctgcc

SEQ ID NO: 3762170 - DNA, 25 bp, Homo sapien
cctgcagcagaggagatcttggagc

SEQ ID NO: 3762171 - DNA, 25 bp, Homo sapien
tgcagcagaggagatcttggagcct

SEQ ID NO: 3762172 - DNA, 25 bp, Homo sapien
tccctgcagcagaggagatcttgga

SEQ ID NO: 3762173 - DNA, 25 bp, Homo sapien
catagaggatataaaacgggaaatt

SEQ ID NO: 3762174 - DNA, 25 bp, Homo sapien
tgtcaaacatagaggatataaaacg

SEQ ID NO: 3762175 - DNA, 25 bp, Homo sapien
ctcaccagttaaaggatgcagcatg

SEQ ID NO: 3762176 - DNA, 25 bp, Homo sapien
tcccagtgggtgtgatggaatttct

SEQ ID NO: 3762177 - DNA, 25 bp, Homo sapien
ggatattaaacacgggcacactggc

SEQ ID NO: 3762178 - DNA, 25 bp, Homo sapien
gctgctctggtcagtaggatattaa

SEQ ID NO: 3762179 - DNA, 25 bp, Homo sapien
tagttgcgatagatgtttgcagaga

SEQ ID NO: 3762180 - DNA, 25 bp, Homo sapien
tctgtacagcccatagtgtagttgc

SEQ ID NO: 3762181 - DNA, 25 bp, Homo sapien
tacccaagattctagagagtccttg

SEQ ID NO: 3762182 - DNA, 25 bp, Homo sapien
aattcccgagtggtctacccaagat

SEQ ID NO: 3762183 - DNA, 25 bp, Homo sapien
gatcccagagtcgtgtgcacttgtt

SEQ ID NO: 3762184 - DNA, 25 bp, Homo sapien
tgagacagatgggagctcgatccca

SEQ ID NO: 3762185 - DNA, 25 bp, Homo sapien
gcatcctacaggaacagtgtgctcc

SEQ ID NO: 3762186 - DNA, 25 bp, Homo sapien
gggcctgtccgtggaactctagatt

SEQ ID NO: 3762187 - DNA, 25 bp, Homo sapien
ttttaaatcaaagcaaaggccgcag

SEQ ID NO: 3762188 - DNA, 25 bp, Homo sapien
caagctccaagctgtctgtatgaga

SEQ ID NO: 3762189 - DNA, 25 bp, Homo sapien
ggaaagctgcgtaagaaaaagaggc

SEQ ID NO: 3762190 - DNA, 25 bp, Homo sapien
aaagatgtgatctgatgtggattca

SEQ ID NO: 3762191 - DNA, 25 bp, Homo sapien
cattaggtgtaagttgtgatagaac

SEQ ID NO: 3762192 - DNA, 25 bp, Homo sapien
tgtcttgagcttgattgtagtcaca

SEQ ID NO: 3762193 - DNA, 25 bp, Homo sapien
tgggagccgaggacgacggggatgt

SEQ ID NO: 3762194 - DNA, 25 bp, Homo sapien
agctgggagccgaggacgacgggga

SEQ ID NO: 3762195 - DNA, 25 bp, Homo sapien
gctgggagccgaggacgacggggat

SEQ ID NO: 3762196 - DNA, 25 bp, Homo sapien
gagccgaggacgacggggatgtggg

SEQ ID NO: 3762197 - DNA, 25 bp, Homo sapien
ggggacagtccaccccggagtgcca

SEQ ID NO: 3762198 - DNA, 25 bp, Homo sapien
aggacgggaacctgagcctgctgca

SEQ ID NO: 3762199 - DNA, 25 bp, Homo sapien
gctgcagacaggtgaccggagcgcg

SEQ ID NO: 3762200 - DNA, 25 bp, Homo sapien
accccggagtgccactctgactggc

SEQ ID NO: 3762201 - DNA, 25 bp, Homo sapien
taaatgttcattctgcgaggtgctg

SEQ ID NO: 3762202 - DNA, 25 bp, Homo sapien
gtttccaggcaccagcggttccaaa

SEQ ID NO: 3762203 - DNA, 25 bp, Homo sapien
tttgcaccagggatgtgcgttatgg

SEQ ID NO: 3762204 - DNA, 25 bp, Homo sapien
tgctgacggcgtggcttttgcaggg

SEQ ID NO: 3762205 - DNA, 25 bp, Homo sapien
tgagtggacgacattgcacacgccc

SEQ ID NO: 3762206 - DNA, 25 bp, Homo sapien
cctgtgagtggacgacattgcacac

SEQ ID NO: 3762207 - DNA, 25 bp, Homo sapien
tgacctgtgagtggacgacattgca

SEQ ID NO: 3762208 - DNA, 25 bp, Homo sapien
gcagtgcggggaatggccatctctg

SEQ ID NO: 3762209 - DNA, 25 bp, Homo sapien
tgtgctttcgttgatggtgtaaatc

SEQ ID NO: 3762210 - DNA, 25 bp, Homo sapien
gatttccccatggttgtgctttcgt

SEQ ID NO: 3762211 - DNA, 25 bp, Homo sapien
ccccatggttgtgctttcgttgatg

SEQ ID NO: 3762212 - DNA, 25 bp, Homo sapien
tgatggtgtaaatctgcacctgcac

SEQ ID NO: 3762213 - DNA, 25 bp, Homo sapien
ctggagttcagtgccgtgctgggtc

SEQ ID NO: 3762214 - DNA, 25 bp, Homo sapien
caggactggagttcagtgccgtgct

SEQ ID NO: 3762215 - DNA, 25 bp, Homo sapien
gcgtgcaggactggagttcagtgcc

SEQ ID NO: 3762216 - DNA, 25 bp, Homo sapien
tgcaggactggagttcagtgccgtg

SEQ ID NO: 3762217 - DNA, 25 bp, Homo sapien
gcccggtgctggacccgcaggcttt

SEQ ID NO: 3762218 - DNA, 25 bp, Homo sapien
ctctgaaacctagtggcctcatggt

SEQ ID NO: 3762219 - DNA, 25 bp, Homo sapien
ctaagacacagaagcccggtgctgg

SEQ ID NO: 3762220 - DNA, 25 bp, Homo sapien
gctttctgggacagtaggaccctga

SEQ ID NO: 3762221 - DNA, 25 bp, Homo sapien
gatcaagccacatcccagaaggcag

SEQ ID NO: 3762222 - DNA, 25 bp, Homo sapien
gagataaagtcaccctgagcagaac

SEQ ID NO: 3762223 - DNA, 25 bp, Homo sapien
taacaggacacttaggatcaagcca

SEQ ID NO: 3762224 - DNA, 25 bp, Homo sapien
agcagaacccagagcgtcttgttgg

SEQ ID NO: 3762225 - DNA, 25 bp, Homo sapien
acaaatactacacactgggcagctg

SEQ ID NO: 3762226 - DNA, 25 bp, Homo sapien
aagtcgagatcaaagcatgggcagg

SEQ ID NO: 3762227 - DNA, 25 bp, Homo sapien
cataagacaagagggcattgcctgg

SEQ ID NO: 3762228 - DNA, 25 bp, Homo sapien
catgggcagggtcggtttctcccaa

SEQ ID NO: 3762229 - DNA, 25 bp, Homo sapien
gttggcagttgtccttcgcttctgc

SEQ ID NO: 3762230 - DNA, 25 bp, Homo sapien
gggttggcagttgtccttcgcttct

SEQ ID NO: 3762231 - DNA, 25 bp, Homo sapien
tgggctgtgctccgtcccttaaatg

SEQ ID NO: 3762232 - DNA, 25 bp, Homo sapien
gcagttgtccttcgcttctgccttc

SEQ ID NO: 3762233 - DNA, 25 bp, Homo sapien
ggcggtccactttctctctttgcgt

SEQ ID NO: 3762234 - DNA, 25 bp, Homo sapien
gacgtaaattccattgtaggtatcc

SEQ ID NO: 3762235 - DNA, 25 bp, Homo sapien
cattcaaccacttgtaaacccttgg

SEQ ID NO: 3762236 - DNA, 25 bp, Homo sapien
ggtcaaactgttaattgagacgtaa

SEQ ID NO: 3762237 - DNA, 25 bp, Homo sapien
caaacgtgttaccagggtgaagtct

SEQ ID NO: 3762238 - DNA, 25 bp, Homo sapien
tatttgcgctatagacaggcactgt

SEQ ID NO: 3762239 - DNA, 25 bp, Homo sapien
gggctgaccccttgtatcctagatt

SEQ ID NO: 3762240 - DNA, 25 bp, Homo sapien
tcttgatacctaaactgctgggctg

SEQ ID NO: 3762241 - DNA, 25 bp, Homo sapien
gagcattctgaaccccgttcctgta

SEQ ID NO: 3762242 - DNA, 25 bp, Homo sapien
aagagcattctgaaccccgttcctg

SEQ ID NO: 3762243 - DNA, 25 bp, Homo sapien
gaagagcattctgaaccccgttcct

SEQ ID NO: 3762244 - DNA, 25 bp, Homo sapien
gggaagagcattctgaaccccgttc

SEQ ID NO: 3762245 - DNA, 25 bp, Homo sapien
tacaacttctacacgatagtacacg

SEQ ID NO: 3762246 - DNA, 25 bp, Homo sapien
tggaaagaccacagcgtctactaca

SEQ ID NO: 3762247 - DNA, 25 bp, Homo sapien
gaccacagcgtctactacaacttct

SEQ ID NO: 3762248 - DNA, 25 bp, Homo sapien
gatagtacacgggatgttctcttca

SEQ ID NO: 3762249 - DNA, 25 bp, Homo sapien
ttcctcttctctgaatgtacccatg

SEQ ID NO: 3762250 - DNA, 25 bp, Homo sapien
tctctgaatgtacccatgagaaaag

SEQ ID NO: 3762251 - DNA, 25 bp, Homo sapien
gaatgtacccatgagaaaagagtgc

SEQ ID NO: 3762252 - DNA, 25 bp, Homo sapien
cctcttctctgaatgtacccatgag

SEQ ID NO: 3762253 - DNA, 25 bp, Homo sapien
cagtcacaggaatagcagtgctcac

SEQ ID NO: 3762254 - DNA, 25 bp, Homo sapien
cactacagggaactggtgattacac

SEQ ID NO: 3762255 - DNA, 25 bp, Homo sapien
catcttacaagaatgggagccacca

SEQ ID NO: 3762256 - DNA, 25 bp, Homo sapien
tacgtcactggctgaaacgggctga

SEQ ID NO: 3762257 - DNA, 25 bp, Homo sapien
gatccacaaagtgctcttaggagca

SEQ ID NO: 3762258 - DNA, 25 bp, Homo sapien
tctgctgtgacttaggcatgttttg

SEQ ID NO: 3762259 - DNA, 25 bp, Homo sapien
gtcttcccctgcactgaggttacca

SEQ ID NO: 3762260 - DNA, 25 bp, Homo sapien
tgacattggaagctctcacaggacc

SEQ ID NO: 3762261 - DNA, 25 bp, Homo sapien
tctccagtcaagtagacagcaggct

SEQ ID NO: 3762262 - DNA, 25 bp, Homo sapien
tatgcatgaggttccagcacgagat

SEQ ID NO: 3762263 - DNA, 25 bp, Homo sapien
ggttcatagcgtgtgtctccaggac

SEQ ID NO: 3762264 - DNA, 25 bp, Homo sapien
cggtggagacacacgtacacttgga

SEQ ID NO: 3762265 - DNA, 25 bp, Homo sapien
tctaatagaggaacgggaggctcct

SEQ ID NO: 3762266 - DNA, 25 bp, Homo sapien
tgccctgctggcatctaatagagga

SEQ ID NO: 3762267 - DNA, 25 bp, Homo sapien
gggatctgcgtgacagaccccttgc

SEQ ID NO: 3762268 - DNA, 25 bp, Homo sapien
accaagggatctgcgtgacagaccc

SEQ ID NO: 3762269 - DNA, 25 bp, Homo sapien
cacgaatgctcgcagaatgaaactg

SEQ ID NO: 3762270 - DNA, 25 bp, Homo sapien
acgaatgctcgcagaatgaaactgg

SEQ ID NO: 3762271 - DNA, 25 bp, Homo sapien
ttccgggcacccacaatgaacatgg

SEQ ID NO: 3762272 - DNA, 25 bp, Homo sapien
ctccacgaatgctcgcagaatgaaa

SEQ ID NO: 3762273 - DNA, 25 bp, Homo sapien
cggtttaactttgattgtttatgca

SEQ ID NO: 3762274 - DNA, 25 bp, Homo sapien
ttttttctcagatgtcgtcaggtcc

SEQ ID NO: 3762275 - DNA, 25 bp, Homo sapien
aaatcctttcccaatcggtagcagc

SEQ ID NO: 3762276 - DNA, 25 bp, Homo sapien
tgtcgtcaggtccatcacagctcag

SEQ ID NO: 3762277 - DNA, 25 bp, Homo sapien
tgctctgtgccgtgagcggtgcccg

SEQ ID NO: 3762278 - DNA, 25 bp, Homo sapien
ccagtgtcccatgggtggtataaat

SEQ ID NO: 3762279 - DNA, 25 bp, Homo sapien
agcctgggagctgaacctcctggga

SEQ ID NO: 3762280 - DNA, 25 bp, Homo sapien
tgcagtgtgccgtgagtaggttaca

SEQ ID NO: 3762281 - DNA, 25 bp, Homo sapien
cacttttccatatgtagggcttccc

SEQ ID NO: 3762282 - DNA, 25 bp, Homo sapien
gaatccagagagtctggaacacaca

SEQ ID NO: 3762283 - DNA, 25 bp, Homo sapien
cacagcacataacgtggaaggttga

SEQ ID NO: 3762284 - DNA, 25 bp, Homo sapien
ggaacacacatctcaccactacaat

SEQ ID NO: 3762285 - DNA, 25 bp, Homo sapien
cactagtacgtgtggctgttcaaca

SEQ ID NO: 3762286 - DNA, 25 bp, Homo sapien
tcttggtaccatgtgcgttcctgtg

SEQ ID NO: 3762287 - DNA, 25 bp, Homo sapien
tcaagtacgactggagcaactgcgg

SEQ ID NO: 3762288 - DNA, 25 bp, Homo sapien
cctgtggactggtgacgagatttac

SEQ ID NO: 3762289 - DNA, 25 bp, Homo sapien
taaccatggagccgcggctcagtgt

SEQ ID NO: 3762290 - DNA, 25 bp, Homo sapien
tgtaaccatggagccgcggctcagt

SEQ ID NO: 3762291 - DNA, 25 bp, Homo sapien
gtaaccatggagccgcggctcagtg

SEQ ID NO: 3762292 - DNA, 25 bp, Homo sapien
cagctcctcaccagatgggttggca

SEQ ID NO: 3762293 - DNA, 25 bp, Homo sapien
gctcctcaccagatgggttggcagc

SEQ ID NO: 3762294 - DNA, 25 bp, Homo sapien
agctcctcaccagatgggttggcag

SEQ ID NO: 3762295 - DNA, 25 bp, Homo sapien
ggccacattgcacgggcagaactgg

SEQ ID NO: 3762296 - DNA, 25 bp, Homo sapien
gctcctgcacagagggctcaacgtc

SEQ ID NO: 3762297 - DNA, 25 bp, Homo sapien
gggagtggccacattgcacgggcag

SEQ ID NO: 3762298 - DNA, 25 bp, Homo sapien
gagtggccacattgcacgggcagaa

SEQ ID NO: 3762299 - DNA, 25 bp, Homo sapien
ccaccacagctttggtctgcatcca

SEQ ID NO: 3762300 - DNA, 25 bp, Homo sapien
tggtctgcatccaggctcacgagag

SEQ ID NO: 3762301 - DNA, 25 bp, Homo sapien
atccaggctcacgagagaaagaagc

SEQ ID NO: 3762302 - DNA, 25 bp, Homo sapien
gttctggagtcacaggacggccacc

SEQ ID NO: 3762303 - DNA, 25 bp, Homo sapien
tgatgtccacgtccgagggctgtgc

SEQ ID NO: 3762304 - DNA, 25 bp, Homo sapien
cagaggcaaatggaagtcaggtctc

SEQ ID NO: 3762305 - DNA, 25 bp, Homo sapien
ccaaggcgaagaggacgtttgatga

SEQ ID NO: 3762306 - DNA, 25 bp, Homo sapien
tgaaatatggattttgtttgccccc

SEQ ID NO: 3762307 - DNA, 25 bp, Homo sapien
tacagataccggttgccagagtgct

SEQ ID NO: 3762308 - DNA, 25 bp, Homo sapien
tattctctgagtgtgaaggtgccgc

SEQ ID NO: 3762309 - DNA, 25 bp, Homo sapien
aatgacacaaagaccaagctgggct

SEQ ID NO: 3762310 - DNA, 25 bp, Homo sapien
tagaccgtcaggcattcaatctgca

SEQ ID NO: 3762311 - DNA, 25 bp, Homo sapien
gctgatggattcatcaataagcaac

SEQ ID NO: 3762312 - DNA, 25 bp, Homo sapien
gattcatcaataagcaactctgttg

SEQ ID NO: 3762313 - DNA, 25 bp, Homo sapien
aagcaactctgttgaaggttctgca

SEQ ID NO: 3762314 - DNA, 25 bp, Homo sapien
caactctgttgaaggttctgcaaat

SEQ ID NO: 3762315 - DNA, 25 bp, Homo sapien
ggaatgaatgccgtagacaaaaggc

SEQ ID NO: 3762316 - DNA, 25 bp, Homo sapien
agggcacagaacacgatgtcaagtc

SEQ ID NO: 3762317 - DNA, 25 bp, Homo sapien
catgttggcggtcagaaaacctgtg

SEQ ID NO: 3762318 - DNA, 25 bp, Homo sapien
aagtcacatgtggtcattttcagaa

SEQ ID NO: 3762319 - DNA, 25 bp, Homo sapien
tgtatggcccaagaccgtcccggaa

SEQ ID NO: 3762320 - DNA, 25 bp, Homo sapien
tcctgtatggcccaagaccgtcccg

SEQ ID NO: 3762321 - DNA, 25 bp, Homo sapien
acagcagcagaacgcgtgcataaac

SEQ ID NO: 3762322 - DNA, 25 bp, Homo sapien
tcacagcagcagaacgcgtgcataa

SEQ ID NO: 3762323 - DNA, 25 bp, Homo sapien
cacggacttcactggcacgaagcag

SEQ ID NO: 3762324 - DNA, 25 bp, Homo sapien
cacgctgtgggcgaggaaggagctg

SEQ ID NO: 3762325 - DNA, 25 bp, Homo sapien
ccactgtgatgcagcgtcggcgtct

SEQ ID NO: 3762326 - DNA, 25 bp, Homo sapien
tgagacccgcagacaggaagagctc

SEQ ID NO: 3762327 - DNA, 25 bp, Homo sapien
ctgtggccagacgtggacgcaggct

SEQ ID NO: 3762328 - DNA, 25 bp, Homo sapien
ccccacccttatctcgagaacccat

SEQ ID NO: 3762329 - DNA, 25 bp, Homo sapien
cagggttgtgggcagattggagagt

SEQ ID NO: 3762330 - DNA, 25 bp, Homo sapien
aggctctcggacagggttctcatct

SEQ ID NO: 3762331 - DNA, 25 bp, Homo sapien
ccaccttatggaagctactgccagt

SEQ ID NO: 3762332 - DNA, 25 bp, Homo sapien
cgtacgtaaaagtgtgccatagtgg

SEQ ID NO: 3762333 - DNA, 25 bp, Homo sapien
cacctggtattaaacctggcatgca

SEQ ID NO: 3762334 - DNA, 25 bp, Homo sapien
tagacttcataagagtaataaaccc

SEQ ID NO: 3762335 - DNA, 25 bp, Homo sapien
gctggctggaacaggtaaccaaagc

SEQ ID NO: 3762336 - DNA, 25 bp, Homo sapien
tctgtagataattaacagctggctg

SEQ ID NO: 3762337 - DNA, 25 bp, Homo sapien
tggagaatgggctcttttgtcacca

SEQ ID NO: 3762338 - DNA, 25 bp, Homo sapien
acttccacgatgaatgtcatgtctg

SEQ ID NO: 3762339 - DNA, 25 bp, Homo sapien
aaacagacatatgccttaacagctt

SEQ ID NO: 3762340 - DNA, 25 bp, Homo sapien
tcagccaaacagacatatgccttaa

SEQ ID NO: 3762341 - DNA, 25 bp, Homo sapien
gccaaacagacatatgccttaacag

SEQ ID NO: 3762342 - DNA, 25 bp, Homo sapien
catgactttagtcttttgcatattc

SEQ ID NO: 3762343 - DNA, 25 bp, Homo sapien
tgtaaaaacaatcagcctttcttca

SEQ ID NO: 3762344 - DNA, 25 bp, Homo sapien
ttgtaaaaacaatcagcctttcttc

SEQ ID NO: 3762345 - DNA, 25 bp, Homo sapien
gtaaaaacaatcagcctttcttcaa

SEQ ID NO: 3762346 - DNA, 25 bp, Homo sapien
tctgcagttcagagcaaccctgttt

SEQ ID NO: 3762347 - DNA, 25 bp, Homo sapien
tgttttaccatgaatcccctggcag

SEQ ID NO: 3762348 - DNA, 25 bp, Homo sapien
gctcccgcacgcactaacttgtttg

SEQ ID NO: 3762349 - DNA, 25 bp, Homo sapien
caggagggaagtttcgatggctccc

SEQ ID NO: 3762350 - DNA, 25 bp, Homo sapien
caggtctaactccattaatttcata

SEQ ID NO: 3762351 - DNA, 25 bp, Homo sapien
aggtctaactccattaatttcatag

SEQ ID NO: 3762352 - DNA, 25 bp, Homo sapien
ggtctaactccattaatttcataga

SEQ ID NO: 3762353 - DNA, 25 bp, Homo sapien
gaaatagtgtgtcacaggagaagac

SEQ ID NO: 3762354 - DNA, 25 bp, Homo sapien
tactaggatcgtgttggtttacatt

SEQ ID NO: 3762355 - DNA, 25 bp, Homo sapien
acattgaatagaaatagtgtgtcac

SEQ ID NO: 3762356 - DNA, 25 bp, Homo sapien
aaagggtttataacatgatattact

SEQ ID NO: 3762357 - DNA, 25 bp, Homo sapien
ccgtgcctggtccaaagagatgttt

SEQ ID NO: 3762358 - DNA, 25 bp, Homo sapien
ggttcaccttcgaccttcatcaggg

SEQ ID NO: 3762359 - DNA, 25 bp, Homo sapien
tgtagcctcgcaacttcattcgtaa

SEQ ID NO: 3762360 - DNA, 25 bp, Homo sapien
taaataatccagactaaccgcacgg

SEQ ID NO: 3762361 - DNA, 25 bp, Homo sapien
ttatggtaatcctatgattcaatag

SEQ ID NO: 3762362 - DNA, 25 bp, Homo sapien
cctttatggtaatcctatgattcaa

SEQ ID NO: 3762363 - DNA, 25 bp, Homo sapien
tattcctcaggaagtaataccttta

SEQ ID NO: 3762364 - DNA, 25 bp, Homo sapien
ttacctttatggtaatcctatgatt

SEQ ID NO: 3762365 - DNA, 25 bp, Homo sapien
tgtgagcactaaacgtactaggcgc

SEQ ID NO: 3762366 - DNA, 25 bp, Homo sapien
ggaatgtatttccacagccaaccgt

SEQ ID NO: 3762367 - DNA, 25 bp, Homo sapien
tactaggcgcctgtgactggtagac

SEQ ID NO: 3762368 - DNA, 25 bp, Homo sapien
caaggcagaatggagtgtgagcact

SEQ ID NO: 3762369 - DNA, 25 bp, Homo sapien
tcccagaagagcaagtggagttgtg

SEQ ID NO: 3762370 - DNA, 25 bp, Homo sapien
caagtggagttgtggctaaggcgag

SEQ ID NO: 3762371 - DNA, 25 bp, Homo sapien
tgagtcccagaagagcaagtggagt

SEQ ID NO: 3762372 - DNA, 25 bp, Homo sapien
agttgtggctaaggcgagctattgt

SEQ ID NO: 3762373 - DNA, 25 bp, Homo sapien
tgggagccgtttcgagagagctctc

SEQ ID NO: 3762374 - DNA, 25 bp, Homo sapien
ggtgagttggacatcgctgttttct

SEQ ID NO: 3762375 - DNA, 25 bp, Homo sapien
ctgttttctcgtgggagccgtttcg

SEQ ID NO: 3762376 - DNA, 25 bp, Homo sapien
gagctctctgtaatgtcgccgtgtc

SEQ ID NO: 3762377 - DNA, 25 bp, Homo sapien
cttcgatgggatgcgggcaactttc

SEQ ID NO: 3762378 - DNA, 25 bp, Homo sapien
aatcctccttcgatgggatgcgggc

SEQ ID NO: 3762379 - DNA, 25 bp, Homo sapien
atgggatgcgggcaactttctgaag

SEQ ID NO: 3762380 - DNA, 25 bp, Homo sapien
cctgcaatcctccttcgatgggatg

SEQ ID NO: 3762381 - DNA, 25 bp, Homo sapien
ggttcttgtcagtgcaaagtagatg

SEQ ID NO: 3762382 - DNA, 25 bp, Homo sapien
ccatcaatatcgtgagtgcataaaa

SEQ ID NO: 3762383 - DNA, 25 bp, Homo sapien
ggagtttgccgagtagctggctgct

SEQ ID NO: 3762384 - DNA, 25 bp, Homo sapien
actacgagagtagagggagtttgcc

SEQ ID NO: 3762385 - DNA, 25 bp, Homo sapien
gatgtgtctcatccaaagtgcgctt

SEQ ID NO: 3762386 - DNA, 25 bp, Homo sapien
tgctttagaccaagagacctgcctt

SEQ ID NO: 3762387 - DNA, 25 bp, Homo sapien
gctatttagacggtgattcactcca

SEQ ID NO: 3762388 - DNA, 25 bp, Homo sapien
caaagttcccaaccacaggagctat

SEQ ID NO: 3762389 - DNA, 25 bp, Homo sapien
ggagcatccgagaccacggttccca

SEQ ID NO: 3762390 - DNA, 25 bp, Homo sapien
ccaaaccaggctgcacgttagaact

SEQ ID NO: 3762391 - DNA, 25 bp, Homo sapien
gctgcacgttagaactgcctgggca

SEQ ID NO: 3762392 - DNA, 25 bp, Homo sapien
ctgggagcatccgagaccacggttc

SEQ ID NO: 3762393 - DNA, 25 bp, Homo sapien
ccttgtgcaggaaggacgatggctt

SEQ ID NO: 3762394 - DNA, 25 bp, Homo sapien
caggcattgcccagtaggtgacaat

SEQ ID NO: 3762395 - DNA, 25 bp, Homo sapien
gacaatctgacctgaatcttcagtc

SEQ ID NO: 3762396 - DNA, 25 bp, Homo sapien
ttcagtcctattgggccttgtgcag

SEQ ID NO: 3762397 - DNA, 25 bp, Homo sapien
ctactgaggtttccccccaaagcag

SEQ ID NO: 3762398 - DNA, 25 bp, Homo sapien
ccccccaaagcaggtaacgtatgtg

SEQ ID NO: 3762399 - DNA, 25 bp, Homo sapien
cccaaagcaggtaacgtatgtgcat

SEQ ID NO: 3762400 - DNA, 25 bp, Homo sapien
ccccaaagcaggtaacgtatgtgca

SEQ ID NO: 3762401 - DNA, 25 bp, Homo sapien
tcaaaaacagagttccaacaccaca

SEQ ID NO: 3762402 - DNA, 25 bp, Homo sapien
cttggtaagttctgaagggtgtagt

SEQ ID NO: 3762403 - DNA, 25 bp, Homo sapien
agaaggatgcatggatcaaaaacag

SEQ ID NO: 3762404 - DNA, 25 bp, Homo sapien
gatgcatggatcaaaaacagagttc

SEQ ID NO: 3762405 - DNA, 25 bp, Homo sapien
caagttgcctgtccacaataaggca

SEQ ID NO: 3762406 - DNA, 25 bp, Homo sapien
cacaataaggcatctgtgtaaatct

SEQ ID NO: 3762407 - DNA, 25 bp, Homo sapien
tccacaataaggcatctgtgtaaat

SEQ ID NO: 3762408 - DNA, 25 bp, Homo sapien
ttcaagttgcctgtccacaataagg

SEQ ID NO: 3762409 - DNA, 25 bp, Homo sapien
cattttctgttttatccaaacccat

SEQ ID NO: 3762410 - DNA, 25 bp, Homo sapien
agaagaaaggccgcatggaaagcca

SEQ ID NO: 3762411 - DNA, 25 bp, Homo sapien
gaagaaaggccgcatggaaagccag

SEQ ID NO: 3762412 - DNA, 25 bp, Homo sapien
aagaaaggccgcatggaaagccagt

SEQ ID NO: 3762413 - DNA, 25 bp, Homo sapien
ttttgccattgaagagaaaggctgt

SEQ ID NO: 3762414 - DNA, 25 bp, Homo sapien
tctctttcggaactttatccctcca

SEQ ID NO: 3762415 - DNA, 25 bp, Homo sapien
tggctgggccttcctctgtagcctt

SEQ ID NO: 3762416 - DNA, 25 bp, Homo sapien
ccgcctgtaggagtctgggtcctca

SEQ ID NO: 3762417 - DNA, 25 bp, Homo sapien
gtcaggtgcagtccgggaacatggc

SEQ ID NO: 3762418 - DNA, 25 bp, Homo sapien
ggagtcaggtgcagtccgggaacat

SEQ ID NO: 3762419 - DNA, 25 bp, Homo sapien
cagaagattcagggcgacatccctg

SEQ ID NO: 3762420 - DNA, 25 bp, Homo sapien
cgacatccctgagggagtcaggtgc

SEQ ID NO: 3762421 - DNA, 25 bp, Homo sapien
aaccacagcggcgtggtagtgactg

SEQ ID NO: 3762422 - DNA, 25 bp, Homo sapien
tattgatgcagcaaaacggaaccag

SEQ ID NO: 3762423 - DNA, 25 bp, Homo sapien
gtgactgtggatagtaagttcctgc

SEQ ID NO: 3762424 - DNA, 25 bp, Homo sapien
cttctgccccgcgtcgagggctgag

SEQ ID NO: 3762425 - DNA, 25 bp, Homo sapien
tgatgccggagagcccaaggtttga

SEQ ID NO: 3762426 - DNA, 25 bp, Homo sapien
tgtctctgtgatgccggagagccca

SEQ ID NO: 3762427 - DNA, 25 bp, Homo sapien
ggtttgattgttccaagtccgagca

SEQ ID NO: 3762428 - DNA, 25 bp, Homo sapien
gagcccaaggtttgattgttccaag

SEQ ID NO: 3762429 - DNA, 25 bp, Homo sapien
ttgtcgagcaggcttcagttcaggg

SEQ ID NO: 3762430 - DNA, 25 bp, Homo sapien
aaaagtcgaggtatctctctcttca

SEQ ID NO: 3762431 - DNA, 25 bp, Homo sapien
ggtgttgtgcaatcccgtactgttg

SEQ ID NO: 3762432 - DNA, 25 bp, Homo sapien
tcagataaaagtcgaggtatctctc

SEQ ID NO: 3762433 - DNA, 25 bp, Homo sapien
cccagagagcacaaggcttagggtg

SEQ ID NO: 3762434 - DNA, 25 bp, Homo sapien
gagagcacaaggcttagggtgtcca

SEQ ID NO: 3762435 - DNA, 25 bp, Homo sapien
agcacaaggcttagggtgtccatcg

SEQ ID NO: 3762436 - DNA, 25 bp, Homo sapien
ctcacggggtcaatggggccaagaa

SEQ ID NO: 3762437 - DNA, 25 bp, Homo sapien
ctcccactagcactacaccagattc

SEQ ID NO: 3762438 - DNA, 25 bp, Homo sapien
tctttttggcactgtctcccactag

SEQ ID NO: 3762439 - DNA, 25 bp, Homo sapien
tgcagctttctatgtctgattcacg

SEQ ID NO: 3762440 - DNA, 25 bp, Homo sapien
tctatgtctgattcacgtctttctt

SEQ ID NO: 3762441 - DNA, 25 bp, Homo sapien
ttctctgagctcctgagcagttaga

SEQ ID NO: 3762442 - DNA, 25 bp, Homo sapien
tgagctcctgagcagttagacggtg

SEQ ID NO: 3762443 - DNA, 25 bp, Homo sapien
cctgagcagttagacggtgctttct

SEQ ID NO: 3762444 - DNA, 25 bp, Homo sapien
gcagttagacggtgctttctcagct

SEQ ID NO: 3762445 - DNA, 25 bp, Homo sapien
cattttcctcttcttcatggcccat

SEQ ID NO: 3762446 - DNA, 25 bp, Homo sapien
tcattttcctcttcttcatggccca

SEQ ID NO: 3762447 - DNA, 25 bp, Homo sapien
ctttcattttcctcttcttcatggc

SEQ ID NO: 3762448 - DNA, 25 bp, Homo sapien
ttcattttcctcttcttcatggccc

SEQ ID NO: 3762449 - DNA, 25 bp, Homo sapien
gaagtggacgtcacttcaccattta

SEQ ID NO: 3762450 - DNA, 25 bp, Homo sapien
aagtggacgtcacttcaccatttaa

SEQ ID NO: 3762451 - DNA, 25 bp, Homo sapien
agtggacgtcacttcaccatttaac

SEQ ID NO: 3762452 - DNA, 25 bp, Homo sapien
tcgcccctgttctgtgtccacttta

SEQ ID NO: 3762453 - DNA, 25 bp, Homo sapien
ttaggtgctggctgaccacgactgg

SEQ ID NO: 3762454 - DNA, 25 bp, Homo sapien
tgtgcaggtcctcgcccctgttctg

SEQ ID NO: 3762455 - DNA, 25 bp, Homo sapien
tccactttaggtgctggctgaccac

SEQ ID NO: 3762456 - DNA, 25 bp, Homo sapien
ttcatgagcacagaagaccgtgtcc

SEQ ID NO: 3762457 - DNA, 25 bp, Homo sapien
tgactcagcactagaaatttcatga

SEQ ID NO: 3762458 - DNA, 25 bp, Homo sapien
gaagaaaacgttaggagctgctgga

SEQ ID NO: 3762459 - DNA, 25 bp, Homo sapien
aaaaggtcgggacagtgactcagca

SEQ ID NO: 3762460 - DNA, 25 bp, Homo sapien
gaaggtctttcacagaagggcaggc

SEQ ID NO: 3762461 - DNA, 25 bp, Homo sapien
agactctggtgtccacacgggccat

SEQ ID NO: 3762462 - DNA, 25 bp, Homo sapien
aagggcaggctggtacacgctccca

SEQ ID NO: 3762463 - DNA, 25 bp, Homo sapien
ctttaaatggatgttgaccagatgt

SEQ ID NO: 3762464 - DNA, 25 bp, Homo sapien
taatttcttctttcctattgtatcc

SEQ ID NO: 3762465 - DNA, 25 bp, Homo sapien
ttaatttcttctttcctattgtatc

SEQ ID NO: 3762466 - DNA, 25 bp, Homo sapien
cttaatttcttctttcctattgtat

SEQ ID NO: 3762467 - DNA, 25 bp, Homo sapien
gcagctctccattgattcttcccga

SEQ ID NO: 3762468 - DNA, 25 bp, Homo sapien
tccattgattcttcccgaattgtca

SEQ ID NO: 3762469 - DNA, 25 bp, Homo sapien
tccatcaaaaatgcagctctccatt

SEQ ID NO: 3762470 - DNA, 25 bp, Homo sapien
cccgaattgtcaatttccaagcagc

SEQ ID NO: 3762471 - DNA, 25 bp, Homo sapien
tgttcaaggtttgttctagattcaa

SEQ ID NO: 3762472 - DNA, 25 bp, Homo sapien
agagaatgttaacattgctcagtgc

SEQ ID NO: 3762473 - DNA, 25 bp, Homo sapien
cattgctcagtgcttgttcaaggtt

SEQ ID NO: 3762474 - DNA, 25 bp, Homo sapien
cagtgcttgttcaaggtttgttcta

SEQ ID NO: 3762475 - DNA, 25 bp, Homo sapien
aactgtccaaattgaagatggatag

SEQ ID NO: 3762476 - DNA, 25 bp, Homo sapien
ggtagaaattcagtgtctcctgcaa

SEQ ID NO: 3762477 - DNA, 25 bp, Homo sapien
cctgcaataggatggccatagtggt

SEQ ID NO: 3762478 - DNA, 25 bp, Homo sapien
gctatatccgcagaagtcgtgagag

SEQ ID NO: 3762479 - DNA, 25 bp, Homo sapien
ggcctgggctagtctgggctaccac

SEQ ID NO: 3762480 - DNA, 25 bp, Homo sapien
tagtctgggctaccacaagagcagc

SEQ ID NO: 3762481 - DNA, 25 bp, Homo sapien
cttaagcgacatgggccccagagaa

SEQ ID NO: 3762482 - DNA, 25 bp, Homo sapien
ggtctgcagagtccgcccttcttaa

SEQ ID NO: 3762483 - DNA, 25 bp, Homo sapien
tcagatgtccgcttgctcctggacg

SEQ ID NO: 3762484 - DNA, 25 bp, Homo sapien
ctcctggacggctttctcaggctgg

SEQ ID NO: 3762485 - DNA, 25 bp, Homo sapien
tgggaacgaagcagctgggcagctt

SEQ ID NO: 3762486 - DNA, 25 bp, Homo sapien
ctcaggctgggaacgaagcagctgg

SEQ ID NO: 3762487 - DNA, 25 bp, Homo sapien
agctgcgagggctactggaagttga

SEQ ID NO: 3762488 - DNA, 25 bp, Homo sapien
gtcactttctcgtgtgtttgtttca

SEQ ID NO: 3762489 - DNA, 25 bp, Homo sapien
atgtcttctgaacggcgggagctgc

SEQ ID NO: 3762490 - DNA, 25 bp, Homo sapien
gcagagtcactttctcgtgtgtttg

SEQ ID NO: 3762491 - DNA, 25 bp, Homo sapien
tagctccgtaacagcacctgagcct

SEQ ID NO: 3762492 - DNA, 25 bp, Homo sapien
cagtagctccgtaacagcacctgag

SEQ ID NO: 3762493 - DNA, 25 bp, Homo sapien
accagtagctccgtaacagcacctg

SEQ ID NO: 3762494 - DNA, 25 bp, Homo sapien
tccgtaacagcacctgagcctgcag

SEQ ID NO: 3762495 - DNA, 25 bp, Homo sapien
cacttgccaatttgaacagtccaaa

SEQ ID NO: 3762496 - DNA, 25 bp, Homo sapien
tgcccagtggtttctaaataattca

SEQ ID NO: 3762497 - DNA, 25 bp, Homo sapien
cagtccaaacacatggtcttccagt

SEQ ID NO: 3762498 - DNA, 25 bp, Homo sapien
gaagcagaggaagtttcagcagaca

SEQ ID NO: 3762499 - DNA, 25 bp, Homo sapien
gggccattctggacaatctgtacca

SEQ ID NO: 3762500 - DNA, 25 bp, Homo sapien
agtcctcaggtgattgtccagaatg

SEQ ID NO: 3762501 - DNA, 25 bp, Homo sapien
gggagcgggccattctggacaatct

SEQ ID NO: 3762502 - DNA, 25 bp, Homo sapien
tgggactcagtcctcaggtgattgt

SEQ ID NO: 3762503 - DNA, 25 bp, Homo sapien
ggatgttgccttgctcttcctggga

SEQ ID NO: 3762504 - DNA, 25 bp, Homo sapien
gtttctgatgcagccacggatgcac

SEQ ID NO: 3762505 - DNA, 25 bp, Homo sapien
cacggatgcacaggggtgcccggaa

SEQ ID NO: 3762506 - DNA, 25 bp, Homo sapien
cttgctcttcctgggatgtttctga

SEQ ID NO: 3762507 - DNA, 25 bp, Homo sapien
gtgagacagcaggagctttgccgca

SEQ ID NO: 3762508 - DNA, 25 bp, Homo sapien
acagcaggagctttgccgcagtggc

SEQ ID NO: 3762509 - DNA, 25 bp, Homo sapien
tgaggagcacaatcccagtgagaca

SEQ ID NO: 3762510 - DNA, 25 bp, Homo sapien
gagctttgccgcagtggcatggagg

SEQ ID NO: 3762511 - DNA, 25 bp, Homo sapien
tggtgatgccagtgacgccccaaag

SEQ ID NO: 3762512 - DNA, 25 bp, Homo sapien
agcctgcccatccagcaactgtgcc

SEQ ID NO: 3762513 - DNA, 25 bp, Homo sapien
ggtgatgccagtgacgccccaaagc

SEQ ID NO: 3762514 - DNA, 25 bp, Homo sapien
tccagcaactgtgccggctgttgct

SEQ ID NO: 3762515 - DNA, 25 bp, Homo sapien
gagttatgtgagtctccccaggctg

SEQ ID NO: 3762516 - DNA, 25 bp, Homo sapien
tttcaaaggcgtccctctctgcagt

SEQ ID NO: 3762517 - DNA, 25 bp, Homo sapien
gctttaacatctctttgggcaccac

SEQ ID NO: 3762518 - DNA, 25 bp, Homo sapien
cgtgccccacttgtctgatgacctg

SEQ ID NO: 3762519 - DNA, 25 bp, Homo sapien
caggcatgggtgcacctagatgcgg

SEQ ID NO: 3762520 - DNA, 25 bp, Homo sapien
gtgcacctagatgcggtgagcaggg

SEQ ID NO: 3762521 - DNA, 25 bp, Homo sapien
ggggcgtctgcaggagcatgtggcc

SEQ ID NO: 3762522 - DNA, 25 bp, Homo sapien
gatcagggggcgtctgcaggagcat

SEQ ID NO: 3762523 - DNA, 25 bp, Homo sapien
aggtcgtggaggacatcggccaggg

SEQ ID NO: 3762524 - DNA, 25 bp, Homo sapien
ctgacagagggatgcaggtcgtgga

SEQ ID NO: 3762525 - DNA, 25 bp, Homo sapien
agggatgcaggtcgtggaggacatc

SEQ ID NO: 3762526 - DNA, 25 bp, Homo sapien
gatgcaggtcgtggaggacatcggc

SEQ ID NO: 3762527 - DNA, 25 bp, Homo sapien
gatgaagtcggcacacgcgatgttc

SEQ ID NO: 3762528 - DNA, 25 bp, Homo sapien
atgaagtcggcacacgcgatgttct

SEQ ID NO: 3762529 - DNA, 25 bp, Homo sapien
ggatgaagtcggcacacgcgatgtt

SEQ ID NO: 3762530 - DNA, 25 bp, Homo sapien
ggctggcatgaattaataggattca

SEQ ID NO: 3762531 - DNA, 25 bp, Homo sapien
gaattaataggattcattggtgctg

SEQ ID NO: 3762532 - DNA, 25 bp, Homo sapien
aataggattcattggtgctgactcc

SEQ ID NO: 3762533 - DNA, 25 bp, Homo sapien
taggattcattggtgctgactcccc

SEQ ID NO: 3762534 - DNA, 25 bp, Homo sapien
attcctgcccacagtcgcgaatctt

SEQ ID NO: 3762535 - DNA, 25 bp, Homo sapien
cagtcgcgaatcttgacgatgacat

SEQ ID NO: 3762536 - DNA, 25 bp, Homo sapien
gcccacagtcgcgaatcttgacgat

SEQ ID NO: 3762537 - DNA, 25 bp, Homo sapien
cgcgaatcttgacgatgacatccat

SEQ ID NO: 3762538 - DNA, 25 bp, Homo sapien
cctagagaatgggagtgtttaacct

SEQ ID NO: 3762539 - DNA, 25 bp, Homo sapien
tggaagcggtggtctgacacaagca

SEQ ID NO: 3762540 - DNA, 25 bp, Homo sapien
tctggatgacgctgaacctgcttac

SEQ ID NO: 3762541 - DNA, 25 bp, Homo sapien
tgaacctgcttacaactccctgctg

SEQ ID NO: 3762542 - DNA, 25 bp, Homo sapien
aatttggaagtctggacacttcagg

SEQ ID NO: 3762543 - DNA, 25 bp, Homo sapien
atttggaagtctggacacttcaggc

SEQ ID NO: 3762544 - DNA, 25 bp, Homo sapien
caaaccgcatgaatttggaagtctg

SEQ ID NO: 3762545 - DNA, 25 bp, Homo sapien
tccaaaccgcatgaatttggaagtc

SEQ ID NO: 3762546 - DNA, 25 bp, Homo sapien
cagacaccgattctgccagcatcgt

SEQ ID NO: 3762547 - DNA, 25 bp, Homo sapien
caccatcaacgagccaggaaacagg

SEQ ID NO: 3762548 - DNA, 25 bp, Homo sapien
aaggagaaggcaccatcaacgagcc

SEQ ID NO: 3762549 - DNA, 25 bp, Homo sapien
tcaccgggtgaggacccaaggagaa

SEQ ID NO: 3762550 - DNA, 25 bp, Homo sapien
tgagtcactgctacgatatcaggga

SEQ ID NO: 3762551 - DNA, 25 bp, Homo sapien
agattcgccaagcaggcacgctgag

SEQ ID NO: 3762552 - DNA, 25 bp, Homo sapien
gcacgctgagtgagtacagatacct

SEQ ID NO: 3762553 - DNA, 25 bp, Homo sapien
cagaggaaagggaacacgtcatgct

SEQ ID NO: 3762554 - DNA, 25 bp, Homo sapien
cctaggagcaaagtcccagagattc

SEQ ID NO: 3762555 - DNA, 25 bp, Homo sapien
agattcccgggcagtcctaggagca

SEQ ID NO: 3762556 - DNA, 25 bp, Homo sapien
acttagcgatgggtcaagattcccg

SEQ ID NO: 3762557 - DNA, 25 bp, Homo sapien
tataaacaccatcttacttagcgat

SEQ ID NO: 3762558 - DNA, 25 bp, Homo sapien
ttctgctcccctagaaatattacat

SEQ ID NO: 3762559 - DNA, 25 bp, Homo sapien
ctttctgctcccctagaaatattac

SEQ ID NO: 3762560 - DNA, 25 bp, Homo sapien
tttctgctcccctagaaatattaca

SEQ ID NO: 3762561 - DNA, 25 bp, Homo sapien
tctgctcccctagaaatattacatt

SEQ ID NO: 3762562 - DNA, 25 bp, Homo sapien
gaaatttctccgagttcataaccag

SEQ ID NO: 3762563 - DNA, 25 bp, Homo sapien
aaagaacagtcaggatgcaagagag

SEQ ID NO: 3762564 - DNA, 25 bp, Homo sapien
cagccgattgtgcaggtgcaaactt

SEQ ID NO: 3762565 - DNA, 25 bp, Homo sapien
ctaagaaagaacagtcaggatgcaa

SEQ ID NO: 3762566 - DNA, 25 bp, Homo sapien
tgttgtttgctagggaaaggtgata

SEQ ID NO: 3762567 - DNA, 25 bp, Homo sapien
gtgatagtcccttgaaaacctgttc

SEQ ID NO: 3762568 - DNA, 25 bp, Homo sapien
tcatttccgtatttgccttgtagct

SEQ ID NO: 3762569 - DNA, 25 bp, Homo sapien
agtgtgggcaatgcactctgcactc

SEQ ID NO: 3762570 - DNA, 25 bp, Homo sapien
tcttcatgacttgcatgtgcagcag

SEQ ID NO: 3762571 - DNA, 25 bp, Homo sapien
tgccattttcttcgctgagagctcc

SEQ ID NO: 3762572 - DNA, 25 bp, Homo sapien
cagaagtgggcagatcgtaagagct

SEQ ID NO: 3762573 - DNA, 25 bp, Homo sapien
ttattccctgcaagccggaagcggg

SEQ ID NO: 3762574 - DNA, 25 bp, Homo sapien
ttttgacccaccccagatctttctg

SEQ ID NO: 3762575 - DNA, 25 bp, Homo sapien
tttgacccaccccagatctttctgt

SEQ ID NO: 3762576 - DNA, 25 bp, Homo sapien
tgcttttgacccaccccagatcttt

SEQ ID NO: 3762577 - DNA, 25 bp, Homo sapien
tgacccaccccagatctttctgttt

SEQ ID NO: 3762578 - DNA, 25 bp, Homo sapien
aacatgcactttgcaatgttctgcg

SEQ ID NO: 3762579 - DNA, 25 bp, Homo sapien
cctcggatgggacgcagggattcaa

SEQ ID NO: 3762580 - DNA, 25 bp, Homo sapien
taagatgaatacatgatgaacagtg

SEQ ID NO: 3762581 - DNA, 25 bp, Homo sapien
tgactgcatcacacgttacctttaa

SEQ ID NO: 3762582 - DNA, 25 bp, Homo sapien
taaccacgtcgtctttcccataggc

SEQ ID NO: 3762583 - DNA, 25 bp, Homo sapien
tactattgagaactgaattgacagg

SEQ ID NO: 3762584 - DNA, 25 bp, Homo sapien
tggacatccctggtcattgtcttct

SEQ ID NO: 3762585 - DNA, 25 bp, Homo sapien
tcttctgctgtctaaccacgtcgtc

SEQ ID NO: 3762586 - DNA, 25 bp, Homo sapien
ggaatgggcacgctgaccatcatgg

SEQ ID NO: 3762587 - DNA, 25 bp, Homo sapien
aggagccacacatggacgtggaatg

SEQ ID NO: 3762588 - DNA, 25 bp, Homo sapien
ggcagcagcgaaggagccacacatg

SEQ ID NO: 3762589 - DNA, 25 bp, Homo sapien
gaatgggcacgctgaccatcatggt

SEQ ID NO: 3762590 - DNA, 25 bp, Homo sapien
cttctgtctgaagactgtgatattg

SEQ ID NO: 3762591 - DNA, 25 bp, Homo sapien
ttggcatggggttccgttgcttaga

SEQ ID NO: 3762592 - DNA, 25 bp, Homo sapien
tagggcatagatgtggttcggccac

SEQ ID NO: 3762593 - DNA, 25 bp, Homo sapien
ccgttgcttagaggtgagagggtga

SEQ ID NO: 3762594 - DNA, 25 bp, Homo sapien
tggctccagaatggcccattgctgg

SEQ ID NO: 3762595 - DNA, 25 bp, Homo sapien
catcaaggtgcacctgtgacttctg

SEQ ID NO: 3762596 - DNA, 25 bp, Homo sapien
ttcatcaaggtgcacctgtgacttc

SEQ ID NO: 3762597 - DNA, 25 bp, Homo sapien
atttcatcaaggtgcacctgtgact

SEQ ID NO: 3762598 - DNA, 25 bp, Homo sapien
tcaaggtgcacctgtgacttctgca

SEQ ID NO: 3762599 - DNA, 25 bp, Homo sapien
aattgattaatggtgacccagcagc

SEQ ID NO: 3762600 - DNA, 25 bp, Homo sapien
tgcttacacagcgaagaaggccgga

SEQ ID NO: 3762601 - DNA, 25 bp, Homo sapien
tatataggtacactcctgtcacggg

SEQ ID NO: 3762602 - DNA, 25 bp, Homo sapien
gtctgtgcgacattctttggtacca

SEQ ID NO: 3762603 - DNA, 25 bp, Homo sapien
tgagcaatggaagatcaaaccggca

SEQ ID NO: 3762604 - DNA, 25 bp, Homo sapien
tcaagtttgtcgttgtgcaggtgcc

SEQ ID NO: 3762605 - DNA, 25 bp, Homo sapien
ctctagctgcggaactggagcaggc

SEQ ID NO: 3762606 - DNA, 25 bp, Homo sapien
ggttgtgagaacagccctctggcct

SEQ ID NO: 3762607 - DNA, 25 bp, Homo sapien
gcaatgtcaggctcgctgacatcct

SEQ ID NO: 3762608 - DNA, 25 bp, Homo sapien
gatgcattcagggagggcaatgtca

SEQ ID NO: 3762609 - DNA, 25 bp, Homo sapien
tccttggagaagagtatttgatgca

SEQ ID NO: 3762610 - DNA, 25 bp, Homo sapien
agagtatttgatgcattcagggagg

SEQ ID NO: 3762611 - DNA, 25 bp, Homo sapien
ggtgaaatatcagctgtccacgccg

SEQ ID NO: 3762612 - DNA, 25 bp, Homo sapien
gattcaagcaagaaagtcctccgca

SEQ ID NO: 3762613 - DNA, 25 bp, Homo sapien
aaaccttagtgtgtccgagtccagc

SEQ ID NO: 3762614 - DNA, 25 bp, Homo sapien
tttcgtaagtgagacaagccagtgc

SEQ ID NO: 3762615 - DNA, 25 bp, Homo sapien
ttaccaacagatagctagacagata

SEQ ID NO: 3762616 - DNA, 25 bp, Homo sapien
cacaggctgtggaattttctagcta

SEQ ID NO: 3762617 - DNA, 25 bp, Homo sapien
atacatacacaagaattctgcccac

SEQ ID NO: 3762618 - DNA, 25 bp, Homo sapien
tagacagatatgtgaaacttgtgcc

SEQ ID NO: 3762619 - DNA, 25 bp, Homo sapien
tatagttccccagaccatgcatgac

SEQ ID NO: 3762620 - DNA, 25 bp, Homo sapien
catgctcacggcaaaggcttaggcg

SEQ ID NO: 3762621 - DNA, 25 bp, Homo sapien
aaagttggcctcatcatacggtcag

SEQ ID NO: 3762622 - DNA, 25 bp, Homo sapien
gaagggatcgcttgcgtaaggcacc

SEQ ID NO: 3762623 - DNA, 25 bp, Homo sapien
agcctggaagccttttagcctacag

SEQ ID NO: 3762624 - DNA, 25 bp, Homo sapien
tgctttggctggaacacgcatccct

SEQ ID NO: 3762625 - DNA, 25 bp, Homo sapien
ttagcctacaggatccacctctctg

SEQ ID NO: 3762626 - DNA, 25 bp, Homo sapien
gctatgccgcttcttacaggacctt

SEQ ID NO: 3762627 - DNA, 25 bp, Homo sapien
ggccaggtggtcagacctggaaaaa

SEQ ID NO: 3762628 - DNA, 25 bp, Homo sapien
caggtggtcagacctggaaaaacac

SEQ ID NO: 3762629 - DNA, 25 bp, Homo sapien
cagaggtgcctcttcatgtgcaggg

SEQ ID NO: 3762630 - DNA, 25 bp, Homo sapien
tcagaggtgcctcttcatgtgcagg

SEQ ID NO: 3762631 - DNA, 25 bp, Homo sapien
cacagaagaagttaggttcccatcc

SEQ ID NO: 3762632 - DNA, 25 bp, Homo sapien
caccagtggctggaggttctttgga

SEQ ID NO: 3762633 - DNA, 25 bp, Homo sapien
taaccatggacaatgagcacaccag

SEQ ID NO: 3762634 - DNA, 25 bp, Homo sapien
ctttggagaatctgaacggacttca

SEQ ID NO: 3762635 - DNA, 25 bp, Homo sapien
actcatcacttcttgcaaaacgcca

SEQ ID NO: 3762636 - DNA, 25 bp, Homo sapien
gccccggtgtgctttcggaagtgcc

SEQ ID NO: 3762637 - DNA, 25 bp, Homo sapien
ggaagtgcctggttaactcatcact

SEQ ID NO: 3762638 - DNA, 25 bp, Homo sapien
tttcggaagtgcctggttaactcat

SEQ ID NO: 3762639 - DNA, 25 bp, Homo sapien
acacacagtggtgggatgcaaggcc

SEQ ID NO: 3762640 - DNA, 25 bp, Homo sapien
tgacttcactgacccgcagacggaa

SEQ ID NO: 3762641 - DNA, 25 bp, Homo sapien
ttcactgacccgcagacggaaaggg

SEQ ID NO: 3762642 - DNA, 25 bp, Homo sapien
aaggggaaattcaacaacacacaca

SEQ ID NO: 3762643 - DNA, 25 bp, Homo sapien
tcctactgataagagaagagcctgc

SEQ ID NO: 3762644 - DNA, 25 bp, Homo sapien
ggatattgggccacccggatctcaa

SEQ ID NO: 3762645 - DNA, 25 bp, Homo sapien
ggcttctggcatcggtaacacacaa

SEQ ID NO: 3762646 - DNA, 25 bp, Homo sapien
gttacgagcttctggaaagccccag

SEQ ID NO: 3762647 - DNA, 25 bp, Homo sapien
tctcaggaaacactcgctgatcaat

SEQ ID NO: 3762648 - DNA, 25 bp, Homo sapien
tcaggaaacactcgctgatcaatgc

SEQ ID NO: 3762649 - DNA, 25 bp, Homo sapien
gttctcaggaaacactcgctgatca

SEQ ID NO: 3762650 - DNA, 25 bp, Homo sapien
aggaaacactcgctgatcaatgctg

SEQ ID NO: 3762651 - DNA, 25 bp, Homo sapien
gggcctcgggccgtcagcatcaaac

SEQ ID NO: 3762652 - DNA, 25 bp, Homo sapien
gagcaggccggtcccactcgggcct

SEQ ID NO: 3762653 - DNA, 25 bp, Homo sapien
accccagggccgctcgaggtagcct

SEQ ID NO: 3762654 - DNA, 25 bp, Homo sapien
agcctcgtgcgagtgcactggtgaa

SEQ ID NO: 3762655 - DNA, 25 bp, Homo sapien
gaagtgaggatttgtctgccctgac

SEQ ID NO: 3762656 - DNA, 25 bp, Homo sapien
tccgtggagaaaaggatctagtctc

SEQ ID NO: 3762657 - DNA, 25 bp, Homo sapien
caaaagtccagtctttaggattcta

SEQ ID NO: 3762658 - DNA, 25 bp, Homo sapien
ggattctactctgaactccaaaaag

SEQ ID NO: 3762659 - DNA, 25 bp, Homo sapien
ctccggggcccgcgtgggcactgac

SEQ ID NO: 3762660 - DNA, 25 bp, Homo sapien
ccctccggggcccgcgtgggcactg

SEQ ID NO: 3762661 - DNA, 25 bp, Homo sapien
cctccggggcccgcgtgggcactga

SEQ ID NO: 3762662 - DNA, 25 bp, Homo sapien
cagcggccgccctccggggcccgcg

SEQ ID NO: 3762663 - DNA, 25 bp, Homo sapien
aaactttcctgcagccgttaaagtg

SEQ ID NO: 3762664 - DNA, 25 bp, Homo sapien
ggaggcatcgccatttcccttgtca

SEQ ID NO: 3762665 - DNA, 25 bp, Homo sapien
cgttaaagtggcaccggtgcaccct

SEQ ID NO: 3762666 - DNA, 25 bp, Homo sapien
tgtgcgtccgctggtgtgctttcaa

SEQ ID NO: 3762667 - DNA, 25 bp, Homo sapien
ggtaacgttccagctctaggcaggt

SEQ ID NO: 3762668 - DNA, 25 bp, Homo sapien
tctgaggctgaaacatagcagggct

SEQ ID NO: 3762669 - DNA, 25 bp, Homo sapien
taagttgtaacaaaagctcgggctg

SEQ ID NO: 3762670 - DNA, 25 bp, Homo sapien
tagcagggctcgctctggaggtaac

SEQ ID NO: 3762671 - DNA, 25 bp, Homo sapien
gataacattgctgcccggtcactac

SEQ ID NO: 3762672 - DNA, 25 bp, Homo sapien
tgccatgacgaccaaaagtaaaagc

SEQ ID NO: 3762673 - DNA, 25 bp, Homo sapien
gagaaggcacgtgattgccatgacg

SEQ ID NO: 3762674 - DNA, 25 bp, Homo sapien
ccttacggaagttagaggaaatctg

SEQ ID NO: 3762675 - DNA, 25 bp, Homo sapien
gcacacagcgtgttctgagggaccc

SEQ ID NO: 3762676 - DNA, 25 bp, Homo sapien
caggacagaaagactgcacggcaca

SEQ ID NO: 3762677 - DNA, 25 bp, Homo sapien
gaatggagctgcagaaaaaccaccc

SEQ ID NO: 3762678 - DNA, 25 bp, Homo sapien
agacagcagctgtctgtattcaggg

SEQ ID NO: 3762679 - DNA, 25 bp, Homo sapien
gggaaattactccacggccctgctg

SEQ ID NO: 3762680 - DNA, 25 bp, Homo sapien
tgtgtagcccagaccgcctatgttt

SEQ ID NO: 3762681 - DNA, 25 bp, Homo sapien
tgcagtgtggcatggacagtacccc

SEQ ID NO: 3762682 - DNA, 25 bp, Homo sapien
acagaatgccgttcccaagtgcagg

SEQ ID NO: 3762683 - DNA, 25 bp, Homo sapien
aagaagctacaactgccgagatcag

SEQ ID NO: 3762684 - DNA, 25 bp, Homo sapien
gaagctacaactgccgagatcagca

SEQ ID NO: 3762685 - DNA, 25 bp, Homo sapien
tcaagaagctacaactgccgagatc

SEQ ID NO: 3762686 - DNA, 25 bp, Homo sapien
gctacaactgccgagatcagcatcc

SEQ ID NO: 3762687 - DNA, 25 bp, Homo sapien
attccagttctacgacaatgtcgga

SEQ ID NO: 3762688 - DNA, 25 bp, Homo sapien
caatgtcggaaaccgaggtccttct

SEQ ID NO: 3762689 - DNA, 25 bp, Homo sapien
gtcacaagactgacaagtcactggg

SEQ ID NO: 3762690 - DNA, 25 bp, Homo sapien
gacttgaagcagtttggacgggctc

SEQ ID NO: 3762691 - DNA, 25 bp, Homo sapien
aaaacacattggaaatggtctacag

SEQ ID NO: 3762692 - DNA, 25 bp, Homo sapien
aaaactgttaagtacaagcaccaag

SEQ ID NO: 3762693 - DNA, 25 bp, Homo sapien
aatgttaggcattccaaagagcaga

SEQ ID NO: 3762694 - DNA, 25 bp, Homo sapien
aaaagagagctggtctacgttctgg

SEQ ID NO: 3762695 - DNA, 25 bp, Homo sapien
atcgcagcctggaggatcgatcggc

SEQ ID NO: 3762696 - DNA, 25 bp, Homo sapien
agttggtccccatgacaagctccag

SEQ ID NO: 3762697 - DNA, 25 bp, Homo sapien
ttggcaggcagagcaagttggtccc

SEQ ID NO: 3762698 - DNA, 25 bp, Homo sapien
ttccctgggcggacgctgatcgcag

SEQ ID NO: 3762699 - DNA, 25 bp, Homo sapien
gctcctggaagatgctgcacatggg

SEQ ID NO: 3762700 - DNA, 25 bp, Homo sapien
gcagcgccgagaagtagccggtctc

SEQ ID NO: 3762701 - DNA, 25 bp, Homo sapien
agctcctggaagatgctgcacatgg

SEQ ID NO: 3762702 - DNA, 25 bp, Homo sapien
gtctcgtgcacgatctggagctcct

SEQ ID NO: 3762703 - DNA, 25 bp, Homo sapien
caatatttgcaaacaccggactgac

SEQ ID NO: 3762704 - DNA, 25 bp, Homo sapien
gaaagtttcatgcaaactccaggct

SEQ ID NO: 3762705 - DNA, 25 bp, Homo sapien
ggactgactgcaaacgtaacccctg

SEQ ID NO: 3762706 - DNA, 25 bp, Homo sapien
ccccggagcgcaggtgaaagtttca

SEQ ID NO: 3762707 - DNA, 25 bp, Homo sapien
ttttagcagggtatataaggcgcgg

SEQ ID NO: 3762708 - DNA, 25 bp, Homo sapien
gttctgattggaaagtggcctcgca

SEQ ID NO: 3762709 - DNA, 25 bp, Homo sapien
tcaattcgaactctgctcgttctga

SEQ ID NO: 3762710 - DNA, 25 bp, Homo sapien
tggcctcgcaggctatttttagcag

SEQ ID NO: 3762711 - DNA, 25 bp, Homo sapien
cagtgtcttgttaattctctaggcc

SEQ ID NO: 3762712 - DNA, 25 bp, Homo sapien
ttgagcagaatagtagagacttacg

SEQ ID NO: 3762713 - DNA, 25 bp, Homo sapien
tctcctgcaaatgggcacatccctt

SEQ ID NO: 3762714 - DNA, 25 bp, Homo sapien
tcttgtctgtaaaggaccacataag

SEQ ID NO: 3762715 - DNA, 25 bp, Homo sapien
tttctattgagcaccctgctgtaca

SEQ ID NO: 3762716 - DNA, 25 bp, Homo sapien
catgggggccatttctattgagcac

SEQ ID NO: 3762717 - DNA, 25 bp, Homo sapien
gggccatttctattgagcaccctgc

SEQ ID NO: 3762718 - DNA, 25 bp, Homo sapien
gccatttctattgagcaccctgctg

SEQ ID NO: 3762719 - DNA, 25 bp, Homo sapien
gctatggatcctgcagtcttggtgg

SEQ ID NO: 3762720 - DNA, 25 bp, Homo sapien
ggatcctgaggattccacactggtc

SEQ ID NO: 3762721 - DNA, 25 bp, Homo sapien
gaagggactgacttccatctccaca

SEQ ID NO: 3762722 - DNA, 25 bp, Homo sapien
cactggtctccctgggcgctatgga

SEQ ID NO: 3762723 - DNA, 25 bp, Homo sapien
ctgacaaatttgtacatgggcccaa

SEQ ID NO: 3762724 - DNA, 25 bp, Homo sapien
tttccattagcacatccagatgagt

SEQ ID NO: 3762725 - DNA, 25 bp, Homo sapien
aagggatatcccacttagacaattc

SEQ ID NO: 3762726 - DNA, 25 bp, Homo sapien
ggtagcacctttccaccagtcaata

SEQ ID NO: 3762727 - DNA, 25 bp, Homo sapien
tcaaagcgacatctgagttgcaaag

SEQ ID NO: 3762728 - DNA, 25 bp, Homo sapien
caagggtcccttgacacgtttcaag

SEQ ID NO: 3762729 - DNA, 25 bp, Homo sapien
aaatcttcacagtttggagtccagt

SEQ ID NO: 3762730 - DNA, 25 bp, Homo sapien
ggctggacacaaacaaggaaatctt

SEQ ID NO: 3762731 - DNA, 25 bp, Homo sapien
ctgcagactcgagaccctgcacctg

SEQ ID NO: 3762732 - DNA, 25 bp, Homo sapien
ttcaggacaagatgtctatctattg

SEQ ID NO: 3762733 - DNA, 25 bp, Homo sapien
acatcggccggaagacatcagctgg

SEQ ID NO: 3762734 - DNA, 25 bp, Homo sapien
ctatctattgtcttgctgctaccat

SEQ ID NO: 3762735 - DNA, 25 bp, Homo sapien
tagctccagccgtatccgtctgcat

SEQ ID NO: 3762736 - DNA, 25 bp, Homo sapien
tctgcgtccctataacatcccatag

SEQ ID NO: 3762737 - DNA, 25 bp, Homo sapien
cccgcagtgcggtcaagagctgtaa

SEQ ID NO: 3762738 - DNA, 25 bp, Homo sapien
ccttctggctggttgtttatgtgga

SEQ ID NO: 3762739 - DNA, 25 bp, Homo sapien
tctccatggcctgggtcatagtctg

SEQ ID NO: 3762740 - DNA, 25 bp, Homo sapien
gagagcaagggcaggctcctctcca

SEQ ID NO: 3762741 - DNA, 25 bp, Homo sapien
tctggagatgactgaagagttagtc

SEQ ID NO: 3762742 - DNA, 25 bp, Homo sapien
gtcttggggctgttgcttgtgagaa

SEQ ID NO: 3762743 - DNA, 25 bp, Homo sapien
gatcaccttgaaagtcatcgatttc

SEQ ID NO: 3762744 - DNA, 25 bp, Homo sapien
tcacaggggtctctggcacgtaatg

SEQ ID NO: 3762745 - DNA, 25 bp, Homo sapien
cacgtaatgatcaccttgaaagtca

SEQ ID NO: 3762746 - DNA, 25 bp, Homo sapien
tctctggcacgtaatgatcaccttg

SEQ ID NO: 3762747 - DNA, 25 bp, Homo sapien
tctgtaaggacaacaccatggtgac

SEQ ID NO: 3762748 - DNA, 25 bp, Homo sapien
caatgatcattatctgatgtcacct

SEQ ID NO: 3762749 - DNA, 25 bp, Homo sapien
gagatgatcccaggtccaatcacaa

SEQ ID NO: 3762750 - DNA, 25 bp, Homo sapien
tcatcgtgcgtgcttaagaaacatc

SEQ ID NO: 3762751 - DNA, 25 bp, Homo sapien
acagcgtcagcacctttctgtcggg

SEQ ID NO: 3762752 - DNA, 25 bp, Homo sapien
agctccaaccccacagcgtcagcac

SEQ ID NO: 3762753 - DNA, 25 bp, Homo sapien
gagtgtgaccgtgatgagaacaaca

SEQ ID NO: 3762754 - DNA, 25 bp, Homo sapien
gagaacaacagtgcttccacacggt

SEQ ID NO: 3762755 - DNA, 25 bp, Homo sapien
tgagtccgggaaattcagtgacttc

SEQ ID NO: 3762756 - DNA, 25 bp, Homo sapien
gccacttggctggtgaagtacagaa

SEQ ID NO: 3762757 - DNA, 25 bp, Homo sapien
gcagagaatacactgagtccgggaa

SEQ ID NO: 3762758 - DNA, 25 bp, Homo sapien
ttgaagttggatcaattagatctgc

SEQ ID NO: 3762759 - DNA, 25 bp, Homo sapien
ttaataaacatgtgattcccacaca

SEQ ID NO: 3762760 - DNA, 25 bp, Homo sapien
aaacatgtgattcccacacatggga

SEQ ID NO: 3762761 - DNA, 25 bp, Homo sapien
taataaacatgtgattcccacacat

SEQ ID NO: 3762762 - DNA, 25 bp, Homo sapien
ataaacatgtgattcccacacatgg

SEQ ID NO: 3762763 - DNA, 25 bp, Homo sapien
gctttggctctggttacaaataaac

SEQ ID NO: 3762764 - DNA, 25 bp, Homo sapien
gagccacgaggatttggctctgatt

SEQ ID NO: 3762765 - DNA, 25 bp, Homo sapien
ctccatgacgtggtggccacagctc

SEQ ID NO: 3762766 - DNA, 25 bp, Homo sapien
aggccgactgcagctgaccggtgac

SEQ ID NO: 3762767 - DNA, 25 bp, Homo sapien
caaccccagcttcttccaatctcac

SEQ ID NO: 3762768 - DNA, 25 bp, Homo sapien
tcaaccccagcttcttccaatctca

SEQ ID NO: 3762769 - DNA, 25 bp, Homo sapien
ggaagtacttatgtgggtatttctc

SEQ ID NO: 3762770 - DNA, 25 bp, Homo sapien
cccgatggggacgatatggagcctt

SEQ ID NO: 3762771 - DNA, 25 bp, Homo sapien
catcccggcagtttggtggtaggaa

SEQ ID NO: 3762772 - DNA, 25 bp, Homo sapien
ctgaggcagtgggatttcttgtgat

SEQ ID NO: 3762773 - DNA, 25 bp, Homo sapien
ttgggggctgcgtatcgaagccctt

SEQ ID NO: 3762774 - DNA, 25 bp, Homo sapien
ggggagaatatccttctaaggccat

SEQ ID NO: 3762775 - DNA, 25 bp, Homo sapien
cgtatcgaagcccttgcacttctgg

SEQ ID NO: 3762776 - DNA, 25 bp, Homo sapien
gctgcgtatcgaagcccttgcactt

SEQ ID NO: 3762777 - DNA, 25 bp, Homo sapien
gagtagctcttgaggacaaccagct

SEQ ID NO: 3762778 - DNA, 25 bp, Homo sapien
ccaaagacggtttctagagtagctc

SEQ ID NO: 3762779 - DNA, 25 bp, Homo sapien
ggccggctggatccctagtagtttc

SEQ ID NO: 3762780 - DNA, 25 bp, Homo sapien
tacaatacgtactcataggaaaggc

SEQ ID NO: 3762781 - DNA, 25 bp, Homo sapien
attttatagagccaaccatactcac

SEQ ID NO: 3762782 - DNA, 25 bp, Homo sapien
tattttatagagccaaccatactca

SEQ ID NO: 3762783 - DNA, 25 bp, Homo sapien
tatgcccaagcttttatcatgaatt

SEQ ID NO: 3762784 - DNA, 25 bp, Homo sapien
atgcccaagcttttatcatgaatta

SEQ ID NO: 3762785 - DNA, 25 bp, Homo sapien
tcatcaccatcactgtgactattta

SEQ ID NO: 3762786 - DNA, 25 bp, Homo sapien
tcatcatcaccatcactgtgactat

SEQ ID NO: 3762787 - DNA, 25 bp, Homo sapien
catcatcatcaccatcactgtgact

SEQ ID NO: 3762788 - DNA, 25 bp, Homo sapien
catcaccatcactgtgactatttat

SEQ ID NO: 3762789 - DNA, 25 bp, Homo sapien
tcaaacaagtattgcttctctggct

SEQ ID NO: 3762790 - DNA, 25 bp, Homo sapien
gaacggtcacagataatttcattgg

SEQ ID NO: 3762791 - DNA, 25 bp, Homo sapien
ttctctggcttaagacgttggtgca

SEQ ID NO: 3762792 - DNA, 25 bp, Homo sapien
cattggaatgaatttgtcacctgtt

SEQ ID NO: 3762793 - DNA, 25 bp, Homo sapien
acatggattgtgttgaaagctgtct

SEQ ID NO: 3762794 - DNA, 25 bp, Homo sapien
ggctacatggattgtgttgaaagct

SEQ ID NO: 3762795 - DNA, 25 bp, Homo sapien
tacatggattgtgttgaaagctgtc

SEQ ID NO: 3762796 - DNA, 25 bp, Homo sapien
gtgttgaaagctgtcttttaacatg

SEQ ID NO: 3762797 - DNA, 25 bp, Homo sapien
gctgctgtttcgtaccatgtggcct

SEQ ID NO: 3762798 - DNA, 25 bp, Homo sapien
tcgggttcatgggagctcacccata

SEQ ID NO: 3762799 - DNA, 25 bp, Homo sapien
tcaggagtattgtcttggtaccaag

SEQ ID NO: 3762800 - DNA, 25 bp, Homo sapien
cacccataaggcatagattggttca

SEQ ID NO: 3762801 - DNA, 25 bp, Homo sapien
tgatgccccgatatgtcccttctgt

SEQ ID NO: 3762802 - DNA, 25 bp, Homo sapien
tgttcccaggcgctgcgctgcttct

SEQ ID NO: 3762803 - DNA, 25 bp, Homo sapien
ctcccttctccggtgctcaagactt

SEQ ID NO: 3762804 - DNA, 25 bp, Homo sapien
gccctctcagtgatgccccgatatg

SEQ ID NO: 3762805 - DNA, 25 bp, Homo sapien
gggagaggccttgtcagacatcaac

SEQ ID NO: 3762806 - DNA, 25 bp, Homo sapien
tagggcatttaaggaggtcattcag

SEQ ID NO: 3762807 - DNA, 25 bp, Homo sapien
tgatgtcataaggtcgggcccctaa

SEQ ID NO: 3762808 - DNA, 25 bp, Homo sapien
cccaggctgcggtgttctgtttcag

SEQ ID NO: 3762809 - DNA, 25 bp, Homo sapien
tggcaggttgtacgcaggcagctct

SEQ ID NO: 3762810 - DNA, 25 bp, Homo sapien
tcaggtgaccctaacttcaagggcc

SEQ ID NO: 3762811 - DNA, 25 bp, Homo sapien
gcatggtgacagcatgtcccctggg

SEQ ID NO: 3762812 - DNA, 25 bp, Homo sapien
tgccttgctcataggagaaccccag

SEQ ID NO: 3762813 - DNA, 25 bp, Homo sapien
tttactacttcctattttgctccaa

SEQ ID NO: 3762814 - DNA, 25 bp, Homo sapien
ggaacagctctgaaatagatttcaa

SEQ ID NO: 3762815 - DNA, 25 bp, Homo sapien
atttcatagccccaaaggaacagct

SEQ ID NO: 3762816 - DNA, 25 bp, Homo sapien
atttctaccagtcttgtcttttatt

SEQ ID NO: 3762817 - DNA, 25 bp, Homo sapien
tgaggacagcccccggaggacaagg

SEQ ID NO: 3762818 - DNA, 25 bp, Homo sapien
ttatcattgggcctggcacattgat

SEQ ID NO: 3762819 - DNA, 25 bp, Homo sapien
attgggcctggcacattgatctctc

SEQ ID NO: 3762820 - DNA, 25 bp, Homo sapien
atcattgggcctggcacattgatct

SEQ ID NO: 3762821 - DNA, 25 bp, Homo sapien
ggagggaaggttgcatcagccactt

SEQ ID NO: 3762822 - DNA, 25 bp, Homo sapien
tgaggagacgggatcagcgatggga

SEQ ID NO: 3762823 - DNA, 25 bp, Homo sapien
atcggagagggctggaatctgtttc

SEQ ID NO: 3762824 - DNA, 25 bp, Homo sapien
ttcctagcgaagcacgtatgtctca

SEQ ID NO: 3762825 - DNA, 25 bp, Homo sapien
tccttaagggcactgacgtccacga

SEQ ID NO: 3762826 - DNA, 25 bp, Homo sapien
taagggcactgacgtccacgagctg

SEQ ID NO: 3762827 - DNA, 25 bp, Homo sapien
gactgctcagggaatagagcatctc

SEQ ID NO: 3762828 - DNA, 25 bp, Homo sapien
accttggctggagcgtgactgctca

SEQ ID NO: 3762829 - DNA, 25 bp, Homo sapien
gaaatcccagcgttgtctggcttcc

SEQ ID NO: 3762830 - DNA, 25 bp, Homo sapien
caatgggtgttggttgcccctttga

SEQ ID NO: 3762831 - DNA, 25 bp, Homo sapien
tcacagaggtgtaaactcagtccta

SEQ ID NO: 3762832 - DNA, 25 bp, Homo sapien
gcttttcagaaatccctctgcatcg

SEQ ID NO: 3762833 - DNA, 25 bp, Homo sapien
ctaaacaggaagttttggtaggcag

SEQ ID NO: 3762834 - DNA, 25 bp, Homo sapien
gcctccactttgatatgatattctg

SEQ ID NO: 3762835 - DNA, 25 bp, Homo sapien
acgtgttccatcctcgtccattaac

SEQ ID NO: 3762836 - DNA, 25 bp, Homo sapien
cacgccctgtgctttggtgcctgca

SEQ ID NO: 3762837 - DNA, 25 bp, Homo sapien
ggctgccttaggagacgtgttccat

SEQ ID NO: 3762838 - DNA, 25 bp, Homo sapien
gaatggtgccccttgcaccgtaagg

SEQ ID NO: 3762839 - DNA, 25 bp, Homo sapien
cctgccgaggtgaagcactagtgct

SEQ ID NO: 3762840 - DNA, 25 bp, Homo sapien
ttgtaacaatcgtggaaactcagtg

SEQ ID NO: 3762841 - DNA, 25 bp, Homo sapien
tgacctgtgggtatggaagtgcacc

SEQ ID NO: 3762842 - DNA, 25 bp, Homo sapien
gtctgagctcgtattttccttcccg

SEQ ID NO: 3762843 - DNA, 25 bp, Homo sapien
tttccttcccgcatctgtaaagtgg

SEQ ID NO: 3762844 - DNA, 25 bp, Homo sapien
tgacggcagtcagcaaagacgcctc

SEQ ID NO: 3762845 - DNA, 25 bp, Homo sapien
cctgacctggcggtgtgtctgagct

SEQ ID NO: 3762846 - DNA, 25 bp, Homo sapien
gcagttagcacactaactgtaaaat

SEQ ID NO: 3762847 - DNA, 25 bp, Homo sapien
aagatgatgataagcttcggagcag

SEQ ID NO: 3762848 - DNA, 25 bp, Homo sapien
gcttcggagcagttagcacactaac

SEQ ID NO: 3762849 - DNA, 25 bp, Homo sapien
gatgataagcttcggagcagttagc

SEQ ID NO: 3762850 - DNA, 25 bp, Homo sapien
gatagaaaaactgcttccggccaat

SEQ ID NO: 3762851 - DNA, 25 bp, Homo sapien
caatttgttcatgccaagtttccag

SEQ ID NO: 3762852 - DNA, 25 bp, Homo sapien
aatgtttatgccaatttgttcatgc

SEQ ID NO: 3762853 - DNA, 25 bp, Homo sapien
gatttagatagaaaaactgcttccg

SEQ ID NO: 3762854 - DNA, 25 bp, Homo sapien
tactcacggtgcttgtggccaactt

SEQ ID NO: 3762855 - DNA, 25 bp, Homo sapien
gctcgtgttggggtcgccacaaacc

SEQ ID NO: 3762856 - DNA, 25 bp, Homo sapien
cgtgcagtcgcagagagctcgtgtt

SEQ ID NO: 3762857 - DNA, 25 bp, Homo sapien
agggaagagggcgacccacgccata

SEQ ID NO: 3762858 - DNA, 25 bp, Homo sapien
catgccctttgctaagagtcctgga

SEQ ID NO: 3762859 - DNA, 25 bp, Homo sapien
agtccacagcggcagcaaaacaggt

SEQ ID NO: 3762860 - DNA, 25 bp, Homo sapien
tgatacacacttccaagaacacgga

SEQ ID NO: 3762861 - DNA, 25 bp, Homo sapien
gagtttgaagtctccacggccgatc

SEQ ID NO: 3762862 - DNA, 25 bp, Homo sapien
ctgaaaccagtagtggaagctagtc

SEQ ID NO: 3762863 - DNA, 25 bp, Homo sapien
tgaaaccagtagtggaagctagtct

SEQ ID NO: 3762864 - DNA, 25 bp, Homo sapien
tgagggtagcaacgccgtgtgcagg

SEQ ID NO: 3762865 - DNA, 25 bp, Homo sapien
tgtgaggaaggattgttagcagaga

SEQ ID NO: 3762866 - DNA, 25 bp, Homo sapien
tgttggaaaaaccaggatgttccta

SEQ ID NO: 3762867 - DNA, 25 bp, Homo sapien
agtgacacgaggaaggcacgagtga

SEQ ID NO: 3762868 - DNA, 25 bp, Homo sapien
ttcccttcctgattccactgctgag

SEQ ID NO: 3762869 - DNA, 25 bp, Homo sapien
gattccactgctgagttacaggcat

SEQ ID NO: 3762870 - DNA, 25 bp, Homo sapien
tcctgattccactgctgagttacag

SEQ ID NO: 3762871 - DNA, 25 bp, Homo sapien
ccttcctgattccactgctgagtta

SEQ ID NO: 3762872 - DNA, 25 bp, Homo sapien
ctttgcatctggcacgctccttttt

SEQ ID NO: 3762873 - DNA, 25 bp, Homo sapien
gcatctggcacgctcctttttcaaa

SEQ ID NO: 3762874 - DNA, 25 bp, Homo sapien
ttgcatctggcacgctcctttttca

SEQ ID NO: 3762875 - DNA, 25 bp, Homo sapien
atctggcacgctcctttttcaaagg

SEQ ID NO: 3762876 - DNA, 25 bp, Homo sapien
ctgcaccttggagaggcctgctggg

SEQ ID NO: 3762877 - DNA, 25 bp, Homo sapien
tcaacactaatgaatttccctttcg

SEQ ID NO: 3762878 - DNA, 25 bp, Homo sapien
gttcttgctatcctcgtcaacacta

SEQ ID NO: 3762879 - DNA, 25 bp, Homo sapien
agttggacacacacgaggctctgac

SEQ ID NO: 3762880 - DNA, 25 bp, Homo sapien
tccctttcgttgttctgtggtgtaa

SEQ ID NO: 3762881 - DNA, 25 bp, Homo sapien
gaaggccgcaagtcgctttttagga

SEQ ID NO: 3762882 - DNA, 25 bp, Homo sapien
ttaggaaatgcgagtacactactgg

SEQ ID NO: 3762883 - DNA, 25 bp, Homo sapien
gagacagttgattgcgctctccagc

SEQ ID NO: 3762884 - DNA, 25 bp, Homo sapien
gagcaaggtgaacgattggtcagca

SEQ ID NO: 3762885 - DNA, 25 bp, Homo sapien
aagaggactgtgtaatccagcccat

SEQ ID NO: 3762886 - DNA, 25 bp, Homo sapien
cactggggaagaggactgtgtaatc

SEQ ID NO: 3762887 - DNA, 25 bp, Homo sapien
cttcactggggaagaggactgtgta

SEQ ID NO: 3762888 - DNA, 25 bp, Homo sapien
gggaagaggactgtgtaatccagcc

SEQ ID NO: 3762889 - DNA, 25 bp, Homo sapien
cctgatcaataactgtctccttgtt

SEQ ID NO: 3762890 - DNA, 25 bp, Homo sapien
gtctccttgtttttcacaataatct

SEQ ID NO: 3762891 - DNA, 25 bp, Homo sapien
ctgatcaataactgtctccttgttt

SEQ ID NO: 3762892 - DNA, 25 bp, Homo sapien
tttcctcttgaatgtcccacaatgc

SEQ ID NO: 3762893 - DNA, 25 bp, Homo sapien
ctgtttggaaggacccccaccagtg

SEQ ID NO: 3762894 - DNA, 25 bp, Homo sapien
caaaatttggcgttgaatcaactcc

SEQ ID NO: 3762895 - DNA, 25 bp, Homo sapien
ctgccaattcttggatcattccaaa

SEQ ID NO: 3762896 - DNA, 25 bp, Homo sapien
tcttagcattaactcctgagctgcc

SEQ ID NO: 3762897 - DNA, 25 bp, Homo sapien
cagagagaagaagcgccttggactc

SEQ ID NO: 3762898 - DNA, 25 bp, Homo sapien
gtcagagagaagaagcgccttggac

SEQ ID NO: 3762899 - DNA, 25 bp, Homo sapien
ctttgcttcttagcattaactcctg

SEQ ID NO: 3762900 - DNA, 25 bp, Homo sapien
tgtgacagcgtctgaaagcctgact

SEQ ID NO: 3762901 - DNA, 25 bp, Homo sapien
tgaacactcaggattctcctctggg

SEQ ID NO: 3762902 - DNA, 25 bp, Homo sapien
taattctagtgagttcgggtttgct

SEQ ID NO: 3762903 - DNA, 25 bp, Homo sapien
tgcttgaaggcaaattctggtctta

SEQ ID NO: 3762904 - DNA, 25 bp, Homo sapien
agcacctcctgcaaggttgagagcc

SEQ ID NO: 3762905 - DNA, 25 bp, Homo sapien
cagttttctgggttcgatttgcagc

SEQ ID NO: 3762906 - DNA, 25 bp, Homo sapien
gcaaggttgagagcctttaaacgca

SEQ ID NO: 3762907 - DNA, 25 bp, Homo sapien
aagtcctgctaagtgacagaggccc

SEQ ID NO: 3762908 - DNA, 25 bp, Homo sapien
ccttgccttaagaacctggtgagaa

SEQ ID NO: 3762909 - DNA, 25 bp, Homo sapien
acactcccacacagaactcctccat

SEQ ID NO: 3762910 - DNA, 25 bp, Homo sapien
ttcatcactcaatactttaccaaag

SEQ ID NO: 3762911 - DNA, 25 bp, Homo sapien
aaccgaggaaggctttagcaggcag

SEQ ID NO: 3762912 - DNA, 25 bp, Homo sapien
ggcaacacctctgaccctgttttct

SEQ ID NO: 3762913 - DNA, 25 bp, Homo sapien
cctttgtgtgcttgtagcctcggca

SEQ ID NO: 3762914 - DNA, 25 bp, Homo sapien
gcctcggcagtgtgatcaggttgac

SEQ ID NO: 3762915 - DNA, 25 bp, Homo sapien
acggcaacacctctgaccctgtttt

SEQ ID NO: 3762916 - DNA, 25 bp, Homo sapien
agcatccctcagacatggtggtcat

SEQ ID NO: 3762917 - DNA, 25 bp, Homo sapien
aagcatccctcagacatggtggtca

SEQ ID NO: 3762918 - DNA, 25 bp, Homo sapien
cgaagcatccctcagacatggtggt

SEQ ID NO: 3762919 - DNA, 25 bp, Homo sapien
gaagcatccctcagacatggtggtc

SEQ ID NO: 3762920 - DNA, 25 bp, Homo sapien
ttgctccttctaatagttcctccat

SEQ ID NO: 3762921 - DNA, 25 bp, Homo sapien
gccatagccacatttttccttcagg

SEQ ID NO: 3762922 - DNA, 25 bp, Homo sapien
gcccccaattttcttgctccttcta

SEQ ID NO: 3762923 - DNA, 25 bp, Homo sapien
atagccacatttttccttcagggtc

SEQ ID NO: 3762924 - DNA, 25 bp, Homo sapien
aatacttcagaacctctaatatccc

SEQ ID NO: 3762925 - DNA, 25 bp, Homo sapien
ccctgcagccttcacattaaaggta

SEQ ID NO: 3762926 - DNA, 25 bp, Homo sapien
tcgaattcgttcttcccagtgactt

SEQ ID NO: 3762927 - DNA, 25 bp, Homo sapien
tcagaacctctaatatccctgcagc

SEQ ID NO: 3762928 - DNA, 25 bp, Homo sapien
ggggcaggaatgtgtcctcggaaag

SEQ ID NO: 3762929 - DNA, 25 bp, Homo sapien
tggggcaggaatgtgtcctcggaaa

SEQ ID NO: 3762930 - DNA, 25 bp, Homo sapien
gggcaggaatgtgtcctcggaaaga

SEQ ID NO: 3762931 - DNA, 25 bp, Homo sapien
catcttcaccagcacacccgcccct

SEQ ID NO: 3762932 - DNA, 25 bp, Homo sapien
cttcaccagcacacccgcccctcac

SEQ ID NO: 3762933 - DNA, 25 bp, Homo sapien
tcttcaccagcacacccgcccctca

SEQ ID NO: 3762934 - DNA, 25 bp, Homo sapien
atcttcaccagcacacccgcccctc

SEQ ID NO: 3762935 - DNA, 25 bp, Homo sapien
tagcttccccaagttcgtgtacagt

SEQ ID NO: 3762936 - DNA, 25 bp, Homo sapien
ttcgtgtacagtgaagctgctccct

SEQ ID NO: 3762937 - DNA, 25 bp, Homo sapien
catcttctcagaatctggacctagg

SEQ ID NO: 3762938 - DNA, 25 bp, Homo sapien
aatctggacctagggattcccgtag

SEQ ID NO: 3762939 - DNA, 25 bp, Homo sapien
caaccgggatggttttgcacgtcac

SEQ ID NO: 3762940 - DNA, 25 bp, Homo sapien
aagaccagggcgcagcactgacaac

SEQ ID NO: 3762941 - DNA, 25 bp, Homo sapien
tgacaaccgggatggttttgcacgt

SEQ ID NO: 3762942 - DNA, 25 bp, Homo sapien
gaagaccagggcgcagcactgacaa

SEQ ID NO: 3762943 - DNA, 25 bp, Homo sapien
tggagtggcggctgagaaggtttga

SEQ ID NO: 3762944 - DNA, 25 bp, Homo sapien
ctggagtggcggctgagaaggtttg

SEQ ID NO: 3762945 - DNA, 25 bp, Homo sapien
gtggcggctgagaaggtttgagcat

SEQ ID NO: 3762946 - DNA, 25 bp, Homo sapien
gagtggcggctgagaaggtttgagc

SEQ ID NO: 3762947 - DNA, 25 bp, Homo sapien
cactgcctcagtgaatgaaggtaat

SEQ ID NO: 3762948 - DNA, 25 bp, Homo sapien
tgatactaattcctcacactgcctc

SEQ ID NO: 3762949 - DNA, 25 bp, Homo sapien
tgtcatttcccacaccaatcattct

SEQ ID NO: 3762950 - DNA, 25 bp, Homo sapien
aaaatactcgccaacaggaagagag

SEQ ID NO: 3762951 - DNA, 25 bp, Homo sapien
ctgaaaccagatagggagtacaacg

SEQ ID NO: 3762952 - DNA, 25 bp, Homo sapien
agtacaacatccgaagacagcctga

SEQ ID NO: 3762953 - DNA, 25 bp, Homo sapien
tacaacgtccgaagacagcctgaaa

SEQ ID NO: 3762954 - DNA, 25 bp, Homo sapien
tgaaaccagatagggagtacaacat

SEQ ID NO: 3762955 - DNA, 25 bp, Homo sapien
ctgaaaccagatagggagtacaacg

SEQ ID NO: 3762956 - DNA, 25 bp, Homo sapien
tacaacgtccgaagacagcctgaaa

SEQ ID NO: 3762957 - DNA, 25 bp, Homo sapien
agggagtacaacgtccgaagacagc

SEQ ID NO: 3762958 - DNA, 25 bp, Homo sapien
accagatagggagtacaacgtccga

SEQ ID NO: 3762959 - DNA, 25 bp, Homo sapien
caggatttctgctatttagaaacac

SEQ ID NO: 3762960 - DNA, 25 bp, Homo sapien
ataaaggtgggcctacattgaccac

SEQ ID NO: 3762961 - DNA, 25 bp, Homo sapien
gctatttagaaacacttcactacat

SEQ ID NO: 3762962 - DNA, 25 bp, Homo sapien
gggcctacattgaccacacgaagac

SEQ ID NO: 3762963 - DNA, 25 bp, Homo sapien
tgtggtattcaaagtaacgtgacat

SEQ ID NO: 3762964 - DNA, 25 bp, Homo sapien
ttgtggtattcaaagtaacgtgaca

SEQ ID NO: 3762965 - DNA, 25 bp, Homo sapien
tttgtggtattcaaagtaacgtgac

SEQ ID NO: 3762966 - DNA, 25 bp, Homo sapien
ctttgtggtattcaaagtaacgtga

SEQ ID NO: 3762967 - DNA, 25 bp, Homo sapien
tcactcagggttgttgtgcggagct

SEQ ID NO: 3762968 - DNA, 25 bp, Homo sapien
gcacgcaggccttctttcaaattaa

SEQ ID NO: 3762969 - DNA, 25 bp, Homo sapien
tatactctgagttgtcacgtgggca

SEQ ID NO: 3762970 - DNA, 25 bp, Homo sapien
cacgtgggcattagaaacactgcat

SEQ ID NO: 3762971 - DNA, 25 bp, Homo sapien
tcatctgagtttatggtgaagaccc

SEQ ID NO: 3762972 - DNA, 25 bp, Homo sapien
ttatgctgtcggtctggctgctgaa

SEQ ID NO: 3762973 - DNA, 25 bp, Homo sapien
aagtcatctgagtttatggtgaaga

SEQ ID NO: 3762974 - DNA, 25 bp, Homo sapien
gagtttatggtgaagacccacagtc

SEQ ID NO: 3762975 - DNA, 25 bp, Homo sapien
gacattgacttggtctaacgttcat

SEQ ID NO: 3762976 - DNA, 25 bp, Homo sapien
tggacattgacttggtctaacgttc

SEQ ID NO: 3762977 - DNA, 25 bp, Homo sapien
gcctggacattgacttggtctaacg

SEQ ID NO: 3762978 - DNA, 25 bp, Homo sapien
cctggacattgacttggtctaacgt

SEQ ID NO: 3762979 - DNA, 25 bp, Homo sapien
gaattgtgtcactcccattgagcag

SEQ ID NO: 3762980 - DNA, 25 bp, Homo sapien
tattgcagggtaggctcagcgaaca

SEQ ID NO: 3762981 - DNA, 25 bp, Homo sapien
tgtgcagcgccttaaccctgatgga

SEQ ID NO: 3762982 - DNA, 25 bp, Homo sapien
ccagaatctgggaatcgggagcaaa

SEQ ID NO: 3762983 - DNA, 25 bp, Homo sapien
ttcctagaagggcaaccctctgttc

SEQ ID NO: 3762984 - DNA, 25 bp, Homo sapien
gcacttcctagaagggcaaccctct

SEQ ID NO: 3762985 - DNA, 25 bp, Homo sapien
gaaggatacagacaggaaatggcac

SEQ ID NO: 3762986 - DNA, 25 bp, Homo sapien
tttcaggtgagagagaaggatacag

SEQ ID NO: 3762987 - DNA, 25 bp, Homo sapien
agaccttgtgtgagtcctttggtac

SEQ ID NO: 3762988 - DNA, 25 bp, Homo sapien
ctgaccctggaacaggactgagcag

SEQ ID NO: 3762989 - DNA, 25 bp, Homo sapien
tgcctgtgtgcacagaagaccttgt

SEQ ID NO: 3762990 - DNA, 25 bp, Homo sapien
tgaccctggaacaggactgagcagg

SEQ ID NO: 3762991 - DNA, 25 bp, Homo sapien
ttgctgcacgaatgtctgagacacc

SEQ ID NO: 3762992 - DNA, 25 bp, Homo sapien
gagacacctcacagtcgcttggttc

SEQ ID NO: 3762993 - DNA, 25 bp, Homo sapien
cacgtttgctgcacgaatgtctgag

SEQ ID NO: 3762994 - DNA, 25 bp, Homo sapien
ctcacagtcgcttggttcagcctct

SEQ ID NO: 3762995 - DNA, 25 bp, Homo sapien
tcagagactagacgtaactgcctgc

SEQ ID NO: 3762996 - DNA, 25 bp, Homo sapien
ggcttagtgcgaccgataaacacca

SEQ ID NO: 3762997 - DNA, 25 bp, Homo sapien
tgagaacatctcacgcggcttagtg

SEQ ID NO: 3762998 - DNA, 25 bp, Homo sapien
gactccatgccgtgtactttgaaga

SEQ ID NO: 3762999 - DNA, 25 bp, Homo sapien
ctccaattactatagccagacaggg

SEQ ID NO: 3763000 - DNA, 25 bp, Homo sapien
agggttgactagtccagtccgggat

SEQ ID NO: 3763001 - DNA, 25 bp, Homo sapien
taccaggacacccttgtgagaaggg

SEQ ID NO: 3763002 - DNA, 25 bp, Homo sapien
ctttcctccaattactatagccaga

SEQ ID NO: 3763003 - DNA, 25 bp, Homo sapien
gccactgggaataccgagtaactcc

SEQ ID NO: 3763004 - DNA, 25 bp, Homo sapien
cgaggacgaagtcctgggctctgtt

SEQ ID NO: 3763005 - DNA, 25 bp, Homo sapien
acgaggacgaagtcctgggctctgt

SEQ ID NO: 3763006 - DNA, 25 bp, Homo sapien
cctcaggacgaggacgaagtcctgg

SEQ ID NO: 3763007 - DNA, 25 bp, Homo sapien
aggacctcaggacgaggacgaagtc

SEQ ID NO: 3763008 - DNA, 25 bp, Homo sapien
gagtggtatgattgtcggcaacttc

SEQ ID NO: 3763009 - DNA, 25 bp, Homo sapien
tgattgtcggcaacttttggaagaa

SEQ ID NO: 3763010 - DNA, 25 bp, Homo sapien
ggcaacttctagctgagagtggtat

SEQ ID NO: 3763011 - DNA, 25 bp, Homo sapien
gagtggtatgattgtcggcaacttt

SEQ ID NO: 3763012 - DNA, 25 bp, Homo sapien
gtgaaattctgtatgagatatttgt

SEQ ID NO: 3763013 - DNA, 25 bp, Homo sapien
gaaattctgtatgagatatttgttg

SEQ ID NO: 3763014 - DNA, 25 bp, Homo sapien
tgtgaaattctgtatgagatatttg

SEQ ID NO: 3763015 - DNA, 25 bp, Homo sapien
aaattctgtatgagatatttgttgt

SEQ ID NO: 3763016 - DNA, 25 bp, Homo sapien
catattttgaattctggaccagaga

SEQ ID NO: 3763017 - DNA, 25 bp, Homo sapien
ggttcttgatactcatcttttccag

SEQ ID NO: 3763018 - DNA, 25 bp, Homo sapien
aagcaagcctgagccaacggcagaa

SEQ ID NO: 3763019 - DNA, 25 bp, Homo sapien
ctgagccaacggcagaactctgcat

SEQ ID NO: 3763020 - DNA, 25 bp, Homo sapien
ttttgcgtttcctgccctgatagag

SEQ ID NO: 3763021 - DNA, 25 bp, Homo sapien
gagattccttccacgtttgctgtgt

SEQ ID NO: 3763022 - DNA, 25 bp, Homo sapien
ggatgtatggcagggaaacttcaag

SEQ ID NO: 3763023 - DNA, 25 bp, Homo sapien
tggaggaattccagaggcttgcatt

SEQ ID NO: 3763024 - DNA, 25 bp, Homo sapien
caggaatgctctttctgggatgtga

SEQ ID NO: 3763025 - DNA, 25 bp, Homo sapien
tccatcacaggaatgctctttctgg

SEQ ID NO: 3763026 - DNA, 25 bp, Homo sapien
atccctgggcatgttctcgggcact

SEQ ID NO: 3763027 - DNA, 25 bp, Homo sapien
atgcagttgcccctccatcacagga

SEQ ID NO: 3763028 - DNA, 25 bp, Homo sapien
gcagagaccagtgggtgaccgatac

SEQ ID NO: 3763029 - DNA, 25 bp, Homo sapien
taggcttgcactgactcacatcgtg

SEQ ID NO: 3763030 - DNA, 25 bp, Homo sapien
cacatcgtgcggtgaaatcttctcc

SEQ ID NO: 3763031 - DNA, 25 bp, Homo sapien
cttctccaacactgcatctggaagc

SEQ ID NO: 3763032 - DNA, 25 bp, Homo sapien
cgcttgtcaagatattagggaagaa

SEQ ID NO: 3763033 - DNA, 25 bp, Homo sapien
tgctgagcttgtattgccgacatca

SEQ ID NO: 3763034 - DNA, 25 bp, Homo sapien
acagagatgggagcactctccaccc

SEQ ID NO: 3763035 - DNA, 25 bp, Homo sapien
gaagtagccttgaccttgatattcc

SEQ ID NO: 3763036 - DNA, 25 bp, Homo sapien
agtcctgaggttgcctctcgtgcac

SEQ ID NO: 3763037 - DNA, 25 bp, Homo sapien
gcctctcgtgcacgttcacagggag

SEQ ID NO: 3763038 - DNA, 25 bp, Homo sapien
tctccaggttctactcccgcgagac

SEQ ID NO: 3763039 - DNA, 25 bp, Homo sapien
tcatttttccggagaatgctcttct

SEQ ID NO: 3763040 - DNA, 25 bp, Homo sapien
tttgtgtgagccaaatctgtccacc

SEQ ID NO: 3763041 - DNA, 25 bp, Homo sapien
ggaagcctttgggatctcgatcttt

SEQ ID NO: 3763042 - DNA, 25 bp, Homo sapien
tctcgatcttttctgcgcaaaatgc

SEQ ID NO: 3763043 - DNA, 25 bp, Homo sapien
tgcttttgctccacctcggcctttg

SEQ ID NO: 3763044 - DNA, 25 bp, Homo sapien
gcacctctgtaatatcgatgacagt

SEQ ID NO: 3763045 - DNA, 25 bp, Homo sapien
cagggtgccgtatcccatgggtgcc

SEQ ID NO: 3763046 - DNA, 25 bp, Homo sapien
ggctgtcagacagcacctctgtaat

SEQ ID NO: 3763047 - DNA, 25 bp, Homo sapien
catgggtgccttcgccaatggtttc

SEQ ID NO: 3763048 - DNA, 25 bp, Homo sapien
tcattggagaagataggtcctggca

SEQ ID NO: 3763049 - DNA, 25 bp, Homo sapien
tgggagccgtccattcacttggcca

SEQ ID NO: 3763050 - DNA, 25 bp, Homo sapien
gggacattgttttcatctgggcgtg

SEQ ID NO: 3763051 - DNA, 25 bp, Homo sapien
ctggcagacctgtcattgctgggac

SEQ ID NO: 3763052 - DNA, 25 bp, Homo sapien
agggtgacgccagcccattctgtcc

SEQ ID NO: 3763053 - DNA, 25 bp, Homo sapien
cattcggtccagtatacatatttcc

SEQ ID NO: 3763054 - DNA, 25 bp, Homo sapien
tccactccataaggatagcccttgt

SEQ ID NO: 3763055 - DNA, 25 bp, Homo sapien
gaggatgtgaacacgacacctgaag

SEQ ID NO: 3763056 - DNA, 25 bp, Homo sapien
gtatttgcaactctacagacaagag

SEQ ID NO: 3763057 - DNA, 25 bp, Homo sapien
aggaggatctcttaactccggcggg

SEQ ID NO: 3763058 - DNA, 25 bp, Homo sapien
gacaagagaaagacactactcagtt

SEQ ID NO: 3763059 - DNA, 25 bp, Homo sapien
gagaattgtctaggcgcattggctc

SEQ ID NO: 3763060 - DNA, 25 bp, Homo sapien
gactggtggagaaacaggcttccat

SEQ ID NO: 3763061 - DNA, 25 bp, Homo sapien
aggactggtggagaaacaggcttcc

SEQ ID NO: 3763062 - DNA, 25 bp, Homo sapien
tcaagggaggactggtggagaaaca

SEQ ID NO: 3763063 - DNA, 25 bp, Homo sapien
gggaggactggtggagaaacaggct

SEQ ID NO: 3763064 - DNA, 25 bp, Homo sapien
ccacttcgtgagctcttcgatgaga

SEQ ID NO: 3763065 - DNA, 25 bp, Homo sapien
gatgaggactaaacgccttttcttg

SEQ ID NO: 3763066 - DNA, 25 bp, Homo sapien
gaactttcgtgctgagatgaggact

SEQ ID NO: 3763067 - DNA, 25 bp, Homo sapien
gatctatcacaatagtagccaggca

SEQ ID NO: 3763068 - DNA, 25 bp, Homo sapien
gaagaaatctacacggaaaccagct

SEQ ID NO: 3763069 - DNA, 25 bp, Homo sapien
tgctgcacttgattcccataactgt

SEQ ID NO: 3763070 - DNA, 25 bp, Homo sapien
tcacagaagtaccagggttgcactg

SEQ ID NO: 3763071 - DNA, 25 bp, Homo sapien
tctcctgccgcagttgtggtgtcaa

SEQ ID NO: 3763072 - DNA, 25 bp, Homo sapien
gtactttctttgacacagtagccca

SEQ ID NO: 3763073 - DNA, 25 bp, Homo sapien
cttgtactttctttgacacagtagc

SEQ ID NO: 3763074 - DNA, 25 bp, Homo sapien
tctgtgttttggtgacactaataat

SEQ ID NO: 3763075 - DNA, 25 bp, Homo sapien
ggtgacactaataatcttgtacttt

SEQ ID NO: 3763076 - DNA, 25 bp, Homo sapien
cagggagaccaagcctgctcctgca

SEQ ID NO: 3763077 - DNA, 25 bp, Homo sapien
ctgatgttgacagcttcccagggtt

SEQ ID NO: 3763078 - DNA, 25 bp, Homo sapien
ccaagcctgctcctgcagagctgat

SEQ ID NO: 3763079 - DNA, 25 bp, Homo sapien
tgctcctgcagagctgatgttgaca

SEQ ID NO: 3763080 - DNA, 25 bp, Homo sapien
tccccggatcctccgatgtacgtag

SEQ ID NO: 3763081 - DNA, 25 bp, Homo sapien
agtacttccccggatcctccgatgt

SEQ ID NO: 3763082 - DNA, 25 bp, Homo sapien
ctctgcgtcttagtacttccccgga

SEQ ID NO: 3763083 - DNA, 25 bp, Homo sapien
tccgatgtacgtagtcttggctgcc

SEQ ID NO: 3763084 - DNA, 25 bp, Homo sapien
gaggttacaacagacactttggccg

SEQ ID NO: 3763085 - DNA, 25 bp, Homo sapien
tcaaacaactcttcatggccacgag

SEQ ID NO: 3763086 - DNA, 25 bp, Homo sapien
gagattgtttcactatggtcctggg

SEQ ID NO: 3763087 - DNA, 25 bp, Homo sapien
ccctctgcagtaccggatgcggcag

SEQ ID NO: 3763088 - DNA, 25 bp, Homo sapien
aaaggcctcatcatgtgaagaaagc

SEQ ID NO: 3763089 - DNA, 25 bp, Homo sapien
gcctcatcatgtgaagaaagctctt

SEQ ID NO: 3763090 - DNA, 25 bp, Homo sapien
cctgctcattttaaaggcctcatca

SEQ ID NO: 3763091 - DNA, 25 bp, Homo sapien
aggcctcatcatgtgaagaaagctc

SEQ ID NO: 3763092 - DNA, 25 bp, Homo sapien
ctgccacatgggaaacctcaggtga

SEQ ID NO: 3763093 - DNA, 25 bp, Homo sapien
atgggaaacctcaggtgacacctca

SEQ ID NO: 3763094 - DNA, 25 bp, Homo sapien
ggaaacctcaggtgacacctcaggc

SEQ ID NO: 3763095 - DNA, 25 bp, Homo sapien
cacatgggaaacctcaggtgacacc

SEQ ID NO: 3763096 - DNA, 25 bp, Homo sapien
cacaggagcattttaggagaatttc

SEQ ID NO: 3763097 - DNA, 25 bp, Homo sapien
agccaggggcacaggagcattttag

SEQ ID NO: 3763098 - DNA, 25 bp, Homo sapien
tgtaaggaggcagcccccctggcag

SEQ ID NO: 3763099 - DNA, 25 bp, Homo sapien
ctgtaaggaggcagcccccctggca

SEQ ID NO: 3763100 - DNA, 25 bp, Homo sapien
tcacccttggcaggaacaggatcat

SEQ ID NO: 3763101 - DNA, 25 bp, Homo sapien
gtgagttcacccttggcaggaacag

SEQ ID NO: 3763102 - DNA, 25 bp, Homo sapien
tgagttcacccttggcaggaacagg

SEQ ID NO: 3763103 - DNA, 25 bp, Homo sapien
agttcacccttggcaggaacaggat

SEQ ID NO: 3763104 - DNA, 25 bp, Homo sapien
taggccggctctggcatgaactctg

SEQ ID NO: 3763105 - DNA, 25 bp, Homo sapien
ttgccacctcagcagcttagcagcc

SEQ ID NO: 3763106 - DNA, 25 bp, Homo sapien
ctgagctggcgcataggccggctct

SEQ ID NO: 3763107 - DNA, 25 bp, Homo sapien
tgtcttctgagctggcgcataggcc

SEQ ID NO: 3763108 - DNA, 25 bp, Homo sapien
gaagatggagcggaatacgcactcc

SEQ ID NO: 3763109 - DNA, 25 bp, Homo sapien
tgggtcacggatccgagggatacac

SEQ ID NO: 3763110 - DNA, 25 bp, Homo sapien
aacaccattgcatgggagtgtgggt

SEQ ID NO: 3763111 - DNA, 25 bp, Homo sapien
ctctagatgactggaagtcaatagc

SEQ ID NO: 3763112 - DNA, 25 bp, Homo sapien
gacactcatggtaccctgtacccga

SEQ ID NO: 3763113 - DNA, 25 bp, Homo sapien
atcccggacactcatggtaccctgt

SEQ ID NO: 3763114 - DNA, 25 bp, Homo sapien
tcatggtaccctgtacccgaaccaa

SEQ ID NO: 3763115 - DNA, 25 bp, Homo sapien
cctgtacccgaaccaaatcagagca

SEQ ID NO: 3763116 - DNA, 25 bp, Homo sapien
ttcccaaagaatcgtcagtttcctg

SEQ ID NO: 3763117 - DNA, 25 bp, Homo sapien
ttcctgcacacgtggaggttcccga

SEQ ID NO: 3763118 - DNA, 25 bp, Homo sapien
tatgtgcgtcataaactgctgtaga

SEQ ID NO: 3763119 - DNA, 25 bp, Homo sapien
ttctggaaacattgacgtgcaagcc

SEQ ID NO: 3763120 - DNA, 25 bp, Homo sapien
ttgagaaccactggcctggagcagc

SEQ ID NO: 3763121 - DNA, 25 bp, Homo sapien
agaaccactggcctggagcagctca

SEQ ID NO: 3763122 - DNA, 25 bp, Homo sapien
ggttgagaaccactggcctggagca

SEQ ID NO: 3763123 - DNA, 25 bp, Homo sapien
tgagaaccactggcctggagcagct

SEQ ID NO: 3763124 - DNA, 25 bp, Homo sapien
ctgagggttggaggaggacatccaa

SEQ ID NO: 3763125 - DNA, 25 bp, Homo sapien
tgagggttggaggaggacatccaag

SEQ ID NO: 3763126 - DNA, 25 bp, Homo sapien
caaccttacacccatagaaggtagg

SEQ ID NO: 3763127 - DNA, 25 bp, Homo sapien
gcctgagttgcaaccttacacccat

SEQ ID NO: 3763128 - DNA, 25 bp, Homo sapien
ttacacccatagaaggtaggacagg

SEQ ID NO: 3763129 - DNA, 25 bp, Homo sapien
gttgcaaccttacacccatagaagg

SEQ ID NO: 3763130 - DNA, 25 bp, Homo sapien
gacattttacgacactggaatcaag

SEQ ID NO: 3763131 - DNA, 25 bp, Homo sapien
actacgcagcttgggcaaaaaagac

SEQ ID NO: 3763132 - DNA, 25 bp, Homo sapien
tgctctgcgttttgccacgttccag

SEQ ID NO: 3763133 - DNA, 25 bp, Homo sapien
ccgactccaagttgtattcaaagca

SEQ ID NO: 3763134 - DNA, 25 bp, Homo sapien
gagtggatcccgttgatcacatggg

SEQ ID NO: 3763135 - DNA, 25 bp, Homo sapien
tgtgcttggagtggatcccgttgat

SEQ ID NO: 3763136 - DNA, 25 bp, Homo sapien
gatcccgttgatcacatgggacagc

SEQ ID NO: 3763137 - DNA, 25 bp, Homo sapien
cttggagtggatcccgttgatcaca

SEQ ID NO: 3763138 - DNA, 25 bp, Homo sapien
tgcagacgccaactcggtgtcctgg

SEQ ID NO: 3763139 - DNA, 25 bp, Homo sapien
tatgcagacgccaactcggtgtcct

SEQ ID NO: 3763140 - DNA, 25 bp, Homo sapien
gcagacgccaactcggtgtcctggg

SEQ ID NO: 3763141 - DNA, 25 bp, Homo sapien
atgcagacgccaactcggtgtcctg

SEQ ID NO: 3763142 - DNA, 25 bp, Homo sapien
agttactcataaaggccacatttgt

SEQ ID NO: 3763143 - DNA, 25 bp, Homo sapien
tagttactcataaaggccacatttg

SEQ ID NO: 3763144 - DNA, 25 bp, Homo sapien
ttactcataaaggccacatttgtac

SEQ ID NO: 3763145 - DNA, 25 bp, Homo sapien
ttagttactcataaaggccacattt

SEQ ID NO: 3763146 - DNA, 25 bp, Homo sapien
ttccatgggtcctgtgctgatgtca

SEQ ID NO: 3763147 - DNA, 25 bp, Homo sapien
cttatatttggccagggtgcagatg

SEQ ID NO: 3763148 - DNA, 25 bp, Homo sapien
ggtgcagatgtccagtttagaagct

SEQ ID NO: 3763149 - DNA, 25 bp, Homo sapien
ggtgcaaagcgaatgcaaacaccac

SEQ ID NO: 3763150 - DNA, 25 bp, Homo sapien
gaactgaatgtaatggccaggctca

SEQ ID NO: 3763151 - DNA, 25 bp, Homo sapien
caggctcaagttatcagacagatag

SEQ ID NO: 3763152 - DNA, 25 bp, Homo sapien
gctcccagagtgtccgtattgctat

SEQ ID NO: 3763153 - DNA, 25 bp, Homo sapien
tcagcatgcgtgttcttctccatgg

SEQ ID NO: 3763154 - DNA, 25 bp, Homo sapien
ttgggcagcatctctttcatattca

SEQ ID NO: 3763155 - DNA, 25 bp, Homo sapien
tcgtaccacaaggttggcaggtggc

SEQ ID NO: 3763156 - DNA, 25 bp, Homo sapien
ccctggatgaccagccctttgggca

SEQ ID NO: 3763157 - DNA, 25 bp, Homo sapien
cccaggacactcgtaccacaaggtt

SEQ ID NO: 3763158 - DNA, 25 bp, Homo sapien
tcgacgcatcaacagccgtgctctg

SEQ ID NO: 3763159 - DNA, 25 bp, Homo sapien
tcagtttcgacgcatcaacagccgt

SEQ ID NO: 3763160 - DNA, 25 bp, Homo sapien
tctgctcttggcagcgaatcccaaa

SEQ ID NO: 3763161 - DNA, 25 bp, Homo sapien
ggcagcgaatcccaaatgacagctt

SEQ ID NO: 3763162 - DNA, 25 bp, Homo sapien
ggagaagtgctgtgtcttaagctca

SEQ ID NO: 3763163 - DNA, 25 bp, Homo sapien
gagaagtgctgtgtcttaagctcat

SEQ ID NO: 3763164 - DNA, 25 bp, Homo sapien
gggagaagtgctgtgtcttaagctc

SEQ ID NO: 3763165 - DNA, 25 bp, Homo sapien
tgcagaacagtaaggatttccaggt

SEQ ID NO: 3763166 - DNA, 25 bp, Homo sapien
ggcacggcatttacctcctgaaaca

SEQ ID NO: 3763167 - DNA, 25 bp, Homo sapien
aactggctggttggatgaaacccaa

SEQ ID NO: 3763168 - DNA, 25 bp, Homo sapien
gcacccagacggctttatctaaaat

SEQ ID NO: 3763169 - DNA, 25 bp, Homo sapien
tgaaaagaattgtgcccacttgtcc

SEQ ID NO: 3763170 - DNA, 25 bp, Homo sapien
cacacgggaccacatcattatctaa

SEQ ID NO: 3763171 - DNA, 25 bp, Homo sapien
gacttcacatcacacgggaccacat

SEQ ID NO: 3763172 - DNA, 25 bp, Homo sapien
acttgtcctgtccttcgcttctctg

SEQ ID NO: 3763173 - DNA, 25 bp, Homo sapien
acttgacaacagccccatagcatca

SEQ ID NO: 3763174 - DNA, 25 bp, Homo sapien
catagcatcagctgccccgaacctt

SEQ ID NO: 3763175 - DNA, 25 bp, Homo sapien
gacaacagccccatagcatcagctg

SEQ ID NO: 3763176 - DNA, 25 bp, Homo sapien
catgcccttggactgagtgaaaatg

SEQ ID NO: 3763177 - DNA, 25 bp, Homo sapien
gataccaacttagagttcaagaccc

SEQ ID NO: 3763178 - DNA, 25 bp, Homo sapien
gagaagttgtaacggcaaacaggtc

SEQ ID NO: 3763179 - DNA, 25 bp, Homo sapien
catttgccgatctttatgcaggtca

SEQ ID NO: 3763180 - DNA, 25 bp, Homo sapien
acgcaccggcacagagagaagttgt

SEQ ID NO: 3763181 - DNA, 25 bp, Homo sapien
catcgacataagaaccttgcctttc

SEQ ID NO: 3763182 - DNA, 25 bp, Homo sapien
aatgcatccacactacgaccatcga

SEQ ID NO: 3763183 - DNA, 25 bp, Homo sapien
caagtctgtacttgggcactgtcct

SEQ ID NO: 3763184 - DNA, 25 bp, Homo sapien
tgaatttgtcacgtgtatttacaag

SEQ ID NO: 3763185 - DNA, 25 bp, Homo sapien
gttgctggtatgtcaagctgaaatg

SEQ ID NO: 3763186 - DNA, 25 bp, Homo sapien
gctggtatgtcaagctgaaatgcca

SEQ ID NO: 3763187 - DNA, 25 bp, Homo sapien
tgctggtatgtcaagctgaaatgcc

SEQ ID NO: 3763188 - DNA, 25 bp, Homo sapien
atgttgctggtatgtcaagctgaaa

SEQ ID NO: 3763189 - DNA, 25 bp, Homo sapien
catcatgccaatgcacagttaatag

SEQ ID NO: 3763190 - DNA, 25 bp, Homo sapien
gggaagccagggctatcagccttct

SEQ ID NO: 3763191 - DNA, 25 bp, Homo sapien
agcccgcaagacctccaagctgtgt

SEQ ID NO: 3763192 - DNA, 25 bp, Homo sapien
tgcactgggaaacccaaatacctgt

SEQ ID NO: 3763193 - DNA, 25 bp, Homo sapien
tcatggtagtgcagtatgtgccaca

SEQ ID NO: 3763194 - DNA, 25 bp, Homo sapien
tattgtctaagtggacccatgaagc

SEQ ID NO: 3763195 - DNA, 25 bp, Homo sapien
tatgcggaagctcacaacacgtggg

SEQ ID NO: 3763196 - DNA, 25 bp, Homo sapien
caacagttgggattcaggcaggtca

SEQ ID NO: 3763197 - DNA, 25 bp, Homo sapien
tagttctcaaatgcacctggccagg

SEQ ID NO: 3763198 - DNA, 25 bp, Homo sapien
gctgtttcgcagacggctgccctct

SEQ ID NO: 3763199 - DNA, 25 bp, Homo sapien
aaactgtcctcgcattatgatctgg

SEQ ID NO: 3763200 - DNA, 25 bp, Homo sapien
gggttctacctcagtcagagagcac

SEQ ID NO: 3763201 - DNA, 25 bp, Homo sapien
aggccatcctgaccacaatactctg

SEQ ID NO: 3763202 - DNA, 25 bp, Homo sapien
gtctcagggatttgcccaggaagaa

SEQ ID NO: 3763203 - DNA, 25 bp, Homo sapien
gatgaagatgtctacccagtgagtc

SEQ ID NO: 3763204 - DNA, 25 bp, Homo sapien
aattgcatgaggtcctgcacaggcc

SEQ ID NO: 3763205 - DNA, 25 bp, Homo sapien
ctagtgctggtttaagacgggcttc

SEQ ID NO: 3763206 - DNA, 25 bp, Homo sapien
tcggtgatatgaaggctaatgttct

SEQ ID NO: 3763207 - DNA, 25 bp, Homo sapien
aaggcggccagagagagctagtgct

SEQ ID NO: 3763208 - DNA, 25 bp, Homo sapien
tgttctgtcggctcacacctgtgtg

SEQ ID NO: 3763209 - DNA, 25 bp, Homo sapien
ctaaactttgccactacaggttggt

SEQ ID NO: 3763210 - DNA, 25 bp, Homo sapien
taattaacccgtgagatgaagtgct

SEQ ID NO: 3763211 - DNA, 25 bp, Homo sapien
cagaggtgcctcagacacgagaaac

SEQ ID NO: 3763212 - DNA, 25 bp, Homo sapien
tgaactctctgaaaagataaatgct

SEQ ID NO: 3763213 - DNA, 25 bp, Homo sapien
gcctttcattcttggtaagacactg

SEQ ID NO: 3763214 - DNA, 25 bp, Homo sapien
aaactttagagatagagcaatggta

SEQ ID NO: 3763215 - DNA, 25 bp, Homo sapien
ctgtaggagattccaacgtgaatgc

SEQ ID NO: 3763216 - DNA, 25 bp, Homo sapien
aatgcatttcacacgcttttacaag

SEQ ID NO: 3763217 - DNA, 25 bp, Homo sapien
tacctggaccatcctcattaatcaa

SEQ ID NO: 3763218 - DNA, 25 bp, Homo sapien
tcagcagcttcgtatcctacgatga

SEQ ID NO: 3763219 - DNA, 25 bp, Homo sapien
tctctcccttacactcatcagctca

SEQ ID NO: 3763220 - DNA, 25 bp, Homo sapien
tcattaatcaatgcgcccacatctt

SEQ ID NO: 3763221 - DNA, 25 bp, Homo sapien
ctcctagctgctgctcaaaatcctt

SEQ ID NO: 3763222 - DNA, 25 bp, Homo sapien
cctcctagctgctgctcaaaatcct

SEQ ID NO: 3763223 - DNA, 25 bp, Homo sapien
ttcctcctagctgctgctcaaaatc

SEQ ID NO: 3763224 - DNA, 25 bp, Homo sapien
tcctcctagctgctgctcaaaatcc

SEQ ID NO: 3763225 - DNA, 25 bp, Homo sapien
tatttgtagaactgagtaaggctca

SEQ ID NO: 3763226 - DNA, 25 bp, Homo sapien
tattggcaattagggttctggaacc

SEQ ID NO: 3763227 - DNA, 25 bp, Homo sapien
caaatcttagggtaggcattctcca

SEQ ID NO: 3763228 - DNA, 25 bp, Homo sapien
gaacttgagtccaatctgaagggct

SEQ ID NO: 3763229 - DNA, 25 bp, Homo sapien
ccaggagggggtcattctcaccacc

SEQ ID NO: 3763230 - DNA, 25 bp, Homo sapien
aggagggggtcattctcaccaccat

SEQ ID NO: 3763231 - DNA, 25 bp, Homo sapien
caggagggggtcattctcaccacca

SEQ ID NO: 3763232 - DNA, 25 bp, Homo sapien
gccaggagggggtcattctcaccac

SEQ ID NO: 3763233 - DNA, 25 bp, Homo sapien
tgagaccacagagtagcaattcctt

SEQ ID NO: 3763234 - DNA, 25 bp, Homo sapien
gaatcttccaggctaatacatcagg

SEQ ID NO: 3763235 - DNA, 25 bp, Homo sapien
tacatcaggcatgccagtcctgtag

SEQ ID NO: 3763236 - DNA, 25 bp, Homo sapien
gtcctgtagttacatgtgagaccac

SEQ ID NO: 3763237 - DNA, 25 bp, Homo sapien
cacacatgacgcgagagcctgtggc

SEQ ID NO: 3763238 - DNA, 25 bp, Homo sapien
gaagctcttcctagatgtgcatcct

SEQ ID NO: 3763239 - DNA, 25 bp, Homo sapien
tggaagaatcttgtcggaacctgtc

SEQ ID NO: 3763240 - DNA, 25 bp, Homo sapien
tggagataccctgttctgaaccctg

SEQ ID NO: 3763241 - DNA, 25 bp, Homo sapien
tgtttaagcaatgatggcaagttct

SEQ ID NO: 3763242 - DNA, 25 bp, Homo sapien
cagcttgatcccacaacagggaaaa

SEQ ID NO: 3763243 - DNA, 25 bp, Homo sapien
gggacacacagaaactcgaatcagt

SEQ ID NO: 3763244 - DNA, 25 bp, Homo sapien
gaagccaggcggtcaaatgggacac

SEQ ID NO: 3763245 - DNA, 25 bp, Homo sapien
agcttcagcctgcaacgtgtgcatt

SEQ ID NO: 3763246 - DNA, 25 bp, Homo sapien
gcttcagcctgcaacgtgtgcattt

SEQ ID NO: 3763247 - DNA, 25 bp, Homo sapien
tcgtcagaggatcgcctcctccagg

SEQ ID NO: 3763248 - DNA, 25 bp, Homo sapien
gaagggccttcgtcagaggatcgcc

SEQ ID NO: 3763249 - DNA, 25 bp, Homo sapien
tgcaggaatttatgagggcatgtac

SEQ ID NO: 3763250 - DNA, 25 bp, Homo sapien
ctcagcttctcggcctatccttgtt

SEQ ID NO: 3763251 - DNA, 25 bp, Homo sapien
cagcttctcggcctatccttgttgc

SEQ ID NO: 3763252 - DNA, 25 bp, Homo sapien
ggtggctgcaggaatttatgagggc

SEQ ID NO: 3763253 - DNA, 25 bp, Homo sapien
tcttcctggaatatgcgtgggcgtc

SEQ ID NO: 3763254 - DNA, 25 bp, Homo sapien
tctcctgtgtcctaggcatggccag

SEQ ID NO: 3763255 - DNA, 25 bp, Homo sapien
gactttgagcgttgcacttctccca

SEQ ID NO: 3763256 - DNA, 25 bp, Homo sapien
tcttgcagggattacgagtggactt

SEQ ID NO: 3763257 - DNA, 25 bp, Homo sapien
ggggaagcttcagaatcatggcgag

SEQ ID NO: 3763258 - DNA, 25 bp, Homo sapien
tggggaagcttcagaatcatggcga

SEQ ID NO: 3763259 - DNA, 25 bp, Homo sapien
gggaagcttcagaatcatggcgaga

SEQ ID NO: 3763260 - DNA, 25 bp, Homo sapien
cgcaagccgctgaaatgcgggagct

SEQ ID NO: 3763261 - DNA, 25 bp, Homo sapien
agtagcgtagggagctgtagtctcc

SEQ ID NO: 3763262 - DNA, 25 bp, Homo sapien
gggtaccacgcttatccagccttgg

SEQ ID NO: 3763263 - DNA, 25 bp, Homo sapien
tttgcagttcgtttagcaggcacag

SEQ ID NO: 3763264 - DNA, 25 bp, Homo sapien
ggaggcagtcaccagtgtcatacat

SEQ ID NO: 3763265 - DNA, 25 bp, Homo sapien
gaggaggcagtcaccagtgtcatac

SEQ ID NO: 3763266 - DNA, 25 bp, Homo sapien
tgacaaaagtgaggaggcagtcacc

SEQ ID NO: 3763267 - DNA, 25 bp, Homo sapien
gtgaggaggcagtcaccagtgtcat

SEQ ID NO: 3763268 - DNA, 25 bp, Homo sapien
cacaggttggctcttcctgtctaaa

SEQ ID NO: 3763269 - DNA, 25 bp, Homo sapien
gactcacctcgacactcacaggttg

SEQ ID NO: 3763270 - DNA, 25 bp, Homo sapien
tgtctgttcggcttctcctcatagg

SEQ ID NO: 3763271 - DNA, 25 bp, Homo sapien
tcctcataggtgatccgactcacct

SEQ ID NO: 3763272 - DNA, 25 bp, Homo sapien
tatcctgtaggaatgcatgtcctcc

SEQ ID NO: 3763273 - DNA, 25 bp, Homo sapien
ttttgcagaggcagaacccgtgacc

SEQ ID NO: 3763274 - DNA, 25 bp, Homo sapien
gggacccaatgtgcctgcaagcaga

SEQ ID NO: 3763275 - DNA, 25 bp, Homo sapien
ggccctaagttgcaaatttatcctg

SEQ ID NO: 3763276 - DNA, 25 bp, Homo sapien
ccactgtgctgggtgacatatgtgc

SEQ ID NO: 3763277 - DNA, 25 bp, Homo sapien
aataaacatcctggactctcacatg

SEQ ID NO: 3763278 - DNA, 25 bp, Homo sapien
gtgctgggtgacatatgtgctttga

SEQ ID NO: 3763279 - DNA, 25 bp, Homo sapien
ctgttaataaacatcctggactctc

SEQ ID NO: 3763280 - DNA, 25 bp, Homo sapien
ttgtgatgagcacagcgttgtggca

SEQ ID NO: 3763281 - DNA, 25 bp, Homo sapien
cagaattgtgttcagtgttgggcag

SEQ ID NO: 3763282 - DNA, 25 bp, Homo sapien
ggtttttgtgatgagcacagcgttg

SEQ ID NO: 3763283 - DNA, 25 bp, Homo sapien
tgggcagaaccgtgccgaccatcag

SEQ ID NO: 3763284 - DNA, 25 bp, Homo sapien
tctctagggcacttagcgtgggcat

SEQ ID NO: 3763285 - DNA, 25 bp, Homo sapien
agctgccatctctagggcacttagc

SEQ ID NO: 3763286 - DNA, 25 bp, Homo sapien
catctctagggcacttagcgtgggc

SEQ ID NO: 3763287 - DNA, 25 bp, Homo sapien
tgccatctctagggcacttagcgtg

SEQ ID NO: 3763288 - DNA, 25 bp, Homo sapien
gtgctcataacccagcctgagaaca

SEQ ID NO: 3763289 - DNA, 25 bp, Homo sapien
ctgtgctcataacccagcctgagaa

SEQ ID NO: 3763290 - DNA, 25 bp, Homo sapien
gctcataacccagcctgagaacagt

SEQ ID NO: 3763291 - DNA, 25 bp, Homo sapien
ccagcctgagaacagtccggaccat

SEQ ID NO: 3763292 - DNA, 25 bp, Homo sapien
gcctggcaaatcacttttctgtgtt

SEQ ID NO: 3763293 - DNA, 25 bp, Homo sapien
cctggcaaatcacttttctgtgttt

SEQ ID NO: 3763294 - DNA, 25 bp, Homo sapien
cacttttctgtgttttcccaacttg

SEQ ID NO: 3763295 - DNA, 25 bp, Homo sapien
tgtgttttcccaacttgggccaaca

SEQ ID NO: 3763296 - DNA, 25 bp, Homo sapien
tacagctctgggacccaaaaggctt

SEQ ID NO: 3763297 - DNA, 25 bp, Homo sapien
agaccctggtgctccactgctagag

SEQ ID NO: 3763298 - DNA, 25 bp, Homo sapien
actgctagagggctttacagctctg

SEQ ID NO: 3763299 - DNA, 25 bp, Homo sapien
tggtccattaggagaatcaaggcca

SEQ ID NO: 3763300 - DNA, 25 bp, Homo sapien
tgtttgtgtagctgggccactgaaa

SEQ ID NO: 3763301 - DNA, 25 bp, Homo sapien
gcactgtttgtgtagctgggccact

SEQ ID NO: 3763302 - DNA, 25 bp, Homo sapien
catatggaacttgcctccttgcact

SEQ ID NO: 3763303 - DNA, 25 bp, Homo sapien
attctgcatatggaacttgcctcct

SEQ ID NO: 3763304 - DNA, 25 bp, Homo sapien
gaaactgcactctgacccttgacac

SEQ ID NO: 3763305 - DNA, 25 bp, Homo sapien
tgaaactgcactctgacccttgaca

SEQ ID NO: 3763306 - DNA, 25 bp, Homo sapien
ttccagcttatgtggcatgctggta

SEQ ID NO: 3763307 - DNA, 25 bp, Homo sapien
cttatgtggcatgctggtattccag

SEQ ID NO: 3763308 - DNA, 25 bp, Homo sapien
tgccgaatgcacacagacttggatc

SEQ ID NO: 3763309 - DNA, 25 bp, Homo sapien
tgcaggtcttgcaggtcggctgcct

SEQ ID NO: 3763310 - DNA, 25 bp, Homo sapien
ggttagcactacctcccgcgtagat

SEQ ID NO: 3763311 - DNA, 25 bp, Homo sapien
cgcgtagatgctctttaacacagtg

SEQ ID NO: 3763312 - DNA, 25 bp, Homo sapien
ctcttgttcctccttcttcttcttg

SEQ ID NO: 3763313 - DNA, 25 bp, Homo sapien
cctccttcttcttcttgattttcat

SEQ ID NO: 3763314 - DNA, 25 bp, Homo sapien
ttgttcctccttcttcttcttgatt

SEQ ID NO: 3763315 - DNA, 25 bp, Homo sapien
ttcctccttcttcttcttgattttc

SEQ ID NO: 3763316 - DNA, 25 bp, Homo sapien
gatgctactaaaatgacagacttga

SEQ ID NO: 3763317 - DNA, 25 bp, Homo sapien
ttcccagagtgtagaccataaaaac

SEQ ID NO: 3763318 - DNA, 25 bp, Homo sapien
taagcaacgttagtgaactggtgac

SEQ ID NO: 3763319 - DNA, 25 bp, Homo sapien
aatcactgagtttaaaaagagactg

SEQ ID NO: 3763320 - DNA, 25 bp, Homo sapien
tatcactcattggaaggatgcagcc

SEQ ID NO: 3763321 - DNA, 25 bp, Homo sapien
cccgggtcagcattcaaaaacacaa

SEQ ID NO: 3763322 - DNA, 25 bp, Homo sapien
tatgatatgacatgcatcctgctcc

SEQ ID NO: 3763323 - DNA, 25 bp, Homo sapien
ggtttcctcaacactgcacctggag

SEQ ID NO: 3763324 - DNA, 25 bp, Homo sapien
cacggtggacgctggcagataaaac

SEQ ID NO: 3763325 - DNA, 25 bp, Homo sapien
cacgaaattgctaaaggagccatga

SEQ ID NO: 3763326 - DNA, 25 bp, Homo sapien
aagctgagccggcacacacggtgga

SEQ ID NO: 3763327 - DNA, 25 bp, Homo sapien
cagctcattgctgcttcaatcagct

SEQ ID NO: 3763328 - DNA, 25 bp, Homo sapien
tgccatagattcagcaagatcaaag

SEQ ID NO: 3763329 - DNA, 25 bp, Homo sapien
caggaattctgaagctccgcagaaa

SEQ ID NO: 3763330 - DNA, 25 bp, Homo sapien
tggaccagacattcaagcaatcctg

SEQ ID NO: 3763331 - DNA, 25 bp, Homo sapien
ccttccgagagagatggccgtagct

SEQ ID NO: 3763332 - DNA, 25 bp, Homo sapien
ccaagtccatctgatccttagttct

SEQ ID NO: 3763333 - DNA, 25 bp, Homo sapien
ctcccaagtccatctgatccttagt

SEQ ID NO: 3763334 - DNA, 25 bp, Homo sapien
aacagtggtttggagattgatagta

SEQ ID NO: 3763335 - DNA, 25 bp, Homo sapien
gaacagtggtttggagattgatagt

SEQ ID NO: 3763336 - DNA, 25 bp, Homo sapien
tttagataatatgtcttttcagtct

SEQ ID NO: 3763337 - DNA, 25 bp, Homo sapien
tcagattgccactggtgcaatgtca

SEQ ID NO: 3763338 - DNA, 25 bp, Homo sapien
ttctgttcccggtctggtcccagag

SEQ ID NO: 3763339 - DNA, 25 bp, Homo sapien
agtctcctccgattccaccagtgtc

SEQ ID NO: 3763340 - DNA, 25 bp, Homo sapien
tcaaggaatctgcaaagtagaaagt

SEQ ID NO: 3763341 - DNA, 25 bp, Homo sapien
aaggaatctgcaaagtagaaagttt

SEQ ID NO: 3763342 - DNA, 25 bp, Homo sapien
gaatctgcaaagtagaaagttttct

SEQ ID NO: 3763343 - DNA, 25 bp, Homo sapien
tctgcaaagtagaaagttttcttac

SEQ ID NO: 3763344 - DNA, 25 bp, Homo sapien
ccttccttggtgcaatgcgggttga

SEQ ID NO: 3763345 - DNA, 25 bp, Homo sapien
caggctgtgtgaccgatttgcattc

SEQ ID NO: 3763346 - DNA, 25 bp, Homo sapien
gccatgtgagtttgtcttttgtccc

SEQ ID NO: 3763347 - DNA, 25 bp, Homo sapien
gagggtagacattctcaggctgtgt

SEQ ID NO: 3763348 - DNA, 25 bp, Homo sapien
tacttacaagttctgctcttatctg

SEQ ID NO: 3763349 - DNA, 25 bp, Homo sapien
agttctgctcttatctgagccctac

SEQ ID NO: 3763350 - DNA, 25 bp, Homo sapien
tgtcctagggaatttacttaagtca

SEQ ID NO: 3763351 - DNA, 25 bp, Homo sapien
aagtcagctccttgttgtcctcggg

SEQ ID NO: 3763352 - DNA, 25 bp, Homo sapien
caagcaaggttctgaagggacataa

SEQ ID NO: 3763353 - DNA, 25 bp, Homo sapien
agctgtgctgacctttgcctatttg

SEQ ID NO: 3763354 - DNA, 25 bp, Homo sapien
gacctaattggcatcatacactctt

SEQ ID NO: 3763355 - DNA, 25 bp, Homo sapien
ccagcttgagctgccagtaaattgt

SEQ ID NO: 3763356 - DNA, 25 bp, Homo sapien
gtgaggtattgtattcatcatgtga

SEQ ID NO: 3763357 - DNA, 25 bp, Homo sapien
gggctcagaagtgtgaggtattgta

SEQ ID NO: 3763358 - DNA, 25 bp, Homo sapien
tattgtattcatcatgtgaaggttg

SEQ ID NO: 3763359 - DNA, 25 bp, Homo sapien
gtgaaggttgtaaaggcaggtctct

SEQ ID NO: 3763360 - DNA, 25 bp, Homo sapien
caggcatcaggtgccatatcaggtg

SEQ ID NO: 3763361 - DNA, 25 bp, Homo sapien
tgtgcaggcatcaggtgccatatca

SEQ ID NO: 3763362 - DNA, 25 bp, Homo sapien
gcaggcatcaggtgccatatcaggt

SEQ ID NO: 3763363 - DNA, 25 bp, Homo sapien
tgcaggcatcaggtgccatatcagg

SEQ ID NO: 3763364 - DNA, 25 bp, Homo sapien
aaagctctggtgaccatatggagtc

SEQ ID NO: 3763365 - DNA, 25 bp, Homo sapien
ggtgaccatatggagtctttttcat

SEQ ID NO: 3763366 - DNA, 25 bp, Homo sapien
ctgtggaacaaaaaggctattttct

SEQ ID NO: 3763367 - DNA, 25 bp, Homo sapien
gctctggtgaccatatggagtcttt

SEQ ID NO: 3763368 - DNA, 25 bp, Homo sapien
acaatagattgctgctgggctgacc

SEQ ID NO: 3763369 - DNA, 25 bp, Homo sapien
cctacaatagattgctgctgggctg

SEQ ID NO: 3763370 - DNA, 25 bp, Homo sapien
cctgcatctatcctacaatagattg

SEQ ID NO: 3763371 - DNA, 25 bp, Homo sapien
tctatcctacaatagattgctgctg

SEQ ID NO: 3763372 - DNA, 25 bp, Homo sapien
ggctcatgccagctttgttaatcag

SEQ ID NO: 3763373 - DNA, 25 bp, Homo sapien
aagtcatctgctgaccctatgccct

SEQ ID NO: 3763374 - DNA, 25 bp, Homo sapien
gtcatctgctgaccctatgccctgg

SEQ ID NO: 3763375 - DNA, 25 bp, Homo sapien
agtcatctgctgaccctatgccctg

SEQ ID NO: 3763376 - DNA, 25 bp, Homo sapien
aatgtggtgcgatgggactgagccc

SEQ ID NO: 3763377 - DNA, 25 bp, Homo sapien
agaatgtggtgcgatgggactgagc

SEQ ID NO: 3763378 - DNA, 25 bp, Homo sapien
cagcagaatgtggtgcgatgggact

SEQ ID NO: 3763379 - DNA, 25 bp, Homo sapien
gtgacagcagaatgtggtgcgatgg

SEQ ID NO: 3763380 - DNA, 25 bp, Homo sapien
cattgcaattgtccttttgggtgaa

SEQ ID NO: 3763381 - DNA, 25 bp, Homo sapien
tctgttggattgctgaagtttccga

SEQ ID NO: 3763382 - DNA, 25 bp, Homo sapien
tgaaaagttgttcgtagaaggccat

SEQ ID NO: 3763383 - DNA, 25 bp, Homo sapien
aagtttccgaattgtgagcattgca

SEQ ID NO: 3763384 - DNA, 25 bp, Homo sapien
taaatcaggctaggtgctgtcactc

SEQ ID NO: 3763385 - DNA, 25 bp, Homo sapien
ttgagactaggaatcaccatcttct

SEQ ID NO: 3763386 - DNA, 25 bp, Homo sapien
ccactgtctgctttaccaagaattg

SEQ ID NO: 3763387 - DNA, 25 bp, Homo sapien
ctattgaatgggatgcctgagcaga

SEQ ID NO: 3763388 - DNA, 25 bp, Homo sapien
gctgttttatccgaggattcctcag

SEQ ID NO: 3763389 - DNA, 25 bp, Homo sapien
tccgaggattcctcagttgaatctt

SEQ ID NO: 3763390 - DNA, 25 bp, Homo sapien
tcctcagttgaatctttcaactcca

SEQ ID NO: 3763391 - DNA, 25 bp, Homo sapien
tttctgctgttttatccgaggattc

SEQ ID NO: 3763392 - DNA, 25 bp, Homo sapien
tgtgctacgtaaaacagctgccaag

SEQ ID NO: 3763393 - DNA, 25 bp, Homo sapien
tgccaagcgatacccagctgagact

SEQ ID NO: 3763394 - DNA, 25 bp, Homo sapien
gagactcggtctgcactatcacgat

SEQ ID NO: 3763395 - DNA, 25 bp, Homo sapien
tatcacgatgccacacactgatcat

SEQ ID NO: 3763396 - DNA, 25 bp, Homo sapien
cagctaataagaggcggatttcctt

SEQ ID NO: 3763397 - DNA, 25 bp, Homo sapien
ataagaggcggatttccttctgagg

SEQ ID NO: 3763398 - DNA, 25 bp, Homo sapien
tccaagcagcacagatagagcttag

SEQ ID NO: 3763399 - DNA, 25 bp, Homo sapien
agcagcacagatagagcttagtcct

SEQ ID NO: 3763400 - DNA, 25 bp, Homo sapien
tgcagggatcacctgcgatatgagg

SEQ ID NO: 3763401 - DNA, 25 bp, Homo sapien
gactgcgatatgatggactgcgaca

SEQ ID NO: 3763402 - DNA, 25 bp, Homo sapien
tcacctgcgatatgagggactgcga

SEQ ID NO: 3763403 - DNA, 25 bp, Homo sapien
atgagggactgcgatatgatggact

SEQ ID NO: 3763404 - DNA, 25 bp, Homo sapien
gatttcctccctcgcacattgtatg

SEQ ID NO: 3763405 - DNA, 25 bp, Homo sapien
gatgagaatcagacattgcaaaggt

SEQ ID NO: 3763406 - DNA, 25 bp, Homo sapien
ctccctcgcacattgtatgaacatt

SEQ ID NO: 3763407 - DNA, 25 bp, Homo sapien
gtatgaacatttccgcttgctggca

SEQ ID NO: 3763408 - DNA, 25 bp, Homo sapien
tatttcctggtgtatctcgtccttt

SEQ ID NO: 3763409 - DNA, 25 bp, Homo sapien
tcctggtgtatctcgtcctttccac

SEQ ID NO: 3763410 - DNA, 25 bp, Homo sapien
gtatctcgtcctttccacttagctc

SEQ ID NO: 3763411 - DNA, 25 bp, Homo sapien
ggtgtatctcgtcctttccacttag

SEQ ID NO: 3763412 - DNA, 25 bp, Homo sapien
cagtgtctgtggcttactgctgagc

SEQ ID NO: 3763413 - DNA, 25 bp, Homo sapien
tagaagcagcatacacagatgcatg

SEQ ID NO: 3763414 - DNA, 25 bp, Homo sapien
tacacagatgcatgagccagtgtct

SEQ ID NO: 3763415 - DNA, 25 bp, Homo sapien
taaataccaccagtagtcccattcc

SEQ ID NO: 3763416 - DNA, 25 bp, Homo sapien
tcttcgctgtttagcagcaatctca

SEQ ID NO: 3763417 - DNA, 25 bp, Homo sapien
tactcttcgctgtttagcagcaatc

SEQ ID NO: 3763418 - DNA, 25 bp, Homo sapien
ctgtactcttcgctgtttagcagca

SEQ ID NO: 3763419 - DNA, 25 bp, Homo sapien
cgctgtttagcagcaatctcatctt

SEQ ID NO: 3763420 - DNA, 25 bp, Homo sapien
ctccaaccaccttgatgaagagaaa

SEQ ID NO: 3763421 - DNA, 25 bp, Homo sapien
gaatatcctgctatgttaggaccag

SEQ ID NO: 3763422 - DNA, 25 bp, Homo sapien
ttctccaaccaccttgatgaagaga

SEQ ID NO: 3763423 - DNA, 25 bp, Homo sapien
gagaaagaatatcctgctatgttag

SEQ ID NO: 3763424 - DNA, 25 bp, Homo sapien
tcactagtgcttatctccaggccag

SEQ ID NO: 3763425 - DNA, 25 bp, Homo sapien
tgacttaaacctcgcctgccatggg

SEQ ID NO: 3763426 - DNA, 25 bp, Homo sapien
gcaggttggcctctagtcaagacca

SEQ ID NO: 3763427 - DNA, 25 bp, Homo sapien
caaatgcattgcaatcaggccgtac

SEQ ID NO: 3763428 - DNA, 25 bp, Homo sapien
ttagatgctcttctttaagttagga

SEQ ID NO: 3763429 - DNA, 25 bp, Homo sapien
aatccttccttacccctgatcatag

SEQ ID NO: 3763430 - DNA, 25 bp, Homo sapien
taaatgtgatacaagctgaggtttt

SEQ ID NO: 3763431 - DNA, 25 bp, Homo sapien
gatcataggtagaaagcattaggta

SEQ ID NO: 3763432 - DNA, 25 bp, Homo sapien
gaccccacgggtacttggacttgca

SEQ ID NO: 3763433 - DNA, 25 bp, Homo sapien
tacttggacttgcagtgccagccat

SEQ ID NO: 3763434 - DNA, 25 bp, Homo sapien
tctcaagacagtagagaccccacgg

SEQ ID NO: 3763435 - DNA, 25 bp, Homo sapien
gtctctcaagacagtagagacccca

SEQ ID NO: 3763436 - DNA, 25 bp, Homo sapien
atgtttacagtggccctgaaggctt

SEQ ID NO: 3763437 - DNA, 25 bp, Homo sapien
aatgtttacagtggccctgaaggct

SEQ ID NO: 3763438 - DNA, 25 bp, Homo sapien
gaacaatggtccacaggatttcaca

SEQ ID NO: 3763439 - DNA, 25 bp, Homo sapien
tgagcctaagagaggcaccttccct

SEQ ID NO: 3763440 - DNA, 25 bp, Homo sapien
agctgcataagaaatcgtttgtcca

SEQ ID NO: 3763441 - DNA, 25 bp, Homo sapien
ccagtgtggtccatgactgagccta

SEQ ID NO: 3763442 - DNA, 25 bp, Homo sapien
gcctggaggttggaactgaacgcct

SEQ ID NO: 3763443 - DNA, 25 bp, Homo sapien
tgccagtgtagcaaggcaccgtcat

SEQ ID NO: 3763444 - DNA, 25 bp, Homo sapien
tcccatttgaggagaatttactgcc

SEQ ID NO: 3763445 - DNA, 25 bp, Homo sapien
taaaggctttttgctaggggactca

SEQ ID NO: 3763446 - DNA, 25 bp, Homo sapien
ctagaaaattagtgctaccatcaac

SEQ ID NO: 3763447 - DNA, 25 bp, Homo sapien
aattagtgctaccatcaacaaaata

SEQ ID NO: 3763448 - DNA, 25 bp, Homo sapien
taagggcatctggagcggctggttg

SEQ ID NO: 3763449 - DNA, 25 bp, Homo sapien
agggcatctggagcggctggttgac

SEQ ID NO: 3763450 - DNA, 25 bp, Homo sapien
taataagccatctctctttggcttc

SEQ ID NO: 3763451 - DNA, 25 bp, Homo sapien
ctaactaataagccatctctctttg

SEQ ID NO: 3763452 - DNA, 25 bp, Homo sapien
ataagccatctctctttggcttcac

SEQ ID NO: 3763453 - DNA, 25 bp, Homo sapien
aactaataagccatctctctttggc

SEQ ID NO: 3763454 - DNA, 25 bp, Homo sapien
tcggagctgctatcccggagctgct

SEQ ID NO: 3763455 - DNA, 25 bp, Homo sapien
acagaaggctgtgaatcagcctcca

SEQ ID NO: 3763456 - DNA, 25 bp, Homo sapien
cactcaaaaactgatgtgctatttg

SEQ ID NO: 3763457 - DNA, 25 bp, Homo sapien
tgtgcctttcaccagcacactcaaa

SEQ ID NO: 3763458 - DNA, 25 bp, Homo sapien
ttcagcaaataacttcattccactg

SEQ ID NO: 3763459 - DNA, 25 bp, Homo sapien
ccctttagtatggttttcagcaaat

SEQ ID NO: 3763460 - DNA, 25 bp, Homo sapien
cagcaaataacttcattccactgat

SEQ ID NO: 3763461 - DNA, 25 bp, Homo sapien
ctttagtatggttttcagcaaataa

SEQ ID NO: 3763462 - DNA, 25 bp, Homo sapien
caaggtcatgggcatagggcttctc

SEQ ID NO: 3763463 - DNA, 25 bp, Homo sapien
ctgtagggatgctttcagcctctct

SEQ ID NO: 3763464 - DNA, 25 bp, Homo sapien
tccaatgactgtggcattggctcct

SEQ ID NO: 3763465 - DNA, 25 bp, Homo sapien
tccttccttaagtccatgtggaggt

SEQ ID NO: 3763466 - DNA, 25 bp, Homo sapien
cattaagtggagaggatcaccccag

SEQ ID NO: 3763467 - DNA, 25 bp, Homo sapien
tactcatggtttacagggtaaccgc

SEQ ID NO: 3763468 - DNA, 25 bp, Homo sapien
tatgagtgccactcggtgccaaacc

SEQ ID NO: 3763469 - DNA, 25 bp, Homo sapien
actgagcatcctccgtgcagacagg

SEQ ID NO: 3763470 - DNA, 25 bp, Homo sapien
gagaaaactgtctcaaccccaagag

SEQ ID NO: 3763471 - DNA, 25 bp, Homo sapien
tcagctaagcatccggactgtctgg

SEQ ID NO: 3763472 - DNA, 25 bp, Homo sapien
gaggctggctacctcccagatgaat

SEQ ID NO: 3763473 - DNA, 25 bp, Homo sapien
tactacttgctacactcagggtcta

SEQ ID NO: 3763474 - DNA, 25 bp, Homo sapien
taactggcccgataattacaggaag

SEQ ID NO: 3763475 - DNA, 25 bp, Homo sapien
aggtttttcattcccgactcagtag

SEQ ID NO: 3763476 - DNA, 25 bp, Homo sapien
aaggcattataagtccctagggagc

SEQ ID NO: 3763477 - DNA, 25 bp, Homo sapien
gagggtgaagcctcatgcccctttg

SEQ ID NO: 3763478 - DNA, 25 bp, Homo sapien
agggcatcacatgctcagagtggga

SEQ ID NO: 3763479 - DNA, 25 bp, Homo sapien
ataacgctgctgtgataataaaccc

SEQ ID NO: 3763480 - DNA, 25 bp, Homo sapien
taataaacccactcctgggacagca

SEQ ID NO: 3763481 - DNA, 25 bp, Homo sapien
cagtgccggcatctgtgagggcctt

SEQ ID NO: 3763482 - DNA, 25 bp, Homo sapien
cactgcaattcgttaatccctttgg

SEQ ID NO: 3763483 - DNA, 25 bp, Homo sapien
agaatatgagagacaccacctttta

SEQ ID NO: 3763484 - DNA, 25 bp, Homo sapien
gtagaatatgagttcacaatgaatt

SEQ ID NO: 3763485 - DNA, 25 bp, Homo sapien
tctgtgacccaagttatgctgaaga

SEQ ID NO: 3763486 - DNA, 25 bp, Homo sapien
tatcaaagaagcgtgggcccttccg

SEQ ID NO: 3763487 - DNA, 25 bp, Homo sapien
tctcctgggaagcttgctgtttgca

SEQ ID NO: 3763488 - DNA, 25 bp, Homo sapien
ctcagataatctgaggctggatacc

SEQ ID NO: 3763489 - DNA, 25 bp, Homo sapien
gagtctccgccttttgttagcagga

SEQ ID NO: 3763490 - DNA, 25 bp, Homo sapien
tgagtggatgtgaaagccttggaca

SEQ ID NO: 3763491 - DNA, 25 bp, Homo sapien
actttacaagcactgtacacttaga

SEQ ID NO: 3763492 - DNA, 25 bp, Homo sapien
tactgtatgctactgcagactttac

SEQ ID NO: 3763493 - DNA, 25 bp, Homo sapien
gtgaaagccttggacattactgtat

SEQ ID NO: 3763494 - DNA, 25 bp, Homo sapien
catgccaggccgaaacttgccattt

SEQ ID NO: 3763495 - DNA, 25 bp, Homo sapien
tgttctcctggtgctgaatctgtct

SEQ ID NO: 3763496 - DNA, 25 bp, Homo sapien
ggagggactcagtatcctatattca

SEQ ID NO: 3763497 - DNA, 25 bp, Homo sapien
atcacaattgatgctgtaaccacag

SEQ ID NO: 3763498 - DNA, 25 bp, Homo sapien
cagacgaggaaatctgaatggtacg

SEQ ID NO: 3763499 - DNA, 25 bp, Homo sapien
gttcaaggtctcacactgactcagc

SEQ ID NO: 3763500 - DNA, 25 bp, Homo sapien
gaatggtacgaaacaaacagagact

SEQ ID NO: 3763501 - DNA, 25 bp, Homo sapien
caggtatcctccaacatcattggca

SEQ ID NO: 3763502 - DNA, 25 bp, Homo sapien
tgatcctggcaatgtgacccggcat

SEQ ID NO: 3763503 - DNA, 25 bp, Homo sapien
tgtcctgacactcctgcaaatgggt

SEQ ID NO: 3763504 - DNA, 25 bp, Homo sapien
tataaagacccagtgtagagactgc

SEQ ID NO: 3763505 - DNA, 25 bp, Homo sapien
caaatgggtcattcagtccttgagg

SEQ ID NO: 3763506 - DNA, 25 bp, Homo sapien
tgtgtgcaagtctatcgagccatct

SEQ ID NO: 3763507 - DNA, 25 bp, Homo sapien
tcctctgcgtgagcttgcagtgcag

SEQ ID NO: 3763508 - DNA, 25 bp, Homo sapien
ccagagatgttagatttgaccatgc

SEQ ID NO: 3763509 - DNA, 25 bp, Homo sapien
taagaggcttagtatcaacatacgg

SEQ ID NO: 3763510 - DNA, 25 bp, Homo sapien
tagtctctcaggcaaagtaaacgca

SEQ ID NO: 3763511 - DNA, 25 bp, Homo sapien
aactactcgagcagaggaaaccggg

SEQ ID NO: 3763512 - DNA, 25 bp, Homo sapien
caagagatagtgaaagccttaaccc

SEQ ID NO: 3763513 - DNA, 25 bp, Homo sapien
gcatcacaagatcaaggtgaccaga

SEQ ID NO: 3763514 - DNA, 25 bp, Homo sapien
tggctcttactgatgggaaggcagc

SEQ ID NO: 3763515 - DNA, 25 bp, Homo sapien
tcataggagttattacaggagacct

SEQ ID NO: 3763516 - DNA, 25 bp, Homo sapien
ttcatcagctgaacttgggcctcca

SEQ ID NO: 3763517 - DNA, 25 bp, Homo sapien
gtatccaacagacccagacaagctt

SEQ ID NO: 3763518 - DNA, 25 bp, Homo sapien
ccagcctgggcgacagagcaagagt

SEQ ID NO: 3763519 - DNA, 25 bp, Homo sapien
ttgaaccagggaggtcgaggttgga

SEQ ID NO: 3763520 - DNA, 25 bp, Homo sapien
accagggaggtcgaggttggagtga

SEQ ID NO: 3763521 - DNA, 25 bp, Homo sapien
tgagctgagatcacaccactgcact

SEQ ID NO: 3763522 - DNA, 25 bp, Homo sapien
cctaacggactcctgttccttatat

SEQ ID NO: 3763523 - DNA, 25 bp, Homo sapien
tggatgtcacagtgtacctcggctc

SEQ ID NO: 3763524 - DNA, 25 bp, Homo sapien
catctataaaagaagcccctaacgg

SEQ ID NO: 3763525 - DNA, 25 bp, Homo sapien
tatattcggcttttctagaaccggc

SEQ ID NO: 3763526 - DNA, 25 bp, Homo sapien
gccctgattaagcacatcgtcacga

SEQ ID NO: 3763527 - DNA, 25 bp, Homo sapien
gatgccttaagcacaccaacaaggg

SEQ ID NO: 3763528 - DNA, 25 bp, Homo sapien
ggacctgacctgactgaaaccagga

SEQ ID NO: 3763529 - DNA, 25 bp, Homo sapien
ttgtatcttggtcttgggcctcagg

SEQ ID NO: 3763530 - DNA, 25 bp, Homo sapien
taggtcttcctgtcagcggtacttc

SEQ ID NO: 3763531 - DNA, 25 bp, Homo sapien
atagagacctctggctaaaaaagac

SEQ ID NO: 3763532 - DNA, 25 bp, Homo sapien
ttcctgtcagcggtacttctttcct

SEQ ID NO: 3763533 - DNA, 25 bp, Homo sapien
aaaagaccctaggtcttcctgtcag

SEQ ID NO: 3763534 - DNA, 25 bp, Homo sapien
tctcttccctggtgagaaggccatt

SEQ ID NO: 3763535 - DNA, 25 bp, Homo sapien
gaaggccattcctagactgcttctc

SEQ ID NO: 3763536 - DNA, 25 bp, Homo sapien
tccacatattaacggcccctggaaa

SEQ ID NO: 3763537 - DNA, 25 bp, Homo sapien
gttgatgaacagttatacactcctg

SEQ ID NO: 3763538 - DNA, 25 bp, Homo sapien
ggtgaacgaggagccctgtgatctc

SEQ ID NO: 3763539 - DNA, 25 bp, Homo sapien
gtacttcccacagttcagtgtccaa

SEQ ID NO: 3763540 - DNA, 25 bp, Homo sapien
ttgccgtgaagatgtcagggtgaac

SEQ ID NO: 3763541 - DNA, 25 bp, Homo sapien
tactgtacttcccacagttcagtgt

SEQ ID NO: 3763542 - DNA, 25 bp, Homo sapien
tcatatccaggtctgtagggtcctt

SEQ ID NO: 3763543 - DNA, 25 bp, Homo sapien
tctgtagggtccttggatcattgtc

SEQ ID NO: 3763544 - DNA, 25 bp, Homo sapien
tggatcattgtctgccagtgattct

SEQ ID NO: 3763545 - DNA, 25 bp, Homo sapien
cattgtctgccagtgattcttggtc

SEQ ID NO: 3763546 - DNA, 25 bp, Homo sapien
tttctgaactagctttcccagtagc

SEQ ID NO: 3763547 - DNA, 25 bp, Homo sapien
ttttctgaactagctttcccagtag

SEQ ID NO: 3763548 - DNA, 25 bp, Homo sapien
cttttctgaactagctttcccagta

SEQ ID NO: 3763549 - DNA, 25 bp, Homo sapien
gaatgcgcttgacctggacatccat

SEQ ID NO: 3763550 - DNA, 25 bp, Homo sapien
tgaatgcgcttgacctggacatcca

SEQ ID NO: 3763551 - DNA, 25 bp, Homo sapien
tccagtggacttaattccaaccagg

SEQ ID NO: 3763552 - DNA, 25 bp, Homo sapien
ctctcgctgcttttgggccagagga

SEQ ID NO: 3763553 - DNA, 25 bp, Homo sapien
ctccttgaggctgcgagtcgtccct

SEQ ID NO: 3763554 - DNA, 25 bp, Homo sapien
ttgtctcccggttatcaggctctcg

SEQ ID NO: 3763555 - DNA, 25 bp, Homo sapien
agccatttggccagagagcagtcac

SEQ ID NO: 3763556 - DNA, 25 bp, Homo sapien
gcagcagccatttggccagagagca

SEQ ID NO: 3763557 - DNA, 25 bp, Homo sapien
gcagccatttggccagagagcagtc

SEQ ID NO: 3763558 - DNA, 25 bp, Homo sapien
cagcagccatttggccagagagcag

SEQ ID NO: 3763559 - DNA, 25 bp, Homo sapien
cttgggtccaggagaggcattgcag

SEQ ID NO: 3763560 - DNA, 25 bp, Homo sapien
ttgggtccaggagaggcattgcagg

SEQ ID NO: 3763561 - DNA, 25 bp, Homo sapien
ggtccaggagaggcattgcaggctt

SEQ ID NO: 3763562 - DNA, 25 bp, Homo sapien
ccaggagaggcattgcaggctttac

SEQ ID NO: 3763563 - DNA, 25 bp, Homo sapien
gcccagatccctcagacaaggagct

SEQ ID NO: 3763564 - DNA, 25 bp, Homo sapien
tcagacaaggagctgtaaggcccaa

SEQ ID NO: 3763565 - DNA, 25 bp, Homo sapien
gcaggacagcgtttagcttttgttt

SEQ ID NO: 3763566 - DNA, 25 bp, Homo sapien
agcaggacagcgtttagcttttgtt

SEQ ID NO: 3763567 - DNA, 25 bp, Homo sapien
cagcaggacagcgtttagcttttgt

SEQ ID NO: 3763568 - DNA, 25 bp, Homo sapien
caggacagcgtttagcttttgtttg

SEQ ID NO: 3763569 - DNA, 25 bp, Homo sapien
tcacacaggaagcagatcaccagga

SEQ ID NO: 3763570 - DNA, 25 bp, Homo sapien
cagccacgggatatgcaggagacac

SEQ ID NO: 3763571 - DNA, 25 bp, Homo sapien
tcaccaggacgacaattacaatcag

SEQ ID NO: 3763572 - DNA, 25 bp, Homo sapien
taaaaagacaatagctgagagcgag

SEQ ID NO: 3763573 - DNA, 25 bp, Homo sapien
taacttgccccgtgcacaggtgagt

SEQ ID NO: 3763574 - DNA, 25 bp, Homo sapien
gatgctcaacgtcatagacttatgg

SEQ ID NO: 3763575 - DNA, 25 bp, Homo sapien
caaggcccatgcaggtcattttcag

SEQ ID NO: 3763576 - DNA, 25 bp, Homo sapien
gaaatagcatgatacacgattgcag

SEQ ID NO: 3763577 - DNA, 25 bp, Homo sapien
ttcctaaaacggagtcggtgctgcc

SEQ ID NO: 3763578 - DNA, 25 bp, Homo sapien
cccgccgaggcgctctctgggagaa

SEQ ID NO: 3763579 - DNA, 25 bp, Homo sapien
tgggagatatcccagccgtgggcct

SEQ ID NO: 3763580 - DNA, 25 bp, Homo sapien
gagaagcgggaacctcggcagccaa

SEQ ID NO: 3763581 - DNA, 25 bp, Homo sapien
agggaacctcgaagcctcctctcca

SEQ ID NO: 3763582 - DNA, 25 bp, Homo sapien
tgaagttactcagaactggagcggg

SEQ ID NO: 3763583 - DNA, 25 bp, Homo sapien
gcggagcccttgaagttactcagaa

SEQ ID NO: 3763584 - DNA, 25 bp, Homo sapien
tgctctgtggagaggcggagccctt

SEQ ID NO: 3763585 - DNA, 25 bp, Homo sapien
cagcattagttttggtctgcccctg

SEQ ID NO: 3763586 - DNA, 25 bp, Homo sapien
aaagtgcacaggcttacagtcgcat

SEQ ID NO: 3763587 - DNA, 25 bp, Homo sapien
cagctgttttagtgggtgttcaatg

SEQ ID NO: 3763588 - DNA, 25 bp, Homo sapien
caatgtgcgaggttccggtttctcc

SEQ ID NO: 3763589 - DNA, 25 bp, Homo sapien
tgcaatcttctgacaaatagcccat

SEQ ID NO: 3763590 - DNA, 25 bp, Homo sapien
tcttcgtttttatagacagaagctg

SEQ ID NO: 3763591 - DNA, 25 bp, Homo sapien
gatggactcttcatactctctctga

SEQ ID NO: 3763592 - DNA, 25 bp, Homo sapien
gctgaatctatgtggcaagagccag

SEQ ID NO: 3763593 - DNA, 25 bp, Homo sapien
gtctgattcacacaaggggaacctc

SEQ ID NO: 3763594 - DNA, 25 bp, Homo sapien
ctgtctgattcacacaaggggaacc

SEQ ID NO: 3763595 - DNA, 25 bp, Homo sapien
ttgtcctgtctgattcacacaaggg

SEQ ID NO: 3763596 - DNA, 25 bp, Homo sapien
tgttgtcctgtctgattcacacaag

SEQ ID NO: 3763597 - DNA, 25 bp, Homo sapien
gccttcttgtgctcggtcatttcct

SEQ ID NO: 3763598 - DNA, 25 bp, Homo sapien
cacttaggagcagtttacggagggt

SEQ ID NO: 3763599 - DNA, 25 bp, Homo sapien
ccaggcacttaggagcagtttacgg

SEQ ID NO: 3763600 - DNA, 25 bp, Homo sapien
gagtcagtttactgatctgagtggg

SEQ ID NO: 3763601 - DNA, 25 bp, Homo sapien
tggcaaagataacgccattcatccg

SEQ ID NO: 3763602 - DNA, 25 bp, Homo sapien
aaacatttccgtcaccatgagggcc

SEQ ID NO: 3763603 - DNA, 25 bp, Homo sapien
caaggtgttggatgtgccaatagtc

SEQ ID NO: 3763604 - DNA, 25 bp, Homo sapien
taacttttttggactggcattcctc

SEQ ID NO: 3763605 - DNA, 25 bp, Homo sapien
agcgtcctcagggtccgtctttctt

SEQ ID NO: 3763606 - DNA, 25 bp, Homo sapien
gatgtgactcattgtctgggctttg

SEQ ID NO: 3763607 - DNA, 25 bp, Homo sapien
ttacttgatgtgactcattgtctgg

SEQ ID NO: 3763608 - DNA, 25 bp, Homo sapien
cttgatgtgactcattgtctgggct

SEQ ID NO: 3763609 - DNA, 25 bp, Homo sapien
aactagaaaacttcccatccatgag

SEQ ID NO: 3763610 - DNA, 25 bp, Homo sapien
aaatggataatctgggtgatgagaa

SEQ ID NO: 3763611 - DNA, 25 bp, Homo sapien
tcaataaactctggaacaaccacag

SEQ ID NO: 3763612 - DNA, 25 bp, Homo sapien
taggccaacttgtgactgagcaggc

SEQ ID NO: 3763613 - DNA, 25 bp, Homo sapien
caatatgtcattctacagcttgagg

SEQ ID NO: 3763614 - DNA, 25 bp, Homo sapien
gatttctgttaaactggtgtgagcc

SEQ ID NO: 3763615 - DNA, 25 bp, Homo sapien
tatacctacacacgtgggcacacat

SEQ ID NO: 3763616 - DNA, 25 bp, Homo sapien
ggtgtgagcctacaattaacacagt

SEQ ID NO: 3763617 - DNA, 25 bp, Homo sapien
gaacctgcttactctttactattga

SEQ ID NO: 3763618 - DNA, 25 bp, Homo sapien
cattgttcagaaaccacagctgaag

SEQ ID NO: 3763619 - DNA, 25 bp, Homo sapien
ccttcttgattttccgaacctgctt

SEQ ID NO: 3763620 - DNA, 25 bp, Homo sapien
gctgaagatccacccctgtggccag

SEQ ID NO: 3763621 - DNA, 25 bp, Homo sapien
catgtcctctggtgtcagctagaag

SEQ ID NO: 3763622 - DNA, 25 bp, Homo sapien
tgtcctctggtgtcagctagaagtc

SEQ ID NO: 3763623 - DNA, 25 bp, Homo sapien
atgtcctctggtgtcagctagaagt

SEQ ID NO: 3763624 - DNA, 25 bp, Homo sapien
tcatgtcctctggtgtcagctagaa

SEQ ID NO: 3763625 - DNA, 25 bp, Homo sapien
tctcattgaagctcttcaccaggac

SEQ ID NO: 3763626 - DNA, 25 bp, Homo sapien
ttctcttctcattgaagctcttcac

SEQ ID NO: 3763627 - DNA, 25 bp, Homo sapien
agctggtagcacaaggcaacctggg

SEQ ID NO: 3763628 - DNA, 25 bp, Homo sapien
ctgcagctggtagcacaaggcaacc

SEQ ID NO: 3763629 - DNA, 25 bp, Homo sapien
ggcattgagtattggatcctcctgg

SEQ ID NO: 3763630 - DNA, 25 bp, Homo sapien
caatggcattgagtattggatcctc

SEQ ID NO: 3763631 - DNA, 25 bp, Homo sapien
ttgagtattggatcctcctggagaa

SEQ ID NO: 3763632 - DNA, 25 bp, Homo sapien
tttcagcaatggcattgagtattgg

SEQ ID NO: 3763633 - DNA, 25 bp, Homo sapien
tgctgcaagtctgaggctgaatatc

SEQ ID NO: 3763634 - DNA, 25 bp, Homo sapien
aggtgctgcaagtctgaggctgaat

SEQ ID NO: 3763635 - DNA, 25 bp, Homo sapien
ctgcaagtctgaggctgaatatcca

SEQ ID NO: 3763636 - DNA, 25 bp, Homo sapien
cagaggtgctgcaagtctgaggctg

SEQ ID NO: 3763637 - DNA, 25 bp, Homo sapien
cccaaggcagaatatgcagtcatga

SEQ ID NO: 3763638 - DNA, 25 bp, Homo sapien
caaggcagaatatgcagtcatgaca

SEQ ID NO: 3763639 - DNA, 25 bp, Homo sapien
gtctgagtcagaccccaaggcagaa

SEQ ID NO: 3763640 - DNA, 25 bp, Homo sapien
cagtctttgtctgagtcagacccca

SEQ ID NO: 3763641 - DNA, 25 bp, Homo sapien
ctttggttgaggtaagggtgatatt

SEQ ID NO: 3763642 - DNA, 25 bp, Homo sapien
ctccaggagtttgctttggttgagg

SEQ ID NO: 3763643 - DNA, 25 bp, Homo sapien
agtactccaggagtttgctttggtt

SEQ ID NO: 3763644 - DNA, 25 bp, Homo sapien
tggttgaggtaagggtgatattcca

SEQ ID NO: 3763645 - DNA, 25 bp, Homo sapien
gaattaggttacagaaccaccaaca

SEQ ID NO: 3763646 - DNA, 25 bp, Homo sapien
ttaggttacagaaccaccaacacca

SEQ ID NO: 3763647 - DNA, 25 bp, Homo sapien
taggttacagaaccaccaacaccaa

SEQ ID NO: 3763648 - DNA, 25 bp, Homo sapien
tggaaaggcttctggcccttttatc

SEQ ID NO: 3763649 - DNA, 25 bp, Homo sapien
atggccccactcagacttatggtgc

SEQ ID NO: 3763650 - DNA, 25 bp, Homo sapien
ttcccgaagctccaatcttgtccca

SEQ ID NO: 3763651 - DNA, 25 bp, Homo sapien
tggtgcccatacacttcccgaagct

SEQ ID NO: 3763652 - DNA, 25 bp, Homo sapien
cagccttggcaacaggagtaaaact

SEQ ID NO: 3763653 - DNA, 25 bp, Homo sapien
gtattcccagccatgtgggaggcag

SEQ ID NO: 3763654 - DNA, 25 bp, Homo sapien
cctgggaggcggaggttgcagtgag

SEQ ID NO: 3763655 - DNA, 25 bp, Homo sapien
gaggcagaggtacatgcttgaacct

SEQ ID NO: 3763656 - DNA, 25 bp, Homo sapien
caacaactcagaatgtgttctcttc

SEQ ID NO: 3763657 - DNA, 25 bp, Homo sapien
gaatgtgttctcttcccttgaagca

SEQ ID NO: 3763658 - DNA, 25 bp, Homo sapien
catctgatgttcaaaggtaaaatac

SEQ ID NO: 3763659 - DNA, 25 bp, Homo sapien
ctcttcccttgaagcatctgatgtt

SEQ ID NO: 3763660 - DNA, 25 bp, Homo sapien
tgtcaaatcgagaatagaggaagcc

SEQ ID NO: 3763661 - DNA, 25 bp, Homo sapien
tgtgagaagcatgtcataagtagcc

SEQ ID NO: 3763662 - DNA, 25 bp, Homo sapien
gaggaagcagttggtgcggcagatg

SEQ ID NO: 3763663 - DNA, 25 bp, Homo sapien
cataagtagccttgtcaaatcgaga

SEQ ID NO: 3763664 - DNA, 25 bp, Homo sapien
tggacaccctgatggacttggccaa

SEQ ID NO: 3763665 - DNA, 25 bp, Homo sapien
gacttggccaatcctgcatccttac

SEQ ID NO: 3763666 - DNA, 25 bp, Homo sapien
ttgttgaggatcatttccagttgcc

SEQ ID NO: 3763667 - DNA, 25 bp, Homo sapien
cagttgcctgcggttgaagttggac

SEQ ID NO: 3763668 - DNA, 25 bp, Homo sapien
taatctgtatagcaggctagaggca

SEQ ID NO: 3763669 - DNA, 25 bp, Homo sapien
gaggcaaataataaacgtacacacg

SEQ ID NO: 3763670 - DNA, 25 bp, Homo sapien
ggctagaggcaaataataaacgtac

SEQ ID NO: 3763671 - DNA, 25 bp, Homo sapien
aaggtgttgtgaggagtaatctgta

SEQ ID NO: 3763672 - DNA, 25 bp, Homo sapien
gagacccactgtgtcaaacatgatc

SEQ ID NO: 3763673 - DNA, 25 bp, Homo sapien
agacccactgtgtcaaacatgatct

SEQ ID NO: 3763674 - DNA, 25 bp, Homo sapien
aagctctgtctggcctcagccaagc

SEQ ID NO: 3763675 - DNA, 25 bp, Homo sapien
tctgtctggcctcagccaagcttgg

SEQ ID NO: 3763676 - DNA, 25 bp, Homo sapien
gctctgtctggcctcagccaagctt

SEQ ID NO: 3763677 - DNA, 25 bp, Homo sapien
agctctgtctggcctcagccaagct

SEQ ID NO: 3763678 - DNA, 25 bp, Homo sapien
cagcgacatgggtttgagactccag

SEQ ID NO: 3763679 - DNA, 25 bp, Homo sapien
gcagtacatccacaacactgaggca

SEQ ID NO: 3763680 - DNA, 25 bp, Homo sapien
tgttcgtcaactgaactccactgtc

SEQ ID NO: 3763681 - DNA, 25 bp, Homo sapien
gagactccagggtataagaacttga

SEQ ID NO: 3763682 - DNA, 25 bp, Homo sapien
tggataccagtgaactcctgtcact

SEQ ID NO: 3763683 - DNA, 25 bp, Homo sapien
ggataccagtgaactcctgtcactc

SEQ ID NO: 3763684 - DNA, 25 bp, Homo sapien
ataccagtgaactcctgtcactctg

SEQ ID NO: 3763685 - DNA, 25 bp, Homo sapien
gataccagtgaactcctgtcactct

SEQ ID NO: 3763686 - DNA, 25 bp, Homo sapien
tatttatgttgatcactaaagtaaa

SEQ ID NO: 3763687 - DNA, 25 bp, Homo sapien
taaagatccatgtagctcagctgaa

SEQ ID NO: 3763688 - DNA, 25 bp, Homo sapien
cagtgacatttcaaggcctctttgg

SEQ ID NO: 3763689 - DNA, 25 bp, Homo sapien
tctttggaccaattctgggcgggaa

SEQ ID NO: 3763690 - DNA, 25 bp, Homo sapien
ggtaaagatccatgtagctcagctg

SEQ ID NO: 3763691 - DNA, 25 bp, Homo sapien
agctaagagtgagctctccacagaa

SEQ ID NO: 3763692 - DNA, 25 bp, Homo sapien
aaacagatgcattggtacacagcac

SEQ ID NO: 3763693 - DNA, 25 bp, Homo sapien
gctaagagtgagctctccacagaaa

SEQ ID NO: 3763694 - DNA, 25 bp, Homo sapien
ctccacagaaacagatgcattggta

SEQ ID NO: 3763695 - DNA, 25 bp, Homo sapien
gtcaatatggcggtagcctacatca

SEQ ID NO: 3763696 - DNA, 25 bp, Homo sapien
tctcttcacagtgccgttggcaatc

SEQ ID NO: 3763697 - DNA, 25 bp, Homo sapien
tacctggacggcttcttctacatta

SEQ ID NO: 3763698 - DNA, 25 bp, Homo sapien
tcttctttcggatggcctgcccgat

SEQ ID NO: 3763699 - DNA, 25 bp, Homo sapien
caggaaccactgagatgtgcccttg

SEQ ID NO: 3763700 - DNA, 25 bp, Homo sapien
ttttgtgttgggaaacaatcctaca

SEQ ID NO: 3763701 - DNA, 25 bp, Homo sapien
aggaaccactgagatgtgcccttgt

SEQ ID NO: 3763702 - DNA, 25 bp, Homo sapien
ggaaccactgagatgtgcccttgta

SEQ ID NO: 3763703 - DNA, 25 bp, Homo sapien
attctgagcaattgcttgcacactt

SEQ ID NO: 3763704 - DNA, 25 bp, Homo sapien
gaattctgagcaattgcttgcacac

SEQ ID NO: 3763705 - DNA, 25 bp, Homo sapien
tgaattctgagcaattgcttgcaca

SEQ ID NO: 3763706 - DNA, 25 bp, Homo sapien
ctgagcaattgcttgcacacttcca

SEQ ID NO: 3763707 - DNA, 25 bp, Homo sapien
accccagaataggcatgaactttcc

SEQ ID NO: 3763708 - DNA, 25 bp, Homo sapien
ccaaaccccagaataggcatgaact

SEQ ID NO: 3763709 - DNA, 25 bp, Homo sapien
gccaaaccccagaataggcatgaac

SEQ ID NO: 3763710 - DNA, 25 bp, Homo sapien
aaaccccagaataggcatgaacttt

SEQ ID NO: 3763711 - DNA, 25 bp, Homo sapien
tcctgcaaagcagagggtttttttc

SEQ ID NO: 3763712 - DNA, 25 bp, Homo sapien
tacttttcctgcaaagcagagggtt

SEQ ID NO: 3763713 - DNA, 25 bp, Homo sapien
cttcttttacttttcctgcaaagca

SEQ ID NO: 3763714 - DNA, 25 bp, Homo sapien
ttttacttttcctgcaaagcagagg

SEQ ID NO: 3763715 - DNA, 25 bp, Homo sapien
gaaatatcagttaactagactagga

SEQ ID NO: 3763716 - DNA, 25 bp, Homo sapien
caaaaaattccagctatatgacaca

SEQ ID NO: 3763717 - DNA, 25 bp, Homo sapien
gattcaaaaggtagtgcaattcagg

SEQ ID NO: 3763718 - DNA, 25 bp, Homo sapien
gaactcacatcatattgcaaagcca

SEQ ID NO: 3763719 - DNA, 25 bp, Homo sapien
tgtccaacgtgccatcttgtgtgac

SEQ ID NO: 3763720 - DNA, 25 bp, Homo sapien
cgtgccatcttgtgtgacagaagac

SEQ ID NO: 3763721 - DNA, 25 bp, Homo sapien
aaggaatgtccaacgtgccatcttg

SEQ ID NO: 3763722 - DNA, 25 bp, Homo sapien
caacgtgccatcttgtgtgacagaa

SEQ ID NO: 3763723 - DNA, 25 bp, Homo sapien
gatgtttcaaggaaaagaggtccaa

SEQ ID NO: 3763724 - DNA, 25 bp, Homo sapien
ttataaatcaggcaaactgagggtg

SEQ ID NO: 3763725 - DNA, 25 bp, Homo sapien
gatattaataacctgagagagctgt

SEQ ID NO: 3763726 - DNA, 25 bp, Homo sapien
tataaaagagtgactaaactctgag

SEQ ID NO: 3763727 - DNA, 25 bp, Homo sapien
ctgaagagtgttgactctctttttc

SEQ ID NO: 3763728 - DNA, 25 bp, Homo sapien
ctgggatgaagcattgtcggactcc

SEQ ID NO: 3763729 - DNA, 25 bp, Homo sapien
ccctccctccataaatatggcaatg

SEQ ID NO: 3763730 - DNA, 25 bp, Homo sapien
ctaagaggagcgagtcctctgaaga

SEQ ID NO: 3763731 - DNA, 25 bp, Homo sapien
gtagaggacttagactccggcgtta

SEQ ID NO: 3763732 - DNA, 25 bp, Homo sapien
aggtagaggacttagactccggcgt

SEQ ID NO: 3763733 - DNA, 25 bp, Homo sapien
caccagctccttctttagaagctgg

SEQ ID NO: 3763734 - DNA, 25 bp, Homo sapien
tgtcaccagctccttctttagaagc

SEQ ID NO: 3763735 - DNA, 25 bp, Homo sapien
ccagctccttctttagaagctggaa

SEQ ID NO: 3763736 - DNA, 25 bp, Homo sapien
gtcaccagctccttctttagaagct

SEQ ID NO: 3763737 - DNA, 25 bp, Homo sapien
caatcaccagcataaagacgtcctc

SEQ ID NO: 3763738 - DNA, 25 bp, Homo sapien
tccaatcaccagcataaagacgtcc

SEQ ID NO: 3763739 - DNA, 25 bp, Homo sapien
aatcaccagcataaagacgtcctct

SEQ ID NO: 3763740 - DNA, 25 bp, Homo sapien
tcaccagcataaagacgtcctctgt

SEQ ID NO: 3763741 - DNA, 25 bp, Homo sapien
cagctgatctaggacccttcagacc

SEQ ID NO: 3763742 - DNA, 25 bp, Homo sapien
agcacccagacgaagtgtccaccat

SEQ ID NO: 3763743 - DNA, 25 bp, Homo sapien
cccagacgaagtgtccaccattcag

SEQ ID NO: 3763744 - DNA, 25 bp, Homo sapien
gacagctgatctaggacccttcaga

SEQ ID NO: 3763745 - DNA, 25 bp, Homo sapien
tgagggagccagcttcagccttggc

SEQ ID NO: 3763746 - DNA, 25 bp, Homo sapien
gaggcacccagagcaagtgagggct

SEQ ID NO: 3763747 - DNA, 25 bp, Homo sapien
gcagaggaggcacccagagcaagtg

SEQ ID NO: 3763748 - DNA, 25 bp, Homo sapien
ctgagggagccagcttcagccttgg

SEQ ID NO: 3763749 - DNA, 25 bp, Homo sapien
ttgtgactactccaagatgtgaatc

SEQ ID NO: 3763750 - DNA, 25 bp, Homo sapien
gcactgcaagttgtgactactccaa

SEQ ID NO: 3763751 - DNA, 25 bp, Homo sapien
aagcaaatagaagcaatcagggcac

SEQ ID NO: 3763752 - DNA, 25 bp, Homo sapien
caatcagggcactgcaagttgtgac

SEQ ID NO: 3763753 - DNA, 25 bp, Homo sapien
tacaactcagcagaaagaacacggc

SEQ ID NO: 3763754 - DNA, 25 bp, Homo sapien
catgcctgtcctgggatttggcacc

SEQ ID NO: 3763755 - DNA, 25 bp, Homo sapien
tttggcacctatgcgcctgcagagg

SEQ ID NO: 3763756 - DNA, 25 bp, Homo sapien
gccatcttgtcacagggtcatctac

SEQ ID NO: 3763757 - DNA, 25 bp, Homo sapien
tccttacttcaaccagagaaaactg

SEQ ID NO: 3763758 - DNA, 25 bp, Homo sapien
taataagagatacaggaagtttacc

SEQ ID NO: 3763759 - DNA, 25 bp, Homo sapien
ttgcctatagtgctctgggatccca

SEQ ID NO: 3763760 - DNA, 25 bp, Homo sapien
ctgcaggtggaatgtcatccttact

SEQ ID NO: 3763761 - DNA, 25 bp, Homo sapien
gatgttgaggctgctgttcgggggc

SEQ ID NO: 3763762 - DNA, 25 bp, Homo sapien
ctcgcttgagaagctccggtgcaga

SEQ ID NO: 3763763 - DNA, 25 bp, Homo sapien
gttcactcacagctgacttggggtg

SEQ ID NO: 3763764 - DNA, 25 bp, Homo sapien
tcgggggcctcgcttgagaagctcc

SEQ ID NO: 3763765 - DNA, 25 bp, Homo sapien
aatgagcagcgcatcagacagaacg

SEQ ID NO: 3763766 - DNA, 25 bp, Homo sapien
ggacccagtcctttgtgccttggca

SEQ ID NO: 3763767 - DNA, 25 bp, Homo sapien
gcaaaaaagcacaagcgaaccccag

SEQ ID NO: 3763768 - DNA, 25 bp, Homo sapien
cttagtctgtttagggagccgccta

SEQ ID NO: 3763769 - DNA, 25 bp, Homo sapien
tcttaccagatcaaaggcagttccg

SEQ ID NO: 3763770 - DNA, 25 bp, Homo sapien
tgaagcgaataggagcacttggcct

SEQ ID NO: 3763771 - DNA, 25 bp, Homo sapien
ggaattgcttgctggatcctgtcga

SEQ ID NO: 3763772 - DNA, 25 bp, Homo sapien
cagttccgtcaatcttgtgggccag

SEQ ID NO: 3763773 - DNA, 25 bp, Homo sapien
tcttgtaggaagaagcacacgcagg

SEQ ID NO: 3763774 - DNA, 25 bp, Homo sapien
ccagcagtgcgagggtcagagtttc

SEQ ID NO: 3763775 - DNA, 25 bp, Homo sapien
gacaggtatttatcagtcagtgcct

SEQ ID NO: 3763776 - DNA, 25 bp, Homo sapien
gaggatgagcgatattgactagcaa

SEQ ID NO: 3763777 - DNA, 25 bp, Homo sapien
aatagtaacttacagccatatagag

SEQ ID NO: 3763778 - DNA, 25 bp, Homo sapien
tgatttcaggaacacttgagatgta

SEQ ID NO: 3763779 - DNA, 25 bp, Homo sapien
aattttatagggacctccaatcact

SEQ ID NO: 3763780 - DNA, 25 bp, Homo sapien
aagggaggaattcaggttgaatgaa

SEQ ID NO: 3763781 - DNA, 25 bp, Homo sapien
gcctgctaatacaacgtgcattctg

SEQ ID NO: 3763782 - DNA, 25 bp, Homo sapien
aacagattactgctgtttccgtgcc

SEQ ID NO: 3763783 - DNA, 25 bp, Homo sapien
gccttttggcaatgtacctaatctg

SEQ ID NO: 3763784 - DNA, 25 bp, Homo sapien
tctgatagctttcttatagagaggc

SEQ ID NO: 3763785 - DNA, 25 bp, Homo sapien
catcaacggaatgagagtagaccag

SEQ ID NO: 3763786 - DNA, 25 bp, Homo sapien
gaagatttggaggaaaacgctgagc

SEQ ID NO: 3763787 - DNA, 25 bp, Homo sapien
tgtgttagaaagtgtgcccaggtaa

SEQ ID NO: 3763788 - DNA, 25 bp, Homo sapien
tgatatcttcgatgtcctgccccac

SEQ ID NO: 3763789 - DNA, 25 bp, Homo sapien
ttttccggccgatgggcttagctgt

SEQ ID NO: 3763790 - DNA, 25 bp, Homo sapien
tattgtctttcttttccggccgatg

SEQ ID NO: 3763791 - DNA, 25 bp, Homo sapien
tagctgtagcttactgaagtcgcca

SEQ ID NO: 3763792 - DNA, 25 bp, Homo sapien
tactgaagtcgccaagcaggagaga

SEQ ID NO: 3763793 - DNA, 25 bp, Homo sapien
acgcagggccttctggcagacctca

SEQ ID NO: 3763794 - DNA, 25 bp, Homo sapien
cacgcagggccttctggcagacctc

SEQ ID NO: 3763795 - DNA, 25 bp, Homo sapien
aaatggataattaggggggccagca

SEQ ID NO: 3763796 - DNA, 25 bp, Homo sapien
aatggataattaggggggccagcaa

SEQ ID NO: 3763797 - DNA, 25 bp, Homo sapien
tccatattgcagaacaccaaggcca

SEQ ID NO: 3763798 - DNA, 25 bp, Homo sapien
cactgagatctccatattgcagaac

SEQ ID NO: 3763799 - DNA, 25 bp, Homo sapien
ccaaggccaagtgctcctattcgct

SEQ ID NO: 3763800 - DNA, 25 bp, Homo sapien
gatctccatattgcagaacaccaag

SEQ ID NO: 3763801 - DNA, 25 bp, Homo sapien
gaggtgggaattggaacctggccca

SEQ ID NO: 3763802 - DNA, 25 bp, Homo sapien
tggcccacaagattgacggaactgc

SEQ ID NO: 3763803 - DNA, 25 bp, Homo sapien
ttggctcatgggcaaacatgcaaag

SEQ ID NO: 3763804 - DNA, 25 bp, Homo sapien
caagcaattccatgtgaaagaggtg

SEQ ID NO: 3763805 - DNA, 25 bp, Homo sapien
tccttggagtcacgagagcagaggc

SEQ ID NO: 3763806 - DNA, 25 bp, Homo sapien
gaaagttccttggagtcacgagagc

SEQ ID NO: 3763807 - DNA, 25 bp, Homo sapien
ttggagtcacgagagcagaggcaca

SEQ ID NO: 3763808 - DNA, 25 bp, Homo sapien
aagttccttggagtcacgagagcag

SEQ ID NO: 3763809 - DNA, 25 bp, Homo sapien
ctgaagtcaactggaattcaaacac

SEQ ID NO: 3763810 - DNA, 25 bp, Homo sapien
catctcctctgaagtcaactggaat

SEQ ID NO: 3763811 - DNA, 25 bp, Homo sapien
catttctgtttaggccatctatggc

SEQ ID NO: 3763812 - DNA, 25 bp, Homo sapien
cgcacatttctgtttaggccatcta

SEQ ID NO: 3763813 - DNA, 25 bp, Homo sapien
gaagaaacagagcttactttgtgcc

SEQ ID NO: 3763814 - DNA, 25 bp, Homo sapien
tatctatctctccaatgaacaggta

SEQ ID NO: 3763815 - DNA, 25 bp, Homo sapien
tatgaaagacctctctaaacaccca

SEQ ID NO: 3763816 - DNA, 25 bp, Homo sapien
ccaagtggtcaatgaaaaccagtca

SEQ ID NO: 3763817 - DNA, 25 bp, Homo sapien
cactatttcagagtatcctatggat

SEQ ID NO: 3763818 - DNA, 25 bp, Homo sapien
taatgaatgccattacctagattca

SEQ ID NO: 3763819 - DNA, 25 bp, Homo sapien
tattctctcgttctctgtatcacta

SEQ ID NO: 3763820 - DNA, 25 bp, Homo sapien
tgttaattctttagagacttgtatg

SEQ ID NO: 3763821 - DNA, 25 bp, Homo sapien
gtgtgaaggacactgtgcaggagac

SEQ ID NO: 3763822 - DNA, 25 bp, Homo sapien
gtgaaggacactgtgcaggagacct

SEQ ID NO: 3763823 - DNA, 25 bp, Homo sapien
aaggacactgtgcaggagacctgag

SEQ ID NO: 3763824 - DNA, 25 bp, Homo sapien
tgtgaaggacactgtgcaggagacc

SEQ ID NO: 3763825 - DNA, 25 bp, Homo sapien
ccaaggcacaaaggactgggtcctc

SEQ ID NO: 3763826 - DNA, 25 bp, Homo sapien
cacgttctgtctgatgcgctgctca

SEQ ID NO: 3763827 - DNA, 25 bp, Homo sapien
gcgctgctcattgtagctcttggcc

SEQ ID NO: 3763828 - DNA, 25 bp, Homo sapien
gtagcgcagggcaatcagggctggg

SEQ ID NO: 3763829 - DNA, 25 bp, Homo sapien
ggatcccagagcactataggcaacc

SEQ ID NO: 3763830 - DNA, 25 bp, Homo sapien
tccagcagcctgtggttgaagttgg

SEQ ID NO: 3763831 - DNA, 25 bp, Homo sapien
gttgcagacaggcttgtacttgagc

SEQ ID NO: 3763832 - DNA, 25 bp, Homo sapien
tgaagttggacaccccgatggactt

SEQ ID NO: 3763833 - DNA, 25 bp, Homo sapien
gatggacttggccaatcctgcatct

SEQ ID NO: 3763834 - DNA, 25 bp, Homo sapien
tgacaatcaaactagctagccgtgg

SEQ ID NO: 3763835 - DNA, 25 bp, Homo sapien
catttgtgtagtcgactgaagagca

SEQ ID NO: 3763836 - DNA, 25 bp, Homo sapien
gcaacaactgtctagacgtgacaat

SEQ ID NO: 3763837 - DNA, 25 bp, Homo sapien
cctaagtttttgatccaatggtgca

SEQ ID NO: 3763838 - DNA, 25 bp, Homo sapien
attttcatcttttgggatcacttcc

SEQ ID NO: 3763839 - DNA, 25 bp, Homo sapien
tgtggcacagagatccactgtgtca

SEQ ID NO: 3763840 - DNA, 25 bp, Homo sapien
tcccatgtggcacagagatccactg

SEQ ID NO: 3763841 - DNA, 25 bp, Homo sapien
tcatcttttgggatcacttcctcac

SEQ ID NO: 3763842 - DNA, 25 bp, Homo sapien
catgaggtaggtgatgcagcgctcc

SEQ ID NO: 3763843 - DNA, 25 bp, Homo sapien
catatgatgttccatgcacaggacc

SEQ ID NO: 3763844 - DNA, 25 bp, Homo sapien
ggaaactcattgtgcaccctatgtg

SEQ ID NO: 3763845 - DNA, 25 bp, Homo sapien
gatgcacaggagctcacggtaatga

SEQ ID NO: 3763846 - DNA, 25 bp, Homo sapien
tttccaaggctggtcggaccaactc

SEQ ID NO: 3763847 - DNA, 25 bp, Homo sapien
tgacctttccaaggctggtcggacc

SEQ ID NO: 3763848 - DNA, 25 bp, Homo sapien
gctggtcggaccaactctggtcgat

SEQ ID NO: 3763849 - DNA, 25 bp, Homo sapien
accaactctggtcgatgggaattgc

SEQ ID NO: 3763850 - DNA, 25 bp, Homo sapien
tgaagtgtagaatatgtcttctctc

SEQ ID NO: 3763851 - DNA, 25 bp, Homo sapien
ttgaagtgtagaatatgtcttctct

SEQ ID NO: 3763852 - DNA, 25 bp, Homo sapien
ttgccaatttgacggcctctagagc

SEQ ID NO: 3763853 - DNA, 25 bp, Homo sapien
gaacccggcttctattgccaatttg

SEQ ID NO: 3763854 - DNA, 25 bp, Homo sapien
ttgacggcctctagagctttacttt

SEQ ID NO: 3763855 - DNA, 25 bp, Homo sapien
ggcttctattgccaatttgacggcc

SEQ ID NO: 3763856 - DNA, 25 bp, Homo sapien
agttagttcgggcacaagcagcaac

SEQ ID NO: 3763857 - DNA, 25 bp, Homo sapien
caaccaaacgtaatattttctgact

SEQ ID NO: 3763858 - DNA, 25 bp, Homo sapien
agagttagttcgggcacaagcagca

SEQ ID NO: 3763859 - DNA, 25 bp, Homo sapien
gagcaaccaaacgtaatattttctg

SEQ ID NO: 3763860 - DNA, 25 bp, Homo sapien
tagatgaccctgtgacaagacggca

SEQ ID NO: 3763861 - DNA, 25 bp, Homo sapien
ggaacacaagcctgacaacctggtc

SEQ ID NO: 3763862 - DNA, 25 bp, Homo sapien
tcaatcttcaagagagggagcaggc

SEQ ID NO: 3763863 - DNA, 25 bp, Homo sapien
ttcccagaggtgagaatagtacatg

SEQ ID NO: 3763864 - DNA, 25 bp, Homo sapien
gaagtgaccatcattcagcttcaca

SEQ ID NO: 3763865 - DNA, 25 bp, Homo sapien
tgcaggcgcataggtgccaaatccc

SEQ ID NO: 3763866 - DNA, 25 bp, Homo sapien
gaccatcattcagcttcacacactg

SEQ ID NO: 3763867 - DNA, 25 bp, Homo sapien
aggcgcataggtgccaaatcccagg

SEQ ID NO: 3763868 - DNA, 25 bp, Homo sapien
ggcctggttagcaaatgtttcttcc

SEQ ID NO: 3763869 - DNA, 25 bp, Homo sapien
ctggttagcaaatgtttcttcctcc

SEQ ID NO: 3763870 - DNA, 25 bp, Homo sapien
ctgtcactggcctggttagcaaatg

SEQ ID NO: 3763871 - DNA, 25 bp, Homo sapien
cactggcctggttagcaaatgtttc

SEQ ID NO: 3763872 - DNA, 25 bp, Homo sapien
ggcagtcttacacaagctgtgataa

SEQ ID NO: 3763873 - DNA, 25 bp, Homo sapien
ccaatggcatgtgagaggagggaca

SEQ ID NO: 3763874 - DNA, 25 bp, Homo sapien
gacagaggcagtcttacacaagctg

SEQ ID NO: 3763875 - DNA, 25 bp, Homo sapien
tgcatccagttcaaccgtttcttac

SEQ ID NO: 3763876 - DNA, 25 bp, Homo sapien
ataatcaatacacatagggatagca

SEQ ID NO: 3763877 - DNA, 25 bp, Homo sapien
taatcaatacacatagggatagcac

SEQ ID NO: 3763878 - DNA, 25 bp, Homo sapien
caggatgaagatataatcaatacac

SEQ ID NO: 3763879 - DNA, 25 bp, Homo sapien
aatcaatacacatagggatagcaca

SEQ ID NO: 3763880 - DNA, 25 bp, Homo sapien
cagtgagttgggattgcaccatcgc

SEQ ID NO: 3763881 - DNA, 25 bp, Homo sapien
agtgagttgggattgcaccatcgca

SEQ ID NO: 3763882 - DNA, 25 bp, Homo sapien
actataggatgcagtatgtcattcc

SEQ ID NO: 3763883 - DNA, 25 bp, Homo sapien
gtggatggtataactataggatgca

SEQ ID NO: 3763884 - DNA, 25 bp, Homo sapien
tataactataggatgcagtatgtca

SEQ ID NO: 3763885 - DNA, 25 bp, Homo sapien
ggatgcagtatgtcattccaatggt

SEQ ID NO: 3763886 - DNA, 25 bp, Homo sapien
tttgagaactcccagggcaacagga

SEQ ID NO: 3763887 - DNA, 25 bp, Homo sapien
gaaaccttctcagaagccctcggca

SEQ ID NO: 3763888 - DNA, 25 bp, Homo sapien
gcaacaggacaagagccacttgaag

SEQ ID NO: 3763889 - DNA, 25 bp, Homo sapien
ctctcatgcggcgttggctagggct

SEQ ID NO: 3763890 - DNA, 25 bp, Homo sapien
aattaaagcacaacatactgaacaa

SEQ ID NO: 3763891 - DNA, 25 bp, Homo sapien
cctgatggacctggttaaacctgca

SEQ ID NO: 3763892 - DNA, 25 bp, Homo sapien
tccctgttgggagagttcttgcagc

SEQ ID NO: 3763893 - DNA, 25 bp, Homo sapien
ttgcagctattacctccaagagagt

SEQ ID NO: 3763894 - DNA, 25 bp, Homo sapien
aaggctctcataagggcaatttact

SEQ ID NO: 3763895 - DNA, 25 bp, Homo sapien
tactcagccttttgcacagaagtcc

SEQ ID NO: 3763896 - DNA, 25 bp, Homo sapien
cagtgggaactagaatttcacatgt

SEQ ID NO: 3763897 - DNA, 25 bp, Homo sapien
caggagaaccatatgatgagaacag

SEQ ID NO: 3763898 - DNA, 25 bp, Homo sapien
gatctcaggagaaccatatgatgag

SEQ ID NO: 3763899 - DNA, 25 bp, Homo sapien
aactagatctcaggagaaccatatg

SEQ ID NO: 3763900 - DNA, 25 bp, Homo sapien
gggaagtaagcatgtcttcacttgg

SEQ ID NO: 3763901 - DNA, 25 bp, Homo sapien
catgtcttcacttggctggcaggag

SEQ ID NO: 3763902 - DNA, 25 bp, Homo sapien
taagcatgtcttcacttggctggca

SEQ ID NO: 3763903 - DNA, 25 bp, Homo sapien
tgtcttcacttggctggcaggagag

SEQ ID NO: 3763904 - DNA, 25 bp, Homo sapien
ggttgcaataaccatcaatcaacgt

SEQ ID NO: 3763905 - DNA, 25 bp, Homo sapien
agctttccttcatctgaaccaaagg

SEQ ID NO: 3763906 - DNA, 25 bp, Homo sapien
tcaatcaacgttgtcacaatgcttg

SEQ ID NO: 3763907 - DNA, 25 bp, Homo sapien
cacactcattctgagggacagctgg

SEQ ID NO: 3763908 - DNA, 25 bp, Homo sapien
cgcattggctttcgttgcttctagg

SEQ ID NO: 3763909 - DNA, 25 bp, Homo sapien
ttgcataaccccctgcatgagacac

SEQ ID NO: 3763910 - DNA, 25 bp, Homo sapien
gctcttgctgtgatatgtcctggat

SEQ ID NO: 3763911 - DNA, 25 bp, Homo sapien
gacaccagcgcattggctttcgttg

SEQ ID NO: 3763912 - DNA, 25 bp, Homo sapien
gctcctcaagggggctcgggtggcg

SEQ ID NO: 3763913 - DNA, 25 bp, Homo sapien
cagcttctgctgctcgactgtttcc

SEQ ID NO: 3763914 - DNA, 25 bp, Homo sapien
gctgctcgactgtttccacaacaat

SEQ ID NO: 3763915 - DNA, 25 bp, Homo sapien
gttcttcctattccctcctgcacag

SEQ ID NO: 3763916 - DNA, 25 bp, Homo sapien
gctcgactgtttccacaacaatgca

SEQ ID NO: 3763917 - DNA, 25 bp, Homo sapien
ctagatacagagtgtggacacaaag

SEQ ID NO: 3763918 - DNA, 25 bp, Homo sapien
gaaacaaaggttctccacgtccgca

SEQ ID NO: 3763919 - DNA, 25 bp, Homo sapien
aacaaaggttctccacgtccgcact

SEQ ID NO: 3763920 - DNA, 25 bp, Homo sapien
acagagtgtggacacaaaggttctc

SEQ ID NO: 3763921 - DNA, 25 bp, Homo sapien
aaacaaatgagccacctctttttca

SEQ ID NO: 3763922 - DNA, 25 bp, Homo sapien
ccatcaaagagagaatattggggcc

SEQ ID NO: 3763923 - DNA, 25 bp, Homo sapien
aggtcaagctctgcaggatagtatt

SEQ ID NO: 3763924 - DNA, 25 bp, Homo sapien
gatgcattccaagggtgagcctgtt

SEQ ID NO: 3763925 - DNA, 25 bp, Homo sapien
gtgttagagctcttaaggtggaacg

SEQ ID NO: 3763926 - DNA, 25 bp, Homo sapien
gttagagctcttaaggtggaacgtc

SEQ ID NO: 3763927 - DNA, 25 bp, Homo sapien
tagagctcttaaggtggaacgtctg

SEQ ID NO: 3763928 - DNA, 25 bp, Homo sapien
aaaggcagcatgtctggagtttttt

SEQ ID NO: 3763929 - DNA, 25 bp, Homo sapien
caagtgaaaactatcccacatgaga

SEQ ID NO: 3763930 - DNA, 25 bp, Homo sapien
agtgaaaactatcccacatgagaat

SEQ ID NO: 3763931 - DNA, 25 bp, Homo sapien
cattgcaagttctgacaactccaag

SEQ ID NO: 3763932 - DNA, 25 bp, Homo sapien
aaatagaacgaaatcagggcattgc

SEQ ID NO: 3763933 - DNA, 25 bp, Homo sapien
tggaagccaggatctgattcataga

SEQ ID NO: 3763934 - DNA, 25 bp, Homo sapien
tacatctccttctagttgtcaaagg

SEQ ID NO: 3763935 - DNA, 25 bp, Homo sapien
tactgtatcccagatatggaacttg

SEQ ID NO: 3763936 - DNA, 25 bp, Homo sapien
gcttctgttcagaaatggcatttcc

SEQ ID NO: 3763937 - DNA, 25 bp, Homo sapien
aatgagcagcgcatcagacagaacg

SEQ ID NO: 3763938 - DNA, 25 bp, Homo sapien
gcaaaaaagcacaagcgaaccccag

SEQ ID NO: 3763939 - DNA, 25 bp, Homo sapien
ggacccagtcctttgtgccttggca

SEQ ID NO: 3763940 - DNA, 25 bp, Homo sapien
cttagtctgtttagggagccgccta

SEQ ID NO: 3763941 - DNA, 25 bp, Homo sapien
catgtcggagatttccgttgaggct

SEQ ID NO: 3763942 - DNA, 25 bp, Homo sapien
gtaacttagcatgtcggagatttcc

SEQ ID NO: 3763943 - DNA, 25 bp, Homo sapien
cggagatttccgttgaggctgtcaa

SEQ ID NO: 3763944 - DNA, 25 bp, Homo sapien
ttccgttgaggctgtcaatggcttt

SEQ ID NO: 3763945 - DNA, 25 bp, Homo sapien
ggagctcttgaccaggaccacagcc

SEQ ID NO: 3763946 - DNA, 25 bp, Homo sapien
atctgctgttcattggagctcttga

SEQ ID NO: 3763947 - DNA, 25 bp, Homo sapien
tgatctgctgttcattggagctctt

SEQ ID NO: 3763948 - DNA, 25 bp, Homo sapien
ttggagctcttgaccaggaccacag

SEQ ID NO: 3763949 - DNA, 25 bp, Homo sapien
aagaactggtgagttctggtccacc

SEQ ID NO: 3763950 - DNA, 25 bp, Homo sapien
aaagaactggtgagttctggtccac

SEQ ID NO: 3763951 - DNA, 25 bp, Homo sapien
taggtaaacttcctgatgctcttat

SEQ ID NO: 3763952 - DNA, 25 bp, Homo sapien
ttaggtaaacttcctgatgctctta

SEQ ID NO: 3763953 - DNA, 25 bp, Homo sapien
ggtaaacttcctgatgctcttatta

SEQ ID NO: 3763954 - DNA, 25 bp, Homo sapien
gtaaacttcctgatgctcttattac

SEQ ID NO: 3763955 - DNA, 25 bp, Homo sapien
tgtcgttgggttcccagagcactgt

SEQ ID NO: 3763956 - DNA, 25 bp, Homo sapien
atgtcgttgggttcccagagcactg

SEQ ID NO: 3763957 - DNA, 25 bp, Homo sapien
cattattgtataaatgagcagaatc

SEQ ID NO: 3763958 - DNA, 25 bp, Homo sapien
tcctcattattgtataaatgagcag

SEQ ID NO: 3763959 - DNA, 25 bp, Homo sapien
ctcattattgtataaatgagcagaa

SEQ ID NO: 3763960 - DNA, 25 bp, Homo sapien
ctcctcattattgtataaatgagca

SEQ ID NO: 3763961 - DNA, 25 bp, Homo sapien
caagcacttagtagccttggaatac

SEQ ID NO: 3763962 - DNA, 25 bp, Homo sapien
caaatctgatgcatattaacatgga

SEQ ID NO: 3763963 - DNA, 25 bp, Homo sapien
caaagtaaaccgctagtgttgatgg

SEQ ID NO: 3763964 - DNA, 25 bp, Homo sapien
caatgtacagttgagaaaagtgaga

SEQ ID NO: 3763965 - DNA, 25 bp, Homo sapien
catataaatgatcaatcattgtaca

SEQ ID NO: 3763966 - DNA, 25 bp, Homo sapien
gctaaaggaatgactagtaagcatt

SEQ ID NO: 3763967 - DNA, 25 bp, Homo sapien
tgctaaaggaatgactagtaagcat

SEQ ID NO: 3763968 - DNA, 25 bp, Homo sapien
aatgatcaatcattgtacatctttc

SEQ ID NO: 3763969 - DNA, 25 bp, Homo sapien
tccctcactgggagtccattccaag

SEQ ID NO: 3763970 - DNA, 25 bp, Homo sapien
ttttggctgctagaaactattccct

SEQ ID NO: 3763971 - DNA, 25 bp, Homo sapien
ttggctgctagaaactattccctca

SEQ ID NO: 3763972 - DNA, 25 bp, Homo sapien
ggctgaatatgaacagctcccatct

SEQ ID NO: 3763973 - DNA, 25 bp, Homo sapien
aaatggaaaataagggtgattagca

SEQ ID NO: 3763974 - DNA, 25 bp, Homo sapien
tcaatattcttcagaaaatggaaaa

SEQ ID NO: 3763975 - DNA, 25 bp, Homo sapien
tggaaaataagggtgattagcagca

SEQ ID NO: 3763976 - DNA, 25 bp, Homo sapien
cagaaaatggaaaataagggtgatt

SEQ ID NO: 3763977 - DNA, 25 bp, Homo sapien
ctggagtcaactcaaagtcaaaaat

SEQ ID NO: 3763978 - DNA, 25 bp, Homo sapien
tctggagcgactctgctcaaccttt

SEQ ID NO: 3763979 - DNA, 25 bp, Homo sapien
tggagcgactctgctcaacctttac

SEQ ID NO: 3763980 - DNA, 25 bp, Homo sapien
ctggagcgactctgctcaaccttta

SEQ ID NO: 3763981 - DNA, 25 bp, Homo sapien
aagagatgtgggcagtcgggatcca

SEQ ID NO: 3763982 - DNA, 25 bp, Homo sapien
ggcctgggcttcgactgtgtttctt

SEQ ID NO: 3763983 - DNA, 25 bp, Homo sapien
gagatgtgggcagtcgggatccacc

SEQ ID NO: 3763984 - DNA, 25 bp, Homo sapien
gggcttcgactgtgtttcttggcaa

SEQ ID NO: 3763985 - DNA, 25 bp, Homo sapien
ctgtgggtctctttgggatcccagg

SEQ ID NO: 3763986 - DNA, 25 bp, Homo sapien
gaccaaaaggtgtcacaatatatga

SEQ ID NO: 3763987 - DNA, 25 bp, Homo sapien
tatatgagccaataaccacatgcaa

SEQ ID NO: 3763988 - DNA, 25 bp, Homo sapien
tttttcaagaccaaaaggtgtcaca

SEQ ID NO: 3763989 - DNA, 25 bp, Homo sapien
ggtgtcacaatatatgagccaataa

SEQ ID NO: 3763990 - DNA, 25 bp, Homo sapien
agttccagcagcttgtgtttgtctc

SEQ ID NO: 3763991 - DNA, 25 bp, Homo sapien
ttccagcagcttgtgtttgtctcct

SEQ ID NO: 3763992 - DNA, 25 bp, Homo sapien
atgagttccagcagcttgtgtttgt

SEQ ID NO: 3763993 - DNA, 25 bp, Homo sapien
ggcttgttgaggatgagttccagca

SEQ ID NO: 3763994 - DNA, 25 bp, Homo sapien
tacacagtgctgcctggtgtctgca

SEQ ID NO: 3763995 - DNA, 25 bp, Homo sapien
gcctggtgtctgcagcagaacatac

SEQ ID NO: 3763996 - DNA, 25 bp, Homo sapien
tgctgcctggtgtctgcagcagaac

SEQ ID NO: 3763997 - DNA, 25 bp, Homo sapien
gctgcctggtgtctgcagcagaaca

SEQ ID NO: 3763998 - DNA, 25 bp, Homo sapien
ccaagtgtcacaaagctccacagtt

SEQ ID NO: 3763999 - DNA, 25 bp, Homo sapien
tctgcccgaaagaaagtagcccaaa

SEQ ID NO: 3764000 - DNA, 25 bp, Homo sapien
tgaagagatctacatagtccggtcc

SEQ ID NO: 3764001 - DNA, 25 bp, Homo sapien
tctagggccgggtgaaccaattctg

SEQ ID NO: 3764002 - DNA, 25 bp, Homo sapien
tcagtgacctttctagggccgggtg

SEQ ID NO: 3764003 - DNA, 25 bp, Homo sapien
caaaaatggattataatttcacaca

SEQ ID NO: 3764004 - DNA, 25 bp, Homo sapien
acaaaaatggattataatttcacac

SEQ ID NO: 3764005 - DNA, 25 bp, Homo sapien
taagtatgctgaatcaatatggcgg

SEQ ID NO: 3764006 - DNA, 25 bp, Homo sapien
ttgacggtaccatcagcgatcttct

SEQ ID NO: 3764007 - DNA, 25 bp, Homo sapien
tatggcggaagcctacgtcaatagc

SEQ ID NO: 3764008 - DNA, 25 bp, Homo sapien
aatagccactttggtggcctcggca

SEQ ID NO: 3764009 - DNA, 25 bp, Homo sapien
gaatggctttgcttcagatccgtca

SEQ ID NO: 3764010 - DNA, 25 bp, Homo sapien
gagcataagtgccaaatcccagcac

SEQ ID NO: 3764011 - DNA, 25 bp, Homo sapien
gaagggtccatcattcagcctcact

SEQ ID NO: 3764012 - DNA, 25 bp, Homo sapien
aaatcccagcactggcatgaagggt

SEQ ID NO: 3764013 - DNA, 25 bp, Homo sapien
ggagggcacccatccaggagaaata

SEQ ID NO: 3764014 - DNA, 25 bp, Homo sapien
catgagccatattgacaggatgacc

SEQ ID NO: 3764015 - DNA, 25 bp, Homo sapien
tccagcatcgcaagaatgggagctc

SEQ ID NO: 3764016 - DNA, 25 bp, Homo sapien
tgtgtgcccagtatcagcagtgacc

SEQ ID NO: 3764017 - DNA, 25 bp, Homo sapien
gaaaccacaaatcaatatcggcagg

SEQ ID NO: 3764018 - DNA, 25 bp, Homo sapien
ggactttcacacttagcatgactca

SEQ ID NO: 3764019 - DNA, 25 bp, Homo sapien
tccccaagatgtgaataattagaag

SEQ ID NO: 3764020 - DNA, 25 bp, Homo sapien
tccacctcaatgttcctagactaag

SEQ ID NO: 3764021 - DNA, 25 bp, Homo sapien
cactgccaggcctaccttacaaaag

SEQ ID NO: 3764022 - DNA, 25 bp, Homo sapien
tcactgccaggcctaccttacaaaa

SEQ ID NO: 3764023 - DNA, 25 bp, Homo sapien
gtcactgccaggcctaccttacaaa

SEQ ID NO: 3764024 - DNA, 25 bp, Homo sapien
gcaacagcttccatccctccagtca

SEQ ID NO: 3764025 - DNA, 25 bp, Homo sapien
agcaacagcttccatccctccagtc

SEQ ID NO: 3764026 - DNA, 25 bp, Homo sapien
acaagcggccatgtgtgaactcccc

SEQ ID NO: 3764027 - DNA, 25 bp, Homo sapien
tccacaagcggccatgtgtgaactc

SEQ ID NO: 3764028 - DNA, 25 bp, Homo sapien
cacaagcggccatgtgtgaactccc

SEQ ID NO: 3764029 - DNA, 25 bp, Homo sapien
ctgtccacaagcggccatgtgtgaa

SEQ ID NO: 3764030 - DNA, 25 bp, Homo sapien
cactgcacggaatattatgctggaa

SEQ ID NO: 3764031 - DNA, 25 bp, Homo sapien
aaaaattgttgagtagactccagag

SEQ ID NO: 3764032 - DNA, 25 bp, Homo sapien
gataatggcataggaattctctcaa

SEQ ID NO: 3764033 - DNA, 25 bp, Homo sapien
tatacagatgtaataaccttacttt

SEQ ID NO: 3764034 - DNA, 25 bp, Homo sapien
tagatatgatgtcgatgcctcctga

SEQ ID NO: 3764035 - DNA, 25 bp, Homo sapien
gaaatgccaatagtcatctgaacct

SEQ ID NO: 3764036 - DNA, 25 bp, Homo sapien
gcaagttcaattctagactactgca

SEQ ID NO: 3764037 - DNA, 25 bp, Homo sapien
ctgtggtggctatactaggaccagg

SEQ ID NO: 3764038 - DNA, 25 bp, Homo sapien
cgaagatccggagaaattccagagg

SEQ ID NO: 3764039 - DNA, 25 bp, Homo sapien
gaggatcttaacttggtggaggcca

SEQ ID NO: 3764040 - DNA, 25 bp, Homo sapien
taagagtcttgcctcgaagatccgg

SEQ ID NO: 3764041 - DNA, 25 bp, Homo sapien
gggacacctcagtcactagcactga

SEQ ID NO: 3764042 - DNA, 25 bp, Homo sapien
tcctctggagtcaactcaaagtcaa

SEQ ID NO: 3764043 - DNA, 25 bp, Homo sapien
ctctggagtcaactcaaagtcaaaa

SEQ ID NO: 3764044 - DNA, 25 bp, Homo sapien
ctggagtcaactcaaagtcaaaaac

SEQ ID NO: 3764045 - DNA, 25 bp, Homo sapien
tctggagtcaactcaaagtcaaaaa

SEQ ID NO: 3764046 - DNA, 25 bp, Homo sapien
accacccccccgctgcagctcatag

SEQ ID NO: 3764047 - DNA, 25 bp, Homo sapien
ctcttctcagagaagctcttggcca

SEQ ID NO: 3764048 - DNA, 25 bp, Homo sapien
tcttctcagagaagctcttggccag

SEQ ID NO: 3764049 - DNA, 25 bp, Homo sapien
cgctgcagctcatagcacagggcaa

SEQ ID NO: 3764050 - DNA, 25 bp, Homo sapien
gagatatgggctatctgggtccatc

SEQ ID NO: 3764051 - DNA, 25 bp, Homo sapien
ctggcctgggcttctattgtatttc

SEQ ID NO: 3764052 - DNA, 25 bp, Homo sapien
ggctcctctaagagatatgggctat

SEQ ID NO: 3764053 - DNA, 25 bp, Homo sapien
aatggatttcaaggttggctcctct

SEQ ID NO: 3764054 - DNA, 25 bp, Homo sapien
tgggtctctgtgagatgccagggcc

SEQ ID NO: 3764055 - DNA, 25 bp, Homo sapien
ttgggtctctgtgagatgccagggc

SEQ ID NO: 3764056 - DNA, 25 bp, Homo sapien
ggtctctgtgagatgccagggccct

SEQ ID NO: 3764057 - DNA, 25 bp, Homo sapien
gggtctctgtgagatgccagggccc

SEQ ID NO: 3764058 - DNA, 25 bp, Homo sapien
tagttgaggtaagggtgacattcca

SEQ ID NO: 3764059 - DNA, 25 bp, Homo sapien
agttgaggtaagggtgacattccac

SEQ ID NO: 3764060 - DNA, 25 bp, Homo sapien
ctagttgaggtaagggtgacattcc

SEQ ID NO: 3764061 - DNA, 25 bp, Homo sapien
tttgtgattgaaattggacaccccg

SEQ ID NO: 3764062 - DNA, 25 bp, Homo sapien
gtttgtgattgaaattggacacccc

SEQ ID NO: 3764063 - DNA, 25 bp, Homo sapien
ttgtgattgaaattggacaccccga

SEQ ID NO: 3764064 - DNA, 25 bp, Homo sapien
ctgcttctttgcacttctccagggc

SEQ ID NO: 3764065 - DNA, 25 bp, Homo sapien
acctggtgtctgcagcagaacatac

SEQ ID NO: 3764066 - DNA, 25 bp, Homo sapien
gccacctggtgtctgcagcagaaca

SEQ ID NO: 3764067 - DNA, 25 bp, Homo sapien
gtgccacctggtgtctgcagcagaa

SEQ ID NO: 3764068 - DNA, 25 bp, Homo sapien
cacctggtgtctgcagcagaacata

SEQ ID NO: 3764069 - DNA, 25 bp, Homo sapien
ctcccatgtgtcacgaagatccaca

SEQ ID NO: 3764070 - DNA, 25 bp, Homo sapien
ccatgtgtcacgaagatccacagta

SEQ ID NO: 3764071 - DNA, 25 bp, Homo sapien
atgtgtcacgaagatccacagtatc

SEQ ID NO: 3764072 - DNA, 25 bp, Homo sapien
tcccatgtgtcacgaagatccacag

SEQ ID NO: 3764073 - DNA, 25 bp, Homo sapien
caatggaggtgctagtaacagtgat

SEQ ID NO: 3764074 - DNA, 25 bp, Homo sapien
tgctagtaacagtgatgaaactgtt

SEQ ID NO: 3764075 - DNA, 25 bp, Homo sapien
gaaactgtttggggcataagaagga

SEQ ID NO: 3764076 - DNA, 25 bp, Homo sapien
gaggtgctagtaacagtgatgaaac

SEQ ID NO: 3764077 - DNA, 25 bp, Homo sapien
cagggctgggcgaactaattctggt

SEQ ID NO: 3764078 - DNA, 25 bp, Homo sapien
gaagagatcgacatagtccagttga

SEQ ID NO: 3764079 - DNA, 25 bp, Homo sapien
cttcatagccaatggattgtggata

SEQ ID NO: 3764080 - DNA, 25 bp, Homo sapien
cttccagggctgggcgaactaattc

SEQ ID NO: 3764081 - DNA, 25 bp, Homo sapien
gggccatcagcaatcttctctcgaa

SEQ ID NO: 3764082 - DNA, 25 bp, Homo sapien
tcagcaatcttctctcgaatggcct

SEQ ID NO: 3764083 - DNA, 25 bp, Homo sapien
acagggccatcagcaatcttctctc

SEQ ID NO: 3764084 - DNA, 25 bp, Homo sapien
tcttctctcgaatggcctttccgac

SEQ ID NO: 3764085 - DNA, 25 bp, Homo sapien
ctcgttttggtagaagaacgccgca

SEQ ID NO: 3764086 - DNA, 25 bp, Homo sapien
gcctgcatcaatagccacttcggtg

SEQ ID NO: 3764087 - DNA, 25 bp, Homo sapien
tagccacttcggtggcttcaccagc

SEQ ID NO: 3764088 - DNA, 25 bp, Homo sapien
cgcatcaatgtgacggaagcctgca

SEQ ID NO: 3764089 - DNA, 25 bp, Homo sapien
tgccaaatcccagcatcggcatgac

SEQ ID NO: 3764090 - DNA, 25 bp, Homo sapien
cagcatcggcatgacatgtccatca

SEQ ID NO: 3764091 - DNA, 25 bp, Homo sapien
tcggcatgacatgtccatcattcag

SEQ ID NO: 3764092 - DNA, 25 bp, Homo sapien
aaatcccagcatcggcatgacatgt

SEQ ID NO: 3764093 - DNA, 25 bp, Homo sapien
tgatttaggttcaccatgaacatgc

SEQ ID NO: 3764094 - DNA, 25 bp, Homo sapien
tttaggttcaccatgaacatgcact

SEQ ID NO: 3764095 - DNA, 25 bp, Homo sapien
caaatgatttaggttcaccatgaac

SEQ ID NO: 3764096 - DNA, 25 bp, Homo sapien
aggttcaccatgaacatgcactgtg

SEQ ID NO: 3764097 - DNA, 25 bp, Homo sapien
tgctctgagtaacagcggtgtactc

SEQ ID NO: 3764098 - DNA, 25 bp, Homo sapien
gcggtgtactcctcagagaaatcct

SEQ ID NO: 3764099 - DNA, 25 bp, Homo sapien
taacagcggtgtactcctcagagaa

SEQ ID NO: 3764100 - DNA, 25 bp, Homo sapien
tgagtaacagcggtgtactcctcag

SEQ ID NO: 3764101 - DNA, 25 bp, Homo sapien
gcatataatgcctaatcagatccag

SEQ ID NO: 3764102 - DNA, 25 bp, Homo sapien
tttagagcaagacagctagtaagcc

SEQ ID NO: 3764103 - DNA, 25 bp, Homo sapien
aaatccctggtgttgtctctacatg

SEQ ID NO: 3764104 - DNA, 25 bp, Homo sapien
ccttttgagaacatgttgggccaac

SEQ ID NO: 3764105 - DNA, 25 bp, Homo sapien
tttgcccagttttagtctactgata

SEQ ID NO: 3764106 - DNA, 25 bp, Homo sapien
gtctactgataatccccttgctggg

SEQ ID NO: 3764107 - DNA, 25 bp, Homo sapien
ttgctggggcgaaagtctacacgga

SEQ ID NO: 3764108 - DNA, 25 bp, Homo sapien
tacacggacagttgtgtcatcagcc

SEQ ID NO: 3764109 - DNA, 25 bp, Homo sapien
ttttgcagttactacttcggtcaga

SEQ ID NO: 3764110 - DNA, 25 bp, Homo sapien
cttttgcagttactacttcggtcag

SEQ ID NO: 3764111 - DNA, 25 bp, Homo sapien
tgcagttactacttcggtcagaagt

SEQ ID NO: 3764112 - DNA, 25 bp, Homo sapien
atgccttttgcagttactacttcgg

SEQ ID NO: 3764113 - DNA, 25 bp, Homo sapien
gaagcggatattcacagcagagaac

SEQ ID NO: 3764114 - DNA, 25 bp, Homo sapien
cacgggatgtcttgtgaagcggata

SEQ ID NO: 3764115 - DNA, 25 bp, Homo sapien
gcatctctcaacacccacgggatgt

SEQ ID NO: 3764116 - DNA, 25 bp, Homo sapien
catgcccaggagtaccgggattcca

SEQ ID NO: 3764117 - DNA, 25 bp, Homo sapien
gcatggcaaggtcccagtgcctgga

SEQ ID NO: 3764118 - DNA, 25 bp, Homo sapien
ggcaaggtcccagtgcctggagtcc

SEQ ID NO: 3764119 - DNA, 25 bp, Homo sapien
atggcaaggtcccagtgcctggagt

SEQ ID NO: 3764120 - DNA, 25 bp, Homo sapien
ctgcatggcaaggtcccagtgcctg

SEQ ID NO: 3764121 - DNA, 25 bp, Homo sapien
gctgtgttcatgtctaagatggctt

SEQ ID NO: 3764122 - DNA, 25 bp, Homo sapien
tcacctgctgtgttcatgtctaaga

SEQ ID NO: 3764123 - DNA, 25 bp, Homo sapien
tcacctttatcacctgctgtgttca

SEQ ID NO: 3764124 - DNA, 25 bp, Homo sapien
ctgctgtgttcatgtctaagatggc

SEQ ID NO: 3764125 - DNA, 25 bp, Homo sapien
agcacaggttccaggtgaagcctga

SEQ ID NO: 3764126 - DNA, 25 bp, Homo sapien
gcacaggttccaggtgaagcctgac

SEQ ID NO: 3764127 - DNA, 25 bp, Homo sapien
ccagctgtgtggtacgagaagtagc

SEQ ID NO: 3764128 - DNA, 25 bp, Homo sapien
gtaacagagctggtcaccaaggcgc

SEQ ID NO: 3764129 - DNA, 25 bp, Homo sapien
gaagtagctgtgcttgtaacagagc

SEQ ID NO: 3764130 - DNA, 25 bp, Homo sapien
tgcagccttaggaaccgcagtctct

SEQ ID NO: 3764131 - DNA, 25 bp, Homo sapien
tccaaaatcaacagaaggcctcaga

SEQ ID NO: 3764132 - DNA, 25 bp, Homo sapien
cctcagaattctcaggggcagagtt

SEQ ID NO: 3764133 - DNA, 25 bp, Homo sapien
agacaggcaggtccaaatttccctc

SEQ ID NO: 3764134 - DNA, 25 bp, Homo sapien
ggccagggttagtctctttgctgtt

SEQ ID NO: 3764135 - DNA, 25 bp, Homo sapien
gatgagtgttcaagcgccttttctg

SEQ ID NO: 3764136 - DNA, 25 bp, Homo sapien
cgagatgagtgttcaagcgcctttt

SEQ ID NO: 3764137 - DNA, 25 bp, Homo sapien
gtgttcaagcgccttttctgcaggg

SEQ ID NO: 3764138 - DNA, 25 bp, Homo sapien
aagcgccttttctgcagggagcttg

SEQ ID NO: 3764139 - DNA, 25 bp, Homo sapien
ctggtggcttggaaaggttgtttca

SEQ ID NO: 3764140 - DNA, 25 bp, Homo sapien
gctttttcagactggtggcttggaa

SEQ ID NO: 3764141 - DNA, 25 bp, Homo sapien
catggcgcagctcacattgacccaa

SEQ ID NO: 3764142 - DNA, 25 bp, Homo sapien
cctgtttccagcatcggctttttca

SEQ ID NO: 3764143 - DNA, 25 bp, Homo sapien
tacccactaggcatataacggcttg

SEQ ID NO: 3764144 - DNA, 25 bp, Homo sapien
gctgacttgtaccagtagaccagga

SEQ ID NO: 3764145 - DNA, 25 bp, Homo sapien
tgtggaacctagagtcttgcctgat

SEQ ID NO: 3764146 - DNA, 25 bp, Homo sapien
gactcagcagttcaaaggactctaa

SEQ ID NO: 3764147 - DNA, 25 bp, Homo sapien
cctctatagagtaggcagcaggcca

SEQ ID NO: 3764148 - DNA, 25 bp, Homo sapien
caattaggtctacattcaagggccc

SEQ ID NO: 3764149 - DNA, 25 bp, Homo sapien
tctcggataaggtaccaggttggtc

SEQ ID NO: 3764150 - DNA, 25 bp, Homo sapien
gaaatgctctcttggcgtacatgag

SEQ ID NO: 3764151 - DNA, 25 bp, Homo sapien
tcctgtgagcctctccattaagaga

SEQ ID NO: 3764152 - DNA, 25 bp, Homo sapien
tgggtagaccgagaactccagctta

SEQ ID NO: 3764153 - DNA, 25 bp, Homo sapien
gacagagttataaggctctaccaca

SEQ ID NO: 3764154 - DNA, 25 bp, Homo sapien
gagagacgtaaaccctgaaccagtg

SEQ ID NO: 3764155 - DNA, 25 bp, Homo sapien
gaaagtaaatgagatgtgagaattc

SEQ ID NO: 3764156 - DNA, 25 bp, Homo sapien
tcctttccgctaaggagctgctcgg

SEQ ID NO: 3764157 - DNA, 25 bp, Homo sapien
tctccagcacaaggtcgatgacctc

SEQ ID NO: 3764158 - DNA, 25 bp, Homo sapien
gtaattgttagcagcatcctccttt

SEQ ID NO: 3764159 - DNA, 25 bp, Homo sapien
cagagtaacggcctcgcgcgtaatt

SEQ ID NO: 3764160 - DNA, 25 bp, Homo sapien
aagagtgctctaggcacatgcttcc

SEQ ID NO: 3764161 - DNA, 25 bp, Homo sapien
ggctccaagtccacgaagagtgctc

SEQ ID NO: 3764162 - DNA, 25 bp, Homo sapien
aagtccacgaagagtgctctaggca

SEQ ID NO: 3764163 - DNA, 25 bp, Homo sapien
cagaagaaggtatcgaaagatgcat

SEQ ID NO: 3764164 - DNA, 25 bp, Homo sapien
aacaacgccatttggctggattcca

SEQ ID NO: 3764165 - DNA, 25 bp, Homo sapien
accgatgtggatggaaaggcactcc

SEQ ID NO: 3764166 - DNA, 25 bp, Homo sapien
agcaggcgtccccaatctggatgcc

SEQ ID NO: 3764167 - DNA, 25 bp, Homo sapien
tctggatgccagcttgaccgatgtg

SEQ ID NO: 3764168 - DNA, 25 bp, Homo sapien
tgcccttcctgccctgtagtaatga

SEQ ID NO: 3764169 - DNA, 25 bp, Homo sapien
gctgatgagaacgtgcccttcctgc

SEQ ID NO: 3764170 - DNA, 25 bp, Homo sapien
tgatgagaacgtgcccttcctgccc

SEQ ID NO: 3764171 - DNA, 25 bp, Homo sapien
cccttcctgccctgtagtaatgact

SEQ ID NO: 3764172 - DNA, 25 bp, Homo sapien
acaggcgctttctgcctggcagagg

SEQ ID NO: 3764173 - DNA, 25 bp, Homo sapien
tcaaatccccggatgacggcggtgg

SEQ ID NO: 3764174 - DNA, 25 bp, Homo sapien
gctgcagtccgctgacaggcgcttt

SEQ ID NO: 3764175 - DNA, 25 bp, Homo sapien
gaggctggcgggcatcgtgcccgtc

SEQ ID NO: 3764176 - DNA, 25 bp, Homo sapien
aattacaccaacagctcatttggtt

SEQ ID NO: 3764177 - DNA, 25 bp, Homo sapien
tcattctacagaggattcttgttca

SEQ ID NO: 3764178 - DNA, 25 bp, Homo sapien
ttatcttataattgtgtgacagaat

SEQ ID NO: 3764179 - DNA, 25 bp, Homo sapien
aattgtgtgacagaattatgtagaa

SEQ ID NO: 3764180 - DNA, 25 bp, Homo sapien
catttcagtaactgtgtgagtcacc

SEQ ID NO: 3764181 - DNA, 25 bp, Homo sapien
tgagtcacctactggtatgcctcca

SEQ ID NO: 3764182 - DNA, 25 bp, Homo sapien
tagacataaagaatagacctgctag

SEQ ID NO: 3764183 - DNA, 25 bp, Homo sapien
caagtatgccacaattgtcagaagc

SEQ ID NO: 3764184 - DNA, 25 bp, Homo sapien
caatatatgaaatgtcccgaggtga

SEQ ID NO: 3764185 - DNA, 25 bp, Homo sapien
tgacacatttctcccctctgacagg

SEQ ID NO: 3764186 - DNA, 25 bp, Homo sapien
tctgcatgaaggttagatgtgccac

SEQ ID NO: 3764187 - DNA, 25 bp, Homo sapien
taggagaagcaaccaagcctgatgg

SEQ ID NO: 3764188 - DNA, 25 bp, Homo sapien
tgcactcggtcataacaggaacaca

SEQ ID NO: 3764189 - DNA, 25 bp, Homo sapien
ggagtttcctagatatccctcgaag

SEQ ID NO: 3764190 - DNA, 25 bp, Homo sapien
cagttaccgcgcttgaatgcctaca

SEQ ID NO: 3764191 - DNA, 25 bp, Homo sapien
tcgaagtcgcctagtcaaataccct

SEQ ID NO: 3764192 - DNA, 25 bp, Homo sapien
gaactaagtgcagtcacggaatggt

SEQ ID NO: 3764193 - DNA, 25 bp, Homo sapien
gaaaactgtggtatacaacgctagt

SEQ ID NO: 3764194 - DNA, 25 bp, Homo sapien
cataaatcaacttgttaggccaggg

SEQ ID NO: 3764195 - DNA, 25 bp, Homo sapien
taaaagtacctgctagaactaagtg

SEQ ID NO: 3764196 - DNA, 25 bp, Homo sapien
ttatttagaacatggtaagcctggt

SEQ ID NO: 3764197 - DNA, 25 bp, Homo sapien
gataggagaagctcaacttgagggc

SEQ ID NO: 3764198 - DNA, 25 bp, Homo sapien
cgtgtagtaagttgtagaaggctcg

SEQ ID NO: 3764199 - DNA, 25 bp, Homo sapien
tggcacccaaaacctacatggaatg

SEQ ID NO: 3764200 - DNA, 25 bp, Homo sapien
gatgaagtccaagctcacgtcctgg

SEQ ID NO: 3764201 - DNA, 25 bp, Homo sapien
tatgctgcgaactcggtgacaagac

SEQ ID NO: 3764202 - DNA, 25 bp, Homo sapien
ttttattagagatcgagtcagcgtc

SEQ ID NO: 3764203 - DNA, 25 bp, Homo sapien
tcacttgtgcccatggagcgctagg

SEQ ID NO: 3764204 - DNA, 25 bp, Homo sapien
atttatgttacatctcctgggccca

SEQ ID NO: 3764205 - DNA, 25 bp, Homo sapien
gactcacagtaaggagaagcaccca

SEQ ID NO: 3764206 - DNA, 25 bp, Homo sapien
ggaatccactgacgagggacctgac

SEQ ID NO: 3764207 - DNA, 25 bp, Homo sapien
gggacctgacccactgtctttgcat

SEQ ID NO: 3764208 - DNA, 25 bp, Homo sapien
gacttcttcctaggccaaaggtcat

SEQ ID NO: 3764209 - DNA, 25 bp, Homo sapien
tcttcctaggccaaaggtcatctgg

SEQ ID NO: 3764210 - DNA, 25 bp, Homo sapien
ttgacttcttcctaggccaaaggtc

SEQ ID NO: 3764211 - DNA, 25 bp, Homo sapien
cttcttcctaggccaaaggtcatct

SEQ ID NO: 3764212 - DNA, 25 bp, Homo sapien
caacctgcaggcctcccaacagtgg

SEQ ID NO: 3764213 - DNA, 25 bp, Homo sapien
tataaggctggcgttcgcctccagg

SEQ ID NO: 3764214 - DNA, 25 bp, Homo sapien
gcctccagggttctccccgacactg

SEQ ID NO: 3764215 - DNA, 25 bp, Homo sapien
tcagacctcgccttgtccaacctgc

SEQ ID NO: 3764216 - DNA, 25 bp, Homo sapien
tggctcacacggcacattctccaga

SEQ ID NO: 3764217 - DNA, 25 bp, Homo sapien
agtgccgggtacagtcagagttgcc

SEQ ID NO: 3764218 - DNA, 25 bp, Homo sapien
gcctcttaatcttggccgcacagca

SEQ ID NO: 3764219 - DNA, 25 bp, Homo sapien
tgccaggacagtttggagcagtgcc

SEQ ID NO: 3764220 - DNA, 25 bp, Homo sapien
ctgttgggaatctgttcttgatgag

SEQ ID NO: 3764221 - DNA, 25 bp, Homo sapien
tgggaatctgttcttgatgagtttt

SEQ ID NO: 3764222 - DNA, 25 bp, Homo sapien
gttgggaatctgttcttgatgagtt

SEQ ID NO: 3764223 - DNA, 25 bp, Homo sapien
ggaatctgttcttgatgagttttgt

SEQ ID NO: 3764224 - DNA, 25 bp, Homo sapien
taggaatgacgtaagaggtgcactc

SEQ ID NO: 3764225 - DNA, 25 bp, Homo sapien
gagtgcagttctcccctgctgaatg

SEQ ID NO: 3764226 - DNA, 25 bp, Homo sapien
tgaggatggagaataggccttgtcc

SEQ ID NO: 3764227 - DNA, 25 bp, Homo sapien
taacagaaggattgggtcaccaggc

SEQ ID NO: 3764228 - DNA, 25 bp, Homo sapien
ccttgtggacccagacgtggagcat

SEQ ID NO: 3764229 - DNA, 25 bp, Homo sapien
gtgttctgagctgagaccgggcacc

SEQ ID NO: 3764230 - DNA, 25 bp, Homo sapien
tcagagtcggcagagaggccatgtc

SEQ ID NO: 3764231 - DNA, 25 bp, Homo sapien
caggaagcaccccttgaaggcagtc

SEQ ID NO: 3764232 - DNA, 25 bp, Homo sapien
agtcctttatttagatcaatgcggg

SEQ ID NO: 3764233 - DNA, 25 bp, Homo sapien
ccgagggcgccgcatccaggccccg

SEQ ID NO: 3764234 - DNA, 25 bp, Homo sapien
gaactcggcagtcctttatttagat

SEQ ID NO: 3764235 - DNA, 25 bp, Homo sapien
cggcagtcctttatttagatcaatg

SEQ ID NO: 3764236 - DNA, 25 bp, Homo sapien
tcgccatcctggtcgaaggcgcgga

SEQ ID NO: 3764237 - DNA, 25 bp, Homo sapien
tccacggtgatgtggccgtcgccat

SEQ ID NO: 3764238 - DNA, 25 bp, Homo sapien
ggcctccgagaggttcttgcccgtg

SEQ ID NO: 3764239 - DNA, 25 bp, Homo sapien
gagtttccttagctgggcctccgag

SEQ ID NO: 3764240 - DNA, 25 bp, Homo sapien
tttccatccgtgtcaaccgcggaga

SEQ ID NO: 3764241 - DNA, 25 bp, Homo sapien
catccgtgtcaaccgcggagaaagc

SEQ ID NO: 3764242 - DNA, 25 bp, Homo sapien
cgtttccatccgtgtcaaccgcgga

SEQ ID NO: 3764243 - DNA, 25 bp, Homo sapien
ggtgccgtttccatccgtgtcaacc

SEQ ID NO: 3764244 - DNA, 25 bp, Homo sapien
cagagtgcaggcagccgcagggatc

SEQ ID NO: 3764245 - DNA, 25 bp, Homo sapien
gctgcccaccggccctcaacctgct

SEQ ID NO: 3764246 - DNA, 25 bp, Homo sapien
tctcctgcacctcgcggagcctccg

SEQ ID NO: 3764247 - DNA, 25 bp, Homo sapien
cctgcgtctcctgcacctcgcggag

SEQ ID NO: 3764248 - DNA, 25 bp, Homo sapien
caggctgtctcatcacgagacagga

SEQ ID NO: 3764249 - DNA, 25 bp, Homo sapien
caggatgatggtcactattctcacg

SEQ ID NO: 3764250 - DNA, 25 bp, Homo sapien
catcacgagacaggatgatggtcac

SEQ ID NO: 3764251 - DNA, 25 bp, Homo sapien
tcactattctcacgatgtgcgtttt

SEQ ID NO: 3764252 - DNA, 25 bp, Homo sapien
tggcacctgtgctgtctctgcagtg

SEQ ID NO: 3764253 - DNA, 25 bp, Homo sapien
ctgtctctgcagtgttggcacagcc

SEQ ID NO: 3764254 - DNA, 25 bp, Homo sapien
ctctgcagtgttggcacagccctga

SEQ ID NO: 3764255 - DNA, 25 bp, Homo sapien
tctctgcagtgttggcacagccctg

SEQ ID NO: 3764256 - DNA, 25 bp, Homo sapien
ggaaatgagaagggcctgtgtggag

SEQ ID NO: 3764257 - DNA, 25 bp, Homo sapien
ccccagggaaatgagaagggcctgt

SEQ ID NO: 3764258 - DNA, 25 bp, Homo sapien
tgagaagggcctgtgtggagggtgt

SEQ ID NO: 3764259 - DNA, 25 bp, Homo sapien
gaagggcctgtgtggagggtgtgat

SEQ ID NO: 3764260 - DNA, 25 bp, Homo sapien
tattttgaagcgtgaagatggccgt

SEQ ID NO: 3764261 - DNA, 25 bp, Homo sapien
tgccgatgtatttcaggattcagga

SEQ ID NO: 3764262 - DNA, 25 bp, Homo sapien
ggttctgagggtggtgctccggact

SEQ ID NO: 3764263 - DNA, 25 bp, Homo sapien
ggaccatattttgaagcgtgaagat

SEQ ID NO: 3764264 - DNA, 25 bp, Homo sapien
gccacccttgaattggtcggggctg

SEQ ID NO: 3764265 - DNA, 25 bp, Homo sapien
ccttgaattggtcggggctggtcac

SEQ ID NO: 3764266 - DNA, 25 bp, Homo sapien
cacccttgaattggtcggggctggt

SEQ ID NO: 3764267 - DNA, 25 bp, Homo sapien
ccctgccacccttgaattggtcggg

SEQ ID NO: 3764268 - DNA, 25 bp, Homo sapien
gttcagctcctgatcgcaaccaggg

SEQ ID NO: 3764269 - DNA, 25 bp, Homo sapien
caaccaggggtcgacagctccttgg

SEQ ID NO: 3764270 - DNA, 25 bp, Homo sapien
ttcctcgggcacgttcagctcctga

SEQ ID NO: 3764271 - DNA, 25 bp, Homo sapien
gggcacgttcagctcctgatcgcaa

SEQ ID NO: 3764272 - DNA, 25 bp, Homo sapien
ctcggtgcccaaactgggcagaacc

SEQ ID NO: 3764273 - DNA, 25 bp, Homo sapien
ggtgcccaaactgggcagaaccaca

SEQ ID NO: 3764274 - DNA, 25 bp, Homo sapien
tcgaagccaccgctgccccggttac

SEQ ID NO: 3764275 - DNA, 25 bp, Homo sapien
agaaccacatcgaagccaccgctgc

SEQ ID NO: 3764276 - DNA, 25 bp, Homo sapien
taaaaagagagctgcgcttttcccc

SEQ ID NO: 3764277 - DNA, 25 bp, Homo sapien
tctggaacattctgcaacaagctgg

SEQ ID NO: 3764278 - DNA, 25 bp, Homo sapien
tcctcgagccccacttttgttacag

SEQ ID NO: 3764279 - DNA, 25 bp, Homo sapien
cagtagccttactcttctcgaagag

SEQ ID NO: 3764280 - DNA, 25 bp, Homo sapien
cccgcagggtgagatctcacacaga

SEQ ID NO: 3764281 - DNA, 25 bp, Homo sapien
cagggtgagatctcacacagaacct

SEQ ID NO: 3764282 - DNA, 25 bp, Homo sapien
gtgtgattggaccaaccccgagcct

SEQ ID NO: 3764283 - DNA, 25 bp, Homo sapien
caggggtgtgattggaccaaccccg

SEQ ID NO: 3764284 - DNA, 25 bp, Homo sapien
tggcaggaaacacggcccgtgaact

SEQ ID NO: 3764285 - DNA, 25 bp, Homo sapien
aactttgccgacaccaccctgaggt

SEQ ID NO: 3764286 - DNA, 25 bp, Homo sapien
gaactccttggcagcggaactttgc

SEQ ID NO: 3764287 - DNA, 25 bp, Homo sapien
aggcgctgcgctgacacaaagtggc

SEQ ID NO: 3764288 - DNA, 25 bp, Homo sapien
gcacctcggtggaattcatactacg

SEQ ID NO: 3764289 - DNA, 25 bp, Homo sapien
tcatactacggttcccatggagagc

SEQ ID NO: 3764290 - DNA, 25 bp, Homo sapien
cacaaatgtggctgccttcgggtct

SEQ ID NO: 3764291 - DNA, 25 bp, Homo sapien
gcggatccgaaatgcacgtcaaatc

SEQ ID NO: 3764292 - DNA, 25 bp, Homo sapien
ctggagccaggaatggcaggagaat

SEQ ID NO: 3764293 - DNA, 25 bp, Homo sapien
ctttgcccccacgaacctctcgaag

SEQ ID NO: 3764294 - DNA, 25 bp, Homo sapien
tcctttgcccccacgaacctctcga

SEQ ID NO: 3764295 - DNA, 25 bp, Homo sapien
ttgcccccacgaacctctcgaagga

SEQ ID NO: 3764296 - DNA, 25 bp, Homo sapien
tgcccccacgaacctctcgaaggac

SEQ ID NO: 3764297 - DNA, 25 bp, Homo sapien
tatcaattgtcaggtcaatccgggc

SEQ ID NO: 3764298 - DNA, 25 bp, Homo sapien
gctcttgcacggcaggatagcctgg

SEQ ID NO: 3764299 - DNA, 25 bp, Homo sapien
gaggcagccgtagaactccactgtg

SEQ ID NO: 3764300 - DNA, 25 bp, Homo sapien
gaggaccgcctctacgtgatggcca

SEQ ID NO: 3764301 - DNA, 25 bp, Homo sapien
tgttcacgtcctccatctccgtttg

SEQ ID NO: 3764302 - DNA, 25 bp, Homo sapien
gcacattggagtgtgaactgcaaaa

SEQ ID NO: 3764303 - DNA, 25 bp, Homo sapien
cagcatatcttgtgcaggccctgca

SEQ ID NO: 3764304 - DNA, 25 bp, Homo sapien
caaaaatcccagatcgacagcatat

SEQ ID NO: 3764305 - DNA, 25 bp, Homo sapien
aagtcgctggtaggaaattttgatg

SEQ ID NO: 3764306 - DNA, 25 bp, Homo sapien
gaaagtcgctggtaggaaattttga

SEQ ID NO: 3764307 - DNA, 25 bp, Homo sapien
gatggaaagtcgctggtaggaaatt

SEQ ID NO: 3764308 - DNA, 25 bp, Homo sapien
ctgtgatggaaagtcgctggtagga

SEQ ID NO: 3764309 - DNA, 25 bp, Homo sapien
tgaacactgcgatgtaccagagggc

SEQ ID NO: 3764310 - DNA, 25 bp, Homo sapien
tgaggcctacacagcacaaatggta

SEQ ID NO: 3764311 - DNA, 25 bp, Homo sapien
tacaagtcatgcgaggaacaccctc

SEQ ID NO: 3764312 - DNA, 25 bp, Homo sapien
aatcctttcgccattggaggcagag

SEQ ID NO: 3764313 - DNA, 25 bp, Homo sapien
gcagcttctggacaagacggtcaaa

SEQ ID NO: 3764314 - DNA, 25 bp, Homo sapien
gatatacgctacgaacaagactgtc

SEQ ID NO: 3764315 - DNA, 25 bp, Homo sapien
ggtgattaaacacgcaaatggaggt

SEQ ID NO: 3764316 - DNA, 25 bp, Homo sapien
gctagctgtaggaatcggaagatct

SEQ ID NO: 3764317 - DNA, 25 bp, Homo sapien
tggtcactctggcagtcaaataggg

SEQ ID NO: 3764318 - DNA, 25 bp, Homo sapien
gaattctaacactcaggcatcaggc

SEQ ID NO: 3764319 - DNA, 25 bp, Homo sapien
caggcaccagtgtacaatcaagagc

SEQ ID NO: 3764320 - DNA, 25 bp, Homo sapien
tggacagagctgtaacctgggccca

SEQ ID NO: 3764321 - DNA, 25 bp, Homo sapien
ctgggagtgaaactgggtcagctgt

SEQ ID NO: 3764322 - DNA, 25 bp, Homo sapien
ttgccccattccttgtccgccaacc

SEQ ID NO: 3764323 - DNA, 25 bp, Homo sapien
gttcctattcatctggaaggaggga

SEQ ID NO: 3764324 - DNA, 25 bp, Homo sapien
tgtccgccaacccaccgtgattcat

SEQ ID NO: 3764325 - DNA, 25 bp, Homo sapien
tgacaaccgtccatctctacccagc

SEQ ID NO: 3764326 - DNA, 25 bp, Homo sapien
gccctgacaaccgtccatctctacc

SEQ ID NO: 3764327 - DNA, 25 bp, Homo sapien
tgtgccctgacaaccgtccatctct

SEQ ID NO: 3764328 - DNA, 25 bp, Homo sapien
cctgacaaccgtccatctctaccca

SEQ ID NO: 3764329 - DNA, 25 bp, Homo sapien
caaggtccctctttggtctgggagg

SEQ ID NO: 3764330 - DNA, 25 bp, Homo sapien
cacagccttttaaggtgacccgagg

SEQ ID NO: 3764331 - DNA, 25 bp, Homo sapien
gaagtttgctgagatcccactccaa

SEQ ID NO: 3764332 - DNA, 25 bp, Homo sapien
tccagggcgatggttgcaggaccat

SEQ ID NO: 3764333 - DNA, 25 bp, Homo sapien
ggccatgtagctggcaccgtggtaa

SEQ ID NO: 3764334 - DNA, 25 bp, Homo sapien
gggccatgtagctggcaccgtggta

SEQ ID NO: 3764335 - DNA, 25 bp, Homo sapien
cgggccatgtagctggcaccgtggt

SEQ ID NO: 3764336 - DNA, 25 bp, Homo sapien
ccgggccatgtagctggcaccgtgg

SEQ ID NO: 3764337 - DNA, 25 bp, Homo sapien
caggatgatcccatgacacacaggt

SEQ ID NO: 3764338 - DNA, 25 bp, Homo sapien
cacagatcctcggtgcaccctggga

SEQ ID NO: 3764339 - DNA, 25 bp, Homo sapien
gatcccatgacacacaggtctcagc

SEQ ID NO: 3764340 - DNA, 25 bp, Homo sapien
cacagccacgtggattttaagccaa

SEQ ID NO: 3764341 - DNA, 25 bp, Homo sapien
agagccatgcacctccgtggcagag

SEQ ID NO: 3764342 - DNA, 25 bp, Homo sapien
gtctacagagccatgcacctccgtg

SEQ ID NO: 3764343 - DNA, 25 bp, Homo sapien
tacagagccatgcacctccgtggca

SEQ ID NO: 3764344 - DNA, 25 bp, Homo sapien
tctacagagccatgcacctccgtgg

SEQ ID NO: 3764345 - DNA, 25 bp, Homo sapien
tgaactttctgaagcccgccaagag

SEQ ID NO: 3764346 - DNA, 25 bp, Homo sapien
caagagcgcactgcgagttccaagt

SEQ ID NO: 3764347 - DNA, 25 bp, Homo sapien
tggaccgcggttccagagaaacgcc

SEQ ID NO: 3764348 - DNA, 25 bp, Homo sapien
gagaaacgcccatgcacataatgtt

SEQ ID NO: 3764349 - DNA, 25 bp, Homo sapien
tgtcctcggcgtgtcctgttttctg

SEQ ID NO: 3764350 - DNA, 25 bp, Homo sapien
cttctatgtcctcggcgtgtcctgt

SEQ ID NO: 3764351 - DNA, 25 bp, Homo sapien
tatgtcctcggcgtgtcctgttttc

SEQ ID NO: 3764352 - DNA, 25 bp, Homo sapien
ggcttctatgtcctcggcgtgtcct

SEQ ID NO: 3764353 - DNA, 25 bp, Homo sapien
caagaaagctggcgccagcttccca

SEQ ID NO: 3764354 - DNA, 25 bp, Homo sapien
gaaagctggcgccagcttcccaggg

SEQ ID NO: 3764355 - DNA, 25 bp, Homo sapien
gtgaaggcagcacccggaaccagca

SEQ ID NO: 3764356 - DNA, 25 bp, Homo sapien
gctggcgccagcttcccagggtgaa

SEQ ID NO: 3764357 - DNA, 25 bp, Homo sapien
ggtgcacctctaaggtcgccttcct

SEQ ID NO: 3764358 - DNA, 25 bp, Homo sapien
ctatctggcaggtgcacctctaagg

SEQ ID NO: 3764359 - DNA, 25 bp, Homo sapien
tctggcaggtgcacctctaaggtcg

SEQ ID NO: 3764360 - DNA, 25 bp, Homo sapien
tctggagcccgggtggtactgggct

SEQ ID NO: 3764361 - DNA, 25 bp, Homo sapien
ctggagggtcatcgtggtagttgcc

SEQ ID NO: 3764362 - DNA, 25 bp, Homo sapien
gacacgggctggagggtcatcgtgg

SEQ ID NO: 3764363 - DNA, 25 bp, Homo sapien
ccctgtccaagtcgctgccccaggt

SEQ ID NO: 3764364 - DNA, 25 bp, Homo sapien
ctgtccaagtcgctgccccaggtct

SEQ ID NO: 3764365 - DNA, 25 bp, Homo sapien
atccagctccctttgactcacttgg

SEQ ID NO: 3764366 - DNA, 25 bp, Homo sapien
tgactcacttgggtggtcgcagccg

SEQ ID NO: 3764367 - DNA, 25 bp, Homo sapien
cgcagccgccggctgtgatttctgg

SEQ ID NO: 3764368 - DNA, 25 bp, Homo sapien
ccgccggctgtgatttctggcccat

SEQ ID NO: 3764369 - DNA, 25 bp, Homo sapien
gggctggatggggaccagactgtga

SEQ ID NO: 3764370 - DNA, 25 bp, Homo sapien
ttcggggactgcgtccagctgcatc

SEQ ID NO: 3764371 - DNA, 25 bp, Homo sapien
cggggactgcgtccagctgcatcac

SEQ ID NO: 3764372 - DNA, 25 bp, Homo sapien
ctggatggggaccagactgtgaagc

SEQ ID NO: 3764373 - DNA, 25 bp, Homo sapien
tccaggcttggacactcaaacaaag

SEQ ID NO: 3764374 - DNA, 25 bp, Homo sapien
caggtccttatcctcggggaccctg

SEQ ID NO: 3764375 - DNA, 25 bp, Homo sapien
ggcttggacactcaaacaaagagct

SEQ ID NO: 3764376 - DNA, 25 bp, Homo sapien
ttggacactcaaacaaagagcttcc

SEQ ID NO: 3764377 - DNA, 25 bp, Homo sapien
gttcaggacaataggcagctgctcc

SEQ ID NO: 3764378 - DNA, 25 bp, Homo sapien
ggttcaggacaataggcagctgctc

SEQ ID NO: 3764379 - DNA, 25 bp, Homo sapien
gaggttcaggacaataggcagctgc

SEQ ID NO: 3764380 - DNA, 25 bp, Homo sapien
aggttcaggacaataggcagctgct

SEQ ID NO: 3764381 - DNA, 25 bp, Homo sapien
agggtcccagctgcactcacaggca

SEQ ID NO: 3764382 - DNA, 25 bp, Homo sapien
cattcttcaggatccaaaggccaca

SEQ ID NO: 3764383 - DNA, 25 bp, Homo sapien
tggttcatgatccagcacattcttc

SEQ ID NO: 3764384 - DNA, 25 bp, Homo sapien
agcacattcttcaggatccaaaggc

SEQ ID NO: 3764385 - DNA, 25 bp, Homo sapien
tcccaaatcacaagctgtaatgaga

SEQ ID NO: 3764386 - DNA, 25 bp, Homo sapien
tctgctggctcgcagacaataggtg

SEQ ID NO: 3764387 - DNA, 25 bp, Homo sapien
ttttccgcaccactggttgccctgg

SEQ ID NO: 3764388 - DNA, 25 bp, Homo sapien
gacaataggtggaacgctggcccac

SEQ ID NO: 3764389 - DNA, 25 bp, Homo sapien
aggatgccccgcaagtaaggggagg

SEQ ID NO: 3764390 - DNA, 25 bp, Homo sapien
cgaggatgccccgcaagtaagggga

SEQ ID NO: 3764391 - DNA, 25 bp, Homo sapien
cccgaggatgccccgcaagtaaggg

SEQ ID NO: 3764392 - DNA, 25 bp, Homo sapien
ccccgaggatgccccgcaagtaagg

SEQ ID NO: 3764393 - DNA, 25 bp, Homo sapien
cctgacaaatgccttgtgatgacgt

SEQ ID NO: 3764394 - DNA, 25 bp, Homo sapien
aatgccttgtgatgacgttggcagc

SEQ ID NO: 3764395 - DNA, 25 bp, Homo sapien
agcagcaatgactgagaggtgtcct

SEQ ID NO: 3764396 - DNA, 25 bp, Homo sapien
cgttggcagctgttcgcagcagcag

SEQ ID NO: 3764397 - DNA, 25 bp, Homo sapien
ctcactaattagacaccacagctct

SEQ ID NO: 3764398 - DNA, 25 bp, Homo sapien
cttcagcatggagaaagcgtggaag

SEQ ID NO: 3764399 - DNA, 25 bp, Homo sapien
tcagcatggagaaagcgtggaagca

SEQ ID NO: 3764400 - DNA, 25 bp, Homo sapien
tcgtggggacctgatgaagacgtct

SEQ ID NO: 3764401 - DNA, 25 bp, Homo sapien
gatttgggacatgaatggaatttga

SEQ ID NO: 3764402 - DNA, 25 bp, Homo sapien
cccaaaaagtaaggcaatgacaaag

SEQ ID NO: 3764403 - DNA, 25 bp, Homo sapien
ggagggcactcgagcaggaagcaga

SEQ ID NO: 3764404 - DNA, 25 bp, Homo sapien
acccttcagactggcggggtgagtg

SEQ ID NO: 3764405 - DNA, 25 bp, Homo sapien
agaaagcccaggaacccttcagact

SEQ ID NO: 3764406 - DNA, 25 bp, Homo sapien
cagaatggttcacagattgtaccga

SEQ ID NO: 3764407 - DNA, 25 bp, Homo sapien
gatgacaatcttactgcagaatggt

SEQ ID NO: 3764408 - DNA, 25 bp, Homo sapien
tgcttggatgtgagtctctgaacca

SEQ ID NO: 3764409 - DNA, 25 bp, Homo sapien
caattacagccctttgtgttaccga

SEQ ID NO: 3764410 - DNA, 25 bp, Homo sapien
ctaaaacacacattggacccagact

SEQ ID NO: 3764411 - DNA, 25 bp, Homo sapien
tgactctgggaacgtcatgcagatg

SEQ ID NO: 3764412 - DNA, 25 bp, Homo sapien
tccatgaatttgtgccgtgactctg

SEQ ID NO: 3764413 - DNA, 25 bp, Homo sapien
aaaattgagtcattaaccctgtgga

SEQ ID NO: 3764414 - DNA, 25 bp, Homo sapien
tcaccagctgacagatccatcatat

SEQ ID NO: 3764415 - DNA, 25 bp, Homo sapien
ccgaagataccacccctcttagagg

SEQ ID NO: 3764416 - DNA, 25 bp, Homo sapien
gagtctggaaccaggacttcaccca

SEQ ID NO: 3764417 - DNA, 25 bp, Homo sapien
gatccatcatatcccggcaaaaagg

SEQ ID NO: 3764418 - DNA, 25 bp, Homo sapien
ggcgagacactcatccagctgtgag

SEQ ID NO: 3764419 - DNA, 25 bp, Homo sapien
cagatttacccacaaggcttgacag

SEQ ID NO: 3764420 - DNA, 25 bp, Homo sapien
acaagtagctttgcctgtgcaggaa

SEQ ID NO: 3764421 - DNA, 25 bp, Homo sapien
cagcctgcttcgcaaaggagttcaa

SEQ ID NO: 3764422 - DNA, 25 bp, Homo sapien
aggacaccaacagcggcttcagtgg

SEQ ID NO: 3764423 - DNA, 25 bp, Homo sapien
aatcgcaaggacaccaacagcggct

SEQ ID NO: 3764424 - DNA, 25 bp, Homo sapien
gagtacaaatcgcaaggacaccaac

SEQ ID NO: 3764425 - DNA, 25 bp, Homo sapien
tcaatatccctgagtacaaatcgca

SEQ ID NO: 3764426 - DNA, 25 bp, Homo sapien
gagtcctgagactaccttgtttgag

SEQ ID NO: 3764427 - DNA, 25 bp, Homo sapien
aagatgctgagcaaacgggtcccaa

SEQ ID NO: 3764428 - DNA, 25 bp, Homo sapien
gactgggagctcaaaaggccaaagg

SEQ ID NO: 3764429 - DNA, 25 bp, Homo sapien
gatgcggccatataaacaagagctc

SEQ ID NO: 3764430 - DNA, 25 bp, Homo sapien
cggtctgctggcgaaaaataaccgc

SEQ ID NO: 3764431 - DNA, 25 bp, Homo sapien
tgagacctggggtccgagcacttct

SEQ ID NO: 3764432 - DNA, 25 bp, Homo sapien
cgtgagaatgccacagcatcggtct

SEQ ID NO: 3764433 - DNA, 25 bp, Homo sapien
gtgatgtcagcgccctgcagccggc

SEQ ID NO: 3764434 - DNA, 25 bp, Homo sapien
ctgggcgcacaggtctgtgggtgat

SEQ ID NO: 3764435 - DNA, 25 bp, Homo sapien
ttgctcaggaatccgccatccattc

SEQ ID NO: 3764436 - DNA, 25 bp, Homo sapien
tgattgctcaggaatccgccatcca

SEQ ID NO: 3764437 - DNA, 25 bp, Homo sapien
gcacaggtctgtgggtgattgctca

SEQ ID NO: 3764438 - DNA, 25 bp, Homo sapien
tgtgggcgtagtcctaacatctgca

SEQ ID NO: 3764439 - DNA, 25 bp, Homo sapien
ggcgtagtcctaacatctgcaagca

SEQ ID NO: 3764440 - DNA, 25 bp, Homo sapien
ctgagtccacctgataaggagccca

SEQ ID NO: 3764441 - DNA, 25 bp, Homo sapien
taaggagcccacaggaatcccatca

SEQ ID NO: 3764442 - DNA, 25 bp, Homo sapien
tccacaagcttcattgcaggatttt

SEQ ID NO: 3764443 - DNA, 25 bp, Homo sapien
cccactcgccttggggttagaccag

SEQ ID NO: 3764444 - DNA, 25 bp, Homo sapien
ccttggggttagaccaggctccact

SEQ ID NO: 3764445 - DNA, 25 bp, Homo sapien
gaccaggctccactggtctcatctt

SEQ ID NO: 3764446 - DNA, 25 bp, Homo sapien
gttctcttacttcccattctatgca

SEQ ID NO: 3764447 - DNA, 25 bp, Homo sapien
cattctatgcacgtaatttccccag

SEQ ID NO: 3764448 - DNA, 25 bp, Homo sapien
tcgaaagaccctcttcgttctctta

SEQ ID NO: 3764449 - DNA, 25 bp, Homo sapien
taaaccctgatgaccaaaaggcctc

SEQ ID NO: 3764450 - DNA, 25 bp, Homo sapien
aaattcactccaaaccacagacttg

SEQ ID NO: 3764451 - DNA, 25 bp, Homo sapien
gaagaaccctgttgagacgtgaaaa

SEQ ID NO: 3764452 - DNA, 25 bp, Homo sapien
taagtgacttgaaggagacccccaa

SEQ ID NO: 3764453 - DNA, 25 bp, Homo sapien
tgtgggttaggccttagaattctaa

SEQ ID NO: 3764454 - DNA, 25 bp, Homo sapien
gaagattgcctgacagcattcacta

SEQ ID NO: 3764455 - DNA, 25 bp, Homo sapien
aatcagagccatcggctgggaggca

SEQ ID NO: 3764456 - DNA, 25 bp, Homo sapien
gcaacgtcgtgaaggagatatccag

SEQ ID NO: 3764457 - DNA, 25 bp, Homo sapien
tgcagaagccattgagaatcagagc

SEQ ID NO: 3764458 - DNA, 25 bp, Homo sapien
cactttatcaccatgagggaagcag

SEQ ID NO: 3764459 - DNA, 25 bp, Homo sapien
tcaccatgagggaagcagtttgagg

SEQ ID NO: 3764460 - DNA, 25 bp, Homo sapien
tgagggaagcagtttgaggactcac

SEQ ID NO: 3764461 - DNA, 25 bp, Homo sapien
ttatcaccatgagggaagcagtttg

SEQ ID NO: 3764462 - DNA, 25 bp, Homo sapien
tggagaaagtcaattcaaacacttg

SEQ ID NO: 3764463 - DNA, 25 bp, Homo sapien
aattcaaacacttgccttccctcag

SEQ ID NO: 3764464 - DNA, 25 bp, Homo sapien
agagtgagaaccttggagaaagtca

SEQ ID NO: 3764465 - DNA, 25 bp, Homo sapien
ccttggagaaagtcaattcaaacac

SEQ ID NO: 3764466 - DNA, 25 bp, Homo sapien
aaaatgacttgggtctcagacccag

SEQ ID NO: 3764467 - DNA, 25 bp, Homo sapien
gggctaggaagggttctccatcttc

SEQ ID NO: 3764468 - DNA, 25 bp, Homo sapien
gcaggatcagggtgaaaaatgactt

SEQ ID NO: 3764469 - DNA, 25 bp, Homo sapien
tgatcagcggatcttgtccagcccc

SEQ ID NO: 3764470 - DNA, 25 bp, Homo sapien
taagcactggcaagcgcaagctcca

SEQ ID NO: 3764471 - DNA, 25 bp, Homo sapien
caagcgcaagctccagggcgtggct

SEQ ID NO: 3764472 - DNA, 25 bp, Homo sapien
cactggcaagcgcaagctccagggc

SEQ ID NO: 3764473 - DNA, 25 bp, Homo sapien
ctggcaagcgcaagctccagggcgt

SEQ ID NO: 3764474 - DNA, 25 bp, Homo sapien
gggacaccgagtcacatctgagcct

SEQ ID NO: 3764475 - DNA, 25 bp, Homo sapien
tcttctgggaagacatgcacactgc

SEQ ID NO: 3764476 - DNA, 25 bp, Homo sapien
gcccgactcatatcattcacctttg

SEQ ID NO: 3764477 - DNA, 25 bp, Homo sapien
cattcacctttggacaggcaaagga

SEQ ID NO: 3764478 - DNA, 25 bp, Homo sapien
ggaagagaaaaccagtgagtcctct

SEQ ID NO: 3764479 - DNA, 25 bp, Homo sapien
cacgcacggcccaggaagagaaaac

SEQ ID NO: 3764480 - DNA, 25 bp, Homo sapien
gcacgcacggcccaggaagagaaaa

SEQ ID NO: 3764481 - DNA, 25 bp, Homo sapien
agagaaaaccagtgagtcctctcta

SEQ ID NO: 3764482 - DNA, 25 bp, Homo sapien
gcacgtacctgaagtcgggttccca

SEQ ID NO: 3764483 - DNA, 25 bp, Homo sapien
tttcaggaaggcgacagctgtgcca

SEQ ID NO: 3764484 - DNA, 25 bp, Homo sapien
tccaaccactgcgaagagaaacgtg

SEQ ID NO: 3764485 - DNA, 25 bp, Homo sapien
cagcatgaatgaggaacgcacgtac

SEQ ID NO: 3764486 - DNA, 25 bp, Homo sapien
catggagaaactggtgtctttcccc

SEQ ID NO: 3764487 - DNA, 25 bp, Homo sapien
cactatgctggataaagtgctggaa

SEQ ID NO: 3764488 - DNA, 25 bp, Homo sapien
tctaattagggcatggttgagcctg

SEQ ID NO: 3764489 - DNA, 25 bp, Homo sapien
tatttggaagggaccctaattagca

SEQ ID NO: 3764490 - DNA, 25 bp, Homo sapien
tatcagtgagcaaacttcaaggcca

SEQ ID NO: 3764491 - DNA, 25 bp, Homo sapien
tccggaccacgagagccaagtgtaa

SEQ ID NO: 3764492 - DNA, 25 bp, Homo sapien
caagtgtaaattgtgtggtcccagc

SEQ ID NO: 3764493 - DNA, 25 bp, Homo sapien
tacggacccttgaagcttgaggaca

SEQ ID NO: 3764494 - DNA, 25 bp, Homo sapien
cctccgtcggccctcagtgatgtgt

SEQ ID NO: 3764495 - DNA, 25 bp, Homo sapien
cgagcacagcgatctgagctttggg

SEQ ID NO: 3764496 - DNA, 25 bp, Homo sapien
ctccgtcggccctcagtgatgtgtg

SEQ ID NO: 3764497 - DNA, 25 bp, Homo sapien
ctactggcgagcacagcgatctgag

SEQ ID NO: 3764498 - DNA, 25 bp, Homo sapien
gggaaatccagtgactctgaaacct

SEQ ID NO: 3764499 - DNA, 25 bp, Homo sapien
aaaccagaggcacagagatgctgcc

SEQ ID NO: 3764500 - DNA, 25 bp, Homo sapien
tgccaactcatcttgcagagcgcgt

SEQ ID NO: 3764501 - DNA, 25 bp, Homo sapien
cagacattcctagcaaagagaaggc

SEQ ID NO: 3764502 - DNA, 25 bp, Homo sapien
tgcccctgtgtggtcggcagccatg

SEQ ID NO: 3764503 - DNA, 25 bp, Homo sapien
gccatgcccctgagccctagaggca

SEQ ID NO: 3764504 - DNA, 25 bp, Homo sapien
gcagccatgcccctgagccctagag

SEQ ID NO: 3764505 - DNA, 25 bp, Homo sapien
cagcggggagcaagatctccaagcc

SEQ ID NO: 3764506 - DNA, 25 bp, Homo sapien
cacctccgcagaagcagtgagaaga

SEQ ID NO: 3764507 - DNA, 25 bp, Homo sapien
agaggaagacaacacgggctacgcg

SEQ ID NO: 3764508 - DNA, 25 bp, Homo sapien
gaagccatcaaagagcgcgtgacag

SEQ ID NO: 3764509 - DNA, 25 bp, Homo sapien
cacagctgggttcgtcttcccggga

SEQ ID NO: 3764510 - DNA, 25 bp, Homo sapien
ctgctcgaaagatgagcaagctgtc

SEQ ID NO: 3764511 - DNA, 25 bp, Homo sapien
tgttctcagagccagtcttacgctc

SEQ ID NO: 3764512 - DNA, 25 bp, Homo sapien
gcacagctgctcgaaagatgagcaa

SEQ ID NO: 3764513 - DNA, 25 bp, Homo sapien
cagtcttacgctcgtttttccgaat

SEQ ID NO: 3764514 - DNA, 25 bp, Homo sapien
cccagggcatgaaatggacagggaa

SEQ ID NO: 3764515 - DNA, 25 bp, Homo sapien
gagtagacgagattccactccctcc

SEQ ID NO: 3764516 - DNA, 25 bp, Homo sapien
acaagcagtttaacaaagtggccca

SEQ ID NO: 3764517 - DNA, 25 bp, Homo sapien
gctatggtccaggagtagacgagat

SEQ ID NO: 3764518 - DNA, 25 bp, Homo sapien
gcagcaccccgcctccacgggctgg

SEQ ID NO: 3764519 - DNA, 25 bp, Homo sapien
cagcaccccgcctccacgggctggg

SEQ ID NO: 3764520 - DNA, 25 bp, Homo sapien
cagaaggtgggcagcaccccgcctc

SEQ ID NO: 3764521 - DNA, 25 bp, Homo sapien
ctgcagaaggtgggcagcaccccgc

SEQ ID NO: 3764522 - DNA, 25 bp, Homo sapien
ttcactattacaggtatcgctgcag

SEQ ID NO: 3764523 - DNA, 25 bp, Homo sapien
ggtatccccatgatgccagtgtgtg

SEQ ID NO: 3764524 - DNA, 25 bp, Homo sapien
tctacatcttactcccaactggtgg

SEQ ID NO: 3764525 - DNA, 25 bp, Homo sapien
tgcaatacaacagaggtgaagttcc

SEQ ID NO: 3764526 - DNA, 25 bp, Homo sapien
aagcagataaacctgtgtgcagtca

SEQ ID NO: 3764527 - DNA, 25 bp, Homo sapien
ttttgcagctttccggaacaactca

SEQ ID NO: 3764528 - DNA, 25 bp, Homo sapien
tcaatgctccaagtctgatccatta

SEQ ID NO: 3764529 - DNA, 25 bp, Homo sapien
agtctgatccattatctcggttttg

SEQ ID NO: 3764530 - DNA, 25 bp, Homo sapien
ggaaagtgtggctccctggcaagca

SEQ ID NO: 3764531 - DNA, 25 bp, Homo sapien
gcgctgccaaacgacctgggacaca

SEQ ID NO: 3764532 - DNA, 25 bp, Homo sapien
cagcgtctgtctcccccaagaaaag

SEQ ID NO: 3764533 - DNA, 25 bp, Homo sapien
ctggtcccgtggacagcgtctgtct

SEQ ID NO: 3764534 - DNA, 25 bp, Homo sapien
gggacctgattctgcgctaagtgct

SEQ ID NO: 3764535 - DNA, 25 bp, Homo sapien
taactaaggcggtgatcaaacagga

SEQ ID NO: 3764536 - DNA, 25 bp, Homo sapien
cacaggttgtcattgctagaggcaa

SEQ ID NO: 3764537 - DNA, 25 bp, Homo sapien
tctcagtttaggacgaagacccgcc

SEQ ID NO: 3764538 - DNA, 25 bp, Homo sapien
gaagtttttcgccagatttgtggcc

SEQ ID NO: 3764539 - DNA, 25 bp, Homo sapien
cccaagtacccacgcggagaggcct

SEQ ID NO: 3764540 - DNA, 25 bp, Homo sapien
gcacaaagggcatcgccttgggcag

SEQ ID NO: 3764541 - DNA, 25 bp, Homo sapien
gccagcatgaagtttttcgccagat

SEQ ID NO: 3764542 - DNA, 25 bp, Homo sapien
tatgaaggcaaagactcctaggccg

SEQ ID NO: 3764543 - DNA, 25 bp, Homo sapien
cactgctgtcggtttgaatggctca

SEQ ID NO: 3764544 - DNA, 25 bp, Homo sapien
tgccgagccacgagaatatacacct

SEQ ID NO: 3764545 - DNA, 25 bp, Homo sapien
catgcagtctgaatacgctaccgaa

SEQ ID NO: 3764546 - DNA, 25 bp, Homo sapien
agtgacagatgcgcgcaggcttggg

SEQ ID NO: 3764547 - DNA, 25 bp, Homo sapien
cccatagaaagtccctgagtgacag

SEQ ID NO: 3764548 - DNA, 25 bp, Homo sapien
aagacccatagaaagtccctgagtg

SEQ ID NO: 3764549 - DNA, 25 bp, Homo sapien
agtgctacttgtggggaatacaaag

SEQ ID NO: 3764550 - DNA, 25 bp, Homo sapien
ggcagtcctggtgccgacccggagg

SEQ ID NO: 3764551 - DNA, 25 bp, Homo sapien
tggtgccgacccggaggtggtggcc

SEQ ID NO: 3764552 - DNA, 25 bp, Homo sapien
gccattccctatgagcaccgagggc

SEQ ID NO: 3764553 - DNA, 25 bp, Homo sapien
tgggcccagccattccctatgagca

SEQ ID NO: 3764554 - DNA, 25 bp, Homo sapien
ggttctgtagaacagcgcagggcca

SEQ ID NO: 3764555 - DNA, 25 bp, Homo sapien
gccccggtgagtgagaatcagcaac

SEQ ID NO: 3764556 - DNA, 25 bp, Homo sapien
ccgtctgtcctgagagtgcctttga

SEQ ID NO: 3764557 - DNA, 25 bp, Homo sapien
gaaaactggatggttgggcccatgc

SEQ ID NO: 3764558 - DNA, 25 bp, Homo sapien
agcctaaacaggatcgcaggaaggg

SEQ ID NO: 3764559 - DNA, 25 bp, Homo sapien
tggaaacattatccaggatccagga

SEQ ID NO: 3764560 - DNA, 25 bp, Homo sapien
gggactcgaaggagcgttgttctat

SEQ ID NO: 3764561 - DNA, 25 bp, Homo sapien
acaggatcgcaggaagggactcgaa

SEQ ID NO: 3764562 - DNA, 25 bp, Homo sapien
agcaatcacgctgcttcagaggaac

SEQ ID NO: 3764563 - DNA, 25 bp, Homo sapien
cagcaatcacgctgcttcagaggaa

SEQ ID NO: 3764564 - DNA, 25 bp, Homo sapien
ctacagcaatcacgctgcttcagag

SEQ ID NO: 3764565 - DNA, 25 bp, Homo sapien
acagcaatcacgctgcttcagagga

SEQ ID NO: 3764566 - DNA, 25 bp, Homo sapien
gctgggcacaacgggggcagccacg

SEQ ID NO: 3764567 - DNA, 25 bp, Homo sapien
tcttctccagccctcggacgccagt

SEQ ID NO: 3764568 - DNA, 25 bp, Homo sapien
acgccagtggccttcctcaagttca

SEQ ID NO: 3764569 - DNA, 25 bp, Homo sapien
gatgtttaacttggcaatcttctcc

SEQ ID NO: 3764570 - DNA, 25 bp, Homo sapien
tcagttgtaggagaggtaatcaatg

SEQ ID NO: 3764571 - DNA, 25 bp, Homo sapien
agctgtgacagagtcagaggtgtct

SEQ ID NO: 3764572 - DNA, 25 bp, Homo sapien
atgtgaggttaatttcaggaagaag

SEQ ID NO: 3764573 - DNA, 25 bp, Homo sapien
aggaaggatgtgaggttaatttcag

SEQ ID NO: 3764574 - DNA, 25 bp, Homo sapien
gttaatttcaggaagaagcacaaca

SEQ ID NO: 3764575 - DNA, 25 bp, Homo sapien
ttaatttcaggaagaagcacaacac

SEQ ID NO: 3764576 - DNA, 25 bp, Homo sapien
cgcggaagcccacagggagccggca

SEQ ID NO: 3764577 - DNA, 25 bp, Homo sapien
gaagcccacagggagccggcacgtc

SEQ ID NO: 3764578 - DNA, 25 bp, Homo sapien
agcccacagggagccggcacgtcag

SEQ ID NO: 3764579 - DNA, 25 bp, Homo sapien
gggtgcgctcggtggggtgtctcac

SEQ ID NO: 3764580 - DNA, 25 bp, Homo sapien
gatgttgccgccaaactcgataagc

SEQ ID NO: 3764581 - DNA, 25 bp, Homo sapien
tgctccacgtgtagtcagacggctt

SEQ ID NO: 3764582 - DNA, 25 bp, Homo sapien
tggtgaagggcagtctcatgaagct

SEQ ID NO: 3764583 - DNA, 25 bp, Homo sapien
gataagcatctcgatgaggtcaaca

SEQ ID NO: 3764584 - DNA, 25 bp, Homo sapien
cagtaggcaattcagagaagagagt

SEQ ID NO: 3764585 - DNA, 25 bp, Homo sapien
ttctcacgataagagcagacattca

SEQ ID NO: 3764586 - DNA, 25 bp, Homo sapien
taagctctgcactcctcaactttct

SEQ ID NO: 3764587 - DNA, 25 bp, Homo sapien
aacagtaggcaattcagagaagaga

SEQ ID NO: 3764588 - DNA, 25 bp, Homo sapien
tccccaggggcatgcaaactcccgg

SEQ ID NO: 3764589 - DNA, 25 bp, Homo sapien
ctctaactccccaggggcatgcaaa

SEQ ID NO: 3764590 - DNA, 25 bp, Homo sapien
ggcatgcaaactcccggggagagct

SEQ ID NO: 3764591 - DNA, 25 bp, Homo sapien
aggggcatgcaaactcccggggaga

SEQ ID NO: 3764592 - DNA, 25 bp, Homo sapien
taaaggcttgatatgaacgcactgc

SEQ ID NO: 3764593 - DNA, 25 bp, Homo sapien
gcttacacctgcttccaatggagat

SEQ ID NO: 3764594 - DNA, 25 bp, Homo sapien
tgttcatagaaacggatccagctgc

SEQ ID NO: 3764595 - DNA, 25 bp, Homo sapien
ggctcggctggaaacgcttacacct

SEQ ID NO: 3764596 - DNA, 25 bp, Homo sapien
ccacttgggcaaacacccacgcagg

SEQ ID NO: 3764597 - DNA, 25 bp, Homo sapien
cacccacttgggcaaacacccacgc

SEQ ID NO: 3764598 - DNA, 25 bp, Homo sapien
gcgggcaaacatccactccggtaaa

SEQ ID NO: 3764599 - DNA, 25 bp, Homo sapien
acttgggcaaacacccacgcaggta

SEQ ID NO: 3764600 - DNA, 25 bp, Homo sapien
aatcgtgcgcttccagattggcccc

SEQ ID NO: 3764601 - DNA, 25 bp, Homo sapien
ccgggcacaggcaacgtgcagaggg

SEQ ID NO: 3764602 - DNA, 25 bp, Homo sapien
gggtcccaaaatggcaatcgtgcgc

SEQ ID NO: 3764603 - DNA, 25 bp, Homo sapien
gattggccccgacgtcaataagaag

SEQ ID NO: 3764604 - DNA, 25 bp, Homo sapien
ccttcaagagctccctggagctgtc

SEQ ID NO: 3764605 - DNA, 25 bp, Homo sapien
ttctgttttcctgaccctcgacatc

SEQ ID NO: 3764606 - DNA, 25 bp, Homo sapien
tgaccctcgacatctgctcagaaac

SEQ ID NO: 3764607 - DNA, 25 bp, Homo sapien
gctcagaaaccttcaagagctccct

SEQ ID NO: 3764608 - DNA, 25 bp, Homo sapien
gacacgtttctctgtcgtctcccat

SEQ ID NO: 3764609 - DNA, 25 bp, Homo sapien
ctgttttgagagcaccacgcacagc

SEQ ID NO: 3764610 - DNA, 25 bp, Homo sapien
tgttttgagagcaccacgcacagcc

SEQ ID NO: 3764611 - DNA, 25 bp, Homo sapien
ccaggctgttgggacacgtttctct

SEQ ID NO: 3764612 - DNA, 25 bp, Homo sapien
accttggccccgtaggacagcaaga

SEQ ID NO: 3764613 - DNA, 25 bp, Homo sapien
cagcaagagcttcacacactcgatg

SEQ ID NO: 3764614 - DNA, 25 bp, Homo sapien
ctgccgtcgatgttgcgagcatcca

SEQ ID NO: 3764615 - DNA, 25 bp, Homo sapien
ttcacacactcgatgctgcccgagg

SEQ ID NO: 3764616 - DNA, 25 bp, Homo sapien
tgcttcttagaagcaccggtttgct

SEQ ID NO: 3764617 - DNA, 25 bp, Homo sapien
aggttcatctttgctaagatgcttc

SEQ ID NO: 3764618 - DNA, 25 bp, Homo sapien
gcagagaaatgccacgcaacccact

SEQ ID NO: 3764619 - DNA, 25 bp, Homo sapien
agagaaatgccacgcaacccacttt

SEQ ID NO: 3764620 - DNA, 25 bp, Homo sapien
ctgaaagagatagcacgtggctgcg

SEQ ID NO: 3764621 - DNA, 25 bp, Homo sapien
ctgcggagcaccgacggcctcctga

SEQ ID NO: 3764622 - DNA, 25 bp, Homo sapien
tattatgtgctaggcaacgacactg

SEQ ID NO: 3764623 - DNA, 25 bp, Homo sapien
gctaggcaacgacactgaaagagat

SEQ ID NO: 3764624 - DNA, 25 bp, Homo sapien
ccaagttctcctgagtcaacctcct

SEQ ID NO: 3764625 - DNA, 25 bp, Homo sapien
caagttctcctgagtcaacctcctc

SEQ ID NO: 3764626 - DNA, 25 bp, Homo sapien
cccaagttctcctgagtcaacctcc

SEQ ID NO: 3764627 - DNA, 25 bp, Homo sapien
caccccgctgggctgcctcgtgcac

SEQ ID NO: 3764628 - DNA, 25 bp, Homo sapien
gcgtgatggagtccacggtgacctg

SEQ ID NO: 3764629 - DNA, 25 bp, Homo sapien
acgcaggcgccgctctcgatcagct

SEQ ID NO: 3764630 - DNA, 25 bp, Homo sapien
gccctgcagactggctgcgtgcagg

SEQ ID NO: 3764631 - DNA, 25 bp, Homo sapien
ctgcatattctgcaggcacaggtgc

SEQ ID NO: 3764632 - DNA, 25 bp, Homo sapien
ctccacagtccacctcccacccctg

SEQ ID NO: 3764633 - DNA, 25 bp, Homo sapien
cacccctgcccctgcatattctgca

SEQ ID NO: 3764634 - DNA, 25 bp, Homo sapien
atattctgcaggcacaggtgctcac

SEQ ID NO: 3764635 - DNA, 25 bp, Homo sapien
cactcccctgcagttgcacatcctt

SEQ ID NO: 3764636 - DNA, 25 bp, Homo sapien
ctgcagttgcacatccttctctgct

SEQ ID NO: 3764637 - DNA, 25 bp, Homo sapien
cccctgcagttgcacatccttctct

SEQ ID NO: 3764638 - DNA, 25 bp, Homo sapien
cagttgcacatccttctctgctgac

SEQ ID NO: 3764639 - DNA, 25 bp, Homo sapien
taaaccaggtgcagacaaaagctcg

SEQ ID NO: 3764640 - DNA, 25 bp, Homo sapien
agaccgtaaactccccagatgcaga

SEQ ID NO: 3764641 - DNA, 25 bp, Homo sapien
tactgcctggatgtgaacttggacc

SEQ ID NO: 3764642 - DNA, 25 bp, Homo sapien
tgaagacaggacctacaggaatggc

SEQ ID NO: 3764643 - DNA, 25 bp, Homo sapien
tactggctaggaccgtgtgccaggt

SEQ ID NO: 3764644 - DNA, 25 bp, Homo sapien
cacgtgcttcagaacgttctctcca

SEQ ID NO: 3764645 - DNA, 25 bp, Homo sapien
gacaccctcccatctaaggctgtgc

SEQ ID NO: 3764646 - DNA, 25 bp, Homo sapien
cttgagaaggaatgacacgtgcttc

SEQ ID NO: 3764647 - DNA, 25 bp, Homo sapien
taagtcgggtgactgattgagtctc

SEQ ID NO: 3764648 - DNA, 25 bp, Homo sapien
gccttgcaagccacccagcagtgtg

SEQ ID NO: 3764649 - DNA, 25 bp, Homo sapien
tgctcagttcccgggccctctgaga

SEQ ID NO: 3764650 - DNA, 25 bp, Homo sapien
ctccatcgctccctgccttgcaagc

SEQ ID NO: 3764651 - DNA, 25 bp, Homo sapien
gaatgttaaaattgtctaaagctcc

SEQ ID NO: 3764652 - DNA, 25 bp, Homo sapien
ggcagtattgttttggatccaacac

SEQ ID NO: 3764653 - DNA, 25 bp, Homo sapien
taaatgttttggtcgcggtacacca

SEQ ID NO: 3764654 - DNA, 25 bp, Homo sapien
cctacggttcgcctctggtgctgct

SEQ ID NO: 3764655 - DNA, 25 bp, Homo sapien
aactgggatggcacttttcggagtg

SEQ ID NO: 3764656 - DNA, 25 bp, Homo sapien
tgctcggattttggtaaagtaggct

SEQ ID NO: 3764657 - DNA, 25 bp, Homo sapien
tttggtaaagtaggctgcgaactgg

SEQ ID NO: 3764658 - DNA, 25 bp, Homo sapien
gattttggtaaagtaggctgcgaac

SEQ ID NO: 3764659 - DNA, 25 bp, Homo sapien
acgcggacgcctctgcaggatgctc

SEQ ID NO: 3764660 - DNA, 25 bp, Homo sapien
gacgcctctgcaggatgctcggaca

SEQ ID NO: 3764661 - DNA, 25 bp, Homo sapien
gggtcacgcggacgcctctgcagga

SEQ ID NO: 3764662 - DNA, 25 bp, Homo sapien
cggacgcctctgcaggatgctcgga

SEQ ID NO: 3764663 - DNA, 25 bp, Homo sapien
gcggcgctcggtgggtttgcggttg

SEQ ID NO: 3764664 - DNA, 25 bp, Homo sapien
tggcttccccgagagggagcaccgt

SEQ ID NO: 3764665 - DNA, 25 bp, Homo sapien
gcaacggccccgcacgcgtcccgca

SEQ ID NO: 3764666 - DNA, 25 bp, Homo sapien
cgcctggcttccccgagagggagca

SEQ ID NO: 3764667 - DNA, 25 bp, Homo sapien
acctccccggcgcaggccatcggat

SEQ ID NO: 3764668 - DNA, 25 bp, Homo sapien
cggccggcctcaggagccggcgccg

SEQ ID NO: 3764669 - DNA, 25 bp, Homo sapien
ctgcctcgctctgacctccgcggcg

SEQ ID NO: 3764670 - DNA, 25 bp, Homo sapien
aggccatcggatacgcggccggcct

SEQ ID NO: 3764671 - DNA, 25 bp, Homo sapien
acgtcgcccaggaagcagccgtccg

SEQ ID NO: 3764672 - DNA, 25 bp, Homo sapien
aggaagcagccgtccgccgcccggg

SEQ ID NO: 3764673 - DNA, 25 bp, Homo sapien
cgcccaggaagcagccgtccgccgc

SEQ ID NO: 3764674 - DNA, 25 bp, Homo sapien
ccacgtcgcccaggaagcagccgtc

SEQ ID NO: 3764675 - DNA, 25 bp, Homo sapien
gcgcggcgactctgggcgccgggac

SEQ ID NO: 3764676 - DNA, 25 bp, Homo sapien
gccgcgcggcgactctgggcgccgg

SEQ ID NO: 3764677 - DNA, 25 bp, Homo sapien
ggcggccgcgcggcgactctgggcg

SEQ ID NO: 3764678 - DNA, 25 bp, Homo sapien
cggccgcgcggcgactctgggcgcc

SEQ ID NO: 3764679 - DNA, 25 bp, Homo sapien
cttggcgaggttcccggaggcgctg

SEQ ID NO: 3764680 - DNA, 25 bp, Homo sapien
tgggccgcgcgtcgtcccgaggcga

SEQ ID NO: 3764681 - DNA, 25 bp, Homo sapien
ctgggtccggactccgctgtcgctg

SEQ ID NO: 3764682 - DNA, 25 bp, Homo sapien
gcggggccagtctgcgctgggccgc

SEQ ID NO: 3764683 - DNA, 25 bp, Homo sapien
caagcgtgtgcaaaacatgtgtcca

SEQ ID NO: 3764684 - DNA, 25 bp, Homo sapien
tatgtcctgtgcaaaacatgcgtcc

SEQ ID NO: 3764685 - DNA, 25 bp, Homo sapien
tacgtccggtgcaaaacgtgtcctg

SEQ ID NO: 3764686 - DNA, 25 bp, Homo sapien
gtctgtgtccacgtgcaaagcatgc

SEQ ID NO: 3764687 - DNA, 25 bp, Homo sapien
tttagaatgtatttccccagcaaga

SEQ ID NO: 3764688 - DNA, 25 bp, Homo sapien
catctggaattcactgcaatgtgta

SEQ ID NO: 3764689 - DNA, 25 bp, Homo sapien
gcaccgtgttgtctcactgccatct

SEQ ID NO: 3764690 - DNA, 25 bp, Homo sapien
tcctccattctgttgcttgaccaaa

SEQ ID NO: 3764691 - DNA, 25 bp, Homo sapien
tgggacaagggagtaccaagaggcc

SEQ ID NO: 3764692 - DNA, 25 bp, Homo sapien
acaatgggacaagggagtaccaaga

SEQ ID NO: 3764693 - DNA, 25 bp, Homo sapien
aatgggacaagggagtaccaagagg

SEQ ID NO: 3764694 - DNA, 25 bp, Homo sapien
ttacaatgggacaagggagtaccaa

SEQ ID NO: 3764695 - DNA, 25 bp, Homo sapien
gattgtacaagtgttccttcccgtg

SEQ ID NO: 3764696 - DNA, 25 bp, Homo sapien
cttcccgtgttcaaagacagctcta

SEQ ID NO: 3764697 - DNA, 25 bp, Homo sapien
ccctggattgtacaagtgttccttc

SEQ ID NO: 3764698 - DNA, 25 bp, Homo sapien
caagtgttccttcccgtgttcaaag

SEQ ID NO: 3764699 - DNA, 25 bp, Homo sapien
gctttagcttgggattcgaagggca

SEQ ID NO: 3764700 - DNA, 25 bp, Homo sapien
tacccatcggcagcaatcactactg

SEQ ID NO: 3764701 - DNA, 25 bp, Homo sapien
gaaagtcacagctgttcgcacctgc

SEQ ID NO: 3764702 - DNA, 25 bp, Homo sapien
acaagagtctaagtgccctggcagc

SEQ ID NO: 3764703 - DNA, 25 bp, Homo sapien
ggagccaactcaaacagcacgagca

SEQ ID NO: 3764704 - DNA, 25 bp, Homo sapien
tcaaacagcacgagcacactgaaga

SEQ ID NO: 3764705 - DNA, 25 bp, Homo sapien
aggagccaactcaaacagcacgagc

SEQ ID NO: 3764706 - DNA, 25 bp, Homo sapien
caactcaaacagcacgagcacactg

SEQ ID NO: 3764707 - DNA, 25 bp, Homo sapien
tcctccacgtattccaagctttggt

SEQ ID NO: 3764708 - DNA, 25 bp, Homo sapien
cagggtgcatatttagttggcaaac

SEQ ID NO: 3764709 - DNA, 25 bp, Homo sapien
caaagaagagagtaccatggaagtc

SEQ ID NO: 3764710 - DNA, 25 bp, Homo sapien
aagtcagaatagtgcttaggctagg

SEQ ID NO: 3764711 - DNA, 25 bp, Homo sapien
gatggtcaccttagctctctgtgca

SEQ ID NO: 3764712 - DNA, 25 bp, Homo sapien
agaaggcgcccgaaggcgaccacgt

SEQ ID NO: 3764713 - DNA, 25 bp, Homo sapien
tgtaggtcagccgagagagcgtctc

SEQ ID NO: 3764714 - DNA, 25 bp, Homo sapien
tcgggccagacaaataaactgttct

SEQ ID NO: 3764715 - DNA, 25 bp, Homo sapien
tccaaaatgtcgcattcgggccaga

SEQ ID NO: 3764716 - DNA, 25 bp, Homo sapien
gtcaagggtcggcaacgcgagacac

SEQ ID NO: 3764717 - DNA, 25 bp, Homo sapien
gcctaatcaggagcgagctgtggcc

SEQ ID NO: 3764718 - DNA, 25 bp, Homo sapien
agctgtggccttacgcctgcgcaga

SEQ ID NO: 3764719 - DNA, 25 bp, Homo sapien
tgcgccttggtttcttcccggcgat

SEQ ID NO: 3764720 - DNA, 25 bp, Homo sapien
tcctttggccgcgaggttttgcttc

SEQ ID NO: 3764721 - DNA, 25 bp, Homo sapien
aaagtcggcatgttctcgcaggctg

SEQ ID NO: 3764722 - DNA, 25 bp, Homo sapien
ttccggttgctagcgccggtcagag

SEQ ID NO: 3764723 - DNA, 25 bp, Homo sapien
catgttctcgcaggctgccgggcgt

SEQ ID NO: 3764724 - DNA, 25 bp, Homo sapien
gagcacggccgggagaagcatggga

SEQ ID NO: 3764725 - DNA, 25 bp, Homo sapien
ggcgactggtgcttcccacgtgcgc

SEQ ID NO: 3764726 - DNA, 25 bp, Homo sapien
ccgggaggacgcagagcacggccgg

SEQ ID NO: 3764727 - DNA, 25 bp, Homo sapien
gtgcgccggtgtcgcgagggcccgg

SEQ ID NO: 3764728 - DNA, 25 bp, Homo sapien
tcaggtcctcgggggcggcggccac

SEQ ID NO: 3764729 - DNA, 25 bp, Homo sapien
taagtccctcctcggcctgggcgcc

SEQ ID NO: 3764730 - DNA, 25 bp, Homo sapien
gtaagtccctcctcggcctgggcgc

SEQ ID NO: 3764731 - DNA, 25 bp, Homo sapien
gcggcggccacgccaaggacgggta

SEQ ID NO: 3764732 - DNA, 25 bp, Homo sapien
gctgcgagggtcgacgcgttctcct

SEQ ID NO: 3764733 - DNA, 25 bp, Homo sapien
ggtcggcgccttctagatgactcaa

SEQ ID NO: 3764734 - DNA, 25 bp, Homo sapien
ttctgtcctgcgctacaacctgtgg

SEQ ID NO: 3764735 - DNA, 25 bp, Homo sapien
ggcagggagatcctaaccgtgtcat

SEQ ID NO: 3764736 - DNA, 25 bp, Homo sapien
tgaagtttccgtcttcgggtttgca

SEQ ID NO: 3764737 - DNA, 25 bp, Homo sapien
gacagctgcgtcctcagggatatgc

SEQ ID NO: 3764738 - DNA, 25 bp, Homo sapien
gatatgctgataagttcttggctga

SEQ ID NO: 3764739 - DNA, 25 bp, Homo sapien
gtttcgtttgcgtcgcctgtcaggg

SEQ ID NO: 3764740 - DNA, 25 bp, Homo sapien
tctacggagtgtgcggggatctccc

SEQ ID NO: 3764741 - DNA, 25 bp, Homo sapien
tacaagctccgttgggtctacggag

SEQ ID NO: 3764742 - DNA, 25 bp, Homo sapien
tcagtggggtttgcagggatcccct

SEQ ID NO: 3764743 - DNA, 25 bp, Homo sapien
ccctgttggctgtacgggctcagtg

SEQ ID NO: 3764744 - DNA, 25 bp, Homo sapien
ggtcactaattttgtgccctatgaa

SEQ ID NO: 3764745 - DNA, 25 bp, Homo sapien
aaaatcaggtagtgagtccttcagc

SEQ ID NO: 3764746 - DNA, 25 bp, Homo sapien
gaaaactttatgtaccccatagtca

SEQ ID NO: 3764747 - DNA, 25 bp, Homo sapien
cctccgttttagttgttctgtagca

SEQ ID NO: 3764748 - DNA, 25 bp, Homo sapien
gaccaccaccttgacactacagttg

SEQ ID NO: 3764749 - DNA, 25 bp, Homo sapien
aatagactcttcttgacgggtgagg

SEQ ID NO: 3764750 - DNA, 25 bp, Homo sapien
cgggtgaggaaatcccagagataca

SEQ ID NO: 3764751 - DNA, 25 bp, Homo sapien
gctctaaaagtctaagcagctcctg

SEQ ID NO: 3764752 - DNA, 25 bp, Homo sapien
tattcagtgtgtctcccttaacccc

SEQ ID NO: 3764753 - DNA, 25 bp, Homo sapien
tataatttttcagacgcagcagatc

SEQ ID NO: 3764754 - DNA, 25 bp, Homo sapien
tgcttggtacacactatgatggttt

SEQ ID NO: 3764755 - DNA, 25 bp, Homo sapien
tacttggactcttcatctgagcatg

SEQ ID NO: 3764756 - DNA, 25 bp, Homo sapien
tacctaccaccgaagtttagcagat

SEQ ID NO: 3764757 - DNA, 25 bp, Homo sapien
gacataaaagtaaagagcataccat

SEQ ID NO: 3764758 - DNA, 25 bp, Homo sapien
ctcaggtggccaagactcgagagtt

SEQ ID NO: 3764759 - DNA, 25 bp, Homo sapien
tgagccgagatcaacagagcgagac

SEQ ID NO: 3764760 - DNA, 25 bp, Homo sapien
aactgattttagatgtgattgggct

SEQ ID NO: 3764761 - DNA, 25 bp, Homo sapien
gctacctagaactgatgatgccaca

SEQ ID NO: 3764762 - DNA, 25 bp, Homo sapien
tgatgccacaaatccttaaatgtcc

SEQ ID NO: 3764763 - DNA, 25 bp, Homo sapien
ggtactgttaagtgaatcgtgcaat

SEQ ID NO: 3764764 - DNA, 25 bp, Homo sapien
ttatcagcctagcactaaatgacct

SEQ ID NO: 3764765 - DNA, 25 bp, Homo sapien
tcagcctagcactaaatgaccttta

SEQ ID NO: 3764766 - DNA, 25 bp, Homo sapien
atcagcctagcactaaatgaccttt

SEQ ID NO: 3764767 - DNA, 25 bp, Homo sapien
tatcagcctagcactaaatgacctt

SEQ ID NO: 3764768 - DNA, 25 bp, Homo sapien
aaagagccattcagtgaccgtaaca

SEQ ID NO: 3764769 - DNA, 25 bp, Homo sapien
tgctgggccctgtcataatagaagt

SEQ ID NO: 3764770 - DNA, 25 bp, Homo sapien
gacatgtaacccttgatggagagaa

SEQ ID NO: 3764771 - DNA, 25 bp, Homo sapien
cagctgcctgctaagaactttgcta

SEQ ID NO: 3764772 - DNA, 25 bp, Homo sapien
tgtgttgtttttcagaccgcaggaa

SEQ ID NO: 3764773 - DNA, 25 bp, Homo sapien
gaacatatttgcagaccatggttta

SEQ ID NO: 3764774 - DNA, 25 bp, Homo sapien
aaaaaagactaccagaggctgcctt

SEQ ID NO: 3764775 - DNA, 25 bp, Homo sapien
ccgtgcctggcaaataactcataaa

SEQ ID NO: 3764776 - DNA, 25 bp, Homo sapien
ctctcttccaaacactcacacatgc

SEQ ID NO: 3764777 - DNA, 25 bp, Homo sapien
tctgctctcttccaaacactcacac

SEQ ID NO: 3764778 - DNA, 25 bp, Homo sapien
attttctgctctcttccaaacactc

SEQ ID NO: 3764779 - DNA, 25 bp, Homo sapien
tgctctcttccaaacactcacacat

SEQ ID NO: 3764780 - DNA, 25 bp, Homo sapien
aggtaggtggtgcaggcattatgaa

SEQ ID NO: 3764781 - DNA, 25 bp, Homo sapien
tattatgctatacttgagtactcct

SEQ ID NO: 3764782 - DNA, 25 bp, Homo sapien
tctacagcatagatacactggacaa

SEQ ID NO: 3764783 - DNA, 25 bp, Homo sapien
aagggatgattcacggccaggcgtg

SEQ ID NO: 3764784 - DNA, 25 bp, Homo sapien
gtcaccttagtgagacaaataccag

SEQ ID NO: 3764785 - DNA, 25 bp, Homo sapien
gtttagtcacatgaactgctccagt

SEQ ID NO: 3764786 - DNA, 25 bp, Homo sapien
ttcaactgctagatataacctctgt

SEQ ID NO: 3764787 - DNA, 25 bp, Homo sapien
ctagaaagttttgttgtcaccttag

SEQ ID NO: 3764788 - DNA, 25 bp, Homo sapien
taggcactagaaaccaaaagcatgt

SEQ ID NO: 3764789 - DNA, 25 bp, Homo sapien
gaaaggcacacgtgtgctatcgcac

SEQ ID NO: 3764790 - DNA, 25 bp, Homo sapien
tagtcatgtgttgagttgagcactc

SEQ ID NO: 3764791 - DNA, 25 bp, Homo sapien
aagaggattctagcatgataggcac

SEQ ID NO: 3764792 - DNA, 25 bp, Homo sapien
gagacacgaccatatcaggctgtga

SEQ ID NO: 3764793 - DNA, 25 bp, Homo sapien
tagggagttaaaccagcctgcctca

SEQ ID NO: 3764794 - DNA, 25 bp, Homo sapien
tggtttccacaactgcaccaagtgg

SEQ ID NO: 3764795 - DNA, 25 bp, Homo sapien
taattgaagaagtatcaccagcgtc

SEQ ID NO: 3764796 - DNA, 25 bp, Homo sapien
tctggtattctcaaggtagctcatg

SEQ ID NO: 3764797 - DNA, 25 bp, Homo sapien
tattctgagacgtagacccaaggga

SEQ ID NO: 3764798 - DNA, 25 bp, Homo sapien
ccagtcaggatgattagggagccat

SEQ ID NO: 3764799 - DNA, 25 bp, Homo sapien
actgcagtggcaccgtacaatcgca

SEQ ID NO: 3764800 - DNA, 25 bp, Homo sapien
taccactctggcattatgtaacagg

SEQ ID NO: 3764801 - DNA, 25 bp, Homo sapien
tgttggcgctgcagtatgctcttca

SEQ ID NO: 3764802 - DNA, 25 bp, Homo sapien
tgtaacaggcgttatgtattattga

SEQ ID NO: 3764803 - DNA, 25 bp, Homo sapien
tggtacatgcccgtactcactgctg

SEQ ID NO: 3764804 - DNA, 25 bp, Homo sapien
tcacagagtggattcaactgcacat

SEQ ID NO: 3764805 - DNA, 25 bp, Homo sapien
gagtatcaggtatctaaatggcttg

SEQ ID NO: 3764806 - DNA, 25 bp, Homo sapien
aaatggcttggcatcccatggatac

SEQ ID NO: 3764807 - DNA, 25 bp, Homo sapien
tcaccagtgtgactctcgatcatca

SEQ ID NO: 3764808 - DNA, 25 bp, Homo sapien
cacttgctgttaacttggatcgtca

SEQ ID NO: 3764809 - DNA, 25 bp, Homo sapien
gcataggcgttttccccattagagc

SEQ ID NO: 3764810 - DNA, 25 bp, Homo sapien
cctgcctggatatggatgatgccaa

SEQ ID NO: 3764811 - DNA, 25 bp, Homo sapien
taggagtagctattggtaagaacac

SEQ ID NO: 3764812 - DNA, 25 bp, Homo sapien
tagctttgggttgcagtgctagata

SEQ ID NO: 3764813 - DNA, 25 bp, Homo sapien
caagatgccttctaagctattgagc

SEQ ID NO: 3764814 - DNA, 25 bp, Homo sapien
tttgcatgctaatgtcagaaaggca

SEQ ID NO: 3764815 - DNA, 25 bp, Homo sapien
ttacatgtttacttagttggagcaa

SEQ ID NO: 3764816 - DNA, 25 bp, Homo sapien
gctgttacacaaacaacactacata

SEQ ID NO: 3764817 - DNA, 25 bp, Homo sapien
ggttttatttgctgttacacaaaca

SEQ ID NO: 3764818 - DNA, 25 bp, Homo sapien
tgtaaatactacactacaaaaatca

SEQ ID NO: 3764819 - DNA, 25 bp, Homo sapien
aatggtacaaatttataaactatca

SEQ ID NO: 3764820 - DNA, 25 bp, Homo sapien
gcagaacagtaagcttccagaggaa

SEQ ID NO: 3764821 - DNA, 25 bp, Homo sapien
tacacggtatctatttggagcaacg

SEQ ID NO: 3764822 - DNA, 25 bp, Homo sapien
tttccgcagtcaagtacaccgagta

SEQ ID NO: 3764823 - DNA, 25 bp, Homo sapien
aagaatggcagtttcacctggcctt

SEQ ID NO: 3764824 - DNA, 25 bp, Homo sapien
aacaaaagagctttattttctcatg

SEQ ID NO: 3764825 - DNA, 25 bp, Homo sapien
acaaaagagctttattttctcatga

SEQ ID NO: 3764826 - DNA, 25 bp, Homo sapien
caaaagagctttattttctcatgag

SEQ ID NO: 3764827 - DNA, 25 bp, Homo sapien
taaacaaaagagctttattttctca

SEQ ID NO: 3764828 - DNA, 25 bp, Homo sapien
tatcaacagagaatgatccagccca

SEQ ID NO: 3764829 - DNA, 25 bp, Homo sapien
tatctatctgcctgaaatatgcacc

SEQ ID NO: 3764830 - DNA, 25 bp, Homo sapien
acagcatctgccgtgaggctcatca

SEQ ID NO: 3764831 - DNA, 25 bp, Homo sapien
ggacaagagtctattaagggaacca

SEQ ID NO: 3764832 - DNA, 25 bp, Homo sapien
tgtcctgattgcaagggtcacagct

SEQ ID NO: 3764833 - DNA, 25 bp, Homo sapien
tgtgtcctgattgcaagggtcacag

SEQ ID NO: 3764834 - DNA, 25 bp, Homo sapien
gtgtcctgattgcaagggtcacagc

SEQ ID NO: 3764835 - DNA, 25 bp, Homo sapien
gtgtgtcctgattgcaagggtcaca

SEQ ID NO: 3764836 - DNA, 25 bp, Homo sapien
gctgtgacccttgcaatcaggacac

SEQ ID NO: 3764837 - DNA, 25 bp, Homo sapien
agctgtgacccttgcaatcaggaca

SEQ ID NO: 3764838 - DNA, 25 bp, Homo sapien
tgtgacccttgcaatcaggacacac

SEQ ID NO: 3764839 - DNA, 25 bp, Homo sapien
ctgtgacccttgcaatcaggacaca

SEQ ID NO: 3764840 - DNA, 25 bp, Homo sapien
tgtcctgattgcaagggtcacagct

SEQ ID NO: 3764841 - DNA, 25 bp, Homo sapien
tgattgcaagggtcacagctgccgt

SEQ ID NO: 3764842 - DNA, 25 bp, Homo sapien
cccggtgttggtttgtgtgtcctga

SEQ ID NO: 3764843 - DNA, 25 bp, Homo sapien
tgtgtcctgattgcaagggtcacag

SEQ ID NO: 3764844 - DNA, 25 bp, Homo sapien
tcctgattgcaagggtcacagctgc

SEQ ID NO: 3764845 - DNA, 25 bp, Homo sapien
attgcaagggtcacagctgccgtgc

SEQ ID NO: 3764846 - DNA, 25 bp, Homo sapien
gctgtgacccttgcaatcaggacac

SEQ ID NO: 3764847 - DNA, 25 bp, Homo sapien
gcacggcagctgtgacccttgcaat

SEQ ID NO: 3764848 - DNA, 25 bp, Homo sapien
tcaggacacacaaaccaacaccggg

SEQ ID NO: 3764849 - DNA, 25 bp, Homo sapien
agctgtgacccttgcaatcaggaca

SEQ ID NO: 3764850 - DNA, 25 bp, Homo sapien
gcagctgtgacccttgcaatcagga

SEQ ID NO: 3764851 - DNA, 25 bp, Homo sapien
tgtgacccttgcaatcaggacacac

SEQ ID NO: 3764852 - DNA, 25 bp, Homo sapien
ggctccaaatgatttctgtactgca

SEQ ID NO: 3764853 - DNA, 25 bp, Homo sapien
tctacttctgtctcaaaatggctcc

SEQ ID NO: 3764854 - DNA, 25 bp, Homo sapien
ctccaaatgatttctgtactgcaaa

SEQ ID NO: 3764855 - DNA, 25 bp, Homo sapien
ttctgtactgcaaaataaagccaaa

SEQ ID NO: 3764856 - DNA, 25 bp, Homo sapien
gctccaaatgatttctgtactgcaa

SEQ ID NO: 3764857 - DNA, 25 bp, Homo sapien
acttctgtctcaaaatggctccaaa

SEQ ID NO: 3764858 - DNA, 25 bp, Homo sapien
ggagccattttgagacagaagtaga

SEQ ID NO: 3764859 - DNA, 25 bp, Homo sapien
tgcagtacagaaatcatttggagcc

SEQ ID NO: 3764860 - DNA, 25 bp, Homo sapien
tttggctttattttgcagtacagaa

SEQ ID NO: 3764861 - DNA, 25 bp, Homo sapien
tttggagccattttgagacagaagt

SEQ ID NO: 3764862 - DNA, 25 bp, Homo sapien
tttgcagtacagaaatcatttggag

SEQ ID NO: 3764863 - DNA, 25 bp, Homo sapien
ttgcagtacagaaatcatttggagc

SEQ ID NO: 3764864 - DNA, 25 bp, Homo sapien
taaagcgggtcaagtgtagtgcatc

SEQ ID NO: 3764865 - DNA, 25 bp, Homo sapien
ttgggacagcatccggaagttttcc

SEQ ID NO: 3764866 - DNA, 25 bp, Homo sapien
ggctattcagcattggcagttacca

SEQ ID NO: 3764867 - DNA, 25 bp, Homo sapien
gaatattccacggtttgggacagca

SEQ ID NO: 3764868 - DNA, 25 bp, Homo sapien
caaacattgggataccgacacagac

SEQ ID NO: 3764869 - DNA, 25 bp, Homo sapien
agagcgctgtgccagtaaatactcc

SEQ ID NO: 3764870 - DNA, 25 bp, Homo sapien
tatgtgggcataaaattctaaccaa

SEQ ID NO: 3764871 - DNA, 25 bp, Homo sapien
atgtgggcataaaattctaaccaaa

SEQ ID NO: 3764872 - DNA, 25 bp, Homo sapien
tgtatgtggtgttttaacctaataa

SEQ ID NO: 3764873 - DNA, 25 bp, Homo sapien
tgtgggcataaaattctaaccaaac

SEQ ID NO: 3764874 - DNA, 25 bp, Homo sapien
ttggttagaattttatgcccacata

SEQ ID NO: 3764875 - DNA, 25 bp, Homo sapien
gtttggttagaattttatgcccaca

SEQ ID NO: 3764876 - DNA, 25 bp, Homo sapien
tttggttagaattttatgcccacat

SEQ ID NO: 3764877 - DNA, 25 bp, Homo sapien
ttattaggttaaaacaccacataca

SEQ ID NO: 3764878 - DNA, 25 bp, Homo sapien
caagttgtctgtgtcggtatcccaa

SEQ ID NO: 3764879 - DNA, 25 bp, Homo sapien
gaaaacttccggatgctgtcccaaa

SEQ ID NO: 3764880 - DNA, 25 bp, Homo sapien
ggtaactgccaatgctgaatagcca

SEQ ID NO: 3764881 - DNA, 25 bp, Homo sapien
ggagtatttactggcacagcgctct

SEQ ID NO: 3764882 - DNA, 25 bp, Homo sapien
gcagcagcacatagctacactgatt

SEQ ID NO: 3764883 - DNA, 25 bp, Homo sapien
gatgcactacacttgacccgcttta

SEQ ID NO: 3764884 - DNA, 25 bp, Homo sapien
ccaccactcattttgagacaacgtg

SEQ ID NO: 3764885 - DNA, 25 bp, Homo sapien
gaatgacatctatggggaagactaa

SEQ ID NO: 3764886 - DNA, 25 bp, Homo sapien
cattttgagacaacgtgtgatgaca

SEQ ID NO: 3764887 - DNA, 25 bp, Homo sapien
cactcattttgagacaacgtgtgat

SEQ ID NO: 3764888 - DNA, 25 bp, Homo sapien
atttcccgcacatatgatgccacca

SEQ ID NO: 3764889 - DNA, 25 bp, Homo sapien
atgatgccaccactcattttgagac

SEQ ID NO: 3764890 - DNA, 25 bp, Homo sapien
tagtcttccccatagatgtcattct

SEQ ID NO: 3764891 - DNA, 25 bp, Homo sapien
tcacacgttgtctcaaaatgagtgg

SEQ ID NO: 3764892 - DNA, 25 bp, Homo sapien
gtctcaaaatgagtggtggcatcat

SEQ ID NO: 3764893 - DNA, 25 bp, Homo sapien
tggtggcatcatatgtgcgggaaat

SEQ ID NO: 3764894 - DNA, 25 bp, Homo sapien
cacgttgtctcaaaatgagtggtgg

SEQ ID NO: 3764895 - DNA, 25 bp, Homo sapien
tgtcatcacacgttgtctcaaaatg

SEQ ID NO: 3764896 - DNA, 25 bp, Homo sapien
gaagacatccctccatggtcttaag

SEQ ID NO: 3764897 - DNA, 25 bp, Homo sapien
atatgggcaggtttcactggaagac

SEQ ID NO: 3764898 - DNA, 25 bp, Homo sapien
gacatccctccatggtcttaagtct

SEQ ID NO: 3764899 - DNA, 25 bp, Homo sapien
cctccatggtcttaagtcttcgtaa

SEQ ID NO: 3764900 - DNA, 25 bp, Homo sapien
gatatgggcaggtttcactggaaga

SEQ ID NO: 3764901 - DNA, 25 bp, Homo sapien
ccatggtcttaagtcttcgtaattt

SEQ ID NO: 3764902 - DNA, 25 bp, Homo sapien
gtcttccagtgaaacctgcccatat

SEQ ID NO: 3764903 - DNA, 25 bp, Homo sapien
gacttaagaccatggagggatgtct

SEQ ID NO: 3764904 - DNA, 25 bp, Homo sapien
ttacgaagacttaagaccatggagg

SEQ ID NO: 3764905 - DNA, 25 bp, Homo sapien
cgaagacttaagaccatggagggat

SEQ ID NO: 3764906 - DNA, 25 bp, Homo sapien
aaaattacgaagacttaagaccatg

SEQ ID NO: 3764907 - DNA, 25 bp, Homo sapien
cttaagaccatggagggatgtcttc

SEQ ID NO: 3764908 - DNA, 25 bp, Homo sapien
tgacctcctggtaccaaaagacttg

SEQ ID NO: 3764909 - DNA, 25 bp, Homo sapien
tcagtgacctcctggtaccaaaaga

SEQ ID NO: 3764910 - DNA, 25 bp, Homo sapien
catcagtgacctcctggtaccaaaa

SEQ ID NO: 3764911 - DNA, 25 bp, Homo sapien
caaaagacttgggaacagaaagcca

SEQ ID NO: 3764912 - DNA, 25 bp, Homo sapien
agcatcagtgacctcctggtaccaa

SEQ ID NO: 3764913 - DNA, 25 bp, Homo sapien
gcatcagtgacctcctggtaccaaa

SEQ ID NO: 3764914 - DNA, 25 bp, Homo sapien
caagtcttttggtaccaggaggtca

SEQ ID NO: 3764915 - DNA, 25 bp, Homo sapien
ttttggtaccaggaggtcactgatg

SEQ ID NO: 3764916 - DNA, 25 bp, Homo sapien
tcttttggtaccaggaggtcactga

SEQ ID NO: 3764917 - DNA, 25 bp, Homo sapien
tttggtaccaggaggtcactgatgc

SEQ ID NO: 3764918 - DNA, 25 bp, Homo sapien
ttggtaccaggaggtcactgatgct

SEQ ID NO: 3764919 - DNA, 25 bp, Homo sapien
tggctttctgttcccaagtcttttg

SEQ ID NO: 3764920 - DNA, 25 bp, Homo sapien
ggattcatctgtacctctcagttga

SEQ ID NO: 3764921 - DNA, 25 bp, Homo sapien
ggaccagctcacctgactgaattct

SEQ ID NO: 3764922 - DNA, 25 bp, Homo sapien
tacctctcagttgacctcaggcaga

SEQ ID NO: 3764923 - DNA, 25 bp, Homo sapien
gctctgtgggattcatctgtacctc

SEQ ID NO: 3764924 - DNA, 25 bp, Homo sapien
ccatggtgggacgaatgtgagggca

SEQ ID NO: 3764925 - DNA, 25 bp, Homo sapien
tatatctgccgagatgcaaactgag

SEQ ID NO: 3764926 - DNA, 25 bp, Homo sapien
gaggtacagatgaatcccacagagc

SEQ ID NO: 3764927 - DNA, 25 bp, Homo sapien
tgcatctcggcagatataaaagaac

SEQ ID NO: 3764928 - DNA, 25 bp, Homo sapien
agaattcagtcaggtgagctggtcc

SEQ ID NO: 3764929 - DNA, 25 bp, Homo sapien
tcaactgagaggtacagatgaatcc

SEQ ID NO: 3764930 - DNA, 25 bp, Homo sapien
tctgcctgaggtcaactgagaggta

SEQ ID NO: 3764931 - DNA, 25 bp, Homo sapien
ctcagtttgcatctcggcagatata

SEQ ID NO: 3764932 - DNA, 25 bp, Homo sapien
cgtctgcatgatctcctttgcgcac

SEQ ID NO: 3764933 - DNA, 25 bp, Homo sapien
acgtctgcatgatctcctttgcgca

SEQ ID NO: 3764934 - DNA, 25 bp, Homo sapien
tacgtctgcatgatctcctttgcgc

SEQ ID NO: 3764935 - DNA, 25 bp, Homo sapien
ctacgtctgcatgatctcctttgcg

SEQ ID NO: 3764936 - DNA, 25 bp, Homo sapien
gcgcaaaggagatcatgcagacgta

SEQ ID NO: 3764937 - DNA, 25 bp, Homo sapien
gtgcgcaaaggagatcatgcagacg

SEQ ID NO: 3764938 - DNA, 25 bp, Homo sapien
cgcaaaggagatcatgcagacgtag

SEQ ID NO: 3764939 - DNA, 25 bp, Homo sapien
tgcgcaaaggagatcatgcagacgt

SEQ ID NO: 3764940 - DNA, 25 bp, Homo sapien
gcacaagggaagtacattgctatag

SEQ ID NO: 3764941 - DNA, 25 bp, Homo sapien
ggagctcttggaaccaattgaacag

SEQ ID NO: 3764942 - DNA, 25 bp, Homo sapien
tctgcatgatctcctttgcgcacaa

SEQ ID NO: 3764943 - DNA, 25 bp, Homo sapien
tatagttagtacaactgtggaaacc

SEQ ID NO: 3764944 - DNA, 25 bp, Homo sapien
tgcgcacaatgtagcagcacaaggg

SEQ ID NO: 3764945 - DNA, 25 bp, Homo sapien
gaaatcagaccagctttggagctct

SEQ ID NO: 3764946 - DNA, 25 bp, Homo sapien
taactgacccgagtatattcttgag

SEQ ID NO: 3764947 - DNA, 25 bp, Homo sapien
caggacatggctctaaaattgcaag

SEQ ID NO: 3764948 - DNA, 25 bp, Homo sapien
gacagattcaactcggagccagcct

SEQ ID NO: 3764949 - DNA, 25 bp, Homo sapien
ggacttgtgtccatcacctgtagaa

SEQ ID NO: 3764950 - DNA, 25 bp, Homo sapien
gcagcattgtgtcaacgcggacaga

SEQ ID NO: 3764951 - DNA, 25 bp, Homo sapien
tagccagttgtttgtaacccttcga

SEQ ID NO: 3764952 - DNA, 25 bp, Homo sapien
tactgttagttagagctgggagacg

SEQ ID NO: 3764953 - DNA, 25 bp, Homo sapien
tctgtccgcgttgacacaatgctgc

SEQ ID NO: 3764954 - DNA, 25 bp, Homo sapien
caattttagagccatgtcctgatca

SEQ ID NO: 3764955 - DNA, 25 bp, Homo sapien
ttctacaggtgatggacacaagtcc

SEQ ID NO: 3764956 - DNA, 25 bp, Homo sapien
tggctccgagttgaatctgtccgcg

SEQ ID NO: 3764957 - DNA, 25 bp, Homo sapien
catcgaagggttacaaacaactggc

SEQ ID NO: 3764958 - DNA, 25 bp, Homo sapien
aactcctgccagatcattattccac

SEQ ID NO: 3764959 - DNA, 25 bp, Homo sapien
caactcctgccagatcattattcca

SEQ ID NO: 3764960 - DNA, 25 bp, Homo sapien
gtggaataatgatctggcaggagtt

SEQ ID NO: 3764961 - DNA, 25 bp, Homo sapien
tggaataatgatctggcaggagttg

SEQ ID NO: 3764962 - DNA, 25 bp, Homo sapien
gctcgctgtaagcagctcatctgtg

SEQ ID NO: 3764963 - DNA, 25 bp, Homo sapien
gtaagcagctcatctgtgaccccag

SEQ ID NO: 3764964 - DNA, 25 bp, Homo sapien
tgctcgctgtaagcagctcatctgt

SEQ ID NO: 3764965 - DNA, 25 bp, Homo sapien
ttgctcgctgtaagcagctcatctg

SEQ ID NO: 3764966 - DNA, 25 bp, Homo sapien
attgctcgctgtaagcagctcatct

SEQ ID NO: 3764967 - DNA, 25 bp, Homo sapien
tcgctgtaagcagctcatctgtgac

SEQ ID NO: 3764968 - DNA, 25 bp, Homo sapien
cacagatgagctgcttacagcgagc

SEQ ID NO: 3764969 - DNA, 25 bp, Homo sapien
agatgagctgcttacagcgagcaat

SEQ ID NO: 3764970 - DNA, 25 bp, Homo sapien
tcacagatgagctgcttacagcgag

SEQ ID NO: 3764971 - DNA, 25 bp, Homo sapien
gtcacagatgagctgcttacagcga

SEQ ID NO: 3764972 - DNA, 25 bp, Homo sapien
gggtcacagatgagctgcttacagc

SEQ ID NO: 3764973 - DNA, 25 bp, Homo sapien
cagatgagctgcttacagcgagcaa

SEQ ID NO: 3764974 - DNA, 25 bp, Homo sapien
cccaggacggtttgttgaaatgact

SEQ ID NO: 3764975 - DNA, 25 bp, Homo sapien
tgttccagaattcaatcccttggga

SEQ ID NO: 3764976 - DNA, 25 bp, Homo sapien
gatacaaggaattactgccaactcc

SEQ ID NO: 3764977 - DNA, 25 bp, Homo sapien
tccaaactatgaacatgggatgtgt

SEQ ID NO: 3764978 - DNA, 25 bp, Homo sapien
aaaaatcactgtactgtggatgcga

SEQ ID NO: 3764979 - DNA, 25 bp, Homo sapien
caagctggactcaaagtcttgggct

SEQ ID NO: 3764980 - DNA, 25 bp, Homo sapien
gacattggagttggcagtaattcct

SEQ ID NO: 3764981 - DNA, 25 bp, Homo sapien
taatgacaaacgtatggaccaatga

SEQ ID NO: 3764982 - DNA, 25 bp, Homo sapien
caagggattgaattctggaacaacc

SEQ ID NO: 3764983 - DNA, 25 bp, Homo sapien
ccaatgaaacgaggagagagccaga

SEQ ID NO: 3764984 - DNA, 25 bp, Homo sapien
agtcatttcaacaaaccgtcctggg

SEQ ID NO: 3764985 - DNA, 25 bp, Homo sapien
gacactgaagcggacaaggatatag

SEQ ID NO: 3764986 - DNA, 25 bp, Homo sapien
catcattaatctggttctagtgcat

SEQ ID NO: 3764987 - DNA, 25 bp, Homo sapien
tacttgcaggccacctacacgggtg

SEQ ID NO: 3764988 - DNA, 25 bp, Homo sapien
ggttgtgcctgtctcccaaattttc

SEQ ID NO: 3764989 - DNA, 25 bp, Homo sapien
tggacactgatgcatatgatttctg

SEQ ID NO: 3764990 - DNA, 25 bp, Homo sapien
ctagtgcatgttctaatcagtaggt

SEQ ID NO: 3764991 - DNA, 25 bp, Homo sapien
tcagtaggtctgagaaggctctgca

SEQ ID NO: 3764992 - DNA, 25 bp, Homo sapien
cacccgtgtaggtggcctgcaagta

SEQ ID NO: 3764993 - DNA, 25 bp, Homo sapien
cagaaatcatatgcatcagtgtcca

SEQ ID NO: 3764994 - DNA, 25 bp, Homo sapien
aaaatgcagagccttctcagaccta

SEQ ID NO: 3764995 - DNA, 25 bp, Homo sapien
gaaaatttgggagacaggcacaacc

SEQ ID NO: 3764996 - DNA, 25 bp, Homo sapien
tatttagagctcacccataatgcat

SEQ ID NO: 3764997 - DNA, 25 bp, Homo sapien
acctactgattagaacatgcactag

SEQ ID NO: 3764998 - DNA, 25 bp, Homo sapien
gctatttatggaggtacctatatgc

SEQ ID NO: 3764999 - DNA, 25 bp, Homo sapien
ctatttatggaggtacctatatgct

SEQ ID NO: 3765000 - DNA, 25 bp, Homo sapien
atttatggaggtacctatatgctga

SEQ ID NO: 3765001 - DNA, 25 bp, Homo sapien
tttatggaggtacctatatgctgaa

SEQ ID NO: 3765002 - DNA, 25 bp, Homo sapien
tatttatggaggtacctatatgctg

SEQ ID NO: 3765003 - DNA, 25 bp, Homo sapien
ttcagcatataggtacctccataaa

SEQ ID NO: 3765004 - DNA, 25 bp, Homo sapien
tcagcatataggtacctccataaat

SEQ ID NO: 3765005 - DNA, 25 bp, Homo sapien
gcatataggtacctccataaatagc

SEQ ID NO: 3765006 - DNA, 25 bp, Homo sapien
agcatataggtacctccataaatag

SEQ ID NO: 3765007 - DNA, 25 bp, Homo sapien
cagcatataggtacctccataaata

SEQ ID NO: 3765008 - DNA, 25 bp, Homo sapien
gccattagtgtctcaggtctgctca

SEQ ID NO: 3765009 - DNA, 25 bp, Homo sapien
caaagtggtggcattaggcgtgaac

SEQ ID NO: 3765010 - DNA, 25 bp, Homo sapien
taccgtgctgagatgaatccgtacg

SEQ ID NO: 3765011 - DNA, 25 bp, Homo sapien
tgcctctgatgtggatagtcccgcg

SEQ ID NO: 3765012 - DNA, 25 bp, Homo sapien
gaatgtatccgagtcacacagcacc

SEQ ID NO: 3765013 - DNA, 25 bp, Homo sapien
gctgtaccatgttgcaaggactagg

SEQ ID NO: 3765014 - DNA, 25 bp, Homo sapien
tgagcagacctgagacactaatggc

SEQ ID NO: 3765015 - DNA, 25 bp, Homo sapien
cacttgcgcgtgtgacgtcatggca

SEQ ID NO: 3765016 - DNA, 25 bp, Homo sapien
gcgggactatccacatcagaggcaa

SEQ ID NO: 3765017 - DNA, 25 bp, Homo sapien
gaaaataatggatccctcaacctgg

SEQ ID NO: 3765018 - DNA, 25 bp, Homo sapien
aaaatggccttgtgcagtcgcggga

SEQ ID NO: 3765019 - DNA, 25 bp, Homo sapien
aagtttcacaaaagagggagcctca

SEQ ID NO: 3765020 - DNA, 25 bp, Homo sapien
tattttttgtggagatagtgtttca

SEQ ID NO: 3765021 - DNA, 25 bp, Homo sapien
tttgtggagatagtgtttcaccatg

SEQ ID NO: 3765022 - DNA, 25 bp, Homo sapien
tttttgtggagatagtgtttcacca

SEQ ID NO: 3765023 - DNA, 25 bp, Homo sapien
tggagatagtgtttcaccatgttgg

SEQ ID NO: 3765024 - DNA, 25 bp, Homo sapien
tttcaggcacctgccatcatgcccg

SEQ ID NO: 3765025 - DNA, 25 bp, Homo sapien
tgtggagatagtgtttcaccatgtt

SEQ ID NO: 3765026 - DNA, 25 bp, Homo sapien
caacatggtgaaacactatctccac

SEQ ID NO: 3765027 - DNA, 25 bp, Homo sapien
catggtgaaacactatctccacaaa

SEQ ID NO: 3765028 - DNA, 25 bp, Homo sapien
gaaacactatctccacaaaaaatac

SEQ ID NO: 3765029 - DNA, 25 bp, Homo sapien
gccgggcatgatggcaggtgcctga

SEQ ID NO: 3765030 - DNA, 25 bp, Homo sapien
ggtgaaacactatctccacaaaaaa

SEQ ID NO: 3765031 - DNA, 25 bp, Homo sapien
ccaacatggtgaaacactatctcca

SEQ ID NO: 3765032 - DNA, 25 bp, Homo sapien
tacattaggtacttctagtgctatc

SEQ ID NO: 3765033 - DNA, 25 bp, Homo sapien
catctacattaggtacttctagtgc

SEQ ID NO: 3765034 - DNA, 25 bp, Homo sapien
gcactagaagtacctaatgtagatg

SEQ ID NO: 3765035 - DNA, 25 bp, Homo sapien
gatagcactagaagtacctaatgta

SEQ ID NO: 3765036 - DNA, 25 bp, Homo sapien
ggtacttctagtgctatccctccct

SEQ ID NO: 3765037 - DNA, 25 bp, Homo sapien
taggtacttctagtgctatccctcc

SEQ ID NO: 3765038 - DNA, 25 bp, Homo sapien
ttaggtacttctagtgctatccctc

SEQ ID NO: 3765039 - DNA, 25 bp, Homo sapien
tacattaggtacttctagtgctatc

SEQ ID NO: 3765040 - DNA, 25 bp, Homo sapien
tacttctagtgctatccctccctag

SEQ ID NO: 3765041 - DNA, 25 bp, Homo sapien
catctacattaggtacttctagtgc

SEQ ID NO: 3765042 - DNA, 25 bp, Homo sapien
tagggagggatagcactagaagtac

SEQ ID NO: 3765043 - DNA, 25 bp, Homo sapien
gcactagaagtacctaatgtagatg

SEQ ID NO: 3765044 - DNA, 25 bp, Homo sapien
ctagggagggatagcactagaagta

SEQ ID NO: 3765045 - DNA, 25 bp, Homo sapien
gatagcactagaagtacctaatgta

SEQ ID NO: 3765046 - DNA, 25 bp, Homo sapien
gagggatagcactagaagtacctaa

SEQ ID NO: 3765047 - DNA, 25 bp, Homo sapien
gggagggatagcactagaagtacct

SEQ ID NO: 3765048 - DNA, 25 bp, Homo sapien
gggtgttcgcatttccatatacgtt

SEQ ID NO: 3765049 - DNA, 25 bp, Homo sapien
aatctctttgtactgatgccgctgt

SEQ ID NO: 3765050 - DNA, 25 bp, Homo sapien
gaagtaggtgataacactttcgcca

SEQ ID NO: 3765051 - DNA, 25 bp, Homo sapien
gaaattgtttgctgctggtatacag

SEQ ID NO: 3765052 - DNA, 25 bp, Homo sapien
gaattatccttctacacagtcatgt

SEQ ID NO: 3765053 - DNA, 25 bp, Homo sapien
cagctttcactgtagagatctatca

SEQ ID NO: 3765054 - DNA, 25 bp, Homo sapien
caagatcataggatacaacgtcaac

SEQ ID NO: 3765055 - DNA, 25 bp, Homo sapien
cgtatatggaaatgcgaacacccaa

SEQ ID NO: 3765056 - DNA, 25 bp, Homo sapien
aaagttggcgaaagtgttatcacct

SEQ ID NO: 3765057 - DNA, 25 bp, Homo sapien
tgtataccagcagcaaacaatttca

SEQ ID NO: 3765058 - DNA, 25 bp, Homo sapien
tgatagatctctacagtgaaagctg

SEQ ID NO: 3765059 - DNA, 25 bp, Homo sapien
taacagcggcatcagtacaaagaga

SEQ ID NO: 3765060 - DNA, 25 bp, Homo sapien
tgagcctccttaagttatcagccag

SEQ ID NO: 3765061 - DNA, 25 bp, Homo sapien
gagcctccttaagttatcagccagt

SEQ ID NO: 3765062 - DNA, 25 bp, Homo sapien
tcttgagcctccttaagttatcagc

SEQ ID NO: 3765063 - DNA, 25 bp, Homo sapien
gcctccttaagttatcagccagtaa

SEQ ID NO: 3765064 - DNA, 25 bp, Homo sapien
cctccttaagttatcagccagtaat

SEQ ID NO: 3765065 - DNA, 25 bp, Homo sapien
tccttaagttatcagccagtaattt

SEQ ID NO: 3765066 - DNA, 25 bp, Homo sapien
ctggctgataacttaaggaggctca

SEQ ID NO: 3765067 - DNA, 25 bp, Homo sapien
ctgataacttaaggaggctcaagat

SEQ ID NO: 3765068 - DNA, 25 bp, Homo sapien
ggctgataacttaaggaggctcaag

SEQ ID NO: 3765069 - DNA, 25 bp, Homo sapien
aaattactggctgataacttaagga

SEQ ID NO: 3765070 - DNA, 25 bp, Homo sapien
ttactggctgataacttaaggaggc

SEQ ID NO: 3765071 - DNA, 25 bp, Homo sapien
tactggctgataacttaaggaggct

SEQ ID NO: 3765072 - DNA, 25 bp, Homo sapien
taagtgctggtatccacgcctgaga

SEQ ID NO: 3765073 - DNA, 25 bp, Homo sapien
cagggttctttgacactctgaaaag

SEQ ID NO: 3765074 - DNA, 25 bp, Homo sapien
cagccaatacaaaaccagcgcactt

SEQ ID NO: 3765075 - DNA, 25 bp, Homo sapien
actgggcggctagatcaagaagaga

SEQ ID NO: 3765076 - DNA, 25 bp, Homo sapien
tgctcttgtaagtgccaactcctgg

SEQ ID NO: 3765077 - DNA, 25 bp, Homo sapien
tagagcctgattatctccactgggc

SEQ ID NO: 3765078 - DNA, 25 bp, Homo sapien
aaatttcagagttcgaagacaaggc

SEQ ID NO: 3765079 - DNA, 25 bp, Homo sapien
gccttgtcttcgaactctgaaattt

SEQ ID NO: 3765080 - DNA, 25 bp, Homo sapien
tagccgcccagtggagataatcagg

SEQ ID NO: 3765081 - DNA, 25 bp, Homo sapien
caggagttggcacttacaagagcac

SEQ ID NO: 3765082 - DNA, 25 bp, Homo sapien
taagtgcgctggttttgtattggct

SEQ ID NO: 3765083 - DNA, 25 bp, Homo sapien
tctcaggcgtggataccagcactta

SEQ ID NO: 3765084 - DNA, 25 bp, Homo sapien
ttctcttcttgatctagccgcccag

SEQ ID NO: 3765085 - DNA, 25 bp, Homo sapien
ttttcagagtgtcaaagaaccctgt

SEQ ID NO: 3765086 - DNA, 25 bp, Homo sapien
cactctatggccttggagaactgcc

SEQ ID NO: 3765087 - DNA, 25 bp, Homo sapien
ccactctatggccttggagaactgc

SEQ ID NO: 3765088 - DNA, 25 bp, Homo sapien
gcagttctccaaggccatagagtgg

SEQ ID NO: 3765089 - DNA, 25 bp, Homo sapien
ggcagttctccaaggccatagagtg

SEQ ID NO: 3765090 - DNA, 25 bp, Homo sapien
actctatggccttggagaactgccc

SEQ ID NO: 3765091 - DNA, 25 bp, Homo sapien
gagaactgccccaaggatttgcaag

SEQ ID NO: 3765092 - DNA, 25 bp, Homo sapien
ggcaagatatggcaaaagcccatac

SEQ ID NO: 3765093 - DNA, 25 bp, Homo sapien
agatatggcaaaagcccataccttt

SEQ ID NO: 3765094 - DNA, 25 bp, Homo sapien
tctttggcaagatatggcaaaagcc

SEQ ID NO: 3765095 - DNA, 25 bp, Homo sapien
tggcaaaagcccatacctttatcca

SEQ ID NO: 3765096 - DNA, 25 bp, Homo sapien
aaaggtatgggcttttgccatatct

SEQ ID NO: 3765097 - DNA, 25 bp, Homo sapien
ggcttttgccatatcttgccaaaga

SEQ ID NO: 3765098 - DNA, 25 bp, Homo sapien
gggcagttctccaaggccatagagt

SEQ ID NO: 3765099 - DNA, 25 bp, Homo sapien
gtatgggcttttgccatatcttgcc

SEQ ID NO: 3765100 - DNA, 25 bp, Homo sapien
tggataaaggtatgggcttttgcca

SEQ ID NO: 3765101 - DNA, 25 bp, Homo sapien
catagagtggataaaggtatgggct

SEQ ID NO: 3765102 - DNA, 25 bp, Homo sapien
aaccgtgttatgaaaccattaatag

SEQ ID NO: 3765103 - DNA, 25 bp, Homo sapien
atcaaccgtgttatgaaaccattaa

SEQ ID NO: 3765104 - DNA, 25 bp, Homo sapien
tcaaccgtgttatgaaaccattaat

SEQ ID NO: 3765105 - DNA, 25 bp, Homo sapien
caaccgtgttatgaaaccattaata

SEQ ID NO: 3765106 - DNA, 25 bp, Homo sapien
accgtgttatgaaaccattaataga

SEQ ID NO: 3765107 - DNA, 25 bp, Homo sapien
tatgaaaccattaatagaattaaac

SEQ ID NO: 3765108 - DNA, 25 bp, Homo sapien
tctattaatggtttcataacacggt

SEQ ID NO: 3765109 - DNA, 25 bp, Homo sapien
tattaatggtttcataacacggttg

SEQ ID NO: 3765110 - DNA, 25 bp, Homo sapien
attaatggtttcataacacggttga

SEQ ID NO: 3765111 - DNA, 25 bp, Homo sapien
ttaatggtttcataacacggttgat

SEQ ID NO: 3765112 - DNA, 25 bp, Homo sapien
ctattaatggtttcataacacggtt

SEQ ID NO: 3765113 - DNA, 25 bp, Homo sapien
attctattaatggtttcataacacg

SEQ ID NO: 3765114 - DNA, 25 bp, Homo sapien
gccatattgcactatgaatgaagag

SEQ ID NO: 3765115 - DNA, 25 bp, Homo sapien
atgaagaggttctagttgaaattag

SEQ ID NO: 3765116 - DNA, 25 bp, Homo sapien
aatacttagccatattgcactatga

SEQ ID NO: 3765117 - DNA, 25 bp, Homo sapien
aaatataaaggtagtgggccaggtg

SEQ ID NO: 3765118 - DNA, 25 bp, Homo sapien
tgcactatgaatgaagaggttctag

SEQ ID NO: 3765119 - DNA, 25 bp, Homo sapien
caaaacaaatacttagccatattgc

SEQ ID NO: 3765120 - DNA, 25 bp, Homo sapien
aactagaacctcttcattcatagtg

SEQ ID NO: 3765121 - DNA, 25 bp, Homo sapien
cattcatagtgcaatatggctaagt

SEQ ID NO: 3765122 - DNA, 25 bp, Homo sapien
ctaatttcaactagaacctcttcat

SEQ ID NO: 3765123 - DNA, 25 bp, Homo sapien
tagaacctcttcattcatagtgcaa

SEQ ID NO: 3765124 - DNA, 25 bp, Homo sapien
gcaatatggctaagtatttgttttg

SEQ ID NO: 3765125 - DNA, 25 bp, Homo sapien
cacctggcccactacctttatattt

SEQ ID NO: 3765126 - DNA, 25 bp, Homo sapien
caagaacttttgaaggcattgatcc

SEQ ID NO: 3765127 - DNA, 25 bp, Homo sapien
ttttgaaggcattgatcctaagaag

SEQ ID NO: 3765128 - DNA, 25 bp, Homo sapien
tgtttgaaaaacgtcgcttcaggaa

SEQ ID NO: 3765129 - DNA, 25 bp, Homo sapien
tgaaaaacgtcgcttcaggaaattc

SEQ ID NO: 3765130 - DNA, 25 bp, Homo sapien
gattgtttgaaaaacgtcgcttcag

SEQ ID NO: 3765131 - DNA, 25 bp, Homo sapien
gatccaagaacttttgaaggcattg

SEQ ID NO: 3765132 - DNA, 25 bp, Homo sapien
ttatagattttactggtcatgctct

SEQ ID NO: 3765133 - DNA, 25 bp, Homo sapien
tagattttactggtcatgctcttgc

SEQ ID NO: 3765134 - DNA, 25 bp, Homo sapien
ctggtcatgctcttgcactttacag

SEQ ID NO: 3765135 - DNA, 25 bp, Homo sapien
gattttactggtcatgctcttgcac

SEQ ID NO: 3765136 - DNA, 25 bp, Homo sapien
tactggtcatgctcttgcactttac

SEQ ID NO: 3765137 - DNA, 25 bp, Homo sapien
attttactggtcatgctcttgcact

SEQ ID NO: 3765138 - DNA, 25 bp, Homo sapien
tgcaagagcatgaccagtaaaatct

SEQ ID NO: 3765139 - DNA, 25 bp, Homo sapien
taaagtgcaagagcatgaccagtaa

SEQ ID NO: 3765140 - DNA, 25 bp, Homo sapien
agtgcaagagcatgaccagtaaaat

SEQ ID NO: 3765141 - DNA, 25 bp, Homo sapien
tgtaaagtgcaagagcatgaccagt

SEQ ID NO: 3765142 - DNA, 25 bp, Homo sapien
ctgtaaagtgcaagagcatgaccag

SEQ ID NO: 3765143 - DNA, 25 bp, Homo sapien
caagagcatgaccagtaaaatctat

SEQ ID NO: 3765144 - DNA, 25 bp, Homo sapien
caatgccttcaaaagttcttggatc

SEQ ID NO: 3765145 - DNA, 25 bp, Homo sapien
cttcttaggatcaatgccttcaaaa

SEQ ID NO: 3765146 - DNA, 25 bp, Homo sapien
taggatcaatgccttcaaaagttct

SEQ ID NO: 3765147 - DNA, 25 bp, Homo sapien
tgaagcgacgtttttcaaacaatcc

SEQ ID NO: 3765148 - DNA, 25 bp, Homo sapien
gatcaatgccttcaaaagttcttgg

SEQ ID NO: 3765149 - DNA, 25 bp, Homo sapien
gaatttcctgaagcgacgtttttca

SEQ ID NO: 3765150 - DNA, 25 bp, Homo sapien
tggacacctctgatctacataaaaa

SEQ ID NO: 3765151 - DNA, 25 bp, Homo sapien
tctacataaaaagtggcagttcaga

SEQ ID NO: 3765152 - DNA, 25 bp, Homo sapien
tatctacctagtagggactaggtgc

SEQ ID NO: 3765153 - DNA, 25 bp, Homo sapien
gaaggcatcagcatagataaatagt

SEQ ID NO: 3765154 - DNA, 25 bp, Homo sapien
cagaaaggcatatcccatggtgatc

SEQ ID NO: 3765155 - DNA, 25 bp, Homo sapien
tgagaaggacgctttaaataaagtg

SEQ ID NO: 3765156 - DNA, 25 bp, Homo sapien
cactttatttaaagcgtccttctca

SEQ ID NO: 3765157 - DNA, 25 bp, Homo sapien
ctatttatctatgctgatgccttcc

SEQ ID NO: 3765158 - DNA, 25 bp, Homo sapien
tctgaactgccactttttatgtaga

SEQ ID NO: 3765159 - DNA, 25 bp, Homo sapien
gcacctagtccctactaggtagata

SEQ ID NO: 3765160 - DNA, 25 bp, Homo sapien
ttttatgtagatcagaggtgtccaa

SEQ ID NO: 3765161 - DNA, 25 bp, Homo sapien
gatcaccatgggatatgcctttctg

SEQ ID NO: 3765162 - DNA, 25 bp, Homo sapien
aaatcatttggccggctactgtggc

SEQ ID NO: 3765163 - DNA, 25 bp, Homo sapien
aaaatcatttggccggctactgtgg

SEQ ID NO: 3765164 - DNA, 25 bp, Homo sapien
aatcatttggccggctactgtggct

SEQ ID NO: 3765165 - DNA, 25 bp, Homo sapien
atcatttggccggctactgtggctc

SEQ ID NO: 3765166 - DNA, 25 bp, Homo sapien
gagccacagtagccggccaaatgat

SEQ ID NO: 3765167 - DNA, 25 bp, Homo sapien
ccacagtagccggccaaatgatttt

SEQ ID NO: 3765168 - DNA, 25 bp, Homo sapien
agccacagtagccggccaaatgatt

SEQ ID NO: 3765169 - DNA, 25 bp, Homo sapien
gccacagtagccggccaaatgattt

SEQ ID NO: 3765170 - DNA, 25 bp, Homo sapien
tctgctgggcatgttgctgtgcacc

SEQ ID NO: 3765171 - DNA, 25 bp, Homo sapien
tcatttggccggctactgtggctca

SEQ ID NO: 3765172 - DNA, 25 bp, Homo sapien
aatagtcactgcacctctagcctgg

SEQ ID NO: 3765173 - DNA, 25 bp, Homo sapien
tactgtgctatgttcacacctggga

SEQ ID NO: 3765174 - DNA, 25 bp, Homo sapien
tgaacccaggcatttgaggctgtac

SEQ ID NO: 3765175 - DNA, 25 bp, Homo sapien
tgtaatcctagccacttggtaggcc

SEQ ID NO: 3765176 - DNA, 25 bp, Homo sapien
gatatatcgtccaggctagaggtgc

SEQ ID NO: 3765177 - DNA, 25 bp, Homo sapien
tagaggtgcagtgactattcccagg

SEQ ID NO: 3765178 - DNA, 25 bp, Homo sapien
tgagccacagtagccggccaaatga

SEQ ID NO: 3765179 - DNA, 25 bp, Homo sapien
cacagtacagcctcaaatgcctggg

SEQ ID NO: 3765180 - DNA, 25 bp, Homo sapien
tattcccaggtgtgaacatagcaca

SEQ ID NO: 3765181 - DNA, 25 bp, Homo sapien
gattacaggtgcacagcaacatgcc

SEQ ID NO: 3765182 - DNA, 25 bp, Homo sapien
gttttttgagactgagctttgctct

SEQ ID NO: 3765183 - DNA, 25 bp, Homo sapien
ccccaagtatctgggataacaggca

SEQ ID NO: 3765184 - DNA, 25 bp, Homo sapien
ccgcacctggccttgtgataatgta

SEQ ID NO: 3765185 - DNA, 25 bp, Homo sapien
ggctggagttcaatggtgtaatctt

SEQ ID NO: 3765186 - DNA, 25 bp, Homo sapien
tttgttttttgagactgagctttgc

SEQ ID NO: 3765187 - DNA, 25 bp, Homo sapien
taagctatagaaaagacagtgccct

SEQ ID NO: 3765188 - DNA, 25 bp, Homo sapien
gagcaaagctcagtctcaaaaaaca

SEQ ID NO: 3765189 - DNA, 25 bp, Homo sapien
tgcctgttatcccagatacttgggg

SEQ ID NO: 3765190 - DNA, 25 bp, Homo sapien
tacattatcacaaggccaggtgcgg

SEQ ID NO: 3765191 - DNA, 25 bp, Homo sapien
agagcaaagctcagtctcaaaaaac

SEQ ID NO: 3765192 - DNA, 25 bp, Homo sapien
aagattacaccattgaactccagcc

SEQ ID NO: 3765193 - DNA, 25 bp, Homo sapien
gcaaagctcagtctcaaaaaacaaa

SEQ ID NO: 3765194 - DNA, 25 bp, Homo sapien
cactttcagagattaagacttcaag

SEQ ID NO: 3765195 - DNA, 25 bp, Homo sapien
aaagaggcatatcccaccatgcatg

SEQ ID NO: 3765196 - DNA, 25 bp, Homo sapien
catgcatgcctatagtggtataatt

SEQ ID NO: 3765197 - DNA, 25 bp, Homo sapien
tgtcccaaagtcttagcactacagg

SEQ ID NO: 3765198 - DNA, 25 bp, Homo sapien
tcaagacttttgacacttctgaaac

SEQ ID NO: 3765199 - DNA, 25 bp, Homo sapien
tacacatgcctataatggtgcaatt

SEQ ID NO: 3765200 - DNA, 25 bp, Homo sapien
catgcatggtgggatatgcctcttt

SEQ ID NO: 3765201 - DNA, 25 bp, Homo sapien
cctgtagtgctaagactttgggaca

SEQ ID NO: 3765202 - DNA, 25 bp, Homo sapien
aattataccactataggcatgcatg

SEQ ID NO: 3765203 - DNA, 25 bp, Homo sapien
cctagacaattatagcaagacccca

SEQ ID NO: 3765204 - DNA, 25 bp, Homo sapien
gtttcagaagtgtcaaaagtcttga

SEQ ID NO: 3765205 - DNA, 25 bp, Homo sapien
tgatctaagagggttaaaactcact

SEQ ID NO: 3765206 - DNA, 25 bp, Homo sapien
tacaaggttccttccactgaagcag

SEQ ID NO: 3765207 - DNA, 25 bp, Homo sapien
gctgctttatacagaggtaactcgc

SEQ ID NO: 3765208 - DNA, 25 bp, Homo sapien
cactgaagcagaagccctggcatct

SEQ ID NO: 3765209 - DNA, 25 bp, Homo sapien
ggtaactcgctatctggattttaaa

SEQ ID NO: 3765210 - DNA, 25 bp, Homo sapien
gtctataagggtggaaaaatctaca

SEQ ID NO: 3765211 - DNA, 25 bp, Homo sapien
gattttaaagtgactgaagggagct

SEQ ID NO: 3765212 - DNA, 25 bp, Homo sapien
cgagttacctctgtataaagcagca

SEQ ID NO: 3765213 - DNA, 25 bp, Homo sapien
cagggcttctgcttcagtggaagga

SEQ ID NO: 3765214 - DNA, 25 bp, Homo sapien
cccttatagacaaagctcccttcag

SEQ ID NO: 3765215 - DNA, 25 bp, Homo sapien
tgtagatttttccacccttatagac

SEQ ID NO: 3765216 - DNA, 25 bp, Homo sapien
tcccttcagtcactttaaaatccag

SEQ ID NO: 3765217 - DNA, 25 bp, Homo sapien
ttaaaatccagatagcgagttacct

SEQ ID NO: 3765218 - DNA, 25 bp, Homo sapien
aaaataccaggatcaccacccgagt

SEQ ID NO: 3765219 - DNA, 25 bp, Homo sapien
ccaggatcaccacccgagtcaatgg

SEQ ID NO: 3765220 - DNA, 25 bp, Homo sapien
taccaggatcaccacccgagtcaat

SEQ ID NO: 3765221 - DNA, 25 bp, Homo sapien
ttaaaataccaggatcaccacccga

SEQ ID NO: 3765222 - DNA, 25 bp, Homo sapien
tcaccacccgagtcaatggggagag

SEQ ID NO: 3765223 - DNA, 25 bp, Homo sapien
aataccaggatcaccacccgagtca

SEQ ID NO: 3765224 - DNA, 25 bp, Homo sapien
gactcgggtggtgatcctggtattt

SEQ ID NO: 3765225 - DNA, 25 bp, Homo sapien
tctccccattgactcgggtggtgat

SEQ ID NO: 3765226 - DNA, 25 bp, Homo sapien
tccccattgactcgggtggtgatcc

SEQ ID NO: 3765227 - DNA, 25 bp, Homo sapien
tcgggtggtgatcctggtattttaa

SEQ ID NO: 3765228 - DNA, 25 bp, Homo sapien
cattgactcgggtggtgatcctggt

SEQ ID NO: 3765229 - DNA, 25 bp, Homo sapien
cctctccccattgactcgggtggtg

SEQ ID NO: 3765230 - DNA, 25 bp, Homo sapien
tatggatcgaaacccttactacgga

SEQ ID NO: 3765231 - DNA, 25 bp, Homo sapien
atatggatcgaaacccttactacgg

SEQ ID NO: 3765232 - DNA, 25 bp, Homo sapien
tcatatggatcgaaacccttactac

SEQ ID NO: 3765233 - DNA, 25 bp, Homo sapien
catatggatcgaaacccttactacg

SEQ ID NO: 3765234 - DNA, 25 bp, Homo sapien
atggatcgaaacccttactacggag

SEQ ID NO: 3765235 - DNA, 25 bp, Homo sapien
gtagtaagggtttcgatccatatga

SEQ ID NO: 3765236 - DNA, 25 bp, Homo sapien
ctccgtagtaagggtttcgatccat

SEQ ID NO: 3765237 - DNA, 25 bp, Homo sapien
ccgtagtaagggtttcgatccatat

SEQ ID NO: 3765238 - DNA, 25 bp, Homo sapien
tccgtagtaagggtttcgatccata

SEQ ID NO: 3765239 - DNA, 25 bp, Homo sapien
cgtagtaagggtttcgatccatatg

SEQ ID NO: 3765240 - DNA, 25 bp, Homo sapien
tccgtagtaagggtttcgatccata

SEQ ID NO: 3765241 - DNA, 25 bp, Homo sapien
tatagatgcactctctcctccgtag

SEQ ID NO: 3765242 - DNA, 25 bp, Homo sapien
gatgcactctctcctccgtagtaag

SEQ ID NO: 3765243 - DNA, 25 bp, Homo sapien
gatccatatgaagaactttcttgcc

SEQ ID NO: 3765244 - DNA, 25 bp, Homo sapien
tcttccaatggtgttatagatgcac

SEQ ID NO: 3765245 - DNA, 25 bp, Homo sapien
cgtagtaagggtttcgatccatatg

SEQ ID NO: 3765246 - DNA, 25 bp, Homo sapien
ctcccgatagtagccgggtgccatg

SEQ ID NO: 3765247 - DNA, 25 bp, Homo sapien
tgaaaagctcccgatagtagccggg

SEQ ID NO: 3765248 - DNA, 25 bp, Homo sapien
caggtgatgccaagtcaggaaccac

SEQ ID NO: 3765249 - DNA, 25 bp, Homo sapien
gatttggatacaacctgaagtttgg

SEQ ID NO: 3765250 - DNA, 25 bp, Homo sapien
ggaaccacactgagatgccctgctt

SEQ ID NO: 3765251 - DNA, 25 bp, Homo sapien
gggttagccatacactctgaaaagc

SEQ ID NO: 3765252 - DNA, 25 bp, Homo sapien
tactatcgggagcttttcagagtgt

SEQ ID NO: 3765253 - DNA, 25 bp, Homo sapien
cagtgtggttcctgacttggcatca

SEQ ID NO: 3765254 - DNA, 25 bp, Homo sapien
caaacttcaggttgtatccaaatca

SEQ ID NO: 3765255 - DNA, 25 bp, Homo sapien
gcttttcagagtgtatggctaaccc

SEQ ID NO: 3765256 - DNA, 25 bp, Homo sapien
catggcacccggctactatcgggag

SEQ ID NO: 3765257 - DNA, 25 bp, Homo sapien
caagcagggcatctcagtgtggttc

SEQ ID NO: 3765258 - DNA, 25 bp, Homo sapien
gctccaagtggtgcctttgaaggta

SEQ ID NO: 3765259 - DNA, 25 bp, Homo sapien
tcagctctttggactcggccacatc

SEQ ID NO: 3765260 - DNA, 25 bp, Homo sapien
ttgctttacggccatagtccagtgg

SEQ ID NO: 3765261 - DNA, 25 bp, Homo sapien
cacatctttaaattactgggccctt

SEQ ID NO: 3765262 - DNA, 25 bp, Homo sapien
gaactagtgggcctgcagatttttt

SEQ ID NO: 3765263 - DNA, 25 bp, Homo sapien
gatcattaatatatactgtgcccag

SEQ ID NO: 3765264 - DNA, 25 bp, Homo sapien
taccttcaaaggcaccacttggagc

SEQ ID NO: 3765265 - DNA, 25 bp, Homo sapien
gagctgacagcaactaccttcaaag

SEQ ID NO: 3765266 - DNA, 25 bp, Homo sapien
taaaaaatctgcaggcccactagtt

SEQ ID NO: 3765267 - DNA, 25 bp, Homo sapien
tatggccgtaaagcaagcactgagg

SEQ ID NO: 3765268 - DNA, 25 bp, Homo sapien
gatgtggccgagtccaaagagctga

SEQ ID NO: 3765269 - DNA, 25 bp, Homo sapien
gcccagtaatttaaagatgtggccg

SEQ ID NO: 3765270 - DNA, 25 bp, Homo sapien
gagaaagcattaagtcccctaagag

SEQ ID NO: 3765271 - DNA, 25 bp, Homo sapien
gaccactggtagatgttcacatgcg

SEQ ID NO: 3765272 - DNA, 25 bp, Homo sapien
caaatgctgttacacttgggagctg

SEQ ID NO: 3765273 - DNA, 25 bp, Homo sapien
gcgtgatacactgcaattacctctg

SEQ ID NO: 3765274 - DNA, 25 bp, Homo sapien
cagcgttaagcatcctggccaaaag

SEQ ID NO: 3765275 - DNA, 25 bp, Homo sapien
catggtacctgattggagactctta

SEQ ID NO: 3765276 - DNA, 25 bp, Homo sapien
taacgctggtttaaactgcctacaa

SEQ ID NO: 3765277 - DNA, 25 bp, Homo sapien
taagagtctccaatcaggtaccatg

SEQ ID NO: 3765278 - DNA, 25 bp, Homo sapien
gcatgtgaacatctaccagtggtct

SEQ ID NO: 3765279 - DNA, 25 bp, Homo sapien
cttttggccaggatgcttaacgctg

SEQ ID NO: 3765280 - DNA, 25 bp, Homo sapien
cgagaacaagctacttatagacagg

SEQ ID NO: 3765281 - DNA, 25 bp, Homo sapien
cagaggtaattgcagtgtatcacgc

SEQ ID NO: 3765282 - DNA, 25 bp, Homo sapien
tttagatgtctctaggcaagagaaa

SEQ ID NO: 3765283 - DNA, 25 bp, Homo sapien
cacttttagatgtctctaggcaaga

SEQ ID NO: 3765284 - DNA, 25 bp, Homo sapien
ctaggcaagagaaaaccttcgaact

SEQ ID NO: 3765285 - DNA, 25 bp, Homo sapien
cttttagatgtctctaggcaagaga

SEQ ID NO: 3765286 - DNA, 25 bp, Homo sapien
taacacttttagatgtctctaggca

SEQ ID NO: 3765287 - DNA, 25 bp, Homo sapien
aacacttttagatgtctctaggcaa

SEQ ID NO: 3765288 - DNA, 25 bp, Homo sapien
ttgcctagagacatctaaaagtgtt

SEQ ID NO: 3765289 - DNA, 25 bp, Homo sapien
tctcttgcctagagacatctaaaag

SEQ ID NO: 3765290 - DNA, 25 bp, Homo sapien
tgcctagagacatctaaaagtgtta

SEQ ID NO: 3765291 - DNA, 25 bp, Homo sapien
agttcgaaggttttctcttgcctag

SEQ ID NO: 3765292 - DNA, 25 bp, Homo sapien
tttctcttgcctagagacatctaaa

SEQ ID NO: 3765293 - DNA, 25 bp, Homo sapien
tcttgcctagagacatctaaaagtg

SEQ ID NO: 3765294 - DNA, 25 bp, Homo sapien
atgaatgaggagtacgacgtgatcg

SEQ ID NO: 3765295 - DNA, 25 bp, Homo sapien
tgaggagtacgacgtgatcgtgctg

SEQ ID NO: 3765296 - DNA, 25 bp, Homo sapien
aatgaggagtacgacgtgatcgtgc

SEQ ID NO: 3765297 - DNA, 25 bp, Homo sapien
agtacgacgtgatcgtgctgggcac

SEQ ID NO: 3765298 - DNA, 25 bp, Homo sapien
tgaatgaggagtacgacgtgatcgt

SEQ ID NO: 3765299 - DNA, 25 bp, Homo sapien
atgaggagtacgacgtgatcgtgct

SEQ ID NO: 3765300 - DNA, 25 bp, Homo sapien
agcacgatcacgtcgtactcctcat

SEQ ID NO: 3765301 - DNA, 25 bp, Homo sapien
gcacgatcacgtcgtactcctcatt

SEQ ID NO: 3765302 - DNA, 25 bp, Homo sapien
cagcacgatcacgtcgtactcctca

SEQ ID NO: 3765303 - DNA, 25 bp, Homo sapien
cgatcacgtcgtactcctcattcat

SEQ ID NO: 3765304 - DNA, 25 bp, Homo sapien
acgatcacgtcgtactcctcattca

SEQ ID NO: 3765305 - DNA, 25 bp, Homo sapien
gtgcccagcacgatcacgtcgtact

SEQ ID NO: 3765306 - DNA, 25 bp, Homo sapien
tgcgccttttccttgctcgggtcct

SEQ ID NO: 3765307 - DNA, 25 bp, Homo sapien
cagttcttctcttcccgtctgaggt

SEQ ID NO: 3765308 - DNA, 25 bp, Homo sapien
cccggctgcggaggctcagtcacag

SEQ ID NO: 3765309 - DNA, 25 bp, Homo sapien
ctcttcccgtctgaggtggcggtcg

SEQ ID NO: 3765310 - DNA, 25 bp, Homo sapien
cttttccttgctcgggtcctgcgtc

SEQ ID NO: 3765311 - DNA, 25 bp, Homo sapien
tcccagcctcgtagggtggtcacgg

SEQ ID NO: 3765312 - DNA, 25 bp, Homo sapien
gacgcaggacccgagcaaggaaaag

SEQ ID NO: 3765313 - DNA, 25 bp, Homo sapien
ctgtgactgagcctccgcagccggg

SEQ ID NO: 3765314 - DNA, 25 bp, Homo sapien
cgtgaccaccctacgaggctgggag

SEQ ID NO: 3765315 - DNA, 25 bp, Homo sapien
gaccgccacctcagacgggaagaga

SEQ ID NO: 3765316 - DNA, 25 bp, Homo sapien
cacctcagacgggaagagaagaact

SEQ ID NO: 3765317 - DNA, 25 bp, Homo sapien
aggacccgagcaaggaaaaggcgca

SEQ ID NO: 3765318 - DNA, 25 bp, Homo sapien
aaactgttccttgcttgccttctac

SEQ ID NO: 3765319 - DNA, 25 bp, Homo sapien
ttagaaactgttccttgcttgcctt

SEQ ID NO: 3765320 - DNA, 25 bp, Homo sapien
gaaactgttccttgcttgccttcta

SEQ ID NO: 3765321 - DNA, 25 bp, Homo sapien
tagaaactgttccttgcttgccttc

SEQ ID NO: 3765322 - DNA, 25 bp, Homo sapien
gaccccacgaaagcctaagcaggtg

SEQ ID NO: 3765323 - DNA, 25 bp, Homo sapien
aggaatctctggcttcattgaggac

SEQ ID NO: 3765324 - DNA, 25 bp, Homo sapien
taagcaggtgaatttcgtaaagacg

SEQ ID NO: 3765325 - DNA, 25 bp, Homo sapien
cattgaggacacaggtgtaagcaga

SEQ ID NO: 3765326 - DNA, 25 bp, Homo sapien
tctcgatagtagctattcagagcct

SEQ ID NO: 3765327 - DNA, 25 bp, Homo sapien
agcagacaatgaagatttggcattc

SEQ ID NO: 3765328 - DNA, 25 bp, Homo sapien
ctgccttgatagaccgaacttgctc

SEQ ID NO: 3765329 - DNA, 25 bp, Homo sapien
cctcaaatacttctcgatagtagct

SEQ ID NO: 3765330 - DNA, 25 bp, Homo sapien
aagatatgttatattggaccatgga

SEQ ID NO: 3765331 - DNA, 25 bp, Homo sapien
cttgaagaagatatgttatattgga

SEQ ID NO: 3765332 - DNA, 25 bp, Homo sapien
gaagaagatatgttatattggacca

SEQ ID NO: 3765333 - DNA, 25 bp, Homo sapien
tatgttatattggaccatggatctt

SEQ ID NO: 3765334 - DNA, 25 bp, Homo sapien
agaaatatggctgccggaaatccac

SEQ ID NO: 3765335 - DNA, 25 bp, Homo sapien
tcagtccggtattaacagtattatg

SEQ ID NO: 3765336 - DNA, 25 bp, Homo sapien
acagaaatatggctgccggaaatcc

SEQ ID NO: 3765337 - DNA, 25 bp, Homo sapien
ccggtattaacagtattatgtgaca

SEQ ID NO: 3765338 - DNA, 25 bp, Homo sapien
tgagatggaggacggtgaaaggcac

SEQ ID NO: 3765339 - DNA, 25 bp, Homo sapien
tgaaaggcactgtgcggacctccct

SEQ ID NO: 3765340 - DNA, 25 bp, Homo sapien
ggcactgtgcggacctccctggctg

SEQ ID NO: 3765341 - DNA, 25 bp, Homo sapien
gaaactgagatggaggacggtgaaa

SEQ ID NO: 3765342 - DNA, 25 bp, Homo sapien
caggagtactaagccccagggctct

SEQ ID NO: 3765343 - DNA, 25 bp, Homo sapien
cagagagtcactggtgcaaggccga

SEQ ID NO: 3765344 - DNA, 25 bp, Homo sapien
ttaggatatgccacccagaagcaac

SEQ ID NO: 3765345 - DNA, 25 bp, Homo sapien
agggctctcccgctactgtgctgaa

SEQ ID NO: 3765346 - DNA, 25 bp, Homo sapien
caaaggtgctgtgagtccatgaggt

SEQ ID NO: 3765347 - DNA, 25 bp, Homo sapien
aggtgctgtgagtccatgaggtgct

SEQ ID NO: 3765348 - DNA, 25 bp, Homo sapien
aaggtgctgtgagtccatgaggtgc

SEQ ID NO: 3765349 - DNA, 25 bp, Homo sapien
ccaaaggtgctgtgagtccatgagg

SEQ ID NO: 3765350 - DNA, 25 bp, Homo sapien
cattttccatgtaatcgggagggca

SEQ ID NO: 3765351 - DNA, 25 bp, Homo sapien
ggctctgagaaatacgttttgttat

SEQ ID NO: 3765352 - DNA, 25 bp, Homo sapien
ggaggctctgagaaatacgttttgt

SEQ ID NO: 3765353 - DNA, 25 bp, Homo sapien
tttccatgtaatcgggagggcagag

SEQ ID NO: 3765354 - DNA, 25 bp, Homo sapien
gtccgagctctgaggtcacttacat

SEQ ID NO: 3765355 - DNA, 25 bp, Homo sapien
tggggtccgagctctgaggtcactt

SEQ ID NO: 3765356 - DNA, 25 bp, Homo sapien
ggctggggtccgagctctgaggtca

SEQ ID NO: 3765357 - DNA, 25 bp, Homo sapien
gggtccgagctctgaggtcacttac

SEQ ID NO: 3765358 - DNA, 25 bp, Homo sapien
gtcaggaacgccgttctggataact

SEQ ID NO: 3765359 - DNA, 25 bp, Homo sapien
ggcccgcagttcctgtttccgtcga

SEQ ID NO: 3765360 - DNA, 25 bp, Homo sapien
aacgccgttctggataactcgcatc

SEQ ID NO: 3765361 - DNA, 25 bp, Homo sapien
cccggcgagcgcagctgtgtgcagg

SEQ ID NO: 3765362 - DNA, 25 bp, Homo sapien
gagttgttgtcagcatgtttgccgc

SEQ ID NO: 3765363 - DNA, 25 bp, Homo sapien
catggccacgatgggccccggcagt

SEQ ID NO: 3765364 - DNA, 25 bp, Homo sapien
taaagggcgattatcaaaggactgc

SEQ ID NO: 3765365 - DNA, 25 bp, Homo sapien
aaagcatcggttgcgtttgctggag

SEQ ID NO: 3765366 - DNA, 25 bp, Homo sapien
ggctgtacaggtcgcatagcaccgg

SEQ ID NO: 3765367 - DNA, 25 bp, Homo sapien
acaggtcgcatagcaccggcaacag

SEQ ID NO: 3765368 - DNA, 25 bp, Homo sapien
ctgtacaggtcgcatagcaccggca

SEQ ID NO: 3765369 - DNA, 25 bp, Homo sapien
ggtcgcatagcaccggcaacagctt

SEQ ID NO: 3765370 - DNA, 25 bp, Homo sapien
tgaacccaggaccttctgcgtgtaa

SEQ ID NO: 3765371 - DNA, 25 bp, Homo sapien
tctgcgtgtaaagcagatgtgataa

SEQ ID NO: 3765372 - DNA, 25 bp, Homo sapien
tgtaaagcagatgtgataaccacta

SEQ ID NO: 3765373 - DNA, 25 bp, Homo sapien
gcttgaacccaggaccttctgcgtg

SEQ ID NO: 3765374 - DNA, 25 bp, Homo sapien
ttgaggcctaggtctgaagtacagc

SEQ ID NO: 3765375 - DNA, 25 bp, Homo sapien
tcatttggcctctcgactgtagcag

SEQ ID NO: 3765376 - DNA, 25 bp, Homo sapien
cttgagtttcggaaagcagaagcga

SEQ ID NO: 3765377 - DNA, 25 bp, Homo sapien
caaaggctgcaagtgattttctgtg

SEQ ID NO: 3765378 - DNA, 25 bp, Homo sapien
aataaagcgcatgagtgttacatca

SEQ ID NO: 3765379 - DNA, 25 bp, Homo sapien
tataaccttattcaaatccatgggt

SEQ ID NO: 3765380 - DNA, 25 bp, Homo sapien
cgtaagatacagtaactgacccagg

SEQ ID NO: 3765381 - DNA, 25 bp, Homo sapien
taattccttgaaggcataccatgtg

SEQ ID NO: 3765382 - DNA, 25 bp, Homo sapien
tttggttatcagataaccctttgtg

SEQ ID NO: 3765383 - DNA, 25 bp, Homo sapien
ggttatcagataaccctttgtgaaa

SEQ ID NO: 3765384 - DNA, 25 bp, Homo sapien
ttaagtggcttagatgaaatgtctt

SEQ ID NO: 3765385 - DNA, 25 bp, Homo sapien
tggttatcagataaccctttgtgaa

SEQ ID NO: 3765386 - DNA, 25 bp, Homo sapien
gtgatactatcaacatggcagctca

SEQ ID NO: 3765387 - DNA, 25 bp, Homo sapien
tcatctgtgatactatcaacatggc

SEQ ID NO: 3765388 - DNA, 25 bp, Homo sapien
ggtatcatctgtgatactatcaaca

SEQ ID NO: 3765389 - DNA, 25 bp, Homo sapien
tctgtgatactatcaacatggcagc

SEQ ID NO: 3765390 - DNA, 25 bp, Homo sapien
ctggctaaagactgctgctgcatct

SEQ ID NO: 3765391 - DNA, 25 bp, Homo sapien
tctctggctaaagactgctgctgca

SEQ ID NO: 3765392 - DNA, 25 bp, Homo sapien
ttctctggctaaagactgctgctgc

SEQ ID NO: 3765393 - DNA, 25 bp, Homo sapien
ctgggcaggccccaggaattctttt

SEQ ID NO: 3765394 - DNA, 25 bp, Homo sapien
tgacaatctcatcagaagtggtgct

SEQ ID NO: 3765395 - DNA, 25 bp, Homo sapien
tcatcagaagtggtgctaccactgt

SEQ ID NO: 3765396 - DNA, 25 bp, Homo sapien
tctcatcagaagtggtgctaccact

SEQ ID NO: 3765397 - DNA, 25 bp, Homo sapien
caatctcatcagaagtggtgctacc

SEQ ID NO: 3765398 - DNA, 25 bp, Homo sapien
ctgagggttgtgacgatcagggcag

SEQ ID NO: 3765399 - DNA, 25 bp, Homo sapien
tcaatggttggtgatgtcatcagca

SEQ ID NO: 3765400 - DNA, 25 bp, Homo sapien
tcagcaaccatttttggagacagac

SEQ ID NO: 3765401 - DNA, 25 bp, Homo sapien
atcagcaaccatttttggagacaga

SEQ ID NO: 3765402 - DNA, 25 bp, Homo sapien
atggttggtgatgtcatcagcaacc

SEQ ID NO: 3765403 - DNA, 25 bp, Homo sapien
ctggtacacctcagatatacaactt

SEQ ID NO: 3765404 - DNA, 25 bp, Homo sapien
cactggtacacctcagatatacaac

SEQ ID NO: 3765405 - DNA, 25 bp, Homo sapien
gatctcgctggggtcaaacgtaggt

SEQ ID NO: 3765406 - DNA, 25 bp, Homo sapien
ttcaccactggtacacctcagatat

SEQ ID NO: 3765407 - DNA, 25 bp, Homo sapien
ggatgactgaagcaagttgcacttg

SEQ ID NO: 3765408 - DNA, 25 bp, Homo sapien
caggatgactgaagcaagttgcact

SEQ ID NO: 3765409 - DNA, 25 bp, Homo sapien
gatgactgaagcaagttgcacttgg

SEQ ID NO: 3765410 - DNA, 25 bp, Homo sapien
aggatgactgaagcaagttgcactt

SEQ ID NO: 3765411 - DNA, 25 bp, Homo sapien
gccgaaaaacgaaaggtgctcaggc

SEQ ID NO: 3765412 - DNA, 25 bp, Homo sapien
gagccgaaaaacgaaaggtgctcag

SEQ ID NO: 3765413 - DNA, 25 bp, Homo sapien
ctgagccgaaaaacgaaaggtgctc

SEQ ID NO: 3765414 - DNA, 25 bp, Homo sapien
ccgaaaaacgaaaggtgctcaggct

SEQ ID NO: 3765415 - DNA, 25 bp, Homo sapien
taaggatcgcatcacttagcatggt

SEQ ID NO: 3765416 - DNA, 25 bp, Homo sapien
tgctgaggtctgcagtaaggatcgc

SEQ ID NO: 3765417 - DNA, 25 bp, Homo sapien
cacagtgaggtcagcgttggctctt

SEQ ID NO: 3765418 - DNA, 25 bp, Homo sapien
caagactctagttgcttcgtacaga

SEQ ID NO: 3765419 - DNA, 25 bp, Homo sapien
ctgtggtgaagccaggagaggtgtc

SEQ ID NO: 3765420 - DNA, 25 bp, Homo sapien
tgtggtgaagccaggagaggtgtca

SEQ ID NO: 3765421 - DNA, 25 bp, Homo sapien
gtggtgaagccaggagaggtgtcat

SEQ ID NO: 3765422 - DNA, 25 bp, Homo sapien
cattttcagcatggtaggaggaggc

SEQ ID NO: 3765423 - DNA, 25 bp, Homo sapien
gataaatgcatccactccccgtgct

SEQ ID NO: 3765424 - DNA, 25 bp, Homo sapien
gtcctcagtatcaagtcaatcacat

SEQ ID NO: 3765425 - DNA, 25 bp, Homo sapien
cccgtgctttcccaggagcgcccag

SEQ ID NO: 3765426 - DNA, 25 bp, Homo sapien
ttccgaagagccttatcccacagag

SEQ ID NO: 3765427 - DNA, 25 bp, Homo sapien
gaagagccttatcccacagagccct

SEQ ID NO: 3765428 - DNA, 25 bp, Homo sapien
cttccgaagagccttatcccacaga

SEQ ID NO: 3765429 - DNA, 25 bp, Homo sapien
ccgaagagccttatcccacagagcc

SEQ ID NO: 3765430 - DNA, 25 bp, Homo sapien
cccagcccacgattaatgttcttat

SEQ ID NO: 3765431 - DNA, 25 bp, Homo sapien
ggtgtttagtagtttcagcagtggc

SEQ ID NO: 3765432 - DNA, 25 bp, Homo sapien
gcagtggcatccagtaaccacggtt

SEQ ID NO: 3765433 - DNA, 25 bp, Homo sapien
caaaggtgcgtggaatctaggaaaa

SEQ ID NO: 3765434 - DNA, 25 bp, Homo sapien
ccacggtttctattacaaaggtgcg

SEQ ID NO: 3765435 - DNA, 25 bp, Homo sapien
agctggtttgtaagggcagaagcaa

SEQ ID NO: 3765436 - DNA, 25 bp, Homo sapien
agctgatcgtgcacgcagctgctgc

SEQ ID NO: 3765437 - DNA, 25 bp, Homo sapien
gccaagtggaagctgatcgtgcacg

SEQ ID NO: 3765438 - DNA, 25 bp, Homo sapien
ggtttgtaagggcagaagcaaagcc

SEQ ID NO: 3765439 - DNA, 25 bp, Homo sapien
gagggcagtcccagactgatctttc

SEQ ID NO: 3765440 - DNA, 25 bp, Homo sapien
ggcagtcccagactgatctttcagt

SEQ ID NO: 3765441 - DNA, 25 bp, Homo sapien
ggaaagagggcagtcccagactgat

SEQ ID NO: 3765442 - DNA, 25 bp, Homo sapien
aaagagggcagtcccagactgatct

SEQ ID NO: 3765443 - DNA, 25 bp, Homo sapien
ctgtacacgtgaaatagccgcacaa

SEQ ID NO: 3765444 - DNA, 25 bp, Homo sapien
tagccgcacaacaggaccatcttca

SEQ ID NO: 3765445 - DNA, 25 bp, Homo sapien
ttcagacctagagggcattgacgca

SEQ ID NO: 3765446 - DNA, 25 bp, Homo sapien
ggaccatcttcagacctagagggca

SEQ ID NO: 3765447 - DNA, 25 bp, Homo sapien
ggtaactacatctcaaatcagtgca

SEQ ID NO: 3765448 - DNA, 25 bp, Homo sapien
tagaaacaggaatccgctgatgcca

SEQ ID NO: 3765449 - DNA, 25 bp, Homo sapien
aaccgagcccaacgctgagagtaag

SEQ ID NO: 3765450 - DNA, 25 bp, Homo sapien
taagacgaacgggaaattcttgctc

SEQ ID NO: 3765451 - DNA, 25 bp, Homo sapien
tggatcacactgaataagaggattc

SEQ ID NO: 3765452 - DNA, 25 bp, Homo sapien
gaataagaggattcaatgttgcttg

SEQ ID NO: 3765453 - DNA, 25 bp, Homo sapien
cactgaataagaggattcaatgttg

SEQ ID NO: 3765454 - DNA, 25 bp, Homo sapien
tcacactgaataagaggattcaatg

SEQ ID NO: 3765455 - DNA, 25 bp, Homo sapien
tatcacagccttaccatgcagcagt

SEQ ID NO: 3765456 - DNA, 25 bp, Homo sapien
gcttctctaaggatcccacagcctg

SEQ ID NO: 3765457 - DNA, 25 bp, Homo sapien
tgatcactgggaactcctcagcagg

SEQ ID NO: 3765458 - DNA, 25 bp, Homo sapien
gggccaactgcattttatagctcaa

SEQ ID NO: 3765459 - DNA, 25 bp, Homo sapien
catgcactttattgcctcctcttgg

SEQ ID NO: 3765460 - DNA, 25 bp, Homo sapien
tatgtcattgcgctatggccagagc

SEQ ID NO: 3765461 - DNA, 25 bp, Homo sapien
ccgactgcaggagaaacttggcaca

SEQ ID NO: 3765462 - DNA, 25 bp, Homo sapien
ttcagaatccttcagtcccgactgc

SEQ ID NO: 3765463 - DNA, 25 bp, Homo sapien
cagggtgcccgtgatgtcttcagaa

SEQ ID NO: 3765464 - DNA, 25 bp, Homo sapien
aattgatgtcagctcccaaggataa

SEQ ID NO: 3765465 - DNA, 25 bp, Homo sapien
gctcccaaggataagagagtctgaa

SEQ ID NO: 3765466 - DNA, 25 bp, Homo sapien
tcatctttagaattgatgtcagctc

SEQ ID NO: 3765467 - DNA, 25 bp, Homo sapien
agagtctgaattgtacttgtatgtc

SEQ ID NO: 3765468 - DNA, 25 bp, Homo sapien
gggattaggcaatgatacattaaat

SEQ ID NO: 3765469 - DNA, 25 bp, Homo sapien
taaatatctctttccactcagtaaa

SEQ ID NO: 3765470 - DNA, 25 bp, Homo sapien
catacctgagagacaggtctgtgtc

SEQ ID NO: 3765471 - DNA, 25 bp, Homo sapien
cacattgcaggataaaaggagcagg

SEQ ID NO: 3765472 - DNA, 25 bp, Homo sapien
gacccaatgcagttagtttccatca

SEQ ID NO: 3765473 - DNA, 25 bp, Homo sapien
tgggaattcctattacagctagtag

SEQ ID NO: 3765474 - DNA, 25 bp, Homo sapien
gatcataaccgctcataaatgggaa

SEQ ID NO: 3765475 - DNA, 25 bp, Homo sapien
cattgtgagcagtacaaatcttgtg

SEQ ID NO: 3765476 - DNA, 25 bp, Homo sapien
cagggaagctcggacaacgttataa

SEQ ID NO: 3765477 - DNA, 25 bp, Homo sapien
tgtctagcaacaaattcaagtcagg

SEQ ID NO: 3765478 - DNA, 25 bp, Homo sapien
gagataaagcgcttcagaatcctga

SEQ ID NO: 3765479 - DNA, 25 bp, Homo sapien
caggctgcagagctactgatcaaag

SEQ ID NO: 3765480 - DNA, 25 bp, Homo sapien
tgtggctctcacatctacatcgacg

SEQ ID NO: 3765481 - DNA, 25 bp, Homo sapien
tgtgaggtgggttgatgtggctctc

SEQ ID NO: 3765482 - DNA, 25 bp, Homo sapien
tacatcgacgccaagttcagagacc

SEQ ID NO: 3765483 - DNA, 25 bp, Homo sapien
ttcagagaccaagaatcggatggct

SEQ ID NO: 3765484 - DNA, 25 bp, Homo sapien
ggcacccaggctgtcttctgctgaa

SEQ ID NO: 3765485 - DNA, 25 bp, Homo sapien
cccaggctgtcttctgctgaaaggc

SEQ ID NO: 3765486 - DNA, 25 bp, Homo sapien
ggctgtcttctgctgaaaggcaagc

SEQ ID NO: 3765487 - DNA, 25 bp, Homo sapien
cctgtgcagagcctgggcacccagg

SEQ ID NO: 3765488 - DNA, 25 bp, Homo sapien
ggcggtgacgccacagttgtctctg

SEQ ID NO: 3765489 - DNA, 25 bp, Homo sapien
aggagcagcctagcgacgtcgatgt

SEQ ID NO: 3765490 - DNA, 25 bp, Homo sapien
tgtgcccacactggattgcgtccat

SEQ ID NO: 3765491 - DNA, 25 bp, Homo sapien
cccatgttcatcgaggagcagccta

SEQ ID NO: 3765492 - DNA, 25 bp, Homo sapien
ctagagccaaaaccccaagtaagag

SEQ ID NO: 3765493 - DNA, 25 bp, Homo sapien
taagaagcaccttgactgcctccaa

SEQ ID NO: 3765494 - DNA, 25 bp, Homo sapien
actgcctccaaatggccatgcattg

SEQ ID NO: 3765495 - DNA, 25 bp, Homo sapien
ctcttaagaagcaccttgactgcct

SEQ ID NO: 3765496 - DNA, 25 bp, Homo sapien
ccttgactgcctccaaatggccatg

SEQ ID NO: 3765497 - DNA, 25 bp, Homo sapien
caaacaaatgagcaaattgaaactt

SEQ ID NO: 3765498 - DNA, 25 bp, Homo sapien
aatgagcaaattgaaactttttact

SEQ ID NO: 3765499 - DNA, 25 bp, Homo sapien
tactttcttcaaacaaatgagcaaa

SEQ ID NO: 3765500 - DNA, 25 bp, Homo sapien
caaatgagcaaattgaaacttttta

SEQ ID NO: 3765501 - DNA, 25 bp, Homo sapien
agactctggagctccccagtagctg

SEQ ID NO: 3765502 - DNA, 25 bp, Homo sapien
gtagtgtaatgtagtgcaatcttgg

SEQ ID NO: 3765503 - DNA, 25 bp, Homo sapien
ccaggctgtagtgtaatgtagtgca

SEQ ID NO: 3765504 - DNA, 25 bp, Homo sapien
ctcagactctggagctccccagtag

SEQ ID NO: 3765505 - DNA, 25 bp, Homo sapien
cctgaacaagatgcggttgggcagt

SEQ ID NO: 3765506 - DNA, 25 bp, Homo sapien
ctgaaggtgacctgaacaagatgcg

SEQ ID NO: 3765507 - DNA, 25 bp, Homo sapien
agcagccacatgtgtgtactgctca

SEQ ID NO: 3765508 - DNA, 25 bp, Homo sapien
gcagccacatgtgtgtactgctcac

SEQ ID NO: 3765509 - DNA, 25 bp, Homo sapien
tgcagtatgcagaggagtccttcta

SEQ ID NO: 3765510 - DNA, 25 bp, Homo sapien
ctgcagtatgcagaggagtccttct

SEQ ID NO: 3765511 - DNA, 25 bp, Homo sapien
gcagtatgcagaggagtccttctaa

SEQ ID NO: 3765512 - DNA, 25 bp, Homo sapien
agtatgcagaggagtccttctaatt

SEQ ID NO: 3765513 - DNA, 25 bp, Homo sapien
tgttcttcaggagtggattggcgcc

SEQ ID NO: 3765514 - DNA, 25 bp, Homo sapien
gggtcgccttctcgactggcaatgt

SEQ ID NO: 3765515 - DNA, 25 bp, Homo sapien
ttgtgcaggccatcatcagaggagt

SEQ ID NO: 3765516 - DNA, 25 bp, Homo sapien
tactggaggatcagagggtcgcctt

SEQ ID NO: 3765517 - DNA, 25 bp, Homo sapien
ttgaccggcaacctctgtgccttct

SEQ ID NO: 3765518 - DNA, 25 bp, Homo sapien
gaaaacagctttgaccggcaacctc

SEQ ID NO: 3765519 - DNA, 25 bp, Homo sapien
aggggccaggtcttcaaaacacaca

SEQ ID NO: 3765520 - DNA, 25 bp, Homo sapien
aacctagaggattcaggggtctggc

SEQ ID NO: 3765521 - DNA, 25 bp, Homo sapien
tgcagaggccgcttgtagtctcggt

SEQ ID NO: 3765522 - DNA, 25 bp, Homo sapien
cacgcagtctcggtggcccatggag

SEQ ID NO: 3765523 - DNA, 25 bp, Homo sapien
ggttggtggcctcgatgtccatgcc

SEQ ID NO: 3765524 - DNA, 25 bp, Homo sapien
gccttcttcaggcagtcgaccgctg

SEQ ID NO: 3765525 - DNA, 25 bp, Homo sapien
tggcgtccgccgtcctggagctgca

SEQ ID NO: 3765526 - DNA, 25 bp, Homo sapien
agggcgagtgggactttccgcctct

SEQ ID NO: 3765527 - DNA, 25 bp, Homo sapien
ctacaccgcaaagccccaaagtgga

SEQ ID NO: 3765528 - DNA, 25 bp, Homo sapien
ccgtacgtgattcgggactgaacac

SEQ ID NO: 3765529 - DNA, 25 bp, Homo sapien
ggccccacgctatctacatacagag

SEQ ID NO: 3765530 - DNA, 25 bp, Homo sapien
gacatgaacgttgagtacatggcac

SEQ ID NO: 3765531 - DNA, 25 bp, Homo sapien
acttcataccgtcaccttgcgggtg

SEQ ID NO: 3765532 - DNA, 25 bp, Homo sapien
gttacagcagtgaaccaggtgggct

SEQ ID NO: 3765533 - DNA, 25 bp, Homo sapien
cttggtctcacagaatcttagattc

SEQ ID NO: 3765534 - DNA, 25 bp, Homo sapien
gctaatagaatcaccagaagccatt

SEQ ID NO: 3765535 - DNA, 25 bp, Homo sapien
ttaagtgacatgaagttatgtttca

SEQ ID NO: 3765536 - DNA, 25 bp, Homo sapien
tacattgttgaggtgttaagtgaca

SEQ ID NO: 3765537 - DNA, 25 bp, Homo sapien
catggtcttggctgtctctcgggaa

SEQ ID NO: 3765538 - DNA, 25 bp, Homo sapien
tggtaactgcgtcaaaaacggcttg

SEQ ID NO: 3765539 - DNA, 25 bp, Homo sapien
caagagagcgctgtgactgagtcct

SEQ ID NO: 3765540 - DNA, 25 bp, Homo sapien
gaaacaaccgagtaaccacagcaag

SEQ ID NO: 3765541 - DNA, 25 bp, Homo sapien
taaagacacaggcttagcgaggctg

SEQ ID NO: 3765542 - DNA, 25 bp, Homo sapien
caggagtacttcttgcaagcagagc

SEQ ID NO: 3765543 - DNA, 25 bp, Homo sapien
taacggaggtgtcgccatgactctc

SEQ ID NO: 3765544 - DNA, 25 bp, Homo sapien
catctaaagggttctcacagagccg

SEQ ID NO: 3765545 - DNA, 25 bp, Homo sapien
ttaaacaggcaccatagcactggca

SEQ ID NO: 3765546 - DNA, 25 bp, Homo sapien
tgcgtcagcactgtcgttctgaacc

SEQ ID NO: 3765547 - DNA, 25 bp, Homo sapien
ttttccagcttactctttcctacag

SEQ ID NO: 3765548 - DNA, 25 bp, Homo sapien
ctggcataccgctgtgtgatgtctg

SEQ ID NO: 3765549 - DNA, 25 bp, Homo sapien
tgcagggctctcctgttgcgatgag

SEQ ID NO: 3765550 - DNA, 25 bp, Homo sapien
tcctgttgcgatgagggcgtcagcc

SEQ ID NO: 3765551 - DNA, 25 bp, Homo sapien
caagttggaccgcagcggaaaggct

SEQ ID NO: 3765552 - DNA, 25 bp, Homo sapien
atgagggcgtcagcccaagttggac

SEQ ID NO: 3765553 - DNA, 25 bp, Homo sapien
cctgctcatgttcggtgcctcagcg

SEQ ID NO: 3765554 - DNA, 25 bp, Homo sapien
aaagtgctgattccacgggcgtgcg

SEQ ID NO: 3765555 - DNA, 25 bp, Homo sapien
tacaacatccccacttaattggctg

SEQ ID NO: 3765556 - DNA, 25 bp, Homo sapien
tcagccagctccacgtattttagag

SEQ ID NO: 3765557 - DNA, 25 bp, Homo sapien
ttaggagtgtggcaggccgggtctc

SEQ ID NO: 3765558 - DNA, 25 bp, Homo sapien
gcagtgtcacgggaggcaagggaag

SEQ ID NO: 3765559 - DNA, 25 bp, Homo sapien
gcagggcagtgtcacgggaggcaag

SEQ ID NO: 3765560 - DNA, 25 bp, Homo sapien
caagggaagggtaggctggtcttct

SEQ ID NO: 3765561 - DNA, 25 bp, Homo sapien
cctgcacataggcatatggtttaaa

SEQ ID NO: 3765562 - DNA, 25 bp, Homo sapien
tgaagtaattgtttcaaggctctga

SEQ ID NO: 3765563 - DNA, 25 bp, Homo sapien
tcagcttggaggtgtactcctgcac

SEQ ID NO: 3765564 - DNA, 25 bp, Homo sapien
cagaccctagtgaaagattaaacag

SEQ ID NO: 3765565 - DNA, 25 bp, Homo sapien
gatgaggtcagctttccatgatgca

SEQ ID NO: 3765566 - DNA, 25 bp, Homo sapien
aaaagtgggaatgtatttgcgaagg

SEQ ID NO: 3765567 - DNA, 25 bp, Homo sapien
gaatggcttcaaatcatcagggttt

SEQ ID NO: 3765568 - DNA, 25 bp, Homo sapien
gatgcacacggctgggtgaaataat

SEQ ID NO: 3765569 - DNA, 25 bp, Homo sapien
ggacttgaggcagacggcccaagtt

SEQ ID NO: 3765570 - DNA, 25 bp, Homo sapien
tccaccaggagggagtggttttgcc

SEQ ID NO: 3765571 - DNA, 25 bp, Homo sapien
cttcatggtgagggcgtccaccagg

SEQ ID NO: 3765572 - DNA, 25 bp, Homo sapien
agtggttttgccaagcggggacttg

SEQ ID NO: 3765573 - DNA, 25 bp, Homo sapien
cagccctcccaggacccgaggatgc

SEQ ID NO: 3765574 - DNA, 25 bp, Homo sapien
caactgtgttcaatcctacgggacc

SEQ ID NO: 3765575 - DNA, 25 bp, Homo sapien
caatcctacgggacccttgctcttt

SEQ ID NO: 3765576 - DNA, 25 bp, Homo sapien
ttgccgtccggttgacctggctgcc

SEQ ID NO: 3765577 - DNA, 25 bp, Homo sapien
tctttcctgaacgtgttgctcaatt

SEQ ID NO: 3765578 - DNA, 25 bp, Homo sapien
tgtctttcctgaacgtgttgctcaa

SEQ ID NO: 3765579 - DNA, 25 bp, Homo sapien
tttcctgaacgtgttgctcaatttc

SEQ ID NO: 3765580 - DNA, 25 bp, Homo sapien
gtctttcctgaacgtgttgctcaat

SEQ ID NO: 3765581 - DNA, 25 bp, Homo sapien
gacgcaacatagtctctgagagcca

SEQ ID NO: 3765582 - DNA, 25 bp, Homo sapien
gcacctcctggcgaactaattaccg

SEQ ID NO: 3765583 - DNA, 25 bp, Homo sapien
catacgatttcaggatggacgcaac

SEQ ID NO: 3765584 - DNA, 25 bp, Homo sapien
taaggcagataaccagccgcagaca

SEQ ID NO: 3765585 - DNA, 25 bp, Homo sapien
atagacatctcccacgccaggagga

SEQ ID NO: 3765586 - DNA, 25 bp, Homo sapien
caaacgctggtgtcttccctataga

SEQ ID NO: 3765587 - DNA, 25 bp, Homo sapien
ccttgtaattgacagagagcctcag

SEQ ID NO: 3765588 - DNA, 25 bp, Homo sapien
tcattgggaggagcccaaacgctgg

SEQ ID NO: 3765589 - DNA, 25 bp, Homo sapien
atgagggacggacggtttcaggaga

SEQ ID NO: 3765590 - DNA, 25 bp, Homo sapien
gtcaggatgagggacggacggtttc

SEQ ID NO: 3765591 - DNA, 25 bp, Homo sapien
aagtcaggatgagggacggacggtt

SEQ ID NO: 3765592 - DNA, 25 bp, Homo sapien
caggatgagggacggacggtttcag

SEQ ID NO: 3765593 - DNA, 25 bp, Homo sapien
gggtgagacaaacccgcagtactcg

SEQ ID NO: 3765594 - DNA, 25 bp, Homo sapien
gtccgctctgtgctgtgaaattcca

SEQ ID NO: 3765595 - DNA, 25 bp, Homo sapien
gagaaacagggtgtcttttgatccc

SEQ ID NO: 3765596 - DNA, 25 bp, Homo sapien
cattgagttctgattagtgcctagc

SEQ ID NO: 3765597 - DNA, 25 bp, Homo sapien
ctttggaggctgaggcggttggatc

SEQ ID NO: 3765598 - DNA, 25 bp, Homo sapien
acctgaggtcaggagttcgagacca

SEQ ID NO: 3765599 - DNA, 25 bp, Homo sapien
caggtgtggtggtgtacgcttgtaa

SEQ ID NO: 3765600 - DNA, 25 bp, Homo sapien
gcctggccaacatggtgaaacactg

SEQ ID NO: 3765601 - DNA, 25 bp, Homo sapien
gagacagggtggttagaagcccaaa

SEQ ID NO: 3765602 - DNA, 25 bp, Homo sapien
gtagacgtctcccacgccaggagaa

SEQ ID NO: 3765603 - DNA, 25 bp, Homo sapien
catgggaatgcggagaacctgctcc

SEQ ID NO: 3765604 - DNA, 25 bp, Homo sapien
ttcactccggacttagctgggctgg

SEQ ID NO: 3765605 - DNA, 25 bp, Homo sapien
ccaagtcaccggcagagcctccatg

SEQ ID NO: 3765606 - DNA, 25 bp, Homo sapien
gtggtgagagcagttttccaagtct

SEQ ID NO: 3765607 - DNA, 25 bp, Homo sapien
ttccatttcaacgctggccagcggg

SEQ ID NO: 3765608 - DNA, 25 bp, Homo sapien
tggtcccccaagtcaccggcagagc

SEQ ID NO: 3765609 - DNA, 25 bp, Homo sapien
tcccactgagcatgtatgtccagca

SEQ ID NO: 3765610 - DNA, 25 bp, Homo sapien
gagcatgtatgtccagcactgcggg

SEQ ID NO: 3765611 - DNA, 25 bp, Homo sapien
gggttgccctcaaatcaacagacgc

SEQ ID NO: 3765612 - DNA, 25 bp, Homo sapien
aagcaggtggttcataggttttgaa

SEQ ID NO: 3765613 - DNA, 25 bp, Homo sapien
cttgacttgaggtagcatgccagga

SEQ ID NO: 3765614 - DNA, 25 bp, Homo sapien
cttgaggtagcatgccaggagagac

SEQ ID NO: 3765615 - DNA, 25 bp, Homo sapien
aggtagcatgccaggagagacacag

SEQ ID NO: 3765616 - DNA, 25 bp, Homo sapien
agagacacagcgctcagcccacaca

SEQ ID NO: 3765617 - DNA, 25 bp, Homo sapien
taatggtaggaattccatacagtgg

SEQ ID NO: 3765618 - DNA, 25 bp, Homo sapien
taaaagtcatgaactagcaaaagca

SEQ ID NO: 3765619 - DNA, 25 bp, Homo sapien
tacagatgttcttgcacctatggat

SEQ ID NO: 3765620 - DNA, 25 bp, Homo sapien
agtgcagcggctcgagtttgctcac

SEQ ID NO: 3765621 - DNA, 25 bp, Homo sapien
ttactttggaagcttgtcagcctgg

SEQ ID NO: 3765622 - DNA, 25 bp, Homo sapien
cccagatgacgtttgatgcaggtaa

SEQ ID NO: 3765623 - DNA, 25 bp, Homo sapien
ggatgcctggaaatctggtagcaag

SEQ ID NO: 3765624 - DNA, 25 bp, Homo sapien
tcagcctggagcatgacttgcattc

SEQ ID NO: 3765625 - DNA, 25 bp, Homo sapien
gagctgaccttgagcccttatttgg

SEQ ID NO: 3765626 - DNA, 25 bp, Homo sapien
tggatgctccatgcaaaagaggtgc

SEQ ID NO: 3765627 - DNA, 25 bp, Homo sapien
tgctgtaacgtcagtgctggcatca

SEQ ID NO: 3765628 - DNA, 25 bp, Homo sapien
cttctctgttaagtgcacggtgcca

SEQ ID NO: 3765629 - DNA, 25 bp, Homo sapien
ggtgtcgctgtggccctgtggatac

SEQ ID NO: 3765630 - DNA, 25 bp, Homo sapien
tcgctgtggccctgtggatacacac

SEQ ID NO: 3765631 - DNA, 25 bp, Homo sapien
cagtggtgtcgctgtggccctgtgg

SEQ ID NO: 3765632 - DNA, 25 bp, Homo sapien
tgtcgctgtggccctgtggatacac

SEQ ID NO: 3765633 - DNA, 25 bp, Homo sapien
catgactgcttatctctgtggttcc

SEQ ID NO: 3765634 - DNA, 25 bp, Homo sapien
gcttatctctgtggttcctgtggaa

SEQ ID NO: 3765635 - DNA, 25 bp, Homo sapien
ggactcatgactgcttatctctgtg

SEQ ID NO: 3765636 - DNA, 25 bp, Homo sapien
gggtgccgtgggaggactcatgact

SEQ ID NO: 3765637 - DNA, 25 bp, Homo sapien
tgctgttgtggccgctgtgttgttt

SEQ ID NO: 3765638 - DNA, 25 bp, Homo sapien
gctgctgttgtggccgctgtgttgt

SEQ ID NO: 3765639 - DNA, 25 bp, Homo sapien
ctgttgtggccgctgtgttgtttga

SEQ ID NO: 3765640 - DNA, 25 bp, Homo sapien
ctgggagcccgggacaatagctgct

SEQ ID NO: 3765641 - DNA, 25 bp, Homo sapien
tctaggaaacgtgaggccaagcgct

SEQ ID NO: 3765642 - DNA, 25 bp, Homo sapien
tgtgaaacacgggaagcctgggctc

SEQ ID NO: 3765643 - DNA, 25 bp, Homo sapien
cctgcactgtaagggtgtggcgtaa

SEQ ID NO: 3765644 - DNA, 25 bp, Homo sapien
cattgtgacagccacggaatctagg

SEQ ID NO: 3765645 - DNA, 25 bp, Homo sapien
ctgtggggtcacccctgccgtcgtt

SEQ ID NO: 3765646 - DNA, 25 bp, Homo sapien
tgtggggtcacccctgccgtcgtta

SEQ ID NO: 3765647 - DNA, 25 bp, Homo sapien
ggtggcgctggcctttggtgaacca

SEQ ID NO: 3765648 - DNA, 25 bp, Homo sapien
tgtggagggtggcgctggcctttgg

SEQ ID NO: 3765649 - DNA, 25 bp, Homo sapien
gagggtggcgctggcctttggtgaa

SEQ ID NO: 3765650 - DNA, 25 bp, Homo sapien
cgctggcctttggtgaaccagggca

SEQ ID NO: 3765651 - DNA, 25 bp, Homo sapien
ccccagcgagtgatttcttggaaca

SEQ ID NO: 3765652 - DNA, 25 bp, Homo sapien
gcctgtgtgactcgctctgttctgg

SEQ ID NO: 3765653 - DNA, 25 bp, Homo sapien
gaacaagtcggaggcttcctccctg

SEQ ID NO: 3765654 - DNA, 25 bp, Homo sapien
tggcaatgtccagcgcctcaaggag

SEQ ID NO: 3765655 - DNA, 25 bp, Homo sapien
gctggacaccatgcacaggtgactg

SEQ ID NO: 3765656 - DNA, 25 bp, Homo sapien
gacaccatgcacaggtgactgagca

SEQ ID NO: 3765657 - DNA, 25 bp, Homo sapien
tggacaccatgcacaggtgactgag

SEQ ID NO: 3765658 - DNA, 25 bp, Homo sapien
ctgctggacaccatgcacaggtgac

SEQ ID NO: 3765659 - DNA, 25 bp, Homo sapien
ggctttacgcttgaaaccagagtta

SEQ ID NO: 3765660 - DNA, 25 bp, Homo sapien
gacattcgtggccttgttcaacacg

SEQ ID NO: 3765661 - DNA, 25 bp, Homo sapien
gttacaaatgtaccgctccctggag

SEQ ID NO: 3765662 - DNA, 25 bp, Homo sapien
gttcaacacgcactccgtcaggctg

SEQ ID NO: 3765663 - DNA, 25 bp, Homo sapien
gtgctatctggtgctggagtgtcag

SEQ ID NO: 3765664 - DNA, 25 bp, Homo sapien
tggtgctatctggtgctggagtgtc

SEQ ID NO: 3765665 - DNA, 25 bp, Homo sapien
ggtgctatctggtgctggagtgtca

SEQ ID NO: 3765666 - DNA, 25 bp, Homo sapien
tttcagatattctgctccttcccgc

SEQ ID NO: 3765667 - DNA, 25 bp, Homo sapien
cacgcaggcctcgtgtgtctggacc

SEQ ID NO: 3765668 - DNA, 25 bp, Homo sapien
gggcagttttccattgtcctgagtc

SEQ ID NO: 3765669 - DNA, 25 bp, Homo sapien
gctgcctgcttgtccgatggtggtg

SEQ ID NO: 3765670 - DNA, 25 bp, Homo sapien
aatggcatgattatgccccgctgca

SEQ ID NO: 3765671 - DNA, 25 bp, Homo sapien
tgttccctagttattcaatgtaaac

SEQ ID NO: 3765672 - DNA, 25 bp, Homo sapien
tgcagatggtatgtatatttcacag

SEQ ID NO: 3765673 - DNA, 25 bp, Homo sapien
gccgtcctccagagataatacattt

SEQ ID NO: 3765674 - DNA, 25 bp, Homo sapien
tttaggactcgagaagacatctggc

SEQ ID NO: 3765675 - DNA, 25 bp, Homo sapien
catatccagagttcagaggttgtcg

SEQ ID NO: 3765676 - DNA, 25 bp, Homo sapien
tcaaatgcctgcacgagctaagggt

SEQ ID NO: 3765677 - DNA, 25 bp, Homo sapien
cccaatcctgtgagcagagtcagaa

SEQ ID NO: 3765678 - DNA, 25 bp, Homo sapien
cagactgaaatgctctctaagaagt

SEQ ID NO: 3765679 - DNA, 25 bp, Homo sapien
cgaactgaaattggtggctagggat

SEQ ID NO: 3765680 - DNA, 25 bp, Homo sapien
agtgaccttctacccaacataatgg

SEQ ID NO: 3765681 - DNA, 25 bp, Homo sapien
catcgcccgcaatctttcagactga

SEQ ID NO: 3765682 - DNA, 25 bp, Homo sapien
gggagaccgagggtccggcagccgc

SEQ ID NO: 3765683 - DNA, 25 bp, Homo sapien
gccgggagaccgagggtccggcagc

SEQ ID NO: 3765684 - DNA, 25 bp, Homo sapien
tagcagcgccgggagaccgagggtc

SEQ ID NO: 3765685 - DNA, 25 bp, Homo sapien
cagcgccgggagaccgagggtccgg

SEQ ID NO: 3765686 - DNA, 25 bp, Homo sapien
aggacaccgctggactccccgggcg

SEQ ID NO: 3765687 - DNA, 25 bp, Homo sapien
agctccacaggacaccgctggactc

SEQ ID NO: 3765688 - DNA, 25 bp, Homo sapien
caccgctggactccccgggcgagcg

SEQ ID NO: 3765689 - DNA, 25 bp, Homo sapien
cacaggacaccgctggactccccgg

SEQ ID NO: 3765690 - DNA, 25 bp, Homo sapien
cgcgctcgtcgtgctctgggacctc

SEQ ID NO: 3765691 - DNA, 25 bp, Homo sapien
tccagtgtgcactcggtccggtgtc

SEQ ID NO: 3765692 - DNA, 25 bp, Homo sapien
gacctccagtgtgcactcggtccgg

SEQ ID NO: 3765693 - DNA, 25 bp, Homo sapien
cctcccggtcctccgcgctcgtcgt

SEQ ID NO: 3765694 - DNA, 25 bp, Homo sapien
ctctctgcggctcggatccacttga

SEQ ID NO: 3765695 - DNA, 25 bp, Homo sapien
tgcgctcggttgtgagcggccggcc

SEQ ID NO: 3765696 - DNA, 25 bp, Homo sapien
tgagtgcccgcggaggtgtcgccgc

SEQ ID NO: 3765697 - DNA, 25 bp, Homo sapien
caaagtcatcggagagcagactctc

SEQ ID NO: 3765698 - DNA, 25 bp, Homo sapien
gcagaggtggccgtaacagcagcca

SEQ ID NO: 3765699 - DNA, 25 bp, Homo sapien
tagcagaggtggccgtaacagcagc

SEQ ID NO: 3765700 - DNA, 25 bp, Homo sapien
cagaggtggccgtaacagcagccat

SEQ ID NO: 3765701 - DNA, 25 bp, Homo sapien
atatttgagagtcccgacccgtcat

SEQ ID NO: 3765702 - DNA, 25 bp, Homo sapien
tcagtcagagtttggttcaaaaccc

SEQ ID NO: 3765703 - DNA, 25 bp, Homo sapien
tgactgaaccgtatccactctgtgt

SEQ ID NO: 3765704 - DNA, 25 bp, Homo sapien
tcagcatcatgcaacgtaatcacgt

SEQ ID NO: 3765705 - DNA, 25 bp, Homo sapien
caggctctcagttcgccatccctca

SEQ ID NO: 3765706 - DNA, 25 bp, Homo sapien
aggctctcagttcgccatccctcac

SEQ ID NO: 3765707 - DNA, 25 bp, Homo sapien
tcaggctctcagttcgccatccctc

SEQ ID NO: 3765708 - DNA, 25 bp, Homo sapien
gccctaggcttttgggtatcacaac

SEQ ID NO: 3765709 - DNA, 25 bp, Homo sapien
ttgcccgagggatcctcagagggct

SEQ ID NO: 3765710 - DNA, 25 bp, Homo sapien
caaattgccaagcagcaagaagcac

SEQ ID NO: 3765711 - DNA, 25 bp, Homo sapien
gggacatttggatctcgttcaggcc

SEQ ID NO: 3765712 - DNA, 25 bp, Homo sapien
cctttcctcttccttcacagtgaca

SEQ ID NO: 3765713 - DNA, 25 bp, Homo sapien
cctcttccttcacagtgacagcaga

SEQ ID NO: 3765714 - DNA, 25 bp, Homo sapien
tttcctcttccttcacagtgacagc

SEQ ID NO: 3765715 - DNA, 25 bp, Homo sapien
tcctcttccttcacagtgacagcag

SEQ ID NO: 3765716 - DNA, 25 bp, Homo sapien
ccttttgggctttgcacctggtgga

SEQ ID NO: 3765717 - DNA, 25 bp, Homo sapien
tcctgcctgtctcccgtttccccac

SEQ ID NO: 3765718 - DNA, 25 bp, Homo sapien
gtgggaaggaaaccagttctcctgc

SEQ ID NO: 3765719 - DNA, 25 bp, Homo sapien
tggagtgttcctggcccccaacaga

SEQ ID NO: 3765720 - DNA, 25 bp, Homo sapien
gagcacacggtgtggagccttaatg

SEQ ID NO: 3765721 - DNA, 25 bp, Homo sapien
tggaagcgttgcatgggaacagagc

SEQ ID NO: 3765722 - DNA, 25 bp, Homo sapien
gccttaatgtgggaactctgccaca

SEQ ID NO: 3765723 - DNA, 25 bp, Homo sapien
cacactgtaacactttacacgccat

SEQ ID NO: 3765724 - DNA, 25 bp, Homo sapien
agattcttccatgggtctgtgtcaa

SEQ ID NO: 3765725 - DNA, 25 bp, Homo sapien
caaaaccttgtggaaagcaaagctg

SEQ ID NO: 3765726 - DNA, 25 bp, Homo sapien
gattcttccatgggtctgtgtcaaa

SEQ ID NO: 3765727 - DNA, 25 bp, Homo sapien
gagattcttccatgggtctgtgtca

SEQ ID NO: 3765728 - DNA, 25 bp, Homo sapien
gatatggaaccaggacttccaccga

SEQ ID NO: 3765729 - DNA, 25 bp, Homo sapien
cagagactctgaagatgggcccagc

SEQ ID NO: 3765730 - DNA, 25 bp, Homo sapien
tattccagaccaacaactcagagac

SEQ ID NO: 3765731 - DNA, 25 bp, Homo sapien
gggagatcttgcaccagatatggaa

SEQ ID NO: 3765732 - DNA, 25 bp, Homo sapien
cagaagcggctgagaaaggaaccac

SEQ ID NO: 3765733 - DNA, 25 bp, Homo sapien
aaaatgatttctgggtagcagccca

SEQ ID NO: 3765734 - DNA, 25 bp, Homo sapien
gaaacgtacgcattgatttgcacct

SEQ ID NO: 3765735 - DNA, 25 bp, Homo sapien
aagaggccaattagtaacgcacagg

SEQ ID NO: 3765736 - DNA, 25 bp, Homo sapien
tatacatgaaaataagatggagagt

SEQ ID NO: 3765737 - DNA, 25 bp, Homo sapien
tgctttaatgaacacatatacatga

SEQ ID NO: 3765738 - DNA, 25 bp, Homo sapien
atatacatgaaaataagatggagag

SEQ ID NO: 3765739 - DNA, 25 bp, Homo sapien
accattcatgctttaatgaacacat

SEQ ID NO: 3765740 - DNA, 25 bp, Homo sapien
cgcaggcaagcacaacggatgtctc

SEQ ID NO: 3765741 - DNA, 25 bp, Homo sapien
ctatttagaagtgggtagcgctcgc

SEQ ID NO: 3765742 - DNA, 25 bp, Homo sapien
tcagagcttccaaaacgcaggcaag

SEQ ID NO: 3765743 - DNA, 25 bp, Homo sapien
tgtctcctgggcgaccatttagcac

SEQ ID NO: 3765744 - DNA, 25 bp, Homo sapien
ctagattgttcttctactcttcctc

SEQ ID NO: 3765745 - DNA, 25 bp, Homo sapien
accagtttgcagaagtcccgaaaat

SEQ ID NO: 3765746 - DNA, 25 bp, Homo sapien
gtatgtgccacctcgcctagctaag

SEQ ID NO: 3765747 - DNA, 25 bp, Homo sapien
gcgagcctctcaccttagtctcccg

SEQ ID NO: 3765748 - DNA, 25 bp, Homo sapien
gtgccacctcgcctagctaagttta

SEQ ID NO: 3765749 - DNA, 25 bp, Homo sapien
ctctgggcccgaaggcttttgatct

SEQ ID NO: 3765750 - DNA, 25 bp, Homo sapien
aaaatccttgcaaggtgttaaggct

SEQ ID NO: 3765751 - DNA, 25 bp, Homo sapien
ccttgcaaggtgttaaggcttgtca

SEQ ID NO: 3765752 - DNA, 25 bp, Homo sapien
tgttaaggcttgtcaggtgttcagc

SEQ ID NO: 3765753 - DNA, 25 bp, Homo sapien
tttcctgtggaatttactcatatct

SEQ ID NO: 3765754 - DNA, 25 bp, Homo sapien
aagatgtcacagctatgaataacac

SEQ ID NO: 3765755 - DNA, 25 bp, Homo sapien
agctatgaataacactgagccacag

SEQ ID NO: 3765756 - DNA, 25 bp, Homo sapien
tgtcacagctatgaataacactgag

SEQ ID NO: 3765757 - DNA, 25 bp, Homo sapien
tggggttttgccatgttggccaggc

SEQ ID NO: 3765758 - DNA, 25 bp, Homo sapien
gtggtgagatttctgttcactgcaa

SEQ ID NO: 3765759 - DNA, 25 bp, Homo sapien
gtgcagtggtgagatttctgttcac

SEQ ID NO: 3765760 - DNA, 25 bp, Homo sapien
atggggttttgccatgttggccagg

SEQ ID NO: 3765761 - DNA, 25 bp, Homo sapien
aggaggacgctgatcagcaggaaaa

SEQ ID NO: 3765762 - DNA, 25 bp, Homo sapien
ggaggacgctgatcagcaggaaaac

SEQ ID NO: 3765763 - DNA, 25 bp, Homo sapien
ggaggaggacgctgatcagcaggaa

SEQ ID NO: 3765764 - DNA, 25 bp, Homo sapien
gaggacgctgatcagcaggaaaaca

SEQ ID NO: 3765765 - DNA, 25 bp, Homo sapien
gagggagttcagcaaagggccctgg

SEQ ID NO: 3765766 - DNA, 25 bp, Homo sapien
ggacatccccaaagagcaaggcgga

SEQ ID NO: 3765767 - DNA, 25 bp, Homo sapien
gtctcaggaagtaggtccctcccca

SEQ ID NO: 3765768 - DNA, 25 bp, Homo sapien
cctaggagtcttgaggaacagggca

SEQ ID NO: 3765769 - DNA, 25 bp, Homo sapien
tccccatgggatttcctaggagtct

SEQ ID NO: 3765770 - DNA, 25 bp, Homo sapien
ctgctacctggtactctgttgtaaa

SEQ ID NO: 3765771 - DNA, 25 bp, Homo sapien
tggacgtctccatggttgcagccat

SEQ ID NO: 3765772 - DNA, 25 bp, Homo sapien
tatggacgtctccatggttgcagcc

SEQ ID NO: 3765773 - DNA, 25 bp, Homo sapien
atggacgtctccatggttgcagcca

SEQ ID NO: 3765774 - DNA, 25 bp, Homo sapien
tctcactctcaggacggccttcggg

SEQ ID NO: 3765775 - DNA, 25 bp, Homo sapien
ttgttgtgacgaggcaggaagtctc

SEQ ID NO: 3765776 - DNA, 25 bp, Homo sapien
tgtgacgaggcaggaagtctcactc

SEQ ID NO: 3765777 - DNA, 25 bp, Homo sapien
ccttcggggcttgcctgaggcttct

SEQ ID NO: 3765778 - DNA, 25 bp, Homo sapien
agcagcaagcattccctggctgtca

SEQ ID NO: 3765779 - DNA, 25 bp, Homo sapien
ccaaggaagcagcaagcattccctg

SEQ ID NO: 3765780 - DNA, 25 bp, Homo sapien
tcttccaaggaagcagcaagcattc

SEQ ID NO: 3765781 - DNA, 25 bp, Homo sapien
gcaagcattccctggctgtcagggt

SEQ ID NO: 3765782 - DNA, 25 bp, Homo sapien
gcaaagcaacattgtggaccccaga

SEQ ID NO: 3765783 - DNA, 25 bp, Homo sapien
gacttaggaccaactacgaggcagc

SEQ ID NO: 3765784 - DNA, 25 bp, Homo sapien
gaaactggacttgcccttggagcca

SEQ ID NO: 3765785 - DNA, 25 bp, Homo sapien
gaaggagcccttagagtccatctga

SEQ ID NO: 3765786 - DNA, 25 bp, Homo sapien
ggaaactgactggtctccatttcac

SEQ ID NO: 3765787 - DNA, 25 bp, Homo sapien
tggaaactgactggtctccatttca

SEQ ID NO: 3765788 - DNA, 25 bp, Homo sapien
ctggaaactgactggtctccatttc

SEQ ID NO: 3765789 - DNA, 25 bp, Homo sapien
tccaccttgtcttcccgtgggtcat

SEQ ID NO: 3765790 - DNA, 25 bp, Homo sapien
cctctgtgtagagccctgtatccct

SEQ ID NO: 3765791 - DNA, 25 bp, Homo sapien
tggacgcactgataataaaccatct

SEQ ID NO: 3765792 - DNA, 25 bp, Homo sapien
gtgggtcattttgcagacgctctca

SEQ ID NO: 3765793 - DNA, 25 bp, Homo sapien
ggcatcttgggatgatgtcggaagg

SEQ ID NO: 3765794 - DNA, 25 bp, Homo sapien
gcggctgggcatcttgggatgatgt

SEQ ID NO: 3765795 - DNA, 25 bp, Homo sapien
atcttgggatgatgtcggaaggatt

SEQ ID NO: 3765796 - DNA, 25 bp, Homo sapien
agcggctgggcatcttgggatgatg

SEQ ID NO: 3765797 - DNA, 25 bp, Homo sapien
ctgaacttccagactctccccaacc

SEQ ID NO: 3765798 - DNA, 25 bp, Homo sapien
tgaacttccagactctccccaaccc

SEQ ID NO: 3765799 - DNA, 25 bp, Homo sapien
ccagactctccccaaccctgcatac

SEQ ID NO: 3765800 - DNA, 25 bp, Homo sapien
cttccagactctccccaaccctgca

SEQ ID NO: 3765801 - DNA, 25 bp, Homo sapien
aacttgtgttttggtctcaggataa

SEQ ID NO: 3765802 - DNA, 25 bp, Homo sapien
catcacgactgaacttgtgttttgg

SEQ ID NO: 3765803 - DNA, 25 bp, Homo sapien
gtttgacagccagtacaattcgtaa

SEQ ID NO: 3765804 - DNA, 25 bp, Homo sapien
cctgccatgtggcaccttgaacatc

SEQ ID NO: 3765805 - DNA, 25 bp, Homo sapien
aatctttgaaacatccctcaggcag

SEQ ID NO: 3765806 - DNA, 25 bp, Homo sapien
acaatctttgaaacatccctcaggc

SEQ ID NO: 3765807 - DNA, 25 bp, Homo sapien
caatctttgaaacatccctcaggca

SEQ ID NO: 3765808 - DNA, 25 bp, Homo sapien
agacgcagagcgtttccttgagggc

SEQ ID NO: 3765809 - DNA, 25 bp, Homo sapien
tgcggtgcgttgtcttgtgcttaag

SEQ ID NO: 3765810 - DNA, 25 bp, Homo sapien
cagggatcgttgtcacactcttgtt

SEQ ID NO: 3765811 - DNA, 25 bp, Homo sapien
ttgagggcagggatcgttgtcacac

SEQ ID NO: 3765812 - DNA, 25 bp, Homo sapien
ctgttcttcaggttgaggtgtcact

SEQ ID NO: 3765813 - DNA, 25 bp, Homo sapien
ctggaaggctcgcttggtccactgg

SEQ ID NO: 3765814 - DNA, 25 bp, Homo sapien
ggtccactggctgcattggactttg

SEQ ID NO: 3765815 - DNA, 25 bp, Homo sapien
acttgtttcgttgtgttccgagtgg

SEQ ID NO: 3765816 - DNA, 25 bp, Homo sapien
tgtacagagcatatagagtgacccg

SEQ ID NO: 3765817 - DNA, 25 bp, Homo sapien
gagtgacccgctttttattctgcgg

SEQ ID NO: 3765818 - DNA, 25 bp, Homo sapien
gacgagtggctagagtttcctgtac

SEQ ID NO: 3765819 - DNA, 25 bp, Homo sapien
gtgcattgacattggttgtcccagg

SEQ ID NO: 3765820 - DNA, 25 bp, Homo sapien
tgggatctctggcgggtcatcgtca

SEQ ID NO: 3765821 - DNA, 25 bp, Homo sapien
tctggcgggtcatcgtcacagagct

SEQ ID NO: 3765822 - DNA, 25 bp, Homo sapien
ttcaacatggttccttccttgtagg

SEQ ID NO: 3765823 - DNA, 25 bp, Homo sapien
tttgaatgtggcgtgtgggatctct

SEQ ID NO: 3765824 - DNA, 25 bp, Homo sapien
tggctgaaatacacgatcatgggtg

SEQ ID NO: 3765825 - DNA, 25 bp, Homo sapien
tatgcagctgaagggtaacatccct

SEQ ID NO: 3765826 - DNA, 25 bp, Homo sapien
tctggctgacgccttggcaatcgca

SEQ ID NO: 3765827 - DNA, 25 bp, Homo sapien
cgcaagtgacagtgacggagagcca

SEQ ID NO: 3765828 - DNA, 25 bp, Homo sapien
tgaaggtaaagctctgggtgtcaga

SEQ ID NO: 3765829 - DNA, 25 bp, Homo sapien
ttcactcactggctcactgtggtcc

SEQ ID NO: 3765830 - DNA, 25 bp, Homo sapien
cagagcccactcttttttcaagcac

SEQ ID NO: 3765831 - DNA, 25 bp, Homo sapien
gatggataggacagacagaaaatca

SEQ ID NO: 3765832 - DNA, 25 bp, Homo sapien
tcagaacgcgggatgaacatagagg

SEQ ID NO: 3765833 - DNA, 25 bp, Homo sapien
ctgtgccacactcagaacgcgggat

SEQ ID NO: 3765834 - DNA, 25 bp, Homo sapien
agaacgcgggatgaacatagaggaa

SEQ ID NO: 3765835 - DNA, 25 bp, Homo sapien
ccacactcagaacgcgggatgaaca

SEQ ID NO: 3765836 - DNA, 25 bp, Homo sapien
gcctcagaagccacggcaccagagg

SEQ ID NO: 3765837 - DNA, 25 bp, Homo sapien
tcctgcctgtagcatgcaccctgtg

SEQ ID NO: 3765838 - DNA, 25 bp, Homo sapien
atcacgtcagctgagacgcaacaca

SEQ ID NO: 3765839 - DNA, 25 bp, Homo sapien
gtgcctccgggccaccaaaaacagc

SEQ ID NO: 3765840 - DNA, 25 bp, Homo sapien
gtgttttgtcttgggccttggtcat

SEQ ID NO: 3765841 - DNA, 25 bp, Homo sapien
atgtgttttgtcttgggccttggtc

SEQ ID NO: 3765842 - DNA, 25 bp, Homo sapien
catgtgttttgtcttgggccttggt

SEQ ID NO: 3765843 - DNA, 25 bp, Homo sapien
tgtgttttgtcttgggccttggtca

SEQ ID NO: 3765844 - DNA, 25 bp, Homo sapien
gaccaggtggtccttaagccatcct

SEQ ID NO: 3765845 - DNA, 25 bp, Homo sapien
tctagcaggttgaggagtgccacgc

SEQ ID NO: 3765846 - DNA, 25 bp, Homo sapien
gcgacactgccgctttctctaaaga

SEQ ID NO: 3765847 - DNA, 25 bp, Homo sapien
gcccggaggtgctcagaatttcctc

SEQ ID NO: 3765848 - DNA, 25 bp, Homo sapien
tactggcacaggatgtcaatactcc

SEQ ID NO: 3765849 - DNA, 25 bp, Homo sapien
aggcccctctactggcacaggatgt

SEQ ID NO: 3765850 - DNA, 25 bp, Homo sapien
tactcctgatccgtatcttgccttc

SEQ ID NO: 3765851 - DNA, 25 bp, Homo sapien
ccagcacagtgaccttccggtcaac

SEQ ID NO: 3765852 - DNA, 25 bp, Homo sapien
tgtctctgtgcacctgatctctctc

SEQ ID NO: 3765853 - DNA, 25 bp, Homo sapien
gtatcatctccataaagcgctgacc

SEQ ID NO: 3765854 - DNA, 25 bp, Homo sapien
tattttaagagcctcatgacctgtc

SEQ ID NO: 3765855 - DNA, 25 bp, Homo sapien
ttgtgattggactattttaagagcc

SEQ ID NO: 3765856 - DNA, 25 bp, Homo sapien
accatgatgaacgtgagcagtcccc

SEQ ID NO: 3765857 - DNA, 25 bp, Homo sapien
caggcaccatgatgaacgtgagcag

SEQ ID NO: 3765858 - DNA, 25 bp, Homo sapien
catgatgaacgtgagcagtccccac

SEQ ID NO: 3765859 - DNA, 25 bp, Homo sapien
ccaggcaccatgatgaacgtgagca

SEQ ID NO: 3765860 - DNA, 25 bp, Homo sapien
gggcagtgaagcggaggtctttctc

SEQ ID NO: 3765861 - DNA, 25 bp, Homo sapien
cagtgaagcggaggtctttctctgc

SEQ ID NO: 3765862 - DNA, 25 bp, Homo sapien
cccttgggaccagccggggcagtga

SEQ ID NO: 3765863 - DNA, 25 bp, Homo sapien
ccggggcagtgaagcggaggtcttt

SEQ ID NO: 3765864 - DNA, 25 bp, Homo sapien
tctttttggcatcgcgccggaggat

SEQ ID NO: 3765865 - DNA, 25 bp, Homo sapien
cccttgtgggtccatccagtctcta

SEQ ID NO: 3765866 - DNA, 25 bp, Homo sapien
tctatcggagtcaggagttgctctc

SEQ ID NO: 3765867 - DNA, 25 bp, Homo sapien
cagttgccgtcagcctctttttggc

SEQ ID NO: 3765868 - DNA, 25 bp, Homo sapien
gatgttgctgagatcggtgcctccc

SEQ ID NO: 3765869 - DNA, 25 bp, Homo sapien
gaaatgtccacatgaggtcccacaa

SEQ ID NO: 3765870 - DNA, 25 bp, Homo sapien
cattgcaggatagcctggagcacga

SEQ ID NO: 3765871 - DNA, 25 bp, Homo sapien
tggccgagaggcaggcaagacactt

SEQ ID NO: 3765872 - DNA, 25 bp, Homo sapien
actgggattggtgactccaatgggc

SEQ ID NO: 3765873 - DNA, 25 bp, Homo sapien
gggattggtgactccaatgggcagc

SEQ ID NO: 3765874 - DNA, 25 bp, Homo sapien
tgggattggtgactccaatgggcag

SEQ ID NO: 3765875 - DNA, 25 bp, Homo sapien
ctgggattggtgactccaatgggca

SEQ ID NO: 3765876 - DNA, 25 bp, Homo sapien
aacattgagggcagtctcagcacac

SEQ ID NO: 3765877 - DNA, 25 bp, Homo sapien
tgggggcaacattgagggcagtctc

SEQ ID NO: 3765878 - DNA, 25 bp, Homo sapien
gggcaacattgagggcagtctcagc

SEQ ID NO: 3765879 - DNA, 25 bp, Homo sapien
cttgggggcaacattgagggcagtc

SEQ ID NO: 3765880 - DNA, 25 bp, Homo sapien
agcaggacctccggcttcttgacgg

SEQ ID NO: 3765881 - DNA, 25 bp, Homo sapien
tccggcttcttgacggggtggacca

SEQ ID NO: 3765882 - DNA, 25 bp, Homo sapien
caggacctccggcttcttgacgggg

SEQ ID NO: 3765883 - DNA, 25 bp, Homo sapien
gcttcttgacggggtggaccaggag

SEQ ID NO: 3765884 - DNA, 25 bp, Homo sapien
ctgtgccaggcatcaaaattaggcc

SEQ ID NO: 3765885 - DNA, 25 bp, Homo sapien
caaaattaggcccttgattcttcta

SEQ ID NO: 3765886 - DNA, 25 bp, Homo sapien
ttaggcccttgattcttctaccaac

SEQ ID NO: 3765887 - DNA, 25 bp, Homo sapien
ccaggcatcaaaattaggcccttga

SEQ ID NO: 3765888 - DNA, 25 bp, Homo sapien
cctctttatgaggatcttggtcatc

SEQ ID NO: 3765889 - DNA, 25 bp, Homo sapien
tctgccagttatgctaattttggga

SEQ ID NO: 3765890 - DNA, 25 bp, Homo sapien
tcatgaggggtcctagtgcagccac

SEQ ID NO: 3765891 - DNA, 25 bp, Homo sapien
ggagttgttgatgcctctgcatttc

SEQ ID NO: 3765892 - DNA, 25 bp, Homo sapien
tttcccccagaaacttctgtcagag

SEQ ID NO: 3765893 - DNA, 25 bp, Homo sapien
catccataaagacccacagtttccc

SEQ ID NO: 3765894 - DNA, 25 bp, Homo sapien
cctcatccataaagacccacagttt

SEQ ID NO: 3765895 - DNA, 25 bp, Homo sapien
agtttcccccagaaacttctgtcag

SEQ ID NO: 3765896 - DNA, 25 bp, Homo sapien
cctggacagctggaatctgtacaca

SEQ ID NO: 3765897 - DNA, 25 bp, Homo sapien
ctatgtccttcgttgggggcctggt

SEQ ID NO: 3765898 - DNA, 25 bp, Homo sapien
catggacaccaagaaacaggccctc

SEQ ID NO: 3765899 - DNA, 25 bp, Homo sapien
caccaagaaacaggccctccagctt

SEQ ID NO: 3765900 - DNA, 25 bp, Homo sapien
actgctcggatagacttctccatgg

SEQ ID NO: 3765901 - DNA, 25 bp, Homo sapien
ggacaccaagaaacaggccctccag

SEQ ID NO: 3765902 - DNA, 25 bp, Homo sapien
caccctgtgtcccggagagccgcag

SEQ ID NO: 3765903 - DNA, 25 bp, Homo sapien
gcaccctgtgtcccggagagccgca

SEQ ID NO: 3765904 - DNA, 25 bp, Homo sapien
tgcaccctgtgtcccggagagccgc

SEQ ID NO: 3765905 - DNA, 25 bp, Homo sapien
accctgtgtcccggagagccgcagg

SEQ ID NO: 3765906 - DNA, 25 bp, Homo sapien
gtggggtggtcagccctcatccctg

SEQ ID NO: 3765907 - DNA, 25 bp, Homo sapien
ctggtggggtggtcagccctcatcc

SEQ ID NO: 3765908 - DNA, 25 bp, Homo sapien
tggggtggtcagccctcatccctgg

SEQ ID NO: 3765909 - DNA, 25 bp, Homo sapien
tggtggggtggtcagccctcatccc

SEQ ID NO: 3765910 - DNA, 25 bp, Homo sapien
ggctttgtcgttctgtctgcttgat

SEQ ID NO: 3765911 - DNA, 25 bp, Homo sapien
cagggctggctttgtcgttctgtct

SEQ ID NO: 3765912 - DNA, 25 bp, Homo sapien
gattggttagtgcatcttctgtgat

SEQ ID NO: 3765913 - DNA, 25 bp, Homo sapien
tgtctgcttgattggttagtgcatc

SEQ ID NO: 3765914 - DNA, 25 bp, Homo sapien
acagtctgcttcccgcaaaagtgtg

SEQ ID NO: 3765915 - DNA, 25 bp, Homo sapien
gtctgcttcccgcaaaagtgtgatt

SEQ ID NO: 3765916 - DNA, 25 bp, Homo sapien
cgcaaaagtgtgattcctcatcccc

SEQ ID NO: 3765917 - DNA, 25 bp, Homo sapien
gcttcccgcaaaagtgtgattcctc

SEQ ID NO: 3765918 - DNA, 25 bp, Homo sapien
tttctttgcctgcatatggcagcca

SEQ ID NO: 3765919 - DNA, 25 bp, Homo sapien
gtgctcagcgcagggagcgttatcc

SEQ ID NO: 3765920 - DNA, 25 bp, Homo sapien
cagggagcgttatcctgtcctgttt

SEQ ID NO: 3765921 - DNA, 25 bp, Homo sapien
ttctttgcctgcatatggcagccat

SEQ ID NO: 3765922 - DNA, 25 bp, Homo sapien
tagtgacaaggttagtaaaatgatc

SEQ ID NO: 3765923 - DNA, 25 bp, Homo sapien
tcctagtgacaaggttagtaaaatg

SEQ ID NO: 3765924 - DNA, 25 bp, Homo sapien
tatatcatccagtcctgttaatcaa

SEQ ID NO: 3765925 - DNA, 25 bp, Homo sapien
aatgatcatggaagtatttcaaagg

SEQ ID NO: 3765926 - DNA, 25 bp, Homo sapien
gctagtcagctaatcttggcctccg

SEQ ID NO: 3765927 - DNA, 25 bp, Homo sapien
taagtccaccccttaagctagtcag

SEQ ID NO: 3765928 - DNA, 25 bp, Homo sapien
tggaaactctcctgtgctatttagg

SEQ ID NO: 3765929 - DNA, 25 bp, Homo sapien
aactgtggtcataagctatgtggca

SEQ ID NO: 3765930 - DNA, 25 bp, Homo sapien
caggccgtcctgttcatatgatgca

SEQ ID NO: 3765931 - DNA, 25 bp, Homo sapien
taggatacatcacgagcctgacagg

SEQ ID NO: 3765932 - DNA, 25 bp, Homo sapien
cttgggcagaaaatgagtagtcctc

SEQ ID NO: 3765933 - DNA, 25 bp, Homo sapien
cctgacaggtgagtgccagaaacca

SEQ ID NO: 3765934 - DNA, 25 bp, Homo sapien
tatgggctgcgctttgaaacgaaca

SEQ ID NO: 3765935 - DNA, 25 bp, Homo sapien
catgcactgcactgtgcggagagca

SEQ ID NO: 3765936 - DNA, 25 bp, Homo sapien
gaagcatgctctgtactctcagtgg

SEQ ID NO: 3765937 - DNA, 25 bp, Homo sapien
tgaaaaaatagactgccttgtgagc

SEQ ID NO: 3765938 - DNA, 25 bp, Homo sapien
tgcatgtgactttcctaagcggcag

SEQ ID NO: 3765939 - DNA, 25 bp, Homo sapien
tactgaggttcattgccagggcagg

SEQ ID NO: 3765940 - DNA, 25 bp, Homo sapien
tcctggtgcccctgatgatgaagca

SEQ ID NO: 3765941 - DNA, 25 bp, Homo sapien
gaactagagcacgagtcatctccgg

SEQ ID NO: 3765942 - DNA, 25 bp, Homo sapien
tcctgtgctggagcgttgcgctgga

SEQ ID NO: 3765943 - DNA, 25 bp, Homo sapien
aaacgttcttttggtctctcctgtg

SEQ ID NO: 3765944 - DNA, 25 bp, Homo sapien
ggagcgttgcgctggatcctgcgtc

SEQ ID NO: 3765945 - DNA, 25 bp, Homo sapien
taggaagtcagtggattgtcaaacg

SEQ ID NO: 3765946 - DNA, 25 bp, Homo sapien
actttgtgccgacctacagaacgcc

SEQ ID NO: 3765947 - DNA, 25 bp, Homo sapien
gccgacctacagaacgccagttaat

SEQ ID NO: 3765948 - DNA, 25 bp, Homo sapien
acagaacgccagttaatcttgggaa

SEQ ID NO: 3765949 - DNA, 25 bp, Homo sapien
cagaacgccagttaatcttgggaat

SEQ ID NO: 3765950 - DNA, 25 bp, Homo sapien
gaatcagtggcagccctaagcctgt

SEQ ID NO: 3765951 - DNA, 25 bp, Homo sapien
ttttcctgcaactagggccagcctc

SEQ ID NO: 3765952 - DNA, 25 bp, Homo sapien
tagaatcagtggcagccctaagcct

SEQ ID NO: 3765953 - DNA, 25 bp, Homo sapien
aggtcacaagggccagcctccagga

SEQ ID NO: 3765954 - DNA, 25 bp, Homo sapien
tcccgtcactgctcaagcgaagtgg

SEQ ID NO: 3765955 - DNA, 25 bp, Homo sapien
ggacccgcacgagtcatttagcctg

SEQ ID NO: 3765956 - DNA, 25 bp, Homo sapien
cacagcttcgccatcagctattggg

SEQ ID NO: 3765957 - DNA, 25 bp, Homo sapien
agcttcccgtcactgctcaagcgaa

SEQ ID NO: 3765958 - DNA, 25 bp, Homo sapien
tggtggaggacacccgcgatgacca

SEQ ID NO: 3765959 - DNA, 25 bp, Homo sapien
tttttcagtagcctctttagatccg

SEQ ID NO: 3765960 - DNA, 25 bp, Homo sapien
cgcgatgaccaacccgtgtgcttgc

SEQ ID NO: 3765961 - DNA, 25 bp, Homo sapien
tttagatccgatagcagtccaaggg

SEQ ID NO: 3765962 - DNA, 25 bp, Homo sapien
tcaagtactccgtggacctggctgg

SEQ ID NO: 3765963 - DNA, 25 bp, Homo sapien
tagtgggaacggctctggacactca

SEQ ID NO: 3765964 - DNA, 25 bp, Homo sapien
tgctgcatggacaaaacacaggctc

SEQ ID NO: 3765965 - DNA, 25 bp, Homo sapien
gaccgtttttcacacagcataggaa

SEQ ID NO: 3765966 - DNA, 25 bp, Homo sapien
tgtcttctgtagcagttacgtccat

SEQ ID NO: 3765967 - DNA, 25 bp, Homo sapien
tgatgcacgctttatctggaaccct

SEQ ID NO: 3765968 - DNA, 25 bp, Homo sapien
ttacgtccatggagctaagtccagg

SEQ ID NO: 3765969 - DNA, 25 bp, Homo sapien
ccttggccttggataaaatttgtct

SEQ ID NO: 3765970 - DNA, 25 bp, Homo sapien
agtggcttcctccccgtggcgtcat

SEQ ID NO: 3765971 - DNA, 25 bp, Homo sapien
ttcctgcttcgctgacactcacacc

SEQ ID NO: 3765972 - DNA, 25 bp, Homo sapien
gcgcagaagctgaaatcagggctca

SEQ ID NO: 3765973 - DNA, 25 bp, Homo sapien
gctgtgtcccaagccaactggcaag

SEQ ID NO: 3765974 - DNA, 25 bp, Homo sapien
aaggatggctcggaacagcccgaaa

SEQ ID NO: 3765975 - DNA, 25 bp, Homo sapien
ttcaaggccggcaagttccgcgtct

SEQ ID NO: 3765976 - DNA, 25 bp, Homo sapien
cctgtgcccgtaggacataaaagta

SEQ ID NO: 3765977 - DNA, 25 bp, Homo sapien
tcagctggtgattcgagcgtgtccc

SEQ ID NO: 3765978 - DNA, 25 bp, Homo sapien
aagcgagacgcgctccgccttgtcc

SEQ ID NO: 3765979 - DNA, 25 bp, Homo sapien
cgcggaagcactgtgcacccgggct

SEQ ID NO: 3765980 - DNA, 25 bp, Homo sapien
ttgggtcctcgccaggcgcggaagc

SEQ ID NO: 3765981 - DNA, 25 bp, Homo sapien
aagcactgtgcacccgggctgcggc

SEQ ID NO: 3765982 - DNA, 25 bp, Homo sapien
gcactgtctcctccggtcctgcgtg

SEQ ID NO: 3765983 - DNA, 25 bp, Homo sapien
gccgcagatataccagggctccgga

SEQ ID NO: 3765984 - DNA, 25 bp, Homo sapien
gggcggcacttgcagcgaattcccg

SEQ ID NO: 3765985 - DNA, 25 bp, Homo sapien
tcgcgtctcctttccggcctcgcgt

SEQ ID NO: 3765986 - DNA, 25 bp, Homo sapien
gggaggaaggtctgagtctttggcc

SEQ ID NO: 3765987 - DNA, 25 bp, Homo sapien
tgggtctccagggtgacggtggtta

SEQ ID NO: 3765988 - DNA, 25 bp, Homo sapien
cagggtgacggtggttagagtggga

SEQ ID NO: 3765989 - DNA, 25 bp, Homo sapien
tgggaggaaggtctgagtctttggc

SEQ ID NO: 3765990 - DNA, 25 bp, Homo sapien
gtcgtcctggcacttccgcaagcag

SEQ ID NO: 3765991 - DNA, 25 bp, Homo sapien
tggtatcttgtgtgcgggtctgagc

SEQ ID NO: 3765992 - DNA, 25 bp, Homo sapien
agcctttccagctgtagctccggaa

SEQ ID NO: 3765993 - DNA, 25 bp, Homo sapien
agtgtgtatgagtcttggtggtatc

SEQ ID NO: 3765994 - DNA, 25 bp, Homo sapien
gacaactgtgctttcttagggtgga

SEQ ID NO: 3765995 - DNA, 25 bp, Homo sapien
tctgcttgagatactgacccctggc

SEQ ID NO: 3765996 - DNA, 25 bp, Homo sapien
gagttggtctgctgtcgtgactgtc

SEQ ID NO: 3765997 - DNA, 25 bp, Homo sapien
gacccctggcgatcagattctggaa

SEQ ID NO: 3765998 - DNA, 25 bp, Homo sapien
ctgtttgatgcaggcggacttcagg

SEQ ID NO: 3765999 - DNA, 25 bp, Homo sapien
atgcaggcggacttcagggaaagct

SEQ ID NO: 3766000 - DNA, 25 bp, Homo sapien
acagtgctgtggctgtcgggcggca

SEQ ID NO: 3766001 - DNA, 25 bp, Homo sapien
ttctcggaaggacagaaccgccctc

SEQ ID NO: 3766002 - DNA, 25 bp, Homo sapien
cagccggtctccagtgtgattcagg

SEQ ID NO: 3766003 - DNA, 25 bp, Homo sapien
tgcagccggtctccagtgtgattca

SEQ ID NO: 3766004 - DNA, 25 bp, Homo sapien
gccggtctccagtgtgattcaggtc

SEQ ID NO: 3766005 - DNA, 25 bp, Homo sapien
tcctgcagccggtctccagtgtgat

SEQ ID NO: 3766006 - DNA, 25 bp, Homo sapien
gcctctgagcctccatggaggctcc

SEQ ID NO: 3766007 - DNA, 25 bp, Homo sapien
catggaggctccccaagccaggcag

SEQ ID NO: 3766008 - DNA, 25 bp, Homo sapien
cacactgctgtggagcctctgagcc

SEQ ID NO: 3766009 - DNA, 25 bp, Homo sapien
cgtccacactgctgtggagcctctg

SEQ ID NO: 3766010 - DNA, 25 bp, Homo sapien
caaagaattccgaaaggttctgagg

SEQ ID NO: 3766011 - DNA, 25 bp, Homo sapien
cactggcaaagaattccgaaaggtt

SEQ ID NO: 3766012 - DNA, 25 bp, Homo sapien
tctgaggggtttactccgggcactg

SEQ ID NO: 3766013 - DNA, 25 bp, Homo sapien
tgccactggcaaagaattccgaaag

SEQ ID NO: 3766014 - DNA, 25 bp, Homo sapien
tgctgagggcggtaagacagggcgg

SEQ ID NO: 3766015 - DNA, 25 bp, Homo sapien
tgtgctgagggcggtaagacagggc

SEQ ID NO: 3766016 - DNA, 25 bp, Homo sapien
tgagggcggtaagacagggcgggta

SEQ ID NO: 3766017 - DNA, 25 bp, Homo sapien
gagcctggcgtcgtggggacagagg

SEQ ID NO: 3766018 - DNA, 25 bp, Homo sapien
tgtgtttccggcaaaggatgttttc

SEQ ID NO: 3766019 - DNA, 25 bp, Homo sapien
atgttttccgagaaggcctgggagc

SEQ ID NO: 3766020 - DNA, 25 bp, Homo sapien
aataggcccggcaggtgtttttgcg

SEQ ID NO: 3766021 - DNA, 25 bp, Homo sapien
gagcggctgtaaataatacccgaga

SEQ ID NO: 3766022 - DNA, 25 bp, Homo sapien
gtccgcggtggaggcgccgccagtg

SEQ ID NO: 3766023 - DNA, 25 bp, Homo sapien
tccatccgaatcttcatgaacaggg

SEQ ID NO: 3766024 - DNA, 25 bp, Homo sapien
cgtatgcgttgggtctgtggctcca

SEQ ID NO: 3766025 - DNA, 25 bp, Homo sapien
actccctgaggacctcgtatgcgtt

SEQ ID NO: 3766026 - DNA, 25 bp, Homo sapien
tgtgcgggtctcattcagctctgcg

SEQ ID NO: 3766027 - DNA, 25 bp, Homo sapien
agctctgcggtcctcagtgtctgtc

SEQ ID NO: 3766028 - DNA, 25 bp, Homo sapien
gagtacgtttcagccctccaggtgg

SEQ ID NO: 3766029 - DNA, 25 bp, Homo sapien
ctgagaagtcgggaggaaaacgcct

SEQ ID NO: 3766030 - DNA, 25 bp, Homo sapien
ctgttcttttcttagtcttacgcag

SEQ ID NO: 3766031 - DNA, 25 bp, Homo sapien
ttcttttcttagtcttacgcaggga

SEQ ID NO: 3766032 - DNA, 25 bp, Homo sapien
tgttcttttcttagtcttacgcagg

SEQ ID NO: 3766033 - DNA, 25 bp, Homo sapien
gactgtgatcttgggccattgtgtc

SEQ ID NO: 3766034 - DNA, 25 bp, Homo sapien
gagactggcgtcacccataaatgca

SEQ ID NO: 3766035 - DNA, 25 bp, Homo sapien
tcctccaggatatttgactgtgatc

SEQ ID NO: 3766036 - DNA, 25 bp, Homo sapien
ataagatgggtatgaacttgctgcg

SEQ ID NO: 3766037 - DNA, 25 bp, Homo sapien
ctgctggctcactcgtttgctggga

SEQ ID NO: 3766038 - DNA, 25 bp, Homo sapien
tactctgacgcattctcccggaaca

SEQ ID NO: 3766039 - DNA, 25 bp, Homo sapien
gggacagatactctgacgcattctc

SEQ ID NO: 3766040 - DNA, 25 bp, Homo sapien
tggggactgcgagaaagcccctgct

SEQ ID NO: 3766041 - DNA, 25 bp, Homo sapien
catcaggcatgcggctgtgcttctt

SEQ ID NO: 3766042 - DNA, 25 bp, Homo sapien
gaggcagaggagtccaagctgggtg

SEQ ID NO: 3766043 - DNA, 25 bp, Homo sapien
tgcagcccacgtcgggagggcaagg

SEQ ID NO: 3766044 - DNA, 25 bp, Homo sapien
tggcctcatacttgtcactcggtga

SEQ ID NO: 3766045 - DNA, 25 bp, Homo sapien
ggcagacaggacacttcgctggcct

SEQ ID NO: 3766046 - DNA, 25 bp, Homo sapien
gaacataaaatgctacctggtggga

SEQ ID NO: 3766047 - DNA, 25 bp, Homo sapien
ggcagtgcctgacttcccgctcctg

SEQ ID NO: 3766048 - DNA, 25 bp, Homo sapien
tacctggtgggactcacgagtgagt

SEQ ID NO: 3766049 - DNA, 25 bp, Homo sapien
cacgagtgagttccggacaggacag

SEQ ID NO: 3766050 - DNA, 25 bp, Homo sapien
ccagcaacaagagaacagcgaagga

SEQ ID NO: 3766051 - DNA, 25 bp, Homo sapien
aacaaaaatgccctgtcctcttggg

SEQ ID NO: 3766052 - DNA, 25 bp, Homo sapien
gaggcgtaggacatgcggctgatat

SEQ ID NO: 3766053 - DNA, 25 bp, Homo sapien
gggagacacaaccagcaacaagaga

SEQ ID NO: 3766054 - DNA, 25 bp, Homo sapien
tgccctgggccgtggagatgactgg

SEQ ID NO: 3766055 - DNA, 25 bp, Homo sapien
tgcctgccctgggccgtggagatga

SEQ ID NO: 3766056 - DNA, 25 bp, Homo sapien
tccgggatggacagagtccgcccca

SEQ ID NO: 3766057 - DNA, 25 bp, Homo sapien
tgccctccctcggtgcctgccctgg

SEQ ID NO: 3766058 - DNA, 25 bp, Homo sapien
tctgaaaggatttactgctgtcaga

SEQ ID NO: 3766059 - DNA, 25 bp, Homo sapien
agccaccccatcgtgtgcagcacgg

SEQ ID NO: 3766060 - DNA, 25 bp, Homo sapien
ctcggcctcgagttgatctgaaagg

SEQ ID NO: 3766061 - DNA, 25 bp, Homo sapien
aaaggatttactgctgtcagagcca

SEQ ID NO: 3766062 - DNA, 25 bp, Homo sapien
atccactgacaaacgcccggtgagg

SEQ ID NO: 3766063 - DNA, 25 bp, Homo sapien
ccccagagtgacacccaagcatgta

SEQ ID NO: 3766064 - DNA, 25 bp, Homo sapien
agtgatgagaagaccgttgagcccc

SEQ ID NO: 3766065 - DNA, 25 bp, Homo sapien
taactaactcgagaccaggagcatc

SEQ ID NO: 3766066 - DNA, 25 bp, Homo sapien
ccagggctagtcagaagccagcgag

SEQ ID NO: 3766067 - DNA, 25 bp, Homo sapien
tttcgacaggtaggatctggctgct

SEQ ID NO: 3766068 - DNA, 25 bp, Homo sapien
ccagcgagtttgagtcgcagctgtt

SEQ ID NO: 3766069 - DNA, 25 bp, Homo sapien
gctgttggggaagtccctctggaat

SEQ ID NO: 3766070 - DNA, 25 bp, Homo sapien
tgccgtccctctggcccaccgctgt

SEQ ID NO: 3766071 - DNA, 25 bp, Homo sapien
gccgtccctctggcccaccgctgtc

SEQ ID NO: 3766072 - DNA, 25 bp, Homo sapien
cgtccctctggcccaccgctgtcca

SEQ ID NO: 3766073 - DNA, 25 bp, Homo sapien
ttgccgtccctctggcccaccgctg

SEQ ID NO: 3766074 - DNA, 25 bp, Homo sapien
cagataaacgtggttcacttccagg

SEQ ID NO: 3766075 - DNA, 25 bp, Homo sapien
ctggtaagagaatgcagataaacgt

SEQ ID NO: 3766076 - DNA, 25 bp, Homo sapien
gagaatgcagataaacgtggttcac

SEQ ID NO: 3766077 - DNA, 25 bp, Homo sapien
taaacgtggttcacttccaggagga

SEQ ID NO: 3766078 - DNA, 25 bp, Homo sapien
ccttaagtggaagtgaatcctcata

SEQ ID NO: 3766079 - DNA, 25 bp, Homo sapien
aagtgaatcctcataaaggtcttcc

SEQ ID NO: 3766080 - DNA, 25 bp, Homo sapien
aacatattcattattccttaagtgg

SEQ ID NO: 3766081 - DNA, 25 bp, Homo sapien
aaggtcttcctctctgtcgtcttca

SEQ ID NO: 3766082 - DNA, 25 bp, Homo sapien
cagcgggtaggtcctagcttggttt

SEQ ID NO: 3766083 - DNA, 25 bp, Homo sapien
gaaatgcggttgcttgtgtttgttg

SEQ ID NO: 3766084 - DNA, 25 bp, Homo sapien
gctatggctggcacaggatcacgga

SEQ ID NO: 3766085 - DNA, 25 bp, Homo sapien
gaacgttttaacctggctatggctg

SEQ ID NO: 3766086 - DNA, 25 bp, Homo sapien
caagagatgaatgatgtgccgctgc

SEQ ID NO: 3766087 - DNA, 25 bp, Homo sapien
tcaactccctgtgccctaagagctg

SEQ ID NO: 3766088 - DNA, 25 bp, Homo sapien
cagtgtttgcaagcttgtagggagt

SEQ ID NO: 3766089 - DNA, 25 bp, Homo sapien
gaccgctgtcagatgcgttatctag

SEQ ID NO: 3766090 - DNA, 25 bp, Homo sapien
gactgtcacaagtcgcgagctggtg

SEQ ID NO: 3766091 - DNA, 25 bp, Homo sapien
tgcacgactgtcacaagtcgcgagc

SEQ ID NO: 3766092 - DNA, 25 bp, Homo sapien
ctgactgcacgactgtcacaagtcg

SEQ ID NO: 3766093 - DNA, 25 bp, Homo sapien
gtcacaagtcgcgagctggtgcaaa

SEQ ID NO: 3766094 - DNA, 25 bp, Homo sapien
ctcccggccagcacagttgaggtga

SEQ ID NO: 3766095 - DNA, 25 bp, Homo sapien
taggatgcactttaagcagcttccc

SEQ ID NO: 3766096 - DNA, 25 bp, Homo sapien
ccacagcgcgtgttaggaatgcaga

SEQ ID NO: 3766097 - DNA, 25 bp, Homo sapien
ggtccacggtctacactgggcagga

SEQ ID NO: 3766098 - DNA, 25 bp, Homo sapien
ccctcgttgcccagatgtgagtgca

SEQ ID NO: 3766099 - DNA, 25 bp, Homo sapien
gactctttaaaagccggcggtgcgc

SEQ ID NO: 3766100 - DNA, 25 bp, Homo sapien
acgcagagccgagtgcagaagatct

SEQ ID NO: 3766101 - DNA, 25 bp, Homo sapien
gatgccgttggaactgacgcagagc

SEQ ID NO: 3766102 - DNA, 25 bp, Homo sapien
ctttgctcaggatttagacaccatg

SEQ ID NO: 3766103 - DNA, 25 bp, Homo sapien
tttagacaccatgggaaattgagtc

SEQ ID NO: 3766104 - DNA, 25 bp, Homo sapien
tcaggatttagacaccatgggaaat

SEQ ID NO: 3766105 - DNA, 25 bp, Homo sapien
ttgctcaggatttagacaccatggg

SEQ ID NO: 3766106 - DNA, 25 bp, Homo sapien
ttccataactggctccttgtgtcac

SEQ ID NO: 3766107 - DNA, 25 bp, Homo sapien
actgtatcccacggctgagtgttca

SEQ ID NO: 3766108 - DNA, 25 bp, Homo sapien
tatcccacggctgagtgttcaccag

SEQ ID NO: 3766109 - DNA, 25 bp, Homo sapien
ccataactggctccttgtgtcactg

SEQ ID NO: 3766110 - DNA, 25 bp, Homo sapien
ccacgtggccatggttgtaaccatg

SEQ ID NO: 3766111 - DNA, 25 bp, Homo sapien
tggttgtaaccatgacaacactttg

SEQ ID NO: 3766112 - DNA, 25 bp, Homo sapien
ccagggtctttacacagttgttcct

SEQ ID NO: 3766113 - DNA, 25 bp, Homo sapien
tcaattcgggtgtttagtctgttac

SEQ ID NO: 3766114 - DNA, 25 bp, Homo sapien
gcagcccagggcttttagcgtctcc

SEQ ID NO: 3766115 - DNA, 25 bp, Homo sapien
tctggccctggagcttgcatgtcgg

SEQ ID NO: 3766116 - DNA, 25 bp, Homo sapien
tgacttcagtttggagccctgctgg

SEQ ID NO: 3766117 - DNA, 25 bp, Homo sapien
gagctggcgggtatcatctggccct

SEQ ID NO: 3766118 - DNA, 25 bp, Homo sapien
gcattcatccgagcctggcaccaga

SEQ ID NO: 3766119 - DNA, 25 bp, Homo sapien
gaccgtcatgtagcagcggaagcca

SEQ ID NO: 3766120 - DNA, 25 bp, Homo sapien
gctcgggtggaggatttacctgtcc

SEQ ID NO: 3766121 - DNA, 25 bp, Homo sapien
tggctgaggcttcgtgaccggccct

SEQ ID NO: 3766122 - DNA, 25 bp, Homo sapien
ggcgctgacattcgggcaatgtctt

SEQ ID NO: 3766123 - DNA, 25 bp, Homo sapien
tcgggagttgcttgggctgccccag

SEQ ID NO: 3766124 - DNA, 25 bp, Homo sapien
ccagcggatgcaccggcgctgacat

SEQ ID NO: 3766125 - DNA, 25 bp, Homo sapien
cgtgtcgggagttgcttgggctgcc

SEQ ID NO: 3766126 - DNA, 25 bp, Homo sapien
catgagggtgtcctcaccggcctgg

SEQ ID NO: 3766127 - DNA, 25 bp, Homo sapien
ggacaaattgcggtaagtccaggca

SEQ ID NO: 3766128 - DNA, 25 bp, Homo sapien
ggtgtccagtcccacccatgagggt

SEQ ID NO: 3766129 - DNA, 25 bp, Homo sapien
tccaggcaatgtagccggctcggtg

SEQ ID NO: 3766130 - DNA, 25 bp, Homo sapien
ttttggggcttattcctggagatga

SEQ ID NO: 3766131 - DNA, 25 bp, Homo sapien
tttgctctccatatcaggttttcga

SEQ ID NO: 3766132 - DNA, 25 bp, Homo sapien
gagatgatgggtctggcatctttgc

SEQ ID NO: 3766133 - DNA, 25 bp, Homo sapien
tcaggttttcgatgccaccaatact

SEQ ID NO: 3766134 - DNA, 25 bp, Homo sapien
gaccctacagttgtggcctccaata

SEQ ID NO: 3766135 - DNA, 25 bp, Homo sapien
gccccgtgcttctgcggcagcgtag

SEQ ID NO: 3766136 - DNA, 25 bp, Homo sapien
cgtttttcatcgagtcggtgtgcga

SEQ ID NO: 3766137 - DNA, 25 bp, Homo sapien
ggcagcgtagaccacaagggcattt

SEQ ID NO: 3766138 - DNA, 25 bp, Homo sapien
tgttgattgggaggtcagacctaca

SEQ ID NO: 3766139 - DNA, 25 bp, Homo sapien
ctacagagcggtttttaacccagag

SEQ ID NO: 3766140 - DNA, 25 bp, Homo sapien
aggtcagacctacagagcggttttt

SEQ ID NO: 3766141 - DNA, 25 bp, Homo sapien
tcagacctacagagcggtttttaac

SEQ ID NO: 3766142 - DNA, 25 bp, Homo sapien
agataggattagtttctgttggtgg

SEQ ID NO: 3766143 - DNA, 25 bp, Homo sapien
agtgggcaggcttggatgggacgta

SEQ ID NO: 3766144 - DNA, 25 bp, Homo sapien
tggcaggagcctgacagctagtggt

SEQ ID NO: 3766145 - DNA, 25 bp, Homo sapien
taggaaataattcagggagatagga

SEQ ID NO: 3766146 - DNA, 25 bp, Homo sapien
cttaacactgggacgctgtggtgct

SEQ ID NO: 3766147 - DNA, 25 bp, Homo sapien
aaacttaacactgggacgctgtggt

SEQ ID NO: 3766148 - DNA, 25 bp, Homo sapien
cttcagcttaaacatatcagaatat

SEQ ID NO: 3766149 - DNA, 25 bp, Homo sapien
tcagaatatgacaattctataaaga

SEQ ID NO: 3766150 - DNA, 25 bp, Homo sapien
ggagcattgcggatcctcacgtgga

SEQ ID NO: 3766151 - DNA, 25 bp, Homo sapien
tgagttcagcgccaggctgtctggc

SEQ ID NO: 3766152 - DNA, 25 bp, Homo sapien
ctgtctggcggtgactcgggcacgg

SEQ ID NO: 3766153 - DNA, 25 bp, Homo sapien
tggagctcggttgagttcagcgcca

SEQ ID NO: 3766154 - DNA, 25 bp, Homo sapien
ggaacccttgcaaatatgtgagatg

SEQ ID NO: 3766155 - DNA, 25 bp, Homo sapien
tgtgagatgtaggaatttctgtgct

SEQ ID NO: 3766156 - DNA, 25 bp, Homo sapien
ttccgagacttccttagacctcatg

SEQ ID NO: 3766157 - DNA, 25 bp, Homo sapien
tcaggtttgttgatgagccggatgc

SEQ ID NO: 3766158 - DNA, 25 bp, Homo sapien
agggcttcgtccctgcagattgcgc

SEQ ID NO: 3766159 - DNA, 25 bp, Homo sapien
tcttagggacgtctgaagctgctgg

SEQ ID NO: 3766160 - DNA, 25 bp, Homo sapien
gggcaagcctgtctgtaagtatctc

SEQ ID NO: 3766161 - DNA, 25 bp, Homo sapien
cccctggcgttgggaggacagtcct

SEQ ID NO: 3766162 - DNA, 25 bp, Homo sapien
ctgctttcttcctgcttgctcattt

SEQ ID NO: 3766163 - DNA, 25 bp, Homo sapien
cgctgctgcttgcactgctttcttc

SEQ ID NO: 3766164 - DNA, 25 bp, Homo sapien
gcactgctttcttcctgcttgctca

SEQ ID NO: 3766165 - DNA, 25 bp, Homo sapien
gctttcttcctgcttgctcatttgg

SEQ ID NO: 3766166 - DNA, 25 bp, Homo sapien
ggttcagccttagctctggcagcca

SEQ ID NO: 3766167 - DNA, 25 bp, Homo sapien
ccactgctctgggatcccttcccca

SEQ ID NO: 3766168 - DNA, 25 bp, Homo sapien
agtttcaggttcagccttagctctg

SEQ ID NO: 3766169 - DNA, 25 bp, Homo sapien
tcaggttcagccttagctctggcag

SEQ ID NO: 3766170 - DNA, 25 bp, Homo sapien
ggaaaggtgtgatgaggaatgcagc

SEQ ID NO: 3766171 - DNA, 25 bp, Homo sapien
ttggaaatgggagaggtttggcatg

SEQ ID NO: 3766172 - DNA, 25 bp, Homo sapien
tggaaaggtgtgatgaggaatgcag

SEQ ID NO: 3766173 - DNA, 25 bp, Homo sapien
ttggcatggcgctcagattttggtg

SEQ ID NO: 3766174 - DNA, 25 bp, Homo sapien
gagtgggctgggtgcccgttccctg

SEQ ID NO: 3766175 - DNA, 25 bp, Homo sapien
cttgcttcagaaagccggccgcctc

SEQ ID NO: 3766176 - DNA, 25 bp, Homo sapien
agtgaccggcccgtgcttccagcag

SEQ ID NO: 3766177 - DNA, 25 bp, Homo sapien
gcccgtgcttccagcaggtgagccg

SEQ ID NO: 3766178 - DNA, 25 bp, Homo sapien
gacatcacccggtcttgcaggctct

SEQ ID NO: 3766179 - DNA, 25 bp, Homo sapien
cccctgggtgaaggacgtggacatc

SEQ ID NO: 3766180 - DNA, 25 bp, Homo sapien
actgttattgttgcatcgccatcac

SEQ ID NO: 3766181 - DNA, 25 bp, Homo sapien
tccactgttattgttgcatcgccat

SEQ ID NO: 3766182 - DNA, 25 bp, Homo sapien
acttccatcatccttcggcgggcac

SEQ ID NO: 3766183 - DNA, 25 bp, Homo sapien
ccagcagatgcggagggaaatgtca

SEQ ID NO: 3766184 - DNA, 25 bp, Homo sapien
ctgtgggtgccggaagctgtgggct

SEQ ID NO: 3766185 - DNA, 25 bp, Homo sapien
gctctccctagatatgaggacccag

SEQ ID NO: 3766186 - DNA, 25 bp, Homo sapien
cctaggaatgtccagcctcggagac

SEQ ID NO: 3766187 - DNA, 25 bp, Homo sapien
tcctgaggacttcttccggagaggg

SEQ ID NO: 3766188 - DNA, 25 bp, Homo sapien
acaccagaaagccacgtgggtccct

SEQ ID NO: 3766189 - DNA, 25 bp, Homo sapien
cactgaggcagacgtgtcggttcca

SEQ ID NO: 3766190 - DNA, 25 bp, Homo sapien
tttctgtgatctcccggcacgtttg

SEQ ID NO: 3766191 - DNA, 25 bp, Homo sapien
agggtgatgagtgctggtcctgaca

SEQ ID NO: 3766192 - DNA, 25 bp, Homo sapien
ctcccggcacgtttggagctgggaa

SEQ ID NO: 3766193 - DNA, 25 bp, Homo sapien
ttgtttcgtttctgtgatctcccgg

SEQ ID NO: 3766194 - DNA, 25 bp, Homo sapien
tccctgagctgagacgcaagttggc

SEQ ID NO: 3766195 - DNA, 25 bp, Homo sapien
tctcttcaggaacgtagatgttggg

SEQ ID NO: 3766196 - DNA, 25 bp, Homo sapien
cctgcacactgtcttggagcatctg

SEQ ID NO: 3766197 - DNA, 25 bp, Homo sapien
ctgggaagacgcctcatgggaacga

SEQ ID NO: 3766198 - DNA, 25 bp, Homo sapien
cgatttgacatggaaggcctgttgc

SEQ ID NO: 3766199 - DNA, 25 bp, Homo sapien
cccactttggctggcgtctgctgga

SEQ ID NO: 3766200 - DNA, 25 bp, Homo sapien
cattctttgaacatcgactctgaag

SEQ ID NO: 3766201 - DNA, 25 bp, Homo sapien
cacgggtgcatgattgtgcttaact

SEQ ID NO: 3766202 - DNA, 25 bp, Homo sapien
tgttaattggtttgggagcctccta

SEQ ID NO: 3766203 - DNA, 25 bp, Homo sapien
gagcctcctatgtgtgacttatgac

SEQ ID NO: 3766204 - DNA, 25 bp, Homo sapien
tgtataaggagcctaaacaatagaa

SEQ ID NO: 3766205 - DNA, 25 bp, Homo sapien
tgtctgaattaatgacctgggatat

SEQ ID NO: 3766206 - DNA, 25 bp, Homo sapien
tatgcgtgaccagcgtcttgcttgg

SEQ ID NO: 3766207 - DNA, 25 bp, Homo sapien
cactgctgcgctccagaaatagcct

SEQ ID NO: 3766208 - DNA, 25 bp, Homo sapien
tgcagctggtatgcgtgaccagcgt

SEQ ID NO: 3766209 - DNA, 25 bp, Homo sapien
gtcttcatcccttaggcgcctgccg

SEQ ID NO: 3766210 - DNA, 25 bp, Homo sapien
gattcatctgagagatgggctaggt

SEQ ID NO: 3766211 - DNA, 25 bp, Homo sapien
catctgagagatgggctaggtccac

SEQ ID NO: 3766212 - DNA, 25 bp, Homo sapien
tctgagattcatctgagagatgggc

SEQ ID NO: 3766213 - DNA, 25 bp, Homo sapien
agatgggctaggtccacagtcactg

SEQ ID NO: 3766214 - DNA, 25 bp, Homo sapien
tgtgccccgtcatcgtccatacgga

SEQ ID NO: 3766215 - DNA, 25 bp, Homo sapien
tctgtcactaaatggataaccagtg

SEQ ID NO: 3766216 - DNA, 25 bp, Homo sapien
gtccatacggacctggcccgcagtg

SEQ ID NO: 3766217 - DNA, 25 bp, Homo sapien
gaacctgggcctaagatcccggaga

SEQ ID NO: 3766218 - DNA, 25 bp, Homo sapien
tctctaatgtgtgcaggcgaacctg

SEQ ID NO: 3766219 - DNA, 25 bp, Homo sapien
gaagcaggtacctcgttttccagcc

SEQ ID NO: 3766220 - DNA, 25 bp, Homo sapien
catcacccctatgtacagaagcagg

SEQ ID NO: 3766221 - DNA, 25 bp, Homo sapien
tctgaactaagtctctgcaagctct

SEQ ID NO: 3766222 - DNA, 25 bp, Homo sapien
aacacgaagtgaaggccacgtagtg

SEQ ID NO: 3766223 - DNA, 25 bp, Homo sapien
tgcaggaatattagtgaagcccatg

SEQ ID NO: 3766224 - DNA, 25 bp, Homo sapien
gaatttgggcgcagcatccagaaaa

SEQ ID NO: 3766225 - DNA, 25 bp, Homo sapien
gctgctcattctttttgaggaaaac

SEQ ID NO: 3766226 - DNA, 25 bp, Homo sapien
aagtaatctgtaatgaattgtgatc

SEQ ID NO: 3766227 - DNA, 25 bp, Homo sapien
gaggaacaaagtaatctgtaatgaa

SEQ ID NO: 3766228 - DNA, 25 bp, Homo sapien
caaagtaatctgtaatgaattgtga

SEQ ID NO: 3766229 - DNA, 25 bp, Homo sapien
gtaatctgtaatgaattgtgatcaa

SEQ ID NO: 3766230 - DNA, 25 bp, Homo sapien
ttggatgttaggatacgtcacggtg

SEQ ID NO: 3766231 - DNA, 25 bp, Homo sapien
aagatgtctaaacggctgtcttcat

SEQ ID NO: 3766232 - DNA, 25 bp, Homo sapien
cacctcctggtatttggatgttagg

SEQ ID NO: 3766233 - DNA, 25 bp, Homo sapien
cttcattctcggcttggctaccagg

SEQ ID NO: 3766234 - DNA, 25 bp, Homo sapien
gagggcagccctgacattcacccgg

SEQ ID NO: 3766235 - DNA, 25 bp, Homo sapien
cgtgtgcgggagacgtgtcacagca

SEQ ID NO: 3766236 - DNA, 25 bp, Homo sapien
tgacattcacccggttcctcctggg

SEQ ID NO: 3766237 - DNA, 25 bp, Homo sapien
tcacagcagcattctatcatcatta

SEQ ID NO: 3766238 - DNA, 25 bp, Homo sapien
tcgtcatccctcatggaaaaagaaa

SEQ ID NO: 3766239 - DNA, 25 bp, Homo sapien
cttcagtttcgtcatccctcatgga

SEQ ID NO: 3766240 - DNA, 25 bp, Homo sapien
gtttcgtcatccctcatggaaaaag

SEQ ID NO: 3766241 - DNA, 25 bp, Homo sapien
tcagtttcgtcatccctcatggaaa

SEQ ID NO: 3766242 - DNA, 25 bp, Homo sapien
gtagctgacactgcatgccgggaac

SEQ ID NO: 3766243 - DNA, 25 bp, Homo sapien
gacactccatgccaggaagtagctg

SEQ ID NO: 3766244 - DNA, 25 bp, Homo sapien
tagcttgtctgtgactcggcgaagg

SEQ ID NO: 3766245 - DNA, 25 bp, Homo sapien
tgtcatggcgacaaaccgatgtggc

SEQ ID NO: 3766246 - DNA, 25 bp, Homo sapien
tgagagtccttcagtccagtgacct

SEQ ID NO: 3766247 - DNA, 25 bp, Homo sapien
catttccgtcgtgtgatgaatttta

SEQ ID NO: 3766248 - DNA, 25 bp, Homo sapien
tcagctacatttccgtcgtgtgatg

SEQ ID NO: 3766249 - DNA, 25 bp, Homo sapien
ttgagagtccttcagtccagtgacc

SEQ ID NO: 3766250 - DNA, 25 bp, Homo sapien
gaccatttctggctacagaactgtc

SEQ ID NO: 3766251 - DNA, 25 bp, Homo sapien
accatttctggctacagaactgtct

SEQ ID NO: 3766252 - DNA, 25 bp, Homo sapien
cattgatttggagtacttggttccc

SEQ ID NO: 3766253 - DNA, 25 bp, Homo sapien
ccaataaggttggagagttatcctt

SEQ ID NO: 3766254 - DNA, 25 bp, Homo sapien
tgcactttatctgagctccagcctg

SEQ ID NO: 3766255 - DNA, 25 bp, Homo sapien
catgaatggacgtagaaatcttctc

SEQ ID NO: 3766256 - DNA, 25 bp, Homo sapien
ctattgatttaagccagagttcaat

SEQ ID NO: 3766257 - DNA, 25 bp, Homo sapien
gatttaagccagagttcaatttttc

SEQ ID NO: 3766258 - DNA, 25 bp, Homo sapien
tgatttaagccagagttcaattttt

SEQ ID NO: 3766259 - DNA, 25 bp, Homo sapien
attgatttaagccagagttcaattt

SEQ ID NO: 3766260 - DNA, 25 bp, Homo sapien
cattgtatagttcgtactggaaggt

SEQ ID NO: 3766261 - DNA, 25 bp, Homo sapien
tggatatagtttggaatagaggttt

SEQ ID NO: 3766262 - DNA, 25 bp, Homo sapien
ttaccagttataggagccattgtat

SEQ ID NO: 3766263 - DNA, 25 bp, Homo sapien
tccatcttgatccaatggcttcatg

SEQ ID NO: 3766264 - DNA, 25 bp, Homo sapien
agagatgtgaacagaagcttctgac

SEQ ID NO: 3766265 - DNA, 25 bp, Homo sapien
cttgagagatgtgaacagaagcttc

SEQ ID NO: 3766266 - DNA, 25 bp, Homo sapien
tgtgaacagaagcttctgacaaaat

SEQ ID NO: 3766267 - DNA, 25 bp, Homo sapien
gatgtgaacagaagcttctgacaaa

SEQ ID NO: 3766268 - DNA, 25 bp, Homo sapien
tacttttgagtaggctgacctttcc

SEQ ID NO: 3766269 - DNA, 25 bp, Homo sapien
tctccatatcccagaagggtcctct

SEQ ID NO: 3766270 - DNA, 25 bp, Homo sapien
caggtgttcctaaagacccgtctct

SEQ ID NO: 3766271 - DNA, 25 bp, Homo sapien
tgtaggagcaagatgtccccatgag

SEQ ID NO: 3766272 - DNA, 25 bp, Homo sapien
tcaaatgatattgattgcctcctct

SEQ ID NO: 3766273 - DNA, 25 bp, Homo sapien
tttgtaggattggaaacgatggtct

SEQ ID NO: 3766274 - DNA, 25 bp, Homo sapien
gatattgattgcctcctctttaggt

SEQ ID NO: 3766275 - DNA, 25 bp, Homo sapien
taggattggaaacgatggtcttgat

SEQ ID NO: 3766276 - DNA, 25 bp, Homo sapien
tgaacttgagcctcactccggcatt

SEQ ID NO: 3766277 - DNA, 25 bp, Homo sapien
acaggctgcgggaggtgaacttgag

SEQ ID NO: 3766278 - DNA, 25 bp, Homo sapien
tgggtccctgcgttgtcctaacgtg

SEQ ID NO: 3766279 - DNA, 25 bp, Homo sapien
gctgagtcagtgtgccgtgagtcac

SEQ ID NO: 3766280 - DNA, 25 bp, Homo sapien
tgtttgtctcttcgggcgagatgcg

SEQ ID NO: 3766281 - DNA, 25 bp, Homo sapien
ccttgtttgtctcttcgggcgagat

SEQ ID NO: 3766282 - DNA, 25 bp, Homo sapien
cgagatgcgagtcactccagggcag

SEQ ID NO: 3766283 - DNA, 25 bp, Homo sapien
tggttgttgggtgccttgtttgtct

SEQ ID NO: 3766284 - DNA, 25 bp, Homo sapien
agctcagcacaccctaagaatccat

SEQ ID NO: 3766285 - DNA, 25 bp, Homo sapien
gcagggcagttagtctgccctttag

SEQ ID NO: 3766286 - DNA, 25 bp, Homo sapien
cctttagggagcagatctaaacctg

SEQ ID NO: 3766287 - DNA, 25 bp, Homo sapien
tcagcacaccctaagaatccatcta

SEQ ID NO: 3766288 - DNA, 25 bp, Homo sapien
cctgattaggcggacaggcttctgt

SEQ ID NO: 3766289 - DNA, 25 bp, Homo sapien
gagggccttgttcataagaatcggg

SEQ ID NO: 3766290 - DNA, 25 bp, Homo sapien
gtgcttagctctggcctccgggatt

SEQ ID NO: 3766291 - DNA, 25 bp, Homo sapien
aagtagccaagtagcaggttacagg

SEQ ID NO: 3766292 - DNA, 25 bp, Homo sapien
ttctgttttgtcagctcagcggcta

SEQ ID NO: 3766293 - DNA, 25 bp, Homo sapien
tctgttttgtcagctcagcggctaa

SEQ ID NO: 3766294 - DNA, 25 bp, Homo sapien
tttgtcagctcagcggctaacaccc

SEQ ID NO: 3766295 - DNA, 25 bp, Homo sapien
tgttttgtcagctcagcggctaaca

SEQ ID NO: 3766296 - DNA, 25 bp, Homo sapien
cctgtgtggtcatgtaaaatgggtt

SEQ ID NO: 3766297 - DNA, 25 bp, Homo sapien
taaaatgggttacaatttggagaca

SEQ ID NO: 3766298 - DNA, 25 bp, Homo sapien
aatgggttacaatttggagacagag

SEQ ID NO: 3766299 - DNA, 25 bp, Homo sapien
aatgatgatgtgtccctgtgtggtc

SEQ ID NO: 3766300 - DNA, 25 bp, Homo sapien
gaaagttccttttcatgacaccatg

SEQ ID NO: 3766301 - DNA, 25 bp, Homo sapien
cagttcccgggaaatagctactgtt

SEQ ID NO: 3766302 - DNA, 25 bp, Homo sapien
ctctttctgggaaggcatgggtgca

SEQ ID NO: 3766303 - DNA, 25 bp, Homo sapien
tgtcttttggatttgcagtgcactc

SEQ ID NO: 3766304 - DNA, 25 bp, Homo sapien
taactggctcctccgtgatgaggac

SEQ ID NO: 3766305 - DNA, 25 bp, Homo sapien
tgatgaggacaaccatcggagtggg

SEQ ID NO: 3766306 - DNA, 25 bp, Homo sapien
cttccttctgttggtagaagcccca

SEQ ID NO: 3766307 - DNA, 25 bp, Homo sapien
agtggggagattggagcatacacca

SEQ ID NO: 3766308 - DNA, 25 bp, Homo sapien
cattgccctgttttgacttgcaaca

SEQ ID NO: 3766309 - DNA, 25 bp, Homo sapien
tttgacttgcaacagagatgctcat

SEQ ID NO: 3766310 - DNA, 25 bp, Homo sapien
ctctgccaatatccattgccctgtt

SEQ ID NO: 3766311 - DNA, 25 bp, Homo sapien
tatccattgccctgttttgacttgc

SEQ ID NO: 3766312 - DNA, 25 bp, Homo sapien
gtttctggctccatccaagaggtgg

SEQ ID NO: 3766313 - DNA, 25 bp, Homo sapien
gagttaccagtaaggagctccaccg

SEQ ID NO: 3766314 - DNA, 25 bp, Homo sapien
cgttgccccgacgaggaagtgtgaa

SEQ ID NO: 3766315 - DNA, 25 bp, Homo sapien
agaggtcgctcccagaagacagtcc

SEQ ID NO: 3766316 - DNA, 25 bp, Homo sapien
tactaactggactttggtcaaacgc

SEQ ID NO: 3766317 - DNA, 25 bp, Homo sapien
tgcttactaactggactttggtcaa

SEQ ID NO: 3766318 - DNA, 25 bp, Homo sapien
aaaattgcttactaactggactttg

SEQ ID NO: 3766319 - DNA, 25 bp, Homo sapien
ctggactttggtcaaacgctggcaa

SEQ ID NO: 3766320 - DNA, 25 bp, Homo sapien
gggagcccatgggcatttgctcctt

SEQ ID NO: 3766321 - DNA, 25 bp, Homo sapien
ggagcccatgggcatttgctccttt

SEQ ID NO: 3766322 - DNA, 25 bp, Homo sapien
ttaaagacatctctaccacccggtg

SEQ ID NO: 3766323 - DNA, 25 bp, Homo sapien
tcaccagctcaatgtaagggattcc

SEQ ID NO: 3766324 - DNA, 25 bp, Homo sapien
gccataaaccacgactttggtgagg

SEQ ID NO: 3766325 - DNA, 25 bp, Homo sapien
gaatgcgagaagctcttgaagccca

SEQ ID NO: 3766326 - DNA, 25 bp, Homo sapien
tttcccaaagctgtgttcttcagag

SEQ ID NO: 3766327 - DNA, 25 bp, Homo sapien
cccaaagctgtgttcttcagagctg

SEQ ID NO: 3766328 - DNA, 25 bp, Homo sapien
caaagctgtgttcttcagagctgca

SEQ ID NO: 3766329 - DNA, 25 bp, Homo sapien
aaagctgtgttcttcagagctgcac

SEQ ID NO: 3766330 - DNA, 25 bp, Homo sapien
aagagcagcattggctttgcgatcc

SEQ ID NO: 3766331 - DNA, 25 bp, Homo sapien
gcagcattggctttgcgatccccaa

SEQ ID NO: 3766332 - DNA, 25 bp, Homo sapien
tggctttgcgatccccaatctcatc

SEQ ID NO: 3766333 - DNA, 25 bp, Homo sapien
ttgcgatccccaatctcatcgtgac

SEQ ID NO: 3766334 - DNA, 25 bp, Homo sapien
catcttgtgtggagtctcgggcccc

SEQ ID NO: 3766335 - DNA, 25 bp, Homo sapien
gaaactcagtgtccttctgttggta

SEQ ID NO: 3766336 - DNA, 25 bp, Homo sapien
tgtccttctgttggtagctgcttgc

SEQ ID NO: 3766337 - DNA, 25 bp, Homo sapien
gctgcccctatcagagcagagttgt

SEQ ID NO: 3766338 - DNA, 25 bp, Homo sapien
ctggaaagcctgaaaccttctcgtg

SEQ ID NO: 3766339 - DNA, 25 bp, Homo sapien
gaaagcctgaaaccttctcgtgcct

SEQ ID NO: 3766340 - DNA, 25 bp, Homo sapien
aaaccttctcgtgccttctactgca

SEQ ID NO: 3766341 - DNA, 25 bp, Homo sapien
gcctgaaaccttctcgtgccttcta

SEQ ID NO: 3766342 - DNA, 25 bp, Homo sapien
gagggaactcccagagctgactgta

SEQ ID NO: 3766343 - DNA, 25 bp, Homo sapien
agccagcttctccagagggaactcc

SEQ ID NO: 3766344 - DNA, 25 bp, Homo sapien
gaactcccagagctgactgtacttt

SEQ ID NO: 3766345 - DNA, 25 bp, Homo sapien
gagctgactgtactttcctacctca

SEQ ID NO: 3766346 - DNA, 25 bp, Homo sapien
tggtagaaggctggtttagccagaa

SEQ ID NO: 3766347 - DNA, 25 bp, Homo sapien
ctggtagaaggctggtttagccaga

SEQ ID NO: 3766348 - DNA, 25 bp, Homo sapien
gaatgactgaatggattgagatcag

SEQ ID NO: 3766349 - DNA, 25 bp, Homo sapien
tgaatggattgagatcagttggcat

SEQ ID NO: 3766350 - DNA, 25 bp, Homo sapien
ttgttggatgtgcaaagaacctggt

SEQ ID NO: 3766351 - DNA, 25 bp, Homo sapien
ggatgtgcaaagaacctggtaattt

SEQ ID NO: 3766352 - DNA, 25 bp, Homo sapien
aactgccagtatgctccaggcacga

SEQ ID NO: 3766353 - DNA, 25 bp, Homo sapien
ttgactctagtagagacagcagccc

SEQ ID NO: 3766354 - DNA, 25 bp, Homo sapien
gaatgttttgctaaaagagcctgca

SEQ ID NO: 3766355 - DNA, 25 bp, Homo sapien
gaagataagcttcctggcagtgaac

SEQ ID NO: 3766356 - DNA, 25 bp, Homo sapien
tctgcttctacttaaataggagagg

SEQ ID NO: 3766357 - DNA, 25 bp, Homo sapien
ttggtcaaacttggtccttgggaca

SEQ ID NO: 3766358 - DNA, 25 bp, Homo sapien
tttgcccgaaatgctgctgaagaag

SEQ ID NO: 3766359 - DNA, 25 bp, Homo sapien
tgcaaatggatttgcccgaaatgct

SEQ ID NO: 3766360 - DNA, 25 bp, Homo sapien
cagatgtatgaaggctatggtgttg

SEQ ID NO: 3766361 - DNA, 25 bp, Homo sapien
tgtgaagtgatgtttcgactagagc

SEQ ID NO: 3766362 - DNA, 25 bp, Homo sapien
ccgtaataggataacttgagtctga

SEQ ID NO: 3766363 - DNA, 25 bp, Homo sapien
ttcgactagagctgattttggaagt

SEQ ID NO: 3766364 - DNA, 25 bp, Homo sapien
agggcttagtgctgagccagacagc

SEQ ID NO: 3766365 - DNA, 25 bp, Homo sapien
cacaaagaggaagcgaaggccaagg

SEQ ID NO: 3766366 - DNA, 25 bp, Homo sapien
aggttgaacagggaaggatgacaca

SEQ ID NO: 3766367 - DNA, 25 bp, Homo sapien
gcttagtgctgagccagacagccat

SEQ ID NO: 3766368 - DNA, 25 bp, Homo sapien
ctccactgctgctgcgttgcccggg

SEQ ID NO: 3766369 - DNA, 25 bp, Homo sapien
tgcgttgcccgggcctggggtagga

SEQ ID NO: 3766370 - DNA, 25 bp, Homo sapien
ctgctgcgttgcccgggcctggggt

SEQ ID NO: 3766371 - DNA, 25 bp, Homo sapien
actgctgctgcgttgcccgggcctg

SEQ ID NO: 3766372 - DNA, 25 bp, Homo sapien
aattctgatgcatttcttgggctta

SEQ ID NO: 3766373 - DNA, 25 bp, Homo sapien
tgagatattaattggcctgacacta

SEQ ID NO: 3766374 - DNA, 25 bp, Homo sapien
gaagcctgtaggatcttgtctatga

SEQ ID NO: 3766375 - DNA, 25 bp, Homo sapien
tgtgtagggtgagagtgcttttcca

SEQ ID NO: 3766376 - DNA, 25 bp, Homo sapien
tgttgtcgtaagtgtagtggcctga

SEQ ID NO: 3766377 - DNA, 25 bp, Homo sapien
tttggtgataagcagggtgtagcac

SEQ ID NO: 3766378 - DNA, 25 bp, Homo sapien
gattacgactttgacacactctggg

SEQ ID NO: 3766379 - DNA, 25 bp, Homo sapien
cacagcactccaccgatggtcaggt

SEQ ID NO: 3766380 - DNA, 25 bp, Homo sapien
tggagtagaagggggaagaattaga

SEQ ID NO: 3766381 - DNA, 25 bp, Homo sapien
tagaagggggaagaattagaacaca

SEQ ID NO: 3766382 - DNA, 25 bp, Homo sapien
cctgtactgagtatatttttcagag

SEQ ID NO: 3766383 - DNA, 25 bp, Homo sapien
cctgaccgtcagtgccctgtactga

SEQ ID NO: 3766384 - DNA, 25 bp, Homo sapien
ttcattaccaacattgccgaggtcc

SEQ ID NO: 3766385 - DNA, 25 bp, Homo sapien
aagcaaggcggagtcaggtcagatc

SEQ ID NO: 3766386 - DNA, 25 bp, Homo sapien
tgctcccactctatttagctctcgt

SEQ ID NO: 3766387 - DNA, 25 bp, Homo sapien
tatttagctctcgtgacgggtctga

SEQ ID NO: 3766388 - DNA, 25 bp, Homo sapien
cactctatttagctctcgtgacggg

SEQ ID NO: 3766389 - DNA, 25 bp, Homo sapien
tctcgtgacgggtctgaatacacca

SEQ ID NO: 3766390 - DNA, 25 bp, Homo sapien
tagcgttccctcagttttccccatc

SEQ ID NO: 3766391 - DNA, 25 bp, Homo sapien
tgtagcgttccctcagttttcccca

SEQ ID NO: 3766392 - DNA, 25 bp, Homo sapien
cgttccctcagttttccccatcagt

SEQ ID NO: 3766393 - DNA, 25 bp, Homo sapien
gcgttccctcagttttccccatcag

SEQ ID NO: 3766394 - DNA, 25 bp, Homo sapien
tccattcctacagggtagacaatca

SEQ ID NO: 3766395 - DNA, 25 bp, Homo sapien
tagacaatcaattccaagggcccag

SEQ ID NO: 3766396 - DNA, 25 bp, Homo sapien
gtcactcagatcaagtccccagggt

SEQ ID NO: 3766397 - DNA, 25 bp, Homo sapien
cagcatctcctatgaacccaaggtc

SEQ ID NO: 3766398 - DNA, 25 bp, Homo sapien
gagcaggaacgtggccagattgccc

SEQ ID NO: 3766399 - DNA, 25 bp, Homo sapien
tgaacatgctgcacggtttgacgca

SEQ ID NO: 3766400 - DNA, 25 bp, Homo sapien
tgtcggctgctgacttggtgttctc

SEQ ID NO: 3766401 - DNA, 25 bp, Homo sapien
gctctgttactagccagctggagat

SEQ ID NO: 3766402 - DNA, 25 bp, Homo sapien
tctgctgggagctgttgacccgccg

SEQ ID NO: 3766403 - DNA, 25 bp, Homo sapien
gacttccacccgataattctacatg

SEQ ID NO: 3766404 - DNA, 25 bp, Homo sapien
tcctgctgagtcacgctgtctgctg

SEQ ID NO: 3766405 - DNA, 25 bp, Homo sapien
tacatggctctgcaataagcagctt

SEQ ID NO: 3766406 - DNA, 25 bp, Homo sapien
gtttattacccagtgctattggcat

SEQ ID NO: 3766407 - DNA, 25 bp, Homo sapien
ggaagagggaatttgccttgcgtct

SEQ ID NO: 3766408 - DNA, 25 bp, Homo sapien
ttgcgtcttcccaactatgcccaag

SEQ ID NO: 3766409 - DNA, 25 bp, Homo sapien
cccactagatggctcaagttcttta

SEQ ID NO: 3766410 - DNA, 25 bp, Homo sapien
tcaggcatgttgctaccaagagctc

SEQ ID NO: 3766411 - DNA, 25 bp, Homo sapien
cctcagtgggaatgatgatttcttc

SEQ ID NO: 3766412 - DNA, 25 bp, Homo sapien
ggcacctgttaccaatgttgtccca

SEQ ID NO: 3766413 - DNA, 25 bp, Homo sapien
tggtataacctcaagtcaggcatgt

SEQ ID NO: 3766414 - DNA, 25 bp, Homo sapien
ttaatatgggtgttccccgcagcca

SEQ ID NO: 3766415 - DNA, 25 bp, Homo sapien
caggcattaatatgggtgttccccg

SEQ ID NO: 3766416 - DNA, 25 bp, Homo sapien
gttccccgcagccagaagttgaagt

SEQ ID NO: 3766417 - DNA, 25 bp, Homo sapien
ccgcagccagaagttgaagtatcta

SEQ ID NO: 3766418 - DNA, 25 bp, Homo sapien
gacgtaactgttctgatgttcggaa

SEQ ID NO: 3766419 - DNA, 25 bp, Homo sapien
ttctgatgttcggaatgcgtgcgat

SEQ ID NO: 3766420 - DNA, 25 bp, Homo sapien
tcgaattgacgtaactgttctgatg

SEQ ID NO: 3766421 - DNA, 25 bp, Homo sapien
ccccaaattcgaattgacgtaactg

SEQ ID NO: 3766422 - DNA, 25 bp, Homo sapien
gagtagggcagttggtgcattccaa

SEQ ID NO: 3766423 - DNA, 25 bp, Homo sapien
aacagcatattttatagtcaaagct

SEQ ID NO: 3766424 - DNA, 25 bp, Homo sapien
tcatccgcagtagagtgaagaaacg

SEQ ID NO: 3766425 - DNA, 25 bp, Homo sapien
tgaagaaacgacatggaaggcagaa

SEQ ID NO: 3766426 - DNA, 25 bp, Homo sapien
ttggggctccttccctcatcactga

SEQ ID NO: 3766427 - DNA, 25 bp, Homo sapien
aggaagttggggctccttccctcat

SEQ ID NO: 3766428 - DNA, 25 bp, Homo sapien
aagttggggctccttccctcatcac

SEQ ID NO: 3766429 - DNA, 25 bp, Homo sapien
ttaggacgcagggagaaacaaggaa

SEQ ID NO: 3766430 - DNA, 25 bp, Homo sapien
aggagactgagcagacggcattgag

SEQ ID NO: 3766431 - DNA, 25 bp, Homo sapien
attccccggcctgccgtcggctggg

SEQ ID NO: 3766432 - DNA, 25 bp, Homo sapien
tgagcagacggcattgagggaagga

SEQ ID NO: 3766433 - DNA, 25 bp, Homo sapien
agtggcttcattccccggcctgccg

SEQ ID NO: 3766434 - DNA, 25 bp, Homo sapien
tggtaaagagcgtggtccctacgtg

SEQ ID NO: 3766435 - DNA, 25 bp, Homo sapien
tacgtgcaagaaatctcctgtgtag

SEQ ID NO: 3766436 - DNA, 25 bp, Homo sapien
cagggtggtaggctcggtggtaaag

SEQ ID NO: 3766437 - DNA, 25 bp, Homo sapien
tggtccctacgtgcaagaaatctcc

SEQ ID NO: 3766438 - DNA, 25 bp, Homo sapien
catctagctcgagagggcagtgctg

SEQ ID NO: 3766439 - DNA, 25 bp, Homo sapien
cgatttaaagttgaccctgtcctct

SEQ ID NO: 3766440 - DNA, 25 bp, Homo sapien
aagttgaccctgtcctctcatctag

SEQ ID NO: 3766441 - DNA, 25 bp, Homo sapien
tgccatgaataattgaaaaccgatt

SEQ ID NO: 3766442 - DNA, 25 bp, Homo sapien
ccatgctcagtcctctccttccgca

SEQ ID NO: 3766443 - DNA, 25 bp, Homo sapien
ccgcccatgctcagtcctctccttc

SEQ ID NO: 3766444 - DNA, 25 bp, Homo sapien
tctccttccgcagtccgatgaccat

SEQ ID NO: 3766445 - DNA, 25 bp, Homo sapien
cctctccttccgcagtccgatgacc

SEQ ID NO: 3766446 - DNA, 25 bp, Homo sapien
tgcattgttgtgagtgggttctggg

SEQ ID NO: 3766447 - DNA, 25 bp, Homo sapien
tgagtgggttctgggatgttcccgg

SEQ ID NO: 3766448 - DNA, 25 bp, Homo sapien
tctgtgggtgtttaaggctgatgct

SEQ ID NO: 3766449 - DNA, 25 bp, Homo sapien
gatgttcccggtctgtgggtgttta

SEQ ID NO: 3766450 - DNA, 25 bp, Homo sapien
tgatgggtccattggagacagaggc

SEQ ID NO: 3766451 - DNA, 25 bp, Homo sapien
attgatgggtccattggagacagag

SEQ ID NO: 3766452 - DNA, 25 bp, Homo sapien
gatgggtccattggagacagaggct

SEQ ID NO: 3766453 - DNA, 25 bp, Homo sapien
cattgatgggtccattggagacaga

SEQ ID NO: 3766454 - DNA, 25 bp, Homo sapien
ttagatagcgtcttcaccaacccca

SEQ ID NO: 3766455 - DNA, 25 bp, Homo sapien
gaaagcgctctagtgaggactttag

SEQ ID NO: 3766456 - DNA, 25 bp, Homo sapien
tctagtgaggactttagatagcgtc

SEQ ID NO: 3766457 - DNA, 25 bp, Homo sapien
tcagatttagaaccagaaagcgctc

SEQ ID NO: 3766458 - DNA, 25 bp, Homo sapien
caaacagcatgcatgggccattgat

SEQ ID NO: 3766459 - DNA, 25 bp, Homo sapien
tgaaatcaccagtcatggcacgaga

SEQ ID NO: 3766460 - DNA, 25 bp, Homo sapien
tgatcttgaatgatgcctacggagg

SEQ ID NO: 3766461 - DNA, 25 bp, Homo sapien
taacaagcgaaggtgtctagcaaac

SEQ ID NO: 3766462 - DNA, 25 bp, Homo sapien
gcgcccaggtgaagagccataattt

SEQ ID NO: 3766463 - DNA, 25 bp, Homo sapien
gagtgagatccgctactagaccagg

SEQ ID NO: 3766464 - DNA, 25 bp, Homo sapien
gacatgtcaggagacgagacacacg

SEQ ID NO: 3766465 - DNA, 25 bp, Homo sapien
gagacacacggcatcgtcattagtg

SEQ ID NO: 3766466 - DNA, 25 bp, Homo sapien
gcgaacgggtctcagtctttattgt

SEQ ID NO: 3766467 - DNA, 25 bp, Homo sapien
ggcgaacgggtctcagtctttattg

SEQ ID NO: 3766468 - DNA, 25 bp, Homo sapien
acgggtctcagtctttattgttgag

SEQ ID NO: 3766469 - DNA, 25 bp, Homo sapien
gaacgggtctcagtctttattgttg

SEQ ID NO: 3766470 - DNA, 25 bp, Homo sapien
gcagtgtctcttgaaccagttccca

SEQ ID NO: 3766471 - DNA, 25 bp, Homo sapien
agcagtgtctcttgaaccagttccc

SEQ ID NO: 3766472 - DNA, 25 bp, Homo sapien
aagcagtgtctcttgaaccagttcc

SEQ ID NO: 3766473 - DNA, 25 bp, Homo sapien
ccaagcagtgtctcttgaaccagtt

SEQ ID NO: 3766474 - DNA, 25 bp, Homo sapien
tctggtccatgctgttgatcagtgc

SEQ ID NO: 3766475 - DNA, 25 bp, Homo sapien
ctccatcccggggttcatgaaggaa

SEQ ID NO: 3766476 - DNA, 25 bp, Homo sapien
cagccggggcttctcgtttaagaat

SEQ ID NO: 3766477 - DNA, 25 bp, Homo sapien
gctctgtcggcaaatgacagccggg

SEQ ID NO: 3766478 - DNA, 25 bp, Homo sapien
tcactggagcttgggacagatgttg

SEQ ID NO: 3766479 - DNA, 25 bp, Homo sapien
aattagagtgcttgaggctggcctg

SEQ ID NO: 3766480 - DNA, 25 bp, Homo sapien
gagaacaactattcttgccctggga

SEQ ID NO: 3766481 - DNA, 25 bp, Homo sapien
gatgttgagaacaactattcttgcc

SEQ ID NO: 3766482 - DNA, 25 bp, Homo sapien
tgttgggaagtccatgagcctggcc

SEQ ID NO: 3766483 - DNA, 25 bp, Homo sapien
tcgctatcatgactaatagcctgtg

SEQ ID NO: 3766484 - DNA, 25 bp, Homo sapien
actaatagcctgtgcgttctctggg

SEQ ID NO: 3766485 - DNA, 25 bp, Homo sapien
gcttcttctggccattcgctatcat

SEQ ID NO: 3766486 - DNA, 25 bp, Homo sapien
tccgttcaagttcctcccagttgat

SEQ ID NO: 3766487 - DNA, 25 bp, Homo sapien
tgatctcccgaaacaaagggtgctg

SEQ ID NO: 3766488 - DNA, 25 bp, Homo sapien
tcttctcaggttctcgcacgaagag

SEQ ID NO: 3766489 - DNA, 25 bp, Homo sapien
ggtgggtcaatctccttccgttcaa

SEQ ID NO: 3766490 - DNA, 25 bp, Homo sapien
agagcccagtttccacctgtaatac

SEQ ID NO: 3766491 - DNA, 25 bp, Homo sapien
ctaccacggatagggcgctgaattc

SEQ ID NO: 3766492 - DNA, 25 bp, Homo sapien
cgctgaattccgttttgatggtgaa

SEQ ID NO: 3766493 - DNA, 25 bp, Homo sapien
tattctcgatggatcctgggctacc

SEQ ID NO: 3766494 - DNA, 25 bp, Homo sapien
tctattaaaacacagacggtgcaca

SEQ ID NO: 3766495 - DNA, 25 bp, Homo sapien
aatgaaccaactacatctccaggtg

SEQ ID NO: 3766496 - DNA, 25 bp, Homo sapien
ctccaggtgagcgtattcaaggtca

SEQ ID NO: 3766497 - DNA, 25 bp, Homo sapien
taactgatgcacatgagggtttctc

SEQ ID NO: 3766498 - DNA, 25 bp, Homo sapien
cagaagacctaatgctcgtcttatg

SEQ ID NO: 3766499 - DNA, 25 bp, Homo sapien
tatgaagacgctcttggcttcgctt

SEQ ID NO: 3766500 - DNA, 25 bp, Homo sapien
gctcgtcttatgaagacgctcttgg

SEQ ID NO: 3766501 - DNA, 25 bp, Homo sapien
agacgctcttggcttcgcttcttac

SEQ ID NO: 3766502 - DNA, 25 bp, Homo sapien
atcctgcccgtggaaaggcgactga

SEQ ID NO: 3766503 - DNA, 25 bp, Homo sapien
ggttgtatttctgacccagcaagat

SEQ ID NO: 3766504 - DNA, 25 bp, Homo sapien
taaaagggattgtccatgcggatgg

SEQ ID NO: 3766505 - DNA, 25 bp, Homo sapien
cagccaccgtgggtaaaagggattg

SEQ ID NO: 3766506 - DNA, 25 bp, Homo sapien
gatttgtaaaagtagcgctccccac

SEQ ID NO: 3766507 - DNA, 25 bp, Homo sapien
acttgacttgggtggacgcttgctc

SEQ ID NO: 3766508 - DNA, 25 bp, Homo sapien
tgtgcttacatcagtggtggcttag

SEQ ID NO: 3766509 - DNA, 25 bp, Homo sapien
gctaaagaagcaatggcatgtggcc

SEQ ID NO: 3766510 - DNA, 25 bp, Homo sapien
caggatgttatctagcttcaggtcc

SEQ ID NO: 3766511 - DNA, 25 bp, Homo sapien
tgtccatctttgtctaacaggatgt

SEQ ID NO: 3766512 - DNA, 25 bp, Homo sapien
caaaatccgcgatcttgatatgtcc

SEQ ID NO: 3766513 - DNA, 25 bp, Homo sapien
tgtcccacagaaggtattcgtcttg

SEQ ID NO: 3766514 - DNA, 25 bp, Homo sapien
gacccaggggagaacttcagagtcc

SEQ ID NO: 3766515 - DNA, 25 bp, Homo sapien
accctatggggcatcaggacccagg

SEQ ID NO: 3766516 - DNA, 25 bp, Homo sapien
cacagcctgtgcatgtctctgcaag

SEQ ID NO: 3766517 - DNA, 25 bp, Homo sapien
gagaacttcagagtccacagcctgt

SEQ ID NO: 3766518 - DNA, 25 bp, Homo sapien
tgtagactattcctttggaatgaag

SEQ ID NO: 3766519 - DNA, 25 bp, Homo sapien
gtagactattcctttggaatgaagg

SEQ ID NO: 3766520 - DNA, 25 bp, Homo sapien
tagactattcctttggaatgaagga

SEQ ID NO: 3766521 - DNA, 25 bp, Homo sapien
ctgtagactattcctttggaatgaa

SEQ ID NO: 3766522 - DNA, 25 bp, Homo sapien
ctctggaaaggtcgaacttgtggca

SEQ ID NO: 3766523 - DNA, 25 bp, Homo sapien
aaggtcgaacttgtggcagctttgg

SEQ ID NO: 3766524 - DNA, 25 bp, Homo sapien
gctttggatgtggtacattaagtcc

SEQ ID NO: 3766525 - DNA, 25 bp, Homo sapien
gtcgctctggaaaggtcgaacttgt

SEQ ID NO: 3766526 - DNA, 25 bp, Homo sapien
atcagacgccacactagtggtgagc

SEQ ID NO: 3766527 - DNA, 25 bp, Homo sapien
ctcaggtctgaatcagacgccacac

SEQ ID NO: 3766528 - DNA, 25 bp, Homo sapien
tgaatcagacgccacactagtggtg

SEQ ID NO: 3766529 - DNA, 25 bp, Homo sapien
ggtctgaatcagacgccacactagt

SEQ ID NO: 3766530 - DNA, 25 bp, Homo sapien
atgagagagtcaccattacctacag

SEQ ID NO: 3766531 - DNA, 25 bp, Homo sapien
actgaaggcaataaacaatgttgac

SEQ ID NO: 3766532 - DNA, 25 bp, Homo sapien
ccagacaactgaaggcaataaacaa

SEQ ID NO: 3766533 - DNA, 25 bp, Homo sapien
gagagtcaccattacctacagcttt

SEQ ID NO: 3766534 - DNA, 25 bp, Homo sapien
tagtctccctcttgtctggtttctc

SEQ ID NO: 3766535 - DNA, 25 bp, Homo sapien
tgaatagtctccctcttgtctggtt

SEQ ID NO: 3766536 - DNA, 25 bp, Homo sapien
ctgaatagtctccctcttgtctggt

SEQ ID NO: 3766537 - DNA, 25 bp, Homo sapien
aatagtctccctcttgtctggtttc

SEQ ID NO: 3766538 - DNA, 25 bp, Homo sapien
aaagttggctggcatccgcactgaa

SEQ ID NO: 3766539 - DNA, 25 bp, Homo sapien
agttggctggcatccgcactgaagg

SEQ ID NO: 3766540 - DNA, 25 bp, Homo sapien
gtactgagaagggatcgtgcaattt

SEQ ID NO: 3766541 - DNA, 25 bp, Homo sapien
ggatcgtgcaatttcaagccctgca

SEQ ID NO: 3766542 - DNA, 25 bp, Homo sapien
tctggaatgtacaaaacatgtgcgt

SEQ ID NO: 3766543 - DNA, 25 bp, Homo sapien
catgtgcgtcagaaacggatgctcc

SEQ ID NO: 3766544 - DNA, 25 bp, Homo sapien
tgctcccaggccaaggaaagaactc

SEQ ID NO: 3766545 - DNA, 25 bp, Homo sapien
gaactctcttctctaccatcgtgca

SEQ ID NO: 3766546 - DNA, 25 bp, Homo sapien
tccaacggagactcccaggaaatgc

SEQ ID NO: 3766547 - DNA, 25 bp, Homo sapien
tttatccacctcatccaacggagac

SEQ ID NO: 3766548 - DNA, 25 bp, Homo sapien
tcatccaacggagactcccaggaaa

SEQ ID NO: 3766549 - DNA, 25 bp, Homo sapien
gatggcacattttatccacctcatc

SEQ ID NO: 3766550 - DNA, 25 bp, Homo sapien
tgaagatctgttcagtatctcttaa

SEQ ID NO: 3766551 - DNA, 25 bp, Homo sapien
tgtcggtaaacatggcggccttgct

SEQ ID NO: 3766552 - DNA, 25 bp, Homo sapien
catttttgatggagcatgggagacc

SEQ ID NO: 3766553 - DNA, 25 bp, Homo sapien
ttcaaccggaccttctctgaagatc

SEQ ID NO: 3766554 - DNA, 25 bp, Homo sapien
caaggccggtgctcagaaatacatc

SEQ ID NO: 3766555 - DNA, 25 bp, Homo sapien
aatacatcccggcatttcccatagg

SEQ ID NO: 3766556 - DNA, 25 bp, Homo sapien
ttcccatagggctgccacaggtgaa

SEQ ID NO: 3766557 - DNA, 25 bp, Homo sapien
tgcatggacatccttgctgagcggc

SEQ ID NO: 3766558 - DNA, 25 bp, Homo sapien
gcatctatgatgcacattcatgcca

SEQ ID NO: 3766559 - DNA, 25 bp, Homo sapien
gctctcaatcatggccagcgcttca

SEQ ID NO: 3766560 - DNA, 25 bp, Homo sapien
cagcgcttcagccattagcttctgg

SEQ ID NO: 3766561 - DNA, 25 bp, Homo sapien
tagcttctggtttatgccacaaagg

SEQ ID NO: 3766562 - DNA, 25 bp, Homo sapien
gatccctcttggactggagagcgtg

SEQ ID NO: 3766563 - DNA, 25 bp, Homo sapien
tagaatctaacttccattgccagtg

SEQ ID NO: 3766564 - DNA, 25 bp, Homo sapien
ggctcccgattaaggatctccagca

SEQ ID NO: 3766565 - DNA, 25 bp, Homo sapien
tgccagtgaccaagagatccctctt

SEQ ID NO: 3766566 - DNA, 25 bp, Homo sapien
gtagccacatctaggcttctctgtg

SEQ ID NO: 3766567 - DNA, 25 bp, Homo sapien
tccttaaaactgtagccacatctag

SEQ ID NO: 3766568 - DNA, 25 bp, Homo sapien
gctccttaaaactgtagccacatct

SEQ ID NO: 3766569 - DNA, 25 bp, Homo sapien
tttgctccttaaaactgtagccaca

SEQ ID NO: 3766570 - DNA, 25 bp, Homo sapien
ctttggatgactattttcttgggaa

SEQ ID NO: 3766571 - DNA, 25 bp, Homo sapien
gctaaggaggccctacttaagacga

SEQ ID NO: 3766572 - DNA, 25 bp, Homo sapien
ccgtaactcagtttcttggagggca

SEQ ID NO: 3766573 - DNA, 25 bp, Homo sapien
taagacgacggcctgcaaggaggca

SEQ ID NO: 3766574 - DNA, 25 bp, Homo sapien
gcagggacccgggagtgtcagaagc

SEQ ID NO: 3766575 - DNA, 25 bp, Homo sapien
ggcagggacccgggagtgtcagaag

SEQ ID NO: 3766576 - DNA, 25 bp, Homo sapien
tcgccttagcaacttggagttgtac

SEQ ID NO: 3766577 - DNA, 25 bp, Homo sapien
aataatgaatggcaggttaggctct

SEQ ID NO: 3766578 - DNA, 25 bp, Homo sapien
ggagttgtacagcaagaaagccttg

SEQ ID NO: 3766579 - DNA, 25 bp, Homo sapien
ggtaggtctgagaaactccatcaat

SEQ ID NO: 3766580 - DNA, 25 bp, Homo sapien
tgtagactttaaatctgtgtggcat

SEQ ID NO: 3766581 - DNA, 25 bp, Homo sapien
atctgtgtggcatgtcaattttgaa

SEQ ID NO: 3766582 - DNA, 25 bp, Homo sapien
catcacacttgagtccttgccgtgc

SEQ ID NO: 3766583 - DNA, 25 bp, Homo sapien
cagaaggtcgggctcttgtaattgt

SEQ ID NO: 3766584 - DNA, 25 bp, Homo sapien
ccctggccacgggagcacttgccat

SEQ ID NO: 3766585 - DNA, 25 bp, Homo sapien
tccagctttatccatctctccctgg

SEQ ID NO: 3766586 - DNA, 25 bp, Homo sapien
agcacttgccatccttggggtctca

SEQ ID NO: 3766587 - DNA, 25 bp, Homo sapien
gcttcctgccaacagacttgactgt

SEQ ID NO: 3766588 - DNA, 25 bp, Homo sapien
acttcttgtgaattgctgcattgca

SEQ ID NO: 3766589 - DNA, 25 bp, Homo sapien
tatcaatacacttcttgtgaattgc

SEQ ID NO: 3766590 - DNA, 25 bp, Homo sapien
tggtttctcggctattgatagctga

SEQ ID NO: 3766591 - DNA, 25 bp, Homo sapien
gatagctgatcctgtgcactttgct

SEQ ID NO: 3766592 - DNA, 25 bp, Homo sapien
actggtagccctgtttgttcaggcc

SEQ ID NO: 3766593 - DNA, 25 bp, Homo sapien
gcactggtagccctgtttgttcagg

SEQ ID NO: 3766594 - DNA, 25 bp, Homo sapien
ctggtagccctgtttgttcaggccc

SEQ ID NO: 3766595 - DNA, 25 bp, Homo sapien
cactggtagccctgtttgttcaggc

SEQ ID NO: 3766596 - DNA, 25 bp, Homo sapien
accccggcgctgatgcaaagcaaag

SEQ ID NO: 3766597 - DNA, 25 bp, Homo sapien
tttgcctgcttgatggcaccccggc

SEQ ID NO: 3766598 - DNA, 25 bp, Homo sapien
cagacaaactcgtggcagacagagc

SEQ ID NO: 3766599 - DNA, 25 bp, Homo sapien
cacttgacgtggtggacctttgcct

SEQ ID NO: 3766600 - DNA, 25 bp, Homo sapien
gtaacattccaggtactcattatgg

SEQ ID NO: 3766601 - DNA, 25 bp, Homo sapien
gtactcattatggtgggtaccacac

SEQ ID NO: 3766602 - DNA, 25 bp, Homo sapien
ttatggtgggtaccacactaagcat

SEQ ID NO: 3766603 - DNA, 25 bp, Homo sapien
ctgctgtaacattccaggtactcat

SEQ ID NO: 3766604 - DNA, 25 bp, Homo sapien
tcaaattacaagtttcctgagcagc

SEQ ID NO: 3766605 - DNA, 25 bp, Homo sapien
attcctcacccttgcatggctaaca

SEQ ID NO: 3766606 - DNA, 25 bp, Homo sapien
ccttgctgagtgtgctgaagaaaca

SEQ ID NO: 3766607 - DNA, 25 bp, Homo sapien
ctatcacttgtttgtagtcaatcaa

SEQ ID NO: 3766608 - DNA, 25 bp, Homo sapien
ctttaatgcccacactgtggaactt

SEQ ID NO: 3766609 - DNA, 25 bp, Homo sapien
tttaatgcccacactgtggaactta

SEQ ID NO: 3766610 - DNA, 25 bp, Homo sapien
tcttgcattcattagcattcggcct

SEQ ID NO: 3766611 - DNA, 25 bp, Homo sapien
cattcattagcattcggccttgagg

SEQ ID NO: 3766612 - DNA, 25 bp, Homo sapien
gtatcttgcattcattagcattcgg

SEQ ID NO: 3766613 - DNA, 25 bp, Homo sapien
tagcattcggccttgaggtttcagc

SEQ ID NO: 3766614 - DNA, 25 bp, Homo sapien
caaatcaccagtaggaagtggtagg

SEQ ID NO: 3766615 - DNA, 25 bp, Homo sapien
tcaaatcaccagtaggaagtggtag

SEQ ID NO: 3766616 - DNA, 25 bp, Homo sapien
aatcaccagtaggaagtggtaggga

SEQ ID NO: 3766617 - DNA, 25 bp, Homo sapien
tcaccagtaggaagtggtagggagc

SEQ ID NO: 3766618 - DNA, 25 bp, Homo sapien
gatatgggcatcaaaagtgctgtcc

SEQ ID NO: 3766619 - DNA, 25 bp, Homo sapien
gagatgaggtccacgtttttgcctt

SEQ ID NO: 3766620 - DNA, 25 bp, Homo sapien
ctgcacctctcagccagcgagtaga

SEQ ID NO: 3766621 - DNA, 25 bp, Homo sapien
gactcttcccttgttgatatgggca

SEQ ID NO: 3766622 - DNA, 25 bp, Homo sapien
gtgctgatctttacccatggagcca

SEQ ID NO: 3766623 - DNA, 25 bp, Homo sapien
ctttacccatggagccagcaaggct

SEQ ID NO: 3766624 - DNA, 25 bp, Homo sapien
tgatctttacccatggagccagcaa

SEQ ID NO: 3766625 - DNA, 25 bp, Homo sapien
tctttacccatggagccagcaaggc

SEQ ID NO: 3766626 - DNA, 25 bp, Homo sapien
ccctttccgatacttccttttgatg

SEQ ID NO: 3766627 - DNA, 25 bp, Homo sapien
cctttccgatacttccttttgatgg

SEQ ID NO: 3766628 - DNA, 25 bp, Homo sapien
ctttccgatacttccttttgatggt

SEQ ID NO: 3766629 - DNA, 25 bp, Homo sapien
aactcagacgttttacacttcaaag

SEQ ID NO: 3766630 - DNA, 25 bp, Homo sapien
tttaggttgggagcaagtggcattc

SEQ ID NO: 3766631 - DNA, 25 bp, Homo sapien
agagaactggatccaggagacccat

SEQ ID NO: 3766632 - DNA, 25 bp, Homo sapien
cattaagtcaaaggcggctttgaaa

SEQ ID NO: 3766633 - DNA, 25 bp, Homo sapien
tcaaaatgcacgtagggaaacaaga

SEQ ID NO: 3766634 - DNA, 25 bp, Homo sapien
cactcttgcagtggtctctccgtaa

SEQ ID NO: 3766635 - DNA, 25 bp, Homo sapien
tgatggcttccatagttactgcaag

SEQ ID NO: 3766636 - DNA, 25 bp, Homo sapien
gaaatccgtggcaaacttccaatgc

SEQ ID NO: 3766637 - DNA, 25 bp, Homo sapien
cacagtaagggttaacagcctcgcc

SEQ ID NO: 3766638 - DNA, 25 bp, Homo sapien
caggacccgcagtcaaagttggaca

SEQ ID NO: 3766639 - DNA, 25 bp, Homo sapien
tggacaagccaatccgaagaaatgg

SEQ ID NO: 3766640 - DNA, 25 bp, Homo sapien
tctttgacgagcacagcacagtaag

SEQ ID NO: 3766641 - DNA, 25 bp, Homo sapien
ccagtgctttatcatggacagccag

SEQ ID NO: 3766642 - DNA, 25 bp, Homo sapien
ggtccactatccatgtgaacaaatg

SEQ ID NO: 3766643 - DNA, 25 bp, Homo sapien
ggacagccagaacctcacataggtc

SEQ ID NO: 3766644 - DNA, 25 bp, Homo sapien
aagatattatttttggtgccccatg

SEQ ID NO: 3766645 - DNA, 25 bp, Homo sapien
cttctttcctgggccaattgggtct

SEQ ID NO: 3766646 - DNA, 25 bp, Homo sapien
ggagagagtttctttgagaatccct

SEQ ID NO: 3766647 - DNA, 25 bp, Homo sapien
gagagtttctttgagaatcccttct

SEQ ID NO: 3766648 - DNA, 25 bp, Homo sapien
tgtctttaggaggcgccctttgccc

SEQ ID NO: 3766649 - DNA, 25 bp, Homo sapien
aatttccctttgtgatcacattcct

SEQ ID NO: 3766650 - DNA, 25 bp, Homo sapien
agtgcatttgggtgccttacttccc

SEQ ID NO: 3766651 - DNA, 25 bp, Homo sapien
tgcaatacattcagcaaaaactcct

SEQ ID NO: 3766652 - DNA, 25 bp, Homo sapien
aactcctcagaacgagtgcatttgg

SEQ ID NO: 3766653 - DNA, 25 bp, Homo sapien
cctcatctggatgcagtcattatca

SEQ ID NO: 3766654 - DNA, 25 bp, Homo sapien
ggtatgtccatccaatcttccaagc

SEQ ID NO: 3766655 - DNA, 25 bp, Homo sapien
caagcttttgctaccccagctgcaa

SEQ ID NO: 3766656 - DNA, 25 bp, Homo sapien
tcatgatggatatcaggtatgtcca

SEQ ID NO: 3766657 - DNA, 25 bp, Homo sapien
cagtgacaaaggaaaccgaaggcta

SEQ ID NO: 3766658 - DNA, 25 bp, Homo sapien
agtcaaccctcagtcagaactagag

SEQ ID NO: 3766659 - DNA, 25 bp, Homo sapien
ggcttcgtggacagaccaagtgttg

SEQ ID NO: 3766660 - DNA, 25 bp, Homo sapien
gcctgccaacattaacaacactctg

SEQ ID NO: 3766661 - DNA, 25 bp, Homo sapien
gatgtaccaagccactgaagatgag

SEQ ID NO: 3766662 - DNA, 25 bp, Homo sapien
cagacaatggcaggtgaacgttccc

SEQ ID NO: 3766663 - DNA, 25 bp, Homo sapien
cattcacaagatgggagcactgcgg

SEQ ID NO: 3766664 - DNA, 25 bp, Homo sapien
aacttggagttcaggtaggacaccg

SEQ ID NO: 3766665 - DNA, 25 bp, Homo sapien
cactgctgcagattccatcggaata

SEQ ID NO: 3766666 - DNA, 25 bp, Homo sapien
ggaaaacttcaaggtacagaatgag

SEQ ID NO: 3766667 - DNA, 25 bp, Homo sapien
tagcctgtggctatcagaacatgca

SEQ ID NO: 3766668 - DNA, 25 bp, Homo sapien
gaagacagtttctgcgtttagcctg

SEQ ID NO: 3766669 - DNA, 25 bp, Homo sapien
gctgctgcccggtggcgctgggact

SEQ ID NO: 3766670 - DNA, 25 bp, Homo sapien
ctgctgcccggtggcgctgggactg

SEQ ID NO: 3766671 - DNA, 25 bp, Homo sapien
ctggagcgagcacggcgccgctgct

SEQ ID NO: 3766672 - DNA, 25 bp, Homo sapien
tggagcgagcacggcgccgctgctg

SEQ ID NO: 3766673 - DNA, 25 bp, Homo sapien
ggcgcactgcgggtgcgcctagaag

SEQ ID NO: 3766674 - DNA, 25 bp, Homo sapien
tgcgcctagaaggcggtgcccgcca

SEQ ID NO: 3766675 - DNA, 25 bp, Homo sapien
gcgggcccggcgcactgcgggtgcg

SEQ ID NO: 3766676 - DNA, 25 bp, Homo sapien
gcgggtgcgcctagaaggcggtgcc

SEQ ID NO: 3766677 - DNA, 25 bp, Homo sapien
gaaacccgttaacctgaagatcaga

SEQ ID NO: 3766678 - DNA, 25 bp, Homo sapien
tgatgccagcatcctgtagacccgc

SEQ ID NO: 3766679 - DNA, 25 bp, Homo sapien
tataatcgtatagtcctacaacagg

SEQ ID NO: 3766680 - DNA, 25 bp, Homo sapien
tggacaactgatctttgaggactct

SEQ ID NO: 3766681 - DNA, 25 bp, Homo sapien
ttcctggaagaggaaatggcatttc

SEQ ID NO: 3766682 - DNA, 25 bp, Homo sapien
tcagaagttctccacacctttgttt

SEQ ID NO: 3766683 - DNA, 25 bp, Homo sapien
cagaagttctccacacctttgtttc

SEQ ID NO: 3766684 - DNA, 25 bp, Homo sapien
tttgtttcctggaagaggaaatggc

SEQ ID NO: 3766685 - DNA, 25 bp, Homo sapien
agcaaaagacgtgatggttgttctc

SEQ ID NO: 3766686 - DNA, 25 bp, Homo sapien
tttctttgagcaaaagacgtgatgg

SEQ ID NO: 3766687 - DNA, 25 bp, Homo sapien
ggttgttctctagaacctttctgtc

SEQ ID NO: 3766688 - DNA, 25 bp, Homo sapien
tgtcctgtccgttgctttgccaagg

SEQ ID NO: 3766689 - DNA, 25 bp, Homo sapien
gaaaacatggtaacctgtggttaca

SEQ ID NO: 3766690 - DNA, 25 bp, Homo sapien
ctaaaacacatgtggttttcaaaca

SEQ ID NO: 3766691 - DNA, 25 bp, Homo sapien
catggtaacctgtggttacaatttc

SEQ ID NO: 3766692 - DNA, 25 bp, Homo sapien
cactaaaacacatgtggttttcaaa

SEQ ID NO: 3766693 - DNA, 25 bp, Homo sapien
tggccagtccctaggccccagatcc

SEQ ID NO: 3766694 - DNA, 25 bp, Homo sapien
cagtccctaggccccagatccgcct

SEQ ID NO: 3766695 - DNA, 25 bp, Homo sapien
gccagtccctaggccccagatccgc

SEQ ID NO: 3766696 - DNA, 25 bp, Homo sapien
ctggccagtccctaggccccagatc

SEQ ID NO: 3766697 - DNA, 25 bp, Homo sapien
aaattcacagatgttgctgaaattt

SEQ ID NO: 3766698 - DNA, 25 bp, Homo sapien
ttgcagagaaattcacagatgttgc

SEQ ID NO: 3766699 - DNA, 25 bp, Homo sapien
agagaaattcacagatgttgctgaa

SEQ ID NO: 3766700 - DNA, 25 bp, Homo sapien
gagaaattcacagatgttgctgaaa

SEQ ID NO: 3766701 - DNA, 25 bp, Homo sapien
gcatgattttccagatagtcccttg

SEQ ID NO: 3766702 - DNA, 25 bp, Homo sapien
gcagacactgcggattggtttcaac

SEQ ID NO: 3766703 - DNA, 25 bp, Homo sapien
gcagctgttgggcttggattaccct

SEQ ID NO: 3766704 - DNA, 25 bp, Homo sapien
tccagagctcacgaatgcagctgtt

SEQ ID NO: 3766705 - DNA, 25 bp, Homo sapien
ggatcctagtgagccggcttggcac

SEQ ID NO: 3766706 - DNA, 25 bp, Homo sapien
tcctttccattgaaacggatcctag

SEQ ID NO: 3766707 - DNA, 25 bp, Homo sapien
gcttggcacagggacccttgtgtgc

SEQ ID NO: 3766708 - DNA, 25 bp, Homo sapien
ttggcacagggacccttgtgtgcag

SEQ ID NO: 3766709 - DNA, 25 bp, Homo sapien
gaagcctaggtctttataaagtcag

SEQ ID NO: 3766710 - DNA, 25 bp, Homo sapien
tattctgaagaatctgagatgcctg

SEQ ID NO: 3766711 - DNA, 25 bp, Homo sapien
gatgcctgctcttgacttgactggc

SEQ ID NO: 3766712 - DNA, 25 bp, Homo sapien
tgtagaacattagacctctgagaaa

SEQ ID NO: 3766713 - DNA, 25 bp, Homo sapien
agtctgtttggtatctgtttagtgc

SEQ ID NO: 3766714 - DNA, 25 bp, Homo sapien
tactaggtctgaaactgagagtctg

SEQ ID NO: 3766715 - DNA, 25 bp, Homo sapien
cagagttggtctgtgcaaacatagg

SEQ ID NO: 3766716 - DNA, 25 bp, Homo sapien
tccttgagatactaggtctgaaact

SEQ ID NO: 3766717 - DNA, 25 bp, Homo sapien
gcacaagagatgctgttagccctgt

SEQ ID NO: 3766718 - DNA, 25 bp, Homo sapien
agcacaagagatgctgttagccctg

SEQ ID NO: 3766719 - DNA, 25 bp, Homo sapien
tactaaatctgttagcagcaagaat

SEQ ID NO: 3766720 - DNA, 25 bp, Homo sapien
taaatctgttagcagcaagaatgag

SEQ ID NO: 3766721 - DNA, 25 bp, Homo sapien
agttactaaatctgttagcagcaag

SEQ ID NO: 3766722 - DNA, 25 bp, Homo sapien
ctagttactaaatctgttagcagca

SEQ ID NO: 3766723 - DNA, 25 bp, Homo sapien
ccaagtttaggtccacagatgtcgt

SEQ ID NO: 3766724 - DNA, 25 bp, Homo sapien
cagatgtgctatgctgagtgccaag

SEQ ID NO: 3766725 - DNA, 25 bp, Homo sapien
cagatgtcgtcataaaaaacaggaa

SEQ ID NO: 3766726 - DNA, 25 bp, Homo sapien
tggcacagatgtgctatgctgagtg

SEQ ID NO: 3766727 - DNA, 25 bp, Homo sapien
gggctgtgtgtcacaaataagactc

SEQ ID NO: 3766728 - DNA, 25 bp, Homo sapien
taaatgtaaattcgcggtgagtgct

SEQ ID NO: 3766729 - DNA, 25 bp, Homo sapien
acttaaatgtaaattcgcggtgagt

SEQ ID NO: 3766730 - DNA, 25 bp, Homo sapien
tgtcacaaataagactcccagtccc

SEQ ID NO: 3766731 - DNA, 25 bp, Homo sapien
ttagtatcacttagacctggaagcc

SEQ ID NO: 3766732 - DNA, 25 bp, Homo sapien
tactctcattcttggtgccttcggg

SEQ ID NO: 3766733 - DNA, 25 bp, Homo sapien
tctttggagggttgtgagatgccca

SEQ ID NO: 3766734 - DNA, 25 bp, Homo sapien
gcagatgtccatgcagatgctgtcc

SEQ ID NO: 3766735 - DNA, 25 bp, Homo sapien
ggtgtcgaataaatgtgaggctcct

SEQ ID NO: 3766736 - DNA, 25 bp, Homo sapien
cagcttatggcggttgttaaaaagg

SEQ ID NO: 3766737 - DNA, 25 bp, Homo sapien
gccaacagcttatggcggttgttaa

SEQ ID NO: 3766738 - DNA, 25 bp, Homo sapien
tcacaatcccaagatctccaggcgg

SEQ ID NO: 3766739 - DNA, 25 bp, Homo sapien
tacctctgcttgtgattctagctgt

SEQ ID NO: 3766740 - DNA, 25 bp, Homo sapien
gaaaatacctctgcttgtgattcta

SEQ ID NO: 3766741 - DNA, 25 bp, Homo sapien
gtcgtgataaggtggagtcctgaaa

SEQ ID NO: 3766742 - DNA, 25 bp, Homo sapien
tctgcttgtgattctagctgtactg

SEQ ID NO: 3766743 - DNA, 25 bp, Homo sapien
tatttcaataaggtgctcctggggg

SEQ ID NO: 3766744 - DNA, 25 bp, Homo sapien
atttcaataaggtgctcctgggggc

SEQ ID NO: 3766745 - DNA, 25 bp, Homo sapien
aatatttcaataaggtgctcctggg

SEQ ID NO: 3766746 - DNA, 25 bp, Homo sapien
atatttcaataaggtgctcctgggg

SEQ ID NO: 3766747 - DNA, 25 bp, Homo sapien
aatcaaatataacagagaaaatctg

SEQ ID NO: 3766748 - DNA, 25 bp, Homo sapien
cctgagttttaaggaatcaaatata

SEQ ID NO: 3766749 - DNA, 25 bp, Homo sapien
caaatataacagagaaaatctgcat

SEQ ID NO: 3766750 - DNA, 25 bp, Homo sapien
ccctgagttttaaggaatcaaatat

SEQ ID NO: 3766751 - DNA, 25 bp, Homo sapien
aaagcagcatacaagccggagagcc

SEQ ID NO: 3766752 - DNA, 25 bp, Homo sapien
ggtattttacagatgccgtgaaagc

SEQ ID NO: 3766753 - DNA, 25 bp, Homo sapien
ccggagagcctactggaagcaagag

SEQ ID NO: 3766754 - DNA, 25 bp, Homo sapien
caggtggcggagactggattcagga

SEQ ID NO: 3766755 - DNA, 25 bp, Homo sapien
aggtccatggaaagacctctggctc

SEQ ID NO: 3766756 - DNA, 25 bp, Homo sapien
aaggtccatggaaagacctctggct

SEQ ID NO: 3766757 - DNA, 25 bp, Homo sapien
caccttccttcgctaggagctcagg

SEQ ID NO: 3766758 - DNA, 25 bp, Homo sapien
gtaatgtgtcttattccggggacac

SEQ ID NO: 3766759 - DNA, 25 bp, Homo sapien
caccaccattaatgagtaatgtgtc

SEQ ID NO: 3766760 - DNA, 25 bp, Homo sapien
taggagctcaggtaacactggacaa

SEQ ID NO: 3766761 - DNA, 25 bp, Homo sapien
agtgtaaactccctacagtctggaa

SEQ ID NO: 3766762 - DNA, 25 bp, Homo sapien
gtcttgtacaaatcactgccagtgt

SEQ ID NO: 3766763 - DNA, 25 bp, Homo sapien
aaacgtaccatagggaggcggcagc

SEQ ID NO: 3766764 - DNA, 25 bp, Homo sapien
tgagctgcatgtcgaaccgggaaac

SEQ ID NO: 3766765 - DNA, 25 bp, Homo sapien
ggaaatgagaatctgcttcccaagc

SEQ ID NO: 3766766 - DNA, 25 bp, Homo sapien
aatacaggaaatgagaatctgcttc

SEQ ID NO: 3766767 - DNA, 25 bp, Homo sapien
ggaaaatacaggaaatgagaatctg

SEQ ID NO: 3766768 - DNA, 25 bp, Homo sapien
aatgagaatctgcttcccaagcacc

SEQ ID NO: 3766769 - DNA, 25 bp, Homo sapien
ctaagaaaaatctgcgttagcatag

SEQ ID NO: 3766770 - DNA, 25 bp, Homo sapien
caaatagtatttccattcgtatgta

SEQ ID NO: 3766771 - DNA, 25 bp, Homo sapien
taggaggcctgggtaacaaatagta

SEQ ID NO: 3766772 - DNA, 25 bp, Homo sapien
ttcgtatgtacaagtgaattccctc

SEQ ID NO: 3766773 - DNA, 25 bp, Homo sapien
cacgaagtgtgtggcctggtgattc

SEQ ID NO: 3766774 - DNA, 25 bp, Homo sapien
ccacgaagtgtgtggcctggtgatt

SEQ ID NO: 3766775 - DNA, 25 bp, Homo sapien
gtcctgtgcggtgcagcatgcaagt

SEQ ID NO: 3766776 - DNA, 25 bp, Homo sapien
gcatgcaagtgtggctgtctctctt

SEQ ID NO: 3766777 - DNA, 25 bp, Homo sapien
ctggagagaggttcgctggccttgg

SEQ ID NO: 3766778 - DNA, 25 bp, Homo sapien
ctgggcatgaggcagtattggtcac

SEQ ID NO: 3766779 - DNA, 25 bp, Homo sapien
gagaggttcgctggccttgggagct

SEQ ID NO: 3766780 - DNA, 25 bp, Homo sapien
cagtattggtcacagccccgttggt

SEQ ID NO: 3766781 - DNA, 25 bp, Homo sapien
tgcccagagacgacgccgaggtcct

SEQ ID NO: 3766782 - DNA, 25 bp, Homo sapien
tgtgcccagagacgacgccgaggtc

SEQ ID NO: 3766783 - DNA, 25 bp, Homo sapien
gtgcccagagacgacgccgaggtcc

SEQ ID NO: 3766784 - DNA, 25 bp, Homo sapien
tgtgtgcccagagacgacgccgagg

SEQ ID NO: 3766785 - DNA, 25 bp, Homo sapien
cagcatccagttgtgagtactggga

SEQ ID NO: 3766786 - DNA, 25 bp, Homo sapien
ttccgcagcatccagttgtgagtac

SEQ ID NO: 3766787 - DNA, 25 bp, Homo sapien
tactgggaacttccaaagacaggga

SEQ ID NO: 3766788 - DNA, 25 bp, Homo sapien
ccagttgtgagtactgggaacttcc

SEQ ID NO: 3766789 - DNA, 25 bp, Homo sapien
ctgagagaggaaggagagagaatag

SEQ ID NO: 3766790 - DNA, 25 bp, Homo sapien
cggaaatcccgagttggtgaggaag

SEQ ID NO: 3766791 - DNA, 25 bp, Homo sapien
gaaggcacgagtccgggcgagtggc

SEQ ID NO: 3766792 - DNA, 25 bp, Homo sapien
aggcacgagtccgggcgagtggcat

SEQ ID NO: 3766793 - DNA, 25 bp, Homo sapien
ggaaggcacgagtccgggcgagtgg

SEQ ID NO: 3766794 - DNA, 25 bp, Homo sapien
tgactctatgatccttcaggatgag

SEQ ID NO: 3766795 - DNA, 25 bp, Homo sapien
tcctgggtgactctatgatccttca

SEQ ID NO: 3766796 - DNA, 25 bp, Homo sapien
aagctcctgggtgactctatgatcc

SEQ ID NO: 3766797 - DNA, 25 bp, Homo sapien
tgggtgactctatgatccttcagga

SEQ ID NO: 3766798 - DNA, 25 bp, Homo sapien
caatggctgtacatacgcacactaa

SEQ ID NO: 3766799 - DNA, 25 bp, Homo sapien
tccaaaggtgtccaacagaagtgtt

SEQ ID NO: 3766800 - DNA, 25 bp, Homo sapien
aagtgttggacaatggctgtacata

SEQ ID NO: 3766801 - DNA, 25 bp, Homo sapien
tctccaaaggtgtccaacagaagtg

SEQ ID NO: 3766802 - DNA, 25 bp, Homo sapien
taggagtcacgggagggagcagcac

SEQ ID NO: 3766803 - DNA, 25 bp, Homo sapien
tctagcagcttaggagtcacgggag

SEQ ID NO: 3766804 - DNA, 25 bp, Homo sapien
cacagctctcgtctagcagcttagg

SEQ ID NO: 3766805 - DNA, 25 bp, Homo sapien
aggagaagcacagctctcgtctagc

SEQ ID NO: 3766806 - DNA, 25 bp, Homo sapien
gtagtagccccaatgccaaccagca

SEQ ID NO: 3766807 - DNA, 25 bp, Homo sapien
gcagtagtgagagtagtagccccaa

SEQ ID NO: 3766808 - DNA, 25 bp, Homo sapien
cttattttggcagtagtgagagtag

SEQ ID NO: 3766809 - DNA, 25 bp, Homo sapien
gtgagagtagtagccccaatgccaa

SEQ ID NO: 3766810 - DNA, 25 bp, Homo sapien
gatagagttggttcacacagctgca

SEQ ID NO: 3766811 - DNA, 25 bp, Homo sapien
aggggacggtggctgcacctcaatc

SEQ ID NO: 3766812 - DNA, 25 bp, Homo sapien
gccttaggaatgcagtgtggaacat

SEQ ID NO: 3766813 - DNA, 25 bp, Homo sapien
tcttgttgccgatagagttggttca

SEQ ID NO: 3766814 - DNA, 25 bp, Homo sapien
cttaattgggtgtagttcttctatt

SEQ ID NO: 3766815 - DNA, 25 bp, Homo sapien
atgtcccttaattgggtgtagttct

SEQ ID NO: 3766816 - DNA, 25 bp, Homo sapien
ccttaattgggtgtagttcttctat

SEQ ID NO: 3766817 - DNA, 25 bp, Homo sapien
agcatgtcccttaattgggtgtagt

SEQ ID NO: 3766818 - DNA, 25 bp, Homo sapien
ggcaattccacttggtcaccccgat

SEQ ID NO: 3766819 - DNA, 25 bp, Homo sapien
tccggacactcaagagtgagcctct

SEQ ID NO: 3766820 - DNA, 25 bp, Homo sapien
cagccttgggctcctgtctacagca

SEQ ID NO: 3766821 - DNA, 25 bp, Homo sapien
tctacagcagcccaaggcaattcca

SEQ ID NO: 3766822 - DNA, 25 bp, Homo sapien
gtggctgagggtgcctcagggttac

SEQ ID NO: 3766823 - DNA, 25 bp, Homo sapien
agtgtgactgatgccctggcggtgg

SEQ ID NO: 3766824 - DNA, 25 bp, Homo sapien
catcaaagaagggcccaggaaaagg

SEQ ID NO: 3766825 - DNA, 25 bp, Homo sapien
gaaaaggagacagtgtgactgatgc

SEQ ID NO: 3766826 - DNA, 25 bp, Homo sapien
attccaaacacaggatgtgcatggt

SEQ ID NO: 3766827 - DNA, 25 bp, Homo sapien
caaacacaggatgtgcatggtgtgt

SEQ ID NO: 3766828 - DNA, 25 bp, Homo sapien
tccaaacacaggatgtgcatggtgt

SEQ ID NO: 3766829 - DNA, 25 bp, Homo sapien
aggggaacagtttgctcctcattcc

SEQ ID NO: 3766830 - DNA, 25 bp, Homo sapien
ccgcagaagaagacaatatctttgt

SEQ ID NO: 3766831 - DNA, 25 bp, Homo sapien
ctctccgcagaagaagacaatatct

SEQ ID NO: 3766832 - DNA, 25 bp, Homo sapien
gcctgctctccgcagaagaagacaa

SEQ ID NO: 3766833 - DNA, 25 bp, Homo sapien
ttccttgcctgctctccgcagaaga

SEQ ID NO: 3766834 - DNA, 25 bp, Homo sapien
gtgttgggctcaaggtctgcatatt

SEQ ID NO: 3766835 - DNA, 25 bp, Homo sapien
tgttgggctcaaggtctgcatattt

SEQ ID NO: 3766836 - DNA, 25 bp, Homo sapien
tgtgttgggctcaaggtctgcatat

SEQ ID NO: 3766837 - DNA, 25 bp, Homo sapien
acacaaatggcttaagaaccatgga

SEQ ID NO: 3766838 - DNA, 25 bp, Homo sapien
aatggcttaagaaccatggagacag

SEQ ID NO: 3766839 - DNA, 25 bp, Homo sapien
tgttgggaaagtcgtgagaaacaca

SEQ ID NO: 3766840 - DNA, 25 bp, Homo sapien
cccggctgaagttgcagggctagta

SEQ ID NO: 3766841 - DNA, 25 bp, Homo sapien
tgaatcctggttctcgcatttccat

SEQ ID NO: 3766842 - DNA, 25 bp, Homo sapien
gagatgacctcttgagcttcccaac

SEQ ID NO: 3766843 - DNA, 25 bp, Homo sapien
catcagagagttttggcagggactg

SEQ ID NO: 3766844 - DNA, 25 bp, Homo sapien
gcagggactgtgtggtagtctccaa

SEQ ID NO: 3766845 - DNA, 25 bp, Homo sapien
tcccaacccgaagtgtcatcagaga

SEQ ID NO: 3766846 - DNA, 25 bp, Homo sapien
gaatgcctctgcctgcattttaata

SEQ ID NO: 3766847 - DNA, 25 bp, Homo sapien
aggtaggagggatttttgaagctct

SEQ ID NO: 3766848 - DNA, 25 bp, Homo sapien
aagaatgcctctgcctgcattttaa

SEQ ID NO: 3766849 - DNA, 25 bp, Homo sapien
tcaagaatgcctctgcctgcatttt

SEQ ID NO: 3766850 - DNA, 25 bp, Homo sapien
cagacgaagcagctgtttaggagga

SEQ ID NO: 3766851 - DNA, 25 bp, Homo sapien
cgcaaggtcagttggttgcagaatc

SEQ ID NO: 3766852 - DNA, 25 bp, Homo sapien
cggtactgctgcagacgaagcagct

SEQ ID NO: 3766853 - DNA, 25 bp, Homo sapien
atttgcatagggcatcccgcaaggt

SEQ ID NO: 3766854 - DNA, 25 bp, Homo sapien
gctgcagggtttcgccagttgtgca

SEQ ID NO: 3766855 - DNA, 25 bp, Homo sapien
tttggaggcacctctaagctgcagg

SEQ ID NO: 3766856 - DNA, 25 bp, Homo sapien
cctctaagctgcagggtttcgccag

SEQ ID NO: 3766857 - DNA, 25 bp, Homo sapien
gtttcgccagttgtgcaatacagcc

SEQ ID NO: 3766858 - DNA, 25 bp, Homo sapien
gaaacaccgaaagcgaacttggcat

SEQ ID NO: 3766859 - DNA, 25 bp, Homo sapien
cgaacttggcattcttcttgggctt

SEQ ID NO: 3766860 - DNA, 25 bp, Homo sapien
ctcgggtccacttttctttgacatt

SEQ ID NO: 3766861 - DNA, 25 bp, Homo sapien
cttcttgggcttctcgggtccactt

SEQ ID NO: 3766862 - DNA, 25 bp, Homo sapien
ctttgcatctttcccatagactagg

SEQ ID NO: 3766863 - DNA, 25 bp, Homo sapien
ctttcccatagactaggatttccat

SEQ ID NO: 3766864 - DNA, 25 bp, Homo sapien
catcctttgcatctttcccatagac

SEQ ID NO: 3766865 - DNA, 25 bp, Homo sapien
ttgcatctttcccatagactaggat

SEQ ID NO: 3766866 - DNA, 25 bp, Homo sapien
gctgtgacaccgtatgaagttctgt

SEQ ID NO: 3766867 - DNA, 25 bp, Homo sapien
gaaactcacagcttatggacctgca

SEQ ID NO: 3766868 - DNA, 25 bp, Homo sapien
gttataaacatccaaaagacactcc

SEQ ID NO: 3766869 - DNA, 25 bp, Homo sapien
gctaccagtgtagcagctgaccacc

SEQ ID NO: 3766870 - DNA, 25 bp, Homo sapien
ggtcccataaatgcaagttccatct

SEQ ID NO: 3766871 - DNA, 25 bp, Homo sapien
gctgctcccaaatgatgacatacac

SEQ ID NO: 3766872 - DNA, 25 bp, Homo sapien
gcagacactgaacattgtggtccca

SEQ ID NO: 3766873 - DNA, 25 bp, Homo sapien
tcataagcaagtagataagccccag

SEQ ID NO: 3766874 - DNA, 25 bp, Homo sapien
agcaaacattcgtgcagggcctact

SEQ ID NO: 3766875 - DNA, 25 bp, Homo sapien
tataccaacctactcttgagggaac

SEQ ID NO: 3766876 - DNA, 25 bp, Homo sapien
ccaaggagggtgacatgttttatac

SEQ ID NO: 3766877 - DNA, 25 bp, Homo sapien
gggaactaatccatctctgcaagaa

SEQ ID NO: 3766878 - DNA, 25 bp, Homo sapien
taaggccaggttcatcactgcaaaa

SEQ ID NO: 3766879 - DNA, 25 bp, Homo sapien
cacaaatccaattccaaaacactgg

SEQ ID NO: 3766880 - DNA, 25 bp, Homo sapien
aacactgggaagcaatcagattgga

SEQ ID NO: 3766881 - DNA, 25 bp, Homo sapien
cactgggaagcaatcagattggatt

SEQ ID NO: 3766882 - DNA, 25 bp, Homo sapien
gaggcttgagactcacctgtgagag

SEQ ID NO: 3766883 - DNA, 25 bp, Homo sapien
tgccctaaacgattcacccctgtgt

SEQ ID NO: 3766884 - DNA, 25 bp, Homo sapien
aagcacggtgattaccagaattcag

SEQ ID NO: 3766885 - DNA, 25 bp, Homo sapien
agagccatcccttaacaagcaatgg

SEQ ID NO: 3766886 - DNA, 25 bp, Homo sapien
gggacattgcgtccgggctctgatt

SEQ ID NO: 3766887 - DNA, 25 bp, Homo sapien
tggatgggacattgcgtccgggctc

SEQ ID NO: 3766888 - DNA, 25 bp, Homo sapien
atgggacattgcgtccgggctctga

SEQ ID NO: 3766889 - DNA, 25 bp, Homo sapien
cattgcgtccgggctctgattagag

SEQ ID NO: 3766890 - DNA, 25 bp, Homo sapien
ttgtttcttaagctggttgaagata

SEQ ID NO: 3766891 - DNA, 25 bp, Homo sapien
cctcctctcctaagaagttgtccaa

SEQ ID NO: 3766892 - DNA, 25 bp, Homo sapien
ctaagaagttgtccaaggaaactgg

SEQ ID NO: 3766893 - DNA, 25 bp, Homo sapien
cctctcctaagaagttgtccaagga

SEQ ID NO: 3766894 - DNA, 25 bp, Homo sapien
aaaaataagatccagtcaatttcag

SEQ ID NO: 3766895 - DNA, 25 bp, Homo sapien
aaataagatccagtcaatttcagtg

SEQ ID NO: 3766896 - DNA, 25 bp, Homo sapien
aaaataagatccagtcaatttcagt

SEQ ID NO: 3766897 - DNA, 25 bp, Homo sapien
ttgcccccctggtaacacatttcag

SEQ ID NO: 3766898 - DNA, 25 bp, Homo sapien
tgcccccctggtaacacatttcaga

SEQ ID NO: 3766899 - DNA, 25 bp, Homo sapien
cagtgatttgggctttacactcaca

SEQ ID NO: 3766900 - DNA, 25 bp, Homo sapien
ttacactcacagatctgagagtctc

SEQ ID NO: 3766901 - DNA, 25 bp, Homo sapien
gggtccatcatgccttgtgctctgg

SEQ ID NO: 3766902 - DNA, 25 bp, Homo sapien
ggtccatcatgccttgtgctctggc

SEQ ID NO: 3766903 - DNA, 25 bp, Homo sapien
gtccatcatgccttgtgctctggcc

SEQ ID NO: 3766904 - DNA, 25 bp, Homo sapien
tccatcatgccttgtgctctggcct

SEQ ID NO: 3766905 - DNA, 25 bp, Homo sapien
ttaggagacacagtacagagctttc

SEQ ID NO: 3766906 - DNA, 25 bp, Homo sapien
gcaaatggacaacccttcacaaagg

SEQ ID NO: 3766907 - DNA, 25 bp, Homo sapien
tttccagtctgcgttaagttcgtct

SEQ ID NO: 3766908 - DNA, 25 bp, Homo sapien
caagtacactgtgtggtacggagag

SEQ ID NO: 3766909 - DNA, 25 bp, Homo sapien
tcacaacagcactgggagttaaact

SEQ ID NO: 3766910 - DNA, 25 bp, Homo sapien
cactgggagttaaactctatggccc

SEQ ID NO: 3766911 - DNA, 25 bp, Homo sapien
cacagaaacatggaactctgtcttc

SEQ ID NO: 3766912 - DNA, 25 bp, Homo sapien
ctgggagttaaactctatggccctt

SEQ ID NO: 3766913 - DNA, 25 bp, Homo sapien
ttcctgttggaacagtgcttccaaa

SEQ ID NO: 3766914 - DNA, 25 bp, Homo sapien
taaacaatgtaaaatctcagtactt

SEQ ID NO: 3766915 - DNA, 25 bp, Homo sapien
cctgttggaacagtgcttccaaacc

SEQ ID NO: 3766916 - DNA, 25 bp, Homo sapien
aacaatgtaaaatctcagtactttg

SEQ ID NO: 3766917 - DNA, 25 bp, Homo sapien
agaaagatgctcttgatctaatttt

SEQ ID NO: 3766918 - DNA, 25 bp, Homo sapien
gctgctccataaagaagagcctgac

SEQ ID NO: 3766919 - DNA, 25 bp, Homo sapien
tgctccataaagaagagcctgacat

SEQ ID NO: 3766920 - DNA, 25 bp, Homo sapien
tcagaaagatgctcttgatctaatt

SEQ ID NO: 3766921 - DNA, 25 bp, Homo sapien
tgttaatacatcagtgctcccgcaa

SEQ ID NO: 3766922 - DNA, 25 bp, Homo sapien
tgggcctctactctacttttcgatg

SEQ ID NO: 3766923 - DNA, 25 bp, Homo sapien
gaaataaaggcccaagccactgcac

SEQ ID NO: 3766924 - DNA, 25 bp, Homo sapien
tgcagtgtgcaatcatgggcccctg

SEQ ID NO: 3766925 - DNA, 25 bp, Homo sapien
gggtcccattcaggataccacattc

SEQ ID NO: 3766926 - DNA, 25 bp, Homo sapien
caggttgtaaggctttccttgcttc

SEQ ID NO: 3766927 - DNA, 25 bp, Homo sapien
tcatcccctccggtcagtaacaggt

SEQ ID NO: 3766928 - DNA, 25 bp, Homo sapien
ttccatgtgttgtagtttccctgtc

SEQ ID NO: 3766929 - DNA, 25 bp, Homo sapien
ctgagttggttcctaggatgagtag

SEQ ID NO: 3766930 - DNA, 25 bp, Homo sapien
ttggttcctaggatgagtagattgg

SEQ ID NO: 3766931 - DNA, 25 bp, Homo sapien
gttggttcctaggatgagtagattg

SEQ ID NO: 3766932 - DNA, 25 bp, Homo sapien
gagttggttcctaggatgagtagat

SEQ ID NO: 3766933 - DNA, 25 bp, Homo sapien
tcaaacagtgcacggataaaatttg

SEQ ID NO: 3766934 - DNA, 25 bp, Homo sapien
tattatttgcaacaggccccgcatg

SEQ ID NO: 3766935 - DNA, 25 bp, Homo sapien
ttttcctttgaccatgactactgca

SEQ ID NO: 3766936 - DNA, 25 bp, Homo sapien
gcatctatgtaatttgtcgtactag

SEQ ID NO: 3766937 - DNA, 25 bp, Homo sapien
tcattggaaactgttgtctggggtt

SEQ ID NO: 3766938 - DNA, 25 bp, Homo sapien
ctcactgggtaaggtgacttctgca

SEQ ID NO: 3766939 - DNA, 25 bp, Homo sapien
tcactgggtaaggtgacttctgcag

SEQ ID NO: 3766940 - DNA, 25 bp, Homo sapien
cctcactgggtaaggtgacttctgc

SEQ ID NO: 3766941 - DNA, 25 bp, Homo sapien
tcagcaagtcactcggaagtgtcca

SEQ ID NO: 3766942 - DNA, 25 bp, Homo sapien
accatcatctgggttaggattcgga

SEQ ID NO: 3766943 - DNA, 25 bp, Homo sapien
cttctgatagggtttgcaaagagca

SEQ ID NO: 3766944 - DNA, 25 bp, Homo sapien
cactcggaagtgtccaccatcatct

SEQ ID NO: 3766945 - DNA, 25 bp, Homo sapien
agggctgcctgtcacaaagcatcac

SEQ ID NO: 3766946 - DNA, 25 bp, Homo sapien
tgcctgtcacaaagcatcacacact

SEQ ID NO: 3766947 - DNA, 25 bp, Homo sapien
gacttaaacaagagagagttatggt

SEQ ID NO: 3766948 - DNA, 25 bp, Homo sapien
ttccctggcagcttattcatttgcc

SEQ ID NO: 3766949 - DNA, 25 bp, Homo sapien
gattctagctgccatgcagacagac

SEQ ID NO: 3766950 - DNA, 25 bp, Homo sapien
catcgtgaactgttgctccggaact

SEQ ID NO: 3766951 - DNA, 25 bp, Homo sapien
ctcacatcgtgaactgttgctccgg

SEQ ID NO: 3766952 - DNA, 25 bp, Homo sapien
caggattagattctagctgccatgc

SEQ ID NO: 3766953 - DNA, 25 bp, Homo sapien
tagtacatttcttgcctagactgct

SEQ ID NO: 3766954 - DNA, 25 bp, Homo sapien
caaccatactctcagctagtacatt

SEQ ID NO: 3766955 - DNA, 25 bp, Homo sapien
ccaatctatgcttaagattaagagg

SEQ ID NO: 3766956 - DNA, 25 bp, Homo sapien
gattaagaggagtcttttcaggcca

SEQ ID NO: 3766957 - DNA, 25 bp, Homo sapien
ttgccaggagtgtttaccaagttct

SEQ ID NO: 3766958 - DNA, 25 bp, Homo sapien
tagcgaggagtcacaatggttgaca

SEQ ID NO: 3766959 - DNA, 25 bp, Homo sapien
tgaatattttccttgtgaaaggcac

SEQ ID NO: 3766960 - DNA, 25 bp, Homo sapien
gaatgctcccagatatgccctcata

SEQ ID NO: 3766961 - DNA, 25 bp, Homo sapien
caagatcactaggcagagcgggcag

SEQ ID NO: 3766962 - DNA, 25 bp, Homo sapien
ctgggaagtcccaagatcactaggc

SEQ ID NO: 3766963 - DNA, 25 bp, Homo sapien
tataaagtctgggaagtcccaagat

SEQ ID NO: 3766964 - DNA, 25 bp, Homo sapien
atgattataaagtctgggaagtccc

SEQ ID NO: 3766965 - DNA, 25 bp, Homo sapien
catctgctttgagtgagaaggcctt

SEQ ID NO: 3766966 - DNA, 25 bp, Homo sapien
ccttgtgcctgcgaccctctgtctc

SEQ ID NO: 3766967 - DNA, 25 bp, Homo sapien
aaggccttgtgcctgcgaccctctg

SEQ ID NO: 3766968 - DNA, 25 bp, Homo sapien
ttgtgcctgcgaccctctgtctctt

SEQ ID NO: 3766969 - DNA, 25 bp, Homo sapien
tactgcatataaatactggatcttg

SEQ ID NO: 3766970 - DNA, 25 bp, Homo sapien
gcatataaatactggatcttggtgc

SEQ ID NO: 3766971 - DNA, 25 bp, Homo sapien
actgcatataaatactggatcttgg

SEQ ID NO: 3766972 - DNA, 25 bp, Homo sapien
tgcatataaatactggatcttggtg

SEQ ID NO: 3766973 - DNA, 25 bp, Homo sapien
atggcagacaatgcccgctggcatt

SEQ ID NO: 3766974 - DNA, 25 bp, Homo sapien
taagaatggcagacaatgcccgctg

SEQ ID NO: 3766975 - DNA, 25 bp, Homo sapien
ctaagaatggcagacaatgcccgct

SEQ ID NO: 3766976 - DNA, 25 bp, Homo sapien
gaatggcagacaatgcccgctggca

SEQ ID NO: 3766977 - DNA, 25 bp, Homo sapien
tgttctgtgggttaatgcaataatc

SEQ ID NO: 3766978 - DNA, 25 bp, Homo sapien
catctgaagtgttctgtgggttaat

SEQ ID NO: 3766979 - DNA, 25 bp, Homo sapien
gggttaatgcaataatcaaatccat

SEQ ID NO: 3766980 - DNA, 25 bp, Homo sapien
gaagtgttctgtgggttaatgcaat

SEQ ID NO: 3766981 - DNA, 25 bp, Homo sapien
agatttcaatctttcgccgccacaa

SEQ ID NO: 3766982 - DNA, 25 bp, Homo sapien
gaaagcctcaagacaggaacgctaa

SEQ ID NO: 3766983 - DNA, 25 bp, Homo sapien
ttgaagacgtgaagaacctgactgc

SEQ ID NO: 3766984 - DNA, 25 bp, Homo sapien
tcagccacatctacagttgaagacg

SEQ ID NO: 3766985 - DNA, 25 bp, Homo sapien
cttgggaacatctgaatgaagcagc

SEQ ID NO: 3766986 - DNA, 25 bp, Homo sapien
aggcttctttcatgtgggcagtaca

SEQ ID NO: 3766987 - DNA, 25 bp, Homo sapien
cttccttgggaacatctgaatgaag

SEQ ID NO: 3766988 - DNA, 25 bp, Homo sapien
tccttgggaacatctgaatgaagca

SEQ ID NO: 3766989 - DNA, 25 bp, Homo sapien
tgccagcacctcttcgcccctcctt

SEQ ID NO: 3766990 - DNA, 25 bp, Homo sapien
ggtgccagcacctcttcgcccctcc

SEQ ID NO: 3766991 - DNA, 25 bp, Homo sapien
tttttttgacctctctctgtttcat

SEQ ID NO: 3766992 - DNA, 25 bp, Homo sapien
ctctttttttgacctctctctgttt

SEQ ID NO: 3766993 - DNA, 25 bp, Homo sapien
caagaacactctttgtgatggggaa

SEQ ID NO: 3766994 - DNA, 25 bp, Homo sapien
atgcattggagcttgaatcaagaac

SEQ ID NO: 3766995 - DNA, 25 bp, Homo sapien
ttggagcttgaatcaagaacactct

SEQ ID NO: 3766996 - DNA, 25 bp, Homo sapien
aacactctttgtgatggggaaatgg

SEQ ID NO: 3766997 - DNA, 25 bp, Homo sapien
tctagagttgttgccaaaacccaca

SEQ ID NO: 3766998 - DNA, 25 bp, Homo sapien
cgggccctgtgttcctctagagttg

SEQ ID NO: 3766999 - DNA, 25 bp, Homo sapien
tggcttcattgtgcccctcttccgg

SEQ ID NO: 3767000 - DNA, 25 bp, Homo sapien
tgcttaagttattacagtgagtggc

SEQ ID NO: 3767001 - DNA, 25 bp, Homo sapien
ctgaatgccaaccagagtcagctct

SEQ ID NO: 3767002 - DNA, 25 bp, Homo sapien
aaacggtccctcaaccacactgtgg

SEQ ID NO: 3767003 - DNA, 25 bp, Homo sapien
cttgagatggcgaaacggtccctca

SEQ ID NO: 3767004 - DNA, 25 bp, Homo sapien
tcagacaaactgaatgccaaccaga

SEQ ID NO: 3767005 - DNA, 25 bp, Homo sapien
aagcgttgccttggctctccactgg

SEQ ID NO: 3767006 - DNA, 25 bp, Homo sapien
agcagggaagcgttgccttggctct

SEQ ID NO: 3767007 - DNA, 25 bp, Homo sapien
gagtgatgatggcatcctgacgcat

SEQ ID NO: 3767008 - DNA, 25 bp, Homo sapien
ctggcaaccactggataaggagtga

SEQ ID NO: 3767009 - DNA, 25 bp, Homo sapien
gggagaatccttggggaactgccgc

SEQ ID NO: 3767010 - DNA, 25 bp, Homo sapien
ggagaatccttggggaactgccgca

SEQ ID NO: 3767011 - DNA, 25 bp, Homo sapien
gagaatccttggggaactgccgcat

SEQ ID NO: 3767012 - DNA, 25 bp, Homo sapien
aattagagtgggcactgaagccctg

SEQ ID NO: 3767013 - DNA, 25 bp, Homo sapien
tagagtgggcactgaagccctgatc

SEQ ID NO: 3767014 - DNA, 25 bp, Homo sapien
caaaattagagtgggcactgaagcc

SEQ ID NO: 3767015 - DNA, 25 bp, Homo sapien
aacacaaaattagagtgggcactga

SEQ ID NO: 3767016 - DNA, 25 bp, Homo sapien
gggtgtgaggtacacgacacattga

SEQ ID NO: 3767017 - DNA, 25 bp, Homo sapien
ccagctgtctcacttcaggcttcag

SEQ ID NO: 3767018 - DNA, 25 bp, Homo sapien
accaaataggataaggttgtgggtg

SEQ ID NO: 3767019 - DNA, 25 bp, Homo sapien
gtgataaccaaataggataaggttg

SEQ ID NO: 3767020 - DNA, 25 bp, Homo sapien
caagcacagaacagtgatctcgtat

SEQ ID NO: 3767021 - DNA, 25 bp, Homo sapien
tgatctcgtatccagacatttcaga

SEQ ID NO: 3767022 - DNA, 25 bp, Homo sapien
cacagaacagtgatctcgtatccag

SEQ ID NO: 3767023 - DNA, 25 bp, Homo sapien
gaacagtgatctcgtatccagacat

SEQ ID NO: 3767024 - DNA, 25 bp, Homo sapien
tcaaagagaaccatcccgatagctc

SEQ ID NO: 3767025 - DNA, 25 bp, Homo sapien
tcttcactttggtgtactgaaaagg

SEQ ID NO: 3767026 - DNA, 25 bp, Homo sapien
tacctcgctgtcaaaggaatgcatt

SEQ ID NO: 3767027 - DNA, 25 bp, Homo sapien
gacttgatttgcttagtaccagcta

SEQ ID NO: 3767028 - DNA, 25 bp, Homo sapien
gaaactgggaatgtctccagctctg

SEQ ID NO: 3767029 - DNA, 25 bp, Homo sapien
tgtctaaattaagctcaccgggcaa

SEQ ID NO: 3767030 - DNA, 25 bp, Homo sapien
tcaattgtaatagacccaggcagga

SEQ ID NO: 3767031 - DNA, 25 bp, Homo sapien
tagcttggcccgtaaatagatgcat

SEQ ID NO: 3767032 - DNA, 25 bp, Homo sapien
tccacagaattagggacctggacac

SEQ ID NO: 3767033 - DNA, 25 bp, Homo sapien
cagtagcagctcctacatgtgtctt

SEQ ID NO: 3767034 - DNA, 25 bp, Homo sapien
tcttcagagctgctaccagttggag

SEQ ID NO: 3767035 - DNA, 25 bp, Homo sapien
aatcattaccaagtccccggtgctt

SEQ ID NO: 3767036 - DNA, 25 bp, Homo sapien
gcatagcaaagtttctcgacatctg

SEQ ID NO: 3767037 - DNA, 25 bp, Homo sapien
agtttctcgacatctgactgtgcca

SEQ ID NO: 3767038 - DNA, 25 bp, Homo sapien
gggcattgacttcggaggcatagca

SEQ ID NO: 3767039 - DNA, 25 bp, Homo sapien
ttcggaggcatagcaaagtttctcg

SEQ ID NO: 3767040 - DNA, 25 bp, Homo sapien
aaggggagagcctcctcacatccca

SEQ ID NO: 3767041 - DNA, 25 bp, Homo sapien
ccacatcgcccaaggacctgagatg

SEQ ID NO: 3767042 - DNA, 25 bp, Homo sapien
agttggcgcctggttgccccggcca

SEQ ID NO: 3767043 - DNA, 25 bp, Homo sapien
aaggccgcatgggtggagttggcgc

SEQ ID NO: 3767044 - DNA, 25 bp, Homo sapien
ctgacctttttgcaggtggcttctc

SEQ ID NO: 3767045 - DNA, 25 bp, Homo sapien
acattccacgttttcccccgcagtg

SEQ ID NO: 3767046 - DNA, 25 bp, Homo sapien
tgcctgccacatctctcctacttcc

SEQ ID NO: 3767047 - DNA, 25 bp, Homo sapien
tctcctacttcctgacctttttgca

SEQ ID NO: 3767048 - DNA, 25 bp, Homo sapien
caagttcccatgaacaaacaaagcc

SEQ ID NO: 3767049 - DNA, 25 bp, Homo sapien
gcccctatagcattgtcatgggaac

SEQ ID NO: 3767050 - DNA, 25 bp, Homo sapien
agccgcattgcgttcattattgaac

SEQ ID NO: 3767051 - DNA, 25 bp, Homo sapien
agtcttttccaagccgcattgcgtt

SEQ ID NO: 3767052 - DNA, 25 bp, Homo sapien
tcaggctcattcttgcaaccgctac

SEQ ID NO: 3767053 - DNA, 25 bp, Homo sapien
ctcaggctcattcttgcaaccgcta

SEQ ID NO: 3767054 - DNA, 25 bp, Homo sapien
ctaagcctgatgatttctctttcaa

SEQ ID NO: 3767055 - DNA, 25 bp, Homo sapien
tcaaaataattacaggagcagccat

SEQ ID NO: 3767056 - DNA, 25 bp, Homo sapien
tttcaaaataattacaggagcagcc

SEQ ID NO: 3767057 - DNA, 25 bp, Homo sapien
tctttcaaaataattacaggagcag

SEQ ID NO: 3767058 - DNA, 25 bp, Homo sapien
cactcgcctatgaaataaagacccc

SEQ ID NO: 3767059 - DNA, 25 bp, Homo sapien
tatcctgtgcttacagttgtagcta

SEQ ID NO: 3767060 - DNA, 25 bp, Homo sapien
cgttctatgtaaggacattctatga

SEQ ID NO: 3767061 - DNA, 25 bp, Homo sapien
tacagttgtagctaaaggacgttct

SEQ ID NO: 3767062 - DNA, 25 bp, Homo sapien
caagtttgacgtaaatcctggagcg

SEQ ID NO: 3767063 - DNA, 25 bp, Homo sapien
tggagcgtgtaattgacacagtgcg

SEQ ID NO: 3767064 - DNA, 25 bp, Homo sapien
aaatcctggagcgtgtaattgacac

SEQ ID NO: 3767065 - DNA, 25 bp, Homo sapien
caatttctggctcccggcaagtttg

SEQ ID NO: 3767066 - DNA, 25 bp, Homo sapien
gatcagagaactcagtgggataatg

SEQ ID NO: 3767067 - DNA, 25 bp, Homo sapien
agtgggataatggacaacgcgccca

SEQ ID NO: 3767068 - DNA, 25 bp, Homo sapien
aactcagtgggataatggacaacgc

SEQ ID NO: 3767069 - DNA, 25 bp, Homo sapien
cagagaactcagtgggataatggac

SEQ ID NO: 3767070 - DNA, 25 bp, Homo sapien
ggcttgccgcgtagcacagttccgt

SEQ ID NO: 3767071 - DNA, 25 bp, Homo sapien
ttaatctaccaaggaggcttgccgc

SEQ ID NO: 3767072 - DNA, 25 bp, Homo sapien
tcaaagccccactcagtgacggtgc

SEQ ID NO: 3767073 - DNA, 25 bp, Homo sapien
tccgtcctgttaaatgattttcttc

SEQ ID NO: 3767074 - DNA, 25 bp, Homo sapien
tgggaaattcgtgtctggttttctg

SEQ ID NO: 3767075 - DNA, 25 bp, Homo sapien
attttacacctctccttaggactgt

SEQ ID NO: 3767076 - DNA, 25 bp, Homo sapien
ttaggactgtgggaaattcgtgtct

SEQ ID NO: 3767077 - DNA, 25 bp, Homo sapien
ttttacacctctccttaggactgtg

SEQ ID NO: 3767078 - DNA, 25 bp, Homo sapien
gagagcagatgtggtataatacaca

SEQ ID NO: 3767079 - DNA, 25 bp, Homo sapien
acacctgatcagaaacgcggagagg

SEQ ID NO: 3767080 - DNA, 25 bp, Homo sapien
gacacctgatcagaaacgcggagag

SEQ ID NO: 3767081 - DNA, 25 bp, Homo sapien
aggagagagcagatgtggtataata

SEQ ID NO: 3767082 - DNA, 25 bp, Homo sapien
atgtggaacgacacacagccctgat

SEQ ID NO: 3767083 - DNA, 25 bp, Homo sapien
ccaggcttgcttgactacaaggaca

SEQ ID NO: 3767084 - DNA, 25 bp, Homo sapien
cacttggtacttgcctgagcattcc

SEQ ID NO: 3767085 - DNA, 25 bp, Homo sapien
gacatggccacttggtttgccctgg

SEQ ID NO: 3767086 - DNA, 25 bp, Homo sapien
tttgccctggttccgtgagtgttcc

SEQ ID NO: 3767087 - DNA, 25 bp, Homo sapien
caagttagctcagttccggaagctc

SEQ ID NO: 3767088 - DNA, 25 bp, Homo sapien
aggggtccaagttagctcagttccg

SEQ ID NO: 3767089 - DNA, 25 bp, Homo sapien
ggtccaagttagctcagttccggaa

SEQ ID NO: 3767090 - DNA, 25 bp, Homo sapien
tccaagttagctcagttccggaagc

SEQ ID NO: 3767091 - DNA, 25 bp, Homo sapien
tccattgtcacagtcatgtagatgt

SEQ ID NO: 3767092 - DNA, 25 bp, Homo sapien
ctgcaaatgcgtagaactgattcac

SEQ ID NO: 3767093 - DNA, 25 bp, Homo sapien
gaacattggccagagtatactgtcc

SEQ ID NO: 3767094 - DNA, 25 bp, Homo sapien
tgattcacaatggaacttccctctg

SEQ ID NO: 3767095 - DNA, 25 bp, Homo sapien
tactgtccacatatgccctgtctaa

SEQ ID NO: 3767096 - DNA, 25 bp, Homo sapien
agaatgggttgagccctccttccag

SEQ ID NO: 3767097 - DNA, 25 bp, Homo sapien
ggtgcagcccctctcagagaatggg

SEQ ID NO: 3767098 - DNA, 25 bp, Homo sapien
tctcagagaacagggtaagccctcc

SEQ ID NO: 3767099 - DNA, 25 bp, Homo sapien
ctctcccagaacagggtgcaccctc

SEQ ID NO: 3767100 - DNA, 25 bp, Homo sapien
tttgctagtgattagacttaaccac

SEQ ID NO: 3767101 - DNA, 25 bp, Homo sapien
ctaatgggatctgcgtggcttgcat

SEQ ID NO: 3767102 - DNA, 25 bp, Homo sapien
tgtccccataaaagaagcacttgtc

SEQ ID NO: 3767103 - DNA, 25 bp, Homo sapien
gggcctctcgctcaaatgtggttag

SEQ ID NO: 3767104 - DNA, 25 bp, Homo sapien
ttgctaccagaggagctactacagc

SEQ ID NO: 3767105 - DNA, 25 bp, Homo sapien
cctttagcctgtcatagaagctgac

SEQ ID NO: 3767106 - DNA, 25 bp, Homo sapien
gagggggagacctttagcctgtcat

SEQ ID NO: 3767107 - DNA, 25 bp, Homo sapien
ctttagcctgtcatagaagctgaca

SEQ ID NO: 3767108 - DNA, 25 bp, Homo sapien
gggagacctttagcctgtcatagaa

SEQ ID NO: 3767109 - DNA, 25 bp, Homo sapien
ctttattaacaatgtggcttacaat

SEQ ID NO: 3767110 - DNA, 25 bp, Homo sapien
tttattaacaatgtggcttacaatt

SEQ ID NO: 3767111 - DNA, 25 bp, Homo sapien
gagctttcaacaatcacgacgaggg

SEQ ID NO: 3767112 - DNA, 25 bp, Homo sapien
tctgcgttggttaggcgacacgacc

SEQ ID NO: 3767113 - DNA, 25 bp, Homo sapien
tgatggatgagttccccacgctgtg

SEQ ID NO: 3767114 - DNA, 25 bp, Homo sapien
gaagccgtgcagctcaaatactgtg

SEQ ID NO: 3767115 - DNA, 25 bp, Homo sapien
taagacagacgctggtgagaggtga

SEQ ID NO: 3767116 - DNA, 25 bp, Homo sapien
ctttaagacagacgctggtgagagg

SEQ ID NO: 3767117 - DNA, 25 bp, Homo sapien
tttaagacagacgctggtgagaggt

SEQ ID NO: 3767118 - DNA, 25 bp, Homo sapien
ttaagacagacgctggtgagaggtg

SEQ ID NO: 3767119 - DNA, 25 bp, Homo sapien
agagacaactttcatggcgacgcca

SEQ ID NO: 3767120 - DNA, 25 bp, Homo sapien
gggtcacacgcctatccatgggaaa

SEQ ID NO: 3767121 - DNA, 25 bp, Homo sapien
tacagcatggcgtgaggtttcttcc

SEQ ID NO: 3767122 - DNA, 25 bp, Homo sapien
tgttctcagcgaaaccagggtgcca

SEQ ID NO: 3767123 - DNA, 25 bp, Homo sapien
ctggtggcataacttgatggcaggc

SEQ ID NO: 3767124 - DNA, 25 bp, Homo sapien
actttgactctctcgatctggtggc

SEQ ID NO: 3767125 - DNA, 25 bp, Homo sapien
aagggtcagaagcaggagtgcttgg

SEQ ID NO: 3767126 - DNA, 25 bp, Homo sapien
tgcactcctgcaccgtcggaagggt

SEQ ID NO: 3767127 - DNA, 25 bp, Homo sapien
tcacatagatgtcatttgaccggac

SEQ ID NO: 3767128 - DNA, 25 bp, Homo sapien
gcttgcttcctatagtaatctggtt

SEQ ID NO: 3767129 - DNA, 25 bp, Homo sapien
gactgctgactttaaccgcaatcct

SEQ ID NO: 3767130 - DNA, 25 bp, Homo sapien
cagcagcttgcttcctatagtaatc

SEQ ID NO: 3767131 - DNA, 25 bp, Homo sapien
cagtctgtcagcttaatgaacctca

SEQ ID NO: 3767132 - DNA, 25 bp, Homo sapien
tgaacctcaccacgtcggtgaccgt

SEQ ID NO: 3767133 - DNA, 25 bp, Homo sapien
gggttgctctccagaaccagtctct

SEQ ID NO: 3767134 - DNA, 25 bp, Homo sapien
tgaccgtccactccaacgggttgct

SEQ ID NO: 3767135 - DNA, 25 bp, Homo sapien
attctgatgccgaaaggcccctcca

SEQ ID NO: 3767136 - DNA, 25 bp, Homo sapien
cacatcgtggccctgaagtgtaaca

SEQ ID NO: 3767137 - DNA, 25 bp, Homo sapien
taaagccgtccaggaaagaggcgct

SEQ ID NO: 3767138 - DNA, 25 bp, Homo sapien
aagaacccaggtggcactaaagccg

SEQ ID NO: 3767139 - DNA, 25 bp, Homo sapien
tcccctcgggcttggtcggcgggca

SEQ ID NO: 3767140 - DNA, 25 bp, Homo sapien
tgctgaggaggcagccggcgccccg

SEQ ID NO: 3767141 - DNA, 25 bp, Homo sapien
cccgcggccccttcgtgtcctctct

SEQ ID NO: 3767142 - DNA, 25 bp, Homo sapien
tggtcggcgggcacttctccccttc

SEQ ID NO: 3767143 - DNA, 25 bp, Homo sapien
aggtgtccgtctggtcatcccggag

SEQ ID NO: 3767144 - DNA, 25 bp, Homo sapien
tccgccgacgaggtgtccgtctggt

SEQ ID NO: 3767145 - DNA, 25 bp, Homo sapien
tcggagccggtctcctcactggcgg

SEQ ID NO: 3767146 - DNA, 25 bp, Homo sapien
tgtcatcgtccatggcgtcagcgtc

SEQ ID NO: 3767147 - DNA, 25 bp, Homo sapien
ttcccagccaaagcagctggacaca

SEQ ID NO: 3767148 - DNA, 25 bp, Homo sapien
gaggcccttcccagccaaagcagct

SEQ ID NO: 3767149 - DNA, 25 bp, Homo sapien
gcccttcccagccaaagcagctgga

SEQ ID NO: 3767150 - DNA, 25 bp, Homo sapien
ccttcccagccaaagcagctggaca

SEQ ID NO: 3767151 - DNA, 25 bp, Homo sapien
ccggccagggccagatgacagagct

SEQ ID NO: 3767152 - DNA, 25 bp, Homo sapien
tgaccatcttgccacaatctccagg

SEQ ID NO: 3767153 - DNA, 25 bp, Homo sapien
gccagggccagatgacagagctaca

SEQ ID NO: 3767154 - DNA, 25 bp, Homo sapien
tctgaccatcttgccacaatctcca

SEQ ID NO: 3767155 - DNA, 25 bp, Homo sapien
agtccacggcagaagacctccgttt

SEQ ID NO: 3767156 - DNA, 25 bp, Homo sapien
tgaagtccacggcagaagacctccg

SEQ ID NO: 3767157 - DNA, 25 bp, Homo sapien
cccgagcccgcggtgaagtccacgg

SEQ ID NO: 3767158 - DNA, 25 bp, Homo sapien
tccacggcagaagacctccgtttct

SEQ ID NO: 3767159 - DNA, 25 bp, Homo sapien
ctgtcggggttgctttccccgatgg

SEQ ID NO: 3767160 - DNA, 25 bp, Homo sapien
tgtccgctgtcggggttgctttccc

SEQ ID NO: 3767161 - DNA, 25 bp, Homo sapien
cccgatggggggcttggagatcttc

SEQ ID NO: 3767162 - DNA, 25 bp, Homo sapien
ggatttccgtcgcttcctccgcctg

SEQ ID NO: 3767163 - DNA, 25 bp, Homo sapien
taagcattcaccgtacacggcaaag

SEQ ID NO: 3767164 - DNA, 25 bp, Homo sapien
caaaggcgagccctcggttaggcct

SEQ ID NO: 3767165 - DNA, 25 bp, Homo sapien
attcaccgtacacggcaaaggcgag

SEQ ID NO: 3767166 - DNA, 25 bp, Homo sapien
gtacacggcaaaggcgagccctcgg

SEQ ID NO: 3767167 - DNA, 25 bp, Homo sapien
acctgcgggccctacctgagaggcc

SEQ ID NO: 3767168 - DNA, 25 bp, Homo sapien
aagctcttccggaaccaggtgacct

SEQ ID NO: 3767169 - DNA, 25 bp, Homo sapien
aggtgcagtgatggagaaacaagct

SEQ ID NO: 3767170 - DNA, 25 bp, Homo sapien
agtgatggagaaacaagctcttccg

SEQ ID NO: 3767171 - DNA, 25 bp, Homo sapien
acatcccagctggctggaacgtggc

SEQ ID NO: 3767172 - DNA, 25 bp, Homo sapien
tggaacgtggctggcagagctaact

SEQ ID NO: 3767173 - DNA, 25 bp, Homo sapien
cagatgtccgtacgattttgaccac

SEQ ID NO: 3767174 - DNA, 25 bp, Homo sapien
aatttgcgacttggtcagatgtccg

SEQ ID NO: 3767175 - DNA, 25 bp, Homo sapien
cagactcggcggcagaaatttgcga

SEQ ID NO: 3767176 - DNA, 25 bp, Homo sapien
aatttggacagcactctagcttggc

SEQ ID NO: 3767177 - DNA, 25 bp, Homo sapien
gaggtcctccttaagcacttgtctc

SEQ ID NO: 3767178 - DNA, 25 bp, Homo sapien
tctaaggtttctctgaggtcctcct

SEQ ID NO: 3767179 - DNA, 25 bp, Homo sapien
taaggtttctctgaggtcctcctta

SEQ ID NO: 3767180 - DNA, 25 bp, Homo sapien
ttctaaggtttctctgaggtcctcc

SEQ ID NO: 3767181 - DNA, 25 bp, Homo sapien
gtttaaccttcaggctcccagtctc

SEQ ID NO: 3767182 - DNA, 25 bp, Homo sapien
ttggtcagtttaaccttcaggctcc

SEQ ID NO: 3767183 - DNA, 25 bp, Homo sapien
tgtctttggtcagtttaaccttcag

SEQ ID NO: 3767184 - DNA, 25 bp, Homo sapien
tcagtttaaccttcaggctcccagt

SEQ ID NO: 3767185 - DNA, 25 bp, Homo sapien
ctccttccctctgataagtgacagt

SEQ ID NO: 3767186 - DNA, 25 bp, Homo sapien
tcacgtgaaatcctaccaggatatt

SEQ ID NO: 3767187 - DNA, 25 bp, Homo sapien
gctctaactcacgtgaaatcctacc

SEQ ID NO: 3767188 - DNA, 25 bp, Homo sapien
ccctctgataagtgacagtgagctc

SEQ ID NO: 3767189 - DNA, 25 bp, Homo sapien
catagaactgcagaacgaacgtcct

SEQ ID NO: 3767190 - DNA, 25 bp, Homo sapien
gaactgcagaacgaacgtccttcag

SEQ ID NO: 3767191 - DNA, 25 bp, Homo sapien
cagaacgaacgtccttcagtttgtt

SEQ ID NO: 3767192 - DNA, 25 bp, Homo sapien
ctgcagaacgaacgtccttcagttt

SEQ ID NO: 3767193 - DNA, 25 bp, Homo sapien
taccagctgtaattctcttaatacc

SEQ ID NO: 3767194 - DNA, 25 bp, Homo sapien
gctgcgttgattatcatgctaagaa

SEQ ID NO: 3767195 - DNA, 25 bp, Homo sapien
tccagtggggatcttctaccagctg

SEQ ID NO: 3767196 - DNA, 25 bp, Homo sapien
cccttccaggcttgtaggctgcgtt

SEQ ID NO: 3767197 - DNA, 25 bp, Homo sapien
tggacatttaatactagggcaaccc

SEQ ID NO: 3767198 - DNA, 25 bp, Homo sapien
cacatgcttgcaaggagggtaacaa

SEQ ID NO: 3767199 - DNA, 25 bp, Homo sapien
gggtggcagactcccattaactctt

SEQ ID NO: 3767200 - DNA, 25 bp, Homo sapien
cataaggaactaatgaaacggagac

SEQ ID NO: 3767201 - DNA, 25 bp, Homo sapien
ccctggggagatacgatgttcctgt

SEQ ID NO: 3767202 - DNA, 25 bp, Homo sapien
gttcctgttaacctcaatgagtttc

SEQ ID NO: 3767203 - DNA, 25 bp, Homo sapien
gcaggcatttctaagagttccagct

SEQ ID NO: 3767204 - DNA, 25 bp, Homo sapien
aacaagcatgtgtctaccatggggc

SEQ ID NO: 3767205 - DNA, 25 bp, Homo sapien
aaggacctcagacccctaaggtgct

SEQ ID NO: 3767206 - DNA, 25 bp, Homo sapien
ggacctcagacccctaaggtgctca

SEQ ID NO: 3767207 - DNA, 25 bp, Homo sapien
acaaggacctcagacccctaaggtg

SEQ ID NO: 3767208 - DNA, 25 bp, Homo sapien
gacctcagacccctaaggtgctcac

SEQ ID NO: 3767209 - DNA, 25 bp, Homo sapien
gactgcttcgaagaatgaaagctct

SEQ ID NO: 3767210 - DNA, 25 bp, Homo sapien
ccaagtctatgaacactgaaggctg

SEQ ID NO: 3767211 - DNA, 25 bp, Homo sapien
ttcaggattccgaccagaaagcttt

SEQ ID NO: 3767212 - DNA, 25 bp, Homo sapien
ggcagccgactttcaggattccgac

SEQ ID NO: 3767213 - DNA, 25 bp, Homo sapien
aatagattagatgttccgctccccg

SEQ ID NO: 3767214 - DNA, 25 bp, Homo sapien
aagtctctgagagccaccctgggat

SEQ ID NO: 3767215 - DNA, 25 bp, Homo sapien
tacccaggtgcgtgttttcagagtc

SEQ ID NO: 3767216 - DNA, 25 bp, Homo sapien
tcagagtcgtttctgccaggagcgc

SEQ ID NO: 3767217 - DNA, 25 bp, Homo sapien
aatttggccgctggcacttatcgga

SEQ ID NO: 3767218 - DNA, 25 bp, Homo sapien
atttttcttgcactcacagaactga

SEQ ID NO: 3767219 - DNA, 25 bp, Homo sapien
tctggactcggctttaaatttggcc

SEQ ID NO: 3767220 - DNA, 25 bp, Homo sapien
tttgtcattagaaaactgctctgga

SEQ ID NO: 3767221 - DNA, 25 bp, Homo sapien
taagccaaggtgattgtgcacgggc

SEQ ID NO: 3767222 - DNA, 25 bp, Homo sapien
gccaaggtgattgtgcacgggcttt

SEQ ID NO: 3767223 - DNA, 25 bp, Homo sapien
caaggtgattgtgcacgggctttac

SEQ ID NO: 3767224 - DNA, 25 bp, Homo sapien
aaaataagccaaggtgattgtgcac

SEQ ID NO: 3767225 - DNA, 25 bp, Homo sapien
cgactgaggtagctctgcaatcctt

SEQ ID NO: 3767226 - DNA, 25 bp, Homo sapien
aggtaagggcctgagaaacacctgt

SEQ ID NO: 3767227 - DNA, 25 bp, Homo sapien
ttgcccggtcccaccgactgaggta

SEQ ID NO: 3767228 - DNA, 25 bp, Homo sapien
tctttaagaaccagcacgcatttgc

SEQ ID NO: 3767229 - DNA, 25 bp, Homo sapien
gaggacagcagtatttcccgttgac

SEQ ID NO: 3767230 - DNA, 25 bp, Homo sapien
ggacagcagtatttcccgttgacgg

SEQ ID NO: 3767231 - DNA, 25 bp, Homo sapien
acagcagtatttcccgttgacggtt

SEQ ID NO: 3767232 - DNA, 25 bp, Homo sapien
ctgaggacagcagtatttcccgttg

SEQ ID NO: 3767233 - DNA, 25 bp, Homo sapien
cttaacaggcactgtgggcggcaat

SEQ ID NO: 3767234 - DNA, 25 bp, Homo sapien
aacaaaggtcatgaggtattttctt

SEQ ID NO: 3767235 - DNA, 25 bp, Homo sapien
ttcttaacaggcactgtgggcggca

SEQ ID NO: 3767236 - DNA, 25 bp, Homo sapien
ataaacaaaggtcatgaggtatttt

SEQ ID NO: 3767237 - DNA, 25 bp, Homo sapien
ccagtaagaccagatgaaaacagca

SEQ ID NO: 3767238 - DNA, 25 bp, Homo sapien
gaatgtgtgtatgggagcaatgcca

SEQ ID NO: 3767239 - DNA, 25 bp, Homo sapien
tgtccaattctttggatggcccaag

SEQ ID NO: 3767240 - DNA, 25 bp, Homo sapien
taagaggaccatagaatagaatgtg

SEQ ID NO: 3767241 - DNA, 25 bp, Homo sapien
gtggggcccctgcagacgctgagaa

SEQ ID NO: 3767242 - DNA, 25 bp, Homo sapien
gccacgtggggcccctgcagacgct

SEQ ID NO: 3767243 - DNA, 25 bp, Homo sapien
ctgccacgtggggcccctgcagacg

SEQ ID NO: 3767244 - DNA, 25 bp, Homo sapien
cacgtggggcccctgcagacgctga

SEQ ID NO: 3767245 - DNA, 25 bp, Homo sapien
gacacagacagcgatttctctcagt

SEQ ID NO: 3767246 - DNA, 25 bp, Homo sapien
tctctcagtgtgtaggtctgggaca

SEQ ID NO: 3767247 - DNA, 25 bp, Homo sapien
ccccaggtatgtcgaaatggaataa

SEQ ID NO: 3767248 - DNA, 25 bp, Homo sapien
taaaaagtgagccatgggaatctgg

SEQ ID NO: 3767249 - DNA, 25 bp, Homo sapien
gacactacagtttatcggtatacag

SEQ ID NO: 3767250 - DNA, 25 bp, Homo sapien
tatcggtatacagtgtagtctggag

SEQ ID NO: 3767251 - DNA, 25 bp, Homo sapien
ggtacataacaaataacagtcacta

SEQ ID NO: 3767252 - DNA, 25 bp, Homo sapien
tttactgctacctctactagggtgc

SEQ ID NO: 3767253 - DNA, 25 bp, Homo sapien
ggttgcacgactgcaatctttctct

SEQ ID NO: 3767254 - DNA, 25 bp, Homo sapien
tctggttgcacgactgcaatctttc

SEQ ID NO: 3767255 - DNA, 25 bp, Homo sapien
gcacgactgcaatctttctcttctt

SEQ ID NO: 3767256 - DNA, 25 bp, Homo sapien
tgtttctctggttgcacgactgcaa

SEQ ID NO: 3767257 - DNA, 25 bp, Homo sapien
agactgttttgtgtggtgcagtcaa

SEQ ID NO: 3767258 - DNA, 25 bp, Homo sapien
gtggtgcagtcaaaggataagaatt

SEQ ID NO: 3767259 - DNA, 25 bp, Homo sapien
gactgttttgtgtggtgcagtcaaa

SEQ ID NO: 3767260 - DNA, 25 bp, Homo sapien
gacctctggaacaggagtctgcagc

SEQ ID NO: 3767261 - DNA, 25 bp, Homo sapien
tgacctctggaacaggagtctgcag

SEQ ID NO: 3767262 - DNA, 25 bp, Homo sapien
gccttctggagaggcgattccccgg

SEQ ID NO: 3767263 - DNA, 25 bp, Homo sapien
caatggcagctggaaaacctgaact

SEQ ID NO: 3767264 - DNA, 25 bp, Homo sapien
agtcttcccaaatcattcccaatgg

SEQ ID NO: 3767265 - DNA, 25 bp, Homo sapien
gaactttgctatggttcctgctgca

SEQ ID NO: 3767266 - DNA, 25 bp, Homo sapien
ctaaggtttcatagaggccatactt

SEQ ID NO: 3767267 - DNA, 25 bp, Homo sapien
ttttgcaagtatctccaaaatgcat

SEQ ID NO: 3767268 - DNA, 25 bp, Homo sapien
cagcttctccccctaaggtttcata

SEQ ID NO: 3767269 - DNA, 25 bp, Homo sapien
atgtaattgttttcacgtttacatg

SEQ ID NO: 3767270 - DNA, 25 bp, Homo sapien
gctcagacgggcttctctgaaccac

SEQ ID NO: 3767271 - DNA, 25 bp, Homo sapien
tggtcccctaaacatatgaggtggg

SEQ ID NO: 3767272 - DNA, 25 bp, Homo sapien
ccctaaacatatgaggtgggctcag

SEQ ID NO: 3767273 - DNA, 25 bp, Homo sapien
gaggtgggctcagacgggcttctct

SEQ ID NO: 3767274 - DNA, 25 bp, Homo sapien
tccacacgttgccatttcgacaaac

SEQ ID NO: 3767275 - DNA, 25 bp, Homo sapien
gactgctacccccagcgagtacgta

SEQ ID NO: 3767276 - DNA, 25 bp, Homo sapien
gccatttcgacaaactctacattcc

SEQ ID NO: 3767277 - DNA, 25 bp, Homo sapien
gaaagagaagtaaggccccttctga

SEQ ID NO: 3767278 - DNA, 25 bp, Homo sapien
gattcctggggttcacagcttcaag

SEQ ID NO: 3767279 - DNA, 25 bp, Homo sapien
ttgtgaaacctcgactgaatgatgt

SEQ ID NO: 3767280 - DNA, 25 bp, Homo sapien
tccaggtgaagccacattagccgcc

SEQ ID NO: 3767281 - DNA, 25 bp, Homo sapien
actcacaacggaggccacacacagt

SEQ ID NO: 3767282 - DNA, 25 bp, Homo sapien
ttgtgataatctgcccagtcgaagt

SEQ ID NO: 3767283 - DNA, 25 bp, Homo sapien
gataatctgcccagtcgaagtcctg

SEQ ID NO: 3767284 - DNA, 25 bp, Homo sapien
tctgcccagtcgaagtcctggccag

SEQ ID NO: 3767285 - DNA, 25 bp, Homo sapien
gctgcttgtgataatctgcccagtc

SEQ ID NO: 3767286 - DNA, 25 bp, Homo sapien
caaggaaaaaggagtgaggtgtcaa

SEQ ID NO: 3767287 - DNA, 25 bp, Homo sapien
aaatcaaaccaatggacaggcaagg

SEQ ID NO: 3767288 - DNA, 25 bp, Homo sapien
taagaaaggcataacccagggagga

SEQ ID NO: 3767289 - DNA, 25 bp, Homo sapien
cctcttaatgggagtctcatcggca

SEQ ID NO: 3767290 - DNA, 25 bp, Homo sapien
tgaagacacatctctgtaacacaat

SEQ ID NO: 3767291 - DNA, 25 bp, Homo sapien
tgtgaagacacatctctgtaacaca

SEQ ID NO: 3767292 - DNA, 25 bp, Homo sapien
tggaagacggactttgttaaagtca

SEQ ID NO: 3767293 - DNA, 25 bp, Homo sapien
gttccactatctcttcctggacctc

SEQ ID NO: 3767294 - DNA, 25 bp, Homo sapien
tttcctttgggctgataatgagctg

SEQ ID NO: 3767295 - DNA, 25 bp, Homo sapien
aatgagctgtctttgtaaggcagtt

SEQ ID NO: 3767296 - DNA, 25 bp, Homo sapien
ctcagaaaataactgcgacataaaa

SEQ ID NO: 3767297 - DNA, 25 bp, Homo sapien
gagctgtctttgtaaggcagttttg

SEQ ID NO: 3767298 - DNA, 25 bp, Homo sapien
tgctttcttcctgaataaacctgac

SEQ ID NO: 3767299 - DNA, 25 bp, Homo sapien
tactgctttcttcctgaataaacct

SEQ ID NO: 3767300 - DNA, 25 bp, Homo sapien
tctcatcttactgctttcttcctga

SEQ ID NO: 3767301 - DNA, 25 bp, Homo sapien
ctctcatcttactgctttcttcctg

SEQ ID NO: 3767302 - DNA, 25 bp, Homo sapien
actgtactggcaaaatccccaaaga

SEQ ID NO: 3767303 - DNA, 25 bp, Homo sapien
gcattgacagtttacttggttcagg

SEQ ID NO: 3767304 - DNA, 25 bp, Homo sapien
ggaggagtgaggctgactccatttt

SEQ ID NO: 3767305 - DNA, 25 bp, Homo sapien
tccccaaagaatctgcatggcacag

SEQ ID NO: 3767306 - DNA, 25 bp, Homo sapien
cctaggttctaaaagacagatgcac

SEQ ID NO: 3767307 - DNA, 25 bp, Homo sapien
cagttatgccacgaagaaaaggccc

SEQ ID NO: 3767308 - DNA, 25 bp, Homo sapien
gggtgtatacgaaacggcatgactt

SEQ ID NO: 3767309 - DNA, 25 bp, Homo sapien
gaagatgagtcttgaacctggagag

SEQ ID NO: 3767310 - DNA, 25 bp, Homo sapien
gtctcaagcttcatcccaactgtga

SEQ ID NO: 3767311 - DNA, 25 bp, Homo sapien
ccaactgtgaagaaatggcttcgca

SEQ ID NO: 3767312 - DNA, 25 bp, Homo sapien
tagtcaccgacgcaggagagatgta

SEQ ID NO: 3767313 - DNA, 25 bp, Homo sapien
aaagggctcgcacatattcactgtc

SEQ ID NO: 3767314 - DNA, 25 bp, Homo sapien
cgctgacttggagtctttagccaaa

SEQ ID NO: 3767315 - DNA, 25 bp, Homo sapien
gacttggagtctttagccaaatcca

SEQ ID NO: 3767316 - DNA, 25 bp, Homo sapien
cttgaccgctgacttggagtcttta

SEQ ID NO: 3767317 - DNA, 25 bp, Homo sapien
tgaccgctgacttggagtctttagc

SEQ ID NO: 3767318 - DNA, 25 bp, Homo sapien
gaacgtccatcattaaacttcccat

SEQ ID NO: 3767319 - DNA, 25 bp, Homo sapien
tgctcgaacgtccatcattaaactt

SEQ ID NO: 3767320 - DNA, 25 bp, Homo sapien
tgtcctgtgctcgaacgtccatcat

SEQ ID NO: 3767321 - DNA, 25 bp, Homo sapien
agagtgtcctgtgctcgaacgtcca

SEQ ID NO: 3767322 - DNA, 25 bp, Homo sapien
caaattgcgtacagaaaaactgctc

SEQ ID NO: 3767323 - DNA, 25 bp, Homo sapien
gccaacaagatgctcacatgagatg

SEQ ID NO: 3767324 - DNA, 25 bp, Homo sapien
cagactgacgtggtaaaagtggttc

SEQ ID NO: 3767325 - DNA, 25 bp, Homo sapien
agtactggagtctggtcaaattgcg

SEQ ID NO: 3767326 - DNA, 25 bp, Homo sapien
cctgcctggatatagtcatcatgag

SEQ ID NO: 3767327 - DNA, 25 bp, Homo sapien
gtgaaccatcgctgcgggagaaaca

SEQ ID NO: 3767328 - DNA, 25 bp, Homo sapien
tgcctctgatgaagtccctgccttg

SEQ ID NO: 3767329 - DNA, 25 bp, Homo sapien
cctggaaagggacagcacctgattc

SEQ ID NO: 3767330 - DNA, 25 bp, Homo sapien
tgctatcccgaaaggtctgaaaggt

SEQ ID NO: 3767331 - DNA, 25 bp, Homo sapien
cagaatcttcggatgctcagcaatg

SEQ ID NO: 3767332 - DNA, 25 bp, Homo sapien
ggtttgtaacactctggccatgcct

SEQ ID NO: 3767333 - DNA, 25 bp, Homo sapien
tccaaaaacgtcctcaaggtgagtg

SEQ ID NO: 3767334 - DNA, 25 bp, Homo sapien
ttctaattttaagcagacacccgta

SEQ ID NO: 3767335 - DNA, 25 bp, Homo sapien
gcattatacaaaggccttaggcagg

SEQ ID NO: 3767336 - DNA, 25 bp, Homo sapien
aagcagacacccgtaggaagtgagg

SEQ ID NO: 3767337 - DNA, 25 bp, Homo sapien
tatacaaaggccttaggcaggagta

SEQ ID NO: 3767338 - DNA, 25 bp, Homo sapien
cgtaacagctgaacgctatggcaat

SEQ ID NO: 3767339 - DNA, 25 bp, Homo sapien
tttgacttctgtctcgtaacagctg

SEQ ID NO: 3767340 - DNA, 25 bp, Homo sapien
tttccataacaacacgcatctcaga

SEQ ID NO: 3767341 - DNA, 25 bp, Homo sapien
gactcactgctgaattcaaacacat

SEQ ID NO: 3767342 - DNA, 25 bp, Homo sapien
cagaggaagtcagtagagagtgcca

SEQ ID NO: 3767343 - DNA, 25 bp, Homo sapien
cagggccagtcaaatgacggttgtc

SEQ ID NO: 3767344 - DNA, 25 bp, Homo sapien
tacatgaaatgcgatcagattgggt

SEQ ID NO: 3767345 - DNA, 25 bp, Homo sapien
gaacattaccttcgtgtaagcagag

SEQ ID NO: 3767346 - DNA, 25 bp, Homo sapien
gaagcaactggatgtctgcccgtca

SEQ ID NO: 3767347 - DNA, 25 bp, Homo sapien
catgaaacttgtacgactctgcaga

SEQ ID NO: 3767348 - DNA, 25 bp, Homo sapien
acgccaatggtgttgggtcgccgcc

SEQ ID NO: 3767349 - DNA, 25 bp, Homo sapien
cacattaagtacatcttctacatga

SEQ ID NO: 3767350 - DNA, 25 bp, Homo sapien
ggcagcatcaataagggatttttcc

SEQ ID NO: 3767351 - DNA, 25 bp, Homo sapien
gcagcatcaataagggatttttcca

SEQ ID NO: 3767352 - DNA, 25 bp, Homo sapien
tggcagcatcaataagggatttttc

SEQ ID NO: 3767353 - DNA, 25 bp, Homo sapien
gcaaagccctgaggacgccaacgca

SEQ ID NO: 3767354 - DNA, 25 bp, Homo sapien
tgggacagggaccataaacacatgc

SEQ ID NO: 3767355 - DNA, 25 bp, Homo sapien
gcactgcatccaaaccacggagaga

SEQ ID NO: 3767356 - DNA, 25 bp, Homo sapien
tgtgcactcaggcaagctcgtgggc

SEQ ID NO: 3767357 - DNA, 25 bp, Homo sapien
ttgggaatcaggactagttataccc

SEQ ID NO: 3767358 - DNA, 25 bp, Homo sapien
caggactagttatacccttgaccct

SEQ ID NO: 3767359 - DNA, 25 bp, Homo sapien
tggctgacacctttggccccttgct

SEQ ID NO: 3767360 - DNA, 25 bp, Homo sapien
cccttgacccttgatggtggtctct

SEQ ID NO: 3767361 - DNA, 25 bp, Homo sapien
caaaggtaacaagaagcccaggtgc

SEQ ID NO: 3767362 - DNA, 25 bp, Homo sapien
ccccagtggggttgcctgcacgctg

SEQ ID NO: 3767363 - DNA, 25 bp, Homo sapien
tcctccacaccagagacaaaggtaa

SEQ ID NO: 3767364 - DNA, 25 bp, Homo sapien
ctgtcctacaacctgaagattctct

SEQ ID NO: 3767365 - DNA, 25 bp, Homo sapien
caactggtcgaagtctgtaatccaa

SEQ ID NO: 3767366 - DNA, 25 bp, Homo sapien
agtgtcctccaatcccacatagcga

SEQ ID NO: 3767367 - DNA, 25 bp, Homo sapien
catagcgaaggcgtaatcttcctcc

SEQ ID NO: 3767368 - DNA, 25 bp, Homo sapien
cagtactgaaaagggttctgggaat

SEQ ID NO: 3767369 - DNA, 25 bp, Homo sapien
ctattaaggaaccaactgtaatgag

SEQ ID NO: 3767370 - DNA, 25 bp, Homo sapien
ggtctatagggcctttccctcgcag

SEQ ID NO: 3767371 - DNA, 25 bp, Homo sapien
ttaaggaaccaactgtaatgaggtc

SEQ ID NO: 3767372 - DNA, 25 bp, Homo sapien
ctatagggcctttccctcgcagagg

SEQ ID NO: 3767373 - DNA, 25 bp, Homo sapien
ttgcctggacctagaaaacgtggta

SEQ ID NO: 3767374 - DNA, 25 bp, Homo sapien
ggccgctactctaatgaccaaaatg

SEQ ID NO: 3767375 - DNA, 25 bp, Homo sapien
gatataggacagtaggaagacatcc

SEQ ID NO: 3767376 - DNA, 25 bp, Homo sapien
caaggtactggcgaacagtctggcg

SEQ ID NO: 3767377 - DNA, 25 bp, Homo sapien
gtcctcgaaccagtcaagtcacgta

SEQ ID NO: 3767378 - DNA, 25 bp, Homo sapien
tgtccagtctgtgtacttctctttg

SEQ ID NO: 3767379 - DNA, 25 bp, Homo sapien
tcaagtcacgtatgagaaattctgt

SEQ ID NO: 3767380 - DNA, 25 bp, Homo sapien
cgtatgagaaattctgtccagtctg

SEQ ID NO: 3767381 - DNA, 25 bp, Homo sapien
aggaaactcaaaacctgccctgcgc

SEQ ID NO: 3767382 - DNA, 25 bp, Homo sapien
tgcgcccaactacggcatcaaagat

SEQ ID NO: 3767383 - DNA, 25 bp, Homo sapien
tcagctgtaagccaaatccttgtct

SEQ ID NO: 3767384 - DNA, 25 bp, Homo sapien
tgaaggaccaatccacacatgaaac

SEQ ID NO: 3767385 - DNA, 25 bp, Homo sapien
ccgggctgtgagtataaagcccttg

SEQ ID NO: 3767386 - DNA, 25 bp, Homo sapien
tgtgagtataaagcccttggtcagg

SEQ ID NO: 3767387 - DNA, 25 bp, Homo sapien
ggctgcccatgcaggcagatgatga

SEQ ID NO: 3767388 - DNA, 25 bp, Homo sapien
gtgtagaccgggctgtgagtataaa

SEQ ID NO: 3767389 - DNA, 25 bp, Homo sapien
gaagtgatctgactataggcatccc

SEQ ID NO: 3767390 - DNA, 25 bp, Homo sapien
tagtagtcacatagccttatcagct

SEQ ID NO: 3767391 - DNA, 25 bp, Homo sapien
taggcatcccatggaaccctgtgat

SEQ ID NO: 3767392 - DNA, 25 bp, Homo sapien
cagcattcagtctccaaggtgagcc

SEQ ID NO: 3767393 - DNA, 25 bp, Homo sapien
ttgtacaagtatctagactctatct

SEQ ID NO: 3767394 - DNA, 25 bp, Homo sapien
caagtatctagactctatctggaca

SEQ ID NO: 3767395 - DNA, 25 bp, Homo sapien
agtatctagactctatctggacagc

SEQ ID NO: 3767396 - DNA, 25 bp, Homo sapien
tacaagtatctagactctatctgga

SEQ ID NO: 3767397 - DNA, 25 bp, Homo sapien
tcagccacttttcttccattctcca

SEQ ID NO: 3767398 - DNA, 25 bp, Homo sapien
cttccaaagagtcagccacttttct

SEQ ID NO: 3767399 - DNA, 25 bp, Homo sapien
gtcagccacttttcttccattctcc

SEQ ID NO: 3767400 - DNA, 25 bp, Homo sapien
caaagagtcagccacttttcttcca

SEQ ID NO: 3767401 - DNA, 25 bp, Homo sapien
gacaggcctattcctgaagtctcag

SEQ ID NO: 3767402 - DNA, 25 bp, Homo sapien
cctgaagtctcagtctgaccagtta

SEQ ID NO: 3767403 - DNA, 25 bp, Homo sapien
ccagttattgcctcctctaaaccaa

SEQ ID NO: 3767404 - DNA, 25 bp, Homo sapien
agttccctagctccggacaggccta

SEQ ID NO: 3767405 - DNA, 25 bp, Homo sapien
taagaggacaggtcaacaggtacag

SEQ ID NO: 3767406 - DNA, 25 bp, Homo sapien
taacaaatatcctagggagtatctg

SEQ ID NO: 3767407 - DNA, 25 bp, Homo sapien
taagcaggctacactcacactgagt

SEQ ID NO: 3767408 - DNA, 25 bp, Homo sapien
tagggagtatctgccacagatggat

SEQ ID NO: 3767409 - DNA, 25 bp, Homo sapien
cttggctaataaatctatcacatcc

SEQ ID NO: 3767410 - DNA, 25 bp, Homo sapien
acttggctaataaatctatcacatc

SEQ ID NO: 3767411 - DNA, 25 bp, Homo sapien
ggatgtcttctcaatccagtcagag

SEQ ID NO: 3767412 - DNA, 25 bp, Homo sapien
tcacctctgtgtaaggaagacccat

SEQ ID NO: 3767413 - DNA, 25 bp, Homo sapien
ggagttcacaaacgttcaggccata

SEQ ID NO: 3767414 - DNA, 25 bp, Homo sapien
caacgtggcggtcaaatcttttatc

SEQ ID NO: 3767415 - DNA, 25 bp, Homo sapien
tgagggaactgaggaaatgtgtgtg

SEQ ID NO: 3767416 - DNA, 25 bp, Homo sapien
gggtgctaaagacatccccacaacc

SEQ ID NO: 3767417 - DNA, 25 bp, Homo sapien
tccccacaaccacaaaagcggtgag

SEQ ID NO: 3767418 - DNA, 25 bp, Homo sapien
tcagcagccatcagcgcagcacagc

SEQ ID NO: 3767419 - DNA, 25 bp, Homo sapien
cctgtcatccgttcagcaatgcaac

SEQ ID NO: 3767420 - DNA, 25 bp, Homo sapien
gtgaattgagtaaaccatctctggt

SEQ ID NO: 3767421 - DNA, 25 bp, Homo sapien
tggccttagggacatacaccaccca

SEQ ID NO: 3767422 - DNA, 25 bp, Homo sapien
accctgtcatccgttcagcaatgca

SEQ ID NO: 3767423 - DNA, 25 bp, Homo sapien
tctaatccatcccatggtagcgtcc

SEQ ID NO: 3767424 - DNA, 25 bp, Homo sapien
gtctaatccatcccatggtagcgtc

SEQ ID NO: 3767425 - DNA, 25 bp, Homo sapien
taaagcactcttcacccttcacagt

SEQ ID NO: 3767426 - DNA, 25 bp, Homo sapien
cgctggtgttgcagaaacacgggaa

SEQ ID NO: 3767427 - DNA, 25 bp, Homo sapien
caaacgtattttgtgaagtgggcct

SEQ ID NO: 3767428 - DNA, 25 bp, Homo sapien
taaggctcacactaggaagcgctgg

SEQ ID NO: 3767429 - DNA, 25 bp, Homo sapien
ctgacgatgggagcaacatgatggt

SEQ ID NO: 3767430 - DNA, 25 bp, Homo sapien
gatgtgctacgcgacggctcttccc

SEQ ID NO: 3767431 - DNA, 25 bp, Homo sapien
tgcctccgacaacagggagttcatc

SEQ ID NO: 3767432 - DNA, 25 bp, Homo sapien
ggacacgacaactcattgctgacga

SEQ ID NO: 3767433 - DNA, 25 bp, Homo sapien
aaggcaagcgtcatccacagccggc

SEQ ID NO: 3767434 - DNA, 25 bp, Homo sapien
cgctgacagccaggcaccgtcacat

SEQ ID NO: 3767435 - DNA, 25 bp, Homo sapien
gaggaaaaaggcaagcgtcatccac

SEQ ID NO: 3767436 - DNA, 25 bp, Homo sapien
tccacagccggcctggccgctgaca

SEQ ID NO: 3767437 - DNA, 25 bp, Homo sapien
agaaccaggctcagaaacccaccgt

SEQ ID NO: 3767438 - DNA, 25 bp, Homo sapien
ggagaaccaggctcagaaacccacc

SEQ ID NO: 3767439 - DNA, 25 bp, Homo sapien
tggagaaccaggctcagaaacccac

SEQ ID NO: 3767440 - DNA, 25 bp, Homo sapien
gagaaccaggctcagaaacccaccg

SEQ ID NO: 3767441 - DNA, 25 bp, Homo sapien
tacttgcttctggagtaagcctgca

SEQ ID NO: 3767442 - DNA, 25 bp, Homo sapien
ccccggttgctatggagaatctgca

SEQ ID NO: 3767443 - DNA, 25 bp, Homo sapien
cggtataatctatagaacagcatta

SEQ ID NO: 3767444 - DNA, 25 bp, Homo sapien
ttggtgaccccaactgctacttgct

SEQ ID NO: 3767445 - DNA, 25 bp, Homo sapien
gctgcacatctgctaactcagagct

SEQ ID NO: 3767446 - DNA, 25 bp, Homo sapien
catctgctaactcagagcttttcac

SEQ ID NO: 3767447 - DNA, 25 bp, Homo sapien
tgctgcacatctgctaactcagagc

SEQ ID NO: 3767448 - DNA, 25 bp, Homo sapien
gcacatctgctaactcagagctttt

SEQ ID NO: 3767449 - DNA, 25 bp, Homo sapien
cactcttcccaggttattttgtctc

SEQ ID NO: 3767450 - DNA, 25 bp, Homo sapien
agcggacacatcctccctaagtcag

SEQ ID NO: 3767451 - DNA, 25 bp, Homo sapien
ctccctaagtcagtcctgcatgcag

SEQ ID NO: 3767452 - DNA, 25 bp, Homo sapien
tctcaatgttacaaccaacaggctc

SEQ ID NO: 3767453 - DNA, 25 bp, Homo sapien
caggccaacttcgtcattcagagca

SEQ ID NO: 3767454 - DNA, 25 bp, Homo sapien
ggtgcactgcataggattctaatag

SEQ ID NO: 3767455 - DNA, 25 bp, Homo sapien
ggcatctgagcttcccttagacagg

SEQ ID NO: 3767456 - DNA, 25 bp, Homo sapien
tccttaaaaggcatccgctgacaga

SEQ ID NO: 3767457 - DNA, 25 bp, Homo sapien
gagaatcctctgttctaacagggct

SEQ ID NO: 3767458 - DNA, 25 bp, Homo sapien
gaaataagcctttgagaatcctctg

SEQ ID NO: 3767459 - DNA, 25 bp, Homo sapien
tgagaatcctctgttctaacagggc

SEQ ID NO: 3767460 - DNA, 25 bp, Homo sapien
aatcctctgttctaacagggctccc

SEQ ID NO: 3767461 - DNA, 25 bp, Homo sapien
tgcctagaccggtggccagagttcc

SEQ ID NO: 3767462 - DNA, 25 bp, Homo sapien
caaatgagtgcttagggccttaaca

SEQ ID NO: 3767463 - DNA, 25 bp, Homo sapien
caagtgaaagccatgcaggttcctg

SEQ ID NO: 3767464 - DNA, 25 bp, Homo sapien
tacagatgctaaatgctggcccaga

SEQ ID NO: 3767465 - DNA, 25 bp, Homo sapien
gaaaagccacgtataagtgactcac

SEQ ID NO: 3767466 - DNA, 25 bp, Homo sapien
cattcagtggaagcggatgatcgta

SEQ ID NO: 3767467 - DNA, 25 bp, Homo sapien
cacttcaaattcgtgttgttcaagg

SEQ ID NO: 3767468 - DNA, 25 bp, Homo sapien
gagaaaagacatgctattcagaaaa

SEQ ID NO: 3767469 - DNA, 25 bp, Homo sapien
ggaacgttcctgttgtggacactaa

SEQ ID NO: 3767470 - DNA, 25 bp, Homo sapien
tagtgctcacttgactggacatctg

SEQ ID NO: 3767471 - DNA, 25 bp, Homo sapien
agtgaacttcctcgggcctcatggc

SEQ ID NO: 3767472 - DNA, 25 bp, Homo sapien
gccagtttcaaagcacccaggacag

SEQ ID NO: 3767473 - DNA, 25 bp, Homo sapien
cagagcttggcaattattctacaca

SEQ ID NO: 3767474 - DNA, 25 bp, Homo sapien
tccttcaaagcaatagagtctggaa

SEQ ID NO: 3767475 - DNA, 25 bp, Homo sapien
gaccctctttaaataccagagcttg

SEQ ID NO: 3767476 - DNA, 25 bp, Homo sapien
gctccacgttgtagaaatcatttcg

SEQ ID NO: 3767477 - DNA, 25 bp, Homo sapien
aatatgttgaacagaagctgatggc

SEQ ID NO: 3767478 - DNA, 25 bp, Homo sapien
ggagttgtttcatttcgtgacggtc

SEQ ID NO: 3767479 - DNA, 25 bp, Homo sapien
gtctcgaagaagttttgagacatcc

SEQ ID NO: 3767480 - DNA, 25 bp, Homo sapien
tgggagaggttcgtgtgggatcggg

SEQ ID NO: 3767481 - DNA, 25 bp, Homo sapien
tggccagtcccaatcacgaggtctg

SEQ ID NO: 3767482 - DNA, 25 bp, Homo sapien
tcttcccaaagtggccatgaactgg

SEQ ID NO: 3767483 - DNA, 25 bp, Homo sapien
tatctgaactaccaggtgtgacccc

SEQ ID NO: 3767484 - DNA, 25 bp, Homo sapien
tgcaacctgaattgtccatccggag

SEQ ID NO: 3767485 - DNA, 25 bp, Homo sapien
caactttttggaggattgagtgcca

SEQ ID NO: 3767486 - DNA, 25 bp, Homo sapien
gcttccaacatgtgctgggcttcaa

SEQ ID NO: 3767487 - DNA, 25 bp, Homo sapien
ccttccttgcaattgggtggcccac

SEQ ID NO: 3767488 - DNA, 25 bp, Homo sapien
ggcaattcccttggtagtagccaca

SEQ ID NO: 3767489 - DNA, 25 bp, Homo sapien
aatttatctcttactctgacagtgg

SEQ ID NO: 3767490 - DNA, 25 bp, Homo sapien
cacaaaatcacagcattcggacaca

SEQ ID NO: 3767491 - DNA, 25 bp, Homo sapien
gaaactgctcagaactattgcaaag

SEQ ID NO: 3767492 - DNA, 25 bp, Homo sapien
cagtcaatgtatacaactgttggaa

SEQ ID NO: 3767493 - DNA, 25 bp, Homo sapien
caacatggccctagaacatctgcat

SEQ ID NO: 3767494 - DNA, 25 bp, Homo sapien
tctgcatggccctagaacatctgca

SEQ ID NO: 3767495 - DNA, 25 bp, Homo sapien
tgtgacatcaacatggccctagaac

SEQ ID NO: 3767496 - DNA, 25 bp, Homo sapien
gcatggccctagaacatctgcatgg

SEQ ID NO: 3767497 - DNA, 25 bp, Homo sapien
catggccctagaacatctgcatggc

SEQ ID NO: 3767498 - DNA, 25 bp, Homo sapien
gcatggccctagaacatctgcatgg

SEQ ID NO: 3767499 - DNA, 25 bp, Homo sapien
tggccctagaacatctgcatggccc

SEQ ID NO: 3767500 - DNA, 25 bp, Homo sapien
cattttgctccactaataagagcca

SEQ ID NO: 3767501 - DNA, 25 bp, Homo sapien
caagccttatagatttactaaacca

SEQ ID NO: 3767502 - DNA, 25 bp, Homo sapien
ctgccccttgcaagcattgcatgcg

SEQ ID NO: 3767503 - DNA, 25 bp, Homo sapien
cattgcatgcgcttatgaataaatc

SEQ ID NO: 3767504 - DNA, 25 bp, Homo sapien
agaacagactaatacccccctcatg

SEQ ID NO: 3767505 - DNA, 25 bp, Homo sapien
tacccccctcatgcaaagatgagaa

SEQ ID NO: 3767506 - DNA, 25 bp, Homo sapien
taatacccccctcatgcaaagatga

SEQ ID NO: 3767507 - DNA, 25 bp, Homo sapien
actaatacccccctcatgcaaagat

SEQ ID NO: 3767508 - DNA, 25 bp, Homo sapien
cacagcaaagatcgaccaggtatgg

SEQ ID NO: 3767509 - DNA, 25 bp, Homo sapien
tcatattctgcggtgcctttcaagt

SEQ ID NO: 3767510 - DNA, 25 bp, Homo sapien
gaaacatcatacaccctggatcgct

SEQ ID NO: 3767511 - DNA, 25 bp, Homo sapien
ccaggtatggttgcagaatttacaa

SEQ ID NO: 3767512 - DNA, 25 bp, Homo sapien
tctgtgtgcccttctcttgatgccc

SEQ ID NO: 3767513 - DNA, 25 bp, Homo sapien
tccaagggcctttcaagattcaagt

SEQ ID NO: 3767514 - DNA, 25 bp, Homo sapien
gagtattcagattcaagaccccaga

SEQ ID NO: 3767515 - DNA, 25 bp, Homo sapien
tgaatgtgatggtaaaaccgtcggc

SEQ ID NO: 3767516 - DNA, 25 bp, Homo sapien
aaatgtgtggcacctgcgtgcagag

SEQ ID NO: 3767517 - DNA, 25 bp, Homo sapien
cgatttgcgtacacagagctggagc

SEQ ID NO: 3767518 - DNA, 25 bp, Homo sapien
ttcacgacggatcagaaatcatagg

SEQ ID NO: 3767519 - DNA, 25 bp, Homo sapien
gggaaggtctctaaatctctaacta

SEQ ID NO: 3767520 - DNA, 25 bp, Homo sapien
gaaaatgcactgatctccctccagc

SEQ ID NO: 3767521 - DNA, 25 bp, Homo sapien
tcaaatgtcgacttgctaaagcaga

SEQ ID NO: 3767522 - DNA, 25 bp, Homo sapien
gaagcctgcttaagacactctgtta

SEQ ID NO: 3767523 - DNA, 25 bp, Homo sapien
gaactgtgagacctttgcactaaga

SEQ ID NO: 3767524 - DNA, 25 bp, Homo sapien
gatggcggctcgtaaatcgaagcct

SEQ ID NO: 3767525 - DNA, 25 bp, Homo sapien
gaaggatggcggctcgtaaatcgaa

SEQ ID NO: 3767526 - DNA, 25 bp, Homo sapien
tcatgaaggatggcggctcgtaaat

SEQ ID NO: 3767527 - DNA, 25 bp, Homo sapien
gctcgtaaatcgaagcctttgaaac

SEQ ID NO: 3767528 - DNA, 25 bp, Homo sapien
cagctgcccgcacgtggtaatgatc

SEQ ID NO: 3767529 - DNA, 25 bp, Homo sapien
gtaaccgcagtagcgcagaagcagc

SEQ ID NO: 3767530 - DNA, 25 bp, Homo sapien
tgactacgtcacaccagaagtcggc

SEQ ID NO: 3767531 - DNA, 25 bp, Homo sapien
aatgatcgtggccacccagtacgtg

SEQ ID NO: 3767532 - DNA, 25 bp, Homo sapien
atattctccccagttaaagccagtt

SEQ ID NO: 3767533 - DNA, 25 bp, Homo sapien
aatattctccccagttaaagccagt

SEQ ID NO: 3767534 - DNA, 25 bp, Homo sapien
agttaaagccagtttcctccaagct

SEQ ID NO: 3767535 - DNA, 25 bp, Homo sapien
ccagttaaagccagtttcctccaag

SEQ ID NO: 3767536 - DNA, 25 bp, Homo sapien
tccattagctgagccgagacacttt

SEQ ID NO: 3767537 - DNA, 25 bp, Homo sapien
tagctgagccgagacacttttccaa

SEQ ID NO: 3767538 - DNA, 25 bp, Homo sapien
ggtctccatttccattagctgagcc

SEQ ID NO: 3767539 - DNA, 25 bp, Homo sapien
ccgagacacttttccaagggtgaag

SEQ ID NO: 3767540 - DNA, 25 bp, Homo sapien
gcctgatgagcaagtgtctcttctc

SEQ ID NO: 3767541 - DNA, 25 bp, Homo sapien
gacctcaggaagtgatatctgaaca

SEQ ID NO: 3767542 - DNA, 25 bp, Homo sapien
attatttacatgacagtcaggcaag

SEQ ID NO: 3767543 - DNA, 25 bp, Homo sapien
cacaccccaccagaaggatgataat

SEQ ID NO: 3767544 - DNA, 25 bp, Homo sapien
accacaccccaccagaaggatgata

SEQ ID NO: 3767545 - DNA, 25 bp, Homo sapien
tctgtaagccagacatgcatggata

SEQ ID NO: 3767546 - DNA, 25 bp, Homo sapien
tgtgttgtccataccgccatgagac

SEQ ID NO: 3767547 - DNA, 25 bp, Homo sapien
tggagattcctacaactggagtgca

SEQ ID NO: 3767548 - DNA, 25 bp, Homo sapien
aagatatcagccagcgggaaaccct

SEQ ID NO: 3767549 - DNA, 25 bp, Homo sapien
cagctgcatttggccgaacttcttt

SEQ ID NO: 3767550 - DNA, 25 bp, Homo sapien
gctgcatttggccgaacttcttttc

SEQ ID NO: 3767551 - DNA, 25 bp, Homo sapien
agctgcatttggccgaacttctttt

SEQ ID NO: 3767552 - DNA, 25 bp, Homo sapien
cacaggcttggcagggattagctcc

SEQ ID NO: 3767553 - DNA, 25 bp, Homo sapien
gccacagagcaaacatctcaaaaag

SEQ ID NO: 3767554 - DNA, 25 bp, Homo sapien
cacagagcaaacatctcaaaaagca

SEQ ID NO: 3767555 - DNA, 25 bp, Homo sapien
ctgccacagagcaaacatctcaaaa

SEQ ID NO: 3767556 - DNA, 25 bp, Homo sapien
acagagcaaacatctcaaaaagcat

SEQ ID NO: 3767557 - DNA, 25 bp, Homo sapien
gtgcttttcgttctatgcccttgac

SEQ ID NO: 3767558 - DNA, 25 bp, Homo sapien
tttctgtggctaactccacagtgcg

SEQ ID NO: 3767559 - DNA, 25 bp, Homo sapien
catcatccaagctaaattttggcag

SEQ ID NO: 3767560 - DNA, 25 bp, Homo sapien
cagtgcgccattccacgggacattt

SEQ ID NO: 3767561 - DNA, 25 bp, Homo sapien
ggcataccttaatatctgtttataa

SEQ ID NO: 3767562 - DNA, 25 bp, Homo sapien
aaggcataccttaatatctgtttat

SEQ ID NO: 3767563 - DNA, 25 bp, Homo sapien
ccttaatatctgtttataagacatc

SEQ ID NO: 3767564 - DNA, 25 bp, Homo sapien
agggaaggcataccttaatatctgt

SEQ ID NO: 3767565 - DNA, 25 bp, Homo sapien
tatgacttcttactttagggcagag

SEQ ID NO: 3767566 - DNA, 25 bp, Homo sapien
gagaaatgtccaaccctagtatact

SEQ ID NO: 3767567 - DNA, 25 bp, Homo sapien
gctgctgaggcaacatagatataag

SEQ ID NO: 3767568 - DNA, 25 bp, Homo sapien
tgtaggtcattcaaatcccacagtg

SEQ ID NO: 3767569 - DNA, 25 bp, Homo sapien
ctacccgcgcaggatccagcacaca

SEQ ID NO: 3767570 - DNA, 25 bp, Homo sapien
gggatctacccgcgcaggatccagc

SEQ ID NO: 3767571 - DNA, 25 bp, Homo sapien
atctacccgcgcaggatccagcaca

SEQ ID NO: 3767572 - DNA, 25 bp, Homo sapien
tcggggatctacccgcgcaggatcc

SEQ ID NO: 3767573 - DNA, 25 bp, Homo sapien
gaagttcgtcctgccctcggcgtgg

SEQ ID NO: 3767574 - DNA, 25 bp, Homo sapien
agggcaccggcctcgctcgcttgct

SEQ ID NO: 3767575 - DNA, 25 bp, Homo sapien
ctggtgaagttcgtcctgccctcgg

SEQ ID NO: 3767576 - DNA, 25 bp, Homo sapien
gtgaagttcgtcctgccctcggcgt

SEQ ID NO: 3767577 - DNA, 25 bp, Homo sapien
tctgcagaaagttcccatcgcgggc

SEQ ID NO: 3767578 - DNA, 25 bp, Homo sapien
gcggttcgtgagctgggtttccaat

SEQ ID NO: 3767579 - DNA, 25 bp, Homo sapien
acccctccgcaaggacaactgggca

SEQ ID NO: 3767580 - DNA, 25 bp, Homo sapien
cgtttccctggctgcggttcgtgag

SEQ ID NO: 3767581 - DNA, 25 bp, Homo sapien
acaaacttgcgctttatccgccggg

SEQ ID NO: 3767582 - DNA, 25 bp, Homo sapien
tgtgcacaaacttgcgctttatccg

SEQ ID NO: 3767583 - DNA, 25 bp, Homo sapien
gaccgtgtgcacaaacttgcgcttt

SEQ ID NO: 3767584 - DNA, 25 bp, Homo sapien
tcagtcgaccgtgtgcacaaacttg

SEQ ID NO: 3767585 - DNA, 25 bp, Homo sapien
tttcttgaagctgcgaacatttcca

SEQ ID NO: 3767586 - DNA, 25 bp, Homo sapien
tcttgaagctgcgaacatttccagg

SEQ ID NO: 3767587 - DNA, 25 bp, Homo sapien
ttgaagctgcgaacatttccaggcc

SEQ ID NO: 3767588 - DNA, 25 bp, Homo sapien
gcctttcttgaagctgcgaacattt

SEQ ID NO: 3767589 - DNA, 25 bp, Homo sapien
ctagtggcgggcctcatagggcggg

SEQ ID NO: 3767590 - DNA, 25 bp, Homo sapien
catagggcgggaaaagaatcgtcgc

SEQ ID NO: 3767591 - DNA, 25 bp, Homo sapien
ctagctagtggcgggcctcataggg

SEQ ID NO: 3767592 - DNA, 25 bp, Homo sapien
gcgggcctcatagggcgggaaaaga

SEQ ID NO: 3767593 - DNA, 25 bp, Homo sapien
tggccctcgacggtccgttggagag

SEQ ID NO: 3767594 - DNA, 25 bp, Homo sapien
ctcgacggtccgttggagagccccg

SEQ ID NO: 3767595 - DNA, 25 bp, Homo sapien
gacgtctgcggagccctcgggcact

SEQ ID NO: 3767596 - DNA, 25 bp, Homo sapien
ggcagggctggacgtctgcggagcc

SEQ ID NO: 3767597 - DNA, 25 bp, Homo sapien
aggtccccgtgggttcgcagctcca

SEQ ID NO: 3767598 - DNA, 25 bp, Homo sapien
catccctaaggagaggtgtccgctc

SEQ ID NO: 3767599 - DNA, 25 bp, Homo sapien
ttcctcgccctgcatccctaaggag

SEQ ID NO: 3767600 - DNA, 25 bp, Homo sapien
aggtgtccgctctgaagggctaggg

SEQ ID NO: 3767601 - DNA, 25 bp, Homo sapien
tgctggactgactgcggcgtccaga

SEQ ID NO: 3767602 - DNA, 25 bp, Homo sapien
ggctccagacactctccacggtttg

SEQ ID NO: 3767603 - DNA, 25 bp, Homo sapien
cgaggcggctccaggtagaacctgc

SEQ ID NO: 3767604 - DNA, 25 bp, Homo sapien
tccagaaatctggagtgtgggctcc

SEQ ID NO: 3767605 - DNA, 25 bp, Homo sapien
ctggttactccgaaggagttgaatt

SEQ ID NO: 3767606 - DNA, 25 bp, Homo sapien
taaagctggctctgtaatggacttg

SEQ ID NO: 3767607 - DNA, 25 bp, Homo sapien
atgtaaacgtccatgtaaagctggc

SEQ ID NO: 3767608 - DNA, 25 bp, Homo sapien
tagactgtggcctctatgatcagga

SEQ ID NO: 3767609 - DNA, 25 bp, Homo sapien
ggctctgtaatggacttgaaatgaa

SEQ ID NO: 3767610 - DNA, 25 bp, Homo sapien
aagacaatgctatcatcggggtcat

SEQ ID NO: 3767611 - DNA, 25 bp, Homo sapien
ggggcatgttgtaagacaatgctat

SEQ ID NO: 3767612 - DNA, 25 bp, Homo sapien
taagacaatgctatcatcggggtca

SEQ ID NO: 3767613 - DNA, 25 bp, Homo sapien
ctggggcatgttgtaagacaatgct

SEQ ID NO: 3767614 - DNA, 25 bp, Homo sapien
tgtgcaagtctacgtaagaggatct

SEQ ID NO: 3767615 - DNA, 25 bp, Homo sapien
tggaccacacggatccactcaaaca

SEQ ID NO: 3767616 - DNA, 25 bp, Homo sapien
tacgtaagaggatctgttgacgcca

SEQ ID NO: 3767617 - DNA, 25 bp, Homo sapien
actcaaacacgagcctcccaagtgg

SEQ ID NO: 3767618 - DNA, 25 bp, Homo sapien
cttcctcaattgtctggccattcga

SEQ ID NO: 3767619 - DNA, 25 bp, Homo sapien
tcctcaattgtctggccattcgaat

SEQ ID NO: 3767620 - DNA, 25 bp, Homo sapien
ttcctcaattgtctggccattcgaa

SEQ ID NO: 3767621 - DNA, 25 bp, Homo sapien
gatgtggcccctacgatttatagtg

SEQ ID NO: 3767622 - DNA, 25 bp, Homo sapien
cccctacgatttatagtgaaactca

SEQ ID NO: 3767623 - DNA, 25 bp, Homo sapien
ggaagatgtggcccctacgatttat

SEQ ID NO: 3767624 - DNA, 25 bp, Homo sapien
tggcccctacgatttatagtgaaac

SEQ ID NO: 3767625 - DNA, 25 bp, Homo sapien
ctgaaggcccatgctcattaatgag

SEQ ID NO: 3767626 - DNA, 25 bp, Homo sapien
gatttctaagcgctgttccagttca

SEQ ID NO: 3767627 - DNA, 25 bp, Homo sapien
gccgtcagccaacattttacaaatg

SEQ ID NO: 3767628 - DNA, 25 bp, Homo sapien
agggccacgctcctcgatttctaag

SEQ ID NO: 3767629 - DNA, 25 bp, Homo sapien
gagccattgcacctgaacagtcctt

SEQ ID NO: 3767630 - DNA, 25 bp, Homo sapien
gctatacattttgaaccagcctcga

SEQ ID NO: 3767631 - DNA, 25 bp, Homo sapien
tctggagcactccactggaatgacg

SEQ ID NO: 3767632 - DNA, 25 bp, Homo sapien
tgtatgcctggtgatacacctcgac

SEQ ID NO: 3767633 - DNA, 25 bp, Homo sapien
tgattcttgttgttagtagagtttt

SEQ ID NO: 3767634 - DNA, 25 bp, Homo sapien
caaagcggataaagtcgccgtcttc

SEQ ID NO: 3767635 - DNA, 25 bp, Homo sapien
tcgccaatacccctaagcttgtgtc

SEQ ID NO: 3767636 - DNA, 25 bp, Homo sapien
agcttgtgtccacaatgattcttgt

SEQ ID NO: 3767637 - DNA, 25 bp, Homo sapien
gtacttgtcaggatcacttcccaaa

SEQ ID NO: 3767638 - DNA, 25 bp, Homo sapien
cagattgcttatcctgcacatggga

SEQ ID NO: 3767639 - DNA, 25 bp, Homo sapien
tgctaaggaattaataggagcagcc

SEQ ID NO: 3767640 - DNA, 25 bp, Homo sapien
cagtggctcagagtggaaaccctct

SEQ ID NO: 3767641 - DNA, 25 bp, Homo sapien
taagatcatccgaggtgaggcgctg

SEQ ID NO: 3767642 - DNA, 25 bp, Homo sapien
tcccaagagcaaggcacagctcgtt

SEQ ID NO: 3767643 - DNA, 25 bp, Homo sapien
tagatgttatcgtggagactcgccc

SEQ ID NO: 3767644 - DNA, 25 bp, Homo sapien
gactcgccctgtttccaatttgcaa

SEQ ID NO: 3767645 - DNA, 25 bp, Homo sapien
tgatttccaactccggcctccagaa

SEQ ID NO: 3767646 - DNA, 25 bp, Homo sapien
gcacgggcagcccttcaaacacctc

SEQ ID NO: 3767647 - DNA, 25 bp, Homo sapien
gcagtcttgcccaggttttggttaa

SEQ ID NO: 3767648 - DNA, 25 bp, Homo sapien
ggatagtagcacacattcgcagtct

SEQ ID NO: 3767649 - DNA, 25 bp, Homo sapien
tgaagggtcctggaccatccggaca

SEQ ID NO: 3767650 - DNA, 25 bp, Homo sapien
cacagataatcaatcgcatggatcc

SEQ ID NO: 3767651 - DNA, 25 bp, Homo sapien
tcaaggttgtttcgccaaatccaga

SEQ ID NO: 3767652 - DNA, 25 bp, Homo sapien
gttggttttggaaggtgcttttgca

SEQ ID NO: 3767653 - DNA, 25 bp, Homo sapien
cagagtcagatcttccccggggttg

SEQ ID NO: 3767654 - DNA, 25 bp, Homo sapien
ttggaaggtgcttttgcatatctgt

SEQ ID NO: 3767655 - DNA, 25 bp, Homo sapien
caccatggtattttgtctaaacagg

SEQ ID NO: 3767656 - DNA, 25 bp, Homo sapien
ccatggtattttgtctaaacaggga

SEQ ID NO: 3767657 - DNA, 25 bp, Homo sapien
catggtattttgtctaaacagggat

SEQ ID NO: 3767658 - DNA, 25 bp, Homo sapien
taacaccatggtattttgtctaaac

SEQ ID NO: 3767659 - DNA, 25 bp, Homo sapien
aggcgtcatcgtggttatttacaag

SEQ ID NO: 3767660 - DNA, 25 bp, Homo sapien
ttggtgtgcctacggaaggcgtcat

SEQ ID NO: 3767661 - DNA, 25 bp, Homo sapien
cctacggaaggcgtcatcgtggtta

SEQ ID NO: 3767662 - DNA, 25 bp, Homo sapien
tgtgcctacggaaggcgtcatcgtg

SEQ ID NO: 3767663 - DNA, 25 bp, Homo sapien
atcttccctgtatctctgcaatttt

SEQ ID NO: 3767664 - DNA, 25 bp, Homo sapien
acggaacgcatcatgaatttgcaag

SEQ ID NO: 3767665 - DNA, 25 bp, Homo sapien
gcaagtcatccttgcacggtagtca

SEQ ID NO: 3767666 - DNA, 25 bp, Homo sapien
ccttgcacggtagtcatgctaatct

SEQ ID NO: 3767667 - DNA, 25 bp, Homo sapien
ctctctggtgggacatcgtttaggg

SEQ ID NO: 3767668 - DNA, 25 bp, Homo sapien
cctgactggatagccaaagaactcc

SEQ ID NO: 3767669 - DNA, 25 bp, Homo sapien
tgctcaggctaaactctctggtggg

SEQ ID NO: 3767670 - DNA, 25 bp, Homo sapien
agtctcttccaatcgcctgactgga

SEQ ID NO: 3767671 - DNA, 25 bp, Homo sapien
aaatatggagttcctgtttgctttc

SEQ ID NO: 3767672 - DNA, 25 bp, Homo sapien
ggtaccttgacctgtaaatatggag

SEQ ID NO: 3767673 - DNA, 25 bp, Homo sapien
tggctgtggagccttccggtacctt

SEQ ID NO: 3767674 - DNA, 25 bp, Homo sapien
tgagaatccgcagccaccttgccag

SEQ ID NO: 3767675 - DNA, 25 bp, Homo sapien
ccagagcagccagcacggtgccctg

SEQ ID NO: 3767676 - DNA, 25 bp, Homo sapien
gagcagccagcacggtgccctgcac

SEQ ID NO: 3767677 - DNA, 25 bp, Homo sapien
ttaatgccccagagcagccagcacg

SEQ ID NO: 3767678 - DNA, 25 bp, Homo sapien
taatgccccagagcagccagcacgg

SEQ ID NO: 3767679 - DNA, 25 bp, Homo sapien
aatgtggaaactgctagtccgtacg

SEQ ID NO: 3767680 - DNA, 25 bp, Homo sapien
tggctgtggagccagtgtcccgcct

SEQ ID NO: 3767681 - DNA, 25 bp, Homo sapien
tgtctgctggataggcccatgaatc

SEQ ID NO: 3767682 - DNA, 25 bp, Homo sapien
ctgtgggcggctacctgtgtctgct

SEQ ID NO: 3767683 - DNA, 25 bp, Homo sapien
agattccacgtactgaaaggctagt

SEQ ID NO: 3767684 - DNA, 25 bp, Homo sapien
ttcaaagttatagtggtgatacgtc

SEQ ID NO: 3767685 - DNA, 25 bp, Homo sapien
gcactggaatgaggtcaaagttcac

SEQ ID NO: 3767686 - DNA, 25 bp, Homo sapien
catattcataagattccacgtactg

SEQ ID NO: 3767687 - DNA, 25 bp, Homo sapien
atgataaccagtttaaatccccagg

SEQ ID NO: 3767688 - DNA, 25 bp, Homo sapien
tgtgatcatcatacagtttcataga

SEQ ID NO: 3767689 - DNA, 25 bp, Homo sapien
gacggagagcttacaaggcatctgc

SEQ ID NO: 3767690 - DNA, 25 bp, Homo sapien
tatccttcccttagtgacggagagc

SEQ ID NO: 3767691 - DNA, 25 bp, Homo sapien
catcacggggtcctgtgtgacaggg

SEQ ID NO: 3767692 - DNA, 25 bp, Homo sapien
aggtagaaagaaggctccatcacgg

SEQ ID NO: 3767693 - DNA, 25 bp, Homo sapien
aggagcaggtagaaagaaggctcca

SEQ ID NO: 3767694 - DNA, 25 bp, Homo sapien
aggctcttctgcagcgcccttagcc

SEQ ID NO: 3767695 - DNA, 25 bp, Homo sapien
gaagtacacgcaccttctgcgatct

SEQ ID NO: 3767696 - DNA, 25 bp, Homo sapien
cgttcctgctggtccgggagctgat

SEQ ID NO: 3767697 - DNA, 25 bp, Homo sapien
tcaggtggattcactaatttgggct

SEQ ID NO: 3767698 - DNA, 25 bp, Homo sapien
tttgggcttacgtctgaagtacacg

SEQ ID NO: 3767699 - DNA, 25 bp, Homo sapien
tcagcccttctttctgttggctttt

SEQ ID NO: 3767700 - DNA, 25 bp, Homo sapien
gagggggactatgacaataacccag

SEQ ID NO: 3767701 - DNA, 25 bp, Homo sapien
catgagataatccatcagcccttct

SEQ ID NO: 3767702 - DNA, 25 bp, Homo sapien
tgtgttgagggggactatgacaata

SEQ ID NO: 3767703 - DNA, 25 bp, Homo sapien
ctaggaaccacggggagagtgactc

SEQ ID NO: 3767704 - DNA, 25 bp, Homo sapien
ggaaccacggggagagtgactcgtg

SEQ ID NO: 3767705 - DNA, 25 bp, Homo sapien
taggaaccacggggagagtgactcg

SEQ ID NO: 3767706 - DNA, 25 bp, Homo sapien
aggaaccacggggagagtgactcgt

SEQ ID NO: 3767707 - DNA, 25 bp, Homo sapien
ccatgaaatgaggattccggttgtt

SEQ ID NO: 3767708 - DNA, 25 bp, Homo sapien
gaaaatgcgtctcaggtctgcgggc

SEQ ID NO: 3767709 - DNA, 25 bp, Homo sapien
tcatcgaactctgctgttccccgga

SEQ ID NO: 3767710 - DNA, 25 bp, Homo sapien
tatttgtggtctattgctctccatg

SEQ ID NO: 3767711 - DNA, 25 bp, Homo sapien
gcacagaagagacgccgctcctgtg

SEQ ID NO: 3767712 - DNA, 25 bp, Homo sapien
cagaagagacgccgctcctgtgcgt

SEQ ID NO: 3767713 - DNA, 25 bp, Homo sapien
cacagaagagacgccgctcctgtgc

SEQ ID NO: 3767714 - DNA, 25 bp, Homo sapien
acagaagagacgccgctcctgtgcg

SEQ ID NO: 3767715 - DNA, 25 bp, Homo sapien
tcagattcgcagagaatggagcctg

SEQ ID NO: 3767716 - DNA, 25 bp, Homo sapien
ctcagattcgcagagaatggagcct

SEQ ID NO: 3767717 - DNA, 25 bp, Homo sapien
tgctgtgacttgccagagtccccag

SEQ ID NO: 3767718 - DNA, 25 bp, Homo sapien
cagggatgacgatgagcctgggatc

SEQ ID NO: 3767719 - DNA, 25 bp, Homo sapien
ctgtgaaggagactgtgagtcctgc

SEQ ID NO: 3767720 - DNA, 25 bp, Homo sapien
ccatgacaagcgctgtgaaggagac

SEQ ID NO: 3767721 - DNA, 25 bp, Homo sapien
acagatcggagagacgccttcccga

SEQ ID NO: 3767722 - DNA, 25 bp, Homo sapien
aggtgagtaatgactggtggacccg

SEQ ID NO: 3767723 - DNA, 25 bp, Homo sapien
tgagtaatgactggtggacccgcat

SEQ ID NO: 3767724 - DNA, 25 bp, Homo sapien
ctgtagggggtggaatgcgagtagg

SEQ ID NO: 3767725 - DNA, 25 bp, Homo sapien
gagctgtagggggtggaatgcgagt

SEQ ID NO: 3767726 - DNA, 25 bp, Homo sapien
gcattgagcaattcacactgttgtg

SEQ ID NO: 3767727 - DNA, 25 bp, Homo sapien
cacgtggttttatgtggatcccaag

SEQ ID NO: 3767728 - DNA, 25 bp, Homo sapien
gagattaaccacacacgtttcagtg

SEQ ID NO: 3767729 - DNA, 25 bp, Homo sapien
tgctgtgaactgtgaacacgggtac

SEQ ID NO: 3767730 - DNA, 25 bp, Homo sapien
gctggctgccaaacgtccatgttct

SEQ ID NO: 3767731 - DNA, 25 bp, Homo sapien
ttctcgctggctgccaaacgtccat

SEQ ID NO: 3767732 - DNA, 25 bp, Homo sapien
tcgctggctgccaaacgtccatgtt

SEQ ID NO: 3767733 - DNA, 25 bp, Homo sapien
ctcgctggctgccaaacgtccatgt

SEQ ID NO: 3767734 - DNA, 25 bp, Homo sapien
gaagctggacttcggccttgtgtga

SEQ ID NO: 3767735 - DNA, 25 bp, Homo sapien
tgtggaccttcagaatagaagctgg

SEQ ID NO: 3767736 - DNA, 25 bp, Homo sapien
taacttcgtggctgaaagagtcaag

SEQ ID NO: 3767737 - DNA, 25 bp, Homo sapien
gacttccagtgggaaattgaaccaa

SEQ ID NO: 3767738 - DNA, 25 bp, Homo sapien
gtttgtgtacattctgggaagctta

SEQ ID NO: 3767739 - DNA, 25 bp, Homo sapien
gatcatgtcctacagttccaagagt

SEQ ID NO: 3767740 - DNA, 25 bp, Homo sapien
taaaatgtctcttgaatgtgaactg

SEQ ID NO: 3767741 - DNA, 25 bp, Homo sapien
gaactgtctcgtaccccactaatta

SEQ ID NO: 3767742 - DNA, 25 bp, Homo sapien
caaggtgccagcagacatggtgtct

SEQ ID NO: 3767743 - DNA, 25 bp, Homo sapien
cttcctggcttgcaggtggccatct

SEQ ID NO: 3767744 - DNA, 25 bp, Homo sapien
ggtgagggccgtcttcctggcttgc

SEQ ID NO: 3767745 - DNA, 25 bp, Homo sapien
tcctggcttgcaggtggccatcttc

SEQ ID NO: 3767746 - DNA, 25 bp, Homo sapien
tcatcgtatccccaggtggtggaga

SEQ ID NO: 3767747 - DNA, 25 bp, Homo sapien
aacaccatctctcccatgtcttttt

SEQ ID NO: 3767748 - DNA, 25 bp, Homo sapien
gtggtggagaggaaaaacaccatct

SEQ ID NO: 3767749 - DNA, 25 bp, Homo sapien
caggtggtggagaggaaaaacacca

SEQ ID NO: 3767750 - DNA, 25 bp, Homo sapien
ctgtggcaccgagggaatcttgtga

SEQ ID NO: 3767751 - DNA, 25 bp, Homo sapien
caaggtcccagttagtcagtgatca

SEQ ID NO: 3767752 - DNA, 25 bp, Homo sapien
ttaaagtagcaacacaggcagtagg

SEQ ID NO: 3767753 - DNA, 25 bp, Homo sapien
tctggaggttcagtgtagccctgca

SEQ ID NO: 3767754 - DNA, 25 bp, Homo sapien
taacttgttcccgaagccgctgcgt

SEQ ID NO: 3767755 - DNA, 25 bp, Homo sapien
cagagagagacgagcccagatagtc

SEQ ID NO: 3767756 - DNA, 25 bp, Homo sapien
gctgcgtccgacaggaacacgtgga

SEQ ID NO: 3767757 - DNA, 25 bp, Homo sapien
taaatagcacagcagacaggccctg

SEQ ID NO: 3767758 - DNA, 25 bp, Homo sapien
gacacgcttcctgctataggtgggc

SEQ ID NO: 3767759 - DNA, 25 bp, Homo sapien
ttgaactctggcctgcatcgaagca

SEQ ID NO: 3767760 - DNA, 25 bp, Homo sapien
gtgtcaagccccgtggaagaagcct

SEQ ID NO: 3767761 - DNA, 25 bp, Homo sapien
ggagagctccaagtaaaagatgcat

SEQ ID NO: 3767762 - DNA, 25 bp, Homo sapien
catggagtccagctaattgccagga

SEQ ID NO: 3767763 - DNA, 25 bp, Homo sapien
cagacgtcggatctatgctgcacca

SEQ ID NO: 3767764 - DNA, 25 bp, Homo sapien
gagctgaggcgtgtacaagccatga

SEQ ID NO: 3767765 - DNA, 25 bp, Homo sapien
aaagcagagtgcctaaacttgtcca

SEQ ID NO: 3767766 - DNA, 25 bp, Homo sapien
ggcggcattgttcctggcaaaccag

SEQ ID NO: 3767767 - DNA, 25 bp, Homo sapien
ttcactgttaggacggcctcaggcc

SEQ ID NO: 3767768 - DNA, 25 bp, Homo sapien
tactccccgtcaatcagtttggcgg

SEQ ID NO: 3767769 - DNA, 25 bp, Homo sapien
cactgggacttggtggcctttcact

SEQ ID NO: 3767770 - DNA, 25 bp, Homo sapien
ttggcaatgtagaaacccaggtggt

SEQ ID NO: 3767771 - DNA, 25 bp, Homo sapien
gaaaggccctcgctgttggcaatgt

SEQ ID NO: 3767772 - DNA, 25 bp, Homo sapien
tccgtggcagttgctggaaaggccc

SEQ ID NO: 3767773 - DNA, 25 bp, Homo sapien
attggcgttggcagacacggacacc

SEQ ID NO: 3767774 - DNA, 25 bp, Homo sapien
agaggctgctgatcctaattcggac

SEQ ID NO: 3767775 - DNA, 25 bp, Homo sapien
cagaggctgctgatcctaattcgga

SEQ ID NO: 3767776 - DNA, 25 bp, Homo sapien
gaggctgctgatcctaattcggaca

SEQ ID NO: 3767777 - DNA, 25 bp, Homo sapien
aggctgctgatcctaattcggacat

SEQ ID NO: 3767778 - DNA, 25 bp, Homo sapien
ccacggacatctcgctgaagacaga

SEQ ID NO: 3767779 - DNA, 25 bp, Homo sapien
gaaaacatgtgttgaaggaacccca

SEQ ID NO: 3767780 - DNA, 25 bp, Homo sapien
caaacagatggcgattgcacttgag

SEQ ID NO: 3767781 - DNA, 25 bp, Homo sapien
tccaaggacatatacagttaggccc

SEQ ID NO: 3767782 - DNA, 25 bp, Homo sapien
taaccactgacgatactcactgagc

SEQ ID NO: 3767783 - DNA, 25 bp, Homo sapien
ggtcacacggcacttgtcataaagc

SEQ ID NO: 3767784 - DNA, 25 bp, Homo sapien
tcactgagcgtctgtaaggtggccc

SEQ ID NO: 3767785 - DNA, 25 bp, Homo sapien
cagggagtcggatgcataagtccag

SEQ ID NO: 3767786 - DNA, 25 bp, Homo sapien
aagcacacggtgagtctgctcaggg

SEQ ID NO: 3767787 - DNA, 25 bp, Homo sapien
gctgcccatcaatgttgaagcacac

SEQ ID NO: 3767788 - DNA, 25 bp, Homo sapien
tcagggggaaatccacaacaaagtg

SEQ ID NO: 3767789 - DNA, 25 bp, Homo sapien
ccacaacaaagtggggatcaccatc

SEQ ID NO: 3767790 - DNA, 25 bp, Homo sapien
gaggactttcctccctatgatggga

SEQ ID NO: 3767791 - DNA, 25 bp, Homo sapien
tcccagggggacatcccttgctatt

SEQ ID NO: 3767792 - DNA, 25 bp, Homo sapien
cattcgcagcgtcagctgtacgcca

SEQ ID NO: 3767793 - DNA, 25 bp, Homo sapien
agccatgggctaccccaggctcatt

SEQ ID NO: 3767794 - DNA, 25 bp, Homo sapien
cccatggagatagaggacaactgtc

SEQ ID NO: 3767795 - DNA, 25 bp, Homo sapien
tctatatccacagctcatctccggg

SEQ ID NO: 3767796 - DNA, 25 bp, Homo sapien
gcaggctgtgcggactctatatcca

SEQ ID NO: 3767797 - DNA, 25 bp, Homo sapien
tgtccctggctttaggaacttgcac

SEQ ID NO: 3767798 - DNA, 25 bp, Homo sapien
ttatgtttatgatagcagaggctgg

SEQ ID NO: 3767799 - DNA, 25 bp, Homo sapien
gagggtcagaatgtgcctctgccac

SEQ ID NO: 3767800 - DNA, 25 bp, Homo sapien
aaaacaaagcctgcctgtcacacca

SEQ ID NO: 3767801 - DNA, 25 bp, Homo sapien
gcatgctccggatctctaaaacaaa

SEQ ID NO: 3767802 - DNA, 25 bp, Homo sapien
gagccagtacacctggcctggtttt

SEQ ID NO: 3767803 - DNA, 25 bp, Homo sapien
agtacacctggcctggttttacact

SEQ ID NO: 3767804 - DNA, 25 bp, Homo sapien
cagtacacctggcctggttttacac

SEQ ID NO: 3767805 - DNA, 25 bp, Homo sapien
gccagtacacctggcctggttttac

SEQ ID NO: 3767806 - DNA, 25 bp, Homo sapien
cacacaaccgcatcctttgctttac

SEQ ID NO: 3767807 - DNA, 25 bp, Homo sapien
atccacacacaaccgcatcctttgc

SEQ ID NO: 3767808 - DNA, 25 bp, Homo sapien
aatccacacacaaccgcatcctttg

SEQ ID NO: 3767809 - DNA, 25 bp, Homo sapien
ccacacacaaccgcatcctttgctt

SEQ ID NO: 3767810 - DNA, 25 bp, Homo sapien
tagagattttaattcttggctggta

SEQ ID NO: 3767811 - DNA, 25 bp, Homo sapien
ctgatgttttagagattttaattct

SEQ ID NO: 3767812 - DNA, 25 bp, Homo sapien
agattttaattcttggctggtatgg

SEQ ID NO: 3767813 - DNA, 25 bp, Homo sapien
tgttttagagattttaattcttggc

SEQ ID NO: 3767814 - DNA, 25 bp, Homo sapien
tataagtattatagcaagatggaat

SEQ ID NO: 3767815 - DNA, 25 bp, Homo sapien
ttatagcaagatggaataacacagc

SEQ ID NO: 3767816 - DNA, 25 bp, Homo sapien
gatggaataacacagcttcctgctg

SEQ ID NO: 3767817 - DNA, 25 bp, Homo sapien
gtgagtggtatctcaggcccgcgtc

SEQ ID NO: 3767818 - DNA, 25 bp, Homo sapien
cttactgttgctggcggtgacctcc

SEQ ID NO: 3767819 - DNA, 25 bp, Homo sapien
ggttcatcgtcactttgcagccagg

SEQ ID NO: 3767820 - DNA, 25 bp, Homo sapien
gatgatctccgagccgttgaagtag

SEQ ID NO: 3767821 - DNA, 25 bp, Homo sapien
gacgctcgatgtggttggtgtcccc

SEQ ID NO: 3767822 - DNA, 25 bp, Homo sapien
catcgaagttcctggtgtatcataa

SEQ ID NO: 3767823 - DNA, 25 bp, Homo sapien
gatgatgcacatcgaagttcctggt

SEQ ID NO: 3767824 - DNA, 25 bp, Homo sapien
gttcctggtgtatcataagttctca

SEQ ID NO: 3767825 - DNA, 25 bp, Homo sapien
tgaggatcatctgggatgatgcaca

SEQ ID NO: 3767826 - DNA, 25 bp, Homo sapien
tgtctttactgcacaccttaggtgt

SEQ ID NO: 3767827 - DNA, 25 bp, Homo sapien
gcgaatcccaaaccgaggacctgtc

SEQ ID NO: 3767828 - DNA, 25 bp, Homo sapien
cagtgcagctgacttgttacagcat

SEQ ID NO: 3767829 - DNA, 25 bp, Homo sapien
ttatccagtgtatcagattctcccc

SEQ ID NO: 3767830 - DNA, 25 bp, Homo sapien
tgcagggccccgttgatgtctgtgc

SEQ ID NO: 3767831 - DNA, 25 bp, Homo sapien
tacttgttgaggagcctgatggccc

SEQ ID NO: 3767832 - DNA, 25 bp, Homo sapien
atcttgagggtgtgcgtctccccga

SEQ ID NO: 3767833 - DNA, 25 bp, Homo sapien
agttctccagcgacagtttctccag

SEQ ID NO: 3767834 - DNA, 25 bp, Homo sapien
cacacatcattctgctagtaagcag

SEQ ID NO: 3767835 - DNA, 25 bp, Homo sapien
gctgtttattactccatggccccca

SEQ ID NO: 3767836 - DNA, 25 bp, Homo sapien
tgctagtaagcagggccattaaaat

SEQ ID NO: 3767837 - DNA, 25 bp, Homo sapien
agctgtttattactccatggccccc

SEQ ID NO: 3767838 - DNA, 25 bp, Homo sapien
ctccagtgggtgacatatggtgaat

SEQ ID NO: 3767839 - DNA, 25 bp, Homo sapien
gtggtccttccatactttgatccgg

SEQ ID NO: 3767840 - DNA, 25 bp, Homo sapien
catggagaattgtgaagagggcatc

SEQ ID NO: 3767841 - DNA, 25 bp, Homo sapien
ccaatgatactgaaacggtcctggg

SEQ ID NO: 3767842 - DNA, 25 bp, Homo sapien
gacgctgacgatattaacagcttgc

SEQ ID NO: 3767843 - DNA, 25 bp, Homo sapien
tgatgatgacgacgctgacgatatt

SEQ ID NO: 3767844 - DNA, 25 bp, Homo sapien
cccgtgagtttttgctaaagtaatg

SEQ ID NO: 3767845 - DNA, 25 bp, Homo sapien
gaaagcaatggagttgatggtatca

SEQ ID NO: 3767846 - DNA, 25 bp, Homo sapien
catggctctgcattactgccacgtg

SEQ ID NO: 3767847 - DNA, 25 bp, Homo sapien
gctctgcattactgccacgtggatt

SEQ ID NO: 3767848 - DNA, 25 bp, Homo sapien
tgccacgtggattttcaaccctcct

SEQ ID NO: 3767849 - DNA, 25 bp, Homo sapien
gcattactgccacgtggattttcaa

SEQ ID NO: 3767850 - DNA, 25 bp, Homo sapien
tgtaaggcctcagctgcaacttgtc

SEQ ID NO: 3767851 - DNA, 25 bp, Homo sapien
taaggcctcagctgcaacttgtcct

SEQ ID NO: 3767852 - DNA, 25 bp, Homo sapien
cttgtaaggcctcagctgcaacttg

SEQ ID NO: 3767853 - DNA, 25 bp, Homo sapien
gcaacttgtccttgcgtgcaccagg

SEQ ID NO: 3767854 - DNA, 25 bp, Homo sapien
gctctgttaacccttgacttgcctt

SEQ ID NO: 3767855 - DNA, 25 bp, Homo sapien
tgttaacccttgacttgccttccca

SEQ ID NO: 3767856 - DNA, 25 bp, Homo sapien
cccaccaatccttgcagactgcagc

SEQ ID NO: 3767857 - DNA, 25 bp, Homo sapien
aatgggctgagcagccaagagctct

SEQ ID NO: 3767858 - DNA, 25 bp, Homo sapien
aataccaataccacttcaagactgg

SEQ ID NO: 3767859 - DNA, 25 bp, Homo sapien
ggagaaatggcagaaactaattagc

SEQ ID NO: 3767860 - DNA, 25 bp, Homo sapien
aaaaaggtgtctctgtcaacaaggg

SEQ ID NO: 3767861 - DNA, 25 bp, Homo sapien
tagaacgatttttctactggccaaa

SEQ ID NO: 3767862 - DNA, 25 bp, Homo sapien
tgccttccctttccagttacacgtg

SEQ ID NO: 3767863 - DNA, 25 bp, Homo sapien
ccttccctttccagttacacgtgca

SEQ ID NO: 3767864 - DNA, 25 bp, Homo sapien
cttccctttccagttacacgtgcac

SEQ ID NO: 3767865 - DNA, 25 bp, Homo sapien
gccttccctttccagttacacgtgc

SEQ ID NO: 3767866 - DNA, 25 bp, Homo sapien
agagaatcaaaggaacagtgtctaa

SEQ ID NO: 3767867 - DNA, 25 bp, Homo sapien
gaatcaaaggaacagtgtctaaaac

SEQ ID NO: 3767868 - DNA, 25 bp, Homo sapien
atcaaaggaacagtgtctaaaacag

SEQ ID NO: 3767869 - DNA, 25 bp, Homo sapien
gagaatcaaaggaacagtgtctaaa

SEQ ID NO: 3767870 - DNA, 25 bp, Homo sapien
tgccaaatgccaagtgttcatatct

SEQ ID NO: 3767871 - DNA, 25 bp, Homo sapien
gccaaatgccaagtgttcatatctg

SEQ ID NO: 3767872 - DNA, 25 bp, Homo sapien
gaatgccaaatgccaagtgttcata

SEQ ID NO: 3767873 - DNA, 25 bp, Homo sapien
caaatgccaagtgttcatatctggg

SEQ ID NO: 3767874 - DNA, 25 bp, Homo sapien
agtagccagcatcaagcagctcata

SEQ ID NO: 3767875 - DNA, 25 bp, Homo sapien
tgctccgtaggaactctgaacactc

SEQ ID NO: 3767876 - DNA, 25 bp, Homo sapien
aaacactactgcactgaggattagc

SEQ ID NO: 3767877 - DNA, 25 bp, Homo sapien
ggagagtttgccaggccattgctaa

SEQ ID NO: 3767878 - DNA, 25 bp, Homo sapien
ggcaagcttgcatcctcctgctttc

SEQ ID NO: 3767879 - DNA, 25 bp, Homo sapien
tatccaaatagcccttgggaaccca

SEQ ID NO: 3767880 - DNA, 25 bp, Homo sapien
gaacccaattttggacagcgaggga

SEQ ID NO: 3767881 - DNA, 25 bp, Homo sapien
cttgggaacccaattttggacagcg

SEQ ID NO: 3767882 - DNA, 25 bp, Homo sapien
caattttggacagcgagggagaaac

SEQ ID NO: 3767883 - DNA, 25 bp, Homo sapien
ggtagaaaccctgcctgacccaaca

SEQ ID NO: 3767884 - DNA, 25 bp, Homo sapien
aactgggaggtagaaaccctgcctg

SEQ ID NO: 3767885 - DNA, 25 bp, Homo sapien
caagaagttttagctcaaactggga

SEQ ID NO: 3767886 - DNA, 25 bp, Homo sapien
gttttagctcaaactgggaggtaga

SEQ ID NO: 3767887 - DNA, 25 bp, Homo sapien
aaatgacagggcatgcgtcaggcat

SEQ ID NO: 3767888 - DNA, 25 bp, Homo sapien
gctgaaaagtctctaatgggtggta

SEQ ID NO: 3767889 - DNA, 25 bp, Homo sapien
taaatgttctgcagctacacgctcc

SEQ ID NO: 3767890 - DNA, 25 bp, Homo sapien
tacatgaagacagtcatcccgatgg

SEQ ID NO: 3767891 - DNA, 25 bp, Homo sapien
ttggttcccaccatagaagcactgc

SEQ ID NO: 3767892 - DNA, 25 bp, Homo sapien
agcactgctgtcaagcacgaatacc

SEQ ID NO: 3767893 - DNA, 25 bp, Homo sapien
tgctgtcaagcacgaataccacatt

SEQ ID NO: 3767894 - DNA, 25 bp, Homo sapien
ctgccggagtttggttcccaccata

SEQ ID NO: 3767895 - DNA, 25 bp, Homo sapien
gcaaagtagtgcacaaaatagccat

SEQ ID NO: 3767896 - DNA, 25 bp, Homo sapien
ttaggagcaaagtagtgcacaaaat

SEQ ID NO: 3767897 - DNA, 25 bp, Homo sapien
ggtctttaggagcaaagtagtgcac

SEQ ID NO: 3767898 - DNA, 25 bp, Homo sapien
taaaggaggaaggtctttaggagca

SEQ ID NO: 3767899 - DNA, 25 bp, Homo sapien
atctaatgataaagtctcccaaaat

SEQ ID NO: 3767900 - DNA, 25 bp, Homo sapien
ctggcttgttgtactacagtaggtt

SEQ ID NO: 3767901 - DNA, 25 bp, Homo sapien
tctctattgacgtcatatctaatga

SEQ ID NO: 3767902 - DNA, 25 bp, Homo sapien
gatgtccccaatgctctgttctcta

SEQ ID NO: 3767903 - DNA, 25 bp, Homo sapien
ccaggtcactaccagcatggttgaa

SEQ ID NO: 3767904 - DNA, 25 bp, Homo sapien
gatctgctcatctgaaggagttggg

SEQ ID NO: 3767905 - DNA, 25 bp, Homo sapien
gagagaacacgagtccacagatctg

SEQ ID NO: 3767906 - DNA, 25 bp, Homo sapien
cattagacaggacaaagaaacgggt

SEQ ID NO: 3767907 - DNA, 25 bp, Homo sapien
aatcacgcagaaggcaaacgcaaag

SEQ ID NO: 3767908 - DNA, 25 bp, Homo sapien
gctgctccgatttgagggaggccaa

SEQ ID NO: 3767909 - DNA, 25 bp, Homo sapien
cccacttctatggtgagctggagca

SEQ ID NO: 3767910 - DNA, 25 bp, Homo sapien
aatgagaacccatgtctctttcctc

SEQ ID NO: 3767911 - DNA, 25 bp, Homo sapien
tccttcttgcccacttctatggtga

SEQ ID NO: 3767912 - DNA, 25 bp, Homo sapien
ttttcctagacaattatcacatggg

SEQ ID NO: 3767913 - DNA, 25 bp, Homo sapien
aagattgagaagagccccatgctca

SEQ ID NO: 3767914 - DNA, 25 bp, Homo sapien
cagccaactgctatgtaaaatgcca

SEQ ID NO: 3767915 - DNA, 25 bp, Homo sapien
aatgccaaaggtgaaaagattgaga

SEQ ID NO: 3767916 - DNA, 25 bp, Homo sapien
agccacgggctggaagcgccaccct

SEQ ID NO: 3767917 - DNA, 25 bp, Homo sapien
ggtctgggttttggctgctgtcgga

SEQ ID NO: 3767918 - DNA, 25 bp, Homo sapien
gagggtctgggttttggctgctgtc

SEQ ID NO: 3767919 - DNA, 25 bp, Homo sapien
tcctgagggtctgggttttggctgc

SEQ ID NO: 3767920 - DNA, 25 bp, Homo sapien
ctgggttgatagggagagggatttc

SEQ ID NO: 3767921 - DNA, 25 bp, Homo sapien
ggatttcccaacacacgctgcctgc

SEQ ID NO: 3767922 - DNA, 25 bp, Homo sapien
gatttcccaacacacgctgcctgct

SEQ ID NO: 3767923 - DNA, 25 bp, Homo sapien
aggatttcccaacacacgctgcctg

SEQ ID NO: 3767924 - DNA, 25 bp, Homo sapien
aaggatttcccaacacacgctgcct

SEQ ID NO: 3767925 - DNA, 25 bp, Homo sapien
tgggatccaacgaggcaatttctta

SEQ ID NO: 3767926 - DNA, 25 bp, Homo sapien
ctgggatccaacgaggcaatttctt

SEQ ID NO: 3767927 - DNA, 25 bp, Homo sapien
gcagtgacaacatcttagacgtctg

SEQ ID NO: 3767928 - DNA, 25 bp, Homo sapien
catgtgagagttcacgtccagcttg

SEQ ID NO: 3767929 - DNA, 25 bp, Homo sapien
aggaaccttgcacagcgccagaaac

SEQ ID NO: 3767930 - DNA, 25 bp, Homo sapien
tagacgtctgtagattccaggaacc

SEQ ID NO: 3767931 - DNA, 25 bp, Homo sapien
ctgtagcatgtatctgtgttatcac

SEQ ID NO: 3767932 - DNA, 25 bp, Homo sapien
ccatgctgtagcatgtatctgtgtt

SEQ ID NO: 3767933 - DNA, 25 bp, Homo sapien
tgctgtagcatgtatctgtgttatc

SEQ ID NO: 3767934 - DNA, 25 bp, Homo sapien
tgtgtccatgctgtagcatgtatct

SEQ ID NO: 3767935 - DNA, 25 bp, Homo sapien
atgcatccatgttatgggatgtgtc

SEQ ID NO: 3767936 - DNA, 25 bp, Homo sapien
gttatgggatgtgtccatgttgtac

SEQ ID NO: 3767937 - DNA, 25 bp, Homo sapien
ccatgttatgggatgtgtccatgtt

SEQ ID NO: 3767938 - DNA, 25 bp, Homo sapien
catccatgttatgggatgtgtccat

SEQ ID NO: 3767939 - DNA, 25 bp, Homo sapien
gttgtagcgtgtgtccatgttatca

SEQ ID NO: 3767940 - DNA, 25 bp, Homo sapien
gtagcgtgtgtccatgttatcatat

SEQ ID NO: 3767941 - DNA, 25 bp, Homo sapien
gtctgggttgtcacatgtgtccatg

SEQ ID NO: 3767942 - DNA, 25 bp, Homo sapien
atgttgtctgggttgtcacatgtgt

SEQ ID NO: 3767943 - DNA, 25 bp, Homo sapien
ctgtgttttcgcatgtgtccatgtt

SEQ ID NO: 3767944 - DNA, 25 bp, Homo sapien
tattggcttggacctcattcacaca

SEQ ID NO: 3767945 - DNA, 25 bp, Homo sapien
tcagcggaatgtattggcttggacc

SEQ ID NO: 3767946 - DNA, 25 bp, Homo sapien
caatcatagttttggtgcaagccca

SEQ ID NO: 3767947 - DNA, 25 bp, Homo sapien
caattccagtttgatctttagcctg

SEQ ID NO: 3767948 - DNA, 25 bp, Homo sapien
gccattttgcaggaacaataaccgc

SEQ ID NO: 3767949 - DNA, 25 bp, Homo sapien
taaggctgccattttgcaggaacaa

SEQ ID NO: 3767950 - DNA, 25 bp, Homo sapien
ttgcaggaacaataaccgctgagct

SEQ ID NO: 3767951 - DNA, 25 bp, Homo sapien
tgctaaggctgccattttgcaggaa

SEQ ID NO: 3767952 - DNA, 25 bp, Homo sapien
aagggtgccatctcttgcagatttc

SEQ ID NO: 3767953 - DNA, 25 bp, Homo sapien
agatctgcacgaacccagcacgcag

SEQ ID NO: 3767954 - DNA, 25 bp, Homo sapien
tttctccgaagccaaggaccagctg

SEQ ID NO: 3767955 - DNA, 25 bp, Homo sapien
gggtgttttcaccacagatctgcac

SEQ ID NO: 3767956 - DNA, 25 bp, Homo sapien
cctctgcctgctgttgtgaagcggc

SEQ ID NO: 3767957 - DNA, 25 bp, Homo sapien
tctgcctgctgttgtgaagcggcag

SEQ ID NO: 3767958 - DNA, 25 bp, Homo sapien
gcctgctgttgtgaagcggcagcac

SEQ ID NO: 3767959 - DNA, 25 bp, Homo sapien
tgcctgctgttgtgaagcggcagca

SEQ ID NO: 3767960 - DNA, 25 bp, Homo sapien
gaagctctgaatatttcagtcccct

SEQ ID NO: 3767961 - DNA, 25 bp, Homo sapien
ccaggatattcacgtccacgctcag

SEQ ID NO: 3767962 - DNA, 25 bp, Homo sapien
aaaaggcggctttgtccttgctggg

SEQ ID NO: 3767963 - DNA, 25 bp, Homo sapien
tgctgtgctcgtacttgcccaggcg

SEQ ID NO: 3767964 - DNA, 25 bp, Homo sapien
cttttaccctatcaccactcttctt

SEQ ID NO: 3767965 - DNA, 25 bp, Homo sapien
ctgatacaccttgtctccaataagc

SEQ ID NO: 3767966 - DNA, 25 bp, Homo sapien
ccctgatacaccttgtctccaataa

SEQ ID NO: 3767967 - DNA, 25 bp, Homo sapien
ctcttttaccctatcaccactcttc

SEQ ID NO: 3767968 - DNA, 25 bp, Homo sapien
gctctgttcagcattctgcaggaaa

SEQ ID NO: 3767969 - DNA, 25 bp, Homo sapien
caggaaaccgtagtgaaggcataac

SEQ ID NO: 3767970 - DNA, 25 bp, Homo sapien
gaaagctgcagctggaatctgcatc

SEQ ID NO: 3767971 - DNA, 25 bp, Homo sapien
aatgtcctggtcttcagaagctctg

SEQ ID NO: 3767972 - DNA, 25 bp, Homo sapien
taatcttcagtttgggagcctttgg

SEQ ID NO: 3767973 - DNA, 25 bp, Homo sapien
agtatcatcggtgatgcatgaaagc

SEQ ID NO: 3767974 - DNA, 25 bp, Homo sapien
gcctttggcatgtgattccaatttc

SEQ ID NO: 3767975 - DNA, 25 bp, Homo sapien
tatcatcggtgatgcatgaaagcat

SEQ ID NO: 3767976 - DNA, 25 bp, Homo sapien
ctccatgcaaaggtgtcagggccat

SEQ ID NO: 3767977 - DNA, 25 bp, Homo sapien
tggttggagccaagcacatgaggaa

SEQ ID NO: 3767978 - DNA, 25 bp, Homo sapien
gatggacttgaacaccaagacaggg

SEQ ID NO: 3767979 - DNA, 25 bp, Homo sapien
ggagagaatgggcaagcactccatg

SEQ ID NO: 3767980 - DNA, 25 bp, Homo sapien
tgtagtcatattctgacacttcaaa

SEQ ID NO: 3767981 - DNA, 25 bp, Homo sapien
aactgaatgtattctctgaactgta

SEQ ID NO: 3767982 - DNA, 25 bp, Homo sapien
cacattgaagatagaggacattaaa

SEQ ID NO: 3767983 - DNA, 25 bp, Homo sapien
catccattaaattgtacacattgaa

SEQ ID NO: 3767984 - DNA, 25 bp, Homo sapien
gcaacagtctgacttgcctcgggac

SEQ ID NO: 3767985 - DNA, 25 bp, Homo sapien
caacagtctgacttgcctcgggacc

SEQ ID NO: 3767986 - DNA, 25 bp, Homo sapien
agtctgacttgcctcgggaccctga

SEQ ID NO: 3767987 - DNA, 25 bp, Homo sapien
acagtctgacttgcctcgggaccct

SEQ ID NO: 3767988 - DNA, 25 bp, Homo sapien
agcaaaactgaacttatcttgaatt

SEQ ID NO: 3767989 - DNA, 25 bp, Homo sapien
caggaaactctggaagcaaaactga

SEQ ID NO: 3767990 - DNA, 25 bp, Homo sapien
ggaaactctggaagcaaaactgaac

SEQ ID NO: 3767991 - DNA, 25 bp, Homo sapien
caaaactgaacttatcttgaatttt

SEQ ID NO: 3767992 - DNA, 25 bp, Homo sapien
gccagctaggattggaagtgcaaat

SEQ ID NO: 3767993 - DNA, 25 bp, Homo sapien
ctaggattggaagtgcaaatgacat

SEQ ID NO: 3767994 - DNA, 25 bp, Homo sapien
gtgccagctaggattggaagtgcaa

SEQ ID NO: 3767995 - DNA, 25 bp, Homo sapien
attgctggtgccagctaggattgga

SEQ ID NO: 3767996 - DNA, 25 bp, Homo sapien
gaatttatctaccacctggccccat

SEQ ID NO: 3767997 - DNA, 25 bp, Homo sapien
cagccaaacaccttcaactgactga

SEQ ID NO: 3767998 - DNA, 25 bp, Homo sapien
ccattcttctaagggcattctgaaa

SEQ ID NO: 3767999 - DNA, 25 bp, Homo sapien
gactgaagtcatgcgttcctagagg

SEQ ID NO: 3768000 - DNA, 25 bp, Homo sapien
ctgctccgaagagtggccccagctc

SEQ ID NO: 3768001 - DNA, 25 bp, Homo sapien
aagagtggccccagctctgcgcctc

SEQ ID NO: 3768002 - DNA, 25 bp, Homo sapien
tgctccgaagagtggccccagctct

SEQ ID NO: 3768003 - DNA, 25 bp, Homo sapien
agtggccccagctctgcgcctcttc

SEQ ID NO: 3768004 - DNA, 25 bp, Homo sapien
cacacacagggacagccccaggcac

SEQ ID NO: 3768005 - DNA, 25 bp, Homo sapien
gcgaccccacacacagggacagccc

SEQ ID NO: 3768006 - DNA, 25 bp, Homo sapien
cccacacacagggacagccccaggc

SEQ ID NO: 3768007 - DNA, 25 bp, Homo sapien
ctgcgaccccacacacagggacagc

SEQ ID NO: 3768008 - DNA, 25 bp, Homo sapien
cagccactgcgggacgctctcgggg

SEQ ID NO: 3768009 - DNA, 25 bp, Homo sapien
gacccggcgggacacgctttgcagc

SEQ ID NO: 3768010 - DNA, 25 bp, Homo sapien
gacacgctttgcagcgcccagggct

SEQ ID NO: 3768011 - DNA, 25 bp, Homo sapien
ggcgggacacgctttgcagcgccca

SEQ ID NO: 3768012 - DNA, 25 bp, Homo sapien
gttccagaggttgggcgcatcttta

SEQ ID NO: 3768013 - DNA, 25 bp, Homo sapien
gctatcctgagtcttcgctgtctca

SEQ ID NO: 3768014 - DNA, 25 bp, Homo sapien
tgagtcttcgctgtctcatctatga

SEQ ID NO: 3768015 - DNA, 25 bp, Homo sapien
gacactaatcttcaaggaccagcta

SEQ ID NO: 3768016 - DNA, 25 bp, Homo sapien
ggttaagtggattgtcttccctgcc

SEQ ID NO: 3768017 - DNA, 25 bp, Homo sapien
ttacacaggtaaattccatgtcaca

SEQ ID NO: 3768018 - DNA, 25 bp, Homo sapien
cctgttcctgtaatatgtggccaat

SEQ ID NO: 3768019 - DNA, 25 bp, Homo sapien
ctgataggtagttttccgatccttt

SEQ ID NO: 3768020 - DNA, 25 bp, Homo sapien
tgctgtcgtacagactaggaccgag

SEQ ID NO: 3768021 - DNA, 25 bp, Homo sapien
ggaccgagtctaacacgtcctgaca

SEQ ID NO: 3768022 - DNA, 25 bp, Homo sapien
cgaatgccagattgtgttgcctgag

SEQ ID NO: 3768023 - DNA, 25 bp, Homo sapien
ccactgtaagtaatagcgaatgcca

SEQ ID NO: 3768024 - DNA, 25 bp, Homo sapien
gaacggtggcttacacatgcaatcc

SEQ ID NO: 3768025 - DNA, 25 bp, Homo sapien
gaacttgcagatcttgttgtgatat

SEQ ID NO: 3768026 - DNA, 25 bp, Homo sapien
tatactctgagtatgaacttgcaga

SEQ ID NO: 3768027 - DNA, 25 bp, Homo sapien
aatagaagttctatatatttcagtg

SEQ ID NO: 3768028 - DNA, 25 bp, Homo sapien
aatcagaggcaagtatgattccatc

SEQ ID NO: 3768029 - DNA, 25 bp, Homo sapien
cacggctcaagtcacgaatcagagg

SEQ ID NO: 3768030 - DNA, 25 bp, Homo sapien
caccctgagccatggttctagcaca

SEQ ID NO: 3768031 - DNA, 25 bp, Homo sapien
aacttgggcctgtccgtgacacacg

SEQ ID NO: 3768032 - DNA, 25 bp, Homo sapien
cagctttctcaaacggccttaaagg

SEQ ID NO: 3768033 - DNA, 25 bp, Homo sapien
tacaaggattacttcgtgcctcagc

SEQ ID NO: 3768034 - DNA, 25 bp, Homo sapien
tggaaaaggattcattgacgggcat

SEQ ID NO: 3768035 - DNA, 25 bp, Homo sapien
cgttacctgctggtttgtgcacaac

SEQ ID NO: 3768036 - DNA, 25 bp, Homo sapien
actaggttactttatgctgtctgca

SEQ ID NO: 3768037 - DNA, 25 bp, Homo sapien
tgagctcctctaaacctaattgcaa

SEQ ID NO: 3768038 - DNA, 25 bp, Homo sapien
taagaagtgctcacctatgataccc

SEQ ID NO: 3768039 - DNA, 25 bp, Homo sapien
gctgaagaggtaaatagcactacct

SEQ ID NO: 3768040 - DNA, 25 bp, Homo sapien
cctgcagatattaagtttagctttt

SEQ ID NO: 3768041 - DNA, 25 bp, Homo sapien
ttaaaacttctacctgcagatatta

SEQ ID NO: 3768042 - DNA, 25 bp, Homo sapien
gtaaaaagatcagcggtcagcaggg

SEQ ID NO: 3768043 - DNA, 25 bp, Homo sapien
cagattcttagtagtccaggctcaa

SEQ ID NO: 3768044 - DNA, 25 bp, Homo sapien
ctaaaatgaagtgcgctatcgagcc

SEQ ID NO: 3768045 - DNA, 25 bp, Homo sapien
caactatatgaccttcgatggagac

SEQ ID NO: 3768046 - DNA, 25 bp, Homo sapien
tgagaatagaagcaatcagccctcc

SEQ ID NO: 3768047 - DNA, 25 bp, Homo sapien
gaatttgatctaaagactgcccaca

SEQ ID NO: 3768048 - DNA, 25 bp, Homo sapien
tctgctaacagcatacgttctccca

SEQ ID NO: 3768049 - DNA, 25 bp, Homo sapien
gttgctttccataatgtgctgtcag

SEQ ID NO: 3768050 - DNA, 25 bp, Homo sapien
tcctcatgtttgaagtgatcatcct

SEQ ID NO: 3768051 - DNA, 25 bp, Homo sapien
gaagtgatcatcctggtatggtctg

SEQ ID NO: 3768052 - DNA, 25 bp, Homo sapien
caactcaggcaaggcgtggtagctc

SEQ ID NO: 3768053 - DNA, 25 bp, Homo sapien
gacgtcagcttatacccatcctcat

SEQ ID NO: 3768054 - DNA, 25 bp, Homo sapien
gaagagtttggcagaagcgaaagct

SEQ ID NO: 3768055 - DNA, 25 bp, Homo sapien
tgaagcacgcctacatgctactgca

SEQ ID NO: 3768056 - DNA, 25 bp, Homo sapien
taaaactatagttcaacattgctgg

SEQ ID NO: 3768057 - DNA, 25 bp, Homo sapien
cctgtaaatgggtgatcatggcagc

SEQ ID NO: 3768058 - DNA, 25 bp, Homo sapien
tacatagtttgatacctcatgagac

SEQ ID NO: 3768059 - DNA, 25 bp, Homo sapien
tctcataatgccttggcgaacacca

SEQ ID NO: 3768060 - DNA, 25 bp, Homo sapien
cattctttaatgaagatataaactc

SEQ ID NO: 3768061 - DNA, 25 bp, Homo sapien
caaagtttagctgaacaactataca

SEQ ID NO: 3768062 - DNA, 25 bp, Homo sapien
tttgatgctttaagattttaatgta

SEQ ID NO: 3768063 - DNA, 25 bp, Homo sapien
gctttaagattttaatgtattgtta

SEQ ID NO: 3768064 - DNA, 25 bp, Homo sapien
taagattttaatgtattgttaacaa

SEQ ID NO: 3768065 - DNA, 25 bp, Homo sapien
taatgtattgttaacaaattttcaa

SEQ ID NO: 3768066 - DNA, 25 bp, Homo sapien
aattccttcaactctgcgtcctttt

SEQ ID NO: 3768067 - DNA, 25 bp, Homo sapien
cagaagtgacggtccagacgtgcta

SEQ ID NO: 3768068 - DNA, 25 bp, Homo sapien
gacctgcaagctgttcagtatctcc

SEQ ID NO: 3768069 - DNA, 25 bp, Homo sapien
gctcccttgtggttagctgtggcca

SEQ ID NO: 3768070 - DNA, 25 bp, Homo sapien
gcttcctggataaatagccagtttc

SEQ ID NO: 3768071 - DNA, 25 bp, Homo sapien
tacagtgcagaaggtgagaaattag

SEQ ID NO: 3768072 - DNA, 25 bp, Homo sapien
gctgctaagttctacctcagtacag

SEQ ID NO: 3768073 - DNA, 25 bp, Homo sapien
tcatgtggatttgctgctaagttct

SEQ ID NO: 3768074 - DNA, 25 bp, Homo sapien
gaagatgaaactgggtctacagtgc

SEQ ID NO: 3768075 - DNA, 25 bp, Homo sapien
ttctcattgatggattctagggtac

SEQ ID NO: 3768076 - DNA, 25 bp, Homo sapien
ctcattgatggattctagggtacct

SEQ ID NO: 3768077 - DNA, 25 bp, Homo sapien
cattgatggattctagggtaccttc

SEQ ID NO: 3768078 - DNA, 25 bp, Homo sapien
ttgatggattctagggtaccttcat

SEQ ID NO: 3768079 - DNA, 25 bp, Homo sapien
cagcaaaatgtactacactgaataa

SEQ ID NO: 3768080 - DNA, 25 bp, Homo sapien
ttctaacttgttacagcaaaatgta

SEQ ID NO: 3768081 - DNA, 25 bp, Homo sapien
cttctaacttgttacagcaaaatgt

SEQ ID NO: 3768082 - DNA, 25 bp, Homo sapien
caacctggtcaaagtagtgtttgta

SEQ ID NO: 3768083 - DNA, 25 bp, Homo sapien
aacaacctggtcaaagtagtgtttg

SEQ ID NO: 3768084 - DNA, 25 bp, Homo sapien
tcagaggtaaacaacctggtcaaag

SEQ ID NO: 3768085 - DNA, 25 bp, Homo sapien
cagaggtaaacaacctggtcaaagt

SEQ ID NO: 3768086 - DNA, 25 bp, Homo sapien
gataagtttccaaaaggcaaagaca

SEQ ID NO: 3768087 - DNA, 25 bp, Homo sapien
gatacggataagtttccaaaaggca

SEQ ID NO: 3768088 - DNA, 25 bp, Homo sapien
tcagatacggataagtttccaaaag

SEQ ID NO: 3768089 - DNA, 25 bp, Homo sapien
cagatacggataagtttccaaaagg

SEQ ID NO: 3768090 - DNA, 25 bp, Homo sapien
agtaagtcaagatcgtgccgccaca

SEQ ID NO: 3768091 - DNA, 25 bp, Homo sapien
caaacagagatgagttacgctggca

SEQ ID NO: 3768092 - DNA, 25 bp, Homo sapien
tgtgttaagacatgggttccaaccc

SEQ ID NO: 3768093 - DNA, 25 bp, Homo sapien
tcagagagccagtaaactacgatgc

SEQ ID NO: 3768094 - DNA, 25 bp, Homo sapien
ttgtctccagaatcaatcatcttca

SEQ ID NO: 3768095 - DNA, 25 bp, Homo sapien
tgtctctaaatgagtctggtcaagt

SEQ ID NO: 3768096 - DNA, 25 bp, Homo sapien
aaatgagtctggtcaagtttcagct

SEQ ID NO: 3768097 - DNA, 25 bp, Homo sapien
tgtctccagaatcaatcatcttcac

SEQ ID NO: 3768098 - DNA, 25 bp, Homo sapien
tagcctttttcttatgatatttctc

SEQ ID NO: 3768099 - DNA, 25 bp, Homo sapien
cagtttcttggttataattttcaca

SEQ ID NO: 3768100 - DNA, 25 bp, Homo sapien
ttttcttatgatatttctctcccag

SEQ ID NO: 3768101 - DNA, 25 bp, Homo sapien
cttatgatatttctctcccagtttc

SEQ ID NO: 3768102 - DNA, 25 bp, Homo sapien
gtagccagtagtctgttcgggcagt

SEQ ID NO: 3768103 - DNA, 25 bp, Homo sapien
cagtagtctgttcgggcagttcttt

SEQ ID NO: 3768104 - DNA, 25 bp, Homo sapien
tagccagtagtctgttcgggcagtt

SEQ ID NO: 3768105 - DNA, 25 bp, Homo sapien
gccagtagtctgttcgggcagttct

SEQ ID NO: 3768106 - DNA, 25 bp, Homo sapien
caatgacataatttgcgagctctga

SEQ ID NO: 3768107 - DNA, 25 bp, Homo sapien
tcctcattggatttcaaaataccat

SEQ ID NO: 3768108 - DNA, 25 bp, Homo sapien
tgtgaagtcctctacttcacagaag

SEQ ID NO: 3768109 - DNA, 25 bp, Homo sapien
tgcgagctctgataaatacaaataa

SEQ ID NO: 3768110 - DNA, 25 bp, Homo sapien
cacagtgtggttaagtatacagcct

SEQ ID NO: 3768111 - DNA, 25 bp, Homo sapien
actgtcaggagctggaaaagaggcc

SEQ ID NO: 3768112 - DNA, 25 bp, Homo sapien
catggatcaatgtagcacagtgtgg

SEQ ID NO: 3768113 - DNA, 25 bp, Homo sapien
aagaggccacgttttcatgcagtaa

SEQ ID NO: 3768114 - DNA, 25 bp, Homo sapien
aatgaaagctccgtgactaacaagg

SEQ ID NO: 3768115 - DNA, 25 bp, Homo sapien
tctaggtaccgttcacaggatctct

SEQ ID NO: 3768116 - DNA, 25 bp, Homo sapien
catgtaagacctctatggtgttggc

SEQ ID NO: 3768117 - DNA, 25 bp, Homo sapien
cctgcatggtgtgaggactaggaac

SEQ ID NO: 3768118 - DNA, 25 bp, Homo sapien
tgatgctgaacttcctatcgtcttc

SEQ ID NO: 3768119 - DNA, 25 bp, Homo sapien
catgatttcatccagtgcagatttc

SEQ ID NO: 3768120 - DNA, 25 bp, Homo sapien
gactgagttgagctctgggaagatt

SEQ ID NO: 3768121 - DNA, 25 bp, Homo sapien
gagctctgggaagattcttttcgtt

SEQ ID NO: 3768122 - DNA, 25 bp, Homo sapien
cactgtgtgagcatttaacccgtgc

SEQ ID NO: 3768123 - DNA, 25 bp, Homo sapien
gattagtgaaaaccatggagtccct

SEQ ID NO: 3768124 - DNA, 25 bp, Homo sapien
cagacgaatgctttacgatgtgcaa

SEQ ID NO: 3768125 - DNA, 25 bp, Homo sapien
tgttaccaagaaccatacacagacg

SEQ ID NO: 3768126 - DNA, 25 bp, Homo sapien
ctgaggcaggaagatcaccttgagc

SEQ ID NO: 3768127 - DNA, 25 bp, Homo sapien
ccaggagttcgaggccagcctgggc

SEQ ID NO: 3768128 - DNA, 25 bp, Homo sapien
gcctgggcaacatagcaagacccca

SEQ ID NO: 3768129 - DNA, 25 bp, Homo sapien
tgggcaacatagcaagaccccatct

SEQ ID NO: 3768130 - DNA, 25 bp, Homo sapien
tgctcctttactcaaattaaacgtg

SEQ ID NO: 3768131 - DNA, 25 bp, Homo sapien
gagctacatgctcctttactcaaat

SEQ ID NO: 3768132 - DNA, 25 bp, Homo sapien
gttgctccggatgagctacatgctc

SEQ ID NO: 3768133 - DNA, 25 bp, Homo sapien
cttggaagatgttgctccggatgag

SEQ ID NO: 3768134 - DNA, 25 bp, Homo sapien
tgtttaggtctccacgcctcttgcc

SEQ ID NO: 3768135 - DNA, 25 bp, Homo sapien
taccctgtgtctagatggcatgcag

SEQ ID NO: 3768136 - DNA, 25 bp, Homo sapien
caagattctagaagagcatccagag

SEQ ID NO: 3768137 - DNA, 25 bp, Homo sapien
gcagaaccaccttacctctgggatt

SEQ ID NO: 3768138 - DNA, 25 bp, Homo sapien
ctctgcttaattccgtaaaagtagg

SEQ ID NO: 3768139 - DNA, 25 bp, Homo sapien
cattttctctgcttaattccgtaaa

SEQ ID NO: 3768140 - DNA, 25 bp, Homo sapien
tctctgcttaattccgtaaaagtag

SEQ ID NO: 3768141 - DNA, 25 bp, Homo sapien
ttctctgcttaattccgtaaaagta

SEQ ID NO: 3768142 - DNA, 25 bp, Homo sapien
tatgacttgctacctgtgttcccag

SEQ ID NO: 3768143 - DNA, 25 bp, Homo sapien
aaattacatgctttcggccaggcgc

SEQ ID NO: 3768144 - DNA, 25 bp, Homo sapien
cccaggcagctctaatacgcaagtg

SEQ ID NO: 3768145 - DNA, 25 bp, Homo sapien
tcaataggcctaaattatgacttgc

SEQ ID NO: 3768146 - DNA, 25 bp, Homo sapien
ccttcccttccaggcctcttctcac

SEQ ID NO: 3768147 - DNA, 25 bp, Homo sapien
ctgttccttcccttccaggcctctt

SEQ ID NO: 3768148 - DNA, 25 bp, Homo sapien
tgttccttcccttccaggcctcttc

SEQ ID NO: 3768149 - DNA, 25 bp, Homo sapien
ttccttcccttccaggcctcttctc

SEQ ID NO: 3768150 - DNA, 25 bp, Homo sapien
ttggtgtctcgtccactttgcacaa

SEQ ID NO: 3768151 - DNA, 25 bp, Homo sapien
tccagttccagttgccggcggatag

SEQ ID NO: 3768152 - DNA, 25 bp, Homo sapien
tgtactgaatataccagccttttgg

SEQ ID NO: 3768153 - DNA, 25 bp, Homo sapien
tctgggtccctgtctatgtactgaa

SEQ ID NO: 3768154 - DNA, 25 bp, Homo sapien
aaatggaatcaactaacacgatgaa

SEQ ID NO: 3768155 - DNA, 25 bp, Homo sapien
ttaatgtccaacagttatatgatgt

SEQ ID NO: 3768156 - DNA, 25 bp, Homo sapien
tcatcctatgaagattagaagtggg

SEQ ID NO: 3768157 - DNA, 25 bp, Homo sapien
gagagacaactgtattaccttgcat

SEQ ID NO: 3768158 - DNA, 25 bp, Homo sapien
aaatcagtcagagtttcccactgag

SEQ ID NO: 3768159 - DNA, 25 bp, Homo sapien
gctgatgtattcgttgtagacaatg

SEQ ID NO: 3768160 - DNA, 25 bp, Homo sapien
gacaatgttgttgtggaccctttta

SEQ ID NO: 3768161 - DNA, 25 bp, Homo sapien
gatgtgctctcggtggctgatgtat

SEQ ID NO: 3768162 - DNA, 25 bp, Homo sapien
gtctcctgagaagttctagaaagtc

SEQ ID NO: 3768163 - DNA, 25 bp, Homo sapien
cctgagaagttctagaaagtcattt

SEQ ID NO: 3768164 - DNA, 25 bp, Homo sapien
aagcgtctcctgagaagttctagaa

SEQ ID NO: 3768165 - DNA, 25 bp, Homo sapien
caaagcgtctcctgagaagttctag

SEQ ID NO: 3768166 - DNA, 25 bp, Homo sapien
tctgttagtgccactgatggtggca

SEQ ID NO: 3768167 - DNA, 25 bp, Homo sapien
aagtctgttagtgccactgatggtg

SEQ ID NO: 3768168 - DNA, 25 bp, Homo sapien
catgaagtctgttagtgccactgat

SEQ ID NO: 3768169 - DNA, 25 bp, Homo sapien
tgaagtctgttagtgccactgatgg

SEQ ID NO: 3768170 - DNA, 25 bp, Homo sapien
gagcatagagagaatacagttaaca

SEQ ID NO: 3768171 - DNA, 25 bp, Homo sapien
tgaataaagcctataagataaagag

SEQ ID NO: 3768172 - DNA, 25 bp, Homo sapien
ctgagcatagagagaatacagttaa

SEQ ID NO: 3768173 - DNA, 25 bp, Homo sapien
gataaagagttctttgagttactta

SEQ ID NO: 3768174 - DNA, 25 bp, Homo sapien
ttctgaagccagcaatagttgtctc

SEQ ID NO: 3768175 - DNA, 25 bp, Homo sapien
gacatacaatgacacttaaagccat

SEQ ID NO: 3768176 - DNA, 25 bp, Homo sapien
gtctctgatgagattcggacataca

SEQ ID NO: 3768177 - DNA, 25 bp, Homo sapien
ctgaagccagcaatagttgtctctg

SEQ ID NO: 3768178 - DNA, 25 bp, Homo sapien
ccagtccaatctccggagaaaaata

SEQ ID NO: 3768179 - DNA, 25 bp, Homo sapien
tccagtccaatctccggagaaaaat

SEQ ID NO: 3768180 - DNA, 25 bp, Homo sapien
atccagtccaatctccggagaaaaa

SEQ ID NO: 3768181 - DNA, 25 bp, Homo sapien
aatccagtccaatctccggagaaaa

SEQ ID NO: 3768182 - DNA, 25 bp, Homo sapien
gggtcgcagaacacaggctgcccgc

SEQ ID NO: 3768183 - DNA, 25 bp, Homo sapien
tctttggtggtggggatcggactgg

SEQ ID NO: 3768184 - DNA, 25 bp, Homo sapien
gaggaatgaggggtcgcagaacaca

SEQ ID NO: 3768185 - DNA, 25 bp, Homo sapien
aatgaggggtcgcagaacacaggct

SEQ ID NO: 3768186 - DNA, 25 bp, Homo sapien
ctgatcctggattgccaggggccct

SEQ ID NO: 3768187 - DNA, 25 bp, Homo sapien
atcctggattgccaggggccctcct

SEQ ID NO: 3768188 - DNA, 25 bp, Homo sapien
ggacctgatcctggattgccagggg

SEQ ID NO: 3768189 - DNA, 25 bp, Homo sapien
agccccgcgtccaggacctgatcct

SEQ ID NO: 3768190 - DNA, 25 bp, Homo sapien
gcacatctggcaataccagcgtagc

SEQ ID NO: 3768191 - DNA, 25 bp, Homo sapien
caataccagcgtagcttctgcagcc

SEQ ID NO: 3768192 - DNA, 25 bp, Homo sapien
ttggacttgatcctgttggcgatag

SEQ ID NO: 3768193 - DNA, 25 bp, Homo sapien
tagccttgggagtaagaaaatccga

SEQ ID NO: 3768194 - DNA, 25 bp, Homo sapien
agtactcagccagccggaaacggaa

SEQ ID NO: 3768195 - DNA, 25 bp, Homo sapien
gaccacggcagcgatcactttctgg

SEQ ID NO: 3768196 - DNA, 25 bp, Homo sapien
actgggttgcaacggtcgcgagact

SEQ ID NO: 3768197 - DNA, 25 bp, Homo sapien
cctcgccgtagcgcgaagaaacgag

SEQ ID NO: 3768198 - DNA, 25 bp, Homo sapien
cgcgctggggagcttcggcgcatgc

SEQ ID NO: 3768199 - DNA, 25 bp, Homo sapien
ggcgcgctggggagcttcggcgcat

SEQ ID NO: 3768200 - DNA, 25 bp, Homo sapien
cgctggggagcttcggcgcatgcgc

SEQ ID NO: 3768201 - DNA, 25 bp, Homo sapien
gctggggagcttcggcgcatgcgcg

SEQ ID NO: 3768202 - DNA, 25 bp, Homo sapien
caatggtatggcagcttgcgggaag

SEQ ID NO: 3768203 - DNA, 25 bp, Homo sapien
gctgtggctaccatgttctctcgcg

SEQ ID NO: 3768204 - DNA, 25 bp, Homo sapien
aagatcggcaggaccgcaagggatg

SEQ ID NO: 3768205 - DNA, 25 bp, Homo sapien
gcctggaccttgcagccgcaatggt

SEQ ID NO: 3768206 - DNA, 25 bp, Homo sapien
gtgctgcaacagcaaaggcgaacat

SEQ ID NO: 3768207 - DNA, 25 bp, Homo sapien
tcccgtgttgcagacgctttgctgg

SEQ ID NO: 3768208 - DNA, 25 bp, Homo sapien
ttgctgggtgctgcaacagcaaagg

SEQ ID NO: 3768209 - DNA, 25 bp, Homo sapien
cgctttgctgggtgctgcaacagca

SEQ ID NO: 3768210 - DNA, 25 bp, Homo sapien
tggttttggtgcagaagggaccgta

SEQ ID NO: 3768211 - DNA, 25 bp, Homo sapien
gttttggtgcagaagggaccgtaca

SEQ ID NO: 3768212 - DNA, 25 bp, Homo sapien
tttggtgcagaagggaccgtacaga

SEQ ID NO: 3768213 - DNA, 25 bp, Homo sapien
gtgcagaagggaccgtacagatctg

SEQ ID NO: 3768214 - DNA, 25 bp, Homo sapien
ttttcaagtgtgattatgaaaagct

SEQ ID NO: 3768215 - DNA, 25 bp, Homo sapien
tgaaaagctgttgtagtagaacagt

SEQ ID NO: 3768216 - DNA, 25 bp, Homo sapien
aaagctgttgtagtagaacagtcat

SEQ ID NO: 3768217 - DNA, 25 bp, Homo sapien
attatgaaaagctgttgtagtagaa

SEQ ID NO: 3768218 - DNA, 25 bp, Homo sapien
tggagtaaatcccacgtagtgatgg

SEQ ID NO: 3768219 - DNA, 25 bp, Homo sapien
gatttttgcctctaacctatgctca

SEQ ID NO: 3768220 - DNA, 25 bp, Homo sapien
gtccaccaaggtcattcaattagag

SEQ ID NO: 3768221 - DNA, 25 bp, Homo sapien
gagagatattagtcactgtccacca

SEQ ID NO: 3768222 - DNA, 25 bp, Homo sapien
tactgagggccaactatatactgct

SEQ ID NO: 3768223 - DNA, 25 bp, Homo sapien
ttacatcggctgttggttgaatcca

SEQ ID NO: 3768224 - DNA, 25 bp, Homo sapien
ttaaggcacttatattctaatagga

SEQ ID NO: 3768225 - DNA, 25 bp, Homo sapien
gttattaagttgaatacccactatg

SEQ ID NO: 3768226 - DNA, 25 bp, Homo sapien
cgttgttgagggtctcggtggcgca

SEQ ID NO: 3768227 - DNA, 25 bp, Homo sapien
gcggagcgagtccaaaatggcggct

SEQ ID NO: 3768228 - DNA, 25 bp, Homo sapien
agcgggatgtgcgagagttactcca

SEQ ID NO: 3768229 - DNA, 25 bp, Homo sapien
gccgcggaagccctagaggatgaat

SEQ ID NO: 3768230 - DNA, 25 bp, Homo sapien
tctgaattgtgtctggatctctctc

SEQ ID NO: 3768231 - DNA, 25 bp, Homo sapien
tgcgggtagatccacccccagcgtg

SEQ ID NO: 3768232 - DNA, 25 bp, Homo sapien
gctcctccgctctgaattgtgtctg

SEQ ID NO: 3768233 - DNA, 25 bp, Homo sapien
cattgtctcctgtttgctgcgggta

SEQ ID NO: 3768234 - DNA, 25 bp, Homo sapien
ggcagttgacaagattctccaggta

SEQ ID NO: 3768235 - DNA, 25 bp, Homo sapien
gggctacagtacttatgagttttaa

SEQ ID NO: 3768236 - DNA, 25 bp, Homo sapien
tgtcagtggctatcgaagtaggata

SEQ ID NO: 3768237 - DNA, 25 bp, Homo sapien
cggttaccagtgagatgtcagtggc

SEQ ID NO: 3768238 - DNA, 25 bp, Homo sapien
ccaagtttcgttcccgcttccacag

SEQ ID NO: 3768239 - DNA, 25 bp, Homo sapien
agacacacgctgtatttcttaggcc

SEQ ID NO: 3768240 - DNA, 25 bp, Homo sapien
tttcgttcccgcttccacagggctg

SEQ ID NO: 3768241 - DNA, 25 bp, Homo sapien
cgctgtatttcttaggccccaagtt

SEQ ID NO: 3768242 - DNA, 25 bp, Homo sapien
catgcgtgctgtttcttacctagag

SEQ ID NO: 3768243 - DNA, 25 bp, Homo sapien
gatgcacttatcacttgctctaggg

SEQ ID NO: 3768244 - DNA, 25 bp, Homo sapien
tgccatgctaatctgcgaccacgct

SEQ ID NO: 3768245 - DNA, 25 bp, Homo sapien
gcccgtggcccaccaatagtattac

SEQ ID NO: 3768246 - DNA, 25 bp, Homo sapien
gttatctgctttcataattctgtgc

SEQ ID NO: 3768247 - DNA, 25 bp, Homo sapien
tatctgctttcataattctgtgcat

SEQ ID NO: 3768248 - DNA, 25 bp, Homo sapien
ttatctgctttcataattctgtgca

SEQ ID NO: 3768249 - DNA, 25 bp, Homo sapien
aggagccaggcattggcacgggcca

SEQ ID NO: 3768250 - DNA, 25 bp, Homo sapien
ggagccaggcattggcacgggccat

SEQ ID NO: 3768251 - DNA, 25 bp, Homo sapien
attcttctcctcagtggtgacttga

SEQ ID NO: 3768252 - DNA, 25 bp, Homo sapien
cagcaactagcaaaggctctgaaat

SEQ ID NO: 3768253 - DNA, 25 bp, Homo sapien
cctcagtggtgacttgagctttctc

SEQ ID NO: 3768254 - DNA, 25 bp, Homo sapien
gcagcaactagcaaaggctctgaaa

SEQ ID NO: 3768255 - DNA, 25 bp, Homo sapien
cagctgggtggccaattgcagttct

SEQ ID NO: 3768256 - DNA, 25 bp, Homo sapien
attctggatgggcatgactggtcct

SEQ ID NO: 3768257 - DNA, 25 bp, Homo sapien
tggccaattgcagttcttcagcaga

SEQ ID NO: 3768258 - DNA, 25 bp, Homo sapien
gggtggccaattgcagttcttcagc

SEQ ID NO: 3768259 - DNA, 25 bp, Homo sapien
agaggatgagtttggagcggtaccc

SEQ ID NO: 3768260 - DNA, 25 bp, Homo sapien
gagtttggagcggtaccccttcagc

SEQ ID NO: 3768261 - DNA, 25 bp, Homo sapien
gatgagtttggagcggtaccccttc

SEQ ID NO: 3768262 - DNA, 25 bp, Homo sapien
aggatgagtttggagcggtacccct

SEQ ID NO: 3768263 - DNA, 25 bp, Homo sapien
ccaaatatgggaacttgctcactga

SEQ ID NO: 3768264 - DNA, 25 bp, Homo sapien
tccaccacttttacctggatcttct

SEQ ID NO: 3768265 - DNA, 25 bp, Homo sapien
tgtgtcctctcagcgaggctctgtc

SEQ ID NO: 3768266 - DNA, 25 bp, Homo sapien
ttctatcgtttttgcggaatgttcc

SEQ ID NO: 3768267 - DNA, 25 bp, Homo sapien
tgccatgagtcggatcctacacaag

SEQ ID NO: 3768268 - DNA, 25 bp, Homo sapien
gatcctacacaaggaactggtgttg

SEQ ID NO: 3768269 - DNA, 25 bp, Homo sapien
actggtgttgaatatagagagatga

SEQ ID NO: 3768270 - DNA, 25 bp, Homo sapien
gagatgagtgagatattcctctctc

SEQ ID NO: 3768271 - DNA, 25 bp, Homo sapien
ccaggtcttgctttctctttaagtc

SEQ ID NO: 3768272 - DNA, 25 bp, Homo sapien
tcttgctttctctttaagtcctaca

SEQ ID NO: 3768273 - DNA, 25 bp, Homo sapien
tgctttctctttaagtcctacactc

SEQ ID NO: 3768274 - DNA, 25 bp, Homo sapien
gctttctctttaagtcctacactca

SEQ ID NO: 3768275 - DNA, 25 bp, Homo sapien
gtccctcgacctggtccctcgacag

SEQ ID NO: 3768276 - DNA, 25 bp, Homo sapien
caggtccctcgacctggtccctcga

SEQ ID NO: 3768277 - DNA, 25 bp, Homo sapien
cctcgacctggtccctcgacagctg

SEQ ID NO: 3768278 - DNA, 25 bp, Homo sapien
cgacctggtccctcgacagctgcta

SEQ ID NO: 3768279 - DNA, 25 bp, Homo sapien
gggagaatagtagggacccatattc

SEQ ID NO: 3768280 - DNA, 25 bp, Homo sapien
cagtccattccagattgggggagaa

SEQ ID NO: 3768281 - DNA, 25 bp, Homo sapien
tgggcactggccgggtttcacctcc

SEQ ID NO: 3768282 - DNA, 25 bp, Homo sapien
tccaacatcgccagttcctgaagtc

SEQ ID NO: 3768283 - DNA, 25 bp, Homo sapien
agaaccttagacgccctccatttgc

SEQ ID NO: 3768284 - DNA, 25 bp, Homo sapien
ataaagaaccttagacgccctccat

SEQ ID NO: 3768285 - DNA, 25 bp, Homo sapien
gataaagaaccttagacgccctcca

SEQ ID NO: 3768286 - DNA, 25 bp, Homo sapien
gaaccttagacgccctccatttgcc

SEQ ID NO: 3768287 - DNA, 25 bp, Homo sapien
agtgagggaacaggatacggttcat

SEQ ID NO: 3768288 - DNA, 25 bp, Homo sapien
aagtgagggaacaggatacggttca

SEQ ID NO: 3768289 - DNA, 25 bp, Homo sapien
tgtgttgtattccacttttccgccg

SEQ ID NO: 3768290 - DNA, 25 bp, Homo sapien
ttgtgttgtattccacttttccgcc

SEQ ID NO: 3768291 - DNA, 25 bp, Homo sapien
tgtattccacttttccgccggggca

SEQ ID NO: 3768292 - DNA, 25 bp, Homo sapien
cattgtgttgtattccacttttccg

SEQ ID NO: 3768293 - DNA, 25 bp, Homo sapien
tgctccttctagctgctccgtttta

SEQ ID NO: 3768294 - DNA, 25 bp, Homo sapien
gagaaaagcaactatgaccatactt

SEQ ID NO: 3768295 - DNA, 25 bp, Homo sapien
gtcagcgttgatttatgcagagaaa

SEQ ID NO: 3768296 - DNA, 25 bp, Homo sapien
tgtctcttgcatcttgtcagcgttg

SEQ ID NO: 3768297 - DNA, 25 bp, Homo sapien
gtagacgcgtactttgcaacttggc

SEQ ID NO: 3768298 - DNA, 25 bp, Homo sapien
acagtgtcctttgagtagacgcgta

SEQ ID NO: 3768299 - DNA, 25 bp, Homo sapien
ttgagtagacgcgtactttgcaact

SEQ ID NO: 3768300 - DNA, 25 bp, Homo sapien
tcctttgagtagacgcgtactttgc

SEQ ID NO: 3768301 - DNA, 25 bp, Homo sapien
tgctcagcagcgtatggaattcgcc

SEQ ID NO: 3768302 - DNA, 25 bp, Homo sapien
gcgtatggaattcgccctgtgccca

SEQ ID NO: 3768303 - DNA, 25 bp, Homo sapien
tcagttcaggagatacgtagaagaa

SEQ ID NO: 3768304 - DNA, 25 bp, Homo sapien
gcagtggtgcagatttgctcagcag

SEQ ID NO: 3768305 - DNA, 25 bp, Homo sapien
caatgtggtcgctgtgccagggaca

SEQ ID NO: 3768306 - DNA, 25 bp, Homo sapien
gtcctctgcttacatcaacccattg

SEQ ID NO: 3768307 - DNA, 25 bp, Homo sapien
gcttgttggcatcctttgttcccca

SEQ ID NO: 3768308 - DNA, 25 bp, Homo sapien
tgttccccagtagtccttgtctaag

SEQ ID NO: 3768309 - DNA, 25 bp, Homo sapien
taaatgttttagtgtagctccacct

SEQ ID NO: 3768310 - DNA, 25 bp, Homo sapien
ggatgctacccaggagtgacttgtt

SEQ ID NO: 3768311 - DNA, 25 bp, Homo sapien
tttcagtgagctagacagtttcctt

SEQ ID NO: 3768312 - DNA, 25 bp, Homo sapien
gccccagtcttgttaggagtctaaa

SEQ ID NO: 3768313 - DNA, 25 bp, Homo sapien
caatatttttaagcgccatttgatc

SEQ ID NO: 3768314 - DNA, 25 bp, Homo sapien
ttgatcagagtaggtcatgtattcc

SEQ ID NO: 3768315 - DNA, 25 bp, Homo sapien
cgccatttgatcagagtaggtcatg

SEQ ID NO: 3768316 - DNA, 25 bp, Homo sapien
taagcgccatttgatcagagtaggt

SEQ ID NO: 3768317 - DNA, 25 bp, Homo sapien
gatgcaaccattggtgacacttcac

SEQ ID NO: 3768318 - DNA, 25 bp, Homo sapien
tattggacagcagatgtgtgactga

SEQ ID NO: 3768319 - DNA, 25 bp, Homo sapien
tgcacgacgagctctgatgcaacca

SEQ ID NO: 3768320 - DNA, 25 bp, Homo sapien
gacacttcacttgggctattggaca

SEQ ID NO: 3768321 - DNA, 25 bp, Homo sapien
ttcaagggagtttctgtgctgggtt

SEQ ID NO: 3768322 - DNA, 25 bp, Homo sapien
tcaagggagtttctgtgctgggttt

SEQ ID NO: 3768323 - DNA, 25 bp, Homo sapien
cttcaagggagtttctgtgctgggt

SEQ ID NO: 3768324 - DNA, 25 bp, Homo sapien
tgggccgtgtagtaatcaaggtaaa

SEQ ID NO: 3768325 - DNA, 25 bp, Homo sapien
aatgtgctctttggcacaatctgac

SEQ ID NO: 3768326 - DNA, 25 bp, Homo sapien
atcatcctggacatccttgctgcgc

SEQ ID NO: 3768327 - DNA, 25 bp, Homo sapien
ttgctgcgccgatgccttcgaggct

SEQ ID NO: 3768328 - DNA, 25 bp, Homo sapien
ggctttttcacttctgtaccaacca

SEQ ID NO: 3768329 - DNA, 25 bp, Homo sapien
gctttttcacttctgtaccaaccaa

SEQ ID NO: 3768330 - DNA, 25 bp, Homo sapien
ttttcacttctgtaccaaccaaata

SEQ ID NO: 3768331 - DNA, 25 bp, Homo sapien
cacttctgtaccaaccaaatataat

SEQ ID NO: 3768332 - DNA, 25 bp, Homo sapien
tggataaacatactggaatactgcc

SEQ ID NO: 3768333 - DNA, 25 bp, Homo sapien
gctgaatgctaattttgctgaaatt

SEQ ID NO: 3768334 - DNA, 25 bp, Homo sapien
tgcgttggataaacatactggaata

SEQ ID NO: 3768335 - DNA, 25 bp, Homo sapien
cgttggataaacatactggaatact

SEQ ID NO: 3768336 - DNA, 25 bp, Homo sapien
aagagtgggctgcttagcactgtcc

SEQ ID NO: 3768337 - DNA, 25 bp, Homo sapien
cgctctcgggtcaacagtgtcagga

SEQ ID NO: 3768338 - DNA, 25 bp, Homo sapien
tgatcctgtgaagtaagtgggctca

SEQ ID NO: 3768339 - DNA, 25 bp, Homo sapien
tccactgtaacgaaatgctgcctta

SEQ ID NO: 3768340 - DNA, 25 bp, Homo sapien
ttctcatgtttatctgttggcagtt

SEQ ID NO: 3768341 - DNA, 25 bp, Homo sapien
catgtttatctgttggcagttgagc

SEQ ID NO: 3768342 - DNA, 25 bp, Homo sapien
tcatgtttatctgttggcagttgag

SEQ ID NO: 3768343 - DNA, 25 bp, Homo sapien
tctcatgtttatctgttggcagttg

SEQ ID NO: 3768344 - DNA, 25 bp, Homo sapien
cagattcctttaacagatcttccag

SEQ ID NO: 3768345 - DNA, 25 bp, Homo sapien
tgtagtctatattgaagataaaacc

SEQ ID NO: 3768346 - DNA, 25 bp, Homo sapien
cagagttccctgtagtctatattga

SEQ ID NO: 3768347 - DNA, 25 bp, Homo sapien
tcttccagtaatgggtgtccagagt

SEQ ID NO: 3768348 - DNA, 25 bp, Homo sapien
tgactggttgggcccctctagacat

SEQ ID NO: 3768349 - DNA, 25 bp, Homo sapien
tcctgcctttatcagcaagcaccag

SEQ ID NO: 3768350 - DNA, 25 bp, Homo sapien
tgcctttatcagcaagcaccagaga

SEQ ID NO: 3768351 - DNA, 25 bp, Homo sapien
ggttgggcccctctagacatcccat

SEQ ID NO: 3768352 - DNA, 25 bp, Homo sapien
cacagcggtttttataggtgaccca

SEQ ID NO: 3768353 - DNA, 25 bp, Homo sapien
gaaatccaaatcaaaccgtcttaga

SEQ ID NO: 3768354 - DNA, 25 bp, Homo sapien
gaactgtgttaatcaagactcttgg

SEQ ID NO: 3768355 - DNA, 25 bp, Homo sapien
taacttctatgtgggagcagatgac

SEQ ID NO: 3768356 - DNA, 25 bp, Homo sapien
ttatcagcccccgtgaaggacttcg

SEQ ID NO: 3768357 - DNA, 25 bp, Homo sapien
gcttcccgggcctccgttatcagcc

SEQ ID NO: 3768358 - DNA, 25 bp, Homo sapien
ccccgtgaaggacttcgcttcagca

SEQ ID NO: 3768359 - DNA, 25 bp, Homo sapien
cgtgaaggacttcgcttcagcagcc

SEQ ID NO: 3768360 - DNA, 25 bp, Homo sapien
ctgtggtagggaggctgccctgtca

SEQ ID NO: 3768361 - DNA, 25 bp, Homo sapien
gaggctgccctgtcagaaggggaag

SEQ ID NO: 3768362 - DNA, 25 bp, Homo sapien
tagggaggctgccctgtcagaaggg

SEQ ID NO: 3768363 - DNA, 25 bp, Homo sapien
gggaggctgccctgtcagaagggga

SEQ ID NO: 3768364 - DNA, 25 bp, Homo sapien
tgtggtagccacaagtctcagcatg

SEQ ID NO: 3768365 - DNA, 25 bp, Homo sapien
tctcagcatgtggaactgcctcgcc

SEQ ID NO: 3768366 - DNA, 25 bp, Homo sapien
tatccacgtcactgcaggactgctg

SEQ ID NO: 3768367 - DNA, 25 bp, Homo sapien
cagctgcatggtgcaacatctcttc

SEQ ID NO: 3768368 - DNA, 25 bp, Homo sapien
tttcattgatatcccgtatttctct

SEQ ID NO: 3768369 - DNA, 25 bp, Homo sapien
tgttttcattgatatcccgtatttc

SEQ ID NO: 3768370 - DNA, 25 bp, Homo sapien
gttttcattgatatcccgtatttct

SEQ ID NO: 3768371 - DNA, 25 bp, Homo sapien
tctgttttcattgatatcccgtatt

SEQ ID NO: 3768372 - DNA, 25 bp, Homo sapien
attatgctttttggcgggagctata

SEQ ID NO: 3768373 - DNA, 25 bp, Homo sapien
gcacatcgtaaagcatattattatg

SEQ ID NO: 3768374 - DNA, 25 bp, Homo sapien
gtgctttatcccgtcgcacatcgta

SEQ ID NO: 3768375 - DNA, 25 bp, Homo sapien
tggcgggagctataattttgaatgg

SEQ ID NO: 3768376 - DNA, 25 bp, Homo sapien
tccacttcgggcagatcctgggctt

SEQ ID NO: 3768377 - DNA, 25 bp, Homo sapien
tgtcgggagggagttctattacacc

SEQ ID NO: 3768378 - DNA, 25 bp, Homo sapien
ccattgggaatccttagtgtcggga

SEQ ID NO: 3768379 - DNA, 25 bp, Homo sapien
cttatgggtatagcccattgggaat

SEQ ID NO: 3768380 - DNA, 25 bp, Homo sapien
ccatgattgggtgtgacgactgcga

SEQ ID NO: 3768381 - DNA, 25 bp, Homo sapien
gatctgccctgggtgtaacaagcct

SEQ ID NO: 3768382 - DNA, 25 bp, Homo sapien
taacaagcctgacgatgggagtccc

SEQ ID NO: 3768383 - DNA, 25 bp, Homo sapien
cgactgcgatgactggtaccactgg

SEQ ID NO: 3768384 - DNA, 25 bp, Homo sapien
tcatgaaaccgagacgctcttctgg

SEQ ID NO: 3768385 - DNA, 25 bp, Homo sapien
tctgtggctgacaaggtgtttctct

SEQ ID NO: 3768386 - DNA, 25 bp, Homo sapien
tcttccaaaggtgtctacagtgagg

SEQ ID NO: 3768387 - DNA, 25 bp, Homo sapien
gctcttctggtgtgatgatctgccg

SEQ ID NO: 3768388 - DNA, 25 bp, Homo sapien
catagccatacttcctcaccaactg

SEQ ID NO: 3768389 - DNA, 25 bp, Homo sapien
caggaagcactcacagcatagccat

SEQ ID NO: 3768390 - DNA, 25 bp, Homo sapien
ccaggaagcactcacagcatagcca

SEQ ID NO: 3768391 - DNA, 25 bp, Homo sapien
gaagcactcacagcatagccatact

SEQ ID NO: 3768392 - DNA, 25 bp, Homo sapien
tctcaacctgtactccaggggcttg

SEQ ID NO: 3768393 - DNA, 25 bp, Homo sapien
tcaacctgtactccaggggcttggg

SEQ ID NO: 3768394 - DNA, 25 bp, Homo sapien
cctccgaacaccagcagccaactct

SEQ ID NO: 3768395 - DNA, 25 bp, Homo sapien
ctcaacctgtactccaggggcttgg

SEQ ID NO: 3768396 - DNA, 25 bp, Homo sapien
attttcacgggaacggttgttgatg

SEQ ID NO: 3768397 - DNA, 25 bp, Homo sapien
tgcagccagcaccacgcatctgccc

SEQ ID NO: 3768398 - DNA, 25 bp, Homo sapien
tagacaccggcaccccaaggcgatg

SEQ ID NO: 3768399 - DNA, 25 bp, Homo sapien
caaggcgatgcgttgttttctggtt

SEQ ID NO: 3768400 - DNA, 25 bp, Homo sapien
tcccagctggcagccaacttcgttt

SEQ ID NO: 3768401 - DNA, 25 bp, Homo sapien
ttctgagccaagtgagttcccagct

SEQ ID NO: 3768402 - DNA, 25 bp, Homo sapien
gtttctatggcggaactcagggttc

SEQ ID NO: 3768403 - DNA, 25 bp, Homo sapien
tcagggttcccacgctcttggagta

SEQ ID NO: 3768404 - DNA, 25 bp, Homo sapien
taggagcccagttcgcatctctaca

SEQ ID NO: 3768405 - DNA, 25 bp, Homo sapien
ggtcccagtcggtctctgcggagcc

SEQ ID NO: 3768406 - DNA, 25 bp, Homo sapien
cctggcttgcgggtggcacacagac

SEQ ID NO: 3768407 - DNA, 25 bp, Homo sapien
atctctacagcgccacacatctagg

SEQ ID NO: 3768408 - DNA, 25 bp, Homo sapien
cttgcaggccgggaatcgagtctgc

SEQ ID NO: 3768409 - DNA, 25 bp, Homo sapien
caagctcttggttgactgtccccag

SEQ ID NO: 3768410 - DNA, 25 bp, Homo sapien
gaccctcccgggtcaagttcacaga

SEQ ID NO: 3768411 - DNA, 25 bp, Homo sapien
tcgagtctgccatgttcgctttcag

SEQ ID NO: 3768412 - DNA, 25 bp, Homo sapien
taagaaccgcgcgatcccggcaggt

SEQ ID NO: 3768413 - DNA, 25 bp, Homo sapien
gcaaagaaacctaagaaccgcgcga

SEQ ID NO: 3768414 - DNA, 25 bp, Homo sapien
atcccggcaggtggctttctgcgga

SEQ ID NO: 3768415 - DNA, 25 bp, Homo sapien
atccgcttcctaggaacctgcccgc

SEQ ID NO: 3768416 - DNA, 25 bp, Homo sapien
cagcggtaacgtagacattggacaa

SEQ ID NO: 3768417 - DNA, 25 bp, Homo sapien
ccttgacactcatttaggagctcgc

SEQ ID NO: 3768418 - DNA, 25 bp, Homo sapien
cagcctgaaaccgaagcctcttgaa

SEQ ID NO: 3768419 - DNA, 25 bp, Homo sapien
gagaacctgatagctggaaactcgt

SEQ ID NO: 3768420 - DNA, 25 bp, Homo sapien
ggttctggtccgtctctctagctgg

SEQ ID NO: 3768421 - DNA, 25 bp, Homo sapien
ctggtgccggtgccaattaggatga

SEQ ID NO: 3768422 - DNA, 25 bp, Homo sapien
caattaggatgaggcgcttgccttc

SEQ ID NO: 3768423 - DNA, 25 bp, Homo sapien
ctctagctggttcagctctgaatcc

SEQ ID NO: 3768424 - DNA, 25 bp, Homo sapien
cctaagcccatcaagacagcaagaa

SEQ ID NO: 3768425 - DNA, 25 bp, Homo sapien
ccatcaagacagcaagaaatgtcca

SEQ ID NO: 3768426 - DNA, 25 bp, Homo sapien
atttgcccctgtctgatcattaaat

SEQ ID NO: 3768427 - DNA, 25 bp, Homo sapien
taagcccatcaagacagcaagaaat

SEQ ID NO: 3768428 - DNA, 25 bp, Homo sapien
tgcgtgctgcaggttctaagggaaa

SEQ ID NO: 3768429 - DNA, 25 bp, Homo sapien
ggaggaagacgcaagtggcccctcc

SEQ ID NO: 3768430 - DNA, 25 bp, Homo sapien
gctgttgcgtgctgcaggttctaag

SEQ ID NO: 3768431 - DNA, 25 bp, Homo sapien
gaccagaagccggagaagggaggct

SEQ ID NO: 3768432 - DNA, 25 bp, Homo sapien
cgcacaggggttggctgacgggctg

SEQ ID NO: 3768433 - DNA, 25 bp, Homo sapien
tggaggctggtttggggttctggcg

SEQ ID NO: 3768434 - DNA, 25 bp, Homo sapien
aggcgcacaggggttggctgacggg

SEQ ID NO: 3768435 - DNA, 25 bp, Homo sapien
tgacgggctggggtgcgcctgggtg

SEQ ID NO: 3768436 - DNA, 25 bp, Homo sapien
tgcaaaagggggtgaaattcattcc

SEQ ID NO: 3768437 - DNA, 25 bp, Homo sapien
tcgcaacccggaagagctccgctct

SEQ ID NO: 3768438 - DNA, 25 bp, Homo sapien
tgcggtttgcctgtttgcaaaaggg

SEQ ID NO: 3768439 - DNA, 25 bp, Homo sapien
ccctgatgtgcggtttgcctgtttg

SEQ ID NO: 3768440 - DNA, 25 bp, Homo sapien
aatgcttggaaagggccggagacac

SEQ ID NO: 3768441 - DNA, 25 bp, Homo sapien
tggatgtcctcgtttgcaggaaaga

SEQ ID NO: 3768442 - DNA, 25 bp, Homo sapien
tagaagtagggatgtgaagaaaaac

SEQ ID NO: 3768443 - DNA, 25 bp, Homo sapien
gaatgagagcccgtgggaatgcttg

SEQ ID NO: 3768444 - DNA, 25 bp, Homo sapien
tgcctgaggaaagtgacaccggtga

SEQ ID NO: 3768445 - DNA, 25 bp, Homo sapien
gggaaagtgcggcatctccctcggc

SEQ ID NO: 3768446 - DNA, 25 bp, Homo sapien
gcaggacagctgctttacatgcctt

SEQ ID NO: 3768447 - DNA, 25 bp, Homo sapien
tctctcggacaccaacagggtgcct

SEQ ID NO: 3768448 - DNA, 25 bp, Homo sapien
tccaagggagcaaactgaggaatcc

SEQ ID NO: 3768449 - DNA, 25 bp, Homo sapien
cagagagaggctttgtagcctccaa

SEQ ID NO: 3768450 - DNA, 25 bp, Homo sapien
gtatccgtcgctgccggtctgctgg

SEQ ID NO: 3768451 - DNA, 25 bp, Homo sapien
cgttagtgaagaacaggcacatgcg

SEQ ID NO: 3768452 - DNA, 25 bp, Homo sapien
gggccggagtcctgggtgctatagc

SEQ ID NO: 3768453 - DNA, 25 bp, Homo sapien
tcctgggtgctatagcggtgtggct

SEQ ID NO: 3768454 - DNA, 25 bp, Homo sapien
cggagtcctgggtgctatagcggtg

SEQ ID NO: 3768455 - DNA, 25 bp, Homo sapien
gggccaagccttgaaatgggtgaat

SEQ ID NO: 3768456 - DNA, 25 bp, Homo sapien
tgccagtgagttttagggtccctct

SEQ ID NO: 3768457 - DNA, 25 bp, Homo sapien
gggccgggatcctcaaccagtattg

SEQ ID NO: 3768458 - DNA, 25 bp, Homo sapien
cagctcgcaagggaaagaaaacggg

SEQ ID NO: 3768459 - DNA, 25 bp, Homo sapien
ccgtttaggtcttgctccccgctct

SEQ ID NO: 3768460 - DNA, 25 bp, Homo sapien
tgcgcggtccggggcgccctgccgc

SEQ ID NO: 3768461 - DNA, 25 bp, Homo sapien
tccggggcgccctgccgcagcgggc

SEQ ID NO: 3768462 - DNA, 25 bp, Homo sapien
gcgcctggagccgtgtccccggcat

SEQ ID NO: 3768463 - DNA, 25 bp, Homo sapien
gcggcgcctggagccgtgtccccgg

SEQ ID NO: 3768464 - DNA, 25 bp, Homo sapien
tctctaattgctccaacaatggcct

SEQ ID NO: 3768465 - DNA, 25 bp, Homo sapien
ttccagagcgccccggtgcgtactg

SEQ ID NO: 3768466 - DNA, 25 bp, Homo sapien
gcgggcgcagggaatcgaattaaac

SEQ ID NO: 3768467 - DNA, 25 bp, Homo sapien
attaaacgtctctgggcggttattg

SEQ ID NO: 3768468 - DNA, 25 bp, Homo sapien
ctttggcctccacttcctccccaga

SEQ ID NO: 3768469 - DNA, 25 bp, Homo sapien
tttggcctccacttcctccccagac

SEQ ID NO: 3768470 - DNA, 25 bp, Homo sapien
gcaaatatttgctgcctcgctggaa

SEQ ID NO: 3768471 - DNA, 25 bp, Homo sapien
cgcagcccagcaagattgatcgagc

SEQ ID NO: 3768472 - DNA, 25 bp, Homo sapien
tttttattgaccgatcgcagcccag

SEQ ID NO: 3768473 - DNA, 25 bp, Homo sapien
ttcttttctgtctgcgcggccggga

SEQ ID NO: 3768474 - DNA, 25 bp, Homo sapien
taagtaaacacgctcaaatgaccgc

SEQ ID NO: 3768475 - DNA, 25 bp, Homo sapien
ctttaagtaaacacgctcaaatgac

SEQ ID NO: 3768476 - DNA, 25 bp, Homo sapien
cgggcggcccgaggcacgctctctc

SEQ ID NO: 3768477 - DNA, 25 bp, Homo sapien
agtaaacacgctcaaatgaccgccc

SEQ ID NO: 3768478 - DNA, 25 bp, Homo sapien
tgcctgttacccaggtcgggcagcg

SEQ ID NO: 3768479 - DNA, 25 bp, Homo sapien
ctgttacccaggtcgggcagcgcgc

SEQ ID NO: 3768480 - DNA, 25 bp, Homo sapien
gggctccgctttgcctgttacccag

SEQ ID NO: 3768481 - DNA, 25 bp, Homo sapien
ctttgcctgttacccaggtcgggca

SEQ ID NO: 3768482 - DNA, 25 bp, Homo sapien
gacagggtctcttcgcccctgggag

SEQ ID NO: 3768483 - DNA, 25 bp, Homo sapien
taccgagtggagaaagtccggctcc

SEQ ID NO: 3768484 - DNA, 25 bp, Homo sapien
ctggaagcgccggttgcctggctct

SEQ ID NO: 3768485 - DNA, 25 bp, Homo sapien
ggtgtgtgtggtagcttaaccccta

SEQ ID NO: 3768486 - DNA, 25 bp, Homo sapien
aacttgacgcctaaagcagccgctt

SEQ ID NO: 3768487 - DNA, 25 bp, Homo sapien
ctcggctgcgggatgcttgctccca

SEQ ID NO: 3768488 - DNA, 25 bp, Homo sapien
aggcgtccaggttgatcgccagccc

SEQ ID NO: 3768489 - DNA, 25 bp, Homo sapien
tttcggataggccaagccggctgct

SEQ ID NO: 3768490 - DNA, 25 bp, Homo sapien
tcttgccggcgaggcgggtcaggcc

SEQ ID NO: 3768491 - DNA, 25 bp, Homo sapien
ggactcgctagaccaggccgaggcc

SEQ ID NO: 3768492 - DNA, 25 bp, Homo sapien
gatcagctttgtggcggtggcacag

SEQ ID NO: 3768493 - DNA, 25 bp, Homo sapien
aggcgctcaggcttctccgcaggag

SEQ ID NO: 3768494 - DNA, 25 bp, Homo sapien
gccagtccgacttggtgctcgcgat

SEQ ID NO: 3768495 - DNA, 25 bp, Homo sapien
tacttccccatccaaaattagcgga

SEQ ID NO: 3768496 - DNA, 25 bp, Homo sapien
ggtgctcgcgattgaatttaaacga

SEQ ID NO: 3768497 - DNA, 25 bp, Homo sapien
aattagcggataggcgcccttgcac

SEQ ID NO: 3768498 - DNA, 25 bp, Homo sapien
gggacttctctcttcggctctgagg

SEQ ID NO: 3768499 - DNA, 25 bp, Homo sapien
tcccgggcttcttagcaaaaatgcg

SEQ ID NO: 3768500 - DNA, 25 bp, Homo sapien
tcaagacctggcatccgcagcgttt

SEQ ID NO: 3768501 - DNA, 25 bp, Homo sapien
gattgacgcgcggagaagcattttt

SEQ ID NO: 3768502 - DNA, 25 bp, Homo sapien
taataacgggagaccaagtgggctc

SEQ ID NO: 3768503 - DNA, 25 bp, Homo sapien
aaaggtttagagagcgctgtgagca

SEQ ID NO: 3768504 - DNA, 25 bp, Homo sapien
gatgcctcttaactgggccgcctaa

SEQ ID NO: 3768505 - DNA, 25 bp, Homo sapien
caaagaagatccaaacgcgagacca

SEQ ID NO: 3768506 - DNA, 25 bp, Homo sapien
tcaccgcatgaaaggaatccttcag

SEQ ID NO: 3768507 - DNA, 25 bp, Homo sapien
tgttgttgttccttcaccgcatgaa

SEQ ID NO: 3768508 - DNA, 25 bp, Homo sapien
aaggtgaagttgaatattgttgttg

SEQ ID NO: 3768509 - DNA, 25 bp, Homo sapien
tccttcaccgcatgaaaggaatcct

SEQ ID NO: 3768510 - DNA, 25 bp, Homo sapien
tgctcgcccgagcagcattttcggg

SEQ ID NO: 3768511 - DNA, 25 bp, Homo sapien
cagggacggcttcttctatctcgaa

SEQ ID NO: 3768512 - DNA, 25 bp, Homo sapien
gcagagagtggatttggagtcttct

SEQ ID NO: 3768513 - DNA, 25 bp, Homo sapien
agccccatcggtgggatagcctgcg

SEQ ID NO: 3768514 - DNA, 25 bp, Homo sapien
ggcgcggatgacactagaacctcct

SEQ ID NO: 3768515 - DNA, 25 bp, Homo sapien
agctgtctgcgaacactgagctgcc

SEQ ID NO: 3768516 - DNA, 25 bp, Homo sapien
gcctggcgccgtcttgatactttca

SEQ ID NO: 3768517 - DNA, 25 bp, Homo sapien
cttaagttgcgtcgcgccacagctg

SEQ ID NO: 3768518 - DNA, 25 bp, Homo sapien
aaaaaagaagaccaggcctgtgtag

SEQ ID NO: 3768519 - DNA, 25 bp, Homo sapien
tgaggaaaaaagatcgaacactttc

SEQ ID NO: 3768520 - DNA, 25 bp, Homo sapien
taaaacatcgggcagaaaaagtgtg

SEQ ID NO: 3768521 - DNA, 25 bp, Homo sapien
cagctctaagtttgttcctaaagaa

SEQ ID NO: 3768522 - DNA, 25 bp, Homo sapien
taaaagtctcaaggcatgggctgat

SEQ ID NO: 3768523 - DNA, 25 bp, Homo sapien
aaagctgccggatatctgagcactg

SEQ ID NO: 3768524 - DNA, 25 bp, Homo sapien
gattgcagaggaggatcgtaattcc

SEQ ID NO: 3768525 - DNA, 25 bp, Homo sapien
gaatcactcaaaaacctggccttag

SEQ ID NO: 3768526 - DNA, 25 bp, Homo sapien
tgccatcggtcacgttgccttcctg

SEQ ID NO: 3768527 - DNA, 25 bp, Homo sapien
tgggagtagattcctgtcatctctg

SEQ ID NO: 3768528 - DNA, 25 bp, Homo sapien
gtaggctgcatctttatcttgatga

SEQ ID NO: 3768529 - DNA, 25 bp, Homo sapien
gctagatatcggcatcagagctgtg

SEQ ID NO: 3768530 - DNA, 25 bp, Homo sapien
tcatgaagcctaaacgcgatggata

SEQ ID NO: 3768531 - DNA, 25 bp, Homo sapien
tttgcaggagcagtatcatgaagcc

SEQ ID NO: 3768532 - DNA, 25 bp, Homo sapien
taacagacccctgactatgaagaag

SEQ ID NO: 3768533 - DNA, 25 bp, Homo sapien
tcaccgccatgggttagagccctgc

SEQ ID NO: 3768534 - DNA, 25 bp, Homo sapien
gaagaaactaggtctgatattcaaa

SEQ ID NO: 3768535 - DNA, 25 bp, Homo sapien
aatgactttattgcatctgggtagc

SEQ ID NO: 3768536 - DNA, 25 bp, Homo sapien
cagggtctctagtgctgtgaaaaaa

SEQ ID NO: 3768537 - DNA, 25 bp, Homo sapien
gtagctgtaaggcatgaaggatgcc

SEQ ID NO: 3768538 - DNA, 25 bp, Homo sapien
ccagcaagagcctgaaagatgtgta

SEQ ID NO: 3768539 - DNA, 25 bp, Homo sapien
tgggtccccagcaagagcctgaaag

SEQ ID NO: 3768540 - DNA, 25 bp, Homo sapien
atccctgcctttggtggcagggctg

SEQ ID NO: 3768541 - DNA, 25 bp, Homo sapien
tcatccctgcctttggtggcagggc

SEQ ID NO: 3768542 - DNA, 25 bp, Homo sapien
tgcagagatgcgggctgcacaatgc

SEQ ID NO: 3768543 - DNA, 25 bp, Homo sapien
ttgtgtaactcagggatgttgtgtg

SEQ ID NO: 3768544 - DNA, 25 bp, Homo sapien
tgcacaatgcccagactaccacgtg

SEQ ID NO: 3768545 - DNA, 25 bp, Homo sapien
cttgggccggggattgtgtaactca

SEQ ID NO: 3768546 - DNA, 25 bp, Homo sapien
ccaacccgatgatcctgagccagga

SEQ ID NO: 3768547 - DNA, 25 bp, Homo sapien
tgagcagacgctgcctggctttccc

SEQ ID NO: 3768548 - DNA, 25 bp, Homo sapien
ctttcccgccatcgccaacccgatg

SEQ ID NO: 3768549 - DNA, 25 bp, Homo sapien
acagtcacagccaactctgagcaga

SEQ ID NO: 3768550 - DNA, 25 bp, Homo sapien
ggcacatgagctggcccgtctttga

SEQ ID NO: 3768551 - DNA, 25 bp, Homo sapien
ggtgtgtgaaagcatcctgttcttc

SEQ ID NO: 3768552 - DNA, 25 bp, Homo sapien
tttgaacatcttcgggctcccttgt

SEQ ID NO: 3768553 - DNA, 25 bp, Homo sapien
gagctggcccgtctttgataaattt

SEQ ID NO: 3768554 - DNA, 25 bp, Homo sapien
cttgggctctcgaaatgtgactgtg

SEQ ID NO: 3768555 - DNA, 25 bp, Homo sapien
gaacttggagcttgattcacttcgc

SEQ ID NO: 3768556 - DNA, 25 bp, Homo sapien
tcagttccatccgaggctggctgtc

SEQ ID NO: 3768557 - DNA, 25 bp, Homo sapien
gacaggagggccgtgcctcttaatt

SEQ ID NO: 3768558 - DNA, 25 bp, Homo sapien
gtcgcacatccacaaaggaggggaa

SEQ ID NO: 3768559 - DNA, 25 bp, Homo sapien
tgagacacctgcaagagcctcccag

SEQ ID NO: 3768560 - DNA, 25 bp, Homo sapien
catgctgacagcttggggattttca

SEQ ID NO: 3768561 - DNA, 25 bp, Homo sapien
cagagctccctgagtgggttccaca

SEQ ID NO: 3768562 - DNA, 25 bp, Homo sapien
gggattttcagtgactcaacaaaca

SEQ ID NO: 3768563 - DNA, 25 bp, Homo sapien
gaaacaggactttgacagttcccaa

SEQ ID NO: 3768564 - DNA, 25 bp, Homo sapien
gagtgacagcgtttacatgcccata

SEQ ID NO: 3768565 - DNA, 25 bp, Homo sapien
catcaaagctgagacgaaaggtgtt

SEQ ID NO: 3768566 - DNA, 25 bp, Homo sapien
gatctgtaccatcttgaaggaagga

SEQ ID NO: 3768567 - DNA, 25 bp, Homo sapien
ccccttccccagcgatggtcacatc

SEQ ID NO: 3768568 - DNA, 25 bp, Homo sapien
cttccccagcgatggtcacatctcc

SEQ ID NO: 3768569 - DNA, 25 bp, Homo sapien
ccagcgatggtcacatctcctcttc

SEQ ID NO: 3768570 - DNA, 25 bp, Homo sapien
cccagcgatggtcacatctcctctt

SEQ ID NO: 3768571 - DNA, 25 bp, Homo sapien
cctcctacctccttcgtctgcatgc

SEQ ID NO: 3768572 - DNA, 25 bp, Homo sapien
cctacctccttcgtctgcatgctgc

SEQ ID NO: 3768573 - DNA, 25 bp, Homo sapien
ctgctgtgaggggatcctctaggct

SEQ ID NO: 3768574 - DNA, 25 bp, Homo sapien
acctccttcgtctgcatgctgctgt

SEQ ID NO: 3768575 - DNA, 25 bp, Homo sapien
ctggggaagactgacacatgctgcc

SEQ ID NO: 3768576 - DNA, 25 bp, Homo sapien
ggagactgatgggtttggaatcatc

SEQ ID NO: 3768577 - DNA, 25 bp, Homo sapien
agaagttgggattcaaaacaccagg

SEQ ID NO: 3768578 - DNA, 25 bp, Homo sapien
aatcatctcttgatgtccacagaag

SEQ ID NO: 3768579 - DNA, 25 bp, Homo sapien
ctgggagaggcacgcgatgctgcat

SEQ ID NO: 3768580 - DNA, 25 bp, Homo sapien
tgtggggccatcatgctcccttccc

SEQ ID NO: 3768581 - DNA, 25 bp, Homo sapien
acgcgatgctgcatggagttgtttc

SEQ ID NO: 3768582 - DNA, 25 bp, Homo sapien
gagaggcacgcgatgctgcatggag

SEQ ID NO: 3768583 - DNA, 25 bp, Homo sapien
cagccgagaaacaggctggcgtttc

SEQ ID NO: 3768584 - DNA, 25 bp, Homo sapien
ccgagaaacaggctggcgtttcctt

SEQ ID NO: 3768585 - DNA, 25 bp, Homo sapien
gctggcgtttccttagctcccactg

SEQ ID NO: 3768586 - DNA, 25 bp, Homo sapien
agccccagccgagaaacaggctggc

SEQ ID NO: 3768587 - DNA, 25 bp, Homo sapien
tgagctcacgatagaatctccaggt

SEQ ID NO: 3768588 - DNA, 25 bp, Homo sapien
tagaatctccaggtgtgtcaatgac

SEQ ID NO: 3768589 - DNA, 25 bp, Homo sapien
tcataatgagctcacgatagaatct

SEQ ID NO: 3768590 - DNA, 25 bp, Homo sapien
cacgatagaatctccaggtgtgtca

SEQ ID NO: 3768591 - DNA, 25 bp, Homo sapien
gatgtgatcatgtctagaaccaaga

SEQ ID NO: 3768592 - DNA, 25 bp, Homo sapien
caagaaactggtctcattaacatcc

SEQ ID NO: 3768593 - DNA, 25 bp, Homo sapien
atcctcacaggagatcagtggtctg

SEQ ID NO: 3768594 - DNA, 25 bp, Homo sapien
cagtggtctgacaatgtatcttggt

SEQ ID NO: 3768595 - DNA, 25 bp, Homo sapien
agtgggagatgtaccaggaattgct

SEQ ID NO: 3768596 - DNA, 25 bp, Homo sapien
tgtgtggtcaccttaggaaggctga

SEQ ID NO: 3768597 - DNA, 25 bp, Homo sapien
ccaggcaaataacgagtgggagatg

SEQ ID NO: 3768598 - DNA, 25 bp, Homo sapien
tgggcaaggtttggggtctccacca

SEQ ID NO: 3768599 - DNA, 25 bp, Homo sapien
tggagtctttgcttcttgaggccaa

SEQ ID NO: 3768600 - DNA, 25 bp, Homo sapien
gagtctttgcttcttgaggccaagt

SEQ ID NO: 3768601 - DNA, 25 bp, Homo sapien
cattggagtctttgcttcttgaggc

SEQ ID NO: 3768602 - DNA, 25 bp, Homo sapien
agtggcattggagtctttgcttctt

SEQ ID NO: 3768603 - DNA, 25 bp, Homo sapien
ttctacccacagtggagtctggtgt

SEQ ID NO: 3768604 - DNA, 25 bp, Homo sapien
taaaaacaagctgtgtttctaccca

SEQ ID NO: 3768605 - DNA, 25 bp, Homo sapien
tgggtacaaaagcttgagctcattt

SEQ ID NO: 3768606 - DNA, 25 bp, Homo sapien
caaaagcttgagctcatttctgttt

SEQ ID NO: 3768607 - DNA, 25 bp, Homo sapien
gagtgtccaggtataggttccctct

SEQ ID NO: 3768608 - DNA, 25 bp, Homo sapien
ctgcctccagagtgatagaaagagt

SEQ ID NO: 3768609 - DNA, 25 bp, Homo sapien
tgtacctggacaaggtgaggaccat

SEQ ID NO: 3768610 - DNA, 25 bp, Homo sapien
gaaagagtcctagcgagtgtccagg

SEQ ID NO: 3768611 - DNA, 25 bp, Homo sapien
caccgtctgggaacaaagttgctgc

SEQ ID NO: 3768612 - DNA, 25 bp, Homo sapien
gatttagagtcaagggaagacgcag

SEQ ID NO: 3768613 - DNA, 25 bp, Homo sapien
aagttgctgcctctatactaagccg

SEQ ID NO: 3768614 - DNA, 25 bp, Homo sapien
tactaagccgcttcagagaaatgac

SEQ ID NO: 3768615 - DNA, 25 bp, Homo sapien
tcacattccccactatggcagaggc

SEQ ID NO: 3768616 - DNA, 25 bp, Homo sapien
gcagaggccatcgtttgtaacctgg

SEQ ID NO: 3768617 - DNA, 25 bp, Homo sapien
acctggcacccaccagcgatggatg

SEQ ID NO: 3768618 - DNA, 25 bp, Homo sapien
gcgatggatgaacctcattttggag

SEQ ID NO: 3768619 - DNA, 25 bp, Homo sapien
ggtgtttggatattggtcacactga

SEQ ID NO: 3768620 - DNA, 25 bp, Homo sapien
cacctggggtgcttggtttatctga

SEQ ID NO: 3768621 - DNA, 25 bp, Homo sapien
gctcgaggggtgtcagtcccatctg

SEQ ID NO: 3768622 - DNA, 25 bp, Homo sapien
tatctgatctaccagatgatgtttg

SEQ ID NO: 3768623 - DNA, 25 bp, Homo sapien
tcgtgaaaatatttgcgggaggccc

SEQ ID NO: 3768624 - DNA, 25 bp, Homo sapien
tgtggtctggtctatgtcgtgaaaa

SEQ ID NO: 3768625 - DNA, 25 bp, Homo sapien
tagtaggtgtaggaaaaatgttgtg

SEQ ID NO: 3768626 - DNA, 25 bp, Homo sapien
cgggaggcccctttgattagctttg

SEQ ID NO: 3768627 - DNA, 25 bp, Homo sapien
agcaggcagagattttgagtcacac

SEQ ID NO: 3768628 - DNA, 25 bp, Homo sapien
ggcagagattttgagtcacacaggg

SEQ ID NO: 3768629 - DNA, 25 bp, Homo sapien
ccagagaggagcgaatatcagaatc

SEQ ID NO: 3768630 - DNA, 25 bp, Homo sapien
gaggagcgaatatcagaatcgtggt

SEQ ID NO: 3768631 - DNA, 25 bp, Homo sapien
tactgtccggtgctgaactggtaga

SEQ ID NO: 3768632 - DNA, 25 bp, Homo sapien
gtgctgaactggtagaggtgacact

SEQ ID NO: 3768633 - DNA, 25 bp, Homo sapien
catgtagaggtgatactgtccaaca

SEQ ID NO: 3768634 - DNA, 25 bp, Homo sapien
agaggtgatactgtccggtgctgaa

SEQ ID NO: 3768635 - DNA, 25 bp, Homo sapien
gccattttaggagatgagcacacca

SEQ ID NO: 3768636 - DNA, 25 bp, Homo sapien
tacggatttgccagctcattgattc

SEQ ID NO: 3768637 - DNA, 25 bp, Homo sapien
aggtcctggccttcatctcctatac

SEQ ID NO: 3768638 - DNA, 25 bp, Homo sapien
tgagaactcagggtctggcattcct

SEQ ID NO: 3768639 - DNA, 25 bp, Homo sapien
tcagatggggtggagtttatgagaa

SEQ ID NO: 3768640 - DNA, 25 bp, Homo sapien
gggtggagtttatgagaagagaaat

SEQ ID NO: 3768641 - DNA, 25 bp, Homo sapien
gatggggtggagtttatgagaagag

SEQ ID NO: 3768642 - DNA, 25 bp, Homo sapien
tggggtggagtttatgagaagagaa

SEQ ID NO: 3768643 - DNA, 25 bp, Homo sapien
ggaaatgaaagatgggattgttttc

SEQ ID NO: 3768644 - DNA, 25 bp, Homo sapien
tgggaaatgaaagatgggattgttt

SEQ ID NO: 3768645 - DNA, 25 bp, Homo sapien
tgccggccgagtccagttttctagt

SEQ ID NO: 3768646 - DNA, 25 bp, Homo sapien
gctgtcaggagtggaaatcatttca

SEQ ID NO: 3768647 - DNA, 25 bp, Homo sapien
gggcatcggcaaagacagtgtttct

SEQ ID NO: 3768648 - DNA, 25 bp, Homo sapien
gtaagcaagtgcttctgccggccga

SEQ ID NO: 3768649 - DNA, 25 bp, Homo sapien
cttgagcattaaagtaactaccagg

SEQ ID NO: 3768650 - DNA, 25 bp, Homo sapien
cgtgagatctacgtagctctggtgg

SEQ ID NO: 3768651 - DNA, 25 bp, Homo sapien
tggctgcagagaggacgatggctgg

SEQ ID NO: 3768652 - DNA, 25 bp, Homo sapien
aataaactggcaaggcggatgggtc

SEQ ID NO: 3768653 - DNA, 25 bp, Homo sapien
ggagctgatgtgatttgacaagctt

SEQ ID NO: 3768654 - DNA, 25 bp, Homo sapien
ctaggagctgatgtgatttgacaag

SEQ ID NO: 3768655 - DNA, 25 bp, Homo sapien
aggagctgatgtgatttgacaagct

SEQ ID NO: 3768656 - DNA, 25 bp, Homo sapien
taggagctgatgtgatttgacaagc

SEQ ID NO: 3768657 - DNA, 25 bp, Homo sapien
gggcactgctcggaaaagacgagat

SEQ ID NO: 3768658 - DNA, 25 bp, Homo sapien
acactaggtgggagttggagatttt

SEQ ID NO: 3768659 - DNA, 25 bp, Homo sapien
tgataaaagatatgatggctttctg

SEQ ID NO: 3768660 - DNA, 25 bp, Homo sapien
gttggtttcttgtttagtgaactga

SEQ ID NO: 3768661 - DNA, 25 bp, Homo sapien
ttaagtctttgatggcatttgccat

SEQ ID NO: 3768662 - DNA, 25 bp, Homo sapien
cttaagtctttgatggcatttgcca

SEQ ID NO: 3768663 - DNA, 25 bp, Homo sapien
tccctacagtgctcattggctttga

SEQ ID NO: 3768664 - DNA, 25 bp, Homo sapien
tggctttgagcatataggacaacaa

SEQ ID NO: 3768665 - DNA, 25 bp, Homo sapien
gagactatccttctgttgaaagtag

SEQ ID NO: 3768666 - DNA, 25 bp, Homo sapien
aatgtttcccttcatattcctgatc

SEQ ID NO: 3768667 - DNA, 25 bp, Homo sapien
tgtgccgagtggaaccataatgtga

SEQ ID NO: 3768668 - DNA, 25 bp, Homo sapien
gattttaagccatagcaatgatgca

SEQ ID NO: 3768669 - DNA, 25 bp, Homo sapien
tcaaaaccttggatgtgtgccgagt

SEQ ID NO: 3768670 - DNA, 25 bp, Homo sapien
gatgcagttgcaaccaatatggctc

SEQ ID NO: 3768671 - DNA, 25 bp, Homo sapien
tgctggtgtccttcatgcctaaagg

SEQ ID NO: 3768672 - DNA, 25 bp, Homo sapien
tcttgtgctaacatttccagcttct

SEQ ID NO: 3768673 - DNA, 25 bp, Homo sapien
ggaagcaggagatcctgtcttgtgc

SEQ ID NO: 3768674 - DNA, 25 bp, Homo sapien
atttgccactaaaatgctggtgtcc

SEQ ID NO: 3768675 - DNA, 25 bp, Homo sapien
aatctgtatctgaaactctccccag

SEQ ID NO: 3768676 - DNA, 25 bp, Homo sapien
tgtctctgtatcagaattatgtggg

SEQ ID NO: 3768677 - DNA, 25 bp, Homo sapien
aagatgtttaaaatctccacgtggg

SEQ ID NO: 3768678 - DNA, 25 bp, Homo sapien
tgtatctgaaactctccccagatgc

SEQ ID NO: 3768679 - DNA, 25 bp, Homo sapien
ttagtggcagcactcacctttcctg

SEQ ID NO: 3768680 - DNA, 25 bp, Homo sapien
gaacatcctagacactaaggctgcc

SEQ ID NO: 3768681 - DNA, 25 bp, Homo sapien
gacattggagcttgctttggaacct

SEQ ID NO: 3768682 - DNA, 25 bp, Homo sapien
tgagtctatatgacaggcatcacaa

SEQ ID NO: 3768683 - DNA, 25 bp, Homo sapien
ccttcatctgggataagaccgcatc

SEQ ID NO: 3768684 - DNA, 25 bp, Homo sapien
aggctactgctgtaaccaccgtggg

SEQ ID NO: 3768685 - DNA, 25 bp, Homo sapien
tattcagcggtggaaggaggctact

SEQ ID NO: 3768686 - DNA, 25 bp, Homo sapien
tccaggtgggagagttagcagagat

SEQ ID NO: 3768687 - DNA, 25 bp, Homo sapien
gatgggagccgtagattattcagcg

SEQ ID NO: 3768688 - DNA, 25 bp, Homo sapien
ccggtgatccggtgtgtgggcaaca

SEQ ID NO: 3768689 - DNA, 25 bp, Homo sapien
aacagtccgctttgcaaagcaggag

SEQ ID NO: 3768690 - DNA, 25 bp, Homo sapien
ggcaacagtccgctttgcaaagcag

SEQ ID NO: 3768691 - DNA, 25 bp, Homo sapien
gtgggcaacagtccgctttgcaaag

SEQ ID NO: 3768692 - DNA, 25 bp, Homo sapien
gacgtcagaaagacaagaatcttcc

SEQ ID NO: 3768693 - DNA, 25 bp, Homo sapien
ggcctgagggtgtctctctcttctc

SEQ ID NO: 3768694 - DNA, 25 bp, Homo sapien
ctgatgacgtcagaaagacaagaat

SEQ ID NO: 3768695 - DNA, 25 bp, Homo sapien
gaaagacaagaatcttccccaggag

SEQ ID NO: 3768696 - DNA, 25 bp, Homo sapien
tacaggtctttatatggacataggc

SEQ ID NO: 3768697 - DNA, 25 bp, Homo sapien
tctggctatttgcactcagtgtgat

SEQ ID NO: 3768698 - DNA, 25 bp, Homo sapien
ggacataggcttgcttttgggtaaa

SEQ ID NO: 3768699 - DNA, 25 bp, Homo sapien
ccttttgatcgctaatggtgtttca

SEQ ID NO: 3768700 - DNA, 25 bp, Homo sapien
tgctggctgaatcggtgcaagtgcc

SEQ ID NO: 3768701 - DNA, 25 bp, Homo sapien
cccaaatggcatggtgtgagtctct

SEQ ID NO: 3768702 - DNA, 25 bp, Homo sapien
gtcagtaaattggttaatcccctca

SEQ ID NO: 3768703 - DNA, 25 bp, Homo sapien
tcctagagaggcagattcgagaaaa

SEQ ID NO: 3768704 - DNA, 25 bp, Homo sapien
tgaaatcactgcttacgagccagca

SEQ ID NO: 3768705 - DNA, 25 bp, Homo sapien
gggctctacccttccattaatggaa

SEQ ID NO: 3768706 - DNA, 25 bp, Homo sapien
gaaagagcgaattctgccaaccctg

SEQ ID NO: 3768707 - DNA, 25 bp, Homo sapien
gtcatcttggaagagtgagccatgc

SEQ ID NO: 3768708 - DNA, 25 bp, Homo sapien
tcaaatcaacaaggtgtggtctggc

SEQ ID NO: 3768709 - DNA, 25 bp, Homo sapien
atgccagcaactccccttcgttttt

SEQ ID NO: 3768710 - DNA, 25 bp, Homo sapien
ggtctggcgttatcattcaaagaat

SEQ ID NO: 3768711 - DNA, 25 bp, Homo sapien
taataaggccatcaactttcaaatc

SEQ ID NO: 3768712 - DNA, 25 bp, Homo sapien
gctttctgagggagggagtttgact

SEQ ID NO: 3768713 - DNA, 25 bp, Homo sapien
tctcccttaaccagaacctgccatg

SEQ ID NO: 3768714 - DNA, 25 bp, Homo sapien
atggagtcgccaccgtctcccttaa

SEQ ID NO: 3768715 - DNA, 25 bp, Homo sapien
gtttccatggagtcgccaccgtctc

SEQ ID NO: 3768716 - DNA, 25 bp, Homo sapien
tcctagggagcgtgttattcctggc

SEQ ID NO: 3768717 - DNA, 25 bp, Homo sapien
gattaacacgccatccttcaagaag

SEQ ID NO: 3768718 - DNA, 25 bp, Homo sapien
tacagattaaggctagagactctcc

SEQ ID NO: 3768719 - DNA, 25 bp, Homo sapien
tcaatgaacattggtacagacccca

SEQ ID NO: 3768720 - DNA, 25 bp, Homo sapien
cctggaaccgatcacaggttttgct

SEQ ID NO: 3768721 - DNA, 25 bp, Homo sapien
gcttttgcctgctggaaaggttaga

SEQ ID NO: 3768722 - DNA, 25 bp, Homo sapien
ggaagtaatttccaatgcatggcga

SEQ ID NO: 3768723 - DNA, 25 bp, Homo sapien
gttagatattctgcaccagatccag

SEQ ID NO: 3768724 - DNA, 25 bp, Homo sapien
tgtcctcagcaccaagcgtcagaga

SEQ ID NO: 3768725 - DNA, 25 bp, Homo sapien
gagggcttgggaagtttcattctac

SEQ ID NO: 3768726 - DNA, 25 bp, Homo sapien
tctacatgtagcatcgtgttcactc

SEQ ID NO: 3768727 - DNA, 25 bp, Homo sapien
ttcagccttgtctcttcaggtgagg

SEQ ID NO: 3768728 - DNA, 25 bp, Homo sapien
tctgcgtgtagctacaggtccctga

SEQ ID NO: 3768729 - DNA, 25 bp, Homo sapien
cacctcggtgccctgttcttgggaa

SEQ ID NO: 3768730 - DNA, 25 bp, Homo sapien
aaaacaggttgcctcggagttccag

SEQ ID NO: 3768731 - DNA, 25 bp, Homo sapien
gtccctgagagagaccggcgcgcct

SEQ ID NO: 3768732 - DNA, 25 bp, Homo sapien
aaagatggagaagaagcgatgtgga

SEQ ID NO: 3768733 - DNA, 25 bp, Homo sapien
cttctctttgaaggtattgacaaga

SEQ ID NO: 3768734 - DNA, 25 bp, Homo sapien
ggtattgacaagatcttgagtaaag

SEQ ID NO: 3768735 - DNA, 25 bp, Homo sapien
gcgatgtggataagaaggactttcc

SEQ ID NO: 3768736 - DNA, 25 bp, Homo sapien
caaaataagtcatgtcctgaatata

SEQ ID NO: 3768737 - DNA, 25 bp, Homo sapien
tcctgaatatatgtttgaaccaaac

SEQ ID NO: 3768738 - DNA, 25 bp, Homo sapien
agtcatgtcctgaatatatgtttga

SEQ ID NO: 3768739 - DNA, 25 bp, Homo sapien
gaatatatgtttgaaccaaacacct

SEQ ID NO: 3768740 - DNA, 25 bp, Homo sapien
tctgaagggcttggatgaaatgacc

SEQ ID NO: 3768741 - DNA, 25 bp, Homo sapien
ctgaagggcttggatgaaatgacca

SEQ ID NO: 3768742 - DNA, 25 bp, Homo sapien
gaagggcttggatgaaatgaccaga

SEQ ID NO: 3768743 - DNA, 25 bp, Homo sapien
aagggcttggatgaaatgaccagaa

SEQ ID NO: 3768744 - DNA, 25 bp, Homo sapien
tgatgatgccactatttaaaattac

SEQ ID NO: 3768745 - DNA, 25 bp, Homo sapien
tcctgatgatgccactatttaaaat

SEQ ID NO: 3768746 - DNA, 25 bp, Homo sapien
gatgccactatttaaaattacagcc

SEQ ID NO: 3768747 - DNA, 25 bp, Homo sapien
gatgatgccactatttaaaattaca

SEQ ID NO: 3768748 - DNA, 25 bp, Homo sapien
gctgtgaaccacttactaccgtctc

SEQ ID NO: 3768749 - DNA, 25 bp, Homo sapien
cagagatttgctgcgtgaaaatctg

SEQ ID NO: 3768750 - DNA, 25 bp, Homo sapien
ttgctgcgtgaaaatctgttttgga

SEQ ID NO: 3768751 - DNA, 25 bp, Homo sapien
tggaagtcttgttgatgttatcccc

SEQ ID NO: 3768752 - DNA, 25 bp, Homo sapien
cattgcatgccggaacttgtagttt

SEQ ID NO: 3768753 - DNA, 25 bp, Homo sapien
tttgctctctcataagccaagaggg

SEQ ID NO: 3768754 - DNA, 25 bp, Homo sapien
ggcagttgctttgctctctcataag

SEQ ID NO: 3768755 - DNA, 25 bp, Homo sapien
aacttgtagttttgggcagttgctt

SEQ ID NO: 3768756 - DNA, 25 bp, Homo sapien
ctggtgatccccaggtgaagcatac

SEQ ID NO: 3768757 - DNA, 25 bp, Homo sapien
tctgtactccattactcaactgagc

SEQ ID NO: 3768758 - DNA, 25 bp, Homo sapien
ccatcggtaatcttcccaaatagct

SEQ ID NO: 3768759 - DNA, 25 bp, Homo sapien
gctgaagttcttttcgctgcgtctc

SEQ ID NO: 3768760 - DNA, 25 bp, Homo sapien
ctggaagtctttccatcggtaatct

SEQ ID NO: 3768761 - DNA, 25 bp, Homo sapien
tctcctgatgagtagccgctcccgg

SEQ ID NO: 3768762 - DNA, 25 bp, Homo sapien
aattgccttccattcgatcccttgc

SEQ ID NO: 3768763 - DNA, 25 bp, Homo sapien
gatcccttgccttcaccgttcccat

SEQ ID NO: 3768764 - DNA, 25 bp, Homo sapien
gggaccatcttccaagaatcctcag

SEQ ID NO: 3768765 - DNA, 25 bp, Homo sapien
cgttctggtttttatgggctgcctt

SEQ ID NO: 3768766 - DNA, 25 bp, Homo sapien
gcgttctggtttttatgggctgcct

SEQ ID NO: 3768767 - DNA, 25 bp, Homo sapien
ggcgttctggtttttatgggctgcc

SEQ ID NO: 3768768 - DNA, 25 bp, Homo sapien
ccaggtgagactctcgtacagaact

SEQ ID NO: 3768769 - DNA, 25 bp, Homo sapien
gatggccgtagaggtagagattgac

SEQ ID NO: 3768770 - DNA, 25 bp, Homo sapien
taccagtgagaaaggatggccgtag

SEQ ID NO: 3768771 - DNA, 25 bp, Homo sapien
acatgaagcaactatggaaggctcc

SEQ ID NO: 3768772 - DNA, 25 bp, Homo sapien
ccactggtaactgccagttctgtca

SEQ ID NO: 3768773 - DNA, 25 bp, Homo sapien
caagattacattgcacctgtgatca

SEQ ID NO: 3768774 - DNA, 25 bp, Homo sapien
tccactggtaactgccagttctgtc

SEQ ID NO: 3768775 - DNA, 25 bp, Homo sapien
gcacctgtgatcacttctcacatca

SEQ ID NO: 3768776 - DNA, 25 bp, Homo sapien
tctaacacaagagccatatcataaa

SEQ ID NO: 3768777 - DNA, 25 bp, Homo sapien
atgactgatctaacacaagagccat

SEQ ID NO: 3768778 - DNA, 25 bp, Homo sapien
gatgattgagttttcaaggaacggg

SEQ ID NO: 3768779 - DNA, 25 bp, Homo sapien
agaatatatgatttggcaaccatga

SEQ ID NO: 3768780 - DNA, 25 bp, Homo sapien
tcagtgttaggcttggcaagtccca

SEQ ID NO: 3768781 - DNA, 25 bp, Homo sapien
cttggcaagtcccagggagtggact

SEQ ID NO: 3768782 - DNA, 25 bp, Homo sapien
ttctgtacggcaagaagatacaaag

SEQ ID NO: 3768783 - DNA, 25 bp, Homo sapien
ttgatcatttcttctgtacggcaag

SEQ ID NO: 3768784 - DNA, 25 bp, Homo sapien
acttggcgaccttcattcactttcc

SEQ ID NO: 3768785 - DNA, 25 bp, Homo sapien
cactgctcctagagtaggaggagca

SEQ ID NO: 3768786 - DNA, 25 bp, Homo sapien
ccccactgctcctagagtaggagga

SEQ ID NO: 3768787 - DNA, 25 bp, Homo sapien
tctccctgacccacttggcgacctt

SEQ ID NO: 3768788 - DNA, 25 bp, Homo sapien
aagtgttcctgaagggcaattcatt

SEQ ID NO: 3768789 - DNA, 25 bp, Homo sapien
atgaggtacgggcatcaagtgttcc

SEQ ID NO: 3768790 - DNA, 25 bp, Homo sapien
ttcaggtctatagaacagcgtgtgc

SEQ ID NO: 3768791 - DNA, 25 bp, Homo sapien
cctgaagggcaattcatttcaggtc

SEQ ID NO: 3768792 - DNA, 25 bp, Homo sapien
gccaatcttgaaaaacgagaaccag

SEQ ID NO: 3768793 - DNA, 25 bp, Homo sapien
aacggctagatgagaacccggtgct

SEQ ID NO: 3768794 - DNA, 25 bp, Homo sapien
ggataagaatctagcctggcgttca

SEQ ID NO: 3768795 - DNA, 25 bp, Homo sapien
gcctggcgttcataagctctttttc

SEQ ID NO: 3768796 - DNA, 25 bp, Homo sapien
cgattgggctcttatgcttgactcc

SEQ ID NO: 3768797 - DNA, 25 bp, Homo sapien
tatctgccagaagattaggataatg

SEQ ID NO: 3768798 - DNA, 25 bp, Homo sapien
caacaggcaggagaataatgtgcta

SEQ ID NO: 3768799 - DNA, 25 bp, Homo sapien
catcacgggacaattctgcattgtg

SEQ ID NO: 3768800 - DNA, 25 bp, Homo sapien
tttctgagctccacgtgcttcctag

SEQ ID NO: 3768801 - DNA, 25 bp, Homo sapien
ggatcccgggatctggacttgtaaa

SEQ ID NO: 3768802 - DNA, 25 bp, Homo sapien
acaggcactaagctgtgtgttcttc

SEQ ID NO: 3768803 - DNA, 25 bp, Homo sapien
cacaagatctaattgttcagcagag

SEQ ID NO: 3768804 - DNA, 25 bp, Homo sapien
agtttgctggtagccactgcagccc

SEQ ID NO: 3768805 - DNA, 25 bp, Homo sapien
ccggcttggagtttgctggtagcca

SEQ ID NO: 3768806 - DNA, 25 bp, Homo sapien
gagctctgcactcccgagcccgtgc

SEQ ID NO: 3768807 - DNA, 25 bp, Homo sapien
gcatctcggtagtgatgggaacact

SEQ ID NO: 3768808 - DNA, 25 bp, Homo sapien
tccctggtggttgggcaatgcttgt

SEQ ID NO: 3768809 - DNA, 25 bp, Homo sapien
ccctggtggttgggcaatgcttgtt

SEQ ID NO: 3768810 - DNA, 25 bp, Homo sapien
ttccctggtggttgggcaatgcttg

SEQ ID NO: 3768811 - DNA, 25 bp, Homo sapien
ctggtggttgggcaatgcttgtttc

SEQ ID NO: 3768812 - DNA, 25 bp, Homo sapien
cgtgtagcaatagttccacctgtga

SEQ ID NO: 3768813 - DNA, 25 bp, Homo sapien
agcaatagttccacctgtgatctca

SEQ ID NO: 3768814 - DNA, 25 bp, Homo sapien
agtgcacgtgtagcaatagttccac

SEQ ID NO: 3768815 - DNA, 25 bp, Homo sapien
tgcacgtgtagcaatagttccacct

SEQ ID NO: 3768816 - DNA, 25 bp, Homo sapien
ctccttgagcgggtatgacctcaga

SEQ ID NO: 3768817 - DNA, 25 bp, Homo sapien
tctttctgtacccttctaacgaatc

SEQ ID NO: 3768818 - DNA, 25 bp, Homo sapien
gagcgggtatgacctcagatttctt

SEQ ID NO: 3768819 - DNA, 25 bp, Homo sapien
gaatctgagcggagttctcgaagca

SEQ ID NO: 3768820 - DNA, 25 bp, Homo sapien
taaactttttacgctgttgttgctg

SEQ ID NO: 3768821 - DNA, 25 bp, Homo sapien
cgctgttgttgctgaatctgcacat

SEQ ID NO: 3768822 - DNA, 25 bp, Homo sapien
aaactttttacgctgttgttgctga

SEQ ID NO: 3768823 - DNA, 25 bp, Homo sapien
tgttgttgctgaatctgcacattat

SEQ ID NO: 3768824 - DNA, 25 bp, Homo sapien
tttccacaaactgagggcggggaga

SEQ ID NO: 3768825 - DNA, 25 bp, Homo sapien
ctgagggcggggagactgtccttgc

SEQ ID NO: 3768826 - DNA, 25 bp, Homo sapien
ttccacaaactgagggcggggagac

SEQ ID NO: 3768827 - DNA, 25 bp, Homo sapien
tgctgtacagcagggcggcttcatt

SEQ ID NO: 3768828 - DNA, 25 bp, Homo sapien
tcttgcacagataccgtatctatct

SEQ ID NO: 3768829 - DNA, 25 bp, Homo sapien
agataccgtatctatctgaatggca

SEQ ID NO: 3768830 - DNA, 25 bp, Homo sapien
tccctttcattgctgtacagcaggg

SEQ ID NO: 3768831 - DNA, 25 bp, Homo sapien
tgggcatggtgttatcatctcgtag

SEQ ID NO: 3768832 - DNA, 25 bp, Homo sapien
tcatctcgtagaggagagtgtctga

SEQ ID NO: 3768833 - DNA, 25 bp, Homo sapien
gagaaccactgaagcgaatcccctc

SEQ ID NO: 3768834 - DNA, 25 bp, Homo sapien
tgttatcatctcgtagaggagagtg

SEQ ID NO: 3768835 - DNA, 25 bp, Homo sapien
atatcaggaagctgagtacagatgg

SEQ ID NO: 3768836 - DNA, 25 bp, Homo sapien
tggactgactctcatcaataaacgc

SEQ ID NO: 3768837 - DNA, 25 bp, Homo sapien
gaaatcgatattgtgctagacttca

SEQ ID NO: 3768838 - DNA, 25 bp, Homo sapien
tagtagaaccgaccatcagcaggat

SEQ ID NO: 3768839 - DNA, 25 bp, Homo sapien
cagccacgtgggacacccaatgtgt

SEQ ID NO: 3768840 - DNA, 25 bp, Homo sapien
cgagttgggcgatattttcagaatc

SEQ ID NO: 3768841 - DNA, 25 bp, Homo sapien
taatatctacattagcgagttgggc

SEQ ID NO: 3768842 - DNA, 25 bp, Homo sapien
tcgtcactgggcttattgaggaaag

SEQ ID NO: 3768843 - DNA, 25 bp, Homo sapien
tgaggtcctgccatgtgtcagcagt

SEQ ID NO: 3768844 - DNA, 25 bp, Homo sapien
gacagacccagctaaggtctctctt

SEQ ID NO: 3768845 - DNA, 25 bp, Homo sapien
agaggacagacccagctaaggtctc

SEQ ID NO: 3768846 - DNA, 25 bp, Homo sapien
tcctgccatgtgtcagcagtcacac

SEQ ID NO: 3768847 - DNA, 25 bp, Homo sapien
tacattctgtgtcctggtggccttt

SEQ ID NO: 3768848 - DNA, 25 bp, Homo sapien
ctttgtttaactcttgcctctggag

SEQ ID NO: 3768849 - DNA, 25 bp, Homo sapien
cctggtggcctttgtttaactcttg

SEQ ID NO: 3768850 - DNA, 25 bp, Homo sapien
gctacattctgtgtcctggtggcct

SEQ ID NO: 3768851 - DNA, 25 bp, Homo sapien
agtctcacaagggtcaaggggttga

SEQ ID NO: 3768852 - DNA, 25 bp, Homo sapien
tgtttgtggtttatctacttattca

SEQ ID NO: 3768853 - DNA, 25 bp, Homo sapien
tgcctatccatatttcctataagaa

SEQ ID NO: 3768854 - DNA, 25 bp, Homo sapien
gtacctattataagcaatgtgcccc

SEQ ID NO: 3768855 - DNA, 25 bp, Homo sapien
tcctaaagtgtctctatctttccgc

SEQ ID NO: 3768856 - DNA, 25 bp, Homo sapien
ataacctccagttgggcatgtcctg

SEQ ID NO: 3768857 - DNA, 25 bp, Homo sapien
tatctttccgcttttgctcaagtag

SEQ ID NO: 3768858 - DNA, 25 bp, Homo sapien
tttgctcaagtagtttgctctgtgt

SEQ ID NO: 3768859 - DNA, 25 bp, Homo sapien
gttcctgtgagatacctgactggca

SEQ ID NO: 3768860 - DNA, 25 bp, Homo sapien
tagtggttagagtcacttgcagggt

SEQ ID NO: 3768861 - DNA, 25 bp, Homo sapien
tatcagctctgtggtatgacagaag

SEQ ID NO: 3768862 - DNA, 25 bp, Homo sapien
gaaattgagcttccgttggtggtta

SEQ ID NO: 3768863 - DNA, 25 bp, Homo sapien
tcaggagtgaatgaactctccagtc

SEQ ID NO: 3768864 - DNA, 25 bp, Homo sapien
tcttcaggagtgaatgaactctcca

SEQ ID NO: 3768865 - DNA, 25 bp, Homo sapien
cttcaggagtgaatgaactctccag

SEQ ID NO: 3768866 - DNA, 25 bp, Homo sapien
ctcttcaggagtgaatgaactctcc

SEQ ID NO: 3768867 - DNA, 25 bp, Homo sapien
catggcctgccgtggggtgaggacc

SEQ ID NO: 3768868 - DNA, 25 bp, Homo sapien
ctagggagccccaaccctgaggaag

SEQ ID NO: 3768869 - DNA, 25 bp, Homo sapien
tgaggaagaccttcagctggctgct

SEQ ID NO: 3768870 - DNA, 25 bp, Homo sapien
tggggtgaggaccagggtagctgtg

SEQ ID NO: 3768871 - DNA, 25 bp, Homo sapien
gacactgcacacagaggcagcccac

SEQ ID NO: 3768872 - DNA, 25 bp, Homo sapien
ctgtgggtagatgacactgcacaca

SEQ ID NO: 3768873 - DNA, 25 bp, Homo sapien
tgtgggtagatgacactgcacacag

SEQ ID NO: 3768874 - DNA, 25 bp, Homo sapien
ttcatggtcacggggtatccggtgc

SEQ ID NO: 3768875 - DNA, 25 bp, Homo sapien
ggggtatccggtgcctgcagatcct

SEQ ID NO: 3768876 - DNA, 25 bp, Homo sapien
gtgttctccaaagaatgcagctacc

SEQ ID NO: 3768877 - DNA, 25 bp, Homo sapien
gttctccaaagaatgcagctaccag

SEQ ID NO: 3768878 - DNA, 25 bp, Homo sapien
tcgttgcaccaaaaggcaatgattt

SEQ ID NO: 3768879 - DNA, 25 bp, Homo sapien
tgctgggaagtgagaccatcttggc

SEQ ID NO: 3768880 - DNA, 25 bp, Homo sapien
agtgctgggaagtgagaccatcttg

SEQ ID NO: 3768881 - DNA, 25 bp, Homo sapien
ctctgcacagcaatcgttgcaccaa

SEQ ID NO: 3768882 - DNA, 25 bp, Homo sapien
cttttgccgagggtgacgctgtgct

SEQ ID NO: 3768883 - DNA, 25 bp, Homo sapien
cgctgtgctggtaggcggtgcagct

SEQ ID NO: 3768884 - DNA, 25 bp, Homo sapien
cagtttagcactggctggtagaagc

SEQ ID NO: 3768885 - DNA, 25 bp, Homo sapien
aagcaggcagccttttgccgagggt

SEQ ID NO: 3768886 - DNA, 25 bp, Homo sapien
tgaagcttgtgtcagtgtgcttgtg

SEQ ID NO: 3768887 - DNA, 25 bp, Homo sapien
ttgtttgaagcttgtgtcagtgtgc

SEQ ID NO: 3768888 - DNA, 25 bp, Homo sapien
cacaaactgcggtgggggatgatca

SEQ ID NO: 3768889 - DNA, 25 bp, Homo sapien
ggatgatcatgggttgtgggaaatg

SEQ ID NO: 3768890 - DNA, 25 bp, Homo sapien
aaagatctattgttattttgaagac

SEQ ID NO: 3768891 - DNA, 25 bp, Homo sapien
aggacaggctattttcctgactagg

SEQ ID NO: 3768892 - DNA, 25 bp, Homo sapien
tgaagacggaggacaggctattttc

SEQ ID NO: 3768893 - DNA, 25 bp, Homo sapien
gatctattgttattttgaagacgga

SEQ ID NO: 3768894 - DNA, 25 bp, Homo sapien
cagtctctcctgcaacttgtgatgt

SEQ ID NO: 3768895 - DNA, 25 bp, Homo sapien
ggaagcctctcgtggcagcgcattg

SEQ ID NO: 3768896 - DNA, 25 bp, Homo sapien
ggccagctgcacgtacataaagatt

SEQ ID NO: 3768897 - DNA, 25 bp, Homo sapien
agattgtagagcatttccactgagc

SEQ ID NO: 3768898 - DNA, 25 bp, Homo sapien
atggttctggagcatgactctcttc

SEQ ID NO: 3768899 - DNA, 25 bp, Homo sapien
gctgttgaagttgacaagagtccca

SEQ ID NO: 3768900 - DNA, 25 bp, Homo sapien
agcagctgttgaagttgacaagagt

SEQ ID NO: 3768901 - DNA, 25 bp, Homo sapien
gctccatggttctggagcatgactc

SEQ ID NO: 3768902 - DNA, 25 bp, Homo sapien
cacgtaggtggttccagtggaaatg

SEQ ID NO: 3768903 - DNA, 25 bp, Homo sapien
ctgaaaacacgtaggtggttccagt

SEQ ID NO: 3768904 - DNA, 25 bp, Homo sapien
agtggaaatgggtgtcaactccagc

SEQ ID NO: 3768905 - DNA, 25 bp, Homo sapien
ggttccagtggaaatgggtgtcaac

SEQ ID NO: 3768906 - DNA, 25 bp, Homo sapien
ctgtcccaaatgtaaaatgtagttt

SEQ ID NO: 3768907 - DNA, 25 bp, Homo sapien
ataataagcttgatagggttagtca

SEQ ID NO: 3768908 - DNA, 25 bp, Homo sapien
taaaatgtagtttataataagcttg

SEQ ID NO: 3768909 - DNA, 25 bp, Homo sapien
ttataataagcttgatagggttagt

SEQ ID NO: 3768910 - DNA, 25 bp, Homo sapien
agcagaaggatcatatccaggggcc

SEQ ID NO: 3768911 - DNA, 25 bp, Homo sapien
tccatcacgtgaacaatgtcctggg

SEQ ID NO: 3768912 - DNA, 25 bp, Homo sapien
tagctggtgtattgccccactgacc

SEQ ID NO: 3768913 - DNA, 25 bp, Homo sapien
tctagtggaacccagacccacacca

SEQ ID NO: 3768914 - DNA, 25 bp, Homo sapien
aatgaaaggagcagtagtcctctag

SEQ ID NO: 3768915 - DNA, 25 bp, Homo sapien
ggcaactgaactctaagctgctgat

SEQ ID NO: 3768916 - DNA, 25 bp, Homo sapien
aacatctccagtagggcactgcaaa

SEQ ID NO: 3768917 - DNA, 25 bp, Homo sapien
cataagtaggatctgggagcccgtc

SEQ ID NO: 3768918 - DNA, 25 bp, Homo sapien
caagctttgagttcaggcgcaataa

SEQ ID NO: 3768919 - DNA, 25 bp, Homo sapien
ggagaaagcctttactgtggagagc

SEQ ID NO: 3768920 - DNA, 25 bp, Homo sapien
ttaccccaaagagtggattcactgg

SEQ ID NO: 3768921 - DNA, 25 bp, Homo sapien
ccaaagagtggattcactggttatg

SEQ ID NO: 3768922 - DNA, 25 bp, Homo sapien
taagtgacaattaccccaaagagtg

SEQ ID NO: 3768923 - DNA, 25 bp, Homo sapien
acaattaccccaaagagtggattca

SEQ ID NO: 3768924 - DNA, 25 bp, Homo sapien
tcagaaataagacgcagaaaaatat

SEQ ID NO: 3768925 - DNA, 25 bp, Homo sapien
tgcagaacaagtttataatcagaaa

SEQ ID NO: 3768926 - DNA, 25 bp, Homo sapien
ttataatcagaaataagacgcagaa

SEQ ID NO: 3768927 - DNA, 25 bp, Homo sapien
aaaatatcaatggccttgtgttcca

SEQ ID NO: 3768928 - DNA, 25 bp, Homo sapien
tgttcctgatgctctatttccttat

SEQ ID NO: 3768929 - DNA, 25 bp, Homo sapien
acccagatgataaactcgggaatca

SEQ ID NO: 3768930 - DNA, 25 bp, Homo sapien
tgataaactcgggaatcacctttgt

SEQ ID NO: 3768931 - DNA, 25 bp, Homo sapien
cagatgataaactcgggaatcacct

SEQ ID NO: 3768932 - DNA, 25 bp, Homo sapien
tggcagcttgaaaaagacctgcaag

SEQ ID NO: 3768933 - DNA, 25 bp, Homo sapien
agcttgaaaaagacctgcaagaatc

SEQ ID NO: 3768934 - DNA, 25 bp, Homo sapien
cataattcgcaggctagagctggca

SEQ ID NO: 3768935 - DNA, 25 bp, Homo sapien
ataattcgcaggctagagctggcag

SEQ ID NO: 3768936 - DNA, 25 bp, Homo sapien
tggtgaccgggttgtgtcaccttga

SEQ ID NO: 3768937 - DNA, 25 bp, Homo sapien
tctttcgtggtgaccgggttgtgtc

SEQ ID NO: 3768938 - DNA, 25 bp, Homo sapien
gaccgggttgtgtcaccttgattag

SEQ ID NO: 3768939 - DNA, 25 bp, Homo sapien
ttgtgtcaccttgattagggtccat

SEQ ID NO: 3768940 - DNA, 25 bp, Homo sapien
ttgcagtggattcttcatctgaaat

SEQ ID NO: 3768941 - DNA, 25 bp, Homo sapien
tacttgcgaaatggaaatctctcta

SEQ ID NO: 3768942 - DNA, 25 bp, Homo sapien
ctatggttctttgcaagttgcctga

SEQ ID NO: 3768943 - DNA, 25 bp, Homo sapien
tctgagcacactgcaggctgttgca

SEQ ID NO: 3768944 - DNA, 25 bp, Homo sapien
aatgagatgccctgtgatccccgga

SEQ ID NO: 3768945 - DNA, 25 bp, Homo sapien
acttgggcaggacgtcagaggactc

SEQ ID NO: 3768946 - DNA, 25 bp, Homo sapien
tcacttgggcaggacgtcagaggac

SEQ ID NO: 3768947 - DNA, 25 bp, Homo sapien
cttgggcaggacgtcagaggactcg

SEQ ID NO: 3768948 - DNA, 25 bp, Homo sapien
tgggcaggacgtcagaggactcgga

SEQ ID NO: 3768949 - DNA, 25 bp, Homo sapien
ctgcagcccatggcgtagctgaggc

SEQ ID NO: 3768950 - DNA, 25 bp, Homo sapien
tgcagcccatggcgtagctgaggcc

SEQ ID NO: 3768951 - DNA, 25 bp, Homo sapien
ctcaatctccgcctgggaccggctg

SEQ ID NO: 3768952 - DNA, 25 bp, Homo sapien
caatctccgcctgggaccggctgat

SEQ ID NO: 3768953 - DNA, 25 bp, Homo sapien
ctccgcctgggaccggctgatgttc

SEQ ID NO: 3768954 - DNA, 25 bp, Homo sapien
atctccgcctgggaccggctgatgt

SEQ ID NO: 3768955 - DNA, 25 bp, Homo sapien
ccaacatgtacatgttgctctgagc

SEQ ID NO: 3768956 - DNA, 25 bp, Homo sapien
gagctacagacgtgtccgaaatctg

SEQ ID NO: 3768957 - DNA, 25 bp, Homo sapien
ctccaacatgtacatgttgctctga

SEQ ID NO: 3768958 - DNA, 25 bp, Homo sapien
tggacagagctacagacgtgtccga

SEQ ID NO: 3768959 - DNA, 25 bp, Homo sapien
ctgtttgactgtgatggcgtgatgc

SEQ ID NO: 3768960 - DNA, 25 bp, Homo sapien
caaggagctgatgcgggcactgggc

SEQ ID NO: 3768961 - DNA, 25 bp, Homo sapien
cactgggcccacttgtgtaggagcg

SEQ ID NO: 3768962 - DNA, 25 bp, Homo sapien
tcaaggagctgatgcgggcactggg

SEQ ID NO: 3768963 - DNA, 25 bp, Homo sapien
gatgcgggcactgggcccacttgtg

SEQ ID NO: 3768964 - DNA, 25 bp, Homo sapien
gacacgttgtaggactgacttctgg

SEQ ID NO: 3768965 - DNA, 25 bp, Homo sapien
caggctgagattccagaaggagcag

SEQ ID NO: 3768966 - DNA, 25 bp, Homo sapien
ctgagattccagaaggagcagagaa

SEQ ID NO: 3768967 - DNA, 25 bp, Homo sapien
gaaccaggctgagattccagaagga

SEQ ID NO: 3768968 - DNA, 25 bp, Homo sapien
ggaagcaggcgggctgaaccaggct

SEQ ID NO: 3768969 - DNA, 25 bp, Homo sapien
tttatatccttgaccagaaccctgc

SEQ ID NO: 3768970 - DNA, 25 bp, Homo sapien
gcccctcggtatgtgaaaacatgga

SEQ ID NO: 3768971 - DNA, 25 bp, Homo sapien
tacatgtagagctcagttatagtcc

SEQ ID NO: 3768972 - DNA, 25 bp, Homo sapien
tatatgaacattaaagcccctcggt

SEQ ID NO: 3768973 - DNA, 25 bp, Homo sapien
tatctagtgctcgtgttccatgctg

SEQ ID NO: 3768974 - DNA, 25 bp, Homo sapien
tgctgctgataactcgtgtggtcta

SEQ ID NO: 3768975 - DNA, 25 bp, Homo sapien
tttcttgttcaacagagactgaggg

SEQ ID NO: 3768976 - DNA, 25 bp, Homo sapien
gaggcatcaccacagtaagcatttc

SEQ ID NO: 3768977 - DNA, 25 bp, Homo sapien
acttggcctcggttggagaagactg

SEQ ID NO: 3768978 - DNA, 25 bp, Homo sapien
cttgcggcacagacatatggtcgtg

SEQ ID NO: 3768979 - DNA, 25 bp, Homo sapien
cgtgccctaggaagccttagtctgg

SEQ ID NO: 3768980 - DNA, 25 bp, Homo sapien
gagcacccagcgttcatggtggcca

SEQ ID NO: 3768981 - DNA, 25 bp, Homo sapien
gccgactgggtttgcatactaagaa

SEQ ID NO: 3768982 - DNA, 25 bp, Homo sapien
atcccgcccgattcccagtgtgaag

SEQ ID NO: 3768983 - DNA, 25 bp, Homo sapien
tagctctataacaaactgctgaacc

SEQ ID NO: 3768984 - DNA, 25 bp, Homo sapien
tgaacctgtttctaaagccgactgg

SEQ ID NO: 3768985 - DNA, 25 bp, Homo sapien
ccatgacgtctcttgcacctgtgtg

SEQ ID NO: 3768986 - DNA, 25 bp, Homo sapien
cacctgtgtgctcctagtgctgcca

SEQ ID NO: 3768987 - DNA, 25 bp, Homo sapien
cgttgtacctggatctatgagtcga

SEQ ID NO: 3768988 - DNA, 25 bp, Homo sapien
cagtctggaactcatggataacaag

SEQ ID NO: 3768989 - DNA, 25 bp, Homo sapien
gagctaacatttggttccggtgaaa

SEQ ID NO: 3768990 - DNA, 25 bp, Homo sapien
aatggtgaactttactgaggctccc

SEQ ID NO: 3768991 - DNA, 25 bp, Homo sapien
gataaccaggtcatgctcagctgat

SEQ ID NO: 3768992 - DNA, 25 bp, Homo sapien
tgaaatggaaacctcgaaatgacga

SEQ ID NO: 3768993 - DNA, 25 bp, Homo sapien
cataggtcaacagtcacatcagtca

SEQ ID NO: 3768994 - DNA, 25 bp, Homo sapien
ttctacatagaaggcatcagagtga

SEQ ID NO: 3768995 - DNA, 25 bp, Homo sapien
tgacaatattaggtgctcgggctcc

SEQ ID NO: 3768996 - DNA, 25 bp, Homo sapien
ctaggaaaattcatgctgtgggcac

SEQ ID NO: 3768997 - DNA, 25 bp, Homo sapien
tgctcttaaagtcaaggctggctct

SEQ ID NO: 3768998 - DNA, 25 bp, Homo sapien
aaagcaagagccctagatctccgag

SEQ ID NO: 3768999 - DNA, 25 bp, Homo sapien
tgagcactctggatctctgcaatgg

SEQ ID NO: 3769000 - DNA, 25 bp, Homo sapien
gctggctctcagtagggcacatcca

SEQ ID NO: 3769001 - DNA, 25 bp, Homo sapien
gatgaatacattcaaaggcgaagca

SEQ ID NO: 3769002 - DNA, 25 bp, Homo sapien
tacatgagacgcattcgatgaatac

SEQ ID NO: 3769003 - DNA, 25 bp, Homo sapien
agcattccaaaaagtgctacatgag

SEQ ID NO: 3769004 - DNA, 25 bp, Homo sapien
cgaagcagaataagggctgactgga

SEQ ID NO: 3769005 - DNA, 25 bp, Homo sapien
cctgccagacatgaacaagagaact

SEQ ID NO: 3769006 - DNA, 25 bp, Homo sapien
cccagtgcttgagggagagctttct

SEQ ID NO: 3769007 - DNA, 25 bp, Homo sapien
gagaactctgtagttctaattgcca

SEQ ID NO: 3769008 - DNA, 25 bp, Homo sapien
gcttgagggagagctttctctcttg

SEQ ID NO: 3769009 - DNA, 25 bp, Homo sapien
gccacttcctgtgcaagtctgggaa

SEQ ID NO: 3769010 - DNA, 25 bp, Homo sapien
ccttcacgtgctttgtctacctgct

SEQ ID NO: 3769011 - DNA, 25 bp, Homo sapien
ccaggccacttcctgtgcaagtctg

SEQ ID NO: 3769012 - DNA, 25 bp, Homo sapien
actgcattccttcacgtgctttgtc

SEQ ID NO: 3769013 - DNA, 25 bp, Homo sapien
ctccctcagatgttgaactactcaa

SEQ ID NO: 3769014 - DNA, 25 bp, Homo sapien
ccctcagatgttgaactactcaaaa

SEQ ID NO: 3769015 - DNA, 25 bp, Homo sapien
actccctcagatgttgaactactca

SEQ ID NO: 3769016 - DNA, 25 bp, Homo sapien
tccctcagatgttgaactactcaaa

SEQ ID NO: 3769017 - DNA, 25 bp, Homo sapien
tcctagtagggagcacatttgtgtt

SEQ ID NO: 3769018 - DNA, 25 bp, Homo sapien
tataagcgtggattgcaggcagatc

SEQ ID NO: 3769019 - DNA, 25 bp, Homo sapien
caggcagatcttcaagacgagtgat

SEQ ID NO: 3769020 - DNA, 25 bp, Homo sapien
actcaggtccagtctataagcgtgg

SEQ ID NO: 3769021 - DNA, 25 bp, Homo sapien
taagcccgatgggacaaatccaaaa

SEQ ID NO: 3769022 - DNA, 25 bp, Homo sapien
ctgcagtaataagcccgatgggaca

SEQ ID NO: 3769023 - DNA, 25 bp, Homo sapien
ctaaggaacccggaatggtgagtgt

SEQ ID NO: 3769024 - DNA, 25 bp, Homo sapien
acaaatccaaaacgcgctaaccctg

SEQ ID NO: 3769025 - DNA, 25 bp, Homo sapien
gccatgcttgtgtgaacatgtcgct

SEQ ID NO: 3769026 - DNA, 25 bp, Homo sapien
aaccaaatggtttatgcatgggctc

SEQ ID NO: 3769027 - DNA, 25 bp, Homo sapien
gacgttgtcttactgttgcagaagg

SEQ ID NO: 3769028 - DNA, 25 bp, Homo sapien
tccacgaacacgagactaggcttgc

SEQ ID NO: 3769029 - DNA, 25 bp, Homo sapien
aatccagtcgttggtttggaggcga

SEQ ID NO: 3769030 - DNA, 25 bp, Homo sapien
aggcgagggctctctgcggtcctct

SEQ ID NO: 3769031 - DNA, 25 bp, Homo sapien
gtttgtacagtagaatccagtcgtt

SEQ ID NO: 3769032 - DNA, 25 bp, Homo sapien
gtcctctcctactgtcaggagcttc

SEQ ID NO: 3769033 - DNA, 25 bp, Homo sapien
cctgaggtcacacctagagtatggg

SEQ ID NO: 3769034 - DNA, 25 bp, Homo sapien
tttatagaaactgaagtgtcgcgag

SEQ ID NO: 3769035 - DNA, 25 bp, Homo sapien
taatccacaaaataccctgcaaggt

SEQ ID NO: 3769036 - DNA, 25 bp, Homo sapien
cgtgtaatacccattgcaaagcaaa

SEQ ID NO: 3769037 - DNA, 25 bp, Homo sapien
ggctaacacatagggcagagagtcc

SEQ ID NO: 3769038 - DNA, 25 bp, Homo sapien
cataggagaaccaccttacgtacgg

SEQ ID NO: 3769039 - DNA, 25 bp, Homo sapien
tatttgccgtacatattcagggtca

SEQ ID NO: 3769040 - DNA, 25 bp, Homo sapien
ttacgtacggtccagtggcagcagg

SEQ ID NO: 3769041 - DNA, 25 bp, Homo sapien
aaatagatgttccagtcaccagctt

SEQ ID NO: 3769042 - DNA, 25 bp, Homo sapien
cttgaagaccagtgcaagctttgga

SEQ ID NO: 3769043 - DNA, 25 bp, Homo sapien
gctgcatggtataattcaatgtgtg

SEQ ID NO: 3769044 - DNA, 25 bp, Homo sapien
ggaattggtcttcaagccttcaaat

SEQ ID NO: 3769045 - DNA, 25 bp, Homo sapien
gaatcgcagggctagaatgaatttt

SEQ ID NO: 3769046 - DNA, 25 bp, Homo sapien
aatcgcagggctagaatgaattttt

SEQ ID NO: 3769047 - DNA, 25 bp, Homo sapien
atcgcagggctagaatgaatttttg

SEQ ID NO: 3769048 - DNA, 25 bp, Homo sapien
aaaccttaggcccacagccggactg

SEQ ID NO: 3769049 - DNA, 25 bp, Homo sapien
gggagagaatttggcctgcgtggag

SEQ ID NO: 3769050 - DNA, 25 bp, Homo sapien
ggcctgcgtggagaaaccttaggcc

SEQ ID NO: 3769051 - DNA, 25 bp, Homo sapien
tggagaaaccttaggcccacagccg

SEQ ID NO: 3769052 - DNA, 25 bp, Homo sapien
cttctgagactagagattgagtaca

SEQ ID NO: 3769053 - DNA, 25 bp, Homo sapien
gagactagagattgagtacattcac

SEQ ID NO: 3769054 - DNA, 25 bp, Homo sapien
tctgagactagagattgagtacatt

SEQ ID NO: 3769055 - DNA, 25 bp, Homo sapien
agcttctgagactagagattgagta

SEQ ID NO: 3769056 - DNA, 25 bp, Homo sapien
catagcaatgatacggttttgaggg

SEQ ID NO: 3769057 - DNA, 25 bp, Homo sapien
caatgatacggttttgagggtttct

SEQ ID NO: 3769058 - DNA, 25 bp, Homo sapien
gaattcatagcaatgatacggtttt

SEQ ID NO: 3769059 - DNA, 25 bp, Homo sapien
ctgtgaattcatagcaatgatacgg

SEQ ID NO: 3769060 - DNA, 25 bp, Homo sapien
tgatttgtgaggcttattgaaaaca

SEQ ID NO: 3769061 - DNA, 25 bp, Homo sapien
tccatgcttgatttgtgaggcttat

SEQ ID NO: 3769062 - DNA, 25 bp, Homo sapien
tgaggcttattgaaaacaatggcat

SEQ ID NO: 3769063 - DNA, 25 bp, Homo sapien
tcttttccatgcttgatttgtgagg

SEQ ID NO: 3769064 - DNA, 25 bp, Homo sapien
tttccattgttttcaggagttttca

SEQ ID NO: 3769065 - DNA, 25 bp, Homo sapien
tgatttccattgttttcaggagttt

SEQ ID NO: 3769066 - DNA, 25 bp, Homo sapien
tctgactccttgatttccattgttt

SEQ ID NO: 3769067 - DNA, 25 bp, Homo sapien
ccttgatttccattgttttcaggag

SEQ ID NO: 3769068 - DNA, 25 bp, Homo sapien
tgttttgattaaagacataattgtg

SEQ ID NO: 3769069 - DNA, 25 bp, Homo sapien
gattaaagacataattgtgatccaa

SEQ ID NO: 3769070 - DNA, 25 bp, Homo sapien
tggcataaggcttggtttgttttga

SEQ ID NO: 3769071 - DNA, 25 bp, Homo sapien
tatggcataaggcttggtttgtttt

SEQ ID NO: 3769072 - DNA, 25 bp, Homo sapien
tggagggtaagctacaatatcggtc

SEQ ID NO: 3769073 - DNA, 25 bp, Homo sapien
acaatgagcaaattatcctgccctg

SEQ ID NO: 3769074 - DNA, 25 bp, Homo sapien
atgagcaaattatcctgccctggag

SEQ ID NO: 3769075 - DNA, 25 bp, Homo sapien
caatatcggtcccatgcttcaggaa

SEQ ID NO: 3769076 - DNA, 25 bp, Homo sapien
cagtagcaagctcttgatgaagtgt

SEQ ID NO: 3769077 - DNA, 25 bp, Homo sapien
tttcttccacctccggttgccttga

SEQ ID NO: 3769078 - DNA, 25 bp, Homo sapien
gccttgacagtagcaagctcttgat

SEQ ID NO: 3769079 - DNA, 25 bp, Homo sapien
tccggttgccttgacagtagcaagc

SEQ ID NO: 3769080 - DNA, 25 bp, Homo sapien
aagtacagagtggactcctggatcc

SEQ ID NO: 3769081 - DNA, 25 bp, Homo sapien
ggaccaaagtacagagtggactcct

SEQ ID NO: 3769082 - DNA, 25 bp, Homo sapien
gtacagagtggactcctggatccat

SEQ ID NO: 3769083 - DNA, 25 bp, Homo sapien
ccaaagtacagagtggactcctgga

SEQ ID NO: 3769084 - DNA, 25 bp, Homo sapien
tatcagaagcgccatacagtataat

SEQ ID NO: 3769085 - DNA, 25 bp, Homo sapien
ctttgccagatccagacatcagact

SEQ ID NO: 3769086 - DNA, 25 bp, Homo sapien
tttacaaccgtctatcagaagcgcc

SEQ ID NO: 3769087 - DNA, 25 bp, Homo sapien
gacatcagacttagctttacaaccg

SEQ ID NO: 3769088 - DNA, 25 bp, Homo sapien
tccctccactcccaaagctttgctc

SEQ ID NO: 3769089 - DNA, 25 bp, Homo sapien
ctctgaacagcagtatgagaagcta

SEQ ID NO: 3769090 - DNA, 25 bp, Homo sapien
tctgaacagcagtatgagaagctag

SEQ ID NO: 3769091 - DNA, 25 bp, Homo sapien
ctccctccactcccaaagctttgct

SEQ ID NO: 3769092 - DNA, 25 bp, Homo sapien
agggctgtttgtctcaagctggaac

SEQ ID NO: 3769093 - DNA, 25 bp, Homo sapien
gctgtttgtctcaagctggaactgc

SEQ ID NO: 3769094 - DNA, 25 bp, Homo sapien
gtttgtctcaagctggaactgccca

SEQ ID NO: 3769095 - DNA, 25 bp, Homo sapien
tctcaagctggaactgcccagacat

SEQ ID NO: 3769096 - DNA, 25 bp, Homo sapien
aagggactgtgtcctatgtgatttc

SEQ ID NO: 3769097 - DNA, 25 bp, Homo sapien
cttttatagagaactgtgcattcct

SEQ ID NO: 3769098 - DNA, 25 bp, Homo sapien
ctgttcatccacttttatagagaac

SEQ ID NO: 3769099 - DNA, 25 bp, Homo sapien
cctatgtgatttcatacctgaagaa

SEQ ID NO: 3769100 - DNA, 25 bp, Homo sapien
tgagcttattagcaggattcatctg

SEQ ID NO: 3769101 - DNA, 25 bp, Homo sapien
agattatatcaaagggagaattcac

SEQ ID NO: 3769102 - DNA, 25 bp, Homo sapien
ccttttcgaaagattccaatgtgag

SEQ ID NO: 3769103 - DNA, 25 bp, Homo sapien
caacaacagcaagcatgatgatttg

SEQ ID NO: 3769104 - DNA, 25 bp, Homo sapien
cttctatctcaagttcatcatgagg

SEQ ID NO: 3769105 - DNA, 25 bp, Homo sapien
tctagtggtgtcaggactaggcttg

SEQ ID NO: 3769106 - DNA, 25 bp, Homo sapien
cattcctaggaaaggtattccgact

SEQ ID NO: 3769107 - DNA, 25 bp, Homo sapien
catgaggatgatgttccattcctag

SEQ ID NO: 3769108 - DNA, 25 bp, Homo sapien
gttctaacaccatagggttgtgttc

SEQ ID NO: 3769109 - DNA, 25 bp, Homo sapien
ttggttctaacaccatagggttgtg

SEQ ID NO: 3769110 - DNA, 25 bp, Homo sapien
ctaacaccatagggttgtgttccat

SEQ ID NO: 3769111 - DNA, 25 bp, Homo sapien
tggttctaacaccatagggttgtgt

SEQ ID NO: 3769112 - DNA, 25 bp, Homo sapien
accggaccttcgatagtaatggcat

SEQ ID NO: 3769113 - DNA, 25 bp, Homo sapien
cgttggagggatgatgtttcagtgg

SEQ ID NO: 3769114 - DNA, 25 bp, Homo sapien
cagtggtctccaaggtggttaaccg

SEQ ID NO: 3769115 - DNA, 25 bp, Homo sapien
taaccggaccttcgatagtaatggc

SEQ ID NO: 3769116 - DNA, 25 bp, Homo sapien
gtgtcacttccagattcaccagaaa

SEQ ID NO: 3769117 - DNA, 25 bp, Homo sapien
agggtgtcacttccagattcaccag

SEQ ID NO: 3769118 - DNA, 25 bp, Homo sapien
gtcacttccagattcaccagaaatc

SEQ ID NO: 3769119 - DNA, 25 bp, Homo sapien
tcagggtgtcacttccagattcacc

SEQ ID NO: 3769120 - DNA, 25 bp, Homo sapien
tggcaccatcaaagggttttacaat

SEQ ID NO: 3769121 - DNA, 25 bp, Homo sapien
aagggttttacaatcatcaaatgaa

SEQ ID NO: 3769122 - DNA, 25 bp, Homo sapien
tcaaatgaaaatcataatttgactt

SEQ ID NO: 3769123 - DNA, 25 bp, Homo sapien
cttttcaacagtcagttgctcttgc

SEQ ID NO: 3769124 - DNA, 25 bp, Homo sapien
ttctttgtaggtattgatttcatcc

SEQ ID NO: 3769125 - DNA, 25 bp, Homo sapien
caattagcagtcttagatgagtgga

SEQ ID NO: 3769126 - DNA, 25 bp, Homo sapien
tgttcaacaagcaatgtaaatgagt

SEQ ID NO: 3769127 - DNA, 25 bp, Homo sapien
ggtatcatcgagtgaggattgaagc

SEQ ID NO: 3769128 - DNA, 25 bp, Homo sapien
cttacatatacctccctcaaatttt

SEQ ID NO: 3769129 - DNA, 25 bp, Homo sapien
ctaccttcttacatatacctccctc

SEQ ID NO: 3769130 - DNA, 25 bp, Homo sapien
taccttcttacatatacctccctca

SEQ ID NO: 3769131 - DNA, 25 bp, Homo sapien
cttcttacatatacctccctcaaat

SEQ ID NO: 3769132 - DNA, 25 bp, Homo sapien
ggcaaagatcatactcactccctgt

SEQ ID NO: 3769133 - DNA, 25 bp, Homo sapien
tggctcggcaaagatcatactcact

SEQ ID NO: 3769134 - DNA, 25 bp, Homo sapien
caggtgtatggctcggcaaagatca

SEQ ID NO: 3769135 - DNA, 25 bp, Homo sapien
agttgaaacgtgcaggtgtatggct

SEQ ID NO: 3769136 - DNA, 25 bp, Homo sapien
aaaaatggataagaagaccagtagc

SEQ ID NO: 3769137 - DNA, 25 bp, Homo sapien
gaccagtagcgactttctccgtaca

SEQ ID NO: 3769138 - DNA, 25 bp, Homo sapien
cctcttcattggcatgtgtggtccc

SEQ ID NO: 3769139 - DNA, 25 bp, Homo sapien
tcttcattggcatgtgtggtcccac

SEQ ID NO: 3769140 - DNA, 25 bp, Homo sapien
tcattgtttctaggtccaataatgc

SEQ ID NO: 3769141 - DNA, 25 bp, Homo sapien
gtcattgtttctaggtccaataatg

SEQ ID NO: 3769142 - DNA, 25 bp, Homo sapien
cattgtttctaggtccaataatgct

SEQ ID NO: 3769143 - DNA, 25 bp, Homo sapien
attgtttctaggtccaataatgctt

SEQ ID NO: 3769144 - DNA, 25 bp, Homo sapien
tctgatgagtttttcgctggtggac

SEQ ID NO: 3769145 - DNA, 25 bp, Homo sapien
ctggtggacgtagccctgctcttga

SEQ ID NO: 3769146 - DNA, 25 bp, Homo sapien
acgtgatgagatggttcctgggtct

SEQ ID NO: 3769147 - DNA, 25 bp, Homo sapien
cacacggatgtccttcaagcctgaa

SEQ ID NO: 3769148 - DNA, 25 bp, Homo sapien
tgccccttttgggagggaatacata

SEQ ID NO: 3769149 - DNA, 25 bp, Homo sapien
aaagcaaagtggcataaaattgccc

SEQ ID NO: 3769150 - DNA, 25 bp, Homo sapien
gtatttgaaggcacgatgttcccct

SEQ ID NO: 3769151 - DNA, 25 bp, Homo sapien
ggcacgcacaccatagttttctatt

SEQ ID NO: 3769152 - DNA, 25 bp, Homo sapien
taatgttacgagagttgagatgtgg

SEQ ID NO: 3769153 - DNA, 25 bp, Homo sapien
tagccaggccataatgttaatgtta

SEQ ID NO: 3769154 - DNA, 25 bp, Homo sapien
tgagatgtggatgactttcactaaa

SEQ ID NO: 3769155 - DNA, 25 bp, Homo sapien
ttttttctatcatggtgatgctgga

SEQ ID NO: 3769156 - DNA, 25 bp, Homo sapien
tttctttagttcattgatgaacagc

SEQ ID NO: 3769157 - DNA, 25 bp, Homo sapien
ttctttagttcattgatgaacagca

SEQ ID NO: 3769158 - DNA, 25 bp, Homo sapien
tctttagttcattgatgaacagcat

SEQ ID NO: 3769159 - DNA, 25 bp, Homo sapien
ttacatcttaaactctcaagatcca

SEQ ID NO: 3769160 - DNA, 25 bp, Homo sapien
tacatcttaaactctcaagatccat

SEQ ID NO: 3769161 - DNA, 25 bp, Homo sapien
tttacatcttaaactctcaagatcc

SEQ ID NO: 3769162 - DNA, 25 bp, Homo sapien
cctgttcgactcagctgcaagaaaa

SEQ ID NO: 3769163 - DNA, 25 bp, Homo sapien
tcgactcagctgcaagaaaacttgt

SEQ ID NO: 3769164 - DNA, 25 bp, Homo sapien
tcaatatacgatgattccctccttt

SEQ ID NO: 3769165 - DNA, 25 bp, Homo sapien
gcatgacgaggctggctgacttctg

SEQ ID NO: 3769166 - DNA, 25 bp, Homo sapien
ctgcttaaggtaggatggatgcctc

SEQ ID NO: 3769167 - DNA, 25 bp, Homo sapien
tgcttaaggtaggatggatgcctcc

SEQ ID NO: 3769168 - DNA, 25 bp, Homo sapien
gatggatgcctcccagtggatggta

SEQ ID NO: 3769169 - DNA, 25 bp, Homo sapien
ggatgcctcccagtggatggtacat

SEQ ID NO: 3769170 - DNA, 25 bp, Homo sapien
taattctgcgccattgataagcatg

SEQ ID NO: 3769171 - DNA, 25 bp, Homo sapien
ccccagtgaatgatttagtgctgtt

SEQ ID NO: 3769172 - DNA, 25 bp, Homo sapien
tatagtgtgagtagggttcaagtct

SEQ ID NO: 3769173 - DNA, 25 bp, Homo sapien
tggaaactccattgcctatcaaagc

SEQ ID NO: 3769174 - DNA, 25 bp, Homo sapien
tacacaggattgaaaggagacattt

SEQ ID NO: 3769175 - DNA, 25 bp, Homo sapien
ctacacaggattgaaaggagacatt

SEQ ID NO: 3769176 - DNA, 25 bp, Homo sapien
attgcaatacttgcctatcaacaga

SEQ ID NO: 3769177 - DNA, 25 bp, Homo sapien
aggtctaactaagccgcagaacagg

SEQ ID NO: 3769178 - DNA, 25 bp, Homo sapien
tgttgctttccttaggtctaactaa

SEQ ID NO: 3769179 - DNA, 25 bp, Homo sapien
ccagcacattgcaatacttgcctat

SEQ ID NO: 3769180 - DNA, 25 bp, Homo sapien
agaaaccagtaggatatgtgaccaa

SEQ ID NO: 3769181 - DNA, 25 bp, Homo sapien
aaatttggggctctcgtcagagaaa

SEQ ID NO: 3769182 - DNA, 25 bp, Homo sapien
gggctctcgtcagagaaaccagtag

SEQ ID NO: 3769183 - DNA, 25 bp, Homo sapien
cagtaggatatgtgaccaaaggcat

SEQ ID NO: 3769184 - DNA, 25 bp, Homo sapien
tgtaatgacaatgtgggcatttcca

SEQ ID NO: 3769185 - DNA, 25 bp, Homo sapien
caaaatctcggtaaccgctgacatt

SEQ ID NO: 3769186 - DNA, 25 bp, Homo sapien
ccatcatgagttcttacgatattac

SEQ ID NO: 3769187 - DNA, 25 bp, Homo sapien
gagttcttacgatattacttggtga

SEQ ID NO: 3769188 - DNA, 25 bp, Homo sapien
ggcagtgccttggttagtttaccac

SEQ ID NO: 3769189 - DNA, 25 bp, Homo sapien
gtttgcagagcaatctcaactgtgt

SEQ ID NO: 3769190 - DNA, 25 bp, Homo sapien
tcaaagtgagaggtgaaagacacac

SEQ ID NO: 3769191 - DNA, 25 bp, Homo sapien
attgaggtacatctcatcttggcag

SEQ ID NO: 3769192 - DNA, 25 bp, Homo sapien
cagtagaggttgtttcattaagtgc

SEQ ID NO: 3769193 - DNA, 25 bp, Homo sapien
gaatcggtatcctgagtcctcttga

SEQ ID NO: 3769194 - DNA, 25 bp, Homo sapien
gtcctcttgaagagcagtagaggtt

SEQ ID NO: 3769195 - DNA, 25 bp, Homo sapien
cgccaggggcctcgagaatcggtat

SEQ ID NO: 3769196 - DNA, 25 bp, Homo sapien
tagagtccacaatcttacgtagaga

SEQ ID NO: 3769197 - DNA, 25 bp, Homo sapien
caaaatgcctacacttgctgccaaa

SEQ ID NO: 3769198 - DNA, 25 bp, Homo sapien
tacgtagagaccatagcatagaggc

SEQ ID NO: 3769199 - DNA, 25 bp, Homo sapien
tagtcagcatcagttaggaaccaaa

SEQ ID NO: 3769200 - DNA, 25 bp, Homo sapien
gaataacaacactgatgggctgaaa

SEQ ID NO: 3769201 - DNA, 25 bp, Homo sapien
gagagccaatctcttgggaacgtga

SEQ ID NO: 3769202 - DNA, 25 bp, Homo sapien
ggctgaaatgaatccctctcctgac

SEQ ID NO: 3769203 - DNA, 25 bp, Homo sapien
gtaagagcaagtccaagttcagaaa

SEQ ID NO: 3769204 - DNA, 25 bp, Homo sapien
tgcagattggcctttggctgatcag

SEQ ID NO: 3769205 - DNA, 25 bp, Homo sapien
ctagaaaatcctgaacccgaaagtg

SEQ ID NO: 3769206 - DNA, 25 bp, Homo sapien
gcaaactctgggaggcgatgacagc

SEQ ID NO: 3769207 - DNA, 25 bp, Homo sapien
ttggctgatcagatttcagcagctc

SEQ ID NO: 3769208 - DNA, 25 bp, Homo sapien
gacccagtcacaattgttcaaaact

SEQ ID NO: 3769209 - DNA, 25 bp, Homo sapien
actactagtgaagccttctttggaa

SEQ ID NO: 3769210 - DNA, 25 bp, Homo sapien
gttcaaaactactagtgaagccttc

SEQ ID NO: 3769211 - DNA, 25 bp, Homo sapien
gcaagagacccagtcacaattgttc

SEQ ID NO: 3769212 - DNA, 25 bp, Homo sapien
gcaagcgtctctgcatcccagagca

SEQ ID NO: 3769213 - DNA, 25 bp, Homo sapien
gcaaatcctctgagatcctcagtct

SEQ ID NO: 3769214 - DNA, 25 bp, Homo sapien
aggcaagcgtctctgcatcccagag

SEQ ID NO: 3769215 - DNA, 25 bp, Homo sapien
tcccagagcaaatcctctgagatcc

SEQ ID NO: 3769216 - DNA, 25 bp, Homo sapien
tactaagttgaagacctccaattct

SEQ ID NO: 3769217 - DNA, 25 bp, Homo sapien
attccatgaatgatcatcaatgtct

SEQ ID NO: 3769218 - DNA, 25 bp, Homo sapien
ttactaagttgaagacctccaattc

SEQ ID NO: 3769219 - DNA, 25 bp, Homo sapien
catcaatgtctttacggttactaag

SEQ ID NO: 3769220 - DNA, 25 bp, Homo sapien
gatatctctaaaagcttggccccag

SEQ ID NO: 3769221 - DNA, 25 bp, Homo sapien
gatttgctcttagtgatagccatga

SEQ ID NO: 3769222 - DNA, 25 bp, Homo sapien
tcagcacctgatgcatgatttgctc

SEQ ID NO: 3769223 - DNA, 25 bp, Homo sapien
tagccatgagtgaatgttattcctg

SEQ ID NO: 3769224 - DNA, 25 bp, Homo sapien
cattgagaccattacagaccttcca

SEQ ID NO: 3769225 - DNA, 25 bp, Homo sapien
taaaggtcatcagtagcatggagtc

SEQ ID NO: 3769226 - DNA, 25 bp, Homo sapien
tgcctcctcgagaaacagctgtttg

SEQ ID NO: 3769227 - DNA, 25 bp, Homo sapien
ggccctcctgccctagcaataaagg

SEQ ID NO: 3769228 - DNA, 25 bp, Homo sapien
ggaccacctcgaagcatcagtgtgc

SEQ ID NO: 3769229 - DNA, 25 bp, Homo sapien
atcagtgtgctctgagggtcttcag

SEQ ID NO: 3769230 - DNA, 25 bp, Homo sapien
ctcactcacatgactactggaagca

SEQ ID NO: 3769231 - DNA, 25 bp, Homo sapien
caggaaaatacctttctcgcttcac

SEQ ID NO: 3769232 - DNA, 25 bp, Homo sapien
tttcttcgtggagctttgactaccc

SEQ ID NO: 3769233 - DNA, 25 bp, Homo sapien
tttgactacccttccaaggctgagc

SEQ ID NO: 3769234 - DNA, 25 bp, Homo sapien
gctgagatatgactttggttacgcc

SEQ ID NO: 3769235 - DNA, 25 bp, Homo sapien
tcagatataggctatttcttcgtgg

SEQ ID NO: 3769236 - DNA, 25 bp, Homo sapien
tgcgaacaccacatatttgacagaa

SEQ ID NO: 3769237 - DNA, 25 bp, Homo sapien
ggatactaacctgaaatccaagatg

SEQ ID NO: 3769238 - DNA, 25 bp, Homo sapien
gaagatagccttggtttgtatgggc

SEQ ID NO: 3769239 - DNA, 25 bp, Homo sapien
taaccagaggattttgagacctgtg

SEQ ID NO: 3769240 - DNA, 25 bp, Homo sapien
caaattccatggtggcacggagcct

SEQ ID NO: 3769241 - DNA, 25 bp, Homo sapien
gagtcatgccgttggaacctctcgc

SEQ ID NO: 3769242 - DNA, 25 bp, Homo sapien
gaaaagggctctagacttccagatc

SEQ ID NO: 3769243 - DNA, 25 bp, Homo sapien
cattatggacacattggagggctga

SEQ ID NO: 3769244 - DNA, 25 bp, Homo sapien
taatttttatgagtcgtagaaatct

SEQ ID NO: 3769245 - DNA, 25 bp, Homo sapien
gtttgctgacataattacttgaatg

SEQ ID NO: 3769246 - DNA, 25 bp, Homo sapien
tttatgagtcgtagaaatcttggca

SEQ ID NO: 3769247 - DNA, 25 bp, Homo sapien
tttcactgaaccagataattagact

SEQ ID NO: 3769248 - DNA, 25 bp, Homo sapien
tgtatatagtaagtttagcaatgtc

SEQ ID NO: 3769249 - DNA, 25 bp, Homo sapien
cacaactaacaagcaaactgacatt

SEQ ID NO: 3769250 - DNA, 25 bp, Homo sapien
ttagtcccaaaacaagatatagcct

SEQ ID NO: 3769251 - DNA, 25 bp, Homo sapien
gcagtgctctactatttatactata

SEQ ID NO: 3769252 - DNA, 25 bp, Homo sapien
gaccttggaggtcacctgtcattgg

SEQ ID NO: 3769253 - DNA, 25 bp, Homo sapien
atttcccatcatgcccttgaccttg

SEQ ID NO: 3769254 - DNA, 25 bp, Homo sapien
ttcccactgtcggttccatttccca

SEQ ID NO: 3769255 - DNA, 25 bp, Homo sapien
ggtcacctgtcattggaagatgaag

SEQ ID NO: 3769256 - DNA, 25 bp, Homo sapien
cgtttgtgagtgaaggcggtatcct

SEQ ID NO: 3769257 - DNA, 25 bp, Homo sapien
ttgggaaccttatcagagatcacag

SEQ ID NO: 3769258 - DNA, 25 bp, Homo sapien
tgtattagcataagaggagtcagcc

SEQ ID NO: 3769259 - DNA, 25 bp, Homo sapien
gagatcacagattcaggctccagaa

SEQ ID NO: 3769260 - DNA, 25 bp, Homo sapien
tcatagagggagcacccaagactgg

SEQ ID NO: 3769261 - DNA, 25 bp, Homo sapien
cagtcgggctgctatggtgtcataa

SEQ ID NO: 3769262 - DNA, 25 bp, Homo sapien
ggaccataaccaataatctagcttc

SEQ ID NO: 3769263 - DNA, 25 bp, Homo sapien
tcataaaggtatgacacggaaatcc

SEQ ID NO: 3769264 - DNA, 25 bp, Homo sapien
cagggaaaatatgaggacatcaatt

SEQ ID NO: 3769265 - DNA, 25 bp, Homo sapien
tcaattgagtaggaaaatgccaaca

SEQ ID NO: 3769266 - DNA, 25 bp, Homo sapien
aagtgtgttgcaggatcgcagccac

SEQ ID NO: 3769267 - DNA, 25 bp, Homo sapien
gcagccactaatcaaggatacagtc

SEQ ID NO: 3769268 - DNA, 25 bp, Homo sapien
cctactccggatcaagtaagtttct

SEQ ID NO: 3769269 - DNA, 25 bp, Homo sapien
caaagatgttcttctcttcgttctt

SEQ ID NO: 3769270 - DNA, 25 bp, Homo sapien
aagatgttcttctcttcgttctttt

SEQ ID NO: 3769271 - DNA, 25 bp, Homo sapien
tcctactccggatcaagtaagtttc

SEQ ID NO: 3769272 - DNA, 25 bp, Homo sapien
gatctaagtctatccactcgagctg

SEQ ID NO: 3769273 - DNA, 25 bp, Homo sapien
agtctatccactcgagctgtctcat

SEQ ID NO: 3769274 - DNA, 25 bp, Homo sapien
ttgcatgtgatctaagtctatccac

SEQ ID NO: 3769275 - DNA, 25 bp, Homo sapien
tgtgatctaagtctatccactcgag

SEQ ID NO: 3769276 - DNA, 25 bp, Homo sapien
cacatcagcggtcaactcttcttga

SEQ ID NO: 3769277 - DNA, 25 bp, Homo sapien
ggatttcctatacttaacctgctgg

SEQ ID NO: 3769278 - DNA, 25 bp, Homo sapien
tcttcttgatagtggtacttgaatc

SEQ ID NO: 3769279 - DNA, 25 bp, Homo sapien
ttgaatcttgcaatagtccccagaa

SEQ ID NO: 3769280 - DNA, 25 bp, Homo sapien
tcccacacattttcagactccaggg

SEQ ID NO: 3769281 - DNA, 25 bp, Homo sapien
tttcccacacattttcagactccag

SEQ ID NO: 3769282 - DNA, 25 bp, Homo sapien
ccacacattttcagactccagggcc

SEQ ID NO: 3769283 - DNA, 25 bp, Homo sapien
acacattttcagactccagggccat

SEQ ID NO: 3769284 - DNA, 25 bp, Homo sapien
tcctctagttaatgttgcaatgttt

SEQ ID NO: 3769285 - DNA, 25 bp, Homo sapien
tctcctctagttaatgttgcaatgt

SEQ ID NO: 3769286 - DNA, 25 bp, Homo sapien
agtctcctctagttaatgttgcaat

SEQ ID NO: 3769287 - DNA, 25 bp, Homo sapien
cctctagttaatgttgcaatgtttt

SEQ ID NO: 3769288 - DNA, 25 bp, Homo sapien
ttgtaatccctgactggacttgtgg

SEQ ID NO: 3769289 - DNA, 25 bp, Homo sapien
gcttagattgaggtggtccatggat

SEQ ID NO: 3769290 - DNA, 25 bp, Homo sapien
ctggcctatgaagtactgctggaac

SEQ ID NO: 3769291 - DNA, 25 bp, Homo sapien
gctgccaccaccgaattatctgtaa

SEQ ID NO: 3769292 - DNA, 25 bp, Homo sapien
tgacaaatttatggatacagtgcat

SEQ ID NO: 3769293 - DNA, 25 bp, Homo sapien
tatggatacagtgcatctctctatc

SEQ ID NO: 3769294 - DNA, 25 bp, Homo sapien
tctctctatcattaaaggcagacag

SEQ ID NO: 3769295 - DNA, 25 bp, Homo sapien
acagtgcatctctctatcattaaag

SEQ ID NO: 3769296 - DNA, 25 bp, Homo sapien
gaaatcacatgtgcttgcatccaga

SEQ ID NO: 3769297 - DNA, 25 bp, Homo sapien
cagctgtggttgtagtagaaatcac

SEQ ID NO: 3769298 - DNA, 25 bp, Homo sapien
ctgacacattgtcggcactcaacaa

SEQ ID NO: 3769299 - DNA, 25 bp, Homo sapien
gaaaactgttcaagttacggcacga

SEQ ID NO: 3769300 - DNA, 25 bp, Homo sapien
ccattttgtcccttaataagctcaa

SEQ ID NO: 3769301 - DNA, 25 bp, Homo sapien
cattttgtcccttaataagctcaac

SEQ ID NO: 3769302 - DNA, 25 bp, Homo sapien
ttccattttgtcccttaataagctc

SEQ ID NO: 3769303 - DNA, 25 bp, Homo sapien
tccattttgtcccttaataagctca

SEQ ID NO: 3769304 - DNA, 25 bp, Homo sapien
gggacagggaaactatggaagctcc

SEQ ID NO: 3769305 - DNA, 25 bp, Homo sapien
gataccagagtaaaagtctagcaag

SEQ ID NO: 3769306 - DNA, 25 bp, Homo sapien
ggcccctatgaatcaatttctgcag

SEQ ID NO: 3769307 - DNA, 25 bp, Homo sapien
ctccatgggccaattagctaatacc

SEQ ID NO: 3769308 - DNA, 25 bp, Homo sapien
ggaggaattgcttgtagctggttgt

SEQ ID NO: 3769309 - DNA, 25 bp, Homo sapien
gaggaattgcttgtagctggttgtc

SEQ ID NO: 3769310 - DNA, 25 bp, Homo sapien
aggaattgcttgtagctggttgtct

SEQ ID NO: 3769311 - DNA, 25 bp, Homo sapien
ggaattgcttgtagctggttgtctc

SEQ ID NO: 3769312 - DNA, 25 bp, Homo sapien
tattgttaacacagcggatctgcat

SEQ ID NO: 3769313 - DNA, 25 bp, Homo sapien
ttttccgtattgttaacacagcgga

SEQ ID NO: 3769314 - DNA, 25 bp, Homo sapien
tccgtattgttaacacagcggatct

SEQ ID NO: 3769315 - DNA, 25 bp, Homo sapien
ctttttccgtattgttaacacagcg

SEQ ID NO: 3769316 - DNA, 25 bp, Homo sapien
caattctatggtttcaaagataact

SEQ ID NO: 3769317 - DNA, 25 bp, Homo sapien
aatgcaccactgaataagcgctcat

SEQ ID NO: 3769318 - DNA, 25 bp, Homo sapien
aaatgcaccactgaataagcgctca

SEQ ID NO: 3769319 - DNA, 25 bp, Homo sapien
ttccacaattctatggtttcaaaga

SEQ ID NO: 3769320 - DNA, 25 bp, Homo sapien
cattgactggaccaatgctgtgaca

SEQ ID NO: 3769321 - DNA, 25 bp, Homo sapien
tagacaggcaatctggatacttccc

SEQ ID NO: 3769322 - DNA, 25 bp, Homo sapien
tgtggccactctactgatagacagg

SEQ ID NO: 3769323 - DNA, 25 bp, Homo sapien
acaatgggcatacaggagggccacc

SEQ ID NO: 3769324 - DNA, 25 bp, Homo sapien
gccaaaacaaaatggtgagatccta

SEQ ID NO: 3769325 - DNA, 25 bp, Homo sapien
ggtgagatcctacaactccttcagt

SEQ ID NO: 3769326 - DNA, 25 bp, Homo sapien
gagtgaaatccgatggatttttcca

SEQ ID NO: 3769327 - DNA, 25 bp, Homo sapien
tcactcttgttgctctaacactttc

SEQ ID NO: 3769328 - DNA, 25 bp, Homo sapien
caatctttacaatcgctgttgtcag

SEQ ID NO: 3769329 - DNA, 25 bp, Homo sapien
tccattaactcttctcttgtgtaca

SEQ ID NO: 3769330 - DNA, 25 bp, Homo sapien
caagatcaaatatgccatggagact

SEQ ID NO: 3769331 - DNA, 25 bp, Homo sapien
cacgtgtggtctgcatgggacattc

SEQ ID NO: 3769332 - DNA, 25 bp, Homo sapien
gcaatataaaaggagattgcttgca

SEQ ID NO: 3769333 - DNA, 25 bp, Homo sapien
cttgttgcaatataaaaggagattg

SEQ ID NO: 3769334 - DNA, 25 bp, Homo sapien
tgttgcaatataaaaggagattgct

SEQ ID NO: 3769335 - DNA, 25 bp, Homo sapien
gaacttgttgcaatataaaaggaga

SEQ ID NO: 3769336 - DNA, 25 bp, Homo sapien
gatggttacaattggggtcaaatgc

SEQ ID NO: 3769337 - DNA, 25 bp, Homo sapien
tatttgatggttacaattggggtca

SEQ ID NO: 3769338 - DNA, 25 bp, Homo sapien
tacaattggggtcaaatgcacattc

SEQ ID NO: 3769339 - DNA, 25 bp, Homo sapien
tatatttgatggttacaattggggt

SEQ ID NO: 3769340 - DNA, 25 bp, Homo sapien
gagcacattctgcattccgtagcct

SEQ ID NO: 3769341 - DNA, 25 bp, Homo sapien
ccagcttagagcacattctgcattc

SEQ ID NO: 3769342 - DNA, 25 bp, Homo sapien
attccgtagcctccgtggattgctc

SEQ ID NO: 3769343 - DNA, 25 bp, Homo sapien
cctccgtggattgctcatcttgttc

SEQ ID NO: 3769344 - DNA, 25 bp, Homo sapien
ggtagcaagggctacagaatccttg

SEQ ID NO: 3769345 - DNA, 25 bp, Homo sapien
ctgtcaaagttctcctgagtctggt

SEQ ID NO: 3769346 - DNA, 25 bp, Homo sapien
caaagttctcctgagtctggtaggt

SEQ ID NO: 3769347 - DNA, 25 bp, Homo sapien
ggctacagaatccttgtggctgtac

SEQ ID NO: 3769348 - DNA, 25 bp, Homo sapien
aggtaattgatcttgctgtcagttt

SEQ ID NO: 3769349 - DNA, 25 bp, Homo sapien
taattgatcttgctgtcagttttgt

SEQ ID NO: 3769350 - DNA, 25 bp, Homo sapien
ggtaattgatcttgctgtcagtttt

SEQ ID NO: 3769351 - DNA, 25 bp, Homo sapien
caggtaattgatcttgctgtcagtt

SEQ ID NO: 3769352 - DNA, 25 bp, Homo sapien
acacagagcgcctcagcgaagtcgt

SEQ ID NO: 3769353 - DNA, 25 bp, Homo sapien
gctcctcagtgggatcccagacaca

SEQ ID NO: 3769354 - DNA, 25 bp, Homo sapien
gtcgtagataatagagcgccccagc

SEQ ID NO: 3769355 - DNA, 25 bp, Homo sapien
gacacagagcgcctcaaaggagtcc

SEQ ID NO: 3769356 - DNA, 25 bp, Homo sapien
cagcggatcctagatgcagagcccg

SEQ ID NO: 3769357 - DNA, 25 bp, Homo sapien
cagcgggatcctagatacagagcgg

SEQ ID NO: 3769358 - DNA, 25 bp, Homo sapien
ggctcagcgggattctcgatacaga

SEQ ID NO: 3769359 - DNA, 25 bp, Homo sapien
cagcggatcctagatgcagagccca

SEQ ID NO: 3769360 - DNA, 25 bp, Homo sapien
ggccgcctgggcagattctttggat

SEQ ID NO: 3769361 - DNA, 25 bp, Homo sapien
taggtatttagtagatcttctggcc

SEQ ID NO: 3769362 - DNA, 25 bp, Homo sapien
ttactgcccctgtagcgtagcactg

SEQ ID NO: 3769363 - DNA, 25 bp, Homo sapien
gcttgtgtccacaaagcacctctct

SEQ ID NO: 3769364 - DNA, 25 bp, Homo sapien
tcctccatgtccataacagtatagt

SEQ ID NO: 3769365 - DNA, 25 bp, Homo sapien
catgcattgatttttatgtagtcga

SEQ ID NO: 3769366 - DNA, 25 bp, Homo sapien
tactgcttatgtgtcgagtcttttg

SEQ ID NO: 3769367 - DNA, 25 bp, Homo sapien
aacaaagcaatggttcccatcctcc

SEQ ID NO: 3769368 - DNA, 25 bp, Homo sapien
catggaaatgtcagatagattatat

SEQ ID NO: 3769369 - DNA, 25 bp, Homo sapien
tctgtttgtagaagaagagcattca

SEQ ID NO: 3769370 - DNA, 25 bp, Homo sapien
gcagttgcttcaagagccgtaaaac

SEQ ID NO: 3769371 - DNA, 25 bp, Homo sapien
tgttgatgccaaaatatagacatgt

SEQ ID NO: 3769372 - DNA, 25 bp, Homo sapien
cttctgctatcgtgggagagaaccg

SEQ ID NO: 3769373 - DNA, 25 bp, Homo sapien
tatcgtgggagagaaccgactccac

SEQ ID NO: 3769374 - DNA, 25 bp, Homo sapien
gaaccgactccacttagagatgcaa

SEQ ID NO: 3769375 - DNA, 25 bp, Homo sapien
agagatgcaataatcagcaactttc

SEQ ID NO: 3769376 - DNA, 25 bp, Homo sapien
gcttgttcacaatggttgggtatca

SEQ ID NO: 3769377 - DNA, 25 bp, Homo sapien
gacagagcttgttcacaatggttgg

SEQ ID NO: 3769378 - DNA, 25 bp, Homo sapien
gatggtgttgacagagcttgttcac

SEQ ID NO: 3769379 - DNA, 25 bp, Homo sapien
agcagatggtgttgacagagcttgt

SEQ ID NO: 3769380 - DNA, 25 bp, Homo sapien
tctttccctggaatacattggatgc

SEQ ID NO: 3769381 - DNA, 25 bp, Homo sapien
gcagttgtatcttatgcattggttt

SEQ ID NO: 3769382 - DNA, 25 bp, Homo sapien
gtatcttatgcattggttttatgac

SEQ ID NO: 3769383 - DNA, 25 bp, Homo sapien
gagaatctttccctggaatacattg

SEQ ID NO: 3769384 - DNA, 25 bp, Homo sapien
tcttggagtcgttttactcccagag

SEQ ID NO: 3769385 - DNA, 25 bp, Homo sapien
gtcttggagtcgttttactcccaga

SEQ ID NO: 3769386 - DNA, 25 bp, Homo sapien
cttggagtcgttttactcccagagg

SEQ ID NO: 3769387 - DNA, 25 bp, Homo sapien
caagatgtcggctgtggttcatgtc

SEQ ID NO: 3769388 - DNA, 25 bp, Homo sapien
cagatttacttgaacaggtcagcca

SEQ ID NO: 3769389 - DNA, 25 bp, Homo sapien
gatactatgatcagaatgtccctag

SEQ ID NO: 3769390 - DNA, 25 bp, Homo sapien
cacctggctaaaaagggagtctgag

SEQ ID NO: 3769391 - DNA, 25 bp, Homo sapien
ttccctgaggaatcatggctcctct

SEQ ID NO: 3769392 - DNA, 25 bp, Homo sapien
tggctcctctgttgtatgcaagagg

SEQ ID NO: 3769393 - DNA, 25 bp, Homo sapien
ttttttccctgaggaatcatggctc

SEQ ID NO: 3769394 - DNA, 25 bp, Homo sapien
tatgcaagagggttgggaaaaagca

SEQ ID NO: 3769395 - DNA, 25 bp, Homo sapien
gagcttcacgtactattgcaaaatc

SEQ ID NO: 3769396 - DNA, 25 bp, Homo sapien
cttgagcttcacgtactattgcaaa

SEQ ID NO: 3769397 - DNA, 25 bp, Homo sapien
agcttcacgtactattgcaaaatct

SEQ ID NO: 3769398 - DNA, 25 bp, Homo sapien
tgagcttcacgtactattgcaaaat

SEQ ID NO: 3769399 - DNA, 25 bp, Homo sapien
gacaataagataatagcccgcctga

SEQ ID NO: 3769400 - DNA, 25 bp, Homo sapien
agcagacagactggtatgcatggag

SEQ ID NO: 3769401 - DNA, 25 bp, Homo sapien
gagatgatctaaacatgccttgctg

SEQ ID NO: 3769402 - DNA, 25 bp, Homo sapien
tgcatggagacgagtgagatgatct

SEQ ID NO: 3769403 - DNA, 25 bp, Homo sapien
tgtcggggattcactgggggatctc

SEQ ID NO: 3769404 - DNA, 25 bp, Homo sapien
aatgtcggggattcactgggggatc

SEQ ID NO: 3769405 - DNA, 25 bp, Homo sapien
ttccatgaatgtcggggattcactg

SEQ ID NO: 3769406 - DNA, 25 bp, Homo sapien
atttccatgaatgtcggggattcac

SEQ ID NO: 3769407 - DNA, 25 bp, Homo sapien
tcatccaaggatctggccacgttgc

SEQ ID NO: 3769408 - DNA, 25 bp, Homo sapien
ttcttcatccaaggatctggccacg

SEQ ID NO: 3769409 - DNA, 25 bp, Homo sapien
atccaaggatctggccacgttgctg

SEQ ID NO: 3769410 - DNA, 25 bp, Homo sapien
ttcatccaaggatctggccacgttg

SEQ ID NO: 3769411 - DNA, 25 bp, Homo sapien
gcaagtttaggtagctgctcatgtg

SEQ ID NO: 3769412 - DNA, 25 bp, Homo sapien
tagcaagtttaggtagctgctcatg

SEQ ID NO: 3769413 - DNA, 25 bp, Homo sapien
ttagcaagtttaggtagctgctcat

SEQ ID NO: 3769414 - DNA, 25 bp, Homo sapien
agcaagtttaggtagctgctcatgt

SEQ ID NO: 3769415 - DNA, 25 bp, Homo sapien
catgactgggaacgcccaggagaga

SEQ ID NO: 3769416 - DNA, 25 bp, Homo sapien
ccaaggctggtggtggtcagagaac

SEQ ID NO: 3769417 - DNA, 25 bp, Homo sapien
tgcggcccactgaacatgaaggagt

SEQ ID NO: 3769418 - DNA, 25 bp, Homo sapien
tggtcagagaacagccagtaacatt

SEQ ID NO: 3769419 - DNA, 25 bp, Homo sapien
tggctgggtcatctgtacaacttac

SEQ ID NO: 3769420 - DNA, 25 bp, Homo sapien
tgttgcaattcttgggaaattggct

SEQ ID NO: 3769421 - DNA, 25 bp, Homo sapien
attactgttgcaattcttgggaaat

SEQ ID NO: 3769422 - DNA, 25 bp, Homo sapien
tgggaagggcgaattactgttgcaa

SEQ ID NO: 3769423 - DNA, 25 bp, Homo sapien
taacaacagttccactgaagtcact

SEQ ID NO: 3769424 - DNA, 25 bp, Homo sapien
caaacgcagagagctccacaggcat

SEQ ID NO: 3769425 - DNA, 25 bp, Homo sapien
ggcatctgtggaacgtgtgaagcca

SEQ ID NO: 3769426 - DNA, 25 bp, Homo sapien
gaagccactaacagttccactgatg

SEQ ID NO: 3769427 - DNA, 25 bp, Homo sapien
catgagggccatctgaagcccaaag

SEQ ID NO: 3769428 - DNA, 25 bp, Homo sapien
gaaaaataggaagtgccctgaataa

SEQ ID NO: 3769429 - DNA, 25 bp, Homo sapien
taaaagtgtgtagggccataagaaa

SEQ ID NO: 3769430 - DNA, 25 bp, Homo sapien
tgctagtgggatttaaaggtctcat

SEQ ID NO: 3769431 - DNA, 25 bp, Homo sapien
aagagtcgacttaatgttatgtgaa

SEQ ID NO: 3769432 - DNA, 25 bp, Homo sapien
agacacaaacgactttttgatgtgg

SEQ ID NO: 3769433 - DNA, 25 bp, Homo sapien
gtggctgtgagacctatttttgaaa

SEQ ID NO: 3769434 - DNA, 25 bp, Homo sapien
tggctgtgagacctatttttgaaaa

SEQ ID NO: 3769435 - DNA, 25 bp, Homo sapien
gacacaaacgactttttgatgtggc

SEQ ID NO: 3769436 - DNA, 25 bp, Homo sapien
gaatatagtgctccaattgtacaaa

SEQ ID NO: 3769437 - DNA, 25 bp, Homo sapien
gaagaatatcctatgaactgaactg

SEQ ID NO: 3769438 - DNA, 25 bp, Homo sapien
gaaaactctttagtactagattgga

SEQ ID NO: 3769439 - DNA, 25 bp, Homo sapien
ttttagaattgagcacctgtataac

SEQ ID NO: 3769440 - DNA, 25 bp, Homo sapien
catcagattctcctcgactgagaat

SEQ ID NO: 3769441 - DNA, 25 bp, Homo sapien
tgagaatactacagtctccagtatc

SEQ ID NO: 3769442 - DNA, 25 bp, Homo sapien
cttcatcagattctcctcgactgag

SEQ ID NO: 3769443 - DNA, 25 bp, Homo sapien
aatactacagtctccagtatccctg

SEQ ID NO: 3769444 - DNA, 25 bp, Homo sapien
tgattccaaggaaaggttctgaaaa

SEQ ID NO: 3769445 - DNA, 25 bp, Homo sapien
ttctgattccaaggaaaggttctga

SEQ ID NO: 3769446 - DNA, 25 bp, Homo sapien
tctgattccaaggaaaggttctgaa

SEQ ID NO: 3769447 - DNA, 25 bp, Homo sapien
tttctgattccaaggaaaggttctg

SEQ ID NO: 3769448 - DNA, 25 bp, Homo sapien
tcctgtagccacaaaactctgaact

SEQ ID NO: 3769449 - DNA, 25 bp, Homo sapien
cacggtatacgtgtcactgaattgg

SEQ ID NO: 3769450 - DNA, 25 bp, Homo sapien
catgattgacctgccagttcctgta

SEQ ID NO: 3769451 - DNA, 25 bp, Homo sapien
tgtggacagatctatggcaaagcag

SEQ ID NO: 3769452 - DNA, 25 bp, Homo sapien
tcctgaggttatggtaagcaatgcg

SEQ ID NO: 3769453 - DNA, 25 bp, Homo sapien
tccaaagagtgcagatgacatgaaa

SEQ ID NO: 3769454 - DNA, 25 bp, Homo sapien
tatatcgcacaaggcaaatgaggag

SEQ ID NO: 3769455 - DNA, 25 bp, Homo sapien
tgaaaatgagaacagggagcactga

SEQ ID NO: 3769456 - DNA, 25 bp, Homo sapien
tcttgctgctatgcgatggagagtg

SEQ ID NO: 3769457 - DNA, 25 bp, Homo sapien
tccagaacaagaagggctccttgtg

SEQ ID NO: 3769458 - DNA, 25 bp, Homo sapien
taggatccaacctggttcgtcctga

SEQ ID NO: 3769459 - DNA, 25 bp, Homo sapien
caaaaaggcctctgttaggatccaa

SEQ ID NO: 3769460 - DNA, 25 bp, Homo sapien
tggaaaagccctgttgtaacaccac

SEQ ID NO: 3769461 - DNA, 25 bp, Homo sapien
caccacacttgtctctgtgttacta

SEQ ID NO: 3769462 - DNA, 25 bp, Homo sapien
gtgttactatcatgaagtcctgttc

SEQ ID NO: 3769463 - DNA, 25 bp, Homo sapien
ctgatacagatagggttctttcttc

SEQ ID NO: 3769464 - DNA, 25 bp, Homo sapien
ctaatctacttcctttatgcgagac

SEQ ID NO: 3769465 - DNA, 25 bp, Homo sapien
cttcctttatgcgagacatatccgc

SEQ ID NO: 3769466 - DNA, 25 bp, Homo sapien
tatgcgagacatatccgcatcacgc

SEQ ID NO: 3769467 - DNA, 25 bp, Homo sapien
taatctacttcctttatgcgagaca

SEQ ID NO: 3769468 - DNA, 25 bp, Homo sapien
accctgatcttgcagtggatgccac

SEQ ID NO: 3769469 - DNA, 25 bp, Homo sapien
aatggcagcactggattcctctgct

SEQ ID NO: 3769470 - DNA, 25 bp, Homo sapien
tcaggaggtgggaacctcatcagga

SEQ ID NO: 3769471 - DNA, 25 bp, Homo sapien
gaatggcagcactggattcctctgc

SEQ ID NO: 3769472 - DNA, 25 bp, Homo sapien
gacagcagtgtggtttcaaacagca

SEQ ID NO: 3769473 - DNA, 25 bp, Homo sapien
agacagcagtgtggtttcaaacagc

SEQ ID NO: 3769474 - DNA, 25 bp, Homo sapien
tgacagcctggctgtgcttgtctgc

SEQ ID NO: 3769475 - DNA, 25 bp, Homo sapien
caagagctttttggccgtcatgtag

SEQ ID NO: 3769476 - DNA, 25 bp, Homo sapien
gatctccaagagctttttggccgtc

SEQ ID NO: 3769477 - DNA, 25 bp, Homo sapien
ttgatctccaagagctttttggccg

SEQ ID NO: 3769478 - DNA, 25 bp, Homo sapien
tccaagagctttttggccgtcatgt

SEQ ID NO: 3769479 - DNA, 25 bp, Homo sapien
gagctatcccgaagtgcctgagctt

SEQ ID NO: 3769480 - DNA, 25 bp, Homo sapien
catagagctatcccgaagtgcctga

SEQ ID NO: 3769481 - DNA, 25 bp, Homo sapien
tagagctatcccgaagtgcctgagc

SEQ ID NO: 3769482 - DNA, 25 bp, Homo sapien
agctatcccgaagtgcctgagcttt

SEQ ID NO: 3769483 - DNA, 25 bp, Homo sapien
gtgctggtcacaatgtagcagtttg

SEQ ID NO: 3769484 - DNA, 25 bp, Homo sapien
gctggtcacaatgtagcagtttgaa

SEQ ID NO: 3769485 - DNA, 25 bp, Homo sapien
tgctggtcacaatgtagcagtttga

SEQ ID NO: 3769486 - DNA, 25 bp, Homo sapien
ctggtcacaatgtagcagtttgaag

SEQ ID NO: 3769487 - DNA, 25 bp, Homo sapien
aaatcaacaatactacacatcaagt

SEQ ID NO: 3769488 - DNA, 25 bp, Homo sapien
cacttcttgggagatgatccagggc

SEQ ID NO: 3769489 - DNA, 25 bp, Homo sapien
gagatattgtggtatcaactcctca

SEQ ID NO: 3769490 - DNA, 25 bp, Homo sapien
cacatcaagttgagatattgtggta

SEQ ID NO: 3769491 - DNA, 25 bp, Homo sapien
cctgagaagcgatgaacagcaatgc

SEQ ID NO: 3769492 - DNA, 25 bp, Homo sapien
aagcgatgaacagcaatgccctgaa

SEQ ID NO: 3769493 - DNA, 25 bp, Homo sapien
tgagaagcgatgaacagcaatgccc

SEQ ID NO: 3769494 - DNA, 25 bp, Homo sapien
agcccctgagaagcgatgaacagca

SEQ ID NO: 3769495 - DNA, 25 bp, Homo sapien
ctagtcattagtgaggcttttgtag

SEQ ID NO: 3769496 - DNA, 25 bp, Homo sapien
cattagtgaggcttttgtagaattc

SEQ ID NO: 3769497 - DNA, 25 bp, Homo sapien
tcattagtgaggcttttgtagaatt

SEQ ID NO: 3769498 - DNA, 25 bp, Homo sapien
agtcattagtgaggcttttgtagaa

SEQ ID NO: 3769499 - DNA, 25 bp, Homo sapien
cagataggcttggtctcatttagtt

SEQ ID NO: 3769500 - DNA, 25 bp, Homo sapien
tctggtgcagataggcttggtctca

SEQ ID NO: 3769501 - DNA, 25 bp, Homo sapien
agagtttctggtgcagataggcttg

SEQ ID NO: 3769502 - DNA, 25 bp, Homo sapien
tgcagataggcttggtctcatttag

SEQ ID NO: 3769503 - DNA, 25 bp, Homo sapien
ggcatcagatgcactagaaatctct

SEQ ID NO: 3769504 - DNA, 25 bp, Homo sapien
gaaaagtgcaaatctctacctcctc

SEQ ID NO: 3769505 - DNA, 25 bp, Homo sapien
gagacatgggttcggcaattaatgc

SEQ ID NO: 3769506 - DNA, 25 bp, Homo sapien
aatgcctgaaaagtgcaaatctcta

SEQ ID NO: 3769507 - DNA, 25 bp, Homo sapien
catcatcactatacatgtgggtcaa

SEQ ID NO: 3769508 - DNA, 25 bp, Homo sapien
caagtctacagagttgtgcaaattc

SEQ ID NO: 3769509 - DNA, 25 bp, Homo sapien
tagctggacaatttcaagagtacgc

SEQ ID NO: 3769510 - DNA, 25 bp, Homo sapien
tcagaatcactctttaacatcaagg

SEQ ID NO: 3769511 - DNA, 25 bp, Homo sapien
tgatgagtcaggaatggttaacagc

SEQ ID NO: 3769512 - DNA, 25 bp, Homo sapien
attttgttacctgatggcaactgga

SEQ ID NO: 3769513 - DNA, 25 bp, Homo sapien
aactggatacagtcaggataccagc

SEQ ID NO: 3769514 - DNA, 25 bp, Homo sapien
ttaacagctgccgaattacttccaa

SEQ ID NO: 3769515 - DNA, 25 bp, Homo sapien
accagaacctgcagatgaatatgcc

SEQ ID NO: 3769516 - DNA, 25 bp, Homo sapien
tctttctgactaaggataattaatc

SEQ ID NO: 3769517 - DNA, 25 bp, Homo sapien
gatgaatatgccctgtctggtttgt

SEQ ID NO: 3769518 - DNA, 25 bp, Homo sapien
tatgcccatctctcttcgaacatgc

SEQ ID NO: 3769519 - DNA, 25 bp, Homo sapien
tgcatgaggccacatttctccaact

SEQ ID NO: 3769520 - DNA, 25 bp, Homo sapien
tgtatgcatgaggccacatttctcc

SEQ ID NO: 3769521 - DNA, 25 bp, Homo sapien
ctgtatgcatgaggccacatttctc

SEQ ID NO: 3769522 - DNA, 25 bp, Homo sapien
tatgcatgaggccacatttctccaa

SEQ ID NO: 3769523 - DNA, 25 bp, Homo sapien
catctatgatggacacttctgcaca

SEQ ID NO: 3769524 - DNA, 25 bp, Homo sapien
gattgtggctcatctatgatggaca

SEQ ID NO: 3769525 - DNA, 25 bp, Homo sapien
ttgtggctcatctatgatggacact

SEQ ID NO: 3769526 - DNA, 25 bp, Homo sapien
ttgattgtggctcatctatgatgga

SEQ ID NO: 3769527 - DNA, 25 bp, Homo sapien
ttttattccagtccccattatcaag

SEQ ID NO: 3769528 - DNA, 25 bp, Homo sapien
tttatgctggaaggtagcccaagct

SEQ ID NO: 3769529 - DNA, 25 bp, Homo sapien
tcatgcccggcacatctttagtgac

SEQ ID NO: 3769530 - DNA, 25 bp, Homo sapien
ataggtactagcgagtccccgcacc

SEQ ID NO: 3769531 - DNA, 25 bp, Homo sapien
tctctccttggtgggcggatggccg

SEQ ID NO: 3769532 - DNA, 25 bp, Homo sapien
ggatggccgtcctcgttcttagcat

SEQ ID NO: 3769533 - DNA, 25 bp, Homo sapien
ttggtgggcggatggccgtcctcgt

SEQ ID NO: 3769534 - DNA, 25 bp, Homo sapien
gggcggatggccgtcctcgttctta

SEQ ID NO: 3769535 - DNA, 25 bp, Homo sapien
ggctgttgggctgtggacttggcat

SEQ ID NO: 3769536 - DNA, 25 bp, Homo sapien
tggctgttgggctgtggacttggca

SEQ ID NO: 3769537 - DNA, 25 bp, Homo sapien
gagtaacgaatctattacttcctca

SEQ ID NO: 3769538 - DNA, 25 bp, Homo sapien
atgctctgcacctgaattaataaaa

SEQ ID NO: 3769539 - DNA, 25 bp, Homo sapien
tgctctgcacctgaattaataaaac

SEQ ID NO: 3769540 - DNA, 25 bp, Homo sapien
ctttgcctgtttgagtaacgaatct

SEQ ID NO: 3769541 - DNA, 25 bp, Homo sapien
tctccagtataccagcagactctga

SEQ ID NO: 3769542 - DNA, 25 bp, Homo sapien
gcatccctatggtgtataataaccg

SEQ ID NO: 3769543 - DNA, 25 bp, Homo sapien
gagaacaggtcattcatgtgtcgaa

SEQ ID NO: 3769544 - DNA, 25 bp, Homo sapien
cacattaatgcttgatctgttttct

SEQ ID NO: 3769545 - DNA, 25 bp, Homo sapien
tatcctctagcatggcacaagatat

SEQ ID NO: 3769546 - DNA, 25 bp, Homo sapien
gcatggcacaagatatataggtttt

SEQ ID NO: 3769547 - DNA, 25 bp, Homo sapien
atatcagtaatactttgaagtgaag

SEQ ID NO: 3769548 - DNA, 25 bp, Homo sapien
tcagtaatactttgaagtgaagtca

SEQ ID NO: 3769549 - DNA, 25 bp, Homo sapien
gttccctgaagtcaatggtggtcat

SEQ ID NO: 3769550 - DNA, 25 bp, Homo sapien
gacacatcctggtcacctgctttga

SEQ ID NO: 3769551 - DNA, 25 bp, Homo sapien
taactagttaatcttccatggccag

SEQ ID NO: 3769552 - DNA, 25 bp, Homo sapien
taagatgccacttaattcccctgca

SEQ ID NO: 3769553 - DNA, 25 bp, Homo sapien
aaagtcactcgatgaggccagggta

SEQ ID NO: 3769554 - DNA, 25 bp, Homo sapien
tttacaggagattatatttgggtca

SEQ ID NO: 3769555 - DNA, 25 bp, Homo sapien
tttgttggccataaatctgttatta

SEQ ID NO: 3769556 - DNA, 25 bp, Homo sapien
gacaaggtttcttctactcgcaaat

SEQ ID NO: 3769557 - DNA, 25 bp, Homo sapien
ctagaagcatttgatagacaaggtt

SEQ ID NO: 3769558 - DNA, 25 bp, Homo sapien
cagtcaatgccggtagaagtattca

SEQ ID NO: 3769559 - DNA, 25 bp, Homo sapien
caactgattgatggatagatgataa

SEQ ID NO: 3769560 - DNA, 25 bp, Homo sapien
catttgtgaaatgtaatgccaaccc

SEQ ID NO: 3769561 - DNA, 25 bp, Homo sapien
acataatgaggtgttgctttccagt

SEQ ID NO: 3769562 - DNA, 25 bp, Homo sapien
tctgcaactttctccttcatactgg

SEQ ID NO: 3769563 - DNA, 25 bp, Homo sapien
cttctgcaactttctccttcatact

SEQ ID NO: 3769564 - DNA, 25 bp, Homo sapien
caactttctccttcatactggacat

SEQ ID NO: 3769565 - DNA, 25 bp, Homo sapien
tgcaactttctccttcatactggac

SEQ ID NO: 3769566 - DNA, 25 bp, Homo sapien
tagggatattgctcgtctggtataa

SEQ ID NO: 3769567 - DNA, 25 bp, Homo sapien
ccacatgttacacttcttgtcacct

SEQ ID NO: 3769568 - DNA, 25 bp, Homo sapien
cacattctgctttggccttaatgat

SEQ ID NO: 3769569 - DNA, 25 bp, Homo sapien
tcgtctggtataagtctccacatgt

SEQ ID NO: 3769570 - DNA, 25 bp, Homo sapien
attttcactgttccagactagattt

SEQ ID NO: 3769571 - DNA, 25 bp, Homo sapien
ttttcactgttccagactagatttg

SEQ ID NO: 3769572 - DNA, 25 bp, Homo sapien
tcctcctaaggaacaacatggtgtc

SEQ ID NO: 3769573 - DNA, 25 bp, Homo sapien
caggctccatggctctggcatgtca

SEQ ID NO: 3769574 - DNA, 25 bp, Homo sapien
caactccagttctaatcaggctcca

SEQ ID NO: 3769575 - DNA, 25 bp, Homo sapien
tggcatctgttgtgcagcatggtac

SEQ ID NO: 3769576 - DNA, 25 bp, Homo sapien
ggtgggaatgttcttctgctacagc

SEQ ID NO: 3769577 - DNA, 25 bp, Homo sapien
ggaatgttcttctgctacagccaca

SEQ ID NO: 3769578 - DNA, 25 bp, Homo sapien
tgcaaaggccctccacccggttgag

SEQ ID NO: 3769579 - DNA, 25 bp, Homo sapien
tctggtgggaatgttcttctgctac

SEQ ID NO: 3769580 - DNA, 25 bp, Homo sapien
caaaagactgagattatgaaggagc

SEQ ID NO: 3769581 - DNA, 25 bp, Homo sapien
ggagctctagccttaatgatattca

SEQ ID NO: 3769582 - DNA, 25 bp, Homo sapien
tctaaatctaggtaagcttcatcac

SEQ ID NO: 3769583 - DNA, 25 bp, Homo sapien
caaaatgcaatgttaggcaagagca

SEQ ID NO: 3769584 - DNA, 25 bp, Homo sapien
agagctggctcccatgaacaccaat

SEQ ID NO: 3769585 - DNA, 25 bp, Homo sapien
tttccaaaatcttttgtatgtacag

SEQ ID NO: 3769586 - DNA, 25 bp, Homo sapien
gctggctcccatgaacaccaattaa

SEQ ID NO: 3769587 - DNA, 25 bp, Homo sapien
ttttgagattaagagctggctccca

SEQ ID NO: 3769588 - DNA, 25 bp, Homo sapien
ggtctctggtgttgaaataagccat

SEQ ID NO: 3769589 - DNA, 25 bp, Homo sapien
cataggtcatttcccgcatggtctc

SEQ ID NO: 3769590 - DNA, 25 bp, Homo sapien
tatccactacataggtcatttcccg

SEQ ID NO: 3769591 - DNA, 25 bp, Homo sapien
catttcccgcatggtctctggtgtt

SEQ ID NO: 3769592 - DNA, 25 bp, Homo sapien
acaaggcctgcaagtgatgtgacgg

SEQ ID NO: 3769593 - DNA, 25 bp, Homo sapien
tctgcaagctcttgatgtaagtcat

SEQ ID NO: 3769594 - DNA, 25 bp, Homo sapien
accatgccggcatccatcacaggga

SEQ ID NO: 3769595 - DNA, 25 bp, Homo sapien
cagattataacaggatccacagata

SEQ ID NO: 3769596 - DNA, 25 bp, Homo sapien
accaaatccagaaatagtttgaaca

SEQ ID NO: 3769597 - DNA, 25 bp, Homo sapien
gtttgaacaaagtcatcaaagctcc

SEQ ID NO: 3769598 - DNA, 25 bp, Homo sapien
tccagaaatagtttgaacaaagtca

SEQ ID NO: 3769599 - DNA, 25 bp, Homo sapien
gaacaaagtcatcaaagctcccaac

SEQ ID NO: 3769600 - DNA, 25 bp, Homo sapien
tgtgtccctgtctcctaaatctcca

SEQ ID NO: 3769601 - DNA, 25 bp, Homo sapien
ctgtgtccctgtctcctaaatctcc

SEQ ID NO: 3769602 - DNA, 25 bp, Homo sapien
aacaaatagttacatggctgtttct

SEQ ID NO: 3769603 - DNA, 25 bp, Homo sapien
aaatagttacatggctgtttctcct

SEQ ID NO: 3769604 - DNA, 25 bp, Homo sapien
tagttacatggctgtttctcctgct

SEQ ID NO: 3769605 - DNA, 25 bp, Homo sapien
agttacatggctgtttctcctgctc

SEQ ID NO: 3769606 - DNA, 25 bp, Homo sapien
tgacgtcctgttcccctgttggggc

SEQ ID NO: 3769607 - DNA, 25 bp, Homo sapien
agtggccctcgcatctgctgacgtc

SEQ ID NO: 3769608 - DNA, 25 bp, Homo sapien
ctgacgtcctgttcccctgttgggg

SEQ ID NO: 3769609 - DNA, 25 bp, Homo sapien
ctacagtggccctcgcatctgctga

SEQ ID NO: 3769610 - DNA, 25 bp, Homo sapien
aaaccccagctcacttaatggatca

SEQ ID NO: 3769611 - DNA, 25 bp, Homo sapien
ggatccacagcgtcttattagcccg

SEQ ID NO: 3769612 - DNA, 25 bp, Homo sapien
acgtgttccaccaaacgcctctgaa

SEQ ID NO: 3769613 - DNA, 25 bp, Homo sapien
tcgtgcccatccttttcccatggat

SEQ ID NO: 3769614 - DNA, 25 bp, Homo sapien
tatggggctggcaattacgtttttg

SEQ ID NO: 3769615 - DNA, 25 bp, Homo sapien
atcttttacttttatggggctggca

SEQ ID NO: 3769616 - DNA, 25 bp, Homo sapien
tcttttacttttatggggctggcaa

SEQ ID NO: 3769617 - DNA, 25 bp, Homo sapien
gggctggcaattacgtttttgcatg

SEQ ID NO: 3769618 - DNA, 25 bp, Homo sapien
gaagatggatctttccttccgccat

SEQ ID NO: 3769619 - DNA, 25 bp, Homo sapien
aactagcaagggtgaggacggtgta

SEQ ID NO: 3769620 - DNA, 25 bp, Homo sapien
ccttcctctctcagacgtatcgtag

SEQ ID NO: 3769621 - DNA, 25 bp, Homo sapien
ggtgtagcttcgtctccttcctctc

SEQ ID NO: 3769622 - DNA, 25 bp, Homo sapien
tatcttccgcacttgaaatgatgtc

SEQ ID NO: 3769623 - DNA, 25 bp, Homo sapien
gaatgccttgtcaactctacactcg

SEQ ID NO: 3769624 - DNA, 25 bp, Homo sapien
tccaagttggacctcatttgttagg

SEQ ID NO: 3769625 - DNA, 25 bp, Homo sapien
gagaagacgtcacattcaaagagcc

SEQ ID NO: 3769626 - DNA, 25 bp, Homo sapien
cagagacgtcaaagcaaaatgaaag

SEQ ID NO: 3769627 - DNA, 25 bp, Homo sapien
caaatgttcacagagacgtcaaagc

SEQ ID NO: 3769628 - DNA, 25 bp, Homo sapien
gggcgggcttgattaattgtgaaca

SEQ ID NO: 3769629 - DNA, 25 bp, Homo sapien
gaaagctaatgagccataacagatc

SEQ ID NO: 3769630 - DNA, 25 bp, Homo sapien
tttgcaatgatcaggaatttctgat

SEQ ID NO: 3769631 - DNA, 25 bp, Homo sapien
ttcttaaaagtgtagagctgcacct

SEQ ID NO: 3769632 - DNA, 25 bp, Homo sapien
tcttaaaagtgtagagctgcacctt

SEQ ID NO: 3769633 - DNA, 25 bp, Homo sapien
gcaatgatcaggaatttctgattat

SEQ ID NO: 3769634 - DNA, 25 bp, Homo sapien
ctggagctttgcagatcttcgttct

SEQ ID NO: 3769635 - DNA, 25 bp, Homo sapien
gagatcttatggctgcttttcctag

SEQ ID NO: 3769636 - DNA, 25 bp, Homo sapien
atcataggctttcctggtagcagca

SEQ ID NO: 3769637 - DNA, 25 bp, Homo sapien
gctgcactccacagcacatcatagg

SEQ ID NO: 3769638 - DNA, 25 bp, Homo sapien
tgatagcctttgctaccctatagat

SEQ ID NO: 3769639 - DNA, 25 bp, Homo sapien
tctacttgttcagccctcagtctct

SEQ ID NO: 3769640 - DNA, 25 bp, Homo sapien
tagccatcaacatctacttgttcag

SEQ ID NO: 3769641 - DNA, 25 bp, Homo sapien
gagtcaactcatcttggcagtagcc

SEQ ID NO: 3769642 - DNA, 25 bp, Homo sapien
tgacatacagaaggctgacatccag

SEQ ID NO: 3769643 - DNA, 25 bp, Homo sapien
tgagcatgctttgatacccctgtag

SEQ ID NO: 3769644 - DNA, 25 bp, Homo sapien
caagcttactagtggtctgtgagca

SEQ ID NO: 3769645 - DNA, 25 bp, Homo sapien
cagagacactcttcttgggcattca

SEQ ID NO: 3769646 - DNA, 25 bp, Homo sapien
ctgcaagttgttggaggatttctgc

SEQ ID NO: 3769647 - DNA, 25 bp, Homo sapien
gagcaaagatgctactcacatttaa

SEQ ID NO: 3769648 - DNA, 25 bp, Homo sapien
tcagaggtaataggtttgtttctac

SEQ ID NO: 3769649 - DNA, 25 bp, Homo sapien
tttagcaggtagtttcctggtattc

SEQ ID NO: 3769650 - DNA, 25 bp, Homo sapien
ctattacaatcctccacttttgtgc

SEQ ID NO: 3769651 - DNA, 25 bp, Homo sapien
agtcagttgattcccgattttctct

SEQ ID NO: 3769652 - DNA, 25 bp, Homo sapien
aagtcagttgattcccgattttctc

SEQ ID NO: 3769653 - DNA, 25 bp, Homo sapien
cagctttcacagagtctttactaga

SEQ ID NO: 3769654 - DNA, 25 bp, Homo sapien
cctgggtgtcggtcacagctttcac

SEQ ID NO: 3769655 - DNA, 25 bp, Homo sapien
cagagtctttactagaagttaccaa

SEQ ID NO: 3769656 - DNA, 25 bp, Homo sapien
cggtacactgttatcctgggtgtcg

SEQ ID NO: 3769657 - DNA, 25 bp, Homo sapien
gataaggaacaggaactgtgcgcca

SEQ ID NO: 3769658 - DNA, 25 bp, Homo sapien
tatgaaactcctgatcagctctggc

SEQ ID NO: 3769659 - DNA, 25 bp, Homo sapien
gtgagtcgatgcaagcagctctggt

SEQ ID NO: 3769660 - DNA, 25 bp, Homo sapien
gctcagctgccagtttgataaggaa

SEQ ID NO: 3769661 - DNA, 25 bp, Homo sapien
tttactctcagtaaaatagctttca

SEQ ID NO: 3769662 - DNA, 25 bp, Homo sapien
agctactttactctcagtaaaatag

SEQ ID NO: 3769663 - DNA, 25 bp, Homo sapien
tactttactctcagtaaaatagctt

SEQ ID NO: 3769664 - DNA, 25 bp, Homo sapien
cttagctactttactctcagtaaaa

SEQ ID NO: 3769665 - DNA, 25 bp, Homo sapien
tagtcaataggacatctagccacgt

SEQ ID NO: 3769666 - DNA, 25 bp, Homo sapien
gccacgtgaacaaggtaaacatctc

SEQ ID NO: 3769667 - DNA, 25 bp, Homo sapien
taatcagcatgagatagtcaatagg

SEQ ID NO: 3769668 - DNA, 25 bp, Homo sapien
tctgtagacgcagagcacagaaacc

SEQ ID NO: 3769669 - DNA, 25 bp, Homo sapien
atctgaaaccaacagggttatattg

SEQ ID NO: 3769670 - DNA, 25 bp, Homo sapien
tctgaaaccaacagggttatattgc

SEQ ID NO: 3769671 - DNA, 25 bp, Homo sapien
actgtccctcctgagggaatatttc

SEQ ID NO: 3769672 - DNA, 25 bp, Homo sapien
ctgtccctcctgagggaatatttcc

SEQ ID NO: 3769673 - DNA, 25 bp, Homo sapien
gtaaaaatccctcctaggtctctca

SEQ ID NO: 3769674 - DNA, 25 bp, Homo sapien
taaaattctaggtaggcatagagta

SEQ ID NO: 3769675 - DNA, 25 bp, Homo sapien
aatccctcctaggtctctcatgata

SEQ ID NO: 3769676 - DNA, 25 bp, Homo sapien
tctaggtaggcatagagtatttttt

SEQ ID NO: 3769677 - DNA, 25 bp, Homo sapien
ggcgtttgtaacgctggtgttcgta

SEQ ID NO: 3769678 - DNA, 25 bp, Homo sapien
tgtaacgctggtgttcgtaacgctg

SEQ ID NO: 3769679 - DNA, 25 bp, Homo sapien
ttcaggaccctggcgtttgtaacgc

SEQ ID NO: 3769680 - DNA, 25 bp, Homo sapien
ttcaggaccctggcgttcgtaacgc

SEQ ID NO: 3769681 - DNA, 25 bp, Homo sapien
tgtcgctggtgttcatgtccctggt

SEQ ID NO: 3769682 - DNA, 25 bp, Homo sapien
tgtccctggtgttcatgaccctggt

SEQ ID NO: 3769683 - DNA, 25 bp, Homo sapien
tgtccctggtgttcatgtcgctggt

SEQ ID NO: 3769684 - DNA, 25 bp, Homo sapien
cttcatgacgctggtgttcatgtcc

SEQ ID NO: 3769685 - DNA, 25 bp, Homo sapien
ccttggtgttcatatctagtgttac

SEQ ID NO: 3769686 - DNA, 25 bp, Homo sapien
tacactggcgctttctcactgtttc

SEQ ID NO: 3769687 - DNA, 25 bp, Homo sapien
tcatatctagtgttacactggcgct

SEQ ID NO: 3769688 - DNA, 25 bp, Homo sapien
tcatgaccttggtgttcatatctag

SEQ ID NO: 3769689 - DNA, 25 bp, Homo sapien
cgtccatgacggagaggcttttgct

SEQ ID NO: 3769690 - DNA, 25 bp, Homo sapien
cccagttaggaggagccgtccatga

SEQ ID NO: 3769691 - DNA, 25 bp, Homo sapien
gagccgtccatgacggagaggcttt

SEQ ID NO: 3769692 - DNA, 25 bp, Homo sapien
cagttaggaggagccgtccatgacg

SEQ ID NO: 3769693 - DNA, 25 bp, Homo sapien
gtggatattggagcaggaacaaaaa

SEQ ID NO: 3769694 - DNA, 25 bp, Homo sapien
ttccttcacaaccacaaataaatcg

SEQ ID NO: 3769695 - DNA, 25 bp, Homo sapien
cacaaataaatcgagagatctcagc

SEQ ID NO: 3769696 - DNA, 25 bp, Homo sapien
aataaatcgagagatctcagcatcc

SEQ ID NO: 3769697 - DNA, 25 bp, Homo sapien
catctcctagcatatccctcaagtt

SEQ ID NO: 3769698 - DNA, 25 bp, Homo sapien
cttgctttaatctcgtaactgacgt

SEQ ID NO: 3769699 - DNA, 25 bp, Homo sapien
cttccacctcactggatgtgggtta

SEQ ID NO: 3769700 - DNA, 25 bp, Homo sapien
tctcgtaactgacgtcccagctctt

SEQ ID NO: 3769701 - DNA, 25 bp, Homo sapien
ctggatgtgggttacgttccctgac

SEQ ID NO: 3769702 - DNA, 25 bp, Homo sapien
cagaccctgctctagtggaagctga

SEQ ID NO: 3769703 - DNA, 25 bp, Homo sapien
cctgctctagtggaagctgactttt

SEQ ID NO: 3769704 - DNA, 25 bp, Homo sapien
tccagaccctgctctagtggaagct

SEQ ID NO: 3769705 - DNA, 25 bp, Homo sapien
gaccctgctctagtggaagctgact

SEQ ID NO: 3769706 - DNA, 25 bp, Homo sapien
taatctttggccatattatagaaga

SEQ ID NO: 3769707 - DNA, 25 bp, Homo sapien
tggccatattatagaagataaatag

SEQ ID NO: 3769708 - DNA, 25 bp, Homo sapien
tcagggccgtgatgaataatctttg

SEQ ID NO: 3769709 - DNA, 25 bp, Homo sapien
agataaatagaggtctcatttcctc

SEQ ID NO: 3769710 - DNA, 25 bp, Homo sapien
gatttgctggatctgcatgagagag

SEQ ID NO: 3769711 - DNA, 25 bp, Homo sapien
cataggttgacatcagagggatttg

SEQ ID NO: 3769712 - DNA, 25 bp, Homo sapien
tgcaaagcgaaggtgatgtgttcat

SEQ ID NO: 3769713 - DNA, 25 bp, Homo sapien
caaagcgaaggtgatgtgttcatca

SEQ ID NO: 3769714 - DNA, 25 bp, Homo sapien
caggaagaatcatgagggaagccat

SEQ ID NO: 3769715 - DNA, 25 bp, Homo sapien
taaagagcccagaccctgaaccctc

SEQ ID NO: 3769716 - DNA, 25 bp, Homo sapien
gaaccctcaggaagaatcatgaggg

SEQ ID NO: 3769717 - DNA, 25 bp, Homo sapien
cctcaggaagaatcatgagggaagc

SEQ ID NO: 3769718 - DNA, 25 bp, Homo sapien
atgaaagatcgcacatttatcaatg

SEQ ID NO: 3769719 - DNA, 25 bp, Homo sapien
ccatagtgacaggataatcctggtg

SEQ ID NO: 3769720 - DNA, 25 bp, Homo sapien
gaatatccgtggtaatgtgcgcaaa

SEQ ID NO: 3769721 - DNA, 25 bp, Homo sapien
cacattcacactgaattgtttcctc

SEQ ID NO: 3769722 - DNA, 25 bp, Homo sapien
ttcttccagaacttggtgatcttgt

SEQ ID NO: 3769723 - DNA, 25 bp, Homo sapien
gatcttgtggtgtatgcagaagcag

SEQ ID NO: 3769724 - DNA, 25 bp, Homo sapien
tgcttcttccagaacttggtgatct

SEQ ID NO: 3769725 - DNA, 25 bp, Homo sapien
gtgatcttgtggtgtatgcagaagc

SEQ ID NO: 3769726 - DNA, 25 bp, Homo sapien
agtaagtaagggtataaaactgatg

SEQ ID NO: 3769727 - DNA, 25 bp, Homo sapien
cagatggaggttacctattaccctt

SEQ ID NO: 3769728 - DNA, 25 bp, Homo sapien
gcttctgtagcaatagtcagatgga

SEQ ID NO: 3769729 - DNA, 25 bp, Homo sapien
cctcgaatgcaacctgaactcattg

SEQ ID NO: 3769730 - DNA, 25 bp, Homo sapien
ttcttctccctcgaatgcaacctga

SEQ ID NO: 3769731 - DNA, 25 bp, Homo sapien
cgggagtcggaacatcttccaggga

SEQ ID NO: 3769732 - DNA, 25 bp, Homo sapien
gacaatgccctatcatggaatcaag

SEQ ID NO: 3769733 - DNA, 25 bp, Homo sapien
caagaaagcaggtgtcatcatccag

SEQ ID NO: 3769734 - DNA, 25 bp, Homo sapien
aaagagttggcatcaagaaagcagg

SEQ ID NO: 3769735 - DNA, 25 bp, Homo sapien
tctgctgcttgctaggaagttggaa

SEQ ID NO: 3769736 - DNA, 25 bp, Homo sapien
gcaactgtcaggtagattttctgct

SEQ ID NO: 3769737 - DNA, 25 bp, Homo sapien
gatttataggctggtggttcactct

SEQ ID NO: 3769738 - DNA, 25 bp, Homo sapien
tcttcctgttcgtgtctccatagca

SEQ ID NO: 3769739 - DNA, 25 bp, Homo sapien
cactcttcagttgctacactaggaa

SEQ ID NO: 3769740 - DNA, 25 bp, Homo sapien
ttgctacactaggaagtggaaatga

SEQ ID NO: 3769741 - DNA, 25 bp, Homo sapien
ataaatcgtacttggagttacatgg

SEQ ID NO: 3769742 - DNA, 25 bp, Homo sapien
tctcttaaaataaatcgtacttgga

SEQ ID NO: 3769743 - DNA, 25 bp, Homo sapien
caatttgtagcataacccctgcagc

SEQ ID NO: 3769744 - DNA, 25 bp, Homo sapien
gaaatgctgaactatggtcacccct

SEQ ID NO: 3769745 - DNA, 25 bp, Homo sapien
cagatctgacacctgaaatggctgc

SEQ ID NO: 3769746 - DNA, 25 bp, Homo sapien
tcacgtcccttgttgattggcccat

SEQ ID NO: 3769747 - DNA, 25 bp, Homo sapien
ctgtttgcatgagggatgaagcttt

SEQ ID NO: 3769748 - DNA, 25 bp, Homo sapien
agggatgaagctttatctctcagaa

SEQ ID NO: 3769749 - DNA, 25 bp, Homo sapien
tctctttctcggcaatggattggaa

SEQ ID NO: 3769750 - DNA, 25 bp, Homo sapien
tggcatcgagcagcagacactaagt

SEQ ID NO: 3769751 - DNA, 25 bp, Homo sapien
tcatttgtggatacacagtctctgt

SEQ ID NO: 3769752 - DNA, 25 bp, Homo sapien
gtatatcttgactgctcttttcgga

SEQ ID NO: 3769753 - DNA, 25 bp, Homo sapien
gctcaggctagcaagcagtgggttc

SEQ ID NO: 3769754 - DNA, 25 bp, Homo sapien
agctgggagctcaggctagcaagca

SEQ ID NO: 3769755 - DNA, 25 bp, Homo sapien
tcaggctagcaagcagtgggttcat

SEQ ID NO: 3769756 - DNA, 25 bp, Homo sapien
gagctcaggctagcaagcagtgggt

SEQ ID NO: 3769757 - DNA, 25 bp, Homo sapien
agagcatttagatgttccttttgca

SEQ ID NO: 3769758 - DNA, 25 bp, Homo sapien
catggataatgtaccgtggacactc

SEQ ID NO: 3769759 - DNA, 25 bp, Homo sapien
tccccaaagatcacaggaagagcat

SEQ ID NO: 3769760 - DNA, 25 bp, Homo sapien
gacactctttctactcgggtgcttt

SEQ ID NO: 3769761 - DNA, 25 bp, Homo sapien
catggccacaacactaggatttagc

SEQ ID NO: 3769762 - DNA, 25 bp, Homo sapien
gaatctgaggtaagcaatagagcca

SEQ ID NO: 3769763 - DNA, 25 bp, Homo sapien
tgcactcgggtttgccttcaagaaa

SEQ ID NO: 3769764 - DNA, 25 bp, Homo sapien
catctgccattgcactggaattgag

SEQ ID NO: 3769765 - DNA, 25 bp, Homo sapien
agacattccaggcttggatcagctc

SEQ ID NO: 3769766 - DNA, 25 bp, Homo sapien
tcttgggagaatcctttgtcccatg

SEQ ID NO: 3769767 - DNA, 25 bp, Homo sapien
cagtcttgggagaatcctttgtccc

SEQ ID NO: 3769768 - DNA, 25 bp, Homo sapien
cttgggagaatcctttgtcccatgc

SEQ ID NO: 3769769 - DNA, 25 bp, Homo sapien
agtcttgggagaatcctttgtccca

SEQ ID NO: 3769770 - DNA, 25 bp, Homo sapien
tcccaggagagactagttagagcct

SEQ ID NO: 3769771 - DNA, 25 bp, Homo sapien
tcacttcgtggaccctgtgggtccc

SEQ ID NO: 3769772 - DNA, 25 bp, Homo sapien
tacggtaccctgtgtctgcaccaca

SEQ ID NO: 3769773 - DNA, 25 bp, Homo sapien
tcgtggcaacagctagaaatacggt

SEQ ID NO: 3769774 - DNA, 25 bp, Homo sapien
aaaccatcgcataacttcccatcag

SEQ ID NO: 3769775 - DNA, 25 bp, Homo sapien
aaccatcgcataacttcccatcagc

SEQ ID NO: 3769776 - DNA, 25 bp, Homo sapien
ccaaaccatcgcataacttcccatc

SEQ ID NO: 3769777 - DNA, 25 bp, Homo sapien
caaaccatcgcataacttcccatca

SEQ ID NO: 3769778 - DNA, 25 bp, Homo sapien
gcagtgtctccacttgtaatttttt

SEQ ID NO: 3769779 - DNA, 25 bp, Homo sapien
tagctgagctgagtcgtcggtgcat

SEQ ID NO: 3769780 - DNA, 25 bp, Homo sapien
ctggttaagtccttagctgagctga

SEQ ID NO: 3769781 - DNA, 25 bp, Homo sapien
ctcaggctccgctgcagcaagtcct

SEQ ID NO: 3769782 - DNA, 25 bp, Homo sapien
gcaagtcctgtactggttaagtcct

SEQ ID NO: 3769783 - DNA, 25 bp, Homo sapien
gtgcatcggattgtaatgaatccca

SEQ ID NO: 3769784 - DNA, 25 bp, Homo sapien
cacgtagaacgcacatttcttgtga

SEQ ID NO: 3769785 - DNA, 25 bp, Homo sapien
tatgcttttggtgcagtgcatcgga

SEQ ID NO: 3769786 - DNA, 25 bp, Homo sapien
atgaatcccacttccgcacgtagaa

SEQ ID NO: 3769787 - DNA, 25 bp, Homo sapien
actttcagtgcctctcccctggaaa

SEQ ID NO: 3769788 - DNA, 25 bp, Homo sapien
atcaatcactttcagtgcctctccc

SEQ ID NO: 3769789 - DNA, 25 bp, Homo sapien
atcactttcagtgcctctcccctgg

SEQ ID NO: 3769790 - DNA, 25 bp, Homo sapien
aatcactttcagtgcctctcccctg

SEQ ID NO: 3769791 - DNA, 25 bp, Homo sapien
tctcgctctcattgaagacagtcaa

SEQ ID NO: 3769792 - DNA, 25 bp, Homo sapien
tgcctcttctcgctctcattgaaga

SEQ ID NO: 3769793 - DNA, 25 bp, Homo sapien
tcttctcgctctcattgaagacagt

SEQ ID NO: 3769794 - DNA, 25 bp, Homo sapien
tctcattgaagacagtcaatctttc

SEQ ID NO: 3769795 - DNA, 25 bp, Homo sapien
ctctttcttcccttcgagtgtggct

SEQ ID NO: 3769796 - DNA, 25 bp, Homo sapien
tttcttcccttcgagtgtggctgtt

SEQ ID NO: 3769797 - DNA, 25 bp, Homo sapien
gctacacagatgtcacttccccttg

SEQ ID NO: 3769798 - DNA, 25 bp, Homo sapien
ctgctacacagatgtcacttcccct

SEQ ID NO: 3769799 - DNA, 25 bp, Homo sapien
tacacagatgtcacttccccttgga

SEQ ID NO: 3769800 - DNA, 25 bp, Homo sapien
ctacacagatgtcacttccccttgg

SEQ ID NO: 3769801 - DNA, 25 bp, Homo sapien
ctgtgtccccagtagtctgagagcc

SEQ ID NO: 3769802 - DNA, 25 bp, Homo sapien
gtctgagagccacagtaagtcctgt

SEQ ID NO: 3769803 - DNA, 25 bp, Homo sapien
agtaagtcctgttgccagttgtatc

SEQ ID NO: 3769804 - DNA, 25 bp, Homo sapien
tgtgtccccagtagtctgagagcca

SEQ ID NO: 3769805 - DNA, 25 bp, Homo sapien
gctctcttgaagagctcattattct

SEQ ID NO: 3769806 - DNA, 25 bp, Homo sapien
catcattgcttctccactggtaact

SEQ ID NO: 3769807 - DNA, 25 bp, Homo sapien
tctgaatgctggacccaaatatccc

SEQ ID NO: 3769808 - DNA, 25 bp, Homo sapien
ttctgttgtactcccatgactctga

SEQ ID NO: 3769809 - DNA, 25 bp, Homo sapien
ctgaagtagtcgctaacacactcgt

SEQ ID NO: 3769810 - DNA, 25 bp, Homo sapien
cagtcttccgatagctttaatactg

SEQ ID NO: 3769811 - DNA, 25 bp, Homo sapien
taatactgaagtagtcgctaacaca

SEQ ID NO: 3769812 - DNA, 25 bp, Homo sapien
tccgatagctttaatactgaagtag

SEQ ID NO: 3769813 - DNA, 25 bp, Homo sapien
tgtctaatgcagtcataagcgtggc

SEQ ID NO: 3769814 - DNA, 25 bp, Homo sapien
aatagcctgatgtacgaccttcgcg

SEQ ID NO: 3769815 - DNA, 25 bp, Homo sapien
gcaacagggctaagattgtcgcact

SEQ ID NO: 3769816 - DNA, 25 bp, Homo sapien
taggtaccttgcagaccataacgag

SEQ ID NO: 3769817 - DNA, 25 bp, Homo sapien
tctgtgtatactctgcctggaacgg

SEQ ID NO: 3769818 - DNA, 25 bp, Homo sapien
cagaccttgtatttgagatgctaac

SEQ ID NO: 3769819 - DNA, 25 bp, Homo sapien
gaatgtgtgaccgttggctataaga

SEQ ID NO: 3769820 - DNA, 25 bp, Homo sapien
gaagaacctacatcatttgcagacc

SEQ ID NO: 3769821 - DNA, 25 bp, Homo sapien
tttgagcttatccatattttagcct

SEQ ID NO: 3769822 - DNA, 25 bp, Homo sapien
gaggtttaggcttgtcaatgagtct

SEQ ID NO: 3769823 - DNA, 25 bp, Homo sapien
cgtgtgaaacagcaaggaatacatt

SEQ ID NO: 3769824 - DNA, 25 bp, Homo sapien
cacgtgtgaaacagcaaggaataca

SEQ ID NO: 3769825 - DNA, 25 bp, Homo sapien
tgtcaatgagtctgcttggatttgg

SEQ ID NO: 3769826 - DNA, 25 bp, Homo sapien
agaaatgtaatggggaggttgtcaa

SEQ ID NO: 3769827 - DNA, 25 bp, Homo sapien
tagaaatgtaatggggaggttgtca

SEQ ID NO: 3769828 - DNA, 25 bp, Homo sapien
agcacttgactgtacttctctgaaa

SEQ ID NO: 3769829 - DNA, 25 bp, Homo sapien
cagagactagttattggtgatgcca

SEQ ID NO: 3769830 - DNA, 25 bp, Homo sapien
taatccgtttgcacaacagctcaaa

SEQ ID NO: 3769831 - DNA, 25 bp, Homo sapien
gatcaccaacatcattaagcacttg

SEQ ID NO: 3769832 - DNA, 25 bp, Homo sapien
tcagagtctcaacaggtcaggtaca

SEQ ID NO: 3769833 - DNA, 25 bp, Homo sapien
tattaaagccacgttccacagcgga

SEQ ID NO: 3769834 - DNA, 25 bp, Homo sapien
cataaggtaccagaggaaagagcct

SEQ ID NO: 3769835 - DNA, 25 bp, Homo sapien
tcattggaaagagtcaagcccggtt

SEQ ID NO: 3769836 - DNA, 25 bp, Homo sapien
cattttactggcaaaagaattgctg

SEQ ID NO: 3769837 - DNA, 25 bp, Homo sapien
attttactggcaaaagaattgctgg

SEQ ID NO: 3769838 - DNA, 25 bp, Homo sapien
cctcgggggtcctgtgtaaattatg

SEQ ID NO: 3769839 - DNA, 25 bp, Homo sapien
ctcgggggtcctgtgtaaattatgt

SEQ ID NO: 3769840 - DNA, 25 bp, Homo sapien
gcagcacagcatgtcccctctttga

SEQ ID NO: 3769841 - DNA, 25 bp, Homo sapien
agaaccgtaggatcccacgcatcac

SEQ ID NO: 3769842 - DNA, 25 bp, Homo sapien
agcacagcatgtcccctctttgaga

SEQ ID NO: 3769843 - DNA, 25 bp, Homo sapien
cccctctttgagagaaccgtaggat

SEQ ID NO: 3769844 - DNA, 25 bp, Homo sapien
gcaagagaatagggcaggcgtaata

SEQ ID NO: 3769845 - DNA, 25 bp, Homo sapien
taaagggaaatgagggcacgctgct

SEQ ID NO: 3769846 - DNA, 25 bp, Homo sapien
tgcaaccagcgagagaaacaaaggg

SEQ ID NO: 3769847 - DNA, 25 bp, Homo sapien
gccaaagcacaatatgagatgcaac

SEQ ID NO: 3769848 - DNA, 25 bp, Homo sapien
tagcatcctgatctgtgtgtgaatt

SEQ ID NO: 3769849 - DNA, 25 bp, Homo sapien
ggtgcactcttcacttagcatcctg

SEQ ID NO: 3769850 - DNA, 25 bp, Homo sapien
ctgagccgctctacccaggtcatga

SEQ ID NO: 3769851 - DNA, 25 bp, Homo sapien
ccaggtcatgaggtacttcctaagc

SEQ ID NO: 3769852 - DNA, 25 bp, Homo sapien
tgttttattgcaaagtctggaaaga

SEQ ID NO: 3769853 - DNA, 25 bp, Homo sapien
tctggaaagatgcatgtcagcacgc

SEQ ID NO: 3769854 - DNA, 25 bp, Homo sapien
ttcaaagtgaagttttaacagtgtc

SEQ ID NO: 3769855 - DNA, 25 bp, Homo sapien
atgtcagcacgcagcatcagccatc

SEQ ID NO: 3769856 - DNA, 25 bp, Homo sapien
tgatcccatagacgaggtcctttac

SEQ ID NO: 3769857 - DNA, 25 bp, Homo sapien
tggtcaacctgcttgatcccataga

SEQ ID NO: 3769858 - DNA, 25 bp, Homo sapien
cacagaggcctgtcaactttaatta

SEQ ID NO: 3769859 - DNA, 25 bp, Homo sapien
ggtcctttacaggagctagtgacct

SEQ ID NO: 3769860 - DNA, 25 bp, Homo sapien
taagaggaccaggaacatcacagag

SEQ ID NO: 3769861 - DNA, 25 bp, Homo sapien
catgtaaacaacacagctggctgtg

SEQ ID NO: 3769862 - DNA, 25 bp, Homo sapien
cagagaaactcacatgtaaacaaca

SEQ ID NO: 3769863 - DNA, 25 bp, Homo sapien
tggctgtgcaccagctctgtgcaca

SEQ ID NO: 3769864 - DNA, 25 bp, Homo sapien
gactgagcaatcagcccacgcaagt

SEQ ID NO: 3769865 - DNA, 25 bp, Homo sapien
gatacacgcgtaggactgagcaatc

SEQ ID NO: 3769866 - DNA, 25 bp, Homo sapien
ttctgtttccctttgatacacgcgt

SEQ ID NO: 3769867 - DNA, 25 bp, Homo sapien
cacgcaagtcctcggctcttgtgga

SEQ ID NO: 3769868 - DNA, 25 bp, Homo sapien
gagaggagcacgtggaacataatgc

SEQ ID NO: 3769869 - DNA, 25 bp, Homo sapien
agaggagcacgtggaacataatgca

SEQ ID NO: 3769870 - DNA, 25 bp, Homo sapien
aggagcacgtggaacataatgcaca

SEQ ID NO: 3769871 - DNA, 25 bp, Homo sapien
gaggagcacgtggaacataatgcac

SEQ ID NO: 3769872 - DNA, 25 bp, Homo sapien
tgaaagaccatttgggagagccagg

SEQ ID NO: 3769873 - DNA, 25 bp, Homo sapien
aatgaaagaccatttgggagagcca

SEQ ID NO: 3769874 - DNA, 25 bp, Homo sapien
gaaagaccatttgggagagccaggt

SEQ ID NO: 3769875 - DNA, 25 bp, Homo sapien
atgaaagaccatttgggagagccag

SEQ ID NO: 3769876 - DNA, 25 bp, Homo sapien
tgtaaaataatgcttcatggcagtg

SEQ ID NO: 3769877 - DNA, 25 bp, Homo sapien
aaataatgcttcatggcagtgagtc

SEQ ID NO: 3769878 - DNA, 25 bp, Homo sapien
ctgtaaaataatgcttcatggcagt

SEQ ID NO: 3769879 - DNA, 25 bp, Homo sapien
taaaataatgcttcatggcagtgag

SEQ ID NO: 3769880 - DNA, 25 bp, Homo sapien
ggatcctatctccaggtataaactc

SEQ ID NO: 3769881 - DNA, 25 bp, Homo sapien
ctgtgggtggatcctatctccaggt

SEQ ID NO: 3769882 - DNA, 25 bp, Homo sapien
ataaactcacatctaccaggccagg

SEQ ID NO: 3769883 - DNA, 25 bp, Homo sapien
taaactcacatctaccaggccagga

SEQ ID NO: 3769884 - DNA, 25 bp, Homo sapien
ggtgtgaaacaggttcatagtctgc

SEQ ID NO: 3769885 - DNA, 25 bp, Homo sapien
gcggtgtgaaacaggttcatagtct

SEQ ID NO: 3769886 - DNA, 25 bp, Homo sapien
gggcggtgtgaaacaggttcatagt

SEQ ID NO: 3769887 - DNA, 25 bp, Homo sapien
gtgtgaaacaggttcatagtctgca

SEQ ID NO: 3769888 - DNA, 25 bp, Homo sapien
gcctagaattcccttgagaacttcc

SEQ ID NO: 3769889 - DNA, 25 bp, Homo sapien
ccccagtggagaggttattaggaca

SEQ ID NO: 3769890 - DNA, 25 bp, Homo sapien
taccaaggtgaccaatcaacactgc

SEQ ID NO: 3769891 - DNA, 25 bp, Homo sapien
cactgctgttggttgcctagaattc

SEQ ID NO: 3769892 - DNA, 25 bp, Homo sapien
aatttcagccctcgttttctgtctc

SEQ ID NO: 3769893 - DNA, 25 bp, Homo sapien
aaatttcagccctcgttttctgtct

SEQ ID NO: 3769894 - DNA, 25 bp, Homo sapien
ccaaatttcagccctcgttttctgt

SEQ ID NO: 3769895 - DNA, 25 bp, Homo sapien
ttcagccctcgttttctgtctctac

SEQ ID NO: 3769896 - DNA, 25 bp, Homo sapien
tgtaaggcagaacatttcaggcatc

SEQ ID NO: 3769897 - DNA, 25 bp, Homo sapien
ctgtaaggcagaacatttcaggcat

SEQ ID NO: 3769898 - DNA, 25 bp, Homo sapien
cagaactgcaagagttctccctcat

SEQ ID NO: 3769899 - DNA, 25 bp, Homo sapien
tgtttctcgcatggccagaactgca

SEQ ID NO: 3769900 - DNA, 25 bp, Homo sapien
tctatgggtcctctagggttagcct

SEQ ID NO: 3769901 - DNA, 25 bp, Homo sapien
ggttagcctgaagttgctgcctgta

SEQ ID NO: 3769902 - DNA, 25 bp, Homo sapien
caaggaagtggtctctcaatgcccc

SEQ ID NO: 3769903 - DNA, 25 bp, Homo sapien
ttttgctctagctgaggagacagtc

SEQ ID NO: 3769904 - DNA, 25 bp, Homo sapien
tccatactgcttcaaccctgatatc

SEQ ID NO: 3769905 - DNA, 25 bp, Homo sapien
gaataattatctcagcccctccata

SEQ ID NO: 3769906 - DNA, 25 bp, Homo sapien
gcaataatcctgagaataattatct

SEQ ID NO: 3769907 - DNA, 25 bp, Homo sapien
ctccaggactgaatggggttttaat

SEQ ID NO: 3769908 - DNA, 25 bp, Homo sapien
tagaacccgtaagtcaccaacatgg

SEQ ID NO: 3769909 - DNA, 25 bp, Homo sapien
tgactacacagtcgtaatatgccat

SEQ ID NO: 3769910 - DNA, 25 bp, Homo sapien
cattagtaatgccttttagaacccg

SEQ ID NO: 3769911 - DNA, 25 bp, Homo sapien
aagcacttgaaaatgtggcctcctt

SEQ ID NO: 3769912 - DNA, 25 bp, Homo sapien
ctaggtctctggcacttaagaagcc

SEQ ID NO: 3769913 - DNA, 25 bp, Homo sapien
tccttaaatcctagcgcaaggcggg

SEQ ID NO: 3769914 - DNA, 25 bp, Homo sapien
gaaataaggacacattgtcggagaa

SEQ ID NO: 3769915 - DNA, 25 bp, Homo sapien
tgtcggagaatgtctccaattccaa

SEQ ID NO: 3769916 - DNA, 25 bp, Homo sapien
aatcaaagttcctgggccacgtgat

SEQ ID NO: 3769917 - DNA, 25 bp, Homo sapien
gccacgtgattaaaaatgtgtagtg

SEQ ID NO: 3769918 - DNA, 25 bp, Homo sapien
ttgtgtagccctccaaaataccctc

SEQ ID NO: 3769919 - DNA, 25 bp, Homo sapien
tagtgaggctctcgcattgtgtagc

SEQ ID NO: 3769920 - DNA, 25 bp, Homo sapien
cctttgacgttcacaactgactatt

SEQ ID NO: 3769921 - DNA, 25 bp, Homo sapien
acataatcacttgagtcacgcagtg

SEQ ID NO: 3769922 - DNA, 25 bp, Homo sapien
gagtcacgcagtgattcctttgacg

SEQ ID NO: 3769923 - DNA, 25 bp, Homo sapien
caactgactatttctagaagcctca

SEQ ID NO: 3769924 - DNA, 25 bp, Homo sapien
ttatttgaattattcccttctgatc

SEQ ID NO: 3769925 - DNA, 25 bp, Homo sapien
tttgaattattcccttctgatcaat

SEQ ID NO: 3769926 - DNA, 25 bp, Homo sapien
atgtaattgctacttcctttgactt

SEQ ID NO: 3769927 - DNA, 25 bp, Homo sapien
tatgtaattgctacttcctttgact

SEQ ID NO: 3769928 - DNA, 25 bp, Homo sapien
tgtgacacggagtcgcagatgattt

SEQ ID NO: 3769929 - DNA, 25 bp, Homo sapien
cacggagtcgcagatgatttgaaca

SEQ ID NO: 3769930 - DNA, 25 bp, Homo sapien
caatgtgacacggagtcgcagatga

SEQ ID NO: 3769931 - DNA, 25 bp, Homo sapien
ctttcaatgtgacacggagtcgcag

SEQ ID NO: 3769932 - DNA, 25 bp, Homo sapien
actgaaggaggagatgaaattcaca

SEQ ID NO: 3769933 - DNA, 25 bp, Homo sapien
tgaaggagagactgaaggaggagat

SEQ ID NO: 3769934 - DNA, 25 bp, Homo sapien
aattcacatggccagcaccattcat

SEQ ID NO: 3769935 - DNA, 25 bp, Homo sapien
gagatgaaattcacatggccagcac

SEQ ID NO: 3769936 - DNA, 25 bp, Homo sapien
ggggtccttgtcactaggactattg

SEQ ID NO: 3769937 - DNA, 25 bp, Homo sapien
tctgtactgcctgacactggtgaac

SEQ ID NO: 3769938 - DNA, 25 bp, Homo sapien
gataaatagaatctgtactgcctga

SEQ ID NO: 3769939 - DNA, 25 bp, Homo sapien
cctgtctgctgccacgtgataaata

SEQ ID NO: 3769940 - DNA, 25 bp, Homo sapien
catggatctcttttctgacgtggtt

SEQ ID NO: 3769941 - DNA, 25 bp, Homo sapien
tgtagcaagggatgtccatggatct

SEQ ID NO: 3769942 - DNA, 25 bp, Homo sapien
gcgaggtataggaagctgccagcca

SEQ ID NO: 3769943 - DNA, 25 bp, Homo sapien
ccatgattttgtctgaggcaggatc

SEQ ID NO: 3769944 - DNA, 25 bp, Homo sapien
cacacagcgggctcttctggcaaat

SEQ ID NO: 3769945 - DNA, 25 bp, Homo sapien
gggctcttctggcaaatgcactttg

SEQ ID NO: 3769946 - DNA, 25 bp, Homo sapien
aggccctattttagccccactagtg

SEQ ID NO: 3769947 - DNA, 25 bp, Homo sapien
tagccccactagtgtctaaagtatc

SEQ ID NO: 3769948 - DNA, 25 bp, Homo sapien
ccaaaaagattccatgggcctgtca

SEQ ID NO: 3769949 - DNA, 25 bp, Homo sapien
aacctgctattccaaaaagattcca

SEQ ID NO: 3769950 - DNA, 25 bp, Homo sapien
cctgctattccaaaaagattccatg

SEQ ID NO: 3769951 - DNA, 25 bp, Homo sapien
tattccaaaaagattccatgggcct

SEQ ID NO: 3769952 - DNA, 25 bp, Homo sapien
ttcaaatcgctcctcttattatggg

SEQ ID NO: 3769953 - DNA, 25 bp, Homo sapien
tcatcttcttgcttcaaatcgctcc

SEQ ID NO: 3769954 - DNA, 25 bp, Homo sapien
tattctgtcaaaactctcgaaagca

SEQ ID NO: 3769955 - DNA, 25 bp, Homo sapien
aaaactctcgaaagcaagaatgtca

SEQ ID NO: 3769956 - DNA, 25 bp, Homo sapien
gcttcttggtctgaactccactgtt

SEQ ID NO: 3769957 - DNA, 25 bp, Homo sapien
gttctgaagggtcttattcacagca

SEQ ID NO: 3769958 - DNA, 25 bp, Homo sapien
acagcagtacaaggagctattgttc

SEQ ID NO: 3769959 - DNA, 25 bp, Homo sapien
cagcttcttggtctgaactccactg

SEQ ID NO: 3769960 - DNA, 25 bp, Homo sapien
aggcccggtgatacgaagagtcagg

SEQ ID NO: 3769961 - DNA, 25 bp, Homo sapien
cccggtgatacgaagagtcagggac

SEQ ID NO: 3769962 - DNA, 25 bp, Homo sapien
tacgaagagtcagggactttctcag

SEQ ID NO: 3769963 - DNA, 25 bp, Homo sapien
ggtgatacgaagagtcagggacttt

SEQ ID NO: 3769964 - DNA, 25 bp, Homo sapien
gctgcttcatggacccagttagctt

SEQ ID NO: 3769965 - DNA, 25 bp, Homo sapien
tacagttccatggtacgaatttctg

SEQ ID NO: 3769966 - DNA, 25 bp, Homo sapien
tgtttccatgaaaggtacagttcca

SEQ ID NO: 3769967 - DNA, 25 bp, Homo sapien
aatttctgatggattcacggtacgc

SEQ ID NO: 3769968 - DNA, 25 bp, Homo sapien
gaaagaggccagttcagaatggtca

SEQ ID NO: 3769969 - DNA, 25 bp, Homo sapien
ggaaagaggccagttcagaatggtc

SEQ ID NO: 3769970 - DNA, 25 bp, Homo sapien
gggaaagaggccagttcagaatggt

SEQ ID NO: 3769971 - DNA, 25 bp, Homo sapien
tgtagcatacgatgtcctccagact

SEQ ID NO: 3769972 - DNA, 25 bp, Homo sapien
cagactgtagcttccttgagttaga

SEQ ID NO: 3769973 - DNA, 25 bp, Homo sapien
gatgcccgaattgcaggtgttaccc

SEQ ID NO: 3769974 - DNA, 25 bp, Homo sapien
gaactttgcacctttccctttgtga

SEQ ID NO: 3769975 - DNA, 25 bp, Homo sapien
ggacatccagtcaacacttcatggg

SEQ ID NO: 3769976 - DNA, 25 bp, Homo sapien
caaatgccaattacaggacatccag

SEQ ID NO: 3769977 - DNA, 25 bp, Homo sapien
gatgatgatgataacaacctttgcc

SEQ ID NO: 3769978 - DNA, 25 bp, Homo sapien
tgggtcaatacatcagcagaaagga

SEQ ID NO: 3769979 - DNA, 25 bp, Homo sapien
taaattttggcaactttctgaagct

SEQ ID NO: 3769980 - DNA, 25 bp, Homo sapien
catggtcgttgccaacatcatcagc

SEQ ID NO: 3769981 - DNA, 25 bp, Homo sapien
tatttcgtctgtaattgcatggtcg

SEQ ID NO: 3769982 - DNA, 25 bp, Homo sapien
ccactgttatttcgtctgtaattgc

SEQ ID NO: 3769983 - DNA, 25 bp, Homo sapien
cccctttgggtgatcgcgtaaatga

SEQ ID NO: 3769984 - DNA, 25 bp, Homo sapien
ccggagatggctctcattgccagca

SEQ ID NO: 3769985 - DNA, 25 bp, Homo sapien
gggtgatcgcgtaaatgattacatg

SEQ ID NO: 3769986 - DNA, 25 bp, Homo sapien
cttttggagctgcccggagatggct

SEQ ID NO: 3769987 - DNA, 25 bp, Homo sapien
tccaaagcaaccctcgttaatcacg

SEQ ID NO: 3769988 - DNA, 25 bp, Homo sapien
agtctcttggtttggacccaagtca

SEQ ID NO: 3769989 - DNA, 25 bp, Homo sapien
tgatcaactgttgcatgtaacctgg

SEQ ID NO: 3769990 - DNA, 25 bp, Homo sapien
gttaatcacgagtccagtctcttgg

SEQ ID NO: 3769991 - DNA, 25 bp, Homo sapien
ttacaagtgatggcaaatttgacat

SEQ ID NO: 3769992 - DNA, 25 bp, Homo sapien
ctcctgtaaatgattgtagccccta

SEQ ID NO: 3769993 - DNA, 25 bp, Homo sapien
tgattgtagcccctaaatttcttta

SEQ ID NO: 3769994 - DNA, 25 bp, Homo sapien
gattgtatctgttgggatatttaca

SEQ ID NO: 3769995 - DNA, 25 bp, Homo sapien
ctgaagggggcatgatttttagttg

SEQ ID NO: 3769996 - DNA, 25 bp, Homo sapien
tgaagggggcatgatttttagttga

SEQ ID NO: 3769997 - DNA, 25 bp, Homo sapien
gaagggggcatgatttttagttgag

SEQ ID NO: 3769998 - DNA, 25 bp, Homo sapien
gggacacagcaccccactgaggaca

SEQ ID NO: 3769999 - DNA, 25 bp, Homo sapien
acacagcaccccactgaggacacca

SEQ ID NO: 3770000 - DNA, 25 bp, Homo sapien
acagcaccccactgaggacaccaac

SEQ ID NO: 3770001 - DNA, 25 bp, Homo sapien
gcaccccactgaggacaccaacaca

SEQ ID NO: 3770002 - DNA, 25 bp, Homo sapien
ggctccagattcagaatttactcca

SEQ ID NO: 3770003 - DNA, 25 bp, Homo sapien
tagtggctccagattcagaatttac

SEQ ID NO: 3770004 - DNA, 25 bp, Homo sapien
gtggctccagattcagaatttactc

SEQ ID NO: 3770005 - DNA, 25 bp, Homo sapien
cttagtggctccagattcagaattt

SEQ ID NO: 3770006 - DNA, 25 bp, Homo sapien
taggggtgaagtagagggttggcat

SEQ ID NO: 3770007 - DNA, 25 bp, Homo sapien
ctaggggtgaagtagagggttggca

SEQ ID NO: 3770008 - DNA, 25 bp, Homo sapien
tgagaactccgtcactaggacagca

SEQ ID NO: 3770009 - DNA, 25 bp, Homo sapien
gatccaaaccctatcaggaggtgta

SEQ ID NO: 3770010 - DNA, 25 bp, Homo sapien
caaagccgaagcaggtgtgttctca

SEQ ID NO: 3770011 - DNA, 25 bp, Homo sapien
cgggaaattttgactcatggcggaa

SEQ ID NO: 3770012 - DNA, 25 bp, Homo sapien
tagacaagtagagtctacacccggg

SEQ ID NO: 3770013 - DNA, 25 bp, Homo sapien
gtttgaatcacatggctcggaccca

SEQ ID NO: 3770014 - DNA, 25 bp, Homo sapien
tctctaagagatgtgctattcttgt

SEQ ID NO: 3770015 - DNA, 25 bp, Homo sapien
ccatcagtttctctaagagatgtgc

SEQ ID NO: 3770016 - DNA, 25 bp, Homo sapien
gatagcaagtgttgaccagtgtgta

SEQ ID NO: 3770017 - DNA, 25 bp, Homo sapien
gactatccctcactcaaaaagaaaa

SEQ ID NO: 3770018 - DNA, 25 bp, Homo sapien
agtagttctaccatttcaagtctca

SEQ ID NO: 3770019 - DNA, 25 bp, Homo sapien
gtgtgtagataaaagggaactctta

SEQ ID NO: 3770020 - DNA, 25 bp, Homo sapien
ccttgcttcacagagatatgagcta

SEQ ID NO: 3770021 - DNA, 25 bp, Homo sapien
caatgattgctttgtaacacggttt

SEQ ID NO: 3770022 - DNA, 25 bp, Homo sapien
tatgagctatcgaatcaatgattgc

SEQ ID NO: 3770023 - DNA, 25 bp, Homo sapien
gctgacattcagcttcattggcaca

SEQ ID NO: 3770024 - DNA, 25 bp, Homo sapien
gcccaatgcttgaggcttcatggcc

SEQ ID NO: 3770025 - DNA, 25 bp, Homo sapien
tgggcccaatgcttgaggcttcatg

SEQ ID NO: 3770026 - DNA, 25 bp, Homo sapien
cttgggcccaatgcttgaggcttca

SEQ ID NO: 3770027 - DNA, 25 bp, Homo sapien
ggcccaatgcttgaggcttcatggc

SEQ ID NO: 3770028 - DNA, 25 bp, Homo sapien
attgtcatggtgattcttctagcag

SEQ ID NO: 3770029 - DNA, 25 bp, Homo sapien
taggagaatcaccattgtcatggtg

SEQ ID NO: 3770030 - DNA, 25 bp, Homo sapien
aacacataggagaatcaccattgtc

SEQ ID NO: 3770031 - DNA, 25 bp, Homo sapien
gtcatggtgattcttctagcagttt

SEQ ID NO: 3770032 - DNA, 25 bp, Homo sapien
tcttgaatgctccatgtgacccaga

SEQ ID NO: 3770033 - DNA, 25 bp, Homo sapien
tcctgagaacgcctgactctaggag

SEQ ID NO: 3770034 - DNA, 25 bp, Homo sapien
actctaggagtgttctgctgttggc

SEQ ID NO: 3770035 - DNA, 25 bp, Homo sapien
tttcctgccctggtacatctagacc

SEQ ID NO: 3770036 - DNA, 25 bp, Homo sapien
tgtggttattcaaacagtggagctg

SEQ ID NO: 3770037 - DNA, 25 bp, Homo sapien
ggtgaaaccaacatataaaccatgt

SEQ ID NO: 3770038 - DNA, 25 bp, Homo sapien
gcttgtttttgcaattgtgtggtta

SEQ ID NO: 3770039 - DNA, 25 bp, Homo sapien
tttgaaacagaatgaggcacgaacg

SEQ ID NO: 3770040 - DNA, 25 bp, Homo sapien
aatccgagcagagctggtcctacag

SEQ ID NO: 3770041 - DNA, 25 bp, Homo sapien
tctgtctgcgggaagctggccagaa

SEQ ID NO: 3770042 - DNA, 25 bp, Homo sapien
tgtgacagcattagatgccattgag

SEQ ID NO: 3770043 - DNA, 25 bp, Homo sapien
tgagagatgtttggtgtgacagcat

SEQ ID NO: 3770044 - DNA, 25 bp, Homo sapien
tgtgcccttgcgttgtattgactcc

SEQ ID NO: 3770045 - DNA, 25 bp, Homo sapien
ccccgaccacaattgggctttattg

SEQ ID NO: 3770046 - DNA, 25 bp, Homo sapien
cccttgcgttgtattgactccccga

SEQ ID NO: 3770047 - DNA, 25 bp, Homo sapien
tattgactccccgaccacaattggg

SEQ ID NO: 3770048 - DNA, 25 bp, Homo sapien
ccagcaccgtggcttgtccattgct

SEQ ID NO: 3770049 - DNA, 25 bp, Homo sapien
attgcttatctgaagggcggatcca

SEQ ID NO: 3770050 - DNA, 25 bp, Homo sapien
tgcagttggtgcaatttcccatttc

SEQ ID NO: 3770051 - DNA, 25 bp, Homo sapien
tgttctagagttcgctcatgctcag

SEQ ID NO: 3770052 - DNA, 25 bp, Homo sapien
tgttcagtttcaaacgtttcactgc

SEQ ID NO: 3770053 - DNA, 25 bp, Homo sapien
agaagccgtgcttacgacggagtga

SEQ ID NO: 3770054 - DNA, 25 bp, Homo sapien
gagttggagcatacttctatagaaa

SEQ ID NO: 3770055 - DNA, 25 bp, Homo sapien
taattccaaagatcggaacgctgtg

SEQ ID NO: 3770056 - DNA, 25 bp, Homo sapien
ggctgtccactacatgggtatttgg

SEQ ID NO: 3770057 - DNA, 25 bp, Homo sapien
gcgtgtgtcagccacagaccctggc

SEQ ID NO: 3770058 - DNA, 25 bp, Homo sapien
caatgagaacacggaagaaggaatg

SEQ ID NO: 3770059 - DNA, 25 bp, Homo sapien
tgggccaccccagcgttcatgtttg

SEQ ID NO: 3770060 - DNA, 25 bp, Homo sapien
catcctgaatgcgccactttctgaa

SEQ ID NO: 3770061 - DNA, 25 bp, Homo sapien
atctcatcctgaatgcgccactttc

SEQ ID NO: 3770062 - DNA, 25 bp, Homo sapien
tcctgaatgcgccactttctgaagg

SEQ ID NO: 3770063 - DNA, 25 bp, Homo sapien
ctcatcctgaatgcgccactttctg

SEQ ID NO: 3770064 - DNA, 25 bp, Homo sapien
ggttagtctgcggtttctcagccat

SEQ ID NO: 3770065 - DNA, 25 bp, Homo sapien
gctctcttgtgaccagacctttcag

SEQ ID NO: 3770066 - DNA, 25 bp, Homo sapien
ctttgtgatgtcagctaggttagtc

SEQ ID NO: 3770067 - DNA, 25 bp, Homo sapien
ctttgctctcttgtgaccagacctt

SEQ ID NO: 3770068 - DNA, 25 bp, Homo sapien
tccccaaccaaagtcttgtcaatgt

SEQ ID NO: 3770069 - DNA, 25 bp, Homo sapien
tgtcaatgttcagtcactccttctc

SEQ ID NO: 3770070 - DNA, 25 bp, Homo sapien
cagtgtggccgtctagcagctaatc

SEQ ID NO: 3770071 - DNA, 25 bp, Homo sapien
aaaatgatctttctccgcagtgtgg

SEQ ID NO: 3770072 - DNA, 25 bp, Homo sapien
gtctgccatctcacttgaagaggtg

SEQ ID NO: 3770073 - DNA, 25 bp, Homo sapien
ggtggtctgccatctcacttgaaga

SEQ ID NO: 3770074 - DNA, 25 bp, Homo sapien
aagaaatacatttccatcctgaggt

SEQ ID NO: 3770075 - DNA, 25 bp, Homo sapien
tggtctgccatctcacttgaagagg

SEQ ID NO: 3770076 - DNA, 25 bp, Homo sapien
aatgcgtttttgtctgggctgcagt

SEQ ID NO: 3770077 - DNA, 25 bp, Homo sapien
tcaatgcgtttttgtctgggctgca

SEQ ID NO: 3770078 - DNA, 25 bp, Homo sapien
caatgcgtttttgtctgggctgcag

SEQ ID NO: 3770079 - DNA, 25 bp, Homo sapien
ggcaactgtattcggctttccttga

SEQ ID NO: 3770080 - DNA, 25 bp, Homo sapien
tcaagggcaatattccgggttagga

SEQ ID NO: 3770081 - DNA, 25 bp, Homo sapien
tattccgggttaggaattccatctc

SEQ ID NO: 3770082 - DNA, 25 bp, Homo sapien
cttggcaactgtattcggctttcct

SEQ ID NO: 3770083 - DNA, 25 bp, Homo sapien
taagaggagagagagagcttactca

SEQ ID NO: 3770084 - DNA, 25 bp, Homo sapien
ttaagaggagagagagagcttactc

SEQ ID NO: 3770085 - DNA, 25 bp, Homo sapien
aagaggagagagagagcttactcac

SEQ ID NO: 3770086 - DNA, 25 bp, Homo sapien
gagccttattaaatggttggcttta

SEQ ID NO: 3770087 - DNA, 25 bp, Homo sapien
tgtctttccggagccttattaaatg

SEQ ID NO: 3770088 - DNA, 25 bp, Homo sapien
accacacctgtctttccggagcctt

SEQ ID NO: 3770089 - DNA, 25 bp, Homo sapien
tccggagccttattaaatggttggc

SEQ ID NO: 3770090 - DNA, 25 bp, Homo sapien
aattgatggtgaatgcctttccctt

SEQ ID NO: 3770091 - DNA, 25 bp, Homo sapien
gtgaatgcctttcccttgtttggct

SEQ ID NO: 3770092 - DNA, 25 bp, Homo sapien
gatggtgaatgcctttcccttgttt

SEQ ID NO: 3770093 - DNA, 25 bp, Homo sapien
tggtgaatgcctttcccttgtttgg

SEQ ID NO: 3770094 - DNA, 25 bp, Homo sapien
tggtgctaatgatattatcctcaac

SEQ ID NO: 3770095 - DNA, 25 bp, Homo sapien
ttatcctcaaccacatgaaagccca

SEQ ID NO: 3770096 - DNA, 25 bp, Homo sapien
ttctgctgaaataagatgagcttcc

SEQ ID NO: 3770097 - DNA, 25 bp, Homo sapien
gagcttccacggattttcacctttg

SEQ ID NO: 3770098 - DNA, 25 bp, Homo sapien
agagatgttctcctgaccttctata

SEQ ID NO: 3770099 - DNA, 25 bp, Homo sapien
aatgctgtataaccaggagagatgt

SEQ ID NO: 3770100 - DNA, 25 bp, Homo sapien
cttctatatccgcatttcccagggc

SEQ ID NO: 3770101 - DNA, 25 bp, Homo sapien
tatatccgcatttcccagggcgctc

SEQ ID NO: 3770102 - DNA, 25 bp, Homo sapien
aatgcagattccttgcctcctagtg

SEQ ID NO: 3770103 - DNA, 25 bp, Homo sapien
gattccttgcctcctagtgttgcct

SEQ ID NO: 3770104 - DNA, 25 bp, Homo sapien
gaaatgcagattccttgcctcctag

SEQ ID NO: 3770105 - DNA, 25 bp, Homo sapien
cttgcctcctagtgttgcctcttga

SEQ ID NO: 3770106 - DNA, 25 bp, Homo sapien
attataatcttttgctactctcttg

SEQ ID NO: 3770107 - DNA, 25 bp, Homo sapien
gatgtcattatagttgcggacacta

SEQ ID NO: 3770108 - DNA, 25 bp, Homo sapien
aatcttttgctactctcttgctaac

SEQ ID NO: 3770109 - DNA, 25 bp, Homo sapien
ctggtgccgtgggctaaggatgagg

SEQ ID NO: 3770110 - DNA, 25 bp, Homo sapien
agatctgctagtgggaagactgttc

SEQ ID NO: 3770111 - DNA, 25 bp, Homo sapien
tgaacgtgaggtcctccaatttcac

SEQ ID NO: 3770112 - DNA, 25 bp, Homo sapien
ttcagggatgcgcagatctgctagt

SEQ ID NO: 3770113 - DNA, 25 bp, Homo sapien
agtggcctgtgaacgtgaggtcctc

SEQ ID NO: 3770114 - DNA, 25 bp, Homo sapien
tacattgactcctttggctacacca

SEQ ID NO: 3770115 - DNA, 25 bp, Homo sapien
acatttttacattgactcctttggc

SEQ ID NO: 3770116 - DNA, 25 bp, Homo sapien
gactcctttggctacaccaagttca

SEQ ID NO: 3770117 - DNA, 25 bp, Homo sapien
ggctacaccaagttcattctgtcca

SEQ ID NO: 3770118 - DNA, 25 bp, Homo sapien
tgtctgattcaatctggtgtcctcc

SEQ ID NO: 3770119 - DNA, 25 bp, Homo sapien
tatcatcaggcactgcgtttatctg

SEQ ID NO: 3770120 - DNA, 25 bp, Homo sapien
gagatattgaaccaggattgcccaa

SEQ ID NO: 3770121 - DNA, 25 bp, Homo sapien
tgtctggaagataggcagggtcaat

SEQ ID NO: 3770122 - DNA, 25 bp, Homo sapien
cttcccatcggatcccgaatcccac

SEQ ID NO: 3770123 - DNA, 25 bp, Homo sapien
tctgagtgataccatgaatccatct

SEQ ID NO: 3770124 - DNA, 25 bp, Homo sapien
ctctgagtgataccatgaatccatc

SEQ ID NO: 3770125 - DNA, 25 bp, Homo sapien
atgaatccatctcctatactgccca

SEQ ID NO: 3770126 - DNA, 25 bp, Homo sapien
ctatactgcccagtttttctcacag

SEQ ID NO: 3770127 - DNA, 25 bp, Homo sapien
agcgccgtagtatcccagagaagcc

SEQ ID NO: 3770128 - DNA, 25 bp, Homo sapien
gattgaatgcatgtatgatcaggcc

SEQ ID NO: 3770129 - DNA, 25 bp, Homo sapien
tcatggcttggatgctagattgaat

SEQ ID NO: 3770130 - DNA, 25 bp, Homo sapien
tatgatcaggccttcgggcaaccac

SEQ ID NO: 3770131 - DNA, 25 bp, Homo sapien
aaggacaatttgctcaattaatatt

SEQ ID NO: 3770132 - DNA, 25 bp, Homo sapien
gcaactggccttgtgctgatggtgg

SEQ ID NO: 3770133 - DNA, 25 bp, Homo sapien
gggcaactggccttgtgctgatggt

SEQ ID NO: 3770134 - DNA, 25 bp, Homo sapien
gaaaaggacaatttgctcaattaat

SEQ ID NO: 3770135 - DNA, 25 bp, Homo sapien
cacagtttaattgtgacactctctg

SEQ ID NO: 3770136 - DNA, 25 bp, Homo sapien
atgcacatactgaatagccatagag

SEQ ID NO: 3770137 - DNA, 25 bp, Homo sapien
ttttatctgtattatgcacatactg

SEQ ID NO: 3770138 - DNA, 25 bp, Homo sapien
tattgagtgtattttgctaatgcac

SEQ ID NO: 3770139 - DNA, 25 bp, Homo sapien
taaatgtccagttaactggagacat

SEQ ID NO: 3770140 - DNA, 25 bp, Homo sapien
gggttatgccatgggatagctgcca

SEQ ID NO: 3770141 - DNA, 25 bp, Homo sapien
tgggattactgccatcatggggtta

SEQ ID NO: 3770142 - DNA, 25 bp, Homo sapien
gttatgccatgggatagctgccatc

SEQ ID NO: 3770143 - DNA, 25 bp, Homo sapien
atgccatgggatagctgccatcatg

SEQ ID NO: 3770144 - DNA, 25 bp, Homo sapien
aatgcagccactccttccctttcta

SEQ ID NO: 3770145 - DNA, 25 bp, Homo sapien
ccactccttccctttctattctctc

SEQ ID NO: 3770146 - DNA, 25 bp, Homo sapien
actccttccctttctattctctcac

SEQ ID NO: 3770147 - DNA, 25 bp, Homo sapien
tgcagccactccttccctttctatt

SEQ ID NO: 3770148 - DNA, 25 bp, Homo sapien
tctgcagctgcgatgcaatatgctc

SEQ ID NO: 3770149 - DNA, 25 bp, Homo sapien
cctggcaggtaccacgttgtgctgt

SEQ ID NO: 3770150 - DNA, 25 bp, Homo sapien
gcaatatgctctggactggatgtca

SEQ ID NO: 3770151 - DNA, 25 bp, Homo sapien
gctgtggttgcttgttctagagcct

SEQ ID NO: 3770152 - DNA, 25 bp, Homo sapien
tggaacaaggtttccgaagccacgc

SEQ ID NO: 3770153 - DNA, 25 bp, Homo sapien
aaggtcgtgactcacactgagggca

SEQ ID NO: 3770154 - DNA, 25 bp, Homo sapien
tctgagacacttgaaggtgacccca

SEQ ID NO: 3770155 - DNA, 25 bp, Homo sapien
tcacccagtgttgacttcggatggt

SEQ ID NO: 3770156 - DNA, 25 bp, Homo sapien
ggatcacccgtagcacaagaatcat

SEQ ID NO: 3770157 - DNA, 25 bp, Homo sapien
caaagatcccagatatagagacaag

SEQ ID NO: 3770158 - DNA, 25 bp, Homo sapien
aaagccaggaaatagcccaggttct

SEQ ID NO: 3770159 - DNA, 25 bp, Homo sapien
tatagagacaagtaggatcacccgt

SEQ ID NO: 3770160 - DNA, 25 bp, Homo sapien
ggacaaatgccatgtttatagtagc

SEQ ID NO: 3770161 - DNA, 25 bp, Homo sapien
aatgccatgtttatagtagcacaaa

SEQ ID NO: 3770162 - DNA, 25 bp, Homo sapien
ccatgtttatagtagcacaaaggag

SEQ ID NO: 3770163 - DNA, 25 bp, Homo sapien
tttatagtagcacaaaggagagaat

SEQ ID NO: 3770164 - DNA, 25 bp, Homo sapien
gttcattaaactgatgctgaaggtg

SEQ ID NO: 3770165 - DNA, 25 bp, Homo sapien
actccttttccgtagcacacagcaa

SEQ ID NO: 3770166 - DNA, 25 bp, Homo sapien
tccttttccgtagcacacagcaact

SEQ ID NO: 3770167 - DNA, 25 bp, Homo sapien
ttttccgtagcacacagcaactggc

SEQ ID NO: 3770168 - DNA, 25 bp, Homo sapien
ttgggtcagggtgaggccaggccaa

SEQ ID NO: 3770169 - DNA, 25 bp, Homo sapien
tgaggccaggccaagagtaagacct

SEQ ID NO: 3770170 - DNA, 25 bp, Homo sapien
agggtgaggccaggccaagagtaag

SEQ ID NO: 3770171 - DNA, 25 bp, Homo sapien
aggccaggccaagagtaagaccttg

SEQ ID NO: 3770172 - DNA, 25 bp, Homo sapien
agccagacacacgtgtggcacaggc

SEQ ID NO: 3770173 - DNA, 25 bp, Homo sapien
aagtcattaacagcacgagaggaag

SEQ ID NO: 3770174 - DNA, 25 bp, Homo sapien
gaggaagccagacacacgtgtggca

SEQ ID NO: 3770175 - DNA, 25 bp, Homo sapien
attaacagcacgagaggaagccaga

SEQ ID NO: 3770176 - DNA, 25 bp, Homo sapien
aatctttcacagatgttccctctat

SEQ ID NO: 3770177 - DNA, 25 bp, Homo sapien
acactgagagcccgaggaatccact

SEQ ID NO: 3770178 - DNA, 25 bp, Homo sapien
ctgctgcctggacactgagagcccg

SEQ ID NO: 3770179 - DNA, 25 bp, Homo sapien
ccctctatcaacagagcagcagctg

SEQ ID NO: 3770180 - DNA, 25 bp, Homo sapien
ttttgctgaaatgaggctagaaaac

SEQ ID NO: 3770181 - DNA, 25 bp, Homo sapien
ggagtttgataccaatctattgtac

SEQ ID NO: 3770182 - DNA, 25 bp, Homo sapien
tctgaatcttgaaatcgaggtccat

SEQ ID NO: 3770183 - DNA, 25 bp, Homo sapien
tttaacactgagcagaacgatgccc

SEQ ID NO: 3770184 - DNA, 25 bp, Homo sapien
agggacatcaacagaacgggttccg

SEQ ID NO: 3770185 - DNA, 25 bp, Homo sapien
tgctgcctctaaccatgaaatacgg

SEQ ID NO: 3770186 - DNA, 25 bp, Homo sapien
tgaaatacggtagagtttcttcaac

SEQ ID NO: 3770187 - DNA, 25 bp, Homo sapien
aacgggttccgattgctgcctctaa

SEQ ID NO: 3770188 - DNA, 25 bp, Homo sapien
gatcctccgagaaaatcaggaagcc

SEQ ID NO: 3770189 - DNA, 25 bp, Homo sapien
tggccaggtgacgatgaatgtccac

SEQ ID NO: 3770190 - DNA, 25 bp, Homo sapien
agaggatgccggctggccaggtgac

SEQ ID NO: 3770191 - DNA, 25 bp, Homo sapien
gggtgggatcctccgagaaaatcag

SEQ ID NO: 3770192 - DNA, 25 bp, Homo sapien
cagcgtccacctgtcaagcctggat

SEQ ID NO: 3770193 - DNA, 25 bp, Homo sapien
gaatccacccaagcgggcagaaagt

SEQ ID NO: 3770194 - DNA, 25 bp, Homo sapien
tgtcaagcctggatgaacaagttca

SEQ ID NO: 3770195 - DNA, 25 bp, Homo sapien
gggaggaaaatctgagccagcgtcc

SEQ ID NO: 3770196 - DNA, 25 bp, Homo sapien
gaatctgcatgggacacacaagctt

SEQ ID NO: 3770197 - DNA, 25 bp, Homo sapien
gcttgatcagttttctcagtgctca

SEQ ID NO: 3770198 - DNA, 25 bp, Homo sapien
tcactgccaagcatcgggtccacca

SEQ ID NO: 3770199 - DNA, 25 bp, Homo sapien
tcctgaattgtcaccactttgtgcc

SEQ ID NO: 3770200 - DNA, 25 bp, Homo sapien
gttttgattcaaagagtttcgaata

SEQ ID NO: 3770201 - DNA, 25 bp, Homo sapien
gattcaaagagtttcgaataagtgg

SEQ ID NO: 3770202 - DNA, 25 bp, Homo sapien
ttcgaagatctagcagtcaggccac

SEQ ID NO: 3770203 - DNA, 25 bp, Homo sapien
taagtggtttattcgaagatctagc

SEQ ID NO: 3770204 - DNA, 25 bp, Homo sapien
agcgaggagagaaatgggctttcca

SEQ ID NO: 3770205 - DNA, 25 bp, Homo sapien
ggagcgaggagagaaatgggctttc

SEQ ID NO: 3770206 - DNA, 25 bp, Homo sapien
cgtaaaagaacctgagaccaccagc

SEQ ID NO: 3770207 - DNA, 25 bp, Homo sapien
gacgtaaaagaacctgagaccacca

SEQ ID NO: 3770208 - DNA, 25 bp, Homo sapien
cagtgccgcgttttaggaggccgat

SEQ ID NO: 3770209 - DNA, 25 bp, Homo sapien
cacacttggacaagcgtgtcttcta

SEQ ID NO: 3770210 - DNA, 25 bp, Homo sapien
gccgattactctgaatgcagtgtga

SEQ ID NO: 3770211 - DNA, 25 bp, Homo sapien
tctaatgagatgtagcaaacagtgc

SEQ ID NO: 3770212 - DNA, 25 bp, Homo sapien
agaataactgggatgattgtactca

SEQ ID NO: 3770213 - DNA, 25 bp, Homo sapien
aactgggatgattgtactcacatcc

SEQ ID NO: 3770214 - DNA, 25 bp, Homo sapien
aataactgggatgattgtactcaca

SEQ ID NO: 3770215 - DNA, 25 bp, Homo sapien
tgggatgattgtactcacatcccag

SEQ ID NO: 3770216 - DNA, 25 bp, Homo sapien
tgttttattcaagcagtcatgctgc

SEQ ID NO: 3770217 - DNA, 25 bp, Homo sapien
gctgcaatccaatggcagctctaac

SEQ ID NO: 3770218 - DNA, 25 bp, Homo sapien
gcagtcatgctgcaatccaatggca

SEQ ID NO: 3770219 - DNA, 25 bp, Homo sapien
agtacagcatttttcgtgttccaaa

SEQ ID NO: 3770220 - DNA, 25 bp, Homo sapien
tgttgtctacggaaactggccctct

SEQ ID NO: 3770221 - DNA, 25 bp, Homo sapien
tagttgtgtgcttctcatgctgtcc

SEQ ID NO: 3770222 - DNA, 25 bp, Homo sapien
tgtgtgatcccaacagtcatcatgg

SEQ ID NO: 3770223 - DNA, 25 bp, Homo sapien
tccctggccagagtgactttgtgaa

SEQ ID NO: 3770224 - DNA, 25 bp, Homo sapien
ctgctggtcaagaaaacataaaagt

SEQ ID NO: 3770225 - DNA, 25 bp, Homo sapien
tctagaaatagaaatctccgtttat

SEQ ID NO: 3770226 - DNA, 25 bp, Homo sapien
tcaaaatgtcccattccacattcat

SEQ ID NO: 3770227 - DNA, 25 bp, Homo sapien
ccacattcattctcattagtggagc

SEQ ID NO: 3770228 - DNA, 25 bp, Homo sapien
gaattgcttcacacttaagagtttc

SEQ ID NO: 3770229 - DNA, 25 bp, Homo sapien
aagggcgtcagggatactggagtac

SEQ ID NO: 3770230 - DNA, 25 bp, Homo sapien
ctccatggtgatgagtatccaccct

SEQ ID NO: 3770231 - DNA, 25 bp, Homo sapien
cgtcagggatactggagtacagctg

SEQ ID NO: 3770232 - DNA, 25 bp, Homo sapien
tgagtatccaccctgtactaaaccc

SEQ ID NO: 3770233 - DNA, 25 bp, Homo sapien
ccttagaaatggtttgtgtccctca

SEQ ID NO: 3770234 - DNA, 25 bp, Homo sapien
aggcaagagaggctgtgtccttaga

SEQ ID NO: 3770235 - DNA, 25 bp, Homo sapien
gctgtgtccttagaaatggtttgtg

SEQ ID NO: 3770236 - DNA, 25 bp, Homo sapien
gaaatggtttgtgtccctcagaacc

SEQ ID NO: 3770237 - DNA, 25 bp, Homo sapien
tctgtggccgtcacaaaactgcttg

SEQ ID NO: 3770238 - DNA, 25 bp, Homo sapien
gtggcccctacttcatcacagacag

SEQ ID NO: 3770239 - DNA, 25 bp, Homo sapien
tggtaggaggaaataatgtggcccc

SEQ ID NO: 3770240 - DNA, 25 bp, Homo sapien
gggctagggtatcttatctcttcat

SEQ ID NO: 3770241 - DNA, 25 bp, Homo sapien
gtttgtttgtacagtctcgtagaat

SEQ ID NO: 3770242 - DNA, 25 bp, Homo sapien
ctccccttgtgtccagcttatttct

SEQ ID NO: 3770243 - DNA, 25 bp, Homo sapien
ctcgtagaattccatcagttgttcc

SEQ ID NO: 3770244 - DNA, 25 bp, Homo sapien
ccccttgtgtccagcttatttcttt

SEQ ID NO: 3770245 - DNA, 25 bp, Homo sapien
cataggattactgtctgagagccgc

SEQ ID NO: 3770246 - DNA, 25 bp, Homo sapien
tgtgggagaaaacagacggacacca

SEQ ID NO: 3770247 - DNA, 25 bp, Homo sapien
tgtgacagatcaggtagcaataggc

SEQ ID NO: 3770248 - DNA, 25 bp, Homo sapien
gaagaaggtaccgatcatcccagtg

SEQ ID NO: 3770249 - DNA, 25 bp, Homo sapien
cccaagggatttcagcagcgagatg

SEQ ID NO: 3770250 - DNA, 25 bp, Homo sapien
tgaaacaaaccctctggcctaagtg

SEQ ID NO: 3770251 - DNA, 25 bp, Homo sapien
tgtcatgagcggatcaatgccaccg

SEQ ID NO: 3770252 - DNA, 25 bp, Homo sapien
ggttgaatccattgaaaagcctcgg

SEQ ID NO: 3770253 - DNA, 25 bp, Homo sapien
tccagccgtcacgtggggaccatgt

SEQ ID NO: 3770254 - DNA, 25 bp, Homo sapien
ccgtcacgtggggaccatgtccatc

SEQ ID NO: 3770255 - DNA, 25 bp, Homo sapien
cacagcaactccagccgtcacgtgg

SEQ ID NO: 3770256 - DNA, 25 bp, Homo sapien
acagcaactccagccgtcacgtggg

SEQ ID NO: 3770257 - DNA, 25 bp, Homo sapien
taatgtgactctctatgtggaagca

SEQ ID NO: 3770258 - DNA, 25 bp, Homo sapien
taatgggaggcctgttctgtcagca

SEQ ID NO: 3770259 - DNA, 25 bp, Homo sapien
catccatgccaggtaggtgcttttc

SEQ ID NO: 3770260 - DNA, 25 bp, Homo sapien
tcagctgcattcaacctagggacaa

SEQ ID NO: 3770261 - DNA, 25 bp, Homo sapien
tgttgcatgatccacaagtgtttcc

SEQ ID NO: 3770262 - DNA, 25 bp, Homo sapien
tgagaattccattatttgtgcatga

SEQ ID NO: 3770263 - DNA, 25 bp, Homo sapien
catgagagcttttgtgcagtagtgg

SEQ ID NO: 3770264 - DNA, 25 bp, Homo sapien
taagataaagcctgccgttttctgg

SEQ ID NO: 3770265 - DNA, 25 bp, Homo sapien
taggaatgtcctagtatcatgaaca

SEQ ID NO: 3770266 - DNA, 25 bp, Homo sapien
gagagtaacaggtgcatgaacaaga

SEQ ID NO: 3770267 - DNA, 25 bp, Homo sapien
caaaaactagggatgtctggaggaa

SEQ ID NO: 3770268 - DNA, 25 bp, Homo sapien
gggagcgagcagtccacatgattct

SEQ ID NO: 3770269 - DNA, 25 bp, Homo sapien
gaatttctcttgaataccagggtga

SEQ ID NO: 3770270 - DNA, 25 bp, Homo sapien
tttgtcaccttgcttcagtatggcc

SEQ ID NO: 3770271 - DNA, 25 bp, Homo sapien
tggaaacccaagattcacgagacat

SEQ ID NO: 3770272 - DNA, 25 bp, Homo sapien
tgttggcaacagaatcgtgtacgct

SEQ ID NO: 3770273 - DNA, 25 bp, Homo sapien
tggaaactggtactgcaggagtaat

SEQ ID NO: 3770274 - DNA, 25 bp, Homo sapien
cttatttctgattggcttcttccca

SEQ ID NO: 3770275 - DNA, 25 bp, Homo sapien
ctctgagttactataaaacagctgt

SEQ ID NO: 3770276 - DNA, 25 bp, Homo sapien
gcattttggaaactggtactgcagg

SEQ ID NO: 3770277 - DNA, 25 bp, Homo sapien
gcatgtattacttggtctgttggca

SEQ ID NO: 3770278 - DNA, 25 bp, Homo sapien
tatagctagatccagtagacacttc

SEQ ID NO: 3770279 - DNA, 25 bp, Homo sapien
gatttgggagttactggcaaaacat

SEQ ID NO: 3770280 - DNA, 25 bp, Homo sapien
ggctgtagatgatttgggagttact

SEQ ID NO: 3770281 - DNA, 25 bp, Homo sapien
aagaacggatgggagccgtaggtgc

SEQ ID NO: 3770282 - DNA, 25 bp, Homo sapien
ctaagaacggatgggagccgtaggt

SEQ ID NO: 3770283 - DNA, 25 bp, Homo sapien
gaacggatgggagccgtaggtgcta

SEQ ID NO: 3770284 - DNA, 25 bp, Homo sapien
acggatgggagccgtaggtgctaac

SEQ ID NO: 3770285 - DNA, 25 bp, Homo sapien
tcggcttcatgcagtagccttgggc

SEQ ID NO: 3770286 - DNA, 25 bp, Homo sapien
cttgggccttggctgatgagcaggt

SEQ ID NO: 3770287 - DNA, 25 bp, Homo sapien
ccaggggacccagcatagaagcagg

SEQ ID NO: 3770288 - DNA, 25 bp, Homo sapien
agcatttccctccttcggcttcatg

SEQ ID NO: 3770289 - DNA, 25 bp, Homo sapien
acttgccctgagtacctgctctcgg

SEQ ID NO: 3770290 - DNA, 25 bp, Homo sapien
aggtaacttgccctgagtacctgct

SEQ ID NO: 3770291 - DNA, 25 bp, Homo sapien
ctctcggccagaccccagcatatgc

SEQ ID NO: 3770292 - DNA, 25 bp, Homo sapien
cttaggtatcatgggagggaggaaa

SEQ ID NO: 3770293 - DNA, 25 bp, Homo sapien
tagccatctaggcagtacagggagc

SEQ ID NO: 3770294 - DNA, 25 bp, Homo sapien
ggtgggcttgccagcacagctttga

SEQ ID NO: 3770295 - DNA, 25 bp, Homo sapien
agagacaagccgagaactacctggg

SEQ ID NO: 3770296 - DNA, 25 bp, Homo sapien
taaatggtgtcgctgacagtcactg

SEQ ID NO: 3770297 - DNA, 25 bp, Homo sapien
gagccctgtggtaccattgatccca

SEQ ID NO: 3770298 - DNA, 25 bp, Homo sapien
cctgtggtaccattgatcccacaca

SEQ ID NO: 3770299 - DNA, 25 bp, Homo sapien
ctgtggtaccattgatcccacacac

SEQ ID NO: 3770300 - DNA, 25 bp, Homo sapien
gccctgtggtaccattgatcccaca

SEQ ID NO: 3770301 - DNA, 25 bp, Homo sapien
gtgctctggaactggcacgtagctg

SEQ ID NO: 3770302 - DNA, 25 bp, Homo sapien
tggcacgtagctgcgagagggtggg

SEQ ID NO: 3770303 - DNA, 25 bp, Homo sapien
tggaactggcacgtagctgcgagag

SEQ ID NO: 3770304 - DNA, 25 bp, Homo sapien
caaagtagaggggaacaggtgctct

SEQ ID NO: 3770305 - DNA, 25 bp, Homo sapien
cctctcagtagactgttggaaatca

SEQ ID NO: 3770306 - DNA, 25 bp, Homo sapien
aatcaaaaggtagggggatatatgt

SEQ ID NO: 3770307 - DNA, 25 bp, Homo sapien
tagggggatatatgttctctttttc

SEQ ID NO: 3770308 - DNA, 25 bp, Homo sapien
ttccctgcaaataatcttggcctct

SEQ ID NO: 3770309 - DNA, 25 bp, Homo sapien
tccaatcgttagaagtgcacaggct

SEQ ID NO: 3770310 - DNA, 25 bp, Homo sapien
tgcacaggctcgctttcaaacacaa

SEQ ID NO: 3770311 - DNA, 25 bp, Homo sapien
tcgataagatggaagaatggcagct

SEQ ID NO: 3770312 - DNA, 25 bp, Homo sapien
ccttgctgtgtgtaagatcggagaa

SEQ ID NO: 3770313 - DNA, 25 bp, Homo sapien
cttcacctgctgcacaaaatcatac

SEQ ID NO: 3770314 - DNA, 25 bp, Homo sapien
cagtccttcacctgctgcacaaaat

SEQ ID NO: 3770315 - DNA, 25 bp, Homo sapien
tctaaccagtccttcacctgctgca

SEQ ID NO: 3770316 - DNA, 25 bp, Homo sapien
gtccttcacctgctgcacaaaatca

SEQ ID NO: 3770317 - DNA, 25 bp, Homo sapien
catgcacagttggaaggacatttct

SEQ ID NO: 3770318 - DNA, 25 bp, Homo sapien
tcatttgtaactggtgatggtcaga

SEQ ID NO: 3770319 - DNA, 25 bp, Homo sapien
cttgatttatgaaggcaggaataga

SEQ ID NO: 3770320 - DNA, 25 bp, Homo sapien
gatggtcagattaacattccccgaa

SEQ ID NO: 3770321 - DNA, 25 bp, Homo sapien
gaatagaaggtagcatgaaacatca

SEQ ID NO: 3770322 - DNA, 25 bp, Homo sapien
gtctctgtacccatctaaaaggtaa

SEQ ID NO: 3770323 - DNA, 25 bp, Homo sapien
cagacactgcctggacctaggttcc

SEQ ID NO: 3770324 - DNA, 25 bp, Homo sapien
gcaggtgacagcagtatttacccag

SEQ ID NO: 3770325 - DNA, 25 bp, Homo sapien
gagcaactccttcacatgttccaga

SEQ ID NO: 3770326 - DNA, 25 bp, Homo sapien
ggagttgctagaaccccagaggtca

SEQ ID NO: 3770327 - DNA, 25 bp, Homo sapien
cattactaagaagaacccagtgcag

SEQ ID NO: 3770328 - DNA, 25 bp, Homo sapien
ccagaggtcattactaagaagaacc

SEQ ID NO: 3770329 - DNA, 25 bp, Homo sapien
ttggagttgctagaaccccagaggt

SEQ ID NO: 3770330 - DNA, 25 bp, Homo sapien
gtggctaccctgagtcattgactga

SEQ ID NO: 3770331 - DNA, 25 bp, Homo sapien
gaacaccttggactctatgatccca

SEQ ID NO: 3770332 - DNA, 25 bp, Homo sapien
cgagcatcatgttcggtggctaccc

SEQ ID NO: 3770333 - DNA, 25 bp, Homo sapien
tcttctgcacgctgagctgctggga

SEQ ID NO: 3770334 - DNA, 25 bp, Homo sapien
cagaggttatagaaaggtcaacaaa

SEQ ID NO: 3770335 - DNA, 25 bp, Homo sapien
gccccaactctgctaaatcatcaag

SEQ ID NO: 3770336 - DNA, 25 bp, Homo sapien
gtcaacaaaacgcacagggttggcc

SEQ ID NO: 3770337 - DNA, 25 bp, Homo sapien
gagggctgggaaagagccccaactc

SEQ ID NO: 3770338 - DNA, 25 bp, Homo sapien
ccctctcttccctcgaactaactca

SEQ ID NO: 3770339 - DNA, 25 bp, Homo sapien
ctcttccctcgaactaactcaaaat

SEQ ID NO: 3770340 - DNA, 25 bp, Homo sapien
ctctcttccctcgaactaactcaaa

SEQ ID NO: 3770341 - DNA, 25 bp, Homo sapien
tctcttccctcgaactaactcaaaa

SEQ ID NO: 3770342 - DNA, 25 bp, Homo sapien
ccttcttctgcctaaacggctcaag

SEQ ID NO: 3770343 - DNA, 25 bp, Homo sapien
ctgcctaaacggctcaagcacagac

SEQ ID NO: 3770344 - DNA, 25 bp, Homo sapien
catgtgtcgtgtctcatcattgtgc

SEQ ID NO: 3770345 - DNA, 25 bp, Homo sapien
cagataacccttcttctgcctaaac

SEQ ID NO: 3770346 - DNA, 25 bp, Homo sapien
cagacacttagtgatgctgcaggtc

SEQ ID NO: 3770347 - DNA, 25 bp, Homo sapien
gacacattgttgacatctggcaggt

SEQ ID NO: 3770348 - DNA, 25 bp, Homo sapien
gcaggtccacgatgtttgccagtta

SEQ ID NO: 3770349 - DNA, 25 bp, Homo sapien
gagagctcacggattcttcctgaaa

SEQ ID NO: 3770350 - DNA, 25 bp, Homo sapien
tattgacgtctttgattggtagcca

SEQ ID NO: 3770351 - DNA, 25 bp, Homo sapien
tggtaggccaataccctaagttgca

SEQ ID NO: 3770352 - DNA, 25 bp, Homo sapien
ggcaagactcaaccactaccgatta

SEQ ID NO: 3770353 - DNA, 25 bp, Homo sapien
aaaaaccagggctagctcaagagtt

SEQ ID NO: 3770354 - DNA, 25 bp, Homo sapien
agctgggtctgcacgtgggcctgat

SEQ ID NO: 3770355 - DNA, 25 bp, Homo sapien
agccacaccgatgatgaccccattc

SEQ ID NO: 3770356 - DNA, 25 bp, Homo sapien
tcttctcgctaaagacccatgaatg

SEQ ID NO: 3770357 - DNA, 25 bp, Homo sapien
ttcttcttctcgctaaagacccatg

SEQ ID NO: 3770358 - DNA, 25 bp, Homo sapien
gcatgtgggctatgtttgtaaaagc

SEQ ID NO: 3770359 - DNA, 25 bp, Homo sapien
tgtttgtaaaagctggactcttttc

SEQ ID NO: 3770360 - DNA, 25 bp, Homo sapien
ccatagaataggcatgtgggctatg

SEQ ID NO: 3770361 - DNA, 25 bp, Homo sapien
tttgtaaaagctggactcttttctc

SEQ ID NO: 3770362 - DNA, 25 bp, Homo sapien
tacttcttaggattccctagaatca

SEQ ID NO: 3770363 - DNA, 25 bp, Homo sapien
tgcaccaaaggtcatattcacgttt

SEQ ID NO: 3770364 - DNA, 25 bp, Homo sapien
gtttggatcccagataatggtcgag

SEQ ID NO: 3770365 - DNA, 25 bp, Homo sapien
cctagaatcaaaaccactaggaaag

SEQ ID NO: 3770366 - DNA, 25 bp, Homo sapien
aaatattacatgcatcttgcacaag

SEQ ID NO: 3770367 - DNA, 25 bp, Homo sapien
cataaatattacatgcatcttgcac

SEQ ID NO: 3770368 - DNA, 25 bp, Homo sapien
cacataaatattacatgcatcttgc

SEQ ID NO: 3770369 - DNA, 25 bp, Homo sapien
ttccacataaatattacatgcatct

SEQ ID NO: 3770370 - DNA, 25 bp, Homo sapien
actccactgtggtctttattaagct

SEQ ID NO: 3770371 - DNA, 25 bp, Homo sapien
aggaaggaaggctgatccactccac

SEQ ID NO: 3770372 - DNA, 25 bp, Homo sapien
gcttgtgcagtttacttcttaggat

SEQ ID NO: 3770373 - DNA, 25 bp, Homo sapien
tgtggtctttattaagcttgtgcag

SEQ ID NO: 3770374 - DNA, 25 bp, Homo sapien
tcttagtggcgtttagacaggtact

SEQ ID NO: 3770375 - DNA, 25 bp, Homo sapien
gcgtttagacaggtactaaactcta

SEQ ID NO: 3770376 - DNA, 25 bp, Homo sapien
tctgtcatcttagtggcgtttagac

SEQ ID NO: 3770377 - DNA, 25 bp, Homo sapien
tcaatctgtcatcttagtggcgttt

SEQ ID NO: 3770378 - DNA, 25 bp, Homo sapien
ctcaatagcgttctcattatttaca

SEQ ID NO: 3770379 - DNA, 25 bp, Homo sapien
gcgttctcattatttacatccgtag

SEQ ID NO: 3770380 - DNA, 25 bp, Homo sapien
caatagcgttctcattatttacatc

SEQ ID NO: 3770381 - DNA, 25 bp, Homo sapien
tagcgttctcattatttacatccgt

SEQ ID NO: 3770382 - DNA, 25 bp, Homo sapien
cttttcctttgcaatgtctaagcct

SEQ ID NO: 3770383 - DNA, 25 bp, Homo sapien
ctttgcaatgtctaagcctctttca

SEQ ID NO: 3770384 - DNA, 25 bp, Homo sapien
aatctggatcttggttcgtcttttc

SEQ ID NO: 3770385 - DNA, 25 bp, Homo sapien
ccagtggataattttaagggctctg

SEQ ID NO: 3770386 - DNA, 25 bp, Homo sapien
tctttcatgcatggcgtcctgggtc

SEQ ID NO: 3770387 - DNA, 25 bp, Homo sapien
ttgccaaaatgtgtacccgtttgga

SEQ ID NO: 3770388 - DNA, 25 bp, Homo sapien
gggttctctcacataccaggaagga

SEQ ID NO: 3770389 - DNA, 25 bp, Homo sapien
ttggagacctctttcatgcatggcg

SEQ ID NO: 3770390 - DNA, 25 bp, Homo sapien
aactgctttcaagatgggctcataa

SEQ ID NO: 3770391 - DNA, 25 bp, Homo sapien
ttgcgatgggatcggaactgctcat

SEQ ID NO: 3770392 - DNA, 25 bp, Homo sapien
ttccatcgtataccaataactgctt

SEQ ID NO: 3770393 - DNA, 25 bp, Homo sapien
tcataaaaggtaattggtgaagctt

SEQ ID NO: 3770394 - DNA, 25 bp, Homo sapien
ttctagcatccgacatacatatgtc

SEQ ID NO: 3770395 - DNA, 25 bp, Homo sapien
ttccggtggttggattattaccagc

SEQ ID NO: 3770396 - DNA, 25 bp, Homo sapien
tgcttttccggtggttggattatta

SEQ ID NO: 3770397 - DNA, 25 bp, Homo sapien
tggattattaccagctcccggaatt

SEQ ID NO: 3770398 - DNA, 25 bp, Homo sapien
tagggacggtgtgaggttgcccgaa

SEQ ID NO: 3770399 - DNA, 25 bp, Homo sapien
acggtgtgaggttgcccgaagctgg

SEQ ID NO: 3770400 - DNA, 25 bp, Homo sapien
ctgatagggacggtgtgaggttgcc

SEQ ID NO: 3770401 - DNA, 25 bp, Homo sapien
ggacggtgtgaggttgcccgaagct

SEQ ID NO: 3770402 - DNA, 25 bp, Homo sapien
acaggaacaggatacgtaatctgta

SEQ ID NO: 3770403 - DNA, 25 bp, Homo sapien
ccttccataagcctctatatgtaat

SEQ ID NO: 3770404 - DNA, 25 bp, Homo sapien
gaacaggatacgtaatctgtatcct

SEQ ID NO: 3770405 - DNA, 25 bp, Homo sapien
cataagcctctatatgtaatgattc

SEQ ID NO: 3770406 - DNA, 25 bp, Homo sapien
tctgtaacagtcattaacagaatgc

SEQ ID NO: 3770407 - DNA, 25 bp, Homo sapien
agtttgttttgtggcatcatcttct

SEQ ID NO: 3770408 - DNA, 25 bp, Homo sapien
ttctgtaacagtcattaacagaatg

SEQ ID NO: 3770409 - DNA, 25 bp, Homo sapien
tagaaatatcccacttagatttctt

SEQ ID NO: 3770410 - DNA, 25 bp, Homo sapien
gcaatcagtagaaaactctgtgttg

SEQ ID NO: 3770411 - DNA, 25 bp, Homo sapien
ctctgtgttgaagcttacaggcagc

SEQ ID NO: 3770412 - DNA, 25 bp, Homo sapien
ctccgatatgcgtggctgttttcat

SEQ ID NO: 3770413 - DNA, 25 bp, Homo sapien
tgcgtggctgttttcatccccttct

SEQ ID NO: 3770414 - DNA, 25 bp, Homo sapien
ctgggctcgatgagaaggctgacct

SEQ ID NO: 3770415 - DNA, 25 bp, Homo sapien
acagcaggccctgcgatgttgctca

SEQ ID NO: 3770416 - DNA, 25 bp, Homo sapien
ctcatgctttgctttgtgaacatcc

SEQ ID NO: 3770417 - DNA, 25 bp, Homo sapien
ctcatttggagatgcctttaaggta

SEQ ID NO: 3770418 - DNA, 25 bp, Homo sapien
cagtgccaattttgggaagggcata

SEQ ID NO: 3770419 - DNA, 25 bp, Homo sapien
gctgaggaggtctttgaattaaagc

SEQ ID NO: 3770420 - DNA, 25 bp, Homo sapien
gaattaaagcatcccatgcctcact

SEQ ID NO: 3770421 - DNA, 25 bp, Homo sapien
agcacagtgctaatgcagaaagcat

SEQ ID NO: 3770422 - DNA, 25 bp, Homo sapien
gggctgtcatgcccagagagattcc

SEQ ID NO: 3770423 - DNA, 25 bp, Homo sapien
gattccctctgaagtagagaatttg

SEQ ID NO: 3770424 - DNA, 25 bp, Homo sapien
caccctcaagcttaccacatccatt

SEQ ID NO: 3770425 - DNA, 25 bp, Homo sapien
tgattcctgccaagatccgtctcag

SEQ ID NO: 3770426 - DNA, 25 bp, Homo sapien
gttgctgccttctccgggaccgaat

SEQ ID NO: 3770427 - DNA, 25 bp, Homo sapien
tcagctgttgtagtctgtcaagcgg

SEQ ID NO: 3770428 - DNA, 25 bp, Homo sapien
cccagctgttgctgttcagctgttg

SEQ ID NO: 3770429 - DNA, 25 bp, Homo sapien
tgttacgcctgcaactgtgtcctcc

SEQ ID NO: 3770430 - DNA, 25 bp, Homo sapien
attgttcaggacagcctggtcccca

SEQ ID NO: 3770431 - DNA, 25 bp, Homo sapien
cctccactgctgtcgataagatcct

SEQ ID NO: 3770432 - DNA, 25 bp, Homo sapien
caaccggttcatatccacgggtggg

SEQ ID NO: 3770433 - DNA, 25 bp, Homo sapien
aaaatagcttcattgaacccgagcg

SEQ ID NO: 3770434 - DNA, 25 bp, Homo sapien
atatcctttcggtgatcgcccttag

SEQ ID NO: 3770435 - DNA, 25 bp, Homo sapien
tccttagggcactgcgataagtccc

SEQ ID NO: 3770436 - DNA, 25 bp, Homo sapien
tgccatcgtgcagagacaggtttgt

SEQ ID NO: 3770437 - DNA, 25 bp, Homo sapien
gctttggcgcctgggtggccctaaa

SEQ ID NO: 3770438 - DNA, 25 bp, Homo sapien
tcggccgcttcggatccgtcgcctc

SEQ ID NO: 3770439 - DNA, 25 bp, Homo sapien
gcttcggatccgtcgcctccctcgg

SEQ ID NO: 3770440 - DNA, 25 bp, Homo sapien
ctccctcggccttcggaggccggca

SEQ ID NO: 3770441 - DNA, 25 bp, Homo sapien
aggccggcacgggacgcgggaggag

SEQ ID NO: 3770442 - DNA, 25 bp, Homo sapien
gaggacccgcgagcagggtgagcgg

SEQ ID NO: 3770443 - DNA, 25 bp, Homo sapien
gagggacgagcggagcgcggcgtcc

SEQ ID NO: 3770444 - DNA, 25 bp, Homo sapien
cggagggacgagcggagcgcggcgt

SEQ ID NO: 3770445 - DNA, 25 bp, Homo sapien
gaccggcgcgaggacccgcgagcag

SEQ ID NO: 3770446 - DNA, 25 bp, Homo sapien
caaattacccgctcatctgatttaa

SEQ ID NO: 3770447 - DNA, 25 bp, Homo sapien
tctgcgcattgaactgtattttgac

SEQ ID NO: 3770448 - DNA, 25 bp, Homo sapien
agctgcttgtttctgcgcattgaac

SEQ ID NO: 3770449 - DNA, 25 bp, Homo sapien
ggagagcagtatccaaatacctagc

SEQ ID NO: 3770450 - DNA, 25 bp, Homo sapien
gctcatcacttgtaaattccactgg

SEQ ID NO: 3770451 - DNA, 25 bp, Homo sapien
tcctcttggattgttcgacttgccc

SEQ ID NO: 3770452 - DNA, 25 bp, Homo sapien
tcacctcggttgagtacttgctaca

SEQ ID NO: 3770453 - DNA, 25 bp, Homo sapien
tcattccattggctatgcgtggttt

SEQ ID NO: 3770454 - DNA, 25 bp, Homo sapien
tgccctgtatgtcgtagaatggaac

SEQ ID NO: 3770455 - DNA, 25 bp, Homo sapien
caaaggcagtatctccacgtggtcc

SEQ ID NO: 3770456 - DNA, 25 bp, Homo sapien
ccttctctacaccagattttgattt

SEQ ID NO: 3770457 - DNA, 25 bp, Homo sapien
gtatctccacgtggtccttctgaaa

SEQ ID NO: 3770458 - DNA, 25 bp, Homo sapien
gggaagcaaaggcagtatctccacg

SEQ ID NO: 3770459 - DNA, 25 bp, Homo sapien
cctgaggttgcctgcaagtctcttg

SEQ ID NO: 3770460 - DNA, 25 bp, Homo sapien
ttgtctccaaagcccgaggttgcag

SEQ ID NO: 3770461 - DNA, 25 bp, Homo sapien
cgaggtcgcacttctgtttcttgtc

SEQ ID NO: 3770462 - DNA, 25 bp, Homo sapien
gtctccaaagcccgaggtcgcactt

SEQ ID NO: 3770463 - DNA, 25 bp, Homo sapien
gatccatggaattaattgtgtaagc

SEQ ID NO: 3770464 - DNA, 25 bp, Homo sapien
agctctgtaatttacccgggattgg

SEQ ID NO: 3770465 - DNA, 25 bp, Homo sapien
agcagtggcatctggatttttatcg

SEQ ID NO: 3770466 - DNA, 25 bp, Homo sapien
gtcaggttgaatctggtatgatcca

SEQ ID NO: 3770467 - DNA, 25 bp, Homo sapien
cctattagcgtggaggacactgaga

SEQ ID NO: 3770468 - DNA, 25 bp, Homo sapien
tgtgtcagctctcctattagcgtgg

SEQ ID NO: 3770469 - DNA, 25 bp, Homo sapien
taacggcgataacagccgagtcctg

SEQ ID NO: 3770470 - DNA, 25 bp, Homo sapien
tcatggcatcgaccatgtaacggcg

SEQ ID NO: 3770471 - DNA, 25 bp, Homo sapien
tcggggaccccgttgcccgtgtgca

SEQ ID NO: 3770472 - DNA, 25 bp, Homo sapien
gggaccccgttgcccgtgtgcatgc

SEQ ID NO: 3770473 - DNA, 25 bp, Homo sapien
ctcaggggcaccataaacacttgct

SEQ ID NO: 3770474 - DNA, 25 bp, Homo sapien
gctcaggggcaccataaacacttgc

SEQ ID NO: 3770475 - DNA, 25 bp, Homo sapien
tgctggttccacatgccacctgtgg

SEQ ID NO: 3770476 - DNA, 25 bp, Homo sapien
gctggttccacatgccacctgtggc

SEQ ID NO: 3770477 - DNA, 25 bp, Homo sapien
ctgctggttccacatgccacctgtg

SEQ ID NO: 3770478 - DNA, 25 bp, Homo sapien
gcccactgggcctcttgtttgcctg

SEQ ID NO: 3770479 - DNA, 25 bp, Homo sapien
ccctgctttcctcctgaatcctcct

SEQ ID NO: 3770480 - DNA, 25 bp, Homo sapien
tcgcccactgggcctcttgtttgcc

SEQ ID NO: 3770481 - DNA, 25 bp, Homo sapien
actgggcctcttgtttgcctgcctc

SEQ ID NO: 3770482 - DNA, 25 bp, Homo sapien
tgatcattgttgcacggtccttggg

SEQ ID NO: 3770483 - DNA, 25 bp, Homo sapien
ccaagcagttccgtattgaaaaatg

SEQ ID NO: 3770484 - DNA, 25 bp, Homo sapien
ggcacttctgccgatccttaacaca

SEQ ID NO: 3770485 - DNA, 25 bp, Homo sapien
gaacttttgtcctgttcagaaccaa

SEQ ID NO: 3770486 - DNA, 25 bp, Homo sapien
tatcttgtttgatccaagcagtaac

SEQ ID NO: 3770487 - DNA, 25 bp, Homo sapien
tatggtggaatgtacaggatgatac

SEQ ID NO: 3770488 - DNA, 25 bp, Homo sapien
tagatggccccattattatggtgga

SEQ ID NO: 3770489 - DNA, 25 bp, Homo sapien
tccaagcagtaactctgcaagtaga

SEQ ID NO: 3770490 - DNA, 25 bp, Homo sapien
ttcttttccctctccccatctggag

SEQ ID NO: 3770491 - DNA, 25 bp, Homo sapien
tctccccatctggagtatcccccat

SEQ ID NO: 3770492 - DNA, 25 bp, Homo sapien
ccctctccccatctggagtatcccc

SEQ ID NO: 3770493 - DNA, 25 bp, Homo sapien
tccctctccccatctggagtatccc

SEQ ID NO: 3770494 - DNA, 25 bp, Homo sapien
tagtcagtggtgccttcaggattca

SEQ ID NO: 3770495 - DNA, 25 bp, Homo sapien
gtaaggtacaagtatgccagattct

SEQ ID NO: 3770496 - DNA, 25 bp, Homo sapien
acttcctggataggacagctctgcg

SEQ ID NO: 3770497 - DNA, 25 bp, Homo sapien
tctgcgtgcaccgttcccggcatag

SEQ ID NO: 3770498 - DNA, 25 bp, Homo sapien
ctgttaaacaaggtctcctctttgg

SEQ ID NO: 3770499 - DNA, 25 bp, Homo sapien
cacgagtttgatgattgccgtgatc

SEQ ID NO: 3770500 - DNA, 25 bp, Homo sapien
ttttctggtggccacgagtttgatg

SEQ ID NO: 3770501 - DNA, 25 bp, Homo sapien
gatgattgccgtgatcaaaacatca

SEQ ID NO: 3770502 - DNA, 25 bp, Homo sapien
gatctgacggtaaattcttgaactg

SEQ ID NO: 3770503 - DNA, 25 bp, Homo sapien
tgaactgctaaagggaaattcctta

SEQ ID NO: 3770504 - DNA, 25 bp, Homo sapien
tcaaaaatgtgagattatcatcttg

SEQ ID NO: 3770505 - DNA, 25 bp, Homo sapien
ccttactaccgaaatgagctcagat

SEQ ID NO: 3770506 - DNA, 25 bp, Homo sapien
ctcccttccccctgagaccgctggt

SEQ ID NO: 3770507 - DNA, 25 bp, Homo sapien
agggtgtggggggagctaagagact

SEQ ID NO: 3770508 - DNA, 25 bp, Homo sapien
catggtttcctaggtgccagggtgt

SEQ ID NO: 3770509 - DNA, 25 bp, Homo sapien
ttccccctgagaccgctggtgtagg

SEQ ID NO: 3770510 - DNA, 25 bp, Homo sapien
ctgttgcctcatccaatgtgtctct

SEQ ID NO: 3770511 - DNA, 25 bp, Homo sapien
aatgtgtctcttaactgtcttgctg

SEQ ID NO: 3770512 - DNA, 25 bp, Homo sapien
tgtcagtacacagccaattcaagat

SEQ ID NO: 3770513 - DNA, 25 bp, Homo sapien
tgctttcattcatacaatctgtcag

SEQ ID NO: 3770514 - DNA, 25 bp, Homo sapien
tgggaccccacgcaggaacaaaaca

SEQ ID NO: 3770515 - DNA, 25 bp, Homo sapien
gaacaaaacagatctgaatcctttc

SEQ ID NO: 3770516 - DNA, 25 bp, Homo sapien
gaatcctttcatatctcacccctga

SEQ ID NO: 3770517 - DNA, 25 bp, Homo sapien
cccctgacaagtcccgagtcaatgg

SEQ ID NO: 3770518 - DNA, 25 bp, Homo sapien
agtggaacctctacagtcagtgctc

SEQ ID NO: 3770519 - DNA, 25 bp, Homo sapien
tccttaggatcacacagcatggtca

SEQ ID NO: 3770520 - DNA, 25 bp, Homo sapien
aaatgttgaattggtgacgacaccg

SEQ ID NO: 3770521 - DNA, 25 bp, Homo sapien
tcagcccatggaagacactaatttg

SEQ ID NO: 3770522 - DNA, 25 bp, Homo sapien
tcaggagtcatcagaaggcatgttg

SEQ ID NO: 3770523 - DNA, 25 bp, Homo sapien
ccttggccctgaaagtgaatggtct

SEQ ID NO: 3770524 - DNA, 25 bp, Homo sapien
tgataaaggcatggagttgccccac

SEQ ID NO: 3770525 - DNA, 25 bp, Homo sapien
gaactggtttgcatgtaggttccca

SEQ ID NO: 3770526 - DNA, 25 bp, Homo sapien
tatcttatcctgattggcagtgagg

SEQ ID NO: 3770527 - DNA, 25 bp, Homo sapien
gacacagtgcatccttcggttgtga

SEQ ID NO: 3770528 - DNA, 25 bp, Homo sapien
gaggatggatcgtaaccctgggtcc

SEQ ID NO: 3770529 - DNA, 25 bp, Homo sapien
cataccacggaatctgttgacagct

SEQ ID NO: 3770530 - DNA, 25 bp, Homo sapien
gatgcatgtagttactctctgcccc

SEQ ID NO: 3770531 - DNA, 25 bp, Homo sapien
caatgggtgatgcatgtagttactc

SEQ ID NO: 3770532 - DNA, 25 bp, Homo sapien
tcctgcaatgggtgatgcatgtagt

SEQ ID NO: 3770533 - DNA, 25 bp, Homo sapien
ggtgatgcatgtagttactctctgc

SEQ ID NO: 3770534 - DNA, 25 bp, Homo sapien
catcagcaggctactaagcagagtt

SEQ ID NO: 3770535 - DNA, 25 bp, Homo sapien
gtatgtagccgtctcagtgccccgg

SEQ ID NO: 3770536 - DNA, 25 bp, Homo sapien
tgcacatgtaacacacatcagcagg

SEQ ID NO: 3770537 - DNA, 25 bp, Homo sapien
cagtagctcgtgagtttacctggag

SEQ ID NO: 3770538 - DNA, 25 bp, Homo sapien
catccataggtattaacagctcctt

SEQ ID NO: 3770539 - DNA, 25 bp, Homo sapien
tttgtactgatacccgattttgcaa

SEQ ID NO: 3770540 - DNA, 25 bp, Homo sapien
ctcgcatccataggtattaacagct

SEQ ID NO: 3770541 - DNA, 25 bp, Homo sapien
actgatacccgattttgcaaaaaca

SEQ ID NO: 3770542 - DNA, 25 bp, Homo sapien
ttcacgaatccttacacttagtggc

SEQ ID NO: 3770543 - DNA, 25 bp, Homo sapien
cccttcacgaatccttacacttagt

SEQ ID NO: 3770544 - DNA, 25 bp, Homo sapien
gaatccttacacttagtggcaactg

SEQ ID NO: 3770545 - DNA, 25 bp, Homo sapien
cacgaatccttacacttagtggcaa

SEQ ID NO: 3770546 - DNA, 25 bp, Homo sapien
atttatatgtctttcctttgcgtag

SEQ ID NO: 3770547 - DNA, 25 bp, Homo sapien
aagtcagaagattgaaaagtaaatt

SEQ ID NO: 3770548 - DNA, 25 bp, Homo sapien
tgcttttcaagcactttgtccagtc

SEQ ID NO: 3770549 - DNA, 25 bp, Homo sapien
cttcttaggtatgaagaaaagtcag

SEQ ID NO: 3770550 - DNA, 25 bp, Homo sapien
cagggacttcccagatgggctggag

SEQ ID NO: 3770551 - DNA, 25 bp, Homo sapien
tccaggtctggccttctggggttta

SEQ ID NO: 3770552 - DNA, 25 bp, Homo sapien
gggtttaacccatgcggccactgac

SEQ ID NO: 3770553 - DNA, 25 bp, Homo sapien
gacacctcatgcatggagtcaggga

SEQ ID NO: 3770554 - DNA, 25 bp, Homo sapien
cagcagagagcagtagaccctgtct

SEQ ID NO: 3770555 - DNA, 25 bp, Homo sapien
tgcccttaggtcaggcacattgacg

SEQ ID NO: 3770556 - DNA, 25 bp, Homo sapien
tgtctccaagccgtggcaagtgtct

SEQ ID NO: 3770557 - DNA, 25 bp, Homo sapien
ggatgaggtgtgtttcgtatgccca

SEQ ID NO: 3770558 - DNA, 25 bp, Homo sapien
gatacagtagaatgtctggccttac

SEQ ID NO: 3770559 - DNA, 25 bp, Homo sapien
gtagaaataacaaaggccctggata

SEQ ID NO: 3770560 - DNA, 25 bp, Homo sapien
caaaggccctggatacagtagaatg

SEQ ID NO: 3770561 - DNA, 25 bp, Homo sapien
cctggatacagtagaatgtctggcc

SEQ ID NO: 3770562 - DNA, 25 bp, Homo sapien
ctgcggccactttgtcctttatctg

SEQ ID NO: 3770563 - DNA, 25 bp, Homo sapien
gctgatttgaccgaggcttcttggc

SEQ ID NO: 3770564 - DNA, 25 bp, Homo sapien
taaactgcggccactttgtccttta

SEQ ID NO: 3770565 - DNA, 25 bp, Homo sapien
taatttctatgaactgctggacagc

SEQ ID NO: 3770566 - DNA, 25 bp, Homo sapien
cagagaatgaattaggaccgtcgtc

SEQ ID NO: 3770567 - DNA, 25 bp, Homo sapien
gatgacttcagataaaagtttcgcc

SEQ ID NO: 3770568 - DNA, 25 bp, Homo sapien
gctttgccataagaaacgcacagat

SEQ ID NO: 3770569 - DNA, 25 bp, Homo sapien
cctcagtttgggcacagtccagcag

SEQ ID NO: 3770570 - DNA, 25 bp, Homo sapien
tcacagaatgaagaccctggttcag

SEQ ID NO: 3770571 - DNA, 25 bp, Homo sapien
gaccctggttcagctgcgatgtagt

SEQ ID NO: 3770572 - DNA, 25 bp, Homo sapien
tcagctgcgatgtagtttggccaag

SEQ ID NO: 3770573 - DNA, 25 bp, Homo sapien
ccactgtcacagaatgaagaccctg

SEQ ID NO: 3770574 - DNA, 25 bp, Homo sapien
tccagattagacagtacctcatgat

SEQ ID NO: 3770575 - DNA, 25 bp, Homo sapien
agtccagattagacagtacctcatg

SEQ ID NO: 3770576 - DNA, 25 bp, Homo sapien
taagtccagattagacagtacctca

SEQ ID NO: 3770577 - DNA, 25 bp, Homo sapien
gattagacagtacctcatgattttt

SEQ ID NO: 3770578 - DNA, 25 bp, Homo sapien
ctgatagagattctgctccagtctc

SEQ ID NO: 3770579 - DNA, 25 bp, Homo sapien
cacctcatacccttctttagatttc

SEQ ID NO: 3770580 - DNA, 25 bp, Homo sapien
tactccctggaatacgataccccag

SEQ ID NO: 3770581 - DNA, 25 bp, Homo sapien
cagtcacactccacctcataccctt

SEQ ID NO: 3770582 - DNA, 25 bp, Homo sapien
tatagacaaaggtatggcaagtgca

SEQ ID NO: 3770583 - DNA, 25 bp, Homo sapien
cggaaccatgagtaaacgcagtgca

SEQ ID NO: 3770584 - DNA, 25 bp, Homo sapien
tgcatttccacatgcgtagcccata

SEQ ID NO: 3770585 - DNA, 25 bp, Homo sapien
gggagctatctttgaaacggaacca

SEQ ID NO: 3770586 - DNA, 25 bp, Homo sapien
gccactcctttagacctaggtccat

SEQ ID NO: 3770587 - DNA, 25 bp, Homo sapien
ggccactcctttagacctaggtcca

SEQ ID NO: 3770588 - DNA, 25 bp, Homo sapien
tgtaatcccagctactcgggaggct

SEQ ID NO: 3770589 - DNA, 25 bp, Homo sapien
gaggcaggagaatggcgtgaacccg

SEQ ID NO: 3770590 - DNA, 25 bp, Homo sapien
aattagcatggcatggtggcggcgc

SEQ ID NO: 3770591 - DNA, 25 bp, Homo sapien
ggaggtagggcttgcagtgagccga

SEQ ID NO: 3770592 - DNA, 25 bp, Homo sapien
taagtgagtctcaggcatctgtgtg

SEQ ID NO: 3770593 - DNA, 25 bp, Homo sapien
gagcgtctctgaaaggtgctttgtg

SEQ ID NO: 3770594 - DNA, 25 bp, Homo sapien
ctataagtgagtctcaggcatctgt

SEQ ID NO: 3770595 - DNA, 25 bp, Homo sapien
caggagcgtctctgaaaggtgcttt

SEQ ID NO: 3770596 - DNA, 25 bp, Homo sapien
cgtactaatttgatgcacacatgga

SEQ ID NO: 3770597 - DNA, 25 bp, Homo sapien
ggatgcctcgcgcactctgcaaatt

SEQ ID NO: 3770598 - DNA, 25 bp, Homo sapien
cattctgagtagcaacaacgtacta

SEQ ID NO: 3770599 - DNA, 25 bp, Homo sapien
tgcgcagagctgcatagctggaccg

SEQ ID NO: 3770600 - DNA, 25 bp, Homo sapien
tctgtttggtctgtagatggtgagc

SEQ ID NO: 3770601 - DNA, 25 bp, Homo sapien
gcttctgaaattggagaaccctaaa

SEQ ID NO: 3770602 - DNA, 25 bp, Homo sapien
tggtgagcaataccacagagagtta

SEQ ID NO: 3770603 - DNA, 25 bp, Homo sapien
tgtgtgatgaggtgatgtgctctcc

SEQ ID NO: 3770604 - DNA, 25 bp, Homo sapien
agaaggcatcgtagaaggccaggaa

SEQ ID NO: 3770605 - DNA, 25 bp, Homo sapien
agatacagagtcatagagaacccag

SEQ ID NO: 3770606 - DNA, 25 bp, Homo sapien
gtctgaagtaaggaagccggcaatg

SEQ ID NO: 3770607 - DNA, 25 bp, Homo sapien
gcagatatgctaggaagttctctcg

SEQ ID NO: 3770608 - DNA, 25 bp, Homo sapien
gcttttgtgtgggttagatgctctt

SEQ ID NO: 3770609 - DNA, 25 bp, Homo sapien
cttaagtttcacaagagcagctttt

SEQ ID NO: 3770610 - DNA, 25 bp, Homo sapien
taagtttcacaagagcagcttttgt

SEQ ID NO: 3770611 - DNA, 25 bp, Homo sapien
tgtgtgggttagatgctcttgctgt

SEQ ID NO: 3770612 - DNA, 25 bp, Homo sapien
gtttcttgagaatcagaccagactg

SEQ ID NO: 3770613 - DNA, 25 bp, Homo sapien
gggctggcccgactgatcttcgaat

SEQ ID NO: 3770614 - DNA, 25 bp, Homo sapien
cagccttcaggaagtcgttagtaaa

SEQ ID NO: 3770615 - DNA, 25 bp, Homo sapien
tctctctagttcagtacaatggaaa

SEQ ID NO: 3770616 - DNA, 25 bp, Homo sapien
cctttcattgttggctgaccgacga

SEQ ID NO: 3770617 - DNA, 25 bp, Homo sapien
catcctttcattgttggctgaccga

SEQ ID NO: 3770618 - DNA, 25 bp, Homo sapien
tcctttcattgttggctgaccgacg

SEQ ID NO: 3770619 - DNA, 25 bp, Homo sapien
ctttcattgttggctgaccgacgac

SEQ ID NO: 3770620 - DNA, 25 bp, Homo sapien
caggaagaaggaatccctttaaatg

SEQ ID NO: 3770621 - DNA, 25 bp, Homo sapien
tgtgcccgtcggtcacagtgctgaa

SEQ ID NO: 3770622 - DNA, 25 bp, Homo sapien
tctgccctggcagataatacctatc

SEQ ID NO: 3770623 - DNA, 25 bp, Homo sapien
tgacttctatcaaagggcagcgtct

SEQ ID NO: 3770624 - DNA, 25 bp, Homo sapien
ctggtgatgccgagactgtgcccgt

SEQ ID NO: 3770625 - DNA, 25 bp, Homo sapien
gggcattaggcaaccagtcctttgg

SEQ ID NO: 3770626 - DNA, 25 bp, Homo sapien
cgtgggggcattaggcaaccagtcc

SEQ ID NO: 3770627 - DNA, 25 bp, Homo sapien
attaggcaaccagtcctttggaggg

SEQ ID NO: 3770628 - DNA, 25 bp, Homo sapien
cattaggcaaccagtcctttggagg

SEQ ID NO: 3770629 - DNA, 25 bp, Homo sapien
gaagaagtttattatcttgaataat

SEQ ID NO: 3770630 - DNA, 25 bp, Homo sapien
gaagtttattatcttgaataattcc

SEQ ID NO: 3770631 - DNA, 25 bp, Homo sapien
cttttgaagaagtttattatcttga

SEQ ID NO: 3770632 - DNA, 25 bp, Homo sapien
tttattatcttgaataattccaacc

SEQ ID NO: 3770633 - DNA, 25 bp, Homo sapien
ccagtttcgggttagccatgtccgt

SEQ ID NO: 3770634 - DNA, 25 bp, Homo sapien
cagtttcgggttagccatgtccgtt

SEQ ID NO: 3770635 - DNA, 25 bp, Homo sapien
agtttcgggttagccatgtccgttg

SEQ ID NO: 3770636 - DNA, 25 bp, Homo sapien
accagtttcgggttagccatgtccg

SEQ ID NO: 3770637 - DNA, 25 bp, Homo sapien
gcattctccctaaccccatggtgga

SEQ ID NO: 3770638 - DNA, 25 bp, Homo sapien
tggtttcacgttccagacagcatga

SEQ ID NO: 3770639 - DNA, 25 bp, Homo sapien
tgtaggcagttgcagtgcccgtcac

SEQ ID NO: 3770640 - DNA, 25 bp, Homo sapien
tcagtaagccgcagcctagattgga

SEQ ID NO: 3770641 - DNA, 25 bp, Homo sapien
ctggttcggcgcaaagaggaaatgc

SEQ ID NO: 3770642 - DNA, 25 bp, Homo sapien
cctggcctgcgtcagcgttatggag

SEQ ID NO: 3770643 - DNA, 25 bp, Homo sapien
tatggagtaggcaacctggttcggc

SEQ ID NO: 3770644 - DNA, 25 bp, Homo sapien
gaggaaatgcgcgttctgtgcccag

SEQ ID NO: 3770645 - DNA, 25 bp, Homo sapien
gaccaccagtccgttttacacaggc

SEQ ID NO: 3770646 - DNA, 25 bp, Homo sapien
taatgggaactggacggtgaccacc

SEQ ID NO: 3770647 - DNA, 25 bp, Homo sapien
caggccaccatacagctgccaggtg

SEQ ID NO: 3770648 - DNA, 25 bp, Homo sapien
tgtattcagctctagaggtggcaaa

SEQ ID NO: 3770649 - DNA, 25 bp, Homo sapien
ctgctgaaattcctgtgacgctgta

SEQ ID NO: 3770650 - DNA, 25 bp, Homo sapien
agttctgatggtttctgttgtggcc

SEQ ID NO: 3770651 - DNA, 25 bp, Homo sapien
cagtgcatatgccattgcatccata

SEQ ID NO: 3770652 - DNA, 25 bp, Homo sapien
gtgacgctgtatgcccctctcactg

SEQ ID NO: 3770653 - DNA, 25 bp, Homo sapien
gatgtttcgtttggctccagtgtga

SEQ ID NO: 3770654 - DNA, 25 bp, Homo sapien
tctggcaaggactgatgtaaccggg

SEQ ID NO: 3770655 - DNA, 25 bp, Homo sapien
agtgtgaagaaccacactgcagttc

SEQ ID NO: 3770656 - DNA, 25 bp, Homo sapien
gaagaaccacactgcagttctcagg

SEQ ID NO: 3770657 - DNA, 25 bp, Homo sapien
ccagcaccagcgatggtatgcaaac

SEQ ID NO: 3770658 - DNA, 25 bp, Homo sapien
agaggaattccagcaccagcgatgg

SEQ ID NO: 3770659 - DNA, 25 bp, Homo sapien
attccagcaccagcgatggtatgca

SEQ ID NO: 3770660 - DNA, 25 bp, Homo sapien
gaattccagcaccagcgatggtatg

SEQ ID NO: 3770661 - DNA, 25 bp, Homo sapien
ttccttggccatgctttccaggtct

SEQ ID NO: 3770662 - DNA, 25 bp, Homo sapien
ggcacacgttgactcagatacagcc

SEQ ID NO: 3770663 - DNA, 25 bp, Homo sapien
cattcctacagatttgttaactgga

SEQ ID NO: 3770664 - DNA, 25 bp, Homo sapien
ttgactcagatacagcccagattcc

SEQ ID NO: 3770665 - DNA, 25 bp, Homo sapien
ccttcctgagcacactcatcaggtt

SEQ ID NO: 3770666 - DNA, 25 bp, Homo sapien
tgagcacactcatcaggtttaagga

SEQ ID NO: 3770667 - DNA, 25 bp, Homo sapien
tgggatcttgtgagattcataccta

SEQ ID NO: 3770668 - DNA, 25 bp, Homo sapien
cactcatcaggtttaaggagccagc

SEQ ID NO: 3770669 - DNA, 25 bp, Homo sapien
tgtccccatggcagtctcatgacaa

SEQ ID NO: 3770670 - DNA, 25 bp, Homo sapien
tcatgacaataacaagccagccttg

SEQ ID NO: 3770671 - DNA, 25 bp, Homo sapien
ggagatccgatctggacagtattca

SEQ ID NO: 3770672 - DNA, 25 bp, Homo sapien
ccagccttgctattttggaaagcag

SEQ ID NO: 3770673 - DNA, 25 bp, Homo sapien
gaatgcagtgactgataaaaactgc

SEQ ID NO: 3770674 - DNA, 25 bp, Homo sapien
gagccgaatgcagtgactgataaaa

SEQ ID NO: 3770675 - DNA, 25 bp, Homo sapien
ttaatatgggagccgaatgcagtga

SEQ ID NO: 3770676 - DNA, 25 bp, Homo sapien
tatgggagccgaatgcagtgactga

SEQ ID NO: 3770677 - DNA, 25 bp, Homo sapien
acctgcgagcagagaaggcccgcag

SEQ ID NO: 3770678 - DNA, 25 bp, Homo sapien
gtagatgtcacacctgcgagcagag

SEQ ID NO: 3770679 - DNA, 25 bp, Homo sapien
gagaaggcccgcaggttgggtatgg

SEQ ID NO: 3770680 - DNA, 25 bp, Homo sapien
tgtcacacctgcgagcagagaaggc

SEQ ID NO: 3770681 - DNA, 25 bp, Homo sapien
agatttcagggcagatcttccaggg

SEQ ID NO: 3770682 - DNA, 25 bp, Homo sapien
tatgccccggcattgatgtcacaaa

SEQ ID NO: 3770683 - DNA, 25 bp, Homo sapien
gcagttaacacccagatatgccccg

SEQ ID NO: 3770684 - DNA, 25 bp, Homo sapien
tcacaaaactgggtcgtggcagggt

SEQ ID NO: 3770685 - DNA, 25 bp, Homo sapien
tttgatcctgctagtacatttttct

SEQ ID NO: 3770686 - DNA, 25 bp, Homo sapien
tgagttgaccaagtttacgactcat

SEQ ID NO: 3770687 - DNA, 25 bp, Homo sapien
gcagattgtttcattgagttgacca

SEQ ID NO: 3770688 - DNA, 25 bp, Homo sapien
gaatttttcttggagtagcagattg

SEQ ID NO: 3770689 - DNA, 25 bp, Homo sapien
tggagtagcagattgtttcattgag

SEQ ID NO: 3770690 - DNA, 25 bp, Homo sapien
ggggtgtgaaaatgctccggtgaga

SEQ ID NO: 3770691 - DNA, 25 bp, Homo sapien
gggtgtgaaaatgctccggtgagag

SEQ ID NO: 3770692 - DNA, 25 bp, Homo sapien
gaaaaccatattgctataggggaag

SEQ ID NO: 3770693 - DNA, 25 bp, Homo sapien
aaaaccatattgctataggggaagg

SEQ ID NO: 3770694 - DNA, 25 bp, Homo sapien
cccctgagtatacagtaggaacctc

SEQ ID NO: 3770695 - DNA, 25 bp, Homo sapien
tggcaccacgccatgccttgtcggg

SEQ ID NO: 3770696 - DNA, 25 bp, Homo sapien
cccaggaagcgtaagaggtagcagc

SEQ ID NO: 3770697 - DNA, 25 bp, Homo sapien
taggaacctccggtgcctggcacca

SEQ ID NO: 3770698 - DNA, 25 bp, Homo sapien
cctccttggtgtatgggaagtgatc

SEQ ID NO: 3770699 - DNA, 25 bp, Homo sapien
gaagtgatcttggtttggttagcct

SEQ ID NO: 3770700 - DNA, 25 bp, Homo sapien
tttggttagcctgaaggcctgcctg

SEQ ID NO: 3770701 - DNA, 25 bp, Homo sapien
atgcctccttggtgtatgggaagtg

SEQ ID NO: 3770702 - DNA, 25 bp, Homo sapien
gttgagccaattaacgtccacttta

SEQ ID NO: 3770703 - DNA, 25 bp, Homo sapien
ccagaccctctagttggcttgttac

SEQ ID NO: 3770704 - DNA, 25 bp, Homo sapien
agccagaccctctagttggcttgtt

SEQ ID NO: 3770705 - DNA, 25 bp, Homo sapien
tgagccaattaacgtccactttagg

SEQ ID NO: 3770706 - DNA, 25 bp, Homo sapien
gctgaacacgatgattgtcccatcg

SEQ ID NO: 3770707 - DNA, 25 bp, Homo sapien
tgaacacgatgattgtcccatcggg

SEQ ID NO: 3770708 - DNA, 25 bp, Homo sapien
gggagagttcgtgaaacagctgaac

SEQ ID NO: 3770709 - DNA, 25 bp, Homo sapien
agcagggtgggagagttcgtgaaac

SEQ ID NO: 3770710 - DNA, 25 bp, Homo sapien
gacttaaactggcttgcatgctact

SEQ ID NO: 3770711 - DNA, 25 bp, Homo sapien
gagttgaaaccgtagtgcatggcag

SEQ ID NO: 3770712 - DNA, 25 bp, Homo sapien
cagttcgacttgtgtgaagcaggca

SEQ ID NO: 3770713 - DNA, 25 bp, Homo sapien
gcatggcagattcgcttgagcacaa

SEQ ID NO: 3770714 - DNA, 25 bp, Homo sapien
gaatctgggcgtcaaaagcatccac

SEQ ID NO: 3770715 - DNA, 25 bp, Homo sapien
cacagtgatgtgttagtggccagta

SEQ ID NO: 3770716 - DNA, 25 bp, Homo sapien
taagggccctgctagatgttgacag

SEQ ID NO: 3770717 - DNA, 25 bp, Homo sapien
cagtaagatctggtgtatttcccct

SEQ ID NO: 3770718 - DNA, 25 bp, Homo sapien
taagcagtggcatgaatcgtcccat

SEQ ID NO: 3770719 - DNA, 25 bp, Homo sapien
ggatatcctgaagtcacccgggcat

SEQ ID NO: 3770720 - DNA, 25 bp, Homo sapien
ctctaacatggagcgaggcctctca

SEQ ID NO: 3770721 - DNA, 25 bp, Homo sapien
gaggtcgctgaaacaagggatatcc

SEQ ID NO: 3770722 - DNA, 25 bp, Homo sapien
caagatcaaataatgctagggtttt

SEQ ID NO: 3770723 - DNA, 25 bp, Homo sapien
tgcggccaagcttgattgatgtttg

SEQ ID NO: 3770724 - DNA, 25 bp, Homo sapien
ttattatgcggccaagcttgattga

SEQ ID NO: 3770725 - DNA, 25 bp, Homo sapien
ttgctttcctctgtatgcgccatct

SEQ ID NO: 3770726 - DNA, 25 bp, Homo sapien
tgggtaaccaaagaagacgctctgt

SEQ ID NO: 3770727 - DNA, 25 bp, Homo sapien
ttgcctcttactgggtaaccaaaga

SEQ ID NO: 3770728 - DNA, 25 bp, Homo sapien
gacgctctgttttacatcccctgaa

SEQ ID NO: 3770729 - DNA, 25 bp, Homo sapien
ttgaagacacgtttctcaaacttgc

SEQ ID NO: 3770730 - DNA, 25 bp, Homo sapien
tctgctcgtttcaaccataaatggt

SEQ ID NO: 3770731 - DNA, 25 bp, Homo sapien
aagtttcgtctgtccctctgctcgt

SEQ ID NO: 3770732 - DNA, 25 bp, Homo sapien
ccataaatggtcatagcatacaggt

SEQ ID NO: 3770733 - DNA, 25 bp, Homo sapien
gcctgggaagtctcattagtagtat

SEQ ID NO: 3770734 - DNA, 25 bp, Homo sapien
ctgctttcctctctggttgagaacc

SEQ ID NO: 3770735 - DNA, 25 bp, Homo sapien
gaaccaacagggagcttagtactca

SEQ ID NO: 3770736 - DNA, 25 bp, Homo sapien
cctttgagattgtctgggcatctgc

SEQ ID NO: 3770737 - DNA, 25 bp, Homo sapien
gactcgaacgagtcagtttatttcc

SEQ ID NO: 3770738 - DNA, 25 bp, Homo sapien
ttggcactgtcacaaggtaaatcta

SEQ ID NO: 3770739 - DNA, 25 bp, Homo sapien
cctgcagctcgtcatagatgtggaa

SEQ ID NO: 3770740 - DNA, 25 bp, Homo sapien
acagttctggctgtgtcagatggca

SEQ ID NO: 3770741 - DNA, 25 bp, Homo sapien
aacagcaggaccatgacagttctgg

SEQ ID NO: 3770742 - DNA, 25 bp, Homo sapien
gggaagccatgttcccttgcacagg

SEQ ID NO: 3770743 - DNA, 25 bp, Homo sapien
tgaaaaacattcagcgagcgaggca

SEQ ID NO: 3770744 - DNA, 25 bp, Homo sapien
cgaggcaaggtatttgctagagact

SEQ ID NO: 3770745 - DNA, 25 bp, Homo sapien
tgtgaagttactaacacggagcttt

SEQ ID NO: 3770746 - DNA, 25 bp, Homo sapien
gaagcttggacattcctaggccagt

SEQ ID NO: 3770747 - DNA, 25 bp, Homo sapien
ccagttaggatcaaaggctgagcac

SEQ ID NO: 3770748 - DNA, 25 bp, Homo sapien
tatctgctgttagattcggccggaa

SEQ ID NO: 3770749 - DNA, 25 bp, Homo sapien
tgagcactggctgcgatattagggc

SEQ ID NO: 3770750 - DNA, 25 bp, Homo sapien
cccacattcatggataggagatagc

SEQ ID NO: 3770751 - DNA, 25 bp, Homo sapien
cattcatggataggagatagcccac

SEQ ID NO: 3770752 - DNA, 25 bp, Homo sapien
cattcatggataggagatggcccac

SEQ ID NO: 3770753 - DNA, 25 bp, Homo sapien
tctgcttcagaggagttagcccaca

SEQ ID NO: 3770754 - DNA, 25 bp, Homo sapien
tagtcgcctttaatggccaggtcag

SEQ ID NO: 3770755 - DNA, 25 bp, Homo sapien
atggccaggtcaggcattatcattt

SEQ ID NO: 3770756 - DNA, 25 bp, Homo sapien
cattgctcagttgggcagcttgtct

SEQ ID NO: 3770757 - DNA, 25 bp, Homo sapien
gcttgtctgatttagcgcctgggta

SEQ ID NO: 3770758 - DNA, 25 bp, Homo sapien
tgccatcagtgttttaagtgtgtca

SEQ ID NO: 3770759 - DNA, 25 bp, Homo sapien
cagtgttttaagtgtgtcacacaca

SEQ ID NO: 3770760 - DNA, 25 bp, Homo sapien
cacatcatggctatcaggaaaaagt

SEQ ID NO: 3770761 - DNA, 25 bp, Homo sapien
cacacatcatggctatcaggaaaaa

SEQ ID NO: 3770762 - DNA, 25 bp, Homo sapien
ggttgtgtccatagtggcgactctg

SEQ ID NO: 3770763 - DNA, 25 bp, Homo sapien
tacccctcagacttgagaaatggct

SEQ ID NO: 3770764 - DNA, 25 bp, Homo sapien
cgactctggagagtatagctgctgg

SEQ ID NO: 3770765 - DNA, 25 bp, Homo sapien
tcagagagccccacgaggttgtgtc

SEQ ID NO: 3770766 - DNA, 25 bp, Homo sapien
cagggcgacagggacggaggcgccg

SEQ ID NO: 3770767 - DNA, 25 bp, Homo sapien
ggcgccggtggcaactggtgctggg

SEQ ID NO: 3770768 - DNA, 25 bp, Homo sapien
agaaccaaaccactgcgtgctgtcg

SEQ ID NO: 3770769 - DNA, 25 bp, Homo sapien
accactgcgtgctgtcgtgggtgca

SEQ ID NO: 3770770 - DNA, 25 bp, Homo sapien
caagccaattctctgagcagctgca

SEQ ID NO: 3770771 - DNA, 25 bp, Homo sapien
gagtcttacggcagcacaagccaat

SEQ ID NO: 3770772 - DNA, 25 bp, Homo sapien
tgcagtcttggtgtcatatgagtca

SEQ ID NO: 3770773 - DNA, 25 bp, Homo sapien
cacgaatgctaagggtgcagtcttg

SEQ ID NO: 3770774 - DNA, 25 bp, Homo sapien
ttatgtggatgcgtatcgaccgcca

SEQ ID NO: 3770775 - DNA, 25 bp, Homo sapien
cactgactgcgtgatttccagggtc

SEQ ID NO: 3770776 - DNA, 25 bp, Homo sapien
gatattagagttgtgtgatcccagc

SEQ ID NO: 3770777 - DNA, 25 bp, Homo sapien
tcatacctgtcagccgagagcactg

SEQ ID NO: 3770778 - DNA, 25 bp, Homo sapien
tttcagcagatgaacctgtataagt

SEQ ID NO: 3770779 - DNA, 25 bp, Homo sapien
ctcccatatcttgaacctgtgaatc

SEQ ID NO: 3770780 - DNA, 25 bp, Homo sapien
gaacctgtgaatctcagtggactct

SEQ ID NO: 3770781 - DNA, 25 bp, Homo sapien
cagatgaacctgtataagtctttcc

SEQ ID NO: 3770782 - DNA, 25 bp, Homo sapien
ctgctggacaaccagacagatgcat

SEQ ID NO: 3770783 - DNA, 25 bp, Homo sapien
gatcgcttgctcaaagactctgccc

SEQ ID NO: 3770784 - DNA, 25 bp, Homo sapien
acagatgcatgctgggaggatcgct

SEQ ID NO: 3770785 - DNA, 25 bp, Homo sapien
aggatcgcttgctcaaagactctgc

SEQ ID NO: 3770786 - DNA, 25 bp, Homo sapien
ggcagcggcccatacctgtagttga

SEQ ID NO: 3770787 - DNA, 25 bp, Homo sapien
cagggcagaagccatgcacttagag

SEQ ID NO: 3770788 - DNA, 25 bp, Homo sapien
taccatcctagactggagagctgct

SEQ ID NO: 3770789 - DNA, 25 bp, Homo sapien
cagcacccgacttgtcagagctttc

SEQ ID NO: 3770790 - DNA, 25 bp, Homo sapien
tctgggatgctatgaagaggagcct

SEQ ID NO: 3770791 - DNA, 25 bp, Homo sapien
catttcccgagcacaagcatggaga

SEQ ID NO: 3770792 - DNA, 25 bp, Homo sapien
cagaggtgtgctttagcgtccagaa

SEQ ID NO: 3770793 - DNA, 25 bp, Homo sapien
aacagcactgtggtagaggaaccca

SEQ ID NO: 3770794 - DNA, 25 bp, Homo sapien
ccaggttagaatttgcgtgtcgtcc

SEQ ID NO: 3770795 - DNA, 25 bp, Homo sapien
ccggtggctagtacagtattgtttc

SEQ ID NO: 3770796 - DNA, 25 bp, Homo sapien
cgagaatcttgcctcccggtggcta

SEQ ID NO: 3770797 - DNA, 25 bp, Homo sapien
cttgatcatttgtgaagggctggaa

SEQ ID NO: 3770798 - DNA, 25 bp, Homo sapien
aattgttcataggaatggtatcgaa

SEQ ID NO: 3770799 - DNA, 25 bp, Homo sapien
agatagaagaatgccggatcctccg

SEQ ID NO: 3770800 - DNA, 25 bp, Homo sapien
ctgagtcgaggtgagtgtgctgtct

SEQ ID NO: 3770801 - DNA, 25 bp, Homo sapien
aatgtaatgagaacgacatcagggt

SEQ ID NO: 3770802 - DNA, 25 bp, Homo sapien
tttgtaaatgacagccgtaactata

SEQ ID NO: 3770803 - DNA, 25 bp, Homo sapien
gctggtgtgctagcttttcgtctga

SEQ ID NO: 3770804 - DNA, 25 bp, Homo sapien
gacagccgtaactatatctgccctg

SEQ ID NO: 3770805 - DNA, 25 bp, Homo sapien
ttctcttgcagggagtcattcacgg

SEQ ID NO: 3770806 - DNA, 25 bp, Homo sapien
caccaggtattcgtgcagagcaaaa

SEQ ID NO: 3770807 - DNA, 25 bp, Homo sapien
taaaaggtgccgctacagtattgac

SEQ ID NO: 3770808 - DNA, 25 bp, Homo sapien
gacaatagacgtcagcctctcagtg

SEQ ID NO: 3770809 - DNA, 25 bp, Homo sapien
cagtcagtcttagtacaggtagcgt

SEQ ID NO: 3770810 - DNA, 25 bp, Homo sapien
aaagccatgcatcagtctcagacca

SEQ ID NO: 3770811 - DNA, 25 bp, Homo sapien
cagtgtcgtcttgtggcagttctcg

SEQ ID NO: 3770812 - DNA, 25 bp, Homo sapien
tctacaagggcaatggcacagaatg

SEQ ID NO: 3770813 - DNA, 25 bp, Homo sapien
catggaggtactgtatcatctgccc

SEQ ID NO: 3770814 - DNA, 25 bp, Homo sapien
ttgcaaagcctattgtctttttcga

SEQ ID NO: 3770815 - DNA, 25 bp, Homo sapien
tgcaaagcctattgtctttttcgaa

SEQ ID NO: 3770816 - DNA, 25 bp, Homo sapien
caaagcctattgtctttttcgaaca

SEQ ID NO: 3770817 - DNA, 25 bp, Homo sapien
gcaaagcctattgtctttttcgaac

SEQ ID NO: 3770818 - DNA, 25 bp, Homo sapien
agcatgacacacaaaccaggtggtt

SEQ ID NO: 3770819 - DNA, 25 bp, Homo sapien
ggtttgaaagttcttcggcatgtaa

SEQ ID NO: 3770820 - DNA, 25 bp, Homo sapien
ggcttctccacagaagcatgacaca

SEQ ID NO: 3770821 - DNA, 25 bp, Homo sapien
agttcttcggcatgtaagactgata

SEQ ID NO: 3770822 - DNA, 25 bp, Homo sapien
cacaagcatggacatatggaaaagg

SEQ ID NO: 3770823 - DNA, 25 bp, Homo sapien
acaagcatggacatatggaaaagga

SEQ ID NO: 3770824 - DNA, 25 bp, Homo sapien
catataaaatgatcggacgtggcac

SEQ ID NO: 3770825 - DNA, 25 bp, Homo sapien
gagctattcaggactttaggcccaa

SEQ ID NO: 3770826 - DNA, 25 bp, Homo sapien
cctgtgtgactggactgaggcaccc

SEQ ID NO: 3770827 - DNA, 25 bp, Homo sapien
tcaagtgcacatgaacggacattcc

SEQ ID NO: 3770828 - DNA, 25 bp, Homo sapien
aaaatcaccagcaaggcaaggcggg

SEQ ID NO: 3770829 - DNA, 25 bp, Homo sapien
ggtgaggtcatcaggccaaaatcac

SEQ ID NO: 3770830 - DNA, 25 bp, Homo sapien
gggagctttctgggtagcacagtgt

SEQ ID NO: 3770831 - DNA, 25 bp, Homo sapien
tcaggccaaaatcaccagcaaggca

SEQ ID NO: 3770832 - DNA, 25 bp, Homo sapien
gggcagcagtcctactgagtccacg

SEQ ID NO: 3770833 - DNA, 25 bp, Homo sapien
gcagtcctactgagtccacgcggcg

SEQ ID NO: 3770834 - DNA, 25 bp, Homo sapien
ctgtgacgtccctgggctgcgccag

SEQ ID NO: 3770835 - DNA, 25 bp, Homo sapien
agccctgctgtgacgtccctgggct

SEQ ID NO: 3770836 - DNA, 25 bp, Homo sapien
gatcccctggttgcctgagagtagc

SEQ ID NO: 3770837 - DNA, 25 bp, Homo sapien
tagattcatgctcggtgtgggttcc

SEQ ID NO: 3770838 - DNA, 25 bp, Homo sapien
tacgggagcccagttagctaccatg

SEQ ID NO: 3770839 - DNA, 25 bp, Homo sapien
cagtgtgccggccagaggataagtc

SEQ ID NO: 3770840 - DNA, 25 bp, Homo sapien
cacctaggtcgaggacgcgtgtgct

SEQ ID NO: 3770841 - DNA, 25 bp, Homo sapien
ccttgtccttcacctaggtcgagga

SEQ ID NO: 3770842 - DNA, 25 bp, Homo sapien
cgaggacgcgtgtgctcgcacacat

SEQ ID NO: 3770843 - DNA, 25 bp, Homo sapien
tttccggtacagctcctcgctctga

SEQ ID NO: 3770844 - DNA, 25 bp, Homo sapien
cctcatgctgcttctcttgccccag

SEQ ID NO: 3770845 - DNA, 25 bp, Homo sapien
tcatgctgcttctcttgccccagga

SEQ ID NO: 3770846 - DNA, 25 bp, Homo sapien
catgctgcttctcttgccccaggac

SEQ ID NO: 3770847 - DNA, 25 bp, Homo sapien
cccctcatgctgcttctcttgcccc

SEQ ID NO: 3770848 - DNA, 25 bp, Homo sapien
gatttgggataaagcctagcagggc

SEQ ID NO: 3770849 - DNA, 25 bp, Homo sapien
caggcatattttcgtggcttggcac

SEQ ID NO: 3770850 - DNA, 25 bp, Homo sapien
tttataccatggaggtggcgagccc

SEQ ID NO: 3770851 - DNA, 25 bp, Homo sapien
gaacaacatcaggtgactcacagga

SEQ ID NO: 3770852 - DNA, 25 bp, Homo sapien
gaaagcagattagctctgaggtgta

SEQ ID NO: 3770853 - DNA, 25 bp, Homo sapien
gtaaacacgacccttccagaaagca

SEQ ID NO: 3770854 - DNA, 25 bp, Homo sapien
gattagctctgaggtgtagtccaga

SEQ ID NO: 3770855 - DNA, 25 bp, Homo sapien
cacagcaccagcagaagtaaacacg

SEQ ID NO: 3770856 - DNA, 25 bp, Homo sapien
tgtggctggaatgtcactggctgga

SEQ ID NO: 3770857 - DNA, 25 bp, Homo sapien
gagagaaggatgtggctggaatgtc

SEQ ID NO: 3770858 - DNA, 25 bp, Homo sapien
ggagctccaagcctcacaataccct

SEQ ID NO: 3770859 - DNA, 25 bp, Homo sapien
tctgcattgtaagagagaaacattt

SEQ ID NO: 3770860 - DNA, 25 bp, Homo sapien
tcaaagtaggaagataatttttctg

SEQ ID NO: 3770861 - DNA, 25 bp, Homo sapien
agataatttttctgacctggaaatt

SEQ ID NO: 3770862 - DNA, 25 bp, Homo sapien
agtaggaagataatttttctgacct

SEQ ID NO: 3770863 - DNA, 25 bp, Homo sapien
ggaagataatttttctgacctggaa

SEQ ID NO: 3770864 - DNA, 25 bp, Homo sapien
gaagggagttgggtcccagtgacca

SEQ ID NO: 3770865 - DNA, 25 bp, Homo sapien
aaaaaacagctgtgtacagagaagg

SEQ ID NO: 3770866 - DNA, 25 bp, Homo sapien
aaaaaaacagctgtgtacagagaag

SEQ ID NO: 3770867 - DNA, 25 bp, Homo sapien
atgacagggcctgaaaactcccacc

SEQ ID NO: 3770868 - DNA, 25 bp, Homo sapien
agccgagtcgtggaggctgcacatc

SEQ ID NO: 3770869 - DNA, 25 bp, Homo sapien
gctgcacatcgcaggaaggatcccc

SEQ ID NO: 3770870 - DNA, 25 bp, Homo sapien
tcccccgtgggtctcacatgacagg

SEQ ID NO: 3770871 - DNA, 25 bp, Homo sapien
ccagaacctcatgccttgagatcca

SEQ ID NO: 3770872 - DNA, 25 bp, Homo sapien
ttgagatccaagcagagcggcgagt

SEQ ID NO: 3770873 - DNA, 25 bp, Homo sapien
catgggaacttggaggcgtccactg

SEQ ID NO: 3770874 - DNA, 25 bp, Homo sapien
aggctgcgaggcacacccagaacct

SEQ ID NO: 3770875 - DNA, 25 bp, Homo sapien
tgtaatccacagcacccgttaacag

SEQ ID NO: 3770876 - DNA, 25 bp, Homo sapien
gtaatccacagcacccgttaacagc

SEQ ID NO: 3770877 - DNA, 25 bp, Homo sapien
ctgtaatccacagcacccgttaaca

SEQ ID NO: 3770878 - DNA, 25 bp, Homo sapien
ccttttaattgaagaggcgaagttg

SEQ ID NO: 3770879 - DNA, 25 bp, Homo sapien
gcgaagttggccaaatagaagcaca

SEQ ID NO: 3770880 - DNA, 25 bp, Homo sapien
gaagcacaagtggagtaaacagaac

SEQ ID NO: 3770881 - DNA, 25 bp, Homo sapien
tagaagcacaagtggagtaaacaga

SEQ ID NO: 3770882 - DNA, 25 bp, Homo sapien
tccccacctgctctgttagggcagt

SEQ ID NO: 3770883 - DNA, 25 bp, Homo sapien
ctctgtctccggctgactgaaaaac

SEQ ID NO: 3770884 - DNA, 25 bp, Homo sapien
tctgtctccggctgactgaaaaaca

SEQ ID NO: 3770885 - DNA, 25 bp, Homo sapien
gaaaccccagttgccacttgggcat

SEQ ID NO: 3770886 - DNA, 25 bp, Homo sapien
ctggagctctttcagtggccgaaac

SEQ ID NO: 3770887 - DNA, 25 bp, Homo sapien
cagtcgtctgactttccccgtatgt

SEQ ID NO: 3770888 - DNA, 25 bp, Homo sapien
tattgggtacctaaagagcagttct

SEQ ID NO: 3770889 - DNA, 25 bp, Homo sapien
tagaggaattgttctaggaatgggc

SEQ ID NO: 3770890 - DNA, 25 bp, Homo sapien
caccgttgaaccctagacctgaagt

SEQ ID NO: 3770891 - DNA, 25 bp, Homo sapien
ggaatccatcccgtttcgctctctc

SEQ ID NO: 3770892 - DNA, 25 bp, Homo sapien
cacccggaatccatcccgtttcgct

SEQ ID NO: 3770893 - DNA, 25 bp, Homo sapien
atccatcccgtttcgctctctccag

SEQ ID NO: 3770894 - DNA, 25 bp, Homo sapien
cccgtttcgctctctccagatggat

SEQ ID NO: 3770895 - DNA, 25 bp, Homo sapien
tcccggtcactggtaacaatagcaa

SEQ ID NO: 3770896 - DNA, 25 bp, Homo sapien
tatacagggattggcattcttcccg

SEQ ID NO: 3770897 - DNA, 25 bp, Homo sapien
caatagcaatatgtgtccagggaca

SEQ ID NO: 3770898 - DNA, 25 bp, Homo sapien
gaactcacagttagacaatccatgg

SEQ ID NO: 3770899 - DNA, 25 bp, Homo sapien
ttaaagtgccatatgactttctacg

SEQ ID NO: 3770900 - DNA, 25 bp, Homo sapien
cactttttaaagtgccatatgactt

SEQ ID NO: 3770901 - DNA, 25 bp, Homo sapien
tttttaaagtgccatatgactttct

SEQ ID NO: 3770902 - DNA, 25 bp, Homo sapien
ccactttttaaagtgccatatgact

SEQ ID NO: 3770903 - DNA, 25 bp, Homo sapien
gtcttgacaaatcctaatgtcacgc

SEQ ID NO: 3770904 - DNA, 25 bp, Homo sapien
ttcggcatgccctggaagcttcttg

SEQ ID NO: 3770905 - DNA, 25 bp, Homo sapien
ttcggcatgccctggaagcttcttc

SEQ ID NO: 3770906 - DNA, 25 bp, Homo sapien
aaatcctaatgtcacgcctacagcc

SEQ ID NO: 3770907 - DNA, 25 bp, Homo sapien
ctgttaggatcagtgtgtgtggatg

SEQ ID NO: 3770908 - DNA, 25 bp, Homo sapien
gttaggatcagtgtgtgtggatggg

SEQ ID NO: 3770909 - DNA, 25 bp, Homo sapien
ggatcagtgtgtgtggatgggatag

SEQ ID NO: 3770910 - DNA, 25 bp, Homo sapien
atcagtgtgtgtggatgggatagcc

SEQ ID NO: 3770911 - DNA, 25 bp, Homo sapien
tatgcattttgtaccagtggaactt

SEQ ID NO: 3770912 - DNA, 25 bp, Homo sapien
caatggcagtcctcaaaggcgtaac

SEQ ID NO: 3770913 - DNA, 25 bp, Homo sapien
ggtgggcccctgacaatgactgatt

SEQ ID NO: 3770914 - DNA, 25 bp, Homo sapien
caaagttaatgcaacctagtggaaa

SEQ ID NO: 3770915 - DNA, 25 bp, Homo sapien
tctgcgtgttgtattgttggtagtc

SEQ ID NO: 3770916 - DNA, 25 bp, Homo sapien
tgcacacctcactgtttcacgtatc

SEQ ID NO: 3770917 - DNA, 25 bp, Homo sapien
cattgtgaacataaccgtgtagttg

SEQ ID NO: 3770918 - DNA, 25 bp, Homo sapien
tgttggtgatacatctgcacacctc

SEQ ID NO: 3770919 - DNA, 25 bp, Homo sapien
tctgattgctcttaaagtgctctta

SEQ ID NO: 3770920 - DNA, 25 bp, Homo sapien
aagtctcgtccccactgtcacccca

SEQ ID NO: 3770921 - DNA, 25 bp, Homo sapien
tgccctcaaagactgaagccgcagg

SEQ ID NO: 3770922 - DNA, 25 bp, Homo sapien
gcctctgctcaggaatctgattgct

SEQ ID NO: 3770923 - DNA, 25 bp, Homo sapien
gtcgatgtttgctccctctgtctta

SEQ ID NO: 3770924 - DNA, 25 bp, Homo sapien
gattccgtcgatgtttgctccctct

SEQ ID NO: 3770925 - DNA, 25 bp, Homo sapien
aagattccgtcgatgtttgctccct

SEQ ID NO: 3770926 - DNA, 25 bp, Homo sapien
ttccgtcgatgtttgctccctctgt

SEQ ID NO: 3770927 - DNA, 25 bp, Homo sapien
ttcctctgcgtgccagtgaaatctc

SEQ ID NO: 3770928 - DNA, 25 bp, Homo sapien
gtgctcaggctcttcaccctctcgt

SEQ ID NO: 3770929 - DNA, 25 bp, Homo sapien
cctctggcccgagattgtattttct

SEQ ID NO: 3770930 - DNA, 25 bp, Homo sapien
cctctcgttgcagcagcccctctgg

SEQ ID NO: 3770931 - DNA, 25 bp, Homo sapien
catcacttctgctttcagtctcctc

SEQ ID NO: 3770932 - DNA, 25 bp, Homo sapien
tcacttctgctttcagtctcctcat

SEQ ID NO: 3770933 - DNA, 25 bp, Homo sapien
atcacttctgctttcagtctcctca

SEQ ID NO: 3770934 - DNA, 25 bp, Homo sapien
tgtgagcaaggtgaatccgtgtgcc

SEQ ID NO: 3770935 - DNA, 25 bp, Homo sapien
tgactgtaaagttggtccctgctta

SEQ ID NO: 3770936 - DNA, 25 bp, Homo sapien
tttgagtcggtatgacaccactgca

SEQ ID NO: 3770937 - DNA, 25 bp, Homo sapien
tccctgcttaaattcatacccatag

SEQ ID NO: 3770938 - DNA, 25 bp, Homo sapien
cttgggataccgcagcaccatcaac

SEQ ID NO: 3770939 - DNA, 25 bp, Homo sapien
ttgggataccgcagcaccatcaaca

SEQ ID NO: 3770940 - DNA, 25 bp, Homo sapien
cagtcgcacgcagccgatgggctcg

SEQ ID NO: 3770941 - DNA, 25 bp, Homo sapien
cacagcagtcgcacgcagccgatgg

SEQ ID NO: 3770942 - DNA, 25 bp, Homo sapien
agcagtcgcacgcagccgatgggct

SEQ ID NO: 3770943 - DNA, 25 bp, Homo sapien
cgcacgcagccgatgggctcggact

SEQ ID NO: 3770944 - DNA, 25 bp, Homo sapien
gcttcagggttttatgttggatttg

SEQ ID NO: 3770945 - DNA, 25 bp, Homo sapien
caagcatcctgatcctttatgaagc

SEQ ID NO: 3770946 - DNA, 25 bp, Homo sapien
ccgtaagtttgaacagaatggcatt

SEQ ID NO: 3770947 - DNA, 25 bp, Homo sapien
tttttctagcttaatgctggattct

SEQ ID NO: 3770948 - DNA, 25 bp, Homo sapien
tggtgccgtgcagccgcgtggggag

SEQ ID NO: 3770949 - DNA, 25 bp, Homo sapien
tgctggtgccgtgcagccgcgtggg

SEQ ID NO: 3770950 - DNA, 25 bp, Homo sapien
gcagccgcgtggggagcgcttaaca

SEQ ID NO: 3770951 - DNA, 25 bp, Homo sapien
cgtgcagccgcgtggggagcgctta

SEQ ID NO: 3770952 - DNA, 25 bp, Homo sapien
gagctctctgcactgacaagtccca

SEQ ID NO: 3770953 - DNA, 25 bp, Homo sapien
ggaactgtaggcaaggtctgaccag

SEQ ID NO: 3770954 - DNA, 25 bp, Homo sapien
taggcaaggtctgaccagaaagtac

SEQ ID NO: 3770955 - DNA, 25 bp, Homo sapien
aactgtaggcaaggtctgaccagaa

SEQ ID NO: 3770956 - DNA, 25 bp, Homo sapien
caggaagccaccaactcatcccacg

SEQ ID NO: 3770957 - DNA, 25 bp, Homo sapien
ccaggaagccaccaactcatcccac

SEQ ID NO: 3770958 - DNA, 25 bp, Homo sapien
ctgtattgtatttaggcatctcttc

SEQ ID NO: 3770959 - DNA, 25 bp, Homo sapien
tgacaaggtcacctgtagatctgtc

SEQ ID NO: 3770960 - DNA, 25 bp, Homo sapien
taacaagcctgtaggttccaggccc

SEQ ID NO: 3770961 - DNA, 25 bp, Homo sapien
gaaaagcctagctgtccagtttgga

SEQ ID NO: 3770962 - DNA, 25 bp, Homo sapien
tcagactcagcatcgccccgctgga

SEQ ID NO: 3770963 - DNA, 25 bp, Homo sapien
gttgctcagactcagcatcgccccg

SEQ ID NO: 3770964 - DNA, 25 bp, Homo sapien
gccccgctggagcttcaacggctgt

SEQ ID NO: 3770965 - DNA, 25 bp, Homo sapien
agcatcgccccgctggagcttcaac

SEQ ID NO: 3770966 - DNA, 25 bp, Homo sapien
gaccctgaaatacactgctgcctgg

SEQ ID NO: 3770967 - DNA, 25 bp, Homo sapien
ctggccaactgctggagacacttga

SEQ ID NO: 3770968 - DNA, 25 bp, Homo sapien
ggcatccaggcgtcttctggccaac

SEQ ID NO: 3770969 - DNA, 25 bp, Homo sapien
tgctgcctggtgttttgcccgccag

SEQ ID NO: 3770970 - DNA, 25 bp, Homo sapien
gacattaggttctgttggtcccgct

SEQ ID NO: 3770971 - DNA, 25 bp, Homo sapien
ttggtcccgctttccgcaggcctga

SEQ ID NO: 3770972 - DNA, 25 bp, Homo sapien
cacatcccgtctgtttgggtgtccc

SEQ ID NO: 3770973 - DNA, 25 bp, Homo sapien
tttgcactcacatcccgtctgtttg

SEQ ID NO: 3770974 - DNA, 25 bp, Homo sapien
ttttccccttcactgcagcgtcctt

SEQ ID NO: 3770975 - DNA, 25 bp, Homo sapien
ctggcgttagcttgggatcccgcgc

SEQ ID NO: 3770976 - DNA, 25 bp, Homo sapien
ttccccttcactgcagcgtccttgt

SEQ ID NO: 3770977 - DNA, 25 bp, Homo sapien
ttagcttgggatcccgcgcggccga

SEQ ID NO: 3770978 - DNA, 25 bp, Homo sapien
taggggcgcccctcgatgacagcac

SEQ ID NO: 3770979 - DNA, 25 bp, Homo sapien
ctaggggcgcccctcgatgacagca

SEQ ID NO: 3770980 - DNA, 25 bp, Homo sapien
caggcgcctgcggagtctattgccc

SEQ ID NO: 3770981 - DNA, 25 bp, Homo sapien
aactctctgggaccggaagcaggtg

SEQ ID NO: 3770982 - DNA, 25 bp, Homo sapien
aaggccgcgaggaaccctggaacat

SEQ ID NO: 3770983 - DNA, 25 bp, Homo sapien
ctggaacatccggttgctggcgcac

SEQ ID NO: 3770984 - DNA, 25 bp, Homo sapien
ggcagagagcagctacagtcaccat

SEQ ID NO: 3770985 - DNA, 25 bp, Homo sapien
caacagcaagacattgcggaatcta

SEQ ID NO: 3770986 - DNA, 25 bp, Homo sapien
aacagcaagacattgcggaatctat

SEQ ID NO: 3770987 - DNA, 25 bp, Homo sapien
aagacattgcggaatctattctcac

SEQ ID NO: 3770988 - DNA, 25 bp, Homo sapien
caagacattgcggaatctattctca

SEQ ID NO: 3770989 - DNA, 25 bp, Homo sapien
atctctttgcttagagggtcacagg

SEQ ID NO: 3770990 - DNA, 25 bp, Homo sapien
tctttgcttagagggtcacaggtcc

SEQ ID NO: 3770991 - DNA, 25 bp, Homo sapien
tttgcttagagggtcacaggtcccc

SEQ ID NO: 3770992 - DNA, 25 bp, Homo sapien
ttgcttagagggtcacaggtcccca

SEQ ID NO: 3770993 - DNA, 25 bp, Homo sapien
ttccagggcctcaacaccaaccagc

SEQ ID NO: 3770994 - DNA, 25 bp, Homo sapien
agggcctcaacaccaaccagcagct

SEQ ID NO: 3770995 - DNA, 25 bp, Homo sapien
tccagggcctcaacaccaaccagca

SEQ ID NO: 3770996 - DNA, 25 bp, Homo sapien
ctattccagggcctcaacaccaacc

SEQ ID NO: 3770997 - DNA, 25 bp, Homo sapien
cagagggtctcccagtgaaattgcc

SEQ ID NO: 3770998 - DNA, 25 bp, Homo sapien
ggagctccaacagtaactgttgttg

SEQ ID NO: 3770999 - DNA, 25 bp, Homo sapien
cactgccaccaagggtctgatgttt

SEQ ID NO: 3771000 - DNA, 25 bp, Homo sapien
ccctgaggatagctcacgtgggtgt

SEQ ID NO: 3771001 - DNA, 25 bp, Homo sapien
tgcatctccaagtgggaggcattgg

SEQ ID NO: 3771002 - DNA, 25 bp, Homo sapien
ccagaacgttggcacaaatccatga

SEQ ID NO: 3771003 - DNA, 25 bp, Homo sapien
cagccaaacagacccttggtaataa

SEQ ID NO: 3771004 - DNA, 25 bp, Homo sapien
ccatgaggacttgattgagaacaga

SEQ ID NO: 3771005 - DNA, 25 bp, Homo sapien
tgtgtggacagggaacccatctgaa

SEQ ID NO: 3771006 - DNA, 25 bp, Homo sapien
ggacagggaacccatctgaactgcc

SEQ ID NO: 3771007 - DNA, 25 bp, Homo sapien
cagggaacccatctgaactgccaca

SEQ ID NO: 3771008 - DNA, 25 bp, Homo sapien
cttccaccatagaaagaaagaccca

SEQ ID NO: 3771009 - DNA, 25 bp, Homo sapien
ttaatgactgtccagggacattcac

SEQ ID NO: 3771010 - DNA, 25 bp, Homo sapien
aaagtggttccaattaatgactgtc

SEQ ID NO: 3771011 - DNA, 25 bp, Homo sapien
gctggcatggtgaggtcccacggtg

SEQ ID NO: 3771012 - DNA, 25 bp, Homo sapien
gagaccattgcagaggcccattgag

SEQ ID NO: 3771013 - DNA, 25 bp, Homo sapien
catggtctttgacgggagaattgac

SEQ ID NO: 3771014 - DNA, 25 bp, Homo sapien
tggttctccgtgactgcagcctgga

SEQ ID NO: 3771015 - DNA, 25 bp, Homo sapien
catggctgatctcgggagtgcacga

SEQ ID NO: 3771016 - DNA, 25 bp, Homo sapien
catcttgggcttcacttcgagggcg

SEQ ID NO: 3771017 - DNA, 25 bp, Homo sapien
tccattcaccgagaaccatgcaggg

SEQ ID NO: 3771018 - DNA, 25 bp, Homo sapien
caggtaacccgatggcagaggaatc

SEQ ID NO: 3771019 - DNA, 25 bp, Homo sapien
catcattgaggctgggaaaactgag

SEQ ID NO: 3771020 - DNA, 25 bp, Homo sapien
ccaactcggagatggtagcaggtcc

SEQ ID NO: 3771021 - DNA, 25 bp, Homo sapien
gcctgatgaggggccatgcatcctg

SEQ ID NO: 3771022 - DNA, 25 bp, Homo sapien
cctgatgaggggccatgcatcctgc

SEQ ID NO: 3771023 - DNA, 25 bp, Homo sapien
cgcctgatgaggggccatgcatcct

SEQ ID NO: 3771024 - DNA, 25 bp, Homo sapien
gcctctggacaggccgtattgggat

SEQ ID NO: 3771025 - DNA, 25 bp, Homo sapien
gacacttcggaaagcaggccccact

SEQ ID NO: 3771026 - DNA, 25 bp, Homo sapien
acacttcggaaagcaggccccactg

SEQ ID NO: 3771027 - DNA, 25 bp, Homo sapien
tggacaggccgtattgggattgtct

SEQ ID NO: 3771028 - DNA, 25 bp, Homo sapien
tgctggccacctctggagcctgagc

SEQ ID NO: 3771029 - DNA, 25 bp, Homo sapien
cttttgtgggaaccgtgctgctggc

SEQ ID NO: 3771030 - DNA, 25 bp, Homo sapien
gccctggccgcgcaattgagatagc

SEQ ID NO: 3771031 - DNA, 25 bp, Homo sapien
gcaattgagatagccgctcggtgcc

SEQ ID NO: 3771032 - DNA, 25 bp, Homo sapien
cactcacaacctctttatctgtctg

SEQ ID NO: 3771033 - DNA, 25 bp, Homo sapien
tgtggagagccatccactcacaacc

SEQ ID NO: 3771034 - DNA, 25 bp, Homo sapien
tcaatggccgtgtggagagccatcc

SEQ ID NO: 3771035 - DNA, 25 bp, Homo sapien
ctttgcctgtcaatggccgtgtgga

SEQ ID NO: 3771036 - DNA, 25 bp, Homo sapien
tctttgtttggctccggcctcgctc

SEQ ID NO: 3771037 - DNA, 25 bp, Homo sapien
ggccgagatgccaatcgggatgcca

SEQ ID NO: 3771038 - DNA, 25 bp, Homo sapien
ggagccccgctggccgagatgccaa

SEQ ID NO: 3771039 - DNA, 25 bp, Homo sapien
gccaatcgggatgccaagcactggc

SEQ ID NO: 3771040 - DNA, 25 bp, Homo sapien
agctccatggacgtcagactgcggg

SEQ ID NO: 3771041 - DNA, 25 bp, Homo sapien
aagctccatggacgtcagactgcgg

SEQ ID NO: 3771042 - DNA, 25 bp, Homo sapien
tgcggggggccttgcacaccatgct

SEQ ID NO: 3771043 - DNA, 25 bp, Homo sapien
tgagaggtgcggacttttcttgaag

SEQ ID NO: 3771044 - DNA, 25 bp, Homo sapien
taggtgcaggatcaagacagaggat

SEQ ID NO: 3771045 - DNA, 25 bp, Homo sapien
aagacagaggatgttcccacggcgc

SEQ ID NO: 3771046 - DNA, 25 bp, Homo sapien
tccaatgctgagtgtaggctgccgg

SEQ ID NO: 3771047 - DNA, 25 bp, Homo sapien
agtggatggatcatgaatcatccaa

SEQ ID NO: 3771048 - DNA, 25 bp, Homo sapien
cagagcgagaatgtggttggtccac

SEQ ID NO: 3771049 - DNA, 25 bp, Homo sapien
gccattcctgagtcccagagcgaga

SEQ ID NO: 3771050 - DNA, 25 bp, Homo sapien
ttcccatcatgcagctgcctgcagg

SEQ ID NO: 3771051 - DNA, 25 bp, Homo sapien
caggaagcggtcgtatgatgccagc

SEQ ID NO: 3771052 - DNA, 25 bp, Homo sapien
tacatggtgggtaaagagctggagg

SEQ ID NO: 3771053 - DNA, 25 bp, Homo sapien
ggcccttctgtttacatggtgggta

SEQ ID NO: 3771054 - DNA, 25 bp, Homo sapien
gagaaactgcattgtagaaaggccc

SEQ ID NO: 3771055 - DNA, 25 bp, Homo sapien
tggtgactctaaaatcattgaaggg

SEQ ID NO: 3771056 - DNA, 25 bp, Homo sapien
tccagggccggtgaagaatgttgac

SEQ ID NO: 3771057 - DNA, 25 bp, Homo sapien
tgttgacggtgactggactacagta

SEQ ID NO: 3771058 - DNA, 25 bp, Homo sapien
ggcctggccccacatatctgcagcc

SEQ ID NO: 3771059 - DNA, 25 bp, Homo sapien
gaaccacgggttctggatgaggttc

SEQ ID NO: 3771060 - DNA, 25 bp, Homo sapien
ctacccttcccagagctctcggtcg

SEQ ID NO: 3771061 - DNA, 25 bp, Homo sapien
tacccttcccagagctctcggtcgg

SEQ ID NO: 3771062 - DNA, 25 bp, Homo sapien
ctgcatgcgacagagaacgggctgg

SEQ ID NO: 3771063 - DNA, 25 bp, Homo sapien
cagctttgggtagcgtgctgtctgc

SEQ ID NO: 3771064 - DNA, 25 bp, Homo sapien
ctgcagatgcccctccgaaaactga

SEQ ID NO: 3771065 - DNA, 25 bp, Homo sapien
ccgaaacctgtgtcagcacggcctg

SEQ ID NO: 3771066 - DNA, 25 bp, Homo sapien
gatatggccaggagctcccgaaacc

SEQ ID NO: 3771067 - DNA, 25 bp, Homo sapien
gggattccgaaagtggcatgtgacc

SEQ ID NO: 3771068 - DNA, 25 bp, Homo sapien
aatcagagcagaaaggggattccga

SEQ ID NO: 3771069 - DNA, 25 bp, Homo sapien
cagaaaggggattccgaaagtggca

SEQ ID NO: 3771070 - DNA, 25 bp, Homo sapien
aaagtggcatgtgaccgcgtccctg

SEQ ID NO: 3771071 - DNA, 25 bp, Homo sapien
aggttcccagggcaagatgtacgca

SEQ ID NO: 3771072 - DNA, 25 bp, Homo sapien
atctgtttcaccacccgagcctggc

SEQ ID NO: 3771073 - DNA, 25 bp, Homo sapien
gatgtacgcagtcatctgtttcacc

SEQ ID NO: 3771074 - DNA, 25 bp, Homo sapien
gagctctctccatgggctgtacctt

SEQ ID NO: 3771075 - DNA, 25 bp, Homo sapien
cagaaaatgccccgatgggaagggc

SEQ ID NO: 3771076 - DNA, 25 bp, Homo sapien
gagaagacacttcaggaactgctct

SEQ ID NO: 3771077 - DNA, 25 bp, Homo sapien
atggtcagcaaacagaccctgggca

SEQ ID NO: 3771078 - DNA, 25 bp, Homo sapien
aatggtcagcaaacagaccctgggc

SEQ ID NO: 3771079 - DNA, 25 bp, Homo sapien
gcaatggtcagcaaacagaccctgg

SEQ ID NO: 3771080 - DNA, 25 bp, Homo sapien
caagacagtgccagcatcgaaggcc

SEQ ID NO: 3771081 - DNA, 25 bp, Homo sapien
gatgtagagccaggcgccaagacag

SEQ ID NO: 3771082 - DNA, 25 bp, Homo sapien
gatattaagcttctctgtcccaaag

SEQ ID NO: 3771083 - DNA, 25 bp, Homo sapien
tccttgtcacactgtcatgatgtag

SEQ ID NO: 3771084 - DNA, 25 bp, Homo sapien
tgtctttccacagaaaactccagaa

SEQ ID NO: 3771085 - DNA, 25 bp, Homo sapien
ctttccacagaaaactccagaacct

SEQ ID NO: 3771086 - DNA, 25 bp, Homo sapien
tatgtctttccacagaaaactccag

SEQ ID NO: 3771087 - DNA, 25 bp, Homo sapien
ttatgtctttccacagaaaactcca

SEQ ID NO: 3771088 - DNA, 25 bp, Homo sapien
tcatggcccagagattgacaggggc

SEQ ID NO: 3771089 - DNA, 25 bp, Homo sapien
tgttgtcagagttggacagctcagc

SEQ ID NO: 3771090 - DNA, 25 bp, Homo sapien
gagttggacagctcagcacggcaac

SEQ ID NO: 3771091 - DNA, 25 bp, Homo sapien
tgtcagagttggacagctcagcacg

SEQ ID NO: 3771092 - DNA, 25 bp, Homo sapien
tttgacacgaagtaataattgtcag

SEQ ID NO: 3771093 - DNA, 25 bp, Homo sapien
ttgacacgaagtaataattgtcaga

SEQ ID NO: 3771094 - DNA, 25 bp, Homo sapien
tgacacgaagtaataattgtcagaa

SEQ ID NO: 3771095 - DNA, 25 bp, Homo sapien
cttttgacacgaagtaataattgtc

SEQ ID NO: 3771096 - DNA, 25 bp, Homo sapien
tctaaccaggttaacgcagtggact

SEQ ID NO: 3771097 - DNA, 25 bp, Homo sapien
gtaacatgaaccagctctaaccagg

SEQ ID NO: 3771098 - DNA, 25 bp, Homo sapien
tgctgcccagtaacatgaaccagct

SEQ ID NO: 3771099 - DNA, 25 bp, Homo sapien
taacgcagtggacttctgtgccatc

SEQ ID NO: 3771100 - DNA, 25 bp, Homo sapien
tgccccctctccaagcctgccatcc

SEQ ID NO: 3771101 - DNA, 25 bp, Homo sapien
ccccctctccaagcctgccatccat

SEQ ID NO: 3771102 - DNA, 25 bp, Homo sapien
ctgccccctctccaagcctgccatc

SEQ ID NO: 3771103 - DNA, 25 bp, Homo sapien
gcctgccccctctccaagcctgcca

SEQ ID NO: 3771104 - DNA, 25 bp, Homo sapien
tctctccagacaagctccggatgct

SEQ ID NO: 3771105 - DNA, 25 bp, Homo sapien
tccagacaagctccggatgcttgga

SEQ ID NO: 3771106 - DNA, 25 bp, Homo sapien
tccggatgcttggatccttgtcgtg

SEQ ID NO: 3771107 - DNA, 25 bp, Homo sapien
ccttgtcgtgggtcaaggcatggat

SEQ ID NO: 3771108 - DNA, 25 bp, Homo sapien
tactgttactgcaacttggccattg

SEQ ID NO: 3771109 - DNA, 25 bp, Homo sapien
tcgcttcaggtgaaactcagtttcc

SEQ ID NO: 3771110 - DNA, 25 bp, Homo sapien
aagcagtgcaggcaatcgcttcagg

SEQ ID NO: 3771111 - DNA, 25 bp, Homo sapien
gcagtgaataagaaccccagctgtt

SEQ ID NO: 3771112 - DNA, 25 bp, Homo sapien
attgtcttgtctagggctccatctc

SEQ ID NO: 3771113 - DNA, 25 bp, Homo sapien
tttcctccttcctaacatgactctg

SEQ ID NO: 3771114 - DNA, 25 bp, Homo sapien
tggcttgagagttcacccaggacac

SEQ ID NO: 3771115 - DNA, 25 bp, Homo sapien
aggacacctgcgtctttccaaggcc

SEQ ID NO: 3771116 - DNA, 25 bp, Homo sapien
gggcagggcgagtgcctccgggttc

SEQ ID NO: 3771117 - DNA, 25 bp, Homo sapien
ggcagggcgagtgcctccgggttcc

SEQ ID NO: 3771118 - DNA, 25 bp, Homo sapien
agggcgagtgcctccgggttcctca

SEQ ID NO: 3771119 - DNA, 25 bp, Homo sapien
cagggcgagtgcctccgggttcctc

SEQ ID NO: 3771120 - DNA, 25 bp, Homo sapien
gagccagcaccgaccaggaaatcgt

SEQ ID NO: 3771121 - DNA, 25 bp, Homo sapien
agaactccaatgtccgctgctgctc

SEQ ID NO: 3771122 - DNA, 25 bp, Homo sapien
tcagcaggacgacaactcacatctt

SEQ ID NO: 3771123 - DNA, 25 bp, Homo sapien
gctgctcagcaggacgacaactcac

SEQ ID NO: 3771124 - DNA, 25 bp, Homo sapien
attctgtcaccccacaggcatgaga

SEQ ID NO: 3771125 - DNA, 25 bp, Homo sapien
ctggctccacgtggcccttacaaag

SEQ ID NO: 3771126 - DNA, 25 bp, Homo sapien
tacaaagtcccggggagatgcagtg

SEQ ID NO: 3771127 - DNA, 25 bp, Homo sapien
gctggctgccccgaatattctgtca

SEQ ID NO: 3771128 - DNA, 25 bp, Homo sapien
agggaggggcttgtcggagctggca

SEQ ID NO: 3771129 - DNA, 25 bp, Homo sapien
cagggaggggcttgtcggagctggc

SEQ ID NO: 3771130 - DNA, 25 bp, Homo sapien
tgctaaatagccttctgaggatgag

SEQ ID NO: 3771131 - DNA, 25 bp, Homo sapien
agaccagagcctccaaaggttctaa

SEQ ID NO: 3771132 - DNA, 25 bp, Homo sapien
ccccagaacttgctaaatagccttc

SEQ ID NO: 3771133 - DNA, 25 bp, Homo sapien
ttccccccagaacttgctaaatagc

SEQ ID NO: 3771134 - DNA, 25 bp, Homo sapien
ctgtgaaataaacgaagtctgctgg

SEQ ID NO: 3771135 - DNA, 25 bp, Homo sapien
tcagtagatgatgctggacttgtct

SEQ ID NO: 3771136 - DNA, 25 bp, Homo sapien
tgtgtttcgataccagatgatgtga

SEQ ID NO: 3771137 - DNA, 25 bp, Homo sapien
tcgagggcctctgaacttgtgtgtg

SEQ ID NO: 3771138 - DNA, 25 bp, Homo sapien
ggacttgtcttcatcgagcattcga

SEQ ID NO: 3771139 - DNA, 25 bp, Homo sapien
tccaaatgacaaatctgaattacag

SEQ ID NO: 3771140 - DNA, 25 bp, Homo sapien
ttcagattatgttgattttcctcca

SEQ ID NO: 3771141 - DNA, 25 bp, Homo sapien
tgattttcctccaaatgacaaatct

SEQ ID NO: 3771142 - DNA, 25 bp, Homo sapien
tatattcagattatgttgattttcc

SEQ ID NO: 3771143 - DNA, 25 bp, Homo sapien
tacaaatacgtaaagcaacaaactg

SEQ ID NO: 3771144 - DNA, 25 bp, Homo sapien
tacgtaaagcaacaaactggaataa

SEQ ID NO: 3771145 - DNA, 25 bp, Homo sapien
tacttacaaatacgtaaagcaacaa

SEQ ID NO: 3771146 - DNA, 25 bp, Homo sapien
caaatacgtaaagcaacaaactgga

SEQ ID NO: 3771147 - DNA, 25 bp, Homo sapien
tgcagtctgattctgactctaggaa

SEQ ID NO: 3771148 - DNA, 25 bp, Homo sapien
tactttcccatgtaaatgcacgccc

SEQ ID NO: 3771149 - DNA, 25 bp, Homo sapien
tggtcactgaaacctagcactgtgg

SEQ ID NO: 3771150 - DNA, 25 bp, Homo sapien
taacttagcacatccttcgctccag

SEQ ID NO: 3771151 - DNA, 25 bp, Homo sapien
gcagagcaaagtaaggcccagaaga

SEQ ID NO: 3771152 - DNA, 25 bp, Homo sapien
tgcaaaattgaaacctcagccagtc

SEQ ID NO: 3771153 - DNA, 25 bp, Homo sapien
tcaacaggacctggaacggtggctg

SEQ ID NO: 3771154 - DNA, 25 bp, Homo sapien
taaatgcccacaccttacagcagag

SEQ ID NO: 3771155 - DNA, 25 bp, Homo sapien
cagacgtggctgataacttaacaaa

SEQ ID NO: 3771156 - DNA, 25 bp, Homo sapien
tccattcacgagagaaagcagtact

SEQ ID NO: 3771157 - DNA, 25 bp, Homo sapien
caaatgtcttcgtgtctgcggctca

SEQ ID NO: 3771158 - DNA, 25 bp, Homo sapien
taactccgctaaatggtagtacctg

SEQ ID NO: 3771159 - DNA, 25 bp, Homo sapien
gatgccactacagggaggaacttca

SEQ ID NO: 3771160 - DNA, 25 bp, Homo sapien
tcaccaaaggtatataaacggccca

SEQ ID NO: 3771161 - DNA, 25 bp, Homo sapien
cttcattcagagtaccagggtccca

SEQ ID NO: 3771162 - DNA, 25 bp, Homo sapien
ccagtaaaacgtctagcagagtgcc

SEQ ID NO: 3771163 - DNA, 25 bp, Homo sapien
catggagggaccacaccaggtcaaa

SEQ ID NO: 3771164 - DNA, 25 bp, Homo sapien
ggtcaaaaccaactacaggatcaag

SEQ ID NO: 3771165 - DNA, 25 bp, Homo sapien
ccaactacaggatcaagttcaactg

SEQ ID NO: 3771166 - DNA, 25 bp, Homo sapien
gctctgtgccaccttttagatgaaa

SEQ ID NO: 3771167 - DNA, 25 bp, Homo sapien
gagatcctactcgtagacatggcat

SEQ ID NO: 3771168 - DNA, 25 bp, Homo sapien
tcaagtgcacactaagataaaggac

SEQ ID NO: 3771169 - DNA, 25 bp, Homo sapien
tccgtgaagagatcctactcgtaga

SEQ ID NO: 3771170 - DNA, 25 bp, Homo sapien
aggactgattccaaaacataaccaa

SEQ ID NO: 3771171 - DNA, 25 bp, Homo sapien
accatgctgaccaggtgtctgttct

SEQ ID NO: 3771172 - DNA, 25 bp, Homo sapien
ccaggtgtctgttcttgtgcttgca

SEQ ID NO: 3771173 - DNA, 25 bp, Homo sapien
gaaaggggtttcagcaccatgctga

SEQ ID NO: 3771174 - DNA, 25 bp, Homo sapien
gcttttctcgcaccatgacagtgaa

SEQ ID NO: 3771175 - DNA, 25 bp, Homo sapien
tgacatatacaaagtaacacaggtg

SEQ ID NO: 3771176 - DNA, 25 bp, Homo sapien
taatgaggaagactagaaatgctac

SEQ ID NO: 3771177 - DNA, 25 bp, Homo sapien
gagaattagccttcaaagcatcagg

SEQ ID NO: 3771178 - DNA, 25 bp, Homo sapien
cacaggtgaatactaggcaacagct

SEQ ID NO: 3771179 - DNA, 25 bp, Homo sapien
tcagcttccacctgacctgcatcaa

SEQ ID NO: 3771180 - DNA, 25 bp, Homo sapien
gcatcaacagcccagttatttcacc

SEQ ID NO: 3771181 - DNA, 25 bp, Homo sapien
cagcccagttatttcaccagaattt

SEQ ID NO: 3771182 - DNA, 25 bp, Homo sapien
ctgacctgcatcaacagcccagtta

SEQ ID NO: 3771183 - DNA, 25 bp, Homo sapien
tgagattcgcaagagtcagaccaga

SEQ ID NO: 3771184 - DNA, 25 bp, Homo sapien
ggtgcagcaatatccgtcgactaca

SEQ ID NO: 3771185 - DNA, 25 bp, Homo sapien
gattgtataaatggccaccctggga

SEQ ID NO: 3771186 - DNA, 25 bp, Homo sapien
gcactgctgcacctttggccgtaaa

SEQ ID NO: 3771187 - DNA, 25 bp, Homo sapien
tctttggtgaccctgaattgcccga

SEQ ID NO: 3771188 - DNA, 25 bp, Homo sapien
tggactagaacttggctcagcgtgc

SEQ ID NO: 3771189 - DNA, 25 bp, Homo sapien
cgttgctcaagtgatggacgcccca

SEQ ID NO: 3771190 - DNA, 25 bp, Homo sapien
cggatatcgtgcatgacttggaggc

SEQ ID NO: 3771191 - DNA, 25 bp, Homo sapien
tcttttgtattccttcccatagtat

SEQ ID NO: 3771192 - DNA, 25 bp, Homo sapien
ttcttttgtattccttcccatagta

SEQ ID NO: 3771193 - DNA, 25 bp, Homo sapien
cgctgcgattatgccatctacacat

SEQ ID NO: 3771194 - DNA, 25 bp, Homo sapien
ttgctgatgctaacgctgcgattat

SEQ ID NO: 3771195 - DNA, 25 bp, Homo sapien
cgtccatctcccatgaacatttgct

SEQ ID NO: 3771196 - DNA, 25 bp, Homo sapien
gctaacgctgcgattatgccatcta

SEQ ID NO: 3771197 - DNA, 25 bp, Homo sapien
aaggcaagtaatggagaggaccaga

SEQ ID NO: 3771198 - DNA, 25 bp, Homo sapien
gcaagtaatggagaggaccagagaa

SEQ ID NO: 3771199 - DNA, 25 bp, Homo sapien
taacgctgtgcctctcatgaggagg

SEQ ID NO: 3771200 - DNA, 25 bp, Homo sapien
tgtggaggtagtaacgctgtgcctc

SEQ ID NO: 3771201 - DNA, 25 bp, Homo sapien
tctggtctctgtcaccccccagtgg

SEQ ID NO: 3771202 - DNA, 25 bp, Homo sapien
accccccagtggacgccacactcaa

SEQ ID NO: 3771203 - DNA, 25 bp, Homo sapien
tggtctctgtcaccccccagtggac

SEQ ID NO: 3771204 - DNA, 25 bp, Homo sapien
ctgtcaccccccagtggacgccaca

SEQ ID NO: 3771205 - DNA, 25 bp, Homo sapien
taaaaggacagatgtgacatggaat

SEQ ID NO: 3771206 - DNA, 25 bp, Homo sapien
ttaaaaggacagatgtgacatggaa

SEQ ID NO: 3771207 - DNA, 25 bp, Homo sapien
aaaaggacagatgtgacatggaatt

SEQ ID NO: 3771208 - DNA, 25 bp, Homo sapien
aatgtaagcaggaatagtacagtca

SEQ ID NO: 3771209 - DNA, 25 bp, Homo sapien
atgtaagcaggaatagtacagtcat

SEQ ID NO: 3771210 - DNA, 25 bp, Homo sapien
ctaaatgtaagcaggaatagtacag

SEQ ID NO: 3771211 - DNA, 25 bp, Homo sapien
aaatgtaagcaggaatagtacagtc

SEQ ID NO: 3771212 - DNA, 25 bp, Homo sapien
atctgaagttgctctatcacaaaat

SEQ ID NO: 3771213 - DNA, 25 bp, Homo sapien
aactttgcccgctttagttctgtca

SEQ ID NO: 3771214 - DNA, 25 bp, Homo sapien
gttcttccatggacaatttcattag

SEQ ID NO: 3771215 - DNA, 25 bp, Homo sapien
ttctggaaggtctaactttgcccgc

SEQ ID NO: 3771216 - DNA, 25 bp, Homo sapien
ccagaggccataatgcactgaggta

SEQ ID NO: 3771217 - DNA, 25 bp, Homo sapien
aggacaagggatcccagtggaaaca

SEQ ID NO: 3771218 - DNA, 25 bp, Homo sapien
caaagacctttgcagtgaagtaagc

SEQ ID NO: 3771219 - DNA, 25 bp, Homo sapien
tcagctgggtgctattctccctgga

SEQ ID NO: 3771220 - DNA, 25 bp, Homo sapien
attttaagatggtgtaagacatagc

SEQ ID NO: 3771221 - DNA, 25 bp, Homo sapien
acatagcagtaagaactcgttctcc

SEQ ID NO: 3771222 - DNA, 25 bp, Homo sapien
gatatcccatattctgaggtttagt

SEQ ID NO: 3771223 - DNA, 25 bp, Homo sapien
tattctgaggtttagtgtaaaggga

SEQ ID NO: 3771224 - DNA, 25 bp, Homo sapien
gatcaaggaaacactgaaaaaacca

SEQ ID NO: 3771225 - DNA, 25 bp, Homo sapien
aacttgtgtagatttcttgagaatc

SEQ ID NO: 3771226 - DNA, 25 bp, Homo sapien
ttcattgtgtaaaaacttgtgtaga

SEQ ID NO: 3771227 - DNA, 25 bp, Homo sapien
tgtaaaaacttgtgtagatttcttg

SEQ ID NO: 3771228 - DNA, 25 bp, Homo sapien
caagtgttgcttaagcttggacaga

SEQ ID NO: 3771229 - DNA, 25 bp, Homo sapien
gaggagtaaagctgtgatctggctc

SEQ ID NO: 3771230 - DNA, 25 bp, Homo sapien
catatacatgaggagtaaagctgtg

SEQ ID NO: 3771231 - DNA, 25 bp, Homo sapien
ttagggcctgagaagagtttgacca

SEQ ID NO: 3771232 - DNA, 25 bp, Homo sapien
cagaaggcatcttcctcgttcatat

SEQ ID NO: 3771233 - DNA, 25 bp, Homo sapien
gagccgcagtataactggccagtag

SEQ ID NO: 3771234 - DNA, 25 bp, Homo sapien
aatctgtgggtgcaatctgagccgc

SEQ ID NO: 3771235 - DNA, 25 bp, Homo sapien
tacgtactggaacagaatgctcaca

SEQ ID NO: 3771236 - DNA, 25 bp, Homo sapien
gacactgtctctatgaaatgtgaac

SEQ ID NO: 3771237 - DNA, 25 bp, Homo sapien
ctgggacctagtcaacaagtattca

SEQ ID NO: 3771238 - DNA, 25 bp, Homo sapien
tccttcctatgagatgtccctttaa

SEQ ID NO: 3771239 - DNA, 25 bp, Homo sapien
ttccagctccaattccggtgaggcc

SEQ ID NO: 3771240 - DNA, 25 bp, Homo sapien
tatacatcccaaggttcaaaggtcc

SEQ ID NO: 3771241 - DNA, 25 bp, Homo sapien
gcaagcacatggaataaggattgtt

SEQ ID NO: 3771242 - DNA, 25 bp, Homo sapien
aagcacatggaataaggattgttgc

SEQ ID NO: 3771243 - DNA, 25 bp, Homo sapien
agcaagcacatggaataaggattgt

SEQ ID NO: 3771244 - DNA, 25 bp, Homo sapien
caagcacatggaataaggattgttg

SEQ ID NO: 3771245 - DNA, 25 bp, Homo sapien
ggaaaactaccaattcaggcagaac

SEQ ID NO: 3771246 - DNA, 25 bp, Homo sapien
gaaccacaaccatctgagtgcttgc

SEQ ID NO: 3771247 - DNA, 25 bp, Homo sapien
tatccctctaggtaaagaaccacaa

SEQ ID NO: 3771248 - DNA, 25 bp, Homo sapien
tcactgagccctgtgatgaaagtca

SEQ ID NO: 3771249 - DNA, 25 bp, Homo sapien
ccaggtctatttgtctgatgtcagg

SEQ ID NO: 3771250 - DNA, 25 bp, Homo sapien
tgtctctaaacataatgtggtcccg

SEQ ID NO: 3771251 - DNA, 25 bp, Homo sapien
tctgatgtcaggtgaacagccccgt

SEQ ID NO: 3771252 - DNA, 25 bp, Homo sapien
cgaaatgtgcggttgacatccaggt

SEQ ID NO: 3771253 - DNA, 25 bp, Homo sapien
tgcgttttccctagtccagaggccc

SEQ ID NO: 3771254 - DNA, 25 bp, Homo sapien
gctaaggagctctaactgcttctga

SEQ ID NO: 3771255 - DNA, 25 bp, Homo sapien
tcttgggctagcactgagggagcta

SEQ ID NO: 3771256 - DNA, 25 bp, Homo sapien
taccaagccttacggagattctgag

SEQ ID NO: 3771257 - DNA, 25 bp, Homo sapien
tagggatctcaagaaggagggccca

SEQ ID NO: 3771258 - DNA, 25 bp, Homo sapien
ttcctttgtaaattcgcctatgaaa

SEQ ID NO: 3771259 - DNA, 25 bp, Homo sapien
gctggagtggtattcctttgtaaat

SEQ ID NO: 3771260 - DNA, 25 bp, Homo sapien
ctgagctggagtggtattcctttgt

SEQ ID NO: 3771261 - DNA, 25 bp, Homo sapien
aatcttcatcaagggaagacatcac

SEQ ID NO: 3771262 - DNA, 25 bp, Homo sapien
taccaagcttctcctcatctatctg

SEQ ID NO: 3771263 - DNA, 25 bp, Homo sapien
cacacctaaaagatgctccaaacag

SEQ ID NO: 3771264 - DNA, 25 bp, Homo sapien
tcctcatggattgtagagtgctgac

SEQ ID NO: 3771265 - DNA, 25 bp, Homo sapien
gtttaacttaagaatgccctcgatg

SEQ ID NO: 3771266 - DNA, 25 bp, Homo sapien
gcaactgccactcaagcactgggta

SEQ ID NO: 3771267 - DNA, 25 bp, Homo sapien
taacgtaacgagcagtgacgagacg

SEQ ID NO: 3771268 - DNA, 25 bp, Homo sapien
tactgactgcatactaaacgcctgg

SEQ ID NO: 3771269 - DNA, 25 bp, Homo sapien
cttgtatttttcccatcctttcagc

SEQ ID NO: 3771270 - DNA, 25 bp, Homo sapien
tgtatttttcccatcctttcagcat

SEQ ID NO: 3771271 - DNA, 25 bp, Homo sapien
tcagtgttcttgtatttttcccatc

SEQ ID NO: 3771272 - DNA, 25 bp, Homo sapien
tttcagtgttcttgtatttttccca

SEQ ID NO: 3771273 - DNA, 25 bp, Homo sapien
gtagttctttcaatttccaggtgct

SEQ ID NO: 3771274 - DNA, 25 bp, Homo sapien
tcagccatttggtagttctttcaat

SEQ ID NO: 3771275 - DNA, 25 bp, Homo sapien
tggtagttctttcaatttccaggtg

SEQ ID NO: 3771276 - DNA, 25 bp, Homo sapien
agttctttcaatttccaggtgcttt

SEQ ID NO: 3771277 - DNA, 25 bp, Homo sapien
ttctaataaaggcaattcaccagta

SEQ ID NO: 3771278 - DNA, 25 bp, Homo sapien
taaaggcaattcaccagtaactgta

SEQ ID NO: 3771279 - DNA, 25 bp, Homo sapien
aataaaggcaattcaccagtaactg

SEQ ID NO: 3771280 - DNA, 25 bp, Homo sapien
ggcaattcaccagtaactgtaaata

SEQ ID NO: 3771281 - DNA, 25 bp, Homo sapien
cagccacattatgatctgggagctc

SEQ ID NO: 3771282 - DNA, 25 bp, Homo sapien
acattatgatctgggagctcctcct

SEQ ID NO: 3771283 - DNA, 25 bp, Homo sapien
cacattatgatctgggagctcctcc

SEQ ID NO: 3771284 - DNA, 25 bp, Homo sapien
gccacattatgatctgggagctcct

SEQ ID NO: 3771285 - DNA, 25 bp, Homo sapien
tctctgtgccggcatatgcttaaat

SEQ ID NO: 3771286 - DNA, 25 bp, Homo sapien
aaatttcacacccttccgaggatga

SEQ ID NO: 3771287 - DNA, 25 bp, Homo sapien
cttccgaggatgacactgctgctgc

SEQ ID NO: 3771288 - DNA, 25 bp, Homo sapien
agcttttccccctcaagtctctgtg

SEQ ID NO: 3771289 - DNA, 25 bp, Homo sapien
ctgtaatgcccagaatacgtaagtt

SEQ ID NO: 3771290 - DNA, 25 bp, Homo sapien
tgtaatgcccagaatacgtaagttg

SEQ ID NO: 3771291 - DNA, 25 bp, Homo sapien
taaacaaggtaatcagcatcttccc

SEQ ID NO: 3771292 - DNA, 25 bp, Homo sapien
gcatcttcccaaggttcaatctctg

SEQ ID NO: 3771293 - DNA, 25 bp, Homo sapien
tgtgactttgtaaacaaggtaatca

SEQ ID NO: 3771294 - DNA, 25 bp, Homo sapien
ggttcaatctctgcaccttctcgtc

SEQ ID NO: 3771295 - DNA, 25 bp, Homo sapien
caagtttgagtgctacatcctggtc

SEQ ID NO: 3771296 - DNA, 25 bp, Homo sapien
ttgagtgctacatcctggtctgaat

SEQ ID NO: 3771297 - DNA, 25 bp, Homo sapien
ctgggcaagtttgagtgctacatcc

SEQ ID NO: 3771298 - DNA, 25 bp, Homo sapien
gcaactatttcagctcgctcctggg

SEQ ID NO: 3771299 - DNA, 25 bp, Homo sapien
tttttccctcttctgctgtccaatt

SEQ ID NO: 3771300 - DNA, 25 bp, Homo sapien
ttttccctcttctgctgtccaattt

SEQ ID NO: 3771301 - DNA, 25 bp, Homo sapien
ccctcttctgctgtccaattttaaa

SEQ ID NO: 3771302 - DNA, 25 bp, Homo sapien
ttccctcttctgctgtccaatttta

SEQ ID NO: 3771303 - DNA, 25 bp, Homo sapien
ggccttgggaattaacaacagcttc

SEQ ID NO: 3771304 - DNA, 25 bp, Homo sapien
gccttgggaattaacaacagcttca

SEQ ID NO: 3771305 - DNA, 25 bp, Homo sapien
tgtgagataatcagtctggccttgg

SEQ ID NO: 3771306 - DNA, 25 bp, Homo sapien
agagtaacttatctattccaagatt

SEQ ID NO: 3771307 - DNA, 25 bp, Homo sapien
gtaacttatctattccaagatttca

SEQ ID NO: 3771308 - DNA, 25 bp, Homo sapien
gagtaacttatctattccaagattt

SEQ ID NO: 3771309 - DNA, 25 bp, Homo sapien
agtaacttatctattccaagatttc

SEQ ID NO: 3771310 - DNA, 25 bp, Homo sapien
aacagcggcttgaaagaagcagctt

SEQ ID NO: 3771311 - DNA, 25 bp, Homo sapien
aacaaacagcggcttgaaagaagca

SEQ ID NO: 3771312 - DNA, 25 bp, Homo sapien
tccgctaacaaacagcggcttgaaa

SEQ ID NO: 3771313 - DNA, 25 bp, Homo sapien
gcattccatccgctaacaaacagcg

SEQ ID NO: 3771314 - DNA, 25 bp, Homo sapien
gccatgctctagatccaaggctgga

SEQ ID NO: 3771315 - DNA, 25 bp, Homo sapien
ccactggtggtcctgtaggaagaac

SEQ ID NO: 3771316 - DNA, 25 bp, Homo sapien
gttctgaaatagcaccctgggaaag

SEQ ID NO: 3771317 - DNA, 25 bp, Homo sapien
ggaacctaaaggctacatacaccag

SEQ ID NO: 3771318 - DNA, 25 bp, Homo sapien
tggcctctgggtgtgcccacttgta

SEQ ID NO: 3771319 - DNA, 25 bp, Homo sapien
tataaatgcccagttgccaagcaag

SEQ ID NO: 3771320 - DNA, 25 bp, Homo sapien
tttccctatggtgagcactgccggg

SEQ ID NO: 3771321 - DNA, 25 bp, Homo sapien
tattttatacatagagcaccttgcg

SEQ ID NO: 3771322 - DNA, 25 bp, Homo sapien
cacaggctccctttcgttgtggaaa

SEQ ID NO: 3771323 - DNA, 25 bp, Homo sapien
tctcctactcgcagagctgcacagg

SEQ ID NO: 3771324 - DNA, 25 bp, Homo sapien
gctgggtgtgcttccatcacgcttc

SEQ ID NO: 3771325 - DNA, 25 bp, Homo sapien
catctgctgtgtttgtgctccaacc

SEQ ID NO: 3771326 - DNA, 25 bp, Homo sapien
gcagcagctgcgtcgacagtaacgt

SEQ ID NO: 3771327 - DNA, 25 bp, Homo sapien
aatactcacccctcacaactgggta

SEQ ID NO: 3771328 - DNA, 25 bp, Homo sapien
cagggccccgagcttctaacatgtc

SEQ ID NO: 3771329 - DNA, 25 bp, Homo sapien
ccccagcaacaggaatggctatttg

SEQ ID NO: 3771330 - DNA, 25 bp, Homo sapien
tatgtactgatttggattcgtcccc

SEQ ID NO: 3771331 - DNA, 25 bp, Homo sapien
ggagattaaatctaggtgaacagaa

SEQ ID NO: 3771332 - DNA, 25 bp, Homo sapien
cgtccccaagatatactgtaagcaa

SEQ ID NO: 3771333 - DNA, 25 bp, Homo sapien
cagggcaaggctcagaatagttaca

SEQ ID NO: 3771334 - DNA, 25 bp, Homo sapien
ttcttataggacttgccttcagttg

SEQ ID NO: 3771335 - DNA, 25 bp, Homo sapien
tcttataggacttgccttcagttgg

SEQ ID NO: 3771336 - DNA, 25 bp, Homo sapien
tttttcttataggacttgccttcag

SEQ ID NO: 3771337 - DNA, 25 bp, Homo sapien
tggatttttcttataggacttgcct

SEQ ID NO: 3771338 - DNA, 25 bp, Homo sapien
gtttcagtctcataatctataaaag

SEQ ID NO: 3771339 - DNA, 25 bp, Homo sapien
acttttctaacaaataatgtctgga

SEQ ID NO: 3771340 - DNA, 25 bp, Homo sapien
ttccccaaatcgacagccaataatt

SEQ ID NO: 3771341 - DNA, 25 bp, Homo sapien
ttgggcaagtcacaacctgcacaag

SEQ ID NO: 3771342 - DNA, 25 bp, Homo sapien
ttgaaggtgttctatcagactccac

SEQ ID NO: 3771343 - DNA, 25 bp, Homo sapien
tgttccaaacagcaggcctatctag

SEQ ID NO: 3771344 - DNA, 25 bp, Homo sapien
tttcagtctgtggtaatcaagccca

SEQ ID NO: 3771345 - DNA, 25 bp, Homo sapien
tcctaaccgaccttgagcctcaatg

SEQ ID NO: 3771346 - DNA, 25 bp, Homo sapien
cacaaagtacaacctaagcctggat

SEQ ID NO: 3771347 - DNA, 25 bp, Homo sapien
aaatttacacatagggcatccacgc

SEQ ID NO: 3771348 - DNA, 25 bp, Homo sapien
tgcaaaattgggataccaccacacc

SEQ ID NO: 3771349 - DNA, 25 bp, Homo sapien
tgttccaatagtgcaccagtcctga

SEQ ID NO: 3771350 - DNA, 25 bp, Homo sapien
ggtgacaccaacttcagatttcccc

SEQ ID NO: 3771351 - DNA, 25 bp, Homo sapien
acaggtgacaccaacttcagatttc

SEQ ID NO: 3771352 - DNA, 25 bp, Homo sapien
caggtgacaccaacttcagatttcc

SEQ ID NO: 3771353 - DNA, 25 bp, Homo sapien
tgacaccaacttcagatttcccctt

SEQ ID NO: 3771354 - DNA, 25 bp, Homo sapien
tcagaagtgcaagagagccagggtc

SEQ ID NO: 3771355 - DNA, 25 bp, Homo sapien
catttccaaggcgaggcttcccatg

SEQ ID NO: 3771356 - DNA, 25 bp, Homo sapien
tggtaactgccatcgtgaatctagc

SEQ ID NO: 3771357 - DNA, 25 bp, Homo sapien
aacctgtggtgatgaaactcttctg

SEQ ID NO: 3771358 - DNA, 25 bp, Homo sapien
caggcaagctcatgaaccaccgaat

SEQ ID NO: 3771359 - DNA, 25 bp, Homo sapien
tttctcacgtgaagttaatagcccg

SEQ ID NO: 3771360 - DNA, 25 bp, Homo sapien
tttaagaatgtagcatccaggccgg

SEQ ID NO: 3771361 - DNA, 25 bp, Homo sapien
tagagaaacaaataccaggcaagct

SEQ ID NO: 3771362 - DNA, 25 bp, Homo sapien
gccaatatggacaggagtggagagg

SEQ ID NO: 3771363 - DNA, 25 bp, Homo sapien
aagccaatatggacaggagtggaga

SEQ ID NO: 3771364 - DNA, 25 bp, Homo sapien
tgaagccaatatggacaggagtgga

SEQ ID NO: 3771365 - DNA, 25 bp, Homo sapien
gaagccaatatggacaggagtggag

SEQ ID NO: 3771366 - DNA, 25 bp, Homo sapien
gagatcagaagagcaatatcagcaa

SEQ ID NO: 3771367 - DNA, 25 bp, Homo sapien
ttgaaacagactgctatccacagag

SEQ ID NO: 3771368 - DNA, 25 bp, Homo sapien
gcaggcactgtgtgagtccctcata

SEQ ID NO: 3771369 - DNA, 25 bp, Homo sapien
tagttttccaagtacaaatgagctg

SEQ ID NO: 3771370 - DNA, 25 bp, Homo sapien
gcgcgcgcgcgtgcttgtatgcaaa

SEQ ID NO: 3771371 - DNA, 25 bp, Homo sapien
gacactgtaattcaagaggttacca

SEQ ID NO: 3771372 - DNA, 25 bp, Homo sapien
catagggaggcattatgaattgaca

SEQ ID NO: 3771373 - DNA, 25 bp, Homo sapien
gaaaatctctaaaagctagtcacag

SEQ ID NO: 3771374 - DNA, 25 bp, Homo sapien
gaaaaattcaatcatatttagcata

SEQ ID NO: 3771375 - DNA, 25 bp, Homo sapien
aaattcaatcatatttagcatactt

SEQ ID NO: 3771376 - DNA, 25 bp, Homo sapien
aaaattcaatcatatttagcatact

SEQ ID NO: 3771377 - DNA, 25 bp, Homo sapien
aaaaattcaatcatatttagcatac

SEQ ID NO: 3771378 - DNA, 25 bp, Homo sapien
gatccttttcagataccataatata

SEQ ID NO: 3771379 - DNA, 25 bp, Homo sapien
atccttttcagataccataatatat

SEQ ID NO: 3771380 - DNA, 25 bp, Homo sapien
ttacaatctgcaagacttgaatcat

SEQ ID NO: 3771381 - DNA, 25 bp, Homo sapien
tgctagttaacaagccaaagactcc

SEQ ID NO: 3771382 - DNA, 25 bp, Homo sapien
tcaagaggcaaaggcggaaggatcc

SEQ ID NO: 3771383 - DNA, 25 bp, Homo sapien
tactaggtacttgctaggtacatgc

SEQ ID NO: 3771384 - DNA, 25 bp, Homo sapien
tagaagtggttctaaccggcatact

SEQ ID NO: 3771385 - DNA, 25 bp, Homo sapien
gatatagacacccttcatcaggtta

SEQ ID NO: 3771386 - DNA, 25 bp, Homo sapien
tgtttcctgtaatgtagcatatttc

SEQ ID NO: 3771387 - DNA, 25 bp, Homo sapien
tgtagcatatttcataactaataca

SEQ ID NO: 3771388 - DNA, 25 bp, Homo sapien
tgcatttggaatcatggtactttgg

SEQ ID NO: 3771389 - DNA, 25 bp, Homo sapien
tggaaaatcagactctgagcaacac

SEQ ID NO: 3771390 - DNA, 25 bp, Homo sapien
taatccttggttccatctgagaaaa

SEQ ID NO: 3771391 - DNA, 25 bp, Homo sapien
tgaaatgcacatcatactaacagca

SEQ ID NO: 3771392 - DNA, 25 bp, Homo sapien
gcatcatacagtacgttttccacaa

SEQ ID NO: 3771393 - DNA, 25 bp, Homo sapien
catagccacagtttgagtataacaa

SEQ ID NO: 3771394 - DNA, 25 bp, Homo sapien
taacctttggtacagtagtctacta

SEQ ID NO: 3771395 - DNA, 25 bp, Homo sapien
gacagatcgctctaatactccctaa

SEQ ID NO: 3771396 - DNA, 25 bp, Homo sapien
gattcagagggagcttggaaagaac

SEQ ID NO: 3771397 - DNA, 25 bp, Homo sapien
gacacacttgatcacgaccatttgg

SEQ ID NO: 3771398 - DNA, 25 bp, Homo sapien
ctggaaatgggtctgaatgttgtcc

SEQ ID NO: 3771399 - DNA, 25 bp, Homo sapien
tggaaatgggtctgaatgttgtccc

SEQ ID NO: 3771400 - DNA, 25 bp, Homo sapien
gaaatgggtctgaatgttgtcccaa

SEQ ID NO: 3771401 - DNA, 25 bp, Homo sapien
gactggaaatgggtctgaatgttgt

SEQ ID NO: 3771402 - DNA, 25 bp, Homo sapien
ccaaaatctgctgtccaaggtttct

SEQ ID NO: 3771403 - DNA, 25 bp, Homo sapien
tccaaggtttctcagaggaatacat

SEQ ID NO: 3771404 - DNA, 25 bp, Homo sapien
aaatctgctgtccaaggtttctcag

SEQ ID NO: 3771405 - DNA, 25 bp, Homo sapien
tgctgtccaaggtttctcagaggaa

SEQ ID NO: 3771406 - DNA, 25 bp, Homo sapien
gcatgctgaagtctacggtctaaaa

SEQ ID NO: 3771407 - DNA, 25 bp, Homo sapien
tgggtacggccctaattcaacaagc

SEQ ID NO: 3771408 - DNA, 25 bp, Homo sapien
ttcccagtccaaagaaggcatgctg

SEQ ID NO: 3771409 - DNA, 25 bp, Homo sapien
ggtctaaaaagcatctatctgcgga

SEQ ID NO: 3771410 - DNA, 25 bp, Homo sapien
tcaaattacagaaacgtgcacccat

SEQ ID NO: 3771411 - DNA, 25 bp, Homo sapien
ggattcctacgcgtcccgcattttc

SEQ ID NO: 3771412 - DNA, 25 bp, Homo sapien
cgtgcacccatggattcctacgcgt

SEQ ID NO: 3771413 - DNA, 25 bp, Homo sapien
cgcgtcccgcattttctagcagtaa

SEQ ID NO: 3771414 - DNA, 25 bp, Homo sapien
gaaccgttttcacgcattacaaatg

SEQ ID NO: 3771415 - DNA, 25 bp, Homo sapien
ctgcgaggaaccgttttcacgcatt

SEQ ID NO: 3771416 - DNA, 25 bp, Homo sapien
ttttcacgcattacaaatgccgcac

SEQ ID NO: 3771417 - DNA, 25 bp, Homo sapien
gaggaaccgttttcacgcattacaa

SEQ ID NO: 3771418 - DNA, 25 bp, Homo sapien
ggttgtgagcgccaaactattttgc

SEQ ID NO: 3771419 - DNA, 25 bp, Homo sapien
aaactttgcaaaggcgcacggattt

SEQ ID NO: 3771420 - DNA, 25 bp, Homo sapien
aagacttgcagatctctcattcgcc

SEQ ID NO: 3771421 - DNA, 25 bp, Homo sapien
ggcgcacggatttccaagacttgca

SEQ ID NO: 3771422 - DNA, 25 bp, Homo sapien
catcaaggcagtcatttaaaggcac

SEQ ID NO: 3771423 - DNA, 25 bp, Homo sapien
aaagttccgcggcatcaaggcagtc

SEQ ID NO: 3771424 - DNA, 25 bp, Homo sapien
ggcacgaagtttgcccgggtcctgc

SEQ ID NO: 3771425 - DNA, 25 bp, Homo sapien
gtccaaacaaagttccgcggcatca

SEQ ID NO: 3771426 - DNA, 25 bp, Homo sapien
gtcccgggcggccgagcagatccgg

SEQ ID NO: 3771427 - DNA, 25 bp, Homo sapien
tcccgggcggccgagcagatccggc

SEQ ID NO: 3771428 - DNA, 25 bp, Homo sapien
ctcagtacggtcccgactgctaggc

SEQ ID NO: 3771429 - DNA, 25 bp, Homo sapien
cgggcggccgagcagatccggcgcg

SEQ ID NO: 3771430 - DNA, 25 bp, Homo sapien
agaggatcccggcgaagccgagccc

SEQ ID NO: 3771431 - DNA, 25 bp, Homo sapien
caggaagttccccggcgcgacacct

SEQ ID NO: 3771432 - DNA, 25 bp, Homo sapien
gcagtgccctccgccccattgtttc

SEQ ID NO: 3771433 - DNA, 25 bp, Homo sapien
ttccccggcgcgacacctcctgccg

SEQ ID NO: 3771434 - DNA, 25 bp, Homo sapien
gcccccgcctcccagggcggctcgc

SEQ ID NO: 3771435 - DNA, 25 bp, Homo sapien
gcgcctccggccccgcccgcctcac

SEQ ID NO: 3771436 - DNA, 25 bp, Homo sapien
cccgcctcccagggcggctcgcccg

SEQ ID NO: 3771437 - DNA, 25 bp, Homo sapien
gcctcccagggcggctcgcccggga

SEQ ID NO: 3771438 - DNA, 25 bp, Homo sapien
gagaaacgactcttggtttcattca

SEQ ID NO: 3771439 - DNA, 25 bp, Homo sapien
attttttcagagaaacgactcttgg

SEQ ID NO: 3771440 - DNA, 25 bp, Homo sapien
tctagatccataaggtgtaaagtga

SEQ ID NO: 3771441 - DNA, 25 bp, Homo sapien
gttaatgtagataaaggttggtcaa

SEQ ID NO: 3771442 - DNA, 25 bp, Homo sapien
ctagagcccattgtctttgaccgcc

SEQ ID NO: 3771443 - DNA, 25 bp, Homo sapien
tccttgtggatttccggctctctcg

SEQ ID NO: 3771444 - DNA, 25 bp, Homo sapien
gtggatttccggctctctcgtaggc

SEQ ID NO: 3771445 - DNA, 25 bp, Homo sapien
gtctttgaccgccatgtgccctttg

SEQ ID NO: 3771446 - DNA, 25 bp, Homo sapien
tgatctctctgaggcttgaaacaat

SEQ ID NO: 3771447 - DNA, 25 bp, Homo sapien
ctctctgaggcttgaaacaatgtac

SEQ ID NO: 3771448 - DNA, 25 bp, Homo sapien
cttgatctctctgaggcttgaaaca

SEQ ID NO: 3771449 - DNA, 25 bp, Homo sapien
atctctctgaggcttgaaacaatgt

SEQ ID NO: 3771450 - DNA, 25 bp, Homo sapien
gtctgtcatccgggccagagtgcag

SEQ ID NO: 3771451 - DNA, 25 bp, Homo sapien
gggattacaggtgcctgctaccgcg

SEQ ID NO: 3771452 - DNA, 25 bp, Homo sapien
ttacaggtgcctgctaccgcgcccg

SEQ ID NO: 3771453 - DNA, 25 bp, Homo sapien
gattacaggtgcctgctaccgcgcc

SEQ ID NO: 3771454 - DNA, 25 bp, Homo sapien
gatggttgcgccattatcttgatac

SEQ ID NO: 3771455 - DNA, 25 bp, Homo sapien
gcataaaatctgagtgaccgcaaat

SEQ ID NO: 3771456 - DNA, 25 bp, Homo sapien
cacgaggtctgcgaaccctctctta

SEQ ID NO: 3771457 - DNA, 25 bp, Homo sapien
cccaggaattgactgtgtaccaaag

SEQ ID NO: 3771458 - DNA, 25 bp, Homo sapien
acaggcgccaatctcacactgcggt

SEQ ID NO: 3771459 - DNA, 25 bp, Homo sapien
caggcgccaatctcacactgcggtg

SEQ ID NO: 3771460 - DNA, 25 bp, Homo sapien
gacaggcgccaatctcacactgcgg

SEQ ID NO: 3771461 - DNA, 25 bp, Homo sapien
taatgatgttgaagtgccaggtggc

SEQ ID NO: 3771462 - DNA, 25 bp, Homo sapien
catgatggcttgtgtggtacacaca

SEQ ID NO: 3771463 - DNA, 25 bp, Homo sapien
taccgccaatcagcccgagaggctt

SEQ ID NO: 3771464 - DNA, 25 bp, Homo sapien
gcttgtctgctttcatgtgccactg

SEQ ID NO: 3771465 - DNA, 25 bp, Homo sapien
tgtctcctccaaggtatagctgatg

SEQ ID NO: 3771466 - DNA, 25 bp, Homo sapien
ggatcctcctgcattctggatttgc

SEQ ID NO: 3771467 - DNA, 25 bp, Homo sapien
gctgatgttcttcaatatgattgca

SEQ ID NO: 3771468 - DNA, 25 bp, Homo sapien
gactgagacaagtggacggtgtttg

SEQ ID NO: 3771469 - DNA, 25 bp, Homo sapien
ttgacaagctcaggacatcacagcc

SEQ ID NO: 3771470 - DNA, 25 bp, Homo sapien
tcaggacatcacagcctcgaaaacc

SEQ ID NO: 3771471 - DNA, 25 bp, Homo sapien
ctcgaaaacccacacagcgggtcag

SEQ ID NO: 3771472 - DNA, 25 bp, Homo sapien
aagctcaggacatcacagcctcgaa

SEQ ID NO: 3771473 - DNA, 25 bp, Homo sapien
agtgctagcctgtttagtatggcaa

SEQ ID NO: 3771474 - DNA, 25 bp, Homo sapien
ttagtatggcaagggcttggtctct

SEQ ID NO: 3771475 - DNA, 25 bp, Homo sapien
ctagcctgtttagtatggcaagggc

SEQ ID NO: 3771476 - DNA, 25 bp, Homo sapien
cctgtttagtatggcaagggcttgg

SEQ ID NO: 3771477 - DNA, 25 bp, Homo sapien
acacttcaccgcagcacagctcaac

SEQ ID NO: 3771478 - DNA, 25 bp, Homo sapien
aagaacacaaaacacttcaccgcag

SEQ ID NO: 3771479 - DNA, 25 bp, Homo sapien
acaaaacacttcaccgcagcacagc

SEQ ID NO: 3771480 - DNA, 25 bp, Homo sapien
gaacacaaaacacttcaccgcagca

SEQ ID NO: 3771481 - DNA, 25 bp, Homo sapien
tactgaactggcttctgaacaagtc

SEQ ID NO: 3771482 - DNA, 25 bp, Homo sapien
agtcatccaggagagattttgcgaa

SEQ ID NO: 3771483 - DNA, 25 bp, Homo sapien
cttagtgggtccacggcatctgtgg

SEQ ID NO: 3771484 - DNA, 25 bp, Homo sapien
ttttgcgaacgcagcttctcccagg

SEQ ID NO: 3771485 - DNA, 25 bp, Homo sapien
cctcacaggatgtttgacataaaat

SEQ ID NO: 3771486 - DNA, 25 bp, Homo sapien
tggtgaagcatagaagggcccttca

SEQ ID NO: 3771487 - DNA, 25 bp, Homo sapien
ggttaaaatggtgaagcatagaagg

SEQ ID NO: 3771488 - DNA, 25 bp, Homo sapien
atagaagggcccttcatcctcacag

SEQ ID NO: 3771489 - DNA, 25 bp, Homo sapien
ccagagtctcacttcctccattcat

SEQ ID NO: 3771490 - DNA, 25 bp, Homo sapien
ttcatccagagtctcacttcctcca

SEQ ID NO: 3771491 - DNA, 25 bp, Homo sapien
ctgctcctgtttcatccagagtctc

SEQ ID NO: 3771492 - DNA, 25 bp, Homo sapien
gctcctgtttcatccagagtctcac

SEQ ID NO: 3771493 - DNA, 25 bp, Homo sapien
cacgcccagccggattgcaatttta

SEQ ID NO: 3771494 - DNA, 25 bp, Homo sapien
aagatattgggggaacagtgctccc

SEQ ID NO: 3771495 - DNA, 25 bp, Homo sapien
gtgctccccgagacatctgggcagc

SEQ ID NO: 3771496 - DNA, 25 bp, Homo sapien
gcataatcagagaggcttaatggaa

SEQ ID NO: 3771497 - DNA, 25 bp, Homo sapien
tcagcggctgtgaattcagcctcat

SEQ ID NO: 3771498 - DNA, 25 bp, Homo sapien
tcagtgccagagaacaacacgcttc

SEQ ID NO: 3771499 - DNA, 25 bp, Homo sapien
aaacaaggaggcgtgttagagagcc

SEQ ID NO: 3771500 - DNA, 25 bp, Homo sapien
aacttcaaggtcttttggagcaatg

SEQ ID NO: 3771501 - DNA, 25 bp, Homo sapien
ccacaatgctggctcattattttcc

SEQ ID NO: 3771502 - DNA, 25 bp, Homo sapien
atccactctgccgtttcaagcttga

SEQ ID NO: 3771503 - DNA, 25 bp, Homo sapien
aatccaagggacaagtggtacagcc

SEQ ID NO: 3771504 - DNA, 25 bp, Homo sapien
gaagagaaaatccactctgccgttt

SEQ ID NO: 3771505 - DNA, 25 bp, Homo sapien
cttcagttcccctttaattgtcaat

SEQ ID NO: 3771506 - DNA, 25 bp, Homo sapien
atgtgaacttcagttcccctttaat

SEQ ID NO: 3771507 - DNA, 25 bp, Homo sapien
cagagtaacttgagagtcagtggtc

SEQ ID NO: 3771508 - DNA, 25 bp, Homo sapien
cctagtgactactggaatagatgca

SEQ ID NO: 3771509 - DNA, 25 bp, Homo sapien
taaatcaagaacaggcctagtgact

SEQ ID NO: 3771510 - DNA, 25 bp, Homo sapien
gccagactaggatattctgctaaaa

SEQ ID NO: 3771511 - DNA, 25 bp, Homo sapien
ttcatcctcagaacagtcagacagc

SEQ ID NO: 3771512 - DNA, 25 bp, Homo sapien
gaacagtcagacagcctctgatccc

SEQ ID NO: 3771513 - DNA, 25 bp, Homo sapien
aaaggcaaggctgtctcttcatcct

SEQ ID NO: 3771514 - DNA, 25 bp, Homo sapien
tcaaaggcaaggctgtctcttcatc

SEQ ID NO: 3771515 - DNA, 25 bp, Homo sapien
ttaggatcgagtctctccttgttcc

SEQ ID NO: 3771516 - DNA, 25 bp, Homo sapien
tgcactgaggttgcaagagtgcatt

SEQ ID NO: 3771517 - DNA, 25 bp, Homo sapien
taggatcgagtctctccttgttcct

SEQ ID NO: 3771518 - DNA, 25 bp, Homo sapien
cttggtgcactgaggttgcaagagt

SEQ ID NO: 3771519 - DNA, 25 bp, Homo sapien
gctgcaaagcccagataggaattag

SEQ ID NO: 3771520 - DNA, 25 bp, Homo sapien
cagcaaacacgggaagaagcagctc

SEQ ID NO: 3771521 - DNA, 25 bp, Homo sapien
ataggaattaggatccactttccag

SEQ ID NO: 3771522 - DNA, 25 bp, Homo sapien
cttcgagtgaagtaatctgagaaca

SEQ ID NO: 3771523 - DNA, 25 bp, Homo sapien
tgaagggttcctgtattccagcacg

SEQ ID NO: 3771524 - DNA, 25 bp, Homo sapien
ctttataaaatcagtgcgcctctga

SEQ ID NO: 3771525 - DNA, 25 bp, Homo sapien
tgtattccagcacgtgtcctcttgg

SEQ ID NO: 3771526 - DNA, 25 bp, Homo sapien
aatcagtgcgcctctgaagggttcc

SEQ ID NO: 3771527 - DNA, 25 bp, Homo sapien
agggcccacaaagagacagtatcgg

SEQ ID NO: 3771528 - DNA, 25 bp, Homo sapien
ccagacagtgcctgaatgattcgct

SEQ ID NO: 3771529 - DNA, 25 bp, Homo sapien
acatgaaactgggaggaacaaggca

SEQ ID NO: 3771530 - DNA, 25 bp, Homo sapien
ggaagggagatatttgaagtaatca

SEQ ID NO: 3771531 - DNA, 25 bp, Homo sapien
gcatcgcctaggaaaccagaacctg

SEQ ID NO: 3771532 - DNA, 25 bp, Homo sapien
gcctaggaaaccagaacctgctgga

SEQ ID NO: 3771533 - DNA, 25 bp, Homo sapien
ccatctccggcatcgcctaggaaac

SEQ ID NO: 3771534 - DNA, 25 bp, Homo sapien
tccggcatcgcctaggaaaccagaa

SEQ ID NO: 3771535 - DNA, 25 bp, Homo sapien
gtaaataaaggagccatctgtgacc

SEQ ID NO: 3771536 - DNA, 25 bp, Homo sapien
aagctcatcgaagacagccgtccaa

SEQ ID NO: 3771537 - DNA, 25 bp, Homo sapien
gctggcaggcggtttgtctgtccaa

SEQ ID NO: 3771538 - DNA, 25 bp, Homo sapien
tggaaagtggaccaagggtgaacac

SEQ ID NO: 3771539 - DNA, 25 bp, Homo sapien
gattatctgccaaggtgcgagtgag

SEQ ID NO: 3771540 - DNA, 25 bp, Homo sapien
gtgcccagtaggtatgatgaaagga

SEQ ID NO: 3771541 - DNA, 25 bp, Homo sapien
cccagtaggtatgatgaaaggatta

SEQ ID NO: 3771542 - DNA, 25 bp, Homo sapien
atgaaaggattatctgccaaggtgc

SEQ ID NO: 3771543 - DNA, 25 bp, Homo sapien
agccagctggaggaataagcccact

SEQ ID NO: 3771544 - DNA, 25 bp, Homo sapien
cagctggaggaataagcccactgac

SEQ ID NO: 3771545 - DNA, 25 bp, Homo sapien
tcccctgctaggtgggaagccagct

SEQ ID NO: 3771546 - DNA, 25 bp, Homo sapien
cagggatatcccctgctaggtggga

SEQ ID NO: 3771547 - DNA, 25 bp, Homo sapien
ggccagagaacctgttgctcgtttc

SEQ ID NO: 3771548 - DNA, 25 bp, Homo sapien
ctggcacacggtactttcaatccat

SEQ ID NO: 3771549 - DNA, 25 bp, Homo sapien
tccttggcctcacccggaagccagg

SEQ ID NO: 3771550 - DNA, 25 bp, Homo sapien
gaacctgttgctcgtttcagagatc

SEQ ID NO: 3771551 - DNA, 25 bp, Homo sapien
gtaactccaagaacacgtggaacaa

SEQ ID NO: 3771552 - DNA, 25 bp, Homo sapien
aagaacacgtggaacaaggctgtgc

SEQ ID NO: 3771553 - DNA, 25 bp, Homo sapien
actccaagaacacgtggaacaaggc

SEQ ID NO: 3771554 - DNA, 25 bp, Homo sapien
ccaagaacacgtggaacaaggctgt

SEQ ID NO: 3771555 - DNA, 25 bp, Homo sapien
tgggacctcggccatccaaaactca

SEQ ID NO: 3771556 - DNA, 25 bp, Homo sapien
gggccagagcctacgagcagccaaa

SEQ ID NO: 3771557 - DNA, 25 bp, Homo sapien
gaggctgcttgggacctcggccatc

SEQ ID NO: 3771558 - DNA, 25 bp, Homo sapien
aagggccagagcctacgagcagcca

SEQ ID NO: 3771559 - DNA, 25 bp, Homo sapien
agcaatgcacgctctctgttgcagt

SEQ ID NO: 3771560 - DNA, 25 bp, Homo sapien
attcagcctgctggaagctacctgt

SEQ ID NO: 3771561 - DNA, 25 bp, Homo sapien
gcctgctggaagctacctgtcccat

SEQ ID NO: 3771562 - DNA, 25 bp, Homo sapien
tgttgcagtgcaaaagatgcattca

SEQ ID NO: 3771563 - DNA, 25 bp, Homo sapien
cgtgactcagtgtgcttgacgaaca

SEQ ID NO: 3771564 - DNA, 25 bp, Homo sapien
cggtggcagggcgtgactcagtgtg

SEQ ID NO: 3771565 - DNA, 25 bp, Homo sapien
tgcttgacgaacatggtgttgtcat

SEQ ID NO: 3771566 - DNA, 25 bp, Homo sapien
tcagtgtgcttgacgaacatggtgt

SEQ ID NO: 3771567 - DNA, 25 bp, Homo sapien
ttccatggattgtgcaagttcaaag

SEQ ID NO: 3771568 - DNA, 25 bp, Homo sapien
catgatttgcacgtgtgggaattgg

SEQ ID NO: 3771569 - DNA, 25 bp, Homo sapien
gggatccccatgatttgcacgtgtg

SEQ ID NO: 3771570 - DNA, 25 bp, Homo sapien
caattccatggattgtgcaagttca

SEQ ID NO: 3771571 - DNA, 25 bp, Homo sapien
agcttctagggaggcctcaggaagc

SEQ ID NO: 3771572 - DNA, 25 bp, Homo sapien
ggcctcaggaagcttccggtcatgg

SEQ ID NO: 3771573 - DNA, 25 bp, Homo sapien
cagcttctagggaggcctcaggaag

SEQ ID NO: 3771574 - DNA, 25 bp, Homo sapien
caggaagcttccggtcatggcagaa

SEQ ID NO: 3771575 - DNA, 25 bp, Homo sapien
ggagaagcctgctagccacctagaa

SEQ ID NO: 3771576 - DNA, 25 bp, Homo sapien
cgggaaccgtgtcttcatcctgagt

SEQ ID NO: 3771577 - DNA, 25 bp, Homo sapien
gcagcagagacatgtggcacaggaa

SEQ ID NO: 3771578 - DNA, 25 bp, Homo sapien
tgaaaaggtagcaaagacacatctg

SEQ ID NO: 3771579 - DNA, 25 bp, Homo sapien
caagattcagtaagttctatcgact

SEQ ID NO: 3771580 - DNA, 25 bp, Homo sapien
taagttctatcgacttctgcctggg

SEQ ID NO: 3771581 - DNA, 25 bp, Homo sapien
cttctgcctgggtaatgcggtggcc

SEQ ID NO: 3771582 - DNA, 25 bp, Homo sapien
tgcggtggccgtccacctgcatgtc

SEQ ID NO: 3771583 - DNA, 25 bp, Homo sapien
cacgctcaaactgggggctgcaggc

SEQ ID NO: 3771584 - DNA, 25 bp, Homo sapien
acgctcaaactgggggctgcaggct

SEQ ID NO: 3771585 - DNA, 25 bp, Homo sapien
gcagcgccctcggagcgcccagcac

SEQ ID NO: 3771586 - DNA, 25 bp, Homo sapien
agcagcgccctcggagcgcccagca

SEQ ID NO: 3771587 - DNA, 25 bp, Homo sapien
caggcagcgcgatcctgcggcgtct

SEQ ID NO: 3771588 - DNA, 25 bp, Homo sapien
tctggccatcccgaatgctatggcc

SEQ ID NO: 3771589 - DNA, 25 bp, Homo sapien
cgtcgccgtcttgcgggccttcggg

SEQ ID NO: 3771590 - DNA, 25 bp, Homo sapien
atcccgaatgctatggccgccgtcg

SEQ ID NO: 3771591 - DNA, 25 bp, Homo sapien
ctggctgagagatccttggagagct

SEQ ID NO: 3771592 - DNA, 25 bp, Homo sapien
gccatgcagtaacatgggtatccgt

SEQ ID NO: 3771593 - DNA, 25 bp, Homo sapien
tgagctctgcccagtaggtcatact

SEQ ID NO: 3771594 - DNA, 25 bp, Homo sapien
atccgtttctgtccgccctggctga

SEQ ID NO: 3771595 - DNA, 25 bp, Homo sapien
tgacatcggaaataacttgagcttg

SEQ ID NO: 3771596 - DNA, 25 bp, Homo sapien
tcgcagatttgacatcggaaataac

SEQ ID NO: 3771597 - DNA, 25 bp, Homo sapien
aggaaatagacactcgcagatttga

SEQ ID NO: 3771598 - DNA, 25 bp, Homo sapien
gacactcgcagatttgacatcggaa

SEQ ID NO: 3771599 - DNA, 25 bp, Homo sapien
tattgggccggaatgatcaggcctc

SEQ ID NO: 3771600 - DNA, 25 bp, Homo sapien
ggagcaaaacccctgagttctggag

SEQ ID NO: 3771601 - DNA, 25 bp, Homo sapien
gcctccgtcagtcatgacacagctg

SEQ ID NO: 3771602 - DNA, 25 bp, Homo sapien
gctgaaatggccattggaatgcctc

SEQ ID NO: 3771603 - DNA, 25 bp, Homo sapien
gcagcagctgggctcacaagtcctc

SEQ ID NO: 3771604 - DNA, 25 bp, Homo sapien
ctgaggggtggcagcggaggcagca

SEQ ID NO: 3771605 - DNA, 25 bp, Homo sapien
tgaggggtggcagcggaggcagcag

SEQ ID NO: 3771606 - DNA, 25 bp, Homo sapien
gaggcagcagctgggctcacaagtc

SEQ ID NO: 3771607 - DNA, 25 bp, Homo sapien
cagggcctttgcccagagagtcagc

SEQ ID NO: 3771608 - DNA, 25 bp, Homo sapien
tcagaggagggaatgccgtgagccc

SEQ ID NO: 3771609 - DNA, 25 bp, Homo sapien
ctcagaggagggaatgccgtgagcc

SEQ ID NO: 3771610 - DNA, 25 bp, Homo sapien
ccagccgctcccctccatgtagccc

SEQ ID NO: 3771611 - DNA, 25 bp, Homo sapien
ggggccgacagcgagaggaatcgga

SEQ ID NO: 3771612 - DNA, 25 bp, Homo sapien
cagacccgggggccgacagcgagag

SEQ ID NO: 3771613 - DNA, 25 bp, Homo sapien
gccgacagcgagaggaatcggagaa

SEQ ID NO: 3771614 - DNA, 25 bp, Homo sapien
tcggagaaggcgcagagcaaacaga

SEQ ID NO: 3771615 - DNA, 25 bp, Homo sapien
tgagcaatggggacacggggtgtaa

SEQ ID NO: 3771616 - DNA, 25 bp, Homo sapien
gggtgtaagcgtggagagaccaagg

SEQ ID NO: 3771617 - DNA, 25 bp, Homo sapien
tggagagggtgagcaatggggacac

SEQ ID NO: 3771618 - DNA, 25 bp, Homo sapien
gacacggggtgtaagcgtggagaga

SEQ ID NO: 3771619 - DNA, 25 bp, Homo sapien
tgcggcaaactcagaatgtgtccca

SEQ ID NO: 3771620 - DNA, 25 bp, Homo sapien
cttgcggcaaactcagaatgtgtcc

SEQ ID NO: 3771621 - DNA, 25 bp, Homo sapien
taagccacttgcggcaaactcagaa

SEQ ID NO: 3771622 - DNA, 25 bp, Homo sapien
gccacttgcggcaaactcagaatgt

SEQ ID NO: 3771623 - DNA, 25 bp, Homo sapien
caagtcctggcagccctgcataggg

SEQ ID NO: 3771624 - DNA, 25 bp, Homo sapien
aagtcctggcagccctgcatagggt

SEQ ID NO: 3771625 - DNA, 25 bp, Homo sapien
tcctggcagccctgcatagggtggg

SEQ ID NO: 3771626 - DNA, 25 bp, Homo sapien
ccgtggccaagtcctggcagccctg

SEQ ID NO: 3771627 - DNA, 25 bp, Homo sapien
gaaatccgactgttctctcaacctc

SEQ ID NO: 3771628 - DNA, 25 bp, Homo sapien
gctctggaatagtcgaaggacaagc

SEQ ID NO: 3771629 - DNA, 25 bp, Homo sapien
caagcgaagaaatccgactgttctc

SEQ ID NO: 3771630 - DNA, 25 bp, Homo sapien
tagtcgaaggacaagcgaagaaatc

SEQ ID NO: 3771631 - DNA, 25 bp, Homo sapien
caggaattcctgcatgctttgatgg

SEQ ID NO: 3771632 - DNA, 25 bp, Homo sapien
ccactaggccaacaaggatgagctc

SEQ ID NO: 3771633 - DNA, 25 bp, Homo sapien
tcccgctgccggaatgataacattc

SEQ ID NO: 3771634 - DNA, 25 bp, Homo sapien
taaagatacacgcaccaggaattcc

SEQ ID NO: 3771635 - DNA, 25 bp, Homo sapien
ttagcgataatccttccacgaacat

SEQ ID NO: 3771636 - DNA, 25 bp, Homo sapien
gcggcaccgggacattgtcttaaaa

SEQ ID NO: 3771637 - DNA, 25 bp, Homo sapien
tgtcttaaaactgtactgcaatttg

SEQ ID NO: 3771638 - DNA, 25 bp, Homo sapien
caatttgtaattagcgataatcctt

SEQ ID NO: 3771639 - DNA, 25 bp, Homo sapien
ctagatccccgcagagagaaaagca

SEQ ID NO: 3771640 - DNA, 25 bp, Homo sapien
tttgtgctagatccccgcagagaga

SEQ ID NO: 3771641 - DNA, 25 bp, Homo sapien
ggcctttgtgctagatccccgcaga

SEQ ID NO: 3771642 - DNA, 25 bp, Homo sapien
gctagatccccgcagagagaaaagc

SEQ ID NO: 3771643 - DNA, 25 bp, Homo sapien
ggcaggtccgtttgagtcgcgccac

SEQ ID NO: 3771644 - DNA, 25 bp, Homo sapien
aaatgagtccacttgaggcagctgc

SEQ ID NO: 3771645 - DNA, 25 bp, Homo sapien
gctgtgcacaggctcgccgaagcca

SEQ ID NO: 3771646 - DNA, 25 bp, Homo sapien
ggcacggtttcctgatcaaatacaa

SEQ ID NO: 3771647 - DNA, 25 bp, Homo sapien
agttttcatccgctttccttattat

SEQ ID NO: 3771648 - DNA, 25 bp, Homo sapien
ttttccgccagtcactgataggata

SEQ ID NO: 3771649 - DNA, 25 bp, Homo sapien
gccagtcactgataggataatccat

SEQ ID NO: 3771650 - DNA, 25 bp, Homo sapien
cttcttttccgccagtcactgatag

SEQ ID NO: 3771651 - DNA, 25 bp, Homo sapien
gcgtcagatcttaattgcttagcct

SEQ ID NO: 3771652 - DNA, 25 bp, Homo sapien
ttgcttagcctgttcaattgctgac

SEQ ID NO: 3771653 - DNA, 25 bp, Homo sapien
gctgactctaacctggcctgttcct

SEQ ID NO: 3771654 - DNA, 25 bp, Homo sapien
tcatattgcatgctagcgtcagatc

SEQ ID NO: 3771655 - DNA, 25 bp, Homo sapien
tgaagatgtgcaaaatgacgacgtc

SEQ ID NO: 3771656 - DNA, 25 bp, Homo sapien
ggctaaaggcttccaaagaagactg

SEQ ID NO: 3771657 - DNA, 25 bp, Homo sapien
tcactcgtgacagttctggctaaag

SEQ ID NO: 3771658 - DNA, 25 bp, Homo sapien
tctgtgtagtatgcgtcccgtggca

SEQ ID NO: 3771659 - DNA, 25 bp, Homo sapien
ccaatttagaaattgaaataagata

SEQ ID NO: 3771660 - DNA, 25 bp, Homo sapien
caatttagaaattgaaataagatat

SEQ ID NO: 3771661 - DNA, 25 bp, Homo sapien
taccaatttagaaattgaaataaga

SEQ ID NO: 3771662 - DNA, 25 bp, Homo sapien
aatttagaaattgaaataagatatg

SEQ ID NO: 3771663 - DNA, 25 bp, Homo sapien
agcggagactgagtacctgagagcc

SEQ ID NO: 3771664 - DNA, 25 bp, Homo sapien
gagagcctgctcataactaaggtgc

SEQ ID NO: 3771665 - DNA, 25 bp, Homo sapien
ctccaccaatatcgcaacacggaaa

SEQ ID NO: 3771666 - DNA, 25 bp, Homo sapien
tatcgcaacacggaaatacagcgga

SEQ ID NO: 3771667 - DNA, 25 bp, Homo sapien
ccggcgctggatctgtaaagctcag

SEQ ID NO: 3771668 - DNA, 25 bp, Homo sapien
cagaacccggcgctggatctgtaaa

SEQ ID NO: 3771669 - DNA, 25 bp, Homo sapien
gtctgctgccacactaagtgggcag

SEQ ID NO: 3771670 - DNA, 25 bp, Homo sapien
ctcagggacacacctaggtctgctg

SEQ ID NO: 3771671 - DNA, 25 bp, Homo sapien
tgaaaaggctcgacaacaataaact

SEQ ID NO: 3771672 - DNA, 25 bp, Homo sapien
cgacaacaataaacttcccagaagg

SEQ ID NO: 3771673 - DNA, 25 bp, Homo sapien
ccgaactgaaaaggctcgacaacaa

SEQ ID NO: 3771674 - DNA, 25 bp, Homo sapien
gtgcgccaggtcctctccgcacggt

SEQ ID NO: 3771675 - DNA, 25 bp, Homo sapien
cctttccgatgggccgcctcctatg

SEQ ID NO: 3771676 - DNA, 25 bp, Homo sapien
ctttccgatgggccgcctcctatgt

SEQ ID NO: 3771677 - DNA, 25 bp, Homo sapien
tccctttccgatgggccgcctccta

SEQ ID NO: 3771678 - DNA, 25 bp, Homo sapien
ccctttccgatgggccgcctcctat

SEQ ID NO: 3771679 - DNA, 25 bp, Homo sapien
caagccagtttcaacatcctgccag

SEQ ID NO: 3771680 - DNA, 25 bp, Homo sapien
ccccacatactgcagggttcccaag

SEQ ID NO: 3771681 - DNA, 25 bp, Homo sapien
catactgcagggttcccaagccagt

SEQ ID NO: 3771682 - DNA, 25 bp, Homo sapien
cagggttcccaagccagtttcaaca

SEQ ID NO: 3771683 - DNA, 25 bp, Homo sapien
catttggagacctgcttctctttca

SEQ ID NO: 3771684 - DNA, 25 bp, Homo sapien
tctttcagaacccttatcattaacc

SEQ ID NO: 3771685 - DNA, 25 bp, Homo sapien
gacaccatttggagacctgcttctc

SEQ ID NO: 3771686 - DNA, 25 bp, Homo sapien
gaacccttatcattaaccttagaca

SEQ ID NO: 3771687 - DNA, 25 bp, Homo sapien
aaaagccttccgcaaccagctatta

SEQ ID NO: 3771688 - DNA, 25 bp, Homo sapien
tcggagatatttccacggtgatagc

SEQ ID NO: 3771689 - DNA, 25 bp, Homo sapien
gctattaaccttcggagatatttcc

SEQ ID NO: 3771690 - DNA, 25 bp, Homo sapien
gcaaccagctattaaccttcggaga

SEQ ID NO: 3771691 - DNA, 25 bp, Homo sapien
ttggcgcgctcctcgctctgactag

SEQ ID NO: 3771692 - DNA, 25 bp, Homo sapien
gggcgtcccggaacagtctgcgcca

SEQ ID NO: 3771693 - DNA, 25 bp, Homo sapien
ggcgcgcgcagtgcgtgcctaagga

SEQ ID NO: 3771694 - DNA, 25 bp, Homo sapien
tgcctaaggagtgcgagttcgggcg

SEQ ID NO: 3771695 - DNA, 25 bp, Homo sapien
gaagatcatctcagataactccagg

SEQ ID NO: 3771696 - DNA, 25 bp, Homo sapien
caaagttcttagacacccaaggcgc

SEQ ID NO: 3771697 - DNA, 25 bp, Homo sapien
acccaaggcgcccagagttggcact

SEQ ID NO: 3771698 - DNA, 25 bp, Homo sapien
cactgtgtgttgatttggaagatca

SEQ ID NO: 3771699 - DNA, 25 bp, Homo sapien
gaaggtgccgctttccataatgccc

SEQ ID NO: 3771700 - DNA, 25 bp, Homo sapien
tgccgctttccataatgcccttgtc

SEQ ID NO: 3771701 - DNA, 25 bp, Homo sapien
gtgaaggtgccgctttccataatgc

SEQ ID NO: 3771702 - DNA, 25 bp, Homo sapien
ggtgccgctttccataatgcccttg

SEQ ID NO: 3771703 - DNA, 25 bp, Homo sapien
cgttccctggttagttttgagctga

SEQ ID NO: 3771704 - DNA, 25 bp, Homo sapien
gattcttcagtaaagtgcgttgggt

SEQ ID NO: 3771705 - DNA, 25 bp, Homo sapien
tgtgatgctagaaaaggttaccttc

SEQ ID NO: 3771706 - DNA, 25 bp, Homo sapien
tacacccttgcggtcttcggacttc

SEQ ID NO: 3771707 - DNA, 25 bp, Homo sapien
accagtggcattcgggcctggctat

SEQ ID NO: 3771708 - DNA, 25 bp, Homo sapien
cagtggcattcgggcctggctatgc

SEQ ID NO: 3771709 - DNA, 25 bp, Homo sapien
tcaccagtggcattcgggcctggct

SEQ ID NO: 3771710 - DNA, 25 bp, Homo sapien
caccagtggcattcgggcctggcta

SEQ ID NO: 3771711 - DNA, 25 bp, Homo sapien
gggtcggggggcatctctatgttgc

SEQ ID NO: 3771712 - DNA, 25 bp, Homo sapien
tggggtcggggggcatctctatgtt

SEQ ID NO: 3771713 - DNA, 25 bp, Homo sapien
ccacccacctcacgagactacaggc

SEQ ID NO: 3771714 - DNA, 25 bp, Homo sapien
catccacccacctcacgagactaca

SEQ ID NO: 3771715 - DNA, 25 bp, Homo sapien
tccccaactttttcccatagctcat

SEQ ID NO: 3771716 - DNA, 25 bp, Homo sapien
ttccccaactttttcccatagctca

SEQ ID NO: 3771717 - DNA, 25 bp, Homo sapien
gactaggctcaagtgtctcctattc

SEQ ID NO: 3771718 - DNA, 25 bp, Homo sapien
ggcacgtgctaaaatggtcctgaac

SEQ ID NO: 3771719 - DNA, 25 bp, Homo sapien
ttaatccaactagagaatccggcag

SEQ ID NO: 3771720 - DNA, 25 bp, Homo sapien
cctgaacttgggtgtgggaccagaa

SEQ ID NO: 3771721 - DNA, 25 bp, Homo sapien
gttggacacttaatccccagcatgg

SEQ ID NO: 3771722 - DNA, 25 bp, Homo sapien
ccgtatacccgagtgtggccatttg

SEQ ID NO: 3771723 - DNA, 25 bp, Homo sapien
cgtttggcaaaaccagccctttcag

SEQ ID NO: 3771724 - DNA, 25 bp, Homo sapien
gcaggaagacctggttgcttgagct

SEQ ID NO: 3771725 - DNA, 25 bp, Homo sapien
ctttcaggggaatggcaggaagacc

SEQ ID NO: 3771726 - DNA, 25 bp, Homo sapien
gctctcctaggaccattgactttgt

SEQ ID NO: 3771727 - DNA, 25 bp, Homo sapien
ggctttgtgcgtaacaccatctagg

SEQ ID NO: 3771728 - DNA, 25 bp, Homo sapien
tctaggtcattctagggcctcctgg

SEQ ID NO: 3771729 - DNA, 25 bp, Homo sapien
ccatttgatgtgtaccgattaagca

SEQ ID NO: 3771730 - DNA, 25 bp, Homo sapien
tctttgctcctggaagtaaagatgg

SEQ ID NO: 3771731 - DNA, 25 bp, Homo sapien
gtctttgctcctggaagtaaagatg

SEQ ID NO: 3771732 - DNA, 25 bp, Homo sapien
agagtcttcagtttcggagatgtca

SEQ ID NO: 3771733 - DNA, 25 bp, Homo sapien
gatgtacacattgcaatagcatgag

SEQ ID NO: 3771734 - DNA, 25 bp, Homo sapien
tcagtttcggagatgtcagccaggc

SEQ ID NO: 3771735 - DNA, 25 bp, Homo sapien
cacattgcaatagcatgaggcttcc

SEQ ID NO: 3771736 - DNA, 25 bp, Homo sapien
cttcagattattccggctgggcatg

SEQ ID NO: 3771737 - DNA, 25 bp, Homo sapien
caagtctgaactgtaacagagctgg

SEQ ID NO: 3771738 - DNA, 25 bp, Homo sapien
gcaaagtcatcttgaatatacccgt

SEQ ID NO: 3771739 - DNA, 25 bp, Homo sapien
gcttggaagtgcagaagaagatacc

SEQ ID NO: 3771740 - DNA, 25 bp, Homo sapien
ccatggaggacccaagctcatgagg

SEQ ID NO: 3771741 - DNA, 25 bp, Homo sapien
gaactcaccatatagtgacgaggca

SEQ ID NO: 3771742 - DNA, 25 bp, Homo sapien
atgcctactgcatataagaactgag

SEQ ID NO: 3771743 - DNA, 25 bp, Homo sapien
actgagaggtgatgggataagactc

SEQ ID NO: 3771744 - DNA, 25 bp, Homo sapien
tcaaaactgtacatgtatctcattc

SEQ ID NO: 3771745 - DNA, 25 bp, Homo sapien
ggagcccagccgtcatcttgtgaag

SEQ ID NO: 3771746 - DNA, 25 bp, Homo sapien
ctgtttaaagacactgaaggcagcc

SEQ ID NO: 3771747 - DNA, 25 bp, Homo sapien
tcttgtgaagccattattctttggt

SEQ ID NO: 3771748 - DNA, 25 bp, Homo sapien
catgacagtagtatctagctagaag

SEQ ID NO: 3771749 - DNA, 25 bp, Homo sapien
acatgacagtagtatctagctagaa

SEQ ID NO: 3771750 - DNA, 25 bp, Homo sapien
aaacatgacagtagtatctagctag

SEQ ID NO: 3771751 - DNA, 25 bp, Homo sapien
aacatgacagtagtatctagctaga

SEQ ID NO: 3771752 - DNA, 25 bp, Homo sapien
caagtcacatagcatacagttcacc

SEQ ID NO: 3771753 - DNA, 25 bp, Homo sapien
gaaatcatggcccatttgcagtcac

SEQ ID NO: 3771754 - DNA, 25 bp, Homo sapien
cactgtggaaggtggcttcgtcccc

SEQ ID NO: 3771755 - DNA, 25 bp, Homo sapien
cagggaaggcagatccgggttcact

SEQ ID NO: 3771756 - DNA, 25 bp, Homo sapien
tagtcttcgtggaaatgacactgaa

SEQ ID NO: 3771757 - DNA, 25 bp, Homo sapien
catcattagtcttcgtggaaatgac

SEQ ID NO: 3771758 - DNA, 25 bp, Homo sapien
cttcagggcgctagagcaaccagcc

SEQ ID NO: 3771759 - DNA, 25 bp, Homo sapien
tccttcagggcgctagagcaaccag

SEQ ID NO: 3771760 - DNA, 25 bp, Homo sapien
tcagcgagagggaacttcatgcatt

SEQ ID NO: 3771761 - DNA, 25 bp, Homo sapien
ccaggttgaggctcttttcagttca

SEQ ID NO: 3771762 - DNA, 25 bp, Homo sapien
gcagcaccggcgaagttggtgtcag

SEQ ID NO: 3771763 - DNA, 25 bp, Homo sapien
ttactttcacgtgggccggtggctc

SEQ ID NO: 3771764 - DNA, 25 bp, Homo sapien
gaatctggccgagggcttgtctccc

SEQ ID NO: 3771765 - DNA, 25 bp, Homo sapien
taagtcactacaggatgccagcgct

SEQ ID NO: 3771766 - DNA, 25 bp, Homo sapien
gagaataacctgttagacccatagg

SEQ ID NO: 3771767 - DNA, 25 bp, Homo sapien
tcctattcttgggtagacagagcca

SEQ ID NO: 3771768 - DNA, 25 bp, Homo sapien
tcacaatggaatggctacaggtaca

SEQ ID NO: 3771769 - DNA, 25 bp, Homo sapien
gtgtaaatattcacaccgtggccca

SEQ ID NO: 3771770 - DNA, 25 bp, Homo sapien
tcagccatgatttgacagagttgca

SEQ ID NO: 3771771 - DNA, 25 bp, Homo sapien
tcaacctgacggtgtcgagctcaga

SEQ ID NO: 3771772 - DNA, 25 bp, Homo sapien
acgggaggaccgcttgaactcagaa

SEQ ID NO: 3771773 - DNA, 25 bp, Homo sapien
gacgggaggaccgcttgaactcaga

SEQ ID NO: 3771774 - DNA, 25 bp, Homo sapien
tcagtttcgtcacgcagacaggcga

SEQ ID NO: 3771775 - DNA, 25 bp, Homo sapien
cattcctgtgtggtggatggcaaca

SEQ ID NO: 3771776 - DNA, 25 bp, Homo sapien
gatgcctacacgtcctggtttccca

SEQ ID NO: 3771777 - DNA, 25 bp, Homo sapien
tttcccatctatgacacggagacgg

SEQ ID NO: 3771778 - DNA, 25 bp, Homo sapien
gcttttcgcgctcctcagttagtcc

SEQ ID NO: 3771779 - DNA, 25 bp, Homo sapien
ggcttttcgcgctcctcagttagtc

SEQ ID NO: 3771780 - DNA, 25 bp, Homo sapien
caggcttttcgcgctcctcagttag

SEQ ID NO: 3771781 - DNA, 25 bp, Homo sapien
ctcagttagtccgcccccacagctg

SEQ ID NO: 3771782 - DNA, 25 bp, Homo sapien
tcaagttaggaccaaacaaagcctg

SEQ ID NO: 3771783 - DNA, 25 bp, Homo sapien
ctggacatgacacgctcctttgcta

SEQ ID NO: 3771784 - DNA, 25 bp, Homo sapien
tcgcttcacccacccacaagaggtg

SEQ ID NO: 3771785 - DNA, 25 bp, Homo sapien
tcctttgctatttccactcgcttca

SEQ ID NO: 3771786 - DNA, 25 bp, Homo sapien
ggcagcactgtaccggacactctgg

SEQ ID NO: 3771787 - DNA, 25 bp, Homo sapien
ctgcaggattccaccggcagcactg

SEQ ID NO: 3771788 - DNA, 25 bp, Homo sapien
ttcccttgagcagtggggagcacct

SEQ ID NO: 3771789 - DNA, 25 bp, Homo sapien
cactctggggtgagagtttcacaag

SEQ ID NO: 3771790 - DNA, 25 bp, Homo sapien
ttttcatccttattttgcgtctcct

SEQ ID NO: 3771791 - DNA, 25 bp, Homo sapien
caggaattttcatccttattttgcg

SEQ ID NO: 3771792 - DNA, 25 bp, Homo sapien
gaattttcatccttattttgcgtct

SEQ ID NO: 3771793 - DNA, 25 bp, Homo sapien
tcatccttattttgcgtctcctcac

SEQ ID NO: 3771794 - DNA, 25 bp, Homo sapien
cagtaacagagggtgttgctgcctt

SEQ ID NO: 3771795 - DNA, 25 bp, Homo sapien
tgatgtaaacactccgccaccttca

SEQ ID NO: 3771796 - DNA, 25 bp, Homo sapien
cccacgcttggatccgatcggagat

SEQ ID NO: 3771797 - DNA, 25 bp, Homo sapien
caggcctggcaccagtgatgtaaac

SEQ ID NO: 3771798 - DNA, 25 bp, Homo sapien
gacgttctccactgtccaatgccag

SEQ ID NO: 3771799 - DNA, 25 bp, Homo sapien
caagcctcgggtctcaaagaagaca

SEQ ID NO: 3771800 - DNA, 25 bp, Homo sapien
tctggcctccccaggtgtgcgacgt

SEQ ID NO: 3771801 - DNA, 25 bp, Homo sapien
gtgggcgcttctcgcctgctgctgt

SEQ ID NO: 3771802 - DNA, 25 bp, Homo sapien
ttcccagagcaacgcgacctcctca

SEQ ID NO: 3771803 - DNA, 25 bp, Homo sapien
cccagagcaacgcgacctcctcagc

SEQ ID NO: 3771804 - DNA, 25 bp, Homo sapien
cagagcaacgcgacctcctcagctc

SEQ ID NO: 3771805 - DNA, 25 bp, Homo sapien
gagcaacgcgacctcctcagctccc

SEQ ID NO: 3771806 - DNA, 25 bp, Homo sapien
tggaaacacacgctcgagcctgtct

SEQ ID NO: 3771807 - DNA, 25 bp, Homo sapien
ccatgcaaggcacgcagaccaggag

SEQ ID NO: 3771808 - DNA, 25 bp, Homo sapien
gtaaagccatgaggccatgcaaggc

SEQ ID NO: 3771809 - DNA, 25 bp, Homo sapien
acacggcacttaggcagctcatcct

SEQ ID NO: 3771810 - DNA, 25 bp, Homo sapien
gaaccttcaagtcagatccaaccaa

SEQ ID NO: 3771811 - DNA, 25 bp, Homo sapien
cctcaaagggccacactcagtccct

SEQ ID NO: 3771812 - DNA, 25 bp, Homo sapien
agccagagtgaaccttcaagtcaga

SEQ ID NO: 3771813 - DNA, 25 bp, Homo sapien
aggaaacgtacacgtcccactggcg

SEQ ID NO: 3771814 - DNA, 25 bp, Homo sapien
cgttcgggtgaagcgcggaagccct

SEQ ID NO: 3771815 - DNA, 25 bp, Homo sapien
ctgaggtcaggcagcgttcgggtga

SEQ ID NO: 3771816 - DNA, 25 bp, Homo sapien
ggtgaagcgcggaagccctgttcca

SEQ ID NO: 3771817 - DNA, 25 bp, Homo sapien
ggcagcgttcgggtgaagcgcggaa

SEQ ID NO: 3771818 - DNA, 25 bp, Homo sapien
caagagaagattaaccctcgcgaga

SEQ ID NO: 3771819 - DNA, 25 bp, Homo sapien
gacagaggctgtaaacccatgaagg

SEQ ID NO: 3771820 - DNA, 25 bp, Homo sapien
gactaaatatactacgcctgctgga

SEQ ID NO: 3771821 - DNA, 25 bp, Homo sapien
caagttgtcgcatacagatgtgctc

SEQ ID NO: 3771822 - DNA, 25 bp, Homo sapien
tgtctggaagcgtcggcttgttccg

SEQ ID NO: 3771823 - DNA, 25 bp, Homo sapien
gcttgttccggtgttggcagaggct

SEQ ID NO: 3771824 - DNA, 25 bp, Homo sapien
cggtgttggcagaggctggtgtttc

SEQ ID NO: 3771825 - DNA, 25 bp, Homo sapien
cttgtctggaagcgtcggcttgttc

SEQ ID NO: 3771826 - DNA, 25 bp, Homo sapien
tagattcgcaactctctagaccgac

SEQ ID NO: 3771827 - DNA, 25 bp, Homo sapien
ttagattcgcaactctctagaccga

SEQ ID NO: 3771828 - DNA, 25 bp, Homo sapien
gatgtgtccactgctctcattcaat

SEQ ID NO: 3771829 - DNA, 25 bp, Homo sapien
ctgctgagatgtgtccactgctctc

SEQ ID NO: 3771830 - DNA, 25 bp, Homo sapien
tcagatacaggacctaatgaaatga

SEQ ID NO: 3771831 - DNA, 25 bp, Homo sapien
aggactccactaaccacaacatcag

SEQ ID NO: 3771832 - DNA, 25 bp, Homo sapien
caaacagggtcacatcagagagctt

SEQ ID NO: 3771833 - DNA, 25 bp, Homo sapien
acaaacagggtcacatcagagagct

SEQ ID NO: 3771834 - DNA, 25 bp, Homo sapien
aaacagggtcacatcagagagctta

SEQ ID NO: 3771835 - DNA, 25 bp, Homo sapien
aacaaacagggtcacatcagagagc

SEQ ID NO: 3771836 - DNA, 25 bp, Homo sapien
aagatggcgtctgcaacgctaccca

SEQ ID NO: 3771837 - DNA, 25 bp, Homo sapien
tatggaagccaaagactgccggcac

SEQ ID NO: 3771838 - DNA, 25 bp, Homo sapien
cacgtgaagacaaaggcggagacca

SEQ ID NO: 3771839 - DNA, 25 bp, Homo sapien
cagataaggccatactggagcaggg

SEQ ID NO: 3771840 - DNA, 25 bp, Homo sapien
gacctggatggaagtcaggccactg

SEQ ID NO: 3771841 - DNA, 25 bp, Homo sapien
ttcttttgtggacaagagggcagac

SEQ ID NO: 3771842 - DNA, 25 bp, Homo sapien
tccctaggcagggaagcgcagaaag

SEQ ID NO: 3771843 - DNA, 25 bp, Homo sapien
gcaggggcacgagtcttccatctct

SEQ ID NO: 3771844 - DNA, 25 bp, Homo sapien
gaatcatgatctaattctgccagcc

SEQ ID NO: 3771845 - DNA, 25 bp, Homo sapien
cagtgatgtccagtgagtaacagac

SEQ ID NO: 3771846 - DNA, 25 bp, Homo sapien
caaagtgacatcttgggctgttgta

SEQ ID NO: 3771847 - DNA, 25 bp, Homo sapien
tgagatcagtaagggcagcagaagc

SEQ ID NO: 3771848 - DNA, 25 bp, Homo sapien
cctctcacgattggtgtttgctgga

SEQ ID NO: 3771849 - DNA, 25 bp, Homo sapien
tcccttcggatgttggtagcgaggc

SEQ ID NO: 3771850 - DNA, 25 bp, Homo sapien
gattagatctgcattaggtgctccc

SEQ ID NO: 3771851 - DNA, 25 bp, Homo sapien
tgggcgctgtgcaagagactgcaac

SEQ ID NO: 3771852 - DNA, 25 bp, Homo sapien
ccgttcattgatatctagtgtgagc

SEQ ID NO: 3771853 - DNA, 25 bp, Homo sapien
gacatgggtacattaaggatcttaa

SEQ ID NO: 3771854 - DNA, 25 bp, Homo sapien
gctggttccagtgatttgcagcaag

SEQ ID NO: 3771855 - DNA, 25 bp, Homo sapien
cttgttcttgccgttcattgatatc

SEQ ID NO: 3771856 - DNA, 25 bp, Homo sapien
caaaggagttacaaatagtttgaga

SEQ ID NO: 3771857 - DNA, 25 bp, Homo sapien
aggagttacaaatagtttgagaaca

SEQ ID NO: 3771858 - DNA, 25 bp, Homo sapien
acaaaggagttacaaatagtttgag

SEQ ID NO: 3771859 - DNA, 25 bp, Homo sapien
caacatctagttggtgcactttaac

SEQ ID NO: 3771860 - DNA, 25 bp, Homo sapien
ggtgcactttaacagattcaccact

SEQ ID NO: 3771861 - DNA, 25 bp, Homo sapien
catgacaaacggcattgtgtctgca

SEQ ID NO: 3771862 - DNA, 25 bp, Homo sapien
ctggcttttgagatgcaaaggaatg

SEQ ID NO: 3771863 - DNA, 25 bp, Homo sapien
tcctagccatgtggtcttaagcaag

SEQ ID NO: 3771864 - DNA, 25 bp, Homo sapien
tttttagatcaactggcaagcccat

SEQ ID NO: 3771865 - DNA, 25 bp, Homo sapien
gcatcctgtgctagaaggcaacaca

SEQ ID NO: 3771866 - DNA, 25 bp, Homo sapien
gatggtctgataagtgaaaaggctc

SEQ ID NO: 3771867 - DNA, 25 bp, Homo sapien
acaaggtacatgcttaagtccaccg

SEQ ID NO: 3771868 - DNA, 25 bp, Homo sapien
tgcttaagtccaccgcctttaatca

SEQ ID NO: 3771869 - DNA, 25 bp, Homo sapien
gcatcattttatccagagcttgaat

SEQ ID NO: 3771870 - DNA, 25 bp, Homo sapien
tcctcatcttctacacaaggtacat

SEQ ID NO: 3771871 - DNA, 25 bp, Homo sapien
tattggaatctgtaaggtaatctgt

SEQ ID NO: 3771872 - DNA, 25 bp, Homo sapien
ccttattggaatctgtaaggtaatc

SEQ ID NO: 3771873 - DNA, 25 bp, Homo sapien
ttattggaatctgtaaggtaatctg

SEQ ID NO: 3771874 - DNA, 25 bp, Homo sapien
tttccttattggaatctgtaaggta

SEQ ID NO: 3771875 - DNA, 25 bp, Homo sapien
tactagccaattaggaaaaccatac

SEQ ID NO: 3771876 - DNA, 25 bp, Homo sapien
gatactgctcatgtaattagtacag

SEQ ID NO: 3771877 - DNA, 25 bp, Homo sapien
gctttagggctaaaggaaacacagc

SEQ ID NO: 3771878 - DNA, 25 bp, Homo sapien
tggatttttacatctgaccgtagaa

SEQ ID NO: 3771879 - DNA, 25 bp, Homo sapien
gattttctccttctgtcatagaatc

SEQ ID NO: 3771880 - DNA, 25 bp, Homo sapien
tcatttccagattgttcttctgttt

SEQ ID NO: 3771881 - DNA, 25 bp, Homo sapien
cttctggctcatttacttcactttc

SEQ ID NO: 3771882 - DNA, 25 bp, Homo sapien
cttcatcctcttcaagattttctcc

SEQ ID NO: 3771883 - DNA, 25 bp, Homo sapien
cctccatattctaaacaaggacaaa

SEQ ID NO: 3771884 - DNA, 25 bp, Homo sapien
aacagcgatctatttttacctccat

SEQ ID NO: 3771885 - DNA, 25 bp, Homo sapien
tttacctccatattctaaacaagga

SEQ ID NO: 3771886 - DNA, 25 bp, Homo sapien
tttcattcacaaacagcgatctatt

SEQ ID NO: 3771887 - DNA, 25 bp, Homo sapien
cctgcagtcctttaatttagccttt

SEQ ID NO: 3771888 - DNA, 25 bp, Homo sapien
gaagcctgcagtcctttaatttagc

SEQ ID NO: 3771889 - DNA, 25 bp, Homo sapien
aagaagcctgcagtcctttaattta

SEQ ID NO: 3771890 - DNA, 25 bp, Homo sapien
aagcctgcagtcctttaatttagcc

SEQ ID NO: 3771891 - DNA, 25 bp, Homo sapien
ttttctgtcactaaactaggtgtca

SEQ ID NO: 3771892 - DNA, 25 bp, Homo sapien
ttttccaaggatccaaagcaagtga

SEQ ID NO: 3771893 - DNA, 25 bp, Homo sapien
ggtgtcacactaatatttactcatg

SEQ ID NO: 3771894 - DNA, 25 bp, Homo sapien
tcatatatgcctttacgggttaagt

SEQ ID NO: 3771895 - DNA, 25 bp, Homo sapien
tattaagaattctcgttccaagtct

SEQ ID NO: 3771896 - DNA, 25 bp, Homo sapien
attaagaattctcgttccaagtctt

SEQ ID NO: 3771897 - DNA, 25 bp, Homo sapien
ttattaagaattctcgttccaagtc

SEQ ID NO: 3771898 - DNA, 25 bp, Homo sapien
gagaattacagagtttgatctttgg

SEQ ID NO: 3771899 - DNA, 25 bp, Homo sapien
tgatctttggtcttagcagttctag

SEQ ID NO: 3771900 - DNA, 25 bp, Homo sapien
cagttctagtgtatcactgatcatg

SEQ ID NO: 3771901 - DNA, 25 bp, Homo sapien
taggaaatggatggtcttttgtcca

SEQ ID NO: 3771902 - DNA, 25 bp, Homo sapien
accaatcattatcaatcataaaagt

SEQ ID NO: 3771903 - DNA, 25 bp, Homo sapien
ttatatgcaatgagaatgttcatac

SEQ ID NO: 3771904 - DNA, 25 bp, Homo sapien
catacaatagaatccatcatatatc

SEQ ID NO: 3771905 - DNA, 25 bp, Homo sapien
tatcacggtccataaattactgaac

SEQ ID NO: 3771906 - DNA, 25 bp, Homo sapien
tcctaagaacttggcactgctgatg

SEQ ID NO: 3771907 - DNA, 25 bp, Homo sapien
tgtcaaagtactggccacatgtgtc

SEQ ID NO: 3771908 - DNA, 25 bp, Homo sapien
catgtgtccagaatagtgcatacga

SEQ ID NO: 3771909 - DNA, 25 bp, Homo sapien
ggagagccatcaggattaacaccaa

SEQ ID NO: 3771910 - DNA, 25 bp, Homo sapien
caacatcctcttggtagagcactag

SEQ ID NO: 3771911 - DNA, 25 bp, Homo sapien
cactagtcctgctaagaggttggct

SEQ ID NO: 3771912 - DNA, 25 bp, Homo sapien
gaggttggctacacaatgaatacta

SEQ ID NO: 3771913 - DNA, 25 bp, Homo sapien
cagggcagctttcgcatctgtctca

SEQ ID NO: 3771914 - DNA, 25 bp, Homo sapien
cagtagtaatatgcattctctacca

SEQ ID NO: 3771915 - DNA, 25 bp, Homo sapien
gtttccggacatattcctggagagg

SEQ ID NO: 3771916 - DNA, 25 bp, Homo sapien
tagagagatccttgtacaaaagttt

SEQ ID NO: 3771917 - DNA, 25 bp, Homo sapien
tcggtggtaaccttagagagatcct

SEQ ID NO: 3771918 - DNA, 25 bp, Homo sapien
gtgacgtatctcgcatcaagatgca

SEQ ID NO: 3771919 - DNA, 25 bp, Homo sapien
gcatcaagatgcattgcttgcttct

SEQ ID NO: 3771920 - DNA, 25 bp, Homo sapien
tgtgacgtatctcgcatcaagatgc

SEQ ID NO: 3771921 - DNA, 25 bp, Homo sapien
cgcatcaagatgcattgcttgcttc

SEQ ID NO: 3771922 - DNA, 25 bp, Homo sapien
gagatctgaaaagaaaccgtccaca

SEQ ID NO: 3771923 - DNA, 25 bp, Homo sapien
tggagatctgaaaagaaaccgtcca

SEQ ID NO: 3771924 - DNA, 25 bp, Homo sapien
agatctgaaaagaaaccgtccacat

SEQ ID NO: 3771925 - DNA, 25 bp, Homo sapien
ggagatctgaaaagaaaccgtccac

SEQ ID NO: 3771926 - DNA, 25 bp, Homo sapien
tttcaatatggtgatgagagaagtc

SEQ ID NO: 3771927 - DNA, 25 bp, Homo sapien
caatatggtgatgagagaagtctga

SEQ ID NO: 3771928 - DNA, 25 bp, Homo sapien
ccatttcaatatggtgatgagagaa

SEQ ID NO: 3771929 - DNA, 25 bp, Homo sapien
tatggtgatgagagaagtctgacag

SEQ ID NO: 3771930 - DNA, 25 bp, Homo sapien
tattgatctggtcctttttccgtac

SEQ ID NO: 3771931 - DNA, 25 bp, Homo sapien
cagtgtgtcatttttggtgaacatc

SEQ ID NO: 3771932 - DNA, 25 bp, Homo sapien
tttaaacaatgcagtgtgtcatttt

SEQ ID NO: 3771933 - DNA, 25 bp, Homo sapien
catcttaaacttagttagttctcct

SEQ ID NO: 3771934 - DNA, 25 bp, Homo sapien
cctcatagctgtccaatgtgtgaat

SEQ ID NO: 3771935 - DNA, 25 bp, Homo sapien
tacttaggacatgtcctcatagctg

SEQ ID NO: 3771936 - DNA, 25 bp, Homo sapien
cctattagagtcatactgtgaatca

SEQ ID NO: 3771937 - DNA, 25 bp, Homo sapien
tcagttttccctattagagtcatac

SEQ ID NO: 3771938 - DNA, 25 bp, Homo sapien
caggaggtatgaagaggagatgcta

SEQ ID NO: 3771939 - DNA, 25 bp, Homo sapien
gagatgctagattttagttctttta

SEQ ID NO: 3771940 - DNA, 25 bp, Homo sapien
ttatctcagtaactggacaaaatac

SEQ ID NO: 3771941 - DNA, 25 bp, Homo sapien
aaatgtctaggtgcaaaagtagagg

SEQ ID NO: 3771942 - DNA, 25 bp, Homo sapien
gagaaagcgtgtgcggacatttccc

SEQ ID NO: 3771943 - DNA, 25 bp, Homo sapien
tctgttcttgcgagagcttggcaac

SEQ ID NO: 3771944 - DNA, 25 bp, Homo sapien
tgcacagtgagtgagagaaagcgtg

SEQ ID NO: 3771945 - DNA, 25 bp, Homo sapien
ttgtgtctgttcttgcgagagcttg

SEQ ID NO: 3771946 - DNA, 25 bp, Homo sapien
gatcctctgctacatcagacatgca

SEQ ID NO: 3771947 - DNA, 25 bp, Homo sapien
tctgctacatcagacatgcagggat

SEQ ID NO: 3771948 - DNA, 25 bp, Homo sapien
tgtagcaaccaatcttgcataaaat

SEQ ID NO: 3771949 - DNA, 25 bp, Homo sapien
gaacaaagatcctctgctacatcag

SEQ ID NO: 3771950 - DNA, 25 bp, Homo sapien
cttgttggtctgtcccttgcacttc

SEQ ID NO: 3771951 - DNA, 25 bp, Homo sapien
taagtggcccaatctactgagtccc

SEQ ID NO: 3771952 - DNA, 25 bp, Homo sapien
cacaaaaaggcagatatagccatct

SEQ ID NO: 3771953 - DNA, 25 bp, Homo sapien
acctagtctaagatcgtttcacttt

SEQ ID NO: 3771954 - DNA, 25 bp, Homo sapien
gaggaggtccaatcagaaaatctct

SEQ ID NO: 3771955 - DNA, 25 bp, Homo sapien
ggtccaatcagaaaatctcttacaa

SEQ ID NO: 3771956 - DNA, 25 bp, Homo sapien
gaaaatctcttacaaaaagtccagc

SEQ ID NO: 3771957 - DNA, 25 bp, Homo sapien
cacagttccaaattgagtgaaggag

SEQ ID NO: 3771958 - DNA, 25 bp, Homo sapien
gtccccctcagggataagccaaatc

SEQ ID NO: 3771959 - DNA, 25 bp, Homo sapien
ccaggctccctagggatcaagccgt

SEQ ID NO: 3771960 - DNA, 25 bp, Homo sapien
ggatcaagccgtccccctcagggat

SEQ ID NO: 3771961 - DNA, 25 bp, Homo sapien
atcctgcaggtagggtagaaatgca

SEQ ID NO: 3771962 - DNA, 25 bp, Homo sapien
gaactatgaagagtgcccgtaccaa

SEQ ID NO: 3771963 - DNA, 25 bp, Homo sapien
gagtgcccgtaccaacttcttcctg

SEQ ID NO: 3771964 - DNA, 25 bp, Homo sapien
tgcttttgtgttcatgttcatgcaa

SEQ ID NO: 3771965 - DNA, 25 bp, Homo sapien
ttgtctaggaactatgaagagtgcc

SEQ ID NO: 3771966 - DNA, 25 bp, Homo sapien
cttgtctatcagatctcggttgaca

SEQ ID NO: 3771967 - DNA, 25 bp, Homo sapien
cttgagatgagatccagtgctggct

SEQ ID NO: 3771968 - DNA, 25 bp, Homo sapien
tatcagatctcggttgacacagttg

SEQ ID NO: 3771969 - DNA, 25 bp, Homo sapien
cacagttgggtaactgctgtaggaa

SEQ ID NO: 3771970 - DNA, 25 bp, Homo sapien
tcatctccaccctctaattctaagg

SEQ ID NO: 3771971 - DNA, 25 bp, Homo sapien
gggacttgatacctccttattctcc

SEQ ID NO: 3771972 - DNA, 25 bp, Homo sapien
ttctagattctccaactcaagttcc

SEQ ID NO: 3771973 - DNA, 25 bp, Homo sapien
caagttccaaatcatcgggacttga

SEQ ID NO: 3771974 - DNA, 25 bp, Homo sapien
ggtttaccaggtgtgaatatatcaa

SEQ ID NO: 3771975 - DNA, 25 bp, Homo sapien
aatatatcaattccaggcccatgtt

SEQ ID NO: 3771976 - DNA, 25 bp, Homo sapien
cattgtctttaaacaagatggctgg

SEQ ID NO: 3771977 - DNA, 25 bp, Homo sapien
ggttctcataaaaattccgagcatc

SEQ ID NO: 3771978 - DNA, 25 bp, Homo sapien
ttttcatccaaaaggtctgctaagg

SEQ ID NO: 3771979 - DNA, 25 bp, Homo sapien
gctcccctttagaatgtagaatgcg

SEQ ID NO: 3771980 - DNA, 25 bp, Homo sapien
tctggtaagacatagcaaattcctc

SEQ ID NO: 3771981 - DNA, 25 bp, Homo sapien
tgctaaggattgagaatttgccagc

SEQ ID NO: 3771982 - DNA, 25 bp, Homo sapien
tatgcagcatgcttgctgaaataca

SEQ ID NO: 3771983 - DNA, 25 bp, Homo sapien
tattactgtcatactcccctcagac

SEQ ID NO: 3771984 - DNA, 25 bp, Homo sapien
agtcacactcttctcagatatagag

SEQ ID NO: 3771985 - DNA, 25 bp, Homo sapien
gatatagagttaaccaaaactagca

SEQ ID NO: 3771986 - DNA, 25 bp, Homo sapien
gccatagttcgccaatgcctgtcac

SEQ ID NO: 3771987 - DNA, 25 bp, Homo sapien
ccattcttaggtgacaggctgtaga

SEQ ID NO: 3771988 - DNA, 25 bp, Homo sapien
tcataggcttaatctggcccacaag

SEQ ID NO: 3771989 - DNA, 25 bp, Homo sapien
gaatgtcataaagtagaggtcagca

SEQ ID NO: 3771990 - DNA, 25 bp, Homo sapien
ccacgcccagttgaatgttttttat

SEQ ID NO: 3771991 - DNA, 25 bp, Homo sapien
tggcctcaggctcctgatgtcaggt

SEQ ID NO: 3771992 - DNA, 25 bp, Homo sapien
cacgcccagttgaatgttttttata

SEQ ID NO: 3771993 - DNA, 25 bp, Homo sapien
ggctggcctcaggctcctgatgtca

SEQ ID NO: 3771994 - DNA, 25 bp, Homo sapien
gaagagaaacttgttaccacttcca

SEQ ID NO: 3771995 - DNA, 25 bp, Homo sapien
cactgctgttagactaagcctgcaa

SEQ ID NO: 3771996 - DNA, 25 bp, Homo sapien
caatcatgagggtactaagtcaggg

SEQ ID NO: 3771997 - DNA, 25 bp, Homo sapien
ttaacaatgggcagacgaaaaagtc

SEQ ID NO: 3771998 - DNA, 25 bp, Homo sapien
ggtcaatcacttaaccaaaatgtat

SEQ ID NO: 3771999 - DNA, 25 bp, Homo sapien
gagaaagtaaggctattaattccaa

SEQ ID NO: 3772000 - DNA, 25 bp, Homo sapien
tgcccaaaatatactaataggacct

SEQ ID NO: 3772001 - DNA, 25 bp, Homo sapien
taggcaaatactactggatgacatt

SEQ ID NO: 3772002 - DNA, 25 bp, Homo sapien
aacacctactagatgagaggtgcag

SEQ ID NO: 3772003 - DNA, 25 bp, Homo sapien
cttactggaagaactattgcccatt

SEQ ID NO: 3772004 - DNA, 25 bp, Homo sapien
gagaccatatctctatgtttacaaa

SEQ ID NO: 3772005 - DNA, 25 bp, Homo sapien
gtcctatgatgtagaaaaacctcaa

SEQ ID NO: 3772006 - DNA, 25 bp, Homo sapien
taggtaggatgtacgagcaaaggac

SEQ ID NO: 3772007 - DNA, 25 bp, Homo sapien
gaccctgccctaactgtactactgg

SEQ ID NO: 3772008 - DNA, 25 bp, Homo sapien
aatagtttaatactcagccacgtgc

SEQ ID NO: 3772009 - DNA, 25 bp, Homo sapien
caatggcaccgagagaactgagctc

SEQ ID NO: 3772010 - DNA, 25 bp, Homo sapien
gagtactcagactgttctactttga

SEQ ID NO: 3772011 - DNA, 25 bp, Homo sapien
tatcgtagactcacattaaaacatg

SEQ ID NO: 3772012 - DNA, 25 bp, Homo sapien
tcagtggcatgaagactttaaacat

SEQ ID NO: 3772013 - DNA, 25 bp, Homo sapien
taagaaatcacctgtaaggagccct

SEQ ID NO: 3772014 - DNA, 25 bp, Homo sapien
aatatcatctccacaatgtcgacag

SEQ ID NO: 3772015 - DNA, 25 bp, Homo sapien
catgagtgtgggactcccgatcagc

SEQ ID NO: 3772016 - DNA, 25 bp, Homo sapien
ttcatagattaaggaaagaccttcc

SEQ ID NO: 3772017 - DNA, 25 bp, Homo sapien
gacagaaactaatcactacagagac

SEQ ID NO: 3772018 - DNA, 25 bp, Homo sapien
cataacgctggtgaaagagagagca

SEQ ID NO: 3772019 - DNA, 25 bp, Homo sapien
taaaatcatgggacaaggagtctct

SEQ ID NO: 3772020 - DNA, 25 bp, Homo sapien
tcttcaaacttgagtcgaggcggct

SEQ ID NO: 3772021 - DNA, 25 bp, Homo sapien
ttaaatgatgtcgttcccaagcttc

SEQ ID NO: 3772022 - DNA, 25 bp, Homo sapien
tgaagctgaatggattcttcttttt

SEQ ID NO: 3772023 - DNA, 25 bp, Homo sapien
gaagctgaatggattcttctttttc

SEQ ID NO: 3772024 - DNA, 25 bp, Homo sapien
gatgaagctgaatggattcttcttt

SEQ ID NO: 3772025 - DNA, 25 bp, Homo sapien
ctgatgaagctgaatggattcttct

SEQ ID NO: 3772026 - DNA, 25 bp, Homo sapien
ccctgagttataagataattatttg

SEQ ID NO: 3772027 - DNA, 25 bp, Homo sapien
ctgagttataagataattatttgat

SEQ ID NO: 3772028 - DNA, 25 bp, Homo sapien
cctgagttataagataattatttga

SEQ ID NO: 3772029 - DNA, 25 bp, Homo sapien
tctgagcagctgcttcttcttcttg

SEQ ID NO: 3772030 - DNA, 25 bp, Homo sapien
tcatctgagcagctgcttcttcttc

SEQ ID NO: 3772031 - DNA, 25 bp, Homo sapien
catctgagcagctgcttcttcttct

SEQ ID NO: 3772032 - DNA, 25 bp, Homo sapien
ttcatctgagcagctgcttcttctt

SEQ ID NO: 3772033 - DNA, 25 bp, Homo sapien
ctcttcttgcttctttctctcttcc

SEQ ID NO: 3772034 - DNA, 25 bp, Homo sapien
tctctcttcctcttgatgtttcttt

SEQ ID NO: 3772035 - DNA, 25 bp, Homo sapien
ctgacgtttggcctgctcttcttgc

SEQ ID NO: 3772036 - DNA, 25 bp, Homo sapien
ctttctctcttcctcttgatgtttc

SEQ ID NO: 3772037 - DNA, 25 bp, Homo sapien
ttttctcttatcatcttccagtctc

SEQ ID NO: 3772038 - DNA, 25 bp, Homo sapien
ttctcttatcatcttccagtctctt

SEQ ID NO: 3772039 - DNA, 25 bp, Homo sapien
tccttttttctcttatcatcttcca

SEQ ID NO: 3772040 - DNA, 25 bp, Homo sapien
ttttttctcttatcatcttccagtc

SEQ ID NO: 3772041 - DNA, 25 bp, Homo sapien
cttgatatcgtcttttggcctctcc

SEQ ID NO: 3772042 - DNA, 25 bp, Homo sapien
tgctggctttttacgctcagctggc

SEQ ID NO: 3772043 - DNA, 25 bp, Homo sapien
agtgagcttgatatcgtcttttggc

SEQ ID NO: 3772044 - DNA, 25 bp, Homo sapien
gctgctcactgtccgcctttcactg

SEQ ID NO: 3772045 - DNA, 25 bp, Homo sapien
tcagtaccatagatgcagtgacttt

SEQ ID NO: 3772046 - DNA, 25 bp, Homo sapien
gaaagaatgtcagtaccatagatgc

SEQ ID NO: 3772047 - DNA, 25 bp, Homo sapien
gaatgtcagtaccatagatgcagtg

SEQ ID NO: 3772048 - DNA, 25 bp, Homo sapien
gggaaagaatgtcagtaccatagat

SEQ ID NO: 3772049 - DNA, 25 bp, Homo sapien
gagcataatataaggaacctccacg

SEQ ID NO: 3772050 - DNA, 25 bp, Homo sapien
tttgacaaccatgaaagatggcagt

SEQ ID NO: 3772051 - DNA, 25 bp, Homo sapien
gaacattttgagtcagctttaaccc

SEQ ID NO: 3772052 - DNA, 25 bp, Homo sapien
tataaggaaaaatccaagcccagac

SEQ ID NO: 3772053 - DNA, 25 bp, Homo sapien
gatgggagacatgctggtaaatact

SEQ ID NO: 3772054 - DNA, 25 bp, Homo sapien
aacaagtaacatttcaggaccacag

SEQ ID NO: 3772055 - DNA, 25 bp, Homo sapien
ggacactacaaagaatggcatcaga

SEQ ID NO: 3772056 - DNA, 25 bp, Homo sapien
ggtaaatactgactatagcaaccca

SEQ ID NO: 3772057 - DNA, 25 bp, Homo sapien
caagagagctgaaggtccgatcacc

SEQ ID NO: 3772058 - DNA, 25 bp, Homo sapien
ggagactgacgatgttaaggaacac

SEQ ID NO: 3772059 - DNA, 25 bp, Homo sapien
taaagcgtcagcgagggtttcactt

SEQ ID NO: 3772060 - DNA, 25 bp, Homo sapien
cgtttcgtgtcgtgtaagtcctcta

SEQ ID NO: 3772061 - DNA, 25 bp, Homo sapien
aggtatccacggtcaccttcgcgga

SEQ ID NO: 3772062 - DNA, 25 bp, Homo sapien
tacaaacccctgctctggtggtgta

SEQ ID NO: 3772063 - DNA, 25 bp, Homo sapien
tgtaggaacctctaaacccaccaca

SEQ ID NO: 3772064 - DNA, 25 bp, Homo sapien
ttcccacaggtatccacggtcacct

SEQ ID NO: 3772065 - DNA, 25 bp, Homo sapien
ctcccgcgttgatgggagcctcgga

SEQ ID NO: 3772066 - DNA, 25 bp, Homo sapien
gtctgaggagaacgacgccggaccc

SEQ ID NO: 3772067 - DNA, 25 bp, Homo sapien
gcggtccctccactgctcgccgacc

SEQ ID NO: 3772068 - DNA, 25 bp, Homo sapien
gggagtaggagtctaggccggtgcc

SEQ ID NO: 3772069 - DNA, 25 bp, Homo sapien
gcaccaactccagcgctcgggctct

SEQ ID NO: 3772070 - DNA, 25 bp, Homo sapien
ctgttgtcaacattagccccgggtt

SEQ ID NO: 3772071 - DNA, 25 bp, Homo sapien
ctcgagcctgttgtcaacattagcc

SEQ ID NO: 3772072 - DNA, 25 bp, Homo sapien
tatctcgcagccgagggcccgcctt

SEQ ID NO: 3772073 - DNA, 25 bp, Homo sapien
aattccccagtcgatgagaagagcg

SEQ ID NO: 3772074 - DNA, 25 bp, Homo sapien
acagtcctgatcgtcttccctgcgg

SEQ ID NO: 3772075 - DNA, 25 bp, Homo sapien
gcgcgactgcccgattaaaaacagt

SEQ ID NO: 3772076 - DNA, 25 bp, Homo sapien
caaaggctcatatgagtgccattca

SEQ ID NO: 3772077 - DNA, 25 bp, Homo sapien
gctgatacccgcctcattctgtttt

SEQ ID NO: 3772078 - DNA, 25 bp, Homo sapien
tatgactcatagctgctcagtggca

SEQ ID NO: 3772079 - DNA, 25 bp, Homo sapien
ctcccaaaagtagttattgtcctct

SEQ ID NO: 3772080 - DNA, 25 bp, Homo sapien
gggtgaaatccagggctacttccat

SEQ ID NO: 3772081 - DNA, 25 bp, Homo sapien
cttcatgacctttgaccatattttt

SEQ ID NO: 3772082 - DNA, 25 bp, Homo sapien
gcttcatgacctttgaccatatttt

SEQ ID NO: 3772083 - DNA, 25 bp, Homo sapien
tcatgacctttgaccatatttttag

SEQ ID NO: 3772084 - DNA, 25 bp, Homo sapien
atgacctttgaccatatttttagtt

SEQ ID NO: 3772085 - DNA, 25 bp, Homo sapien
caccctgggtaacaagagtgaaaca

SEQ ID NO: 3772086 - DNA, 25 bp, Homo sapien
tgaagtaaacgtctaagtcttctcc

SEQ ID NO: 3772087 - DNA, 25 bp, Homo sapien
tacctgctcaccgtaaaaattagaa

SEQ ID NO: 3772088 - DNA, 25 bp, Homo sapien
tccagtgtctgaaagcttccgaagc

SEQ ID NO: 3772089 - DNA, 25 bp, Homo sapien
ctgtaacattttcactgggaggaag

SEQ ID NO: 3772090 - DNA, 25 bp, Homo sapien
gtatatgtgctgccaaaatgagcac

SEQ ID NO: 3772091 - DNA, 25 bp, Homo sapien
tgctaatcttctctgcagtgttcta

SEQ ID NO: 3772092 - DNA, 25 bp, Homo sapien
aatcttctctgcagtgttctaattt

SEQ ID NO: 3772093 - DNA, 25 bp, Homo sapien
tagtatatgtgctgccaaaatgagc

SEQ ID NO: 3772094 - DNA, 25 bp, Homo sapien
gggcctctaccatctactgtgcttg

SEQ ID NO: 3772095 - DNA, 25 bp, Homo sapien
tactggaaacgtaactaaacagcga

SEQ ID NO: 3772096 - DNA, 25 bp, Homo sapien
gcgaaccatgtagcttcacctgact

SEQ ID NO: 3772097 - DNA, 25 bp, Homo sapien
ggactttcccaacaccaggtgcttg

SEQ ID NO: 3772098 - DNA, 25 bp, Homo sapien
ttccccacagttgtttgttgctggt

SEQ ID NO: 3772099 - DNA, 25 bp, Homo sapien
tccccacagttgtttgttgctggtt

SEQ ID NO: 3772100 - DNA, 25 bp, Homo sapien
ttagtcccactaccattaacactgg

SEQ ID NO: 3772101 - DNA, 25 bp, Homo sapien
ggcagaggtacatcgcacagcgact

SEQ ID NO: 3772102 - DNA, 25 bp, Homo sapien
caactgcacgcgttttgctggatgt

SEQ ID NO: 3772103 - DNA, 25 bp, Homo sapien
cattgtctggaaggcctttagtccc

SEQ ID NO: 3772104 - DNA, 25 bp, Homo sapien
aaagcagccacttagcccacatggg

SEQ ID NO: 3772105 - DNA, 25 bp, Homo sapien
cccacatgggcgaaatcaagtctcc

SEQ ID NO: 3772106 - DNA, 25 bp, Homo sapien
tctgttgttgtactcacagcagcaa

SEQ ID NO: 3772107 - DNA, 25 bp, Homo sapien
tctcaagcaatgtctgtagttcagt

SEQ ID NO: 3772108 - DNA, 25 bp, Homo sapien
aatctgatattaaacgttttctaag

SEQ ID NO: 3772109 - DNA, 25 bp, Homo sapien
ccctgagatgcctgtaaaagtcaaa

SEQ ID NO: 3772110 - DNA, 25 bp, Homo sapien
ttctaagatcatttgtataggttca

SEQ ID NO: 3772111 - DNA, 25 bp, Homo sapien
tgtataggttcagtgtattcataag

SEQ ID NO: 3772112 - DNA, 25 bp, Homo sapien
tagatagatagtgaccaacttaagg

SEQ ID NO: 3772113 - DNA, 25 bp, Homo sapien
tcccagtctccatttgaaagagcat

SEQ ID NO: 3772114 - DNA, 25 bp, Homo sapien
catttgaaagagcatagatcttggt

SEQ ID NO: 3772115 - DNA, 25 bp, Homo sapien
gggtaatcatatatgtgactaacat

SEQ ID NO: 3772116 - DNA, 25 bp, Homo sapien
agtggctcggtgagcatccgccaag

SEQ ID NO: 3772117 - DNA, 25 bp, Homo sapien
tccacccagtgttatgacgtccgat

SEQ ID NO: 3772118 - DNA, 25 bp, Homo sapien
caagggcctcagaccactgttacca

SEQ ID NO: 3772119 - DNA, 25 bp, Homo sapien
tacaaagccaaataatcgcagggca

SEQ ID NO: 3772120 - DNA, 25 bp, Homo sapien
tggagccaggctagaaacatgactt

SEQ ID NO: 3772121 - DNA, 25 bp, Homo sapien
tgtggacaaacggaggctactgcag

SEQ ID NO: 3772122 - DNA, 25 bp, Homo sapien
gtcagctgcagaggtcattcccatg

SEQ ID NO: 3772123 - DNA, 25 bp, Homo sapien
gacttagggctggatgagaatcatc

SEQ ID NO: 3772124 - DNA, 25 bp, Homo sapien
agttgaatacaaagtcttagtgaag

SEQ ID NO: 3772125 - DNA, 25 bp, Homo sapien
aaaatggccagtgtcatatttgggc

SEQ ID NO: 3772126 - DNA, 25 bp, Homo sapien
gaagaaggcctggtggtctcgttta

SEQ ID NO: 3772127 - DNA, 25 bp, Homo sapien
gtctcgtttacaaaaatggccagtg

SEQ ID NO: 3772128 - DNA, 25 bp, Homo sapien
agtgctagagcgtaggaatagaccc

SEQ ID NO: 3772129 - DNA, 25 bp, Homo sapien
ggaatagaccctggcgtccactgtg

SEQ ID NO: 3772130 - DNA, 25 bp, Homo sapien
tttcaagaagggcacttcaaatggc

SEQ ID NO: 3772131 - DNA, 25 bp, Homo sapien
agaagggcacttcaaatggctttgc

SEQ ID NO: 3772132 - DNA, 25 bp, Homo sapien
gacaaaacatcttattcaatcagtg

SEQ ID NO: 3772133 - DNA, 25 bp, Homo sapien
ttagatcatgccgttaaggaaggac

SEQ ID NO: 3772134 - DNA, 25 bp, Homo sapien
tcagtgtttgcgcagcaggtactac

SEQ ID NO: 3772135 - DNA, 25 bp, Homo sapien
ggcaagattacattcctagcatgag

SEQ ID NO: 3772136 - DNA, 25 bp, Homo sapien
caagctagagggcaatggcgtgatc

SEQ ID NO: 3772137 - DNA, 25 bp, Homo sapien
cccaagctagagggcaatggcgtga

SEQ ID NO: 3772138 - DNA, 25 bp, Homo sapien
ccaagctagagggcaatggcgtgat

SEQ ID NO: 3772139 - DNA, 25 bp, Homo sapien
aagctagagggcaatggcgtgatct

SEQ ID NO: 3772140 - DNA, 25 bp, Homo sapien
tagctaattatggtccgcggagcct

SEQ ID NO: 3772141 - DNA, 25 bp, Homo sapien
gagctgcgctgcctcgtattgattg

SEQ ID NO: 3772142 - DNA, 25 bp, Homo sapien
gagcctcaaaccgagtcgggcctgt

SEQ ID NO: 3772143 - DNA, 25 bp, Homo sapien
gccgagagaggctacagaacctgtt

SEQ ID NO: 3772144 - DNA, 25 bp, Homo sapien
tattcactgaaaccgtaagctgctg

SEQ ID NO: 3772145 - DNA, 25 bp, Homo sapien
ttgaagggcccatggtatgtctcca

SEQ ID NO: 3772146 - DNA, 25 bp, Homo sapien
catacagaggtgctccttgaagggc

SEQ ID NO: 3772147 - DNA, 25 bp, Homo sapien
tattcccatgatgacaagtgtctgc

SEQ ID NO: 3772148 - DNA, 25 bp, Homo sapien
catactagcatacttgaggaaaagc

SEQ ID NO: 3772149 - DNA, 25 bp, Homo sapien
acacctttgcattgctatggactga

SEQ ID NO: 3772150 - DNA, 25 bp, Homo sapien
tagaatcgttttggctactcagcag

SEQ ID NO: 3772151 - DNA, 25 bp, Homo sapien
gcatatcacacggagtatacaggaa

SEQ ID NO: 3772152 - DNA, 25 bp, Homo sapien
ggaaaattagtagtggtcacctgca

SEQ ID NO: 3772153 - DNA, 25 bp, Homo sapien
gagttatatttagtacccagtttgc

SEQ ID NO: 3772154 - DNA, 25 bp, Homo sapien
taccaaaagtttgcacttgacccag

SEQ ID NO: 3772155 - DNA, 25 bp, Homo sapien
caagttgctaggcatttgactttag

SEQ ID NO: 3772156 - DNA, 25 bp, Homo sapien
ggtcattcttgggtaaagaaatgac

SEQ ID NO: 3772157 - DNA, 25 bp, Homo sapien
atcaagtctctgcagcaggtcattc

SEQ ID NO: 3772158 - DNA, 25 bp, Homo sapien
agcaggtcattcttgggtaaagaaa

SEQ ID NO: 3772159 - DNA, 25 bp, Homo sapien
tctctgcagcaggtcattcttgggt

SEQ ID NO: 3772160 - DNA, 25 bp, Homo sapien
gtcaagagcctaccaaaacaaccca

SEQ ID NO: 3772161 - DNA, 25 bp, Homo sapien
tacactaagtcatacacgctcggcc

SEQ ID NO: 3772162 - DNA, 25 bp, Homo sapien
tcggccaccaggagttgcagaacat

SEQ ID NO: 3772163 - DNA, 25 bp, Homo sapien
gaaaacaaagctaacgtcaagagcc

SEQ ID NO: 3772164 - DNA, 25 bp, Homo sapien
gtggtaacatcggaagacttttata

SEQ ID NO: 3772165 - DNA, 25 bp, Homo sapien
caagaggcgtcaaaaaggctttgag

SEQ ID NO: 3772166 - DNA, 25 bp, Homo sapien
tcggaagacttttatacaagaggcg

SEQ ID NO: 3772167 - DNA, 25 bp, Homo sapien
gacttttatacaagaggcgtcaaaa

SEQ ID NO: 3772168 - DNA, 25 bp, Homo sapien
ttgcagtgggatactgaaacataaa

SEQ ID NO: 3772169 - DNA, 25 bp, Homo sapien
taaaattagttgcagtgggatactg

SEQ ID NO: 3772170 - DNA, 25 bp, Homo sapien
atgaaatgccagatcatataataat

SEQ ID NO: 3772171 - DNA, 25 bp, Homo sapien
taagacttaaaattagttgcagtgg

SEQ ID NO: 3772172 - DNA, 25 bp, Homo sapien
gcagcaagttccaagacacgtaatg

SEQ ID NO: 3772173 - DNA, 25 bp, Homo sapien
taagcctgcagctcatattactaag

SEQ ID NO: 3772174 - DNA, 25 bp, Homo sapien
actgatgaagtctatttgaaagacc

SEQ ID NO: 3772175 - DNA, 25 bp, Homo sapien
atacatgattaggaagagagacaag

SEQ ID NO: 3772176 - DNA, 25 bp, Homo sapien
tatagtacagtttgacaagcctggg

SEQ ID NO: 3772177 - DNA, 25 bp, Homo sapien
gactgtcacgatgtgtatagtacag

SEQ ID NO: 3772178 - DNA, 25 bp, Homo sapien
ttggcttcggccttgcgttttcggc

SEQ ID NO: 3772179 - DNA, 25 bp, Homo sapien
gcgttttcggcatcatctccgttaa

SEQ ID NO: 3772180 - DNA, 25 bp, Homo sapien
gctgcaaagcatctgggcactcaca

SEQ ID NO: 3772181 - DNA, 25 bp, Homo sapien
gagctctcgagtcaagcttgctagg

SEQ ID NO: 3772182 - DNA, 25 bp, Homo sapien
tttggtaggcagatctgcaggctgc

SEQ ID NO: 3772183 - DNA, 25 bp, Homo sapien
aaagcatctgggcactcacactctc

SEQ ID NO: 3772184 - DNA, 25 bp, Homo sapien
ctggagaacattcggcaatgtcccc

SEQ ID NO: 3772185 - DNA, 25 bp, Homo sapien
ttcttcaagctcccggagagcagct

SEQ ID NO: 3772186 - DNA, 25 bp, Homo sapien
gagaacattcggcaatgtccccttt

SEQ ID NO: 3772187 - DNA, 25 bp, Homo sapien
cttcaagctcccggagagcagctgc

SEQ ID NO: 3772188 - DNA, 25 bp, Homo sapien
aactggcttaggcttgggagcttgc

SEQ ID NO: 3772189 - DNA, 25 bp, Homo sapien
ctgtgaggagatgtgacttggtggt

SEQ ID NO: 3772190 - DNA, 25 bp, Homo sapien
acaggaagcctgctcatattctgct

SEQ ID NO: 3772191 - DNA, 25 bp, Homo sapien
gatccatcatgagccttcacgacca

SEQ ID NO: 3772192 - DNA, 25 bp, Homo sapien
aggagcaaactggtggccattaggg

SEQ ID NO: 3772193 - DNA, 25 bp, Homo sapien
catagtaaaacaccgaggcctggga

SEQ ID NO: 3772194 - DNA, 25 bp, Homo sapien
cattaggggactcccatggccactg

SEQ ID NO: 3772195 - DNA, 25 bp, Homo sapien
ggagcagcaacgcagactctttttc

SEQ ID NO: 3772196 - DNA, 25 bp, Homo sapien
atccctaagaagcaattcgatgttg

SEQ ID NO: 3772197 - DNA, 25 bp, Homo sapien
agcaattcgatgttgagtgactcac

SEQ ID NO: 3772198 - DNA, 25 bp, Homo sapien
cctggttcaggccaacatccctaag

SEQ ID NO: 3772199 - DNA, 25 bp, Homo sapien
aagaagcaattcgatgttgagtgac

SEQ ID NO: 3772200 - DNA, 25 bp, Homo sapien
ctgcagggaactctatgcagtagcc

SEQ ID NO: 3772201 - DNA, 25 bp, Homo sapien
agggttggaataggtttgcactcct

SEQ ID NO: 3772202 - DNA, 25 bp, Homo sapien
gggttggaataggtttgcactccta

SEQ ID NO: 3772203 - DNA, 25 bp, Homo sapien
ggttggaataggtttgcactcctac

SEQ ID NO: 3772204 - DNA, 25 bp, Homo sapien
cctggttgtacgtttcactgattcc

SEQ ID NO: 3772205 - DNA, 25 bp, Homo sapien
gttgtacgtttcactgattcccaag

SEQ ID NO: 3772206 - DNA, 25 bp, Homo sapien
tccgcagtctgctctttcctggttg

SEQ ID NO: 3772207 - DNA, 25 bp, Homo sapien
ctttcctggttgtacgtttcactga

SEQ ID NO: 3772208 - DNA, 25 bp, Homo sapien
ccgaaacagaaagcctgctaagcat

SEQ ID NO: 3772209 - DNA, 25 bp, Homo sapien
ccccgaaacagaaagcctgctaagc

SEQ ID NO: 3772210 - DNA, 25 bp, Homo sapien
gtgcccccgaaacagaaagcctgct

SEQ ID NO: 3772211 - DNA, 25 bp, Homo sapien
tctgggtgcccccgaaacagaaagc

SEQ ID NO: 3772212 - DNA, 25 bp, Homo sapien
ctcagaaaactttagtttggatcct

SEQ ID NO: 3772213 - DNA, 25 bp, Homo sapien
aaactttagtttggatcctatgtct

SEQ ID NO: 3772214 - DNA, 25 bp, Homo sapien
ttctcagaaaactttagtttggatc

SEQ ID NO: 3772215 - DNA, 25 bp, Homo sapien
cagaaaactttagtttggatcctat

SEQ ID NO: 3772216 - DNA, 25 bp, Homo sapien
ctactttctggccttggaacatggg

SEQ ID NO: 3772217 - DNA, 25 bp, Homo sapien
tagtaagagctgcaagatatcctcc

SEQ ID NO: 3772218 - DNA, 25 bp, Homo sapien
aagtgcccctactttgcatgtgtga

SEQ ID NO: 3772219 - DNA, 25 bp, Homo sapien
ggagttaccacctgcatctcgatag

SEQ ID NO: 3772220 - DNA, 25 bp, Homo sapien
tctctgctgcctcctaaggttagtc

SEQ ID NO: 3772221 - DNA, 25 bp, Homo sapien
tcctaaagactgaagaagacagtgc

SEQ ID NO: 3772222 - DNA, 25 bp, Homo sapien
ggttagtcctaaagactgaagaaga

SEQ ID NO: 3772223 - DNA, 25 bp, Homo sapien
tcctaaggttagtcctaaagactga

SEQ ID NO: 3772224 - DNA, 25 bp, Homo sapien
caatgttgttgttttctctttattt

SEQ ID NO: 3772225 - DNA, 25 bp, Homo sapien
attagcaatgttgttgttttctctt

SEQ ID NO: 3772226 - DNA, 25 bp, Homo sapien
agcaatgttgttgttttctctttat

SEQ ID NO: 3772227 - DNA, 25 bp, Homo sapien
tagcaatgttgttgttttctcttta

SEQ ID NO: 3772228 - DNA, 25 bp, Homo sapien
atccatgtacgttgttttttcaagc

SEQ ID NO: 3772229 - DNA, 25 bp, Homo sapien
tccatgtacgttgttttttcaagct

SEQ ID NO: 3772230 - DNA, 25 bp, Homo sapien
tatgaaatatctgagtccgcaaatg

SEQ ID NO: 3772231 - DNA, 25 bp, Homo sapien
ttaggccatcaacagccaagttgtg

SEQ ID NO: 3772232 - DNA, 25 bp, Homo sapien
tatctgagtccgcaaatgcatatat

SEQ ID NO: 3772233 - DNA, 25 bp, Homo sapien
gacaactacatatgaaatatctgag

SEQ ID NO: 3772234 - DNA, 25 bp, Homo sapien
tgagaagattccgttggttcttggc

SEQ ID NO: 3772235 - DNA, 25 bp, Homo sapien
tctgagaagattccgttggttcttg

SEQ ID NO: 3772236 - DNA, 25 bp, Homo sapien
attctgagaagattccgttggttct

SEQ ID NO: 3772237 - DNA, 25 bp, Homo sapien
agaagattccgttggttcttggctc

SEQ ID NO: 3772238 - DNA, 25 bp, Homo sapien
tttacagccctcaggtgagaagttc

SEQ ID NO: 3772239 - DNA, 25 bp, Homo sapien
tacagccctcaggtgagaagttcac

SEQ ID NO: 3772240 - DNA, 25 bp, Homo sapien
tcaaacgagtctttacagccctcag

SEQ ID NO: 3772241 - DNA, 25 bp, Homo sapien
tttcaaacgagtctttacagccctc

SEQ ID NO: 3772242 - DNA, 25 bp, Homo sapien
catgtcgatgttattgtactgggaa

SEQ ID NO: 3772243 - DNA, 25 bp, Homo sapien
tcaagtgggtcctttcaatctggaa

SEQ ID NO: 3772244 - DNA, 25 bp, Homo sapien
cctctggaagcttgtagttagtcac

SEQ ID NO: 3772245 - DNA, 25 bp, Homo sapien
gctgttgagaagtccaaagctattc

SEQ ID NO: 3772246 - DNA, 25 bp, Homo sapien
taaagtcaggcatcaaattgggcat

SEQ ID NO: 3772247 - DNA, 25 bp, Homo sapien
ttatgattgtcttgttaaagtcagg

SEQ ID NO: 3772248 - DNA, 25 bp, Homo sapien
tatgattgtcttgttaaagtcaggc

SEQ ID NO: 3772249 - DNA, 25 bp, Homo sapien
gtcttgttaaagtcaggcatcaaat

SEQ ID NO: 3772250 - DNA, 25 bp, Homo sapien
catgcagatgtggtccctttcccct

SEQ ID NO: 3772251 - DNA, 25 bp, Homo sapien
tgcagatgtggtccctttccccttc

SEQ ID NO: 3772252 - DNA, 25 bp, Homo sapien
gtgactggcttgccccggttactta

SEQ ID NO: 3772253 - DNA, 25 bp, Homo sapien
tgactggcttgccccggttacttac

SEQ ID NO: 3772254 - DNA, 25 bp, Homo sapien
ctctcgcggtgctaaaaggatgggc

SEQ ID NO: 3772255 - DNA, 25 bp, Homo sapien
taaaattcctctctcgacacttcgg

SEQ ID NO: 3772256 - DNA, 25 bp, Homo sapien
gacgaaataactagctggaggcagc

SEQ ID NO: 3772257 - DNA, 25 bp, Homo sapien
tgtgtcaagcgtatgccccgggatt

SEQ ID NO: 3772258 - DNA, 25 bp, Homo sapien
cactaccaattaacagtggtggttt

SEQ ID NO: 3772259 - DNA, 25 bp, Homo sapien
tagcttctgagctacagagtacact

SEQ ID NO: 3772260 - DNA, 25 bp, Homo sapien
agagtacactaccaattaacagtgg

SEQ ID NO: 3772261 - DNA, 25 bp, Homo sapien
tttttgtactagaggatagcttctg

SEQ ID NO: 3772262 - DNA, 25 bp, Homo sapien
gagaagttacacacgtgcagcccag

SEQ ID NO: 3772263 - DNA, 25 bp, Homo sapien
tatctgagaacaacttaaacggcga

SEQ ID NO: 3772264 - DNA, 25 bp, Homo sapien
gctgctgaggccgacagagaagtta

SEQ ID NO: 3772265 - DNA, 25 bp, Homo sapien
ccttgggaagcgcagagtgtaacac

SEQ ID NO: 3772266 - DNA, 25 bp, Homo sapien
caggacaccgtgtccccctctctca

SEQ ID NO: 3772267 - DNA, 25 bp, Homo sapien
tccatccggatttagtcatgctcag

SEQ ID NO: 3772268 - DNA, 25 bp, Homo sapien
gctcagatacctcccatccgaaaaa

SEQ ID NO: 3772269 - DNA, 25 bp, Homo sapien
caactctgtccatccggatttagtc

SEQ ID NO: 3772270 - DNA, 25 bp, Homo sapien
acgggcggatcaggaagtcagggta

SEQ ID NO: 3772271 - DNA, 25 bp, Homo sapien
ccgagcagtgtggacatcagccact

SEQ ID NO: 3772272 - DNA, 25 bp, Homo sapien
gatcttaaacataggaaaaccatac

SEQ ID NO: 3772273 - DNA, 25 bp, Homo sapien
accctgatgcgggtgggccgagcag

SEQ ID NO: 3772274 - DNA, 25 bp, Homo sapien
gccactttttatattcatgtacatt

SEQ ID NO: 3772275 - DNA, 25 bp, Homo sapien
ggttggggtaaatatgtgctttgtc

SEQ ID NO: 3772276 - DNA, 25 bp, Homo sapien
ggtaaatatgtgctttgtcctgcag

SEQ ID NO: 3772277 - DNA, 25 bp, Homo sapien
ctgaagagaagacgctgctgcagtt

SEQ ID NO: 3772278 - DNA, 25 bp, Homo sapien
gaagagaagacgctgctgcagttgc

SEQ ID NO: 3772279 - DNA, 25 bp, Homo sapien
tccacgacccttaaaacatcctcag

SEQ ID NO: 3772280 - DNA, 25 bp, Homo sapien
tctgtaataaccaaccagttgggct

SEQ ID NO: 3772281 - DNA, 25 bp, Homo sapien
gcttgcaaacctgcttctatcttcc

SEQ ID NO: 3772282 - DNA, 25 bp, Homo sapien
ccccatgtaatttcactctgatctg

SEQ ID NO: 3772283 - DNA, 25 bp, Homo sapien
ccgagggacagcgtgggagggtggt

SEQ ID NO: 3772284 - DNA, 25 bp, Homo sapien
agctcccgagggacagcgtgggagg

SEQ ID NO: 3772285 - DNA, 25 bp, Homo sapien
ttcccctcagctcccgagggacagc

SEQ ID NO: 3772286 - DNA, 25 bp, Homo sapien
ccctcagctcccgagggacagcgtg

SEQ ID NO: 3772287 - DNA, 25 bp, Homo sapien
tgtttaagcgccaaacactgagttt

SEQ ID NO: 3772288 - DNA, 25 bp, Homo sapien
cagaatatgacacaacttccagagg

SEQ ID NO: 3772289 - DNA, 25 bp, Homo sapien
gaggccaagttcacagaatatgaca

SEQ ID NO: 3772290 - DNA, 25 bp, Homo sapien
cattttagtggccaggaccaatgtg

SEQ ID NO: 3772291 - DNA, 25 bp, Homo sapien
gggcctgccagttcttatcttcctc

SEQ ID NO: 3772292 - DNA, 25 bp, Homo sapien
agaggagcagaatctgtaagggtga

SEQ ID NO: 3772293 - DNA, 25 bp, Homo sapien
agcagaatctgtaagggtgagagca

SEQ ID NO: 3772294 - DNA, 25 bp, Homo sapien
taagggtgagagcagtagagacaca

SEQ ID NO: 3772295 - DNA, 25 bp, Homo sapien
aggagcagaatctgtaagggtgaga

SEQ ID NO: 3772296 - DNA, 25 bp, Homo sapien
gcttaatgaggagcttcttgcaaaa

SEQ ID NO: 3772297 - DNA, 25 bp, Homo sapien
ccaagacaggactcacagcttaatg

SEQ ID NO: 3772298 - DNA, 25 bp, Homo sapien
tggttaaattgagcgcaacactaag

SEQ ID NO: 3772299 - DNA, 25 bp, Homo sapien
aaagctggccttctagctggttgaa

SEQ ID NO: 3772300 - DNA, 25 bp, Homo sapien
ctcaggagggctgtcttacaaccag

SEQ ID NO: 3772301 - DNA, 25 bp, Homo sapien
gatgaaggctcggtatttggagttc

SEQ ID NO: 3772302 - DNA, 25 bp, Homo sapien
tttggagttcccaggtaggagttca

SEQ ID NO: 3772303 - DNA, 25 bp, Homo sapien
tcccaggtaggagttcaggtttgtc

SEQ ID NO: 3772304 - DNA, 25 bp, Homo sapien
catttccaggccctacgaccaactc

SEQ ID NO: 3772305 - DNA, 25 bp, Homo sapien
tgcctgaatatgcattgtcttgcat

SEQ ID NO: 3772306 - DNA, 25 bp, Homo sapien
aggccctacgaccaactcagtgcct

SEQ ID NO: 3772307 - DNA, 25 bp, Homo sapien
agtgcctgaatatgcattgtcttgc

SEQ ID NO: 3772308 - DNA, 25 bp, Homo sapien
cagataggatctgggcataatgaag

SEQ ID NO: 3772309 - DNA, 25 bp, Homo sapien
gataggatctgggcataatgaagcc

SEQ ID NO: 3772310 - DNA, 25 bp, Homo sapien
tcagataggatctgggcataatgaa

SEQ ID NO: 3772311 - DNA, 25 bp, Homo sapien
taggatctgggcataatgaagccac

SEQ ID NO: 3772312 - DNA, 25 bp, Homo sapien
ttttattcacatgccggcctctcaa

SEQ ID NO: 3772313 - DNA, 25 bp, Homo sapien
attttattcacatgccggcctctca

SEQ ID NO: 3772314 - DNA, 25 bp, Homo sapien
cacacttcccgtgctttcttcaggc

SEQ ID NO: 3772315 - DNA, 25 bp, Homo sapien
ttcttgctgcccacacttcccgtgc

SEQ ID NO: 3772316 - DNA, 25 bp, Homo sapien
gacagaaattggaatcaaagagtgc

SEQ ID NO: 3772317 - DNA, 25 bp, Homo sapien
cagaaattggaatcaaagagtgcat

SEQ ID NO: 3772318 - DNA, 25 bp, Homo sapien
acagaaattggaatcaaagagtgca

SEQ ID NO: 3772319 - DNA, 25 bp, Homo sapien
tgacagaaattggaatcaaagagtg

SEQ ID NO: 3772320 - DNA, 25 bp, Homo sapien
tacagtagctcaaggtatggaagct

SEQ ID NO: 3772321 - DNA, 25 bp, Homo sapien
gatgaatttcggtctgtgatgcagg

SEQ ID NO: 3772322 - DNA, 25 bp, Homo sapien
gatgcaggttcattgagttcagaca

SEQ ID NO: 3772323 - DNA, 25 bp, Homo sapien
ggaaatcagccttattgcaccaaca

SEQ ID NO: 3772324 - DNA, 25 bp, Homo sapien
agacgtgtttcgaaatgttggtcag

SEQ ID NO: 3772325 - DNA, 25 bp, Homo sapien
agagacgtgtttcgaaatgttggtc

SEQ ID NO: 3772326 - DNA, 25 bp, Homo sapien
ggttcaagcaaatttcatgctaatt

SEQ ID NO: 3772327 - DNA, 25 bp, Homo sapien
gagacgtgtttcgaaatgttggtca

SEQ ID NO: 3772328 - DNA, 25 bp, Homo sapien
ctgtaactgaaggttccgcatgagt

SEQ ID NO: 3772329 - DNA, 25 bp, Homo sapien
tctgggactgcgatgtctcattgtg

SEQ ID NO: 3772330 - DNA, 25 bp, Homo sapien
ggttccgcatgagtcacggacttcc

SEQ ID NO: 3772331 - DNA, 25 bp, Homo sapien
cattgtggggcctgcctgtaactga

SEQ ID NO: 3772332 - DNA, 25 bp, Homo sapien
gcagggcagcaacccaggggcttgg

SEQ ID NO: 3772333 - DNA, 25 bp, Homo sapien
gggcagcaacccaggggcttggtaa

SEQ ID NO: 3772334 - DNA, 25 bp, Homo sapien
gtgcagggcagcaacccaggggctt

SEQ ID NO: 3772335 - DNA, 25 bp, Homo sapien
tggtgcagggcagcaacccaggggc

SEQ ID NO: 3772336 - DNA, 25 bp, Homo sapien
cagaacaatgctggatttccgggta

SEQ ID NO: 3772337 - DNA, 25 bp, Homo sapien
gaagttggagttctgtgcttagaaa

SEQ ID NO: 3772338 - DNA, 25 bp, Homo sapien
gacattgtgcttgtttacttcctgg

SEQ ID NO: 3772339 - DNA, 25 bp, Homo sapien
aataattgggcgttgtgaaggctgc

SEQ ID NO: 3772340 - DNA, 25 bp, Homo sapien
ctgattggatccacacacccagcat

SEQ ID NO: 3772341 - DNA, 25 bp, Homo sapien
ctgaacgaggaagccaaatacttgt

SEQ ID NO: 3772342 - DNA, 25 bp, Homo sapien
agactgaacgaggaagccaaatact

SEQ ID NO: 3772343 - DNA, 25 bp, Homo sapien
tggtctgttttctgcgtgaggctgt

SEQ ID NO: 3772344 - DNA, 25 bp, Homo sapien
tgcgtgaggctgtctgcaaagtcct

SEQ ID NO: 3772345 - DNA, 25 bp, Homo sapien
ggcagacgatcacttctttccactg

SEQ ID NO: 3772346 - DNA, 25 bp, Homo sapien
gaggcgaagtgttgataccaagaaa

SEQ ID NO: 3772347 - DNA, 25 bp, Homo sapien
ggttagttttggcagtccataggaa

SEQ ID NO: 3772348 - DNA, 25 bp, Homo sapien
ttccgatcaagaggtcgcccctgca

SEQ ID NO: 3772349 - DNA, 25 bp, Homo sapien
gcgctcttgggaggggagcgggaca

SEQ ID NO: 3772350 - DNA, 25 bp, Homo sapien
tcttgggaggggagcgggacatccc

SEQ ID NO: 3772351 - DNA, 25 bp, Homo sapien
tggcccggcgctcttgggaggggag

SEQ ID NO: 3772352 - DNA, 25 bp, Homo sapien
ccgtggcccggcgctcttgggaggg

SEQ ID NO: 3772353 - DNA, 25 bp, Homo sapien
acccagcctgtcaccgcgtcctcat

SEQ ID NO: 3772354 - DNA, 25 bp, Homo sapien
cactaccgcggcagaaacccagcct

SEQ ID NO: 3772355 - DNA, 25 bp, Homo sapien
cgtcctcattgtcccgttctcggcg

SEQ ID NO: 3772356 - DNA, 25 bp, Homo sapien
gtcaccgcgtcctcattgtcccgtt

SEQ ID NO: 3772357 - DNA, 25 bp, Homo sapien
ccccgagcgcgcccgacgcgtgggc

SEQ ID NO: 3772358 - DNA, 25 bp, Homo sapien
cccccgagcgcgcccgacgcgtggg

SEQ ID NO: 3772359 - DNA, 25 bp, Homo sapien
gagcctcaccggagggtctgtgcat

SEQ ID NO: 3772360 - DNA, 25 bp, Homo sapien
gtctgtgcatttcacgcgggctcgg

SEQ ID NO: 3772361 - DNA, 25 bp, Homo sapien
taggcaagactttgggtggccacgc

SEQ ID NO: 3772362 - DNA, 25 bp, Homo sapien
ggaattggcatctgcacgtacgagg

SEQ ID NO: 3772363 - DNA, 25 bp, Homo sapien
tggcaggaacgctccaagcatgtgc

SEQ ID NO: 3772364 - DNA, 25 bp, Homo sapien
gggctgcatcgagtcccatgctgat

SEQ ID NO: 3772365 - DNA, 25 bp, Homo sapien
gttttgtttcggagcggctcagaat

SEQ ID NO: 3772366 - DNA, 25 bp, Homo sapien
gaaataatccgaagtcgatggcagg

SEQ ID NO: 3772367 - DNA, 25 bp, Homo sapien
tcaggacctgccgaatgagtctgaa

SEQ ID NO: 3772368 - DNA, 25 bp, Homo sapien
ggacctgccgaatgagtctgaagtt

SEQ ID NO: 3772369 - DNA, 25 bp, Homo sapien
gaatcaggacctgccgaatgagtct

SEQ ID NO: 3772370 - DNA, 25 bp, Homo sapien
aagagaatcaggacctgccgaatga

SEQ ID NO: 3772371 - DNA, 25 bp, Homo sapien
ttgtcatccaggacccgcactgtgg

SEQ ID NO: 3772372 - DNA, 25 bp, Homo sapien
gcttgtcatccaggacccgcactgt

SEQ ID NO: 3772373 - DNA, 25 bp, Homo sapien
tgtcatccaggacccgcactgtggc

SEQ ID NO: 3772374 - DNA, 25 bp, Homo sapien
tcatccaggacccgcactgtggccg

SEQ ID NO: 3772375 - DNA, 25 bp, Homo sapien
tgtgaatgctttcctgtccgtggct

SEQ ID NO: 3772376 - DNA, 25 bp, Homo sapien
tgaatgctttcctgtccgtggcttg

SEQ ID NO: 3772377 - DNA, 25 bp, Homo sapien
ctttcctgtccgtggcttgttccca

SEQ ID NO: 3772378 - DNA, 25 bp, Homo sapien
atgctttcctgtccgtggcttgttc

SEQ ID NO: 3772379 - DNA, 25 bp, Homo sapien
cgggtgactgatgccctgtcccctg

SEQ ID NO: 3772380 - DNA, 25 bp, Homo sapien
cctgtcccctgactgactcgtgcag

SEQ ID NO: 3772381 - DNA, 25 bp, Homo sapien
gcctccgggtgactgatgccctgtc

SEQ ID NO: 3772382 - DNA, 25 bp, Homo sapien
cctgtagcctccgggtgactgatgc

SEQ ID NO: 3772383 - DNA, 25 bp, Homo sapien
aaaaatggggatttgccctctggtg

SEQ ID NO: 3772384 - DNA, 25 bp, Homo sapien
ccagagcgcttctctggcagaacag

SEQ ID NO: 3772385 - DNA, 25 bp, Homo sapien
ggcagaacagcctcttggactccag

SEQ ID NO: 3772386 - DNA, 25 bp, Homo sapien
gagatgactgtgggtggtttccacc

SEQ ID NO: 3772387 - DNA, 25 bp, Homo sapien
gatcctgtcgccaagatgagacctg

SEQ ID NO: 3772388 - DNA, 25 bp, Homo sapien
gatagagtcttcgtgagcacagtgg

SEQ ID NO: 3772389 - DNA, 25 bp, Homo sapien
cagtaattcgtgtagcttggcagtg

SEQ ID NO: 3772390 - DNA, 25 bp, Homo sapien
aatcagcagcgggacagatcctgtc

SEQ ID NO: 3772391 - DNA, 25 bp, Homo sapien
atcacctgctgtctgccgctctgca

SEQ ID NO: 3772392 - DNA, 25 bp, Homo sapien
tcacctgctgtctgccgctctgcat

SEQ ID NO: 3772393 - DNA, 25 bp, Homo sapien
cggtaaaggcgtggcttgcgatttc

SEQ ID NO: 3772394 - DNA, 25 bp, Homo sapien
aagcacattgtcgtgtcgtctgtgt

SEQ ID NO: 3772395 - DNA, 25 bp, Homo sapien
ggcttgcgatttcacttgggaagca

SEQ ID NO: 3772396 - DNA, 25 bp, Homo sapien
cacttgatgagcctgcggtaaaggc

SEQ ID NO: 3772397 - DNA, 25 bp, Homo sapien
ccaccatactccatggaaggtcctt

SEQ ID NO: 3772398 - DNA, 25 bp, Homo sapien
caccaccatactccatggaaggtcc

SEQ ID NO: 3772399 - DNA, 25 bp, Homo sapien
accatactccatggaaggtccttcc

SEQ ID NO: 3772400 - DNA, 25 bp, Homo sapien
atcccgcagctgatggagacaccac

SEQ ID NO: 3772401 - DNA, 25 bp, Homo sapien
ctccgggacttgtgcagcctgcctg

SEQ ID NO: 3772402 - DNA, 25 bp, Homo sapien
tccagtctgtgtgttcccccttggg

SEQ ID NO: 3772403 - DNA, 25 bp, Homo sapien
catgagctccgggacttgtgcagcc

SEQ ID NO: 3772404 - DNA, 25 bp, Homo sapien
agcctgcctgtttccagtctgtgtg

SEQ ID NO: 3772405 - DNA, 25 bp, Homo sapien
catgatggacgcgtgagcatgtgtc

SEQ ID NO: 3772406 - DNA, 25 bp, Homo sapien
ctgagcagacatgccggccagaaca

SEQ ID NO: 3772407 - DNA, 25 bp, Homo sapien
cgtgagcatgtgtccaaacttgagg

SEQ ID NO: 3772408 - DNA, 25 bp, Homo sapien
gaagacatgatggacgcgtgagcat

SEQ ID NO: 3772409 - DNA, 25 bp, Homo sapien
tattgtgtccgcatcattgtccact

SEQ ID NO: 3772410 - DNA, 25 bp, Homo sapien
catttttctcgtgactgctgttggg

SEQ ID NO: 3772411 - DNA, 25 bp, Homo sapien
cttatgcccagggataatgggttca

SEQ ID NO: 3772412 - DNA, 25 bp, Homo sapien
tggggaacggttgccaaaatcgtca

SEQ ID NO: 3772413 - DNA, 25 bp, Homo sapien
ggccctccaaccagagtcttcatga

SEQ ID NO: 3772414 - DNA, 25 bp, Homo sapien
tccaaccagagtcttcatgagtctc

SEQ ID NO: 3772415 - DNA, 25 bp, Homo sapien
cagagtcttcatgagtctctggctt

SEQ ID NO: 3772416 - DNA, 25 bp, Homo sapien
cttcatgagtctctggcttaacccc

SEQ ID NO: 3772417 - DNA, 25 bp, Homo sapien
tccaggaaatgcgttcttctggttt

SEQ ID NO: 3772418 - DNA, 25 bp, Homo sapien
caggaaatgcgttcttctggtttaa

SEQ ID NO: 3772419 - DNA, 25 bp, Homo sapien
gagtgtgacgtaggcctccaggaaa

SEQ ID NO: 3772420 - DNA, 25 bp, Homo sapien
aactgtaccagagtgtgacgtaggc

SEQ ID NO: 3772421 - DNA, 25 bp, Homo sapien
tgggaacgcccccatggttgccttc

SEQ ID NO: 3772422 - DNA, 25 bp, Homo sapien
ctgactctaggtcccttctctccag

SEQ ID NO: 3772423 - DNA, 25 bp, Homo sapien
actgaagcgtctctgggaacgcccc

SEQ ID NO: 3772424 - DNA, 25 bp, Homo sapien
cttctcactgaagcgtctctgggaa

SEQ ID NO: 3772425 - DNA, 25 bp, Homo sapien
ccctcatggtccctattacggtgga

SEQ ID NO: 3772426 - DNA, 25 bp, Homo sapien
tacactcatgattgggagaggaagt

SEQ ID NO: 3772427 - DNA, 25 bp, Homo sapien
tattacggtggacttggcgcctaca

SEQ ID NO: 3772428 - DNA, 25 bp, Homo sapien
tgtaatcgtgtattcagcaccacgt

SEQ ID NO: 3772429 - DNA, 25 bp, Homo sapien
gagctcagaagtttctgacttttcc

SEQ ID NO: 3772430 - DNA, 25 bp, Homo sapien
cataaggcttggcagaatgcggaga

SEQ ID NO: 3772431 - DNA, 25 bp, Homo sapien
tagagctttaggctgtgcttccacc

SEQ ID NO: 3772432 - DNA, 25 bp, Homo sapien
tgcggatccacattggttcccatct

SEQ ID NO: 3772433 - DNA, 25 bp, Homo sapien
ctggcttcatatgctcctcttgttg

SEQ ID NO: 3772434 - DNA, 25 bp, Homo sapien
catatgctcctcttgttgatagtag

SEQ ID NO: 3772435 - DNA, 25 bp, Homo sapien
cttcatatgctcctcttgttgatag

SEQ ID NO: 3772436 - DNA, 25 bp, Homo sapien
tggcttcatatgctcctcttgttga

SEQ ID NO: 3772437 - DNA, 25 bp, Homo sapien
tcttttatcacagtcctcatctcct

SEQ ID NO: 3772438 - DNA, 25 bp, Homo sapien
ggcttttcttttatcacagtcctca

SEQ ID NO: 3772439 - DNA, 25 bp, Homo sapien
tctcctggtgcctcctgcaacccca

SEQ ID NO: 3772440 - DNA, 25 bp, Homo sapien
cattttacagcaaatggggcttttc

SEQ ID NO: 3772441 - DNA, 25 bp, Homo sapien
tgagctggtggcgttgatgactgtt

SEQ ID NO: 3772442 - DNA, 25 bp, Homo sapien
gactgttgatgggatgaatagaggg

SEQ ID NO: 3772443 - DNA, 25 bp, Homo sapien
gctggtggcgttgatgactgttgat

SEQ ID NO: 3772444 - DNA, 25 bp, Homo sapien
gtggcgttgatgactgttgatggga

SEQ ID NO: 3772445 - DNA, 25 bp, Homo sapien
ttggatgactcaagggtctccgctc

SEQ ID NO: 3772446 - DNA, 25 bp, Homo sapien
gcgctagtattacactgagacctgg

SEQ ID NO: 3772447 - DNA, 25 bp, Homo sapien
ggttagtcttgtgctacgacgtgca

SEQ ID NO: 3772448 - DNA, 25 bp, Homo sapien
ccattcgcattagactgtgggcaga

SEQ ID NO: 3772449 - DNA, 25 bp, Homo sapien
gagctcctgccacgtctgttctgtg

SEQ ID NO: 3772450 - DNA, 25 bp, Homo sapien
caggtggagctcctgccacgtctgt

SEQ ID NO: 3772451 - DNA, 25 bp, Homo sapien
cgtctgttctgtgagctcgcctctt

SEQ ID NO: 3772452 - DNA, 25 bp, Homo sapien
gtctgttctgtgagctcgcctcttc

SEQ ID NO: 3772453 - DNA, 25 bp, Homo sapien
tggtccttgttgcctaggaggctga

SEQ ID NO: 3772454 - DNA, 25 bp, Homo sapien
tggcttgtgctgtggtccttgttgc

SEQ ID NO: 3772455 - DNA, 25 bp, Homo sapien
gctgtggtccttgttgcctaggagg

SEQ ID NO: 3772456 - DNA, 25 bp, Homo sapien
gtggcttgtgctgtggtccttgttg

SEQ ID NO: 3772457 - DNA, 25 bp, Homo sapien
tgattctcaaagtacaagtctgacc

SEQ ID NO: 3772458 - DNA, 25 bp, Homo sapien
aagtctgaccatgttattcctctgt

SEQ ID NO: 3772459 - DNA, 25 bp, Homo sapien
tccacagtgggtccaaagtgattct

SEQ ID NO: 3772460 - DNA, 25 bp, Homo sapien
tggccccagtccagcgtattttcca

SEQ ID NO: 3772461 - DNA, 25 bp, Homo sapien
taattcccaaatgaacacgatccgc

SEQ ID NO: 3772462 - DNA, 25 bp, Homo sapien
cctgttgacctttgcatgctccgtg

SEQ ID NO: 3772463 - DNA, 25 bp, Homo sapien
tgaaaagacggattgctcagcaaag

SEQ ID NO: 3772464 - DNA, 25 bp, Homo sapien
caaagcgctgtggtcaataattccc

SEQ ID NO: 3772465 - DNA, 25 bp, Homo sapien
catttgaattaattacacgactttt

SEQ ID NO: 3772466 - DNA, 25 bp, Homo sapien
tcatttgaattaattacacgacttt

SEQ ID NO: 3772467 - DNA, 25 bp, Homo sapien
cagagtctgagaacgaggcagtaca

SEQ ID NO: 3772468 - DNA, 25 bp, Homo sapien
tacattgctgattttgcaaacacac

SEQ ID NO: 3772469 - DNA, 25 bp, Homo sapien
gcaaacacactgagaccagacagct

SEQ ID NO: 3772470 - DNA, 25 bp, Homo sapien
aaacacactgagaccagacagctgc

SEQ ID NO: 3772471 - DNA, 25 bp, Homo sapien
tccgcagaggatttgaggatgttct

SEQ ID NO: 3772472 - DNA, 25 bp, Homo sapien
tcccttttggccatgcggcagggtc

SEQ ID NO: 3772473 - DNA, 25 bp, Homo sapien
cccttttggccatgcggcagggtct

SEQ ID NO: 3772474 - DNA, 25 bp, Homo sapien
ttctcctggcgtcacagttcctcca

SEQ ID NO: 3772475 - DNA, 25 bp, Homo sapien
gggttttggatacatcagaggagca

SEQ ID NO: 3772476 - DNA, 25 bp, Homo sapien
gatttccagattccaagggctgtct

SEQ ID NO: 3772477 - DNA, 25 bp, Homo sapien
tctggagacactgggccgcgtttct

SEQ ID NO: 3772478 - DNA, 25 bp, Homo sapien
ctgagagcctgggagctctaatttg

SEQ ID NO: 3772479 - DNA, 25 bp, Homo sapien
aaggccagattccacccacctgctc

SEQ ID NO: 3772480 - DNA, 25 bp, Homo sapien
gctggacactctcgaaggccagatt

SEQ ID NO: 3772481 - DNA, 25 bp, Homo sapien
gtctgtgctggacactctcgaaggc

SEQ ID NO: 3772482 - DNA, 25 bp, Homo sapien
caagatggtgccgtctcggcaatgg

SEQ ID NO: 3772483 - DNA, 25 bp, Homo sapien
gaaggtgagacgtgctctgtgccca

SEQ ID NO: 3772484 - DNA, 25 bp, Homo sapien
aaggtgagacgtgctctgtgcccag

SEQ ID NO: 3772485 - DNA, 25 bp, Homo sapien
cgccttgagcttgggaccttttcct

SEQ ID NO: 3772486 - DNA, 25 bp, Homo sapien
tgatggaccatgcttggcaaagtgc

SEQ ID NO: 3772487 - DNA, 25 bp, Homo sapien
cttggcaaagtgcaattcaggtgtc

SEQ ID NO: 3772488 - DNA, 25 bp, Homo sapien
ttcaggtgtctgaagtcgtgggtcc

SEQ ID NO: 3772489 - DNA, 25 bp, Homo sapien
actttgcttcccctgtcgtgatgga

SEQ ID NO: 3772490 - DNA, 25 bp, Homo sapien
cacatgttaagctgcccttggtgtc

SEQ ID NO: 3772491 - DNA, 25 bp, Homo sapien
gaattatacatgtggctattgtccc

SEQ ID NO: 3772492 - DNA, 25 bp, Homo sapien
cttggagaaggaccacatgttaagc

SEQ ID NO: 3772493 - DNA, 25 bp, Homo sapien
gtcaatgtgcacatcggtgaagggt

SEQ ID NO: 3772494 - DNA, 25 bp, Homo sapien
agggtcccggttgtagagccacact

SEQ ID NO: 3772495 - DNA, 25 bp, Homo sapien
cacatcggtgaagggtcccggttgt

SEQ ID NO: 3772496 - DNA, 25 bp, Homo sapien
tgaagggtcccggttgtagagccac

SEQ ID NO: 3772497 - DNA, 25 bp, Homo sapien
tgctgtctttgatataagacgaatc

SEQ ID NO: 3772498 - DNA, 25 bp, Homo sapien
gagggatcgaggacttacttgtttg

SEQ ID NO: 3772499 - DNA, 25 bp, Homo sapien
gacgaatctgaggagattttgtttt

SEQ ID NO: 3772500 - DNA, 25 bp, Homo sapien
ctgagagagggatcgaggacttact

SEQ ID NO: 3772501 - DNA, 25 bp, Homo sapien
gagaatgagtagaatttagtcagac

SEQ ID NO: 3772502 - DNA, 25 bp, Homo sapien
tagtcagacttagctttggttctgc

SEQ ID NO: 3772503 - DNA, 25 bp, Homo sapien
cttggagaatgagtagaatttagtc

SEQ ID NO: 3772504 - DNA, 25 bp, Homo sapien
aatttagtcagacttagctttggtt

SEQ ID NO: 3772505 - DNA, 25 bp, Homo sapien
gcttcctttcacatgaagacaggcc

SEQ ID NO: 3772506 - DNA, 25 bp, Homo sapien
tttgttttggcttcctttcacatga

SEQ ID NO: 3772507 - DNA, 25 bp, Homo sapien
tgttttggcttcctttcacatgaag

SEQ ID NO: 3772508 - DNA, 25 bp, Homo sapien
ttcctttcacatgaagacaggccat

SEQ ID NO: 3772509 - DNA, 25 bp, Homo sapien
tatccggaaatggagtgtgatcaca

SEQ ID NO: 3772510 - DNA, 25 bp, Homo sapien
gggcacgtacggctgagtcatccaa

SEQ ID NO: 3772511 - DNA, 25 bp, Homo sapien
tgagaagaaattatccccggaccat

SEQ ID NO: 3772512 - DNA, 25 bp, Homo sapien
aacatgaaatgtgactatccggaaa

SEQ ID NO: 3772513 - DNA, 25 bp, Homo sapien
tctgtgggcttcccacgggttccca

SEQ ID NO: 3772514 - DNA, 25 bp, Homo sapien
cctcctggccagctgggtaagtctg

SEQ ID NO: 3772515 - DNA, 25 bp, Homo sapien
ctggccagctgggtaagtctgttct

SEQ ID NO: 3772516 - DNA, 25 bp, Homo sapien
acctcagaagcagtccgcctagccc

SEQ ID NO: 3772517 - DNA, 25 bp, Homo sapien
cttcttgggacctggtatccccagg

SEQ ID NO: 3772518 - DNA, 25 bp, Homo sapien
aggatttccaccctggggcagctct

SEQ ID NO: 3772519 - DNA, 25 bp, Homo sapien
ttgaggatttccaccctggggcagc

SEQ ID NO: 3772520 - DNA, 25 bp, Homo sapien
gggcagctcttttcctgtctcagct

SEQ ID NO: 3772521 - DNA, 25 bp, Homo sapien
ctggggcagctcttttcctgtctca

SEQ ID NO: 3772522 - DNA, 25 bp, Homo sapien
caggaaccagagcaacagagacatt

SEQ ID NO: 3772523 - DNA, 25 bp, Homo sapien
ggccaatagccccttaattgaggga

SEQ ID NO: 3772524 - DNA, 25 bp, Homo sapien
cctccttttccaagtggccaatagc

SEQ ID NO: 3772525 - DNA, 25 bp, Homo sapien
aattgagggagaggaaccatccagg

SEQ ID NO: 3772526 - DNA, 25 bp, Homo sapien
tgagcaacatggatcaaagccgtgg

SEQ ID NO: 3772527 - DNA, 25 bp, Homo sapien
gcatctctaggtctgcaacagcaag

SEQ ID NO: 3772528 - DNA, 25 bp, Homo sapien
tcctgacaaccagtgcagactatag

SEQ ID NO: 3772529 - DNA, 25 bp, Homo sapien
gatttgcgagtctgggcttttcctg

SEQ ID NO: 3772530 - DNA, 25 bp, Homo sapien
gatctgtcctcttagaatctcaggg

SEQ ID NO: 3772531 - DNA, 25 bp, Homo sapien
tgtcctcttagaatctcagggtgga

SEQ ID NO: 3772532 - DNA, 25 bp, Homo sapien
tcctcttagaatctcagggtggact

SEQ ID NO: 3772533 - DNA, 25 bp, Homo sapien
gacttgggaggatgtgatctttgct

SEQ ID NO: 3772534 - DNA, 25 bp, Homo sapien
aggaagcttggacagcatctctggg

SEQ ID NO: 3772535 - DNA, 25 bp, Homo sapien
ggctggccagggcagttgctgcagc

SEQ ID NO: 3772536 - DNA, 25 bp, Homo sapien
tggacagcatctctggggctggcca

SEQ ID NO: 3772537 - DNA, 25 bp, Homo sapien
gggctggccagggcagttgctgcag

SEQ ID NO: 3772538 - DNA, 25 bp, Homo sapien
tgaggacaggatcgtcctcatccac

SEQ ID NO: 3772539 - DNA, 25 bp, Homo sapien
tgtgaggacaggatcgtcctcatcc

SEQ ID NO: 3772540 - DNA, 25 bp, Homo sapien
gaggacaggatcgtcctcatccacc

SEQ ID NO: 3772541 - DNA, 25 bp, Homo sapien
gtgaggacaggatcgtcctcatcca

SEQ ID NO: 3772542 - DNA, 25 bp, Homo sapien
gctgactgtaaacagcacctcgttc

SEQ ID NO: 3772543 - DNA, 25 bp, Homo sapien
cgttcaaggtggtgaacctgtttct

SEQ ID NO: 3772544 - DNA, 25 bp, Homo sapien
tgtctgtgttgaccgctgactgtaa

SEQ ID NO: 3772545 - DNA, 25 bp, Homo sapien
ttgggcatgagacccaaatgctgtc

SEQ ID NO: 3772546 - DNA, 25 bp, Homo sapien
atcgtctggccccataagtcccttc

SEQ ID NO: 3772547 - DNA, 25 bp, Homo sapien
gaaacccagctctccgttctgtctg

SEQ ID NO: 3772548 - DNA, 25 bp, Homo sapien
agcaggcctgcccatctgtacactg

SEQ ID NO: 3772549 - DNA, 25 bp, Homo sapien
ccatctgtacactggaggaaaccca

SEQ ID NO: 3772550 - DNA, 25 bp, Homo sapien
tcctggccccaacgagtcccagcat

SEQ ID NO: 3772551 - DNA, 25 bp, Homo sapien
tggccccaacgagtcccagcattta

SEQ ID NO: 3772552 - DNA, 25 bp, Homo sapien
cccaacgagtcccagcatttatagg

SEQ ID NO: 3772553 - DNA, 25 bp, Homo sapien
aacgagtcccagcatttataggcat

SEQ ID NO: 3772554 - DNA, 25 bp, Homo sapien
tattttaacagtaatacggggtgca

SEQ ID NO: 3772555 - DNA, 25 bp, Homo sapien
tatttcctggaattccaaatccaag

SEQ ID NO: 3772556 - DNA, 25 bp, Homo sapien
tcctggaattccaaatccaaggtac

SEQ ID NO: 3772557 - DNA, 25 bp, Homo sapien
tttatttcctggaattccaaatcca

SEQ ID NO: 3772558 - DNA, 25 bp, Homo sapien
atttcctggaattccaaatccaagg

SEQ ID NO: 3772559 - DNA, 25 bp, Homo sapien
gctgtttggtaaatctgttctgctg

SEQ ID NO: 3772560 - DNA, 25 bp, Homo sapien
tccccgctgtttctgagttactgct

SEQ ID NO: 3772561 - DNA, 25 bp, Homo sapien
gcactgtgcagtaggatcttagcct

SEQ ID NO: 3772562 - DNA, 25 bp, Homo sapien
actggcgaccccaaatcctgaggaa

SEQ ID NO: 3772563 - DNA, 25 bp, Homo sapien
ccagatacaggaaaacgcgtgaact

SEQ ID NO: 3772564 - DNA, 25 bp, Homo sapien
tgctttcagcttcccaccgggcatt

SEQ ID NO: 3772565 - DNA, 25 bp, Homo sapien
tgtctgtcacccatgagctttgcaa

SEQ ID NO: 3772566 - DNA, 25 bp, Homo sapien
aaatgcttcactgcgcgcatccaag

SEQ ID NO: 3772567 - DNA, 25 bp, Homo sapien
agggaggagggccaattacaggaga

SEQ ID NO: 3772568 - DNA, 25 bp, Homo sapien
agggccaattacaggagatcctggg

SEQ ID NO: 3772569 - DNA, 25 bp, Homo sapien
ggagggccaattacaggagatcctg

SEQ ID NO: 3772570 - DNA, 25 bp, Homo sapien
gaggagggccaattacaggagatcc

SEQ ID NO: 3772571 - DNA, 25 bp, Homo sapien
ttgttcttccaagatggtggaagcc

SEQ ID NO: 3772572 - DNA, 25 bp, Homo sapien
ttccaagatggtggaagccaggcag

SEQ ID NO: 3772573 - DNA, 25 bp, Homo sapien
tcttccaagatggtggaagccaggc

SEQ ID NO: 3772574 - DNA, 25 bp, Homo sapien
ttcttccaagatggtggaagccagg

SEQ ID NO: 3772575 - DNA, 25 bp, Homo sapien
ggccttttctgtaatgtcaccgatt

SEQ ID NO: 3772576 - DNA, 25 bp, Homo sapien
gaaatctctgcccttactggcttct

SEQ ID NO: 3772577 - DNA, 25 bp, Homo sapien
cctaccccaggccttttctgtaatg

SEQ ID NO: 3772578 - DNA, 25 bp, Homo sapien
tggtgtgccccgcagaaatctctgc

SEQ ID NO: 3772579 - DNA, 25 bp, Homo sapien
atttgcttttcagattggtgtgctg

SEQ ID NO: 3772580 - DNA, 25 bp, Homo sapien
gcacagccggacagagaggaggctt

SEQ ID NO: 3772581 - DNA, 25 bp, Homo sapien
cacagccggacagagaggaggcttt

SEQ ID NO: 3772582 - DNA, 25 bp, Homo sapien
agccggacagagaggaggctttcgg

SEQ ID NO: 3772583 - DNA, 25 bp, Homo sapien
cacgggcctgaaatagaatgcatta

SEQ ID NO: 3772584 - DNA, 25 bp, Homo sapien
cgggtatttctaagcaagaatgcac

SEQ ID NO: 3772585 - DNA, 25 bp, Homo sapien
cattagtaagtgtaaccgagaggcg

SEQ ID NO: 3772586 - DNA, 25 bp, Homo sapien
gaggcgaagtgtatttttagcgaac

SEQ ID NO: 3772587 - DNA, 25 bp, Homo sapien
ctgatagccctgtgagtatgcgtct

SEQ ID NO: 3772588 - DNA, 25 bp, Homo sapien
gatagccctgtgagtatgcgtctgt

SEQ ID NO: 3772589 - DNA, 25 bp, Homo sapien
gtagcagcgctgttcgcttaacaga

SEQ ID NO: 3772590 - DNA, 25 bp, Homo sapien
tcgcttaacagagccaaattcagcc

SEQ ID NO: 3772591 - DNA, 25 bp, Homo sapien
acactcacgggtctgggctctggat

SEQ ID NO: 3772592 - DNA, 25 bp, Homo sapien
gggaccacgggctgatgtccctgca

SEQ ID NO: 3772593 - DNA, 25 bp, Homo sapien
gctggatgtgatgttccctggcttg

SEQ ID NO: 3772594 - DNA, 25 bp, Homo sapien
tgcattccggcattcagcccgagag

SEQ ID NO: 3772595 - DNA, 25 bp, Homo sapien
caaggagtcagttgtgggctcccca

SEQ ID NO: 3772596 - DNA, 25 bp, Homo sapien
aaggagtcagttgtgggctccccac

SEQ ID NO: 3772597 - DNA, 25 bp, Homo sapien
ggagtcagttgtgggctccccacca

SEQ ID NO: 3772598 - DNA, 25 bp, Homo sapien
cccaaggagtcagttgtgggctccc

SEQ ID NO: 3772599 - DNA, 25 bp, Homo sapien
ctgatggtggatgcccggcttccct

SEQ ID NO: 3772600 - DNA, 25 bp, Homo sapien
cctttgctgtaggtgactgtctgtc

SEQ ID NO: 3772601 - DNA, 25 bp, Homo sapien
tggatgaaacccttgcacacttgct

SEQ ID NO: 3772602 - DNA, 25 bp, Homo sapien
ctcttgttgataacagggcattgtg

SEQ ID NO: 3772603 - DNA, 25 bp, Homo sapien
ctttggggtgctcacagggctcctg

SEQ ID NO: 3772604 - DNA, 25 bp, Homo sapien
gggagatgtggccagcatcaacagc

SEQ ID NO: 3772605 - DNA, 25 bp, Homo sapien
agatgtggccagcatcaacagcctt

SEQ ID NO: 3772606 - DNA, 25 bp, Homo sapien
tgtggccagcatcaacagccttcca

SEQ ID NO: 3772607 - DNA, 25 bp, Homo sapien
ctttcagattcaggcgaacatccat

SEQ ID NO: 3772608 - DNA, 25 bp, Homo sapien
actttcagattcaggcgaacatcca

SEQ ID NO: 3772609 - DNA, 25 bp, Homo sapien
ctggtaagaatcctgctttgtctct

SEQ ID NO: 3772610 - DNA, 25 bp, Homo sapien
attctggtaagaatcctgctttgtc

SEQ ID NO: 3772611 - DNA, 25 bp, Homo sapien
tctggtaagaatcctgctttgtctc

SEQ ID NO: 3772612 - DNA, 25 bp, Homo sapien
ttctggtaagaatcctgctttgtct

SEQ ID NO: 3772613 - DNA, 25 bp, Homo sapien
cgtgagtgcgtgtgctcagcgctgt

SEQ ID NO: 3772614 - DNA, 25 bp, Homo sapien
gtgagtgcgtgtgctcagcgctgtt

SEQ ID NO: 3772615 - DNA, 25 bp, Homo sapien
cagcgctgttctgccggattgccat

SEQ ID NO: 3772616 - DNA, 25 bp, Homo sapien
gctcagcgctgttctgccggattgc

SEQ ID NO: 3772617 - DNA, 25 bp, Homo sapien
gatgctgtgatggatgcagagcttt

SEQ ID NO: 3772618 - DNA, 25 bp, Homo sapien
caggcagtctggaccgaaggaatga

SEQ ID NO: 3772619 - DNA, 25 bp, Homo sapien
catcgcagaccgtgggctgagtgat

SEQ ID NO: 3772620 - DNA, 25 bp, Homo sapien
gcagagctttaggaaggtattcaat

SEQ ID NO: 3772621 - DNA, 25 bp, Homo sapien
tggtagcaacaaagcaacgcttcga

SEQ ID NO: 3772622 - DNA, 25 bp, Homo sapien
tgtgggcccggatctcttgcaggca

SEQ ID NO: 3772623 - DNA, 25 bp, Homo sapien
aaactggaagaacattggtagcaac

SEQ ID NO: 3772624 - DNA, 25 bp, Homo sapien
ggctgccactgactctcgcttctaa

SEQ ID NO: 3772625 - DNA, 25 bp, Homo sapien
gctttgttgtaaatatgctcacatt

SEQ ID NO: 3772626 - DNA, 25 bp, Homo sapien
acgggatgcggaattttagtttgca

SEQ ID NO: 3772627 - DNA, 25 bp, Homo sapien
gggatgcggaattttagtttgcatt

SEQ ID NO: 3772628 - DNA, 25 bp, Homo sapien
ctgctttgttgtaaatatgctcaca

SEQ ID NO: 3772629 - DNA, 25 bp, Homo sapien
tggtatctgcctagctcccaattta

SEQ ID NO: 3772630 - DNA, 25 bp, Homo sapien
tatctgcctagctcccaatttagta

SEQ ID NO: 3772631 - DNA, 25 bp, Homo sapien
ctgcctagctcccaatttagtatgc

SEQ ID NO: 3772632 - DNA, 25 bp, Homo sapien
tgcctagctcccaatttagtatgct

SEQ ID NO: 3772633 - DNA, 25 bp, Homo sapien
ctcgctctttttctcaggccggagt

SEQ ID NO: 3772634 - DNA, 25 bp, Homo sapien
ctataagcgcctgccacagcacccg

SEQ ID NO: 3772635 - DNA, 25 bp, Homo sapien
gggactataagcgcctgccacagca

SEQ ID NO: 3772636 - DNA, 25 bp, Homo sapien
tctcgctctttttctcaggccggag

SEQ ID NO: 3772637 - DNA, 25 bp, Homo sapien
caaggccacgcattcttcagcactg

SEQ ID NO: 3772638 - DNA, 25 bp, Homo sapien
atcaaggtctggccggctcccaagg

SEQ ID NO: 3772639 - DNA, 25 bp, Homo sapien
tggtgttgggatttggatcaaggtc

SEQ ID NO: 3772640 - DNA, 25 bp, Homo sapien
agcactgcccccgttgaacccggag

SEQ ID NO: 3772641 - DNA, 25 bp, Homo sapien
ctctgtgaccctcgcgtttataaga

SEQ ID NO: 3772642 - DNA, 25 bp, Homo sapien
ccctcgcgtttataagaggtgagac

SEQ ID NO: 3772643 - DNA, 25 bp, Homo sapien
tgtgaccctcgcgtttataagaggt

SEQ ID NO: 3772644 - DNA, 25 bp, Homo sapien
agaggtgagacatggtgatttgttc

SEQ ID NO: 3772645 - DNA, 25 bp, Homo sapien
agggcaggtcaggagctctccctcg

SEQ ID NO: 3772646 - DNA, 25 bp, Homo sapien
aggtcaggagctctccctcgcagct

SEQ ID NO: 3772647 - DNA, 25 bp, Homo sapien
gcaggtcaggagctctccctcgcag

SEQ ID NO: 3772648 - DNA, 25 bp, Homo sapien
cagggcaggtcaggagctctccctc

SEQ ID NO: 3772649 - DNA, 25 bp, Homo sapien
gaggagagcccccaataatggtgat

SEQ ID NO: 3772650 - DNA, 25 bp, Homo sapien
ggtacaagtattattaggtctgaag

SEQ ID NO: 3772651 - DNA, 25 bp, Homo sapien
atcagaggagagcccccaataatgg

SEQ ID NO: 3772652 - DNA, 25 bp, Homo sapien
tgcagatctgcagcacaggagaagg

SEQ ID NO: 3772653 - DNA, 25 bp, Homo sapien
tgttctcatacaggaagcatgttaa

SEQ ID NO: 3772654 - DNA, 25 bp, Homo sapien
ttctcatacaggaagcatgttaagg

SEQ ID NO: 3772655 - DNA, 25 bp, Homo sapien
tctcatacaggaagcatgttaagga

SEQ ID NO: 3772656 - DNA, 25 bp, Homo sapien
ctgttctcatacaggaagcatgtta

SEQ ID NO: 3772657 - DNA, 25 bp, Homo sapien
tttgaactcgatcccatagacatga

SEQ ID NO: 3772658 - DNA, 25 bp, Homo sapien
ggctttgaatgccacgggtaacgtg

SEQ ID NO: 3772659 - DNA, 25 bp, Homo sapien
tgaaccagagccacgatgaagggat

SEQ ID NO: 3772660 - DNA, 25 bp, Homo sapien
tccagaagagtaatttcagtaacag

SEQ ID NO: 3772661 - DNA, 25 bp, Homo sapien
gtcccctctgcgttggccgtggtca

SEQ ID NO: 3772662 - DNA, 25 bp, Homo sapien
ccgtggtcatttctgatcacaggga

SEQ ID NO: 3772663 - DNA, 25 bp, Homo sapien
aagggtccgattgagcaggttgtcc

SEQ ID NO: 3772664 - DNA, 25 bp, Homo sapien
tccgattgagcaggttgtcccctct

SEQ ID NO: 3772665 - DNA, 25 bp, Homo sapien
tgccaaagggcttttccgccttctg

SEQ ID NO: 3772666 - DNA, 25 bp, Homo sapien
atccaacaaactcaggaccattggg

SEQ ID NO: 3772667 - DNA, 25 bp, Homo sapien
gttcccagcccgagcccttggctgt

SEQ ID NO: 3772668 - DNA, 25 bp, Homo sapien
gccttctggaagatggacttagtaa

SEQ ID NO: 3772669 - DNA, 25 bp, Homo sapien
tccatgccagggttattagtggagt

SEQ ID NO: 3772670 - DNA, 25 bp, Homo sapien
agtggtttctctggacacgggaacg

SEQ ID NO: 3772671 - DNA, 25 bp, Homo sapien
gtggagttctgcacgcaggccttgc

SEQ ID NO: 3772672 - DNA, 25 bp, Homo sapien
gactcagtgggctgtggtacttccc

SEQ ID NO: 3772673 - DNA, 25 bp, Homo sapien
gtcagcaaaggaggtggccctgggg

SEQ ID NO: 3772674 - DNA, 25 bp, Homo sapien
cgtcagcaaaggaggtggccctggg

SEQ ID NO: 3772675 - DNA, 25 bp, Homo sapien
tcagcaaaggaggtggccctggggt

SEQ ID NO: 3772676 - DNA, 25 bp, Homo sapien
cctccagagaagtgggctctccagc

SEQ ID NO: 3772677 - DNA, 25 bp, Homo sapien
cagagaagtgggctctccagcccca

SEQ ID NO: 3772678 - DNA, 25 bp, Homo sapien
ctgcaataccgctcacacccagtcc

SEQ ID NO: 3772679 - DNA, 25 bp, Homo sapien
aataccgctcacacccagtcctatc

SEQ ID NO: 3772680 - DNA, 25 bp, Homo sapien
cgctcacacccagtcctatccttac

SEQ ID NO: 3772681 - DNA, 25 bp, Homo sapien
accgctcacacccagtcctatcctt

SEQ ID NO: 3772682 - DNA, 25 bp, Homo sapien
tccagtgtttgcagagcgctctgaa

SEQ ID NO: 3772683 - DNA, 25 bp, Homo sapien
atgaaaaagcctgtgaggacctggg

SEQ ID NO: 3772684 - DNA, 25 bp, Homo sapien
ggtggcctaactgtgttgacctcca

SEQ ID NO: 3772685 - DNA, 25 bp, Homo sapien
tcttgttggctccaaagtgacgcca

SEQ ID NO: 3772686 - DNA, 25 bp, Homo sapien
gattaagccattgccccgtcatctc

SEQ ID NO: 3772687 - DNA, 25 bp, Homo sapien
aacaagcccttgtatggtacctgat

SEQ ID NO: 3772688 - DNA, 25 bp, Homo sapien
accgttccccacactgtcatgatta

SEQ ID NO: 3772689 - DNA, 25 bp, Homo sapien
ccttgtatggtacctgattttgcat

SEQ ID NO: 3772690 - DNA, 25 bp, Homo sapien
gtgccaagtacttcacaagagggtg

SEQ ID NO: 3772691 - DNA, 25 bp, Homo sapien
gaacctcgcttctcaagggtggctg

SEQ ID NO: 3772692 - DNA, 25 bp, Homo sapien
tgtggtcgagtcagcacgctgcagt

SEQ ID NO: 3772693 - DNA, 25 bp, Homo sapien
gctaaaggcagcaggtgccaaagcc

SEQ ID NO: 3772694 - DNA, 25 bp, Homo sapien
cttcctctcaatgcggaccagaggg

SEQ ID NO: 3772695 - DNA, 25 bp, Homo sapien
tcctctcaatgcggaccagagggag

SEQ ID NO: 3772696 - DNA, 25 bp, Homo sapien
ccttcctctcaatgcggaccagagg

SEQ ID NO: 3772697 - DNA, 25 bp, Homo sapien
gacgtcgatgaactctggaaatcta

SEQ ID NO: 3772698 - DNA, 25 bp, Homo sapien
ctttgttctgaagggaggctggccc

SEQ ID NO: 3772699 - DNA, 25 bp, Homo sapien
gctcctgcggctttgttctgaaggg

SEQ ID NO: 3772700 - DNA, 25 bp, Homo sapien
ccagagaaaggctttgacgtcgatg

SEQ ID NO: 3772701 - DNA, 25 bp, Homo sapien
ctggttggcagtaaactcagctttg

SEQ ID NO: 3772702 - DNA, 25 bp, Homo sapien
agtccggagacttcccctgcctggt

SEQ ID NO: 3772703 - DNA, 25 bp, Homo sapien
taagtccggagacttcccctgcctg

SEQ ID NO: 3772704 - DNA, 25 bp, Homo sapien
ttggcagtaaactcagctttgtttc

SEQ ID NO: 3772705 - DNA, 25 bp, Homo sapien
ggtttgcttctatcattcctgactg

SEQ ID NO: 3772706 - DNA, 25 bp, Homo sapien
gcttctatcattcctgactgtgcca

SEQ ID NO: 3772707 - DNA, 25 bp, Homo sapien
cacggcaccaaggtttgcttctatc

SEQ ID NO: 3772708 - DNA, 25 bp, Homo sapien
gagattccacggcaccaaggtttgc

SEQ ID NO: 3772709 - DNA, 25 bp, Homo sapien
tggacttcctgaatctagccctgaa

SEQ ID NO: 3772710 - DNA, 25 bp, Homo sapien
ctgctgctccaaactgtggacttcc

SEQ ID NO: 3772711 - DNA, 25 bp, Homo sapien
gtggacttcctgaatctagccctga

SEQ ID NO: 3772712 - DNA, 25 bp, Homo sapien
gctccaaactgtggacttcctgaat

SEQ ID NO: 3772713 - DNA, 25 bp, Homo sapien
ctccctggcagcgatgcagtgtttt

SEQ ID NO: 3772714 - DNA, 25 bp, Homo sapien
ttttccagctgcttggattgccgtc

SEQ ID NO: 3772715 - DNA, 25 bp, Homo sapien
gattgccgtcgtatgctgctccaag

SEQ ID NO: 3772716 - DNA, 25 bp, Homo sapien
ctggcagcgatgcagtgttttttcc

SEQ ID NO: 3772717 - DNA, 25 bp, Homo sapien
gggcagccgatgagctgaaaaccat

SEQ ID NO: 3772718 - DNA, 25 bp, Homo sapien
gggatggcatagagtggggaaggca

SEQ ID NO: 3772719 - DNA, 25 bp, Homo sapien
ggggcagccgatgagctgaaaacca

SEQ ID NO: 3772720 - DNA, 25 bp, Homo sapien
gttgatgtcgtcgtttgtttaatcc

SEQ ID NO: 3772721 - DNA, 25 bp, Homo sapien
caaagccacttggtacagcaacggg

SEQ ID NO: 3772722 - DNA, 25 bp, Homo sapien
ctttttgttgatgtcgtcgtttgtt

SEQ ID NO: 3772723 - DNA, 25 bp, Homo sapien
tgtcgtcgtttgtttaatcctggta

SEQ ID NO: 3772724 - DNA, 25 bp, Homo sapien
agcacggcagagtgcaaatttcaga

SEQ ID NO: 3772725 - DNA, 25 bp, Homo sapien
ctaaagcacggcagagtgcaaattt

SEQ ID NO: 3772726 - DNA, 25 bp, Homo sapien
aatttcagagagtgcctcgaatttc

SEQ ID NO: 3772727 - DNA, 25 bp, Homo sapien
ttcagagagtgcctcgaatttcgag

SEQ ID NO: 3772728 - DNA, 25 bp, Homo sapien
taccgctagcattgccgagatgcac

SEQ ID NO: 3772729 - DNA, 25 bp, Homo sapien
cattgccgagatgcactgcagtcat

SEQ ID NO: 3772730 - DNA, 25 bp, Homo sapien
actggtgggttaccgctagcattgc

SEQ ID NO: 3772731 - DNA, 25 bp, Homo sapien
tgggttaccgctagcattgccgaga

SEQ ID NO: 3772732 - DNA, 25 bp, Homo sapien
tttgagtttcaaaagccagttttga

SEQ ID NO: 3772733 - DNA, 25 bp, Homo sapien
gtggctttgagtttcaaaagccagt

SEQ ID NO: 3772734 - DNA, 25 bp, Homo sapien
tcacggagtggctttgagtttcaaa

SEQ ID NO: 3772735 - DNA, 25 bp, Homo sapien
cacggagtggctttgagtttcaaaa

SEQ ID NO: 3772736 - DNA, 25 bp, Homo sapien
ggagagtgtctgctctaagcttttt

SEQ ID NO: 3772737 - DNA, 25 bp, Homo sapien
tcctctggggaggaaaatactgctc

SEQ ID NO: 3772738 - DNA, 25 bp, Homo sapien
ctccactggggcgtttttccttcag

SEQ ID NO: 3772739 - DNA, 25 bp, Homo sapien
gcagaaaacccatgatgccatctcc

SEQ ID NO: 3772740 - DNA, 25 bp, Homo sapien
aaatttgatcagacgttgtctgtca

SEQ ID NO: 3772741 - DNA, 25 bp, Homo sapien
tgaatagggttgagtgtccctgtgt

SEQ ID NO: 3772742 - DNA, 25 bp, Homo sapien
tgtctgtcaaatgagtgaatagggt

SEQ ID NO: 3772743 - DNA, 25 bp, Homo sapien
tgatcagacgttgtctgtcaaatga

SEQ ID NO: 3772744 - DNA, 25 bp, Homo sapien
atctcgatccttcggacactccatg

SEQ ID NO: 3772745 - DNA, 25 bp, Homo sapien
tggaggcttctggacgcagcatctg

SEQ ID NO: 3772746 - DNA, 25 bp, Homo sapien
ccttcggacactccatggaggcttc

SEQ ID NO: 3772747 - DNA, 25 bp, Homo sapien
tgtgctgctcagggccgttcctctt

SEQ ID NO: 3772748 - DNA, 25 bp, Homo sapien
cattggctgatgtgctctgtggcat

SEQ ID NO: 3772749 - DNA, 25 bp, Homo sapien
tcattggctgatgtgctctgtggca

SEQ ID NO: 3772750 - DNA, 25 bp, Homo sapien
ctgtcacaggttttaattgaaggtc

SEQ ID NO: 3772751 - DNA, 25 bp, Homo sapien
cacaggttttaattgaaggtcagca

SEQ ID NO: 3772752 - DNA, 25 bp, Homo sapien
gtcagcagtggcaggtaagccacca

SEQ ID NO: 3772753 - DNA, 25 bp, Homo sapien
caggttttaattgaaggtcagcagt

SEQ ID NO: 3772754 - DNA, 25 bp, Homo sapien
ggagccttggtctccaggaactttc

SEQ ID NO: 3772755 - DNA, 25 bp, Homo sapien
ttctgttcctggcatgcagatctcc

SEQ ID NO: 3772756 - DNA, 25 bp, Homo sapien
tggcatgcagatctcctgccccacc

SEQ ID NO: 3772757 - DNA, 25 bp, Homo sapien
ctggagccttggtctccaggaactt

SEQ ID NO: 3772758 - DNA, 25 bp, Homo sapien
gactctgttgtacccgacatccaag

SEQ ID NO: 3772759 - DNA, 25 bp, Homo sapien
ggaaggagtagagggcggaagactc

SEQ ID NO: 3772760 - DNA, 25 bp, Homo sapien
tgttgtacccgacatccaagaaaac

SEQ ID NO: 3772761 - DNA, 25 bp, Homo sapien
tagagggcggaagactctgttgtac

SEQ ID NO: 3772762 - DNA, 25 bp, Homo sapien
gaaggagactcactccatgctgagg

SEQ ID NO: 3772763 - DNA, 25 bp, Homo sapien
gagaatttcaagtgctgacactgac

SEQ ID NO: 3772764 - DNA, 25 bp, Homo sapien
tgattccagctggtttaagcacagg

SEQ ID NO: 3772765 - DNA, 25 bp, Homo sapien
caggatccacttgcggaaagcagaa

SEQ ID NO: 3772766 - DNA, 25 bp, Homo sapien
tgaggccaggaccttcttgaagcac

SEQ ID NO: 3772767 - DNA, 25 bp, Homo sapien
tgggctgaccgtttcctcgctgact

SEQ ID NO: 3772768 - DNA, 25 bp, Homo sapien
gacacgctgaccatctggaggctaa

SEQ ID NO: 3772769 - DNA, 25 bp, Homo sapien
gacattgaacttccagtaactgagg

SEQ ID NO: 3772770 - DNA, 25 bp, Homo sapien
tggacataaagtgttggtgttggca

SEQ ID NO: 3772771 - DNA, 25 bp, Homo sapien
ggacataaagtgttggtgttggcat

SEQ ID NO: 3772772 - DNA, 25 bp, Homo sapien
ctggacataaagtgttggtgttggc

SEQ ID NO: 3772773 - DNA, 25 bp, Homo sapien
atgcagaaaggaccgaaggtctgaa

SEQ ID NO: 3772774 - DNA, 25 bp, Homo sapien
gcatcactgtctgggctacagggat

SEQ ID NO: 3772775 - DNA, 25 bp, Homo sapien
tagagcatcactgtctgggctacag

SEQ ID NO: 3772776 - DNA, 25 bp, Homo sapien
tcatagagcatcactgtctgggcta

SEQ ID NO: 3772777 - DNA, 25 bp, Homo sapien
ttgtgtcctccatgaagagatgctg

SEQ ID NO: 3772778 - DNA, 25 bp, Homo sapien
gttttctgagcatttgtgagctctt

SEQ ID NO: 3772779 - DNA, 25 bp, Homo sapien
ctcttggcatttgggtcatagtgca

SEQ ID NO: 3772780 - DNA, 25 bp, Homo sapien
gtcctccatgaagagatgctggtgt

SEQ ID NO: 3772781 - DNA, 25 bp, Homo sapien
tgctattcgatggagtgggacctcg

SEQ ID NO: 3772782 - DNA, 25 bp, Homo sapien
tccagtccatcctgtgctattcgat

SEQ ID NO: 3772783 - DNA, 25 bp, Homo sapien
gggttgagaacacggctccaggaca

SEQ ID NO: 3772784 - DNA, 25 bp, Homo sapien
ggacctcgggttgagaacacggctc

SEQ ID NO: 3772785 - DNA, 25 bp, Homo sapien
gatcgaggtcggagaaaaggcaaaa

SEQ ID NO: 3772786 - DNA, 25 bp, Homo sapien
tttgagttaacaacgcaggtgccgt

SEQ ID NO: 3772787 - DNA, 25 bp, Homo sapien
cagccacgccgcttggagttgaaag

SEQ ID NO: 3772788 - DNA, 25 bp, Homo sapien
tagggcacatcgtcagatcgaggtc

SEQ ID NO: 3772789 - DNA, 25 bp, Homo sapien
taagatggcaaaaatcagtcgatgg

SEQ ID NO: 3772790 - DNA, 25 bp, Homo sapien
ggctgagctggtactgatgttctta

SEQ ID NO: 3772791 - DNA, 25 bp, Homo sapien
aaaatcagtcgatggggcttgggct

SEQ ID NO: 3772792 - DNA, 25 bp, Homo sapien
tacttccgcctaacccatttggctg

SEQ ID NO: 3772793 - DNA, 25 bp, Homo sapien
gcagggctcagaatggatggctgga

SEQ ID NO: 3772794 - DNA, 25 bp, Homo sapien
tggctggattttaactcgtggtttc

SEQ ID NO: 3772795 - DNA, 25 bp, Homo sapien
ctgggcagggctcagaatggatggc

SEQ ID NO: 3772796 - DNA, 25 bp, Homo sapien
ggatggctggattttaactcgtggt

SEQ ID NO: 3772797 - DNA, 25 bp, Homo sapien
aagaggcagaagcataaaccttcca

SEQ ID NO: 3772798 - DNA, 25 bp, Homo sapien
ctaggccgtttagtgaggtgttcat

SEQ ID NO: 3772799 - DNA, 25 bp, Homo sapien
cgggtcccgtgtctgtctgctgaag

SEQ ID NO: 3772800 - DNA, 25 bp, Homo sapien
ttcctgcactgttcgcatccctgag

SEQ ID NO: 3772801 - DNA, 25 bp, Homo sapien
gaggccatcctagagcctcgaagtg

SEQ ID NO: 3772802 - DNA, 25 bp, Homo sapien
gaagtgcccccttccgtgctgacat

SEQ ID NO: 3772803 - DNA, 25 bp, Homo sapien
aagtgcaggcaacccggaagactcc

SEQ ID NO: 3772804 - DNA, 25 bp, Homo sapien
tgctgacattctgacgttcccgctc

SEQ ID NO: 3772805 - DNA, 25 bp, Homo sapien
gtttctggggacgaatccagacatt

SEQ ID NO: 3772806 - DNA, 25 bp, Homo sapien
tggggacgaatccagacattttcca

SEQ ID NO: 3772807 - DNA, 25 bp, Homo sapien
ttggtttctggggacgaatccagac

SEQ ID NO: 3772808 - DNA, 25 bp, Homo sapien
caggtgaggaagctccgcctgggcc

SEQ ID NO: 3772809 - DNA, 25 bp, Homo sapien
gcaggctgacctgcagtgagtcagt

SEQ ID NO: 3772810 - DNA, 25 bp, Homo sapien
gttgaaatgtgagtgttgcctgact

SEQ ID NO: 3772811 - DNA, 25 bp, Homo sapien
aatgtgagtgttgcctgacttggtg

SEQ ID NO: 3772812 - DNA, 25 bp, Homo sapien
acctgcagtgagtcagtcgttcctg

SEQ ID NO: 3772813 - DNA, 25 bp, Homo sapien
agatgccatccatgtaggagatgct

SEQ ID NO: 3772814 - DNA, 25 bp, Homo sapien
gctgagtgtcactacgagtcttgac

SEQ ID NO: 3772815 - DNA, 25 bp, Homo sapien
tttctcgtcatgctggtgtttcaca

SEQ ID NO: 3772816 - DNA, 25 bp, Homo sapien
tcacaaccttgtagctagagtccgg

SEQ ID NO: 3772817 - DNA, 25 bp, Homo sapien
gctagagtccggtgcagcttttctt

SEQ ID NO: 3772818 - DNA, 25 bp, Homo sapien
ggtctcaccttgaatgagtctggca

SEQ ID NO: 3772819 - DNA, 25 bp, Homo sapien
gaggcaacatctcggggttctccaa

SEQ ID NO: 3772820 - DNA, 25 bp, Homo sapien
tgggaggcaacatctcggggttctc

SEQ ID NO: 3772821 - DNA, 25 bp, Homo sapien
ttctccaaggggaggtctcaccttg

SEQ ID NO: 3772822 - DNA, 25 bp, Homo sapien
tgcccaggtctgacccggaatccgg

SEQ ID NO: 3772823 - DNA, 25 bp, Homo sapien
tccggttgtgttggatggtaccact

SEQ ID NO: 3772824 - DNA, 25 bp, Homo sapien
acccggaatccggttgtgttggatg

SEQ ID NO: 3772825 - DNA, 25 bp, Homo sapien
tggatggtaccactgagaatcgtca

SEQ ID NO: 3772826 - DNA, 25 bp, Homo sapien
gttctagagtcatttccagcgagtg

SEQ ID NO: 3772827 - DNA, 25 bp, Homo sapien
tttccagcaaaaggcggcacaggtg

SEQ ID NO: 3772828 - DNA, 25 bp, Homo sapien
cacgatggatgatagctgagcaacc

SEQ ID NO: 3772829 - DNA, 25 bp, Homo sapien
gaaaatagcttggatccacccatgg

SEQ ID NO: 3772830 - DNA, 25 bp, Homo sapien
catgctactacactccagcccgggc

SEQ ID NO: 3772831 - DNA, 25 bp, Homo sapien
atgctactacactccagcccgggcg

SEQ ID NO: 3772832 - DNA, 25 bp, Homo sapien
cggtgacgtccagagccattgcttt

SEQ ID NO: 3772833 - DNA, 25 bp, Homo sapien
cacaagatggctgccggtgacgtcc

SEQ ID NO: 3772834 - DNA, 25 bp, Homo sapien
tgctctccacagcttccgtgacata

SEQ ID NO: 3772835 - DNA, 25 bp, Homo sapien
taaggctggcaccaagtgctctagt

SEQ ID NO: 3772836 - DNA, 25 bp, Homo sapien
ggagctagcgttccccaaaacacaa

SEQ ID NO: 3772837 - DNA, 25 bp, Homo sapien
gatggagctagcgttccccaaaaca

SEQ ID NO: 3772838 - DNA, 25 bp, Homo sapien
ctatgcagagatggagctagcgttc

SEQ ID NO: 3772839 - DNA, 25 bp, Homo sapien
cagagatggagctagcgttccccaa

SEQ ID NO: 3772840 - DNA, 25 bp, Homo sapien
ctgcgctgtgttgtcaggttccaag

SEQ ID NO: 3772841 - DNA, 25 bp, Homo sapien
agccagcagatagatggatgtgtgt

SEQ ID NO: 3772842 - DNA, 25 bp, Homo sapien
aaagagccagcagatagatggatgt

SEQ ID NO: 3772843 - DNA, 25 bp, Homo sapien
cttgactctgcgctgtgttgtcagg

SEQ ID NO: 3772844 - DNA, 25 bp, Homo sapien
tgccgaccacgtgagtgttctgttt

SEQ ID NO: 3772845 - DNA, 25 bp, Homo sapien
gtttggctgtagtgccctcatgctt

SEQ ID NO: 3772846 - DNA, 25 bp, Homo sapien
accacgtgagtgttctgtttggctg

SEQ ID NO: 3772847 - DNA, 25 bp, Homo sapien
tttggctgtagtgccctcatgcttc

SEQ ID NO: 3772848 - DNA, 25 bp, Homo sapien
caattggcttcccactttctaaata

SEQ ID NO: 3772849 - DNA, 25 bp, Homo sapien
aataaatgttgccataccccagtag

SEQ ID NO: 3772850 - DNA, 25 bp, Homo sapien
taccccagtagctttagtgcaatgc

SEQ ID NO: 3772851 - DNA, 25 bp, Homo sapien
gctttagtgcaatgcctaggatcat

SEQ ID NO: 3772852 - DNA, 25 bp, Homo sapien
tgttcctgatgcttcattatctcgt

SEQ ID NO: 3772853 - DNA, 25 bp, Homo sapien
cattatctcgtttgaatgaaagagc

SEQ ID NO: 3772854 - DNA, 25 bp, Homo sapien
ttgaatgaaagagcagcactgggtc

SEQ ID NO: 3772855 - DNA, 25 bp, Homo sapien
cctgatgcttcattatctcgtttga

SEQ ID NO: 3772856 - DNA, 25 bp, Homo sapien
tagactgtaaacccggaagtgcctg

SEQ ID NO: 3772857 - DNA, 25 bp, Homo sapien
gactgtaaacccggaagtgcctgaa

SEQ ID NO: 3772858 - DNA, 25 bp, Homo sapien
agactgtaaacccggaagtgcctga

SEQ ID NO: 3772859 - DNA, 25 bp, Homo sapien
gacgtaactttctccttgcacattg

SEQ ID NO: 3772860 - DNA, 25 bp, Homo sapien
gctgattgcggctcgttgacgtaac

SEQ ID NO: 3772861 - DNA, 25 bp, Homo sapien
cagggcaatctgtgcctcgctatcc

SEQ ID NO: 3772862 - DNA, 25 bp, Homo sapien
tccttgcacattgcagggcaatctg

SEQ ID NO: 3772863 - DNA, 25 bp, Homo sapien
gggcccactgtaaggtacactttgc

SEQ ID NO: 3772864 - DNA, 25 bp, Homo sapien
aatgtggctgcctgaagacacttca

SEQ ID NO: 3772865 - DNA, 25 bp, Homo sapien
cctgttgcagggtgtctgtattgct

SEQ ID NO: 3772866 - DNA, 25 bp, Homo sapien
tgctttctaatatgccagggccaaa

SEQ ID NO: 3772867 - DNA, 25 bp, Homo sapien
taccaatttgaggacaattgacagc

SEQ ID NO: 3772868 - DNA, 25 bp, Homo sapien
caggtcattttctatagttgagtac

SEQ ID NO: 3772869 - DNA, 25 bp, Homo sapien
tgtgggaattttgtttgagcttacg

SEQ ID NO: 3772870 - DNA, 25 bp, Homo sapien
gagcttacgttgaatctgtttacca

SEQ ID NO: 3772871 - DNA, 25 bp, Homo sapien
ggtgctgccacgagataggtagctg

SEQ ID NO: 3772872 - DNA, 25 bp, Homo sapien
gaggtgctgccacgagataggtagc

SEQ ID NO: 3772873 - DNA, 25 bp, Homo sapien
gtgctgccacgagataggtagctgg

SEQ ID NO: 3772874 - DNA, 25 bp, Homo sapien
aggtgctgccacgagataggtagct

SEQ ID NO: 3772875 - DNA, 25 bp, Homo sapien
tgacatcttggtgggagttatggct

SEQ ID NO: 3772876 - DNA, 25 bp, Homo sapien
ttttgtcctgtaggagttcagtctg

SEQ ID NO: 3772877 - DNA, 25 bp, Homo sapien
ggtcagtggtaatgtgacatcttgg

SEQ ID NO: 3772878 - DNA, 25 bp, Homo sapien
tgtcctgtaggagttcagtctggct

SEQ ID NO: 3772879 - DNA, 25 bp, Homo sapien
ccttctccggactaacgattgaata

SEQ ID NO: 3772880 - DNA, 25 bp, Homo sapien
gtccttctccggactaacgattgaa

SEQ ID NO: 3772881 - DNA, 25 bp, Homo sapien
tccggactaacgattgaatatgctt

SEQ ID NO: 3772882 - DNA, 25 bp, Homo sapien
tctccggactaacgattgaatatgc

SEQ ID NO: 3772883 - DNA, 25 bp, Homo sapien
tcaactgtatgaagttgccagtaca

SEQ ID NO: 3772884 - DNA, 25 bp, Homo sapien
taggttcaactgtatgaagttgcca

SEQ ID NO: 3772885 - DNA, 25 bp, Homo sapien
ctgtatgaagttgccagtacataat

SEQ ID NO: 3772886 - DNA, 25 bp, Homo sapien
tatgaagttgccagtacataatcat

SEQ ID NO: 3772887 - DNA, 25 bp, Homo sapien
acggctttggtggtcgactcataga

SEQ ID NO: 3772888 - DNA, 25 bp, Homo sapien
gctttggtggtcgactcatagattt

SEQ ID NO: 3772889 - DNA, 25 bp, Homo sapien
tttggtggtcgactcatagatttca

SEQ ID NO: 3772890 - DNA, 25 bp, Homo sapien
attgacggctttggtggtcgactca

SEQ ID NO: 3772891 - DNA, 25 bp, Homo sapien
taaaactccgtggttaagcagcaca

SEQ ID NO: 3772892 - DNA, 25 bp, Homo sapien
ggaggatcactatgtcagtgtccac

SEQ ID NO: 3772893 - DNA, 25 bp, Homo sapien
catcataacctcctgtgtccttgac

SEQ ID NO: 3772894 - DNA, 25 bp, Homo sapien
tctcctaaaactccgtggttaagca

SEQ ID NO: 3772895 - DNA, 25 bp, Homo sapien
accacattgtcggatgagtggcagc

SEQ ID NO: 3772896 - DNA, 25 bp, Homo sapien
tggaggaaaccacattgtcggatga

SEQ ID NO: 3772897 - DNA, 25 bp, Homo sapien
gaaaccacattgtcggatgagtggc

SEQ ID NO: 3772898 - DNA, 25 bp, Homo sapien
cacattgtcggatgagtggcagctg

SEQ ID NO: 3772899 - DNA, 25 bp, Homo sapien
gaagctccgctctccttcaactgaa

SEQ ID NO: 3772900 - DNA, 25 bp, Homo sapien
acttcaccaagaagcttgagggcca

SEQ ID NO: 3772901 - DNA, 25 bp, Homo sapien
ggaagatgcttttaagaacttcacc

SEQ ID NO: 3772902 - DNA, 25 bp, Homo sapien
agggacaataggagctgatgttttt

SEQ ID NO: 3772903 - DNA, 25 bp, Homo sapien
cagttccatacctgggagagcctca

SEQ ID NO: 3772904 - DNA, 25 bp, Homo sapien
ccctgtactgatgagaaaagtaaag

SEQ ID NO: 3772905 - DNA, 25 bp, Homo sapien
gagggtactgagcttagcagcagcc

SEQ ID NO: 3772906 - DNA, 25 bp, Homo sapien
cagccagcttcattgtcagttccat

SEQ ID NO: 3772907 - DNA, 25 bp, Homo sapien
cactgtaaggacatccctgccacag

SEQ ID NO: 3772908 - DNA, 25 bp, Homo sapien
ccatggtcacggcatgtagccagga

SEQ ID NO: 3772909 - DNA, 25 bp, Homo sapien
gtcacggcatgtagccaggactctg

SEQ ID NO: 3772910 - DNA, 25 bp, Homo sapien
actgtaaggacatccctgccacagc

SEQ ID NO: 3772911 - DNA, 25 bp, Homo sapien
ccttgactcaaggaacagtaggccg

SEQ ID NO: 3772912 - DNA, 25 bp, Homo sapien
cagtaggccgagatacagagctggc

SEQ ID NO: 3772913 - DNA, 25 bp, Homo sapien
tcaattcagggagcaagaagcggag

SEQ ID NO: 3772914 - DNA, 25 bp, Homo sapien
ccttcgatgccgtgtccaagggaca

SEQ ID NO: 3772915 - DNA, 25 bp, Homo sapien
gaactcagcatctgcgtcagggaca

SEQ ID NO: 3772916 - DNA, 25 bp, Homo sapien
tcattctagcttagggacccaagag

SEQ ID NO: 3772917 - DNA, 25 bp, Homo sapien
catgaaggtgcgtagcctgagtccc

SEQ ID NO: 3772918 - DNA, 25 bp, Homo sapien
tgagagaaacccacgaggaactggc

SEQ ID NO: 3772919 - DNA, 25 bp, Homo sapien
ttgactctctttctactggccaggg

SEQ ID NO: 3772920 - DNA, 25 bp, Homo sapien
gccttgactctctttctactggcca

SEQ ID NO: 3772921 - DNA, 25 bp, Homo sapien
tggccttgactctctttctactggc

SEQ ID NO: 3772922 - DNA, 25 bp, Homo sapien
cttgactctctttctactggccagg

SEQ ID NO: 3772923 - DNA, 25 bp, Homo sapien
cctagacagaaattgaacatgggat

SEQ ID NO: 3772924 - DNA, 25 bp, Homo sapien
ttcctccgagctttggagtctgctg

SEQ ID NO: 3772925 - DNA, 25 bp, Homo sapien
acaggctgtctcgtattccccagac

SEQ ID NO: 3772926 - DNA, 25 bp, Homo sapien
taacctgtgcttcataccagaagga

SEQ ID NO: 3772927 - DNA, 25 bp, Homo sapien
cgagtgaggtgccattgaacagtta

SEQ ID NO: 3772928 - DNA, 25 bp, Homo sapien
caaatcacgtgagctgaggtttcag

SEQ ID NO: 3772929 - DNA, 25 bp, Homo sapien
gaacgttttcatcaccctaatggca

SEQ ID NO: 3772930 - DNA, 25 bp, Homo sapien
cttgaagggctctttagctgggaat

SEQ ID NO: 3772931 - DNA, 25 bp, Homo sapien
acatatggatgtgcgcaagacagca

SEQ ID NO: 3772932 - DNA, 25 bp, Homo sapien
ttattcttcaagaggagagcccgcg

SEQ ID NO: 3772933 - DNA, 25 bp, Homo sapien
tgagaggtcatcttggtatgtcacc

SEQ ID NO: 3772934 - DNA, 25 bp, Homo sapien
gaaaccaagacaaggctgggtgccg

SEQ ID NO: 3772935 - DNA, 25 bp, Homo sapien
gagaccccggagagctgattgtatg

SEQ ID NO: 3772936 - DNA, 25 bp, Homo sapien
tcataaaattaaccctcacggcgcc

SEQ ID NO: 3772937 - DNA, 25 bp, Homo sapien
taaagcagtcaagcaggagggatcc

SEQ ID NO: 3772938 - DNA, 25 bp, Homo sapien
catggttagaggatggtgagtccca

SEQ ID NO: 3772939 - DNA, 25 bp, Homo sapien
tggccgccgctttagttgatgcatc

SEQ ID NO: 3772940 - DNA, 25 bp, Homo sapien
gatgtcctcatgtgtggtgtcacca

SEQ ID NO: 3772941 - DNA, 25 bp, Homo sapien
ggaactccaggctatgtcggtaagg

SEQ ID NO: 3772942 - DNA, 25 bp, Homo sapien
tctgcactgtttctattggccgccg

SEQ ID NO: 3772943 - DNA, 25 bp, Homo sapien
ttgagttttactgctctgtgttttg

SEQ ID NO: 3772944 - DNA, 25 bp, Homo sapien
agcccacggaatggcagtttttctg

SEQ ID NO: 3772945 - DNA, 25 bp, Homo sapien
aattgagttttactgctctgtgttt

SEQ ID NO: 3772946 - DNA, 25 bp, Homo sapien
tggcaaagcccacggaatggcagtt

SEQ ID NO: 3772947 - DNA, 25 bp, Homo sapien
catctgcggggtctgagtctgttga

SEQ ID NO: 3772948 - DNA, 25 bp, Homo sapien
tgttgattgctgtgtctggcactga

SEQ ID NO: 3772949 - DNA, 25 bp, Homo sapien
tgtctggcactgacgtgtcgggaat

SEQ ID NO: 3772950 - DNA, 25 bp, Homo sapien
gagaagagtccatcgctcttgctac

SEQ ID NO: 3772951 - DNA, 25 bp, Homo sapien
cattgggtaatggtgttgtgagata

SEQ ID NO: 3772952 - DNA, 25 bp, Homo sapien
gagccattgggtaatggtgttgtga

SEQ ID NO: 3772953 - DNA, 25 bp, Homo sapien
aatggtgttgtgagataccaggttg

SEQ ID NO: 3772954 - DNA, 25 bp, Homo sapien
tgggtaatggtgttgtgagatacca

SEQ ID NO: 3772955 - DNA, 25 bp, Homo sapien
tccctgcaaggctcttgggacacca

SEQ ID NO: 3772956 - DNA, 25 bp, Homo sapien
ctgcaaggctcttgggacaccattt

SEQ ID NO: 3772957 - DNA, 25 bp, Homo sapien
ccattttgaaccttgagcaaagaaa

SEQ ID NO: 3772958 - DNA, 25 bp, Homo sapien
cctgcaaggctcttgggacaccatt

SEQ ID NO: 3772959 - DNA, 25 bp, Homo sapien
gagctgccacttgtgattcagggac

SEQ ID NO: 3772960 - DNA, 25 bp, Homo sapien
tgccacttgtgattcagggaccaca

SEQ ID NO: 3772961 - DNA, 25 bp, Homo sapien
gctgccacttgtgattcagggacca

SEQ ID NO: 3772962 - DNA, 25 bp, Homo sapien
gagagagctgccacttgtgattcag

SEQ ID NO: 3772963 - DNA, 25 bp, Homo sapien
ggattgcaatactggaaacctgggt

SEQ ID NO: 3772964 - DNA, 25 bp, Homo sapien
cattcagtatcacctccttgtcttg

SEQ ID NO: 3772965 - DNA, 25 bp, Homo sapien
gatgctcctggtaaaagtccctcat

SEQ ID NO: 3772966 - DNA, 25 bp, Homo sapien
ttttttaatatccctgctgctgcaa

SEQ ID NO: 3772967 - DNA, 25 bp, Homo sapien
tactgaggccaaattctctactgaa

SEQ ID NO: 3772968 - DNA, 25 bp, Homo sapien
gccaaattctctactgaaatgtgtg

SEQ ID NO: 3772969 - DNA, 25 bp, Homo sapien
tcttactgaggccaaattctctact

SEQ ID NO: 3772970 - DNA, 25 bp, Homo sapien
ccaaattctctactgaaatgtgtgt

SEQ ID NO: 3772971 - DNA, 25 bp, Homo sapien
tacgcagtgtcgcaaactgttagaa

SEQ ID NO: 3772972 - DNA, 25 bp, Homo sapien
cgtgtcttctctgatacgcagtgtc

SEQ ID NO: 3772973 - DNA, 25 bp, Homo sapien
cgcaaactgttagaaacttgattac

SEQ ID NO: 3772974 - DNA, 25 bp, Homo sapien
gattacagtttgatttagtagctgg

SEQ ID NO: 3772975 - DNA, 25 bp, Homo sapien
cagagtccttgccacgcgtcataaa

SEQ ID NO: 3772976 - DNA, 25 bp, Homo sapien
tgactaggaagctctcgggtatctc

SEQ ID NO: 3772977 - DNA, 25 bp, Homo sapien
tgagaagtggactctcccagggcta

SEQ ID NO: 3772978 - DNA, 25 bp, Homo sapien
ttctcaggcaggaaaactggcgtct

SEQ ID NO: 3772979 - DNA, 25 bp, Homo sapien
ggcaggaggttgtgccctgaagttt

SEQ ID NO: 3772980 - DNA, 25 bp, Homo sapien
gatatctggttctgtggagtggcca

SEQ ID NO: 3772981 - DNA, 25 bp, Homo sapien
cctgaagtttgtcctgagctcccag

SEQ ID NO: 3772982 - DNA, 25 bp, Homo sapien
tgtgctgtttgatatctggttctgt

SEQ ID NO: 3772983 - DNA, 25 bp, Homo sapien
tctctccacctcaacattgctcttc

SEQ ID NO: 3772984 - DNA, 25 bp, Homo sapien
gtgtggctgccctctcacttcagca

SEQ ID NO: 3772985 - DNA, 25 bp, Homo sapien
cattgctcttcctgatgctgtgtgg

SEQ ID NO: 3772986 - DNA, 25 bp, Homo sapien
ttcagcatctttcagctggaggaac

SEQ ID NO: 3772987 - DNA, 25 bp, Homo sapien
cccataacgttggtttctgactctg

SEQ ID NO: 3772988 - DNA, 25 bp, Homo sapien
tgtccagggcagtcagtgtctcagg

SEQ ID NO: 3772989 - DNA, 25 bp, Homo sapien
tcttagccatcagatagtaacccag

SEQ ID NO: 3772990 - DNA, 25 bp, Homo sapien
ttaccagttaccttccagcccataa

SEQ ID NO: 3772991 - DNA, 25 bp, Homo sapien
cagaatccctcagctgacactgaag

SEQ ID NO: 3772992 - DNA, 25 bp, Homo sapien
ggccagccaaaaagactgtgcgtat

SEQ ID NO: 3772993 - DNA, 25 bp, Homo sapien
caagcatttaatgccacggccgtcg

SEQ ID NO: 3772994 - DNA, 25 bp, Homo sapien
tgcaagtgtttcgagcagcctcagt

SEQ ID NO: 3772995 - DNA, 25 bp, Homo sapien
cagtatgtagtcaacactagcctgg

SEQ ID NO: 3772996 - DNA, 25 bp, Homo sapien
tcaaagtgctctgcgtcacaaaatg

SEQ ID NO: 3772997 - DNA, 25 bp, Homo sapien
tattaagtgctcagtacatggaacc

SEQ ID NO: 3772998 - DNA, 25 bp, Homo sapien
caacacaccaaccaagggtaggaag

SEQ ID NO: 3772999 - DNA, 25 bp, Homo sapien
tctcacaaactgtactgactcgagg

SEQ ID NO: 3773000 - DNA, 25 bp, Homo sapien
tgcactctggaagcaagtgactggc

SEQ ID NO: 3773001 - DNA, 25 bp, Homo sapien
cttgcaaagctctaactgaacggac

SEQ ID NO: 3773002 - DNA, 25 bp, Homo sapien
tgcataggactggaagaccgaagtt

SEQ ID NO: 3773003 - DNA, 25 bp, Homo sapien
tcagtgtaggtaaccgtctatggtg

SEQ ID NO: 3773004 - DNA, 25 bp, Homo sapien
taaccgtctatggtgtgttttttca

SEQ ID NO: 3773005 - DNA, 25 bp, Homo sapien
tccactcttctcagtgtaggtaacc

SEQ ID NO: 3773006 - DNA, 25 bp, Homo sapien
taacaccatcgtttccactcttctc

SEQ ID NO: 3773007 - DNA, 25 bp, Homo sapien
gtcatgggaagtcctgttggttgag

SEQ ID NO: 3773008 - DNA, 25 bp, Homo sapien
caggtctgcgtcatcacgacccagt

SEQ ID NO: 3773009 - DNA, 25 bp, Homo sapien
ggtgtcccggcaggtctgcgtcatc

SEQ ID NO: 3773010 - DNA, 25 bp, Homo sapien
gtcatcacgacccagtaacgctgct

SEQ ID NO: 3773011 - DNA, 25 bp, Homo sapien
gagttggccatgcaatgaatgaata

SEQ ID NO: 3773012 - DNA, 25 bp, Homo sapien
cagtattggagaactaggcggttgc

SEQ ID NO: 3773013 - DNA, 25 bp, Homo sapien
catgcaatgaatgaatattataagc

SEQ ID NO: 3773014 - DNA, 25 bp, Homo sapien
attggagaactaggcggttgcttac

SEQ ID NO: 3773015 - DNA, 25 bp, Homo sapien
caaagtaatagaaggctgcaagcgc

SEQ ID NO: 3773016 - DNA, 25 bp, Homo sapien
agtgtcttggaaacattcgagttca

SEQ ID NO: 3773017 - DNA, 25 bp, Homo sapien
gagttcatacagtgcatgacaaagt

SEQ ID NO: 3773018 - DNA, 25 bp, Homo sapien
caagcgctgaaaatgcacccgaatc

SEQ ID NO: 3773019 - DNA, 25 bp, Homo sapien
ctgggctcataggaaatatctgtag

SEQ ID NO: 3773020 - DNA, 25 bp, Homo sapien
tggatgaatcgtaggtgggagggac

SEQ ID NO: 3773021 - DNA, 25 bp, Homo sapien
tgtagtaggatgaaaggaatctggc

SEQ ID NO: 3773022 - DNA, 25 bp, Homo sapien
agtgtccatcatgccctggatgaat

SEQ ID NO: 3773023 - DNA, 25 bp, Homo sapien
ccagtgcaggtagactttatttttg

SEQ ID NO: 3773024 - DNA, 25 bp, Homo sapien
cagtgcaggtagactttatttttga

SEQ ID NO: 3773025 - DNA, 25 bp, Homo sapien
cccagtgcaggtagactttattttt

SEQ ID NO: 3773026 - DNA, 25 bp, Homo sapien
agtgcaggtagactttatttttgaa

SEQ ID NO: 3773027 - DNA, 25 bp, Homo sapien
gccagaattgagtcttcgcgttggg

SEQ ID NO: 3773028 - DNA, 25 bp, Homo sapien
gagccctcgctgcttcgcagaattt

SEQ ID NO: 3773029 - DNA, 25 bp, Homo sapien
cagaaccttggccagaattgagtct

SEQ ID NO: 3773030 - DNA, 25 bp, Homo sapien
cacgctggaaccattgctctagggc

SEQ ID NO: 3773031 - DNA, 25 bp, Homo sapien
tctggcaaattaattgaaggtcctt

SEQ ID NO: 3773032 - DNA, 25 bp, Homo sapien
tccttgaattcagccagtgcacgaa

SEQ ID NO: 3773033 - DNA, 25 bp, Homo sapien
aagtgcgggcaaagggaagctcctc

SEQ ID NO: 3773034 - DNA, 25 bp, Homo sapien
ttcccaggtttgcacaatcacttct

SEQ ID NO: 3773035 - DNA, 25 bp, Homo sapien
gactccaagaaaatgagtgtgcaga

SEQ ID NO: 3773036 - DNA, 25 bp, Homo sapien
cctgacatttgcaaaagatattcca

SEQ ID NO: 3773037 - DNA, 25 bp, Homo sapien
aaagctcaaacagactcctaaaagg

SEQ ID NO: 3773038 - DNA, 25 bp, Homo sapien
ccagtctttcgatgttcagaattga

SEQ ID NO: 3773039 - DNA, 25 bp, Homo sapien
ctggcacctgttcggtggtcccggg

SEQ ID NO: 3773040 - DNA, 25 bp, Homo sapien
gcacctgttcggtggtcccggggca

SEQ ID NO: 3773041 - DNA, 25 bp, Homo sapien
cacctgttcggtggtcccggggcat

SEQ ID NO: 3773042 - DNA, 25 bp, Homo sapien
ctgttcggtggtcccggggcatcat

SEQ ID NO: 3773043 - DNA, 25 bp, Homo sapien
gcagcgacattgcatgcagcagagt

SEQ ID NO: 3773044 - DNA, 25 bp, Homo sapien
catgaaatgctgtccgaatggtggc

SEQ ID NO: 3773045 - DNA, 25 bp, Homo sapien
cacgttcaggtgagaagacctcaaa

SEQ ID NO: 3773046 - DNA, 25 bp, Homo sapien
catttatcttagtcccacgttcagg

SEQ ID NO: 3773047 - DNA, 25 bp, Homo sapien
gactgagcaagaggtactgtgccca

SEQ ID NO: 3773048 - DNA, 25 bp, Homo sapien
cccagcggaccgtgagcattaggct

SEQ ID NO: 3773049 - DNA, 25 bp, Homo sapien
catatgtatacacttggcttggacc

SEQ ID NO: 3773050 - DNA, 25 bp, Homo sapien
tacttggttgcaacacctgtgctga

SEQ ID NO: 3773051 - DNA, 25 bp, Homo sapien
tttaaagttaggccagcccctcatc

SEQ ID NO: 3773052 - DNA, 25 bp, Homo sapien
attgcaagcgtgagcaaagtgctgg

SEQ ID NO: 3773053 - DNA, 25 bp, Homo sapien
ttaaagttaggccagcccctcatcc

SEQ ID NO: 3773054 - DNA, 25 bp, Homo sapien
taaagttaggccagcccctcatcct

SEQ ID NO: 3773055 - DNA, 25 bp, Homo sapien
ctctaaatcgtgttacataaacaag

SEQ ID NO: 3773056 - DNA, 25 bp, Homo sapien
tctgtaacacaatgagttaatgttt

SEQ ID NO: 3773057 - DNA, 25 bp, Homo sapien
catgttcaaacagttcctccaaaga

SEQ ID NO: 3773058 - DNA, 25 bp, Homo sapien
caagtaactgtgacccatgttcaaa

SEQ ID NO: 3773059 - DNA, 25 bp, Homo sapien
attcctctgagaatgaaacgcagta

SEQ ID NO: 3773060 - DNA, 25 bp, Homo sapien
tgaaaagccgtgaatcaggacctgg

SEQ ID NO: 3773061 - DNA, 25 bp, Homo sapien
ctctcgagacttgttggtgattttg

SEQ ID NO: 3773062 - DNA, 25 bp, Homo sapien
ccctgaggagggtctattcctctga

SEQ ID NO: 3773063 - DNA, 25 bp, Homo sapien
ctacagtttgggctggttgctgtga

SEQ ID NO: 3773064 - DNA, 25 bp, Homo sapien
ttgctgtgactgagcagctgagctc

SEQ ID NO: 3773065 - DNA, 25 bp, Homo sapien
ctggttgctgtgactgagcagctga

SEQ ID NO: 3773066 - DNA, 25 bp, Homo sapien
ttgggctggttgctgtgactgagca

SEQ ID NO: 3773067 - DNA, 25 bp, Homo sapien
tggtgtctggcaccaaaatggtcag

SEQ ID NO: 3773068 - DNA, 25 bp, Homo sapien
tgagttgaggatcgggccccttcct

SEQ ID NO: 3773069 - DNA, 25 bp, Homo sapien
tgccaccatccaatccttgaaagtc

SEQ ID NO: 3773070 - DNA, 25 bp, Homo sapien
cttcctcagagatgtagaacggttc

SEQ ID NO: 3773071 - DNA, 25 bp, Homo sapien
tttcatatgcttcctgagccgaaag

SEQ ID NO: 3773072 - DNA, 25 bp, Homo sapien
ctgagccgaaagctttcccactctt

SEQ ID NO: 3773073 - DNA, 25 bp, Homo sapien
cactcttcacgttccccaccccaat

SEQ ID NO: 3773074 - DNA, 25 bp, Homo sapien
tatgcttcctgagccgaaagctttc

SEQ ID NO: 3773075 - DNA, 25 bp, Homo sapien
gacagtgcagcaggtaacagggacc

SEQ ID NO: 3773076 - DNA, 25 bp, Homo sapien
gattaatgttgctgcttgtcccttg

SEQ ID NO: 3773077 - DNA, 25 bp, Homo sapien
ttgtcccttgtgaggagccaggcag

SEQ ID NO: 3773078 - DNA, 25 bp, Homo sapien
caattaacagatgacaagggtagca

SEQ ID NO: 3773079 - DNA, 25 bp, Homo sapien
catggttctccaagcacgggctgta

SEQ ID NO: 3773080 - DNA, 25 bp, Homo sapien
tgctttgaggaaatgtccccaggag

SEQ ID NO: 3773081 - DNA, 25 bp, Homo sapien
aataaactagaagacgcacctgcta

SEQ ID NO: 3773082 - DNA, 25 bp, Homo sapien
ggctgtacattacccttaggctgac

SEQ ID NO: 3773083 - DNA, 25 bp, Homo sapien
aagcttggccgtgtgagtgccccag

SEQ ID NO: 3773084 - DNA, 25 bp, Homo sapien
tccccagactggctgtcagagcaag

SEQ ID NO: 3773085 - DNA, 25 bp, Homo sapien
tgccatttccggtacagaggacagc

SEQ ID NO: 3773086 - DNA, 25 bp, Homo sapien
gcaacgtaagagtcatctccccaga

SEQ ID NO: 3773087 - DNA, 25 bp, Homo sapien
aggccaggagcctttactggtggaa

SEQ ID NO: 3773088 - DNA, 25 bp, Homo sapien
cccactcaaatgtgcctgagcaata

SEQ ID NO: 3773089 - DNA, 25 bp, Homo sapien
gacttcttaatcacacagctgggac

SEQ ID NO: 3773090 - DNA, 25 bp, Homo sapien
cttgttgggttgaaaggccatgatc

SEQ ID NO: 3773091 - DNA, 25 bp, Homo sapien
gaactgacgtaaggacaagtgcact

SEQ ID NO: 3773092 - DNA, 25 bp, Homo sapien
tcctatcggaacaaacaaggcttgt

SEQ ID NO: 3773093 - DNA, 25 bp, Homo sapien
cagaagttcacagcgtcttggagca

SEQ ID NO: 3773094 - DNA, 25 bp, Homo sapien
caggtcacgtgatcccagtaggtaa

SEQ ID NO: 3773095 - DNA, 25 bp, Homo sapien
ttgtttaattacctgctgccctgct

SEQ ID NO: 3773096 - DNA, 25 bp, Homo sapien
tgttggaaatcaggtataatttatc

SEQ ID NO: 3773097 - DNA, 25 bp, Homo sapien
tgacccatggcaggccgatcaaggc

SEQ ID NO: 3773098 - DNA, 25 bp, Homo sapien
ctgtgttaacgcgacccataggtat

SEQ ID NO: 3773099 - DNA, 25 bp, Homo sapien
ctgtgatgagcttatgaagtcttca

SEQ ID NO: 3773100 - DNA, 25 bp, Homo sapien
tgtgatgagcttatgaagtcttcac

SEQ ID NO: 3773101 - DNA, 25 bp, Homo sapien
gtggccagtgaggtgccagcaggtt

SEQ ID NO: 3773102 - DNA, 25 bp, Homo sapien
cctgcacgtgctgattttcaggcat

SEQ ID NO: 3773103 - DNA, 25 bp, Homo sapien
aatgctggctggatagggaggccct

SEQ ID NO: 3773104 - DNA, 25 bp, Homo sapien
gctcactcatcaggactaatggttg

SEQ ID NO: 3773105 - DNA, 25 bp, Homo sapien
tctgcaggcgagcattcagcactca

SEQ ID NO: 3773106 - DNA, 25 bp, Homo sapien
caattaccgtcaggattggccctgc

SEQ ID NO: 3773107 - DNA, 25 bp, Homo sapien
aatagctgcatgtacgaaacctcac

SEQ ID NO: 3773108 - DNA, 25 bp, Homo sapien
taaaggctaagcacgttgatgtctt

SEQ ID NO: 3773109 - DNA, 25 bp, Homo sapien
aacaaggccttctgcaccgaggagc

SEQ ID NO: 3773110 - DNA, 25 bp, Homo sapien
ggagctgccggttgcgcttctccag

SEQ ID NO: 3773111 - DNA, 25 bp, Homo sapien
aggtggcggcccttcttacgcgcct

SEQ ID NO: 3773112 - DNA, 25 bp, Homo sapien
ctcactgagtttctggttcgccagc

SEQ ID NO: 3773113 - DNA, 25 bp, Homo sapien
tgcatacactatctctgggagcata

SEQ ID NO: 3773114 - DNA, 25 bp, Homo sapien
tctgggagcatatgcaagaaacggg

SEQ ID NO: 3773115 - DNA, 25 bp, Homo sapien
catatgcaagaaacgggtaagggtg

SEQ ID NO: 3773116 - DNA, 25 bp, Homo sapien
ccatctgtgtccgtttaaatatgca

SEQ ID NO: 3773117 - DNA, 25 bp, Homo sapien
ggagcatctggtggttccacttggc

SEQ ID NO: 3773118 - DNA, 25 bp, Homo sapien
gaggactaactcactaggcaagact

SEQ ID NO: 3773119 - DNA, 25 bp, Homo sapien
aagactggctcactaggccgggcat

SEQ ID NO: 3773120 - DNA, 25 bp, Homo sapien
ggtctgtacacttcccgtgagtatt

SEQ ID NO: 3773121 - DNA, 25 bp, Homo sapien
caaacaaagggaacgctcatgccca

SEQ ID NO: 3773122 - DNA, 25 bp, Homo sapien
aatgactcgacaggaccacactgga

SEQ ID NO: 3773123 - DNA, 25 bp, Homo sapien
gcagaacggtttcctgaatgactcg

SEQ ID NO: 3773124 - DNA, 25 bp, Homo sapien
acgtcctccgtagtgccttttggcg

SEQ ID NO: 3773125 - DNA, 25 bp, Homo sapien
tggagcgcagtagcagctggatgtg

SEQ ID NO: 3773126 - DNA, 25 bp, Homo sapien
taagaattgcaggatgtgacgcaga

SEQ ID NO: 3773127 - DNA, 25 bp, Homo sapien
gaaaacctgggtaagtgcaggagaa

SEQ ID NO: 3773128 - DNA, 25 bp, Homo sapien
gggacaagatcttaaatggccaggg

SEQ ID NO: 3773129 - DNA, 25 bp, Homo sapien
tccaaccttggatgcctctgcttgt

SEQ ID NO: 3773130 - DNA, 25 bp, Homo sapien
gggctctggtctagatgcaaggctc

SEQ ID NO: 3773131 - DNA, 25 bp, Homo sapien
ggtcctgtgagttacagcatctgaa

SEQ ID NO: 3773132 - DNA, 25 bp, Homo sapien
tgtttagtcaaagcctccttgggca

SEQ ID NO: 3773133 - DNA, 25 bp, Homo sapien
cgtgcccagcagttgacaggtggct

SEQ ID NO: 3773134 - DNA, 25 bp, Homo sapien
cccagcagttgacaggtggctgcca

SEQ ID NO: 3773135 - DNA, 25 bp, Homo sapien
tgccagtggggcacccgggggccat

SEQ ID NO: 3773136 - DNA, 25 bp, Homo sapien
gctgccagtggggcacccgggggcc

SEQ ID NO: 3773137 - DNA, 25 bp, Homo sapien
tctgtaagctccatgtcttgggtca

SEQ ID NO: 3773138 - DNA, 25 bp, Homo sapien
tgggtgtgccaacccgggctgagtg

SEQ ID NO: 3773139 - DNA, 25 bp, Homo sapien
gctgagtgaggtgcactgtgtcccc

SEQ ID NO: 3773140 - DNA, 25 bp, Homo sapien
gagtgtgggtgtgccaacccgggct

SEQ ID NO: 3773141 - DNA, 25 bp, Homo sapien
agaagggaaagtaatctctgggtgc

SEQ ID NO: 3773142 - DNA, 25 bp, Homo sapien
aagggaaagtaatctctgggtgctg

SEQ ID NO: 3773143 - DNA, 25 bp, Homo sapien
gaagggaaagtaatctctgggtgct

SEQ ID NO: 3773144 - DNA, 25 bp, Homo sapien
caagatctgacgagatcaggtgcat

SEQ ID NO: 3773145 - DNA, 25 bp, Homo sapien
gtgcattcagggtgctacggccgta

SEQ ID NO: 3773146 - DNA, 25 bp, Homo sapien
ttctcttatccaggtagtcaccagg

SEQ ID NO: 3773147 - DNA, 25 bp, Homo sapien
tcttatccaggtagtcaccaggcca

SEQ ID NO: 3773148 - DNA, 25 bp, Homo sapien
tccctttggtcttccatcccgtggc

SEQ ID NO: 3773149 - DNA, 25 bp, Homo sapien
tcttatgccttcaacccagcatcct

SEQ ID NO: 3773150 - DNA, 25 bp, Homo sapien
ttcttatgccttcaacccagcatcc

SEQ ID NO: 3773151 - DNA, 25 bp, Homo sapien
catcccgtggcccttatccaatttt

SEQ ID NO: 3773152 - DNA, 25 bp, Homo sapien
actgaatttagatccctgagtagga

SEQ ID NO: 3773153 - DNA, 25 bp, Homo sapien
ccctgagtaggaattgctgatcttt

SEQ ID NO: 3773154 - DNA, 25 bp, Homo sapien
aaagggaggcactgaatttagatcc

SEQ ID NO: 3773155 - DNA, 25 bp, Homo sapien
gaattgctgatctttgcacttgtga

SEQ ID NO: 3773156 - DNA, 25 bp, Homo sapien
catgagcttccaccatgtgccagag

SEQ ID NO: 3773157 - DNA, 25 bp, Homo sapien
ccagagtgttgggtgctaaaaatac

SEQ ID NO: 3773158 - DNA, 25 bp, Homo sapien
acctggcctgttcacttctatacaa

SEQ ID NO: 3773159 - DNA, 25 bp, Homo sapien
ggcactgataaaatggcctgtgact

SEQ ID NO: 3773160 - DNA, 25 bp, Homo sapien
agtcattgtcaaatagagtttgccc

SEQ ID NO: 3773161 - DNA, 25 bp, Homo sapien
gagtttgcccttctttagaccactg

SEQ ID NO: 3773162 - DNA, 25 bp, Homo sapien
tagaagcgctaaatttggtgaccaa

SEQ ID NO: 3773163 - DNA, 25 bp, Homo sapien
caacaccttaaattactagaagcgc

SEQ ID NO: 3773164 - DNA, 25 bp, Homo sapien
tgggccatgagtgaactgcaacatc

SEQ ID NO: 3773165 - DNA, 25 bp, Homo sapien
gaagagccagacacaactgccagtg

SEQ ID NO: 3773166 - DNA, 25 bp, Homo sapien
cataatgtcctcagtagctgggcca

SEQ ID NO: 3773167 - DNA, 25 bp, Homo sapien
ggctgccgggaataaagaccacata

SEQ ID NO: 3773168 - DNA, 25 bp, Homo sapien
acctgtcacatccaagcccatcatc

SEQ ID NO: 3773169 - DNA, 25 bp, Homo sapien
tctctcctagttggtgccacctgtc

SEQ ID NO: 3773170 - DNA, 25 bp, Homo sapien
ctgtgttctctcctagttggtgcca

SEQ ID NO: 3773171 - DNA, 25 bp, Homo sapien
tgttctctcctagttggtgccacct

SEQ ID NO: 3773172 - DNA, 25 bp, Homo sapien
tccggttccaggacttgcaagcctc

SEQ ID NO: 3773173 - DNA, 25 bp, Homo sapien
gcaaatcaatgctgaaccacccctg

SEQ ID NO: 3773174 - DNA, 25 bp, Homo sapien
ggactctggacagaaagtggcccac

SEQ ID NO: 3773175 - DNA, 25 bp, Homo sapien
ggctgtttgtcaatgagaggaagga

SEQ ID NO: 3773176 - DNA, 25 bp, Homo sapien
ctgagaattaggtgggctggtcctg

SEQ ID NO: 3773177 - DNA, 25 bp, Homo sapien
tgctgagaattaggtgggctggtcc

SEQ ID NO: 3773178 - DNA, 25 bp, Homo sapien
gctgagaattaggtgggctggtcct

SEQ ID NO: 3773179 - DNA, 25 bp, Homo sapien
ctgctgagaattaggtgggctggtc

SEQ ID NO: 3773180 - DNA, 25 bp, Homo sapien
acccagagaggacggcaagtcagaa

SEQ ID NO: 3773181 - DNA, 25 bp, Homo sapien
catgacacggtcaagggagtattca

SEQ ID NO: 3773182 - DNA, 25 bp, Homo sapien
agaaagttggaccacacccagggag

SEQ ID NO: 3773183 - DNA, 25 bp, Homo sapien
cagaagaaatctgcgggtcctggag

SEQ ID NO: 3773184 - DNA, 25 bp, Homo sapien
aagatcccgttgctatttactaatg

SEQ ID NO: 3773185 - DNA, 25 bp, Homo sapien
gcttttgaaagaaagatcccgttgc

SEQ ID NO: 3773186 - DNA, 25 bp, Homo sapien
ttaacaccatgacaccgaaccagag

SEQ ID NO: 3773187 - DNA, 25 bp, Homo sapien
gaggcggtgaacacgtactaacact

SEQ ID NO: 3773188 - DNA, 25 bp, Homo sapien
gaagaactccttatccaacagtaaa

SEQ ID NO: 3773189 - DNA, 25 bp, Homo sapien
ttctcatactttgggaagaactcct

SEQ ID NO: 3773190 - DNA, 25 bp, Homo sapien
ctcatcttgttctcatactttggga

SEQ ID NO: 3773191 - DNA, 25 bp, Homo sapien
gggaagaactccttatccaacagta

SEQ ID NO: 3773192 - DNA, 25 bp, Homo sapien
ccagtcactggagaaagtcgccagc

SEQ ID NO: 3773193 - DNA, 25 bp, Homo sapien
tggcatcttggaaattgactccgtg

SEQ ID NO: 3773194 - DNA, 25 bp, Homo sapien
gctgctgcccttgcgaacagtttga

SEQ ID NO: 3773195 - DNA, 25 bp, Homo sapien
tccgtgaggcaagaggttataattt

SEQ ID NO: 3773196 - DNA, 25 bp, Homo sapien
acagcatctcgacctcggccgagta

SEQ ID NO: 3773197 - DNA, 25 bp, Homo sapien
tcgacctcggccgagtagaagaggc

SEQ ID NO: 3773198 - DNA, 25 bp, Homo sapien
taggagtagtcctggaccacggtgt

SEQ ID NO: 3773199 - DNA, 25 bp, Homo sapien
ggcgtacacgatggtctcggccagc

SEQ ID NO: 3773200 - DNA, 25 bp, Homo sapien
ccgggagctgagcgcaccgctgtct

SEQ ID NO: 3773201 - DNA, 25 bp, Homo sapien
tgctcgggccgctcccgggagctga

SEQ ID NO: 3773202 - DNA, 25 bp, Homo sapien
gaagggcagccctgggcgctcggct

SEQ ID NO: 3773203 - DNA, 25 bp, Homo sapien
agccctgggcgctcggctgctcggg

SEQ ID NO: 3773204 - DNA, 25 bp, Homo sapien
tggacattgctagactggaactgac

SEQ ID NO: 3773205 - DNA, 25 bp, Homo sapien
tctggacattgctagactggaactg

SEQ ID NO: 3773206 - DNA, 25 bp, Homo sapien
ctggacattgctagactggaactga

SEQ ID NO: 3773207 - DNA, 25 bp, Homo sapien
tacttgacttaagctgtcctggaac

SEQ ID NO: 3773208 - DNA, 25 bp, Homo sapien
gaacatccaggttttatgatcatca

SEQ ID NO: 3773209 - DNA, 25 bp, Homo sapien
tcaagaacatccaggttttatgatc

SEQ ID NO: 3773210 - DNA, 25 bp, Homo sapien
tcattcacgtgcaacccagggctac

SEQ ID NO: 3773211 - DNA, 25 bp, Homo sapien
tagcaacaagtagcctggggtgctc

SEQ ID NO: 3773212 - DNA, 25 bp, Homo sapien
ctagcaacaagtagcctggggtgct

SEQ ID NO: 3773213 - DNA, 25 bp, Homo sapien
agcaacaagtagcctggggtgctcc

SEQ ID NO: 3773214 - DNA, 25 bp, Homo sapien
cactgctgtcttggtatttacagac

SEQ ID NO: 3773215 - DNA, 25 bp, Homo sapien
gagcatcttgctcccgctgatgtag

SEQ ID NO: 3773216 - DNA, 25 bp, Homo sapien
tttgtgtagcaccttgttccaggca

SEQ ID NO: 3773217 - DNA, 25 bp, Homo sapien
gtctgcagattagaagcaataataa

SEQ ID NO: 3773218 - DNA, 25 bp, Homo sapien
gctcaaggtggttcctttagctccc

SEQ ID NO: 3773219 - DNA, 25 bp, Homo sapien
tcaaggtggttcctttagctcccat

SEQ ID NO: 3773220 - DNA, 25 bp, Homo sapien
tgctcaaggtggttcctttagctcc

SEQ ID NO: 3773221 - DNA, 25 bp, Homo sapien
ctgctcaaggtggttcctttagctc

SEQ ID NO: 3773222 - DNA, 25 bp, Homo sapien
gcaatccagaagaacctaaacaggg

SEQ ID NO: 3773223 - DNA, 25 bp, Homo sapien
ggtccctggagtagataatgtaact

SEQ ID NO: 3773224 - DNA, 25 bp, Homo sapien
ccgcaatccagaagaacctaaacag

SEQ ID NO: 3773225 - DNA, 25 bp, Homo sapien
agtccagttcccttcccgcaatcca

SEQ ID NO: 3773226 - DNA, 25 bp, Homo sapien
aaatgtgatggaaatagactcttcg

SEQ ID NO: 3773227 - DNA, 25 bp, Homo sapien
tggaaatagactcttcgctctccag

SEQ ID NO: 3773228 - DNA, 25 bp, Homo sapien
tgtgatggaaatagactcttcgctc

SEQ ID NO: 3773229 - DNA, 25 bp, Homo sapien
gatggaaatagactcttcgctctcc

SEQ ID NO: 3773230 - DNA, 25 bp, Homo sapien
gcatgcctctgccaatttcccaaga

SEQ ID NO: 3773231 - DNA, 25 bp, Homo sapien
ctgggagagacaacaccatcgacac

SEQ ID NO: 3773232 - DNA, 25 bp, Homo sapien
aacagctgtagctgatttcttcagc

SEQ ID NO: 3773233 - DNA, 25 bp, Homo sapien
aatttatccaggtgtggagaacagc

SEQ ID NO: 3773234 - DNA, 25 bp, Homo sapien
gcaggggtgaaggtacacagcccat

SEQ ID NO: 3773235 - DNA, 25 bp, Homo sapien
gctgcctcgtttgatcctgataagc

SEQ ID NO: 3773236 - DNA, 25 bp, Homo sapien
cccaaaatggacgagctgcctcgtt

SEQ ID NO: 3773237 - DNA, 25 bp, Homo sapien
gcctcgtttgatcctgataagccat

SEQ ID NO: 3773238 - DNA, 25 bp, Homo sapien
ggacatacggccaaatctaactctg

SEQ ID NO: 3773239 - DNA, 25 bp, Homo sapien
tagaaatggcgcacaacctcttgca

SEQ ID NO: 3773240 - DNA, 25 bp, Homo sapien
gaagcaagttcgtgatggactagca

SEQ ID NO: 3773241 - DNA, 25 bp, Homo sapien
tgtaacagcccaacgtagatccaag

SEQ ID NO: 3773242 - DNA, 25 bp, Homo sapien
ctttatatattgaaagaactgtttc

SEQ ID NO: 3773243 - DNA, 25 bp, Homo sapien
attctggcccctgatgtgcttctgg

SEQ ID NO: 3773244 - DNA, 25 bp, Homo sapien
ttcctccattaagtagcacatgtaa

SEQ ID NO: 3773245 - DNA, 25 bp, Homo sapien
tgttctttatatattgaaagaactg

SEQ ID NO: 3773246 - DNA, 25 bp, Homo sapien
tcatttggtattgcgagggatagac

SEQ ID NO: 3773247 - DNA, 25 bp, Homo sapien
cagtccaggacaatacgctgcagcg

SEQ ID NO: 3773248 - DNA, 25 bp, Homo sapien
tccaggacaatacgctgcagcgtaa

SEQ ID NO: 3773249 - DNA, 25 bp, Homo sapien
ctactgagaatcctgtgggtcagca

SEQ ID NO: 3773250 - DNA, 25 bp, Homo sapien
caaacctactgagaatcctgtgggt

SEQ ID NO: 3773251 - DNA, 25 bp, Homo sapien
atccccctcaatatggcctaagcaa

SEQ ID NO: 3773252 - DNA, 25 bp, Homo sapien
cctcaatatggcctaagcaatctga

SEQ ID NO: 3773253 - DNA, 25 bp, Homo sapien
cccctcaatatggcctaagcaatct

SEQ ID NO: 3773254 - DNA, 25 bp, Homo sapien
tccccctcaatatggcctaagcaat

SEQ ID NO: 3773255 - DNA, 25 bp, Homo sapien
gtatctcttcaagttggccttattt

SEQ ID NO: 3773256 - DNA, 25 bp, Homo sapien
atctcttcaagttggccttattttt

SEQ ID NO: 3773257 - DNA, 25 bp, Homo sapien
tctcttcaagttggccttattttta

SEQ ID NO: 3773258 - DNA, 25 bp, Homo sapien
tatctcttcaagttggccttatttt

SEQ ID NO: 3773259 - DNA, 25 bp, Homo sapien
acctttagaaggtgctggactctca

SEQ ID NO: 3773260 - DNA, 25 bp, Homo sapien
gacctttagaaggtgctggactctc

SEQ ID NO: 3773261 - DNA, 25 bp, Homo sapien
tcacttgaaattcaagtcacctgtt

SEQ ID NO: 3773262 - DNA, 25 bp, Homo sapien
gtaggaagtatcctctctcagtacc

SEQ ID NO: 3773263 - DNA, 25 bp, Homo sapien
tgcagtgtagatcattccaagtctt

SEQ ID NO: 3773264 - DNA, 25 bp, Homo sapien
aagaattccattgaactggttccag

SEQ ID NO: 3773265 - DNA, 25 bp, Homo sapien
attgtccctatttgcacatgacatc

SEQ ID NO: 3773266 - DNA, 25 bp, Homo sapien
tgggaaggaccctaccttgtgctgc

SEQ ID NO: 3773267 - DNA, 25 bp, Homo sapien
tggaaaccacatcctcatcaaaggt

SEQ ID NO: 3773268 - DNA, 25 bp, Homo sapien
ctaggcaacactaagtagggatggg

SEQ ID NO: 3773269 - DNA, 25 bp, Homo sapien
tcaagccccaagatatgcaaagtcc

SEQ ID NO: 3773270 - DNA, 25 bp, Homo sapien
tggagactgatagtgaccccaaatg

SEQ ID NO: 3773271 - DNA, 25 bp, Homo sapien
gtggagactgatagtgaccccaaat

SEQ ID NO: 3773272 - DNA, 25 bp, Homo sapien
tgtggagactgatagtgaccccaaa

SEQ ID NO: 3773273 - DNA, 25 bp, Homo sapien
attcttacgccattgcatcctcact

SEQ ID NO: 3773274 - DNA, 25 bp, Homo sapien
ccttttctgccgatcccagggtaca

SEQ ID NO: 3773275 - DNA, 25 bp, Homo sapien
tctgccgatcccagggtacagctgt

SEQ ID NO: 3773276 - DNA, 25 bp, Homo sapien
acagctgtgacaccgtcttttctgc

SEQ ID NO: 3773277 - DNA, 25 bp, Homo sapien
cgcaggcaccccttacaggccccgg

SEQ ID NO: 3773278 - DNA, 25 bp, Homo sapien
tccttataaagcagcctctagcctc

SEQ ID NO: 3773279 - DNA, 25 bp, Homo sapien
ggaggtccagacagcgaagcagaat

SEQ ID NO: 3773280 - DNA, 25 bp, Homo sapien
gaatccttcggagataccaggagag

SEQ ID NO: 3773281 - DNA, 25 bp, Homo sapien
caggagagggcgcatctgccttttt

SEQ ID NO: 3773282 - DNA, 25 bp, Homo sapien
gagcctattcgtccgcaacaagagc

SEQ ID NO: 3773283 - DNA, 25 bp, Homo sapien
cttgtcatcctgctgtctaatccgg

SEQ ID NO: 3773284 - DNA, 25 bp, Homo sapien
ccagcagaggctattcttcagcaac

SEQ ID NO: 3773285 - DNA, 25 bp, Homo sapien
ttcagcaacaagaatagccgagcct

SEQ ID NO: 3773286 - DNA, 25 bp, Homo sapien
gctgaacagccattttttatactca

SEQ ID NO: 3773287 - DNA, 25 bp, Homo sapien
gaaaatgtacatgacctaactttta

SEQ ID NO: 3773288 - DNA, 25 bp, Homo sapien
gacctaacttttacatcatagtaaa

SEQ ID NO: 3773289 - DNA, 25 bp, Homo sapien
gtaaaacaggccctatggagagagg

SEQ ID NO: 3773290 - DNA, 25 bp, Homo sapien
ggatactgtttcctcgtattaccac

SEQ ID NO: 3773291 - DNA, 25 bp, Homo sapien
tcataaagggatcaagtccctgcaa

SEQ ID NO: 3773292 - DNA, 25 bp, Homo sapien
tccctgcaatattccttggacgtgt

SEQ ID NO: 3773293 - DNA, 25 bp, Homo sapien
tgaggatactgtttcctcgtattac

SEQ ID NO: 3773294 - DNA, 25 bp, Homo sapien
tggtggaggcataaaaggtcatgga

SEQ ID NO: 3773295 - DNA, 25 bp, Homo sapien
agttttcaaagaaacgtctctctct

SEQ ID NO: 3773296 - DNA, 25 bp, Homo sapien
tggaggcataaaaggtcatggaggg

SEQ ID NO: 3773297 - DNA, 25 bp, Homo sapien
ttcaaagaaacgtctctctcttttc

SEQ ID NO: 3773298 - DNA, 25 bp, Homo sapien
tctgcttcgtaagattgccatcacc

SEQ ID NO: 3773299 - DNA, 25 bp, Homo sapien
tggaacacttctgcattatacctgt

SEQ ID NO: 3773300 - DNA, 25 bp, Homo sapien
ctaagtgaatttgggtgtgtgacac

SEQ ID NO: 3773301 - DNA, 25 bp, Homo sapien
cacctaatgctaagctatggaacac

SEQ ID NO: 3773302 - DNA, 25 bp, Homo sapien
ccatctgagaaaccgttgcctaacc

SEQ ID NO: 3773303 - DNA, 25 bp, Homo sapien
ttttgatgtcccatctgagaaaccg

SEQ ID NO: 3773304 - DNA, 25 bp, Homo sapien
ggcgcggtggccaaaattacagttg

SEQ ID NO: 3773305 - DNA, 25 bp, Homo sapien
gcctggcgcggtggccaaaattaca

SEQ ID NO: 3773306 - DNA, 25 bp, Homo sapien
tcatgcccagcagtagtgttcctct

SEQ ID NO: 3773307 - DNA, 25 bp, Homo sapien
aactgagtgaaaaactggaactggc

SEQ ID NO: 3773308 - DNA, 25 bp, Homo sapien
cacccggccagagctgataattaaa

SEQ ID NO: 3773309 - DNA, 25 bp, Homo sapien
taacagtatcaacgagtcacagcct

SEQ ID NO: 3773310 - DNA, 25 bp, Homo sapien
gatgaaaccgataacattggcctca

SEQ ID NO: 3773311 - DNA, 25 bp, Homo sapien
tgcaggaacaatgaagtggccacag

SEQ ID NO: 3773312 - DNA, 25 bp, Homo sapien
gcagttagctagcatgtgacatcat

SEQ ID NO: 3773313 - DNA, 25 bp, Homo sapien
aaaaatattggcatcgatgaaaccg

SEQ ID NO: 3773314 - DNA, 25 bp, Homo sapien
gccgggctatttgctactgcaataa

SEQ ID NO: 3773315 - DNA, 25 bp, Homo sapien
gcatgggtgcccctagcccaatggc

SEQ ID NO: 3773316 - DNA, 25 bp, Homo sapien
tgcaataataggtttcttataaacc

SEQ ID NO: 3773317 - DNA, 25 bp, Homo sapien
tttcttataaaccgtcagcctcctg

SEQ ID NO: 3773318 - DNA, 25 bp, Homo sapien
aaaaagatgcatgaacttgtgaggg

SEQ ID NO: 3773319 - DNA, 25 bp, Homo sapien
taagacgtttttgcaaggcaaggag

SEQ ID NO: 3773320 - DNA, 25 bp, Homo sapien
gtgaggggattcctgcatggctctt

SEQ ID NO: 3773321 - DNA, 25 bp, Homo sapien
ttctacttgctggttgaagcttctg

SEQ ID NO: 3773322 - DNA, 25 bp, Homo sapien
cattccagcctagactggaaggcag

SEQ ID NO: 3773323 - DNA, 25 bp, Homo sapien
ttgaagtcaggtgtttgagtcgagc

SEQ ID NO: 3773324 - DNA, 25 bp, Homo sapien
attccagcctagactggaaggcagc

SEQ ID NO: 3773325 - DNA, 25 bp, Homo sapien
gcattccagcctagactggaaggca

SEQ ID NO: 3773326 - DNA, 25 bp, Homo sapien
tcagggtaactgatggaagtaaact

SEQ ID NO: 3773327 - DNA, 25 bp, Homo sapien
tcagtcagggtaactgatggaagta

SEQ ID NO: 3773328 - DNA, 25 bp, Homo sapien
cagggtaactgatggaagtaaactc

SEQ ID NO: 3773329 - DNA, 25 bp, Homo sapien
gtaactgatggaagtaaactccagg

SEQ ID NO: 3773330 - DNA, 25 bp, Homo sapien
gactgaactcatcatccccgtctga

SEQ ID NO: 3773331 - DNA, 25 bp, Homo sapien
cacagcctgggactgaactcatcat

SEQ ID NO: 3773332 - DNA, 25 bp, Homo sapien
aaacctgaaggaggaaatctccaca

SEQ ID NO: 3773333 - DNA, 25 bp, Homo sapien
tgatccacagtaagctgctctttca

SEQ ID NO: 3773334 - DNA, 25 bp, Homo sapien
tgtttggcttccctgcgacgagagc

SEQ ID NO: 3773335 - DNA, 25 bp, Homo sapien
ggaccgtgcagaaataacagccttg

SEQ ID NO: 3773336 - DNA, 25 bp, Homo sapien
tataattcttgtgggagtcctcaaa

SEQ ID NO: 3773337 - DNA, 25 bp, Homo sapien
cacatgtaatcaaagagtccacgca

SEQ ID NO: 3773338 - DNA, 25 bp, Homo sapien
tacatcaagggaattcttcactaag

SEQ ID NO: 3773339 - DNA, 25 bp, Homo sapien
ctacatcaagggaattcttcactaa

SEQ ID NO: 3773340 - DNA, 25 bp, Homo sapien
catgggcatatcaataccagctgta

SEQ ID NO: 3773341 - DNA, 25 bp, Homo sapien
gaaaacatgggcatatcaataccag

SEQ ID NO: 3773342 - DNA, 25 bp, Homo sapien
caataccagctgtattgatgtccat

SEQ ID NO: 3773343 - DNA, 25 bp, Homo sapien
tattgatgtccattattatctctgc

SEQ ID NO: 3773344 - DNA, 25 bp, Homo sapien
tatgaaatctgtatcagtacgatac

SEQ ID NO: 3773345 - DNA, 25 bp, Homo sapien
gcttctttaatgctgaccttccctc

SEQ ID NO: 3773346 - DNA, 25 bp, Homo sapien
tcttgaaatatgaaatctgtatcag

SEQ ID NO: 3773347 - DNA, 25 bp, Homo sapien
tctgtatcagtacgatacttgtact

SEQ ID NO: 3773348 - DNA, 25 bp, Homo sapien
ctatcagattttcgaggcttaatta

SEQ ID NO: 3773349 - DNA, 25 bp, Homo sapien
atcagattttcgaggcttaattaag

SEQ ID NO: 3773350 - DNA, 25 bp, Homo sapien
cagattttcgaggcttaattaagtt

SEQ ID NO: 3773351 - DNA, 25 bp, Homo sapien
tcagattttcgaggcttaattaagt

SEQ ID NO: 3773352 - DNA, 25 bp, Homo sapien
tttgaaggtagcagggccagaggtc

SEQ ID NO: 3773353 - DNA, 25 bp, Homo sapien
ctttttgaaggtagcagggccagag

SEQ ID NO: 3773354 - DNA, 25 bp, Homo sapien
tttttgaaggtagcagggccagagg

SEQ ID NO: 3773355 - DNA, 25 bp, Homo sapien
ttgaaggtagcagggccagaggtct

SEQ ID NO: 3773356 - DNA, 25 bp, Homo sapien
catggccatggtcaaggctatacaa

SEQ ID NO: 3773357 - DNA, 25 bp, Homo sapien
tcatggccatggtcaaggctataca

SEQ ID NO: 3773358 - DNA, 25 bp, Homo sapien
cgcggaacatggatgaggataatga

SEQ ID NO: 3773359 - DNA, 25 bp, Homo sapien
tcgcggaacatggatgaggataatg

SEQ ID NO: 3773360 - DNA, 25 bp, Homo sapien
ttcgcggaacatggatgaggataat

SEQ ID NO: 3773361 - DNA, 25 bp, Homo sapien
cttcgcggaacatggatgaggataa

SEQ ID NO: 3773362 - DNA, 25 bp, Homo sapien
gctgtgggcagccagacacacggac

SEQ ID NO: 3773363 - DNA, 25 bp, Homo sapien
ctgtgggcagccagacacacggaca

SEQ ID NO: 3773364 - DNA, 25 bp, Homo sapien
tctgtagttttagccctttcctgga

SEQ ID NO: 3773365 - DNA, 25 bp, Homo sapien
agagaatccttctccttcgtgtaca

SEQ ID NO: 3773366 - DNA, 25 bp, Homo sapien
aaacttcgtaatgtttgtgtgagcg

SEQ ID NO: 3773367 - DNA, 25 bp, Homo sapien
taggaaacttcgtaatgtttgtgtg

SEQ ID NO: 3773368 - DNA, 25 bp, Homo sapien
ctccttcgtgtacagtgtcactttg

SEQ ID NO: 3773369 - DNA, 25 bp, Homo sapien
catttcgaatggacataaggctgac

SEQ ID NO: 3773370 - DNA, 25 bp, Homo sapien
tactgggtgggatgacttaaacttc

SEQ ID NO: 3773371 - DNA, 25 bp, Homo sapien
gacaaaggaacagtcggtcccagag

SEQ ID NO: 3773372 - DNA, 25 bp, Homo sapien
ggtcctgagcccaaacatttcgaat

SEQ ID NO: 3773373 - DNA, 25 bp, Homo sapien
acagccgcgtgcgtctgacgtcaag

SEQ ID NO: 3773374 - DNA, 25 bp, Homo sapien
gattcgctggcgtagccagtcagtg

SEQ ID NO: 3773375 - DNA, 25 bp, Homo sapien
ccccaacaaagagggcgtccaatga

SEQ ID NO: 3773376 - DNA, 25 bp, Homo sapien
aatgacgtaaaccaatccgattgct

SEQ ID NO: 3773377 - DNA, 25 bp, Homo sapien
gtgaacgaagaaggcgtcccggcat

SEQ ID NO: 3773378 - DNA, 25 bp, Homo sapien
ctgtgaacgaagaaggcgtcccggc

SEQ ID NO: 3773379 - DNA, 25 bp, Homo sapien
tgtgaacgaagaaggcgtcccggca

SEQ ID NO: 3773380 - DNA, 25 bp, Homo sapien
gcttgggaccgctcggagctggcat

SEQ ID NO: 3773381 - DNA, 25 bp, Homo sapien
tctctgcgcgggttgcaaggggtcc

SEQ ID NO: 3773382 - DNA, 25 bp, Homo sapien
tccgaggctagaggcgcggggtccc

SEQ ID NO: 3773383 - DNA, 25 bp, Homo sapien
ggtgggcgcgatctggatttggcgg

SEQ ID NO: 3773384 - DNA, 25 bp, Homo sapien
tgcctgcttactttctgccattggg

SEQ ID NO: 3773385 - DNA, 25 bp, Homo sapien
gtgtttatacgaacacccagaggca

SEQ ID NO: 3773386 - DNA, 25 bp, Homo sapien
tcaggaagattggactaagtgatcc

SEQ ID NO: 3773387 - DNA, 25 bp, Homo sapien
caggtaagtagcttaacttctgggc

SEQ ID NO: 3773388 - DNA, 25 bp, Homo sapien
gtagtgcgatcgcggcacactgcag

SEQ ID NO: 3773389 - DNA, 25 bp, Homo sapien
tgcagtagtgcgatcgcggcacact

SEQ ID NO: 3773390 - DNA, 25 bp, Homo sapien
ctacaggcgtgcgtgaccaagccca

SEQ ID NO: 3773391 - DNA, 25 bp, Homo sapien
ggcgtgcgtgaccaagcccagctaa

SEQ ID NO: 3773392 - DNA, 25 bp, Homo sapien
aaagcatggcatccaaccaggagga

SEQ ID NO: 3773393 - DNA, 25 bp, Homo sapien
tgaatacagcgcaaccttcctggtg

SEQ ID NO: 3773394 - DNA, 25 bp, Homo sapien
ggctgacgcaggatctgagctagca

SEQ ID NO: 3773395 - DNA, 25 bp, Homo sapien
ccaggaggacagttttgtgtgaata

SEQ ID NO: 3773396 - DNA, 25 bp, Homo sapien
ttggtgaaggaattctggaccgaat

SEQ ID NO: 3773397 - DNA, 25 bp, Homo sapien
tgttatgcttctcccgcccaaggaa

SEQ ID NO: 3773398 - DNA, 25 bp, Homo sapien
gcccaaggaaatgaccgcagctggc

SEQ ID NO: 3773399 - DNA, 25 bp, Homo sapien
aaatgaccgcagctggcatttggtg

SEQ ID NO: 3773400 - DNA, 25 bp, Homo sapien
ctgaagtataatggagcccttgtta

SEQ ID NO: 3773401 - DNA, 25 bp, Homo sapien
ggtaatggaattcttatttggctcc

SEQ ID NO: 3773402 - DNA, 25 bp, Homo sapien
gtagaacaaggtaatggaattctta

SEQ ID NO: 3773403 - DNA, 25 bp, Homo sapien
tttggctcctttctgccagagttct

SEQ ID NO: 3773404 - DNA, 25 bp, Homo sapien
ggaagccactgtaggtttggtacta

SEQ ID NO: 3773405 - DNA, 25 bp, Homo sapien
agcaaacatgtgattcttgactgat

SEQ ID NO: 3773406 - DNA, 25 bp, Homo sapien
cataagcaaacatgtgattcttgac

SEQ ID NO: 3773407 - DNA, 25 bp, Homo sapien
ttggtactaggaggccctgcaggca

SEQ ID NO: 3773408 - DNA, 25 bp, Homo sapien
tgaaagtcaggacactttcacacac

SEQ ID NO: 3773409 - DNA, 25 bp, Homo sapien
aagaggtgaaagtcaggacactttc

SEQ ID NO: 3773410 - DNA, 25 bp, Homo sapien
gaggtgaaagtcaggacactttcac

SEQ ID NO: 3773411 - DNA, 25 bp, Homo sapien
ggtgaaagtcaggacactttcacac

SEQ ID NO: 3773412 - DNA, 25 bp, Homo sapien
gccggtttgcatgggaaagattgct

SEQ ID NO: 3773413 - DNA, 25 bp, Homo sapien
gaacacggggatgccaatggtgcta

SEQ ID NO: 3773414 - DNA, 25 bp, Homo sapien
gaaaggcatgcgtcttttcaagagc

SEQ ID NO: 3773415 - DNA, 25 bp, Homo sapien
caatggtgctacaagctttgtcttc

SEQ ID NO: 3773416 - DNA, 25 bp, Homo sapien
gtgtggtggcggttgtagagatagg

SEQ ID NO: 3773417 - DNA, 25 bp, Homo sapien
gtggtggcggttgtagagataggat

SEQ ID NO: 3773418 - DNA, 25 bp, Homo sapien
tgtagagataggatgggtgcaggcc

SEQ ID NO: 3773419 - DNA, 25 bp, Homo sapien
tagagataggatgggtgcaggccgt

SEQ ID NO: 3773420 - DNA, 25 bp, Homo sapien
agtgccactggcgccactgctccac

SEQ ID NO: 3773421 - DNA, 25 bp, Homo sapien
actggcgccactgctccacagcctc

SEQ ID NO: 3773422 - DNA, 25 bp, Homo sapien
cagcctcccggctcctctcttcctg

SEQ ID NO: 3773423 - DNA, 25 bp, Homo sapien
cacagcctcccggctcctctcttcc

SEQ ID NO: 3773424 - DNA, 25 bp, Homo sapien
gttttctcaaatgtggacctcacca

SEQ ID NO: 3773425 - DNA, 25 bp, Homo sapien
ctagcgaaagtgaaactggcatcct

SEQ ID NO: 3773426 - DNA, 25 bp, Homo sapien
tttctcaaatgtggacctcaccaag

SEQ ID NO: 3773427 - DNA, 25 bp, Homo sapien
tggtactagcgaaagtgaaactggc

SEQ ID NO: 3773428 - DNA, 25 bp, Homo sapien
gatggccaacaggaccgcctggtgg

SEQ ID NO: 3773429 - DNA, 25 bp, Homo sapien
gatacaaataggagaagcataaagc

SEQ ID NO: 3773430 - DNA, 25 bp, Homo sapien
ataggagaagcataaagccacaaga

SEQ ID NO: 3773431 - DNA, 25 bp, Homo sapien
ccaaggcttagagaagaggatacaa

SEQ ID NO: 3773432 - DNA, 25 bp, Homo sapien
ggcttagagaagaggatacaaatag

SEQ ID NO: 3773433 - DNA, 25 bp, Homo sapien
tacactgaataggtcaatgaaggcc

SEQ ID NO: 3773434 - DNA, 25 bp, Homo sapien
tggagccaggacattgacgtgaata

SEQ ID NO: 3773435 - DNA, 25 bp, Homo sapien
tgtccaatatgatcctgccagagct

SEQ ID NO: 3773436 - DNA, 25 bp, Homo sapien
gacgtgaatataaggcacctgcgag

SEQ ID NO: 3773437 - DNA, 25 bp, Homo sapien
cattcctttgttcctcgtaatattc

SEQ ID NO: 3773438 - DNA, 25 bp, Homo sapien
catcaacccgaagcttctgcctgtt

SEQ ID NO: 3773439 - DNA, 25 bp, Homo sapien
gtaatattctctccgcagctcatca

SEQ ID NO: 3773440 - DNA, 25 bp, Homo sapien
gcagctcatcaacccgaagcttctg

SEQ ID NO: 3773441 - DNA, 25 bp, Homo sapien
gccgcgcctcttgaggaaattcgag

SEQ ID NO: 3773442 - DNA, 25 bp, Homo sapien
ttgggggaccgcttgccgcgcctct

SEQ ID NO: 3773443 - DNA, 25 bp, Homo sapien
cgcctcttgaggaaattcgaggcat

SEQ ID NO: 3773444 - DNA, 25 bp, Homo sapien
cgcttgccgcgcctcttgaggaaat

SEQ ID NO: 3773445 - DNA, 25 bp, Homo sapien
cctgcatgaaaatcttctgttttgc

SEQ ID NO: 3773446 - DNA, 25 bp, Homo sapien
ttcctgcatgaaaatcttctgtttt

SEQ ID NO: 3773447 - DNA, 25 bp, Homo sapien
ctgattcctgcatgaaaatcttctg

SEQ ID NO: 3773448 - DNA, 25 bp, Homo sapien
gattcctgcatgaaaatcttctgtt

SEQ ID NO: 3773449 - DNA, 25 bp, Homo sapien
ttctcccgccatctgcatggtgccc

SEQ ID NO: 3773450 - DNA, 25 bp, Homo sapien
tctcccgccatctgcatggtgccca

SEQ ID NO: 3773451 - DNA, 25 bp, Homo sapien
agcaccacggcggagaagcaagaca

SEQ ID NO: 3773452 - DNA, 25 bp, Homo sapien
gcaggacggcctgtctccaagtcat

SEQ ID NO: 3773453 - DNA, 25 bp, Homo sapien
tagacaggagcaccacggcggagaa

SEQ ID NO: 3773454 - DNA, 25 bp, Homo sapien
agcaggacggcctgtctccaagtca

SEQ ID NO: 3773455 - DNA, 25 bp, Homo sapien
aggggctccgtccaggacccacaag

SEQ ID NO: 3773456 - DNA, 25 bp, Homo sapien
cagaggtaggggctccgtccaggac

SEQ ID NO: 3773457 - DNA, 25 bp, Homo sapien
caaggcagaccaggcgtcctgcacc

SEQ ID NO: 3773458 - DNA, 25 bp, Homo sapien
accaggcgtcctgcaccctttgggt

SEQ ID NO: 3773459 - DNA, 25 bp, Homo sapien
tattattgataacccgggcctgagc

SEQ ID NO: 3773460 - DNA, 25 bp, Homo sapien
gcagggcctccgtacagatgtatta

SEQ ID NO: 3773461 - DNA, 25 bp, Homo sapien
cctgtggaagaagcgatggcccagc

SEQ ID NO: 3773462 - DNA, 25 bp, Homo sapien
aaaacgcattggcaaggcctgtgga

SEQ ID NO: 3773463 - DNA, 25 bp, Homo sapien
gcagagaaacaaccatagacaggct

SEQ ID NO: 3773464 - DNA, 25 bp, Homo sapien
agggcagtgaccgatggacagggca

SEQ ID NO: 3773465 - DNA, 25 bp, Homo sapien
cacttgcactttttgtcagggctag

SEQ ID NO: 3773466 - DNA, 25 bp, Homo sapien
gggtgacaccggtctgtgagtctct

SEQ ID NO: 3773467 - DNA, 25 bp, Homo sapien
gctgccctcagctggtaccgaaaat

SEQ ID NO: 3773468 - DNA, 25 bp, Homo sapien
caaacaaaacggcactcatggcaac

SEQ ID NO: 3773469 - DNA, 25 bp, Homo sapien
ccgaaaatatggtgctgtcttgaaa

SEQ ID NO: 3773470 - DNA, 25 bp, Homo sapien
tgttcagtccatgctcactccaaat

SEQ ID NO: 3773471 - DNA, 25 bp, Homo sapien
tcttcttgggtaaagagctaactga

SEQ ID NO: 3773472 - DNA, 25 bp, Homo sapien
catgacaccgttcctatgcccttga

SEQ ID NO: 3773473 - DNA, 25 bp, Homo sapien
actttatttggactccatgacaccg

SEQ ID NO: 3773474 - DNA, 25 bp, Homo sapien
gatacaaaacataccctaagctcca

SEQ ID NO: 3773475 - DNA, 25 bp, Homo sapien
ttgaaagagttatagcagatggcta

SEQ ID NO: 3773476 - DNA, 25 bp, Homo sapien
taagtacctgatacatgttttctgc

SEQ ID NO: 3773477 - DNA, 25 bp, Homo sapien
gacaccaaccacctttattggctgc

SEQ ID NO: 3773478 - DNA, 25 bp, Homo sapien
ttgtgctgcaaaactaactctatgc

SEQ ID NO: 3773479 - DNA, 25 bp, Homo sapien
cctttcacaagtcgagctcgaaaca

SEQ ID NO: 3773480 - DNA, 25 bp, Homo sapien
caagtcgagctcgaaacatccaaat

SEQ ID NO: 3773481 - DNA, 25 bp, Homo sapien
ttcacaagtcgagctcgaaacatcc

SEQ ID NO: 3773482 - DNA, 25 bp, Homo sapien
gtcgagctcgaaacatccaaatatc

SEQ ID NO: 3773483 - DNA, 25 bp, Homo sapien
aacctctgcctcctgggttcaaatg

SEQ ID NO: 3773484 - DNA, 25 bp, Homo sapien
caatggtaccatcttggctcattgc

SEQ ID NO: 3773485 - DNA, 25 bp, Homo sapien
ccaccacacccggctaattttatat

SEQ ID NO: 3773486 - DNA, 25 bp, Homo sapien
tcctgggttcaaatgattctcctgc

SEQ ID NO: 3773487 - DNA, 25 bp, Homo sapien
agaatttatgtgctattcctacaac

SEQ ID NO: 3773488 - DNA, 25 bp, Homo sapien
ttcaagttcacgctattttcagctc

SEQ ID NO: 3773489 - DNA, 25 bp, Homo sapien
tattttcagctccaaagaatttatg

SEQ ID NO: 3773490 - DNA, 25 bp, Homo sapien
caaagaatttatgtgctattcctac

SEQ ID NO: 3773491 - DNA, 25 bp, Homo sapien
tcacgtcaatgtagtggcaatcggc

SEQ ID NO: 3773492 - DNA, 25 bp, Homo sapien
gcaatcggcactggcgaaatggcag

SEQ ID NO: 3773493 - DNA, 25 bp, Homo sapien
gactggtgcccttcacgtcaatgta

SEQ ID NO: 3773494 - DNA, 25 bp, Homo sapien
tccttctcgatgttttcttgactgg

SEQ ID NO: 3773495 - DNA, 25 bp, Homo sapien
ccagatccgtggatgagcaaaggat

SEQ ID NO: 3773496 - DNA, 25 bp, Homo sapien
gaagaaaacagtgtcgcccttctcc

SEQ ID NO: 3773497 - DNA, 25 bp, Homo sapien
ctcgtagtcctggatcccgtggaac

SEQ ID NO: 3773498 - DNA, 25 bp, Homo sapien
caccaggtgcacccgggccttgttt

SEQ ID NO: 3773499 - DNA, 25 bp, Homo sapien
ctgagcagggtatctgagactccac

SEQ ID NO: 3773500 - DNA, 25 bp, Homo sapien
gcatgcaccaaactttaaaccttgg

SEQ ID NO: 3773501 - DNA, 25 bp, Homo sapien
tgagactccacacgctctggaagcc

SEQ ID NO: 3773502 - DNA, 25 bp, Homo sapien
ctggaagccctgcaaacttttccct

SEQ ID NO: 3773503 - DNA, 25 bp, Homo sapien
ggagaaggatggagtatcttgattg

SEQ ID NO: 3773504 - DNA, 25 bp, Homo sapien
cccaaataaactgcagacttgttag

SEQ ID NO: 3773505 - DNA, 25 bp, Homo sapien
tgcagtaacagaaagcagctcagtg

SEQ ID NO: 3773506 - DNA, 25 bp, Homo sapien
gtcttcgatcttcctaaaagtttga

SEQ ID NO: 3773507 - DNA, 25 bp, Homo sapien
tgtgtgcctgggagcacaaccagac

SEQ ID NO: 3773508 - DNA, 25 bp, Homo sapien
ccgttgttccggctgatgtgctcca

SEQ ID NO: 3773509 - DNA, 25 bp, Homo sapien
tccaggcgcaaacgatgagatcgct

SEQ ID NO: 3773510 - DNA, 25 bp, Homo sapien
tgggagcacaaccagacagccgttg

SEQ ID NO: 3773511 - DNA, 25 bp, Homo sapien
cagggggtgacgggacgtcttcttg

SEQ ID NO: 3773512 - DNA, 25 bp, Homo sapien
tgcagggggtgacgggacgtcttct

SEQ ID NO: 3773513 - DNA, 25 bp, Homo sapien
aggggaaatagtgcaggtcctggtg

SEQ ID NO: 3773514 - DNA, 25 bp, Homo sapien
gtacttatgcacactattttccagc

SEQ ID NO: 3773515 - DNA, 25 bp, Homo sapien
gcactcccttcttccgggttgctgg

SEQ ID NO: 3773516 - DNA, 25 bp, Homo sapien
tccagcaagcggtataacatcctca

SEQ ID NO: 3773517 - DNA, 25 bp, Homo sapien
gctggtagctaagtacttatgcaca

SEQ ID NO: 3773518 - DNA, 25 bp, Homo sapien
tcccctggtttgctccctgagtgtg

SEQ ID NO: 3773519 - DNA, 25 bp, Homo sapien
catgtccagtcggagtgcccatgac

SEQ ID NO: 3773520 - DNA, 25 bp, Homo sapien
gagacctggtaatgctaagctgcct

SEQ ID NO: 3773521 - DNA, 25 bp, Homo sapien
acaactatagtcattccatgtccag

SEQ ID NO: 3773522 - DNA, 25 bp, Homo sapien
tggaggtttgtttatcaacattgtg

SEQ ID NO: 3773523 - DNA, 25 bp, Homo sapien
ggtccagtgaagcactccacatatt

SEQ ID NO: 3773524 - DNA, 25 bp, Homo sapien
cataatattaggtccagtgaagcac

SEQ ID NO: 3773525 - DNA, 25 bp, Homo sapien
cattgtgtgcatggccataatatta

SEQ ID NO: 3773526 - DNA, 25 bp, Homo sapien
cacttggagcatattcggatttcga

SEQ ID NO: 3773527 - DNA, 25 bp, Homo sapien
ggaaatcctggaccttcgtgatcat

SEQ ID NO: 3773528 - DNA, 25 bp, Homo sapien
gatttcgaaatggtcacatctctca

SEQ ID NO: 3773529 - DNA, 25 bp, Homo sapien
tgcagtatctgaagagctccttatc

SEQ ID NO: 3773530 - DNA, 25 bp, Homo sapien
tttctgcagattttttcaaactcat

SEQ ID NO: 3773531 - DNA, 25 bp, Homo sapien
ctcctttctgcagattttttcaaac

SEQ ID NO: 3773532 - DNA, 25 bp, Homo sapien
tctgcagattttttcaaactcattc

SEQ ID NO: 3773533 - DNA, 25 bp, Homo sapien
cctttctgcagattttttcaaactc

SEQ ID NO: 3773534 - DNA, 25 bp, Homo sapien
atgtcgttaccgctggctccaagca

SEQ ID NO: 3773535 - DNA, 25 bp, Homo sapien
atgatgtcgttaccgctggctccaa

SEQ ID NO: 3773536 - DNA, 25 bp, Homo sapien
caaatgatgtcgttaccgctggctc

SEQ ID NO: 3773537 - DNA, 25 bp, Homo sapien
tgtcgttaccgctggctccaagcac

SEQ ID NO: 3773538 - DNA, 25 bp, Homo sapien
cagcttgaggtagaataattccaat

SEQ ID NO: 3773539 - DNA, 25 bp, Homo sapien
tctgtaacacttaccatgtgcccag

SEQ ID NO: 3773540 - DNA, 25 bp, Homo sapien
ctagtttagcataccagtagggaag

SEQ ID NO: 3773541 - DNA, 25 bp, Homo sapien
ggtggtttctctgcactaagttggc

SEQ ID NO: 3773542 - DNA, 25 bp, Homo sapien
aattgccccaggacacatgatatta

SEQ ID NO: 3773543 - DNA, 25 bp, Homo sapien
tgatattaagtggtggagctgagac

SEQ ID NO: 3773544 - DNA, 25 bp, Homo sapien
caggacacatgatattaagtggtgg

SEQ ID NO: 3773545 - DNA, 25 bp, Homo sapien
taaattgccccaggacacatgatat

SEQ ID NO: 3773546 - DNA, 25 bp, Homo sapien
taaaataacaaatagtgttactgta

SEQ ID NO: 3773547 - DNA, 25 bp, Homo sapien
tgtaaaataacaaatagtgttactg

SEQ ID NO: 3773548 - DNA, 25 bp, Homo sapien
tattgtaaaataacaaatagtgtta

SEQ ID NO: 3773549 - DNA, 25 bp, Homo sapien
gaaagcgttgaatatcggcatcagg

SEQ ID NO: 3773550 - DNA, 25 bp, Homo sapien
ctctgttccagggttagaacgttat

SEQ ID NO: 3773551 - DNA, 25 bp, Homo sapien
catcaggtacaagatttttgattac

SEQ ID NO: 3773552 - DNA, 25 bp, Homo sapien
ggttagaacgttattatccagagta

SEQ ID NO: 3773553 - DNA, 25 bp, Homo sapien
attgttgaggatggaaactggcaga

SEQ ID NO: 3773554 - DNA, 25 bp, Homo sapien
tggaaactggcagaggaaatagtcc

SEQ ID NO: 3773555 - DNA, 25 bp, Homo sapien
tggaattgttgaggatggaaactgg

SEQ ID NO: 3773556 - DNA, 25 bp, Homo sapien
gaattgttgaggatggaaactggca

SEQ ID NO: 3773557 - DNA, 25 bp, Homo sapien
ctcagtggcaatgccgtagtccagc

SEQ ID NO: 3773558 - DNA, 25 bp, Homo sapien
gctgtccttccccaaatagtgtctt

SEQ ID NO: 3773559 - DNA, 25 bp, Homo sapien
tagtgtctttatataactcagtggc

SEQ ID NO: 3773560 - DNA, 25 bp, Homo sapien
aatgccgtagtccagcagggaggcc

SEQ ID NO: 3773561 - DNA, 25 bp, Homo sapien
gaaacgacgtctccacaaagagagg

SEQ ID NO: 3773562 - DNA, 25 bp, Homo sapien
caccgtgcgcctgtgattggacatc

SEQ ID NO: 3773563 - DNA, 25 bp, Homo sapien
agggcaacgcggcaattgccccgac

SEQ ID NO: 3773564 - DNA, 25 bp, Homo sapien
agaggtcccggtcactgcctgcctg

SEQ ID NO: 3773565 - DNA, 25 bp, Homo sapien
ccggcgccggatccagcccgagccc

SEQ ID NO: 3773566 - DNA, 25 bp, Homo sapien
cgccggcgccggatccagcccgagc

SEQ ID NO: 3773567 - DNA, 25 bp, Homo sapien
ggcgccggatccagcccgagccccg

SEQ ID NO: 3773568 - DNA, 25 bp, Homo sapien
gagccccgcgcagcccaaaggatac

SEQ ID NO: 3773569 - DNA, 25 bp, Homo sapien
cagaacaatctgcagacgggcggcg

SEQ ID NO: 3773570 - DNA, 25 bp, Homo sapien
agaacaatctgcagacgggcggcgg

SEQ ID NO: 3773571 - DNA, 25 bp, Homo sapien
ccagaacaatctgcagacgggcggc

SEQ ID NO: 3773572 - DNA, 25 bp, Homo sapien
gaacaatctgcagacgggcggcggc

SEQ ID NO: 3773573 - DNA, 25 bp, Homo sapien
gcctctgccccatttagcccagcgg

SEQ ID NO: 3773574 - DNA, 25 bp, Homo sapien
ctctgccccatttagcccagcgggc

SEQ ID NO: 3773575 - DNA, 25 bp, Homo sapien
ctgccccatttagcccagcgggcgg

SEQ ID NO: 3773576 - DNA, 25 bp, Homo sapien
ccccatttagcccagcgggcggctc

SEQ ID NO: 3773577 - DNA, 25 bp, Homo sapien
tctgccgaagttcccggcctaatac

SEQ ID NO: 3773578 - DNA, 25 bp, Homo sapien
ggttgcaagtctgccgaagttcccg

SEQ ID NO: 3773579 - DNA, 25 bp, Homo sapien
cacgtagacccttagagttacaagc

SEQ ID NO: 3773580 - DNA, 25 bp, Homo sapien
ctttttcagggacctcggttgcaag

SEQ ID NO: 3773581 - DNA, 25 bp, Homo sapien
gggactccagcccaaaatattagaa

SEQ ID NO: 3773582 - DNA, 25 bp, Homo sapien
gatgcatccctaaaagtcatatgtg

SEQ ID NO: 3773583 - DNA, 25 bp, Homo sapien
gttacttccagaacgtcgcagcaca

SEQ ID NO: 3773584 - DNA, 25 bp, Homo sapien
gaatttggtgacaatgtcgcagtcc

SEQ ID NO: 3773585 - DNA, 25 bp, Homo sapien
tcacggtttgaacgcaagcgcaggg

SEQ ID NO: 3773586 - DNA, 25 bp, Homo sapien
tatgaccatgtaggagtaacccggg

SEQ ID NO: 3773587 - DNA, 25 bp, Homo sapien
gggctctcaaggactctacggtttg

SEQ ID NO: 3773588 - DNA, 25 bp, Homo sapien
tcccgcgcgggaatatgaccatgta

SEQ ID NO: 3773589 - DNA, 25 bp, Homo sapien
cgcgctgacggtgattggttttcat

SEQ ID NO: 3773590 - DNA, 25 bp, Homo sapien
ccgcgctgacggtgattggttttca

SEQ ID NO: 3773591 - DNA, 25 bp, Homo sapien
attagcggtaattggttttactctg

SEQ ID NO: 3773592 - DNA, 25 bp, Homo sapien
gaagttcctcttgtacacttccaaa

SEQ ID NO: 3773593 - DNA, 25 bp, Homo sapien
taaagcttttttggctagctatgcg

SEQ ID NO: 3773594 - DNA, 25 bp, Homo sapien
tgcgaaatacgttcctggacttctg

SEQ ID NO: 3773595 - DNA, 25 bp, Homo sapien
tcaggaattcaatacttgcgtgcag

SEQ ID NO: 3773596 - DNA, 25 bp, Homo sapien
tacttgcgtgcagcttcttaaactc

SEQ ID NO: 3773597 - DNA, 25 bp, Homo sapien
gcttcttaaactccaggtgacgccg

SEQ ID NO: 3773598 - DNA, 25 bp, Homo sapien
cgtgcagcttcttaaactccaggtg

SEQ ID NO: 3773599 - DNA, 25 bp, Homo sapien
ttattcattataaagcatgcagaac

SEQ ID NO: 3773600 - DNA, 25 bp, Homo sapien
taaagggaatgctaaattcagactg

SEQ ID NO: 3773601 - DNA, 25 bp, Homo sapien
cctggctcattcatctataaacaga

SEQ ID NO: 3773602 - DNA, 25 bp, Homo sapien
cagaacttggaagactataatctac

SEQ ID NO: 3773603 - DNA, 25 bp, Homo sapien
acacagcctgtgcaaataagcagct

SEQ ID NO: 3773604 - DNA, 25 bp, Homo sapien
caacacagcctgtgcaaataagcag

SEQ ID NO: 3773605 - DNA, 25 bp, Homo sapien
tacctcaacacagcctgtgcaaata

SEQ ID NO: 3773606 - DNA, 25 bp, Homo sapien
cctcaacacagcctgtgcaaataag

SEQ ID NO: 3773607 - DNA, 25 bp, Homo sapien
cttcagtgtgaagttttaaagtgct

SEQ ID NO: 3773608 - DNA, 25 bp, Homo sapien
ataccaagataaatacacttcagtg

SEQ ID NO: 3773609 - DNA, 25 bp, Homo sapien
tttaaagtgctaccagaaagtcaaa

SEQ ID NO: 3773610 - DNA, 25 bp, Homo sapien
tacacttcagtgtgaagttttaaag

SEQ ID NO: 3773611 - DNA, 25 bp, Homo sapien
aatgttctacatagattttgccaag

SEQ ID NO: 3773612 - DNA, 25 bp, Homo sapien
tattcagtgacaatcatttgagtct

SEQ ID NO: 3773613 - DNA, 25 bp, Homo sapien
tgccaagaactccaatattcagtga

SEQ ID NO: 3773614 - DNA, 25 bp, Homo sapien
catttgagtcttcgtggagctttca

SEQ ID NO: 3773615 - DNA, 25 bp, Homo sapien
gatgtgggaagtaaacagaatggtc

SEQ ID NO: 3773616 - DNA, 25 bp, Homo sapien
ggaagtaaacagaatggtcaagatt

SEQ ID NO: 3773617 - DNA, 25 bp, Homo sapien
tgggaagtaaacagaatggtcaaga

SEQ ID NO: 3773618 - DNA, 25 bp, Homo sapien
atgtgggaagtaaacagaatggtca

SEQ ID NO: 3773619 - DNA, 25 bp, Homo sapien
tcctctgcaacattccttttgagat

SEQ ID NO: 3773620 - DNA, 25 bp, Homo sapien
ctctgcaacattccttttgagatca

SEQ ID NO: 3773621 - DNA, 25 bp, Homo sapien
tgccttcctctgcaacattcctttt

SEQ ID NO: 3773622 - DNA, 25 bp, Homo sapien
ctgcaacattccttttgagatcagt

SEQ ID NO: 3773623 - DNA, 25 bp, Homo sapien
gggcaggaatgttgccttctaacac

SEQ ID NO: 3773624 - DNA, 25 bp, Homo sapien
cttttttggccatagccccataggg

SEQ ID NO: 3773625 - DNA, 25 bp, Homo sapien
aatcaggggcaggaatgttgccttc

SEQ ID NO: 3773626 - DNA, 25 bp, Homo sapien
tgttgccttctaacaccccgggtga

SEQ ID NO: 3773627 - DNA, 25 bp, Homo sapien
tacacggacctctaagtacccaaca

SEQ ID NO: 3773628 - DNA, 25 bp, Homo sapien
aggaaaacaccagctctcacggcac

SEQ ID NO: 3773629 - DNA, 25 bp, Homo sapien
caataggcctgccactgaggaaaac

SEQ ID NO: 3773630 - DNA, 25 bp, Homo sapien
tcacggcacaggctacactgaagtt

SEQ ID NO: 3773631 - DNA, 25 bp, Homo sapien
gctttttctctcacgaagatgggca

SEQ ID NO: 3773632 - DNA, 25 bp, Homo sapien
ggaggtccagttacacatgcatgaa

SEQ ID NO: 3773633 - DNA, 25 bp, Homo sapien
agatgggcacttgaggatccagcgc

SEQ ID NO: 3773634 - DNA, 25 bp, Homo sapien
agcgcccttgtgcttaatgacagga

SEQ ID NO: 3773635 - DNA, 25 bp, Homo sapien
ttaaaaagcctatgcggcaagagat

SEQ ID NO: 3773636 - DNA, 25 bp, Homo sapien
taaaaagcctatgcggcaagagata

SEQ ID NO: 3773637 - DNA, 25 bp, Homo sapien
tttaaaaagcctatgcggcaagaga

SEQ ID NO: 3773638 - DNA, 25 bp, Homo sapien
tgtatccacttacaaaccgacctaa

SEQ ID NO: 3773639 - DNA, 25 bp, Homo sapien
accgacctaaggtcaccccgatgtg

SEQ ID NO: 3773640 - DNA, 25 bp, Homo sapien
ggtcaccccgatgtgtagacacaat

SEQ ID NO: 3773641 - DNA, 25 bp, Homo sapien
taattgtatccacttacaaaccgac

SEQ ID NO: 3773642 - DNA, 25 bp, Homo sapien
ttgaagtgataagggaaatagatct

SEQ ID NO: 3773643 - DNA, 25 bp, Homo sapien
acttgtggtgcgacctcgatgatcc

SEQ ID NO: 3773644 - DNA, 25 bp, Homo sapien
tccatctcccgtttatcctccattt

SEQ ID NO: 3773645 - DNA, 25 bp, Homo sapien
gtttcctctaataaattactgcaca

SEQ ID NO: 3773646 - DNA, 25 bp, Homo sapien
tatgtttcctctaataaattactgc

SEQ ID NO: 3773647 - DNA, 25 bp, Homo sapien
gctccatctcccgtttatcctccat

SEQ ID NO: 3773648 - DNA, 25 bp, Homo sapien
ttggccaggttctgcgcatggccca

SEQ ID NO: 3773649 - DNA, 25 bp, Homo sapien
gccaggttctgcgcatggcccaaaa

SEQ ID NO: 3773650 - DNA, 25 bp, Homo sapien
tggccaggttctgcgcatggcccaa

SEQ ID NO: 3773651 - DNA, 25 bp, Homo sapien
ccaggttctgcgcatggcccaaaat

SEQ ID NO: 3773652 - DNA, 25 bp, Homo sapien
tcttacgtccacaattaatctgcaa

SEQ ID NO: 3773653 - DNA, 25 bp, Homo sapien
tcagggagatgacgtatcggaataa

SEQ ID NO: 3773654 - DNA, 25 bp, Homo sapien
tcagtggaaggtaaaccggccaaga

SEQ ID NO: 3773655 - DNA, 25 bp, Homo sapien
actttgagccacctgaaaactatca

SEQ ID NO: 3773656 - DNA, 25 bp, Homo sapien
tggagcagttttgcgtttagaaaga

SEQ ID NO: 3773657 - DNA, 25 bp, Homo sapien
catactacagatacactacattttg

SEQ ID NO: 3773658 - DNA, 25 bp, Homo sapien
cttcctctccgataacctctggcca

SEQ ID NO: 3773659 - DNA, 25 bp, Homo sapien
taattatccattcacccgacctatt

SEQ ID NO: 3773660 - DNA, 25 bp, Homo sapien
gtttaatcttattccatttctcagg

SEQ ID NO: 3773661 - DNA, 25 bp, Homo sapien
cagctctacatcttcttgggtgacc

SEQ ID NO: 3773662 - DNA, 25 bp, Homo sapien
gtcctgttgagcctcgccatgttca

SEQ ID NO: 3773663 - DNA, 25 bp, Homo sapien
gccatgttcatcatcgcctcctggt

SEQ ID NO: 3773664 - DNA, 25 bp, Homo sapien
gatatccagccactggtgcacagcc

SEQ ID NO: 3773665 - DNA, 25 bp, Homo sapien
gtcagcaccagcacgtcccctggca

SEQ ID NO: 3773666 - DNA, 25 bp, Homo sapien
ggggttttgtcagcaccagcacgtc

SEQ ID NO: 3773667 - DNA, 25 bp, Homo sapien
gtcccctggcactgcattgtctggc

SEQ ID NO: 3773668 - DNA, 25 bp, Homo sapien
ttagtactgtttggccgcctgttac

SEQ ID NO: 3773669 - DNA, 25 bp, Homo sapien
cattgggttggcagacagtggtagc

SEQ ID NO: 3773670 - DNA, 25 bp, Homo sapien
tgtttggccgcctgttacagatgtt

SEQ ID NO: 3773671 - DNA, 25 bp, Homo sapien
ccttggataatcagaggcatcactt

SEQ ID NO: 3773672 - DNA, 25 bp, Homo sapien
actgaggcaccattactatggccaa

SEQ ID NO: 3773673 - DNA, 25 bp, Homo sapien
ccgtcaccatctacgtccacgacat

SEQ ID NO: 3773674 - DNA, 25 bp, Homo sapien
tctaagtgccacgtgtcccacatct

SEQ ID NO: 3773675 - DNA, 25 bp, Homo sapien
cacgtgtcccacatctgtaaggctg

SEQ ID NO: 3773676 - DNA, 25 bp, Homo sapien
tcactgaggacattggcacacgcta

SEQ ID NO: 3773677 - DNA, 25 bp, Homo sapien
atattgtcacattccgtgaccccca

SEQ ID NO: 3773678 - DNA, 25 bp, Homo sapien
actgaggacattggcacacgctatc

SEQ ID NO: 3773679 - DNA, 25 bp, Homo sapien
ttccgtgacccccattgcatagagg

SEQ ID NO: 3773680 - DNA, 25 bp, Homo sapien
tgtgcaggacaaagaatgtaccagt

SEQ ID NO: 3773681 - DNA, 25 bp, Homo sapien
tggcaacctttcctgcatcacagag

SEQ ID NO: 3773682 - DNA, 25 bp, Homo sapien
gaagcaagtttagaaccgacagtct

SEQ ID NO: 3773683 - DNA, 25 bp, Homo sapien
cacagagaacgtggagactttccag

SEQ ID NO: 3773684 - DNA, 25 bp, Homo sapien
atctgtggccacactttcagtatca

SEQ ID NO: 3773685 - DNA, 25 bp, Homo sapien
ggctgtttaattgcttgctttaggc

SEQ ID NO: 3773686 - DNA, 25 bp, Homo sapien
cactttcagtatcatcaagccagtc

SEQ ID NO: 3773687 - DNA, 25 bp, Homo sapien
agtggctgtttaattgcttgcttta

SEQ ID NO: 3773688 - DNA, 25 bp, Homo sapien
gtctcaagagtattgctccagagga

SEQ ID NO: 3773689 - DNA, 25 bp, Homo sapien
tcaagagtattgctccagaggagaa

SEQ ID NO: 3773690 - DNA, 25 bp, Homo sapien
agaaaacggacagatgtgcggaaga

SEQ ID NO: 3773691 - DNA, 25 bp, Homo sapien
gcggaagaaatataggtttccaata

SEQ ID NO: 3773692 - DNA, 25 bp, Homo sapien
cttgccacacacgaagaacacctgg

SEQ ID NO: 3773693 - DNA, 25 bp, Homo sapien
ccacgtggctgcctcatgataaagt

SEQ ID NO: 3773694 - DNA, 25 bp, Homo sapien
taaagtccctacagtgcagcctgat

SEQ ID NO: 3773695 - DNA, 25 bp, Homo sapien
aaccagattttcctagtctctccac

SEQ ID NO: 3773696 - DNA, 25 bp, Homo sapien
agggtcgtctacgatcgggtaaatg

SEQ ID NO: 3773697 - DNA, 25 bp, Homo sapien
ggtcgtctacgatcgggtaaatgta

SEQ ID NO: 3773698 - DNA, 25 bp, Homo sapien
tgtaagggtcgtctacgatcgggta

SEQ ID NO: 3773699 - DNA, 25 bp, Homo sapien
catcatgtaagggtcgtctacgatc

SEQ ID NO: 3773700 - DNA, 25 bp, Homo sapien
aaggaaagcccaccgtgcctcaaag

SEQ ID NO: 3773701 - DNA, 25 bp, Homo sapien
caccgtgcctcaaaggaatgacaca

SEQ ID NO: 3773702 - DNA, 25 bp, Homo sapien
atgacacaagtatccattccaatgc

SEQ ID NO: 3773703 - DNA, 25 bp, Homo sapien
gaatgacacaagtatccattccaat

SEQ ID NO: 3773704 - DNA, 25 bp, Homo sapien
agagtaacgggggattcttgagcac

SEQ ID NO: 3773705 - DNA, 25 bp, Homo sapien
gatcagagtaacgggggattcttga

SEQ ID NO: 3773706 - DNA, 25 bp, Homo sapien
agtaacgggggattcttgagcacgc

SEQ ID NO: 3773707 - DNA, 25 bp, Homo sapien
taacgggggattcttgagcacgccc

SEQ ID NO: 3773708 - DNA, 25 bp, Homo sapien
ctgttttcaaactgagctcctcaaa

SEQ ID NO: 3773709 - DNA, 25 bp, Homo sapien
gctggacggcaggaactgttttcaa

SEQ ID NO: 3773710 - DNA, 25 bp, Homo sapien
atggtatttctccacagcttggcca

SEQ ID NO: 3773711 - DNA, 25 bp, Homo sapien
ccagcgactggggtgtaacatttct

SEQ ID NO: 3773712 - DNA, 25 bp, Homo sapien
acaaaagcaagtctgcttttatctg

SEQ ID NO: 3773713 - DNA, 25 bp, Homo sapien
ctttccaacaaaagcaagtctgctt

SEQ ID NO: 3773714 - DNA, 25 bp, Homo sapien
caacaaaagcaagtctgcttttatc

SEQ ID NO: 3773715 - DNA, 25 bp, Homo sapien
tccaacaaaagcaagtctgctttta

SEQ ID NO: 3773716 - DNA, 25 bp, Homo sapien
gtcactgccatccaagtacagcaca

SEQ ID NO: 3773717 - DNA, 25 bp, Homo sapien
cgtaacacgcttttcgcccgatgca

SEQ ID NO: 3773718 - DNA, 25 bp, Homo sapien
agcacaagaaccctaaggctggaac

SEQ ID NO: 3773719 - DNA, 25 bp, Homo sapien
accctgcagagaaccccaatgccct

SEQ ID NO: 3773720 - DNA, 25 bp, Homo sapien
ttggcataacggctcccagaaactg

SEQ ID NO: 3773721 - DNA, 25 bp, Homo sapien
tgaatctggttagccggaagctttt

SEQ ID NO: 3773722 - DNA, 25 bp, Homo sapien
gtaaagattccagcaatttttgcag

SEQ ID NO: 3773723 - DNA, 25 bp, Homo sapien
tgcaggacatcttggggcactttgc

SEQ ID NO: 3773724 - DNA, 25 bp, Homo sapien
ctcccctccctctgcgggttggctg

SEQ ID NO: 3773725 - DNA, 25 bp, Homo sapien
ttggctgggttctttatggatccac

SEQ ID NO: 3773726 - DNA, 25 bp, Homo sapien
tgcgggttggctgggttctttatgg

SEQ ID NO: 3773727 - DNA, 25 bp, Homo sapien
tccctctgcgggttggctgggttct

SEQ ID NO: 3773728 - DNA, 25 bp, Homo sapien
gaaacgcccgatacaaacttgtcag

SEQ ID NO: 3773729 - DNA, 25 bp, Homo sapien
tttaactgtggcaagagggccagcc

SEQ ID NO: 3773730 - DNA, 25 bp, Homo sapien
tcataacgggactgcgtcagcacag

SEQ ID NO: 3773731 - DNA, 25 bp, Homo sapien
cactgtggttcagaaagcggcggtc

SEQ ID NO: 3773732 - DNA, 25 bp, Homo sapien
ggggacaccttcgggctcaggctca

SEQ ID NO: 3773733 - DNA, 25 bp, Homo sapien
gggcaccgcgcgtgcggcccaggag

SEQ ID NO: 3773734 - DNA, 25 bp, Homo sapien
cgctctccaggacgcccgcgtcgga

SEQ ID NO: 3773735 - DNA, 25 bp, Homo sapien
gccatccctgttcgggccggcggga

SEQ ID NO: 3773736 - DNA, 25 bp, Homo sapien
cgcctgaataaaaatgccgcgcccg

SEQ ID NO: 3773737 - DNA, 25 bp, Homo sapien
cgcggccgggctcccttaagcgtcg

SEQ ID NO: 3773738 - DNA, 25 bp, Homo sapien
ctgaataaaaatgccgcgcccggcg

SEQ ID NO: 3773739 - DNA, 25 bp, Homo sapien
tcccttaagcgtcgcctgaataaaa

SEQ ID NO: 3773740 - DNA, 25 bp, Homo sapien
tcgtgaaatgtggagacgtcctgca

SEQ ID NO: 3773741 - DNA, 25 bp, Homo sapien
ctattgtttagctcggctccggagt

SEQ ID NO: 3773742 - DNA, 25 bp, Homo sapien
aagtttcttgaacacttcatgtgcg

SEQ ID NO: 3773743 - DNA, 25 bp, Homo sapien
tacggttccccgctggttgcattgt

SEQ ID NO: 3773744 - DNA, 25 bp, Homo sapien
ttctctgccgcagaggccgtaagcc

SEQ ID NO: 3773745 - DNA, 25 bp, Homo sapien
gggccacactacagccttggcccag

SEQ ID NO: 3773746 - DNA, 25 bp, Homo sapien
cgggaagcagttctctgccgcagag

SEQ ID NO: 3773747 - DNA, 25 bp, Homo sapien
gccgcagaggccgtaagccacagat

SEQ ID NO: 3773748 - DNA, 25 bp, Homo sapien
cagtctcctgaagtggatccgtttc

SEQ ID NO: 3773749 - DNA, 25 bp, Homo sapien
gaccgtctgagggtagttctgcagc

SEQ ID NO: 3773750 - DNA, 25 bp, Homo sapien
ttctttacataggacacccacactc

SEQ ID NO: 3773751 - DNA, 25 bp, Homo sapien
attctgttcagcttggaccgtctga

SEQ ID NO: 3773752 - DNA, 25 bp, Homo sapien
ttgtctccaatgtttaatccatggc

SEQ ID NO: 3773753 - DNA, 25 bp, Homo sapien
tttgccccatgattaccgtcttcct

SEQ ID NO: 3773754 - DNA, 25 bp, Homo sapien
ccatgattaccgtcttcctcaatta

SEQ ID NO: 3773755 - DNA, 25 bp, Homo sapien
ttaatccatggcagactttaccctt

SEQ ID NO: 3773756 - DNA, 25 bp, Homo sapien
gtcaggatcctgttgctggagtctg

SEQ ID NO: 3773757 - DNA, 25 bp, Homo sapien
ctaatgctctgagtcaggatcctgt

SEQ ID NO: 3773758 - DNA, 25 bp, Homo sapien
agctcatcagctctgtgcttctgtt

SEQ ID NO: 3773759 - DNA, 25 bp, Homo sapien
ttgctggagtctgtgctctggccca

SEQ ID NO: 3773760 - DNA, 25 bp, Homo sapien
aagtgaaggtgtgtaattattccag

SEQ ID NO: 3773761 - DNA, 25 bp, Homo sapien
ctctttttgttatgaagtgaaggtg

SEQ ID NO: 3773762 - DNA, 25 bp, Homo sapien
ctaaggttactgaacgggtatctct

SEQ ID NO: 3773763 - DNA, 25 bp, Homo sapien
ctctaaggttactgaacgggtatct

SEQ ID NO: 3773764 - DNA, 25 bp, Homo sapien
ctgcttttggaaggcagcaaacttc

SEQ ID NO: 3773765 - DNA, 25 bp, Homo sapien
ccaagctggcagtgcgacataacca

SEQ ID NO: 3773766 - DNA, 25 bp, Homo sapien
taaccaaacagctatccgatagctg

SEQ ID NO: 3773767 - DNA, 25 bp, Homo sapien
tgtgagtattaaattcccaagttcc

SEQ ID NO: 3773768 - DNA, 25 bp, Homo sapien
atagtttagaaaggaccaccaccat

SEQ ID NO: 3773769 - DNA, 25 bp, Homo sapien
ggcaaatgccaccaagagtccagaa

SEQ ID NO: 3773770 - DNA, 25 bp, Homo sapien
ccagaagctacaaggaagcggtgac

SEQ ID NO: 3773771 - DNA, 25 bp, Homo sapien
tgctttaaggaacagacagggaagg

SEQ ID NO: 3773772 - DNA, 25 bp, Homo sapien
tctaaaagagggagctatgctttcc

SEQ ID NO: 3773773 - DNA, 25 bp, Homo sapien
caggaagtgaatggatttgttacaa

SEQ ID NO: 3773774 - DNA, 25 bp, Homo sapien
ggacaggaagtgaatggatttgtta

SEQ ID NO: 3773775 - DNA, 25 bp, Homo sapien
gtgaatggatttgttacaatcctgt

SEQ ID NO: 3773776 - DNA, 25 bp, Homo sapien
gagagggacaggaagtgaatggatt

SEQ ID NO: 3773777 - DNA, 25 bp, Homo sapien
tcatcctaaagctgtctccgcaggc

SEQ ID NO: 3773778 - DNA, 25 bp, Homo sapien
ctggtgctcccagtggttctggaaa

SEQ ID NO: 3773779 - DNA, 25 bp, Homo sapien
aaagagatgtgaaaagtgcaggcaa

SEQ ID NO: 3773780 - DNA, 25 bp, Homo sapien
tgctggtgctcccagtggttctgga

SEQ ID NO: 3773781 - DNA, 25 bp, Homo sapien
agagatgtgaaaagtgcaggcaacc

SEQ ID NO: 3773782 - DNA, 25 bp, Homo sapien
tgaataattcctgattgctttctgg

SEQ ID NO: 3773783 - DNA, 25 bp, Homo sapien
taattcctgattgctttctggctga

SEQ ID NO: 3773784 - DNA, 25 bp, Homo sapien
tgagtaggatctaagtaatgggaat

SEQ ID NO: 3773785 - DNA, 25 bp, Homo sapien
gcagccttctgtgggaaatgagtag

SEQ ID NO: 3773786 - DNA, 25 bp, Homo sapien
agtttctttccctgacaccgttgct

SEQ ID NO: 3773787 - DNA, 25 bp, Homo sapien
ctgacaccgttgctcatacccgtaa

SEQ ID NO: 3773788 - DNA, 25 bp, Homo sapien
ctaatgggaatgccctctactccag

SEQ ID NO: 3773789 - DNA, 25 bp, Homo sapien
acaccgttgctcatacccgtaagag

SEQ ID NO: 3773790 - DNA, 25 bp, Homo sapien
tgaaaaaataactctcagggatgca

SEQ ID NO: 3773791 - DNA, 25 bp, Homo sapien
ctgaaaaaataactctcagggatgc

SEQ ID NO: 3773792 - DNA, 25 bp, Homo sapien
gaaaaaataactctcagggatgcac

SEQ ID NO: 3773793 - DNA, 25 bp, Homo sapien
gattggaactcatggttgtgctttg

SEQ ID NO: 3773794 - DNA, 25 bp, Homo sapien
ctttcatcccctattggcagttgta

SEQ ID NO: 3773795 - DNA, 25 bp, Homo sapien
cctattggcagttgtatgacctttc

SEQ ID NO: 3773796 - DNA, 25 bp, Homo sapien
gtcacagcaccctgtaatgattgga

SEQ ID NO: 3773797 - DNA, 25 bp, Homo sapien
atcactgtccgccaagcctttactg

SEQ ID NO: 3773798 - DNA, 25 bp, Homo sapien
ttctcatcactgtccgccaagcctt

SEQ ID NO: 3773799 - DNA, 25 bp, Homo sapien
ccgccaagcctttactgggtgaggt

SEQ ID NO: 3773800 - DNA, 25 bp, Homo sapien
cctgggctgccatttctctccgcct

SEQ ID NO: 3773801 - DNA, 25 bp, Homo sapien
gatttcaccattgacagtaactcgg

SEQ ID NO: 3773802 - DNA, 25 bp, Homo sapien
acacttggtgttaacagggagccca

SEQ ID NO: 3773803 - DNA, 25 bp, Homo sapien
gggagcccagatgtgtcgtcactga

SEQ ID NO: 3773804 - DNA, 25 bp, Homo sapien
ttgacagtaactcgggcagggtcca

SEQ ID NO: 3773805 - DNA, 25 bp, Homo sapien
caacaacctgcctatttatggagct

SEQ ID NO: 3773806 - DNA, 25 bp, Homo sapien
tcagtagagattgggcgacaaagcc

SEQ ID NO: 3773807 - DNA, 25 bp, Homo sapien
gcttagcgtcactgccctgagaacg

SEQ ID NO: 3773808 - DNA, 25 bp, Homo sapien
taacagggacagttctgagcactca

SEQ ID NO: 3773809 - DNA, 25 bp, Homo sapien
ctacaactctagatttgatctaata

SEQ ID NO: 3773810 - DNA, 25 bp, Homo sapien
tacaactctagatttgatctaatat

SEQ ID NO: 3773811 - DNA, 25 bp, Homo sapien
ctctacctccccttggcgcctctgt

SEQ ID NO: 3773812 - DNA, 25 bp, Homo sapien
tggcacctctacctccccttggcgc

SEQ ID NO: 3773813 - DNA, 25 bp, Homo sapien
gctccacctccccttggcacctcta

SEQ ID NO: 3773814 - DNA, 25 bp, Homo sapien
ttggcgcctctgtctcccctgagca

SEQ ID NO: 3773815 - DNA, 25 bp, Homo sapien
actccagagcatgcgtacaagggga

SEQ ID NO: 3773816 - DNA, 25 bp, Homo sapien
cagagcatgcgtacaaggggagggg

SEQ ID NO: 3773817 - DNA, 25 bp, Homo sapien
ccagagcatgcgtacaaggggaggg

SEQ ID NO: 3773818 - DNA, 25 bp, Homo sapien
tccagagcatgcgtacaaggggagg

SEQ ID NO: 3773819 - DNA, 25 bp, Homo sapien
gggcctcaatcccaacagcaaagag

SEQ ID NO: 3773820 - DNA, 25 bp, Homo sapien
cctgagggagcgagaggttccggtg

SEQ ID NO: 3773821 - DNA, 25 bp, Homo sapien
ccgagtgttgaacttttcccaacag

SEQ ID NO: 3773822 - DNA, 25 bp, Homo sapien
cgctgacaggcagattatgtggcct

SEQ ID NO: 3773823 - DNA, 25 bp, Homo sapien
gaaaaggcaagtccacgtgatctaa

SEQ ID NO: 3773824 - DNA, 25 bp, Homo sapien
ggccaggactcactgtcgtcagaat

SEQ ID NO: 3773825 - DNA, 25 bp, Homo sapien
tcaccagggcctgaaatcttaacag

SEQ ID NO: 3773826 - DNA, 25 bp, Homo sapien
taaattctcatggagtacaacctgc

SEQ ID NO: 3773827 - DNA, 25 bp, Homo sapien
gatgatgaagtgtagctgagacctg

SEQ ID NO: 3773828 - DNA, 25 bp, Homo sapien
gagctctgcaagactagggtcaccg

SEQ ID NO: 3773829 - DNA, 25 bp, Homo sapien
tgcgaatccctctctgatgatgaag

SEQ ID NO: 3773830 - DNA, 25 bp, Homo sapien
cctggcgtgggaaagttgcgaatcc

SEQ ID NO: 3773831 - DNA, 25 bp, Homo sapien
tgttatacaccattttcacaaccag

SEQ ID NO: 3773832 - DNA, 25 bp, Homo sapien
ggtttctgaataaagactgaacagt

SEQ ID NO: 3773833 - DNA, 25 bp, Homo sapien
tcagacataaagagcatcttgggaa

SEQ ID NO: 3773834 - DNA, 25 bp, Homo sapien
gaagattgagacattatccatagat

SEQ ID NO: 3773835 - DNA, 25 bp, Homo sapien
taacacggcgaaaggtcaccaatta

SEQ ID NO: 3773836 - DNA, 25 bp, Homo sapien
tccgttcatcgcacacatctttggg

SEQ ID NO: 3773837 - DNA, 25 bp, Homo sapien
tttccagtgtgtagatccgttcatc

SEQ ID NO: 3773838 - DNA, 25 bp, Homo sapien
gtcctcaagtgctgaacaccccaag

SEQ ID NO: 3773839 - DNA, 25 bp, Homo sapien
cgggccgactgacgacgaacatttt

SEQ ID NO: 3773840 - DNA, 25 bp, Homo sapien
tagattgattctacaagccacgcct

SEQ ID NO: 3773841 - DNA, 25 bp, Homo sapien
caagagacatgctatccaggtgaat

SEQ ID NO: 3773842 - DNA, 25 bp, Homo sapien
tcaaccagctgtgaggccgtgggaa

SEQ ID NO: 3773843 - DNA, 25 bp, Homo sapien
tagaaaggcatggtgctcccctgaa

SEQ ID NO: 3773844 - DNA, 25 bp, Homo sapien
catcctatgcctgcgaatgtggctt

SEQ ID NO: 3773845 - DNA, 25 bp, Homo sapien
gcaatgtgtctcttacacggctgaa

SEQ ID NO: 3773846 - DNA, 25 bp, Homo sapien
gaatgaggctgatatgcgtgccctg

SEQ ID NO: 3773847 - DNA, 25 bp, Homo sapien
tgtgggcagagaatcttcagatatc

SEQ ID NO: 3773848 - DNA, 25 bp, Homo sapien
tcagatatcctttggagggaagtca

SEQ ID NO: 3773849 - DNA, 25 bp, Homo sapien
gagaatcttcagatatcctttggag

SEQ ID NO: 3773850 - DNA, 25 bp, Homo sapien
cctttggagggaagtcagtagagtc

SEQ ID NO: 3773851 - DNA, 25 bp, Homo sapien
tgattgactgctcaaggctccaagg

SEQ ID NO: 3773852 - DNA, 25 bp, Homo sapien
taacacaacagcgtgcagcaaatgc

SEQ ID NO: 3773853 - DNA, 25 bp, Homo sapien
gatatgaacccatacacaggtagga

SEQ ID NO: 3773854 - DNA, 25 bp, Homo sapien
gatggctggccttgttcaaatcgct

SEQ ID NO: 3773855 - DNA, 25 bp, Homo sapien
agtctttcatcactgtccgcgatct

SEQ ID NO: 3773856 - DNA, 25 bp, Homo sapien
cagtctttcatcactgtccgcgatc

SEQ ID NO: 3773857 - DNA, 25 bp, Homo sapien
agcaatgccgtccagtctttcatca

SEQ ID NO: 3773858 - DNA, 25 bp, Homo sapien
gtggtagagcaatgccgtccagtct

SEQ ID NO: 3773859 - DNA, 25 bp, Homo sapien
ttgtactattcaatgcaagtggcct

SEQ ID NO: 3773860 - DNA, 25 bp, Homo sapien
tgctgaaataacctagagccaagta

SEQ ID NO: 3773861 - DNA, 25 bp, Homo sapien
taagactttaagagagcaaatcagc

SEQ ID NO: 3773862 - DNA, 25 bp, Homo sapien
gacagaagcgaaccataaaagagag

SEQ ID NO: 3773863 - DNA, 25 bp, Homo sapien
ccagtttaatttgatcctgtagaat

SEQ ID NO: 3773864 - DNA, 25 bp, Homo sapien
ggaagcttatccacatggttagctg

SEQ ID NO: 3773865 - DNA, 25 bp, Homo sapien
tagctgtacagtacttttctgtgaa

SEQ ID NO: 3773866 - DNA, 25 bp, Homo sapien
gtagaatctgtacccaatctcttgg

SEQ ID NO: 3773867 - DNA, 25 bp, Homo sapien
accttaacaagtaaaatatgcagat

SEQ ID NO: 3773868 - DNA, 25 bp, Homo sapien
atatgcagatctgaaacagaaatat

SEQ ID NO: 3773869 - DNA, 25 bp, Homo sapien
aataccttaacaagtaaaatatgca

SEQ ID NO: 3773870 - DNA, 25 bp, Homo sapien
cttaacaagtaaaatatgcagatct

SEQ ID NO: 3773871 - DNA, 25 bp, Homo sapien
cattgaacgattcccacgtgtgcgg

SEQ ID NO: 3773872 - DNA, 25 bp, Homo sapien
actctgcaaacaaggcggactggcc

SEQ ID NO: 3773873 - DNA, 25 bp, Homo sapien
taatcatcatcaagtgaaggcggca

SEQ ID NO: 3773874 - DNA, 25 bp, Homo sapien
taatttgagttccaaggcacagggc

SEQ ID NO: 3773875 - DNA, 25 bp, Homo sapien
gatctgccaaactcctagagcttgc

SEQ ID NO: 3773876 - DNA, 25 bp, Homo sapien
ctagcagacactttaagaagcaggg

SEQ ID NO: 3773877 - DNA, 25 bp, Homo sapien
tcaaggtttacagcacgcagaactg

SEQ ID NO: 3773878 - DNA, 25 bp, Homo sapien
ggacaagggacaatagtctctgctg

SEQ ID NO: 3773879 - DNA, 25 bp, Homo sapien
tttaatctcgcaacaaccagcaggg

SEQ ID NO: 3773880 - DNA, 25 bp, Homo sapien
cacacatctgagtgagcggaccaca

SEQ ID NO: 3773881 - DNA, 25 bp, Homo sapien
tgagactccccatgtgcgaggcagt

SEQ ID NO: 3773882 - DNA, 25 bp, Homo sapien
caaaatagaagcatggtggccaact

SEQ ID NO: 3773883 - DNA, 25 bp, Homo sapien
gccaagccgcagatgtgtcgagtga

SEQ ID NO: 3773884 - DNA, 25 bp, Homo sapien
tggaatgggttctcagcatgcaggc

SEQ ID NO: 3773885 - DNA, 25 bp, Homo sapien
tgaggagccagcaaacaaaaggagg

SEQ ID NO: 3773886 - DNA, 25 bp, Homo sapien
ggcatgtaaaacactacgagagggt

SEQ ID NO: 3773887 - DNA, 25 bp, Homo sapien
tcacgcgtcctcaatggcatatgac

SEQ ID NO: 3773888 - DNA, 25 bp, Homo sapien
tgtgcacccacaaatcttagaggca

SEQ ID NO: 3773889 - DNA, 25 bp, Homo sapien
tacaaatctgggacttaaacctcat

SEQ ID NO: 3773890 - DNA, 25 bp, Homo sapien
cactgagtgggcaccactggccttt

SEQ ID NO: 3773891 - DNA, 25 bp, Homo sapien
gccgatacccgtcatcactgttaga

SEQ ID NO: 3773892 - DNA, 25 bp, Homo sapien
gactcggggtcgatatcatcatcac

SEQ ID NO: 3773893 - DNA, 25 bp, Homo sapien
tcatcactgttagactcggggtcaa

SEQ ID NO: 3773894 - DNA, 25 bp, Homo sapien
tagactcggggtcaatacccttcat

SEQ ID NO: 3773895 - DNA, 25 bp, Homo sapien
tatcgtcatcgctgtgagacttggg

SEQ ID NO: 3773896 - DNA, 25 bp, Homo sapien
tcatcgctgttagactcagggccga

SEQ ID NO: 3773897 - DNA, 25 bp, Homo sapien
gggccgatatctgtcatcgctgtta

SEQ ID NO: 3773898 - DNA, 25 bp, Homo sapien
agactcagggccgatatcgtcatcg

SEQ ID NO: 3773899 - DNA, 25 bp, Homo sapien
tacactcggggccgatacccgtcac

SEQ ID NO: 3773900 - DNA, 25 bp, Homo sapien
ttacactcggggccgatacccgtca

SEQ ID NO: 3773901 - DNA, 25 bp, Homo sapien
gactccggtcgatatccgtcatcag

SEQ ID NO: 3773902 - DNA, 25 bp, Homo sapien
catcatcgcttttggactctggtcg

SEQ ID NO: 3773903 - DNA, 25 bp, Homo sapien
gggctcaggtcgatacccgtcatca

SEQ ID NO: 3773904 - DNA, 25 bp, Homo sapien
catcatcgctgttagacttgggttg

SEQ ID NO: 3773905 - DNA, 25 bp, Homo sapien
gactatggtcatttatggttcccta

SEQ ID NO: 3773906 - DNA, 25 bp, Homo sapien
ctttactatctattattaggatgac

SEQ ID NO: 3773907 - DNA, 25 bp, Homo sapien
tcgatccacttgtcacaatctattt

SEQ ID NO: 3773908 - DNA, 25 bp, Homo sapien
ggatgactcttctactgtcattaaa

SEQ ID NO: 3773909 - DNA, 25 bp, Homo sapien
tcgctgcatttcagaaaagcaccag

SEQ ID NO: 3773910 - DNA, 25 bp, Homo sapien
gggtgcttggtacttgctagttcca

SEQ ID NO: 3773911 - DNA, 25 bp, Homo sapien
ttctggccatgaacaaagggtgctt

SEQ ID NO: 3773912 - DNA, 25 bp, Homo sapien
gaagtcctacttacatcattgacca

SEQ ID NO: 3773913 - DNA, 25 bp, Homo sapien
tagagtccagctgagatttaggcat

SEQ ID NO: 3773914 - DNA, 25 bp, Homo sapien
cagaaggcttcctgagcgagtgtag

SEQ ID NO: 3773915 - DNA, 25 bp, Homo sapien
taaacacgtcaaagccttcagcaag

SEQ ID NO: 3773916 - DNA, 25 bp, Homo sapien
tcctttccggttgtcattgagtcct

SEQ ID NO: 3773917 - DNA, 25 bp, Homo sapien
gactttgtatctctaggatctggca

SEQ ID NO: 3773918 - DNA, 25 bp, Homo sapien
gcacgccaggaggtttacagctcac

SEQ ID NO: 3773919 - DNA, 25 bp, Homo sapien
gatacggaatcagaggacgtccaag

SEQ ID NO: 3773920 - DNA, 25 bp, Homo sapien
tttcaacttggacgctatcgcacac

SEQ ID NO: 3773921 - DNA, 25 bp, Homo sapien
ggctgttcctgttgagcagctcaga

SEQ ID NO: 3773922 - DNA, 25 bp, Homo sapien
ctgttgagcagctcagaacagaggt

SEQ ID NO: 3773923 - DNA, 25 bp, Homo sapien
acacagtgggcctgagccgcagtgt

SEQ ID NO: 3773924 - DNA, 25 bp, Homo sapien
cctgagccgcagtgtggatgggaca

SEQ ID NO: 3773925 - DNA, 25 bp, Homo sapien
tgttcgtcacacacaggcattgggc

SEQ ID NO: 3773926 - DNA, 25 bp, Homo sapien
cacagctgagagtctaacccaggca

SEQ ID NO: 3773927 - DNA, 25 bp, Homo sapien
tatccaggaggatcgttcaaatcac

SEQ ID NO: 3773928 - DNA, 25 bp, Homo sapien
gaacttgtgcaagctgcccgtagaa

SEQ ID NO: 3773929 - DNA, 25 bp, Homo sapien
tacgagtcacaacgcaaaaagggaa

SEQ ID NO: 3773930 - DNA, 25 bp, Homo sapien
ccagagctgaaaagcctgcactgct

SEQ ID NO: 3773931 - DNA, 25 bp, Homo sapien
tcgaggtgtctagcaaacgtgttga

SEQ ID NO: 3773932 - DNA, 25 bp, Homo sapien
tctccgcgtctcagttgaagtctca

SEQ ID NO: 3773933 - DNA, 25 bp, Homo sapien
actcagggccctagttgcaatagca

SEQ ID NO: 3773934 - DNA, 25 bp, Homo sapien
gataaaggctgaaggcctcacctgg

SEQ ID NO: 3773935 - DNA, 25 bp, Homo sapien
tgttctagcaacactgggccacttg

SEQ ID NO: 3773936 - DNA, 25 bp, Homo sapien
gactggtccagcatagaacgttatc

SEQ ID NO: 3773937 - DNA, 25 bp, Homo sapien
tagcaagtcagatggttatctcgga

SEQ ID NO: 3773938 - DNA, 25 bp, Homo sapien
ggactgcggcaacattctggctgtg

SEQ ID NO: 3773939 - DNA, 25 bp, Homo sapien
tagaaaaacctttgcagagccttaa

SEQ ID NO: 3773940 - DNA, 25 bp, Homo sapien
ttatggtcctatgaatgtaaaatag

SEQ ID NO: 3773941 - DNA, 25 bp, Homo sapien
catagcattagagtcagcagccaga

SEQ ID NO: 3773942 - DNA, 25 bp, Homo sapien
tacatagcattagagtcagcagcca

SEQ ID NO: 3773943 - DNA, 25 bp, Homo sapien
agcattagagtcagcagccagaaaa

SEQ ID NO: 3773944 - DNA, 25 bp, Homo sapien
ttacatagcattagagtcagcagcc

SEQ ID NO: 3773945 - DNA, 25 bp, Homo sapien
tctgaggaaggtgattccagaacaa

SEQ ID NO: 3773946 - DNA, 25 bp, Homo sapien
gagagcagatagctcagaggccacc

SEQ ID NO: 3773947 - DNA, 25 bp, Homo sapien
ttctgtttcacagtaagaggttcca

SEQ ID NO: 3773948 - DNA, 25 bp, Homo sapien
cagaacaatgccgaatcctagaacg

SEQ ID NO: 3773949 - DNA, 25 bp, Homo sapien
ctgggagcatataagggaaattgga

SEQ ID NO: 3773950 - DNA, 25 bp, Homo sapien
tactcaggagaaagcgttactgcag

SEQ ID NO: 3773951 - DNA, 25 bp, Homo sapien
taaaggttaccaaacgcaggctctg

SEQ ID NO: 3773952 - DNA, 25 bp, Homo sapien
tttagatagagacggctgtgcttcc

SEQ ID NO: 3773953 - DNA, 25 bp, Homo sapien
tactgcaggtgaatcgtgacagcat

SEQ ID NO: 3773954 - DNA, 25 bp, Homo sapien
gcactacataagagcacagaagttt

SEQ ID NO: 3773955 - DNA, 25 bp, Homo sapien
catataaacatgaatcacctcctct

SEQ ID NO: 3773956 - DNA, 25 bp, Homo sapien
cctcttacctcttatcagtctgaaa

SEQ ID NO: 3773957 - DNA, 25 bp, Homo sapien
aattagtctagctcaatggttctca

SEQ ID NO: 3773958 - DNA, 25 bp, Homo sapien
aatcaaaggactcattccgaggcct

SEQ ID NO: 3773959 - DNA, 25 bp, Homo sapien
aaatcaaaggactcattccgaggcc

SEQ ID NO: 3773960 - DNA, 25 bp, Homo sapien
tcaaaggactcattccgaggcctga

SEQ ID NO: 3773961 - DNA, 25 bp, Homo sapien
aaaggactcattccgaggcctgatc

SEQ ID NO: 3773962 - DNA, 25 bp, Homo sapien
ctgatgaattcaccactggaagttc

SEQ ID NO: 3773963 - DNA, 25 bp, Homo sapien
agaatggcctgcaacgttgactggc

SEQ ID NO: 3773964 - DNA, 25 bp, Homo sapien
tgactggcagttacaagtacagcag

SEQ ID NO: 3773965 - DNA, 25 bp, Homo sapien
ctcatggtcttgagttcttgtagaa

SEQ ID NO: 3773966 - DNA, 25 bp, Homo sapien
tactgacgtgggatgctgggttatc

SEQ ID NO: 3773967 - DNA, 25 bp, Homo sapien
ccagtgtggccggatagaaaactaa

SEQ ID NO: 3773968 - DNA, 25 bp, Homo sapien
tacaaaatatggatcactgggttca

SEQ ID NO: 3773969 - DNA, 25 bp, Homo sapien
tacatgggcacaaaatgatcgcttt

SEQ ID NO: 3773970 - DNA, 25 bp, Homo sapien
tctgaatgtttgttgacaaccatac

SEQ ID NO: 3773971 - DNA, 25 bp, Homo sapien
ttctgaatgtttgttgacaaccata

SEQ ID NO: 3773972 - DNA, 25 bp, Homo sapien
ttggaaggttctagaacgggtgcca

SEQ ID NO: 3773973 - DNA, 25 bp, Homo sapien
agaacgggtgccatactgccctgag

SEQ ID NO: 3773974 - DNA, 25 bp, Homo sapien
gttctagaacgggtgccatactgcc

SEQ ID NO: 3773975 - DNA, 25 bp, Homo sapien
gaaggttctagaacgggtgccatac

SEQ ID NO: 3773976 - DNA, 25 bp, Homo sapien
aacgtggaggccagactaaatccag

SEQ ID NO: 3773977 - DNA, 25 bp, Homo sapien
cagaggagttcaaacgtggaggcca

SEQ ID NO: 3773978 - DNA, 25 bp, Homo sapien
tccttctttgccaactcgctgatag

SEQ ID NO: 3773979 - DNA, 25 bp, Homo sapien
gatagatccgcccagtgctgtcgtt

SEQ ID NO: 3773980 - DNA, 25 bp, Homo sapien
ctgtaatttgcttttttatttccat

SEQ ID NO: 3773981 - DNA, 25 bp, Homo sapien
taatggaaacagggccaaagttagc

SEQ ID NO: 3773982 - DNA, 25 bp, Homo sapien
tggaaacagggccaaagttagcact

SEQ ID NO: 3773983 - DNA, 25 bp, Homo sapien
ctaatggaaacagggccaaagttag

SEQ ID NO: 3773984 - DNA, 25 bp, Homo sapien
aatggaaacagggccaaagttagca

SEQ ID NO: 3773985 - DNA, 25 bp, Homo sapien
tgggccacagccacccgtgaggaat

SEQ ID NO: 3773986 - DNA, 25 bp, Homo sapien
tgaggaatgggcaggtcactaaagc

SEQ ID NO: 3773987 - DNA, 25 bp, Homo sapien
caggtcactaaagcgctctgctcac

SEQ ID NO: 3773988 - DNA, 25 bp, Homo sapien
gaatgggcaggtcactaaagcgctc

SEQ ID NO: 3773989 - DNA, 25 bp, Homo sapien
ttcaggatgactggcagggatgcag

SEQ ID NO: 3773990 - DNA, 25 bp, Homo sapien
gggacgcagggcttcactactgaca

SEQ ID NO: 3773991 - DNA, 25 bp, Homo sapien
agggcttcactgctgacacaatgtc

SEQ ID NO: 3773992 - DNA, 25 bp, Homo sapien
cacaatgtcctccaggatgacacgc

SEQ ID NO: 3773993 - DNA, 25 bp, Homo sapien
cttcagagaggacggccgaggagac

SEQ ID NO: 3773994 - DNA, 25 bp, Homo sapien
agtgtggcagcatggcaagcgaggg

SEQ ID NO: 3773995 - DNA, 25 bp, Homo sapien
tctgactcccatcacatcagcctgg

SEQ ID NO: 3773996 - DNA, 25 bp, Homo sapien
cactcgaggtcactggcggtaccag

SEQ ID NO: 3773997 - DNA, 25 bp, Homo sapien
taatttcagcaaccagacacatacg

SEQ ID NO: 3773998 - DNA, 25 bp, Homo sapien
ggtatgcctgcactgaagtccatgc

SEQ ID NO: 3773999 - DNA, 25 bp, Homo sapien
gacacatacgttcccggctagttaa

SEQ ID NO: 3774000 - DNA, 25 bp, Homo sapien
gataagcccacaggcaaatgcggta

SEQ ID NO: 3774001 - DNA, 25 bp, Homo sapien
actaactgacacatcacaggagaag

SEQ ID NO: 3774002 - DNA, 25 bp, Homo sapien
gcttctctacactaactgacacatc

SEQ ID NO: 3774003 - DNA, 25 bp, Homo sapien
ctacactaactgacacatcacagga

SEQ ID NO: 3774004 - DNA, 25 bp, Homo sapien
cagcttgcttctctacactaactga

SEQ ID NO: 3774005 - DNA, 25 bp, Homo sapien
tgtgcttgtgccattaaaggcccac

SEQ ID NO: 3774006 - DNA, 25 bp, Homo sapien
atctcttgctggcacttgtccgggc

SEQ ID NO: 3774007 - DNA, 25 bp, Homo sapien
gctggcacttgtccgggcctctggt

SEQ ID NO: 3774008 - DNA, 25 bp, Homo sapien
tgactgggagcctgccccaaaggga

SEQ ID NO: 3774009 - DNA, 25 bp, Homo sapien
gtgaggccaccctgctagggcacca

SEQ ID NO: 3774010 - DNA, 25 bp, Homo sapien
gcatagtgaggccaccctgctaggg

SEQ ID NO: 3774011 - DNA, 25 bp, Homo sapien
caggagtttaagattcataggagat

SEQ ID NO: 3774012 - DNA, 25 bp, Homo sapien
agctggagcgcatagtgaggccacc

SEQ ID NO: 3774013 - DNA, 25 bp, Homo sapien
gctacacttcccaggagcacagtta

SEQ ID NO: 3774014 - DNA, 25 bp, Homo sapien
cacagttacggtgtccgtgactgaa

SEQ ID NO: 3774015 - DNA, 25 bp, Homo sapien
ggtgtccgtgactgaacagacaaaa

SEQ ID NO: 3774016 - DNA, 25 bp, Homo sapien
cacagttacatgtttgccagctgaa

SEQ ID NO: 3774017 - DNA, 25 bp, Homo sapien
gagtttgacctacaactcactgtga

SEQ ID NO: 3774018 - DNA, 25 bp, Homo sapien
ggagtttgacctacaactcactgtg

SEQ ID NO: 3774019 - DNA, 25 bp, Homo sapien
ggtaagcaccctgcctacattgaat

SEQ ID NO: 3774020 - DNA, 25 bp, Homo sapien
tgtcacaacaagacgtgggtgccgt

SEQ ID NO: 3774021 - DNA, 25 bp, Homo sapien
tcatgagactatcaagccggtgtcc

SEQ ID NO: 3774022 - DNA, 25 bp, Homo sapien
caagctaagaggttcgagcactggc

SEQ ID NO: 3774023 - DNA, 25 bp, Homo sapien
catttggtgcctaaattcggccaca

SEQ ID NO: 3774024 - DNA, 25 bp, Homo sapien
taacagatatgacgagaagatacgg

SEQ ID NO: 3774025 - DNA, 25 bp, Homo sapien
gaagatacggttgaggaaagctgac

SEQ ID NO: 3774026 - DNA, 25 bp, Homo sapien
ccactgatgtgcaagagataaaccc

SEQ ID NO: 3774027 - DNA, 25 bp, Homo sapien
tcatgataatgtaaaggtattaatc

SEQ ID NO: 3774028 - DNA, 25 bp, Homo sapien
tattttatcatgataatgtaaaggt

SEQ ID NO: 3774029 - DNA, 25 bp, Homo sapien
gagaaatgctgcgagagacacagac

SEQ ID NO: 3774030 - DNA, 25 bp, Homo sapien
acaatgagaaatgctgcgagagaca

SEQ ID NO: 3774031 - DNA, 25 bp, Homo sapien
gcttgggagcacgtttgaacaaagc

SEQ ID NO: 3774032 - DNA, 25 bp, Homo sapien
aaatgcacgtaaggctctctgggtc

SEQ ID NO: 3774033 - DNA, 25 bp, Homo sapien
tgtgaaatgcacgtaaggctctctg

SEQ ID NO: 3774034 - DNA, 25 bp, Homo sapien
ggttccgcttgggagcacgtttgaa

SEQ ID NO: 3774035 - DNA, 25 bp, Homo sapien
agcctggtccttcattggaattctt

SEQ ID NO: 3774036 - DNA, 25 bp, Homo sapien
tcattggaattcttgcatcttcctc

SEQ ID NO: 3774037 - DNA, 25 bp, Homo sapien
aattcttgcatcttcctcaacttgg

SEQ ID NO: 3774038 - DNA, 25 bp, Homo sapien
tcaagcctggtccttcattggaatt

SEQ ID NO: 3774039 - DNA, 25 bp, Homo sapien
tgaatcctgggcactagcatcctgt

SEQ ID NO: 3774040 - DNA, 25 bp, Homo sapien
tctcttatccttacaattcacttcc

SEQ ID NO: 3774041 - DNA, 25 bp, Homo sapien
cacttccttcgtagtgaccttacca

SEQ ID NO: 3774042 - DNA, 25 bp, Homo sapien
tgggcactagcatcctgttgctctt

SEQ ID NO: 3774043 - DNA, 25 bp, Homo sapien
tgcttgtaatcgttctcgctctgac

SEQ ID NO: 3774044 - DNA, 25 bp, Homo sapien
gagagcttcgtttgaaggctgaccc

SEQ ID NO: 3774045 - DNA, 25 bp, Homo sapien
cagagagatcctggcgagagcttcg

SEQ ID NO: 3774046 - DNA, 25 bp, Homo sapien
gcagcagtcctgctacctgaagtcc

SEQ ID NO: 3774047 - DNA, 25 bp, Homo sapien
tgtcaaagatgtaataccccaatta

SEQ ID NO: 3774048 - DNA, 25 bp, Homo sapien
agtgaagcatgccaacgaatatgca

SEQ ID NO: 3774049 - DNA, 25 bp, Homo sapien
caacttttagcaatgttaataaggg

SEQ ID NO: 3774050 - DNA, 25 bp, Homo sapien
taattagcactgtgtgtagacacta

SEQ ID NO: 3774051 - DNA, 25 bp, Homo sapien
cattaacatcgttgctgaattctgg

SEQ ID NO: 3774052 - DNA, 25 bp, Homo sapien
tttggcctccccattaacatcgttg

SEQ ID NO: 3774053 - DNA, 25 bp, Homo sapien
gctgaattctgggatcttatacacc

SEQ ID NO: 3774054 - DNA, 25 bp, Homo sapien
tgggatcttatacacctcgtggtga

SEQ ID NO: 3774055 - DNA, 25 bp, Homo sapien
aacagcaaatctcaggtccgagggt

SEQ ID NO: 3774056 - DNA, 25 bp, Homo sapien
taaacagagcgggtctaaactcaat

SEQ ID NO: 3774057 - DNA, 25 bp, Homo sapien
gatgtcaacaattccgccttgggct

SEQ ID NO: 3774058 - DNA, 25 bp, Homo sapien
tgaatcagatagcaccaacagggca

SEQ ID NO: 3774059 - DNA, 25 bp, Homo sapien
gcttcttttcctctcggagaactcc

SEQ ID NO: 3774060 - DNA, 25 bp, Homo sapien
ccgccgggaccaaggtccgcgcctg

SEQ ID NO: 3774061 - DNA, 25 bp, Homo sapien
gggctcgtgtcaccgcggcggagcc

SEQ ID NO: 3774062 - DNA, 25 bp, Homo sapien
cgggaccaaggtccgcgcctggagt

SEQ ID NO: 3774063 - DNA, 25 bp, Homo sapien
ggcggcgcgggctcgtgtcaccgcg

SEQ ID NO: 3774064 - DNA, 25 bp, Homo sapien
cagcccaactttccgttgggagcgg

SEQ ID NO: 3774065 - DNA, 25 bp, Homo sapien
ccgcctgggctcagcctgcggtcgc

SEQ ID NO: 3774066 - DNA, 25 bp, Homo sapien
cccgctcatgccggcccgcgggttc

SEQ ID NO: 3774067 - DNA, 25 bp, Homo sapien
ccggcccgcctgggctcagcctgcg

SEQ ID NO: 3774068 - DNA, 25 bp, Homo sapien
gtaggacaggaacatgacgggacat

SEQ ID NO: 3774069 - DNA, 25 bp, Homo sapien
gtgggtctcacccaaatgaggcagc

SEQ ID NO: 3774070 - DNA, 25 bp, Homo sapien
gaaccgctcttatttcagggacaca

SEQ ID NO: 3774071 - DNA, 25 bp, Homo sapien
cgggacatgcgtgaaagtatctgcc

SEQ ID NO: 3774072 - DNA, 25 bp, Homo sapien
cctatgaagttcgaaggatcaaaag

SEQ ID NO: 3774073 - DNA, 25 bp, Homo sapien
cttttgatccttcgaacttcatagg

SEQ ID NO: 3774074 - DNA, 25 bp, Homo sapien
aactccgccaagttgtttacaggtg

SEQ ID NO: 3774075 - DNA, 25 bp, Homo sapien
cgccaagttgtttacaggtgaaatc

SEQ ID NO: 3774076 - DNA, 25 bp, Homo sapien
tgtgccttatcaactccgccaagtt

SEQ ID NO: 3774077 - DNA, 25 bp, Homo sapien
aagaataacatgtgccttatcaact

SEQ ID NO: 3774078 - DNA, 25 bp, Homo sapien
agctctgccaaggtggcccctgagc

SEQ ID NO: 3774079 - DNA, 25 bp, Homo sapien
tcccaagactgtggtcctgcggcgt

SEQ ID NO: 3774080 - DNA, 25 bp, Homo sapien
ggagctctgccaaggtggcccctga

SEQ ID NO: 3774081 - DNA, 25 bp, Homo sapien
cttcccaagactgtggtcctgcggc

SEQ ID NO: 3774082 - DNA, 25 bp, Homo sapien
cttcaatctgaacaggccctccatg

SEQ ID NO: 3774083 - DNA, 25 bp, Homo sapien
ctgtgccgacatcgccttcaatctg

SEQ ID NO: 3774084 - DNA, 25 bp, Homo sapien
gacatcgccttcaatctgaacaggc

SEQ ID NO: 3774085 - DNA, 25 bp, Homo sapien
tcaatctgaacaggccctccatgtt

SEQ ID NO: 3774086 - DNA, 25 bp, Homo sapien
catcctgggactcaatgttgtttct

SEQ ID NO: 3774087 - DNA, 25 bp, Homo sapien
gatccaacatgcttcacattttggt

SEQ ID NO: 3774088 - DNA, 25 bp, Homo sapien
tctggtggatactgtgacatgcatc

SEQ ID NO: 3774089 - DNA, 25 bp, Homo sapien
gacctcctgggtggatccaacttga

SEQ ID NO: 3774090 - DNA, 25 bp, Homo sapien
ataaattccatgagtcggggcaaac

SEQ ID NO: 3774091 - DNA, 25 bp, Homo sapien
gaggataaattccatgagtcggggc

SEQ ID NO: 3774092 - DNA, 25 bp, Homo sapien
ccatgagtcggggcaaacacagatc

SEQ ID NO: 3774093 - DNA, 25 bp, Homo sapien
aattccatgagtcggggcaaacaca

SEQ ID NO: 3774094 - DNA, 25 bp, Homo sapien
aggtgcttcaggaagaccgccctct

SEQ ID NO: 3774095 - DNA, 25 bp, Homo sapien
ggtgcttcaggaagaccgccctctt

SEQ ID NO: 3774096 - DNA, 25 bp, Homo sapien
aggatgatcagaacgttccccgggg

SEQ ID NO: 3774097 - DNA, 25 bp, Homo sapien
gatgatcagaacgttccccggggta

SEQ ID NO: 3774098 - DNA, 25 bp, Homo sapien
tcttcagtaggaaaatatctaggca

SEQ ID NO: 3774099 - DNA, 25 bp, Homo sapien
taggcattttatgaagtttaaccac

SEQ ID NO: 3774100 - DNA, 25 bp, Homo sapien
cttcagtaggaaaatatctaggcat

SEQ ID NO: 3774101 - DNA, 25 bp, Homo sapien
atatctaggcattttatgaagttta

SEQ ID NO: 3774102 - DNA, 25 bp, Homo sapien
tcaacctcgtacttagcggctgagt

SEQ ID NO: 3774103 - DNA, 25 bp, Homo sapien
tttcaacctcgtacttagcggctga

SEQ ID NO: 3774104 - DNA, 25 bp, Homo sapien
cttttcaacctcgtacttagcggct

SEQ ID NO: 3774105 - DNA, 25 bp, Homo sapien
aacctcgtacttagcggctgagtac

SEQ ID NO: 3774106 - DNA, 25 bp, Homo sapien
tggaatacatagcacatcgggaata

SEQ ID NO: 3774107 - DNA, 25 bp, Homo sapien
ggaatacatagcacatcgggaatac

SEQ ID NO: 3774108 - DNA, 25 bp, Homo sapien
ctggaatacatagcacatcgggaat

SEQ ID NO: 3774109 - DNA, 25 bp, Homo sapien
tttttcaccttgtcaccagcctcag

SEQ ID NO: 3774110 - DNA, 25 bp, Homo sapien
ctgacaaggacagggttgtgctgca

SEQ ID NO: 3774111 - DNA, 25 bp, Homo sapien
acaaggacagggttgtgctgcaatg

SEQ ID NO: 3774112 - DNA, 25 bp, Homo sapien
tgggcttcttagccttgaggtgacc

SEQ ID NO: 3774113 - DNA, 25 bp, Homo sapien
tcgtagtggagggttgttgatgtgc

SEQ ID NO: 3774114 - DNA, 25 bp, Homo sapien
ttgatgtgcttggggaatcaatgta

SEQ ID NO: 3774115 - DNA, 25 bp, Homo sapien
atgtgcttggggaatcaatgtattc

SEQ ID NO: 3774116 - DNA, 25 bp, Homo sapien
agtcgtagtggagggttgttgatgt

SEQ ID NO: 3774117 - DNA, 25 bp, Homo sapien
tgacagtgatactccggaagtttac

SEQ ID NO: 3774118 - DNA, 25 bp, Homo sapien
catgtgaataggtctaaagtgccga

SEQ ID NO: 3774119 - DNA, 25 bp, Homo sapien
tttgtgccagagaacagtcattacc

SEQ ID NO: 3774120 - DNA, 25 bp, Homo sapien
gatttcaatcggactccctcatgtg

SEQ ID NO: 3774121 - DNA, 25 bp, Homo sapien
ggtagtaacacttcatgccacttgc

SEQ ID NO: 3774122 - DNA, 25 bp, Homo sapien
agagcccctcatcttgaccacagaa

SEQ ID NO: 3774123 - DNA, 25 bp, Homo sapien
aagattcatatacatcggcctttcc

SEQ ID NO: 3774124 - DNA, 25 bp, Homo sapien
cttgctttttactttcgacattgct

SEQ ID NO: 3774125 - DNA, 25 bp, Homo sapien
cctaaattttagatgcataagggag

SEQ ID NO: 3774126 - DNA, 25 bp, Homo sapien
gaagttatctcgttacatacaatgg

SEQ ID NO: 3774127 - DNA, 25 bp, Homo sapien
ggccgaattgttacatgtagctaga

SEQ ID NO: 3774128 - DNA, 25 bp, Homo sapien
gaacctggttgagactggccgaatt

SEQ ID NO: 3774129 - DNA, 25 bp, Homo sapien
taagaactttgttggccttcatttc

SEQ ID NO: 3774130 - DNA, 25 bp, Homo sapien
tcatttcatatctgactgcaagctg

SEQ ID NO: 3774131 - DNA, 25 bp, Homo sapien
cagtctctgagttctacctgatgta

SEQ ID NO: 3774132 - DNA, 25 bp, Homo sapien
tcagttgacccgaaagttgtggtta

SEQ ID NO: 3774133 - DNA, 25 bp, Homo sapien
tcaggtcacacagtagagtagttca

SEQ ID NO: 3774134 - DNA, 25 bp, Homo sapien
tgacaccagtacctcctaaaattgg

SEQ ID NO: 3774135 - DNA, 25 bp, Homo sapien
tcaaagatgtagatcccctcagaga

SEQ ID NO: 3774136 - DNA, 25 bp, Homo sapien
cacagggctgtgaccattcgaggga

SEQ ID NO: 3774137 - DNA, 25 bp, Homo sapien
gccatgtgtttactcggtctaccaa

SEQ ID NO: 3774138 - DNA, 25 bp, Homo sapien
tgtagctcccgtctgaatccaaagg

SEQ ID NO: 3774139 - DNA, 25 bp, Homo sapien
gaatgatgcccgtatgcactgagaa

SEQ ID NO: 3774140 - DNA, 25 bp, Homo sapien
taagtccagtgatctgtaccccgca

SEQ ID NO: 3774141 - DNA, 25 bp, Homo sapien
caaaacatgtaaacgtgcagctccc

SEQ ID NO: 3774142 - DNA, 25 bp, Homo sapien
gctttatatcagaccaaggacttcg

SEQ ID NO: 3774143 - DNA, 25 bp, Homo sapien
tacgcatccgaagaatccaataggg

SEQ ID NO: 3774144 - DNA, 25 bp, Homo sapien
taactggtcatctgatagcacctgg

SEQ ID NO: 3774145 - DNA, 25 bp, Homo sapien
tctctacggagagagaagtgggcca

SEQ ID NO: 3774146 - DNA, 25 bp, Homo sapien
gatggcgactgtgagtcagcaacgc

SEQ ID NO: 3774147 - DNA, 25 bp, Homo sapien
gacaccagtttacatagggttgact

SEQ ID NO: 3774148 - DNA, 25 bp, Homo sapien
gctttgagtcttgggctcggctgaa

SEQ ID NO: 3774149 - DNA, 25 bp, Homo sapien
tctcagaatggcgttgaggcggtca

SEQ ID NO: 3774150 - DNA, 25 bp, Homo sapien
gaactgattgtggtcctccgatgca

SEQ ID NO: 3774151 - DNA, 25 bp, Homo sapien
tatccgcaggaattggatgccggct

SEQ ID NO: 3774152 - DNA, 25 bp, Homo sapien
tgtaaactgaatatgccacgaggcc

SEQ ID NO: 3774153 - DNA, 25 bp, Homo sapien
ttttcctgcccgtaccactggacat

SEQ ID NO: 3774154 - DNA, 25 bp, Homo sapien
tgcccgtaccactggacatcagcta

SEQ ID NO: 3774155 - DNA, 25 bp, Homo sapien
gctttttcctgcccgtaccactgga

SEQ ID NO: 3774156 - DNA, 25 bp, Homo sapien
ccgtaccactggacatcagctagtt

SEQ ID NO: 3774157 - DNA, 25 bp, Homo sapien
gaggaatccaggaaacagctatcat

SEQ ID NO: 3774158 - DNA, 25 bp, Homo sapien
tccaggaaacagctatcattgtagc

SEQ ID NO: 3774159 - DNA, 25 bp, Homo sapien
ctggatagagggaggaatccaggaa

SEQ ID NO: 3774160 - DNA, 25 bp, Homo sapien
gaatccaggaaacagctatcattgt

SEQ ID NO: 3774161 - DNA, 25 bp, Homo sapien
gatcatgattcggaaaaacagcctc

SEQ ID NO: 3774162 - DNA, 25 bp, Homo sapien
aatgatcctgaatgagccctttgaa

SEQ ID NO: 3774163 - DNA, 25 bp, Homo sapien
aggcatctgtgcatatactggtgga

SEQ ID NO: 3774164 - DNA, 25 bp, Homo sapien
ggagcatttcggtaccaaacacagc

SEQ ID NO: 3774165 - DNA, 25 bp, Homo sapien
gctttgaaaccacaaggatgtcatt

SEQ ID NO: 3774166 - DNA, 25 bp, Homo sapien
cagtctctccctaactccacgtggt

SEQ ID NO: 3774167 - DNA, 25 bp, Homo sapien
ctggttcaaaggtggccacgtgcct

SEQ ID NO: 3774168 - DNA, 25 bp, Homo sapien
cgggccaatgagagtcccccgatca

SEQ ID NO: 3774169 - DNA, 25 bp, Homo sapien
gttcattatggaggcttctgggtca

SEQ ID NO: 3774170 - DNA, 25 bp, Homo sapien
gaagtcctggattagtttgccacag

SEQ ID NO: 3774171 - DNA, 25 bp, Homo sapien
tcacagaacccacatatgagagggc

SEQ ID NO: 3774172 - DNA, 25 bp, Homo sapien
tagaggagccgcagtatggaaacca

SEQ ID NO: 3774173 - DNA, 25 bp, Homo sapien
attcaattttccggtagtagtcaag

SEQ ID NO: 3774174 - DNA, 25 bp, Homo sapien
tcaattttccggtagtagtcaagga

SEQ ID NO: 3774175 - DNA, 25 bp, Homo sapien
gtcccacagttggtcacaaggccag

SEQ ID NO: 3774176 - DNA, 25 bp, Homo sapien
agaaccaactggtggcacatactgg

SEQ ID NO: 3774177 - DNA, 25 bp, Homo sapien
gggttgttgaacagtcccacagttg

SEQ ID NO: 3774178 - DNA, 25 bp, Homo sapien
gaaccaactggtggcacatactggg

SEQ ID NO: 3774179 - DNA, 25 bp, Homo sapien
aagcctaagtccctgtcctaattgc

SEQ ID NO: 3774180 - DNA, 25 bp, Homo sapien
tgtatgcatgagcatgaactcgtgt

SEQ ID NO: 3774181 - DNA, 25 bp, Homo sapien
gggaaggtgctgttgctcagtataa

SEQ ID NO: 3774182 - DNA, 25 bp, Homo sapien
cagtataatgtatgtgtgtccctgc

SEQ ID NO: 3774183 - DNA, 25 bp, Homo sapien
tgcacattaggttcagtaggccagg

SEQ ID NO: 3774184 - DNA, 25 bp, Homo sapien
actgagtcggcccttggtgctttga

SEQ ID NO: 3774185 - DNA, 25 bp, Homo sapien
ccgggagactagctttctaacgagc

SEQ ID NO: 3774186 - DNA, 25 bp, Homo sapien
gaccaggtggtactgttatctgccc

SEQ ID NO: 3774187 - DNA, 25 bp, Homo sapien
cagacccatccagaatgggtgagtt

SEQ ID NO: 3774188 - DNA, 25 bp, Homo sapien
tcagacccatccagaatgggtgagt

SEQ ID NO: 3774189 - DNA, 25 bp, Homo sapien
ctcagacccatccagaatgggtgag

SEQ ID NO: 3774190 - DNA, 25 bp, Homo sapien
agacccatccagaatgggtgagttt

SEQ ID NO: 3774191 - DNA, 25 bp, Homo sapien
agtgatgcacactagtaatcccggc

SEQ ID NO: 3774192 - DNA, 25 bp, Homo sapien
aacaaaaatgccgaccaggtgcctg

SEQ ID NO: 3774193 - DNA, 25 bp, Homo sapien
tcatgtgtgttagaagctgctcgca

SEQ ID NO: 3774194 - DNA, 25 bp, Homo sapien
tgctcgcagcctttgagtacacagc

SEQ ID NO: 3774195 - DNA, 25 bp, Homo sapien
actctttcgagctgacacagtgaag

SEQ ID NO: 3774196 - DNA, 25 bp, Homo sapien
gaacgtctatgacactctttcgagc

SEQ ID NO: 3774197 - DNA, 25 bp, Homo sapien
caccaggatctgaacgtctatgaca

SEQ ID NO: 3774198 - DNA, 25 bp, Homo sapien
tgtcaccaggatctgaacgtctatg

SEQ ID NO: 3774199 - DNA, 25 bp, Homo sapien
gggtggctccaatttcacttgacgg

SEQ ID NO: 3774200 - DNA, 25 bp, Homo sapien
ttcacttgacggtgtcgagcttctc

SEQ ID NO: 3774201 - DNA, 25 bp, Homo sapien
tgacggtgtcgagcttctctggctt

SEQ ID NO: 3774202 - DNA, 25 bp, Homo sapien
gctccaatttcacttgacggtgtcg

SEQ ID NO: 3774203 - DNA, 25 bp, Homo sapien
ctacccactaccatgcaccttcatt

SEQ ID NO: 3774204 - DNA, 25 bp, Homo sapien
tctacccactaccatgcaccttcat

SEQ ID NO: 3774205 - DNA, 25 bp, Homo sapien
gggatcctaggtccccgctttgcca

SEQ ID NO: 3774206 - DNA, 25 bp, Homo sapien
ctgggatcctaggtccccgctttgc

SEQ ID NO: 3774207 - DNA, 25 bp, Homo sapien
tggtgacggtttctacagcagcaaa

SEQ ID NO: 3774208 - DNA, 25 bp, Homo sapien
caggaggtaggcatagggatggtga

SEQ ID NO: 3774209 - DNA, 25 bp, Homo sapien
gagggcatccagaaaggttctcaga

SEQ ID NO: 3774210 - DNA, 25 bp, Homo sapien
ggaagtcaatcctacgtaaatgcat

SEQ ID NO: 3774211 - DNA, 25 bp, Homo sapien
cattgctactgtagggcgctttgaa

SEQ ID NO: 3774212 - DNA, 25 bp, Homo sapien
ctttgagcgagacctgagcagggct

SEQ ID NO: 3774213 - DNA, 25 bp, Homo sapien
gaagtccacggaacacccaccatta

SEQ ID NO: 3774214 - DNA, 25 bp, Homo sapien
cgaagtccacggaacacccaccatt

SEQ ID NO: 3774215 - DNA, 25 bp, Homo sapien
ccgaagtccacggaacacccaccat

SEQ ID NO: 3774216 - DNA, 25 bp, Homo sapien
gccagtggaccctaataaacgtcca

SEQ ID NO: 3774217 - DNA, 25 bp, Homo sapien
ggagcttgtcatttggccagtggac

SEQ ID NO: 3774218 - DNA, 25 bp, Homo sapien
gagcctggctcgctagggcatccag

SEQ ID NO: 3774219 - DNA, 25 bp, Homo sapien
tctcctacagttccccaaagatgaa

SEQ ID NO: 3774220 - DNA, 25 bp, Homo sapien
tctttaccaaattcctgactcagag

SEQ ID NO: 3774221 - DNA, 25 bp, Homo sapien
taccaaattcctgactcagagttcc

SEQ ID NO: 3774222 - DNA, 25 bp, Homo sapien
cccgatctttaccaaattcctgact

SEQ ID NO: 3774223 - DNA, 25 bp, Homo sapien
aggtcactctgtttcccccgatctt

SEQ ID NO: 3774224 - DNA, 25 bp, Homo sapien
ttttattcttatgatgtttaccatt

SEQ ID NO: 3774225 - DNA, 25 bp, Homo sapien
tttattcttatgatgtttaccattt

SEQ ID NO: 3774226 - DNA, 25 bp, Homo sapien
attttattcttatgatgtttaccat

SEQ ID NO: 3774227 - DNA, 25 bp, Homo sapien
tcctttgcaagctacagctgtgggc

SEQ ID NO: 3774228 - DNA, 25 bp, Homo sapien
taagccagtgctgagaccggagcac

SEQ ID NO: 3774229 - DNA, 25 bp, Homo sapien
cacctttggttggataaacccagag

SEQ ID NO: 3774230 - DNA, 25 bp, Homo sapien
taccgcccaatgctcttgagtatga

SEQ ID NO: 3774231 - DNA, 25 bp, Homo sapien
accggcaagcagttcgccctcaggt

SEQ ID NO: 3774232 - DNA, 25 bp, Homo sapien
ggtcttcccgcgtgcacctggccgc

SEQ ID NO: 3774233 - DNA, 25 bp, Homo sapien
cggcaagcagttcgccctcaggtct

SEQ ID NO: 3774234 - DNA, 25 bp, Homo sapien
ccctcaggtcttcccgcgtgcacct

SEQ ID NO: 3774235 - DNA, 25 bp, Homo sapien
cccgccgtgtaggagttggacgtct

SEQ ID NO: 3774236 - DNA, 25 bp, Homo sapien
tccttgatgcggtactgcgagctgg

SEQ ID NO: 3774237 - DNA, 25 bp, Homo sapien
ctgctgtgcgccacgaaggtgctct

SEQ ID NO: 3774238 - DNA, 25 bp, Homo sapien
aactgagccttgacgctgtagtggc

SEQ ID NO: 3774239 - DNA, 25 bp, Homo sapien
ctgtgcaggtacacaccgccccccg

SEQ ID NO: 3774240 - DNA, 25 bp, Homo sapien
tgcaggtacacaccgccccccgcgc

SEQ ID NO: 3774241 - DNA, 25 bp, Homo sapien
aggttgggcatgctgcccgagctgg

SEQ ID NO: 3774242 - DNA, 25 bp, Homo sapien
gcctctgcctctggcgcgccttgga

SEQ ID NO: 3774243 - DNA, 25 bp, Homo sapien
gagtagttggcgttcatctgcgccg

SEQ ID NO: 3774244 - DNA, 25 bp, Homo sapien
agtcctcggccagcgtggagtagtt

SEQ ID NO: 3774245 - DNA, 25 bp, Homo sapien
ggtgcacgacgagcagtcgtccatg

SEQ ID NO: 3774246 - DNA, 25 bp, Homo sapien
ccgggtagtagtgctccgagctcga

SEQ ID NO: 3774247 - DNA, 25 bp, Homo sapien
tgtagaagtcggggctcccggtgtc

SEQ ID NO: 3774248 - DNA, 25 bp, Homo sapien
gtgtcgttttccgagcccaggagct

SEQ ID NO: 3774249 - DNA, 25 bp, Homo sapien
gtcgttttccgagcccaggagcttg

SEQ ID NO: 3774250 - DNA, 25 bp, Homo sapien
cggtgtcgttttccgagcccaggag

SEQ ID NO: 3774251 - DNA, 25 bp, Homo sapien
gctgtgcagtcgggtggggctgatg

SEQ ID NO: 3774252 - DNA, 25 bp, Homo sapien
aggctgtgcagtcgggtggggctga

SEQ ID NO: 3774253 - DNA, 25 bp, Homo sapien
ctaaagtgcagtgcgaggctgtgca

SEQ ID NO: 3774254 - DNA, 25 bp, Homo sapien
gtgcagtcgggtggggctgatgtcc

SEQ ID NO: 3774255 - DNA, 25 bp, Homo sapien
gcgtggacggcatgctggactggga

SEQ ID NO: 3774256 - DNA, 25 bp, Homo sapien
tgggagttccagtgcgggaggccgc

SEQ ID NO: 3774257 - DNA, 25 bp, Homo sapien
actccggacccgcaggtctggcgtg

SEQ ID NO: 3774258 - DNA, 25 bp, Homo sapien
tgcaaggagttgcttcctccgccgg

SEQ ID NO: 3774259 - DNA, 25 bp, Homo sapien
tcgttgcggtgatagtgcatctgtc

SEQ ID NO: 3774260 - DNA, 25 bp, Homo sapien
gctgtgagaggagcgcttcttgacc

SEQ ID NO: 3774261 - DNA, 25 bp, Homo sapien
catagggttcatctaaagaggactc

SEQ ID NO: 3774262 - DNA, 25 bp, Homo sapien
tgcatctgtcggagtccctccaggg

SEQ ID NO: 3774263 - DNA, 25 bp, Homo sapien
ggaggcctgttgtgcgacggtggcc

SEQ ID NO: 3774264 - DNA, 25 bp, Homo sapien
gccgaggagggagtcccttgtgagg

SEQ ID NO: 3774265 - DNA, 25 bp, Homo sapien
tgttgtgcgacggtggccgaggagg

SEQ ID NO: 3774266 - DNA, 25 bp, Homo sapien
ccttgtgaggagaatgtagggggga

SEQ ID NO: 3774267 - DNA, 25 bp, Homo sapien
gatgcgtcggagtgaaaaatcctgt

SEQ ID NO: 3774268 - DNA, 25 bp, Homo sapien
gatgtcttaagcacggatgcgtcgg

SEQ ID NO: 3774269 - DNA, 25 bp, Homo sapien
atgtgagccaagagcccgactgatg

SEQ ID NO: 3774270 - DNA, 25 bp, Homo sapien
tttagaactattcacctggcagtgt

SEQ ID NO: 3774271 - DNA, 25 bp, Homo sapien
gctgtcttcactggcaatgtttcca

SEQ ID NO: 3774272 - DNA, 25 bp, Homo sapien
tctgagagggagctgtcttcactgg

SEQ ID NO: 3774273 - DNA, 25 bp, Homo sapien
gaacaagggcatctgagagggagct

SEQ ID NO: 3774274 - DNA, 25 bp, Homo sapien
catcctcaagaacaagggcatctga

SEQ ID NO: 3774275 - DNA, 25 bp, Homo sapien
cgtgcagggaccactcgtgggacct

SEQ ID NO: 3774276 - DNA, 25 bp, Homo sapien
ggcagctgctcaggtcgtgcaggga

SEQ ID NO: 3774277 - DNA, 25 bp, Homo sapien
cagcggacagttaggcagctgctca

SEQ ID NO: 3774278 - DNA, 25 bp, Homo sapien
gacaaatgaaggcagcggacagtta

SEQ ID NO: 3774279 - DNA, 25 bp, Homo sapien
tatgatcagcgaagccctctgggtg

SEQ ID NO: 3774280 - DNA, 25 bp, Homo sapien
gacttgatgcggttctcattgattg

SEQ ID NO: 3774281 - DNA, 25 bp, Homo sapien
cgggcggcctccgtaatctgggact

SEQ ID NO: 3774282 - DNA, 25 bp, Homo sapien
cagtgcattcagatacgaggttttc

SEQ ID NO: 3774283 - DNA, 25 bp, Homo sapien
ttagggatcgcttggctgtgtttcg

SEQ ID NO: 3774284 - DNA, 25 bp, Homo sapien
aagtgttggtgtgaacgctgccgcc

SEQ ID NO: 3774285 - DNA, 25 bp, Homo sapien
gagaacagagttcccacgatgcagg

SEQ ID NO: 3774286 - DNA, 25 bp, Homo sapien
ctgtgtttcgactgtctccagcaag

SEQ ID NO: 3774287 - DNA, 25 bp, Homo sapien
tattcttctccgaacaatgggtggt

SEQ ID NO: 3774288 - DNA, 25 bp, Homo sapien
gggatattctactggcagcttgccc

SEQ ID NO: 3774289 - DNA, 25 bp, Homo sapien
tgttcctattcttctccgaacaatg

SEQ ID NO: 3774290 - DNA, 25 bp, Homo sapien
tctccgaacaatgggtggttcctcc

SEQ ID NO: 3774291 - DNA, 25 bp, Homo sapien
caaatcccgtgctcttgacactgca

SEQ ID NO: 3774292 - DNA, 25 bp, Homo sapien
cacccagccagtgaggagcagtgtc

SEQ ID NO: 3774293 - DNA, 25 bp, Homo sapien
cagtgtcagcgtgagttctcgggcc

SEQ ID NO: 3774294 - DNA, 25 bp, Homo sapien
gatagtaacctactctggccagatg

SEQ ID NO: 3774295 - DNA, 25 bp, Homo sapien
tgagtcgaagtcttgattctccaga

SEQ ID NO: 3774296 - DNA, 25 bp, Homo sapien
gaagacgtaatttaacactctgcag

SEQ ID NO: 3774297 - DNA, 25 bp, Homo sapien
tccacttgaaggtatttgagtcgaa

SEQ ID NO: 3774298 - DNA, 25 bp, Homo sapien
tggtgcctccctatatcctgccaaa

SEQ ID NO: 3774299 - DNA, 25 bp, Homo sapien
caagcagcgcgtcttgatactctga

SEQ ID NO: 3774300 - DNA, 25 bp, Homo sapien
tcaagcagcgcgtcttgatactctg

SEQ ID NO: 3774301 - DNA, 25 bp, Homo sapien
aagcagcgcgtcttgatactctgag

SEQ ID NO: 3774302 - DNA, 25 bp, Homo sapien
cagccaggtcaactgctttcttaag

SEQ ID NO: 3774303 - DNA, 25 bp, Homo sapien
tgccttctgtcaaaacgatcaaatg

SEQ ID NO: 3774304 - DNA, 25 bp, Homo sapien
cagtatcacatagtgcatttcccag

SEQ ID NO: 3774305 - DNA, 25 bp, Homo sapien
taagatttgcactaatgcggttctg

SEQ ID NO: 3774306 - DNA, 25 bp, Homo sapien
agcttctcggagacacagcttcttc

SEQ ID NO: 3774307 - DNA, 25 bp, Homo sapien
tcttggccgactgcgagctatctga

SEQ ID NO: 3774308 - DNA, 25 bp, Homo sapien
tggccgactgcgagctatctgattc

SEQ ID NO: 3774309 - DNA, 25 bp, Homo sapien
cttcttggccgactgcgagctatct

SEQ ID NO: 3774310 - DNA, 25 bp, Homo sapien
ttggccgactgcgagctatctgatt

SEQ ID NO: 3774311 - DNA, 25 bp, Homo sapien
tcagcactctaactgtgagaagcac

SEQ ID NO: 3774312 - DNA, 25 bp, Homo sapien
aatttaactggagcccatgctgcgg

SEQ ID NO: 3774313 - DNA, 25 bp, Homo sapien
gaagatggaccctcctgaaaaagaa

SEQ ID NO: 3774314 - DNA, 25 bp, Homo sapien
catgctgcggagatgggatttaccc

SEQ ID NO: 3774315 - DNA, 25 bp, Homo sapien
cagcctgccaaggtagctgggatta

SEQ ID NO: 3774316 - DNA, 25 bp, Homo sapien
cgccaccacacccagctattttttt

SEQ ID NO: 3774317 - DNA, 25 bp, Homo sapien
caggcacccgccaccacacccagct

SEQ ID NO: 3774318 - DNA, 25 bp, Homo sapien
aggtgttagaggctgtgcattcaag

SEQ ID NO: 3774319 - DNA, 25 bp, Homo sapien
cttttctttgcaagcccatcgtgag

SEQ ID NO: 3774320 - DNA, 25 bp, Homo sapien
tagaaacggacaggtgttagaggct

SEQ ID NO: 3774321 - DNA, 25 bp, Homo sapien
cccatcgtgagcagaagtgttagaa

SEQ ID NO: 3774322 - DNA, 25 bp, Homo sapien
gaaatggttcaggtttgctctctcc

SEQ ID NO: 3774323 - DNA, 25 bp, Homo sapien
ggttacatggctaaatcattgtgac

SEQ ID NO: 3774324 - DNA, 25 bp, Homo sapien
gtctccagtttatgtccctccaagg

SEQ ID NO: 3774325 - DNA, 25 bp, Homo sapien
gcacatcgctgaacattattgcagg

SEQ ID NO: 3774326 - DNA, 25 bp, Homo sapien
catttactgaagtactccgtttcat

SEQ ID NO: 3774327 - DNA, 25 bp, Homo sapien
caatcacatctgaagactcaggaac

SEQ ID NO: 3774328 - DNA, 25 bp, Homo sapien
ctcaggaacatttactgaagtactc

SEQ ID NO: 3774329 - DNA, 25 bp, Homo sapien
atctgaagactcaggaacatttact

SEQ ID NO: 3774330 - DNA, 25 bp, Homo sapien
agagtctcgctttgtcaccaaagct

SEQ ID NO: 3774331 - DNA, 25 bp, Homo sapien
ggagtgcagtggcctgatcttggct

SEQ ID NO: 3774332 - DNA, 25 bp, Homo sapien
tttagtagagatggggttagtagag

SEQ ID NO: 3774333 - DNA, 25 bp, Homo sapien
cagtggcctgatcttggctcactgc

SEQ ID NO: 3774334 - DNA, 25 bp, Homo sapien
tctttggagtgaacttcccgatgct

SEQ ID NO: 3774335 - DNA, 25 bp, Homo sapien
agtcagaaagtcattttcgggggca

SEQ ID NO: 3774336 - DNA, 25 bp, Homo sapien
ttggaaatctttggagtgaacttcc

SEQ ID NO: 3774337 - DNA, 25 bp, Homo sapien
tggagtgaacttcccgatgctatga

SEQ ID NO: 3774338 - DNA, 25 bp, Homo sapien
ttcatcacagtcctacccagtcagg

SEQ ID NO: 3774339 - DNA, 25 bp, Homo sapien
taggttatacattgtcatttggtcc

SEQ ID NO: 3774340 - DNA, 25 bp, Homo sapien
cgctcgtgggaagtgatagttatat

SEQ ID NO: 3774341 - DNA, 25 bp, Homo sapien
catttggtcctggttccctttagtg

SEQ ID NO: 3774342 - DNA, 25 bp, Homo sapien
tgttagacctaaaaggagaggccac

SEQ ID NO: 3774343 - DNA, 25 bp, Homo sapien
aaaccctggcacaatccgactttgg

SEQ ID NO: 3774344 - DNA, 25 bp, Homo sapien
tatgaccaaaattaaggcccctgga

SEQ ID NO: 3774345 - DNA, 25 bp, Homo sapien
cacaggccatgggtaatggaggact

SEQ ID NO: 3774346 - DNA, 25 bp, Homo sapien
cacaaatggattcaggacgcgggtt

SEQ ID NO: 3774347 - DNA, 25 bp, Homo sapien
gaagcaatcactgggctgtcacagg

SEQ ID NO: 3774348 - DNA, 25 bp, Homo sapien
gatggttcaccacctctaagggcct

SEQ ID NO: 3774349 - DNA, 25 bp, Homo sapien
tcactactacgggattcagggccct

SEQ ID NO: 3774350 - DNA, 25 bp, Homo sapien
taactgtgcatcaaacacctattgg

SEQ ID NO: 3774351 - DNA, 25 bp, Homo sapien
cagttgacccaactggacactgggt

SEQ ID NO: 3774352 - DNA, 25 bp, Homo sapien
tgggtactgggcaagtattagaaaa

SEQ ID NO: 3774353 - DNA, 25 bp, Homo sapien
ctaccctcctgaataggcgtgagcc

SEQ ID NO: 3774354 - DNA, 25 bp, Homo sapien
tcaggccaaggctagatttccccat

SEQ ID NO: 3774355 - DNA, 25 bp, Homo sapien
attgcaagggatgtcgaatcagccc

SEQ ID NO: 3774356 - DNA, 25 bp, Homo sapien
ttcatcacgggaaagctttatcctc

SEQ ID NO: 3774357 - DNA, 25 bp, Homo sapien
tccagatggcgctgccaatgctttc

SEQ ID NO: 3774358 - DNA, 25 bp, Homo sapien
ggccccagcgctgaatgataaagca

SEQ ID NO: 3774359 - DNA, 25 bp, Homo sapien
cactgaagctgacaatgggagccgc

SEQ ID NO: 3774360 - DNA, 25 bp, Homo sapien
ccagattgattagcaaagtccagcc

SEQ ID NO: 3774361 - DNA, 25 bp, Homo sapien
tacagatggattaagcaggaaggtt

SEQ ID NO: 3774362 - DNA, 25 bp, Homo sapien
gcacacctgggttctatgagcctgg

SEQ ID NO: 3774363 - DNA, 25 bp, Homo sapien
gacacgggcttaaaactgggcacac

SEQ ID NO: 3774364 - DNA, 25 bp, Homo sapien
tccaagtggtttcgatgcacgccga

SEQ ID NO: 3774365 - DNA, 25 bp, Homo sapien
caattaaagcgactagaccagcagc

SEQ ID NO: 3774366 - DNA, 25 bp, Homo sapien
gactcgcaatttcaaaaggcactga

SEQ ID NO: 3774367 - DNA, 25 bp, Homo sapien
acaagtgggcacatgagcggattcc

SEQ ID NO: 3774368 - DNA, 25 bp, Homo sapien
tgccctgcgacacgatggagagagt

SEQ ID NO: 3774369 - DNA, 25 bp, Homo sapien
ccttctttgcgtggctcagagacag

SEQ ID NO: 3774370 - DNA, 25 bp, Homo sapien
gacacttaagtgtgaccagcaggcc

SEQ ID NO: 3774371 - DNA, 25 bp, Homo sapien
tgacattcccgacagcttgccatgg

SEQ ID NO: 3774372 - DNA, 25 bp, Homo sapien
caggccttcttgcactgcgtggttc

SEQ ID NO: 3774373 - DNA, 25 bp, Homo sapien
cactgcgtggttctactgatgcttt

SEQ ID NO: 3774374 - DNA, 25 bp, Homo sapien
ggagcagttttctcagattcgcatt

SEQ ID NO: 3774375 - DNA, 25 bp, Homo sapien
cctgggagcagttttctcagattcg

SEQ ID NO: 3774376 - DNA, 25 bp, Homo sapien
ttttctcagattcgcatttggatcc

SEQ ID NO: 3774377 - DNA, 25 bp, Homo sapien
cagttttctcagattcgcatttgga

SEQ ID NO: 3774378 - DNA, 25 bp, Homo sapien
caaagccagctttggagcagcttgc

SEQ ID NO: 3774379 - DNA, 25 bp, Homo sapien
ttggagcagcttgccctgcagtctc

SEQ ID NO: 3774380 - DNA, 25 bp, Homo sapien
gcaaagccagctttggagcagcttg

SEQ ID NO: 3774381 - DNA, 25 bp, Homo sapien
agctttggagcagcttgccctgcag

SEQ ID NO: 3774382 - DNA, 25 bp, Homo sapien
ctctggggtcccagccatgctcagg

SEQ ID NO: 3774383 - DNA, 25 bp, Homo sapien
tgctcagggggcgtccctccagctg

SEQ ID NO: 3774384 - DNA, 25 bp, Homo sapien
gctcagggggcgtccctccagctgg

SEQ ID NO: 3774385 - DNA, 25 bp, Homo sapien
gtcccagccatgctcagggggcgtc

SEQ ID NO: 3774386 - DNA, 25 bp, Homo sapien
gcgtccccgtctcggtcaggtcgat

SEQ ID NO: 3774387 - DNA, 25 bp, Homo sapien
gatgatcttccccttgctacccatg

SEQ ID NO: 3774388 - DNA, 25 bp, Homo sapien
tgttggccagcttcgaggtcttcag

SEQ ID NO: 3774389 - DNA, 25 bp, Homo sapien
ggctgcgtgctgcatggattttgga

SEQ ID NO: 3774390 - DNA, 25 bp, Homo sapien
atggaaagggaagcaggtcaaagaa

SEQ ID NO: 3774391 - DNA, 25 bp, Homo sapien
gaagcaggtcaaagaagtgacgctc

SEQ ID NO: 3774392 - DNA, 25 bp, Homo sapien
agcaggtcaaagaagtgacgctcac

SEQ ID NO: 3774393 - DNA, 25 bp, Homo sapien
ggaatggaaagggaagcaggtcaaa

SEQ ID NO: 3774394 - DNA, 25 bp, Homo sapien
ttgcggaaaggacagtcatccctcg

SEQ ID NO: 3774395 - DNA, 25 bp, Homo sapien
ttttgtttgcatcccttggcctcat

SEQ ID NO: 3774396 - DNA, 25 bp, Homo sapien
tccgcaaagggacttatctccctga

SEQ ID NO: 3774397 - DNA, 25 bp, Homo sapien
tgctcaccgtcttgacattccgcaa

SEQ ID NO: 3774398 - DNA, 25 bp, Homo sapien
tcaagagctgcatcaattgaggatg

SEQ ID NO: 3774399 - DNA, 25 bp, Homo sapien
gatgttctaagcctccgattctgta

SEQ ID NO: 3774400 - DNA, 25 bp, Homo sapien
cccagccacaaaacagggtagatgc

SEQ ID NO: 3774401 - DNA, 25 bp, Homo sapien
gctgcactgctttgtgcttaagaga

SEQ ID NO: 3774402 - DNA, 25 bp, Homo sapien
taccttcggtagtgacaatgtgttt

SEQ ID NO: 3774403 - DNA, 25 bp, Homo sapien
cacacgtgtgtccaatgtttgcttg

SEQ ID NO: 3774404 - DNA, 25 bp, Homo sapien
ggtttttataaggtatctgctccag

SEQ ID NO: 3774405 - DNA, 25 bp, Homo sapien
ttttgtgagtgtgctgaaggcaaca

SEQ ID NO: 3774406 - DNA, 25 bp, Homo sapien
taacacgatggaagtctgcgggctg

SEQ ID NO: 3774407 - DNA, 25 bp, Homo sapien
cgtgggcctttcctcgacttatgct

SEQ ID NO: 3774408 - DNA, 25 bp, Homo sapien
aaggacagcgacttccgacctcatg

SEQ ID NO: 3774409 - DNA, 25 bp, Homo sapien
cacctggtgtgaattgtcttcctcc

SEQ ID NO: 3774410 - DNA, 25 bp, Homo sapien
taactgaggttagattgatggccca

SEQ ID NO: 3774411 - DNA, 25 bp, Homo sapien
cagtgaatcactatcggactttgac

SEQ ID NO: 3774412 - DNA, 25 bp, Homo sapien
ggatctgcattagggcctggctgta

SEQ ID NO: 3774413 - DNA, 25 bp, Homo sapien
tgtaaaggccatcgtaataagaata

SEQ ID NO: 3774414 - DNA, 25 bp, Homo sapien
gggaaatcctccgtaagtgctagaa

SEQ ID NO: 3774415 - DNA, 25 bp, Homo sapien
caaaggataaaatgacggctgcggg

SEQ ID NO: 3774416 - DNA, 25 bp, Homo sapien
caagagaccgcctatgcaaaaaccg

SEQ ID NO: 3774417 - DNA, 25 bp, Homo sapien
tcccaagaactcacgcgatggaggg

SEQ ID NO: 3774418 - DNA, 25 bp, Homo sapien
tgctagaggattctcccgagggcca

SEQ ID NO: 3774419 - DNA, 25 bp, Homo sapien
tatctgtgcaaggtatggacccggg

SEQ ID NO: 3774420 - DNA, 25 bp, Homo sapien
aagggcttgccttcacgctgctaga

SEQ ID NO: 3774421 - DNA, 25 bp, Homo sapien
taaactaagagaggcagacaatggc

SEQ ID NO: 3774422 - DNA, 25 bp, Homo sapien
tctgtccagatagaactggtgttgg

SEQ ID NO: 3774423 - DNA, 25 bp, Homo sapien
tcaatgccggacatgcataccacgt

SEQ ID NO: 3774424 - DNA, 25 bp, Homo sapien
gcccagatggacttgatcaatgccg

SEQ ID NO: 3774425 - DNA, 25 bp, Homo sapien
ggtgttggcttatggccatagccca

SEQ ID NO: 3774426 - DNA, 25 bp, Homo sapien
tgcatgtaacgcactcacacgtggc

SEQ ID NO: 3774427 - DNA, 25 bp, Homo sapien
gcaccgcgaggttcacttcaaagta

SEQ ID NO: 3774428 - DNA, 25 bp, Homo sapien
taagcaaggccacaagcaataggat

SEQ ID NO: 3774429 - DNA, 25 bp, Homo sapien
tactcagagcgagtttgcctgggac

SEQ ID NO: 3774430 - DNA, 25 bp, Homo sapien
ggttttccaactgtctccattggaa

SEQ ID NO: 3774431 - DNA, 25 bp, Homo sapien
catgaacttccacggaaaacttctt

SEQ ID NO: 3774432 - DNA, 25 bp, Homo sapien
tctctgaagtacaggttttccaact

SEQ ID NO: 3774433 - DNA, 25 bp, Homo sapien
ctgcgtgggtcatgaacttccacgg

SEQ ID NO: 3774434 - DNA, 25 bp, Homo sapien
tggttaactttcgacagctggcagt

SEQ ID NO: 3774435 - DNA, 25 bp, Homo sapien
ctgctggttaactttcgacagctgg

SEQ ID NO: 3774436 - DNA, 25 bp, Homo sapien
gttaactttcgacagctggcagttt

SEQ ID NO: 3774437 - DNA, 25 bp, Homo sapien
cacacacacgcagctctccagttca

SEQ ID NO: 3774438 - DNA, 25 bp, Homo sapien
cactaatgtgtaagagccttgcaaa

SEQ ID NO: 3774439 - DNA, 25 bp, Homo sapien
cagtgtgagcctgtcaagcccattc

SEQ ID NO: 3774440 - DNA, 25 bp, Homo sapien
tctgcgtggagtgctgaactgagct

SEQ ID NO: 3774441 - DNA, 25 bp, Homo sapien
tgttggtttggtcgtggcagtcccc

SEQ ID NO: 3774442 - DNA, 25 bp, Homo sapien
tgaacaggttccacgacattggcct

SEQ ID NO: 3774443 - DNA, 25 bp, Homo sapien
ttttgtccccggctcagagtgcatt

SEQ ID NO: 3774444 - DNA, 25 bp, Homo sapien
tcagagattcaacagcgccttagcg

SEQ ID NO: 3774445 - DNA, 25 bp, Homo sapien
ggcagtacactgagcaaagcggtca

SEQ ID NO: 3774446 - DNA, 25 bp, Homo sapien
tgtacactgaacccacctaatgggt

SEQ ID NO: 3774447 - DNA, 25 bp, Homo sapien
cccacctaatgggtttgatcaaggg

SEQ ID NO: 3774448 - DNA, 25 bp, Homo sapien
gctcattgtggacttgatcctggcc

SEQ ID NO: 3774449 - DNA, 25 bp, Homo sapien
acttgatcctggccttaggtcctgg

SEQ ID NO: 3774450 - DNA, 25 bp, Homo sapien
gacgtggcatcatagagacatcccg

SEQ ID NO: 3774451 - DNA, 25 bp, Homo sapien
gaaatgtcaatactctgccctagcg

SEQ ID NO: 3774452 - DNA, 25 bp, Homo sapien
ctagcgatatctgtgcgaggcaaaa

SEQ ID NO: 3774453 - DNA, 25 bp, Homo sapien
cagggaaatacaggcatacactcac

SEQ ID NO: 3774454 - DNA, 25 bp, Homo sapien
ggtctctacagagggcaactcactt

SEQ ID NO: 3774455 - DNA, 25 bp, Homo sapien
ttgtcagatggcactcccactaggg

SEQ ID NO: 3774456 - DNA, 25 bp, Homo sapien
tcatagacacggctagtgaggagtc

SEQ ID NO: 3774457 - DNA, 25 bp, Homo sapien
actagggccgtcttctcacatctgc

SEQ ID NO: 3774458 - DNA, 25 bp, Homo sapien
tcagtcaaacgtgaggacggagaga

SEQ ID NO: 3774459 - DNA, 25 bp, Homo sapien
tcagaaagattataagcattggcaa

SEQ ID NO: 3774460 - DNA, 25 bp, Homo sapien
gatgccagggtacacctttcagaaa

SEQ ID NO: 3774461 - DNA, 25 bp, Homo sapien
gaagagacacccatgacaaggctgt

SEQ ID NO: 3774462 - DNA, 25 bp, Homo sapien
gtggctggcctcattgggaccctct

SEQ ID NO: 3774463 - DNA, 25 bp, Homo sapien
ggcctcattgggaccctctggtctt

SEQ ID NO: 3774464 - DNA, 25 bp, Homo sapien
gctggcctcattgggaccctctggt

SEQ ID NO: 3774465 - DNA, 25 bp, Homo sapien
tggtcttcccaatcactggtttgat

SEQ ID NO: 3774466 - DNA, 25 bp, Homo sapien
ttaggagggtggaaactgagagagc

SEQ ID NO: 3774467 - DNA, 25 bp, Homo sapien
ccagaccagtctcgggatggccttc

SEQ ID NO: 3774468 - DNA, 25 bp, Homo sapien
gagacgttgtttgcttttcgaggcc

SEQ ID NO: 3774469 - DNA, 25 bp, Homo sapien
ctgtgggaaccgaggaaccctggct

SEQ ID NO: 3774470 - DNA, 25 bp, Homo sapien
tggcttcccaggtccagtgaccaac

SEQ ID NO: 3774471 - DNA, 25 bp, Homo sapien
gggtcatcctagcttccgagtttcg

SEQ ID NO: 3774472 - DNA, 25 bp, Homo sapien
agtttcgtctaggttgagggcgcca

SEQ ID NO: 3774473 - DNA, 25 bp, Homo sapien
actttaccatttgttgttagtccag

SEQ ID NO: 3774474 - DNA, 25 bp, Homo sapien
ggtggctccggggtcatcctagctt

SEQ ID NO: 3774475 - DNA, 25 bp, Homo sapien
ctgactttcccccatgaatactcat

SEQ ID NO: 3774476 - DNA, 25 bp, Homo sapien
gagtctgactttcccccatgaatac

SEQ ID NO: 3774477 - DNA, 25 bp, Homo sapien
gtctgactttcccccatgaatactc

SEQ ID NO: 3774478 - DNA, 25 bp, Homo sapien
cgagtctgactttcccccatgaata

SEQ ID NO: 3774479 - DNA, 25 bp, Homo sapien
gccattttattggagaggatttcat

SEQ ID NO: 3774480 - DNA, 25 bp, Homo sapien
gggccattttattggagaggatttc

SEQ ID NO: 3774481 - DNA, 25 bp, Homo sapien
atgggggccattttattggagagga

SEQ ID NO: 3774482 - DNA, 25 bp, Homo sapien
tgggggccattttattggagaggat

SEQ ID NO: 3774483 - DNA, 25 bp, Homo sapien
caggcgtatatcaccacgcccagct

SEQ ID NO: 3774484 - DNA, 25 bp, Homo sapien
aggtgtgagccaccgtgcccagccg

SEQ ID NO: 3774485 - DNA, 25 bp, Homo sapien
tacaggtgtgagccaccgtgcccag

SEQ ID NO: 3774486 - DNA, 25 bp, Homo sapien
ttacaggcgtatatcaccacgccca

SEQ ID NO: 3774487 - DNA, 25 bp, Homo sapien
aagccaaaatccagtctgcagggtg

SEQ ID NO: 3774488 - DNA, 25 bp, Homo sapien
gtaccctgcaggcaatgaagctgtg

SEQ ID NO: 3774489 - DNA, 25 bp, Homo sapien
cagggtgtccccacgtgttcagctg

SEQ ID NO: 3774490 - DNA, 25 bp, Homo sapien
gaactcttctgaacacgcacaaaag

SEQ ID NO: 3774491 - DNA, 25 bp, Homo sapien
tcggagccaccggtgaggtcccttg

SEQ ID NO: 3774492 - DNA, 25 bp, Homo sapien
gtgaggtcccttgcgttttactcca

SEQ ID NO: 3774493 - DNA, 25 bp, Homo sapien
agcagagtgtggggtttaaatgttc

SEQ ID NO: 3774494 - DNA, 25 bp, Homo sapien
agccaccggtgaggtcccttgcgtt

SEQ ID NO: 3774495 - DNA, 25 bp, Homo sapien
tatggaaacacttaagtggattctc

SEQ ID NO: 3774496 - DNA, 25 bp, Homo sapien
ccaatgctgttggagctgtgcaggc

SEQ ID NO: 3774497 - DNA, 25 bp, Homo sapien
taagtggattctcaaggcggctgct

SEQ ID NO: 3774498 - DNA, 25 bp, Homo sapien
ctgagcccctgtgagtgtgccgacg

SEQ ID NO: 3774499 - DNA, 25 bp, Homo sapien
cagtttccggagagtgcttctacga

SEQ ID NO: 3774500 - DNA, 25 bp, Homo sapien
tcagcttcaaatagaccgcggctaa

SEQ ID NO: 3774501 - DNA, 25 bp, Homo sapien
ttctcaacatcttggttccccttct

SEQ ID NO: 3774502 - DNA, 25 bp, Homo sapien
tctacgacaatggaaatctgacact

SEQ ID NO: 3774503 - DNA, 25 bp, Homo sapien
taaagtgactcctacgcctgttcct

SEQ ID NO: 3774504 - DNA, 25 bp, Homo sapien
tctggatctgagaggagttaaaccc

SEQ ID NO: 3774505 - DNA, 25 bp, Homo sapien
cagactggcttcaggattcaagaga

SEQ ID NO: 3774506 - DNA, 25 bp, Homo sapien
cagccctgcccgaaattaaggaaca

SEQ ID NO: 3774507 - DNA, 25 bp, Homo sapien
cactttatcatggtagtcatactgg

SEQ ID NO: 3774508 - DNA, 25 bp, Homo sapien
actttatcatggtagtcatactgga

SEQ ID NO: 3774509 - DNA, 25 bp, Homo sapien
cataatagtgaaccccgtaggttgg

SEQ ID NO: 3774510 - DNA, 25 bp, Homo sapien
ttgggagagactccacgatgctcat

SEQ ID NO: 3774511 - DNA, 25 bp, Homo sapien
gagagactccacgatgctcatgtag

SEQ ID NO: 3774512 - DNA, 25 bp, Homo sapien
ttcactgcataatagtgaaccccgt

SEQ ID NO: 3774513 - DNA, 25 bp, Homo sapien
tgtctgaccgttcagtttcttgtag

SEQ ID NO: 3774514 - DNA, 25 bp, Homo sapien
gattgcttgacctcttgtctgaccg

SEQ ID NO: 3774515 - DNA, 25 bp, Homo sapien
tcttgtagtgctcaatgactctgtc

SEQ ID NO: 3774516 - DNA, 25 bp, Homo sapien
tttacgattgcttgacctcttgtct

SEQ ID NO: 3774517 - DNA, 25 bp, Homo sapien
aagcttcctgccagtaagatatttc

SEQ ID NO: 3774518 - DNA, 25 bp, Homo sapien
tctctaggtcaacagccaagcttcc

SEQ ID NO: 3774519 - DNA, 25 bp, Homo sapien
cagccaagcttcctgccagtaagat

SEQ ID NO: 3774520 - DNA, 25 bp, Homo sapien
tggagtctctaggtcaacagccaag

SEQ ID NO: 3774521 - DNA, 25 bp, Homo sapien
aagaagctccaaggcaccaacagct

SEQ ID NO: 3774522 - DNA, 25 bp, Homo sapien
ataagaagctccaaggcaccaacag

SEQ ID NO: 3774523 - DNA, 25 bp, Homo sapien
cataagaagctccaaggcaccaaca

SEQ ID NO: 3774524 - DNA, 25 bp, Homo sapien
ctcataagaagctccaaggcaccaa

SEQ ID NO: 3774525 - DNA, 25 bp, Homo sapien
tataacaagaggttagctggctcct

SEQ ID NO: 3774526 - DNA, 25 bp, Homo sapien
tgtggagtcgacacctcggtctccc

SEQ ID NO: 3774527 - DNA, 25 bp, Homo sapien
ccatgaggtaggagatacggccgct

SEQ ID NO: 3774528 - DNA, 25 bp, Homo sapien
tggcaagcccgcctcctgagaagtg

SEQ ID NO: 3774529 - DNA, 25 bp, Homo sapien
gttcagcggctccacttccttccat

SEQ ID NO: 3774530 - DNA, 25 bp, Homo sapien
taatcctgcagaactgcgtcaggag

SEQ ID NO: 3774531 - DNA, 25 bp, Homo sapien
ctgcagaactgcgtcaggaggttca

SEQ ID NO: 3774532 - DNA, 25 bp, Homo sapien
tgcgtcaggaggttcagcggctcca

SEQ ID NO: 3774533 - DNA, 25 bp, Homo sapien
taaatcaacagctgccttggcgtgt

SEQ ID NO: 3774534 - DNA, 25 bp, Homo sapien
aaatcaacagctgccttggcgtgtt

SEQ ID NO: 3774535 - DNA, 25 bp, Homo sapien
catggggttttgtgaagtcgactcc

SEQ ID NO: 3774536 - DNA, 25 bp, Homo sapien
tcagtgtagatagggacctttttcc

SEQ ID NO: 3774537 - DNA, 25 bp, Homo sapien
gaagtcgactcctagatccagggtc

SEQ ID NO: 3774538 - DNA, 25 bp, Homo sapien
tagatccagggtcaagcaactcagt

SEQ ID NO: 3774539 - DNA, 25 bp, Homo sapien
aggaaagcccccgaagaatggtgag

SEQ ID NO: 3774540 - DNA, 25 bp, Homo sapien
agcctgcaggttgcccatccaatgt

SEQ ID NO: 3774541 - DNA, 25 bp, Homo sapien
catccaatgtgcgaactccagcggg

SEQ ID NO: 3774542 - DNA, 25 bp, Homo sapien
gctccttagttcaggaatgatcagg

SEQ ID NO: 3774543 - DNA, 25 bp, Homo sapien
ccattggatttttggaagtgaacag

SEQ ID NO: 3774544 - DNA, 25 bp, Homo sapien
tgggtaatagggtccatgaacaagg

SEQ ID NO: 3774545 - DNA, 25 bp, Homo sapien
cccagtggcacaaggaattagggag

SEQ ID NO: 3774546 - DNA, 25 bp, Homo sapien
gggttcggattgcaagtctcgacat

SEQ ID NO: 3774547 - DNA, 25 bp, Homo sapien
caaggaaacgggaccatcatttttg

SEQ ID NO: 3774548 - DNA, 25 bp, Homo sapien
tggcagcttcttcaagtcactcctc

SEQ ID NO: 3774549 - DNA, 25 bp, Homo sapien
ggcagcttcttcaagtcactcctca

SEQ ID NO: 3774550 - DNA, 25 bp, Homo sapien
gcactctctgataccacttgggccg

SEQ ID NO: 3774551 - DNA, 25 bp, Homo sapien
tgtcttgtctgagagaccccacatc

SEQ ID NO: 3774552 - DNA, 25 bp, Homo sapien
tctgagaaaataatcgcactctctg

SEQ ID NO: 3774553 - DNA, 25 bp, Homo sapien
gagagaatgcccagaaacgcactca

SEQ ID NO: 3774554 - DNA, 25 bp, Homo sapien
cagcttcgaggttgcttatattaac

SEQ ID NO: 3774555 - DNA, 25 bp, Homo sapien
ctgggctatgttagcagcttcgagg

SEQ ID NO: 3774556 - DNA, 25 bp, Homo sapien
tattaaccaaggcaaatactggcca

SEQ ID NO: 3774557 - DNA, 25 bp, Homo sapien
tatattaaccaaggcaaatactggc

SEQ ID NO: 3774558 - DNA, 25 bp, Homo sapien
tcatttttagcaatgtttttcattg

SEQ ID NO: 3774559 - DNA, 25 bp, Homo sapien
aaggaatgaaacaggtataactgtt

SEQ ID NO: 3774560 - DNA, 25 bp, Homo sapien
tataactgtttcatttttagcaatg

SEQ ID NO: 3774561 - DNA, 25 bp, Homo sapien
aaaggaatgaaacaggtataactgt

SEQ ID NO: 3774562 - DNA, 25 bp, Homo sapien
ttcctcaggtgcttggatggtggac

SEQ ID NO: 3774563 - DNA, 25 bp, Homo sapien
tccagcacctatgctgctaactgga

SEQ ID NO: 3774564 - DNA, 25 bp, Homo sapien
cgcagccatagaggggagttcctca

SEQ ID NO: 3774565 - DNA, 25 bp, Homo sapien
caggtgcttggatggtggacactcc

SEQ ID NO: 3774566 - DNA, 25 bp, Homo sapien
tgatgaatttccggatcttctctcc

SEQ ID NO: 3774567 - DNA, 25 bp, Homo sapien
atgaatttccggatcttctctccct

SEQ ID NO: 3774568 - DNA, 25 bp, Homo sapien
acactgatgaatttccggatcttct

SEQ ID NO: 3774569 - DNA, 25 bp, Homo sapien
actgatgaatttccggatcttctct

SEQ ID NO: 3774570 - DNA, 25 bp, Homo sapien
ggcaaacaagttgccctgatgacag

SEQ ID NO: 3774571 - DNA, 25 bp, Homo sapien
agtttgggtttcactcacacccatc

SEQ ID NO: 3774572 - DNA, 25 bp, Homo sapien
ctggcttcaatgtgaaaggcacttt

SEQ ID NO: 3774573 - DNA, 25 bp, Homo sapien
caactttattggatgaaaccatgag

SEQ ID NO: 3774574 - DNA, 25 bp, Homo sapien
tattactccacaattttaggccact

SEQ ID NO: 3774575 - DNA, 25 bp, Homo sapien
ttagccactgaaccgaatgtggtca

SEQ ID NO: 3774576 - DNA, 25 bp, Homo sapien
tttcgacgtgttgggtatcttccca

SEQ ID NO: 3774577 - DNA, 25 bp, Homo sapien
tgaagatggctttactagcatgggc

SEQ ID NO: 3774578 - DNA, 25 bp, Homo sapien
taaaatataggaagctaattcaaac

SEQ ID NO: 3774579 - DNA, 25 bp, Homo sapien
cttcgctgtcaacgtcaataagctc

SEQ ID NO: 3774580 - DNA, 25 bp, Homo sapien
aattcaaacaccacttcgctgtcaa

SEQ ID NO: 3774581 - DNA, 25 bp, Homo sapien
tataggaagctaattcaaacaccac

SEQ ID NO: 3774582 - DNA, 25 bp, Homo sapien
taagaggcagactaggccccagcat

SEQ ID NO: 3774583 - DNA, 25 bp, Homo sapien
aattaagaggcagactaggccccag

SEQ ID NO: 3774584 - DNA, 25 bp, Homo sapien
agagaaattaagaggcagactaggc

SEQ ID NO: 3774585 - DNA, 25 bp, Homo sapien
gaaattaagaggcagactaggcccc

SEQ ID NO: 3774586 - DNA, 25 bp, Homo sapien
gcagtagtgtgatctggactcttgg

SEQ ID NO: 3774587 - DNA, 25 bp, Homo sapien
gcaacctccgcctttggggctcagg

SEQ ID NO: 3774588 - DNA, 25 bp, Homo sapien
agtagtgtgatctggactcttggac

SEQ ID NO: 3774589 - DNA, 25 bp, Homo sapien
acctccgcctttggggctcaggcaa

SEQ ID NO: 3774590 - DNA, 25 bp, Homo sapien
cccaagaaggttgtggttagagcct

SEQ ID NO: 3774591 - DNA, 25 bp, Homo sapien
caacgagctaatcacatgcctggca

SEQ ID NO: 3774592 - DNA, 25 bp, Homo sapien
gcctggcatgggactaagaactttg

SEQ ID NO: 3774593 - DNA, 25 bp, Homo sapien
cttggagacgttacaggaggtgccc

SEQ ID NO: 3774594 - DNA, 25 bp, Homo sapien
gagatggcatctcaccatgttggtc

SEQ ID NO: 3774595 - DNA, 25 bp, Homo sapien
agatggcatctcaccatgttggtca

SEQ ID NO: 3774596 - DNA, 25 bp, Homo sapien
aattctcctgagtgagcctcccgag

SEQ ID NO: 3774597 - DNA, 25 bp, Homo sapien
gtagagatggcatctcaccatgttg

SEQ ID NO: 3774598 - DNA, 25 bp, Homo sapien
ctgaatttgatcattaccaggccct

SEQ ID NO: 3774599 - DNA, 25 bp, Homo sapien
aaagtacctggaactgcattatggt

SEQ ID NO: 3774600 - DNA, 25 bp, Homo sapien
ccaaaatgctgtcctcttagtgtgc

SEQ ID NO: 3774601 - DNA, 25 bp, Homo sapien
accaggccctccgttattctgaaca

SEQ ID NO: 3774602 - DNA, 25 bp, Homo sapien
tggtgcctataattccacctgctca

SEQ ID NO: 3774603 - DNA, 25 bp, Homo sapien
tgtgatggctggtgcctataattcc

SEQ ID NO: 3774604 - DNA, 25 bp, Homo sapien
gatggctggtgcctataattccacc

SEQ ID NO: 3774605 - DNA, 25 bp, Homo sapien
tggctggtgcctataattccacctg

SEQ ID NO: 3774606 - DNA, 25 bp, Homo sapien
tgagatacacctcacacccattggg

SEQ ID NO: 3774607 - DNA, 25 bp, Homo sapien
ggctgtcgctctcaattaggaatca

SEQ ID NO: 3774608 - DNA, 25 bp, Homo sapien
gaacaactgggaatagggtctcgag

SEQ ID NO: 3774609 - DNA, 25 bp, Homo sapien
tcactagtctacagggaaacgcaaa

SEQ ID NO: 3774610 - DNA, 25 bp, Homo sapien
caaatgatactttcaggtttcagag

SEQ ID NO: 3774611 - DNA, 25 bp, Homo sapien
tgacttctcctaatcaataaaatgg

SEQ ID NO: 3774612 - DNA, 25 bp, Homo sapien
cgcgccgggtcaggaatcacattat

SEQ ID NO: 3774613 - DNA, 25 bp, Homo sapien
ttattaaatggtgccgttagcttca

SEQ ID NO: 3774614 - DNA, 25 bp, Homo sapien
gtagatgcaggacttcgcgttcaga

SEQ ID NO: 3774615 - DNA, 25 bp, Homo sapien
ttcgcgttcagaaagaaaagctcaa

SEQ ID NO: 3774616 - DNA, 25 bp, Homo sapien
tcaatggtagcattatccttcaggt

SEQ ID NO: 3774617 - DNA, 25 bp, Homo sapien
tggtagcattatccttcaggtatga

SEQ ID NO: 3774618 - DNA, 25 bp, Homo sapien
tttgagatgaaagctggcattcccc

SEQ ID NO: 3774619 - DNA, 25 bp, Homo sapien
aaaatggtgcgtgaaccacagaaac

SEQ ID NO: 3774620 - DNA, 25 bp, Homo sapien
aagagaaaaatggtgcgtgaaccac

SEQ ID NO: 3774621 - DNA, 25 bp, Homo sapien
aaaataaagtgctctcttgagctac

SEQ ID NO: 3774622 - DNA, 25 bp, Homo sapien
tagaaaggaaagctcaatggtagcg

SEQ ID NO: 3774623 - DNA, 25 bp, Homo sapien
aggaaagctcaatggtagcgttatc

SEQ ID NO: 3774624 - DNA, 25 bp, Homo sapien
actggagatacaggacctcatgtgt

SEQ ID NO: 3774625 - DNA, 25 bp, Homo sapien
caggacctcatgtgtctttttagaa

SEQ ID NO: 3774626 - DNA, 25 bp, Homo sapien
tttaagatgcaggaataacagcgag

SEQ ID NO: 3774627 - DNA, 25 bp, Homo sapien
ggtcaaggttgactcccaagtctct

SEQ ID NO: 3774628 - DNA, 25 bp, Homo sapien
catttggatgcagaaagacgacgac

SEQ ID NO: 3774629 - DNA, 25 bp, Homo sapien
aacagcgagtagtgactgagggaac

SEQ ID NO: 3774630 - DNA, 25 bp, Homo sapien
caggagagtgtagtgccacagagcc

SEQ ID NO: 3774631 - DNA, 25 bp, Homo sapien
agcagagcagggaacctgccccgag

SEQ ID NO: 3774632 - DNA, 25 bp, Homo sapien
agagaagacaagcaagacacgacct

SEQ ID NO: 3774633 - DNA, 25 bp, Homo sapien
cctcgtggacaccagggctcaaggg

SEQ ID NO: 3774634 - DNA, 25 bp, Homo sapien
gcaccagaagctggacgaccacaga

SEQ ID NO: 3774635 - DNA, 25 bp, Homo sapien
accacagaatgaggaacgagaggcc

SEQ ID NO: 3774636 - DNA, 25 bp, Homo sapien
ctaggggcgagagacctccagtgac

SEQ ID NO: 3774637 - DNA, 25 bp, Homo sapien
gagcatgttcgaatgagcccagagc

SEQ ID NO: 3774638 - DNA, 25 bp, Homo sapien
gtagcagagggcactggctggagga

SEQ ID NO: 3774639 - DNA, 25 bp, Homo sapien
ggggtagcagagggcactggctgga

SEQ ID NO: 3774640 - DNA, 25 bp, Homo sapien
gagcagagcagaaggggtagcagag

SEQ ID NO: 3774641 - DNA, 25 bp, Homo sapien
tgtgagcagagcagaaggggtagca

SEQ ID NO: 3774642 - DNA, 25 bp, Homo sapien
caagatatccagtgtatcccttcag

SEQ ID NO: 3774643 - DNA, 25 bp, Homo sapien
cctcctccagtgtggtatttccaag

SEQ ID NO: 3774644 - DNA, 25 bp, Homo sapien
tgtggtatttccaagatatccagtg

SEQ ID NO: 3774645 - DNA, 25 bp, Homo sapien
atcccttcagagtggcagcctgcca

SEQ ID NO: 3774646 - DNA, 25 bp, Homo sapien
ggagctctgggttgggtagtgctgg

SEQ ID NO: 3774647 - DNA, 25 bp, Homo sapien
gctctgggttgggtagtgctggaac

SEQ ID NO: 3774648 - DNA, 25 bp, Homo sapien
ctgtgactgtgattgtccctgtgca

SEQ ID NO: 3774649 - DNA, 25 bp, Homo sapien
tctgggttgggtagtgctggaacca

SEQ ID NO: 3774650 - DNA, 25 bp, Homo sapien
gcacttgtcctgaacaccatctttg

SEQ ID NO: 3774651 - DNA, 25 bp, Homo sapien
gtggtgtgcacttgtcctgaacacc

SEQ ID NO: 3774652 - DNA, 25 bp, Homo sapien
tgtcctgaacaccatctttgcagga

SEQ ID NO: 3774653 - DNA, 25 bp, Homo sapien
tgtgcacttgtcctgaacaccatct

SEQ ID NO: 3774654 - DNA, 25 bp, Homo sapien
tagggaagtcatgttccaatactct

SEQ ID NO: 3774655 - DNA, 25 bp, Homo sapien
tactcttcgatctagctgaagccag

SEQ ID NO: 3774656 - DNA, 25 bp, Homo sapien
ttttagggaagtcatgttccaatac

SEQ ID NO: 3774657 - DNA, 25 bp, Homo sapien
gttccaatactcttcgatctagctg

SEQ ID NO: 3774658 - DNA, 25 bp, Homo sapien
tgtgaatcacttcctaatctacaaa

SEQ ID NO: 3774659 - DNA, 25 bp, Homo sapien
tagcgcttctacaccacgttttgtg

SEQ ID NO: 3774660 - DNA, 25 bp, Homo sapien
aattttcttttctagcgcttctaca

SEQ ID NO: 3774661 - DNA, 25 bp, Homo sapien
tacaccacgttttgtgaatcacttc

SEQ ID NO: 3774662 - DNA, 25 bp, Homo sapien
tcaggaacaatcatgctgctggtaa

SEQ ID NO: 3774663 - DNA, 25 bp, Homo sapien
gcacttgtacggcacttcacagttt

SEQ ID NO: 3774664 - DNA, 25 bp, Homo sapien
taagagtatcttgcacttgtacggc

SEQ ID NO: 3774665 - DNA, 25 bp, Homo sapien
tgctgctggtaagagtatcttgcac

SEQ ID NO: 3774666 - DNA, 25 bp, Homo sapien
aagatgtggctttgctcctgctgcc

SEQ ID NO: 3774667 - DNA, 25 bp, Homo sapien
aggctccaggacgaggggcccacct

SEQ ID NO: 3774668 - DNA, 25 bp, Homo sapien
tgcaattcctcctgcccaccgacgg

SEQ ID NO: 3774669 - DNA, 25 bp, Homo sapien
cccagctttcttgaggaagatgtgg

SEQ ID NO: 3774670 - DNA, 25 bp, Homo sapien
cacaaggtcaagaagctccttggcc

SEQ ID NO: 3774671 - DNA, 25 bp, Homo sapien
cagattgaagtgagaagccacaagg

SEQ ID NO: 3774672 - DNA, 25 bp, Homo sapien
catctgtgaatgctattccaaagta

SEQ ID NO: 3774673 - DNA, 25 bp, Homo sapien
gtttcatctgtgaatgctattccaa

SEQ ID NO: 3774674 - DNA, 25 bp, Homo sapien
ggaggtctgatagtttcaaagccca

SEQ ID NO: 3774675 - DNA, 25 bp, Homo sapien
tcaaagcccacatgtgtaatccctc

SEQ ID NO: 3774676 - DNA, 25 bp, Homo sapien
gcctaaggatcgtgcctcaagggcc

SEQ ID NO: 3774677 - DNA, 25 bp, Homo sapien
cagcatttctgtactggatgatgaa

SEQ ID NO: 3774678 - DNA, 25 bp, Homo sapien
gaaccccagtcactagaagctggaa

SEQ ID NO: 3774679 - DNA, 25 bp, Homo sapien
tccagccatcaggtttgtggttatt

SEQ ID NO: 3774680 - DNA, 25 bp, Homo sapien
gggaagcgattgtcccctccagctg

SEQ ID NO: 3774681 - DNA, 25 bp, Homo sapien
tgatgaagacacaggcgaggaaccc

SEQ ID NO: 3774682 - DNA, 25 bp, Homo sapien
tttggacacgcatggccggatggca

SEQ ID NO: 3774683 - DNA, 25 bp, Homo sapien
tgactgtgaaacgtggcccgtctgc

SEQ ID NO: 3774684 - DNA, 25 bp, Homo sapien
tgtgctttgggaggaaccacggtct

SEQ ID NO: 3774685 - DNA, 25 bp, Homo sapien
tcttcgccaagggtgttttttgaca

SEQ ID NO: 3774686 - DNA, 25 bp, Homo sapien
cagcggctgctcattattcccgggg

SEQ ID NO: 3774687 - DNA, 25 bp, Homo sapien
tccttgtcgccctgctgcttagctg

SEQ ID NO: 3774688 - DNA, 25 bp, Homo sapien
tgcggggggtgcatgaggtgactct

SEQ ID NO: 3774689 - DNA, 25 bp, Homo sapien
tgggcggcgactcccctccttgtcg

SEQ ID NO: 3774690 - DNA, 25 bp, Homo sapien
catttgaatgatgcccaatgggaag

SEQ ID NO: 3774691 - DNA, 25 bp, Homo sapien
atgggaaggctttgacaggcgtaca

SEQ ID NO: 3774692 - DNA, 25 bp, Homo sapien
taatgattgctcctctagaaatgca

SEQ ID NO: 3774693 - DNA, 25 bp, Homo sapien
gcctgctctattcatgatccccggg

SEQ ID NO: 3774694 - DNA, 25 bp, Homo sapien
gagaagagtgtctgtcaaccaagaa

SEQ ID NO: 3774695 - DNA, 25 bp, Homo sapien
gctcgatgttcaaggaagagcagag

SEQ ID NO: 3774696 - DNA, 25 bp, Homo sapien
gagcagagaagagtgtctgtcaacc

SEQ ID NO: 3774697 - DNA, 25 bp, Homo sapien
tattccatttgctcgatgttcaagg

SEQ ID NO: 3774698 - DNA, 25 bp, Homo sapien
ggctggcattcgaagactgtgtctc

SEQ ID NO: 3774699 - DNA, 25 bp, Homo sapien
gctggcattcgaagactgtgtctct

SEQ ID NO: 3774700 - DNA, 25 bp, Homo sapien
ggaaggtgtggctcgtatgacatct

SEQ ID NO: 3774701 - DNA, 25 bp, Homo sapien
tccagtgtaacggacggaaggtgtg

SEQ ID NO: 3774702 - DNA, 25 bp, Homo sapien
tcttcctttctcttagccttacatg

SEQ ID NO: 3774703 - DNA, 25 bp, Homo sapien
acctggggatttgactgtgtgcttc

SEQ ID NO: 3774704 - DNA, 25 bp, Homo sapien
ttgcatgcagtgcagaagacctctg

SEQ ID NO: 3774705 - DNA, 25 bp, Homo sapien
tcctgtcgctggcacctgatcggat

SEQ ID NO: 3774706 - DNA, 25 bp, Homo sapien
gaccctcgtgcttcgtccagagtga

SEQ ID NO: 3774707 - DNA, 25 bp, Homo sapien
tgaagtgcctttcccgtgtgtccac

SEQ ID NO: 3774708 - DNA, 25 bp, Homo sapien
taccagcatcaaggattgtccactg

SEQ ID NO: 3774709 - DNA, 25 bp, Homo sapien
caggaggtctgtgcggaaatgtcac

SEQ ID NO: 3774710 - DNA, 25 bp, Homo sapien
agtgatttcagccttgcgagcacat

SEQ ID NO: 3774711 - DNA, 25 bp, Homo sapien
tcgggattccgacttgattggtctt

SEQ ID NO: 3774712 - DNA, 25 bp, Homo sapien
atcagcggggcagtttaaaaagcca

SEQ ID NO: 3774713 - DNA, 25 bp, Homo sapien
ttgcgagcacattagaatcagcggg

SEQ ID NO: 3774714 - DNA, 25 bp, Homo sapien
aattgatgcgtctgaaatttctggt

SEQ ID NO: 3774715 - DNA, 25 bp, Homo sapien
actgagaccagcctgtgttgccatg

SEQ ID NO: 3774716 - DNA, 25 bp, Homo sapien
gtcatcttcagcattacaaagcacg

SEQ ID NO: 3774717 - DNA, 25 bp, Homo sapien
agcacgtcaggagaacaaggcacgg

SEQ ID NO: 3774718 - DNA, 25 bp, Homo sapien
tttttatgtcatttccttgatcttg

SEQ ID NO: 3774719 - DNA, 25 bp, Homo sapien
acagcccaaagcatttttatgtcat

SEQ ID NO: 3774720 - DNA, 25 bp, Homo sapien
catttccttgatcttggtagttttc

SEQ ID NO: 3774721 - DNA, 25 bp, Homo sapien
cacagcccaaagcatttttatgtca

SEQ ID NO: 3774722 - DNA, 25 bp, Homo sapien
ctatggtgacctgcccaatgaagac

SEQ ID NO: 3774723 - DNA, 25 bp, Homo sapien
tggctactatggtgacctgcccaat

SEQ ID NO: 3774724 - DNA, 25 bp, Homo sapien
tctggtggctactatggtgacctgc

SEQ ID NO: 3774725 - DNA, 25 bp, Homo sapien
tactatggtgacctgcccaatgaag

SEQ ID NO: 3774726 - DNA, 25 bp, Homo sapien
gtctgctgagatccccgcagagcct

SEQ ID NO: 3774727 - DNA, 25 bp, Homo sapien
gatttgcaaacccacaggagtctgc

SEQ ID NO: 3774728 - DNA, 25 bp, Homo sapien
gcagagatttgcaaacccacaggag

SEQ ID NO: 3774729 - DNA, 25 bp, Homo sapien
tatcatctggtttctacctaaagca

SEQ ID NO: 3774730 - DNA, 25 bp, Homo sapien
caatagtatgggctgttgatggctc

SEQ ID NO: 3774731 - DNA, 25 bp, Homo sapien
taaacagctcacagtcatatcatgg

SEQ ID NO: 3774732 - DNA, 25 bp, Homo sapien
actcgagagtcaaagagagcaatcc

SEQ ID NO: 3774733 - DNA, 25 bp, Homo sapien
gatacactgtctctcgtaaacagct

SEQ ID NO: 3774734 - DNA, 25 bp, Homo sapien
tctacactggggcatgtattggaga

SEQ ID NO: 3774735 - DNA, 25 bp, Homo sapien
gatgtcattgatgggcacagaaaaa

SEQ ID NO: 3774736 - DNA, 25 bp, Homo sapien
acttaaggatgtcattgatgggcac

SEQ ID NO: 3774737 - DNA, 25 bp, Homo sapien
aaacaggcaagacttaaggatgtca

SEQ ID NO: 3774738 - DNA, 25 bp, Homo sapien
aatgatgggcttcggttgccatgag

SEQ ID NO: 3774739 - DNA, 25 bp, Homo sapien
agtaggaatgatgggcttcggttgc

SEQ ID NO: 3774740 - DNA, 25 bp, Homo sapien
caccgaggtgttcagtcacaaagac

SEQ ID NO: 3774741 - DNA, 25 bp, Homo sapien
ctgccaccgaggtgttcagtcacaa

SEQ ID NO: 3774742 - DNA, 25 bp, Homo sapien
gcagctgagatttccccagaccgtt

SEQ ID NO: 3774743 - DNA, 25 bp, Homo sapien
cactggatgggacaagttgcagcag

SEQ ID NO: 3774744 - DNA, 25 bp, Homo sapien
aacagagattcaagggcgataggga

SEQ ID NO: 3774745 - DNA, 25 bp, Homo sapien
tggatccccttacaagaaaggacag

SEQ ID NO: 3774746 - DNA, 25 bp, Homo sapien
tggatgccgtcagctttctcgccca

SEQ ID NO: 3774747 - DNA, 25 bp, Homo sapien
tgtctgaagatctgaggtatagcct

SEQ ID NO: 3774748 - DNA, 25 bp, Homo sapien
tgcatcctcctggcaagaggcaaat

SEQ ID NO: 3774749 - DNA, 25 bp, Homo sapien
gcctttgatgagtatgctatcctca

SEQ ID NO: 3774750 - DNA, 25 bp, Homo sapien
tactaggagttccagcttcctgtca

SEQ ID NO: 3774751 - DNA, 25 bp, Homo sapien
ctgtactaggagttccagcttcctg

SEQ ID NO: 3774752 - DNA, 25 bp, Homo sapien
tgtactaggagttccagcttcctgt

SEQ ID NO: 3774753 - DNA, 25 bp, Homo sapien
gtactaggagttccagcttcctgtc

SEQ ID NO: 3774754 - DNA, 25 bp, Homo sapien
aagatgtacttgacatcggcggccc

SEQ ID NO: 3774755 - DNA, 25 bp, Homo sapien
ggtttggaactgctatcctgatgag

SEQ ID NO: 3774756 - DNA, 25 bp, Homo sapien
cctgttaggtttggaactgctatcc

SEQ ID NO: 3774757 - DNA, 25 bp, Homo sapien
gctatcctgatgagaatgagcgtct

SEQ ID NO: 3774758 - DNA, 25 bp, Homo sapien
tctcaaggcctgttaggtttggaac

SEQ ID NO: 3774759 - DNA, 25 bp, Homo sapien
atcatcatgtttttgaaggtacagc

SEQ ID NO: 3774760 - DNA, 25 bp, Homo sapien
gtacagctttcttttgacagcactg

SEQ ID NO: 3774761 - DNA, 25 bp, Homo sapien
tttgaaggtacagctttcttttgac

SEQ ID NO: 3774762 - DNA, 25 bp, Homo sapien
catgtttttgaaggtacagctttct

SEQ ID NO: 3774763 - DNA, 25 bp, Homo sapien
aggatgtcggatgcgggacagcagc

SEQ ID NO: 3774764 - DNA, 25 bp, Homo sapien
aggacaccctgaggatgtcggatgc

SEQ ID NO: 3774765 - DNA, 25 bp, Homo sapien
cgctgacagcacgtcttccccgagc

SEQ ID NO: 3774766 - DNA, 25 bp, Homo sapien
tgacagcacgtcttccccgagcaca

SEQ ID NO: 3774767 - DNA, 25 bp, Homo sapien
gctgttgtgtggctcagaaggaaat

SEQ ID NO: 3774768 - DNA, 25 bp, Homo sapien
ttgtgtggctcagaaggaaattcca

SEQ ID NO: 3774769 - DNA, 25 bp, Homo sapien
aggctgttgtgtggctcagaaggaa

SEQ ID NO: 3774770 - DNA, 25 bp, Homo sapien
tgttgtgtggctcagaaggaaattc

SEQ ID NO: 3774771 - DNA, 25 bp, Homo sapien
gaggtcccagttccatgaggtcaaa

SEQ ID NO: 3774772 - DNA, 25 bp, Homo sapien
gaaacagggacgctcgagaactaga

SEQ ID NO: 3774773 - DNA, 25 bp, Homo sapien
caaacctctagtggcatcggagcaa

SEQ ID NO: 3774774 - DNA, 25 bp, Homo sapien
cacggagcagtccatctgggctaga

SEQ ID NO: 3774775 - DNA, 25 bp, Homo sapien
catgagcagcgagttaatgtagtga

SEQ ID NO: 3774776 - DNA, 25 bp, Homo sapien
gtagccacggattggcaaataattg

SEQ ID NO: 3774777 - DNA, 25 bp, Homo sapien
tgcaagcaaaacatacgcagtagcc

SEQ ID NO: 3774778 - DNA, 25 bp, Homo sapien
ggagtgctcaacatgagcagcgagt

SEQ ID NO: 3774779 - DNA, 25 bp, Homo sapien
gagaaacggacagcgcagaatcaga

SEQ ID NO: 3774780 - DNA, 25 bp, Homo sapien
gcgcagaatcagaaatgggtaaggt

SEQ ID NO: 3774781 - DNA, 25 bp, Homo sapien
cagagagaaacggacagcgcagaat

SEQ ID NO: 3774782 - DNA, 25 bp, Homo sapien
ggggtgaaccgataaaaatgcagtg

SEQ ID NO: 3774783 - DNA, 25 bp, Homo sapien
tagcctggcaagtcccctcaatatg

SEQ ID NO: 3774784 - DNA, 25 bp, Homo sapien
gatggtagtctcacccaacacttac

SEQ ID NO: 3774785 - DNA, 25 bp, Homo sapien
caatatgagatctcctgaaccttcc

SEQ ID NO: 3774786 - DNA, 25 bp, Homo sapien
gaactacaagcatgctgcacgcacg

SEQ ID NO: 3774787 - DNA, 25 bp, Homo sapien
cggtgctttcccacagatcagtgat

SEQ ID NO: 3774788 - DNA, 25 bp, Homo sapien
tcagcagtttgtcccgggctctctg

SEQ ID NO: 3774789 - DNA, 25 bp, Homo sapien
gtttgtcccgggctctctgagcggt

SEQ ID NO: 3774790 - DNA, 25 bp, Homo sapien
gctctctgagcggtgctttcccaca

SEQ ID NO: 3774791 - DNA, 25 bp, Homo sapien
tgtattcccgatagaacaggctgtc

SEQ ID NO: 3774792 - DNA, 25 bp, Homo sapien
gggcattggttctcgtttctcagca

SEQ ID NO: 3774793 - DNA, 25 bp, Homo sapien
tgtctattaagaagccgtcgccaga

SEQ ID NO: 3774794 - DNA, 25 bp, Homo sapien
tattagcacagccatcccttggaaa

SEQ ID NO: 3774795 - DNA, 25 bp, Homo sapien
aacttctggctgcaagcggctggta

SEQ ID NO: 3774796 - DNA, 25 bp, Homo sapien
ggcgaaggcccttggcctactaggc

SEQ ID NO: 3774797 - DNA, 25 bp, Homo sapien
tattttttgcgcttccaagggatcc

SEQ ID NO: 3774798 - DNA, 25 bp, Homo sapien
caagggatccgaggaacttctggct

SEQ ID NO: 3774799 - DNA, 25 bp, Homo sapien
catggttgatctagtacttggtaga

SEQ ID NO: 3774800 - DNA, 25 bp, Homo sapien
tacttggtagatctagaaacatcat

SEQ ID NO: 3774801 - DNA, 25 bp, Homo sapien
gatctagtacttggtagatctagaa

SEQ ID NO: 3774802 - DNA, 25 bp, Homo sapien
tagtacttggtagatctagaaacat

SEQ ID NO: 3774803 - DNA, 25 bp, Homo sapien
ggtgacagcgacagcttgtctctta

SEQ ID NO: 3774804 - DNA, 25 bp, Homo sapien
gattgcctccctatctaaaatgaaa

SEQ ID NO: 3774805 - DNA, 25 bp, Homo sapien
gtgtcgctccacttctgaaatatct

SEQ ID NO: 3774806 - DNA, 25 bp, Homo sapien
aaatgaaatataatcgtgtcgctcc

SEQ ID NO: 3774807 - DNA, 25 bp, Homo sapien
agtgacaacactgccgaaaaatgat

SEQ ID NO: 3774808 - DNA, 25 bp, Homo sapien
gtgacaacactgccgaaaaatgatg

SEQ ID NO: 3774809 - DNA, 25 bp, Homo sapien
cccttgcagccctacgtcactcagc

SEQ ID NO: 3774810 - DNA, 25 bp, Homo sapien
ggcccttgcagccctacgtcactca

SEQ ID NO: 3774811 - DNA, 25 bp, Homo sapien
aaacatctactgagctcctgcaaca

SEQ ID NO: 3774812 - DNA, 25 bp, Homo sapien
tcctgaggcacgtgatccgccttca

SEQ ID NO: 3774813 - DNA, 25 bp, Homo sapien
taagcatcctgctttcattaggcca

SEQ ID NO: 3774814 - DNA, 25 bp, Homo sapien
gccattagggtctttggtgctaaag

SEQ ID NO: 3774815 - DNA, 25 bp, Homo sapien
tgctcaagcgccataagttttaaac

SEQ ID NO: 3774816 - DNA, 25 bp, Homo sapien
taaacaagccagttgtccgtgactt

SEQ ID NO: 3774817 - DNA, 25 bp, Homo sapien
catgccccgccagtcaatactgtta

SEQ ID NO: 3774818 - DNA, 25 bp, Homo sapien
ggaaggtatcgtatggtccaatttc

SEQ ID NO: 3774819 - DNA, 25 bp, Homo sapien
tctctttctttcttgacagattctc

SEQ ID NO: 3774820 - DNA, 25 bp, Homo sapien
tggagtggagtgtgcaatcatgact

SEQ ID NO: 3774821 - DNA, 25 bp, Homo sapien
ggagtggagtgtgcaatcatgactc

SEQ ID NO: 3774822 - DNA, 25 bp, Homo sapien
ctttctttcttgacagattctcact

SEQ ID NO: 3774823 - DNA, 25 bp, Homo sapien
tgcagccagactggtccagatagtt

SEQ ID NO: 3774824 - DNA, 25 bp, Homo sapien
caaggaggaaattcgtggctgcaga

SEQ ID NO: 3774825 - DNA, 25 bp, Homo sapien
tcatcgtgtgtggttcaaggaggaa

SEQ ID NO: 3774826 - DNA, 25 bp, Homo sapien
gaaaacatttgtcagcctgccctgg

SEQ ID NO: 3774827 - DNA, 25 bp, Homo sapien
tagcagccagtctggagaacttgcc

SEQ ID NO: 3774828 - DNA, 25 bp, Homo sapien
gaggtacagcgtgctacctggacac

SEQ ID NO: 3774829 - DNA, 25 bp, Homo sapien
tctgcatggaatgcttagcagccag

SEQ ID NO: 3774830 - DNA, 25 bp, Homo sapien
gaacttgccgtgtgttctccaggct

SEQ ID NO: 3774831 - DNA, 25 bp, Homo sapien
agtcccatgcaaagagtgtcactgc

SEQ ID NO: 3774832 - DNA, 25 bp, Homo sapien
tgcaaagagtgtcactgccagacgt

SEQ ID NO: 3774833 - DNA, 25 bp, Homo sapien
tcactgccagacgttcccgaagggt

SEQ ID NO: 3774834 - DNA, 25 bp, Homo sapien
agtgtcactgccagacgttcccgaa

SEQ ID NO: 3774835 - DNA, 25 bp, Homo sapien
cagatgtgtataatccaggaaagct

SEQ ID NO: 3774836 - DNA, 25 bp, Homo sapien
ctggtttcatgcagcacggtagtca

SEQ ID NO: 3774837 - DNA, 25 bp, Homo sapien
taaagagcttcaactggactcctgg

SEQ ID NO: 3774838 - DNA, 25 bp, Homo sapien
ggcacacaagtaaccataagacaga

SEQ ID NO: 3774839 - DNA, 25 bp, Homo sapien
gattggctagttcctggctctttag

SEQ ID NO: 3774840 - DNA, 25 bp, Homo sapien
caatgcttgacatgcttccctggca

SEQ ID NO: 3774841 - DNA, 25 bp, Homo sapien
gaagcattttagcttggccagcata

SEQ ID NO: 3774842 - DNA, 25 bp, Homo sapien
ccctggcataatgagtgggatttat

SEQ ID NO: 3774843 - DNA, 25 bp, Homo sapien
ggacaatcaagggatgccactggtt

SEQ ID NO: 3774844 - DNA, 25 bp, Homo sapien
gatgcttccctgaacgcaagaatct

SEQ ID NO: 3774845 - DNA, 25 bp, Homo sapien
gctggactctttaggcagatgcttc

SEQ ID NO: 3774846 - DNA, 25 bp, Homo sapien
tcagaggcacatgcaagttcttcct

SEQ ID NO: 3774847 - DNA, 25 bp, Homo sapien
ttctgttcttttactcgccttctcc

SEQ ID NO: 3774848 - DNA, 25 bp, Homo sapien
tggtccactgaagaccagcatggcc

SEQ ID NO: 3774849 - DNA, 25 bp, Homo sapien
tctgttcttttactcgccttctcct

SEQ ID NO: 3774850 - DNA, 25 bp, Homo sapien
cacttctgttcttttactcgccttc

SEQ ID NO: 3774851 - DNA, 25 bp, Homo sapien
aatgcatgaaataagatgttagtca

SEQ ID NO: 3774852 - DNA, 25 bp, Homo sapien
tggaatgcatgaaataagatgttag

SEQ ID NO: 3774853 - DNA, 25 bp, Homo sapien
tctttggaatgcatgaaataagatg

SEQ ID NO: 3774854 - DNA, 25 bp, Homo sapien
ctttggaatgcatgaaataagatgt

SEQ ID NO: 3774855 - DNA, 25 bp, Homo sapien
ttcattagccacattactgacttac

SEQ ID NO: 3774856 - DNA, 25 bp, Homo sapien
cacttcttatgacagatcacaacat

SEQ ID NO: 3774857 - DNA, 25 bp, Homo sapien
caacacttcttatgacagatcacaa

SEQ ID NO: 3774858 - DNA, 25 bp, Homo sapien
ttactgacttacttcacaactcttt

SEQ ID NO: 3774859 - DNA, 25 bp, Homo sapien
catgttaggaattctcctccacaca

SEQ ID NO: 3774860 - DNA, 25 bp, Homo sapien
cttagcccatgttaggaattctcct

SEQ ID NO: 3774861 - DNA, 25 bp, Homo sapien
cccatgttaggaattctcctccaca

SEQ ID NO: 3774862 - DNA, 25 bp, Homo sapien
tagcccatgttaggaattctcctcc

SEQ ID NO: 3774863 - DNA, 25 bp, Homo sapien
aaggaaggagagaggtagtgcgcca

SEQ ID NO: 3774864 - DNA, 25 bp, Homo sapien
aggaaggagagaggtagtgcgccat

SEQ ID NO: 3774865 - DNA, 25 bp, Homo sapien
tggaagctcactttacaaagaatca

SEQ ID NO: 3774866 - DNA, 25 bp, Homo sapien
taaagtttaagaactcagcatcatc

SEQ ID NO: 3774867 - DNA, 25 bp, Homo sapien
catcatcatcatactggaagctcac

SEQ ID NO: 3774868 - DNA, 25 bp, Homo sapien
catcatactggaagctcactttaca

SEQ ID NO: 3774869 - DNA, 25 bp, Homo sapien
gcagcagccggtacttatcccttct

SEQ ID NO: 3774870 - DNA, 25 bp, Homo sapien
tgagctgcagtactagtcctcaggc

SEQ ID NO: 3774871 - DNA, 25 bp, Homo sapien
agctgcagtactagtcctcaggcct

SEQ ID NO: 3774872 - DNA, 25 bp, Homo sapien
ggcctttgcatatggctagaaacca

SEQ ID NO: 3774873 - DNA, 25 bp, Homo sapien
cctttgcatatggctagaaaccaac

SEQ ID NO: 3774874 - DNA, 25 bp, Homo sapien
tatttgccaacgtggagccagtgcc

SEQ ID NO: 3774875 - DNA, 25 bp, Homo sapien
ggcgcctgatggcaagcttatttgc

SEQ ID NO: 3774876 - DNA, 25 bp, Homo sapien
tagcgtattaaaggccctaaagaga

SEQ ID NO: 3774877 - DNA, 25 bp, Homo sapien
tgtaataccagaagtggcgcctgat

SEQ ID NO: 3774878 - DNA, 25 bp, Homo sapien
gcagattcccaggagtacttcaata

SEQ ID NO: 3774879 - DNA, 25 bp, Homo sapien
tatgcatgtgaaaaacacccaggtg

SEQ ID NO: 3774880 - DNA, 25 bp, Homo sapien
catctctacagttgttgcaaaggga

SEQ ID NO: 3774881 - DNA, 25 bp, Homo sapien
caaagggatcttcctagaaaggcag

SEQ ID NO: 3774882 - DNA, 25 bp, Homo sapien
taaccagtctagacaattataacca

SEQ ID NO: 3774883 - DNA, 25 bp, Homo sapien
agacaattataaccaatctagtttc

SEQ ID NO: 3774884 - DNA, 25 bp, Homo sapien
tacaattataaccagtctagacaat

SEQ ID NO: 3774885 - DNA, 25 bp, Homo sapien
ctttttacaattataaccagtctag

SEQ ID NO: 3774886 - DNA, 25 bp, Homo sapien
gtagaatccatcagtccaagactgg

SEQ ID NO: 3774887 - DNA, 25 bp, Homo sapien
gtttggttgggtcatggtagaatcc

SEQ ID NO: 3774888 - DNA, 25 bp, Homo sapien
aatagcaaattgagaatcaaagccc

SEQ ID NO: 3774889 - DNA, 25 bp, Homo sapien
tccacatgtggaaacgtttggttgg

SEQ ID NO: 3774890 - DNA, 25 bp, Homo sapien
aagtcaggttccaactccacggtgg

SEQ ID NO: 3774891 - DNA, 25 bp, Homo sapien
tagacggccctggagatgcaccatg

SEQ ID NO: 3774892 - DNA, 25 bp, Homo sapien
tcctcagcgcccgacaagtcaggtt

SEQ ID NO: 3774893 - DNA, 25 bp, Homo sapien
cagaactcgaatgttcctcacttgg

SEQ ID NO: 3774894 - DNA, 25 bp, Homo sapien
taaacctcagtgtgcagataacggc

SEQ ID NO: 3774895 - DNA, 25 bp, Homo sapien
ccatgagtttccacaaggtcaagca

SEQ ID NO: 3774896 - DNA, 25 bp, Homo sapien
gaacttagggaagacctcagaccca

SEQ ID NO: 3774897 - DNA, 25 bp, Homo sapien
gaagcaccaccgagtgttgggatcc

SEQ ID NO: 3774898 - DNA, 25 bp, Homo sapien
gagtggccctatagttaagagttgc

SEQ ID NO: 3774899 - DNA, 25 bp, Homo sapien
tacagctcagttgttccagagatgg

SEQ ID NO: 3774900 - DNA, 25 bp, Homo sapien
gggagacagcctattgatgatgaga

SEQ ID NO: 3774901 - DNA, 25 bp, Homo sapien
tgaaatttgatgtaactgggcatcc

SEQ ID NO: 3774902 - DNA, 25 bp, Homo sapien
ggctgacaagccctaggacggtgac

SEQ ID NO: 3774903 - DNA, 25 bp, Homo sapien
tctgcgagtcaacctgatcaccctg

SEQ ID NO: 3774904 - DNA, 25 bp, Homo sapien
gagcagaacaatgggagccccagca

SEQ ID NO: 3774905 - DNA, 25 bp, Homo sapien
tccagatcggaaactcagaaacgtg

SEQ ID NO: 3774906 - DNA, 25 bp, Homo sapien
tcggagccagaatccctaatggaat

SEQ ID NO: 3774907 - DNA, 25 bp, Homo sapien
actgtgcttggcgtgcctgggcttc

SEQ ID NO: 3774908 - DNA, 25 bp, Homo sapien
tgctctctgaaagccgcggttttcc

SEQ ID NO: 3774909 - DNA, 25 bp, Homo sapien
catgaacaccgcaatcagatacgag

SEQ ID NO: 3774910 - DNA, 25 bp, Homo sapien
catttttgatacacctgttgggaca

SEQ ID NO: 3774911 - DNA, 25 bp, Homo sapien
gatacacctgttgggacaatgcgtt

SEQ ID NO: 3774912 - DNA, 25 bp, Homo sapien
ttgaagcatttttgatacacctgtt

SEQ ID NO: 3774913 - DNA, 25 bp, Homo sapien
ttttgatacacctgttgggacaatg

SEQ ID NO: 3774914 - DNA, 25 bp, Homo sapien
tcaatgggctacgtttccattgtgt

SEQ ID NO: 3774915 - DNA, 25 bp, Homo sapien
ttttactctcaatgggctacgtttc

SEQ ID NO: 3774916 - DNA, 25 bp, Homo sapien
ctattttttactctcaatgggctac

SEQ ID NO: 3774917 - DNA, 25 bp, Homo sapien
actctcaatgggctacgtttccatt

SEQ ID NO: 3774918 - DNA, 25 bp, Homo sapien
cgggttcagcgattctgctgtctca

SEQ ID NO: 3774919 - DNA, 25 bp, Homo sapien
gggttcagcgattctgctgtctcag

SEQ ID NO: 3774920 - DNA, 25 bp, Homo sapien
tcccgggttcagcgattctgctgtc

SEQ ID NO: 3774921 - DNA, 25 bp, Homo sapien
gatggagccttgcttcgttgcccag

SEQ ID NO: 3774922 - DNA, 25 bp, Homo sapien
taagggcactaactgtctcccaaag

SEQ ID NO: 3774923 - DNA, 25 bp, Homo sapien
ttaaggatggcatcttagcctctcc

SEQ ID NO: 3774924 - DNA, 25 bp, Homo sapien
aatgctctgctacctgacaacccag

SEQ ID NO: 3774925 - DNA, 25 bp, Homo sapien
ctaatattaaggcagattcggtgcc

SEQ ID NO: 3774926 - DNA, 25 bp, Homo sapien
aaaagacctaagggacaattgcagc

SEQ ID NO: 3774927 - DNA, 25 bp, Homo sapien
ttctgacatagtggctgaagggagg

SEQ ID NO: 3774928 - DNA, 25 bp, Homo sapien
aagacctaagggacaattgcagctc

SEQ ID NO: 3774929 - DNA, 25 bp, Homo sapien
gacctaagggacaattgcagctcca

SEQ ID NO: 3774930 - DNA, 25 bp, Homo sapien
tcttggccttagttgtaataatctt

SEQ ID NO: 3774931 - DNA, 25 bp, Homo sapien
tggccttagttgtaataatcttcac

SEQ ID NO: 3774932 - DNA, 25 bp, Homo sapien
cttggccttagttgtaataatcttc

SEQ ID NO: 3774933 - DNA, 25 bp, Homo sapien
ttggccttagttgtaataatcttca

SEQ ID NO: 3774934 - DNA, 25 bp, Homo sapien
tgtactgtacttagaaacacatggc

SEQ ID NO: 3774935 - DNA, 25 bp, Homo sapien
tgtccaggactgaccttagggtgag

SEQ ID NO: 3774936 - DNA, 25 bp, Homo sapien
caggcatctgatccatgtactgtac

SEQ ID NO: 3774937 - DNA, 25 bp, Homo sapien
ccatgagcattaggttcaggatgtc

SEQ ID NO: 3774938 - DNA, 25 bp, Homo sapien
gcagcacacactcaacgatagagac

SEQ ID NO: 3774939 - DNA, 25 bp, Homo sapien
gatagagactctgttgtattccgaa

SEQ ID NO: 3774940 - DNA, 25 bp, Homo sapien
aatatccactgaaagccgtctgctg

SEQ ID NO: 3774941 - DNA, 25 bp, Homo sapien
tctgtctgaacagttcttggctgcc

SEQ ID NO: 3774942 - DNA, 25 bp, Homo sapien
attgtcgaacctgggcacctaaggg

SEQ ID NO: 3774943 - DNA, 25 bp, Homo sapien
ttttcaccacctcttaatggcatat

SEQ ID NO: 3774944 - DNA, 25 bp, Homo sapien
acagaagcaattgtcgaacctgggc

SEQ ID NO: 3774945 - DNA, 25 bp, Homo sapien
cctctagcagttggatacagaagca

SEQ ID NO: 3774946 - DNA, 25 bp, Homo sapien
ttccaaggatgtgcagcgcgggagg

SEQ ID NO: 3774947 - DNA, 25 bp, Homo sapien
ttcacggggaagacccaatgttcca

SEQ ID NO: 3774948 - DNA, 25 bp, Homo sapien
ccaaggatgtgcagcgcgggagggc

SEQ ID NO: 3774949 - DNA, 25 bp, Homo sapien
gaagacccaatgttccaaggatgtg

SEQ ID NO: 3774950 - DNA, 25 bp, Homo sapien
tactttgtgggtgtagggattctcc

SEQ ID NO: 3774951 - DNA, 25 bp, Homo sapien
ttggactacaccttaactgaagacg

SEQ ID NO: 3774952 - DNA, 25 bp, Homo sapien
gatgctgcggatagctgatctaaca

SEQ ID NO: 3774953 - DNA, 25 bp, Homo sapien
ggacttgccacaattcaaacatggg

SEQ ID NO: 3774954 - DNA, 25 bp, Homo sapien
cctttcaacgctgcgccttctcaga

SEQ ID NO: 3774955 - DNA, 25 bp, Homo sapien
tttgggatctattcggagccactgc

SEQ ID NO: 3774956 - DNA, 25 bp, Homo sapien
tctttgggatctattcggagccact

SEQ ID NO: 3774957 - DNA, 25 bp, Homo sapien
aaagtctttgggatctattcggagc

SEQ ID NO: 3774958 - DNA, 25 bp, Homo sapien
ttctgcaacttcagcgcccacgaag

SEQ ID NO: 3774959 - DNA, 25 bp, Homo sapien
agctggctcagcgagactgccgtgt

SEQ ID NO: 3774960 - DNA, 25 bp, Homo sapien
gagagaaggagcctccctcaaaaat

SEQ ID NO: 3774961 - DNA, 25 bp, Homo sapien
ccgcttgtgggcaagtgacgcgtct

SEQ ID NO: 3774962 - DNA, 25 bp, Homo sapien
ccttctgaacggaggaacaatatct

SEQ ID NO: 3774963 - DNA, 25 bp, Homo sapien
cagacagaacacatcagggacctct

SEQ ID NO: 3774964 - DNA, 25 bp, Homo sapien
aaactgttgcaatcacatggttcag

SEQ ID NO: 3774965 - DNA, 25 bp, Homo sapien
taaacgcacgggtattactcactgt

SEQ ID NO: 3774966 - DNA, 25 bp, Homo sapien
tctactcctcctgaaatcggcttat

SEQ ID NO: 3774967 - DNA, 25 bp, Homo sapien
tacgtgtgccagtaaacaagaagaa

SEQ ID NO: 3774968 - DNA, 25 bp, Homo sapien
tggatggcataaatggtctcaaacg

SEQ ID NO: 3774969 - DNA, 25 bp, Homo sapien
tacacggctgtgtcgaagcagattc

SEQ ID NO: 3774970 - DNA, 25 bp, Homo sapien
gcttaaacacccattagtcccagag

SEQ ID NO: 3774971 - DNA, 25 bp, Homo sapien
catcttgcagggtattaaaagcggg

SEQ ID NO: 3774972 - DNA, 25 bp, Homo sapien
tcagtgtcgtttgagggctccaggc

SEQ ID NO: 3774973 - DNA, 25 bp, Homo sapien
aaaagcgggctctttctcagtgtcg

SEQ ID NO: 3774974 - DNA, 25 bp, Homo sapien
agctggctgtgtagattggctttca

SEQ ID NO: 3774975 - DNA, 25 bp, Homo sapien
tgcaaagcccgttttcatgtgctgt

SEQ ID NO: 3774976 - DNA, 25 bp, Homo sapien
catgtgctgtcagtcgtggatggat

SEQ ID NO: 3774977 - DNA, 25 bp, Homo sapien
ccatgtttatgaagtgcagtttcac

SEQ ID NO: 3774978 - DNA, 25 bp, Homo sapien
gcttggactgatctcccgtcttgtg

SEQ ID NO: 3774979 - DNA, 25 bp, Homo sapien
gcatgtacatttgcaggtgcgagct

SEQ ID NO: 3774980 - DNA, 25 bp, Homo sapien
tgcgagcttgtgcacgcgaacatgt

SEQ ID NO: 3774981 - DNA, 25 bp, Homo sapien
tgaagagccattcgtgtgcttggac

SEQ ID NO: 3774982 - DNA, 25 bp, Homo sapien
aggactcagtgatgtactataaaga

SEQ ID NO: 3774983 - DNA, 25 bp, Homo sapien
aaggactcagtgatgtactataaag

SEQ ID NO: 3774984 - DNA, 25 bp, Homo sapien
ggactcagtgatgtactataaagaa

SEQ ID NO: 3774985 - DNA, 25 bp, Homo sapien
ttctccagctgcgagacgcagactg

SEQ ID NO: 3774986 - DNA, 25 bp, Homo sapien
ggatcgagaagacctttcagctgcc

SEQ ID NO: 3774987 - DNA, 25 bp, Homo sapien
gcagcgcagtgttgttcttggatcg

SEQ ID NO: 3774988 - DNA, 25 bp, Homo sapien
tggaaaggtaacagctcacagccgc

SEQ ID NO: 3774989 - DNA, 25 bp, Homo sapien
aagtcttccagcttggcagccaaag

SEQ ID NO: 3774990 - DNA, 25 bp, Homo sapien
gcaggtgctccagtgtcagctcaaa

SEQ ID NO: 3774991 - DNA, 25 bp, Homo sapien
tcagctcaaagtcttccagcttggc

SEQ ID NO: 3774992 - DNA, 25 bp, Homo sapien
aaacacatccatgagcaggtgctcc

SEQ ID NO: 3774993 - DNA, 25 bp, Homo sapien
tttcctgtctaacctagagcagtgg

SEQ ID NO: 3774994 - DNA, 25 bp, Homo sapien
tcatgcctgggtcagtaaacctaag

SEQ ID NO: 3774995 - DNA, 25 bp, Homo sapien
cacacagtggatcagaatcagtcag

SEQ ID NO: 3774996 - DNA, 25 bp, Homo sapien
cccacagatccagtttacatgaaaa

SEQ ID NO: 3774997 - DNA, 25 bp, Homo sapien
gatgcggtgttctgtgccgtgtcca

SEQ ID NO: 3774998 - DNA, 25 bp, Homo sapien
gctgcctgggaactacgttgccacc

SEQ ID NO: 3774999 - DNA, 25 bp, Homo sapien
aagacgcccaccctttggtggatgc

SEQ ID NO: 3775000 - DNA, 25 bp, Homo sapien
tgctggcggacaccaccctaagacg

SEQ ID NO: 3775001 - DNA, 25 bp, Homo sapien
ccacactcgagttccagaacttaga

SEQ ID NO: 3775002 - DNA, 25 bp, Homo sapien
cactcgagttccagaacttagaaga

SEQ ID NO: 3775003 - DNA, 25 bp, Homo sapien
actcgagttccagaacttagaagaa

SEQ ID NO: 3775004 - DNA, 25 bp, Homo sapien
cacactcgagttccagaacttagaa

SEQ ID NO: 3775005 - DNA, 25 bp, Homo sapien
ggcctgtttgctgaaggccatgcat

SEQ ID NO: 3775006 - DNA, 25 bp, Homo sapien
ttggcctgtttgctgaaggccatgc

SEQ ID NO: 3775007 - DNA, 25 bp, Homo sapien
tggcctgtttgctgaaggccatgca

SEQ ID NO: 3775008 - DNA, 25 bp, Homo sapien
gtgctctggttttaatcggctggta

SEQ ID NO: 3775009 - DNA, 25 bp, Homo sapien
cccaaacagtaacacggttgctatg

SEQ ID NO: 3775010 - DNA, 25 bp, Homo sapien
tcggctggtacctcacagtgaatct

SEQ ID NO: 3775011 - DNA, 25 bp, Homo sapien
caaacagtaacacggttgctatggt

SEQ ID NO: 3775012 - DNA, 25 bp, Homo sapien
attcttgtaaatttctctcctcctc

SEQ ID NO: 3775013 - DNA, 25 bp, Homo sapien
ctcctgttcccagaacccaaagaag

SEQ ID NO: 3775014 - DNA, 25 bp, Homo sapien
ctgttcccagaacccaaagaagagc

SEQ ID NO: 3775015 - DNA, 25 bp, Homo sapien
atattcttgtaaatttctctcctcc

SEQ ID NO: 3775016 - DNA, 25 bp, Homo sapien
gctggaaatgaaatgctcagaacac

SEQ ID NO: 3775017 - DNA, 25 bp, Homo sapien
tgagcgcaaggataagcctgccact

SEQ ID NO: 3775018 - DNA, 25 bp, Homo sapien
cgttggtgcccacttggattgcagg

SEQ ID NO: 3775019 - DNA, 25 bp, Homo sapien
gaaacctccatggttgacactggca

SEQ ID NO: 3775020 - DNA, 25 bp, Homo sapien
catctgccgcggctctttcatgtgc

SEQ ID NO: 3775021 - DNA, 25 bp, Homo sapien
ggctctttcatgtgcaaatagtcag

SEQ ID NO: 3775022 - DNA, 25 bp, Homo sapien
gccgcggctctttcatgtgcaaata

SEQ ID NO: 3775023 - DNA, 25 bp, Homo sapien
tcatgtgcaaatagtcaggcatttc

SEQ ID NO: 3775024 - DNA, 25 bp, Homo sapien
tatgtgtcactaaaaaaccgcccca

SEQ ID NO: 3775025 - DNA, 25 bp, Homo sapien
ggatttagctaactcccatctggta

SEQ ID NO: 3775026 - DNA, 25 bp, Homo sapien
tgagacttctgagccctactgaacg

SEQ ID NO: 3775027 - DNA, 25 bp, Homo sapien
caaagagctgagatactgaggtcct

SEQ ID NO: 3775028 - DNA, 25 bp, Homo sapien
cagagaggaccaggtatgtgtgcag

SEQ ID NO: 3775029 - DNA, 25 bp, Homo sapien
gactgggcttgggtgttcttggtgg

SEQ ID NO: 3775030 - DNA, 25 bp, Homo sapien
ggcttaggatatgggtgctgatggg

SEQ ID NO: 3775031 - DNA, 25 bp, Homo sapien
ttcttggtggcttaggatatgggtg

SEQ ID NO: 3775032 - DNA, 25 bp, Homo sapien
ccttggatgaagtaggagcctgcag

SEQ ID NO: 3775033 - DNA, 25 bp, Homo sapien
tgagggtggactcttaggtggatcc

SEQ ID NO: 3775034 - DNA, 25 bp, Homo sapien
acttgatgagaacactgggtgaggg

SEQ ID NO: 3775035 - DNA, 25 bp, Homo sapien
ccaagtaagtgttgaatgtagaaga

SEQ ID NO: 3775036 - DNA, 25 bp, Homo sapien
cgctgccggactcaaattccacaga

SEQ ID NO: 3775037 - DNA, 25 bp, Homo sapien
ggaactcgttgatttgtcaaactta

SEQ ID NO: 3775038 - DNA, 25 bp, Homo sapien
atttttgagtcgctgccggactcaa

SEQ ID NO: 3775039 - DNA, 25 bp, Homo sapien
aggtgtccaggaactcgttgatttg

SEQ ID NO: 3775040 - DNA, 25 bp, Homo sapien
ccactgaggagactcatacaggaca

SEQ ID NO: 3775041 - DNA, 25 bp, Homo sapien
caggacaggagggaattttaagagg

SEQ ID NO: 3775042 - DNA, 25 bp, Homo sapien
gaatggagacggactccactgagga

SEQ ID NO: 3775043 - DNA, 25 bp, Homo sapien
ctgaggagactcatacaggacagga

SEQ ID NO: 3775044 - DNA, 25 bp, Homo sapien
tctagatactaccagagcttgtaat

SEQ ID NO: 3775045 - DNA, 25 bp, Homo sapien
ccaggaatttactcttagatggttt

SEQ ID NO: 3775046 - DNA, 25 bp, Homo sapien
tagatggtttaatctagatactacc

SEQ ID NO: 3775047 - DNA, 25 bp, Homo sapien
taccagagcttgtaatacagaaaat

SEQ ID NO: 3775048 - DNA, 25 bp, Homo sapien
ctgccttagtgtcttccggctgtgt

SEQ ID NO: 3775049 - DNA, 25 bp, Homo sapien
tctgtggagactggtacatctgcct

SEQ ID NO: 3775050 - DNA, 25 bp, Homo sapien
ccatattctggaggtgtcctgcgaa

SEQ ID NO: 3775051 - DNA, 25 bp, Homo sapien
ccggctgtgtgatgcttgtgttaag

SEQ ID NO: 3775052 - DNA, 25 bp, Homo sapien
gggtctgggtgcctgcaaccactgg

SEQ ID NO: 3775053 - DNA, 25 bp, Homo sapien
ggtgcctgcaaccactgggggtctt

SEQ ID NO: 3775054 - DNA, 25 bp, Homo sapien
gtgcctgcaaccactgggggtcttg

SEQ ID NO: 3775055 - DNA, 25 bp, Homo sapien
tgggtgcctgcaaccactgggggtc

SEQ ID NO: 3775056 - DNA, 25 bp, Homo sapien
tggaaccttccgtggagactgaatc

SEQ ID NO: 3775057 - DNA, 25 bp, Homo sapien
ggtctccaattgtgacaccgcagag

SEQ ID NO: 3775058 - DNA, 25 bp, Homo sapien
cactgagaggttgggtaaccagctc

SEQ ID NO: 3775059 - DNA, 25 bp, Homo sapien
cagtctgtattcacacctaagggca

SEQ ID NO: 3775060 - DNA, 25 bp, Homo sapien
ccagaaggggcgaagataagcgcag

SEQ ID NO: 3775061 - DNA, 25 bp, Homo sapien
gttggcccagtgatgataaaatcag

SEQ ID NO: 3775062 - DNA, 25 bp, Homo sapien
gagtcctcattgaggaggaagccca

SEQ ID NO: 3775063 - DNA, 25 bp, Homo sapien
gcagagcctggaagatgagtcctca

SEQ ID NO: 3775064 - DNA, 25 bp, Homo sapien
aggcccctggcgctggttctctctg

SEQ ID NO: 3775065 - DNA, 25 bp, Homo sapien
cgctggttctctctggaggttgagt

SEQ ID NO: 3775066 - DNA, 25 bp, Homo sapien
gcgtgaccaccgttggctgacttcc

SEQ ID NO: 3775067 - DNA, 25 bp, Homo sapien
ccagcgtgaccaccgttggctgact

SEQ ID NO: 3775068 - DNA, 25 bp, Homo sapien
ccgaccgctgcacgggagagaatat

SEQ ID NO: 3775069 - DNA, 25 bp, Homo sapien
tctgaggaggaacggaacaagagtc

SEQ ID NO: 3775070 - DNA, 25 bp, Homo sapien
cagggatctagaaataaccgtaagg

SEQ ID NO: 3775071 - DNA, 25 bp, Homo sapien
agacactcttgctcttgcctgaggt

SEQ ID NO: 3775072 - DNA, 25 bp, Homo sapien
gaaacagcactttgcaggcacctga

SEQ ID NO: 3775073 - DNA, 25 bp, Homo sapien
tacttcatgtagatctgtgccacac

SEQ ID NO: 3775074 - DNA, 25 bp, Homo sapien
caaccagcccgtgggcatcatggaa

SEQ ID NO: 3775075 - DNA, 25 bp, Homo sapien
aatgtagtacagtcaaggcagacgc

SEQ ID NO: 3775076 - DNA, 25 bp, Homo sapien
ttgccctccagcctgcacgacacag

SEQ ID NO: 3775077 - DNA, 25 bp, Homo sapien
cgggaagcagagattggagattgca

SEQ ID NO: 3775078 - DNA, 25 bp, Homo sapien
gatccaagatggcaccattgccctc

SEQ ID NO: 3775079 - DNA, 25 bp, Homo sapien
gaagcagagattggagattgcagtg

SEQ ID NO: 3775080 - DNA, 25 bp, Homo sapien
ccctttcagagagtttcagaatcct

SEQ ID NO: 3775081 - DNA, 25 bp, Homo sapien
tctgggtgtctaggcttaagcccct

SEQ ID NO: 3775082 - DNA, 25 bp, Homo sapien
tcagcctgcaaaatcccatttaagc

SEQ ID NO: 3775083 - DNA, 25 bp, Homo sapien
tcagaatcctgcagatccgctggta

SEQ ID NO: 3775084 - DNA, 25 bp, Homo sapien
tagcacatgctgaggggttcagcac

SEQ ID NO: 3775085 - DNA, 25 bp, Homo sapien
ccatgccggccctctgcatactgaa

SEQ ID NO: 3775086 - DNA, 25 bp, Homo sapien
ggttcagcactggatccatgccggc

SEQ ID NO: 3775087 - DNA, 25 bp, Homo sapien
tgaatgccaaagagcaagttgtgag

SEQ ID NO: 3775088 - DNA, 25 bp, Homo sapien
gagttaccgccaacctttgcttgcc

SEQ ID NO: 3775089 - DNA, 25 bp, Homo sapien
cagatacggagagttaccgccaacc

SEQ ID NO: 3775090 - DNA, 25 bp, Homo sapien
aatgaaaaaggcttgacagctgaga

SEQ ID NO: 3775091 - DNA, 25 bp, Homo sapien
gaaaaaggcttgacagctgagatgg

SEQ ID NO: 3775092 - DNA, 25 bp, Homo sapien
aggggtggaggaagccttacaatca

SEQ ID NO: 3775093 - DNA, 25 bp, Homo sapien
tggaggaagccttacaatcacaggg

SEQ ID NO: 3775094 - DNA, 25 bp, Homo sapien
ggaggaagccttacaatcacagggt

SEQ ID NO: 3775095 - DNA, 25 bp, Homo sapien
ggtggaggaagccttacaatcacag

SEQ ID NO: 3775096 - DNA, 25 bp, Homo sapien
ttgatgtgcagatataacgttcccc

SEQ ID NO: 3775097 - DNA, 25 bp, Homo sapien
tagtgaggttatcgcaacaccaagc

SEQ ID NO: 3775098 - DNA, 25 bp, Homo sapien
gacgttcatctaggaatgaagcctg

SEQ ID NO: 3775099 - DNA, 25 bp, Homo sapien
gccgtaacacattggcagcatttgg

SEQ ID NO: 3775100 - DNA, 25 bp, Homo sapien
tactcccagagcacttatgcaggtt

SEQ ID NO: 3775101 - DNA, 25 bp, Homo sapien
cgacatctgtttcccaagccgagtt

SEQ ID NO: 3775102 - DNA, 25 bp, Homo sapien
ttccctctagatgccaagcttcttg

SEQ ID NO: 3775103 - DNA, 25 bp, Homo sapien
tttaagttcctccatacagcagctg

SEQ ID NO: 3775104 - DNA, 25 bp, Homo sapien
tgagtaacacttctggcaacctgtg

SEQ ID NO: 3775105 - DNA, 25 bp, Homo sapien
taaatgaaactgtcctgagcaggtg

SEQ ID NO: 3775106 - DNA, 25 bp, Homo sapien
ccgtaaaatgccacagagacctgcg

SEQ ID NO: 3775107 - DNA, 25 bp, Homo sapien
tgtggtccaaccagatcagagtcag

SEQ ID NO: 3775108 - DNA, 25 bp, Homo sapien
tgttctcactcccatgtgctatatc

SEQ ID NO: 3775109 - DNA, 25 bp, Homo sapien
gaggaggaaggaccaagctccctta

SEQ ID NO: 3775110 - DNA, 25 bp, Homo sapien
tgagtctgggctgccaacacactca

SEQ ID NO: 3775111 - DNA, 25 bp, Homo sapien
gctcccttagagaaccattctgttc

SEQ ID NO: 3775112 - DNA, 25 bp, Homo sapien
gtcatactgccaggtaactttctga

SEQ ID NO: 3775113 - DNA, 25 bp, Homo sapien
ccatgtcatactgccaggtaacttt

SEQ ID NO: 3775114 - DNA, 25 bp, Homo sapien
tttgtccatgtcatactgccaggta

SEQ ID NO: 3775115 - DNA, 25 bp, Homo sapien
tgtccatgtcatactgccaggtaac

SEQ ID NO: 3775116 - DNA, 25 bp, Homo sapien
ctgctccccatcaattattgtcgtt

SEQ ID NO: 3775117 - DNA, 25 bp, Homo sapien
ccatcaattattgtcgtttgctgat

SEQ ID NO: 3775118 - DNA, 25 bp, Homo sapien
tattgtcgtttgctgattattccca

SEQ ID NO: 3775119 - DNA, 25 bp, Homo sapien
ttattgtcgtttgctgattattccc

SEQ ID NO: 3775120 - DNA, 25 bp, Homo sapien
tgttcataaggcctcgcctccacag

SEQ ID NO: 3775121 - DNA, 25 bp, Homo sapien
taaggcctcgcctccacaggagtct

SEQ ID NO: 3775122 - DNA, 25 bp, Homo sapien
tctctggtgatccagcagacatgag

SEQ ID NO: 3775123 - DNA, 25 bp, Homo sapien
ggagtctcctcacttcagctttgcc

SEQ ID NO: 3775124 - DNA, 25 bp, Homo sapien
agagcctggattaggcaaagtggca

SEQ ID NO: 3775125 - DNA, 25 bp, Homo sapien
cagcaattgtagaaggacagcagag

SEQ ID NO: 3775126 - DNA, 25 bp, Homo sapien
ggcttgagagcctggattaggcaaa

SEQ ID NO: 3775127 - DNA, 25 bp, Homo sapien
cagggaccggccagcaattgtagaa

SEQ ID NO: 3775128 - DNA, 25 bp, Homo sapien
cacttggggtgaaattaactgcatg

SEQ ID NO: 3775129 - DNA, 25 bp, Homo sapien
ttgcactgcacctggtggttgcttc

SEQ ID NO: 3775130 - DNA, 25 bp, Homo sapien
tctcacttggggtgaaattaactgc

SEQ ID NO: 3775131 - DNA, 25 bp, Homo sapien
tgcacctggtggttgcttccacttt

SEQ ID NO: 3775132 - DNA, 25 bp, Homo sapien
gagctacgcttgcatcctgaattgg

SEQ ID NO: 3775133 - DNA, 25 bp, Homo sapien
gctgtaatctcatggtgactgcttc

SEQ ID NO: 3775134 - DNA, 25 bp, Homo sapien
tatacatgttctggtgacagtctcc

SEQ ID NO: 3775135 - DNA, 25 bp, Homo sapien
cacaggttttctaagtaaagcgcac

SEQ ID NO: 3775136 - DNA, 25 bp, Homo sapien
ggtccttagaaaccatctactgctg

SEQ ID NO: 3775137 - DNA, 25 bp, Homo sapien
gaaacacctagatgccttcctatga

SEQ ID NO: 3775138 - DNA, 25 bp, Homo sapien
gagtagctttggaagcggaaacacc

SEQ ID NO: 3775139 - DNA, 25 bp, Homo sapien
ccttgggccaaatagggagtagctt

SEQ ID NO: 3775140 - DNA, 25 bp, Homo sapien
aaaaggtggctcatagtaagttaca

SEQ ID NO: 3775141 - DNA, 25 bp, Homo sapien
gaaagaatcattgcaaacggcttag

SEQ ID NO: 3775142 - DNA, 25 bp, Homo sapien
atttctctactgcactgaatgtggc

SEQ ID NO: 3775143 - DNA, 25 bp, Homo sapien
cacttgaaggcagattccagatgaa

SEQ ID NO: 3775144 - DNA, 25 bp, Homo sapien
tctgagaaccaagctcattcaaaag

SEQ ID NO: 3775145 - DNA, 25 bp, Homo sapien
tgcaggacactttctaccccaggtt

SEQ ID NO: 3775146 - DNA, 25 bp, Homo sapien
gttcccacttcagcccaaaggcaga

SEQ ID NO: 3775147 - DNA, 25 bp, Homo sapien
caggacactttctaccccaggttct

SEQ ID NO: 3775148 - DNA, 25 bp, Homo sapien
gacactaggtcaagctatgcacagc

SEQ ID NO: 3775149 - DNA, 25 bp, Homo sapien
tgtggtaatatgtaaatcctgctcc

SEQ ID NO: 3775150 - DNA, 25 bp, Homo sapien
aaatccacccaggatgacgtgccca

SEQ ID NO: 3775151 - DNA, 25 bp, Homo sapien
cacaggctaaataggaatctccagc

SEQ ID NO: 3775152 - DNA, 25 bp, Homo sapien
ggcacaaaagccttcactgttgaga

SEQ ID NO: 3775153 - DNA, 25 bp, Homo sapien
gagaaataggccagccgctctggct

SEQ ID NO: 3775154 - DNA, 25 bp, Homo sapien
ctgtgcctatgcctgagccctgtgc

SEQ ID NO: 3775155 - DNA, 25 bp, Homo sapien
gtatttgcccaagcctcatcttcag

SEQ ID NO: 3775156 - DNA, 25 bp, Homo sapien
tcgtcctcatcggagacaggagccc

SEQ ID NO: 3775157 - DNA, 25 bp, Homo sapien
cttcgtcctcatcggagacaggagc

SEQ ID NO: 3775158 - DNA, 25 bp, Homo sapien
ttcgtcctcatcggagacaggagcc

SEQ ID NO: 3775159 - DNA, 25 bp, Homo sapien
cgtcctcatcggagacaggagccct

SEQ ID NO: 3775160 - DNA, 25 bp, Homo sapien
gaatcctcatgccagtttctgtctc

SEQ ID NO: 3775161 - DNA, 25 bp, Homo sapien
cagaatcctcatgccagtttctgtc

SEQ ID NO: 3775162 - DNA, 25 bp, Homo sapien
ggcagaatcctcatgccagtttctg

SEQ ID NO: 3775163 - DNA, 25 bp, Homo sapien
ggtggcagaatcctcatgccagttt

SEQ ID NO: 3775164 - DNA, 25 bp, Homo sapien
tgaaaagagccatgtcgggagccgt

SEQ ID NO: 3775165 - DNA, 25 bp, Homo sapien
agcgcctgcaaagcgccgttcctgg

SEQ ID NO: 3775166 - DNA, 25 bp, Homo sapien
cacccggtctaacttgaatccccag

SEQ ID NO: 3775167 - DNA, 25 bp, Homo sapien
tctctgtgtgccgtgcttaagcatc

SEQ ID NO: 3775168 - DNA, 25 bp, Homo sapien
tgaacacctggccacaaattatcca

SEQ ID NO: 3775169 - DNA, 25 bp, Homo sapien
gccacaaattatccaccaaccttgg

SEQ ID NO: 3775170 - DNA, 25 bp, Homo sapien
cacctggccacaaattatccaccaa

SEQ ID NO: 3775171 - DNA, 25 bp, Homo sapien
tggccacaaattatccaccaacctt

SEQ ID NO: 3775172 - DNA, 25 bp, Homo sapien
gaagcttcagctaagtaattcaccc

SEQ ID NO: 3775173 - DNA, 25 bp, Homo sapien
catccacttcaagccaggttctgtg

SEQ ID NO: 3775174 - DNA, 25 bp, Homo sapien
tcatgcagtagttcacacaattccc

SEQ ID NO: 3775175 - DNA, 25 bp, Homo sapien
cattcagttcaatgaagccactgct

SEQ ID NO: 3775176 - DNA, 25 bp, Homo sapien
agatgggagttgacacagtttctgc

SEQ ID NO: 3775177 - DNA, 25 bp, Homo sapien
gagatagggtgcagtagcacatgcc

SEQ ID NO: 3775178 - DNA, 25 bp, Homo sapien
tataagaggcaaccccaacactact

SEQ ID NO: 3775179 - DNA, 25 bp, Homo sapien
ttcggaggctcaggcaatgaaattg

SEQ ID NO: 3775180 - DNA, 25 bp, Homo sapien
ctaggttccttcaaggtggacacat

SEQ ID NO: 3775181 - DNA, 25 bp, Homo sapien
taccagtgtgaagagtacaggtgaa

SEQ ID NO: 3775182 - DNA, 25 bp, Homo sapien
tggacacatatgctgagaacctcct

SEQ ID NO: 3775183 - DNA, 25 bp, Homo sapien
gccctgaggttaccagtgtgaagag

SEQ ID NO: 3775184 - DNA, 25 bp, Homo sapien
tattcttgaaggtggctttgaccat

SEQ ID NO: 3775185 - DNA, 25 bp, Homo sapien
ctattcttgaaggtggctttgacca

SEQ ID NO: 3775186 - DNA, 25 bp, Homo sapien
caaacgcgaccgctaaagtcgtgta

SEQ ID NO: 3775187 - DNA, 25 bp, Homo sapien
cgtgcatggcctgcccggatacaac

SEQ ID NO: 3775188 - DNA, 25 bp, Homo sapien
gatacaactgcgtgggtactgcgat

SEQ ID NO: 3775189 - DNA, 25 bp, Homo sapien
cgatggagcacaaacaaacgcgacc

SEQ ID NO: 3775190 - DNA, 25 bp, Homo sapien
ggcggttgttagctgtgcagatgag

SEQ ID NO: 3775191 - DNA, 25 bp, Homo sapien
aagagaggatagcagcagctcaaca

SEQ ID NO: 3775192 - DNA, 25 bp, Homo sapien
gctcaacagtggcaccttcagtagt

SEQ ID NO: 3775193 - DNA, 25 bp, Homo sapien
atgagcagaagagaggatagcagca

SEQ ID NO: 3775194 - DNA, 25 bp, Homo sapien
cagaccactttttcacatccccggt

SEQ ID NO: 3775195 - DNA, 25 bp, Homo sapien
tccaccagaccactttttcacatcc

SEQ ID NO: 3775196 - DNA, 25 bp, Homo sapien
caccagaccactttttcacatcccc

SEQ ID NO: 3775197 - DNA, 25 bp, Homo sapien
ccagaccactttttcacatccccgg

SEQ ID NO: 3775198 - DNA, 25 bp, Homo sapien
tcaaccaggctttaacctccactgg

SEQ ID NO: 3775199 - DNA, 25 bp, Homo sapien
taatcaacaattctgagccccagcc

SEQ ID NO: 3775200 - DNA, 25 bp, Homo sapien
tcttttggatggagaataacatatc

SEQ ID NO: 3775201 - DNA, 25 bp, Homo sapien
tgaatatcagtgtgtatccacacac

SEQ ID NO: 3775202 - DNA, 25 bp, Homo sapien
aaggtggtaatattcatgacttcag

SEQ ID NO: 3775203 - DNA, 25 bp, Homo sapien
gagcccaggataaaattaatagtag

SEQ ID NO: 3775204 - DNA, 25 bp, Homo sapien
aaattaatagtagcaactccttgga

SEQ ID NO: 3775205 - DNA, 25 bp, Homo sapien
ccttggatccagtgtactgtggcat

SEQ ID NO: 3775206 - DNA, 25 bp, Homo sapien
tgtccagtcgtagttctctaaatgg

SEQ ID NO: 3775207 - DNA, 25 bp, Homo sapien
ttatgtccagtcgtagttctctaaa

SEQ ID NO: 3775208 - DNA, 25 bp, Homo sapien
tatgtccagtcgtagttctctaaat

SEQ ID NO: 3775209 - DNA, 25 bp, Homo sapien
tccagtcgtagttctctaaatggtt

SEQ ID NO: 3775210 - DNA, 25 bp, Homo sapien
ccagcaaagcacatcctagtaggaa

SEQ ID NO: 3775211 - DNA, 25 bp, Homo sapien
ctggccaatgtggtgctttccagtg

SEQ ID NO: 3775212 - DNA, 25 bp, Homo sapien
gccaatgtggtgctttccagtgctc

SEQ ID NO: 3775213 - DNA, 25 bp, Homo sapien
ccaatgtggtgctttccagtgctca

SEQ ID NO: 3775214 - DNA, 25 bp, Homo sapien
cagtaagcgcttcccacgggggtca

SEQ ID NO: 3775215 - DNA, 25 bp, Homo sapien
tcagtaagcgcttcccacgggggtc

SEQ ID NO: 3775216 - DNA, 25 bp, Homo sapien
ctggctgtgtcccatcatcattaga

SEQ ID NO: 3775217 - DNA, 25 bp, Homo sapien
tttgtcatcttgtcatctggctgtg

SEQ ID NO: 3775218 - DNA, 25 bp, Homo sapien
ctgtgtcccatcatcattagaaata

SEQ ID NO: 3775219 - DNA, 25 bp, Homo sapien
cttgtttgtcatcttgtcatctggc

SEQ ID NO: 3775220 - DNA, 25 bp, Homo sapien
gaattggccaacacagatgcagaac

SEQ ID NO: 3775221 - DNA, 25 bp, Homo sapien
taactacttagggtactagccacat

SEQ ID NO: 3775222 - DNA, 25 bp, Homo sapien
tctctcggccatgggaggattacag

SEQ ID NO: 3775223 - DNA, 25 bp, Homo sapien
gcttttgacaacgttagccatagga

SEQ ID NO: 3775224 - DNA, 25 bp, Homo sapien
gtatctgtcccatgcctggttccca

SEQ ID NO: 3775225 - DNA, 25 bp, Homo sapien
tgaaacagtaaagggtgatgggcac

SEQ ID NO: 3775226 - DNA, 25 bp, Homo sapien
cattcccggatccttggaagatcca

SEQ ID NO: 3775227 - DNA, 25 bp, Homo sapien
gaaaggccgctaagttgctccctga

SEQ ID NO: 3775228 - DNA, 25 bp, Homo sapien
cttctcataggaggcccgtggtagg

SEQ ID NO: 3775229 - DNA, 25 bp, Homo sapien
gtgagcttctcataggaggcccgtg

SEQ ID NO: 3775230 - DNA, 25 bp, Homo sapien
agcttctcataggaggcccgtggta

SEQ ID NO: 3775231 - DNA, 25 bp, Homo sapien
tgagcttctcataggaggcccgtgg

SEQ ID NO: 3775232 - DNA, 25 bp, Homo sapien
caccgatatccagtggcactgagga

SEQ ID NO: 3775233 - DNA, 25 bp, Homo sapien
ctaacaaggggccaccaccgatatc

SEQ ID NO: 3775234 - DNA, 25 bp, Homo sapien
tccctatgggatccccactaacaag

SEQ ID NO: 3775235 - DNA, 25 bp, Homo sapien
ttccctatgggatccccactaacaa

SEQ ID NO: 3775236 - DNA, 25 bp, Homo sapien
ctgcaggagcagcatgggaggagat

SEQ ID NO: 3775237 - DNA, 25 bp, Homo sapien
tgcaggagcagcatgggaggagatg

SEQ ID NO: 3775238 - DNA, 25 bp, Homo sapien
gatttccctcaagggtgtgaagccc

SEQ ID NO: 3775239 - DNA, 25 bp, Homo sapien
ggtgtgaagccctcggagaagtcac

SEQ ID NO: 3775240 - DNA, 25 bp, Homo sapien
gagaagtcacttacggcaaaccaca

SEQ ID NO: 3775241 - DNA, 25 bp, Homo sapien
gaagaagaaagtggagtagatttcc

SEQ ID NO: 3775242 - DNA, 25 bp, Homo sapien
cctgcatgtcgaaggggaaataatc

SEQ ID NO: 3775243 - DNA, 25 bp, Homo sapien
tctcctgctcaggttctttgatttt

SEQ ID NO: 3775244 - DNA, 25 bp, Homo sapien
cagttgctactgtccttacttcgta

SEQ ID NO: 3775245 - DNA, 25 bp, Homo sapien
cttacttcgtagctgcccctgcatg

SEQ ID NO: 3775246 - DNA, 25 bp, Homo sapien
acttagtccgaaatgcagttgagga

SEQ ID NO: 3775247 - DNA, 25 bp, Homo sapien
taaatatgcaccttgacccagagag

SEQ ID NO: 3775248 - DNA, 25 bp, Homo sapien
tccttggtcactggaagaggctatg

SEQ ID NO: 3775249 - DNA, 25 bp, Homo sapien
gcattctgtatctagacgcttccca

SEQ ID NO: 3775250 - DNA, 25 bp, Homo sapien
actatttaggctggactgaggggca

SEQ ID NO: 3775251 - DNA, 25 bp, Homo sapien
ctctactgtattgattggactgaag

SEQ ID NO: 3775252 - DNA, 25 bp, Homo sapien
caggtggtatcagggaccaggaact

SEQ ID NO: 3775253 - DNA, 25 bp, Homo sapien
tggactgaagagcagaaccctacca

SEQ ID NO: 3775254 - DNA, 25 bp, Homo sapien
tctggattgaggagcaggaaccctg

SEQ ID NO: 3775255 - DNA, 25 bp, Homo sapien
cataatagtctggattgaggagcag

SEQ ID NO: 3775256 - DNA, 25 bp, Homo sapien
tagtctggattgaggagcaggaacc

SEQ ID NO: 3775257 - DNA, 25 bp, Homo sapien
atagtctggattgaggagcaggaac

SEQ ID NO: 3775258 - DNA, 25 bp, Homo sapien
tgaggagcagagagattgaggaaag

SEQ ID NO: 3775259 - DNA, 25 bp, Homo sapien
aggagcagagagattgaggaaagac

SEQ ID NO: 3775260 - DNA, 25 bp, Homo sapien
agcagagagattgaggaaagacttc

SEQ ID NO: 3775261 - DNA, 25 bp, Homo sapien
ctggattgaggagcagagagattga

SEQ ID NO: 3775262 - DNA, 25 bp, Homo sapien
gcacagttgtgagagcttagctgga

SEQ ID NO: 3775263 - DNA, 25 bp, Homo sapien
tgtccataggtcagggataactgct

SEQ ID NO: 3775264 - DNA, 25 bp, Homo sapien
gctggctgtccataggtcagggata

SEQ ID NO: 3775265 - DNA, 25 bp, Homo sapien
cacagttgtgagagcttagctggag

SEQ ID NO: 3775266 - DNA, 25 bp, Homo sapien
tggagatgtggcctaatttcatagc

SEQ ID NO: 3775267 - DNA, 25 bp, Homo sapien
agcattggtggagatgtggcctaat

SEQ ID NO: 3775268 - DNA, 25 bp, Homo sapien
ctgtggagggtagagaggctttggg

SEQ ID NO: 3775269 - DNA, 25 bp, Homo sapien
gggagagcattggtggagatgtggc

SEQ ID NO: 3775270 - DNA, 25 bp, Homo sapien
attcagcatgtaaaaggctagagag

SEQ ID NO: 3775271 - DNA, 25 bp, Homo sapien
gcatgtaaaaggctagagagatgtt

SEQ ID NO: 3775272 - DNA, 25 bp, Homo sapien
tcaagagctaaagtcagaatcagaa

SEQ ID NO: 3775273 - DNA, 25 bp, Homo sapien
aaaaggctagagagatgtttctgaa

SEQ ID NO: 3775274 - DNA, 25 bp, Homo sapien
aaaaaacccatcagtggctgaacca

SEQ ID NO: 3775275 - DNA, 25 bp, Homo sapien
ctgaactcttgacatagcatctgtg

SEQ ID NO: 3775276 - DNA, 25 bp, Homo sapien
gattccctattcagtaggacttcag

SEQ ID NO: 3775277 - DNA, 25 bp, Homo sapien
tgaaccaaccactgcaaccctatgt

SEQ ID NO: 3775278 - DNA, 25 bp, Homo sapien
taggcacgagggaattcttcttagg

SEQ ID NO: 3775279 - DNA, 25 bp, Homo sapien
tatgtgggtcccaatgagaagggcc

SEQ ID NO: 3775280 - DNA, 25 bp, Homo sapien
tctgggctgccagatacaagtcggt

SEQ ID NO: 3775281 - DNA, 25 bp, Homo sapien
cagggctggaattcggcattctgaa

SEQ ID NO: 3775282 - DNA, 25 bp, Homo sapien
gatgctaaaaaccaattctcccgta

SEQ ID NO: 3775283 - DNA, 25 bp, Homo sapien
tacaaacagaacctgataaccacag

SEQ ID NO: 3775284 - DNA, 25 bp, Homo sapien
cacagcgtaagctcgatgctaaaaa

SEQ ID NO: 3775285 - DNA, 25 bp, Homo sapien
ccgtattaggatggctgacactttc

SEQ ID NO: 3775286 - DNA, 25 bp, Homo sapien
cagtgactctccagcggcttaagac

SEQ ID NO: 3775287 - DNA, 25 bp, Homo sapien
gcttaagacagctgcgccgttgcag

SEQ ID NO: 3775288 - DNA, 25 bp, Homo sapien
cgttgcagccgtcacaaaaatcagc

SEQ ID NO: 3775289 - DNA, 25 bp, Homo sapien
gccgttgcagccgtcacaaaaatca

SEQ ID NO: 3775290 - DNA, 25 bp, Homo sapien
ggtcagctctgcggatcaccacctg

SEQ ID NO: 3775291 - DNA, 25 bp, Homo sapien
caatcagctgggtctaggtcaatga

SEQ ID NO: 3775292 - DNA, 25 bp, Homo sapien
ctgaggaccagacaagggcttccaa

SEQ ID NO: 3775293 - DNA, 25 bp, Homo sapien
gccctgccagggtgcgctgcctctg

SEQ ID NO: 3775294 - DNA, 25 bp, Homo sapien
ttgggtccccaggagcaagtgaagc

SEQ ID NO: 3775295 - DNA, 25 bp, Homo sapien
ggtccccaggagcaagtgaagccat

SEQ ID NO: 3775296 - DNA, 25 bp, Homo sapien
cagagggaatagagaacatggtcca

SEQ ID NO: 3775297 - DNA, 25 bp, Homo sapien
cacccctagacattcttccaagtaa

SEQ ID NO: 3775298 - DNA, 25 bp, Homo sapien
atttcacccctagacattcttccaa

SEQ ID NO: 3775299 - DNA, 25 bp, Homo sapien
cagccctccattgaactccaatcag

SEQ ID NO: 3775300 - DNA, 25 bp, Homo sapien
gccctccattgaactccaatcagca

SEQ ID NO: 3775301 - DNA, 25 bp, Homo sapien
gaaagtaaccatactctctacgagt

SEQ ID NO: 3775302 - DNA, 25 bp, Homo sapien
aggatttctccggttctgtatgcat

SEQ ID NO: 3775303 - DNA, 25 bp, Homo sapien
ctattgaggatgatatgtcaggttc

SEQ ID NO: 3775304 - DNA, 25 bp, Homo sapien
cggttctgtatgcatctattgagga

SEQ ID NO: 3775305 - DNA, 25 bp, Homo sapien
tagaaagttacccttgcccacgatc

SEQ ID NO: 3775306 - DNA, 25 bp, Homo sapien
ggacgggccccataaatcacttgca

SEQ ID NO: 3775307 - DNA, 25 bp, Homo sapien
ccacttttaggagctggcatgacag

SEQ ID NO: 3775308 - DNA, 25 bp, Homo sapien
tctgcacagaaacagggcatatggc

SEQ ID NO: 3775309 - DNA, 25 bp, Homo sapien
gaactcttgtggctgttacctcata

SEQ ID NO: 3775310 - DNA, 25 bp, Homo sapien
aaggacccactgtctagctgtgttc

SEQ ID NO: 3775311 - DNA, 25 bp, Homo sapien
gcacgtcataagcacttagctggag

SEQ ID NO: 3775312 - DNA, 25 bp, Homo sapien
tcagaaactgaagcgtggccaatgt

SEQ ID NO: 3775313 - DNA, 25 bp, Homo sapien
gagtctccagggttcttgtttgcaa

SEQ ID NO: 3775314 - DNA, 25 bp, Homo sapien
tattaatgggtcagctcatgtaagc

SEQ ID NO: 3775315 - DNA, 25 bp, Homo sapien
tatggctcgaggttctaggtggtca

SEQ ID NO: 3775316 - DNA, 25 bp, Homo sapien
gatatgatgagctctaatctccaca

SEQ ID NO: 3775317 - DNA, 25 bp, Homo sapien
gacagccatcaattgggttggtgca

SEQ ID NO: 3775318 - DNA, 25 bp, Homo sapien
caggaagactacataaagacacagg

SEQ ID NO: 3775319 - DNA, 25 bp, Homo sapien
tgccgcaaggcaaggatcaaggcct

SEQ ID NO: 3775320 - DNA, 25 bp, Homo sapien
aattcctattgtttaagcctgccag

SEQ ID NO: 3775321 - DNA, 25 bp, Homo sapien
tagcagcgttcaacttggcaatagt

SEQ ID NO: 3775322 - DNA, 25 bp, Homo sapien
gattccttgtagaagctaactttag

SEQ ID NO: 3775323 - DNA, 25 bp, Homo sapien
tggttttgaattggaatgacttctg

SEQ ID NO: 3775324 - DNA, 25 bp, Homo sapien
taaatcgcccaacctcagatttgga

SEQ ID NO: 3775325 - DNA, 25 bp, Homo sapien
gttaatctcagtatctaataacacc

SEQ ID NO: 3775326 - DNA, 25 bp, Homo sapien
taatctcagtatctaataacaccct

SEQ ID NO: 3775327 - DNA, 25 bp, Homo sapien
ctcagtatctaataacaccctggaa

SEQ ID NO: 3775328 - DNA, 25 bp, Homo sapien
tcagttaatctcagtatctaataac

SEQ ID NO: 3775329 - DNA, 25 bp, Homo sapien
aggccgtaatctttccccagcatga

SEQ ID NO: 3775330 - DNA, 25 bp, Homo sapien
gagacagagtccatactgggaagct

SEQ ID NO: 3775331 - DNA, 25 bp, Homo sapien
tgtgctctgtgtaaagcaagcctaa

SEQ ID NO: 3775332 - DNA, 25 bp, Homo sapien
ttcactattgcagacatgccctttg

SEQ ID NO: 3775333 - DNA, 25 bp, Homo sapien
atcttgctctttgacaggccccccg

SEQ ID NO: 3775334 - DNA, 25 bp, Homo sapien
gccccccgctccgtgatgcattcat

SEQ ID NO: 3775335 - DNA, 25 bp, Homo sapien
ttgctgccatcttgctctttgacag

SEQ ID NO: 3775336 - DNA, 25 bp, Homo sapien
agtgtcccaatatttcttcttgctg

SEQ ID NO: 3775337 - DNA, 25 bp, Homo sapien
gggccatgcggcacattcaatgtga

SEQ ID NO: 3775338 - DNA, 25 bp, Homo sapien
taattccaaagtcgagggaacattg

SEQ ID NO: 3775339 - DNA, 25 bp, Homo sapien
tgattgggtacaaacactgtcttgc

SEQ ID NO: 3775340 - DNA, 25 bp, Homo sapien
aagtgccgtcatctaatggaactgc

SEQ ID NO: 3775341 - DNA, 25 bp, Homo sapien
tcaacaaatgacacgtagccaagag

SEQ ID NO: 3775342 - DNA, 25 bp, Homo sapien
cagtatcttctttcgctgcctgaga

SEQ ID NO: 3775343 - DNA, 25 bp, Homo sapien
tcataacacccttgaagccccttgg

SEQ ID NO: 3775344 - DNA, 25 bp, Homo sapien
gataaactaatcctcggctctagca

SEQ ID NO: 3775345 - DNA, 25 bp, Homo sapien
gaagggaacctagacatcagagagc

SEQ ID NO: 3775346 - DNA, 25 bp, Homo sapien
cacctcaagatggtccaggcatgct

SEQ ID NO: 3775347 - DNA, 25 bp, Homo sapien
tgccctagcataaaagccagagtgg

SEQ ID NO: 3775348 - DNA, 25 bp, Homo sapien
gccctctgtgagctgtccgttgaaa

SEQ ID NO: 3775349 - DNA, 25 bp, Homo sapien
cagatctaagggcagaggccactga

SEQ ID NO: 3775350 - DNA, 25 bp, Homo sapien
tttcctcagtgagcagacacgcgat

SEQ ID NO: 3775351 - DNA, 25 bp, Homo sapien
tttaatcaaacggtccatcagggtg

SEQ ID NO: 3775352 - DNA, 25 bp, Homo sapien
tggtatcagcctcccacagactgtg

SEQ ID NO: 3775353 - DNA, 25 bp, Homo sapien
ataaagcagatacacatctttcttc

SEQ ID NO: 3775354 - DNA, 25 bp, Homo sapien
gattcatgcttaggggcttggaata

SEQ ID NO: 3775355 - DNA, 25 bp, Homo sapien
catctttcttctaagtatagaagaa

SEQ ID NO: 3775356 - DNA, 25 bp, Homo sapien
atttaatttggataccaaggattca

SEQ ID NO: 3775357 - DNA, 25 bp, Homo sapien
tctcctctatattaacacgatgcag

SEQ ID NO: 3775358 - DNA, 25 bp, Homo sapien
ctctatattaacacgatgcaggatt

SEQ ID NO: 3775359 - DNA, 25 bp, Homo sapien
ttatttctgttagtgtactagataa

SEQ ID NO: 3775360 - DNA, 25 bp, Homo sapien
tagtgtactagataatataatatac

SEQ ID NO: 3775361 - DNA, 25 bp, Homo sapien
gataaatgcctggacaagtcctgcc

SEQ ID NO: 3775362 - DNA, 25 bp, Homo sapien
ggaaacatttccatgccaagcctga

SEQ ID NO: 3775363 - DNA, 25 bp, Homo sapien
aattgggttggaacaagacagtgcc

SEQ ID NO: 3775364 - DNA, 25 bp, Homo sapien
caatggtagataggaaacaagctgc

SEQ ID NO: 3775365 - DNA, 25 bp, Homo sapien
caacagattccacagttgccctgag

SEQ ID NO: 3775366 - DNA, 25 bp, Homo sapien
caatctatttcgaggggctcttagc

SEQ ID NO: 3775367 - DNA, 25 bp, Homo sapien
ggaggaggcatcctagcaatctatt

SEQ ID NO: 3775368 - DNA, 25 bp, Homo sapien
aatttagatgcaaaagacaaggggg

SEQ ID NO: 3775369 - DNA, 25 bp, Homo sapien
ctgaaatggcaaatctacagcttct

SEQ ID NO: 3775370 - DNA, 25 bp, Homo sapien
tggcaaatctacagcttcttttccc

SEQ ID NO: 3775371 - DNA, 25 bp, Homo sapien
tcatgctgatactctgacccaagaa

SEQ ID NO: 3775372 - DNA, 25 bp, Homo sapien
catgctgatactctgacccaagaaa

SEQ ID NO: 3775373 - DNA, 25 bp, Homo sapien
aatgttgaacatgtctgcagccact

SEQ ID NO: 3775374 - DNA, 25 bp, Homo sapien
ctgcgggataaagcggagcaatgtt

SEQ ID NO: 3775375 - DNA, 25 bp, Homo sapien
ggctggagtggacgctgcccgggcc

SEQ ID NO: 3775376 - DNA, 25 bp, Homo sapien
cgggataaagcggagcaatgttgaa

SEQ ID NO: 3775377 - DNA, 25 bp, Homo sapien
aggccgagagctgagtcgggcacca

SEQ ID NO: 3775378 - DNA, 25 bp, Homo sapien
gcaggccgagagctgagtcgggcac

SEQ ID NO: 3775379 - DNA, 25 bp, Homo sapien
ccgagagctgagtcgggcaccagct

SEQ ID NO: 3775380 - DNA, 25 bp, Homo sapien
tcagcaggccgagagctgagtcggg

SEQ ID NO: 3775381 - DNA, 25 bp, Homo sapien
ccatgcacgaatcctgctgccgagt

SEQ ID NO: 3775382 - DNA, 25 bp, Homo sapien
ggtctccgattcccatgcacgaatc

SEQ ID NO: 3775383 - DNA, 25 bp, Homo sapien
acgaatcctgctgccgagtcagtcc

SEQ ID NO: 3775384 - DNA, 25 bp, Homo sapien
cgattcccatgcacgaatcctgctg

SEQ ID NO: 3775385 - DNA, 25 bp, Homo sapien
gctgcagataggtgtgtcccttttt

SEQ ID NO: 3775386 - DNA, 25 bp, Homo sapien
taggtgtgtccctttttgcaaaatc

SEQ ID NO: 3775387 - DNA, 25 bp, Homo sapien
gcagataggtgtgtccctttttgca

SEQ ID NO: 3775388 - DNA, 25 bp, Homo sapien
gtgtgtccctttttgcaaaatcaga

SEQ ID NO: 3775389 - DNA, 25 bp, Homo sapien
agccgagtctgaccatgaggcacca

SEQ ID NO: 3775390 - DNA, 25 bp, Homo sapien
gacagccgagtctgaccatgaggca

SEQ ID NO: 3775391 - DNA, 25 bp, Homo sapien
ctgggagtgagacagccgagtctga

SEQ ID NO: 3775392 - DNA, 25 bp, Homo sapien
agtgagacagccgagtctgaccatg

SEQ ID NO: 3775393 - DNA, 25 bp, Homo sapien
gaggaacatggaattgcactgcctg

SEQ ID NO: 3775394 - DNA, 25 bp, Homo sapien
tttcctctccaagtagactggccag

SEQ ID NO: 3775395 - DNA, 25 bp, Homo sapien
ccgaggaggaagtcacttaggaact

SEQ ID NO: 3775396 - DNA, 25 bp, Homo sapien
tcagctcccggtagggctaacatac

SEQ ID NO: 3775397 - DNA, 25 bp, Homo sapien
gagtcaatgtaaaccagagtgagga

SEQ ID NO: 3775398 - DNA, 25 bp, Homo sapien
actctggtctctgcggggactccta

SEQ ID NO: 3775399 - DNA, 25 bp, Homo sapien
tgtctcagctcagagtcaatgtaaa

SEQ ID NO: 3775400 - DNA, 25 bp, Homo sapien
tgaggaacccactggtatcctgcat

SEQ ID NO: 3775401 - DNA, 25 bp, Homo sapien
gcccagatgacacttggacttcctg

SEQ ID NO: 3775402 - DNA, 25 bp, Homo sapien
caaagttattccagtagcacgtaca

SEQ ID NO: 3775403 - DNA, 25 bp, Homo sapien
gcgagtatatttgtctactggagac

SEQ ID NO: 3775404 - DNA, 25 bp, Homo sapien
gaaactctgaagaacatttggtagc

SEQ ID NO: 3775405 - DNA, 25 bp, Homo sapien
cgggacaaatcccttgtgacagcct

SEQ ID NO: 3775406 - DNA, 25 bp, Homo sapien
tttccatactgggtcatgcaactgc

SEQ ID NO: 3775407 - DNA, 25 bp, Homo sapien
gctattctgtatgggagagagctga

SEQ ID NO: 3775408 - DNA, 25 bp, Homo sapien
ttgcccgggacaaatcccttgtgac

SEQ ID NO: 3775409 - DNA, 25 bp, Homo sapien
tatctgaaaggagtgaacagattct

SEQ ID NO: 3775410 - DNA, 25 bp, Homo sapien
ggagtgaacagattctgttttcaaa

SEQ ID NO: 3775411 - DNA, 25 bp, Homo sapien
ctgaaaggagtgaacagattctgtt

SEQ ID NO: 3775412 - DNA, 25 bp, Homo sapien
aaggagtgaacagattctgttttca

SEQ ID NO: 3775413 - DNA, 25 bp, Homo sapien
cagggtgctatgattgtaagcaaac

SEQ ID NO: 3775414 - DNA, 25 bp, Homo sapien
tgaggagcttcctgcaaccagtgtg

SEQ ID NO: 3775415 - DNA, 25 bp, Homo sapien
aacactggtgtacctgtcagggtgc

SEQ ID NO: 3775416 - DNA, 25 bp, Homo sapien
cagtgtggctgtctagaaatcagga

SEQ ID NO: 3775417 - DNA, 25 bp, Homo sapien
gtttgggcactactgcaccttcatg

SEQ ID NO: 3775418 - DNA, 25 bp, Homo sapien
cacctttgaaggtttgtgcccagtt

SEQ ID NO: 3775419 - DNA, 25 bp, Homo sapien
cccaaaaagggcgagatggctgctg

SEQ ID NO: 3775420 - DNA, 25 bp, Homo sapien
gggccattgcaagagcacattgcca

SEQ ID NO: 3775421 - DNA, 25 bp, Homo sapien
gggcagatggctagcaccttctcaa

SEQ ID NO: 3775422 - DNA, 25 bp, Homo sapien
cagatggctagcaccttctcaaatg

SEQ ID NO: 3775423 - DNA, 25 bp, Homo sapien
aagggcagatggctagcaccttctc

SEQ ID NO: 3775424 - DNA, 25 bp, Homo sapien
gatggctagcaccttctcaaatgta

SEQ ID NO: 3775425 - DNA, 25 bp, Homo sapien
gcatgccaacatcaacagtcttcgg

SEQ ID NO: 3775426 - DNA, 25 bp, Homo sapien
tcctggaatacactcgcctcttctt

SEQ ID NO: 3775427 - DNA, 25 bp, Homo sapien
tgttgagcctgcacacgaggtacag

SEQ ID NO: 3775428 - DNA, 25 bp, Homo sapien
tcccatcccctgttaatcgtagttc

SEQ ID NO: 3775429 - DNA, 25 bp, Homo sapien
tccgcagaacaccatacaggctgac

SEQ ID NO: 3775430 - DNA, 25 bp, Homo sapien
tgacatatgtctgggctgccatcgc

SEQ ID NO: 3775431 - DNA, 25 bp, Homo sapien
tgccatcgcctagtgctctagggct

SEQ ID NO: 3775432 - DNA, 25 bp, Homo sapien
gattttccccagagtcgacgttcag

SEQ ID NO: 3775433 - DNA, 25 bp, Homo sapien
ggcactcagctgctatccaggactt

SEQ ID NO: 3775434 - DNA, 25 bp, Homo sapien
aagggttaatatggcggcactcagc

SEQ ID NO: 3775435 - DNA, 25 bp, Homo sapien
tgaagccagttatcgtcctcaactc

SEQ ID NO: 3775436 - DNA, 25 bp, Homo sapien
ggtttccaaggtgtagatctctcaa

SEQ ID NO: 3775437 - DNA, 25 bp, Homo sapien
ccagatgtccttgggcgggttgcct

SEQ ID NO: 3775438 - DNA, 25 bp, Homo sapien
gttgagcgcagaagagtaagcaccc

SEQ ID NO: 3775439 - DNA, 25 bp, Homo sapien
ttcgcataaggcacagttgagcgca

SEQ ID NO: 3775440 - DNA, 25 bp, Homo sapien
gtaagcacccgctctgagcctgagg

SEQ ID NO: 3775441 - DNA, 25 bp, Homo sapien
cacggaaatagcagccttcaaattc

SEQ ID NO: 3775442 - DNA, 25 bp, Homo sapien
gttatcacggaaatagcagccttca

SEQ ID NO: 3775443 - DNA, 25 bp, Homo sapien
aggagccaagccaacgttatcacgg

SEQ ID NO: 3775444 - DNA, 25 bp, Homo sapien
gccaacgttatcacggaaatagcag

SEQ ID NO: 3775445 - DNA, 25 bp, Homo sapien
gttcccatcaattcgtgatttgcca

SEQ ID NO: 3775446 - DNA, 25 bp, Homo sapien
ccagccaaagtgcaactcagattct

SEQ ID NO: 3775447 - DNA, 25 bp, Homo sapien
gaaccagagttcccatcaattcgtg

SEQ ID NO: 3775448 - DNA, 25 bp, Homo sapien
ccagagttcccatcaattcgtgatt

SEQ ID NO: 3775449 - DNA, 25 bp, Homo sapien
aattatcatgattaagtagaagctc

SEQ ID NO: 3775450 - DNA, 25 bp, Homo sapien
tatcatgattaagtagaagctctga

SEQ ID NO: 3775451 - DNA, 25 bp, Homo sapien
tcatgattaagtagaagctctgaca

SEQ ID NO: 3775452 - DNA, 25 bp, Homo sapien
ctaattatcatgattaagtagaagc

SEQ ID NO: 3775453 - DNA, 25 bp, Homo sapien
tgtctttcagcatccacagtcagca

SEQ ID NO: 3775454 - DNA, 25 bp, Homo sapien
tctttcagcatccacagtcagcatg

SEQ ID NO: 3775455 - DNA, 25 bp, Homo sapien
attctacttgcagccaaaggaatcc

SEQ ID NO: 3775456 - DNA, 25 bp, Homo sapien
agccacacattctacttgcagccaa

SEQ ID NO: 3775457 - DNA, 25 bp, Homo sapien
gacttggctttagatgaactatcaa

SEQ ID NO: 3775458 - DNA, 25 bp, Homo sapien
gtgagaagcctgttaatatcctttg

SEQ ID NO: 3775459 - DNA, 25 bp, Homo sapien
gacgaaaacagagtgtgggtcacat

SEQ ID NO: 3775460 - DNA, 25 bp, Homo sapien
cacattctttacacagagttcactc

SEQ ID NO: 3775461 - DNA, 25 bp, Homo sapien
caatgcccaggtggctcagtcaggg

SEQ ID NO: 3775462 - DNA, 25 bp, Homo sapien
ggaccatctgtcgtgaataagcaaa

SEQ ID NO: 3775463 - DNA, 25 bp, Homo sapien
ttgagtaactctggcctgaacatga

SEQ ID NO: 3775464 - DNA, 25 bp, Homo sapien
ggagctttccaagtaatcggtctgg

SEQ ID NO: 3775465 - DNA, 25 bp, Homo sapien
cttcacgtggatggggagaccccac

SEQ ID NO: 3775466 - DNA, 25 bp, Homo sapien
gcttcacgtggatggggagacccca

SEQ ID NO: 3775467 - DNA, 25 bp, Homo sapien
agcttcacgtggatggggagacccc

SEQ ID NO: 3775468 - DNA, 25 bp, Homo sapien
gctgtaagtggagcacgtggactcc

SEQ ID NO: 3775469 - DNA, 25 bp, Homo sapien
gagcacgtggactcctccttgggtc

SEQ ID NO: 3775470 - DNA, 25 bp, Homo sapien
aacataggggctgtaagtggagcac

SEQ ID NO: 3775471 - DNA, 25 bp, Homo sapien
gaaggagcgagcctggaacataggg

SEQ ID NO: 3775472 - DNA, 25 bp, Homo sapien
cccagaccacgacacagtattggca

SEQ ID NO: 3775473 - DNA, 25 bp, Homo sapien
cagtgaatgagaagcaatgcccaga

SEQ ID NO: 3775474 - DNA, 25 bp, Homo sapien
ctgccccagaccacgacacagtatt

SEQ ID NO: 3775475 - DNA, 25 bp, Homo sapien
atcctgccccagaccacgacacagt

SEQ ID NO: 3775476 - DNA, 25 bp, Homo sapien
tgtgcagaggctcagacaaattgtg

SEQ ID NO: 3775477 - DNA, 25 bp, Homo sapien
gagaacatgtacaaccacctgaact

SEQ ID NO: 3775478 - DNA, 25 bp, Homo sapien
gaaatgcaggctccaagaacgtctg

SEQ ID NO: 3775479 - DNA, 25 bp, Homo sapien
cagaagctcggtaattggaggacag

SEQ ID NO: 3775480 - DNA, 25 bp, Homo sapien
ctggtccatagaaacttcccttgat

SEQ ID NO: 3775481 - DNA, 25 bp, Homo sapien
aaaccctctgtttctcggtctgtct

SEQ ID NO: 3775482 - DNA, 25 bp, Homo sapien
gggcccttgactaatcctgttgaaa

SEQ ID NO: 3775483 - DNA, 25 bp, Homo sapien
aggccacctagatcttccctgcatt

SEQ ID NO: 3775484 - DNA, 25 bp, Homo sapien
gaattctcaaaaaacagaaatcatt

SEQ ID NO: 3775485 - DNA, 25 bp, Homo sapien
aattctcaaaaaacagaaatcattc

SEQ ID NO: 3775486 - DNA, 25 bp, Homo sapien
ctgaattctcaaaaaacagaaatca

SEQ ID NO: 3775487 - DNA, 25 bp, Homo sapien
ttctcaaaaaacagaaatcattcat

SEQ ID NO: 3775488 - DNA, 25 bp, Homo sapien
ctttaagggtcttggtgcatgtttc

SEQ ID NO: 3775489 - DNA, 25 bp, Homo sapien
gagagatggcccgtggagccgtgtg

SEQ ID NO: 3775490 - DNA, 25 bp, Homo sapien
tgtgagctgagaaatcctcaggtcc

SEQ ID NO: 3775491 - DNA, 25 bp, Homo sapien
tattgtgatccctcttccaaaacca

SEQ ID NO: 3775492 - DNA, 25 bp, Homo sapien
tgaacaggtgttcctggtccttgac

SEQ ID NO: 3775493 - DNA, 25 bp, Homo sapien
tcaagccactagtgatgaacaggtg

SEQ ID NO: 3775494 - DNA, 25 bp, Homo sapien
actcgaacatcgagaaagacctctg

SEQ ID NO: 3775495 - DNA, 25 bp, Homo sapien
agattttgagcctttctccacccga

SEQ ID NO: 3775496 - DNA, 25 bp, Homo sapien
tagatttccagggcggcaaactaac

SEQ ID NO: 3775497 - DNA, 25 bp, Homo sapien
agtagatttccagggcggcaaacta

SEQ ID NO: 3775498 - DNA, 25 bp, Homo sapien
gtagatttccagggcggcaaactaa

SEQ ID NO: 3775499 - DNA, 25 bp, Homo sapien
tgtggcaccattcccaacacgaaga

SEQ ID NO: 3775500 - DNA, 25 bp, Homo sapien
ttgaaactgaggtgtcgggaatttc

SEQ ID NO: 3775501 - DNA, 25 bp, Homo sapien
tccatgatctgatgaacggctttga

SEQ ID NO: 3775502 - DNA, 25 bp, Homo sapien
agatgtgtctgggacagcaccccaa

SEQ ID NO: 3775503 - DNA, 25 bp, Homo sapien
gccagttattgacccttggtggaaa

SEQ ID NO: 3775504 - DNA, 25 bp, Homo sapien
ttttactggctagttgcgtgtgaat

SEQ ID NO: 3775505 - DNA, 25 bp, Homo sapien
gtctctcgtctcttttactggctag

SEQ ID NO: 3775506 - DNA, 25 bp, Homo sapien
accgagtctctcgtctcttttactg

SEQ ID NO: 3775507 - DNA, 25 bp, Homo sapien
tagttgcgtgtgaataatgaaaggt

SEQ ID NO: 3775508 - DNA, 25 bp, Homo sapien
gaattccagaaccagtagtaccagc

SEQ ID NO: 3775509 - DNA, 25 bp, Homo sapien
tcacccgcaaggctagcaagatggc

SEQ ID NO: 3775510 - DNA, 25 bp, Homo sapien
gatggctaacccttggcattgccca

SEQ ID NO: 3775511 - DNA, 25 bp, Homo sapien
tagtaccagcatgttgatcacccgc

SEQ ID NO: 3775512 - DNA, 25 bp, Homo sapien
caaagagcgattgctggtattaata

SEQ ID NO: 3775513 - DNA, 25 bp, Homo sapien
taacagaatggcaaagagcgattgc

SEQ ID NO: 3775514 - DNA, 25 bp, Homo sapien
gcgattgctggtattaatagaatca

SEQ ID NO: 3775515 - DNA, 25 bp, Homo sapien
gaatggcaaagagcgattgctggta

SEQ ID NO: 3775516 - DNA, 25 bp, Homo sapien
tcagtaagcacgtgtgcctaattga

SEQ ID NO: 3775517 - DNA, 25 bp, Homo sapien
gcctaattgatctgaccgcttatct

SEQ ID NO: 3775518 - DNA, 25 bp, Homo sapien
gtaagcacgtgtgcctaattgatct

SEQ ID NO: 3775519 - DNA, 25 bp, Homo sapien
tctgaccgcttatctctgagaaaca

SEQ ID NO: 3775520 - DNA, 25 bp, Homo sapien
cggggttggcaaaagctcgaaacat

SEQ ID NO: 3775521 - DNA, 25 bp, Homo sapien
cagctcaggtctttgttccaccctt

SEQ ID NO: 3775522 - DNA, 25 bp, Homo sapien
agccccagctcaggtctttgttcca

SEQ ID NO: 3775523 - DNA, 25 bp, Homo sapien
ggagccccagctcaggtctttgttc

SEQ ID NO: 3775524 - DNA, 25 bp, Homo sapien
gggaacattgaaaccgctcttgtat

SEQ ID NO: 3775525 - DNA, 25 bp, Homo sapien
tcaactataggtctgcatgtttggg

SEQ ID NO: 3775526 - DNA, 25 bp, Homo sapien
cattgaaaccgctcttgtattcttt

SEQ ID NO: 3775527 - DNA, 25 bp, Homo sapien
atcttttttcccttcgatgatttca

SEQ ID NO: 3775528 - DNA, 25 bp, Homo sapien
tccaaagtaacttctttgaggaata

SEQ ID NO: 3775529 - DNA, 25 bp, Homo sapien
tcctaccaagctatctaaaatgcag

SEQ ID NO: 3775530 - DNA, 25 bp, Homo sapien
cataatcacacttcagacatgccgt

SEQ ID NO: 3775531 - DNA, 25 bp, Homo sapien
tgtactggggtcaaacgcactgaac

SEQ ID NO: 3775532 - DNA, 25 bp, Homo sapien
tttgagctgaggactgactgatggc

SEQ ID NO: 3775533 - DNA, 25 bp, Homo sapien
taaaaagatatgagccagtcccgaa

SEQ ID NO: 3775534 - DNA, 25 bp, Homo sapien
tcaacgtgcaatcagaaatgggctt

SEQ ID NO: 3775535 - DNA, 25 bp, Homo sapien
tattttaagaaaaccacgctgtgga

SEQ ID NO: 3775536 - DNA, 25 bp, Homo sapien
tccttctaaaggagcctaccagggc

SEQ ID NO: 3775537 - DNA, 25 bp, Homo sapien
ggtaccgatgcccacactagcagtt

SEQ ID NO: 3775538 - DNA, 25 bp, Homo sapien
tctccaatgcagaaatgactggctg

SEQ ID NO: 3775539 - DNA, 25 bp, Homo sapien
tagagaaatcctgactgcccagctg

SEQ ID NO: 3775540 - DNA, 25 bp, Homo sapien
gaatatgggcctaattgtcaactgc

SEQ ID NO: 3775541 - DNA, 25 bp, Homo sapien
tagtggctgtgctcgacattcacgt

SEQ ID NO: 3775542 - DNA, 25 bp, Homo sapien
tctaaattaagtgccaacaagggta

SEQ ID NO: 3775543 - DNA, 25 bp, Homo sapien
ccaacaagggtagtggctgtgctcg

SEQ ID NO: 3775544 - DNA, 25 bp, Homo sapien
cgacattcacgttccttctctggtg

SEQ ID NO: 3775545 - DNA, 25 bp, Homo sapien
gctctgggtcccacgaaacttggaa

SEQ ID NO: 3775546 - DNA, 25 bp, Homo sapien
cagtgagtgaacagattaaacgcat

SEQ ID NO: 3775547 - DNA, 25 bp, Homo sapien
gaaaaaccaagtagtgcaactctca

SEQ ID NO: 3775548 - DNA, 25 bp, Homo sapien
tctgttaagtctctgaacacaggtc

SEQ ID NO: 3775549 - DNA, 25 bp, Homo sapien
aggcatccacccagatcgtaggaaa

SEQ ID NO: 3775550 - DNA, 25 bp, Homo sapien
cactgcccttcatttggcgaatagg

SEQ ID NO: 3775551 - DNA, 25 bp, Homo sapien
ttggcgaataggaactgcaactgtc

SEQ ID NO: 3775552 - DNA, 25 bp, Homo sapien
ccagatcgtaggaaaatcaaaccaa

SEQ ID NO: 3775553 - DNA, 25 bp, Homo sapien
ctgagattgagaaggcacccacaga

SEQ ID NO: 3775554 - DNA, 25 bp, Homo sapien
cacacgaggtcttggtgcagcctca

SEQ ID NO: 3775555 - DNA, 25 bp, Homo sapien
tgtggggtgacacacgaggtcttgg

SEQ ID NO: 3775556 - DNA, 25 bp, Homo sapien
attgagaaggcacccacagacagct

SEQ ID NO: 3775557 - DNA, 25 bp, Homo sapien
ggcgacttcttggcctgttctcctg

SEQ ID NO: 3775558 - DNA, 25 bp, Homo sapien
gggcgacttcttggcctgttctcct

SEQ ID NO: 3775559 - DNA, 25 bp, Homo sapien
cctgttctcctgagattgcctttca

SEQ ID NO: 3775560 - DNA, 25 bp, Homo sapien
gcctgttctcctgagattgcctttc

SEQ ID NO: 3775561 - DNA, 25 bp, Homo sapien
tcttcttgcaatttctgcttctcaa

SEQ ID NO: 3775562 - DNA, 25 bp, Homo sapien
tcttgctcttcttgcaatttctgct

SEQ ID NO: 3775563 - DNA, 25 bp, Homo sapien
gctcttcttgcaatttctgcttctc

SEQ ID NO: 3775564 - DNA, 25 bp, Homo sapien
ttgctcttcttgcaatttctgcttc

SEQ ID NO: 3775565 - DNA, 25 bp, Homo sapien
tctgctgccgttttaatagctctat

SEQ ID NO: 3775566 - DNA, 25 bp, Homo sapien
ttaatagctctatttccaagtcaga

SEQ ID NO: 3775567 - DNA, 25 bp, Homo sapien
tgctttattacttggtctcgttttc

SEQ ID NO: 3775568 - DNA, 25 bp, Homo sapien
ccaacttctgctgccgttttaatag

SEQ ID NO: 3775569 - DNA, 25 bp, Homo sapien
gactgctaatctgtagacaagggac

SEQ ID NO: 3775570 - DNA, 25 bp, Homo sapien
taaacgactcctatcaactaccgtg

SEQ ID NO: 3775571 - DNA, 25 bp, Homo sapien
taccgtgactaaccaactaggagtc

SEQ ID NO: 3775572 - DNA, 25 bp, Homo sapien
gacagggttgttctctaaacgactc

SEQ ID NO: 3775573 - DNA, 25 bp, Homo sapien
cttgatccctttaaagtccacacaa

SEQ ID NO: 3775574 - DNA, 25 bp, Homo sapien
acacaatcacatctgtaaaccaatc

SEQ ID NO: 3775575 - DNA, 25 bp, Homo sapien
gatccctttaaagtccacacaatca

SEQ ID NO: 3775576 - DNA, 25 bp, Homo sapien
aatcctcaattgcatacttcctcat

SEQ ID NO: 3775577 - DNA, 25 bp, Homo sapien
acccagctagtatagtccatcttta

SEQ ID NO: 3775578 - DNA, 25 bp, Homo sapien
cccagctagtatagtccatctttaa

SEQ ID NO: 3775579 - DNA, 25 bp, Homo sapien
acacccagctagtatagtccatctt

SEQ ID NO: 3775580 - DNA, 25 bp, Homo sapien
cacccagctagtatagtccatcttt

SEQ ID NO: 3775581 - DNA, 25 bp, Homo sapien
ttcccaattttcattagcagaactt

SEQ ID NO: 3775582 - DNA, 25 bp, Homo sapien
atttccagggaaacaaaagaggcag

SEQ ID NO: 3775583 - DNA, 25 bp, Homo sapien
tcattagcagaactttccgttaaaa

SEQ ID NO: 3775584 - DNA, 25 bp, Homo sapien
caattttcattagcagaactttccg

SEQ ID NO: 3775585 - DNA, 25 bp, Homo sapien
gatgagtactgccaaagtgccctac

SEQ ID NO: 3775586 - DNA, 25 bp, Homo sapien
tacctgtgactactgaagcgggcaa

SEQ ID NO: 3775587 - DNA, 25 bp, Homo sapien
tctatgtgaacagtggccccaaaat

SEQ ID NO: 3775588 - DNA, 25 bp, Homo sapien
tctcctggattatgcaaaagctgct

SEQ ID NO: 3775589 - DNA, 25 bp, Homo sapien
gaaatctgcctttttatactactga

SEQ ID NO: 3775590 - DNA, 25 bp, Homo sapien
tttaaagatcccttcaatagtaatc

SEQ ID NO: 3775591 - DNA, 25 bp, Homo sapien
cacacccagcccttcttaattgttt

SEQ ID NO: 3775592 - DNA, 25 bp, Homo sapien
taaagatcccttcaatagtaatctt

SEQ ID NO: 3775593 - DNA, 25 bp, Homo sapien
aactcttaagagataagatgagata

SEQ ID NO: 3775594 - DNA, 25 bp, Homo sapien
tttaatgtatttccaaccagaccaa

SEQ ID NO: 3775595 - DNA, 25 bp, Homo sapien
gaaaactcttaagagataagatgag

SEQ ID NO: 3775596 - DNA, 25 bp, Homo sapien
aaaactcttaagagataagatgaga

SEQ ID NO: 3775597 - DNA, 25 bp, Homo sapien
gatcacttattatgttaagcatttt

SEQ ID NO: 3775598 - DNA, 25 bp, Homo sapien
ataggaagtggaagatagatgtgac

SEQ ID NO: 3775599 - DNA, 25 bp, Homo sapien
gcattttcatacacgctattattta

SEQ ID NO: 3775600 - DNA, 25 bp, Homo sapien
aaattccagttgttgtcacatagga

SEQ ID NO: 3775601 - DNA, 25 bp, Homo sapien
gaaaatctttgagtgacaactgcta

SEQ ID NO: 3775602 - DNA, 25 bp, Homo sapien
ttcccaggcaggataggatggcttc

SEQ ID NO: 3775603 - DNA, 25 bp, Homo sapien
ttgtgtgacaaaggcagatggaagc

SEQ ID NO: 3775604 - DNA, 25 bp, Homo sapien
tttcggagcctactaaactgacgag

SEQ ID NO: 3775605 - DNA, 25 bp, Homo sapien
gcagagtatagcaacccaacatcca

SEQ ID NO: 3775606 - DNA, 25 bp, Homo sapien
taatatggttctagagacttctccc

SEQ ID NO: 3775607 - DNA, 25 bp, Homo sapien
ctactgacaaatgccggagtaggcg

SEQ ID NO: 3775608 - DNA, 25 bp, Homo sapien
catgagtgtcctatctattaagtct

SEQ ID NO: 3775609 - DNA, 25 bp, Homo sapien
tcagaagggaacccgtgactgcagg

SEQ ID NO: 3775610 - DNA, 25 bp, Homo sapien
tctgaggcctaatgagttcaggatt

SEQ ID NO: 3775611 - DNA, 25 bp, Homo sapien
tcttctatgtagtctggctcggcca

SEQ ID NO: 3775612 - DNA, 25 bp, Homo sapien
taatgagttcaggattgtcatcttc

SEQ ID NO: 3775613 - DNA, 25 bp, Homo sapien
aagatcttgatggttccgggaggtt

SEQ ID NO: 3775614 - DNA, 25 bp, Homo sapien
tatggtcaatatcctcaggtgggct

SEQ ID NO: 3775615 - DNA, 25 bp, Homo sapien
gatgcttcttgtaatgagatatgag

SEQ ID NO: 3775616 - DNA, 25 bp, Homo sapien
taatgagatatgagtccttatggtc

SEQ ID NO: 3775617 - DNA, 25 bp, Homo sapien
gagtccttatggtcaatatcctcag

SEQ ID NO: 3775618 - DNA, 25 bp, Homo sapien
gaccttgacctcgttattacatttg

SEQ ID NO: 3775619 - DNA, 25 bp, Homo sapien
gataatctccacgatgccaaaccca

SEQ ID NO: 3775620 - DNA, 25 bp, Homo sapien
aaacagacaactgcctctgaccttg

SEQ ID NO: 3775621 - DNA, 25 bp, Homo sapien
cgtatttctgcccttcaccatagat

SEQ ID NO: 3775622 - DNA, 25 bp, Homo sapien
tttgcctgccctccgctttccgtcc

SEQ ID NO: 3775623 - DNA, 25 bp, Homo sapien
ctttgcctgccctccgctttccgtc

SEQ ID NO: 3775624 - DNA, 25 bp, Homo sapien
ttgcctgccctccgctttccgtccc

SEQ ID NO: 3775625 - DNA, 25 bp, Homo sapien
tgccctccgctttccgtcccctcat

SEQ ID NO: 3775626 - DNA, 25 bp, Homo sapien
atatgtatatgctgtcaacacaggg

SEQ ID NO: 3775627 - DNA, 25 bp, Homo sapien
ccaagcctgtctcctattagagaga

SEQ ID NO: 3775628 - DNA, 25 bp, Homo sapien
ggatttcagcccaggaggatgtttt

SEQ ID NO: 3775629 - DNA, 25 bp, Homo sapien
ttttcagacacttgtggctgcacag

SEQ ID NO: 3775630 - DNA, 25 bp, Homo sapien
gaataatgatgaacccaatcttggc

SEQ ID NO: 3775631 - DNA, 25 bp, Homo sapien
gaaagtgaatgaccgtataccgcaa

SEQ ID NO: 3775632 - DNA, 25 bp, Homo sapien
tccattacttaatgttccatcaaca

SEQ ID NO: 3775633 - DNA, 25 bp, Homo sapien
cgtataccgcaagtacactagttta

SEQ ID NO: 3775634 - DNA, 25 bp, Homo sapien
ctccccagccagtaaaactccaggc

SEQ ID NO: 3775635 - DNA, 25 bp, Homo sapien
aagcccgtgcacgttcccatctcca

SEQ ID NO: 3775636 - DNA, 25 bp, Homo sapien
caagcccgtgcacgttcccatctcc

SEQ ID NO: 3775637 - DNA, 25 bp, Homo sapien
cccagccagtaaaactccaggcacc

SEQ ID NO: 3775638 - DNA, 25 bp, Homo sapien
aggatgcatccccctgttgtctgat

SEQ ID NO: 3775639 - DNA, 25 bp, Homo sapien
atggcaggatgcatccccctgttgt

SEQ ID NO: 3775640 - DNA, 25 bp, Homo sapien
ggcaggatgcatccccctgttgtct

SEQ ID NO: 3775641 - DNA, 25 bp, Homo sapien
gatgcatccccctgttgtctgatca

SEQ ID NO: 3775642 - DNA, 25 bp, Homo sapien
catagtggtttagcgcttctgttac

SEQ ID NO: 3775643 - DNA, 25 bp, Homo sapien
tctgttacaaagctattgatctggg

SEQ ID NO: 3775644 - DNA, 25 bp, Homo sapien
ggtgtcctgggctctatcactaaca

SEQ ID NO: 3775645 - DNA, 25 bp, Homo sapien
ccccattaatatatctcttgatgaa

SEQ ID NO: 3775646 - DNA, 25 bp, Homo sapien
tatgacctggcccaactggccaaac

SEQ ID NO: 3775647 - DNA, 25 bp, Homo sapien
aattccgtaatatttatgacctggc

SEQ ID NO: 3775648 - DNA, 25 bp, Homo sapien
gaccacgaaaagcttcctgctgggc

SEQ ID NO: 3775649 - DNA, 25 bp, Homo sapien
caagagctgactaataattccgtaa

SEQ ID NO: 3775650 - DNA, 25 bp, Homo sapien
gagttaacctggttggctgaaccag

SEQ ID NO: 3775651 - DNA, 25 bp, Homo sapien
agcgctcgctggttgagttaacctg

SEQ ID NO: 3775652 - DNA, 25 bp, Homo sapien
aaccagttactatgtctcctacggg

SEQ ID NO: 3775653 - DNA, 25 bp, Homo sapien
cacagggtgggcctgaagatcgaga

SEQ ID NO: 3775654 - DNA, 25 bp, Homo sapien
tcagctgccccagatacacatggga

SEQ ID NO: 3775655 - DNA, 25 bp, Homo sapien
cacacgagaatgctggagttggccc

SEQ ID NO: 3775656 - DNA, 25 bp, Homo sapien
ctctctccagctgcgaaggcaggca

SEQ ID NO: 3775657 - DNA, 25 bp, Homo sapien
ctgcttcatcgcttggaggtggcag

SEQ ID NO: 3775658 - DNA, 25 bp, Homo sapien
ttttcatatttcaaccctacagcgg

SEQ ID NO: 3775659 - DNA, 25 bp, Homo sapien
aaggcttcagaaccttcttggtggc

SEQ ID NO: 3775660 - DNA, 25 bp, Homo sapien
catttagcctctcggagacctgcct

SEQ ID NO: 3775661 - DNA, 25 bp, Homo sapien
cctacagcggttggactgtgcttcc

SEQ ID NO: 3775662 - DNA, 25 bp, Homo sapien
ctgtgacatatggtgtagttctatt

SEQ ID NO: 3775663 - DNA, 25 bp, Homo sapien
gatgagcttgctctataccacctgt

SEQ ID NO: 3775664 - DNA, 25 bp, Homo sapien
caaaaacgtccaacagcaatgtaca

SEQ ID NO: 3775665 - DNA, 25 bp, Homo sapien
acagtaatttggcagctctcttgag

SEQ ID NO: 3775666 - DNA, 25 bp, Homo sapien
gactagcgaaagcacacaaaaacgt

SEQ ID NO: 3775667 - DNA, 25 bp, Homo sapien
ttctctatccacaaaattagtttca

SEQ ID NO: 3775668 - DNA, 25 bp, Homo sapien
gctggcctcgcctgttcagagagtt

SEQ ID NO: 3775669 - DNA, 25 bp, Homo sapien
agctggcctcgcctgttcagagagt

SEQ ID NO: 3775670 - DNA, 25 bp, Homo sapien
gataagctggcctcgcctgttcaga

SEQ ID NO: 3775671 - DNA, 25 bp, Homo sapien
taagctggcctcgcctgttcagaga

SEQ ID NO: 3775672 - DNA, 25 bp, Homo sapien
gaaatttacaattgataaagtcatc

SEQ ID NO: 3775673 - DNA, 25 bp, Homo sapien
gcacagaagatctagaaatgctgac

SEQ ID NO: 3775674 - DNA, 25 bp, Homo sapien
aggccagtaatttgatatcggaaat

SEQ ID NO: 3775675 - DNA, 25 bp, Homo sapien
tcaatggtgactcctcccaaatgca

SEQ ID NO: 3775676 - DNA, 25 bp, Homo sapien
tgtgctccgtgctactgcccctcac

SEQ ID NO: 3775677 - DNA, 25 bp, Homo sapien
gtgtgctccgtgctactgcccctca

SEQ ID NO: 3775678 - DNA, 25 bp, Homo sapien
tgtgtgctccgtgctactgcccctc

SEQ ID NO: 3775679 - DNA, 25 bp, Homo sapien
tggtccatctaggccacaagccaca

SEQ ID NO: 3775680 - DNA, 25 bp, Homo sapien
cctggtccatctaggccacaagcca

SEQ ID NO: 3775681 - DNA, 25 bp, Homo sapien
agatctccctggtccatctaggcca

SEQ ID NO: 3775682 - DNA, 25 bp, Homo sapien
ttgagatctccctggtccatctagg

SEQ ID NO: 3775683 - DNA, 25 bp, Homo sapien
tctgaactcagcgtctaaggtgatc

SEQ ID NO: 3775684 - DNA, 25 bp, Homo sapien
tgtgaaccaactggcctaagctgac

SEQ ID NO: 3775685 - DNA, 25 bp, Homo sapien
tatacatccttcaaagccacgctgg

SEQ ID NO: 3775686 - DNA, 25 bp, Homo sapien
aagatcagccacaagtacaacacgg

SEQ ID NO: 3775687 - DNA, 25 bp, Homo sapien
cagccttcatgagcccagctttgcc

SEQ ID NO: 3775688 - DNA, 25 bp, Homo sapien
agggacaaggtgataaatggtcctg

SEQ ID NO: 3775689 - DNA, 25 bp, Homo sapien
ggacaaggtgataaatggtcctggc

SEQ ID NO: 3775690 - DNA, 25 bp, Homo sapien
tggaaaccataccagggagatttaa

SEQ ID NO: 3775691 - DNA, 25 bp, Homo sapien
cagggacaaggtgataaatggtcct

SEQ ID NO: 3775692 - DNA, 25 bp, Homo sapien
gcaactgaaaagggtcccctaagca

SEQ ID NO: 3775693 - DNA, 25 bp, Homo sapien
aatttcagcaccaaacttcagtcct

SEQ ID NO: 3775694 - DNA, 25 bp, Homo sapien
gcccgcagcttctcactcagttttc

SEQ ID NO: 3775695 - DNA, 25 bp, Homo sapien
aagggtcccctaagcaatttcagca

SEQ ID NO: 3775696 - DNA, 25 bp, Homo sapien
tgaattaacaaacgcacaacccttg

SEQ ID NO: 3775697 - DNA, 25 bp, Homo sapien
caagtgcccatcaaaggcttaggag

SEQ ID NO: 3775698 - DNA, 25 bp, Homo sapien
tagcctgatccagaccatcagagag

SEQ ID NO: 3775699 - DNA, 25 bp, Homo sapien
tgtacaagaacaactccaagatccc

SEQ ID NO: 3775700 - DNA, 25 bp, Homo sapien
gctatatgaagcaataggaaacaca

SEQ ID NO: 3775701 - DNA, 25 bp, Homo sapien
ctatatgaagcaataggaaacacag

SEQ ID NO: 3775702 - DNA, 25 bp, Homo sapien
agctatatgaagcaataggaaacac

SEQ ID NO: 3775703 - DNA, 25 bp, Homo sapien
aaacaatggaggaaccagcctgagt

SEQ ID NO: 3775704 - DNA, 25 bp, Homo sapien
caatggaggaaccagcctgagtcaa

SEQ ID NO: 3775705 - DNA, 25 bp, Homo sapien
ctggaggcacgagtcagcgatgaca

SEQ ID NO: 3775706 - DNA, 25 bp, Homo sapien
gatgacaccacagggtattcaagga

SEQ ID NO: 3775707 - DNA, 25 bp, Homo sapien
tggactgagcagtcgatggaaggct

SEQ ID NO: 3775708 - DNA, 25 bp, Homo sapien
tgggaaatagggctgaagacgtgga

SEQ ID NO: 3775709 - DNA, 25 bp, Homo sapien
cgatggaaggctcggaagtcagaca

SEQ ID NO: 3775710 - DNA, 25 bp, Homo sapien
aaatagggctgaagacgtggactga

SEQ ID NO: 3775711 - DNA, 25 bp, Homo sapien
tcaaaaagattgagacccagcaggt

SEQ ID NO: 3775712 - DNA, 25 bp, Homo sapien
tatcaggccgtgcaaagtgccatgc

SEQ ID NO: 3775713 - DNA, 25 bp, Homo sapien
tcttttgaagggagccggacacctg

SEQ ID NO: 3775714 - DNA, 25 bp, Homo sapien
taagggattccagtgcgttgacaag

SEQ ID NO: 3775715 - DNA, 25 bp, Homo sapien
cttctcctggaagcactaatcccat

SEQ ID NO: 3775716 - DNA, 25 bp, Homo sapien
caggcctacaatcttcactagatag

SEQ ID NO: 3775717 - DNA, 25 bp, Homo sapien
cactagatagtcaaattttactgga

SEQ ID NO: 3775718 - DNA, 25 bp, Homo sapien
cagaatgctttcaaatcaagtgcta

SEQ ID NO: 3775719 - DNA, 25 bp, Homo sapien
ttagcaagagaagagttagcccagg

SEQ ID NO: 3775720 - DNA, 25 bp, Homo sapien
ctcagtagatataggcaggctcctt

SEQ ID NO: 3775721 - DNA, 25 bp, Homo sapien
gacgaacggttacagagactgacct

SEQ ID NO: 3775722 - DNA, 25 bp, Homo sapien
catcaaggcctaagtgacgaacggt

SEQ ID NO: 3775723 - DNA, 25 bp, Homo sapien
gccacaagaccagggtagacactta

SEQ ID NO: 3775724 - DNA, 25 bp, Homo sapien
tgcatgccaccctgagaaaaaatct

SEQ ID NO: 3775725 - DNA, 25 bp, Homo sapien
tctgtggtattccactacggcagca

SEQ ID NO: 3775726 - DNA, 25 bp, Homo sapien
gacacttaagggttcagcttccaag

SEQ ID NO: 3775727 - DNA, 25 bp, Homo sapien
accacacacgtcacaaaggagctca

SEQ ID NO: 3775728 - DNA, 25 bp, Homo sapien
ttcaatggagagcaatacaaacaca

SEQ ID NO: 3775729 - DNA, 25 bp, Homo sapien
gaaaaagcactgtgtgatggcctgg

SEQ ID NO: 3775730 - DNA, 25 bp, Homo sapien
taactaggattacaagagcgtgcca

SEQ ID NO: 3775731 - DNA, 25 bp, Homo sapien
caagttcgtccattcaccggaagaa

SEQ ID NO: 3775732 - DNA, 25 bp, Homo sapien
cagggcctgggacacaatacaaagt

SEQ ID NO: 3775733 - DNA, 25 bp, Homo sapien
gaaccctgttgagcgctctcctaga

SEQ ID NO: 3775734 - DNA, 25 bp, Homo sapien
gaagaatcttctataggcgaaccct

SEQ ID NO: 3775735 - DNA, 25 bp, Homo sapien
gagaattatgctttcgcaccccatg

SEQ ID NO: 3775736 - DNA, 25 bp, Homo sapien
ccagatatggaaaaacgcagtgtat

SEQ ID NO: 3775737 - DNA, 25 bp, Homo sapien
cgaggtccagctgccgatgagaatt

SEQ ID NO: 3775738 - DNA, 25 bp, Homo sapien
gcagtgtataaccaagtgaccaggg

SEQ ID NO: 3775739 - DNA, 25 bp, Homo sapien
tgctcaattcgaagctacgggagga

SEQ ID NO: 3775740 - DNA, 25 bp, Homo sapien
aatcagagggttaggtgttctccac

SEQ ID NO: 3775741 - DNA, 25 bp, Homo sapien
gatttgcaccaaggagctttgagct

SEQ ID NO: 3775742 - DNA, 25 bp, Homo sapien
gctctcagtaattcagcaaccctgg

SEQ ID NO: 3775743 - DNA, 25 bp, Homo sapien
taaggggtggcccacatgctgttcc

SEQ ID NO: 3775744 - DNA, 25 bp, Homo sapien
atcctaaggggtggcccacatgctg

SEQ ID NO: 3775745 - DNA, 25 bp, Homo sapien
ctatcctaaggggtggcccacatgc

SEQ ID NO: 3775746 - DNA, 25 bp, Homo sapien
aggggtggcccacatgctgttccaa

SEQ ID NO: 3775747 - DNA, 25 bp, Homo sapien
gagttaccaatcaatgggcccaagg

SEQ ID NO: 3775748 - DNA, 25 bp, Homo sapien
ggaggtgcatataacccaggcgacc

SEQ ID NO: 3775749 - DNA, 25 bp, Homo sapien
tgtgggcactggcataacagcataa

SEQ ID NO: 3775750 - DNA, 25 bp, Homo sapien
taaacctgccatggtcggaagagcc

SEQ ID NO: 3775751 - DNA, 25 bp, Homo sapien
caccttcaatcccaagcgacaaagt

SEQ ID NO: 3775752 - DNA, 25 bp, Homo sapien
caagcgacaaagtgtccgaacccca

SEQ ID NO: 3775753 - DNA, 25 bp, Homo sapien
cagaaccatacggtttcccgatcca

SEQ ID NO: 3775754 - DNA, 25 bp, Homo sapien
gacagaactgaacagtccacctcat

SEQ ID NO: 3775755 - DNA, 25 bp, Homo sapien
aggccacactcgaccccatgatgca

SEQ ID NO: 3775756 - DNA, 25 bp, Homo sapien
acacagaggacatcccactccacag

SEQ ID NO: 3775757 - DNA, 25 bp, Homo sapien
tcatgaggtcatcccaaggccacac

SEQ ID NO: 3775758 - DNA, 25 bp, Homo sapien
cccacagcacactagcacccatagt

SEQ ID NO: 3775759 - DNA, 25 bp, Homo sapien
ctcatttccttaaaacacttgcaca

SEQ ID NO: 3775760 - DNA, 25 bp, Homo sapien
aactcatttccttaaaacacttgca

SEQ ID NO: 3775761 - DNA, 25 bp, Homo sapien
tcatttccttaaaacacttgcacac

SEQ ID NO: 3775762 - DNA, 25 bp, Homo sapien
ccaactcatttccttaaaacacttg

SEQ ID NO: 3775763 - DNA, 25 bp, Homo sapien
gcccagcggcccgactgctcggcgg

SEQ ID NO: 3775764 - DNA, 25 bp, Homo sapien
ctcggcgcgcgcacaaaggcgcgcg

SEQ ID NO: 3775765 - DNA, 25 bp, Homo sapien
gcgcagggcggctctcgctccccgc

SEQ ID NO: 3775766 - DNA, 25 bp, Homo sapien
cccgcaagccagtccggcgcagggc

SEQ ID NO: 3775767 - DNA, 25 bp, Homo sapien
caagtctgcgatgctaagaggccgt

SEQ ID NO: 3775768 - DNA, 25 bp, Homo sapien
tgtacaaatttacggtcaagccagg

SEQ ID NO: 3775769 - DNA, 25 bp, Homo sapien
gaggccgtccccatagaaatcctgc

SEQ ID NO: 3775770 - DNA, 25 bp, Homo sapien
cctcttggaagaaaacgcagacaga

SEQ ID NO: 3775771 - DNA, 25 bp, Homo sapien
cagtggttaccaagtcttcattgac

SEQ ID NO: 3775772 - DNA, 25 bp, Homo sapien
tattgagtaataaccgaattcccac

SEQ ID NO: 3775773 - DNA, 25 bp, Homo sapien
gaattcccacatggtccgttcagtg

SEQ ID NO: 3775774 - DNA, 25 bp, Homo sapien
aagtcttcattgacccctgatgacc

SEQ ID NO: 3775775 - DNA, 25 bp, Homo sapien
aacgactactgaatgatgcaaagat

SEQ ID NO: 3775776 - DNA, 25 bp, Homo sapien
ctactgaatgatgcaaagatctgca

SEQ ID NO: 3775777 - DNA, 25 bp, Homo sapien
cgactactgaatgatgcaaagatct

SEQ ID NO: 3775778 - DNA, 25 bp, Homo sapien
actactgaatgatgcaaagatctgc

SEQ ID NO: 3775779 - DNA, 25 bp, Homo sapien
tgggacattttgtggctagacataa

SEQ ID NO: 3775780 - DNA, 25 bp, Homo sapien
aatttttaccttagtcaggctgcaa

SEQ ID NO: 3775781 - DNA, 25 bp, Homo sapien
tctgtggccctgttatttgtgttct

SEQ ID NO: 3775782 - DNA, 25 bp, Homo sapien
gaggaaggagcataaacaagatttg

SEQ ID NO: 3775783 - DNA, 25 bp, Homo sapien
acacctaatttgacagcattttgtt

SEQ ID NO: 3775784 - DNA, 25 bp, Homo sapien
cacacctaatttgacagcattttgt

SEQ ID NO: 3775785 - DNA, 25 bp, Homo sapien
atttttctgtcgctcaatgagaatg

SEQ ID NO: 3775786 - DNA, 25 bp, Homo sapien
ctcatctttctcaacgtcaacactg

SEQ ID NO: 3775787 - DNA, 25 bp, Homo sapien
tctttctcaacgtcaacactgaaca

SEQ ID NO: 3775788 - DNA, 25 bp, Homo sapien
tctgtcgctcaatgagaatgtcaaa

SEQ ID NO: 3775789 - DNA, 25 bp, Homo sapien
ggtgctgagtgtcggccatgcactc

SEQ ID NO: 3775790 - DNA, 25 bp, Homo sapien
tcagggattgggtgacaattactcc

SEQ ID NO: 3775791 - DNA, 25 bp, Homo sapien
tcacaggcactgaagtgaagggcaa

SEQ ID NO: 3775792 - DNA, 25 bp, Homo sapien
tccccatcgctgatataaacaattg

SEQ ID NO: 3775793 - DNA, 25 bp, Homo sapien
cttccgagatctgatgagattgggt

SEQ ID NO: 3775794 - DNA, 25 bp, Homo sapien
cgttcagggtggtatggtcgtagac

SEQ ID NO: 3775795 - DNA, 25 bp, Homo sapien
ttagcttccgagatctgatgagatt

SEQ ID NO: 3775796 - DNA, 25 bp, Homo sapien
cgagatctgatgagattgggtgcgt

SEQ ID NO: 3775797 - DNA, 25 bp, Homo sapien
tccagctcgaggcatttaggttctt

SEQ ID NO: 3775798 - DNA, 25 bp, Homo sapien
gataggtgtctctcaactggtctct

SEQ ID NO: 3775799 - DNA, 25 bp, Homo sapien
tgcatctatccatggagggaggtca

SEQ ID NO: 3775800 - DNA, 25 bp, Homo sapien
tttgtctccacctgttgcaacaagc

SEQ ID NO: 3775801 - DNA, 25 bp, Homo sapien
tggtctctgactttccgaggaaatg

SEQ ID NO: 3775802 - DNA, 25 bp, Homo sapien
gactagtagctttaacaacggagag

SEQ ID NO: 3775803 - DNA, 25 bp, Homo sapien
gcaacagttcgctcccaagtagact

SEQ ID NO: 3775804 - DNA, 25 bp, Homo sapien
caacggagaggcattggtaatagcg

SEQ ID NO: 3775805 - DNA, 25 bp, Homo sapien
taatcacagccataagactagtagc

SEQ ID NO: 3775806 - DNA, 25 bp, Homo sapien
gccctgagtatcctcttaataacca

SEQ ID NO: 3775807 - DNA, 25 bp, Homo sapien
tccagccctgagtatcctcttaata

SEQ ID NO: 3775808 - DNA, 25 bp, Homo sapien
atttccagccctgagtatcctctta

SEQ ID NO: 3775809 - DNA, 25 bp, Homo sapien
cagccctgagtatcctcttaataac

SEQ ID NO: 3775810 - DNA, 25 bp, Homo sapien
acagctgctgctaacacaatccaga

SEQ ID NO: 3775811 - DNA, 25 bp, Homo sapien
cacagctgctgctaacacaatccag

SEQ ID NO: 3775812 - DNA, 25 bp, Homo sapien
agctgctgctaacacaatccagatg

SEQ ID NO: 3775813 - DNA, 25 bp, Homo sapien
cagctgctgctaacacaatccagat

SEQ ID NO: 3775814 - DNA, 25 bp, Homo sapien
ccaggactgaactcgctgatacgat

SEQ ID NO: 3775815 - DNA, 25 bp, Homo sapien
ccagtccttggttactgagccttca

SEQ ID NO: 3775816 - DNA, 25 bp, Homo sapien
tgactgagactaaaagtgtgcccac

SEQ ID NO: 3775817 - DNA, 25 bp, Homo sapien
tactgtacaggtttagaatcacact

SEQ ID NO: 3775818 - DNA, 25 bp, Homo sapien
ccaggggtgaagtggccagcaatta

SEQ ID NO: 3775819 - DNA, 25 bp, Homo sapien
ggtgaagtggccagcaattagagtg

SEQ ID NO: 3775820 - DNA, 25 bp, Homo sapien
gggtgaagtggccagcaattagagt

SEQ ID NO: 3775821 - DNA, 25 bp, Homo sapien
aggggtgaagtggccagcaattaga

SEQ ID NO: 3775822 - DNA, 25 bp, Homo sapien
tggcaacaacggcatgaactgccag

SEQ ID NO: 3775823 - DNA, 25 bp, Homo sapien
gcaacaacggcatgaactgccagca

SEQ ID NO: 3775824 - DNA, 25 bp, Homo sapien
caatggcaacaacggcatgaactgc

SEQ ID NO: 3775825 - DNA, 25 bp, Homo sapien
tttcaatggcaacaacggcatgaac

SEQ ID NO: 3775826 - DNA, 25 bp, Homo sapien
tcacctaagtgggttcctgctccaa

SEQ ID NO: 3775827 - DNA, 25 bp, Homo sapien
agtgtcacctaagtgggttcctgct

SEQ ID NO: 3775828 - DNA, 25 bp, Homo sapien
ttggaagtcaaggttagtgtcacct

SEQ ID NO: 3775829 - DNA, 25 bp, Homo sapien
tgtcacctaagtgggttcctgctcc

SEQ ID NO: 3775830 - DNA, 25 bp, Homo sapien
aaatggtccacccactaatgtggta

SEQ ID NO: 3775831 - DNA, 25 bp, Homo sapien
tacagaaccccagttcactgttaac

SEQ ID NO: 3775832 - DNA, 25 bp, Homo sapien
cactgttaaccttatggatcaactc

SEQ ID NO: 3775833 - DNA, 25 bp, Homo sapien
taaccttatggatcaactccagcaa

SEQ ID NO: 3775834 - DNA, 25 bp, Homo sapien
tgggtatcctgaagcgtgtcacacg

SEQ ID NO: 3775835 - DNA, 25 bp, Homo sapien
tcaggaccctttcaactccaaaaga

SEQ ID NO: 3775836 - DNA, 25 bp, Homo sapien
agcagtaacctatttctgggtatcc

SEQ ID NO: 3775837 - DNA, 25 bp, Homo sapien
aaaatgagatggtctctcaggaccc

SEQ ID NO: 3775838 - DNA, 25 bp, Homo sapien
ggaaacgatgtgtgaaaactacaac

SEQ ID NO: 3775839 - DNA, 25 bp, Homo sapien
cagtttggcggccaggaaacgatgt

SEQ ID NO: 3775840 - DNA, 25 bp, Homo sapien
aaagtaaatccagtttggcggccag

SEQ ID NO: 3775841 - DNA, 25 bp, Homo sapien
gcggccaggaaacgatgtgtgaaaa

SEQ ID NO: 3775842 - DNA, 25 bp, Homo sapien
caacaagcagacagcactgggatgg

SEQ ID NO: 3775843 - DNA, 25 bp, Homo sapien
gtcagaggagtggctggcaagatga

SEQ ID NO: 3775844 - DNA, 25 bp, Homo sapien
atcagggtaccaggtgagggtttgg

SEQ ID NO: 3775845 - DNA, 25 bp, Homo sapien
acagccagaatcagggtaccaggtg

SEQ ID NO: 3775846 - DNA, 25 bp, Homo sapien
agaagagggagagttagcccataag

SEQ ID NO: 3775847 - DNA, 25 bp, Homo sapien
gttagcccataaggggcttgtttgc

SEQ ID NO: 3775848 - DNA, 25 bp, Homo sapien
aagaagagggagagttagcccataa

SEQ ID NO: 3775849 - DNA, 25 bp, Homo sapien
gagagttagcccataaggggcttgt

SEQ ID NO: 3775850 - DNA, 25 bp, Homo sapien
gccactagcacgtccacaaagagtt

SEQ ID NO: 3775851 - DNA, 25 bp, Homo sapien
atgagagccactagcacgtccacaa

SEQ ID NO: 3775852 - DNA, 25 bp, Homo sapien
ggtcatgagagccactagcacgtcc

SEQ ID NO: 3775853 - DNA, 25 bp, Homo sapien
gaggggtcatgagagccactagcac

SEQ ID NO: 3775854 - DNA, 25 bp, Homo sapien
ctctttgcagtgtgatcatctctga

SEQ ID NO: 3775855 - DNA, 25 bp, Homo sapien
cgatcctgtaccctgagaggtttcc

SEQ ID NO: 3775856 - DNA, 25 bp, Homo sapien
gctttgcagtttctcgatcctgtac

SEQ ID NO: 3775857 - DNA, 25 bp, Homo sapien
ttgcagtgtgatcatctctgagcct

SEQ ID NO: 3775858 - DNA, 25 bp, Homo sapien
aaaacattcagacgagtgttttgct

SEQ ID NO: 3775859 - DNA, 25 bp, Homo sapien
aacattcagacgagtgttttgcttc

SEQ ID NO: 3775860 - DNA, 25 bp, Homo sapien
ctaccagcaaaacattcagacgagt

SEQ ID NO: 3775861 - DNA, 25 bp, Homo sapien
ccagcaaaacattcagacgagtgtt

SEQ ID NO: 3775862 - DNA, 25 bp, Homo sapien
gttcttaacaccaagcttggatttg

SEQ ID NO: 3775863 - DNA, 25 bp, Homo sapien
aagtagttcttaacaccaagcttgg

SEQ ID NO: 3775864 - DNA, 25 bp, Homo sapien
tagttcttaacaccaagcttggatt

SEQ ID NO: 3775865 - DNA, 25 bp, Homo sapien
tcttaacaccaagcttggatttgat

SEQ ID NO: 3775866 - DNA, 25 bp, Homo sapien
tcaccgaaacgaaactcagcacaaa

SEQ ID NO: 3775867 - DNA, 25 bp, Homo sapien
ttttcactcaccgaaacgaaactca

SEQ ID NO: 3775868 - DNA, 25 bp, Homo sapien
gaaacgaaactcagcacaaaatcca

SEQ ID NO: 3775869 - DNA, 25 bp, Homo sapien
ttcactcaccgaaacgaaactcagc

SEQ ID NO: 3775870 - DNA, 25 bp, Homo sapien
ttctcactaggccactcaaatatct

SEQ ID NO: 3775871 - DNA, 25 bp, Homo sapien
atgggattctcactaggccactcaa

SEQ ID NO: 3775872 - DNA, 25 bp, Homo sapien
attctcactaggccactcaaatatc

SEQ ID NO: 3775873 - DNA, 25 bp, Homo sapien
gggattctcactaggccactcaaat

SEQ ID NO: 3775874 - DNA, 25 bp, Homo sapien
tcagtaaccaccagagcctgtgaat

SEQ ID NO: 3775875 - DNA, 25 bp, Homo sapien
gagaaagccgactgacaaaactgtg

SEQ ID NO: 3775876 - DNA, 25 bp, Homo sapien
ttctctgcccagttgctaaaccaac

SEQ ID NO: 3775877 - DNA, 25 bp, Homo sapien
gctaggatggcttggttaccacttc

SEQ ID NO: 3775878 - DNA, 25 bp, Homo sapien
tggaatgagtatcagccacgccgga

SEQ ID NO: 3775879 - DNA, 25 bp, Homo sapien
cacgccggactgattgaaggaagca

SEQ ID NO: 3775880 - DNA, 25 bp, Homo sapien
tctgcatgggtgctcgaatcttgcc

SEQ ID NO: 3775881 - DNA, 25 bp, Homo sapien
tattcccaaaacaggcgagcagagc

SEQ ID NO: 3775882 - DNA, 25 bp, Homo sapien
agacttcagtcttttggtgagtctt

SEQ ID NO: 3775883 - DNA, 25 bp, Homo sapien
gagacttcagtcttttggtgagtct

SEQ ID NO: 3775884 - DNA, 25 bp, Homo sapien
ggagacttcagtcttttggtgagtc

SEQ ID NO: 3775885 - DNA, 25 bp, Homo sapien
tccctgagagtcacttagccgctgg

SEQ ID NO: 3775886 - DNA, 25 bp, Homo sapien
taaatagaagttgggatggcaaggc

SEQ ID NO: 3775887 - DNA, 25 bp, Homo sapien
gaacttgctagtggttgcccctaaa

SEQ ID NO: 3775888 - DNA, 25 bp, Homo sapien
aggaactctttccaattgcccgaag

SEQ ID NO: 3775889 - DNA, 25 bp, Homo sapien
gactagttatgatcaaagagtgagg

SEQ ID NO: 3775890 - DNA, 25 bp, Homo sapien
gcttccgcagtaaacgactagttat

SEQ ID NO: 3775891 - DNA, 25 bp, Homo sapien
caaagagtgaggaaacctgctccct

SEQ ID NO: 3775892 - DNA, 25 bp, Homo sapien
gtctgggctccagctagcttccgca

SEQ ID NO: 3775893 - DNA, 25 bp, Homo sapien
agcaggatgacttgatctctccctg

SEQ ID NO: 3775894 - DNA, 25 bp, Homo sapien
gaaagttgccgctcattacaaacgg

SEQ ID NO: 3775895 - DNA, 25 bp, Homo sapien
agccacacactgcttgaagcctctt

SEQ ID NO: 3775896 - DNA, 25 bp, Homo sapien
tatgccccagtcagcaagaagcagc

SEQ ID NO: 3775897 - DNA, 25 bp, Homo sapien
gataatcgagctgccaaaattcaga

SEQ ID NO: 3775898 - DNA, 25 bp, Homo sapien
gaccattcattacaccacagctttg

SEQ ID NO: 3775899 - DNA, 25 bp, Homo sapien
tacctctgcagcatttagaattaaa

SEQ ID NO: 3775900 - DNA, 25 bp, Homo sapien
taggaaccactaactctctgacata

SEQ ID NO: 3775901 - DNA, 25 bp, Homo sapien
taacccatgtaatccccatgtcaat

SEQ ID NO: 3775902 - DNA, 25 bp, Homo sapien
gatgacaatgttattaacccatgta

SEQ ID NO: 3775903 - DNA, 25 bp, Homo sapien
taaaatgcccagatcttaattatcc

SEQ ID NO: 3775904 - DNA, 25 bp, Homo sapien
gatcttaattatcctaccagatgac

SEQ ID NO: 3775905 - DNA, 25 bp, Homo sapien
caggcaatgaaaactggcatagtca

SEQ ID NO: 3775906 - DNA, 25 bp, Homo sapien
tgggaaaaacgagtactcctgcctg

SEQ ID NO: 3775907 - DNA, 25 bp, Homo sapien
taaaattgcatccagagaggagtct

SEQ ID NO: 3775908 - DNA, 25 bp, Homo sapien
gagaccaaatatgatgcattcccag

SEQ ID NO: 3775909 - DNA, 25 bp, Homo sapien
cagctcttgaatgagattcacatag

SEQ ID NO: 3775910 - DNA, 25 bp, Homo sapien
gggccagctcttgaatgagattcac

SEQ ID NO: 3775911 - DNA, 25 bp, Homo sapien
ttgggggccagctcttgaatgagat

SEQ ID NO: 3775912 - DNA, 25 bp, Homo sapien
gaatgagattcacatagtcagtttt

SEQ ID NO: 3775913 - DNA, 25 bp, Homo sapien
tccctatgaatcacttcaaaaggca

SEQ ID NO: 3775914 - DNA, 25 bp, Homo sapien
tggaaaccaagacacacccaaggaa

SEQ ID NO: 3775915 - DNA, 25 bp, Homo sapien
cttggtgctgactaccctatgatcc

SEQ ID NO: 3775916 - DNA, 25 bp, Homo sapien
catatagtttgcttatcttggtgct

SEQ ID NO: 3775917 - DNA, 25 bp, Homo sapien
tgcacactcattgggcgagtgactt

SEQ ID NO: 3775918 - DNA, 25 bp, Homo sapien
tgcaggcatatgcacactcattggg

SEQ ID NO: 3775919 - DNA, 25 bp, Homo sapien
gagtgacttcacttaggatctttgt

SEQ ID NO: 3775920 - DNA, 25 bp, Homo sapien
ttctcacaaatcttcattgcaggca

SEQ ID NO: 3775921 - DNA, 25 bp, Homo sapien
ggtgtccaagcaaaaactgatcaat

SEQ ID NO: 3775922 - DNA, 25 bp, Homo sapien
tagtgtccagcgaaaagttaactcc

SEQ ID NO: 3775923 - DNA, 25 bp, Homo sapien
tatcagtgacttgtagaatcggttc

SEQ ID NO: 3775924 - DNA, 25 bp, Homo sapien
agttaactcctctgtctatcagtga

SEQ ID NO: 3775925 - DNA, 25 bp, Homo sapien
aacataacttctatgcctgattatt

SEQ ID NO: 3775926 - DNA, 25 bp, Homo sapien
acttctatgcctgattattccaata

SEQ ID NO: 3775927 - DNA, 25 bp, Homo sapien
tatagtcccctatgggtagggatgg

SEQ ID NO: 3775928 - DNA, 25 bp, Homo sapien
cactgcaggggtgtgcctcttctgt

SEQ ID NO: 3775929 - DNA, 25 bp, Homo sapien
ctgagactgttccactgtactccaa

SEQ ID NO: 3775930 - DNA, 25 bp, Homo sapien
acttgagcctggaagacggaagttg

SEQ ID NO: 3775931 - DNA, 25 bp, Homo sapien
tgagcctggaagacggaagttgcag

SEQ ID NO: 3775932 - DNA, 25 bp, Homo sapien
tgagactgttccactgtactccaac

SEQ ID NO: 3775933 - DNA, 25 bp, Homo sapien
cctctgcgattacacaagcttcttt

SEQ ID NO: 3775934 - DNA, 25 bp, Homo sapien
ttcctctgcgattacacaagcttct

SEQ ID NO: 3775935 - DNA, 25 bp, Homo sapien
tcctctgcgattacacaagcttctt

SEQ ID NO: 3775936 - DNA, 25 bp, Homo sapien
gatctaaaacgagggacagggcctg

SEQ ID NO: 3775937 - DNA, 25 bp, Homo sapien
gccgccgccatgcaagcagttgtca

SEQ ID NO: 3775938 - DNA, 25 bp, Homo sapien
gttatttatagccagggccaggaga

SEQ ID NO: 3775939 - DNA, 25 bp, Homo sapien
tattcacagcaaaaccacaacgtgg

SEQ ID NO: 3775940 - DNA, 25 bp, Homo sapien
ccaccacagcaactgggctcgcgca

SEQ ID NO: 3775941 - DNA, 25 bp, Homo sapien
gtgagagaccaaaagcccggcgcaa

SEQ ID NO: 3775942 - DNA, 25 bp, Homo sapien
cttcacagtcggcccctggccgccc

SEQ ID NO: 3775943 - DNA, 25 bp, Homo sapien
cagcaactgggctcgcgcaccacat

SEQ ID NO: 3775944 - DNA, 25 bp, Homo sapien
cagcttcaatcgcctccgccacccg

SEQ ID NO: 3775945 - DNA, 25 bp, Homo sapien
gcagcttcaatcgcctccgccaccc

SEQ ID NO: 3775946 - DNA, 25 bp, Homo sapien
agcagcttcaatcgcctccgccacc

SEQ ID NO: 3775947 - DNA, 25 bp, Homo sapien
ccattggctctcaaggaagggatag

SEQ ID NO: 3775948 - DNA, 25 bp, Homo sapien
gagacgcgctgaagctactcgcgga

SEQ ID NO: 3775949 - DNA, 25 bp, Homo sapien
ggacaaatgacgcaactgaacacag

SEQ ID NO: 3775950 - DNA, 25 bp, Homo sapien
actgtgcagtttccgcggagcgcag

SEQ ID NO: 3775951 - DNA, 25 bp, Homo sapien
tcacgctgattggcggcgacgcggg

SEQ ID NO: 3775952 - DNA, 25 bp, Homo sapien
cgctgattggcggcgacgcgggagg

SEQ ID NO: 3775953 - DNA, 25 bp, Homo sapien
acgctgattggcggcgacgcgggag

SEQ ID NO: 3775954 - DNA, 25 bp, Homo sapien
cttcacgctgattggcggcgacgcg

SEQ ID NO: 3775955 - DNA, 25 bp, Homo sapien
cctgatggggccgttgggcggccgg

SEQ ID NO: 3775956 - DNA, 25 bp, Homo sapien
gcggccggtagctgttgctgttggg

SEQ ID NO: 3775957 - DNA, 25 bp, Homo sapien
gaacgtgaagctccgcggtgcctga

SEQ ID NO: 3775958 - DNA, 25 bp, Homo sapien
cgggaacgtgaagctccgcggtgcc

SEQ ID NO: 3775959 - DNA, 25 bp, Homo sapien
tgggctagggcttcatgacggccac

SEQ ID NO: 3775960 - DNA, 25 bp, Homo sapien
cctgtgtggccgtctataaggtgag

SEQ ID NO: 3775961 - DNA, 25 bp, Homo sapien
tgcacctcagcctgtgtggccgtct

SEQ ID NO: 3775962 - DNA, 25 bp, Homo sapien
ttttctggcgctgggtcatccacag

SEQ ID NO: 3775963 - DNA, 25 bp, Homo sapien
acttggaggcggtggtctctgggac

SEQ ID NO: 3775964 - DNA, 25 bp, Homo sapien
tgagctgggcccgaacgtctaggtc

SEQ ID NO: 3775965 - DNA, 25 bp, Homo sapien
gcgcctggcgattcctccggaaagt

SEQ ID NO: 3775966 - DNA, 25 bp, Homo sapien
aagtcgtctactccgcggcggaggc

SEQ ID NO: 3775967 - DNA, 25 bp, Homo sapien
tgtgaagccagttgatggtgcgtgg

SEQ ID NO: 3775968 - DNA, 25 bp, Homo sapien
gtgaagccagttgatggtgcgtggt

SEQ ID NO: 3775969 - DNA, 25 bp, Homo sapien
ctgtgaagccagttgatggtgcgtg

SEQ ID NO: 3775970 - DNA, 25 bp, Homo sapien
aatgaagaggtactagtccccccat

SEQ ID NO: 3775971 - DNA, 25 bp, Homo sapien
tataccgtggtcatgcttggactcc

SEQ ID NO: 3775972 - DNA, 25 bp, Homo sapien
tacagtgtcacaaccaagatgctca

SEQ ID NO: 3775973 - DNA, 25 bp, Homo sapien
gatgctcacatcgatatagtccaga

SEQ ID NO: 3775974 - DNA, 25 bp, Homo sapien
tgacagtcagatgggtaacacagag

SEQ ID NO: 3775975 - DNA, 25 bp, Homo sapien
tttacagatccattgttgtaccaac

SEQ ID NO: 3775976 - DNA, 25 bp, Homo sapien
gatttttacagatccattgttgtac

SEQ ID NO: 3775977 - DNA, 25 bp, Homo sapien
ggtgatttttacagatccattgttg

SEQ ID NO: 3775978 - DNA, 25 bp, Homo sapien
tacagatccattgttgtaccaactc

SEQ ID NO: 3775979 - DNA, 25 bp, Homo sapien
cataggtggagaaatggtcagagca

SEQ ID NO: 3775980 - DNA, 25 bp, Homo sapien
caggctcgagtgcttagctaaatgc

SEQ ID NO: 3775981 - DNA, 25 bp, Homo sapien
tacccagaaccatgagtagacggca

SEQ ID NO: 3775982 - DNA, 25 bp, Homo sapien
ttattttctatcttgcaggctcgag

SEQ ID NO: 3775983 - DNA, 25 bp, Homo sapien
aattttaaggtagcattctgtggta

SEQ ID NO: 3775984 - DNA, 25 bp, Homo sapien
ccacaccagacatatagactcttta

SEQ ID NO: 3775985 - DNA, 25 bp, Homo sapien
aaggtagcattctgtggtattaata

SEQ ID NO: 3775986 - DNA, 25 bp, Homo sapien
aaagagcatatatttaaggcattga

SEQ ID NO: 3775987 - DNA, 25 bp, Homo sapien
gacagtgtgcaagaaagcaagccag

SEQ ID NO: 3775988 - DNA, 25 bp, Homo sapien
gcactttcagacatgtaaggcactg

SEQ ID NO: 3775989 - DNA, 25 bp, Homo sapien
taaggcactgtcatgtaacaagtag

SEQ ID NO: 3775990 - DNA, 25 bp, Homo sapien
aagcccgtgggctgttgaccgtaag

SEQ ID NO: 3775991 - DNA, 25 bp, Homo sapien
tacgatatgaaatagatactggaga

SEQ ID NO: 3775992 - DNA, 25 bp, Homo sapien
aattacgatatgaaatagatactgg

SEQ ID NO: 3775993 - DNA, 25 bp, Homo sapien
ggaaattacgatatgaaatagatac

SEQ ID NO: 3775994 - DNA, 25 bp, Homo sapien
aatgggaaattacgatatgaaatag

SEQ ID NO: 3775995 - DNA, 25 bp, Homo sapien
tgttttgcgattaattcacgaaccg

SEQ ID NO: 3775996 - DNA, 25 bp, Homo sapien
aagatcattatacttcatgttctac

SEQ ID NO: 3775997 - DNA, 25 bp, Homo sapien
tcacgaaccgtctgcagctcttctt

SEQ ID NO: 3775998 - DNA, 25 bp, Homo sapien
tgctttctttgtgaagaatatgggc

SEQ ID NO: 3775999 - DNA, 25 bp, Homo sapien
aaattaagcaggataagggcctagc

SEQ ID NO: 3776000 - DNA, 25 bp, Homo sapien
taggcagattctagacacctgggat

SEQ ID NO: 3776001 - DNA, 25 bp, Homo sapien
tgagcacacctattctacgctaggc

SEQ ID NO: 3776002 - DNA, 25 bp, Homo sapien
tgctgataaatgagatacctggtga

SEQ ID NO: 3776003 - DNA, 25 bp, Homo sapien
agtctatccttatcagacatttggg

SEQ ID NO: 3776004 - DNA, 25 bp, Homo sapien
ttccagcttcgtcctacaaaggaca

SEQ ID NO: 3776005 - DNA, 25 bp, Homo sapien
tccagtctatccttatcagacattt

SEQ ID NO: 3776006 - DNA, 25 bp, Homo sapien
atggtttccagcttcgtcctacaaa

SEQ ID NO: 3776007 - DNA, 25 bp, Homo sapien
gatccctattggtgcagctatagaa

SEQ ID NO: 3776008 - DNA, 25 bp, Homo sapien
ttctatccctcctgatgaagtgatc

SEQ ID NO: 3776009 - DNA, 25 bp, Homo sapien
gactctcttatgatagagtgttcag

SEQ ID NO: 3776010 - DNA, 25 bp, Homo sapien
ggaagactctcttatgatagagtgt

SEQ ID NO: 3776011 - DNA, 25 bp, Homo sapien
ccagaagcagactaaaaatgcctag

SEQ ID NO: 3776012 - DNA, 25 bp, Homo sapien
gaagcagactaaaaatgcctagctt

SEQ ID NO: 3776013 - DNA, 25 bp, Homo sapien
cagaagcagactaaaaatgcctagc

SEQ ID NO: 3776014 - DNA, 25 bp, Homo sapien
gcagactaaaaatgcctagcttttt

SEQ ID NO: 3776015 - DNA, 25 bp, Homo sapien
gataaactcaacaactaggagaggg

SEQ ID NO: 3776016 - DNA, 25 bp, Homo sapien
taaaagatctctttagggctgggca

SEQ ID NO: 3776017 - DNA, 25 bp, Homo sapien
attacaggcataagcgacagccatt

SEQ ID NO: 3776018 - DNA, 25 bp, Homo sapien
tttgcactgccaccgaggctcaagt

SEQ ID NO: 3776019 - DNA, 25 bp, Homo sapien
caataggtggtgtttaagctgagac

SEQ ID NO: 3776020 - DNA, 25 bp, Homo sapien
gaaagtaatttccagctgccttcag

SEQ ID NO: 3776021 - DNA, 25 bp, Homo sapien
cccaagtgatctgaaggtagccatg

SEQ ID NO: 3776022 - DNA, 25 bp, Homo sapien
ggtaacatgcgaggcctctgtcaat

SEQ ID NO: 3776023 - DNA, 25 bp, Homo sapien
cactgatgtggaccggtggtttccg

SEQ ID NO: 3776024 - DNA, 25 bp, Homo sapien
gaacaatcatggatgcagcgtcaag

SEQ ID NO: 3776025 - DNA, 25 bp, Homo sapien
gaagtaagacgtctccaaagcgcaa

SEQ ID NO: 3776026 - DNA, 25 bp, Homo sapien
tgtgccgcacattaggatcagctgg

SEQ ID NO: 3776027 - DNA, 25 bp, Homo sapien
tactgttgatttagagggcccacct

SEQ ID NO: 3776028 - DNA, 25 bp, Homo sapien
gaagtgcccgttactgcttcagcaa

SEQ ID NO: 3776029 - DNA, 25 bp, Homo sapien
cctgccattgctgagtacattgtga

SEQ ID NO: 3776030 - DNA, 25 bp, Homo sapien
gaaaggatggccagattctacaaat

SEQ ID NO: 3776031 - DNA, 25 bp, Homo sapien
ccacgtagtaaatgatggacatgca

SEQ ID NO: 3776032 - DNA, 25 bp, Homo sapien
aaaaggcacacagtattcgctttgc

SEQ ID NO: 3776033 - DNA, 25 bp, Homo sapien
gcatctttcgaactagcaatggacg

SEQ ID NO: 3776034 - DNA, 25 bp, Homo sapien
gaagagttcactggcatatttagaa

SEQ ID NO: 3776035 - DNA, 25 bp, Homo sapien
taagccgagcgtgtcataaaacttg

SEQ ID NO: 3776036 - DNA, 25 bp, Homo sapien
cacaagcatggctacatatctggag

SEQ ID NO: 3776037 - DNA, 25 bp, Homo sapien
tcagtagtcttcaccatggcaccac

SEQ ID NO: 3776038 - DNA, 25 bp, Homo sapien
taaaaagtatttgccgtgtgtcaca

SEQ ID NO: 3776039 - DNA, 25 bp, Homo sapien
catggcggtatgcacctgtgatcca

SEQ ID NO: 3776040 - DNA, 25 bp, Homo sapien
atggcggtatgcacctgtgatccag

SEQ ID NO: 3776041 - DNA, 25 bp, Homo sapien
ggcatggcggtatgcacctgtgatc

SEQ ID NO: 3776042 - DNA, 25 bp, Homo sapien
aggtcatcagtcttttgcattatca

SEQ ID NO: 3776043 - DNA, 25 bp, Homo sapien
tgtttgctttgatgacacctgaatt

SEQ ID NO: 3776044 - DNA, 25 bp, Homo sapien
tggttcagtagctacgtaatatact

SEQ ID NO: 3776045 - DNA, 25 bp, Homo sapien
ggtagatgaatgcttctttggttca

SEQ ID NO: 3776046 - DNA, 25 bp, Homo sapien
tttgtgaatcacagcgtaagaagac

SEQ ID NO: 3776047 - DNA, 25 bp, Homo sapien
gacaacaagggaatcacgtatctct

SEQ ID NO: 3776048 - DNA, 25 bp, Homo sapien
gatgcggctcgatacggcaatgtgt

SEQ ID NO: 3776049 - DNA, 25 bp, Homo sapien
tctgatgaattcacagtggatgcgg

SEQ ID NO: 3776050 - DNA, 25 bp, Homo sapien
catgtagaagggcttgtttacaccg

SEQ ID NO: 3776051 - DNA, 25 bp, Homo sapien
gatactcgtcttccccgaatagcat

SEQ ID NO: 3776052 - DNA, 25 bp, Homo sapien
tgtgcatgcctcaaagacctctaag

SEQ ID NO: 3776053 - DNA, 25 bp, Homo sapien
taagcaacttaatttccagtggaac

SEQ ID NO: 3776054 - DNA, 25 bp, Homo sapien
tgcctcccgtagtgtttgaaagcgt

SEQ ID NO: 3776055 - DNA, 25 bp, Homo sapien
gctgtgacttgcagaggttacctca

SEQ ID NO: 3776056 - DNA, 25 bp, Homo sapien
tctaaacggtaaaacaagctgcctg

SEQ ID NO: 3776057 - DNA, 25 bp, Homo sapien
taaacttggccaaagtgtgtgcctg

SEQ ID NO: 3776058 - DNA, 25 bp, Homo sapien
catagtgtcagtgttaagaaaaggt

SEQ ID NO: 3776059 - DNA, 25 bp, Homo sapien
ccagtggccatactttgaattgtga

SEQ ID NO: 3776060 - DNA, 25 bp, Homo sapien
atttgatcttgtccacttttttgtg

SEQ ID NO: 3776061 - DNA, 25 bp, Homo sapien
tgaattgtgattctcacgggtttaa

SEQ ID NO: 3776062 - DNA, 25 bp, Homo sapien
gagcattgtcactcaccaggtacgt

SEQ ID NO: 3776063 - DNA, 25 bp, Homo sapien
cgtgctagcaagattaaccgaaggt

SEQ ID NO: 3776064 - DNA, 25 bp, Homo sapien
aacttcatgtttcggctggacacgg

SEQ ID NO: 3776065 - DNA, 25 bp, Homo sapien
gtatttaatcttcggcttcaggcag

SEQ ID NO: 3776066 - DNA, 25 bp, Homo sapien
tagctatgtgaactaacctctgtgc

SEQ ID NO: 3776067 - DNA, 25 bp, Homo sapien
taagagcatcatcagagtaagcacc

SEQ ID NO: 3776068 - DNA, 25 bp, Homo sapien
tggagagacatcagagcatagcagt

SEQ ID NO: 3776069 - DNA, 25 bp, Homo sapien
gaaatgtatctacctcaaagggtgg

SEQ ID NO: 3776070 - DNA, 25 bp, Homo sapien
ctggccaccatttaattcttgagca

SEQ ID NO: 3776071 - DNA, 25 bp, Homo sapien
aatccatcctgccacctaagccttc

SEQ ID NO: 3776072 - DNA, 25 bp, Homo sapien
ttgcaggcaggagttactgtgcctg

SEQ ID NO: 3776073 - DNA, 25 bp, Homo sapien
tctggctaacattttgtggagacag

SEQ ID NO: 3776074 - DNA, 25 bp, Homo sapien
ccgcttctaatttggccaccgtatt

SEQ ID NO: 3776075 - DNA, 25 bp, Homo sapien
cgtattcacatcaaggttaagtgac

SEQ ID NO: 3776076 - DNA, 25 bp, Homo sapien
ctaatttggccaccgtattcacatc

SEQ ID NO: 3776077 - DNA, 25 bp, Homo sapien
ggccaccgtattcacatcaaggtta

SEQ ID NO: 3776078 - DNA, 25 bp, Homo sapien
catactagatccaagtttgtcaatt

SEQ ID NO: 3776079 - DNA, 25 bp, Homo sapien
tttaaatcaggtgtgtttatgagca

SEQ ID NO: 3776080 - DNA, 25 bp, Homo sapien
tcagtttatcatactagatccaagt

SEQ ID NO: 3776081 - DNA, 25 bp, Homo sapien
tgtctatagccatcagtttatcata

SEQ ID NO: 3776082 - DNA, 25 bp, Homo sapien
atcctcaagggcctccagagtagcc

SEQ ID NO: 3776083 - DNA, 25 bp, Homo sapien
caagccattgcccacctcaaagtgc

SEQ ID NO: 3776084 - DNA, 25 bp, Homo sapien
tgtaatattgactgtcatctctgtg

SEQ ID NO: 3776085 - DNA, 25 bp, Homo sapien
gtggttgctctaggttgaaacgctt

SEQ ID NO: 3776086 - DNA, 25 bp, Homo sapien
ctctaggttgaaacgctttgaattc

SEQ ID NO: 3776087 - DNA, 25 bp, Homo sapien
ctttttttgactgctatactctcac

SEQ ID NO: 3776088 - DNA, 25 bp, Homo sapien
ggtatctaagagtgagcattttctt

SEQ ID NO: 3776089 - DNA, 25 bp, Homo sapien
ttaggtatctaagagtgagcatttt

SEQ ID NO: 3776090 - DNA, 25 bp, Homo sapien
tctttttttgactgctatactctca

SEQ ID NO: 3776091 - DNA, 25 bp, Homo sapien
aatgctctcgtttaggtaactcagc

SEQ ID NO: 3776092 - DNA, 25 bp, Homo sapien
tgctctcgtttaggtaactcagctt

SEQ ID NO: 3776093 - DNA, 25 bp, Homo sapien
gctctcgtttaggtaactcagcttc

SEQ ID NO: 3776094 - DNA, 25 bp, Homo sapien
ctctcgtttaggtaactcagcttct

SEQ ID NO: 3776095 - DNA, 25 bp, Homo sapien
aagtttgtgaaacgagagctctgca

SEQ ID NO: 3776096 - DNA, 25 bp, Homo sapien
tacattttgttccatgagagaggca

SEQ ID NO: 3776097 - DNA, 25 bp, Homo sapien
tcctcgggtatatgtgtctcactgc

SEQ ID NO: 3776098 - DNA, 25 bp, Homo sapien
cagtatcagattggctgtcccagcc

SEQ ID NO: 3776099 - DNA, 25 bp, Homo sapien
tcccaacagccagagtggaaaacct

SEQ ID NO: 3776100 - DNA, 25 bp, Homo sapien
gaaccaagaagagccttgcctcagt

SEQ ID NO: 3776101 - DNA, 25 bp, Homo sapien
tggaaaacctcatgatccatgggca

SEQ ID NO: 3776102 - DNA, 25 bp, Homo sapien
agtgtcttgtcctggtcccaacagc

SEQ ID NO: 3776103 - DNA, 25 bp, Homo sapien
tcggtgaactgttctagctctcttc

SEQ ID NO: 3776104 - DNA, 25 bp, Homo sapien
tccgtactttgggaagaccggcata

SEQ ID NO: 3776105 - DNA, 25 bp, Homo sapien
ctgagtctcggtgaactgttctagc

SEQ ID NO: 3776106 - DNA, 25 bp, Homo sapien
tatactttggctccgtactttggga

SEQ ID NO: 3776107 - DNA, 25 bp, Homo sapien
taagcaattaaatgcaacccggttg

SEQ ID NO: 3776108 - DNA, 25 bp, Homo sapien
tcgggatacaatataactagctgct

SEQ ID NO: 3776109 - DNA, 25 bp, Homo sapien
gacatcctctggcattcgggataca

SEQ ID NO: 3776110 - DNA, 25 bp, Homo sapien
ggaaatcacacaactactttggagg

SEQ ID NO: 3776111 - DNA, 25 bp, Homo sapien
ctcctcctggcagattccgggaagc

SEQ ID NO: 3776112 - DNA, 25 bp, Homo sapien
agattccgggaagcctttaggatga

SEQ ID NO: 3776113 - DNA, 25 bp, Homo sapien
tttcgaaggcctcactgccaactgc

SEQ ID NO: 3776114 - DNA, 25 bp, Homo sapien
ctttcgaaggcctcactgccaactg

SEQ ID NO: 3776115 - DNA, 25 bp, Homo sapien
ccatagttgtgccaactggaatgac

SEQ ID NO: 3776116 - DNA, 25 bp, Homo sapien
gacaactttatccatagttgtgcca

SEQ ID NO: 3776117 - DNA, 25 bp, Homo sapien
ggacagaggtagctcaagaaatctt

SEQ ID NO: 3776118 - DNA, 25 bp, Homo sapien
ctggaatgacatttggatatgcgtt

SEQ ID NO: 3776119 - DNA, 25 bp, Homo sapien
tcaccaatgggactcaaagattctt

SEQ ID NO: 3776120 - DNA, 25 bp, Homo sapien
tcaacaatctctacgatgaaacagg

SEQ ID NO: 3776121 - DNA, 25 bp, Homo sapien
gaacactgagtactagtgggcctag

SEQ ID NO: 3776122 - DNA, 25 bp, Homo sapien
cagaattgcatttcttagctgggca

SEQ ID NO: 3776123 - DNA, 25 bp, Homo sapien
acaagctctgtatgaactctctcca

SEQ ID NO: 3776124 - DNA, 25 bp, Homo sapien
cactgtaggaggagtgaaaagaaaa

SEQ ID NO: 3776125 - DNA, 25 bp, Homo sapien
aaacaagctctgtatgaactctctc

SEQ ID NO: 3776126 - DNA, 25 bp, Homo sapien
aaaaacaagctctgtatgaactctc

SEQ ID NO: 3776127 - DNA, 25 bp, Homo sapien
gaagtaattccacagggtaatttgc

SEQ ID NO: 3776128 - DNA, 25 bp, Homo sapien
cttaatgctgattatgtggagtgga

SEQ ID NO: 3776129 - DNA, 25 bp, Homo sapien
gctgattatgtggagtggaattcta

SEQ ID NO: 3776130 - DNA, 25 bp, Homo sapien
aaccacatggtggatggcttaatgc

SEQ ID NO: 3776131 - DNA, 25 bp, Homo sapien
gaaagtagccctgacagcaaaggaa

SEQ ID NO: 3776132 - DNA, 25 bp, Homo sapien
tttaagcggctagaaatagcatctc

SEQ ID NO: 3776133 - DNA, 25 bp, Homo sapien
gactctatgagctgtggacctacct

SEQ ID NO: 3776134 - DNA, 25 bp, Homo sapien
taatattctaaaggagtgcgtgacc

SEQ ID NO: 3776135 - DNA, 25 bp, Homo sapien
catttgtaaagcgaagagcctataa

SEQ ID NO: 3776136 - DNA, 25 bp, Homo sapien
gcagcctcaggttttacatttgtaa

SEQ ID NO: 3776137 - DNA, 25 bp, Homo sapien
catgaccttgagctaacaacttagg

SEQ ID NO: 3776138 - DNA, 25 bp, Homo sapien
gagcctataaatggaagccctgacc

SEQ ID NO: 3776139 - DNA, 25 bp, Homo sapien
cttgggatgccggcatgcatggatc

SEQ ID NO: 3776140 - DNA, 25 bp, Homo sapien
gggatgccggcatgcatggatctga

SEQ ID NO: 3776141 - DNA, 25 bp, Homo sapien
tgggatgccggcatgcatggatctg

SEQ ID NO: 3776142 - DNA, 25 bp, Homo sapien
ttgggatgccggcatgcatggatct

SEQ ID NO: 3776143 - DNA, 25 bp, Homo sapien
tacgggctccgagtgatccagcttc

SEQ ID NO: 3776144 - DNA, 25 bp, Homo sapien
acgggctccgagtgatccagcttcg

SEQ ID NO: 3776145 - DNA, 25 bp, Homo sapien
cgggctccgagtgatccagcttcgg

SEQ ID NO: 3776146 - DNA, 25 bp, Homo sapien
ggatcacagaacgtagtatccaaat

SEQ ID NO: 3776147 - DNA, 25 bp, Homo sapien
cagaacgtagtatccaaatatacac

SEQ ID NO: 3776148 - DNA, 25 bp, Homo sapien
tcttggatcacagaacgtagtatcc

SEQ ID NO: 3776149 - DNA, 25 bp, Homo sapien
aatcttggatcacagaacgtagtat

SEQ ID NO: 3776150 - DNA, 25 bp, Homo sapien
gcagcttctccttgcgccaatctga

SEQ ID NO: 3776151 - DNA, 25 bp, Homo sapien
tctccttgcgccaatctgaagtctc

SEQ ID NO: 3776152 - DNA, 25 bp, Homo sapien
aagtctcctgtgtacaggacagttc

SEQ ID NO: 3776153 - DNA, 25 bp, Homo sapien
ccggagtgcagaagctccattctag

SEQ ID NO: 3776154 - DNA, 25 bp, Homo sapien
acaatatgtgtctacatataataaa

SEQ ID NO: 3776155 - DNA, 25 bp, Homo sapien
tacaatatgtgtctacatataataa

SEQ ID NO: 3776156 - DNA, 25 bp, Homo sapien
cagtgaccagctggtaagagagtca

SEQ ID NO: 3776157 - DNA, 25 bp, Homo sapien
agagagtcacaacaatctcttcctt

SEQ ID NO: 3776158 - DNA, 25 bp, Homo sapien
aactgatcccggacagtgaccagct

SEQ ID NO: 3776159 - DNA, 25 bp, Homo sapien
taagagagtcacaacaatctcttcc

SEQ ID NO: 3776160 - DNA, 25 bp, Homo sapien
taggacctagctcaacaaagccctc

SEQ ID NO: 3776161 - DNA, 25 bp, Homo sapien
caccactagttatagaaccaagata

SEQ ID NO: 3776162 - DNA, 25 bp, Homo sapien
gggactgagcaatttcaccactagt

SEQ ID NO: 3776163 - DNA, 25 bp, Homo sapien
caagataagcgaaaaccgatggcca

SEQ ID NO: 3776164 - DNA, 25 bp, Homo sapien
aaggtgaacgaatcccttgaggtca

SEQ ID NO: 3776165 - DNA, 25 bp, Homo sapien
caagcccggccactatttaacaatt

SEQ ID NO: 3776166 - DNA, 25 bp, Homo sapien
caaggtgaacgaatcccttgaggtc

SEQ ID NO: 3776167 - DNA, 25 bp, Homo sapien
ccaagcccggccactatttaacaat

SEQ ID NO: 3776168 - DNA, 25 bp, Homo sapien
tccagccatcagtaagtggggagag

SEQ ID NO: 3776169 - DNA, 25 bp, Homo sapien
agggcaagacctgcaggcactactg

SEQ ID NO: 3776170 - DNA, 25 bp, Homo sapien
ttcggcaagggcaagacctgcaggc

SEQ ID NO: 3776171 - DNA, 25 bp, Homo sapien
aagacctgcaggcactactgcctct

SEQ ID NO: 3776172 - DNA, 25 bp, Homo sapien
ccattcattctggaggaccctttcg

SEQ ID NO: 3776173 - DNA, 25 bp, Homo sapien
cattcattctggaggaccctttcga

SEQ ID NO: 3776174 - DNA, 25 bp, Homo sapien
taggagtctcgatttcaatagatat

SEQ ID NO: 3776175 - DNA, 25 bp, Homo sapien
gggtaggagtctcgatttcaataga

SEQ ID NO: 3776176 - DNA, 25 bp, Homo sapien
ggtaggagtctcgatttcaatagat

SEQ ID NO: 3776177 - DNA, 25 bp, Homo sapien
ctgggtaggagtctcgatttcaata

SEQ ID NO: 3776178 - DNA, 25 bp, Homo sapien
agggccgcagcaacatcagcttctg

SEQ ID NO: 3776179 - DNA, 25 bp, Homo sapien
cgggagaccagcactattgaggcca

SEQ ID NO: 3776180 - DNA, 25 bp, Homo sapien
tgacctgtagtaacttcaagctgaa

SEQ ID NO: 3776181 - DNA, 25 bp, Homo sapien
cagaagtgggtttcggtctgtccta

SEQ ID NO: 3776182 - DNA, 25 bp, Homo sapien
ccaaaatctgtatttcgggctcgtt

SEQ ID NO: 3776183 - DNA, 25 bp, Homo sapien
cacaggtgaacagtatagataaacc

SEQ ID NO: 3776184 - DNA, 25 bp, Homo sapien
tgtatttcgggctcgttaacaacaa

SEQ ID NO: 3776185 - DNA, 25 bp, Homo sapien
ttaacaacaactccttagtcacagg

SEQ ID NO: 3776186 - DNA, 25 bp, Homo sapien
catttcagtgccaccaagagcacaa

SEQ ID NO: 3776187 - DNA, 25 bp, Homo sapien
atttcagtgccaccaagagcacaag

SEQ ID NO: 3776188 - DNA, 25 bp, Homo sapien
tcctccaacagtggtccctcaccat

SEQ ID NO: 3776189 - DNA, 25 bp, Homo sapien
tggaaacacggtgtccctggacctc

SEQ ID NO: 3776190 - DNA, 25 bp, Homo sapien
tacgcgcttgtatgtgatcaggtgt

SEQ ID NO: 3776191 - DNA, 25 bp, Homo sapien
tggaaatacgcgcttgtatgtgatc

SEQ ID NO: 3776192 - DNA, 25 bp, Homo sapien
gaaatacgcgcttgtatgtgatcag

SEQ ID NO: 3776193 - DNA, 25 bp, Homo sapien
aatacgcgcttgtatgtgatcaggt

SEQ ID NO: 3776194 - DNA, 25 bp, Homo sapien
caaatggttctagcccctagctgtg

SEQ ID NO: 3776195 - DNA, 25 bp, Homo sapien
aacatgccaaatggttctagcccct

SEQ ID NO: 3776196 - DNA, 25 bp, Homo sapien
ggcagcagagttcgactctgtttca

SEQ ID NO: 3776197 - DNA, 25 bp, Homo sapien
cagcagagttcgactctgtttcaaa

SEQ ID NO: 3776198 - DNA, 25 bp, Homo sapien
cagatgactgatacataggctctgc

SEQ ID NO: 3776199 - DNA, 25 bp, Homo sapien
gttaagtcactccattttgaagtaa

SEQ ID NO: 3776200 - DNA, 25 bp, Homo sapien
tttgttacgcagcagcagatgactg

SEQ ID NO: 3776201 - DNA, 25 bp, Homo sapien
taccctgtcaatccctgatccacag

SEQ ID NO: 3776202 - DNA, 25 bp, Homo sapien
gacactgggcaactaatttaacctc

SEQ ID NO: 3776203 - DNA, 25 bp, Homo sapien
tgtgacactgggcaactaatttaac

SEQ ID NO: 3776204 - DNA, 25 bp, Homo sapien
ctggctggaatcctggtcctgccac

SEQ ID NO: 3776205 - DNA, 25 bp, Homo sapien
actgggcaactaatttaacctctct

SEQ ID NO: 3776206 - DNA, 25 bp, Homo sapien
aacgttagctatcattatcaagaag

SEQ ID NO: 3776207 - DNA, 25 bp, Homo sapien
ataaacgttagctatcattatcaag

SEQ ID NO: 3776208 - DNA, 25 bp, Homo sapien
cagtgccaagatacagtaagtattc

SEQ ID NO: 3776209 - DNA, 25 bp, Homo sapien
cattatcaagaagacagagtattgc

SEQ ID NO: 3776210 - DNA, 25 bp, Homo sapien
ttacagaaataacatggagtgagtt

SEQ ID NO: 3776211 - DNA, 25 bp, Homo sapien
ggagtgagttactgctgtacctagc

SEQ ID NO: 3776212 - DNA, 25 bp, Homo sapien
tacctagcagcatagataaatcaca

SEQ ID NO: 3776213 - DNA, 25 bp, Homo sapien
tatgatcctttacaatggaacagcc

SEQ ID NO: 3776214 - DNA, 25 bp, Homo sapien
aggtaggggctcttaatcctttcat

SEQ ID NO: 3776215 - DNA, 25 bp, Homo sapien
cactccaaccttcttttcaaggtag

SEQ ID NO: 3776216 - DNA, 25 bp, Homo sapien
ggggctcttaatcctttcatgtgat

SEQ ID NO: 3776217 - DNA, 25 bp, Homo sapien
ctgcactccaaccttcttttcaagg

SEQ ID NO: 3776218 - DNA, 25 bp, Homo sapien
gcagtgggacaggaagtaggcgcgg

SEQ ID NO: 3776219 - DNA, 25 bp, Homo sapien
gggccctcaggttctccctatcgaa

SEQ ID NO: 3776220 - DNA, 25 bp, Homo sapien
cctatcgaagcggtctatggagata

SEQ ID NO: 3776221 - DNA, 25 bp, Homo sapien
gatagttggatactcggccatctgc

SEQ ID NO: 3776222 - DNA, 25 bp, Homo sapien
cgccgccgatcccagagtccgggac

SEQ ID NO: 3776223 - DNA, 25 bp, Homo sapien
agcgccgccgatcccagagtccggg

SEQ ID NO: 3776224 - DNA, 25 bp, Homo sapien
gccgccgatcccagagtccgggacc

SEQ ID NO: 3776225 - DNA, 25 bp, Homo sapien
gcgccgccgatcccagagtccggga

SEQ ID NO: 3776226 - DNA, 25 bp, Homo sapien
aagtcaaggagcatccggtcgggtt

SEQ ID NO: 3776227 - DNA, 25 bp, Homo sapien
tgcctcgccattgggcggccgaacg

SEQ ID NO: 3776228 - DNA, 25 bp, Homo sapien
gcgccgccacttccgggaagccgcg

SEQ ID NO: 3776229 - DNA, 25 bp, Homo sapien
cacgtccaatcagaggagtccggag

SEQ ID NO: 3776230 - DNA, 25 bp, Homo sapien
aacacaggtgttgctctggtaaggc

SEQ ID NO: 3776231 - DNA, 25 bp, Homo sapien
gaaatcgaaactcccagagcaggtg

SEQ ID NO: 3776232 - DNA, 25 bp, Homo sapien
ttcgctgcacgcgatgggccctgag

SEQ ID NO: 3776233 - DNA, 25 bp, Homo sapien
taaggcgttgcccatgtctgtggag

SEQ ID NO: 3776234 - DNA, 25 bp, Homo sapien
tcttcgttccgcttcctgcttgtct

SEQ ID NO: 3776235 - DNA, 25 bp, Homo sapien
acctggctttccaggcctccataac

SEQ ID NO: 3776236 - DNA, 25 bp, Homo sapien
tccaggcctccataacacttgaagt

SEQ ID NO: 3776237 - DNA, 25 bp, Homo sapien
ggcctccataacacttgaagtccca

SEQ ID NO: 3776238 - DNA, 25 bp, Homo sapien
cttgaagtcccactttgtgcacagc

SEQ ID NO: 3776239 - DNA, 25 bp, Homo sapien
gacaacatgtttgcagaatatggca

SEQ ID NO: 3776240 - DNA, 25 bp, Homo sapien
tagcattcaatctatctggcgacaa

SEQ ID NO: 3776241 - DNA, 25 bp, Homo sapien
ccacagagacgcaaggtaacgtgag

SEQ ID NO: 3776242 - DNA, 25 bp, Homo sapien
gtaacgtgagaacaaatccaggaac

SEQ ID NO: 3776243 - DNA, 25 bp, Homo sapien
tgagatcgtgctgccatgtggccgc

SEQ ID NO: 3776244 - DNA, 25 bp, Homo sapien
gagatgagatcgtgctgccatgtgg

SEQ ID NO: 3776245 - DNA, 25 bp, Homo sapien
gagatcgtgctgccatgtggccgct

SEQ ID NO: 3776246 - DNA, 25 bp, Homo sapien
gatgagatcgtgctgccatgtggcc

SEQ ID NO: 3776247 - DNA, 25 bp, Homo sapien
cacaatatgcaagatggggagttga

SEQ ID NO: 3776248 - DNA, 25 bp, Homo sapien
gccacaatatgcaagatggggagtt

SEQ ID NO: 3776249 - DNA, 25 bp, Homo sapien
tgccacaatatgcaagatggggagt

SEQ ID NO: 3776250 - DNA, 25 bp, Homo sapien
ggtgccacaatatgcaagatgggga

SEQ ID NO: 3776251 - DNA, 25 bp, Homo sapien
agcccagtgaggaccggctgccatt

SEQ ID NO: 3776252 - DNA, 25 bp, Homo sapien
ccagtgaggaccggctgccattctg

SEQ ID NO: 3776253 - DNA, 25 bp, Homo sapien
gcccagtgaggaccggctgccattc

SEQ ID NO: 3776254 - DNA, 25 bp, Homo sapien
agtgaggaccggctgccattctgga

SEQ ID NO: 3776255 - DNA, 25 bp, Homo sapien
gaaacaagtaaaccgacacccagca

SEQ ID NO: 3776256 - DNA, 25 bp, Homo sapien
aaacaagtaaaccgacacccagcat

SEQ ID NO: 3776257 - DNA, 25 bp, Homo sapien
ctagaaaagagggttgagaaatcgg

SEQ ID NO: 3776258 - DNA, 25 bp, Homo sapien
agagggttgagaaatcggaaacaag

SEQ ID NO: 3776259 - DNA, 25 bp, Homo sapien
tctggccatggcactctcccgtttg

SEQ ID NO: 3776260 - DNA, 25 bp, Homo sapien
catctggccatggcactctcccgtt

SEQ ID NO: 3776261 - DNA, 25 bp, Homo sapien
tggccatggcactctcccgtttgtc

SEQ ID NO: 3776262 - DNA, 25 bp, Homo sapien
ctggccatggcactctcccgtttgt

SEQ ID NO: 3776263 - DNA, 25 bp, Homo sapien
tgaactgcccttctcctgtgctggg

SEQ ID NO: 3776264 - DNA, 25 bp, Homo sapien
cccttctcctgtgctgggccatgac

SEQ ID NO: 3776265 - DNA, 25 bp, Homo sapien
gtgctgggccatgaccacggagaac

SEQ ID NO: 3776266 - DNA, 25 bp, Homo sapien
cacggagaacaggtccactgtcttc

SEQ ID NO: 3776267 - DNA, 25 bp, Homo sapien
gaaacgaggtttcacaatatggcca

SEQ ID NO: 3776268 - DNA, 25 bp, Homo sapien
tctaattttccaggacaggccatac

SEQ ID NO: 3776269 - DNA, 25 bp, Homo sapien
ggtgggtacccacaagtgcaactgc

SEQ ID NO: 3776270 - DNA, 25 bp, Homo sapien
tttcgggacacgtctactcgagtct

SEQ ID NO: 3776271 - DNA, 25 bp, Homo sapien
tacacaactttgaacgcaccaattg

SEQ ID NO: 3776272 - DNA, 25 bp, Homo sapien
tcaccaacattataactacacaact

SEQ ID NO: 3776273 - DNA, 25 bp, Homo sapien
aattgtgttggaagacttgctgtac

SEQ ID NO: 3776274 - DNA, 25 bp, Homo sapien
tctgcaatggagacgattttcttcc

SEQ ID NO: 3776275 - DNA, 25 bp, Homo sapien
tcatgagattccactcttctgctgc

SEQ ID NO: 3776276 - DNA, 25 bp, Homo sapien
agattccactcttctgctgcgcagc

SEQ ID NO: 3776277 - DNA, 25 bp, Homo sapien
tgagattccactcttctgctgcgca

SEQ ID NO: 3776278 - DNA, 25 bp, Homo sapien
catgagattccactcttctgctgcg

SEQ ID NO: 3776279 - DNA, 25 bp, Homo sapien
ccacagggtgttttgaatgtccctg

SEQ ID NO: 3776280 - DNA, 25 bp, Homo sapien
ccatcaaataagcaaacaactgcta

SEQ ID NO: 3776281 - DNA, 25 bp, Homo sapien
atgccaatgcctgttccatcaaata

SEQ ID NO: 3776282 - DNA, 25 bp, Homo sapien
cacagggtgttttgaatgtccctgt

SEQ ID NO: 3776283 - DNA, 25 bp, Homo sapien
tagagaagttgagatggctcacaga

SEQ ID NO: 3776284 - DNA, 25 bp, Homo sapien
aggtagagaagttgagatggctcac

SEQ ID NO: 3776285 - DNA, 25 bp, Homo sapien
caaggtagagaagttgagatggctc

SEQ ID NO: 3776286 - DNA, 25 bp, Homo sapien
gcaaggtagagaagttgagatggct

SEQ ID NO: 3776287 - DNA, 25 bp, Homo sapien
aggatttatgatgactgggtagtaa

SEQ ID NO: 3776288 - DNA, 25 bp, Homo sapien
tttatgatgactgggtagtaaagag

SEQ ID NO: 3776289 - DNA, 25 bp, Homo sapien
gatttatgatgactgggtagtaaag

SEQ ID NO: 3776290 - DNA, 25 bp, Homo sapien
gaggatttatgatgactgggtagta

SEQ ID NO: 3776291 - DNA, 25 bp, Homo sapien
tgaaaccgatgtcagcccagcacag

SEQ ID NO: 3776292 - DNA, 25 bp, Homo sapien
tgtggaggggggagtcagagctgac

SEQ ID NO: 3776293 - DNA, 25 bp, Homo sapien
aaaccgatgtcagcccagcacaggt

SEQ ID NO: 3776294 - DNA, 25 bp, Homo sapien
ctatggccaaggtgaaaccgatgtc

SEQ ID NO: 3776295 - DNA, 25 bp, Homo sapien
ctgtggctctgtgtgacttggacac

SEQ ID NO: 3776296 - DNA, 25 bp, Homo sapien
agattctgtggctctgtgtgacttg

SEQ ID NO: 3776297 - DNA, 25 bp, Homo sapien
tctcagatacctgtgagattctgtg

SEQ ID NO: 3776298 - DNA, 25 bp, Homo sapien
attctcagatacctgtgagattctg

SEQ ID NO: 3776299 - DNA, 25 bp, Homo sapien
agatgatgaaggatctcaggcatgt

SEQ ID NO: 3776300 - DNA, 25 bp, Homo sapien
tgttcctaaacatgtctagcttatt

SEQ ID NO: 3776301 - DNA, 25 bp, Homo sapien
ctgagtgttgcggtctgttgtgaga

SEQ ID NO: 3776302 - DNA, 25 bp, Homo sapien
ggcatgttcctaaacatgtctagct

SEQ ID NO: 3776303 - DNA, 25 bp, Homo sapien
agggcccgcgaacctctgctgcaga

SEQ ID NO: 3776304 - DNA, 25 bp, Homo sapien
ggaggatgtgactgaactaagatga

SEQ ID NO: 3776305 - DNA, 25 bp, Homo sapien
gacacgtcttgatagggtgcttcca

SEQ ID NO: 3776306 - DNA, 25 bp, Homo sapien
gatatattccttcagagggcccgcg

SEQ ID NO: 3776307 - DNA, 25 bp, Homo sapien
taagccgctttgcagttcagccaca

SEQ ID NO: 3776308 - DNA, 25 bp, Homo sapien
taattcttcactaaggttggtgaac

SEQ ID NO: 3776309 - DNA, 25 bp, Homo sapien
agccataagccgctttgcagttcag

SEQ ID NO: 3776310 - DNA, 25 bp, Homo sapien
cataagccgctttgcagttcagcca

SEQ ID NO: 3776311 - DNA, 25 bp, Homo sapien
agtcccctgtgtacaagatagttcc

SEQ ID NO: 3776312 - DNA, 25 bp, Homo sapien
gtcccctgtgtacaagatagttcca

SEQ ID NO: 3776313 - DNA, 25 bp, Homo sapien
ccctgtgtacaagatagttccatta

SEQ ID NO: 3776314 - DNA, 25 bp, Homo sapien
tcccctgtgtacaagatagttccat

SEQ ID NO: 3776315 - DNA, 25 bp, Homo sapien
aagacctgcgggcactactgcctct

SEQ ID NO: 3776316 - DNA, 25 bp, Homo sapien
agggcaagacctgcgggcactactg

SEQ ID NO: 3776317 - DNA, 25 bp, Homo sapien
tccagccatcagtaagtggggagag

SEQ ID NO: 3776318 - DNA, 25 bp, Homo sapien
gttcggcaagggcaagacctgcggg

SEQ ID NO: 3776319 - DNA, 25 bp, Homo sapien
ctcagtgacagtgactcctcatgga

SEQ ID NO: 3776320 - DNA, 25 bp, Homo sapien
tgacagtgactcctcatggaagtct

SEQ ID NO: 3776321 - DNA, 25 bp, Homo sapien
cagtgactcctcatggaagtctcca

SEQ ID NO: 3776322 - DNA, 25 bp, Homo sapien
actgctcagtgacagtgactcctca

SEQ ID NO: 3776323 - DNA, 25 bp, Homo sapien
tggaggaccctttcgaatgggtctc

SEQ ID NO: 3776324 - DNA, 25 bp, Homo sapien
tctggaggaccctttcgaatgggtc

SEQ ID NO: 3776325 - DNA, 25 bp, Homo sapien
tcgaatgggtctccccctggttgga

SEQ ID NO: 3776326 - DNA, 25 bp, Homo sapien
cgaatgggtctccccctggttggag

SEQ ID NO: 3776327 - DNA, 25 bp, Homo sapien
tggataaacaatgcacaaaagtcat

SEQ ID NO: 3776328 - DNA, 25 bp, Homo sapien
ctggataaacaatgcacaaaagtca

SEQ ID NO: 3776329 - DNA, 25 bp, Homo sapien
gatgcttcatccactaaagatatct

SEQ ID NO: 3776330 - DNA, 25 bp, Homo sapien
tgatgcttcatccactaaagatatc

SEQ ID NO: 3776331 - DNA, 25 bp, Homo sapien
ctctgaattttgagtctttgtaaaa

SEQ ID NO: 3776332 - DNA, 25 bp, Homo sapien
tctctctgaattttgagtctttgta

SEQ ID NO: 3776333 - DNA, 25 bp, Homo sapien
ctctctgaattttgagtctttgtaa

SEQ ID NO: 3776334 - DNA, 25 bp, Homo sapien
ctctctctgaattttgagtctttgt

SEQ ID NO: 3776335 - DNA, 25 bp, Homo sapien
gcaaatgaatagatcatccattcta

SEQ ID NO: 3776336 - DNA, 25 bp, Homo sapien
tgtctttgtacctcttagtgctcta

SEQ ID NO: 3776337 - DNA, 25 bp, Homo sapien
gctctacttctagtgtggatgggta

SEQ ID NO: 3776338 - DNA, 25 bp, Homo sapien
tcattactaacaaaagacaattctg

SEQ ID NO: 3776339 - DNA, 25 bp, Homo sapien
cctaagtctcagactttgaaatttc

SEQ ID NO: 3776340 - DNA, 25 bp, Homo sapien
taagtctcagactttgaaatttcac

SEQ ID NO: 3776341 - DNA, 25 bp, Homo sapien
ctcctaagtctcagactttgaaatt

SEQ ID NO: 3776342 - DNA, 25 bp, Homo sapien
ctaagtctcagactttgaaatttca

SEQ ID NO: 3776343 - DNA, 25 bp, Homo sapien
attgcagccatcacacactttcccc

SEQ ID NO: 3776344 - DNA, 25 bp, Homo sapien
ctttccattgcagccatcacacact

SEQ ID NO: 3776345 - DNA, 25 bp, Homo sapien
tgcagccatcacacactttccccat

SEQ ID NO: 3776346 - DNA, 25 bp, Homo sapien
ttccattgcagccatcacacacttt

SEQ ID NO: 3776347 - DNA, 25 bp, Homo sapien
tctcctatggacttactctttgtcc

SEQ ID NO: 3776348 - DNA, 25 bp, Homo sapien
attccttctctcctatggacttact

SEQ ID NO: 3776349 - DNA, 25 bp, Homo sapien
ttctctcctatggacttactctttg

SEQ ID NO: 3776350 - DNA, 25 bp, Homo sapien
tcctatggacttactctttgtcccc

SEQ ID NO: 3776351 - DNA, 25 bp, Homo sapien
cctttgacccgttggcatcctctgg

SEQ ID NO: 3776352 - DNA, 25 bp, Homo sapien
gactttcagtgcatcggtaattgag

SEQ ID NO: 3776353 - DNA, 25 bp, Homo sapien
tttgaggagagtatgcacaactccc

SEQ ID NO: 3776354 - DNA, 25 bp, Homo sapien
gagaggcccagttacgtctttgtcc

SEQ ID NO: 3776355 - DNA, 25 bp, Homo sapien
catctccagtgcactccttaaggct

SEQ ID NO: 3776356 - DNA, 25 bp, Homo sapien
ttgagttgaactgtgtgccccagtg

SEQ ID NO: 3776357 - DNA, 25 bp, Homo sapien
cttgagttgaactgtgtgccccagt

SEQ ID NO: 3776358 - DNA, 25 bp, Homo sapien
agcttccagggggtcacttttatct

SEQ ID NO: 3776359 - DNA, 25 bp, Homo sapien
tccagggggtcacttttatcttctg

SEQ ID NO: 3776360 - DNA, 25 bp, Homo sapien
cagcttccagggggtcacttttatc

SEQ ID NO: 3776361 - DNA, 25 bp, Homo sapien
gggggtcacttttatcttctggatc

SEQ ID NO: 3776362 - DNA, 25 bp, Homo sapien
ctttaaactgctatggacagacttg

SEQ ID NO: 3776363 - DNA, 25 bp, Homo sapien
caaagagcctgtgtaccatccagaa

SEQ ID NO: 3776364 - DNA, 25 bp, Homo sapien
tggtgttgctacaatcaagacagaa

SEQ ID NO: 3776365 - DNA, 25 bp, Homo sapien
ggatctattcctctggtcataccat

SEQ ID NO: 3776366 - DNA, 25 bp, Homo sapien
tattgtaacagaacagatgagccaa

SEQ ID NO: 3776367 - DNA, 25 bp, Homo sapien
acagcacggaaatttctcatggaac

SEQ ID NO: 3776368 - DNA, 25 bp, Homo sapien
aaatctgtacacatattaccagggc

SEQ ID NO: 3776369 - DNA, 25 bp, Homo sapien
gaaattacggcttttgcagcaacgt

SEQ ID NO: 3776370 - DNA, 25 bp, Homo sapien
aacagggtgtatacagggtcatgga

SEQ ID NO: 3776371 - DNA, 25 bp, Homo sapien
gttaaacagggtgtatacagggtca

SEQ ID NO: 3776372 - DNA, 25 bp, Homo sapien
ggtgtatacagggtcatggagtgtg

SEQ ID NO: 3776373 - DNA, 25 bp, Homo sapien
taaacagggtgtatacagggtcatg

SEQ ID NO: 3776374 - DNA, 25 bp, Homo sapien
aacaaaactgcacctgtgaccaggt

SEQ ID NO: 3776375 - DNA, 25 bp, Homo sapien
taacaaaactgcacctgtgaccagg

SEQ ID NO: 3776376 - DNA, 25 bp, Homo sapien
gtaacaaaactgcacctgtgaccag

SEQ ID NO: 3776377 - DNA, 25 bp, Homo sapien
caaaactgcacctgtgaccaggtgt

SEQ ID NO: 3776378 - DNA, 25 bp, Homo sapien
tgcaactgtactccctaactctata

SEQ ID NO: 3776379 - DNA, 25 bp, Homo sapien
tcaagttaacagtatgcctctccct

SEQ ID NO: 3776380 - DNA, 25 bp, Homo sapien
gtactacagctcatgctaatagcaa

SEQ ID NO: 3776381 - DNA, 25 bp, Homo sapien
aaccggtcacctacatcaggtatgt

SEQ ID NO: 3776382 - DNA, 25 bp, Homo sapien
ttgctttagaaatataggcactcgt

SEQ ID NO: 3776383 - DNA, 25 bp, Homo sapien
tttagaaatataggcactcgtcgca

SEQ ID NO: 3776384 - DNA, 25 bp, Homo sapien
gaaatataggcactcgtcgcatctt

SEQ ID NO: 3776385 - DNA, 25 bp, Homo sapien
tataggcactcgtcgcatcttccgt

SEQ ID NO: 3776386 - DNA, 25 bp, Homo sapien
tgccttttaaatctagcattcctgg

SEQ ID NO: 3776387 - DNA, 25 bp, Homo sapien
cttctgcagccctgtcaaaatcagc

SEQ ID NO: 3776388 - DNA, 25 bp, Homo sapien
tccatcatctggtcttgctttcagc

SEQ ID NO: 3776389 - DNA, 25 bp, Homo sapien
agcccatagagttctttcagttctc

SEQ ID NO: 3776390 - DNA, 25 bp, Homo sapien
cttgtttgtaaagcccatagagttc

SEQ ID NO: 3776391 - DNA, 25 bp, Homo sapien
ctcagtgcaatacattcctgcctta

SEQ ID NO: 3776392 - DNA, 25 bp, Homo sapien
ctctgtctagcctgtctggttctgg

SEQ ID NO: 3776393 - DNA, 25 bp, Homo sapien
gttctggcacctcagtgcaatacat

SEQ ID NO: 3776394 - DNA, 25 bp, Homo sapien
tctctgtctagcctgtctggttctg

SEQ ID NO: 3776395 - DNA, 25 bp, Homo sapien
tgcaaataaagacttggctcacgat

SEQ ID NO: 3776396 - DNA, 25 bp, Homo sapien
gaattttctgtgcttaaacgccctc

SEQ ID NO: 3776397 - DNA, 25 bp, Homo sapien
caggccgagcacagggactcaagat

SEQ ID NO: 3776398 - DNA, 25 bp, Homo sapien
cttggctcacgatcagtctgactgg

SEQ ID NO: 3776399 - DNA, 25 bp, Homo sapien
caccgcttcttaaacggccgcgtct

SEQ ID NO: 3776400 - DNA, 25 bp, Homo sapien
tggcggctgccgcgttgttgctgct

SEQ ID NO: 3776401 - DNA, 25 bp, Homo sapien
tcgcacccaccgcttcttaaacggc

SEQ ID NO: 3776402 - DNA, 25 bp, Homo sapien
tgctgctgttgtcgtccggtgctct

SEQ ID NO: 3776403 - DNA, 25 bp, Homo sapien
cctagatgatgggaaaggtcccgtg

SEQ ID NO: 3776404 - DNA, 25 bp, Homo sapien
ggcagaacccggtctgtggtgtttc

SEQ ID NO: 3776405 - DNA, 25 bp, Homo sapien
tgtggtgtttcagcaggaaatactg

SEQ ID NO: 3776406 - DNA, 25 bp, Homo sapien
tcaggtatcagtccatatcttcagc

SEQ ID NO: 3776407 - DNA, 25 bp, Homo sapien
ttttttgattgagtgcaggaaactt

SEQ ID NO: 3776408 - DNA, 25 bp, Homo sapien
gtacacgacaaggtgaggctcccat

SEQ ID NO: 3776409 - DNA, 25 bp, Homo sapien
ttttgattgagtgcaggaaacttta

SEQ ID NO: 3776410 - DNA, 25 bp, Homo sapien
tcccatggtgtctccctcttcaggg

SEQ ID NO: 3776411 - DNA, 25 bp, Homo sapien
gccatgtgggctccgccaccctgtt

SEQ ID NO: 3776412 - DNA, 25 bp, Homo sapien
tccgcagcagtgagagcctctctcg

SEQ ID NO: 3776413 - DNA, 25 bp, Homo sapien
agcagtgagagcctctctcgtcctc

SEQ ID NO: 3776414 - DNA, 25 bp, Homo sapien
cagggactccgcagcagtgagagcc

SEQ ID NO: 3776415 - DNA, 25 bp, Homo sapien
ctccagcatcgaaggtgaaagagtg

SEQ ID NO: 3776416 - DNA, 25 bp, Homo sapien
atgacctggtgctcggtgtagcccg

SEQ ID NO: 3776417 - DNA, 25 bp, Homo sapien
atgccagctccagcatcgaaggtga

SEQ ID NO: 3776418 - DNA, 25 bp, Homo sapien
tggaggagatgacctggtgctcggt

SEQ ID NO: 3776419 - DNA, 25 bp, Homo sapien
ctctgaagcctgcttcaccaccttc

SEQ ID NO: 3776420 - DNA, 25 bp, Homo sapien
cttgaagagccctctgaagcctgct

SEQ ID NO: 3776421 - DNA, 25 bp, Homo sapien
aagagccctctgaagcctgcttcac

SEQ ID NO: 3776422 - DNA, 25 bp, Homo sapien
ccctctgaagcctgcttcaccacct

SEQ ID NO: 3776423 - DNA, 25 bp, Homo sapien
tagtttgttcctcgacagagtgacc

SEQ ID NO: 3776424 - DNA, 25 bp, Homo sapien
acctctgagattgggaatgctgtcc

SEQ ID NO: 3776425 - DNA, 25 bp, Homo sapien
gagacctgcgaattgctcaactgct

SEQ ID NO: 3776426 - DNA, 25 bp, Homo sapien
gccggccatcactcagaatcttaag

SEQ ID NO: 3776427 - DNA, 25 bp, Homo sapien
cacctgaacctgtgaggcgctggct

SEQ ID NO: 3776428 - DNA, 25 bp, Homo sapien
tcttagcatagaggaacatgtcttc

SEQ ID NO: 3776429 - DNA, 25 bp, Homo sapien
taacttagttttgccacggttgaga

SEQ ID NO: 3776430 - DNA, 25 bp, Homo sapien
gaagttaggatttcaacccagagcc

SEQ ID NO: 3776431 - DNA, 25 bp, Homo sapien
ggaggctcattaggtcagaagcaac

SEQ ID NO: 3776432 - DNA, 25 bp, Homo sapien
ggaggcagatacgtaaagaggaaaa

SEQ ID NO: 3776433 - DNA, 25 bp, Homo sapien
gaaaaggaggcagatacgtaaagag

SEQ ID NO: 3776434 - DNA, 25 bp, Homo sapien
taccagaaaataggatacaaaacca

SEQ ID NO: 3776435 - DNA, 25 bp, Homo sapien
tggccaagggtagatcaacagatcc

SEQ ID NO: 3776436 - DNA, 25 bp, Homo sapien
ctgccgtcttctaagttctggccaa

SEQ ID NO: 3776437 - DNA, 25 bp, Homo sapien
taaaatgttattcggccgcttcatc

SEQ ID NO: 3776438 - DNA, 25 bp, Homo sapien
tagatcaacagatccagattcctga

SEQ ID NO: 3776439 - DNA, 25 bp, Homo sapien
gcagctgttgctgaactcaaggcaa

SEQ ID NO: 3776440 - DNA, 25 bp, Homo sapien
ttttcgggctcaagattccctgcat

SEQ ID NO: 3776441 - DNA, 25 bp, Homo sapien
cagtggacactggacgggatattct

SEQ ID NO: 3776442 - DNA, 25 bp, Homo sapien
gactttgcagcgactccgatggtag

SEQ ID NO: 3776443 - DNA, 25 bp, Homo sapien
ttgattttcgcggtgctggggagtc

SEQ ID NO: 3776444 - DNA, 25 bp, Homo sapien
tgattttcgcggtgctggggagtct

SEQ ID NO: 3776445 - DNA, 25 bp, Homo sapien
gattttcgcggtgctggggagtctg

SEQ ID NO: 3776446 - DNA, 25 bp, Homo sapien
tcttgattttcgcggtgctggggag

SEQ ID NO: 3776447 - DNA, 25 bp, Homo sapien
gcgacgggctcactgggacaggggc

SEQ ID NO: 3776448 - DNA, 25 bp, Homo sapien
ctgggacaggggctggggttgtgcg

SEQ ID NO: 3776449 - DNA, 25 bp, Homo sapien
ggcgacgggctcactgggacagggg

SEQ ID NO: 3776450 - DNA, 25 bp, Homo sapien
ggacaggggctggggttgtgcgtcc

SEQ ID NO: 3776451 - DNA, 25 bp, Homo sapien
caaatacagaaaagcgaatagagac

SEQ ID NO: 3776452 - DNA, 25 bp, Homo sapien
aaatacagaaaagcgaatagagaca

SEQ ID NO: 3776453 - DNA, 25 bp, Homo sapien
gcaaatacagaaaagcgaatagaga

SEQ ID NO: 3776454 - DNA, 25 bp, Homo sapien
gacagagggctaagattccaaagca

SEQ ID NO: 3776455 - DNA, 25 bp, Homo sapien
cacaaacgcccggagagagcgagcc

SEQ ID NO: 3776456 - DNA, 25 bp, Homo sapien
gcgagccctcgggataccattggct

SEQ ID NO: 3776457 - DNA, 25 bp, Homo sapien
gagagcgagccctcgggataccatt

SEQ ID NO: 3776458 - DNA, 25 bp, Homo sapien
gataccattggctataggctggcct

SEQ ID NO: 3776459 - DNA, 25 bp, Homo sapien
gataacgaaacctgcactgctccga

SEQ ID NO: 3776460 - DNA, 25 bp, Homo sapien
gattgggcctcgttgtgtcgtttcc

SEQ ID NO: 3776461 - DNA, 25 bp, Homo sapien
tctccggagtgacctaacacaggat

SEQ ID NO: 3776462 - DNA, 25 bp, Homo sapien
taaactcgagtctaaaagattgggc

SEQ ID NO: 3776463 - DNA, 25 bp, Homo sapien
ttgccttcaggtgaccacggattcg

SEQ ID NO: 3776464 - DNA, 25 bp, Homo sapien
ctgttgccttcaggtgaccacggat

SEQ ID NO: 3776465 - DNA, 25 bp, Homo sapien
cactgggcgccggtgctgttgcctt

SEQ ID NO: 3776466 - DNA, 25 bp, Homo sapien
cttcaggtgaccacggattcgccat

SEQ ID NO: 3776467 - DNA, 25 bp, Homo sapien
gggatccagaaaccgggagtcacca

SEQ ID NO: 3776468 - DNA, 25 bp, Homo sapien
ggagtcaccaccaataccgttctca

SEQ ID NO: 3776469 - DNA, 25 bp, Homo sapien
tctcaactttacttccagctggtca

SEQ ID NO: 3776470 - DNA, 25 bp, Homo sapien
tactgtgtcgggagattctaccttc

SEQ ID NO: 3776471 - DNA, 25 bp, Homo sapien
tgtatgcctgcatatgtatcaaatg

SEQ ID NO: 3776472 - DNA, 25 bp, Homo sapien
tgcctgcatatgtatcaaatgctgt

SEQ ID NO: 3776473 - DNA, 25 bp, Homo sapien
tgcatatgtatcaaatgctgtagga

SEQ ID NO: 3776474 - DNA, 25 bp, Homo sapien
tgtaggaaggatattcaagaaattt

SEQ ID NO: 3776475 - DNA, 25 bp, Homo sapien
tatccagaatcagagtacaggccgg

SEQ ID NO: 3776476 - DNA, 25 bp, Homo sapien
tacagacgcttgaggacaggcttaa

SEQ ID NO: 3776477 - DNA, 25 bp, Homo sapien
tctggagagcgaggatatgcacttc

SEQ ID NO: 3776478 - DNA, 25 bp, Homo sapien
tgcacacgtcaggaagcagcttgcc

SEQ ID NO: 3776479 - DNA, 25 bp, Homo sapien
caaaccctgttccagtgaatgagga

SEQ ID NO: 3776480 - DNA, 25 bp, Homo sapien
tcacggcaacctatagaaaggagag

SEQ ID NO: 3776481 - DNA, 25 bp, Homo sapien
cagtcgccctctggtggtagtctca

SEQ ID NO: 3776482 - DNA, 25 bp, Homo sapien
taaaggagcagtgtaactgtcaccg

SEQ ID NO: 3776483 - DNA, 25 bp, Homo sapien
tgagtgcttgcacaaaactctgctt

SEQ ID NO: 3776484 - DNA, 25 bp, Homo sapien
tgatagcacgaataagttccaccag

SEQ ID NO: 3776485 - DNA, 25 bp, Homo sapien
tgcttttgaagcaatccactgacct

SEQ ID NO: 3776486 - DNA, 25 bp, Homo sapien
tagtcgcgggtacaggctctttctt

SEQ ID NO: 3776487 - DNA, 25 bp, Homo sapien
ttgcatgtttattgattcggcaact

SEQ ID NO: 3776488 - DNA, 25 bp, Homo sapien
cttgcatgtttattgattcggcaac

SEQ ID NO: 3776489 - DNA, 25 bp, Homo sapien
tgttcccagtgataccatgtaaggt

SEQ ID NO: 3776490 - DNA, 25 bp, Homo sapien
taaacaaccaccacctgtcactgag

SEQ ID NO: 3776491 - DNA, 25 bp, Homo sapien
gagaaatacatgtactagtcaccag

SEQ ID NO: 3776492 - DNA, 25 bp, Homo sapien
cttagtccatagaaaaacagtccct

SEQ ID NO: 3776493 - DNA, 25 bp, Homo sapien
atctcctataccaaacttgagtttt

SEQ ID NO: 3776494 - DNA, 25 bp, Homo sapien
gacacctccaattgtacaggtaata

SEQ ID NO: 3776495 - DNA, 25 bp, Homo sapien
cctggacacctccaattgtacaggt

SEQ ID NO: 3776496 - DNA, 25 bp, Homo sapien
caggtaatactgcaaattgccatct

SEQ ID NO: 3776497 - DNA, 25 bp, Homo sapien
agaagctcaggaaatcagtcagttt

SEQ ID NO: 3776498 - DNA, 25 bp, Homo sapien
gcatcaccgtggaggggagcgtata

SEQ ID NO: 3776499 - DNA, 25 bp, Homo sapien
ttgtagaatgagtaggcggctttga

SEQ ID NO: 3776500 - DNA, 25 bp, Homo sapien
ttagccaggatgagcgcgtcgctca

SEQ ID NO: 3776501 - DNA, 25 bp, Homo sapien
caaaggcttccgagtcattagacct

SEQ ID NO: 3776502 - DNA, 25 bp, Homo sapien
catctcatacgctgaattactgcag

SEQ ID NO: 3776503 - DNA, 25 bp, Homo sapien
gatgatctttccattgtccctcaca

SEQ ID NO: 3776504 - DNA, 25 bp, Homo sapien
tgcaggcacctgcagaacctgatta

SEQ ID NO: 3776505 - DNA, 25 bp, Homo sapien
caccatgtctagatggcttataagc

SEQ ID NO: 3776506 - DNA, 25 bp, Homo sapien
atggcaccatgtctagatggcttat

SEQ ID NO: 3776507 - DNA, 25 bp, Homo sapien
gatggcttataagcaacttctaaca

SEQ ID NO: 3776508 - DNA, 25 bp, Homo sapien
taagcaacttctaacaactttcaag

SEQ ID NO: 3776509 - DNA, 25 bp, Homo sapien
aacgtgtcaataatgtgctcccggg

SEQ ID NO: 3776510 - DNA, 25 bp, Homo sapien
tccactacaaacgtgtcaataatgt

SEQ ID NO: 3776511 - DNA, 25 bp, Homo sapien
gattaattctcgaactgatttgata

SEQ ID NO: 3776512 - DNA, 25 bp, Homo sapien
gatgaaactgcttcaggtaagtgtt

SEQ ID NO: 3776513 - DNA, 25 bp, Homo sapien
gaggagtgaaacgactttgcactca

SEQ ID NO: 3776514 - DNA, 25 bp, Homo sapien
gtgaaacgactttgcactcaaagtg

SEQ ID NO: 3776515 - DNA, 25 bp, Homo sapien
cacgcgggagctagttagagctgca

SEQ ID NO: 3776516 - DNA, 25 bp, Homo sapien
agcagcacgcgggagctagttagag

SEQ ID NO: 3776517 - DNA, 25 bp, Homo sapien
aatggctagcttccgtataatggaa

SEQ ID NO: 3776518 - DNA, 25 bp, Homo sapien
tccgtataatggaatagtgaagcgg

SEQ ID NO: 3776519 - DNA, 25 bp, Homo sapien
tataatggaatagtgaagcggtcat

SEQ ID NO: 3776520 - DNA, 25 bp, Homo sapien
attaaaatggctagcttccgtataa

SEQ ID NO: 3776521 - DNA, 25 bp, Homo sapien
cattaaaagcgtcagttgttacagc

SEQ ID NO: 3776522 - DNA, 25 bp, Homo sapien
tctgcattaaaagcgtcagttgtta

SEQ ID NO: 3776523 - DNA, 25 bp, Homo sapien
ttttctgcattaaaagcgtcagttg

SEQ ID NO: 3776524 - DNA, 25 bp, Homo sapien
cagtttttagactcctgcaaataat

SEQ ID NO: 3776525 - DNA, 25 bp, Homo sapien
tttctggggtttagtgatcgatgcc

SEQ ID NO: 3776526 - DNA, 25 bp, Homo sapien
ggggtttagtgatcgatgccagtat

SEQ ID NO: 3776527 - DNA, 25 bp, Homo sapien
atctggaagtctgtatagcttcatt

SEQ ID NO: 3776528 - DNA, 25 bp, Homo sapien
aagtctgtatagcttcattgttctc

SEQ ID NO: 3776529 - DNA, 25 bp, Homo sapien
taggaagaaccactcccgcggtgta

SEQ ID NO: 3776530 - DNA, 25 bp, Homo sapien
ggctacccgtttcgatctcaacttc

SEQ ID NO: 3776531 - DNA, 25 bp, Homo sapien
agtgatctctcggattagcactggg

SEQ ID NO: 3776532 - DNA, 25 bp, Homo sapien
ctgcatgtggctatgggcttaggaa

SEQ ID NO: 3776533 - DNA, 25 bp, Homo sapien
cataaatccgaatgtttgctgggat

SEQ ID NO: 3776534 - DNA, 25 bp, Homo sapien
tgtcataaatccgaatgtttgctgg

SEQ ID NO: 3776535 - DNA, 25 bp, Homo sapien
tggcacttatgaacccgaccagttt

SEQ ID NO: 3776536 - DNA, 25 bp, Homo sapien
gctgggatggcacttatgaacccga

SEQ ID NO: 3776537 - DNA, 25 bp, Homo sapien
cgtaattctcatttaacaacgtgta

SEQ ID NO: 3776538 - DNA, 25 bp, Homo sapien
cacaacaggaactcgggtgaatagt

SEQ ID NO: 3776539 - DNA, 25 bp, Homo sapien
tttaacaacgtgtataactccttga

SEQ ID NO: 3776540 - DNA, 25 bp, Homo sapien
cgggtgaatagtcaaatcggaacat

SEQ ID NO: 3776541 - DNA, 25 bp, Homo sapien
ccctgtggcaaagaatacggttctt

SEQ ID NO: 3776542 - DNA, 25 bp, Homo sapien
ttcggcatcactcaagtctaaagtg

SEQ ID NO: 3776543 - DNA, 25 bp, Homo sapien
ctttatctggttcaattgcaccatg

SEQ ID NO: 3776544 - DNA, 25 bp, Homo sapien
cttggcgtacgttgtctttatctgg

SEQ ID NO: 3776545 - DNA, 25 bp, Homo sapien
cctccctgccccctgctcccagtgc

SEQ ID NO: 3776546 - DNA, 25 bp, Homo sapien
gccccctgctcccagtgctctggcc

SEQ ID NO: 3776547 - DNA, 25 bp, Homo sapien
ctgccccctgctcccagtgctctgg

SEQ ID NO: 3776548 - DNA, 25 bp, Homo sapien
cccctgctcccagtgctctggccat

SEQ ID NO: 3776549 - DNA, 25 bp, Homo sapien
tggatatcctgcaacttctgcattg

SEQ ID NO: 3776550 - DNA, 25 bp, Homo sapien
gcagctccattgctctctggatatc

SEQ ID NO: 3776551 - DNA, 25 bp, Homo sapien
tcatcaatgttcctggctgggccct

SEQ ID NO: 3776552 - DNA, 25 bp, Homo sapien
caaaactggtatctgtgctttgcag

SEQ ID NO: 3776553 - DNA, 25 bp, Homo sapien
tcctgggcaaccatagcctgtcgtt

SEQ ID NO: 3776554 - DNA, 25 bp, Homo sapien
aatgagaagacagcgcagaggactg

SEQ ID NO: 3776555 - DNA, 25 bp, Homo sapien
cgccagctcttggagattccccagt

SEQ ID NO: 3776556 - DNA, 25 bp, Homo sapien
tcaagagcccttcggttttgctgta

SEQ ID NO: 3776557 - DNA, 25 bp, Homo sapien
aaacagcaactttggacttctgttc

SEQ ID NO: 3776558 - DNA, 25 bp, Homo sapien
agcaactttggacttctgttccact

SEQ ID NO: 3776559 - DNA, 25 bp, Homo sapien
ccttagaagtttataaacagcaact

SEQ ID NO: 3776560 - DNA, 25 bp, Homo sapien
ttataaacagcaactttggacttct

SEQ ID NO: 3776561 - DNA, 25 bp, Homo sapien
gagcaataattttaacttgggaagc

SEQ ID NO: 3776562 - DNA, 25 bp, Homo sapien
taacttgggaagcttactcatcgta

SEQ ID NO: 3776563 - DNA, 25 bp, Homo sapien
ttaacttgggaagcttactcatcgt

SEQ ID NO: 3776564 - DNA, 25 bp, Homo sapien
aacttgggaagcttactcatcgtac

SEQ ID NO: 3776565 - DNA, 25 bp, Homo sapien
ggaagtgcagtacccaggcaaaggc

SEQ ID NO: 3776566 - DNA, 25 bp, Homo sapien
tgacaacatcaaaactacctgcaag

SEQ ID NO: 3776567 - DNA, 25 bp, Homo sapien
actggaacctcaagatcgaactgcg

SEQ ID NO: 3776568 - DNA, 25 bp, Homo sapien
ccttggaaagctgtatctagtgggt

SEQ ID NO: 3776569 - DNA, 25 bp, Homo sapien
agacacccacgcagtacaatcaacc

SEQ ID NO: 3776570 - DNA, 25 bp, Homo sapien
tgccaccagacacccacgcagtaca

SEQ ID NO: 3776571 - DNA, 25 bp, Homo sapien
cagtacaatcaaccctcttcttggc

SEQ ID NO: 3776572 - DNA, 25 bp, Homo sapien
tgcctgggggttggctccacagaca

SEQ ID NO: 3776573 - DNA, 25 bp, Homo sapien
gctgaaatctgctgccagatggtgt

SEQ ID NO: 3776574 - DNA, 25 bp, Homo sapien
tcccgctgaaatctgctgccagatg

SEQ ID NO: 3776575 - DNA, 25 bp, Homo sapien
gaaatctgctgccagatggtgttgt

SEQ ID NO: 3776576 - DNA, 25 bp, Homo sapien
aaatctgctgccagatggtgttgtg

SEQ ID NO: 3776577 - DNA, 25 bp, Homo sapien
gaaaaacacagcaggtatccacaca

SEQ ID NO: 3776578 - DNA, 25 bp, Homo sapien
cacagtgtaccccttcgttatttgg

SEQ ID NO: 3776579 - DNA, 25 bp, Homo sapien
tattcaggtaattagacagacaccc

SEQ ID NO: 3776580 - DNA, 25 bp, Homo sapien
ttaaggaggctgtcaagagcttcca

SEQ ID NO: 3776581 - DNA, 25 bp, Homo sapien
cgagtctgacttggtgcctccggaa

SEQ ID NO: 3776582 - DNA, 25 bp, Homo sapien
tctcctgggaatcagatgccgagtc

SEQ ID NO: 3776583 - DNA, 25 bp, Homo sapien
gaatcagatgccgagtctgacttgg

SEQ ID NO: 3776584 - DNA, 25 bp, Homo sapien
tggtgcctccggaatttggtttctc

SEQ ID NO: 3776585 - DNA, 25 bp, Homo sapien
aacagttcgaaggagacgtgcccca

SEQ ID NO: 3776586 - DNA, 25 bp, Homo sapien
gccccaaggcctcgctgttgatggc

SEQ ID NO: 3776587 - DNA, 25 bp, Homo sapien
agacgtgccccaaggcctcgctgtt

SEQ ID NO: 3776588 - DNA, 25 bp, Homo sapien
gttcgaaggagacgtgccccaaggc

SEQ ID NO: 3776589 - DNA, 25 bp, Homo sapien
tccttcttacaaccacagtatgtga

SEQ ID NO: 3776590 - DNA, 25 bp, Homo sapien
ctttatggcttctctatggtgtatc

SEQ ID NO: 3776591 - DNA, 25 bp, Homo sapien
gctttagggccatggaagtaaagta

SEQ ID NO: 3776592 - DNA, 25 bp, Homo sapien
gtaagggtcacttgaccacaagcac

SEQ ID NO: 3776593 - DNA, 25 bp, Homo sapien
tagacaagtagaatgcaaatgattt

SEQ ID NO: 3776594 - DNA, 25 bp, Homo sapien
gaattagaggtcagtcaaaagtccc

SEQ ID NO: 3776595 - DNA, 25 bp, Homo sapien
cttaaagtagacaagtagaatgcaa

SEQ ID NO: 3776596 - DNA, 25 bp, Homo sapien
ttttataatgaattagaggtcagtc

SEQ ID NO: 3776597 - DNA, 25 bp, Homo sapien
tgtgccagcgcatagtttgaatcca

SEQ ID NO: 3776598 - DNA, 25 bp, Homo sapien
tctaagggtgtagcaagaaccgctc

SEQ ID NO: 3776599 - DNA, 25 bp, Homo sapien
tcaccatggttcgaaaaatctcact

SEQ ID NO: 3776600 - DNA, 25 bp, Homo sapien
gagtaaaccatctgtgactcaggcc

SEQ ID NO: 3776601 - DNA, 25 bp, Homo sapien
tcaagtgtgaaaatgcgtggtgcat

SEQ ID NO: 3776602 - DNA, 25 bp, Homo sapien
tgtgaaaatgcgtggtgcatcgagt

SEQ ID NO: 3776603 - DNA, 25 bp, Homo sapien
ggtgcatcgagttttggagatcaaa

SEQ ID NO: 3776604 - DNA, 25 bp, Homo sapien
aatgcgtggtgcatcgagttttgga

SEQ ID NO: 3776605 - DNA, 25 bp, Homo sapien
aggggatcggccctgctctgaagag

SEQ ID NO: 3776606 - DNA, 25 bp, Homo sapien
tcaggggatcggccctgctctgaag

SEQ ID NO: 3776607 - DNA, 25 bp, Homo sapien
ggggatcggccctgctctgaagagc

SEQ ID NO: 3776608 - DNA, 25 bp, Homo sapien
gggatcggccctgctctgaagagct

SEQ ID NO: 3776609 - DNA, 25 bp, Homo sapien
cctcggcgccagaactttgcgcagt

SEQ ID NO: 3776610 - DNA, 25 bp, Homo sapien
ctttgcccattcttttcgggtggcg

SEQ ID NO: 3776611 - DNA, 25 bp, Homo sapien
gcgaggcggtgcaaagcccagtatc

SEQ ID NO: 3776612 - DNA, 25 bp, Homo sapien
aactttgcgcagttcgccgcctgcg

SEQ ID NO: 3776613 - DNA, 25 bp, Homo sapien
agaggagggcgacctcctaccccag

SEQ ID NO: 3776614 - DNA, 25 bp, Homo sapien
ctcctcggcgcccaccggagccacc

SEQ ID NO: 3776615 - DNA, 25 bp, Homo sapien
caaagggaagggcgtagcgcctctc

SEQ ID NO: 3776616 - DNA, 25 bp, Homo sapien
ggctgcggccgccacaaagggaagg

SEQ ID NO: 3776617 - DNA, 25 bp, Homo sapien
cgcgccccggacctcaccatgggct

SEQ ID NO: 3776618 - DNA, 25 bp, Homo sapien
tgggctccgcgccacggagaagcca

SEQ ID NO: 3776619 - DNA, 25 bp, Homo sapien
gggggcgcgcggcaagtgacagtag

SEQ ID NO: 3776620 - DNA, 25 bp, Homo sapien
gcgcactgcactctcccgcgagccg

SEQ ID NO: 3776621 - DNA, 25 bp, Homo sapien
cctcattgtccccgtctatcccgca

SEQ ID NO: 3776622 - DNA, 25 bp, Homo sapien
ctcattgtccccgtctatcccgcac

SEQ ID NO: 3776623 - DNA, 25 bp, Homo sapien
gtgtcctggtcgtccagttccaggc

SEQ ID NO: 3776624 - DNA, 25 bp, Homo sapien
gctggctggccgcagactcgctgtc

SEQ ID NO: 3776625 - DNA, 25 bp, Homo sapien
tgtcctggtcgtccagttccaggct

SEQ ID NO: 3776626 - DNA, 25 bp, Homo sapien
ccgcagactcgctgtcctccgccat

SEQ ID NO: 3776627 - DNA, 25 bp, Homo sapien
ctggggaggcggtgctcggggccgg

SEQ ID NO: 3776628 - DNA, 25 bp, Homo sapien
cgggccggagcggccgcagctccct

SEQ ID NO: 3776629 - DNA, 25 bp, Homo sapien
cgcggcggcgctggctggggaggcg

SEQ ID NO: 3776630 - DNA, 25 bp, Homo sapien
ggccgggccggagcggccgcagctc

SEQ ID NO: 3776631 - DNA, 25 bp, Homo sapien
tcaagaagttttgactaagaactgc

SEQ ID NO: 3776632 - DNA, 25 bp, Homo sapien
caagaagttttgactaagaactgct

SEQ ID NO: 3776633 - DNA, 25 bp, Homo sapien
gaccgatgatctggtggagcgtgtc

SEQ ID NO: 3776634 - DNA, 25 bp, Homo sapien
taagagggagatcaagtttggatgc

SEQ ID NO: 3776635 - DNA, 25 bp, Homo sapien
tgatctggtggagcgtgtctgcggc

SEQ ID NO: 3776636 - DNA, 25 bp, Homo sapien
tggtggagcgtgtctgcggcagagg

SEQ ID NO: 3776637 - DNA, 25 bp, Homo sapien
gcccacaggtcactacctgggagcc

SEQ ID NO: 3776638 - DNA, 25 bp, Homo sapien
cacccccttgcaggaaaaggtctct

SEQ ID NO: 3776639 - DNA, 25 bp, Homo sapien
tgcccacaggtcactacctgggagc

SEQ ID NO: 3776640 - DNA, 25 bp, Homo sapien
gtttaatgctcctctgttgtcaatt

SEQ ID NO: 3776641 - DNA, 25 bp, Homo sapien
ctgtttaatgctcctctgttgtcaa

SEQ ID NO: 3776642 - DNA, 25 bp, Homo sapien
ttaatgctcctctgttgtcaatttt

SEQ ID NO: 3776643 - DNA, 25 bp, Homo sapien
aatgctcctctgttgtcaattttat

SEQ ID NO: 3776644 - DNA, 25 bp, Homo sapien
gagcattgcaggatgtgtcaggtct

SEQ ID NO: 3776645 - DNA, 25 bp, Homo sapien
aagagcttaggaaagtgagccttgc

SEQ ID NO: 3776646 - DNA, 25 bp, Homo sapien
gcaggcccatgctgagagcattgca

SEQ ID NO: 3776647 - DNA, 25 bp, Homo sapien
ccgttggctccttgagctttgaaga

SEQ ID NO: 3776648 - DNA, 25 bp, Homo sapien
gcctggcagtaaggccaggttcctg

SEQ ID NO: 3776649 - DNA, 25 bp, Homo sapien
ctagttgttacccatgttctggaca

SEQ ID NO: 3776650 - DNA, 25 bp, Homo sapien
ttctggacacagagtggccatcctg

SEQ ID NO: 3776651 - DNA, 25 bp, Homo sapien
gagggcctgcttgcttcatggtcac

SEQ ID NO: 3776652 - DNA, 25 bp, Homo sapien
tctctggagggcaaaggcagcataa

SEQ ID NO: 3776653 - DNA, 25 bp, Homo sapien
tgtgcgttcttccatgaggttcaga

SEQ ID NO: 3776654 - DNA, 25 bp, Homo sapien
taagataaagtgaaggccggctgac

SEQ ID NO: 3776655 - DNA, 25 bp, Homo sapien
gaaagagcatgatacttacaagtcc

SEQ ID NO: 3776656 - DNA, 25 bp, Homo sapien
gtggtttggacgtggaggctggaga

SEQ ID NO: 3776657 - DNA, 25 bp, Homo sapien
gagttggttacttcagaacaggcct

SEQ ID NO: 3776658 - DNA, 25 bp, Homo sapien
ccagcccaccatgcttaatgggtgg

SEQ ID NO: 3776659 - DNA, 25 bp, Homo sapien
tattttagtatctccctggagttgg

SEQ ID NO: 3776660 - DNA, 25 bp, Homo sapien
gctggtctcgtttctctcaatgctc

SEQ ID NO: 3776661 - DNA, 25 bp, Homo sapien
tggtctcgtttctctcaatgctcat

SEQ ID NO: 3776662 - DNA, 25 bp, Homo sapien
tcctcgctggtctcgtttctctcaa

SEQ ID NO: 3776663 - DNA, 25 bp, Homo sapien
ctcgctggtctcgtttctctcaatg

SEQ ID NO: 3776664 - DNA, 25 bp, Homo sapien
caaggataagtcaagacttccataa

SEQ ID NO: 3776665 - DNA, 25 bp, Homo sapien
caaggacaaggataagtcaagactt

SEQ ID NO: 3776666 - DNA, 25 bp, Homo sapien
tgacaaggacaaggataagtcaaga

SEQ ID NO: 3776667 - DNA, 25 bp, Homo sapien
aggacaaggataagtcaagacttcc

SEQ ID NO: 3776668 - DNA, 25 bp, Homo sapien
gaggcgaactcctgtctctctgttt

SEQ ID NO: 3776669 - DNA, 25 bp, Homo sapien
tataggaactacatcatagctgccc

SEQ ID NO: 3776670 - DNA, 25 bp, Homo sapien
cattcgggccctcaatggatagcat

SEQ ID NO: 3776671 - DNA, 25 bp, Homo sapien
gatgagatcacccagctcaacagtg

SEQ ID NO: 3776672 - DNA, 25 bp, Homo sapien
gaaatcacactgagtttgtcatgct

SEQ ID NO: 3776673 - DNA, 25 bp, Homo sapien
tgtggcctacgtaccattctgtggc

SEQ ID NO: 3776674 - DNA, 25 bp, Homo sapien
ctgcataagcgatgtctgtgagagg

SEQ ID NO: 3776675 - DNA, 25 bp, Homo sapien
gggtgcgatgcctctttgtttttgc

SEQ ID NO: 3776676 - DNA, 25 bp, Homo sapien
tgttgtcctcggcacacggcatgct

SEQ ID NO: 3776677 - DNA, 25 bp, Homo sapien
ctgcttgttgtcctcggcacacggc

SEQ ID NO: 3776678 - DNA, 25 bp, Homo sapien
tcggcacacggcatgctgtgactgc

SEQ ID NO: 3776679 - DNA, 25 bp, Homo sapien
gctgctggctgcttaatacatcggg

SEQ ID NO: 3776680 - DNA, 25 bp, Homo sapien
taaggaggtgattccattggcggca

SEQ ID NO: 3776681 - DNA, 25 bp, Homo sapien
gactttcccaggtaacatgcattaa

SEQ ID NO: 3776682 - DNA, 25 bp, Homo sapien
tgacagcagagaggtcttccgggac

SEQ ID NO: 3776683 - DNA, 25 bp, Homo sapien
ggcaaccttagagccgcaaaggact

SEQ ID NO: 3776684 - DNA, 25 bp, Homo sapien
ttaagagaggacactcagcggttcc

SEQ ID NO: 3776685 - DNA, 25 bp, Homo sapien
gagagaacgcataccttgagacgct

SEQ ID NO: 3776686 - DNA, 25 bp, Homo sapien
cacattgggtgagcaagatgagccc

SEQ ID NO: 3776687 - DNA, 25 bp, Homo sapien
ctgtgttgaaacgaggatgctgacc

SEQ ID NO: 3776688 - DNA, 25 bp, Homo sapien
aatccgagggagaactgaggtgatc

SEQ ID NO: 3776689 - DNA, 25 bp, Homo sapien
gtgatcgttagagcatagcgacatc

SEQ ID NO: 3776690 - DNA, 25 bp, Homo sapien
ccagaatccgagggagaactgaggt

SEQ ID NO: 3776691 - DNA, 25 bp, Homo sapien
gatcgttagagcatagcgacatcac

SEQ ID NO: 3776692 - DNA, 25 bp, Homo sapien
ggaatgcagtaaacgtccacgtccg

SEQ ID NO: 3776693 - DNA, 25 bp, Homo sapien
ttctaacatttacacggcaaacagg

SEQ ID NO: 3776694 - DNA, 25 bp, Homo sapien
tcggaaggacatctggacaccactt

SEQ ID NO: 3776695 - DNA, 25 bp, Homo sapien
aatgtccctggtggcggatacgccg

SEQ ID NO: 3776696 - DNA, 25 bp, Homo sapien
ggtgggtctgcgatagctcatttaa

SEQ ID NO: 3776697 - DNA, 25 bp, Homo sapien
tgggtctgcgatagctcatttaatg

SEQ ID NO: 3776698 - DNA, 25 bp, Homo sapien
acagtcaggtgggtctgcgatagct

SEQ ID NO: 3776699 - DNA, 25 bp, Homo sapien
tcaggtgggtctgcgatagctcatt

SEQ ID NO: 3776700 - DNA, 25 bp, Homo sapien
tcctcgtgggcagatcttctctggt

SEQ ID NO: 3776701 - DNA, 25 bp, Homo sapien
tccgagggggcatccgcagtccgtc

SEQ ID NO: 3776702 - DNA, 25 bp, Homo sapien
gggcatccgcagtccgtctggtcgt

SEQ ID NO: 3776703 - DNA, 25 bp, Homo sapien
ccgtttctgccaggggcttttcttg

SEQ ID NO: 3776704 - DNA, 25 bp, Homo sapien
taacgtgagcgttggacctgccatc

SEQ ID NO: 3776705 - DNA, 25 bp, Homo sapien
tacattcagtgggtctgcggtccag

SEQ ID NO: 3776706 - DNA, 25 bp, Homo sapien
cattgacctggtcgacagaactgca

SEQ ID NO: 3776707 - DNA, 25 bp, Homo sapien
caaagccgcgtcgttcagggaagct

SEQ ID NO: 3776708 - DNA, 25 bp, Homo sapien
ctcggcgtgaaaacagcaagttaat

SEQ ID NO: 3776709 - DNA, 25 bp, Homo sapien
cgtggactggtctcttttggaactc

SEQ ID NO: 3776710 - DNA, 25 bp, Homo sapien
cggcgtgaaaacagcaagttaatgt

SEQ ID NO: 3776711 - DNA, 25 bp, Homo sapien
acatggacgtggactggtctctttt

SEQ ID NO: 3776712 - DNA, 25 bp, Homo sapien
tttctgtggtgctgacgaggtttca

SEQ ID NO: 3776713 - DNA, 25 bp, Homo sapien
ttctgtggtgctgacgaggtttcaa

SEQ ID NO: 3776714 - DNA, 25 bp, Homo sapien
aagaaacaccgtgtgatacgtggta

SEQ ID NO: 3776715 - DNA, 25 bp, Homo sapien
gtaatgtcctgtgttacaacgggac

SEQ ID NO: 3776716 - DNA, 25 bp, Homo sapien
aaaagaaacaccgtgtgatacgtgg

SEQ ID NO: 3776717 - DNA, 25 bp, Homo sapien
ggtaatgtcctgtgttacaacggga

SEQ ID NO: 3776718 - DNA, 25 bp, Homo sapien
tgagttcgagcaatccactgcctcg

SEQ ID NO: 3776719 - DNA, 25 bp, Homo sapien
tttagaggcaatgttctcactatgt

SEQ ID NO: 3776720 - DNA, 25 bp, Homo sapien
tcctgagttcgagcaatccactgcc

SEQ ID NO: 3776721 - DNA, 25 bp, Homo sapien
gagttcgagcaatccactgcctcgg

SEQ ID NO: 3776722 - DNA, 25 bp, Homo sapien
ttttttcatgcaaagacaatagaca

SEQ ID NO: 3776723 - DNA, 25 bp, Homo sapien
catgcaaagacaatagacaattccc

SEQ ID NO: 3776724 - DNA, 25 bp, Homo sapien
ttcatgcaaagacaatagacaattc

SEQ ID NO: 3776725 - DNA, 25 bp, Homo sapien
ttttcatgcaaagacaatagacaat

SEQ ID NO: 3776726 - DNA, 25 bp, Homo sapien
tgtatgtccacgtcagctggctgcc

SEQ ID NO: 3776727 - DNA, 25 bp, Homo sapien
tcctggtgcacaagacccagaccgc

SEQ ID NO: 3776728 - DNA, 25 bp, Homo sapien
aactggggggcaatgtatgtccacg

SEQ ID NO: 3776729 - DNA, 25 bp, Homo sapien
gggcaatgtatgtccacgtcagctg

SEQ ID NO: 3776730 - DNA, 25 bp, Homo sapien
tgtaaggcttgagcatattgtaaaa

SEQ ID NO: 3776731 - DNA, 25 bp, Homo sapien
ggcttgagcatattgtaaaagtcat

SEQ ID NO: 3776732 - DNA, 25 bp, Homo sapien
cacgctcctttgtaaggcttgagca

SEQ ID NO: 3776733 - DNA, 25 bp, Homo sapien
cctttgtaaggcttgagcatattgt

SEQ ID NO: 3776734 - DNA, 25 bp, Homo sapien
cttgctctgaggcctgcgatggcag

SEQ ID NO: 3776735 - DNA, 25 bp, Homo sapien
ccttgctctgaggcctgcgatggca

SEQ ID NO: 3776736 - DNA, 25 bp, Homo sapien
gccttgctctgaggcctgcgatggc

SEQ ID NO: 3776737 - DNA, 25 bp, Homo sapien
ggacaagtcgggcaccagcgagggc

SEQ ID NO: 3776738 - DNA, 25 bp, Homo sapien
cacgtgggacaagtcgggcaccagc

SEQ ID NO: 3776739 - DNA, 25 bp, Homo sapien
tcgggcaccagcgagggctcggcat

SEQ ID NO: 3776740 - DNA, 25 bp, Homo sapien
gcacgtgggacaagtcgggcaccag

SEQ ID NO: 3776741 - DNA, 25 bp, Homo sapien
caaggttttgcaaatgggtatgagg

SEQ ID NO: 3776742 - DNA, 25 bp, Homo sapien
cagaaagagcagactgtaagcaagg

SEQ ID NO: 3776743 - DNA, 25 bp, Homo sapien
ggctggatcactgcaccaaagggtt

SEQ ID NO: 3776744 - DNA, 25 bp, Homo sapien
tggatcactgcaccaaagggtttgg

SEQ ID NO: 3776745 - DNA, 25 bp, Homo sapien
tgttccaatcaacgcctatggctgg

SEQ ID NO: 3776746 - DNA, 25 bp, Homo sapien
gtggctggacaatgacatgtgcctc

SEQ ID NO: 3776747 - DNA, 25 bp, Homo sapien
gcattttaggaggtggctggacaat

SEQ ID NO: 3776748 - DNA, 25 bp, Homo sapien
ctggtcgtgcagccggcattttagg

SEQ ID NO: 3776749 - DNA, 25 bp, Homo sapien
taagctgggactcggaaagaaatgc

SEQ ID NO: 3776750 - DNA, 25 bp, Homo sapien
gatttgttagcatgtcagacctcag

SEQ ID NO: 3776751 - DNA, 25 bp, Homo sapien
ctaaatgtgatacccaagtctgcca

SEQ ID NO: 3776752 - DNA, 25 bp, Homo sapien
tgtgacatcactgaaccactggtgc

SEQ ID NO: 3776753 - DNA, 25 bp, Homo sapien
gttaagttgtaaaagatcatgatca

SEQ ID NO: 3776754 - DNA, 25 bp, Homo sapien
tgttaagttgtaaaagatcatgatc

SEQ ID NO: 3776755 - DNA, 25 bp, Homo sapien
cttcagtgggaaacgctgaatctca

SEQ ID NO: 3776756 - DNA, 25 bp, Homo sapien
gaaaatccttgcagatgattcccag

SEQ ID NO: 3776757 - DNA, 25 bp, Homo sapien
caaatttgaaaatccttgcagatga

SEQ ID NO: 3776758 - DNA, 25 bp, Homo sapien
aaagaagcggtctggatctacaggc

SEQ ID NO: 3776759 - DNA, 25 bp, Homo sapien
tagcagcaaactaagagggccttga

SEQ ID NO: 3776760 - DNA, 25 bp, Homo sapien
ggaaagcccgcaggaagacacaaat

SEQ ID NO: 3776761 - DNA, 25 bp, Homo sapien
caaaagcaggctataccaagacggg

SEQ ID NO: 3776762 - DNA, 25 bp, Homo sapien
agagacctaagtccctaagaatggg

SEQ ID NO: 3776763 - DNA, 25 bp, Homo sapien
aaaagtcacaactgaccgcctggct

SEQ ID NO: 3776764 - DNA, 25 bp, Homo sapien
cacagtggcaacagacaccaactgg

SEQ ID NO: 3776765 - DNA, 25 bp, Homo sapien
gagtggtacagagccactgcgatgc

SEQ ID NO: 3776766 - DNA, 25 bp, Homo sapien
cctgcactccattggagaacaggag

SEQ ID NO: 3776767 - DNA, 25 bp, Homo sapien
tcagctaagaggcattcgctatgac

SEQ ID NO: 3776768 - DNA, 25 bp, Homo sapien
cagatgtccgtctgacaacctgtac

SEQ ID NO: 3776769 - DNA, 25 bp, Homo sapien
gctgccccagttacaggataaagaa

SEQ ID NO: 3776770 - DNA, 25 bp, Homo sapien
ttccccagggcaacaagtcagatgt

SEQ ID NO: 3776771 - DNA, 25 bp, Homo sapien
taacaacagttagcaggctttgcat

SEQ ID NO: 3776772 - DNA, 25 bp, Homo sapien
tatgtgcttaagatgtgttggccca

SEQ ID NO: 3776773 - DNA, 25 bp, Homo sapien
aagtctctggagcttaatcatcctg

SEQ ID NO: 3776774 - DNA, 25 bp, Homo sapien
gattcacaagttgctatctgtgcca

SEQ ID NO: 3776775 - DNA, 25 bp, Homo sapien
gagcaaccatatgaccttctgatga

SEQ ID NO: 3776776 - DNA, 25 bp, Homo sapien
gtaacgaagccatctggtagccgat

SEQ ID NO: 3776777 - DNA, 25 bp, Homo sapien
tcccaagagagggtctgaatggcac

SEQ ID NO: 3776778 - DNA, 25 bp, Homo sapien
gccgattgtcggcacagaactcttg

SEQ ID NO: 3776779 - DNA, 25 bp, Homo sapien
cataggcattgtgcctcaggctgct

SEQ ID NO: 3776780 - DNA, 25 bp, Homo sapien
cgcgacataggcattgtgcctcagg

SEQ ID NO: 3776781 - DNA, 25 bp, Homo sapien
agcttctggtcaaaccgccacgccg

SEQ ID NO: 3776782 - DNA, 25 bp, Homo sapien
cgccacgccgcgacataggcattgt

SEQ ID NO: 3776783 - DNA, 25 bp, Homo sapien
accagcaccggcgttccattactgc

SEQ ID NO: 3776784 - DNA, 25 bp, Homo sapien
cacagtgacatagatgggaccatcc

SEQ ID NO: 3776785 - DNA, 25 bp, Homo sapien
gggcacagtgacatagatgggacca

SEQ ID NO: 3776786 - DNA, 25 bp, Homo sapien
tactgctcagcaagtggacgctgac

SEQ ID NO: 3776787 - DNA, 25 bp, Homo sapien
ttccatcatttgcatgcaaagtacc

SEQ ID NO: 3776788 - DNA, 25 bp, Homo sapien
tggatccaccctctaaaccaaacaa

SEQ ID NO: 3776789 - DNA, 25 bp, Homo sapien
agcctttcggagccctttccagtct

SEQ ID NO: 3776790 - DNA, 25 bp, Homo sapien
agtctcttccgcagcctctctgttt

SEQ ID NO: 3776791 - DNA, 25 bp, Homo sapien
ttacaactctggatccaccctctaa

SEQ ID NO: 3776792 - DNA, 25 bp, Homo sapien
tgaacttgtgtcatcttccaaagac

SEQ ID NO: 3776793 - DNA, 25 bp, Homo sapien
ggtccaggcgtgctctctttaggct

SEQ ID NO: 3776794 - DNA, 25 bp, Homo sapien
ccaaagacacgtctggtccaggcgt

SEQ ID NO: 3776795 - DNA, 25 bp, Homo sapien
tgcgtcttcgggagatgaacttgtg

SEQ ID NO: 3776796 - DNA, 25 bp, Homo sapien
atggtgcagttggacacaaacagag

SEQ ID NO: 3776797 - DNA, 25 bp, Homo sapien
tgggtctttctctgataaggaatta

SEQ ID NO: 3776798 - DNA, 25 bp, Homo sapien
tttctggtggatggcttttagtttc

SEQ ID NO: 3776799 - DNA, 25 bp, Homo sapien
acagaggtggaaggtacccgtcttg

SEQ ID NO: 3776800 - DNA, 25 bp, Homo sapien
gttccatttccgtctaatcctcgca

SEQ ID NO: 3776801 - DNA, 25 bp, Homo sapien
ctggcggccgtgagaaacgcggtca

SEQ ID NO: 3776802 - DNA, 25 bp, Homo sapien
gttctcaggcaacctcagagccctt

SEQ ID NO: 3776803 - DNA, 25 bp, Homo sapien
aacgcggtcaggtcactgtagctgg

SEQ ID NO: 3776804 - DNA, 25 bp, Homo sapien
ggaaatgaacgcgaggctgtggccg

SEQ ID NO: 3776805 - DNA, 25 bp, Homo sapien
ctggaaatgaacgcgaggctgtggc

SEQ ID NO: 3776806 - DNA, 25 bp, Homo sapien
aaatgaacgcgaggctgtggccggg

SEQ ID NO: 3776807 - DNA, 25 bp, Homo sapien
tgaacgcgaggctgtggccgggcac

SEQ ID NO: 3776808 - DNA, 25 bp, Homo sapien
gagattaacctccgagttatctccc

SEQ ID NO: 3776809 - DNA, 25 bp, Homo sapien
cagagattaacctccgagttatctc

SEQ ID NO: 3776810 - DNA, 25 bp, Homo sapien
ctgcagagattaacctccgagttat

SEQ ID NO: 3776811 - DNA, 25 bp, Homo sapien
tgcagagattaacctccgagttatc

SEQ ID NO: 3776812 - DNA, 25 bp, Homo sapien
ctcgggggtcccacaaacgctctgt

SEQ ID NO: 3776813 - DNA, 25 bp, Homo sapien
tgtggagagttcaaattcctcgggg

SEQ ID NO: 3776814 - DNA, 25 bp, Homo sapien
gggggtcccacaaacgctctgtgtc

SEQ ID NO: 3776815 - DNA, 25 bp, Homo sapien
gggtcccacaaacgctctgtgtcct

SEQ ID NO: 3776816 - DNA, 25 bp, Homo sapien
agtcatctgccctccacaaccttcc

SEQ ID NO: 3776817 - DNA, 25 bp, Homo sapien
ggagtacaatgatgccatcacagtt

SEQ ID NO: 3776818 - DNA, 25 bp, Homo sapien
acgcctggcctctctgtgtatatac

SEQ ID NO: 3776819 - DNA, 25 bp, Homo sapien
ggcctctctgtgtatatacattcat

SEQ ID NO: 3776820 - DNA, 25 bp, Homo sapien
gaatctccctgcaacgggtctacga

SEQ ID NO: 3776821 - DNA, 25 bp, Homo sapien
gagaatctccctgcaacgggtctac

SEQ ID NO: 3776822 - DNA, 25 bp, Homo sapien
cactgagaatctccctgcaacgggt

SEQ ID NO: 3776823 - DNA, 25 bp, Homo sapien
tggcactgagaatctccctgcaacg

SEQ ID NO: 3776824 - DNA, 25 bp, Homo sapien
catatggagtgtgctgggaaaagct

SEQ ID NO: 3776825 - DNA, 25 bp, Homo sapien
ctgacggcctgctttccctgtgaaa

SEQ ID NO: 3776826 - DNA, 25 bp, Homo sapien
cactgccatgtcctcttcggaaagg

SEQ ID NO: 3776827 - DNA, 25 bp, Homo sapien
ggaaggcgtgcttccctgacggcct

SEQ ID NO: 3776828 - DNA, 25 bp, Homo sapien
gggcatcttgtctgtatcttcttat

SEQ ID NO: 3776829 - DNA, 25 bp, Homo sapien
gcccgatgacagtgcccatgggcag

SEQ ID NO: 3776830 - DNA, 25 bp, Homo sapien
ctgggtggtgccagtcggcccgatg

SEQ ID NO: 3776831 - DNA, 25 bp, Homo sapien
tctcatcacactctgagtcgttgtt

SEQ ID NO: 3776832 - DNA, 25 bp, Homo sapien
gagggcctcctagaggctccgggag

SEQ ID NO: 3776833 - DNA, 25 bp, Homo sapien
cagcgtgagggcctcctagaggctc

SEQ ID NO: 3776834 - DNA, 25 bp, Homo sapien
tgagggcctcctagaggctccggga

SEQ ID NO: 3776835 - DNA, 25 bp, Homo sapien
gagacagcgtgagggcctcctagag

SEQ ID NO: 3776836 - DNA, 25 bp, Homo sapien
atcatttgggcattgtggtatgtgc

SEQ ID NO: 3776837 - DNA, 25 bp, Homo sapien
aatcatttgggcattgtggtatgtg

SEQ ID NO: 3776838 - DNA, 25 bp, Homo sapien
gaggggcaagatcatgtttacagac

SEQ ID NO: 3776839 - DNA, 25 bp, Homo sapien
gtgagcttttctgtgagagcaggag

SEQ ID NO: 3776840 - DNA, 25 bp, Homo sapien
gcaggaggggcaagatcatgtttac

SEQ ID NO: 3776841 - DNA, 25 bp, Homo sapien
gcaagatcatgtttacagacatcac

SEQ ID NO: 3776842 - DNA, 25 bp, Homo sapien
aaggaacaaccagtaaccagccact

SEQ ID NO: 3776843 - DNA, 25 bp, Homo sapien
ctttacaagccagaagacagagtgg

SEQ ID NO: 3776844 - DNA, 25 bp, Homo sapien
gaaactttacaagccagaagacaga

SEQ ID NO: 3776845 - DNA, 25 bp, Homo sapien
gggccaatattcaacattcttaaag

SEQ ID NO: 3776846 - DNA, 25 bp, Homo sapien
tatttggacgacatcttcatatacc

SEQ ID NO: 3776847 - DNA, 25 bp, Homo sapien
taccattagagtggcagagcgttct

SEQ ID NO: 3776848 - DNA, 25 bp, Homo sapien
tcctgatactatttggacgacatct

SEQ ID NO: 3776849 - DNA, 25 bp, Homo sapien
gcgttctggaagcaggccaaggctc

SEQ ID NO: 3776850 - DNA, 25 bp, Homo sapien
tccgtgggtagtgctgcttttttcc

SEQ ID NO: 3776851 - DNA, 25 bp, Homo sapien
gctgttcataccaagtagatttttt

SEQ ID NO: 3776852 - DNA, 25 bp, Homo sapien
tgtctggaggtgctgttcataccaa

SEQ ID NO: 3776853 - DNA, 25 bp, Homo sapien
aggcagcagagagacggagatccgt

SEQ ID NO: 3776854 - DNA, 25 bp, Homo sapien
taaagaaagatgaggaacgccttac

SEQ ID NO: 3776855 - DNA, 25 bp, Homo sapien
ttaaagaaagatgaggaacgcctta

SEQ ID NO: 3776856 - DNA, 25 bp, Homo sapien
tactggaacttgataaaggcgacgc

SEQ ID NO: 3776857 - DNA, 25 bp, Homo sapien
cgatgagcgcatctgctacgggctg

SEQ ID NO: 3776858 - DNA, 25 bp, Homo sapien
tgctggcgtcgctgatgtgcacctt

SEQ ID NO: 3776859 - DNA, 25 bp, Homo sapien
taggcatgcttcgaggcggtgacaa

SEQ ID NO: 3776860 - DNA, 25 bp, Homo sapien
ttatcagccaattgcagagccaagg

SEQ ID NO: 3776861 - DNA, 25 bp, Homo sapien
aaacgagcgctcaggaattcttccc

SEQ ID NO: 3776862 - DNA, 25 bp, Homo sapien
gaggaagaaacgagcgctcaggaat

SEQ ID NO: 3776863 - DNA, 25 bp, Homo sapien
tcagccatcgcctctagcatattct

SEQ ID NO: 3776864 - DNA, 25 bp, Homo sapien
gctcttggcaaacatgaagagtgtg

SEQ ID NO: 3776865 - DNA, 25 bp, Homo sapien
cttggcaaacatgaagagtgtggct

SEQ ID NO: 3776866 - DNA, 25 bp, Homo sapien
ctctgctcttggcaaacatgaagag

SEQ ID NO: 3776867 - DNA, 25 bp, Homo sapien
cacgattcagagctcctctgctctt

SEQ ID NO: 3776868 - DNA, 25 bp, Homo sapien
gccagctgaaaaggagcctctctcc

SEQ ID NO: 3776869 - DNA, 25 bp, Homo sapien
caagtagcccagcactcctgtggct

SEQ ID NO: 3776870 - DNA, 25 bp, Homo sapien
ggaggccagctgaaaaggagcctct

SEQ ID NO: 3776871 - DNA, 25 bp, Homo sapien
agctgaaaaggagcctctctcctta

SEQ ID NO: 3776872 - DNA, 25 bp, Homo sapien
tgacctttgctctacgaggttttgc

SEQ ID NO: 3776873 - DNA, 25 bp, Homo sapien
tttgctctacgaggttttgccccat

SEQ ID NO: 3776874 - DNA, 25 bp, Homo sapien
ctttgctctacgaggttttgcccca

SEQ ID NO: 3776875 - DNA, 25 bp, Homo sapien
gacctttgctctacgaggttttgcc

SEQ ID NO: 3776876 - DNA, 25 bp, Homo sapien
aaagatctgttggaaggcaccagtg

SEQ ID NO: 3776877 - DNA, 25 bp, Homo sapien
gaaggcaccagtggaacggttgcca

SEQ ID NO: 3776878 - DNA, 25 bp, Homo sapien
tctgttggaaggcaccagtggaacg

SEQ ID NO: 3776879 - DNA, 25 bp, Homo sapien
ccagtggaacggttgccaaggcaac

SEQ ID NO: 3776880 - DNA, 25 bp, Homo sapien
tgaaaaagcagctttaagatgacga

SEQ ID NO: 3776881 - DNA, 25 bp, Homo sapien
aaaaagcagctttaagatgacgatg

SEQ ID NO: 3776882 - DNA, 25 bp, Homo sapien
gatgacttttagcaagtcattactc

SEQ ID NO: 3776883 - DNA, 25 bp, Homo sapien
aagcagctttaagatgacgatgatg

SEQ ID NO: 3776884 - DNA, 25 bp, Homo sapien
taactactttgaacagcgcagcacc

SEQ ID NO: 3776885 - DNA, 25 bp, Homo sapien
ggatcagtgacgacgtgcccaagaa

SEQ ID NO: 3776886 - DNA, 25 bp, Homo sapien
tgcccaatgggtcacagacgtatat

SEQ ID NO: 3776887 - DNA, 25 bp, Homo sapien
tcaagtagcagaacagaggctccgc

SEQ ID NO: 3776888 - DNA, 25 bp, Homo sapien
gtcgtttgtgccacaggcatgcagg

SEQ ID NO: 3776889 - DNA, 25 bp, Homo sapien
ggagccacatggagaaagtgtcgtt

SEQ ID NO: 3776890 - DNA, 25 bp, Homo sapien
gaaagtgtcgtttgtgccacaggca

SEQ ID NO: 3776891 - DNA, 25 bp, Homo sapien
atgcagggacaggacgatttcccgg

SEQ ID NO: 3776892 - DNA, 25 bp, Homo sapien
catagtgcaaggcaacgacgggatc

SEQ ID NO: 3776893 - DNA, 25 bp, Homo sapien
gatttcaaaacaggaggcacgtcgt

SEQ ID NO: 3776894 - DNA, 25 bp, Homo sapien
ccataatgtgaagcgtgacacgcca

SEQ ID NO: 3776895 - DNA, 25 bp, Homo sapien
tatctggtaggataaaccgtcaccc

SEQ ID NO: 3776896 - DNA, 25 bp, Homo sapien
tgttctcgttgaagcaatcagacct

SEQ ID NO: 3776897 - DNA, 25 bp, Homo sapien
ctggcttgacctaaaattgggaccg

SEQ ID NO: 3776898 - DNA, 25 bp, Homo sapien
caactgtccaatacccctggcttga

SEQ ID NO: 3776899 - DNA, 25 bp, Homo sapien
gacctgatttccattttggcctggg

SEQ ID NO: 3776900 - DNA, 25 bp, Homo sapien
ataatgcgttgctttctttgacagc

SEQ ID NO: 3776901 - DNA, 25 bp, Homo sapien
cctttgcagagattagaaggctgca

SEQ ID NO: 3776902 - DNA, 25 bp, Homo sapien
aacctcaggcccgatacaagcatgg

SEQ ID NO: 3776903 - DNA, 25 bp, Homo sapien
tccatgctctggtggtaacctcagg

SEQ ID NO: 3776904 - DNA, 25 bp, Homo sapien
tctccatgttacacgctcatcttcg

SEQ ID NO: 3776905 - DNA, 25 bp, Homo sapien
tcatcttcgcccacggtcgtgcttg

SEQ ID NO: 3776906 - DNA, 25 bp, Homo sapien
cattgagtgtgaatgcggtagggaa

SEQ ID NO: 3776907 - DNA, 25 bp, Homo sapien
caattggaccaggaagtgaatgacg

SEQ ID NO: 3776908 - DNA, 25 bp, Homo sapien
gggatctggcaacctcatgttcaca

SEQ ID NO: 3776909 - DNA, 25 bp, Homo sapien
tctggctgcttctacttggttgaca

SEQ ID NO: 3776910 - DNA, 25 bp, Homo sapien
tttcggtaacttgctctgctcaggc

SEQ ID NO: 3776911 - DNA, 25 bp, Homo sapien
gatacagagcgacgcggatacctgg

SEQ ID NO: 3776912 - DNA, 25 bp, Homo sapien
ggcaccaccagatttggccagcctt

SEQ ID NO: 3776913 - DNA, 25 bp, Homo sapien
ccagggcaccaccagatttggccag

SEQ ID NO: 3776914 - DNA, 25 bp, Homo sapien
agggcaccaccagatttggccagcc

SEQ ID NO: 3776915 - DNA, 25 bp, Homo sapien
accaccagatttggccagccttcat

SEQ ID NO: 3776916 - DNA, 25 bp, Homo sapien
ctatcagtatggacatcagaaacct

SEQ ID NO: 3776917 - DNA, 25 bp, Homo sapien
tggacatcagaaacctcgggtccct

SEQ ID NO: 3776918 - DNA, 25 bp, Homo sapien
cagaaacctcgggtccctcattggg

SEQ ID NO: 3776919 - DNA, 25 bp, Homo sapien
ctcgggtccctcattgggcttcttt

SEQ ID NO: 3776920 - DNA, 25 bp, Homo sapien
aagttacatcaacaaactgcacagc

SEQ ID NO: 3776921 - DNA, 25 bp, Homo sapien
ccaccaaagttacatcaacaaactg

SEQ ID NO: 3776922 - DNA, 25 bp, Homo sapien
accaccaccaaagttacatcaacaa

SEQ ID NO: 3776923 - DNA, 25 bp, Homo sapien
ttggattcaatttcacatgcatcat

SEQ ID NO: 3776924 - DNA, 25 bp, Homo sapien
tgctattccatccaggagatccaga

SEQ ID NO: 3776925 - DNA, 25 bp, Homo sapien
aaacaagccgaggtccatctggact

SEQ ID NO: 3776926 - DNA, 25 bp, Homo sapien
atctggactacagcccactcctgat

SEQ ID NO: 3776927 - DNA, 25 bp, Homo sapien
aggagatccagatgccccgtagcag

SEQ ID NO: 3776928 - DNA, 25 bp, Homo sapien
cgctttagcagtgcccgagccactt

SEQ ID NO: 3776929 - DNA, 25 bp, Homo sapien
gccactggagaattccaccgcttta

SEQ ID NO: 3776930 - DNA, 25 bp, Homo sapien
tctgcaagcagctgagaatctccag

SEQ ID NO: 3776931 - DNA, 25 bp, Homo sapien
taaattactaaaaagccactggaga

SEQ ID NO: 3776932 - DNA, 25 bp, Homo sapien
ctgaatgttttacacgtaacctcat

SEQ ID NO: 3776933 - DNA, 25 bp, Homo sapien
ccaactcaccagtcgctgggttcaa

SEQ ID NO: 3776934 - DNA, 25 bp, Homo sapien
accagtcgctgggttcaaacatgtt

SEQ ID NO: 3776935 - DNA, 25 bp, Homo sapien
actcaccagtcgctgggttcaaaca

SEQ ID NO: 3776936 - DNA, 25 bp, Homo sapien
tttccccaactcaccagtcgctggg

SEQ ID NO: 3776937 - DNA, 25 bp, Homo sapien
cgatgctgtctttagcaaggaccca

SEQ ID NO: 3776938 - DNA, 25 bp, Homo sapien
cgggcaaaagggacatacttcgcat

SEQ ID NO: 3776939 - DNA, 25 bp, Homo sapien
taaaactgagatgaagacgatgctg

SEQ ID NO: 3776940 - DNA, 25 bp, Homo sapien
ccaggcttcacacttcgggcaaaag

SEQ ID NO: 3776941 - DNA, 25 bp, Homo sapien
cagaaatcgagaaggttcaagcttc

SEQ ID NO: 3776942 - DNA, 25 bp, Homo sapien
cccagaaatcgagaaggttcaagct

SEQ ID NO: 3776943 - DNA, 25 bp, Homo sapien
cgagaaggttcaagcttctctgcag

SEQ ID NO: 3776944 - DNA, 25 bp, Homo sapien
aatcgagaaggttcaagcttctctg

SEQ ID NO: 3776945 - DNA, 25 bp, Homo sapien
ggcaaagaatagacctcttagagaa

SEQ ID NO: 3776946 - DNA, 25 bp, Homo sapien
gatcccagtgttctaataactgaag

SEQ ID NO: 3776947 - DNA, 25 bp, Homo sapien
caaatgttataacagattgcagctt

SEQ ID NO: 3776948 - DNA, 25 bp, Homo sapien
actgaagtttgagtttggcaaagaa

SEQ ID NO: 3776949 - DNA, 25 bp, Homo sapien
aaatcactttgccaattcgaagcag

SEQ ID NO: 3776950 - DNA, 25 bp, Homo sapien
cattggaaatcactttgccaattcg

SEQ ID NO: 3776951 - DNA, 25 bp, Homo sapien
tggaaatcactttgccaattcgaag

SEQ ID NO: 3776952 - DNA, 25 bp, Homo sapien
ctgtggcattggaaatcactttgcc

SEQ ID NO: 3776953 - DNA, 25 bp, Homo sapien
acaggcctcgggctcggaatcccgg

SEQ ID NO: 3776954 - DNA, 25 bp, Homo sapien
caggcctcgggctcggaatcccggg

SEQ ID NO: 3776955 - DNA, 25 bp, Homo sapien
ctgagcccccggcaagagtccaggc

SEQ ID NO: 3776956 - DNA, 25 bp, Homo sapien
ctcatgggccgctgagcaaatccct

SEQ ID NO: 3776957 - DNA, 25 bp, Homo sapien
agagaagactcatgggccgctgagc

SEQ ID NO: 3776958 - DNA, 25 bp, Homo sapien
gaagactcatgggccgctgagcaaa

SEQ ID NO: 3776959 - DNA, 25 bp, Homo sapien
agactcatgggccgctgagcaaatc

SEQ ID NO: 3776960 - DNA, 25 bp, Homo sapien
cgggcgcatccagacgagcccccgc

SEQ ID NO: 3776961 - DNA, 25 bp, Homo sapien
ggcgcatccagacgagcccccgccg

SEQ ID NO: 3776962 - DNA, 25 bp, Homo sapien
cgcatccagacgagcccccgccgca

SEQ ID NO: 3776963 - DNA, 25 bp, Homo sapien
gggcgcatccagacgagcccccgcc

SEQ ID NO: 3776964 - DNA, 25 bp, Homo sapien
ggagcgcgttgcgggtgctgcaggc

SEQ ID NO: 3776965 - DNA, 25 bp, Homo sapien
cggaggctcccgatgcggctcgggc

SEQ ID NO: 3776966 - DNA, 25 bp, Homo sapien
tgcgtcgccaccacgcggcccggga

SEQ ID NO: 3776967 - DNA, 25 bp, Homo sapien
atgcggctcgggctgcgtcgccacc

SEQ ID NO: 3776968 - DNA, 25 bp, Homo sapien
gcagcagcgtcgcggacctgctcat

SEQ ID NO: 3776969 - DNA, 25 bp, Homo sapien
agcagcagcgtcgcggacctgctca

SEQ ID NO: 3776970 - DNA, 25 bp, Homo sapien
cagcagcagcgtcgcggacctgctc

SEQ ID NO: 3776971 - DNA, 25 bp, Homo sapien
acagcagcagcgtcgcggacctgct

SEQ ID NO: 3776972 - DNA, 25 bp, Homo sapien
gcggctcgggctcgccgagagcggg

SEQ ID NO: 3776973 - DNA, 25 bp, Homo sapien
cggctcgggctcgccgagagcgggc

SEQ ID NO: 3776974 - DNA, 25 bp, Homo sapien
ggctcgggctcgccgagagcgggcc

SEQ ID NO: 3776975 - DNA, 25 bp, Homo sapien
gggcgccgcgcccccctccatgtcg

SEQ ID NO: 3776976 - DNA, 25 bp, Homo sapien
ccgggcgccgcgcccccctccatgt

SEQ ID NO: 3776977 - DNA, 25 bp, Homo sapien
cgggcgccgcgcccccctccatgtc

SEQ ID NO: 3776978 - DNA, 25 bp, Homo sapien
gccgggcgccgcgcccccctccatg

SEQ ID NO: 3776979 - DNA, 25 bp, Homo sapien
cgcgcgccgggcccgccgcccgatt

SEQ ID NO: 3776980 - DNA, 25 bp, Homo sapien
tccgcgcgccgggcccgccgcccga

SEQ ID NO: 3776981 - DNA, 25 bp, Homo sapien
cgcgccgggcccgccgcccgattgg

SEQ ID NO: 3776982 - DNA, 25 bp, Homo sapien
tggctccgcgcgccgggcccgccgc

SEQ ID NO: 3776983 - DNA, 25 bp, Homo sapien
catgttccgatcatgatcatcagac

SEQ ID NO: 3776984 - DNA, 25 bp, Homo sapien
cttttctcatgttccgatcatgatc

SEQ ID NO: 3776985 - DNA, 25 bp, Homo sapien
tgatcatcagacacccactcagtaa

SEQ ID NO: 3776986 - DNA, 25 bp, Homo sapien
tccgatcatgatcatcagacaccca

SEQ ID NO: 3776987 - DNA, 25 bp, Homo sapien
tgtggctgactatacctcaaccagg

SEQ ID NO: 3776988 - DNA, 25 bp, Homo sapien
tactttgaatacatacggccctagg

SEQ ID NO: 3776989 - DNA, 25 bp, Homo sapien
cattggagtccccataaaaatggaa

SEQ ID NO: 3776990 - DNA, 25 bp, Homo sapien
tcaaagctgcctactgtcagaacct

SEQ ID NO: 3776991 - DNA, 25 bp, Homo sapien
ttaaaacttaatcaccacagtctga

SEQ ID NO: 3776992 - DNA, 25 bp, Homo sapien
gcacctccatcagtaagggctcatg

SEQ ID NO: 3776993 - DNA, 25 bp, Homo sapien
ttctacagggaattaggtgcttaca

SEQ ID NO: 3776994 - DNA, 25 bp, Homo sapien
ttttctgaacataggttagcacctc

SEQ ID NO: 3776995 - DNA, 25 bp, Homo sapien
cctctttagtctgagctcatcgcag

SEQ ID NO: 3776996 - DNA, 25 bp, Homo sapien
ggattaattaacaacccagcaagta

SEQ ID NO: 3776997 - DNA, 25 bp, Homo sapien
gagacgctacttcagataagcaggc

SEQ ID NO: 3776998 - DNA, 25 bp, Homo sapien
tatttcttgagtcctcattatgggc

SEQ ID NO: 3776999 - DNA, 25 bp, Homo sapien
tctctgtgatctctggcaggtaagg

SEQ ID NO: 3777000 - DNA, 25 bp, Homo sapien
ggtaaggctcattctgtgcattaac

SEQ ID NO: 3777001 - DNA, 25 bp, Homo sapien
tgctgtgacctccatagatctctgt

SEQ ID NO: 3777002 - DNA, 25 bp, Homo sapien
taactgcttgtacagttagtgtcat

SEQ ID NO: 3777003 - DNA, 25 bp, Homo sapien
tatagaaaagatatctagccagatt

SEQ ID NO: 3777004 - DNA, 25 bp, Homo sapien
gacaggttgccacttgttggaaata

SEQ ID NO: 3777005 - DNA, 25 bp, Homo sapien
tacattcaggttagaccatgtatag

SEQ ID NO: 3777006 - DNA, 25 bp, Homo sapien
agatatctagccagattctaaactg

SEQ ID NO: 3777007 - DNA, 25 bp, Homo sapien
taggggaatgtagtctgaacacagg

SEQ ID NO: 3777008 - DNA, 25 bp, Homo sapien
ctaggggaatgtagtctgaacacag

SEQ ID NO: 3777009 - DNA, 25 bp, Homo sapien
tacagctgacacttgatactggatc

SEQ ID NO: 3777010 - DNA, 25 bp, Homo sapien
cagttgagctcggtctctcttgtcc

SEQ ID NO: 3777011 - DNA, 25 bp, Homo sapien
tactggatcagttgaaacttgaccc

SEQ ID NO: 3777012 - DNA, 25 bp, Homo sapien
ccagtgtggaacgagcagttgagct

SEQ ID NO: 3777013 - DNA, 25 bp, Homo sapien
taaaatgacagttgccaccggcaag

SEQ ID NO: 3777014 - DNA, 25 bp, Homo sapien
aaaatgacagttgccaccggcaagt

SEQ ID NO: 3777015 - DNA, 25 bp, Homo sapien
atgtaaaatgacagttgccaccggc

SEQ ID NO: 3777016 - DNA, 25 bp, Homo sapien
tgtaaaatgacagttgccaccggca

SEQ ID NO: 3777017 - DNA, 25 bp, Homo sapien
cctgctatttctcccacgaggacag

SEQ ID NO: 3777018 - DNA, 25 bp, Homo sapien
gtaatccgacttctgccctcacaag

SEQ ID NO: 3777019 - DNA, 25 bp, Homo sapien
ccctgtgtgccctgtaatccgactt

SEQ ID NO: 3777020 - DNA, 25 bp, Homo sapien
gctatttctcccacgaggacaggga

SEQ ID NO: 3777021 - DNA, 25 bp, Homo sapien
ctcagatgatgacaagggccaggat

SEQ ID NO: 3777022 - DNA, 25 bp, Homo sapien
gcacgtgtgtgatgtaggtgaatac

SEQ ID NO: 3777023 - DNA, 25 bp, Homo sapien
actgatgtctacagcagaagagtgg

SEQ ID NO: 3777024 - DNA, 25 bp, Homo sapien
aaatggcatcggtgcttaggaggca

SEQ ID NO: 3777025 - DNA, 25 bp, Homo sapien
ccttctcttcgctggtccttttcgg

SEQ ID NO: 3777026 - DNA, 25 bp, Homo sapien
tctcttcgctggtccttttcggatc

SEQ ID NO: 3777027 - DNA, 25 bp, Homo sapien
tcttcgctggtccttttcggatcct

SEQ ID NO: 3777028 - DNA, 25 bp, Homo sapien
cttcgctggtccttttcggatcctg

SEQ ID NO: 3777029 - DNA, 25 bp, Homo sapien
tgagtttttacacccggaaagctgc

SEQ ID NO: 3777030 - DNA, 25 bp, Homo sapien
gctctgccaatatattctctccagg

SEQ ID NO: 3777031 - DNA, 25 bp, Homo sapien
ccaggtcttgtagtttagatgggta

SEQ ID NO: 3777032 - DNA, 25 bp, Homo sapien
aatcctccactgctctttttacaca

SEQ ID NO: 3777033 - DNA, 25 bp, Homo sapien
caggcaaggaatttggaattccctg

SEQ ID NO: 3777034 - DNA, 25 bp, Homo sapien
ttccaggcaaggaatttggaattcc

SEQ ID NO: 3777035 - DNA, 25 bp, Homo sapien
tggaattccctgcaaggacaaaggt

SEQ ID NO: 3777036 - DNA, 25 bp, Homo sapien
tttggaattccctgcaaggacaaag

SEQ ID NO: 3777037 - DNA, 25 bp, Homo sapien
tatagggtgcgcgtcaggaatgagt

SEQ ID NO: 3777038 - DNA, 25 bp, Homo sapien
ggtgaatcagatgtctaccattcgc

SEQ ID NO: 3777039 - DNA, 25 bp, Homo sapien
agatgtctaccattcgcaccaattg

SEQ ID NO: 3777040 - DNA, 25 bp, Homo sapien
agcagctggtatagggtgcgcgtca

SEQ ID NO: 3777041 - DNA, 25 bp, Homo sapien
gattgacagctgtttagcagggaga

SEQ ID NO: 3777042 - DNA, 25 bp, Homo sapien
attgacagctgtttagcagggagat

SEQ ID NO: 3777043 - DNA, 25 bp, Homo sapien
ttgacagctgtttagcagggagatc

SEQ ID NO: 3777044 - DNA, 25 bp, Homo sapien
cactatgcatactcctggcttgaca

SEQ ID NO: 3777045 - DNA, 25 bp, Homo sapien
ggcatgagagtagcaactggctcca

SEQ ID NO: 3777046 - DNA, 25 bp, Homo sapien
tcatggcccatttcagctcgacatc

SEQ ID NO: 3777047 - DNA, 25 bp, Homo sapien
cattcagaacctgtagcaaaggtgg

SEQ ID NO: 3777048 - DNA, 25 bp, Homo sapien
gaatataaagttggcgtttctcatc

SEQ ID NO: 3777049 - DNA, 25 bp, Homo sapien
caggaatatcaagacttctgaatgc

SEQ ID NO: 3777050 - DNA, 25 bp, Homo sapien
catgcaggaatatcaagacttctga

SEQ ID NO: 3777051 - DNA, 25 bp, Homo sapien
gtgctggaatataaagttggcgttt

SEQ ID NO: 3777052 - DNA, 25 bp, Homo sapien
taagggagattgtagtcagtttcac

SEQ ID NO: 3777053 - DNA, 25 bp, Homo sapien
tgtgttaaaagtgtccccagtggtc

SEQ ID NO: 3777054 - DNA, 25 bp, Homo sapien
cacaaatagatcacttgtttccttc

SEQ ID NO: 3777055 - DNA, 25 bp, Homo sapien
ggtcctgggcccgtaataattctca

SEQ ID NO: 3777056 - DNA, 25 bp, Homo sapien
tggcggaacttcaccacgaaactct

SEQ ID NO: 3777057 - DNA, 25 bp, Homo sapien
tcctagcttggtgtcaggttggccc

SEQ ID NO: 3777058 - DNA, 25 bp, Homo sapien
gctttctgacatacacagggatccc

SEQ ID NO: 3777059 - DNA, 25 bp, Homo sapien
tgtgagtgaggcatcttgtcccagc

SEQ ID NO: 3777060 - DNA, 25 bp, Homo sapien
ggattttccatattgcacgaggctg

SEQ ID NO: 3777061 - DNA, 25 bp, Homo sapien
tcaggattcatgttcccatgggcat

SEQ ID NO: 3777062 - DNA, 25 bp, Homo sapien
tgttagatttcgacttttcttcagg

SEQ ID NO: 3777063 - DNA, 25 bp, Homo sapien
cataacagggtggtttgcagagtgt

SEQ ID NO: 3777064 - DNA, 25 bp, Homo sapien
gaatggctggtaggagagatttctc

SEQ ID NO: 3777065 - DNA, 25 bp, Homo sapien
gcagaacgttctctcttggccttta

SEQ ID NO: 3777066 - DNA, 25 bp, Homo sapien
attcttatatgatcccggccccagt

SEQ ID NO: 3777067 - DNA, 25 bp, Homo sapien
tattgagtatcggtgatcccatccc

SEQ ID NO: 3777068 - DNA, 25 bp, Homo sapien
agtttttgttggcaactgcagaacg

SEQ ID NO: 3777069 - DNA, 25 bp, Homo sapien
cccttgcaatgttgcatgccttcat

SEQ ID NO: 3777070 - DNA, 25 bp, Homo sapien
tttgaggaaactcgcagagaccctg

SEQ ID NO: 3777071 - DNA, 25 bp, Homo sapien
accctgggtctagtgctggttccaa

SEQ ID NO: 3777072 - DNA, 25 bp, Homo sapien
tctagtgctggttccaacctctggg

SEQ ID NO: 3777073 - DNA, 25 bp, Homo sapien
tcaggctttggaggatggcctcaga

SEQ ID NO: 3777074 - DNA, 25 bp, Homo sapien
tcaggtcttagtgaaggccgtctcc

SEQ ID NO: 3777075 - DNA, 25 bp, Homo sapien
caggtcttagtgaaggccgtctcct

SEQ ID NO: 3777076 - DNA, 25 bp, Homo sapien
tccccattgtccacgggttgaagct

SEQ ID NO: 3777077 - DNA, 25 bp, Homo sapien
cttcatgctacgtatgacttcccca

SEQ ID NO: 3777078 - DNA, 25 bp, Homo sapien
tgacttccccattgtccacgggttg

SEQ ID NO: 3777079 - DNA, 25 bp, Homo sapien
cgggttgaagctctttgcagggatt

SEQ ID NO: 3777080 - DNA, 25 bp, Homo sapien
tccatattctaaagggcagagggcc

SEQ ID NO: 3777081 - DNA, 25 bp, Homo sapien
tgcaattcccataggtagcagtgcc

SEQ ID NO: 3777082 - DNA, 25 bp, Homo sapien
tgcatgcgcgtgtgtacaacggcct

SEQ ID NO: 3777083 - DNA, 25 bp, Homo sapien
gaaatacagatagaccctcagagga

SEQ ID NO: 3777084 - DNA, 25 bp, Homo sapien
tctattggtcacagatcagccagga

SEQ ID NO: 3777085 - DNA, 25 bp, Homo sapien
caaggagctaatctctattggtcac

SEQ ID NO: 3777086 - DNA, 25 bp, Homo sapien
gattcagggcattacctggggtcag

SEQ ID NO: 3777087 - DNA, 25 bp, Homo sapien
cccaaatcccaaggagctaatctct

SEQ ID NO: 3777088 - DNA, 25 bp, Homo sapien
gacccgaaactgctaccaggacagt

SEQ ID NO: 3777089 - DNA, 25 bp, Homo sapien
tacctggaagactaacaccaaagac

SEQ ID NO: 3777090 - DNA, 25 bp, Homo sapien
tgtggacaccccttaattctttgag

SEQ ID NO: 3777091 - DNA, 25 bp, Homo sapien
cagtgctcatccgtagtcagccaca

SEQ ID NO: 3777092 - DNA, 25 bp, Homo sapien
agcgtgctcgtccatgtgcctttca

SEQ ID NO: 3777093 - DNA, 25 bp, Homo sapien
agttccgcagctgtagccaaatggc

SEQ ID NO: 3777094 - DNA, 25 bp, Homo sapien
gcctttcatttgctcctcaatgaag

SEQ ID NO: 3777095 - DNA, 25 bp, Homo sapien
catgaactgcaccagcgtgctcgtc

SEQ ID NO: 3777096 - DNA, 25 bp, Homo sapien
tgatctggactgcaacttacgttcc

SEQ ID NO: 3777097 - DNA, 25 bp, Homo sapien
gagtccctggataatgtgagtgaaa

SEQ ID NO: 3777098 - DNA, 25 bp, Homo sapien
caacttatgctggattgatctggac

SEQ ID NO: 3777099 - DNA, 25 bp, Homo sapien
caaggcatagcaggaaaaacgggta

SEQ ID NO: 3777100 - DNA, 25 bp, Homo sapien
ctccaaagtgcggtgtagatgaggt

SEQ ID NO: 3777101 - DNA, 25 bp, Homo sapien
tgggcacccaggacaatttctccaa

SEQ ID NO: 3777102 - DNA, 25 bp, Homo sapien
tcaggtatcagaaagctttgatttt

SEQ ID NO: 3777103 - DNA, 25 bp, Homo sapien
aatttctccaaagtgcggtgtagat

SEQ ID NO: 3777104 - DNA, 25 bp, Homo sapien
ttctttgaacaggaccagtgtttga

SEQ ID NO: 3777105 - DNA, 25 bp, Homo sapien
tgaacaggaccagtgtttgaggtct

SEQ ID NO: 3777106 - DNA, 25 bp, Homo sapien
tttgaacaggaccagtgtttgaggt

SEQ ID NO: 3777107 - DNA, 25 bp, Homo sapien
acaggaccagtgtttgaggtctttg

SEQ ID NO: 3777108 - DNA, 25 bp, Homo sapien
tgttccctgtcggtcatgtcctcct

SEQ ID NO: 3777109 - DNA, 25 bp, Homo sapien
tgtcggtcatgtcctcctgaggagg

SEQ ID NO: 3777110 - DNA, 25 bp, Homo sapien
tccctgtcggtcatgtcctcctgag

SEQ ID NO: 3777111 - DNA, 25 bp, Homo sapien
agctgttccctgtcggtcatgtcct

SEQ ID NO: 3777112 - DNA, 25 bp, Homo sapien
ggcgagaaccaacaatccaagaagt

SEQ ID NO: 3777113 - DNA, 25 bp, Homo sapien
tgagaaggaaacattcggagttgcc

SEQ ID NO: 3777114 - DNA, 25 bp, Homo sapien
ggagttgcccaaataactgatgtct

SEQ ID NO: 3777115 - DNA, 25 bp, Homo sapien
attattacccataatgggattgaga

SEQ ID NO: 3777116 - DNA, 25 bp, Homo sapien
cactaataaaggcatggacagagga

SEQ ID NO: 3777117 - DNA, 25 bp, Homo sapien
tctgtcttcttaactagagttgagc

SEQ ID NO: 3777118 - DNA, 25 bp, Homo sapien
taactagagttgagcgccctgatgg

SEQ ID NO: 3777119 - DNA, 25 bp, Homo sapien
ttcattcgattctccagccccaaat

SEQ ID NO: 3777120 - DNA, 25 bp, Homo sapien
gtttctgctagggagcacgtgcttg

SEQ ID NO: 3777121 - DNA, 25 bp, Homo sapien
tggatggaaccaaccgtaacatgtg

SEQ ID NO: 3777122 - DNA, 25 bp, Homo sapien
gatgagttgagaacagcaggctgtc

SEQ ID NO: 3777123 - DNA, 25 bp, Homo sapien
tggccagtgcagaaagatgcaatcc

SEQ ID NO: 3777124 - DNA, 25 bp, Homo sapien
aaagtctctgaccaccttcacaaat

SEQ ID NO: 3777125 - DNA, 25 bp, Homo sapien
agtctctgaccaccttcacaaataa

SEQ ID NO: 3777126 - DNA, 25 bp, Homo sapien
tcaaaagtctctgaccaccttcaca

SEQ ID NO: 3777127 - DNA, 25 bp, Homo sapien
caaaagtctctgaccaccttcacaa

SEQ ID NO: 3777128 - DNA, 25 bp, Homo sapien
gttttgctggctgatctgtataagg

SEQ ID NO: 3777129 - DNA, 25 bp, Homo sapien
ggctgatctgtataaggcatcttct

SEQ ID NO: 3777130 - DNA, 25 bp, Homo sapien
ccagggatgcaagagcatagggatc

SEQ ID NO: 3777131 - DNA, 25 bp, Homo sapien
gggatgcaagagcatagggatcatt

SEQ ID NO: 3777132 - DNA, 25 bp, Homo sapien
gaatgaacccctttttgccacaagc

SEQ ID NO: 3777133 - DNA, 25 bp, Homo sapien
cctctcataaagaatgaaccccttt

SEQ ID NO: 3777134 - DNA, 25 bp, Homo sapien
gaacccctttttgccacaagcagtg

SEQ ID NO: 3777135 - DNA, 25 bp, Homo sapien
tttgccacaagcagtgtcacctgtc

SEQ ID NO: 3777136 - DNA, 25 bp, Homo sapien
ctatgaaaagacttcccactgagct

SEQ ID NO: 3777137 - DNA, 25 bp, Homo sapien
tcccactgagcttttgtgaagcagc

SEQ ID NO: 3777138 - DNA, 25 bp, Homo sapien
ttcccactgagcttttgtgaagcag

SEQ ID NO: 3777139 - DNA, 25 bp, Homo sapien
gagatttgtaaacactcgatatttg

SEQ ID NO: 3777140 - DNA, 25 bp, Homo sapien
gactttcaggactgcgctttctcct

SEQ ID NO: 3777141 - DNA, 25 bp, Homo sapien
aaggtgtgggcccataatcgtgacc

SEQ ID NO: 3777142 - DNA, 25 bp, Homo sapien
cgtcccactgcacaggagatttgta

SEQ ID NO: 3777143 - DNA, 25 bp, Homo sapien
tctagaattgcccagcgtataatga

SEQ ID NO: 3777144 - DNA, 25 bp, Homo sapien
taatggcgaggatgaatggaacaca

SEQ ID NO: 3777145 - DNA, 25 bp, Homo sapien
tgcagaggaagactcttgagcctat

SEQ ID NO: 3777146 - DNA, 25 bp, Homo sapien
tacagttactgaccgattgacatac

SEQ ID NO: 3777147 - DNA, 25 bp, Homo sapien
gacatgctgtgtaccactaaccctg

SEQ ID NO: 3777148 - DNA, 25 bp, Homo sapien
gacctgtgcttcacggctgacatgc

SEQ ID NO: 3777149 - DNA, 25 bp, Homo sapien
gctgacatgctgtgtaccactaacc

SEQ ID NO: 3777150 - DNA, 25 bp, Homo sapien
aaggactctcatgttgacctgtgct

SEQ ID NO: 3777151 - DNA, 25 bp, Homo sapien
ttcaaatcattaatactgcatatgt

SEQ ID NO: 3777152 - DNA, 25 bp, Homo sapien
tcaaatcattaatactgcatatgtt

SEQ ID NO: 3777153 - DNA, 25 bp, Homo sapien
tttcaaatcattaatactgcatatg

SEQ ID NO: 3777154 - DNA, 25 bp, Homo sapien
caagatgaggaatagtagagtttcg

SEQ ID NO: 3777155 - DNA, 25 bp, Homo sapien
gtttcgcaaaaaggcgctgagctca

SEQ ID NO: 3777156 - DNA, 25 bp, Homo sapien
catccctcttcctgacaagatgagg

SEQ ID NO: 3777157 - DNA, 25 bp, Homo sapien
ggaattcgaccacatgtacatccct

SEQ ID NO: 3777158 - DNA, 25 bp, Homo sapien
gccccaggtacactcgccaagcctc

SEQ ID NO: 3777159 - DNA, 25 bp, Homo sapien
caggtacactcgccaagcctctgat

SEQ ID NO: 3777160 - DNA, 25 bp, Homo sapien
ctcgccaagcctctgatgttctgca

SEQ ID NO: 3777161 - DNA, 25 bp, Homo sapien
ctgctcttcgttcccgatggcccca

SEQ ID NO: 3777162 - DNA, 25 bp, Homo sapien
tgtgaaggctttagagttagtggca

SEQ ID NO: 3777163 - DNA, 25 bp, Homo sapien
ggtggaaatcgatttaactgagaaa

SEQ ID NO: 3777164 - DNA, 25 bp, Homo sapien
tatgtgggaacttgcagggattctc

SEQ ID NO: 3777165 - DNA, 25 bp, Homo sapien
caatggatccctggagtgtgtgacc

SEQ ID NO: 3777166 - DNA, 25 bp, Homo sapien
tatttttcacaagttttcctagaga

SEQ ID NO: 3777167 - DNA, 25 bp, Homo sapien
atttttcacaagttttcctagagat

SEQ ID NO: 3777168 - DNA, 25 bp, Homo sapien
tattaggatttggttggcactgcag

SEQ ID NO: 3777169 - DNA, 25 bp, Homo sapien
tggtacttggtccaatattgtgcag

SEQ ID NO: 3777170 - DNA, 25 bp, Homo sapien
cagaggtcccagagtttgaatatgg

SEQ ID NO: 3777171 - DNA, 25 bp, Homo sapien
tccaggatggtgtcactgatggtac

SEQ ID NO: 3777172 - DNA, 25 bp, Homo sapien
caactttaacacagacaatggctac

SEQ ID NO: 3777173 - DNA, 25 bp, Homo sapien
cacaactttaacacagacaatggct

SEQ ID NO: 3777174 - DNA, 25 bp, Homo sapien
aacacaactttaacacagacaatgg

SEQ ID NO: 3777175 - DNA, 25 bp, Homo sapien
ccctaacacaactttaacacagaca

SEQ ID NO: 3777176 - DNA, 25 bp, Homo sapien
tatgttccaccaatggtccaacctc

SEQ ID NO: 3777177 - DNA, 25 bp, Homo sapien
tcataaatatgttccaccaatggtc

SEQ ID NO: 3777178 - DNA, 25 bp, Homo sapien
cagaacaatctgcggagggtgtgac

SEQ ID NO: 3777179 - DNA, 25 bp, Homo sapien
tggttcccagttatgaatgggcaga

SEQ ID NO: 3777180 - DNA, 25 bp, Homo sapien
tagcaatggcccaggtaaagaatgt

SEQ ID NO: 3777181 - DNA, 25 bp, Homo sapien
tcaatttatttgagtagatactccc

SEQ ID NO: 3777182 - DNA, 25 bp, Homo sapien
tagtggacagtatactaacagaagc

SEQ ID NO: 3777183 - DNA, 25 bp, Homo sapien
tgtacagtagaatgactacagtgac

SEQ ID NO: 3777184 - DNA, 25 bp, Homo sapien
ggagctagcattcacctgataccca

SEQ ID NO: 3777185 - DNA, 25 bp, Homo sapien
caaaattttagcaagtcgaatccca

SEQ ID NO: 3777186 - DNA, 25 bp, Homo sapien
tccagatcattttacggagctagca

SEQ ID NO: 3777187 - DNA, 25 bp, Homo sapien
tacagatcagtacttcttacgaacg

SEQ ID NO: 3777188 - DNA, 25 bp, Homo sapien
ccaatgacttgcataacattataga

SEQ ID NO: 3777189 - DNA, 25 bp, Homo sapien
aagaagccagcaccattcccaatga

SEQ ID NO: 3777190 - DNA, 25 bp, Homo sapien
cacagatgtttctcaagtgcgttag

SEQ ID NO: 3777191 - DNA, 25 bp, Homo sapien
gaacaatgagagcacgtggacaaca

SEQ ID NO: 3777192 - DNA, 25 bp, Homo sapien
tcgaagcttgtaaaccaccgtggaa

SEQ ID NO: 3777193 - DNA, 25 bp, Homo sapien
aataccagttgacatttttagccaa

SEQ ID NO: 3777194 - DNA, 25 bp, Homo sapien
tctggaaccccagtgacaacttggt

SEQ ID NO: 3777195 - DNA, 25 bp, Homo sapien
gaaataccagctgtcatcatcgaag

SEQ ID NO: 3777196 - DNA, 25 bp, Homo sapien
gcgctacagcagtgatgttgatttg

SEQ ID NO: 3777197 - DNA, 25 bp, Homo sapien
tcttatttccacctgcgctacagca

SEQ ID NO: 3777198 - DNA, 25 bp, Homo sapien
tgttgatttgcaggctcacaaaatt

SEQ ID NO: 3777199 - DNA, 25 bp, Homo sapien
gatttgcaggctcacaaaattgctg

SEQ ID NO: 3777200 - DNA, 25 bp, Homo sapien
cagcttttagcaaaccgagacacag

SEQ ID NO: 3777201 - DNA, 25 bp, Homo sapien
gcagcttttagcaaaccgagacaca

SEQ ID NO: 3777202 - DNA, 25 bp, Homo sapien
gcttttagcaaaccgagacacagcc

SEQ ID NO: 3777203 - DNA, 25 bp, Homo sapien
aggcagcttttagcaaaccgagaca

SEQ ID NO: 3777204 - DNA, 25 bp, Homo sapien
tatattcaggtgtcattaggaagag

SEQ ID NO: 3777205 - DNA, 25 bp, Homo sapien
ccaagatgatggtaatgcggtaggt

SEQ ID NO: 3777206 - DNA, 25 bp, Homo sapien
ttttgaagctttccaaatgcgagag

SEQ ID NO: 3777207 - DNA, 25 bp, Homo sapien
cactctgattcgatggacaagctct

SEQ ID NO: 3777208 - DNA, 25 bp, Homo sapien
aataccgctgctacatccaaacaag

SEQ ID NO: 3777209 - DNA, 25 bp, Homo sapien
ataccgctgctacatccaaacaagc

SEQ ID NO: 3777210 - DNA, 25 bp, Homo sapien
taataccgctgctacatccaaacaa

SEQ ID NO: 3777211 - DNA, 25 bp, Homo sapien
taccgctgctacatccaaacaagcc

SEQ ID NO: 3777212 - DNA, 25 bp, Homo sapien
tgtggcaattgcaatctgagacccg

SEQ ID NO: 3777213 - DNA, 25 bp, Homo sapien
gagacccgttgtacacagggaggaa

SEQ ID NO: 3777214 - DNA, 25 bp, Homo sapien
gagaccgcttaatgcaaatatttgg

SEQ ID NO: 3777215 - DNA, 25 bp, Homo sapien
tgaggacagtcaccaagacctgttt

SEQ ID NO: 3777216 - DNA, 25 bp, Homo sapien
tatttgtggaaaagggattcattaa

SEQ ID NO: 3777217 - DNA, 25 bp, Homo sapien
tcattaaatgcaggtcatggcagtc

SEQ ID NO: 3777218 - DNA, 25 bp, Homo sapien
ggattcattaaatgcaggtcatggc

SEQ ID NO: 3777219 - DNA, 25 bp, Homo sapien
gattcattaaatgcaggtcatggca

SEQ ID NO: 3777220 - DNA, 25 bp, Homo sapien
ggatggccattgcaaaatctatgct

SEQ ID NO: 3777221 - DNA, 25 bp, Homo sapien
tagctgatgcccagctgagagcatg

SEQ ID NO: 3777222 - DNA, 25 bp, Homo sapien
aggtaagccatcagagattcattca

SEQ ID NO: 3777223 - DNA, 25 bp, Homo sapien
tgcatcctgccacagtgcgcatagg

SEQ ID NO: 3777224 - DNA, 25 bp, Homo sapien
ttgttttctcaagacgtggaactgc

SEQ ID NO: 3777225 - DNA, 25 bp, Homo sapien
gatcgaagttaatgctcatgtttgt

SEQ ID NO: 3777226 - DNA, 25 bp, Homo sapien
gatttggagatcgaagttaatgctc

SEQ ID NO: 3777227 - DNA, 25 bp, Homo sapien
ctgcaaatcggaggcccagggaata

SEQ ID NO: 3777228 - DNA, 25 bp, Homo sapien
tttttgaatacccaagatcaacgca

SEQ ID NO: 3777229 - DNA, 25 bp, Homo sapien
tcaacgcaacattatagcataaaag

SEQ ID NO: 3777230 - DNA, 25 bp, Homo sapien
gaagtgagcttactgtagtttcagc

SEQ ID NO: 3777231 - DNA, 25 bp, Homo sapien
tttttgccccaagaagtgagcttac

SEQ ID NO: 3777232 - DNA, 25 bp, Homo sapien
tacgtacctgaatctcccttgaaaa

SEQ ID NO: 3777233 - DNA, 25 bp, Homo sapien
gagacgattcactctgtgtaggtta

SEQ ID NO: 3777234 - DNA, 25 bp, Homo sapien
tatggtcactgttgaatgtcatgtc

SEQ ID NO: 3777235 - DNA, 25 bp, Homo sapien
ctgtgtttttagcttgagacgattc

SEQ ID NO: 3777236 - DNA, 25 bp, Homo sapien
gtggtaactggagagctttccattt

SEQ ID NO: 3777237 - DNA, 25 bp, Homo sapien
tgctgctaggtgctgagttgctgag

SEQ ID NO: 3777238 - DNA, 25 bp, Homo sapien
tggtaactggagagctttccatttg

SEQ ID NO: 3777239 - DNA, 25 bp, Homo sapien
gctgagttgctgagtggtaactgga

SEQ ID NO: 3777240 - DNA, 25 bp, Homo sapien
ctgtgaagtccagttagaaggaaat

SEQ ID NO: 3777241 - DNA, 25 bp, Homo sapien
tactcacagctcagtggtcgaaatc

SEQ ID NO: 3777242 - DNA, 25 bp, Homo sapien
gttccagacaccatagggttcccaa

SEQ ID NO: 3777243 - DNA, 25 bp, Homo sapien
atttgttccagacaccatagggttc

SEQ ID NO: 3777244 - DNA, 25 bp, Homo sapien
gtactcacagctcagtggtcgaaat

SEQ ID NO: 3777245 - DNA, 25 bp, Homo sapien
tgcctagagcaaacttggacacaaa

SEQ ID NO: 3777246 - DNA, 25 bp, Homo sapien
cattccccagacatctagctaaaga

SEQ ID NO: 3777247 - DNA, 25 bp, Homo sapien
tctgttctagtcctaatgcctagag

SEQ ID NO: 3777248 - DNA, 25 bp, Homo sapien
taaagaattctgtaggtaaaccaca

SEQ ID NO: 3777249 - DNA, 25 bp, Homo sapien
tgacatcactcaaagagttttttct

SEQ ID NO: 3777250 - DNA, 25 bp, Homo sapien
tagctcttagagtgttcttcattca

SEQ ID NO: 3777251 - DNA, 25 bp, Homo sapien
ctctcgttaataagaggaacaatga

SEQ ID NO: 3777252 - DNA, 25 bp, Homo sapien
cagtttctgggacattcttgttcta

SEQ ID NO: 3777253 - DNA, 25 bp, Homo sapien
ggcttttatcagtgctcatcaggga

SEQ ID NO: 3777254 - DNA, 25 bp, Homo sapien
tgtgtaagcccacccctgctttgtg

SEQ ID NO: 3777255 - DNA, 25 bp, Homo sapien
catgtgcttgaaactgataggaact

SEQ ID NO: 3777256 - DNA, 25 bp, Homo sapien
tcatcagggattggctggaccttct

SEQ ID NO: 3777257 - DNA, 25 bp, Homo sapien
tctccaatgattacctgatgcttat

SEQ ID NO: 3777258 - DNA, 25 bp, Homo sapien
tgttgcgttcgattccaacataatc

SEQ ID NO: 3777259 - DNA, 25 bp, Homo sapien
cttctggtatcattacaaagagttc

SEQ ID NO: 3777260 - DNA, 25 bp, Homo sapien
gcataaggtgattttcatctccaat

SEQ ID NO: 3777261 - DNA, 25 bp, Homo sapien
gtctagccgacagcttcaagtcagg

SEQ ID NO: 3777262 - DNA, 25 bp, Homo sapien
tctagccgacagcttcaagtcagga

SEQ ID NO: 3777263 - DNA, 25 bp, Homo sapien
ggtctagccgacagcttcaagtcag

SEQ ID NO: 3777264 - DNA, 25 bp, Homo sapien
ctagccgacagcttcaagtcaggaa

SEQ ID NO: 3777265 - DNA, 25 bp, Homo sapien
gttgtataaacgcacgtcaggaaca

SEQ ID NO: 3777266 - DNA, 25 bp, Homo sapien
ctgtgttgtataaacgcacgtcagg

SEQ ID NO: 3777267 - DNA, 25 bp, Homo sapien
ttgtataaacgcacgtcaggaacaa

SEQ ID NO: 3777268 - DNA, 25 bp, Homo sapien
gtgttgtataaacgcacgtcaggaa

SEQ ID NO: 3777269 - DNA, 25 bp, Homo sapien
tcaatattggtttcacttccaggcc

SEQ ID NO: 3777270 - DNA, 25 bp, Homo sapien
taaaggtggattcgtccaaactgta

SEQ ID NO: 3777271 - DNA, 25 bp, Homo sapien
caaactaatgttgattggagataat

SEQ ID NO: 3777272 - DNA, 25 bp, Homo sapien
gagataatttatctcggaattcagt

SEQ ID NO: 3777273 - DNA, 25 bp, Homo sapien
ttttatcacaagagggaagacgcga

SEQ ID NO: 3777274 - DNA, 25 bp, Homo sapien
tcagggaatctaattgcacctctgc

SEQ ID NO: 3777275 - DNA, 25 bp, Homo sapien
gacgcgatgagcctgatggttatca

SEQ ID NO: 3777276 - DNA, 25 bp, Homo sapien
cgaaggtaaacgatgaaatcctggc

SEQ ID NO: 3777277 - DNA, 25 bp, Homo sapien
ctattgtgtttgcaatgctctggcc

SEQ ID NO: 3777278 - DNA, 25 bp, Homo sapien
tattgtgtttgcaatgctctggcct

SEQ ID NO: 3777279 - DNA, 25 bp, Homo sapien
ttggcagaaccttgctacagttggg

SEQ ID NO: 3777280 - DNA, 25 bp, Homo sapien
aaatttggcagaaccttgctacagt

SEQ ID NO: 3777281 - DNA, 25 bp, Homo sapien
tgaaatttggcagaaccttgctaca

SEQ ID NO: 3777282 - DNA, 25 bp, Homo sapien
atttggcagaaccttgctacagttg

SEQ ID NO: 3777283 - DNA, 25 bp, Homo sapien
gaggcaccattcacaaattttgcat

SEQ ID NO: 3777284 - DNA, 25 bp, Homo sapien
aacggagacctttcaatcattttgg

SEQ ID NO: 3777285 - DNA, 25 bp, Homo sapien
gaaacacattctagactgaaccagc

SEQ ID NO: 3777286 - DNA, 25 bp, Homo sapien
taaatgcagtaagaaaatggctcat

SEQ ID NO: 3777287 - DNA, 25 bp, Homo sapien
tctgggtcaagagtggttagttctg

SEQ ID NO: 3777288 - DNA, 25 bp, Homo sapien
catcaacaacatgttaaaattggct

SEQ ID NO: 3777289 - DNA, 25 bp, Homo sapien
tactgtctgagttagaccacgtctc

SEQ ID NO: 3777290 - DNA, 25 bp, Homo sapien
caagagtggttagttctgcaattct

SEQ ID NO: 3777291 - DNA, 25 bp, Homo sapien
gtttgagaagcaccggactaactca

SEQ ID NO: 3777292 - DNA, 25 bp, Homo sapien
gagtctggaacctggcaagttttat

SEQ ID NO: 3777293 - DNA, 25 bp, Homo sapien
gatgtcatagagtctggaacctggc

SEQ ID NO: 3777294 - DNA, 25 bp, Homo sapien
gcatctacagtcacaaccggtcttg

SEQ ID NO: 3777295 - DNA, 25 bp, Homo sapien
ttgataatcattgggtgcagcagaa

SEQ ID NO: 3777296 - DNA, 25 bp, Homo sapien
agccattcgtatttgtgagtacttg

SEQ ID NO: 3777297 - DNA, 25 bp, Homo sapien
tctgttgatagttttcaagctgagc

SEQ ID NO: 3777298 - DNA, 25 bp, Homo sapien
aaatttctgttgatagttttcaagc

SEQ ID NO: 3777299 - DNA, 25 bp, Homo sapien
gccattcgtatttgtgagtacttga

SEQ ID NO: 3777300 - DNA, 25 bp, Homo sapien
ctgttccaaatgcacccacaatcaa

SEQ ID NO: 3777301 - DNA, 25 bp, Homo sapien
tgttccaaatgcacccacaatcaaa

SEQ ID NO: 3777302 - DNA, 25 bp, Homo sapien
gttccaaatgcacccacaatcaaat

SEQ ID NO: 3777303 - DNA, 25 bp, Homo sapien
tatgaggaagggtattaacccagaa

SEQ ID NO: 3777304 - DNA, 25 bp, Homo sapien
cagaagtggaacgttctgattgtca

SEQ ID NO: 3777305 - DNA, 25 bp, Homo sapien
taacccagaagtggaacgttctgat

SEQ ID NO: 3777306 - DNA, 25 bp, Homo sapien
attaacccagaagtggaacgttctg

SEQ ID NO: 3777307 - DNA, 25 bp, Homo sapien
gatgtacaatccaggactctgcttt

SEQ ID NO: 3777308 - DNA, 25 bp, Homo sapien
catttgttggagtctgatgactgca

SEQ ID NO: 3777309 - DNA, 25 bp, Homo sapien
gcttttggactcagctgtgttcctg

SEQ ID NO: 3777310 - DNA, 25 bp, Homo sapien
gcagatttagggactccttgtgcct

SEQ ID NO: 3777311 - DNA, 25 bp, Homo sapien
ccagctttctggcttacgctggcta

SEQ ID NO: 3777312 - DNA, 25 bp, Homo sapien
cttctcttagggttgatagttttca

SEQ ID NO: 3777313 - DNA, 25 bp, Homo sapien
ttacgctggctatctcgtgaacttc

SEQ ID NO: 3777314 - DNA, 25 bp, Homo sapien
tctgtggtctggttggaccgccagc

SEQ ID NO: 3777315 - DNA, 25 bp, Homo sapien
taatgtatgcaagacactcctctgg

SEQ ID NO: 3777316 - DNA, 25 bp, Homo sapien
gattcctgactatcacggctgtttc

SEQ ID NO: 3777317 - DNA, 25 bp, Homo sapien
acaatgatagtcttggccttctgcc

SEQ ID NO: 3777318 - DNA, 25 bp, Homo sapien
tgaaccccaacatacagacctgaac

SEQ ID NO: 3777319 - DNA, 25 bp, Homo sapien
gcctgagggcaatcacagaaacctg

SEQ ID NO: 3777320 - DNA, 25 bp, Homo sapien
gcatgccatccaactacctttaggg

SEQ ID NO: 3777321 - DNA, 25 bp, Homo sapien
tcatggaggcctagaacgtagcatt

SEQ ID NO: 3777322 - DNA, 25 bp, Homo sapien
gcctgtgcgtgtctgagtcctaaca

SEQ ID NO: 3777323 - DNA, 25 bp, Homo sapien
agttatggttcctatcatgaaccag

SEQ ID NO: 3777324 - DNA, 25 bp, Homo sapien
aatagttatggttcctatcatgaac

SEQ ID NO: 3777325 - DNA, 25 bp, Homo sapien
tatggttcctatcatgaaccagttc

SEQ ID NO: 3777326 - DNA, 25 bp, Homo sapien
aagaatagttatggttcctatcatg

SEQ ID NO: 3777327 - DNA, 25 bp, Homo sapien
gccaaatccggaagggacagcatgt

SEQ ID NO: 3777328 - DNA, 25 bp, Homo sapien
gaatctcctcttaaagtaaagccaa

SEQ ID NO: 3777329 - DNA, 25 bp, Homo sapien
cttgcagaacttgggaaggcttggt

SEQ ID NO: 3777330 - DNA, 25 bp, Homo sapien
gcaaaaggcactccgatggcaatgt

SEQ ID NO: 3777331 - DNA, 25 bp, Homo sapien
aatctcccaaacgtctcggtgccag

SEQ ID NO: 3777332 - DNA, 25 bp, Homo sapien
ggttcaggtctcctaagtgtgccat

SEQ ID NO: 3777333 - DNA, 25 bp, Homo sapien
gggttgctctcaaattcacgttcca

SEQ ID NO: 3777334 - DNA, 25 bp, Homo sapien
tccataaagagaggtgccccaacca

SEQ ID NO: 3777335 - DNA, 25 bp, Homo sapien
cataaggcgaagcttgggcaaagtc

SEQ ID NO: 3777336 - DNA, 25 bp, Homo sapien
tttccaagaaggacggtgccctgca

SEQ ID NO: 3777337 - DNA, 25 bp, Homo sapien
gcttgggcaaagtcctgaggattca

SEQ ID NO: 3777338 - DNA, 25 bp, Homo sapien
aactttgctatagactagaatgcgc

SEQ ID NO: 3777339 - DNA, 25 bp, Homo sapien
ccctggtgcttgttgtgtggccgtc

SEQ ID NO: 3777340 - DNA, 25 bp, Homo sapien
tgtggccgtcagtgggaagaaatgt

SEQ ID NO: 3777341 - DNA, 25 bp, Homo sapien
tggaatgaatccgtgcagcagggga

SEQ ID NO: 3777342 - DNA, 25 bp, Homo sapien
gggaagagcccctggtgcttgttgt

SEQ ID NO: 3777343 - DNA, 25 bp, Homo sapien
ctcccctggtgcatggtagtagggt

SEQ ID NO: 3777344 - DNA, 25 bp, Homo sapien
tgcctcccctggtgcatggtagtag

SEQ ID NO: 3777345 - DNA, 25 bp, Homo sapien
tggtagtagggttccagaaggctct

SEQ ID NO: 3777346 - DNA, 25 bp, Homo sapien
tccagaaggctctgtgaccatctag

SEQ ID NO: 3777347 - DNA, 25 bp, Homo sapien
cttgttcctgatgccatagtggtgc

SEQ ID NO: 3777348 - DNA, 25 bp, Homo sapien
gggcacgttcattccaatcaataag

SEQ ID NO: 3777349 - DNA, 25 bp, Homo sapien
catacgtcattatcaaccaaaggcc

SEQ ID NO: 3777350 - DNA, 25 bp, Homo sapien
cacttggtatcaaaccttctatggg

SEQ ID NO: 3777351 - DNA, 25 bp, Homo sapien
gatacgacaacggtatatccaaaat

SEQ ID NO: 3777352 - DNA, 25 bp, Homo sapien
catctgatacgacaacggtatatcc

SEQ ID NO: 3777353 - DNA, 25 bp, Homo sapien
cgacaacggtatatccaaaataaga

SEQ ID NO: 3777354 - DNA, 25 bp, Homo sapien
gttaacatctgatacgacaacggta

SEQ ID NO: 3777355 - DNA, 25 bp, Homo sapien
ttgacccatagtttcaggttgccag

SEQ ID NO: 3777356 - DNA, 25 bp, Homo sapien
ccagtttgcttccatagtgtgccat

SEQ ID NO: 3777357 - DNA, 25 bp, Homo sapien
aagtgacgtagcttccatcgtgtcc

SEQ ID NO: 3777358 - DNA, 25 bp, Homo sapien
ggatttatgctctcaccagatttga

SEQ ID NO: 3777359 - DNA, 25 bp, Homo sapien
tagtctactggtaacccagagtgat

SEQ ID NO: 3777360 - DNA, 25 bp, Homo sapien
catccccggtgcctaggacagtttc

SEQ ID NO: 3777361 - DNA, 25 bp, Homo sapien
tgggatctgtctgtctgatgcatga

SEQ ID NO: 3777362 - DNA, 25 bp, Homo sapien
ggacagtttccagtacgtagtagct

SEQ ID NO: 3777363 - DNA, 25 bp, Homo sapien
ctgttctcccgtgaaattctgaata

SEQ ID NO: 3777364 - DNA, 25 bp, Homo sapien
cccgtgaaattctgaataaacgtca

SEQ ID NO: 3777365 - DNA, 25 bp, Homo sapien
ttctgaataaacgtcatatccgtag

SEQ ID NO: 3777366 - DNA, 25 bp, Homo sapien
tatccgtagagttaatgatggaaac

SEQ ID NO: 3777367 - DNA, 25 bp, Homo sapien
cctcttggaattccagcaaccaatt

SEQ ID NO: 3777368 - DNA, 25 bp, Homo sapien
atatccaaaattctgtgctcctctt

SEQ ID NO: 3777369 - DNA, 25 bp, Homo sapien
tatccaaaattctgtgctcctcttg

SEQ ID NO: 3777370 - DNA, 25 bp, Homo sapien
ccaaaattctgtgctcctcttggaa

SEQ ID NO: 3777371 - DNA, 25 bp, Homo sapien
ggactccattaatatccctttggta

SEQ ID NO: 3777372 - DNA, 25 bp, Homo sapien
tatgccattttaccatttccccatg

SEQ ID NO: 3777373 - DNA, 25 bp, Homo sapien
aatcacattgatagaaaaaacttta

SEQ ID NO: 3777374 - DNA, 25 bp, Homo sapien
taagtgatttaaactcaacagtgcc

SEQ ID NO: 3777375 - DNA, 25 bp, Homo sapien
tgctgagaatccccagtaaactccc

SEQ ID NO: 3777376 - DNA, 25 bp, Homo sapien
tgagaatccccagtaaactccccag

SEQ ID NO: 3777377 - DNA, 25 bp, Homo sapien
cttgctgagaatccccagtaaactc

SEQ ID NO: 3777378 - DNA, 25 bp, Homo sapien
gctgagaatccccagtaaactcccc

SEQ ID NO: 3777379 - DNA, 25 bp, Homo sapien
gcaacactggcagtgatcacttgtc

SEQ ID NO: 3777380 - DNA, 25 bp, Homo sapien
gaatgagtaatttgcaatgatatct

SEQ ID NO: 3777381 - DNA, 25 bp, Homo sapien
ggtaactgtcatcataggaagctgg

SEQ ID NO: 3777382 - DNA, 25 bp, Homo sapien
gctggagccacttccgtctgctttt

SEQ ID NO: 3777383 - DNA, 25 bp, Homo sapien
gtcctcccacaataaggtctccatt

SEQ ID NO: 3777384 - DNA, 25 bp, Homo sapien
cttgccagtagaaactcccaggtcc

SEQ ID NO: 3777385 - DNA, 25 bp, Homo sapien
aatcctgcttggcagtaaccctggc

SEQ ID NO: 3777386 - DNA, 25 bp, Homo sapien
ccagactaaatcctgcttggcagta

SEQ ID NO: 3777387 - DNA, 25 bp, Homo sapien
ataaaaatccagactaaatcctgct

SEQ ID NO: 3777388 - DNA, 25 bp, Homo sapien
tggcagtaaccctggccttccggat

SEQ ID NO: 3777389 - DNA, 25 bp, Homo sapien
tgacgtcttacccaacaaatggaag

SEQ ID NO: 3777390 - DNA, 25 bp, Homo sapien
tcctagagtgaactcaggaatccaa

SEQ ID NO: 3777391 - DNA, 25 bp, Homo sapien
ccaaggaagcatgtggataatttgc

SEQ ID NO: 3777392 - DNA, 25 bp, Homo sapien
tgaacttgataattatgtcctagag

SEQ ID NO: 3777393 - DNA, 25 bp, Homo sapien
tgttaatgatctgtgaacttcttgg

SEQ ID NO: 3777394 - DNA, 25 bp, Homo sapien
aatgatctgtgaacttcttggccat

SEQ ID NO: 3777395 - DNA, 25 bp, Homo sapien
catatgctcatgaacaagctggctt

SEQ ID NO: 3777396 - DNA, 25 bp, Homo sapien
gctttgtgttaatgatctgtgaact

SEQ ID NO: 3777397 - DNA, 25 bp, Homo sapien
tgaggaggaagaagtacccgtagga

SEQ ID NO: 3777398 - DNA, 25 bp, Homo sapien
ccgtaggaatagggagaccaggagg

SEQ ID NO: 3777399 - DNA, 25 bp, Homo sapien
cccgtaggaatagggagaccaggag

SEQ ID NO: 3777400 - DNA, 25 bp, Homo sapien
tcggcataggcgctgaagttctgaa

SEQ ID NO: 3777401 - DNA, 25 bp, Homo sapien
tccggcaaggagagaactcggcata

SEQ ID NO: 3777402 - DNA, 25 bp, Homo sapien
gaattgctacatagcaggtgccaac

SEQ ID NO: 3777403 - DNA, 25 bp, Homo sapien
taagagttctccagtgatataaagg

SEQ ID NO: 3777404 - DNA, 25 bp, Homo sapien
gcacaagcccacggctcatactcac

SEQ ID NO: 3777405 - DNA, 25 bp, Homo sapien
ctcgataggttctttggttccatta

SEQ ID NO: 3777406 - DNA, 25 bp, Homo sapien
gatttgaactcgataggttctttgg

SEQ ID NO: 3777407 - DNA, 25 bp, Homo sapien
tgaactcgataggttctttggttcc

SEQ ID NO: 3777408 - DNA, 25 bp, Homo sapien
actgattggatttgaactcgatagg

SEQ ID NO: 3777409 - DNA, 25 bp, Homo sapien
ttgcagatgtcagcatgagtggggc

SEQ ID NO: 3777410 - DNA, 25 bp, Homo sapien
actttgcagatgtcagcatgagtgg

SEQ ID NO: 3777411 - DNA, 25 bp, Homo sapien
ctttgcagatgtcagcatgagtggg

SEQ ID NO: 3777412 - DNA, 25 bp, Homo sapien
cagatgtcagcatgagtggggccat

SEQ ID NO: 3777413 - DNA, 25 bp, Homo sapien
cagttttatgtttgtgagaaatatt

SEQ ID NO: 3777414 - DNA, 25 bp, Homo sapien
gttttatgtttgtgagaaatattca

SEQ ID NO: 3777415 - DNA, 25 bp, Homo sapien
ctcagttttatgtttgtgagaaata

SEQ ID NO: 3777416 - DNA, 25 bp, Homo sapien
cctcagttttatgtttgtgagaaat

SEQ ID NO: 3777417 - DNA, 25 bp, Homo sapien
cttcctgtcaacttcttatgtgggc

SEQ ID NO: 3777418 - DNA, 25 bp, Homo sapien
gtgactggttcccagctgtattgct

SEQ ID NO: 3777419 - DNA, 25 bp, Homo sapien
tcccagctgtattgcttctctgtca

SEQ ID NO: 3777420 - DNA, 25 bp, Homo sapien
tcttcctgtcaacttcttatgtggg

SEQ ID NO: 3777421 - DNA, 25 bp, Homo sapien
gacacatcacactccattatgcgga

SEQ ID NO: 3777422 - DNA, 25 bp, Homo sapien
tctgggactcagttatagggctgtc

SEQ ID NO: 3777423 - DNA, 25 bp, Homo sapien
cagagcagaatacccaattgtagac

SEQ ID NO: 3777424 - DNA, 25 bp, Homo sapien
gaacaggatctcaactggactctgg

SEQ ID NO: 3777425 - DNA, 25 bp, Homo sapien
agcattgcatcaagtagctgccact

SEQ ID NO: 3777426 - DNA, 25 bp, Homo sapien
cacgaagtggatgttcagaatggaa

SEQ ID NO: 3777427 - DNA, 25 bp, Homo sapien
gaatggaaatagctacactggcatc

SEQ ID NO: 3777428 - DNA, 25 bp, Homo sapien
tctactttgtccacgaagtggatgt

SEQ ID NO: 3777429 - DNA, 25 bp, Homo sapien
ccctccgcgggccaaggacagtaat

SEQ ID NO: 3777430 - DNA, 25 bp, Homo sapien
cttccacgatatcgggctggctggt

SEQ ID NO: 3777431 - DNA, 25 bp, Homo sapien
aggacagtaatagacggctccccct

SEQ ID NO: 3777432 - DNA, 25 bp, Homo sapien
tggtggtgtcaaacggtatctgcct

SEQ ID NO: 3777433 - DNA, 25 bp, Homo sapien
aagtccacggcgtagccgaagtagc

SEQ ID NO: 3777434 - DNA, 25 bp, Homo sapien
gggccgctgtacactgtgagctttt

SEQ ID NO: 3777435 - DNA, 25 bp, Homo sapien
gtccaggttgaacgcctgacaggcg

SEQ ID NO: 3777436 - DNA, 25 bp, Homo sapien
cgggcgtcgggtatgtggaagtcca

SEQ ID NO: 3777437 - DNA, 25 bp, Homo sapien
tggctgctacccaggagcgcgagcc

SEQ ID NO: 3777438 - DNA, 25 bp, Homo sapien
tgcgctcggcgcacccgtggtgaca

SEQ ID NO: 3777439 - DNA, 25 bp, Homo sapien
ctggtctagagccagggactcccgg

SEQ ID NO: 3777440 - DNA, 25 bp, Homo sapien
ggctggtggaatctggcggtcccca

SEQ ID NO: 3777441 - DNA, 25 bp, Homo sapien
cactcatgtgtactcctgtgaaact

SEQ ID NO: 3777442 - DNA, 25 bp, Homo sapien
gtaaccttaaccacaccgcattgag

SEQ ID NO: 3777443 - DNA, 25 bp, Homo sapien
tcatattgctaaggctttttccaga

SEQ ID NO: 3777444 - DNA, 25 bp, Homo sapien
ccgcattgagtcacaacaatatctt

SEQ ID NO: 3777445 - DNA, 25 bp, Homo sapien
caaaaacatgggatacaggattcaa

SEQ ID NO: 3777446 - DNA, 25 bp, Homo sapien
aaaacatgggatacaggattcaaag

SEQ ID NO: 3777447 - DNA, 25 bp, Homo sapien
tcaaaaacatgggatacaggattca

SEQ ID NO: 3777448 - DNA, 25 bp, Homo sapien
ttcaaaaacatgggatacaggattc

SEQ ID NO: 3777449 - DNA, 25 bp, Homo sapien
tttcctctatgctgctgtgacactc

SEQ ID NO: 3777450 - DNA, 25 bp, Homo sapien
gctgcttgcttgcagtctgaattga

SEQ ID NO: 3777451 - DNA, 25 bp, Homo sapien
agaaggatctctttgcccagtgaac

SEQ ID NO: 3777452 - DNA, 25 bp, Homo sapien
gcccagtgaacatattgtgtgcagt

SEQ ID NO: 3777453 - DNA, 25 bp, Homo sapien
tagtcaagccactaacagcttgctg

SEQ ID NO: 3777454 - DNA, 25 bp, Homo sapien
cagtggtactgtgaacgtctgtgtg

SEQ ID NO: 3777455 - DNA, 25 bp, Homo sapien
tttcctagtcacaggacaaggctgc

SEQ ID NO: 3777456 - DNA, 25 bp, Homo sapien
tctgtgtgaactgagaaggttttcc

SEQ ID NO: 3777457 - DNA, 25 bp, Homo sapien
gttgatgatttgcagttcccataga

SEQ ID NO: 3777458 - DNA, 25 bp, Homo sapien
tgttccatgggggaaacagtctgtg

SEQ ID NO: 3777459 - DNA, 25 bp, Homo sapien
aagtcacgtgttgatgatttgcagt

SEQ ID NO: 3777460 - DNA, 25 bp, Homo sapien
tcaaagtcacgtgttgatgatttgc

SEQ ID NO: 3777461 - DNA, 25 bp, Homo sapien
aagtgtgtcaggtcttgtgtggcat

SEQ ID NO: 3777462 - DNA, 25 bp, Homo sapien
gaagtgtgtcaggtcttgtgtggca

SEQ ID NO: 3777463 - DNA, 25 bp, Homo sapien
gtcctcccgagacatctgggtacca

SEQ ID NO: 3777464 - DNA, 25 bp, Homo sapien
tgtcctcccgagacatctgggtacc

SEQ ID NO: 3777465 - DNA, 25 bp, Homo sapien
cgtgtcctcccgagacatctgggta

SEQ ID NO: 3777466 - DNA, 25 bp, Homo sapien
ccccgtgtcctcccgagacatctgg

SEQ ID NO: 3777467 - DNA, 25 bp, Homo sapien
ccagtcctccatggaagtcattcat

SEQ ID NO: 3777468 - DNA, 25 bp, Homo sapien
ctccagtcctccatggaagtcattc

SEQ ID NO: 3777469 - DNA, 25 bp, Homo sapien
tccagtcctccatggaagtcattca

SEQ ID NO: 3777470 - DNA, 25 bp, Homo sapien
ccgcatcatcctgctccactgtgat

SEQ ID NO: 3777471 - DNA, 25 bp, Homo sapien
ctgcagccaaaccaaagtctcaagg

SEQ ID NO: 3777472 - DNA, 25 bp, Homo sapien
caaaccaaagtctcaaggtttggct

SEQ ID NO: 3777473 - DNA, 25 bp, Homo sapien
aaccaaagtctcaaggtttggctcg

SEQ ID NO: 3777474 - DNA, 25 bp, Homo sapien
agccaaaccaaagtctcaaggtttg

SEQ ID NO: 3777475 - DNA, 25 bp, Homo sapien
tatatagacagtgaaagggactgaa

SEQ ID NO: 3777476 - DNA, 25 bp, Homo sapien
gggtgtgtacaaggagagataaacc

SEQ ID NO: 3777477 - DNA, 25 bp, Homo sapien
cacacctgagttttaacaagggctc

SEQ ID NO: 3777478 - DNA, 25 bp, Homo sapien
gaacagactcgcaaacacacctgag

SEQ ID NO: 3777479 - DNA, 25 bp, Homo sapien
tcacccctgagtttgtaatcaacag

SEQ ID NO: 3777480 - DNA, 25 bp, Homo sapien
gcaaaaggttggagaatttcacaga

SEQ ID NO: 3777481 - DNA, 25 bp, Homo sapien
gagatattaccacaccttcagccaa

SEQ ID NO: 3777482 - DNA, 25 bp, Homo sapien
gaagttgaatacatctatagctccc

SEQ ID NO: 3777483 - DNA, 25 bp, Homo sapien
catccctatcaagctacaaatgatt

SEQ ID NO: 3777484 - DNA, 25 bp, Homo sapien
ccatccctatcaagctacaaatgat

SEQ ID NO: 3777485 - DNA, 25 bp, Homo sapien
atccctatcaagctacaaatgattt

SEQ ID NO: 3777486 - DNA, 25 bp, Homo sapien
tatccagataatgtttcccgttttg

SEQ ID NO: 3777487 - DNA, 25 bp, Homo sapien
tcccgttttgttcctgatgctaatg

SEQ ID NO: 3777488 - DNA, 25 bp, Homo sapien
agggtcactggattcataacaggaa

SEQ ID NO: 3777489 - DNA, 25 bp, Homo sapien
catttgctagtgaagccatccaggc

SEQ ID NO: 3777490 - DNA, 25 bp, Homo sapien
gctggctgagttagcagagctctta

SEQ ID NO: 3777491 - DNA, 25 bp, Homo sapien
ttcgaggtcctgtatgacttagcca

SEQ ID NO: 3777492 - DNA, 25 bp, Homo sapien
gatctctctctcaagtaaacgggct

SEQ ID NO: 3777493 - DNA, 25 bp, Homo sapien
tgctcactggtctagaaagctgcca

SEQ ID NO: 3777494 - DNA, 25 bp, Homo sapien
taagtaaattgtcaaaggatccagg

SEQ ID NO: 3777495 - DNA, 25 bp, Homo sapien
tttgctagtaaatttcacacgaagg

SEQ ID NO: 3777496 - DNA, 25 bp, Homo sapien
taacagtgttgactatcagattctc

SEQ ID NO: 3777497 - DNA, 25 bp, Homo sapien
tattacaagccggaatcattcaaac

SEQ ID NO: 3777498 - DNA, 25 bp, Homo sapien
tcagtgataccagtgtttagcttaa

SEQ ID NO: 3777499 - DNA, 25 bp, Homo sapien
tatttacagttaatcagtgatacca

SEQ ID NO: 3777500 - DNA, 25 bp, Homo sapien
gcttaatccagccaattgccagtct

SEQ ID NO: 3777501 - DNA, 25 bp, Homo sapien
cagccaattgccagtcttgactcct

SEQ ID NO: 3777502 - DNA, 25 bp, Homo sapien
aactgcagtcccttctacgtacatg

SEQ ID NO: 3777503 - DNA, 25 bp, Homo sapien
tgtagcatgggatcttcaaaaccca

SEQ ID NO: 3777504 - DNA, 25 bp, Homo sapien
tatggccatttggtttgcagacagc

SEQ ID NO: 3777505 - DNA, 25 bp, Homo sapien
tccagagtaactcaatgtatggcca

SEQ ID NO: 3777506 - DNA, 25 bp, Homo sapien
ttttcagtccccaaagcaaaactgc

SEQ ID NO: 3777507 - DNA, 25 bp, Homo sapien
gacattgaaactacaactcgggctt

SEQ ID NO: 3777508 - DNA, 25 bp, Homo sapien
tcatgtcattagagcagaagtgctt

SEQ ID NO: 3777509 - DNA, 25 bp, Homo sapien
tggtagttgcctctaaaacacatta

SEQ ID NO: 3777510 - DNA, 25 bp, Homo sapien
ggctcggatgcctggcggctcagac

SEQ ID NO: 3777511 - DNA, 25 bp, Homo sapien
aggctcggatgcctggcggctcaga

SEQ ID NO: 3777512 - DNA, 25 bp, Homo sapien
agtggtagacagtaaaagattctgg

SEQ ID NO: 3777513 - DNA, 25 bp, Homo sapien
tccattgtagtggtagacagtaaaa

SEQ ID NO: 3777514 - DNA, 25 bp, Homo sapien
attataatttgactgcttcaatcca

SEQ ID NO: 3777515 - DNA, 25 bp, Homo sapien
ataatttgactgcttcaatccattg

SEQ ID NO: 3777516 - DNA, 25 bp, Homo sapien
ttactcagactaaatacacttccag

SEQ ID NO: 3777517 - DNA, 25 bp, Homo sapien
tccaatttggcccacgatgtttaat

SEQ ID NO: 3777518 - DNA, 25 bp, Homo sapien
agcagtagcatcacttttactcaga

SEQ ID NO: 3777519 - DNA, 25 bp, Homo sapien
tgaaagtgttgcctctgaagaagat

SEQ ID NO: 3777520 - DNA, 25 bp, Homo sapien
gctgagtctgcctggatagatcccc

SEQ ID NO: 3777521 - DNA, 25 bp, Homo sapien
gatcacgttcaaccctcttaacctg

SEQ ID NO: 3777522 - DNA, 25 bp, Homo sapien
tcaaggccattacaggcctggctcc

SEQ ID NO: 3777523 - DNA, 25 bp, Homo sapien
tatccgatggatacaaacaggcaca

SEQ ID NO: 3777524 - DNA, 25 bp, Homo sapien
gacaagcatgactcatttcatcatg

SEQ ID NO: 3777525 - DNA, 25 bp, Homo sapien
ggacaagcatgactcatttcatcat

SEQ ID NO: 3777526 - DNA, 25 bp, Homo sapien
tggacaagcatgactcatttcatca

SEQ ID NO: 3777527 - DNA, 25 bp, Homo sapien
ttagccaggccaccatatgtagtcc

SEQ ID NO: 3777528 - DNA, 25 bp, Homo sapien
acagtgcctgatggagagtatgtgc

SEQ ID NO: 3777529 - DNA, 25 bp, Homo sapien
gcatcagcctctacatcatagcaaa

SEQ ID NO: 3777530 - DNA, 25 bp, Homo sapien
taaatgtttactgggcctcgtgagg

SEQ ID NO: 3777531 - DNA, 25 bp, Homo sapien
gaaaagatctatgacaccgagggcg

SEQ ID NO: 3777532 - DNA, 25 bp, Homo sapien
tcacatgctcgtgggaggcaaacag

SEQ ID NO: 3777533 - DNA, 25 bp, Homo sapien
tctgagctgctataggatgggaaca

SEQ ID NO: 3777534 - DNA, 25 bp, Homo sapien
aaagcagctgttctctaacttgggc

SEQ ID NO: 3777535 - DNA, 25 bp, Homo sapien
tggtaaaatgcttcacttagagaac

SEQ ID NO: 3777536 - DNA, 25 bp, Homo sapien
gtattggatatagaactggcttgcc

SEQ ID NO: 3777537 - DNA, 25 bp, Homo sapien
tcaaaaacattcaggttggcccaga

SEQ ID NO: 3777538 - DNA, 25 bp, Homo sapien
aaagcccagtggaagacatgtccca

SEQ ID NO: 3777539 - DNA, 25 bp, Homo sapien
tagctaggggcttctactacccaca

SEQ ID NO: 3777540 - DNA, 25 bp, Homo sapien
agctaggggcttctactacccacag

SEQ ID NO: 3777541 - DNA, 25 bp, Homo sapien
gctaggggcttctactacccacagc

SEQ ID NO: 3777542 - DNA, 25 bp, Homo sapien
ctagctaggggcttctactacccac

SEQ ID NO: 3777543 - DNA, 25 bp, Homo sapien
tcttctcacagtatttaacagcttc

SEQ ID NO: 3777544 - DNA, 25 bp, Homo sapien
cttgacctcttctcacagtatttaa

SEQ ID NO: 3777545 - DNA, 25 bp, Homo sapien
cctcttctcacagtatttaacagct

SEQ ID NO: 3777546 - DNA, 25 bp, Homo sapien
gacctcttctcacagtatttaacag

SEQ ID NO: 3777547 - DNA, 25 bp, Homo sapien
ggcccaataatatgattcctaatcc

SEQ ID NO: 3777548 - DNA, 25 bp, Homo sapien
aatgggcccaataatatgattccta

SEQ ID NO: 3777549 - DNA, 25 bp, Homo sapien
tcttgaagaaatgggcccaataata

SEQ ID NO: 3777550 - DNA, 25 bp, Homo sapien
agaaatgggcccaataatatgattc

SEQ ID NO: 3777551 - DNA, 25 bp, Homo sapien
tatgtcaagtctgctataatattgg

SEQ ID NO: 3777552 - DNA, 25 bp, Homo sapien
catctttatttaagagggaaagtca

SEQ ID NO: 3777553 - DNA, 25 bp, Homo sapien
gaaccgtcattactttactgaagat

SEQ ID NO: 3777554 - DNA, 25 bp, Homo sapien
atttaagcagggcaactagcaccat

SEQ ID NO: 3777555 - DNA, 25 bp, Homo sapien
ccagaagtgaatcgggtatgaatcc

SEQ ID NO: 3777556 - DNA, 25 bp, Homo sapien
tctgaaacaaggtccaatgctttca

SEQ ID NO: 3777557 - DNA, 25 bp, Homo sapien
ttccagaagtgaatcgggtatgaat

SEQ ID NO: 3777558 - DNA, 25 bp, Homo sapien
aagtgaatcgggtatgaatccatta

SEQ ID NO: 3777559 - DNA, 25 bp, Homo sapien
gagcttcaggggcaactaaagccat

SEQ ID NO: 3777560 - DNA, 25 bp, Homo sapien
cttcaggggcaactaaagccatatc

SEQ ID NO: 3777561 - DNA, 25 bp, Homo sapien
agcttcaggggcaactaaagccata

SEQ ID NO: 3777562 - DNA, 25 bp, Homo sapien
gcttcaggggcaactaaagccatat

SEQ ID NO: 3777563 - DNA, 25 bp, Homo sapien
tcgtatgggcagagaaatcagggta

SEQ ID NO: 3777564 - DNA, 25 bp, Homo sapien
tgaggcaccaatctgtgtcgtatgg

SEQ ID NO: 3777565 - DNA, 25 bp, Homo sapien
agcagacagccctctgacgttcttc

SEQ ID NO: 3777566 - DNA, 25 bp, Homo sapien
ccaatctgtgtcgtatgggcagaga

SEQ ID NO: 3777567 - DNA, 25 bp, Homo sapien
cttaacaatgtaagctgcacatgga

SEQ ID NO: 3777568 - DNA, 25 bp, Homo sapien
acaatgtaagctgcacatggaggaa

SEQ ID NO: 3777569 - DNA, 25 bp, Homo sapien
ggaggaatctccacatacgcagact

SEQ ID NO: 3777570 - DNA, 25 bp, Homo sapien
gaatctccacatacgcagacttcat

SEQ ID NO: 3777571 - DNA, 25 bp, Homo sapien
caagtaacctcaatgaaagtgccat

SEQ ID NO: 3777572 - DNA, 25 bp, Homo sapien
tttcaagtaacctcaatgaaagtgc

SEQ ID NO: 3777573 - DNA, 25 bp, Homo sapien
ttcaagtaacctcaatgaaagtgcc

SEQ ID NO: 3777574 - DNA, 25 bp, Homo sapien
tcaagtaacctcaatgaaagtgcca

SEQ ID NO: 3777575 - DNA, 25 bp, Homo sapien
aaatacggtgaggtgagtctcactg

SEQ ID NO: 3777576 - DNA, 25 bp, Homo sapien
acaatccaaatagggaattttggag

SEQ ID NO: 3777577 - DNA, 25 bp, Homo sapien
gagtctcactgccaacaatccaaat

SEQ ID NO: 3777578 - DNA, 25 bp, Homo sapien
cttggcaaaaaatacggtgaggtga

SEQ ID NO: 3777579 - DNA, 25 bp, Homo sapien
cattagtgttaaaaatcctactgct

SEQ ID NO: 3777580 - DNA, 25 bp, Homo sapien
gcttgttcatgtataccaagaagtt

SEQ ID NO: 3777581 - DNA, 25 bp, Homo sapien
cttacagtatcttaaagcttccatt

SEQ ID NO: 3777582 - DNA, 25 bp, Homo sapien
aaaatcctactgctgcttgttcatg

SEQ ID NO: 3777583 - DNA, 25 bp, Homo sapien
gaaagatgaaccacactgatgagta

SEQ ID NO: 3777584 - DNA, 25 bp, Homo sapien
tgatgagtaccaagtgtgagagaga

SEQ ID NO: 3777585 - DNA, 25 bp, Homo sapien
taccaagtgtgagagagagtgatgc

SEQ ID NO: 3777586 - DNA, 25 bp, Homo sapien
tcgagaatccggagaacgcgtagaa

SEQ ID NO: 3777587 - DNA, 25 bp, Homo sapien
cagcaggagattaattaaactttgg

SEQ ID NO: 3777588 - DNA, 25 bp, Homo sapien
tctctatcaccatcccatacattag

SEQ ID NO: 3777589 - DNA, 25 bp, Homo sapien
gaaacagcatgtcccgtcagcagga

SEQ ID NO: 3777590 - DNA, 25 bp, Homo sapien
tcccatacattagaaacagcatgtc

SEQ ID NO: 3777591 - DNA, 25 bp, Homo sapien
atgtccatatacaggatctatcaag

SEQ ID NO: 3777592 - DNA, 25 bp, Homo sapien
tgccatgtccatatacaggatctat

SEQ ID NO: 3777593 - DNA, 25 bp, Homo sapien
tctatcaagggttcacttgcatctt

SEQ ID NO: 3777594 - DNA, 25 bp, Homo sapien
cttgcatcttcaatttcgtttttta

SEQ ID NO: 3777595 - DNA, 25 bp, Homo sapien
caccatcaggaataaaattactcat

SEQ ID NO: 3777596 - DNA, 25 bp, Homo sapien
gggtcaagtgctacacggaaggatc

SEQ ID NO: 3777597 - DNA, 25 bp, Homo sapien
gaacattattgataatctctgtagt

SEQ ID NO: 3777598 - DNA, 25 bp, Homo sapien
caacgagtgagtgctgaggaaacag

SEQ ID NO: 3777599 - DNA, 25 bp, Homo sapien
cacattgaatactggtccaagacag

SEQ ID NO: 3777600 - DNA, 25 bp, Homo sapien
cattgaatactggtccaagacagca

SEQ ID NO: 3777601 - DNA, 25 bp, Homo sapien
acattgaatactggtccaagacagc

SEQ ID NO: 3777602 - DNA, 25 bp, Homo sapien
taagtagcgcatttctatgtaaaac

SEQ ID NO: 3777603 - DNA, 25 bp, Homo sapien
cagtatgaacagacttaaagtggca

SEQ ID NO: 3777604 - DNA, 25 bp, Homo sapien
ctaagaacctttccacagtatgaac

SEQ ID NO: 3777605 - DNA, 25 bp, Homo sapien
ggcaatgtgtccacagagtaagtat

SEQ ID NO: 3777606 - DNA, 25 bp, Homo sapien
tgaattaatgcatgaaatcgctcaa

SEQ ID NO: 3777607 - DNA, 25 bp, Homo sapien
aaatcgctcaaagccaagctcttcg

SEQ ID NO: 3777608 - DNA, 25 bp, Homo sapien
taatgcatgaaatcgctcaaagcca

SEQ ID NO: 3777609 - DNA, 25 bp, Homo sapien
aagccaagctcttcgacagccaagg

SEQ ID NO: 3777610 - DNA, 25 bp, Homo sapien
gcagagatgagacttgagcacagat

SEQ ID NO: 3777611 - DNA, 25 bp, Homo sapien
aatgacacaagatacacacagcagg

SEQ ID NO: 3777612 - DNA, 25 bp, Homo sapien
cagttcagctatgctacggcagtta

SEQ ID NO: 3777613 - DNA, 25 bp, Homo sapien
aagtgccaggcccttttctaaatgc

SEQ ID NO: 3777614 - DNA, 25 bp, Homo sapien
tcagtaattaagcttaagctggaaa

SEQ ID NO: 3777615 - DNA, 25 bp, Homo sapien
cttaagctggaaaagaatacatgtt

SEQ ID NO: 3777616 - DNA, 25 bp, Homo sapien
agtaattaagcttaagctggaaaag

SEQ ID NO: 3777617 - DNA, 25 bp, Homo sapien
agcttaagctggaaaagaatacatg

SEQ ID NO: 3777618 - DNA, 25 bp, Homo sapien
tgaaaccaagcagtatgatccagag

SEQ ID NO: 3777619 - DNA, 25 bp, Homo sapien
tgttccacttggcaactagactctg

SEQ ID NO: 3777620 - DNA, 25 bp, Homo sapien
tgatccagagtggtcacaacaagca

SEQ ID NO: 3777621 - DNA, 25 bp, Homo sapien
tatgacaaaggagttccttctgctc

SEQ ID NO: 3777622 - DNA, 25 bp, Homo sapien
tgaacaatcccgccaagaagacttc

SEQ ID NO: 3777623 - DNA, 25 bp, Homo sapien
gaacaatcccgccaagaagacttct

SEQ ID NO: 3777624 - DNA, 25 bp, Homo sapien
ctgaacaatcccgccaagaagactt

SEQ ID NO: 3777625 - DNA, 25 bp, Homo sapien
ggtgcaataacagcacaggggccac

SEQ ID NO: 3777626 - DNA, 25 bp, Homo sapien
caggtgcaataacagcacaggggcc

SEQ ID NO: 3777627 - DNA, 25 bp, Homo sapien
aaactgttctaatgcagatccctct

SEQ ID NO: 3777628 - DNA, 25 bp, Homo sapien
acaggtgcaataacagcacaggggc

SEQ ID NO: 3777629 - DNA, 25 bp, Homo sapien
caacccatgagtgaatgttgcggga

SEQ ID NO: 3777630 - DNA, 25 bp, Homo sapien
caggaagaagttgtttcaacatccc

SEQ ID NO: 3777631 - DNA, 25 bp, Homo sapien
tccctatagagatgatgctgacgta

SEQ ID NO: 3777632 - DNA, 25 bp, Homo sapien
tgaaagcaacattaccgtggagaag

SEQ ID NO: 3777633 - DNA, 25 bp, Homo sapien
caaacgtgacttctggtatggtata

SEQ ID NO: 3777634 - DNA, 25 bp, Homo sapien
gataaaatttcgagcattcaagcag

SEQ ID NO: 3777635 - DNA, 25 bp, Homo sapien
ggaacacttgtgtccactactgtga

SEQ ID NO: 3777636 - DNA, 25 bp, Homo sapien
aatgcttacagattgttccgatgac

SEQ ID NO: 3777637 - DNA, 25 bp, Homo sapien
cataaatggccgtttttcctgatta

SEQ ID NO: 3777638 - DNA, 25 bp, Homo sapien
gccgtttttcctgattacgtctgaa

SEQ ID NO: 3777639 - DNA, 25 bp, Homo sapien
ttcctgattacgtctgaaattaccc

SEQ ID NO: 3777640 - DNA, 25 bp, Homo sapien
cctgattacgtctgaaattacccat

SEQ ID NO: 3777641 - DNA, 25 bp, Homo sapien
tccatcagctctttagtcagttcgg

SEQ ID NO: 3777642 - DNA, 25 bp, Homo sapien
tcagctctttagtcagttcggacat

SEQ ID NO: 3777643 - DNA, 25 bp, Homo sapien
catcagctctttagtcagttcggac

SEQ ID NO: 3777644 - DNA, 25 bp, Homo sapien
aaatggtgtccgagagaccggggct

SEQ ID NO: 3777645 - DNA, 25 bp, Homo sapien
cagagaccaagcctgtcaagccagg

SEQ ID NO: 3777646 - DNA, 25 bp, Homo sapien
gcagcagcgagttttccgtaccgga

SEQ ID NO: 3777647 - DNA, 25 bp, Homo sapien
acggcggcggcaaacgaattggaag

SEQ ID NO: 3777648 - DNA, 25 bp, Homo sapien
aaccggcgggcggatcttcgctttg

SEQ ID NO: 3777649 - DNA, 25 bp, Homo sapien
tatacaagtattggacctaatcttt

SEQ ID NO: 3777650 - DNA, 25 bp, Homo sapien
taaagtattctcctactataatgtt

SEQ ID NO: 3777651 - DNA, 25 bp, Homo sapien
tgttatggtaaatgattaaactgaa

SEQ ID NO: 3777652 - DNA, 25 bp, Homo sapien
atatacattatacaagtattggacc

SEQ ID NO: 3777653 - DNA, 25 bp, Homo sapien
tgtttcccgttgtcaatttgctgcc

SEQ ID NO: 3777654 - DNA, 25 bp, Homo sapien
cgttgtcaatttgctgccttcaata

SEQ ID NO: 3777655 - DNA, 25 bp, Homo sapien
gttatcagtgtttcccgttgtcaat

SEQ ID NO: 3777656 - DNA, 25 bp, Homo sapien
atttgctgccttcaatatctccaac

SEQ ID NO: 3777657 - DNA, 25 bp, Homo sapien
gatgtcatcaaactcgagcaagtat

SEQ ID NO: 3777658 - DNA, 25 bp, Homo sapien
tcaaactcgagcaagtataagcatt

SEQ ID NO: 3777659 - DNA, 25 bp, Homo sapien
aactcgagcaagtataagcatttga

SEQ ID NO: 3777660 - DNA, 25 bp, Homo sapien
gtcatcaaactcgagcaagtataag

SEQ ID NO: 3777661 - DNA, 25 bp, Homo sapien
tgtcattcaaagtcggcaccactga

SEQ ID NO: 3777662 - DNA, 25 bp, Homo sapien
tgacaagaactatcctcggtagggt

SEQ ID NO: 3777663 - DNA, 25 bp, Homo sapien
tctataattgtgcacagcagccgca

SEQ ID NO: 3777664 - DNA, 25 bp, Homo sapien
cccatgataggcttgaactgaggct

SEQ ID NO: 3777665 - DNA, 25 bp, Homo sapien
agtatgggtcatcgtgatagggata

SEQ ID NO: 3777666 - DNA, 25 bp, Homo sapien
tagggatagtttagctcaggaacca

SEQ ID NO: 3777667 - DNA, 25 bp, Homo sapien
tagctcaggaaccaacgtttcggtg

SEQ ID NO: 3777668 - DNA, 25 bp, Homo sapien
aacgtttcggtgtcttgattgccca

SEQ ID NO: 3777669 - DNA, 25 bp, Homo sapien
tccacgaagatcaatggtgtagctc

SEQ ID NO: 3777670 - DNA, 25 bp, Homo sapien
gagaaaccagatgactctgcaggag

SEQ ID NO: 3777671 - DNA, 25 bp, Homo sapien
caaagagtcacttgagacggcctaa

SEQ ID NO: 3777672 - DNA, 25 bp, Homo sapien
ggtgtagctctacattgcaaggagc

SEQ ID NO: 3777673 - DNA, 25 bp, Homo sapien
ctgatctctaggaacaggatcaatg

SEQ ID NO: 3777674 - DNA, 25 bp, Homo sapien
tctaggaacaggatcaatgcgcttc

SEQ ID NO: 3777675 - DNA, 25 bp, Homo sapien
gatcaatgcgcttcattcctgaaac

SEQ ID NO: 3777676 - DNA, 25 bp, Homo sapien
gaacaggatcaatgcgcttcattcc

SEQ ID NO: 3777677 - DNA, 25 bp, Homo sapien
gttaccctatcccttgcctgagctg

SEQ ID NO: 3777678 - DNA, 25 bp, Homo sapien
ctctggcttaggaattgtgcacccc

SEQ ID NO: 3777679 - DNA, 25 bp, Homo sapien
gctggccctgaagtcaactcgaatt

SEQ ID NO: 3777680 - DNA, 25 bp, Homo sapien
cacaatccctgcagaggttacccta

SEQ ID NO: 3777681 - DNA, 25 bp, Homo sapien
tttcacggatttcgccagagtttct

SEQ ID NO: 3777682 - DNA, 25 bp, Homo sapien
tctcttttcacggatttcgccagag

SEQ ID NO: 3777683 - DNA, 25 bp, Homo sapien
cacggatttcgccagagtttctttg

SEQ ID NO: 3777684 - DNA, 25 bp, Homo sapien
cttttcacggatttcgccagagttt

SEQ ID NO: 3777685 - DNA, 25 bp, Homo sapien
cacaaagctgttgtattaggcacaa

SEQ ID NO: 3777686 - DNA, 25 bp, Homo sapien
tacattaacttgacaaaggatggcc

SEQ ID NO: 3777687 - DNA, 25 bp, Homo sapien
ggatggccactagcaacctctaaaa

SEQ ID NO: 3777688 - DNA, 25 bp, Homo sapien
gataatccccttaaagccaggtaga

SEQ ID NO: 3777689 - DNA, 25 bp, Homo sapien
caaacggtattgcttatatgaggct

SEQ ID NO: 3777690 - DNA, 25 bp, Homo sapien
aaacggtattgcttatatgaggctt

SEQ ID NO: 3777691 - DNA, 25 bp, Homo sapien
aacggtattgcttatatgaggcttt

SEQ ID NO: 3777692 - DNA, 25 bp, Homo sapien
tcaaacggtattgcttatatgaggc

SEQ ID NO: 3777693 - DNA, 25 bp, Homo sapien
agtgtcaccaatcctacttctccct

SEQ ID NO: 3777694 - DNA, 25 bp, Homo sapien
gctttcagcagcaactgtccaacca

SEQ ID NO: 3777695 - DNA, 25 bp, Homo sapien
tagtgtcaccaatcctacttctccc

SEQ ID NO: 3777696 - DNA, 25 bp, Homo sapien
cctttagctttcagcagcaactgtc

SEQ ID NO: 3777697 - DNA, 25 bp, Homo sapien
tcttaaatgtgataccttaatattc

SEQ ID NO: 3777698 - DNA, 25 bp, Homo sapien
cctgcattagcagactcttttgcat

SEQ ID NO: 3777699 - DNA, 25 bp, Homo sapien
atattcagaatgtgtagaatgtggg

SEQ ID NO: 3777700 - DNA, 25 bp, Homo sapien
ttcctctgagaatctcaatcctgca

SEQ ID NO: 3777701 - DNA, 25 bp, Homo sapien
ttctgaatgtatttgtcctcacagt

SEQ ID NO: 3777702 - DNA, 25 bp, Homo sapien
ttggtcttctctgatgtttgcaaac

SEQ ID NO: 3777703 - DNA, 25 bp, Homo sapien
ccttggtcttctctgatgtttgcaa

SEQ ID NO: 3777704 - DNA, 25 bp, Homo sapien
ggtcttctctgatgtttgcaaacat

SEQ ID NO: 3777705 - DNA, 25 bp, Homo sapien
atttccttggtcttctctgatgttt

SEQ ID NO: 3777706 - DNA, 25 bp, Homo sapien
tagtatatgtgctacagaaacaagc

SEQ ID NO: 3777707 - DNA, 25 bp, Homo sapien
tttagtatatgtgctacagaaacaa

SEQ ID NO: 3777708 - DNA, 25 bp, Homo sapien
ttagtatatgtgctacagaaacaag

SEQ ID NO: 3777709 - DNA, 25 bp, Homo sapien
agtatatgtgctacagaaacaagca

SEQ ID NO: 3777710 - DNA, 25 bp, Homo sapien
cagtggtgcatgtactgtcttgaca

SEQ ID NO: 3777711 - DNA, 25 bp, Homo sapien
tcagtggtgcatgtactgtcttgac

SEQ ID NO: 3777712 - DNA, 25 bp, Homo sapien
agtggtgcatgtactgtcttgacaa

SEQ ID NO: 3777713 - DNA, 25 bp, Homo sapien
tggtgcatgtactgtcttgacaaac

SEQ ID NO: 3777714 - DNA, 25 bp, Homo sapien
gaaggtttttgttgcccatctcaga

SEQ ID NO: 3777715 - DNA, 25 bp, Homo sapien
tcttggaaggtttttgttgcccatc

SEQ ID NO: 3777716 - DNA, 25 bp, Homo sapien
tattggcaacatgaagggtcctcac

SEQ ID NO: 3777717 - DNA, 25 bp, Homo sapien
tcaaaatattcccagatcgctccta

SEQ ID NO: 3777718 - DNA, 25 bp, Homo sapien
tcaaggtgccgttttcttgaaaaca

SEQ ID NO: 3777719 - DNA, 25 bp, Homo sapien
gtcatgttgtcaaggtgccgttttc

SEQ ID NO: 3777720 - DNA, 25 bp, Homo sapien
aaggtcatgttgtcaaggtgccgtt

SEQ ID NO: 3777721 - DNA, 25 bp, Homo sapien
tgttgtcaaggtgccgttttcttga

SEQ ID NO: 3777722 - DNA, 25 bp, Homo sapien
gagtcctctggctgtttcaatgaca

SEQ ID NO: 3777723 - DNA, 25 bp, Homo sapien
tgtaaagcatcaaagccacggcacg

SEQ ID NO: 3777724 - DNA, 25 bp, Homo sapien
gacgccttagagaacacctgtaaag

SEQ ID NO: 3777725 - DNA, 25 bp, Homo sapien
gccatctggacgtggccttttgcaa

SEQ ID NO: 3777726 - DNA, 25 bp, Homo sapien
cagttgggctgggtaaagactacag

SEQ ID NO: 3777727 - DNA, 25 bp, Homo sapien
tgtggaaaagagacccttgagcaga

SEQ ID NO: 3777728 - DNA, 25 bp, Homo sapien
ggtgacctcttggttgcaactcttc

SEQ ID NO: 3777729 - DNA, 25 bp, Homo sapien
aagactacagctgccatgtcaaatg

SEQ ID NO: 3777730 - DNA, 25 bp, Homo sapien
acccgatcatacattctattaactg

SEQ ID NO: 3777731 - DNA, 25 bp, Homo sapien
cccgatcatacattctattaactga

SEQ ID NO: 3777732 - DNA, 25 bp, Homo sapien
aaacccgatcatacattctattaac

SEQ ID NO: 3777733 - DNA, 25 bp, Homo sapien
taaaacccgatcatacattctatta

SEQ ID NO: 3777734 - DNA, 25 bp, Homo sapien
ttacaaagtggtcccatttgcttgg

SEQ ID NO: 3777735 - DNA, 25 bp, Homo sapien
gcttcttacaaagtggtcccatttg

SEQ ID NO: 3777736 - DNA, 25 bp, Homo sapien
tcttacaaagtggtcccatttgctt

SEQ ID NO: 3777737 - DNA, 25 bp, Homo sapien
ttctgcttcttacaaagtggtccca

SEQ ID NO: 3777738 - DNA, 25 bp, Homo sapien
tgagaagtaatgtggagagggtgtg

SEQ ID NO: 3777739 - DNA, 25 bp, Homo sapien
tgtgatgctggcgagttggaaggga

SEQ ID NO: 3777740 - DNA, 25 bp, Homo sapien
tctgggcttccggaaagagcaactg

SEQ ID NO: 3777741 - DNA, 25 bp, Homo sapien
caactgtgccgcgttgtcagtgtag

SEQ ID NO: 3777742 - DNA, 25 bp, Homo sapien
agtccatcatagaccctaataccgc

SEQ ID NO: 3777743 - DNA, 25 bp, Homo sapien
gccagtaagtccatcatagacccta

SEQ ID NO: 3777744 - DNA, 25 bp, Homo sapien
tggctgccagtaagtccatcataga

SEQ ID NO: 3777745 - DNA, 25 bp, Homo sapien
agctggctgccagtaagtccatcat

SEQ ID NO: 3777746 - DNA, 25 bp, Homo sapien
aagatttgccgtgtatatcaatcaa

SEQ ID NO: 3777747 - DNA, 25 bp, Homo sapien
gcaagatttgccgtgtatatcaatc

SEQ ID NO: 3777748 - DNA, 25 bp, Homo sapien
cagcaagatttgccgtgtatatcaa

SEQ ID NO: 3777749 - DNA, 25 bp, Homo sapien
caagatttgccgtgtatatcaatca

SEQ ID NO: 3777750 - DNA, 25 bp, Homo sapien
gtttcaatcttgttgcccagctgga

SEQ ID NO: 3777751 - DNA, 25 bp, Homo sapien
cgtttcaatcttgttgcccagctgg

SEQ ID NO: 3777752 - DNA, 25 bp, Homo sapien
gcgtttcaatcttgttgcccagctg

SEQ ID NO: 3777753 - DNA, 25 bp, Homo sapien
gcccagccaacaactgctaattctt

SEQ ID NO: 3777754 - DNA, 25 bp, Homo sapien
agcaaaacagatcaaattacacatt

SEQ ID NO: 3777755 - DNA, 25 bp, Homo sapien
gctctgtacactataatcttatgtg

SEQ ID NO: 3777756 - DNA, 25 bp, Homo sapien
gacccaagccagttagagccacatt

SEQ ID NO: 3777757 - DNA, 25 bp, Homo sapien
tagcggttcactttgattcagagcc

SEQ ID NO: 3777758 - DNA, 25 bp, Homo sapien
caaagggacattaacagctgagtgc

SEQ ID NO: 3777759 - DNA, 25 bp, Homo sapien
tctgctgagcgtgagacctccttct

SEQ ID NO: 3777760 - DNA, 25 bp, Homo sapien
gaaatcagatactcttgctagcagg

SEQ ID NO: 3777761 - DNA, 25 bp, Homo sapien
ctctacagaggaccttactgccaca

SEQ ID NO: 3777762 - DNA, 25 bp, Homo sapien
tctccctctacagaggaccttactg

SEQ ID NO: 3777763 - DNA, 25 bp, Homo sapien
ctacagaggaccttactgccacatc

SEQ ID NO: 3777764 - DNA, 25 bp, Homo sapien
gaggaccttactgccacatctgcca

SEQ ID NO: 3777765 - DNA, 25 bp, Homo sapien
tagattccattcgcctaagaataga

SEQ ID NO: 3777766 - DNA, 25 bp, Homo sapien
gattccattcgcctaagaatagaaa

SEQ ID NO: 3777767 - DNA, 25 bp, Homo sapien
tgtagattccattcgcctaagaata

SEQ ID NO: 3777768 - DNA, 25 bp, Homo sapien
gtagattccattcgcctaagaatag

SEQ ID NO: 3777769 - DNA, 25 bp, Homo sapien
catgcatgtaaacactcgatggtca

SEQ ID NO: 3777770 - DNA, 25 bp, Homo sapien
aacatgccaactccgtaacaaggtt

SEQ ID NO: 3777771 - DNA, 25 bp, Homo sapien
cagaaggtgtcatatctcacacatg

SEQ ID NO: 3777772 - DNA, 25 bp, Homo sapien
aggttagatgggtaacatgccaact

SEQ ID NO: 3777773 - DNA, 25 bp, Homo sapien
tctgattttcaagggtaacactttc

SEQ ID NO: 3777774 - DNA, 25 bp, Homo sapien
ggcttctggcagatgctccgtgcat

SEQ ID NO: 3777775 - DNA, 25 bp, Homo sapien
gcataatgaaaactgtacgaaataa

SEQ ID NO: 3777776 - DNA, 25 bp, Homo sapien
taataaaagctgataatcaaatgta

SEQ ID NO: 3777777 - DNA, 25 bp, Homo sapien
ttaatgcataatgaaaactgtacga

SEQ ID NO: 3777778 - DNA, 25 bp, Homo sapien
tcatattaatgcataatgaaaactg

SEQ ID NO: 3777779 - DNA, 25 bp, Homo sapien
cagtctccgcagtgtgcatcatttg

SEQ ID NO: 3777780 - DNA, 25 bp, Homo sapien
cactgaaagcagtagaggtacccgc

SEQ ID NO: 3777781 - DNA, 25 bp, Homo sapien
gaagctgggcaatgctgttctgcat

SEQ ID NO: 3777782 - DNA, 25 bp, Homo sapien
ggagaagaattttgcgcattacctg

SEQ ID NO: 3777783 - DNA, 25 bp, Homo sapien
ctctcaggaatatatgttgctagta

SEQ ID NO: 3777784 - DNA, 25 bp, Homo sapien
caaataacttggtgtatgtttcact

SEQ ID NO: 3777785 - DNA, 25 bp, Homo sapien
gaaaagcaggtgataaccattgtat

SEQ ID NO: 3777786 - DNA, 25 bp, Homo sapien
tctcaaggcattgagtgtggaacct

SEQ ID NO: 3777787 - DNA, 25 bp, Homo sapien
ctgtcacttcctgggttcgtcactg

SEQ ID NO: 3777788 - DNA, 25 bp, Homo sapien
cacttcctgggttcgtcactgccat

SEQ ID NO: 3777789 - DNA, 25 bp, Homo sapien
ctgtctgcaaaggccttttcccagc

SEQ ID NO: 3777790 - DNA, 25 bp, Homo sapien
agcactgtcacttcctgggttcgtc

SEQ ID NO: 3777791 - DNA, 25 bp, Homo sapien
ccatggaaatgagagggcatgacac

SEQ ID NO: 3777792 - DNA, 25 bp, Homo sapien
catggatgtgttatgtgcgagacct

SEQ ID NO: 3777793 - DNA, 25 bp, Homo sapien
ggttcctaaggcaacaaatagatgg

SEQ ID NO: 3777794 - DNA, 25 bp, Homo sapien
cagaagtcttagtgagggaaacagg

SEQ ID NO: 3777795 - DNA, 25 bp, Homo sapien
gggaactttgcactctggatcggct

SEQ ID NO: 3777796 - DNA, 25 bp, Homo sapien
ctgtgtctcgcatgaggctcccaga

SEQ ID NO: 3777797 - DNA, 25 bp, Homo sapien
catctgtgaaggagatagaagggtc

SEQ ID NO: 3777798 - DNA, 25 bp, Homo sapien
ggctcccagaccttctagaacaaga

SEQ ID NO: 3777799 - DNA, 25 bp, Homo sapien
ggctttccggtatctatttttgcca

SEQ ID NO: 3777800 - DNA, 25 bp, Homo sapien
tttgccatacattttgctgttttgc

SEQ ID NO: 3777801 - DNA, 25 bp, Homo sapien
gattttgatatctttggctttccgg

SEQ ID NO: 3777802 - DNA, 25 bp, Homo sapien
tgtataagaacacataacactactg

SEQ ID NO: 3777803 - DNA, 25 bp, Homo sapien
gacccaggcatttcaacagagctaa

SEQ ID NO: 3777804 - DNA, 25 bp, Homo sapien
tccccttggtgacgtatgcagcagc

SEQ ID NO: 3777805 - DNA, 25 bp, Homo sapien
taaacactgcaaaggagagccactt

SEQ ID NO: 3777806 - DNA, 25 bp, Homo sapien
tatacacaactgaggtgccctgcca

SEQ ID NO: 3777807 - DNA, 25 bp, Homo sapien
tttgatatagacttcatctcccggc

SEQ ID NO: 3777808 - DNA, 25 bp, Homo sapien
caaatgaagaaccacactgttactg

SEQ ID NO: 3777809 - DNA, 25 bp, Homo sapien
ggcatagtcgtaattctgatcagca

SEQ ID NO: 3777810 - DNA, 25 bp, Homo sapien
ggctttcccgccatctaatttgata

SEQ ID NO: 3777811 - DNA, 25 bp, Homo sapien
catttttattcagtaggcgtaacca

SEQ ID NO: 3777812 - DNA, 25 bp, Homo sapien
cagggtgtaaccacaaaaccgagtg

SEQ ID NO: 3777813 - DNA, 25 bp, Homo sapien
aatgcattagagtgattccacagac

SEQ ID NO: 3777814 - DNA, 25 bp, Homo sapien
ggcgtaaccacaaattcctgcgaat

SEQ ID NO: 3777815 - DNA, 25 bp, Homo sapien
tcagggaatcaaatcctcttggccg

SEQ ID NO: 3777816 - DNA, 25 bp, Homo sapien
taaagtggccccagcagaatactgc

SEQ ID NO: 3777817 - DNA, 25 bp, Homo sapien
tgagcgtcctccgactccatagaga

SEQ ID NO: 3777818 - DNA, 25 bp, Homo sapien
agacccatgcgtagcccttgtagcg

SEQ ID NO: 3777819 - DNA, 25 bp, Homo sapien
agccctgcttggactcattccttcg

SEQ ID NO: 3777820 - DNA, 25 bp, Homo sapien
ccccgagtcggtcaccctgccacgc

SEQ ID NO: 3777821 - DNA, 25 bp, Homo sapien
ctgccacgcccattccggactcccc

SEQ ID NO: 3777822 - DNA, 25 bp, Homo sapien
tgtttctccctccggcctttgtcta

SEQ ID NO: 3777823 - DNA, 25 bp, Homo sapien
cagcgcacgagctgtccccgggacc

SEQ ID NO: 3777824 - DNA, 25 bp, Homo sapien
cctctgttgcggaggatcccacggc

SEQ ID NO: 3777825 - DNA, 25 bp, Homo sapien
gactccccagcgcacgagctgtccc

SEQ ID NO: 3777826 - DNA, 25 bp, Homo sapien
ccacggccaggggtcgcttcccgcg

SEQ ID NO: 3777827 - DNA, 25 bp, Homo sapien
gcgcaccgatcgagggtcccagact

SEQ ID NO: 3777828 - DNA, 25 bp, Homo sapien
cccagactccggaactgccctctcc

SEQ ID NO: 3777829 - DNA, 25 bp, Homo sapien
accgatcgagggtcccagactccgg

SEQ ID NO: 3777830 - DNA, 25 bp, Homo sapien
gcaggggcgcgcaccgatcgagggt

SEQ ID NO: 3777831 - DNA, 25 bp, Homo sapien
ctccgcgcatcaggacgtggtaggt

SEQ ID NO: 3777832 - DNA, 25 bp, Homo sapien
tgagcacctcgtagccttcatgctg

SEQ ID NO: 3777833 - DNA, 25 bp, Homo sapien
tcgtagtggtttccgaggttggtga

SEQ ID NO: 3777834 - DNA, 25 bp, Homo sapien
gtgccgtcccctccgcgcatcagga

SEQ ID NO: 3777835 - DNA, 25 bp, Homo sapien
ctgatggccccggccgcgttcaggc

SEQ ID NO: 3777836 - DNA, 25 bp, Homo sapien
aggccttggcggcccggctcgccct

SEQ ID NO: 3777837 - DNA, 25 bp, Homo sapien
tggcggcccggctcgcccttctcgc

SEQ ID NO: 3777838 - DNA, 25 bp, Homo sapien
cttggcggcccggctcgcccttctc

SEQ ID NO: 3777839 - DNA, 25 bp, Homo sapien
catggggccgggtggcccgggctct

SEQ ID NO: 3777840 - DNA, 25 bp, Homo sapien
gcggtcgggcgtggcagcggtgctg

SEQ ID NO: 3777841 - DNA, 25 bp, Homo sapien
gcctgccggcctcgcctttggggcc

SEQ ID NO: 3777842 - DNA, 25 bp, Homo sapien
atgaggccgcggtcgggcgtggcag

SEQ ID NO: 3777843 - DNA, 25 bp, Homo sapien
gcagggactgcatgaggccgcggtc

SEQ ID NO: 3777844 - DNA, 25 bp, Homo sapien
gcggcaggtgcccagcatctcgtag

SEQ ID NO: 3777845 - DNA, 25 bp, Homo sapien
ggtgcccagcatctcgtagtgcgcc

SEQ ID NO: 3777846 - DNA, 25 bp, Homo sapien
tgcccagcatctcgtagtgcgccga

SEQ ID NO: 3777847 - DNA, 25 bp, Homo sapien
caggtgcccagcatctcgtagtgcg

SEQ ID NO: 3777848 - DNA, 25 bp, Homo sapien
caccagcaccgggatgaggatcacc

SEQ ID NO: 3777849 - DNA, 25 bp, Homo sapien
gccggccgagctcaccagcaccggg

SEQ ID NO: 3777850 - DNA, 25 bp, Homo sapien
accagcaccgggatgaggatcacca

SEQ ID NO: 3777851 - DNA, 25 bp, Homo sapien
ccgagctcaccagcaccgggatgag

SEQ ID NO: 3777852 - DNA, 25 bp, Homo sapien
agcgcggggcgatcctcttgtctgc

SEQ ID NO: 3777853 - DNA, 25 bp, Homo sapien
gggcgatcctcttgtctgcttttgg

SEQ ID NO: 3777854 - DNA, 25 bp, Homo sapien
cgcggggcgatcctcttgtctgctt

SEQ ID NO: 3777855 - DNA, 25 bp, Homo sapien
gctcagcgcggggcgatcctcttgt

SEQ ID NO: 3777856 - DNA, 25 bp, Homo sapien
ccaactcccctgggcgtgcgtgcgc

SEQ ID NO: 3777857 - DNA, 25 bp, Homo sapien
tcccctgggcgtgcgtgcgccggcc

SEQ ID NO: 3777858 - DNA, 25 bp, Homo sapien
aactcccctgggcgtgcgtgcgccg

SEQ ID NO: 3777859 - DNA, 25 bp, Homo sapien
ctgggcgtgcgtgcgccggccgctg

SEQ ID NO: 3777860 - DNA, 25 bp, Homo sapien
cgggcgcccagtgacttgagccgaa

SEQ ID NO: 3777861 - DNA, 25 bp, Homo sapien
gtgacttgagccgaagtcccgagcc

SEQ ID NO: 3777862 - DNA, 25 bp, Homo sapien
cttgagccgaagtcccgagcccggg

SEQ ID NO: 3777863 - DNA, 25 bp, Homo sapien
cgcccagtgacttgagccgaagtcc

SEQ ID NO: 3777864 - DNA, 25 bp, Homo sapien
cggcgcggccaccgggagggcagag

SEQ ID NO: 3777865 - DNA, 25 bp, Homo sapien
ccggcgcggccaccgggagggcaga

SEQ ID NO: 3777866 - DNA, 25 bp, Homo sapien
tttttgcagactgcgcctgttcgca

SEQ ID NO: 3777867 - DNA, 25 bp, Homo sapien
ggcagctcacacttttatgccgccg

SEQ ID NO: 3777868 - DNA, 25 bp, Homo sapien
tgttcgcaccaactttccgtctgaa

SEQ ID NO: 3777869 - DNA, 25 bp, Homo sapien
gccgcctgcgatcgacttttccgtt

SEQ ID NO: 3777870 - DNA, 25 bp, Homo sapien
aaacgcgcgccggagcaatttatag

SEQ ID NO: 3777871 - DNA, 25 bp, Homo sapien
aagaggaggctgacaaacgcgcgcc

SEQ ID NO: 3777872 - DNA, 25 bp, Homo sapien
ccggagcaatttataggcacccaag

SEQ ID NO: 3777873 - DNA, 25 bp, Homo sapien
caatttataggcacccaaggcacag

SEQ ID NO: 3777874 - DNA, 25 bp, Homo sapien
acagctgtgcgacagctttcagagc

SEQ ID NO: 3777875 - DNA, 25 bp, Homo sapien
tgagattctgaatactcccttgctg

SEQ ID NO: 3777876 - DNA, 25 bp, Homo sapien
gaaccaagcgatggcaggtcctgct

SEQ ID NO: 3777877 - DNA, 25 bp, Homo sapien
aagggagacagctgtgcgacagctt

SEQ ID NO: 3777878 - DNA, 25 bp, Homo sapien
tctttgctagctcctctacaatcag

SEQ ID NO: 3777879 - DNA, 25 bp, Homo sapien
aaatccccgatttccccactgccag

SEQ ID NO: 3777880 - DNA, 25 bp, Homo sapien
ctttgctagctcctctacaatcagt

SEQ ID NO: 3777881 - DNA, 25 bp, Homo sapien
tcaagggtcacacctaaatccccga

SEQ ID NO: 3777882 - DNA, 25 bp, Homo sapien
tttccagatggtagatgtgattttc

SEQ ID NO: 3777883 - DNA, 25 bp, Homo sapien
aagatgttgccccaagaacagtgag

SEQ ID NO: 3777884 - DNA, 25 bp, Homo sapien
ctcctctgccttgtaaatgaataag

SEQ ID NO: 3777885 - DNA, 25 bp, Homo sapien
tccagatggtagatgtgattttctt

SEQ ID NO: 3777886 - DNA, 25 bp, Homo sapien
ctagcagtctttcgggggataccgc

SEQ ID NO: 3777887 - DNA, 25 bp, Homo sapien
tggccctgaagttgcgtttacttaa

SEQ ID NO: 3777888 - DNA, 25 bp, Homo sapien
agttctagcagtctttcgggggata

SEQ ID NO: 3777889 - DNA, 25 bp, Homo sapien
tctttcgggggataccgccaatggc

SEQ ID NO: 3777890 - DNA, 25 bp, Homo sapien
cttctggattgcttcttaaaagtca

SEQ ID NO: 3777891 - DNA, 25 bp, Homo sapien
cttttggaggacaaaatggtgaggt

SEQ ID NO: 3777892 - DNA, 25 bp, Homo sapien
ctggattgcttcttaaaagtcacct

SEQ ID NO: 3777893 - DNA, 25 bp, Homo sapien
tggaggacaaaatggtgaggtttgc

SEQ ID NO: 3777894 - DNA, 25 bp, Homo sapien
gtccaatccagaaagccgtgatcat

SEQ ID NO: 3777895 - DNA, 25 bp, Homo sapien
tgtggaccctccagaagatgaagtc

SEQ ID NO: 3777896 - DNA, 25 bp, Homo sapien
tggaccttgtggaccctccagaaga

SEQ ID NO: 3777897 - DNA, 25 bp, Homo sapien
tccagaagatgaagtccaatccaga

SEQ ID NO: 3777898 - DNA, 25 bp, Homo sapien
gttggatcacaatcctgtgattttc

SEQ ID NO: 3777899 - DNA, 25 bp, Homo sapien
ggttggatcacaatcctgtgatttt

SEQ ID NO: 3777900 - DNA, 25 bp, Homo sapien
tggatcacaatcctgtgattttctt

SEQ ID NO: 3777901 - DNA, 25 bp, Homo sapien
ttggatcacaatcctgtgattttct

SEQ ID NO: 3777902 - DNA, 25 bp, Homo sapien
tgggcagagggtctcaatggctaca

SEQ ID NO: 3777903 - DNA, 25 bp, Homo sapien
aatttgtttttgtaggtgggcagag

SEQ ID NO: 3777904 - DNA, 25 bp, Homo sapien
taatgagggtcagacattgagtacc

SEQ ID NO: 3777905 - DNA, 25 bp, Homo sapien
tcatgaaacagacaaccgactggcc

SEQ ID NO: 3777906 - DNA, 25 bp, Homo sapien
gctataggaggataatataaacacc

SEQ ID NO: 3777907 - DNA, 25 bp, Homo sapien
gcctcagattcgagggctgtttgtt

SEQ ID NO: 3777908 - DNA, 25 bp, Homo sapien
gcaaagaagccagcctcctttcagt

SEQ ID NO: 3777909 - DNA, 25 bp, Homo sapien
caccatcgctgattctgacaataag

SEQ ID NO: 3777910 - DNA, 25 bp, Homo sapien
gatccttatggaggttgtggtccca

SEQ ID NO: 3777911 - DNA, 25 bp, Homo sapien
tcctcgttctccaggatcattggga

SEQ ID NO: 3777912 - DNA, 25 bp, Homo sapien
ttgtcccaacatgggccgatcagat

SEQ ID NO: 3777913 - DNA, 25 bp, Homo sapien
gggcgaccggtagccatgctgtcct

SEQ ID NO: 3777914 - DNA, 25 bp, Homo sapien
gatctcatggcatatttatatcttc

SEQ ID NO: 3777915 - DNA, 25 bp, Homo sapien
agaggaaaggccacaagagcctgct

SEQ ID NO: 3777916 - DNA, 25 bp, Homo sapien
aaaggccacaagagcctgctgccaa

SEQ ID NO: 3777917 - DNA, 25 bp, Homo sapien
ataaggcccacaactaccttcctat

SEQ ID NO: 3777918 - DNA, 25 bp, Homo sapien
cagctcatgtacagtgttggacagc

SEQ ID NO: 3777919 - DNA, 25 bp, Homo sapien
tctccgatcgcctattaaagcccat

SEQ ID NO: 3777920 - DNA, 25 bp, Homo sapien
ctccacggtaatgtagaagctgttc

SEQ ID NO: 3777921 - DNA, 25 bp, Homo sapien
cacatcagctcatgtacagtgttgg

SEQ ID NO: 3777922 - DNA, 25 bp, Homo sapien
gttcattaccacagcgactttggga

SEQ ID NO: 3777923 - DNA, 25 bp, Homo sapien
ctgctcttgcagaaggaacggttga

SEQ ID NO: 3777924 - DNA, 25 bp, Homo sapien
gaggccatgtcaggtcattggacag

SEQ ID NO: 3777925 - DNA, 25 bp, Homo sapien
tgtctagggcactttgtgggactct

SEQ ID NO: 3777926 - DNA, 25 bp, Homo sapien
agaggctacagaattaagagcatag

SEQ ID NO: 3777927 - DNA, 25 bp, Homo sapien
tgcagagaggctacagaattaagag

SEQ ID NO: 3777928 - DNA, 25 bp, Homo sapien
acagctacagtgctccggcttgggg

SEQ ID NO: 3777929 - DNA, 25 bp, Homo sapien
acagtgctccggcttggggttctgc

SEQ ID NO: 3777930 - DNA, 25 bp, Homo sapien
tgggccccagtacacaatcttaagg

SEQ ID NO: 3777931 - DNA, 25 bp, Homo sapien
aactgctacggcctttctggagcga

SEQ ID NO: 3777932 - DNA, 25 bp, Homo sapien
tccactgacagggatcaggcttttc

SEQ ID NO: 3777933 - DNA, 25 bp, Homo sapien
taaaagcctcatgcagacacaccgt

SEQ ID NO: 3777934 - DNA, 25 bp, Homo sapien
ctcaactgggaagccgaaaggacac

SEQ ID NO: 3777935 - DNA, 25 bp, Homo sapien
ttcaggcagaggcatacatggcacc

SEQ ID NO: 3777936 - DNA, 25 bp, Homo sapien
tgtggcctctctgattgaaatgcga

SEQ ID NO: 3777937 - DNA, 25 bp, Homo sapien
gatgcgagcagattttccgccgtga

SEQ ID NO: 3777938 - DNA, 25 bp, Homo sapien
tgagaagaaacgaactgtgatttaa

SEQ ID NO: 3777939 - DNA, 25 bp, Homo sapien
gaaaagtttatcatgtataaccaat

SEQ ID NO: 3777940 - DNA, 25 bp, Homo sapien
taaaattggataagatgattttggg

SEQ ID NO: 3777941 - DNA, 25 bp, Homo sapien
taaccaataaaattggataagatga

SEQ ID NO: 3777942 - DNA, 25 bp, Homo sapien
tgttcttttattctgagtcaataag

SEQ ID NO: 3777943 - DNA, 25 bp, Homo sapien
atcatttgtaagttaaattagcata

SEQ ID NO: 3777944 - DNA, 25 bp, Homo sapien
aatcatttgtaagttaaattagcat

SEQ ID NO: 3777945 - DNA, 25 bp, Homo sapien
aaatcatttgtaagttaaattagca

SEQ ID NO: 3777946 - DNA, 25 bp, Homo sapien
ttaggtgaatcaacagaaagagtga

SEQ ID NO: 3777947 - DNA, 25 bp, Homo sapien
gttgaataagagctttgttccctgc

SEQ ID NO: 3777948 - DNA, 25 bp, Homo sapien
cagagcccactatggaattcgcagt

SEQ ID NO: 3777949 - DNA, 25 bp, Homo sapien
ttataacaatctcccacctagcaaa

SEQ ID NO: 3777950 - DNA, 25 bp, Homo sapien
gcaagagagaatgaagtgttggaga

SEQ ID NO: 3777951 - DNA, 25 bp, Homo sapien
gctggaaggccagccgatgccaatc

SEQ ID NO: 3777952 - DNA, 25 bp, Homo sapien
caagagagaatgaagtgttggagag

SEQ ID NO: 3777953 - DNA, 25 bp, Homo sapien
gaaggccagccgatgccaatccctt

SEQ ID NO: 3777954 - DNA, 25 bp, Homo sapien
ccggctgatctttttcgatttgtca

SEQ ID NO: 3777955 - DNA, 25 bp, Homo sapien
cggctgatctttttcgatttgtcat

SEQ ID NO: 3777956 - DNA, 25 bp, Homo sapien
ttccggctgatctttttcgatttgt

SEQ ID NO: 3777957 - DNA, 25 bp, Homo sapien
ggcctgcatgtgtctgccgtagagg

SEQ ID NO: 3777958 - DNA, 25 bp, Homo sapien
cacagagcctgacgtccctgtacca

SEQ ID NO: 3777959 - DNA, 25 bp, Homo sapien
agagcctgacgtccctgtaccaggt

SEQ ID NO: 3777960 - DNA, 25 bp, Homo sapien
agcctgacgtccctgtaccaggtgg

SEQ ID NO: 3777961 - DNA, 25 bp, Homo sapien
tccacagcccgcagttgctgtgaat

SEQ ID NO: 3777962 - DNA, 25 bp, Homo sapien
ggtacaagcaggttccatcggcggt

SEQ ID NO: 3777963 - DNA, 25 bp, Homo sapien
cacggagtgtagaacacagggttca

SEQ ID NO: 3777964 - DNA, 25 bp, Homo sapien
agacagacctacgagccggagcgtg

SEQ ID NO: 3777965 - DNA, 25 bp, Homo sapien
tattccagtcttccaagtgttgcct

SEQ ID NO: 3777966 - DNA, 25 bp, Homo sapien
ttaggaagcttctctgacgcaggct

SEQ ID NO: 3777967 - DNA, 25 bp, Homo sapien
ttctctgacgcaggctaccagggcc

SEQ ID NO: 3777968 - DNA, 25 bp, Homo sapien
gtgctgcccggaatctgcactgcca

SEQ ID NO: 3777969 - DNA, 25 bp, Homo sapien
tctgggaaagcttcggcgggcactg

SEQ ID NO: 3777970 - DNA, 25 bp, Homo sapien
acactttggctatgaatccccaaaa

SEQ ID NO: 3777971 - DNA, 25 bp, Homo sapien
taatgattgtctccgagcagctgct

SEQ ID NO: 3777972 - DNA, 25 bp, Homo sapien
ataactttaatgattgtctccgagc

SEQ ID NO: 3777973 - DNA, 25 bp, Homo sapien
ttggctatgaatccccaaaaggcag

SEQ ID NO: 3777974 - DNA, 25 bp, Homo sapien
tcctgtatgatgaataacgattgag

SEQ ID NO: 3777975 - DNA, 25 bp, Homo sapien
cagacagtcctgtatgatgaataac

SEQ ID NO: 3777976 - DNA, 25 bp, Homo sapien
tgtgtctgccaccagacagtcctgt

SEQ ID NO: 3777977 - DNA, 25 bp, Homo sapien
ctaaggggaaatttctgtgtctgcc

SEQ ID NO: 3777978 - DNA, 25 bp, Homo sapien
gattctggaagagtccgtagagtcc

SEQ ID NO: 3777979 - DNA, 25 bp, Homo sapien
tgtaccaagccacagataaggccag

SEQ ID NO: 3777980 - DNA, 25 bp, Homo sapien
ttcaagtttggattggtctcggtca

SEQ ID NO: 3777981 - DNA, 25 bp, Homo sapien
tgccaagtgacagcacatggtaggc

SEQ ID NO: 3777982 - DNA, 25 bp, Homo sapien
tctttgcttccgcacaaggacaggg

SEQ ID NO: 3777983 - DNA, 25 bp, Homo sapien
ttctcggagatggtaatggatgccc

SEQ ID NO: 3777984 - DNA, 25 bp, Homo sapien
tcgttttggatgagatgagactgtg

SEQ ID NO: 3777985 - DNA, 25 bp, Homo sapien
ccagaggctagcatatacagaggct

SEQ ID NO: 3777986 - DNA, 25 bp, Homo sapien
tctctccagcagaatcaaacccttc

SEQ ID NO: 3777987 - DNA, 25 bp, Homo sapien
atgttcccattggtccccgcacaca

SEQ ID NO: 3777988 - DNA, 25 bp, Homo sapien
tttgccccgatcaagtcccttctct

SEQ ID NO: 3777989 - DNA, 25 bp, Homo sapien
tctgactcttttgccccgatcaagt

SEQ ID NO: 3777990 - DNA, 25 bp, Homo sapien
tcagctgccccggaggttatgcctc

SEQ ID NO: 3777991 - DNA, 25 bp, Homo sapien
tttcctataatcttgttcagctgcc

SEQ ID NO: 3777992 - DNA, 25 bp, Homo sapien
tattcttccagagtagacatctgtg

SEQ ID NO: 3777993 - DNA, 25 bp, Homo sapien
gtttgtttgcatagacagacttcag

SEQ ID NO: 3777994 - DNA, 25 bp, Homo sapien
caatgtgtgtgttgcagaccacttt

SEQ ID NO: 3777995 - DNA, 25 bp, Homo sapien
ctcagttgtggcttgcatcttttca

SEQ ID NO: 3777996 - DNA, 25 bp, Homo sapien
aacttattaatggtatcctttgata

SEQ ID NO: 3777997 - DNA, 25 bp, Homo sapien
attaatctttcctttacaatctgtg

SEQ ID NO: 3777998 - DNA, 25 bp, Homo sapien
ggattccaatgttctagcgttctga

SEQ ID NO: 3777999 - DNA, 25 bp, Homo sapien
taaagttcacgctacctgttgtgcg

SEQ ID NO: 3778000 - DNA, 25 bp, Homo sapien
atattttgtgagcagaggccctgac

SEQ ID NO: 3778001 - DNA, 25 bp, Homo sapien
tctccatgggactcacaaacttttg

SEQ ID NO: 3778002 - DNA, 25 bp, Homo sapien
ccatgacctggcaagtagcgtatac

SEQ ID NO: 3778003 - DNA, 25 bp, Homo sapien
gcattgctattgagacagtcctggt

SEQ ID NO: 3778004 - DNA, 25 bp, Homo sapien
gaaggctctcgttctgtcactcagg

SEQ ID NO: 3778005 - DNA, 25 bp, Homo sapien
ttagttgaccatacaagtgggcagg

SEQ ID NO: 3778006 - DNA, 25 bp, Homo sapien
caaccagatctgtatgcgccatgag

SEQ ID NO: 3778007 - DNA, 25 bp, Homo sapien
cctacgtgctcctgtacaccaggag

SEQ ID NO: 3778008 - DNA, 25 bp, Homo sapien
catcctgttctaaacaaagggccct

SEQ ID NO: 3778009 - DNA, 25 bp, Homo sapien
cctggcagacatggttaggatcgtt

SEQ ID NO: 3778010 - DNA, 25 bp, Homo sapien
tgatcagggtagactcccaaaggaa

SEQ ID NO: 3778011 - DNA, 25 bp, Homo sapien
cagtggttgagaagatcctgtgagc

SEQ ID NO: 3778012 - DNA, 25 bp, Homo sapien
actggtagactaggactgagcttgg

SEQ ID NO: 3778013 - DNA, 25 bp, Homo sapien
tattacctagctagatcgtcttggg

SEQ ID NO: 3778014 - DNA, 25 bp, Homo sapien
catggaaaatgagacaacgttcttt

SEQ ID NO: 3778015 - DNA, 25 bp, Homo sapien
cttaaacgatgactgtccgttttct

SEQ ID NO: 3778016 - DNA, 25 bp, Homo sapien
gatgactgtccgttttctcgtctga

SEQ ID NO: 3778017 - DNA, 25 bp, Homo sapien
tgtccgttttctcgtctgaaagcag

SEQ ID NO: 3778018 - DNA, 25 bp, Homo sapien
tgaattctgtaaagaattcaccagg

SEQ ID NO: 3778019 - DNA, 25 bp, Homo sapien
attctgtaaagaattcaccagggcc

SEQ ID NO: 3778020 - DNA, 25 bp, Homo sapien
gatgaattctgtaaagaattcacca

SEQ ID NO: 3778021 - DNA, 25 bp, Homo sapien
ggagatgaattctgtaaagaattca

SEQ ID NO: 3778022 - DNA, 25 bp, Homo sapien
tgtaggaatccgaagcgcatttcca

SEQ ID NO: 3778023 - DNA, 25 bp, Homo sapien
ggaatccgaagcgcatttccatcct

SEQ ID NO: 3778024 - DNA, 25 bp, Homo sapien
taggaatccgaagcgcatttccatc

SEQ ID NO: 3778025 - DNA, 25 bp, Homo sapien
gtaggaatccgaagcgcatttccat

SEQ ID NO: 3778026 - DNA, 25 bp, Homo sapien
taagtctgaagaatcgaaactgtca

SEQ ID NO: 3778027 - DNA, 25 bp, Homo sapien
gaattcgtgtgtaagaataagttac

SEQ ID NO: 3778028 - DNA, 25 bp, Homo sapien
gactacactgattaataagtctgaa

SEQ ID NO: 3778029 - DNA, 25 bp, Homo sapien
ggtgctgactacactgattaataag

SEQ ID NO: 3778030 - DNA, 25 bp, Homo sapien
ccgtaacaatttgtattcagggtca

SEQ ID NO: 3778031 - DNA, 25 bp, Homo sapien
caaacatccattagatattccataa

SEQ ID NO: 3778032 - DNA, 25 bp, Homo sapien
tgccaaacatccattagatattcca

SEQ ID NO: 3778033 - DNA, 25 bp, Homo sapien
aatttgtattcagggtcatcattgt

SEQ ID NO: 3778034 - DNA, 25 bp, Homo sapien
tgtagtgcaaggttcaggataaatc

SEQ ID NO: 3778035 - DNA, 25 bp, Homo sapien
aatgcaggcttgatagtcaacaatc

SEQ ID NO: 3778036 - DNA, 25 bp, Homo sapien
gagtgctggaggattaaccacatta

SEQ ID NO: 3778037 - DNA, 25 bp, Homo sapien
ttttctcactggtcaaacctgagcc

SEQ ID NO: 3778038 - DNA, 25 bp, Homo sapien
cctgtgagtgatgccatgctggaaa

SEQ ID NO: 3778039 - DNA, 25 bp, Homo sapien
taaaatggcttgcagttggtatcca

SEQ ID NO: 3778040 - DNA, 25 bp, Homo sapien
aaatgaggctttaggactgccatgc

SEQ ID NO: 3778041 - DNA, 25 bp, Homo sapien
cagttttcatgatgacgcctgtttg

SEQ ID NO: 3778042 - DNA, 25 bp, Homo sapien
tgttaaccggcaactcagtgacatc

SEQ ID NO: 3778043 - DNA, 25 bp, Homo sapien
taaccggcaactcagtgacatcagc

SEQ ID NO: 3778044 - DNA, 25 bp, Homo sapien
catgttaaccggcaactcagtgaca

SEQ ID NO: 3778045 - DNA, 25 bp, Homo sapien
tcatgttaaccggcaactcagtgac

SEQ ID NO: 3778046 - DNA, 25 bp, Homo sapien
ggcaatggctctccggtgcttactg

SEQ ID NO: 3778047 - DNA, 25 bp, Homo sapien
atggaaccagctggtccccgtggaa

SEQ ID NO: 3778048 - DNA, 25 bp, Homo sapien
ggtgacgacagctgctacaggagaa

SEQ ID NO: 3778049 - DNA, 25 bp, Homo sapien
atgtaccttgtgacctcccagcaga

SEQ ID NO: 3778050 - DNA, 25 bp, Homo sapien
tcctctaattccagatggctaggag

SEQ ID NO: 3778051 - DNA, 25 bp, Homo sapien
tcaagataccatacaaaccaagctc

SEQ ID NO: 3778052 - DNA, 25 bp, Homo sapien
tagagccccatctaaaactcacgat

SEQ ID NO: 3778053 - DNA, 25 bp, Homo sapien
tttctaagggtgagctacattcgta

SEQ ID NO: 3778054 - DNA, 25 bp, Homo sapien
tgactttaagctggcagattccgct

SEQ ID NO: 3778055 - DNA, 25 bp, Homo sapien
caggaatcgtgaggtttttgggaca

SEQ ID NO: 3778056 - DNA, 25 bp, Homo sapien
tacatataacaacagaagcacgtgg

SEQ ID NO: 3778057 - DNA, 25 bp, Homo sapien
cctttcacctggagtgaggacttga

SEQ ID NO: 3778058 - DNA, 25 bp, Homo sapien
taactgccatcaataggatactgtc

SEQ ID NO: 3778059 - DNA, 25 bp, Homo sapien
taaaatgctaagtgctaactgccat

SEQ ID NO: 3778060 - DNA, 25 bp, Homo sapien
cacctggccgacatgcagtttttaa

SEQ ID NO: 3778061 - DNA, 25 bp, Homo sapien
caagcaatcctctagtctcgacttc

SEQ ID NO: 3778062 - DNA, 25 bp, Homo sapien
gtctcagaacggatatactcaaaaa

SEQ ID NO: 3778063 - DNA, 25 bp, Homo sapien
ttgtatgtctcagaacggatatact

SEQ ID NO: 3778064 - DNA, 25 bp, Homo sapien
gggtcacccagggattgttctctgc

SEQ ID NO: 3778065 - DNA, 25 bp, Homo sapien
aaacatgggacacgccaagctggaa

SEQ ID NO: 3778066 - DNA, 25 bp, Homo sapien
tgcttctggccagttaaatccaagt

SEQ ID NO: 3778067 - DNA, 25 bp, Homo sapien
catgagaacaacgtggagcagggaa

SEQ ID NO: 3778068 - DNA, 25 bp, Homo sapien
ggcacagagcagcatttctcaccac

SEQ ID NO: 3778069 - DNA, 25 bp, Homo sapien
gggaagtcagctacatttgggcaca

SEQ ID NO: 3778070 - DNA, 25 bp, Homo sapien
ccgggaaggatgacacacacaagtc

SEQ ID NO: 3778071 - DNA, 25 bp, Homo sapien
cctctagtacagcaagctttgccat

SEQ ID NO: 3778072 - DNA, 25 bp, Homo sapien
tatttgggagggagggctgctactg

SEQ ID NO: 3778073 - DNA, 25 bp, Homo sapien
ttgggagggagggctgctactggac

SEQ ID NO: 3778074 - DNA, 25 bp, Homo sapien
ttatttgggagggagggctgctact

SEQ ID NO: 3778075 - DNA, 25 bp, Homo sapien
atttgggagggagggctgctactgg

SEQ ID NO: 3778076 - DNA, 25 bp, Homo sapien
tctgtatgcgggaacgaggctgcca

SEQ ID NO: 3778077 - DNA, 25 bp, Homo sapien
gacttcagcaccgtacagatctgcc

SEQ ID NO: 3778078 - DNA, 25 bp, Homo sapien
tgccacaggaccaacagttggacca

SEQ ID NO: 3778079 - DNA, 25 bp, Homo sapien
cagctatggatgcaccgcgcttggt

SEQ ID NO: 3778080 - DNA, 25 bp, Homo sapien
gaacgggtctagatagggcatcaga

SEQ ID NO: 3778081 - DNA, 25 bp, Homo sapien
gactacgatgttctgtgggaggctt

SEQ ID NO: 3778082 - DNA, 25 bp, Homo sapien
ggcatcagagagacgccttcacagg

SEQ ID NO: 3778083 - DNA, 25 bp, Homo sapien
ccttcacaggcaggctaagggaggt

SEQ ID NO: 3778084 - DNA, 25 bp, Homo sapien
catggctgatcctaagcagttctga

SEQ ID NO: 3778085 - DNA, 25 bp, Homo sapien
ttcacaatgtacatggctgatccta

SEQ ID NO: 3778086 - DNA, 25 bp, Homo sapien
ttctgagagccctcacatatttctg

SEQ ID NO: 3778087 - DNA, 25 bp, Homo sapien
gcagttctgagagccctcacatatt

SEQ ID NO: 3778088 - DNA, 25 bp, Homo sapien
caggaggcactgataagcgtatttc

SEQ ID NO: 3778089 - DNA, 25 bp, Homo sapien
gatgcctgtacaactaaagagccct

SEQ ID NO: 3778090 - DNA, 25 bp, Homo sapien
cattacttagaaaaggagtctgacc

SEQ ID NO: 3778091 - DNA, 25 bp, Homo sapien
catgatatgagcaccaaaagaccac

SEQ ID NO: 3778092 - DNA, 25 bp, Homo sapien
tgggccctggcttgactccaagcat

SEQ ID NO: 3778093 - DNA, 25 bp, Homo sapien
tcaaagagatggtcacaagggcaaa

SEQ ID NO: 3778094 - DNA, 25 bp, Homo sapien
tctaccacaattttggacgcgggtg

SEQ ID NO: 3778095 - DNA, 25 bp, Homo sapien
gacgcgggtgaggatgattacatca

SEQ ID NO: 3778096 - DNA, 25 bp, Homo sapien
tactactcttaaggaatgcaacacc

SEQ ID NO: 3778097 - DNA, 25 bp, Homo sapien
tgttcaacattttctcatgcgctag

SEQ ID NO: 3778098 - DNA, 25 bp, Homo sapien
actggattcatctgttagggctgcc

SEQ ID NO: 3778099 - DNA, 25 bp, Homo sapien
tccaacagaaatgcacatagtcact

SEQ ID NO: 3778100 - DNA, 25 bp, Homo sapien
ttccccagcgatttgttactcatga

SEQ ID NO: 3778101 - DNA, 25 bp, Homo sapien
ggtccaactgcttccaatagaacac

SEQ ID NO: 3778102 - DNA, 25 bp, Homo sapien
tctgtacagagcaacagtcattgcc

SEQ ID NO: 3778103 - DNA, 25 bp, Homo sapien
aatacaagggtgacagcatgaaagc

SEQ ID NO: 3778104 - DNA, 25 bp, Homo sapien
cacacatatatatcatgtgatatat

SEQ ID NO: 3778105 - DNA, 25 bp, Homo sapien
atatgcatatagacacaaacataca

SEQ ID NO: 3778106 - DNA, 25 bp, Homo sapien
tatatgcatatagacacaaacatac

SEQ ID NO: 3778107 - DNA, 25 bp, Homo sapien
acatatatgcatatagacacaaaca

SEQ ID NO: 3778108 - DNA, 25 bp, Homo sapien
caactgtgggtaccattttggtgaa

SEQ ID NO: 3778109 - DNA, 25 bp, Homo sapien
tacgatttgctgtattagttggcac

SEQ ID NO: 3778110 - DNA, 25 bp, Homo sapien
cacataatttgagctgggagagcaa

SEQ ID NO: 3778111 - DNA, 25 bp, Homo sapien
gggagagcaaagtccatcgcaatgt

SEQ ID NO: 3778112 - DNA, 25 bp, Homo sapien
tcagggctaacacaggacagtggac

SEQ ID NO: 3778113 - DNA, 25 bp, Homo sapien
tcttctgagttaatcagcctccaag

SEQ ID NO: 3778114 - DNA, 25 bp, Homo sapien
gaagaatgggaagcttcagatggct

SEQ ID NO: 3778115 - DNA, 25 bp, Homo sapien
cttcagatggcttggcaggtgtcag

SEQ ID NO: 3778116 - DNA, 25 bp, Homo sapien
aaccctgctaacagcacgtggcaga

SEQ ID NO: 3778117 - DNA, 25 bp, Homo sapien
gggaatcacgaacagtgactttact

SEQ ID NO: 3778118 - DNA, 25 bp, Homo sapien
agcagtgggtatccccagagaaacc

SEQ ID NO: 3778119 - DNA, 25 bp, Homo sapien
tttactgtccgagaaggaggtgaca

SEQ ID NO: 3778120 - DNA, 25 bp, Homo sapien
aagagtttcaaggaactaattaatg

SEQ ID NO: 3778121 - DNA, 25 bp, Homo sapien
caagatgcctaccacaagggaacag

SEQ ID NO: 3778122 - DNA, 25 bp, Homo sapien
gtgcattcctcacaacacaggctgc

SEQ ID NO: 3778123 - DNA, 25 bp, Homo sapien
caggctgccagttggtggtttttgc

SEQ ID NO: 3778124 - DNA, 25 bp, Homo sapien
gtcattgacttcagagtggactcac

SEQ ID NO: 3778125 - DNA, 25 bp, Homo sapien
caggagtcattgacttcagagtgga

SEQ ID NO: 3778126 - DNA, 25 bp, Homo sapien
tagtgacaggagtcattgacttcag

SEQ ID NO: 3778127 - DNA, 25 bp, Homo sapien
gacaggagtcattgacttcagagtg

SEQ ID NO: 3778128 - DNA, 25 bp, Homo sapien
ggaagtgaggcagaaccctgcagac

SEQ ID NO: 3778129 - DNA, 25 bp, Homo sapien
agtgaggcagaaccctgcagaccag

SEQ ID NO: 3778130 - DNA, 25 bp, Homo sapien
ttcatcatacccagacccaaatccc

SEQ ID NO: 3778131 - DNA, 25 bp, Homo sapien
catcatacccagacccaaatcccag

SEQ ID NO: 3778132 - DNA, 25 bp, Homo sapien
tgtacctgggcttatgtcttagtcc

SEQ ID NO: 3778133 - DNA, 25 bp, Homo sapien
cagacttggaaagtgcttgtgtacc

SEQ ID NO: 3778134 - DNA, 25 bp, Homo sapien
ggctctgggcctaatcaagtgaatt

SEQ ID NO: 3778135 - DNA, 25 bp, Homo sapien
gtttccttgtacactggctctgggc

SEQ ID NO: 3778136 - DNA, 25 bp, Homo sapien
gaagccacccggaagagaagtgcag

SEQ ID NO: 3778137 - DNA, 25 bp, Homo sapien
catgcacgtgagctgtaccttgtac

SEQ ID NO: 3778138 - DNA, 25 bp, Homo sapien
tgagtgagaccatcctagggtaccc

SEQ ID NO: 3778139 - DNA, 25 bp, Homo sapien
cagtgtcttggacaacggtctgcca

SEQ ID NO: 3778140 - DNA, 25 bp, Homo sapien
taagccgatattgttgggacagggc

SEQ ID NO: 3778141 - DNA, 25 bp, Homo sapien
ccaactgggctaaatgaggaagtac

SEQ ID NO: 3778142 - DNA, 25 bp, Homo sapien
gggccaatggacttataaactctga

SEQ ID NO: 3778143 - DNA, 25 bp, Homo sapien
tcatgggaagtacacaaagggacag

SEQ ID NO: 3778144 - DNA, 25 bp, Homo sapien
gcactaaagggcacatgcgtggata

SEQ ID NO: 3778145 - DNA, 25 bp, Homo sapien
cagtcagtggatggaacctagaata

SEQ ID NO: 3778146 - DNA, 25 bp, Homo sapien
gaatgacatctataccagtcagtgg

SEQ ID NO: 3778147 - DNA, 25 bp, Homo sapien
tacatcctatgatctgaaagagagc

SEQ ID NO: 3778148 - DNA, 25 bp, Homo sapien
aactggattctgtctataataagcc

SEQ ID NO: 3778149 - DNA, 25 bp, Homo sapien
cacattgatgggtataccattggga

SEQ ID NO: 3778150 - DNA, 25 bp, Homo sapien
taggcaagtcacaatctcccttggt

SEQ ID NO: 3778151 - DNA, 25 bp, Homo sapien
tgtcaataacgtggccttaggcaag

SEQ ID NO: 3778152 - DNA, 25 bp, Homo sapien
taggaaccatagtgcttcaggctca

SEQ ID NO: 3778153 - DNA, 25 bp, Homo sapien
tctgtggtgtcaaccgaggtggcca

SEQ ID NO: 3778154 - DNA, 25 bp, Homo sapien
cctgtcctggccgagttaactgcat

SEQ ID NO: 3778155 - DNA, 25 bp, Homo sapien
ggcaggctccggaggatatttcaat

SEQ ID NO: 3778156 - DNA, 25 bp, Homo sapien
ccttctggaggcttcgggattgcag

SEQ ID NO: 3778157 - DNA, 25 bp, Homo sapien
tagagtgcacaagtccaaaaactgg

SEQ ID NO: 3778158 - DNA, 25 bp, Homo sapien
gacatccggctgcatgcctttccag

SEQ ID NO: 3778159 - DNA, 25 bp, Homo sapien
tcgtggccccttccatgagtgactc

SEQ ID NO: 3778160 - DNA, 25 bp, Homo sapien
ccagatggtcacctcaggcgttggg

SEQ ID NO: 3778161 - DNA, 25 bp, Homo sapien
tccagatggtcacctcaggcgttgg

SEQ ID NO: 3778162 - DNA, 25 bp, Homo sapien
aaaaaccaaagacgatcccatcctg

SEQ ID NO: 3778163 - DNA, 25 bp, Homo sapien
gacgatcccatcctggggcatgttt

SEQ ID NO: 3778164 - DNA, 25 bp, Homo sapien
tagaagaattcacctcacacatgga

SEQ ID NO: 3778165 - DNA, 25 bp, Homo sapien
taatatcctacgttgcctcactgct

SEQ ID NO: 3778166 - DNA, 25 bp, Homo sapien
gaggcattaagtgagctttacacca

SEQ ID NO: 3778167 - DNA, 25 bp, Homo sapien
caagcatacatgtcagaggcattaa

SEQ ID NO: 3778168 - DNA, 25 bp, Homo sapien
gcccgagatctctcctttaacaaga

SEQ ID NO: 3778169 - DNA, 25 bp, Homo sapien
gtgttgagttgctcctcagccctta

SEQ ID NO: 3778170 - DNA, 25 bp, Homo sapien
caagagagctaagggaaatggcaag

SEQ ID NO: 3778171 - DNA, 25 bp, Homo sapien
caacacgtgactacttgcaactcag

SEQ ID NO: 3778172 - DNA, 25 bp, Homo sapien
cctggaaataggaacgacctggcag

SEQ ID NO: 3778173 - DNA, 25 bp, Homo sapien
ttcccagcaagaacatatttaacaa

SEQ ID NO: 3778174 - DNA, 25 bp, Homo sapien
caggattaggattcagcggccagga

SEQ ID NO: 3778175 - DNA, 25 bp, Homo sapien
ggccaggagtaggatccattcccag

SEQ ID NO: 3778176 - DNA, 25 bp, Homo sapien
gtttctaagacaggggacactacag

SEQ ID NO: 3778177 - DNA, 25 bp, Homo sapien
atcagcagtttctaagacaggggac

SEQ ID NO: 3778178 - DNA, 25 bp, Homo sapien
cagtttctaagacaggggacactac

SEQ ID NO: 3778179 - DNA, 25 bp, Homo sapien
cagcagtttctaagacaggggacac

SEQ ID NO: 3778180 - DNA, 25 bp, Homo sapien
tgttattcatgaaacccagaactaa

SEQ ID NO: 3778181 - DNA, 25 bp, Homo sapien
gctacattaggataattgttattca

SEQ ID NO: 3778182 - DNA, 25 bp, Homo sapien
aggttgttcagaattgctacattag

SEQ ID NO: 3778183 - DNA, 25 bp, Homo sapien
cagaattgctacattaggataattg

SEQ ID NO: 3778184 - DNA, 25 bp, Homo sapien
tccccgatttccttaggcagcgaga

SEQ ID NO: 3778185 - DNA, 25 bp, Homo sapien
agcgagatcaggtcgttatccctaa

SEQ ID NO: 3778186 - DNA, 25 bp, Homo sapien
gctccccgatttccttaggcagcga

SEQ ID NO: 3778187 - DNA, 25 bp, Homo sapien
tcaggtcgttatccctaaggctgag

SEQ ID NO: 3778188 - DNA, 25 bp, Homo sapien
gaaactctcatcctctatgtcctct

SEQ ID NO: 3778189 - DNA, 25 bp, Homo sapien
tcttctactaaagctcaatcctttc

SEQ ID NO: 3778190 - DNA, 25 bp, Homo sapien
agaaaacaagttgtcaacatattta

SEQ ID NO: 3778191 - DNA, 25 bp, Homo sapien
ccttactcctgctcaaattgacttg

SEQ ID NO: 3778192 - DNA, 25 bp, Homo sapien
caaaatcgttgtcacttagatagag

SEQ ID NO: 3778193 - DNA, 25 bp, Homo sapien
tctggcggcaggatttcaaaatcgt

SEQ ID NO: 3778194 - DNA, 25 bp, Homo sapien
cacttagatagagtgcacgcagggt

SEQ ID NO: 3778195 - DNA, 25 bp, Homo sapien
tgtgagcttcccaatatctggcggc

SEQ ID NO: 3778196 - DNA, 25 bp, Homo sapien
cctagggctcccaataataacaagc

SEQ ID NO: 3778197 - DNA, 25 bp, Homo sapien
caatacgagggagtcagctttgatt

SEQ ID NO: 3778198 - DNA, 25 bp, Homo sapien
ccctggcttggtgaaaagcctttga

SEQ ID NO: 3778199 - DNA, 25 bp, Homo sapien
agctttgattaataaccctggcttg

SEQ ID NO: 3778200 - DNA, 25 bp, Homo sapien
ccaggaagagaattttcgctcaagt

SEQ ID NO: 3778201 - DNA, 25 bp, Homo sapien
ttttcgctcaagttgttgtacgtca

SEQ ID NO: 3778202 - DNA, 25 bp, Homo sapien
gagaattttcgctcaagttgttgta

SEQ ID NO: 3778203 - DNA, 25 bp, Homo sapien
tcgctcaagttgttgtacgtcaagt

SEQ ID NO: 3778204 - DNA, 25 bp, Homo sapien
tgaaggcgacatgtgtctggaaaca

SEQ ID NO: 3778205 - DNA, 25 bp, Homo sapien
tggaaacaccccataccgcacggag

SEQ ID NO: 3778206 - DNA, 25 bp, Homo sapien
cactaggtgcttctgtctttaaacg

SEQ ID NO: 3778207 - DNA, 25 bp, Homo sapien
gacccttgggctctgatacaaggat

SEQ ID NO: 3778208 - DNA, 25 bp, Homo sapien
ctctttcatacggaaatatgaccat

SEQ ID NO: 3778209 - DNA, 25 bp, Homo sapien
cttctccatactctttcatacggaa

SEQ ID NO: 3778210 - DNA, 25 bp, Homo sapien
ccatactctttcatacggaaatatg

SEQ ID NO: 3778211 - DNA, 25 bp, Homo sapien
tactctttcatacggaaatatgacc

SEQ ID NO: 3778212 - DNA, 25 bp, Homo sapien
agttctgcgatgttcggtggcacca

SEQ ID NO: 3778213 - DNA, 25 bp, Homo sapien
cttcagttctgcgatgttcggtggc

SEQ ID NO: 3778214 - DNA, 25 bp, Homo sapien
cagttctgcgatgttcggtggcacc

SEQ ID NO: 3778215 - DNA, 25 bp, Homo sapien
tcagttctgcgatgttcggtggcac

SEQ ID NO: 3778216 - DNA, 25 bp, Homo sapien
gagtgtgaatctgggaatggaactc

SEQ ID NO: 3778217 - DNA, 25 bp, Homo sapien
tgctgagtgtgaatctgggaatgga

SEQ ID NO: 3778218 - DNA, 25 bp, Homo sapien
ctgagtgtgaatctgggaatggaac

SEQ ID NO: 3778219 - DNA, 25 bp, Homo sapien
ctatggaaacaaaaatgctgagtgt

SEQ ID NO: 3778220 - DNA, 25 bp, Homo sapien
gattagcaagagatcgatacactgt

SEQ ID NO: 3778221 - DNA, 25 bp, Homo sapien
tcccttccgggatgatgtacattga

SEQ ID NO: 3778222 - DNA, 25 bp, Homo sapien
gatgaaatattcaccctccctagtt

SEQ ID NO: 3778223 - DNA, 25 bp, Homo sapien
cacacaaaggttacatcagattagc

SEQ ID NO: 3778224 - DNA, 25 bp, Homo sapien
gtgcctgaagggttcattaacttct

SEQ ID NO: 3778225 - DNA, 25 bp, Homo sapien
gaatgtgattcaagagttttgtcca

SEQ ID NO: 3778226 - DNA, 25 bp, Homo sapien
gttttgtccatctgacgtgccagcc

SEQ ID NO: 3778227 - DNA, 25 bp, Homo sapien
ctggaaggttccacaagcagcccaa

SEQ ID NO: 3778228 - DNA, 25 bp, Homo sapien
ccttcgaaataacccaactatggct

SEQ ID NO: 3778229 - DNA, 25 bp, Homo sapien
cttcgaaataacccaactatggctt

SEQ ID NO: 3778230 - DNA, 25 bp, Homo sapien
ggaattctcccgttcttcgactgga

SEQ ID NO: 3778231 - DNA, 25 bp, Homo sapien
tcgtccatggagctcctacactgac

SEQ ID NO: 3778232 - DNA, 25 bp, Homo sapien
cttcgactggaaggagtaaggatcc

SEQ ID NO: 3778233 - DNA, 25 bp, Homo sapien
tccagagccacaggaacgcttcgtc

SEQ ID NO: 3778234 - DNA, 25 bp, Homo sapien
gcctgccaccgttctgaagttctca

SEQ ID NO: 3778235 - DNA, 25 bp, Homo sapien
agcctgccaccgttctgaagttctc

SEQ ID NO: 3778236 - DNA, 25 bp, Homo sapien
cagcctgccaccgttctgaagttct

SEQ ID NO: 3778237 - DNA, 25 bp, Homo sapien
ttaatttcatacaagccatgcacaa

SEQ ID NO: 3778238 - DNA, 25 bp, Homo sapien
tggtttaatttcatacaagccatgc

SEQ ID NO: 3778239 - DNA, 25 bp, Homo sapien
gtttaatttcatacaagccatgcac

SEQ ID NO: 3778240 - DNA, 25 bp, Homo sapien
tgcacaagaacttttgcataaagca

SEQ ID NO: 3778241 - DNA, 25 bp, Homo sapien
tattctccccaacacaatggaattg

SEQ ID NO: 3778242 - DNA, 25 bp, Homo sapien
tcacttaaaaacgtaatgcccagag

SEQ ID NO: 3778243 - DNA, 25 bp, Homo sapien
gaattgagcagtatacgaatcagca

SEQ ID NO: 3778244 - DNA, 25 bp, Homo sapien
tctttcaacgtaaggatattggagg

SEQ ID NO: 3778245 - DNA, 25 bp, Homo sapien
ggccggagagcctgcacaaaattta

SEQ ID NO: 3778246 - DNA, 25 bp, Homo sapien
cggagagcctgcacaaaatttattc

SEQ ID NO: 3778247 - DNA, 25 bp, Homo sapien
agcaatagcaacatgccctgtggtg

SEQ ID NO: 3778248 - DNA, 25 bp, Homo sapien
taagcagcaatagcaacatgccctg

SEQ ID NO: 3778249 - DNA, 25 bp, Homo sapien
gaaatgatccatgcttccacaaaag

SEQ ID NO: 3778250 - DNA, 25 bp, Homo sapien
tgggagcaatgaacactcggtttat

SEQ ID NO: 3778251 - DNA, 25 bp, Homo sapien
cggtttatacaggtaattactgcga

SEQ ID NO: 3778252 - DNA, 25 bp, Homo sapien
aattactgcgaagccactaagggcc

SEQ ID NO: 3778253 - DNA, 25 bp, Homo sapien
aagagtctacatgcaagagagtttg

SEQ ID NO: 3778254 - DNA, 25 bp, Homo sapien
cttcctagagcagcaaatggagagg

SEQ ID NO: 3778255 - DNA, 25 bp, Homo sapien
tacggggggacagaagatgatccat

SEQ ID NO: 3778256 - DNA, 25 bp, Homo sapien
cagggaatgccatgctagagttaaa

SEQ ID NO: 3778257 - DNA, 25 bp, Homo sapien
caaatccctcaacatgacattctgc

SEQ ID NO: 3778258 - DNA, 25 bp, Homo sapien
tgctcaatttcactggactcggaaa

SEQ ID NO: 3778259 - DNA, 25 bp, Homo sapien
ccttcacaaattcttgccacatgat

SEQ ID NO: 3778260 - DNA, 25 bp, Homo sapien
caaattcttgccacatgattagaaa

SEQ ID NO: 3778261 - DNA, 25 bp, Homo sapien
agttgtgtgatatgggataaggtaa

SEQ ID NO: 3778262 - DNA, 25 bp, Homo sapien
cagttgtgtgatatgggataaggta

SEQ ID NO: 3778263 - DNA, 25 bp, Homo sapien
tgcccctgatttggccagtatgagt

SEQ ID NO: 3778264 - DNA, 25 bp, Homo sapien
tagctgacgggttataatctatcat

SEQ ID NO: 3778265 - DNA, 25 bp, Homo sapien
tccatccaagctggcttattagtcc

SEQ ID NO: 3778266 - DNA, 25 bp, Homo sapien
tattagtcctttcgacacacgccct

SEQ ID NO: 3778267 - DNA, 25 bp, Homo sapien
gacacctggaagtttggtactgatt

SEQ ID NO: 3778268 - DNA, 25 bp, Homo sapien
tccactcgggaatggtgagttcact

SEQ ID NO: 3778269 - DNA, 25 bp, Homo sapien
cacaggaccacatggtaaagtaggt

SEQ ID NO: 3778270 - DNA, 25 bp, Homo sapien
aaaggactccaggtcgggtctgcag

SEQ ID NO: 3778271 - DNA, 25 bp, Homo sapien
aaagcccggtcaggcaaagaccaag

SEQ ID NO: 3778272 - DNA, 25 bp, Homo sapien
cgtaatcacacctggtagattttct

SEQ ID NO: 3778273 - DNA, 25 bp, Homo sapien
gaccgtaatcacacctggtagattt

SEQ ID NO: 3778274 - DNA, 25 bp, Homo sapien
ggtgccttgctgaccgtaatcacac

SEQ ID NO: 3778275 - DNA, 25 bp, Homo sapien
cgctactggtgccttgctgaccgta

SEQ ID NO: 3778276 - DNA, 25 bp, Homo sapien
atgagggcgaacaaagccaggatga

SEQ ID NO: 3778277 - DNA, 25 bp, Homo sapien
gatgagggcgaacaaagccaggatg

SEQ ID NO: 3778278 - DNA, 25 bp, Homo sapien
gcctttgctatctgcaaaggattca

SEQ ID NO: 3778279 - DNA, 25 bp, Homo sapien
agactgtgcattccgaatgaaagcc

SEQ ID NO: 3778280 - DNA, 25 bp, Homo sapien
actaaaaaggcctttgctatctgca

SEQ ID NO: 3778281 - DNA, 25 bp, Homo sapien
gtgcattccgaatgaaagccactaa

SEQ ID NO: 3778282 - DNA, 25 bp, Homo sapien
tctgcatctccgtgatgctgcttaa

SEQ ID NO: 3778283 - DNA, 25 bp, Homo sapien
gatgctgcttaaaacgcctgcccat

SEQ ID NO: 3778284 - DNA, 25 bp, Homo sapien
ctctgcatctccgtgatgctgctta

SEQ ID NO: 3778285 - DNA, 25 bp, Homo sapien
tgcatctccgtgatgctgcttaaaa

SEQ ID NO: 3778286 - DNA, 25 bp, Homo sapien
aatcactggattgttctggagcaca

SEQ ID NO: 3778287 - DNA, 25 bp, Homo sapien
aaattattattgacacctggatgga

SEQ ID NO: 3778288 - DNA, 25 bp, Homo sapien
tgacagcaattccaaccataataaa

SEQ ID NO: 3778289 - DNA, 25 bp, Homo sapien
gaacgcacagttcctagcaggtgag

SEQ ID NO: 3778290 - DNA, 25 bp, Homo sapien
taatccatacagagggcttagcaca

SEQ ID NO: 3778291 - DNA, 25 bp, Homo sapien
gaatcattagcccagacaggacagc

SEQ ID NO: 3778292 - DNA, 25 bp, Homo sapien
cttctagaacatgaccgggtggcca

SEQ ID NO: 3778293 - DNA, 25 bp, Homo sapien
caggtgtggcttcaaatctgggctc

SEQ ID NO: 3778294 - DNA, 25 bp, Homo sapien
cccaggccaagaagcggcgtgttta

SEQ ID NO: 3778295 - DNA, 25 bp, Homo sapien
atacacacaacctagaggagtgaaa

SEQ ID NO: 3778296 - DNA, 25 bp, Homo sapien
tagctggagcgagaaaaacgaaaag

SEQ ID NO: 3778297 - DNA, 25 bp, Homo sapien
caagaagcggcgtgtttaaaaacag

SEQ ID NO: 3778298 - DNA, 25 bp, Homo sapien
tgcaaacgactgagaaagagggaaa

SEQ ID NO: 3778299 - DNA, 25 bp, Homo sapien
taaaaggatttcaggtgcaaacgac

SEQ ID NO: 3778300 - DNA, 25 bp, Homo sapien
ttagcctggtgcagacggataaggt

SEQ ID NO: 3778301 - DNA, 25 bp, Homo sapien
taaggttttacacaggtggtgatgt

SEQ ID NO: 3778302 - DNA, 25 bp, Homo sapien
tgtacatcacgccaagaaacctgga

SEQ ID NO: 3778303 - DNA, 25 bp, Homo sapien
gaaacctggagcattaccgtcgata

SEQ ID NO: 3778304 - DNA, 25 bp, Homo sapien
taggctctggtccaggaagggcaac

SEQ ID NO: 3778305 - DNA, 25 bp, Homo sapien
caagatctgaacgagtaggctctgg

SEQ ID NO: 3778306 - DNA, 25 bp, Homo sapien
gaaaatccacctcaatgccatacag

SEQ ID NO: 3778307 - DNA, 25 bp, Homo sapien
tacagcagagacaaccgatgaggca

SEQ ID NO: 3778308 - DNA, 25 bp, Homo sapien
tgtgtgattctcatcgtggactctc

SEQ ID NO: 3778309 - DNA, 25 bp, Homo sapien
agtgactattaagcaaactgtggaa

SEQ ID NO: 3778310 - DNA, 25 bp, Homo sapien
cgggagagtcctgcccgagaactca

SEQ ID NO: 3778311 - DNA, 25 bp, Homo sapien
tgaattggcaaacttagaaagcctt

SEQ ID NO: 3778312 - DNA, 25 bp, Homo sapien
gggtctaaaccagtacaatcgctca

SEQ ID NO: 3778313 - DNA, 25 bp, Homo sapien
cagtacaatcgctcacagcaggacc

SEQ ID NO: 3778314 - DNA, 25 bp, Homo sapien
tggagatgccccggtcactcatgtc

SEQ ID NO: 3778315 - DNA, 25 bp, Homo sapien
cggtcactcatgtccacctcgggct

SEQ ID NO: 3778316 - DNA, 25 bp, Homo sapien
ctggttcttctcccggctctcctcc

SEQ ID NO: 3778317 - DNA, 25 bp, Homo sapien
ttctcccggctctcctccaccaact

SEQ ID NO: 3778318 - DNA, 25 bp, Homo sapien
aacaacaaagcacgtgggcgatgac

SEQ ID NO: 3778319 - DNA, 25 bp, Homo sapien
agcaagcgcagaggcggaaaggcaa

SEQ ID NO: 3778320 - DNA, 25 bp, Homo sapien
aacaacaacaaagcacgtgggcgat

SEQ ID NO: 3778321 - DNA, 25 bp, Homo sapien
ggcgatgacagcaagcgcagaggcg

SEQ ID NO: 3778322 - DNA, 25 bp, Homo sapien
gagcgggtgggcgtccgagggcgtc

SEQ ID NO: 3778323 - DNA, 25 bp, Homo sapien
gagtgggaagggttcagccccgctg

SEQ ID NO: 3778324 - DNA, 25 bp, Homo sapien
gctgcggccacgcagcgagaagcaa

SEQ ID NO: 3778325 - DNA, 25 bp, Homo sapien
ccccaagtgcaacaccgcacacact

SEQ ID NO: 3778326 - DNA, 25 bp, Homo sapien
tgcaaccacaagcttcggcagaacg

SEQ ID NO: 3778327 - DNA, 25 bp, Homo sapien
ccctaagacgatgggcgtgcaacca

SEQ ID NO: 3778328 - DNA, 25 bp, Homo sapien
tgcaacaccggcactgaacagcgaa

SEQ ID NO: 3778329 - DNA, 25 bp, Homo sapien
tgaacagcgaacacgccctgtctcg

SEQ ID NO: 3778330 - DNA, 25 bp, Homo sapien
ccagctccacgcccgaccctaccca

SEQ ID NO: 3778331 - DNA, 25 bp, Homo sapien
cagctccacgcccgaccctacccat

SEQ ID NO: 3778332 - DNA, 25 bp, Homo sapien
tcagcttattctctgtggcatcagc

SEQ ID NO: 3778333 - DNA, 25 bp, Homo sapien
tattgattctatccatggtttggtg

SEQ ID NO: 3778334 - DNA, 25 bp, Homo sapien
tgagtgaacacgagttgttacccac

SEQ ID NO: 3778335 - DNA, 25 bp, Homo sapien
gtatcaggatggcagagtgctgtcc

SEQ ID NO: 3778336 - DNA, 25 bp, Homo sapien
gaatgcggatggacgccgtgcataa

SEQ ID NO: 3778337 - DNA, 25 bp, Homo sapien
tgtcccaagttaatcggaatgcgga

SEQ ID NO: 3778338 - DNA, 25 bp, Homo sapien
gttaatcggaatgcggatggacgcc

SEQ ID NO: 3778339 - DNA, 25 bp, Homo sapien
gacgccgtgcataatcagcatgaaa

SEQ ID NO: 3778340 - DNA, 25 bp, Homo sapien
tgtcccgttattctctcatttgcta

SEQ ID NO: 3778341 - DNA, 25 bp, Homo sapien
ctagtatgtcaacagacggtcaaca

SEQ ID NO: 3778342 - DNA, 25 bp, Homo sapien
cttgtttgtcccgttattctctcat

SEQ ID NO: 3778343 - DNA, 25 bp, Homo sapien
aacagacggtcaacagaagttttag

SEQ ID NO: 3778344 - DNA, 25 bp, Homo sapien
ttgggtatgtgcctggatagccggg

SEQ ID NO: 3778345 - DNA, 25 bp, Homo sapien
gtttgggtatgtgcctggatagccg

SEQ ID NO: 3778346 - DNA, 25 bp, Homo sapien
caaggacccactcgcagtacgtgtt

SEQ ID NO: 3778347 - DNA, 25 bp, Homo sapien
cgcagtacgtgttgtttgggtatgt

SEQ ID NO: 3778348 - DNA, 25 bp, Homo sapien
tttggcagcagagttccacagtact

SEQ ID NO: 3778349 - DNA, 25 bp, Homo sapien
cagatgatttcatatccacgatcag

SEQ ID NO: 3778350 - DNA, 25 bp, Homo sapien
cttgcccagtaatggtgaattgctg

SEQ ID NO: 3778351 - DNA, 25 bp, Homo sapien
tacactatcactcttaaatcgtagg

SEQ ID NO: 3778352 - DNA, 25 bp, Homo sapien
cagcaccacgcttttgagtttgggc

SEQ ID NO: 3778353 - DNA, 25 bp, Homo sapien
caccacgcttttgagtttgggcgtt

SEQ ID NO: 3778354 - DNA, 25 bp, Homo sapien
catagccagcaccacgcttttgagt

SEQ ID NO: 3778355 - DNA, 25 bp, Homo sapien
tcatccactagtagatgggagggct

SEQ ID NO: 3778356 - DNA, 25 bp, Homo sapien
actaatttccactgacactgctgac

SEQ ID NO: 3778357 - DNA, 25 bp, Homo sapien
gcagcaggatactaatttccactga

SEQ ID NO: 3778358 - DNA, 25 bp, Homo sapien
gatactaatttccactgacactgct

SEQ ID NO: 3778359 - DNA, 25 bp, Homo sapien
gacactgctgacaacttgtcttatt

SEQ ID NO: 3778360 - DNA, 25 bp, Homo sapien
cccaaagtttcaggcccacgaggcg

SEQ ID NO: 3778361 - DNA, 25 bp, Homo sapien
tcatatgcccaatgcagcgatgggg

SEQ ID NO: 3778362 - DNA, 25 bp, Homo sapien
gctccaggcacaagggggcttctct

SEQ ID NO: 3778363 - DNA, 25 bp, Homo sapien
ccacgaggcgcatggttctgcctgc

SEQ ID NO: 3778364 - DNA, 25 bp, Homo sapien
attcaactgagttctcgatgccaag

SEQ ID NO: 3778365 - DNA, 25 bp, Homo sapien
agagtaacggtgcaatccttgtcat

SEQ ID NO: 3778366 - DNA, 25 bp, Homo sapien
tctcgatgccaagtgaatgaaaaaa

SEQ ID NO: 3778367 - DNA, 25 bp, Homo sapien
tgagttctcgatgccaagtgaatga

SEQ ID NO: 3778368 - DNA, 25 bp, Homo sapien
aatgatggcagcttttttgaataaa

SEQ ID NO: 3778369 - DNA, 25 bp, Homo sapien
aattgggctgggttctagttaagag

SEQ ID NO: 3778370 - DNA, 25 bp, Homo sapien
actgtagtaatttgctaaattgggc

SEQ ID NO: 3778371 - DNA, 25 bp, Homo sapien
gctagcattctaaccatcctggata

SEQ ID NO: 3778372 - DNA, 25 bp, Homo sapien
tggcacagccgaagcatttctgcca

SEQ ID NO: 3778373 - DNA, 25 bp, Homo sapien
agaataaaacactggcacagccgaa

SEQ ID NO: 3778374 - DNA, 25 bp, Homo sapien
taaaacactggcacagccgaagcat

SEQ ID NO: 3778375 - DNA, 25 bp, Homo sapien
aacactggcacagccgaagcatttc

SEQ ID NO: 3778376 - DNA, 25 bp, Homo sapien
agtaattctgcgtgcagtcttgcga

SEQ ID NO: 3778377 - DNA, 25 bp, Homo sapien
tgcagtcttgcgaggtcagctgtaa

SEQ ID NO: 3778378 - DNA, 25 bp, Homo sapien
gaggtcagctgtaatgcccacacag

SEQ ID NO: 3778379 - DNA, 25 bp, Homo sapien
tgcggaggggaatcaatgacccaag

SEQ ID NO: 3778380 - DNA, 25 bp, Homo sapien
tgttaagtcactgatgaattgaacc

SEQ ID NO: 3778381 - DNA, 25 bp, Homo sapien
caagttcgcattttcactatcccca

SEQ ID NO: 3778382 - DNA, 25 bp, Homo sapien
ccaagttcgcattttcactatcccc

SEQ ID NO: 3778383 - DNA, 25 bp, Homo sapien
agccaagttcgcattttcactatcc

SEQ ID NO: 3778384 - DNA, 25 bp, Homo sapien
gccaagttcgcattttcactatccc

SEQ ID NO: 3778385 - DNA, 25 bp, Homo sapien
tacattatgggtaggttatagcata

SEQ ID NO: 3778386 - DNA, 25 bp, Homo sapien
cattgcctttgggatagtacagtga

SEQ ID NO: 3778387 - DNA, 25 bp, Homo sapien
aaaatattggctatgaaaaggggca

SEQ ID NO: 3778388 - DNA, 25 bp, Homo sapien
tagtacagtgattttctgaaattac

SEQ ID NO: 3778389 - DNA, 25 bp, Homo sapien
agtcattcttgatcacacgagtttc

SEQ ID NO: 3778390 - DNA, 25 bp, Homo sapien
ttctaagcttgcacattgcttcaag

SEQ ID NO: 3778391 - DNA, 25 bp, Homo sapien
tcaagcctgcatcgaatgcattcat

SEQ ID NO: 3778392 - DNA, 25 bp, Homo sapien
agttttccctcgctctatcaagtca

SEQ ID NO: 3778393 - DNA, 25 bp, Homo sapien
catctttgcctagtacttgctgcct

SEQ ID NO: 3778394 - DNA, 25 bp, Homo sapien
gcaaatgtattgaaggtgaggtgaa

SEQ ID NO: 3778395 - DNA, 25 bp, Homo sapien
tacataatcataaaggcatctttgc

SEQ ID NO: 3778396 - DNA, 25 bp, Homo sapien
tgtttacaggtgcaattatgatcca

SEQ ID NO: 3778397 - DNA, 25 bp, Homo sapien
aaaggtattattcgagcctgtcaga

SEQ ID NO: 3778398 - DNA, 25 bp, Homo sapien
tattattcgagcctgtcagataacc

SEQ ID NO: 3778399 - DNA, 25 bp, Homo sapien
ggcaaaggtattattcgagcctgtc

SEQ ID NO: 3778400 - DNA, 25 bp, Homo sapien
tattcgagcctgtcagataaccacc

SEQ ID NO: 3778401 - DNA, 25 bp, Homo sapien
tggaaccgcagaatttgccaagaag

SEQ ID NO: 3778402 - DNA, 25 bp, Homo sapien
gatcgctggtattggcaccatcgta

SEQ ID NO: 3778403 - DNA, 25 bp, Homo sapien
taaattgccaggtagtcatgggagc

SEQ ID NO: 3778404 - DNA, 25 bp, Homo sapien
tcttcacatttggtgggcgcttgga

SEQ ID NO: 3778405 - DNA, 25 bp, Homo sapien
acggtgatggtatacagacagtgca

SEQ ID NO: 3778406 - DNA, 25 bp, Homo sapien
ttgagctcgatcaccttgtcgtcac

SEQ ID NO: 3778407 - DNA, 25 bp, Homo sapien
aataggcaggacttgtgatgattcc

SEQ ID NO: 3778408 - DNA, 25 bp, Homo sapien
tgcatatcatttgggtagtctgcgt

SEQ ID NO: 3778409 - DNA, 25 bp, Homo sapien
tgtaacctctgataatgtgcacgcc

SEQ ID NO: 3778410 - DNA, 25 bp, Homo sapien
ttgacacagcttcccgtcacagcgg

SEQ ID NO: 3778411 - DNA, 25 bp, Homo sapien
tatcctataggaaaacttgaatccg

SEQ ID NO: 3778412 - DNA, 25 bp, Homo sapien
gaagtctgtgatttgctcgttggag

SEQ ID NO: 3778413 - DNA, 25 bp, Homo sapien
cagcccaaatcggcatctctactgt

SEQ ID NO: 3778414 - DNA, 25 bp, Homo sapien
gcccaaatcggcatctctactgttc

SEQ ID NO: 3778415 - DNA, 25 bp, Homo sapien
agcccagcccaaatcggcatctcta

SEQ ID NO: 3778416 - DNA, 25 bp, Homo sapien
caaagcccagcccaaatcggcatct

SEQ ID NO: 3778417 - DNA, 25 bp, Homo sapien
aatgaacacagagggcacttgtggc

SEQ ID NO: 3778418 - DNA, 25 bp, Homo sapien
gaatgaacacagagggcacttgtgg

SEQ ID NO: 3778419 - DNA, 25 bp, Homo sapien
tcaagaggaccactgacagaggatt

SEQ ID NO: 3778420 - DNA, 25 bp, Homo sapien
cataggtgcaattcatgttgttgtc

SEQ ID NO: 3778421 - DNA, 25 bp, Homo sapien
agggccagtgaaattacttccacat

SEQ ID NO: 3778422 - DNA, 25 bp, Homo sapien
gaggattagcctctatgacataggt

SEQ ID NO: 3778423 - DNA, 25 bp, Homo sapien
tgtgggaacaaaaagtcatcatcag

SEQ ID NO: 3778424 - DNA, 25 bp, Homo sapien
ctatgtgggaacaaaaagtcatcat

SEQ ID NO: 3778425 - DNA, 25 bp, Homo sapien
gtgggaacaaaaagtcatcatcaga

SEQ ID NO: 3778426 - DNA, 25 bp, Homo sapien
ttatttctcgtgtatctattttgtc

SEQ ID NO: 3778427 - DNA, 25 bp, Homo sapien
gctaacaaaggacgcggagaagccc

SEQ ID NO: 3778428 - DNA, 25 bp, Homo sapien
tgttacttggtgtgataacgggacc

SEQ ID NO: 3778429 - DNA, 25 bp, Homo sapien
tggaagacggcagtgaatgtgttac

SEQ ID NO: 3778430 - DNA, 25 bp, Homo sapien
gagctggtgcctcctgagactggaa

SEQ ID NO: 3778431 - DNA, 25 bp, Homo sapien
cagggctttgtccacctcctcagtt

SEQ ID NO: 3778432 - DNA, 25 bp, Homo sapien
ctagcagggctttgtccacctcctc

SEQ ID NO: 3778433 - DNA, 25 bp, Homo sapien
gcagggctttgtccacctcctcagt

SEQ ID NO: 3778434 - DNA, 25 bp, Homo sapien
ccacctcctcagttcctgcccacac

SEQ ID NO: 3778435 - DNA, 25 bp, Homo sapien
gctaaaacttaataaagagcctcaa

SEQ ID NO: 3778436 - DNA, 25 bp, Homo sapien
taattatagattcgacaactctacc

SEQ ID NO: 3778437 - DNA, 25 bp, Homo sapien
ctaaacaggcaaagtaagaagggct

SEQ ID NO: 3778438 - DNA, 25 bp, Homo sapien
tgaaggaatccaagaatgcttaagt

SEQ ID NO: 3778439 - DNA, 25 bp, Homo sapien
aacatctgctgttttcgggaaaatt

SEQ ID NO: 3778440 - DNA, 25 bp, Homo sapien
tctgacattgtccatcaccgctggg

SEQ ID NO: 3778441 - DNA, 25 bp, Homo sapien
cttttgtgagtaatggccgtccagg

SEQ ID NO: 3778442 - DNA, 25 bp, Homo sapien
caaagctgatctccaagtgtttact

SEQ ID NO: 3778443 - DNA, 25 bp, Homo sapien
tatcagaatgaaatattccaccaca

SEQ ID NO: 3778444 - DNA, 25 bp, Homo sapien
gccagtgaggggatctgattgtacc

SEQ ID NO: 3778445 - DNA, 25 bp, Homo sapien
aggccagtgaggggatctgattgta

SEQ ID NO: 3778446 - DNA, 25 bp, Homo sapien
ctgaggccagtgaggggatctgatt

SEQ ID NO: 3778447 - DNA, 25 bp, Homo sapien
gcataaaatccaccaccttgcaatg

SEQ ID NO: 3778448 - DNA, 25 bp, Homo sapien
ctaaagtttgtgtgttccacgtagc

SEQ ID NO: 3778449 - DNA, 25 bp, Homo sapien
agtttgtgtgttccacgtagcataa

SEQ ID NO: 3778450 - DNA, 25 bp, Homo sapien
gtagcataaaatccaccaccttgca

SEQ ID NO: 3778451 - DNA, 25 bp, Homo sapien
gacagtgacagagtcccaagcacaa

SEQ ID NO: 3778452 - DNA, 25 bp, Homo sapien
ctgactgtattgtcctggggtttga

SEQ ID NO: 3778453 - DNA, 25 bp, Homo sapien
gaatttccacagtattgtcctatga

SEQ ID NO: 3778454 - DNA, 25 bp, Homo sapien
ttgtcctatgatgggtgattcaggg

SEQ ID NO: 3778455 - DNA, 25 bp, Homo sapien
actgtcacctatctgtattccgcca

SEQ ID NO: 3778456 - DNA, 25 bp, Homo sapien
agagcagtgggtcaggctgtcataa

SEQ ID NO: 3778457 - DNA, 25 bp, Homo sapien
gggcttgtgatcactccactgtcac

SEQ ID NO: 3778458 - DNA, 25 bp, Homo sapien
caggctgtcataagcatttggatag

SEQ ID NO: 3778459 - DNA, 25 bp, Homo sapien
ggtataaccaatggcaatgtaggct

SEQ ID NO: 3778460 - DNA, 25 bp, Homo sapien
tgaatccatacctgagaataaggta

SEQ ID NO: 3778461 - DNA, 25 bp, Homo sapien
cgttcgttggtgacaaagtgaatcc

SEQ ID NO: 3778462 - DNA, 25 bp, Homo sapien
ccaatgtgttctacacgttcgttgg

SEQ ID NO: 3778463 - DNA, 25 bp, Homo sapien
aaactcgaggacatcaaattgacag

SEQ ID NO: 3778464 - DNA, 25 bp, Homo sapien
acagtcttggtgactttctaggtaa

SEQ ID NO: 3778465 - DNA, 25 bp, Homo sapien
ccactcgaaactcgaggacatcaaa

SEQ ID NO: 3778466 - DNA, 25 bp, Homo sapien
gaggacatcaaattgacagtcttgg

SEQ ID NO: 3778467 - DNA, 25 bp, Homo sapien
tgaatggaaatggatgaatttccct

SEQ ID NO: 3778468 - DNA, 25 bp, Homo sapien
gtgaatggaaatggatgaatttccc

SEQ ID NO: 3778469 - DNA, 25 bp, Homo sapien
aatggaaatggatgaatttccctga

SEQ ID NO: 3778470 - DNA, 25 bp, Homo sapien
gaatggaaatggatgaatttccctg

SEQ ID NO: 3778471 - DNA, 25 bp, Homo sapien
tgcttacattcacactactacacag

SEQ ID NO: 3778472 - DNA, 25 bp, Homo sapien
ctactacacagtttctctagctggg

SEQ ID NO: 3778473 - DNA, 25 bp, Homo sapien
cattcacactactacacagtttctc

SEQ ID NO: 3778474 - DNA, 25 bp, Homo sapien
actactacacagtttctctagctgg

SEQ ID NO: 3778475 - DNA, 25 bp, Homo sapien
taaccttcaggcacacaatccatct

SEQ ID NO: 3778476 - DNA, 25 bp, Homo sapien
gtttaaccttcaggcacacaatcca

SEQ ID NO: 3778477 - DNA, 25 bp, Homo sapien
aaagagtttaaccttcaggcacaca

SEQ ID NO: 3778478 - DNA, 25 bp, Homo sapien
ttcaggcacacaatccatcttactg

SEQ ID NO: 3778479 - DNA, 25 bp, Homo sapien
gaagacacatgtgaaaccactggag

SEQ ID NO: 3778480 - DNA, 25 bp, Homo sapien
agagagcagtgcttatgcaggacca

SEQ ID NO: 3778481 - DNA, 25 bp, Homo sapien
tcagaactttcgtggtggcttgtgc

SEQ ID NO: 3778482 - DNA, 25 bp, Homo sapien
catggaggtcacgtagcagtgctct

SEQ ID NO: 3778483 - DNA, 25 bp, Homo sapien
ttccctccggggcagtgattctcca

SEQ ID NO: 3778484 - DNA, 25 bp, Homo sapien
cggggcagtgattctccactcgcag

SEQ ID NO: 3778485 - DNA, 25 bp, Homo sapien
gaagtaaatgttccaatagagccct

SEQ ID NO: 3778486 - DNA, 25 bp, Homo sapien
ttgttaaacattagggtgatccgcc

SEQ ID NO: 3778487 - DNA, 25 bp, Homo sapien
tcacagagccgtctgtgacaaacct

SEQ ID NO: 3778488 - DNA, 25 bp, Homo sapien
aatcgcagtctgaatcctgaggcag

SEQ ID NO: 3778489 - DNA, 25 bp, Homo sapien
aggaatggtgtttccacagtatctg

SEQ ID NO: 3778490 - DNA, 25 bp, Homo sapien
cacagcagtattgctagaagtgtct

SEQ ID NO: 3778491 - DNA, 25 bp, Homo sapien
tgtcccagatctccacgaagtcttt

SEQ ID NO: 3778492 - DNA, 25 bp, Homo sapien
ggtatgattgtcccagatctccacg

SEQ ID NO: 3778493 - DNA, 25 bp, Homo sapien
gaggtatgattgtcccagatctcca

SEQ ID NO: 3778494 - DNA, 25 bp, Homo sapien
cagaggtatgattgtcccagatctc

SEQ ID NO: 3778495 - DNA, 25 bp, Homo sapien
agtgttggatgtccaatgctttcaa

SEQ ID NO: 3778496 - DNA, 25 bp, Homo sapien
tgttggatgtccaatgctttcaaca

SEQ ID NO: 3778497 - DNA, 25 bp, Homo sapien
ggaagtgttggatgtccaatgcttt

SEQ ID NO: 3778498 - DNA, 25 bp, Homo sapien
aagtgttggatgtccaatgctttca

SEQ ID NO: 3778499 - DNA, 25 bp, Homo sapien
tctcctgaggaccactgactgctgg

SEQ ID NO: 3778500 - DNA, 25 bp, Homo sapien
tcaaatacataacctctcctgagga

SEQ ID NO: 3778501 - DNA, 25 bp, Homo sapien
gatcgaaatctcaaatacataacct

SEQ ID NO: 3778502 - DNA, 25 bp, Homo sapien
gggctgttgtcagatcgaaatctca

SEQ ID NO: 3778503 - DNA, 25 bp, Homo sapien
ttggtgcatccgaatccactccatc

SEQ ID NO: 3778504 - DNA, 25 bp, Homo sapien
actccatcccgcaactcaaggtagt

SEQ ID NO: 3778505 - DNA, 25 bp, Homo sapien
gaaagtattggtgcatccgaatcca

SEQ ID NO: 3778506 - DNA, 25 bp, Homo sapien
atttggaaagtattggtgcatccga

SEQ ID NO: 3778507 - DNA, 25 bp, Homo sapien
agcatcatggatgtagacgttgccc

SEQ ID NO: 3778508 - DNA, 25 bp, Homo sapien
tcagcatcatggatgtagacgttgc

SEQ ID NO: 3778509 - DNA, 25 bp, Homo sapien
gcatcatggatgtagacgttgcccc

SEQ ID NO: 3778510 - DNA, 25 bp, Homo sapien
atcatggatgtagacgttgccccca

SEQ ID NO: 3778511 - DNA, 25 bp, Homo sapien
tcctttaccacactgtgaactcctt

SEQ ID NO: 3778512 - DNA, 25 bp, Homo sapien
ctgaaaccacagaagtgcgccacca

SEQ ID NO: 3778513 - DNA, 25 bp, Homo sapien
agcttactgagcagctgaaaccaca

SEQ ID NO: 3778514 - DNA, 25 bp, Homo sapien
gaactcggtggtttgcatgatgtga

SEQ ID NO: 3778515 - DNA, 25 bp, Homo sapien
aactgaacaaacatttgattatccg

SEQ ID NO: 3778516 - DNA, 25 bp, Homo sapien
aaactgaacaaacatttgattatcc

SEQ ID NO: 3778517 - DNA, 25 bp, Homo sapien
actgaacaaacatttgattatccga

SEQ ID NO: 3778518 - DNA, 25 bp, Homo sapien
ctgaacaaacatttgattatccgag

SEQ ID NO: 3778519 - DNA, 25 bp, Homo sapien
tggacagcaatggtcaggccacttt

SEQ ID NO: 3778520 - DNA, 25 bp, Homo sapien
aatccccctggttgcaagaagaatc

SEQ ID NO: 3778521 - DNA, 25 bp, Homo sapien
atggacagcaatggtcaggccactt

SEQ ID NO: 3778522 - DNA, 25 bp, Homo sapien
agtaatccccctggttgcaagaaga

SEQ ID NO: 3778523 - DNA, 25 bp, Homo sapien
tcctttggagcgaagatgccacacc

SEQ ID NO: 3778524 - DNA, 25 bp, Homo sapien
ttttgtacgacttggccccagtgct

SEQ ID NO: 3778525 - DNA, 25 bp, Homo sapien
ttggagcgaagatgccacaccagag

SEQ ID NO: 3778526 - DNA, 25 bp, Homo sapien
cagcacacttttgtacgacttggcc

SEQ ID NO: 3778527 - DNA, 25 bp, Homo sapien
gtgaaaggatgcattgaagcctgcc

SEQ ID NO: 3778528 - DNA, 25 bp, Homo sapien
tcttgtgaaaggatgcattgaagcc

SEQ ID NO: 3778529 - DNA, 25 bp, Homo sapien
aaggatgcattgaagcctgccctgg

SEQ ID NO: 3778530 - DNA, 25 bp, Homo sapien
aggatgcattgaagcctgccctggt

SEQ ID NO: 3778531 - DNA, 25 bp, Homo sapien
gaacatgtactctccagtagaccgg

SEQ ID NO: 3778532 - DNA, 25 bp, Homo sapien
cagttctccctgtcactaaaactca

SEQ ID NO: 3778533 - DNA, 25 bp, Homo sapien
tccctgtcactaaaactcaaaatca

SEQ ID NO: 3778534 - DNA, 25 bp, Homo sapien
tttttgataaagacgtctttgacag

SEQ ID NO: 3778535 - DNA, 25 bp, Homo sapien
tctttgacagtttccaccgtctttc

SEQ ID NO: 3778536 - DNA, 25 bp, Homo sapien
caagggcatagagatagaagttaac

SEQ ID NO: 3778537 - DNA, 25 bp, Homo sapien
gagttacaagccactttgctgtatg

SEQ ID NO: 3778538 - DNA, 25 bp, Homo sapien
tattgagcaattagtatatacccct

SEQ ID NO: 3778539 - DNA, 25 bp, Homo sapien
cagattaacctcagatgccccaaaa

SEQ ID NO: 3778540 - DNA, 25 bp, Homo sapien
tgtgcaacgtgctgatagccgattg

SEQ ID NO: 3778541 - DNA, 25 bp, Homo sapien
tgatactcctctgtgcaacgtgctg

SEQ ID NO: 3778542 - DNA, 25 bp, Homo sapien
tctggtgctttgatactcctctgtg

SEQ ID NO: 3778543 - DNA, 25 bp, Homo sapien
cctctgtgcaacgtgctgatagccg

SEQ ID NO: 3778544 - DNA, 25 bp, Homo sapien
cgttcggtgagattcaatgtccagg

SEQ ID NO: 3778545 - DNA, 25 bp, Homo sapien
cctggatgagccacgtacagtccac

SEQ ID NO: 3778546 - DNA, 25 bp, Homo sapien
gctatcataggcacacgttcggtga

SEQ ID NO: 3778547 - DNA, 25 bp, Homo sapien
gaaagaatgttgagttccacggtag

SEQ ID NO: 3778548 - DNA, 25 bp, Homo sapien
actgtgcctggttcccattactttt

SEQ ID NO: 3778549 - DNA, 25 bp, Homo sapien
tcagtgtatccataataaattctca

SEQ ID NO: 3778550 - DNA, 25 bp, Homo sapien
gctcctggagagtagagattgtacc

SEQ ID NO: 3778551 - DNA, 25 bp, Homo sapien
gctcactggcagcatgtaggctcaa

SEQ ID NO: 3778552 - DNA, 25 bp, Homo sapien
ccttccctgagattgaagagtcgga

SEQ ID NO: 3778553 - DNA, 25 bp, Homo sapien
gaaagattcagtctgggtaccacag

SEQ ID NO: 3778554 - DNA, 25 bp, Homo sapien
gcgtgaatgctaggcccatcataga

SEQ ID NO: 3778555 - DNA, 25 bp, Homo sapien
cagtaagctccaattaggcgggcgt

SEQ ID NO: 3778556 - DNA, 25 bp, Homo sapien
gaaaggagaggcgactttcccatga

SEQ ID NO: 3778557 - DNA, 25 bp, Homo sapien
ccatggacaacgtgagatgcattca

SEQ ID NO: 3778558 - DNA, 25 bp, Homo sapien
tatgtccatctccaagattctacca

SEQ ID NO: 3778559 - DNA, 25 bp, Homo sapien
tgggtagttttcaggccagaaagga

SEQ ID NO: 3778560 - DNA, 25 bp, Homo sapien
gaaccatctgagataaatctgaccc

SEQ ID NO: 3778561 - DNA, 25 bp, Homo sapien
cccacagggtatgtccaacgatgga

SEQ ID NO: 3778562 - DNA, 25 bp, Homo sapien
tatcgtcccaccaagtgacccgtgg

SEQ ID NO: 3778563 - DNA, 25 bp, Homo sapien
gtggcatttccttcacggatctcca

SEQ ID NO: 3778564 - DNA, 25 bp, Homo sapien
tctgaggaaaatgatctccctttct

SEQ ID NO: 3778565 - DNA, 25 bp, Homo sapien
gaggaaaatgatctccctttcttcc

SEQ ID NO: 3778566 - DNA, 25 bp, Homo sapien
cttctgaggaaaatgatctcccttt

SEQ ID NO: 3778567 - DNA, 25 bp, Homo sapien
tgaggaaaatgatctccctttcttc

SEQ ID NO: 3778568 - DNA, 25 bp, Homo sapien
ctggagccggttgccaggggaactg

SEQ ID NO: 3778569 - DNA, 25 bp, Homo sapien
cagctggagccggttgccaggggaa

SEQ ID NO: 3778570 - DNA, 25 bp, Homo sapien
acagctggagccggttgccagggga

SEQ ID NO: 3778571 - DNA, 25 bp, Homo sapien
aagacagctggagccggttgccagg

SEQ ID NO: 3778572 - DNA, 25 bp, Homo sapien
tgttccagacacattccacattagg

SEQ ID NO: 3778573 - DNA, 25 bp, Homo sapien
gccagggctgttgaagatgccttca

SEQ ID NO: 3778574 - DNA, 25 bp, Homo sapien
cacattagggggataaatgtctggg

SEQ ID NO: 3778575 - DNA, 25 bp, Homo sapien
gccatgtagaacgttccaccacaag

SEQ ID NO: 3778576 - DNA, 25 bp, Homo sapien
cttctaggtgttctgtagcttttaa

SEQ ID NO: 3778577 - DNA, 25 bp, Homo sapien
ttctaggtgttctgtagcttttaac

SEQ ID NO: 3778578 - DNA, 25 bp, Homo sapien
ctaggtgttctgtagcttttaacca

SEQ ID NO: 3778579 - DNA, 25 bp, Homo sapien
tctaggtgttctgtagcttttaacc

SEQ ID NO: 3778580 - DNA, 25 bp, Homo sapien
tgctagaatcagagacgaatctcag

SEQ ID NO: 3778581 - DNA, 25 bp, Homo sapien
ggcatgtcggtgccacagtaacggc

SEQ ID NO: 3778582 - DNA, 25 bp, Homo sapien
gaatctcagcgtcagggcgctgctg

SEQ ID NO: 3778583 - DNA, 25 bp, Homo sapien
ccgacactgatgcggtgaccgtggt

SEQ ID NO: 3778584 - DNA, 25 bp, Homo sapien
cgtgcacacgttgtgcttctttcaa

SEQ ID NO: 3778585 - DNA, 25 bp, Homo sapien
caaagtcacgtgcacacgttgtgct

SEQ ID NO: 3778586 - DNA, 25 bp, Homo sapien
atttctacaaagtcacgtgcacacg

SEQ ID NO: 3778587 - DNA, 25 bp, Homo sapien
gcgcgtcttcgtggccgccatccaa

SEQ ID NO: 3778588 - DNA, 25 bp, Homo sapien
aaagagaagactctctcgtaaagta

SEQ ID NO: 3778589 - DNA, 25 bp, Homo sapien
agaaaaaagagaagactctctcgta

SEQ ID NO: 3778590 - DNA, 25 bp, Homo sapien
aaaaagagaagactctctcgtaaag

SEQ ID NO: 3778591 - DNA, 25 bp, Homo sapien
gaaaaaagagaagactctctcgtaa

SEQ ID NO: 3778592 - DNA, 25 bp, Homo sapien
ggactgttaccaggtcagaaaataa

SEQ ID NO: 3778593 - DNA, 25 bp, Homo sapien
catcggactgttaccaggtcagaaa

SEQ ID NO: 3778594 - DNA, 25 bp, Homo sapien
cttcccacagacaccttctctcctg

SEQ ID NO: 3778595 - DNA, 25 bp, Homo sapien
ctcctgtgtgccttttctttttcat

SEQ ID NO: 3778596 - DNA, 25 bp, Homo sapien
ccacagacaccttctctcctgtgtg

SEQ ID NO: 3778597 - DNA, 25 bp, Homo sapien
tcccacagacaccttctctcctgtg

SEQ ID NO: 3778598 - DNA, 25 bp, Homo sapien
gctgcagttctgattgtttggataa

SEQ ID NO: 3778599 - DNA, 25 bp, Homo sapien
tctgattgtttggataattggcagg

SEQ ID NO: 3778600 - DNA, 25 bp, Homo sapien
attggcagggaaccgtggagaggaa

SEQ ID NO: 3778601 - DNA, 25 bp, Homo sapien
gaggttgcgcttgaatgatccagct

SEQ ID NO: 3778602 - DNA, 25 bp, Homo sapien
atttctgagcacaggtctcatttca

SEQ ID NO: 3778603 - DNA, 25 bp, Homo sapien
caatttctgagcacaggtctcattt

SEQ ID NO: 3778604 - DNA, 25 bp, Homo sapien
tttctgagcacaggtctcatttcac

SEQ ID NO: 3778605 - DNA, 25 bp, Homo sapien
tcaatttctgagcacaggtctcatt

SEQ ID NO: 3778606 - DNA, 25 bp, Homo sapien
tcttgtgcctgggaagatccacagg

SEQ ID NO: 3778607 - DNA, 25 bp, Homo sapien
gagcactgaagatttctcttgtgcc

SEQ ID NO: 3778608 - DNA, 25 bp, Homo sapien
ctgggaagatccacagggtacttgc

SEQ ID NO: 3778609 - DNA, 25 bp, Homo sapien
cagagcactgaagatttctcttgtg

SEQ ID NO: 3778610 - DNA, 25 bp, Homo sapien
tgcctgaattgagctcggaagcctc

SEQ ID NO: 3778611 - DNA, 25 bp, Homo sapien
ccttccacacgtcctggcaaggcgg

SEQ ID NO: 3778612 - DNA, 25 bp, Homo sapien
gactgaaatctcaagaagaggctgt

SEQ ID NO: 3778613 - DNA, 25 bp, Homo sapien
caaggcgggacattgtggagcttaa

SEQ ID NO: 3778614 - DNA, 25 bp, Homo sapien
ttcgataccttgaggagatttgcat

SEQ ID NO: 3778615 - DNA, 25 bp, Homo sapien
ctgatgcttcgataccttgaggaga

SEQ ID NO: 3778616 - DNA, 25 bp, Homo sapien
tgcttcgataccttgaggagatttg

SEQ ID NO: 3778617 - DNA, 25 bp, Homo sapien
tgatgcttcgataccttgaggagat

SEQ ID NO: 3778618 - DNA, 25 bp, Homo sapien
ttgcccaatcacacgcttagcagtg

SEQ ID NO: 3778619 - DNA, 25 bp, Homo sapien
cttagcagtgcagagccaatataca

SEQ ID NO: 3778620 - DNA, 25 bp, Homo sapien
gacgtccgaccaagtatgattaaac

SEQ ID NO: 3778621 - DNA, 25 bp, Homo sapien
tgcagcagggaaaactgagctctga

SEQ ID NO: 3778622 - DNA, 25 bp, Homo sapien
ccaatgatctgagcaaagaggatgc

SEQ ID NO: 3778623 - DNA, 25 bp, Homo sapien
caagcagcctttctaggagatcaat

SEQ ID NO: 3778624 - DNA, 25 bp, Homo sapien
tgcagagctacatgaatcgaagact

SEQ ID NO: 3778625 - DNA, 25 bp, Homo sapien
tggtgctgctgaacggactttcctc

SEQ ID NO: 3778626 - DNA, 25 bp, Homo sapien
tctgacagcatcactggcaactgaa

SEQ ID NO: 3778627 - DNA, 25 bp, Homo sapien
cacttgaactctgttaaaaatctcc

SEQ ID NO: 3778628 - DNA, 25 bp, Homo sapien
taggtgacaacagcaaacgaactct

SEQ ID NO: 3778629 - DNA, 25 bp, Homo sapien
tctctttgctaataactctgtctaa

SEQ ID NO: 3778630 - DNA, 25 bp, Homo sapien
tccttcccttgcagcctcccctcgt

SEQ ID NO: 3778631 - DNA, 25 bp, Homo sapien
attcccaaatgtgcgtgcaccattt

SEQ ID NO: 3778632 - DNA, 25 bp, Homo sapien
tttattcccaaatgtgcgtgcacca

SEQ ID NO: 3778633 - DNA, 25 bp, Homo sapien
ttattcccaaatgtgcgtgcaccat

SEQ ID NO: 3778634 - DNA, 25 bp, Homo sapien
cagtgtgaacgcttccctggcttcc

SEQ ID NO: 3778635 - DNA, 25 bp, Homo sapien
tgcatttctactggcgagactctgc

SEQ ID NO: 3778636 - DNA, 25 bp, Homo sapien
taaatgtcgcctccagtgtgaacgc

SEQ ID NO: 3778637 - DNA, 25 bp, Homo sapien
ggcttccaggcccaaatgaatgatg

SEQ ID NO: 3778638 - DNA, 25 bp, Homo sapien
tgattccagagcactgagccctaga

SEQ ID NO: 3778639 - DNA, 25 bp, Homo sapien
tttcacaatgattccagagcactga

SEQ ID NO: 3778640 - DNA, 25 bp, Homo sapien
ccctagatatgctaaatcctaggtg

SEQ ID NO: 3778641 - DNA, 25 bp, Homo sapien
gagccctagatatgctaaatcctag

SEQ ID NO: 3778642 - DNA, 25 bp, Homo sapien
acagtctgtgttgctcctataagga

SEQ ID NO: 3778643 - DNA, 25 bp, Homo sapien
tcagtgaagttcaagagaacacgat

SEQ ID NO: 3778644 - DNA, 25 bp, Homo sapien
gaacacgatgatttctgtcaacccg

SEQ ID NO: 3778645 - DNA, 25 bp, Homo sapien
gaatctctccactgggagcctggaa

SEQ ID NO: 3778646 - DNA, 25 bp, Homo sapien
tccagtgactgcttgccatgacgca

SEQ ID NO: 3778647 - DNA, 25 bp, Homo sapien
tctcaggtgatctctgggtacacag

SEQ ID NO: 3778648 - DNA, 25 bp, Homo sapien
aatcgaattgctagctcatttccag

SEQ ID NO: 3778649 - DNA, 25 bp, Homo sapien
tacacagttgggctattctgggaga

SEQ ID NO: 3778650 - DNA, 25 bp, Homo sapien
tccaataccccagtgacatagtcct

SEQ ID NO: 3778651 - DNA, 25 bp, Homo sapien
acatagtcctctggaaagagtctcc

SEQ ID NO: 3778652 - DNA, 25 bp, Homo sapien
tccttgggctcacggagggcatctt

SEQ ID NO: 3778653 - DNA, 25 bp, Homo sapien
tccaggaggcctcacagacaggttt

SEQ ID NO: 3778654 - DNA, 25 bp, Homo sapien
tactttctcccgtaatgggtatgac

SEQ ID NO: 3778655 - DNA, 25 bp, Homo sapien
ggcctgcttgtagggaacagcccct

SEQ ID NO: 3778656 - DNA, 25 bp, Homo sapien
atttctgtcaggcatagggctctcc

SEQ ID NO: 3778657 - DNA, 25 bp, Homo sapien
gccaagtgggcaacaatcacatgca

SEQ ID NO: 3778658 - DNA, 25 bp, Homo sapien
ggaaccagagttggcggaccagtgc

SEQ ID NO: 3778659 - DNA, 25 bp, Homo sapien
ccagcggatggagcccaagttgccc

SEQ ID NO: 3778660 - DNA, 25 bp, Homo sapien
tggcggaccagtgcctccactgtgg

SEQ ID NO: 3778661 - DNA, 25 bp, Homo sapien
actgtggtccttcagaaggtcccag

SEQ ID NO: 3778662 - DNA, 25 bp, Homo sapien
taactcagctgctgcaaggccctca

SEQ ID NO: 3778663 - DNA, 25 bp, Homo sapien
ctaccaaatgatcaccgaagggctg

SEQ ID NO: 3778664 - DNA, 25 bp, Homo sapien
ctgttctaccccaaactttggaatg

SEQ ID NO: 3778665 - DNA, 25 bp, Homo sapien
gaatagaacactgctgactactgga

SEQ ID NO: 3778666 - DNA, 25 bp, Homo sapien
agctgaatgctactcccggggtccg

SEQ ID NO: 3778667 - DNA, 25 bp, Homo sapien
tccaagacatcaaagttgcaccttg

SEQ ID NO: 3778668 - DNA, 25 bp, Homo sapien
gggtccgtcctaatgtaccagatac

SEQ ID NO: 3778669 - DNA, 25 bp, Homo sapien
gaatgatactccacatcgaagtcat

SEQ ID NO: 3778670 - DNA, 25 bp, Homo sapien
ccaaatctgagcctcaaggttgttt

SEQ ID NO: 3778671 - DNA, 25 bp, Homo sapien
tccacccggagaaatggacacaggt

SEQ ID NO: 3778672 - DNA, 25 bp, Homo sapien
cgtccatggcagtggtgttctgtga

SEQ ID NO: 3778673 - DNA, 25 bp, Homo sapien
tgtgaccctttaaactctgtccaaa

SEQ ID NO: 3778674 - DNA, 25 bp, Homo sapien
aagcctcgttgtagatccgttttct

SEQ ID NO: 3778675 - DNA, 25 bp, Homo sapien
ctcagaagcagtgctcaggaaatga

SEQ ID NO: 3778676 - DNA, 25 bp, Homo sapien
taaatgcgtttgtgtatgaactggg

SEQ ID NO: 3778677 - DNA, 25 bp, Homo sapien
taaagccaatagaaggtttgtgtcg

SEQ ID NO: 3778678 - DNA, 25 bp, Homo sapien
gaactctttaggctaatgaaagggc

SEQ ID NO: 3778679 - DNA, 25 bp, Homo sapien
tttaggctaatgaaagggccagtgg

SEQ ID NO: 3778680 - DNA, 25 bp, Homo sapien
tctttaggctaatgaaagggccagt

SEQ ID NO: 3778681 - DNA, 25 bp, Homo sapien
tgatgaccactctagctacttcccg

SEQ ID NO: 3778682 - DNA, 25 bp, Homo sapien
tgttcagatgcgtccacagtttttt

SEQ ID NO: 3778683 - DNA, 25 bp, Homo sapien
tacagaccgctgattggtacattta

SEQ ID NO: 3778684 - DNA, 25 bp, Homo sapien
atggtgtgtccggattttgtttgtt

SEQ ID NO: 3778685 - DNA, 25 bp, Homo sapien
tgtccggattttgtttgttcagatg

SEQ ID NO: 3778686 - DNA, 25 bp, Homo sapien
tgaaatcctttctcacggcggccaa

SEQ ID NO: 3778687 - DNA, 25 bp, Homo sapien
gcttggagcttgtagtactccctgg

SEQ ID NO: 3778688 - DNA, 25 bp, Homo sapien
gcggccaaccccatctgtaaggagc

SEQ ID NO: 3778689 - DNA, 25 bp, Homo sapien
ggcaggtctactccacagtagcgtc

SEQ ID NO: 3778690 - DNA, 25 bp, Homo sapien
aaaaacacatggtttgtgggatgga

SEQ ID NO: 3778691 - DNA, 25 bp, Homo sapien
aaaacacatggtttgtgggatggaa

SEQ ID NO: 3778692 - DNA, 25 bp, Homo sapien
tcatttaatgattttatcagctgta

SEQ ID NO: 3778693 - DNA, 25 bp, Homo sapien
ctcatttaatgattttatcagctgt

SEQ ID NO: 3778694 - DNA, 25 bp, Homo sapien
atgattttatcagctgtatatctcc

SEQ ID NO: 3778695 - DNA, 25 bp, Homo sapien
attttatcagctgtatatctccaaa

SEQ ID NO: 3778696 - DNA, 25 bp, Homo sapien
tgtgagtcgccttaaagcacagacc

SEQ ID NO: 3778697 - DNA, 25 bp, Homo sapien
ctcccctactgattgtgagtcgcct

SEQ ID NO: 3778698 - DNA, 25 bp, Homo sapien
gagtcgccttaaagcacagaccacc

SEQ ID NO: 3778699 - DNA, 25 bp, Homo sapien
ctgattgtgagtcgccttaaagcac

SEQ ID NO: 3778700 - DNA, 25 bp, Homo sapien
caaacatactgctcccaagtagtgg

SEQ ID NO: 3778701 - DNA, 25 bp, Homo sapien
cagaagcctcccctataatgaatag

SEQ ID NO: 3778702 - DNA, 25 bp, Homo sapien
gggcatgaagtacagttctaaacta

SEQ ID NO: 3778703 - DNA, 25 bp, Homo sapien
gcgagaggccaaccttgcagcctgt

SEQ ID NO: 3778704 - DNA, 25 bp, Homo sapien
gacccctggatctcagctgttcagt

SEQ ID NO: 3778705 - DNA, 25 bp, Homo sapien
gattacgcattgaaggagacccctg

SEQ ID NO: 3778706 - DNA, 25 bp, Homo sapien
tgtgtcttacggaatactaggtcgc

SEQ ID NO: 3778707 - DNA, 25 bp, Homo sapien
cagatgggtaacgtcacctctacaa

SEQ ID NO: 3778708 - DNA, 25 bp, Homo sapien
cacaggacgttccagctgtgactca

SEQ ID NO: 3778709 - DNA, 25 bp, Homo sapien
acaggacgttccagctgtgactcat

SEQ ID NO: 3778710 - DNA, 25 bp, Homo sapien
cagaatgttaaccacaggacgttcc

SEQ ID NO: 3778711 - DNA, 25 bp, Homo sapien
gcagaatgttaaccacaggacgttc

SEQ ID NO: 3778712 - DNA, 25 bp, Homo sapien
tggatagagtccactggcaagcaaa

SEQ ID NO: 3778713 - DNA, 25 bp, Homo sapien
gaaaccaaggcgaatcatcctgtgt

SEQ ID NO: 3778714 - DNA, 25 bp, Homo sapien
tggagactgaggcatcccggacagc

SEQ ID NO: 3778715 - DNA, 25 bp, Homo sapien
tgggtcctacccagccctgtagttc

SEQ ID NO: 3778716 - DNA, 25 bp, Homo sapien
caacgtgaaatcatagacctttgag

SEQ ID NO: 3778717 - DNA, 25 bp, Homo sapien
aatcatagacctttgagctggaaga

SEQ ID NO: 3778718 - DNA, 25 bp, Homo sapien
aagaagccagaggactgccatccgg

SEQ ID NO: 3778719 - DNA, 25 bp, Homo sapien
agagaagaacctggttcatagaaca

SEQ ID NO: 3778720 - DNA, 25 bp, Homo sapien
cccatggtagtcaccagatagaaga

SEQ ID NO: 3778721 - DNA, 25 bp, Homo sapien
tcattagcatcccatggtagtcacc

SEQ ID NO: 3778722 - DNA, 25 bp, Homo sapien
ggctgaggcagttctaattccagtg

SEQ ID NO: 3778723 - DNA, 25 bp, Homo sapien
ggcagttctaattccagtgactccc

SEQ ID NO: 3778724 - DNA, 25 bp, Homo sapien
aatgtgtagttcacagtgttgcctg

SEQ ID NO: 3778725 - DNA, 25 bp, Homo sapien
cccggatggtccagttgcaatgctg

SEQ ID NO: 3778726 - DNA, 25 bp, Homo sapien
gattcggataccctatactctctaa

SEQ ID NO: 3778727 - DNA, 25 bp, Homo sapien
tactctctaagatgccataggtttg

SEQ ID NO: 3778728 - DNA, 25 bp, Homo sapien
ggtattcagccttgaagccacgtcc

SEQ ID NO: 3778729 - DNA, 25 bp, Homo sapien
cagatgagagttgctacttgggcca

SEQ ID NO: 3778730 - DNA, 25 bp, Homo sapien
taaacatgctgtctccactagaacg

SEQ ID NO: 3778731 - DNA, 25 bp, Homo sapien
cacaaagctgagttagcagatgaga

SEQ ID NO: 3778732 - DNA, 25 bp, Homo sapien
gatgctccaagtgaaagtctttgaa

SEQ ID NO: 3778733 - DNA, 25 bp, Homo sapien
cgctgccgtggctagatttcaacca

SEQ ID NO: 3778734 - DNA, 25 bp, Homo sapien
gaattccagttcaaatgcgctgccg

SEQ ID NO: 3778735 - DNA, 25 bp, Homo sapien
tttcaaccaccagtagcattcagag

SEQ ID NO: 3778736 - DNA, 25 bp, Homo sapien
ccgcttgaagtggtgagattacccc

SEQ ID NO: 3778737 - DNA, 25 bp, Homo sapien
tagttgggagatatgaacgtgccgc

SEQ ID NO: 3778738 - DNA, 25 bp, Homo sapien
atgaacgtgccgcttgaagtggtga

SEQ ID NO: 3778739 - DNA, 25 bp, Homo sapien
gtaatagggcatcgggtagttggga

SEQ ID NO: 3778740 - DNA, 25 bp, Homo sapien
ttgatgacccatcccagtaagctga

SEQ ID NO: 3778741 - DNA, 25 bp, Homo sapien
ctgttgatgacccatcccagtaagc

SEQ ID NO: 3778742 - DNA, 25 bp, Homo sapien
gatgacccatcccagtaagctgaga

SEQ ID NO: 3778743 - DNA, 25 bp, Homo sapien
tgttgatgacccatcccagtaagct

SEQ ID NO: 3778744 - DNA, 25 bp, Homo sapien
tagatttgagccatagaatattccc

SEQ ID NO: 3778745 - DNA, 25 bp, Homo sapien
ccatagaatattcccagcaatggtg

SEQ ID NO: 3778746 - DNA, 25 bp, Homo sapien
gtagatttgagccatagaatattcc

SEQ ID NO: 3778747 - DNA, 25 bp, Homo sapien
tgagccatagaatattcccagcaat

SEQ ID NO: 3778748 - DNA, 25 bp, Homo sapien
ggccagttctcactgtgatccgata

SEQ ID NO: 3778749 - DNA, 25 bp, Homo sapien
cccagttgttgggataattattggg

SEQ ID NO: 3778750 - DNA, 25 bp, Homo sapien
gaagtttggagaagtgaatgtcccc

SEQ ID NO: 3778751 - DNA, 25 bp, Homo sapien
tgcactgcaatcagttggccagttc

SEQ ID NO: 3778752 - DNA, 25 bp, Homo sapien
catttgctaaacacacttggacaca

SEQ ID NO: 3778753 - DNA, 25 bp, Homo sapien
gaagcagacctacacatgaacacag

SEQ ID NO: 3778754 - DNA, 25 bp, Homo sapien
aaacttctagaaggagccgggtgcg

SEQ ID NO: 3778755 - DNA, 25 bp, Homo sapien
aagatgacctttatccccaaattgg

SEQ ID NO: 3778756 - DNA, 25 bp, Homo sapien
cacttattatctcagccaattcaga

SEQ ID NO: 3778757 - DNA, 25 bp, Homo sapien
tattctgctcccattactttatcat

SEQ ID NO: 3778758 - DNA, 25 bp, Homo sapien
caattcagagtactttggagacatt

SEQ ID NO: 3778759 - DNA, 25 bp, Homo sapien
tctttaccgtctgaaaacttcagtg

SEQ ID NO: 3778760 - DNA, 25 bp, Homo sapien
aggtcggagtcagtcacaaacacca

SEQ ID NO: 3778761 - DNA, 25 bp, Homo sapien
tgttgctgcactgattgcttcatag

SEQ ID NO: 3778762 - DNA, 25 bp, Homo sapien
gaagccttcataagcgaggtcggag

SEQ ID NO: 3778763 - DNA, 25 bp, Homo sapien
ttcatagtttattaagaagccttca

SEQ ID NO: 3778764 - DNA, 25 bp, Homo sapien
gagagatggcgggatcgactttcca

SEQ ID NO: 3778765 - DNA, 25 bp, Homo sapien
gagatggcgggatcgactttccaca

SEQ ID NO: 3778766 - DNA, 25 bp, Homo sapien
tgcttgtgagagatggcgggatcga

SEQ ID NO: 3778767 - DNA, 25 bp, Homo sapien
tggcgggatcgactttccacagtat

SEQ ID NO: 3778768 - DNA, 25 bp, Homo sapien
caagggatgtctcagagtcggtgtc

SEQ ID NO: 3778769 - DNA, 25 bp, Homo sapien
gtcggtgtcataaacttccaagtag

SEQ ID NO: 3778770 - DNA, 25 bp, Homo sapien
tgtgcaattgtaatgaaactccaga

SEQ ID NO: 3778771 - DNA, 25 bp, Homo sapien
tatgccaagtacagttgataccgtg

SEQ ID NO: 3778772 - DNA, 25 bp, Homo sapien
ctttgaatggtccctgttgattctg

SEQ ID NO: 3778773 - DNA, 25 bp, Homo sapien
aatggtccctgttgattctgtaaga

SEQ ID NO: 3778774 - DNA, 25 bp, Homo sapien
tggtccctgttgattctgtaagaat

SEQ ID NO: 3778775 - DNA, 25 bp, Homo sapien
tgaatggtccctgttgattctgtaa

SEQ ID NO: 3778776 - DNA, 25 bp, Homo sapien
tgaacttagccatgaaaccatggtt

SEQ ID NO: 3778777 - DNA, 25 bp, Homo sapien
aaatcctcagcactgaacttagcca

SEQ ID NO: 3778778 - DNA, 25 bp, Homo sapien
tagaagaacttttcacgaatgtgac

SEQ ID NO: 3778779 - DNA, 25 bp, Homo sapien
tgaaggtatgtctgtaccgcaatac

SEQ ID NO: 3778780 - DNA, 25 bp, Homo sapien
tctccagttaattcatccccgcaag

SEQ ID NO: 3778781 - DNA, 25 bp, Homo sapien
tggtggatggtccacctacaggttc

SEQ ID NO: 3778782 - DNA, 25 bp, Homo sapien
tggtccacctacaggttctttctcc

SEQ ID NO: 3778783 - DNA, 25 bp, Homo sapien
aaaaggcgagcgaatgaccccttct

SEQ ID NO: 3778784 - DNA, 25 bp, Homo sapien
atggatttaatgtgagagatggttc

SEQ ID NO: 3778785 - DNA, 25 bp, Homo sapien
gatggttccgttgccacagactttt

SEQ ID NO: 3778786 - DNA, 25 bp, Homo sapien
ttttaaacctgatccagacactatt

SEQ ID NO: 3778787 - DNA, 25 bp, Homo sapien
taaacagctctgaaactagcttttt

SEQ ID NO: 3778788 - DNA, 25 bp, Homo sapien
tccagaaggcacatcgctctccctg

SEQ ID NO: 3778789 - DNA, 25 bp, Homo sapien
gtagagccccctttctggttcctca

SEQ ID NO: 3778790 - DNA, 25 bp, Homo sapien
taagaaacaacaacttctcgaaagc

SEQ ID NO: 3778791 - DNA, 25 bp, Homo sapien
tgcgtctcttgtagagccccctttc

SEQ ID NO: 3778792 - DNA, 25 bp, Homo sapien
ctctaattgaaagctatttttgctg

SEQ ID NO: 3778793 - DNA, 25 bp, Homo sapien
tatttgaaattcttccgtagtgtaa

SEQ ID NO: 3778794 - DNA, 25 bp, Homo sapien
taattgaaagctatttttgctgttc

SEQ ID NO: 3778795 - DNA, 25 bp, Homo sapien
ctctctaattgaaagctatttttgc

SEQ ID NO: 3778796 - DNA, 25 bp, Homo sapien
gacgcattgcctggtgtgagtgaaa

SEQ ID NO: 3778797 - DNA, 25 bp, Homo sapien
gagtgaaaggcccagacaactcagg

SEQ ID NO: 3778798 - DNA, 25 bp, Homo sapien
caactcaggcaagaagagttcaccc

SEQ ID NO: 3778799 - DNA, 25 bp, Homo sapien
cattgcagctccacgtgggtgaagt

SEQ ID NO: 3778800 - DNA, 25 bp, Homo sapien
tggcttgcaggcattggatccaatt

SEQ ID NO: 3778801 - DNA, 25 bp, Homo sapien
gagacgaacaggtcatggcaatggc

SEQ ID NO: 3778802 - DNA, 25 bp, Homo sapien
tgctctggcttgcaggcattggatc

SEQ ID NO: 3778803 - DNA, 25 bp, Homo sapien
acgaacaggtcatggcaatggcatt

SEQ ID NO: 3778804 - DNA, 25 bp, Homo sapien
ggagtctgaatggaagtgaattctg

SEQ ID NO: 3778805 - DNA, 25 bp, Homo sapien
aatggaagtgaattctggcaaaggg

SEQ ID NO: 3778806 - DNA, 25 bp, Homo sapien
aaggtgatgttaagtaggtgatatg

SEQ ID NO: 3778807 - DNA, 25 bp, Homo sapien
aggtgatatggaagccttggtcact

SEQ ID NO: 3778808 - DNA, 25 bp, Homo sapien
gggtcctgatacaaaggaccatctc

SEQ ID NO: 3778809 - DNA, 25 bp, Homo sapien
cctgatacaaaggaccatctcgaat

SEQ ID NO: 3778810 - DNA, 25 bp, Homo sapien
tggagcggtgggacagagaaagtgg

SEQ ID NO: 3778811 - DNA, 25 bp, Homo sapien
agagaaagtggtgcagaacttccca

SEQ ID NO: 3778812 - DNA, 25 bp, Homo sapien
gatagtttccaggataccccggaga

SEQ ID NO: 3778813 - DNA, 25 bp, Homo sapien
taatagaaccgtaaggaccagtcag

SEQ ID NO: 3778814 - DNA, 25 bp, Homo sapien
caggaggtcaggactagttacaaca

SEQ ID NO: 3778815 - DNA, 25 bp, Homo sapien
gctcgaggctcaaggtcccaaaagt

SEQ ID NO: 3778816 - DNA, 25 bp, Homo sapien
taaacctgaagaaactcgtgtggac

SEQ ID NO: 3778817 - DNA, 25 bp, Homo sapien
tcactgctgaggagttcatgaggga

SEQ ID NO: 3778818 - DNA, 25 bp, Homo sapien
tgaaaatagagagcattgtcactgc

SEQ ID NO: 3778819 - DNA, 25 bp, Homo sapien
ggacagttgtccatggattctaacc

SEQ ID NO: 3778820 - DNA, 25 bp, Homo sapien
catttattcctgagagggactctcc

SEQ ID NO: 3778821 - DNA, 25 bp, Homo sapien
ccagaagcagttaacatcatgaaca

SEQ ID NO: 3778822 - DNA, 25 bp, Homo sapien
tcatgaacataaccaacatccgggc

SEQ ID NO: 3778823 - DNA, 25 bp, Homo sapien
tcagttttgataacccagaagcagt

SEQ ID NO: 3778824 - DNA, 25 bp, Homo sapien
gagcatccgtggcataagaaatgct

SEQ ID NO: 3778825 - DNA, 25 bp, Homo sapien
tgctgctatgctgtgagcatccgtg

SEQ ID NO: 3778826 - DNA, 25 bp, Homo sapien
ccgtggcataagaaatgctgactgt

SEQ ID NO: 3778827 - DNA, 25 bp, Homo sapien
tgctgtgagcatccgtggcataaga

SEQ ID NO: 3778828 - DNA, 25 bp, Homo sapien
cagttgacacctgtccaacctgagt

SEQ ID NO: 3778829 - DNA, 25 bp, Homo sapien
gaatcaacgccatcaacacaagttc

SEQ ID NO: 3778830 - DNA, 25 bp, Homo sapien
tccagtccagagacgtgtgcattca

SEQ ID NO: 3778831 - DNA, 25 bp, Homo sapien
gacgtgtgcattcacaactgaaaga

SEQ ID NO: 3778832 - DNA, 25 bp, Homo sapien
gacttaggcaaatattactgagctg

SEQ ID NO: 3778833 - DNA, 25 bp, Homo sapien
catttggcccataaccatttccagt

SEQ ID NO: 3778834 - DNA, 25 bp, Homo sapien
agtataacccgggagacacgtgcag

SEQ ID NO: 3778835 - DNA, 25 bp, Homo sapien
cattgtccatttagacaggggtgac

SEQ ID NO: 3778836 - DNA, 25 bp, Homo sapien
tgtgagtgtgcacactcttccgtca

SEQ ID NO: 3778837 - DNA, 25 bp, Homo sapien
tgagtgtgcacactcttccgtcacc

SEQ ID NO: 3778838 - DNA, 25 bp, Homo sapien
gtgagtgtgcacactcttccgtcac

SEQ ID NO: 3778839 - DNA, 25 bp, Homo sapien
cgcaaatatatccattgccttgcca

SEQ ID NO: 3778840 - DNA, 25 bp, Homo sapien
tgggaagacccaggtgtattcacac

SEQ ID NO: 3778841 - DNA, 25 bp, Homo sapien
gaacagccgccgttatttatctcac

SEQ ID NO: 3778842 - DNA, 25 bp, Homo sapien
tattcacacactcaacgggtggagc

SEQ ID NO: 3778843 - DNA, 25 bp, Homo sapien
gaaagagccttgagtgttgaaacac

SEQ ID NO: 3778844 - DNA, 25 bp, Homo sapien
tgcacaagtgtggagcaaggcccgg

SEQ ID NO: 3778845 - DNA, 25 bp, Homo sapien
tgttgggtgaaaacatccacccagc

SEQ ID NO: 3778846 - DNA, 25 bp, Homo sapien
gaagctgcactcgtctctgtccagc

SEQ ID NO: 3778847 - DNA, 25 bp, Homo sapien
tccagcttgctctcgcattaaatcc

SEQ ID NO: 3778848 - DNA, 25 bp, Homo sapien
acagatgccatggacacagcgtgcc

SEQ ID NO: 3778849 - DNA, 25 bp, Homo sapien
tccgtacgtctcaggtgggcagtga

SEQ ID NO: 3778850 - DNA, 25 bp, Homo sapien
tcgtcatatttggatgcacactggg

SEQ ID NO: 3778851 - DNA, 25 bp, Homo sapien
acaatgtcagggcacgcgctttggg

SEQ ID NO: 3778852 - DNA, 25 bp, Homo sapien
tacacaagagcacaatgtcagggca

SEQ ID NO: 3778853 - DNA, 25 bp, Homo sapien
agagcacaatgtcagggcacgcgct

SEQ ID NO: 3778854 - DNA, 25 bp, Homo sapien
ctgttggttacacaagagcacaatg

SEQ ID NO: 3778855 - DNA, 25 bp, Homo sapien
caggcacaggattcggcttgcctgt

SEQ ID NO: 3778856 - DNA, 25 bp, Homo sapien
ggtgggccccagaaccaattgctgg

SEQ ID NO: 3778857 - DNA, 25 bp, Homo sapien
tcggcttgcctgtggtgggccccag

SEQ ID NO: 3778858 - DNA, 25 bp, Homo sapien
ctccaggcacaggattcggcttgcc

SEQ ID NO: 3778859 - DNA, 25 bp, Homo sapien
gcagttaaatcctttctctttatct

SEQ ID NO: 3778860 - DNA, 25 bp, Homo sapien
cagttaaatcctttctctttatctc

SEQ ID NO: 3778861 - DNA, 25 bp, Homo sapien
agttaaatcctttctctttatctct

SEQ ID NO: 3778862 - DNA, 25 bp, Homo sapien
gaactcatagacatatctagtagaa

SEQ ID NO: 3778863 - DNA, 25 bp, Homo sapien
tacttttgcataatgattgaactca

SEQ ID NO: 3778864 - DNA, 25 bp, Homo sapien
tagaagtgtgcattaatagtgatgg

SEQ ID NO: 3778865 - DNA, 25 bp, Homo sapien
ataaaaagagaaggtttgtgactgc

SEQ ID NO: 3778866 - DNA, 25 bp, Homo sapien
caatgtgtgtggcatcagcaaagct

SEQ ID NO: 3778867 - DNA, 25 bp, Homo sapien
tctttacccaaaactatgagcttgc

SEQ ID NO: 3778868 - DNA, 25 bp, Homo sapien
gccaaactataaggaaagacactgt

SEQ ID NO: 3778869 - DNA, 25 bp, Homo sapien
gcaaagctttgacgatggatatccc

SEQ ID NO: 3778870 - DNA, 25 bp, Homo sapien
gctccttttgcaccaggccatgctt

SEQ ID NO: 3778871 - DNA, 25 bp, Homo sapien
tcagctccttttgcaccaggccatg

SEQ ID NO: 3778872 - DNA, 25 bp, Homo sapien
ctaagtcttcagctccttttgcacc

SEQ ID NO: 3778873 - DNA, 25 bp, Homo sapien
cttcagctccttttgcaccaggcca

SEQ ID NO: 3778874 - DNA, 25 bp, Homo sapien
ctgtgccaatcacgggagccttctt

SEQ ID NO: 3778875 - DNA, 25 bp, Homo sapien
tctctgtgccaatcacgggagcctt

SEQ ID NO: 3778876 - DNA, 25 bp, Homo sapien
cggttccttggggatgttagagcaa

SEQ ID NO: 3778877 - DNA, 25 bp, Homo sapien
tccggttccttggggatgttagagc

SEQ ID NO: 3778878 - DNA, 25 bp, Homo sapien
tcacggggtgagagtaaaggactca

SEQ ID NO: 3778879 - DNA, 25 bp, Homo sapien
cttcacggggtgagagtaaaggact

SEQ ID NO: 3778880 - DNA, 25 bp, Homo sapien
gagtaaaggactcatgagcttttct

SEQ ID NO: 3778881 - DNA, 25 bp, Homo sapien
ggtgagagtaaaggactcatgagct

SEQ ID NO: 3778882 - DNA, 25 bp, Homo sapien
tctcacattcgttaacatcagctga

SEQ ID NO: 3778883 - DNA, 25 bp, Homo sapien
cgttaacatcagctgagcagagagg

SEQ ID NO: 3778884 - DNA, 25 bp, Homo sapien
gtaaatctcacattcgttaacatca

SEQ ID NO: 3778885 - DNA, 25 bp, Homo sapien
cattcgttaacatcagctgagcaga

SEQ ID NO: 3778886 - DNA, 25 bp, Homo sapien
tgggttttagcatacctggtatatt

SEQ ID NO: 3778887 - DNA, 25 bp, Homo sapien
ggaggccacagaatcctagaaactt

SEQ ID NO: 3778888 - DNA, 25 bp, Homo sapien
tcaccactgtttgggttttagcata

SEQ ID NO: 3778889 - DNA, 25 bp, Homo sapien
gccatcattcttaaccaaagagtag

SEQ ID NO: 3778890 - DNA, 25 bp, Homo sapien
gaggcaggttccaccattctggcaa

SEQ ID NO: 3778891 - DNA, 25 bp, Homo sapien
caaaaaaaggaatcatgcagattga

SEQ ID NO: 3778892 - DNA, 25 bp, Homo sapien
tcatgcagattgaggcaggttccac

SEQ ID NO: 3778893 - DNA, 25 bp, Homo sapien
aggcaggttccaccattctggcaag

SEQ ID NO: 3778894 - DNA, 25 bp, Homo sapien
ctgctgcaagccttggaattttctc

SEQ ID NO: 3778895 - DNA, 25 bp, Homo sapien
ggaattttctctcaagatccaccag

SEQ ID NO: 3778896 - DNA, 25 bp, Homo sapien
aagccttggaattttctctcaagat

SEQ ID NO: 3778897 - DNA, 25 bp, Homo sapien
tgcaagccttggaattttctctcaa

SEQ ID NO: 3778898 - DNA, 25 bp, Homo sapien
tagatttgactagatatattttgag

SEQ ID NO: 3778899 - DNA, 25 bp, Homo sapien
aattgcactcccttttaactctata

SEQ ID NO: 3778900 - DNA, 25 bp, Homo sapien
tatattttgaggcagaccaattgca

SEQ ID NO: 3778901 - DNA, 25 bp, Homo sapien
ttggaattaagctgatagatttgac

SEQ ID NO: 3778902 - DNA, 25 bp, Homo sapien
agggatccggttctaaactcaatgt

SEQ ID NO: 3778903 - DNA, 25 bp, Homo sapien
tcccagggatccggttctaaactca

SEQ ID NO: 3778904 - DNA, 25 bp, Homo sapien
agaaacaccaaatttcctctctctg

SEQ ID NO: 3778905 - DNA, 25 bp, Homo sapien
ccagggatccggttctaaactcaat

SEQ ID NO: 3778906 - DNA, 25 bp, Homo sapien
ccagcttcgccatttacttcagcaa

SEQ ID NO: 3778907 - DNA, 25 bp, Homo sapien
gcgctatacacccttccagctggat

SEQ ID NO: 3778908 - DNA, 25 bp, Homo sapien
cagctggatatatggtttgaggaca

SEQ ID NO: 3778909 - DNA, 25 bp, Homo sapien
acctatggacggctgtggaatccat

SEQ ID NO: 3778910 - DNA, 25 bp, Homo sapien
ttttatcatccctgtgggacctatg

SEQ ID NO: 3778911 - DNA, 25 bp, Homo sapien
tgtagtaaattgcagattcttccct

SEQ ID NO: 3778912 - DNA, 25 bp, Homo sapien
gaatgcattcccctaatattctgca

SEQ ID NO: 3778913 - DNA, 25 bp, Homo sapien
ccatctataagatgataggaacacg

SEQ ID NO: 3778914 - DNA, 25 bp, Homo sapien
tccagtctagggaagaccacatggt

SEQ ID NO: 3778915 - DNA, 25 bp, Homo sapien
ctgctgacttctgctccggtcctgt

SEQ ID NO: 3778916 - DNA, 25 bp, Homo sapien
tgctccggtcctgtcgcatggtctc

SEQ ID NO: 3778917 - DNA, 25 bp, Homo sapien
tccggtcctgtcgcatggtctcacc

SEQ ID NO: 3778918 - DNA, 25 bp, Homo sapien
gctccggtcctgtcgcatggtctca

SEQ ID NO: 3778919 - DNA, 25 bp, Homo sapien
gcccagtatgggcacactatagaaa

SEQ ID NO: 3778920 - DNA, 25 bp, Homo sapien
actatagaaagtggttccactggcc

SEQ ID NO: 3778921 - DNA, 25 bp, Homo sapien
taaacagcaggtaccaaactaggaa

SEQ ID NO: 3778922 - DNA, 25 bp, Homo sapien
ttaggcaacattacaaagacaagtg

SEQ ID NO: 3778923 - DNA, 25 bp, Homo sapien
tggagggtctcgcatcattataagg

SEQ ID NO: 3778924 - DNA, 25 bp, Homo sapien
taacgaaattcaaatccagagggac

SEQ ID NO: 3778925 - DNA, 25 bp, Homo sapien
ccatagcagaggagatactaattgc

SEQ ID NO: 3778926 - DNA, 25 bp, Homo sapien
cattataaggatcagccatagcaga

SEQ ID NO: 3778927 - DNA, 25 bp, Homo sapien
ggtttccaaggtgtgaagcaatgaa

SEQ ID NO: 3778928 - DNA, 25 bp, Homo sapien
taccataggtgaaccctcctgccat

SEQ ID NO: 3778929 - DNA, 25 bp, Homo sapien
cagcagctccattggattaatccaa

SEQ ID NO: 3778930 - DNA, 25 bp, Homo sapien
caatgaagcggagtttaccataggt

SEQ ID NO: 3778931 - DNA, 25 bp, Homo sapien
gaggtgaggatgtcaccaccgatgg

SEQ ID NO: 3778932 - DNA, 25 bp, Homo sapien
gacaccattcatacgataatcaaag

SEQ ID NO: 3778933 - DNA, 25 bp, Homo sapien
tctgattgcactcagacttcagcat

SEQ ID NO: 3778934 - DNA, 25 bp, Homo sapien
gtggtaaataactgcaaacaactta

SEQ ID NO: 3778935 - DNA, 25 bp, Homo sapien
tactcagcatactcatatctaagtc

SEQ ID NO: 3778936 - DNA, 25 bp, Homo sapien
acagaattattcaaacaatccccca

SEQ ID NO: 3778937 - DNA, 25 bp, Homo sapien
aattctattaccatactcagcatac

SEQ ID NO: 3778938 - DNA, 25 bp, Homo sapien
tattaccatactcagcatactcata

SEQ ID NO: 3778939 - DNA, 25 bp, Homo sapien
tctgtaggaacgagcctctctgggc

SEQ ID NO: 3778940 - DNA, 25 bp, Homo sapien
tgtaggtcgggaaacatcaagcctg

SEQ ID NO: 3778941 - DNA, 25 bp, Homo sapien
tgtgtttagcatgcaagccctggct

SEQ ID NO: 3778942 - DNA, 25 bp, Homo sapien
taattacacttttcagggaggagca

SEQ ID NO: 3778943 - DNA, 25 bp, Homo sapien
aattttgtgacgaacctccatagcg

SEQ ID NO: 3778944 - DNA, 25 bp, Homo sapien
agttagaatcccaagccgaaggcca

SEQ ID NO: 3778945 - DNA, 25 bp, Homo sapien
cagaggtccagaaaagtgcttgcta

SEQ ID NO: 3778946 - DNA, 25 bp, Homo sapien
gaagtaaacactgaagccatgctag

SEQ ID NO: 3778947 - DNA, 25 bp, Homo sapien
ttgattagtttagctactacatgca

SEQ ID NO: 3778948 - DNA, 25 bp, Homo sapien
agattttgattagtttagctactac

SEQ ID NO: 3778949 - DNA, 25 bp, Homo sapien
ttttgattagtttagctactacatg

SEQ ID NO: 3778950 - DNA, 25 bp, Homo sapien
tgattagtttagctactacatgcac

SEQ ID NO: 3778951 - DNA, 25 bp, Homo sapien
agtaggcgataacgctgtttcactg

SEQ ID NO: 3778952 - DNA, 25 bp, Homo sapien
tccaagtaggcgataacgctgtttc

SEQ ID NO: 3778953 - DNA, 25 bp, Homo sapien
ctatttccaagtaggcgataacgct

SEQ ID NO: 3778954 - DNA, 25 bp, Homo sapien
aggcgataacgctgtttcactgtta

SEQ ID NO: 3778955 - DNA, 25 bp, Homo sapien
ggacaggaaggtagaattagttaca

SEQ ID NO: 3778956 - DNA, 25 bp, Homo sapien
caattaggagcattaagaatagcaa

SEQ ID NO: 3778957 - DNA, 25 bp, Homo sapien
agcaaaatttcatatactcatgagg

SEQ ID NO: 3778958 - DNA, 25 bp, Homo sapien
aattagttacaataaagttgcttca

SEQ ID NO: 3778959 - DNA, 25 bp, Homo sapien
caaacaggcttttagactatcccag

SEQ ID NO: 3778960 - DNA, 25 bp, Homo sapien
aagtagccagaggtacaaatgtacc

SEQ ID NO: 3778961 - DNA, 25 bp, Homo sapien
gcaatattacaattacctcagaagg

SEQ ID NO: 3778962 - DNA, 25 bp, Homo sapien
ccactgaaagtgatggcaaattact

SEQ ID NO: 3778963 - DNA, 25 bp, Homo sapien
gacatcagggtaagctcaactccaa

SEQ ID NO: 3778964 - DNA, 25 bp, Homo sapien
gacagttgtgtcacggtgctgctca

SEQ ID NO: 3778965 - DNA, 25 bp, Homo sapien
gtattaccaaagtgactactgccct

SEQ ID NO: 3778966 - DNA, 25 bp, Homo sapien
tgttggaaacacacatgagggacag

SEQ ID NO: 3778967 - DNA, 25 bp, Homo sapien
tcttcaagagtatgtctgattgctc

SEQ ID NO: 3778968 - DNA, 25 bp, Homo sapien
ttcaagagtatgtctgattgctcat

SEQ ID NO: 3778969 - DNA, 25 bp, Homo sapien
tctgtcttcaagagtatgtctgatt

SEQ ID NO: 3778970 - DNA, 25 bp, Homo sapien
tgtcttcaagagtatgtctgattgc

SEQ ID NO: 3778971 - DNA, 25 bp, Homo sapien
ctgttcttcttgtgacaaattggta

SEQ ID NO: 3778972 - DNA, 25 bp, Homo sapien
tatcgcagtttaagtattaacagct

SEQ ID NO: 3778973 - DNA, 25 bp, Homo sapien
tctttaggagtgaaatatcgcagtt

SEQ ID NO: 3778974 - DNA, 25 bp, Homo sapien
gacaaattggtaagggatttgtaga

SEQ ID NO: 3778975 - DNA, 25 bp, Homo sapien
tgtcccttctatgtagcttccatat

SEQ ID NO: 3778976 - DNA, 25 bp, Homo sapien
gaccctgtcccttctatgtagcttc

SEQ ID NO: 3778977 - DNA, 25 bp, Homo sapien
ctgcagtctgtaacacagaccctgt

SEQ ID NO: 3778978 - DNA, 25 bp, Homo sapien
cagaccctgtcccttctatgtagct

SEQ ID NO: 3778979 - DNA, 25 bp, Homo sapien
catatcgcagcaatgactttggtgg

SEQ ID NO: 3778980 - DNA, 25 bp, Homo sapien
aagatactggttcacgtcagtgtca

SEQ ID NO: 3778981 - DNA, 25 bp, Homo sapien
caagtgggctgaacaatgtctaaca

SEQ ID NO: 3778982 - DNA, 25 bp, Homo sapien
tgtctaacagaagagcatatcgcag

SEQ ID NO: 3778983 - DNA, 25 bp, Homo sapien
agaacactgtatgctgccatcaaag

SEQ ID NO: 3778984 - DNA, 25 bp, Homo sapien
tcttctgcagtttcaagcttaaaaa

SEQ ID NO: 3778985 - DNA, 25 bp, Homo sapien
gaacactgtatgctgccatcaaagc

SEQ ID NO: 3778986 - DNA, 25 bp, Homo sapien
gaaaatatcgtagccttgaatttgg

SEQ ID NO: 3778987 - DNA, 25 bp, Homo sapien
gcaataagaaaatatcgtagccttg

SEQ ID NO: 3778988 - DNA, 25 bp, Homo sapien
atatcgtagccttgaatttggaatg

SEQ ID NO: 3778989 - DNA, 25 bp, Homo sapien
taagaaaatatcgtagccttgaatt

SEQ ID NO: 3778990 - DNA, 25 bp, Homo sapien
ttttctattgtttgtatcaagaggt

SEQ ID NO: 3778991 - DNA, 25 bp, Homo sapien
cttggtactgaaagccacaattttc

SEQ ID NO: 3778992 - DNA, 25 bp, Homo sapien
gaggttggagataatagaaactctt

SEQ ID NO: 3778993 - DNA, 25 bp, Homo sapien
gataatagaaactcttggtactgaa

SEQ ID NO: 3778994 - DNA, 25 bp, Homo sapien
caaggactcgggtggatgctttctc

SEQ ID NO: 3778995 - DNA, 25 bp, Homo sapien
ttacagacagcagctgactcaagga

SEQ ID NO: 3778996 - DNA, 25 bp, Homo sapien
catctgaaagaaccccgacacagga

SEQ ID NO: 3778997 - DNA, 25 bp, Homo sapien
tggccagtcagatgggagcactgtt

SEQ ID NO: 3778998 - DNA, 25 bp, Homo sapien
cattttccaaaagaatatactttgg

SEQ ID NO: 3778999 - DNA, 25 bp, Homo sapien
acattttccaaaagaatatactttg

SEQ ID NO: 3779000 - DNA, 25 bp, Homo sapien
atatgtaagaagctattcgtccttg

SEQ ID NO: 3779001 - DNA, 25 bp, Homo sapien
gaagctattcgtccttgaatcagtc

SEQ ID NO: 3779002 - DNA, 25 bp, Homo sapien
gctattcgtccttgaatcagtcata

SEQ ID NO: 3779003 - DNA, 25 bp, Homo sapien
taagaagctattcgtccttgaatca

SEQ ID NO: 3779004 - DNA, 25 bp, Homo sapien
tatcaaaagataatctgtcaaactc

SEQ ID NO: 3779005 - DNA, 25 bp, Homo sapien
atatcaaaagataatctgtcaaact

SEQ ID NO: 3779006 - DNA, 25 bp, Homo sapien
ggcagggagggctcattaaaatcat

SEQ ID NO: 3779007 - DNA, 25 bp, Homo sapien
tcaaaagataatctgtcaaactctt

SEQ ID NO: 3779008 - DNA, 25 bp, Homo sapien
aaaagggcctcattctcagatatcc

SEQ ID NO: 3779009 - DNA, 25 bp, Homo sapien
gcagttgtgtgcaatgaacttcaaa

SEQ ID NO: 3779010 - DNA, 25 bp, Homo sapien
gaccagtcaccatccctttcatata

SEQ ID NO: 3779011 - DNA, 25 bp, Homo sapien
gacaagatgcatcaaaagaattcct

SEQ ID NO: 3779012 - DNA, 25 bp, Homo sapien
ctgaaaactgtgctgtgttgctcct

SEQ ID NO: 3779013 - DNA, 25 bp, Homo sapien
aaaactgtgctgtgttgctcctttt

SEQ ID NO: 3779014 - DNA, 25 bp, Homo sapien
ctaagtagctgaaaactgtgctgtg

SEQ ID NO: 3779015 - DNA, 25 bp, Homo sapien
taagtagctgaaaactgtgctgtgt

SEQ ID NO: 3779016 - DNA, 25 bp, Homo sapien
gggcatcctatgtctagaatcgaaa

SEQ ID NO: 3779017 - DNA, 25 bp, Homo sapien
taatattagatcaagtcagtgggct

SEQ ID NO: 3779018 - DNA, 25 bp, Homo sapien
gataaggcagttaggcaaaaattca

SEQ ID NO: 3779019 - DNA, 25 bp, Homo sapien
tattgactggcaggtgtatttgtcc

SEQ ID NO: 3779020 - DNA, 25 bp, Homo sapien
cggatcactctgtcttcggtagcta

SEQ ID NO: 3779021 - DNA, 25 bp, Homo sapien
agaagggctcatggatgttatattg

SEQ ID NO: 3779022 - DNA, 25 bp, Homo sapien
taatgatatttatcacggatcactc

SEQ ID NO: 3779023 - DNA, 25 bp, Homo sapien
tagctatcatttactctacagtatg

SEQ ID NO: 3779024 - DNA, 25 bp, Homo sapien
ttttcgaagttcaatatcaccacag

SEQ ID NO: 3779025 - DNA, 25 bp, Homo sapien
cttgtgctgaagtcaccacaggtga

SEQ ID NO: 3779026 - DNA, 25 bp, Homo sapien
caattaagacaacggaaaccagtat

SEQ ID NO: 3779027 - DNA, 25 bp, Homo sapien
tgatctccctgtctatagctggact

SEQ ID NO: 3779028 - DNA, 25 bp, Homo sapien
ttcaatcgtcttggcaagtaactgt

SEQ ID NO: 3779029 - DNA, 25 bp, Homo sapien
cttgtatacttcattagcgacagtg

SEQ ID NO: 3779030 - DNA, 25 bp, Homo sapien
agccaccacttgtgcaggtatacag

SEQ ID NO: 3779031 - DNA, 25 bp, Homo sapien
gacagtgttgacatcaatggcagcc

SEQ ID NO: 3779032 - DNA, 25 bp, Homo sapien
aagactcatactgttcatctgggag

SEQ ID NO: 3779033 - DNA, 25 bp, Homo sapien
tctccaatttggaggaggatagtcc

SEQ ID NO: 3779034 - DNA, 25 bp, Homo sapien
tagaccagtgacaaaagcttaagac

SEQ ID NO: 3779035 - DNA, 25 bp, Homo sapien
gatagtcccactaagcaatccctaa

SEQ ID NO: 3779036 - DNA, 25 bp, Homo sapien
gaaatgctcttttatggctatgttt

SEQ ID NO: 3779037 - DNA, 25 bp, Homo sapien
atttgcctttcctagatactacgtt

SEQ ID NO: 3779038 - DNA, 25 bp, Homo sapien
tagtaagtgaactacgacaaacaat

SEQ ID NO: 3779039 - DNA, 25 bp, Homo sapien
gctatgtttgtctattaatttgcct

SEQ ID NO: 3779040 - DNA, 25 bp, Homo sapien
catagttaaaaggtcaggtaggtag

SEQ ID NO: 3779041 - DNA, 25 bp, Homo sapien
aaaccacctggaaaggagcaatgca

SEQ ID NO: 3779042 - DNA, 25 bp, Homo sapien
tagtagttctaaccagaacaacggc

SEQ ID NO: 3779043 - DNA, 25 bp, Homo sapien
gaacaacggcaacatagcatagtta

SEQ ID NO: 3779044 - DNA, 25 bp, Homo sapien
ttactcttgttactcttggtcctaa

SEQ ID NO: 3779045 - DNA, 25 bp, Homo sapien
gttactcttgttactcttggtccta

SEQ ID NO: 3779046 - DNA, 25 bp, Homo sapien
agttactcttgttactcttggtcct

SEQ ID NO: 3779047 - DNA, 25 bp, Homo sapien
tactcttgttactcttggtcctaaa

SEQ ID NO: 3779048 - DNA, 25 bp, Homo sapien
gaattgtagctattatcccttccaa

SEQ ID NO: 3779049 - DNA, 25 bp, Homo sapien
tagcattcgcaaacttctaccttga

SEQ ID NO: 3779050 - DNA, 25 bp, Homo sapien
gaagacacgtttctttccaacgatc

SEQ ID NO: 3779051 - DNA, 25 bp, Homo sapien
tccaacgatcagacgtccaagttct

SEQ ID NO: 3779052 - DNA, 25 bp, Homo sapien
cgctgtatagctccagcacccgcag

SEQ ID NO: 3779053 - DNA, 25 bp, Homo sapien
acgccgctgtatagctccagcaccc

SEQ ID NO: 3779054 - DNA, 25 bp, Homo sapien
gtgcatgccgcccacgccgctgtat

SEQ ID NO: 3779055 - DNA, 25 bp, Homo sapien
cgcccacgccgctgtatagctccag

SEQ ID NO: 3779056 - DNA, 25 bp, Homo sapien
cccggagctaggcctgccggtccgt

SEQ ID NO: 3779057 - DNA, 25 bp, Homo sapien
ccccggagctaggcctgccggtccg

SEQ ID NO: 3779058 - DNA, 25 bp, Homo sapien
agccccggagctaggcctgccggtc

SEQ ID NO: 3779059 - DNA, 25 bp, Homo sapien
gccccggagctaggcctgccggtcc

SEQ ID NO: 3779060 - DNA, 25 bp, Homo sapien
taacctagtgatctggattgcccct

SEQ ID NO: 3779061 - DNA, 25 bp, Homo sapien
tgccaaggcttgtgaatcgcacaca

SEQ ID NO: 3779062 - DNA, 25 bp, Homo sapien
caaattatccggtgatgctgatgct

SEQ ID NO: 3779063 - DNA, 25 bp, Homo sapien
aaggtatgccttttctcactagaga

SEQ ID NO: 3779064 - DNA, 25 bp, Homo sapien
attgagaagaaaagaaatatttgtc

SEQ ID NO: 3779065 - DNA, 25 bp, Homo sapien
ctatattgagaagaaaagaaatatt

SEQ ID NO: 3779066 - DNA, 25 bp, Homo sapien
atattgagaagaaaagaaatatttg

SEQ ID NO: 3779067 - DNA, 25 bp, Homo sapien
tgagaagaaaagaaatatttgtcat

SEQ ID NO: 3779068 - DNA, 25 bp, Homo sapien
taaatctgaaccgagaacctagcca

SEQ ID NO: 3779069 - DNA, 25 bp, Homo sapien
tagttctgcctttaacgtatcaaca

SEQ ID NO: 3779070 - DNA, 25 bp, Homo sapien
tttgtaatagcaacactcagtggag

SEQ ID NO: 3779071 - DNA, 25 bp, Homo sapien
aaatacggcattttatgtcatagca

SEQ ID NO: 3779072 - DNA, 25 bp, Homo sapien
ttttattctgatcaccacgagtcca

SEQ ID NO: 3779073 - DNA, 25 bp, Homo sapien
caccacgagtccattaaatttcaaa

SEQ ID NO: 3779074 - DNA, 25 bp, Homo sapien
tatgtcatccaaagggagctttgct

SEQ ID NO: 3779075 - DNA, 25 bp, Homo sapien
actactaagtaataaatctatgtca

SEQ ID NO: 3779076 - DNA, 25 bp, Homo sapien
ggtaaggttactgaacactcaggtc

SEQ ID NO: 3779077 - DNA, 25 bp, Homo sapien
ggtttcagacccactagtcatagtc

SEQ ID NO: 3779078 - DNA, 25 bp, Homo sapien
cattctgttatgagcatgagtcacc

SEQ ID NO: 3779079 - DNA, 25 bp, Homo sapien
tcaatgcctccctatgctaagaagg

SEQ ID NO: 3779080 - DNA, 25 bp, Homo sapien
gaagtatattaagcatgctctattt

SEQ ID NO: 3779081 - DNA, 25 bp, Homo sapien
tctgaagtatattaagcatgctcta

SEQ ID NO: 3779082 - DNA, 25 bp, Homo sapien
gacatctgaagtatattaagcatgc

SEQ ID NO: 3779083 - DNA, 25 bp, Homo sapien
tgcagacatctgaagtatattaagc

SEQ ID NO: 3779084 - DNA, 25 bp, Homo sapien
tataaagtactacagcacggtgagg

SEQ ID NO: 3779085 - DNA, 25 bp, Homo sapien
tcttcatatgtcaaaccgggctgtc

SEQ ID NO: 3779086 - DNA, 25 bp, Homo sapien
gggacatctccaatggtagcacaaa

SEQ ID NO: 3779087 - DNA, 25 bp, Homo sapien
gcaatcatatcaaagtgtgcctggt

SEQ ID NO: 3779088 - DNA, 25 bp, Homo sapien
ctttgggaatccctagtgtttactg

SEQ ID NO: 3779089 - DNA, 25 bp, Homo sapien
tggtttctacttgtatccgtgttgc

SEQ ID NO: 3779090 - DNA, 25 bp, Homo sapien
gatatcgttgcccaaatagtgacca

SEQ ID NO: 3779091 - DNA, 25 bp, Homo sapien
tagtactcgataggtggtctttcaa

SEQ ID NO: 3779092 - DNA, 25 bp, Homo sapien
gacgcagccgcgctcccaccaccca

SEQ ID NO: 3779093 - DNA, 25 bp, Homo sapien
cagagacgcagccgcgctcccacca

SEQ ID NO: 3779094 - DNA, 25 bp, Homo sapien
cgcagccgcgctcccaccacccaca

SEQ ID NO: 3779095 - DNA, 25 bp, Homo sapien
gagacgcagccgcgctcccaccacc

SEQ ID NO: 3779096 - DNA, 25 bp, Homo sapien
tccagccggagctacgtgactacgt

SEQ ID NO: 3779097 - DNA, 25 bp, Homo sapien
cagaataagatcctgctggccgagc

SEQ ID NO: 3779098 - DNA, 25 bp, Homo sapien
gacgccatcaacaccgagttcaaga

SEQ ID NO: 3779099 - DNA, 25 bp, Homo sapien
ctgcaggactcggtggacttctcgc

SEQ ID NO: 3779100 - DNA, 25 bp, Homo sapien
tgcaggaggagatgcttcagagaga

SEQ ID NO: 3779101 - DNA, 25 bp, Homo sapien
gcttcagagagaggaagccgaaaac

SEQ ID NO: 3779102 - DNA, 25 bp, Homo sapien
caggaggagatgcttcagagagagg

SEQ ID NO: 3779103 - DNA, 25 bp, Homo sapien
ttcagagagaggaagccgaaaacac

SEQ ID NO: 3779104 - DNA, 25 bp, Homo sapien
ctggcacgtcttgaccttgaacgca

SEQ ID NO: 3779105 - DNA, 25 bp, Homo sapien
gacaatgcgtctctggcacgtcttg

SEQ ID NO: 3779106 - DNA, 25 bp, Homo sapien
aggatgttgacaatgcgtctctggc

SEQ ID NO: 3779107 - DNA, 25 bp, Homo sapien
tggcacgtcttgaccttgaacgcaa

SEQ ID NO: 3779108 - DNA, 25 bp, Homo sapien
gaataccaagacctgctcaatgtta

SEQ ID NO: 3779109 - DNA, 25 bp, Homo sapien
ggaaatggctcgtcaccttcgtgaa

SEQ ID NO: 3779110 - DNA, 25 bp, Homo sapien
tgaaggaggaaatggctcgtcacct

SEQ ID NO: 3779111 - DNA, 25 bp, Homo sapien
tgagattcagaatatgaaggaggaa

SEQ ID NO: 3779112 - DNA, 25 bp, Homo sapien
taatctggattcactccctctggtt

SEQ ID NO: 3779113 - DNA, 25 bp, Homo sapien
ggttgatacccactcaaaaaggaca

SEQ ID NO: 3779114 - DNA, 25 bp, Homo sapien
aaggacacttctgattaagacggtt

SEQ ID NO: 3779115 - DNA, 25 bp, Homo sapien
gattaagacggttgaaactagagat

SEQ ID NO: 3779116 - DNA, 25 bp, Homo sapien
cagtttttcaggagcgcaagataga

SEQ ID NO: 3779117 - DNA, 25 bp, Homo sapien
ggttatcaacgaaacttctcagcat

SEQ ID NO: 3779118 - DNA, 25 bp, Homo sapien
cagcatcacgatgaccttgaataaa

SEQ ID NO: 3779119 - DNA, 25 bp, Homo sapien
taagctctagttcttaacaaccgac

SEQ ID NO: 3779120 - DNA, 25 bp, Homo sapien
tctctatgaaggctccaaccctgca

SEQ ID NO: 3779121 - DNA, 25 bp, Homo sapien
aaattcatgtcaaggcacgagttcc

SEQ ID NO: 3779122 - DNA, 25 bp, Homo sapien
gagtcatttcttatggaggtgcacg

SEQ ID NO: 3779123 - DNA, 25 bp, Homo sapien
tgaccttacttgtgtagactgcagc

SEQ ID NO: 3779124 - DNA, 25 bp, Homo sapien
ttatgtcgagcaaaagtgcaagaca

SEQ ID NO: 3779125 - DNA, 25 bp, Homo sapien
gagggattacaaagtagcacaagaa

SEQ ID NO: 3779126 - DNA, 25 bp, Homo sapien
tcttgtatttgacacgtagccttga

SEQ ID NO: 3779127 - DNA, 25 bp, Homo sapien
tgcaagacaagaaatgagtacagac

SEQ ID NO: 3779128 - DNA, 25 bp, Homo sapien
gaacattattggcacctcacagcag

SEQ ID NO: 3779129 - DNA, 25 bp, Homo sapien
cagtcagacttggttgtggcgaatc

SEQ ID NO: 3779130 - DNA, 25 bp, Homo sapien
cagatttcttgggagtgtcacagtc

SEQ ID NO: 3779131 - DNA, 25 bp, Homo sapien
agtaggagagcttcaaacaatggcc

SEQ ID NO: 3779132 - DNA, 25 bp, Homo sapien
taaaatagcatataaagtccccaca

SEQ ID NO: 3779133 - DNA, 25 bp, Homo sapien
agactgggtattgtaactgttcacg

SEQ ID NO: 3779134 - DNA, 25 bp, Homo sapien
tcctacaagaggcaataatccttct

SEQ ID NO: 3779135 - DNA, 25 bp, Homo sapien
gggtcttcccatatctgcagattag

SEQ ID NO: 3779136 - DNA, 25 bp, Homo sapien
caaaggccatgccaataattttcat

SEQ ID NO: 3779137 - DNA, 25 bp, Homo sapien
tatggtgtccatgttataaggagaa

SEQ ID NO: 3779138 - DNA, 25 bp, Homo sapien
ggagacattgttaatcacctactgc

SEQ ID NO: 3779139 - DNA, 25 bp, Homo sapien
gagaaggattgaatgacttgccatc

SEQ ID NO: 3779140 - DNA, 25 bp, Homo sapien
gacaagcggtatgcagtcacacctt

SEQ ID NO: 3779141 - DNA, 25 bp, Homo sapien
tgctttagactcttcgagcgtgtag

SEQ ID NO: 3779142 - DNA, 25 bp, Homo sapien
tgcaacacttgtgatcatcaagccg

SEQ ID NO: 3779143 - DNA, 25 bp, Homo sapien
ctacagttttagagaagggccagaa

SEQ ID NO: 3779144 - DNA, 25 bp, Homo sapien
ctgccaacatctttactaacatctc

SEQ ID NO: 3779145 - DNA, 25 bp, Homo sapien
atagtcacaagatttgttttactgc

SEQ ID NO: 3779146 - DNA, 25 bp, Homo sapien
cagagttatgatgcttggatttata

SEQ ID NO: 3779147 - DNA, 25 bp, Homo sapien
ttcagagttatgatgcttggattta

SEQ ID NO: 3779148 - DNA, 25 bp, Homo sapien
cactgattataagggtagtccacaa

SEQ ID NO: 3779149 - DNA, 25 bp, Homo sapien
cggatttatctatttcagttccaca

SEQ ID NO: 3779150 - DNA, 25 bp, Homo sapien
aacgaagtcggatttatctatttca

SEQ ID NO: 3779151 - DNA, 25 bp, Homo sapien
ttattcagaattcccccatttccga

SEQ ID NO: 3779152 - DNA, 25 bp, Homo sapien
cagcccagggccgatgtggttctga

SEQ ID NO: 3779153 - DNA, 25 bp, Homo sapien
tccggagtgacagaagatgccccag

SEQ ID NO: 3779154 - DNA, 25 bp, Homo sapien
tgagcagtccggagtgacagaagat

SEQ ID NO: 3779155 - DNA, 25 bp, Homo sapien
tggttctgagcagtccggagtgaca

SEQ ID NO: 3779156 - DNA, 25 bp, Homo sapien
tttttgctttccacctcgtaactca

SEQ ID NO: 3779157 - DNA, 25 bp, Homo sapien
cacctcgtaactcatattagtccca

SEQ ID NO: 3779158 - DNA, 25 bp, Homo sapien
caacaaagttttgaacagcatcaca

SEQ ID NO: 3779159 - DNA, 25 bp, Homo sapien
tcccaactggagtgttattctgaga

SEQ ID NO: 3779160 - DNA, 25 bp, Homo sapien
tagttgtacttgttgcaattcaaag

SEQ ID NO: 3779161 - DNA, 25 bp, Homo sapien
gaactggacaataagcgcttgaata

SEQ ID NO: 3779162 - DNA, 25 bp, Homo sapien
gtatctgtccattaatccaatttta

SEQ ID NO: 3779163 - DNA, 25 bp, Homo sapien
tatagatctgagtgcatgtcacctt

SEQ ID NO: 3779164 - DNA, 25 bp, Homo sapien
tcgaagatctgcaaaatcacctttg

SEQ ID NO: 3779165 - DNA, 25 bp, Homo sapien
tataaggatgaaatcgaagatctgc

SEQ ID NO: 3779166 - DNA, 25 bp, Homo sapien
ctggatctataaggatgaaatcgaa

SEQ ID NO: 3779167 - DNA, 25 bp, Homo sapien
gatgaaatcgaagatctgcaaaatc

SEQ ID NO: 3779168 - DNA, 25 bp, Homo sapien
ttctcttcttgcctcatttgacatg

SEQ ID NO: 3779169 - DNA, 25 bp, Homo sapien
catacataggccaacaatccagcac

SEQ ID NO: 3779170 - DNA, 25 bp, Homo sapien
aacatacataggccaacaatccagc

SEQ ID NO: 3779171 - DNA, 25 bp, Homo sapien
acataggccaacaatccagcacttg

SEQ ID NO: 3779172 - DNA, 25 bp, Homo sapien
gaaagatgacttgtaaggcagtaag

SEQ ID NO: 3779173 - DNA, 25 bp, Homo sapien
tagtgcattctcactgcatgctaaa

SEQ ID NO: 3779174 - DNA, 25 bp, Homo sapien
ctctatgagaagtgctggctacaca

SEQ ID NO: 3779175 - DNA, 25 bp, Homo sapien
taagaaggtcacatatgacacgttc

SEQ ID NO: 3779176 - DNA, 25 bp, Homo sapien
tcacatagtgtagaagacttacccc

SEQ ID NO: 3779177 - DNA, 25 bp, Homo sapien
agccactgtatcttacaacccaaaa

SEQ ID NO: 3779178 - DNA, 25 bp, Homo sapien
tctcaagttcgtatttggaagaact

SEQ ID NO: 3779179 - DNA, 25 bp, Homo sapien
cacacagtcttcatatcccagtgac

SEQ ID NO: 3779180 - DNA, 25 bp, Homo sapien
taaatttcagctctgatgttattgg

SEQ ID NO: 3779181 - DNA, 25 bp, Homo sapien
ctaaatttcagctctgatgttattg

SEQ ID NO: 3779182 - DNA, 25 bp, Homo sapien
aatttcagctctgatgttattggta

SEQ ID NO: 3779183 - DNA, 25 bp, Homo sapien
atttcagctctgatgttattggtac

SEQ ID NO: 3779184 - DNA, 25 bp, Homo sapien
cactgaatcctatgaaaacagtttt

SEQ ID NO: 3779185 - DNA, 25 bp, Homo sapien
aattacaccaatatgctactctgtg

SEQ ID NO: 3779186 - DNA, 25 bp, Homo sapien
tgtaattataatgctgaatcagtct

SEQ ID NO: 3779187 - DNA, 25 bp, Homo sapien
tcttaagggaaatgttcgtggtata

SEQ ID NO: 3779188 - DNA, 25 bp, Homo sapien
cacggttcgctgtggaattcatcat

SEQ ID NO: 3779189 - DNA, 25 bp, Homo sapien
tctcaggcattgttccaggacggct

SEQ ID NO: 3779190 - DNA, 25 bp, Homo sapien
aaagccagcgcgcatctcaggcatt

SEQ ID NO: 3779191 - DNA, 25 bp, Homo sapien
taaaggggccctaactgctcccaga

SEQ ID NO: 3779192 - DNA, 25 bp, Homo sapien
ggctagtgtaatgaaggtgaatttc

SEQ ID NO: 3779193 - DNA, 25 bp, Homo sapien
ttaatcgtggctagtgtaatgaagg

SEQ ID NO: 3779194 - DNA, 25 bp, Homo sapien
aatcgtggctagtgtaatgaaggtg

SEQ ID NO: 3779195 - DNA, 25 bp, Homo sapien
cgtggctagtgtaatgaaggtgaat

SEQ ID NO: 3779196 - DNA, 25 bp, Homo sapien
agtccgtagtccctccagttattgg

SEQ ID NO: 3779197 - DNA, 25 bp, Homo sapien
actggttctaaactggttgggacag

SEQ ID NO: 3779198 - DNA, 25 bp, Homo sapien
gagtaggtatagacagctccttcca

SEQ ID NO: 3779199 - DNA, 25 bp, Homo sapien
gagcgatgtggccaaagtccgtagt

SEQ ID NO: 3779200 - DNA, 25 bp, Homo sapien
ttagaagaccagtgaaccccacgtg

SEQ ID NO: 3779201 - DNA, 25 bp, Homo sapien
accaaggagaggagctagtccctaa

SEQ ID NO: 3779202 - DNA, 25 bp, Homo sapien
ctttcagctgtcaatgtagtcaccc

SEQ ID NO: 3779203 - DNA, 25 bp, Homo sapien
tattattgaaagaagcccctagcag

SEQ ID NO: 3779204 - DNA, 25 bp, Homo sapien
tcatttgaaaggtatctcatttgca

SEQ ID NO: 3779205 - DNA, 25 bp, Homo sapien
tctctttgaaacctgacgatgtcta

SEQ ID NO: 3779206 - DNA, 25 bp, Homo sapien
gtaacaaagtaatcaggcacgaaat

SEQ ID NO: 3779207 - DNA, 25 bp, Homo sapien
tgacataatagcactgtttcctgcc

SEQ ID NO: 3779208 - DNA, 25 bp, Homo sapien
tcttagactgaaatccaggtagatt

SEQ ID NO: 3779209 - DNA, 25 bp, Homo sapien
gtgtcacgctcaagcaaatgattat

SEQ ID NO: 3779210 - DNA, 25 bp, Homo sapien
cacgctcaagcaaatgattatccat

SEQ ID NO: 3779211 - DNA, 25 bp, Homo sapien
atttcttagactgaaatccaggtag

SEQ ID NO: 3779212 - DNA, 25 bp, Homo sapien
gaggacaaaccccctcgtagcacaa

SEQ ID NO: 3779213 - DNA, 25 bp, Homo sapien
tgagtaaaagcttaggaatctataa

SEQ ID NO: 3779214 - DNA, 25 bp, Homo sapien
aagtgctgaatgagtaaaagcttag

SEQ ID NO: 3779215 - DNA, 25 bp, Homo sapien
cctcgtagcacaacaagaaagttaa

SEQ ID NO: 3779216 - DNA, 25 bp, Homo sapien
accaagcaaaaggtcttctgtatcc

SEQ ID NO: 3779217 - DNA, 25 bp, Homo sapien
tccccagaccaagcaaaaggtcttc

SEQ ID NO: 3779218 - DNA, 25 bp, Homo sapien
aacacatcctgtccaagatgctttt

SEQ ID NO: 3779219 - DNA, 25 bp, Homo sapien
tgtcagtagcagcatgagtatttca

SEQ ID NO: 3779220 - DNA, 25 bp, Homo sapien
tgccgtttccatggacaactctgta

SEQ ID NO: 3779221 - DNA, 25 bp, Homo sapien
ctgaaggtagtcgttctctgaatac

SEQ ID NO: 3779222 - DNA, 25 bp, Homo sapien
ttctgcttgccgtttccatggacaa

SEQ ID NO: 3779223 - DNA, 25 bp, Homo sapien
tctgtatatctgtgataatctgaag

SEQ ID NO: 3779224 - DNA, 25 bp, Homo sapien
acatggagattatgggagctgtaat

SEQ ID NO: 3779225 - DNA, 25 bp, Homo sapien
cagccaaccatatcacttcttcttc

SEQ ID NO: 3779226 - DNA, 25 bp, Homo sapien
cttcttcttcacaaatatctgcaac

SEQ ID NO: 3779227 - DNA, 25 bp, Homo sapien
tggagattatgggagctgtaattca

SEQ ID NO: 3779228 - DNA, 25 bp, Homo sapien
tatctgcgacctggaagttccctcc

SEQ ID NO: 3779229 - DNA, 25 bp, Homo sapien
gtataaaaccaagctatgcccgacc

SEQ ID NO: 3779230 - DNA, 25 bp, Homo sapien
cttttcccaaagatctagctaggca

SEQ ID NO: 3779231 - DNA, 25 bp, Homo sapien
gatgcagcacttctttcagtcaagg

SEQ ID NO: 3779232 - DNA, 25 bp, Homo sapien
gcatcagccccaaatgaggacgggc

SEQ ID NO: 3779233 - DNA, 25 bp, Homo sapien
gaggagttattcaggcctccgccag

SEQ ID NO: 3779234 - DNA, 25 bp, Homo sapien
gtctgtgtatctactgctacgtgat

SEQ ID NO: 3779235 - DNA, 25 bp, Homo sapien
tcttgctgacgcacgctgatgacgt

SEQ ID NO: 3779236 - DNA, 25 bp, Homo sapien
aagagcccagaacctattggtgagt

SEQ ID NO: 3779237 - DNA, 25 bp, Homo sapien
gctccaaagaaaagccggatggcaa

SEQ ID NO: 3779238 - DNA, 25 bp, Homo sapien
ttggtgagttccacgtacgtcagcc

SEQ ID NO: 3779239 - DNA, 25 bp, Homo sapien
gaaaagccggatggcaaaagagccc

SEQ ID NO: 3779240 - DNA, 25 bp, Homo sapien
tagatgaggcatggagcacttggat

SEQ ID NO: 3779241 - DNA, 25 bp, Homo sapien
gtgcctcttccatgtagatgaggca

SEQ ID NO: 3779242 - DNA, 25 bp, Homo sapien
ccatgtagatgaggcatggagcact

SEQ ID NO: 3779243 - DNA, 25 bp, Homo sapien
gcatggagcacttggatttcctttt

SEQ ID NO: 3779244 - DNA, 25 bp, Homo sapien
actcaatgccatattgcagattttt

SEQ ID NO: 3779245 - DNA, 25 bp, Homo sapien
tgcatttctccgtcagttggagcga

SEQ ID NO: 3779246 - DNA, 25 bp, Homo sapien
tttcgttttgttagagaaagactca

SEQ ID NO: 3779247 - DNA, 25 bp, Homo sapien
gagcgacttctcattcagatatgtg

SEQ ID NO: 3779248 - DNA, 25 bp, Homo sapien
ggaaacaaatgagaggatctgggat

SEQ ID NO: 3779249 - DNA, 25 bp, Homo sapien
tgggatagaagtgaaggtgacggaa

SEQ ID NO: 3779250 - DNA, 25 bp, Homo sapien
tcttggggaccaaacagggtcttca

SEQ ID NO: 3779251 - DNA, 25 bp, Homo sapien
tctgactttagctcttgagctttgg

SEQ ID NO: 3779252 - DNA, 25 bp, Homo sapien
ccaagttagaagtctgagcagttga

SEQ ID NO: 3779253 - DNA, 25 bp, Homo sapien
aaactaaccaagttagaagtctgag

SEQ ID NO: 3779254 - DNA, 25 bp, Homo sapien
caagttagaagtctgagcagttgag

SEQ ID NO: 3779255 - DNA, 25 bp, Homo sapien
taaccaagttagaagtctgagcagt

SEQ ID NO: 3779256 - DNA, 25 bp, Homo sapien
caagagctatttcaacatttgccat

SEQ ID NO: 3779257 - DNA, 25 bp, Homo sapien
ccaagtccaagagctatttcaacat

SEQ ID NO: 3779258 - DNA, 25 bp, Homo sapien
ttggaaagcatcaccaagtccaaga

SEQ ID NO: 3779259 - DNA, 25 bp, Homo sapien
ccactaaaccattcttggaaagcat

SEQ ID NO: 3779260 - DNA, 25 bp, Homo sapien
ctttttctccttcagctccatcctc

SEQ ID NO: 3779261 - DNA, 25 bp, Homo sapien
tttttctccttcagctccatcctca

SEQ ID NO: 3779262 - DNA, 25 bp, Homo sapien
ttttctccttcagctccatcctcat

SEQ ID NO: 3779263 - DNA, 25 bp, Homo sapien
caagcctctaaatgtgggaataccc

SEQ ID NO: 3779264 - DNA, 25 bp, Homo sapien
cgatgacacccagattgatatgtgc

SEQ ID NO: 3779265 - DNA, 25 bp, Homo sapien
tactgggccgcacttatcttacttg

SEQ ID NO: 3779266 - DNA, 25 bp, Homo sapien
gagtcctatctctctggcgatgaca

SEQ ID NO: 3779267 - DNA, 25 bp, Homo sapien
gcaccatgagatagttgataacacc

SEQ ID NO: 3779268 - DNA, 25 bp, Homo sapien
gatcatacccaaaaactctataagg

SEQ ID NO: 3779269 - DNA, 25 bp, Homo sapien
taacacctgtacagaatgctgtggc

SEQ ID NO: 3779270 - DNA, 25 bp, Homo sapien
tagatactcatgcatatctcctggg

SEQ ID NO: 3779271 - DNA, 25 bp, Homo sapien
ttccactaccactctgatgagaata

SEQ ID NO: 3779272 - DNA, 25 bp, Homo sapien
ggttgttacttgcattgtctctaga

SEQ ID NO: 3779273 - DNA, 25 bp, Homo sapien
ccactctgatgagaatacaatagca

SEQ ID NO: 3779274 - DNA, 25 bp, Homo sapien
tctgggttgttacttgcattgtctc

SEQ ID NO: 3779275 - DNA, 25 bp, Homo sapien
gttgcttagctcgtccccggagaca

SEQ ID NO: 3779276 - DNA, 25 bp, Homo sapien
ctggatggttgcttagctcgtcccc

SEQ ID NO: 3779277 - DNA, 25 bp, Homo sapien
ctcagcggctgcttttctcgggaag

SEQ ID NO: 3779278 - DNA, 25 bp, Homo sapien
tcagcggctgcttttctcgggaagc

SEQ ID NO: 3779279 - DNA, 25 bp, Homo sapien
tagatcacttcttgggcagcactcc

SEQ ID NO: 3779280 - DNA, 25 bp, Homo sapien
actgagtcagtaggagcagaagagc

SEQ ID NO: 3779281 - DNA, 25 bp, Homo sapien
gagtatatgaccttaccctagacca

SEQ ID NO: 3779282 - DNA, 25 bp, Homo sapien
gagttagacttggaggtttgcatca

SEQ ID NO: 3779283 - DNA, 25 bp, Homo sapien
tttgtatcctctagtagagacaagg

SEQ ID NO: 3779284 - DNA, 25 bp, Homo sapien
ttgtatcctctagtagagacaaggt

SEQ ID NO: 3779285 - DNA, 25 bp, Homo sapien
ctgcaacctccccttcgttggttca

SEQ ID NO: 3779286 - DNA, 25 bp, Homo sapien
ctccccttcgttggttcaagcgatt

SEQ ID NO: 3779287 - DNA, 25 bp, Homo sapien
ctgttagtggcgcgcggtaccgcgg

SEQ ID NO: 3779288 - DNA, 25 bp, Homo sapien
agcgctgcgggggtgccgtgggtgg

SEQ ID NO: 3779289 - DNA, 25 bp, Homo sapien
tggcgcgcggtaccgcggtcgccgg

SEQ ID NO: 3779290 - DNA, 25 bp, Homo sapien
gggctccggagcgtcctcagcgctg

SEQ ID NO: 3779291 - DNA, 25 bp, Homo sapien
gggcgcgtctgccgggcaccagagc

SEQ ID NO: 3779292 - DNA, 25 bp, Homo sapien
cccccggccgcatcctgagccacag

SEQ ID NO: 3779293 - DNA, 25 bp, Homo sapien
tctgccgggcaccagagcaggcgca

SEQ ID NO: 3779294 - DNA, 25 bp, Homo sapien
gcggccgggcgcgtctgccgggcac

SEQ ID NO: 3779295 - DNA, 25 bp, Homo sapien
tgtcctcccggaggcgctcggagct

SEQ ID NO: 3779296 - DNA, 25 bp, Homo sapien
gattcgccgagctcgccgcctgtcc

SEQ ID NO: 3779297 - DNA, 25 bp, Homo sapien
cctgtcctcccggaggcgctcggag

SEQ ID NO: 3779298 - DNA, 25 bp, Homo sapien
cgagctcgccgcctgtcctcccgga

SEQ ID NO: 3779299 - DNA, 25 bp, Homo sapien
ttcagttagaaaaatccttccacag

SEQ ID NO: 3779300 - DNA, 25 bp, Homo sapien
cccagctggagtcataagctcatct

SEQ ID NO: 3779301 - DNA, 25 bp, Homo sapien
tgtaggcagcttcacacctattgcc

SEQ ID NO: 3779302 - DNA, 25 bp, Homo sapien
ctattgccctatagggtcccgaaga

SEQ ID NO: 3779303 - DNA, 25 bp, Homo sapien
aattgcacagaaattagatctctct

SEQ ID NO: 3779304 - DNA, 25 bp, Homo sapien
aggaaattgcacagaaattagatct

SEQ ID NO: 3779305 - DNA, 25 bp, Homo sapien
gcacagaaattagatctctcttctt

SEQ ID NO: 3779306 - DNA, 25 bp, Homo sapien
gaaattgcacagaaattagatctct

SEQ ID NO: 3779307 - DNA, 25 bp, Homo sapien
gatcacctcgctgttccaaattgct

SEQ ID NO: 3779308 - DNA, 25 bp, Homo sapien
gactctacacgagctctaagtggta

SEQ ID NO: 3779309 - DNA, 25 bp, Homo sapien
cgctgaattacttaggatggctcca

SEQ ID NO: 3779310 - DNA, 25 bp, Homo sapien
ccaaattgcttaggttataattcag

SEQ ID NO: 3779311 - DNA, 25 bp, Homo sapien
ggtgaagccgccttgtcctaaactg

SEQ ID NO: 3779312 - DNA, 25 bp, Homo sapien
ccttgtcctaaactgatgtggagtc

SEQ ID NO: 3779313 - DNA, 25 bp, Homo sapien
ctgagagtggcctttccagaggctc

SEQ ID NO: 3779314 - DNA, 25 bp, Homo sapien
gccgccttgtcctaaactgatgtgg

SEQ ID NO: 3779315 - DNA, 25 bp, Homo sapien
ttaaagtatagacttataaagcatt

SEQ ID NO: 3779316 - DNA, 25 bp, Homo sapien
taaagtatagacttataaagcattt

SEQ ID NO: 3779317 - DNA, 25 bp, Homo sapien
tctttgggatccttatcagtagcaa

SEQ ID NO: 3779318 - DNA, 25 bp, Homo sapien
tctcacctaggtgccttcagagcca

SEQ ID NO: 3779319 - DNA, 25 bp, Homo sapien
gaaaagccggcaaagctaggaagaa

SEQ ID NO: 3779320 - DNA, 25 bp, Homo sapien
caaagctaggaagaaggctgtactc

SEQ ID NO: 3779321 - DNA, 25 bp, Homo sapien
ttctaggtttcggttccttgtcagc

SEQ ID NO: 3779322 - DNA, 25 bp, Homo sapien
atctgtcacttctaaccttgtctgt

SEQ ID NO: 3779323 - DNA, 25 bp, Homo sapien
tgtcacttctaaccttgtctgtggc

SEQ ID NO: 3779324 - DNA, 25 bp, Homo sapien
ttgtcagctttaggccttgccaatg

SEQ ID NO: 3779325 - DNA, 25 bp, Homo sapien
catgtacccttaaccaaagacctgt

SEQ ID NO: 3779326 - DNA, 25 bp, Homo sapien
gattccagagaaggcacagtcctgt

SEQ ID NO: 3779327 - DNA, 25 bp, Homo sapien
tcagccaggattggcatagagaccc

SEQ ID NO: 3779328 - DNA, 25 bp, Homo sapien
ggaaagtggcctcttcaaacttgac

SEQ ID NO: 3779329 - DNA, 25 bp, Homo sapien
ccagttttccttggagcacggcaga

SEQ ID NO: 3779330 - DNA, 25 bp, Homo sapien
aggacatgtttgaaattggacttct

SEQ ID NO: 3779331 - DNA, 25 bp, Homo sapien
aaggacatgtttgaaattggacttc

SEQ ID NO: 3779332 - DNA, 25 bp, Homo sapien
gaaaccatcactggtcactttttta

SEQ ID NO: 3779333 - DNA, 25 bp, Homo sapien
tttccttttctgtgacacagctgtc

SEQ ID NO: 3779334 - DNA, 25 bp, Homo sapien
ttccttttctgtgacacagctgtca

SEQ ID NO: 3779335 - DNA, 25 bp, Homo sapien
ctttccttttctgtgacacagctgt

SEQ ID NO: 3779336 - DNA, 25 bp, Homo sapien
tccttttctgtgacacagctgtcat

SEQ ID NO: 3779337 - DNA, 25 bp, Homo sapien
caggtttctctttgatggatacatg

SEQ ID NO: 3779338 - DNA, 25 bp, Homo sapien
ggaaacaagttggaacgcaacagga

SEQ ID NO: 3779339 - DNA, 25 bp, Homo sapien
gaaagtctgagagcttatggccata

SEQ ID NO: 3779340 - DNA, 25 bp, Homo sapien
ctctacagccaataacagcaggttt

SEQ ID NO: 3779341 - DNA, 25 bp, Homo sapien
gaagctgagcaactggagccttgag

SEQ ID NO: 3779342 - DNA, 25 bp, Homo sapien
cctgcatcgagaaaggcatgggagc

SEQ ID NO: 3779343 - DNA, 25 bp, Homo sapien
ccagaaggtggaatcgatctcccaa

SEQ ID NO: 3779344 - DNA, 25 bp, Homo sapien
tcccacactgcgctacagaaggagt

SEQ ID NO: 3779345 - DNA, 25 bp, Homo sapien
actatcaaggatgttgctatattca

SEQ ID NO: 3779346 - DNA, 25 bp, Homo sapien
gttgctatattcatgtcgaattaac

SEQ ID NO: 3779347 - DNA, 25 bp, Homo sapien
agctaaaactatcaaggatgttgct

SEQ ID NO: 3779348 - DNA, 25 bp, Homo sapien
caaggatgttgctatattcatgtcg

SEQ ID NO: 3779349 - DNA, 25 bp, Homo sapien
gggaggagaccacccctcatattgt

SEQ ID NO: 3779350 - DNA, 25 bp, Homo sapien
gatgacaggggtgtgccagcacacc

SEQ ID NO: 3779351 - DNA, 25 bp, Homo sapien
ttctgcctccaaagaaagaagtaaa

SEQ ID NO: 3779352 - DNA, 25 bp, Homo sapien
ctcctgaacagttgggatgacaggg

SEQ ID NO: 3779353 - DNA, 25 bp, Homo sapien
caaatacttatgctcttcctaaccc

SEQ ID NO: 3779354 - DNA, 25 bp, Homo sapien
ggagtctgtccaaagatcatacccc

SEQ ID NO: 3779355 - DNA, 25 bp, Homo sapien
tagagaagactttctcaaccaaagt

SEQ ID NO: 3779356 - DNA, 25 bp, Homo sapien
cctaagtaccacaaagggattatca

SEQ ID NO: 3779357 - DNA, 25 bp, Homo sapien
ggcaaataccacgtgtctcaagtta

SEQ ID NO: 3779358 - DNA, 25 bp, Homo sapien
tagatctggcacaagaggaacacaa

SEQ ID NO: 3779359 - DNA, 25 bp, Homo sapien
caatacctacccaaaagttactgat

SEQ ID NO: 3779360 - DNA, 25 bp, Homo sapien
cactagcaggtataatagtaaatcg

SEQ ID NO: 3779361 - DNA, 25 bp, Homo sapien
aaaagcaccttgtttgcagagatca

SEQ ID NO: 3779362 - DNA, 25 bp, Homo sapien
cttgttattaaaacttggactcagg

SEQ ID NO: 3779363 - DNA, 25 bp, Homo sapien
tggactcaggtaatcttggttattc

SEQ ID NO: 3779364 - DNA, 25 bp, Homo sapien
taatcttggttattctggaaaaagc

SEQ ID NO: 3779365 - DNA, 25 bp, Homo sapien
tttgacgtaacatatgaaaatagag

SEQ ID NO: 3779366 - DNA, 25 bp, Homo sapien
cgtaacatatgaaaatagagttgtg

SEQ ID NO: 3779367 - DNA, 25 bp, Homo sapien
ctttcttctttgacgtaacatatga

SEQ ID NO: 3779368 - DNA, 25 bp, Homo sapien
tcttctttgacgtaacatatgaaaa

SEQ ID NO: 3779369 - DNA, 25 bp, Homo sapien
aaacaaagaaaaacaagctattgct

SEQ ID NO: 3779370 - DNA, 25 bp, Homo sapien
caaagaaaaacaagctattgcttta

SEQ ID NO: 3779371 - DNA, 25 bp, Homo sapien
acaaagaaaaacaagctattgcttt

SEQ ID NO: 3779372 - DNA, 25 bp, Homo sapien
aacaaagaaaaacaagctattgctt

SEQ ID NO: 3779373 - DNA, 25 bp, Homo sapien
ggttctgttcaagtaatgctaccat

SEQ ID NO: 3779374 - DNA, 25 bp, Homo sapien
cactgtttgaacctgtaactgtcag

SEQ ID NO: 3779375 - DNA, 25 bp, Homo sapien
gaagagaacccactgtttgaacctg

SEQ ID NO: 3779376 - DNA, 25 bp, Homo sapien
taactgtcagacagacaccgaagca

SEQ ID NO: 3779377 - DNA, 25 bp, Homo sapien
gcaactccaacaggatataagatga

SEQ ID NO: 3779378 - DNA, 25 bp, Homo sapien
gttttcttcacatgcggcaaggcag

SEQ ID NO: 3779379 - DNA, 25 bp, Homo sapien
ggcagcgtatattgtaagaagttca

SEQ ID NO: 3779380 - DNA, 25 bp, Homo sapien
tgatgccatggttataagaagaaaa

SEQ ID NO: 3779381 - DNA, 25 bp, Homo sapien
ttttccagacactcaagacatgcaa

SEQ ID NO: 3779382 - DNA, 25 bp, Homo sapien
caaatttaaacatacgatggcagag

SEQ ID NO: 3779383 - DNA, 25 bp, Homo sapien
gaggacttttccaagaacacttatg

SEQ ID NO: 3779384 - DNA, 25 bp, Homo sapien
tcaagtctaatgtgccaacctcagg

SEQ ID NO: 3779385 - DNA, 25 bp, Homo sapien
tgttcatacctacatctcaggcatg

SEQ ID NO: 3779386 - DNA, 25 bp, Homo sapien
taaaaaatagtaattgaccaggcat

SEQ ID NO: 3779387 - DNA, 25 bp, Homo sapien
taggcacacaccatttgtcattgtt

SEQ ID NO: 3779388 - DNA, 25 bp, Homo sapien
tgctttaggatatatttggagccct

SEQ ID NO: 3779389 - DNA, 25 bp, Homo sapien
tataacagcattctggcatcgtggg

SEQ ID NO: 3779390 - DNA, 25 bp, Homo sapien
taattctctggcgttagcacacaaa

SEQ ID NO: 3779391 - DNA, 25 bp, Homo sapien
ggctgaaacacgaattttaattctc

SEQ ID NO: 3779392 - DNA, 25 bp, Homo sapien
tattagttataccagttatacctcc

SEQ ID NO: 3779393 - DNA, 25 bp, Homo sapien
tgatctctgtcacagtccacgcgac

SEQ ID NO: 3779394 - DNA, 25 bp, Homo sapien
agtccacgcgaccagaaaaagcacc

SEQ ID NO: 3779395 - DNA, 25 bp, Homo sapien
tgtagaaggaatagcgagtgatctc

SEQ ID NO: 3779396 - DNA, 25 bp, Homo sapien
aagtatggcaagtggtcaagaaggc

SEQ ID NO: 3779397 - DNA, 25 bp, Homo sapien
tgcagaattacagagaaacccagtg

SEQ ID NO: 3779398 - DNA, 25 bp, Homo sapien
gaattacagagaaacccagtgtcat

SEQ ID NO: 3779399 - DNA, 25 bp, Homo sapien
ctgcagaattacagagaaacccagt

SEQ ID NO: 3779400 - DNA, 25 bp, Homo sapien
cagaattacagagaaacccagtgtc

SEQ ID NO: 3779401 - DNA, 25 bp, Homo sapien
gacaatgttaccttgctgaaaccaa

SEQ ID NO: 3779402 - DNA, 25 bp, Homo sapien
aacacatgctattcactctcactgg

SEQ ID NO: 3779403 - DNA, 25 bp, Homo sapien
ggttctttgcaatccttgctcggaa

SEQ ID NO: 3779404 - DNA, 25 bp, Homo sapien
tgttctactgtaggaccaacgcttg

SEQ ID NO: 3779405 - DNA, 25 bp, Homo sapien
gtccccatgcagacagggggccagt

SEQ ID NO: 3779406 - DNA, 25 bp, Homo sapien
tcagtgagctgtccccatgcagaca

SEQ ID NO: 3779407 - DNA, 25 bp, Homo sapien
ccccatgcagacagggggccagtga

SEQ ID NO: 3779408 - DNA, 25 bp, Homo sapien
ccatgcagacagggggccagtgaag

SEQ ID NO: 3779409 - DNA, 25 bp, Homo sapien
tactgacaacttcgattacataatc

SEQ ID NO: 3779410 - DNA, 25 bp, Homo sapien
cataatcaaagaggacaacttggat

SEQ ID NO: 3779411 - DNA, 25 bp, Homo sapien
gaatatattacggatctaagatgcc

SEQ ID NO: 3779412 - DNA, 25 bp, Homo sapien
tcattctgctaaggcactaagtcaa

SEQ ID NO: 3779413 - DNA, 25 bp, Homo sapien
ttggaccccagtcacaatcacagaa

SEQ ID NO: 3779414 - DNA, 25 bp, Homo sapien
ccccagtcacaatcacagaagtagg

SEQ ID NO: 3779415 - DNA, 25 bp, Homo sapien
ttttatactgtgagtaatgagccac

SEQ ID NO: 3779416 - DNA, 25 bp, Homo sapien
cacaccataaagattcttgaactca

SEQ ID NO: 3779417 - DNA, 25 bp, Homo sapien
aagtgaactattgccctaaaggcaa

SEQ ID NO: 3779418 - DNA, 25 bp, Homo sapien
aacaagtgaactattgccctaaagg

SEQ ID NO: 3779419 - DNA, 25 bp, Homo sapien
tgaactattgccctaaaggcaattt

SEQ ID NO: 3779420 - DNA, 25 bp, Homo sapien
gaactattgccctaaaggcaattta

SEQ ID NO: 3779421 - DNA, 25 bp, Homo sapien
cataggtggtatgtaatcagcaaaa

SEQ ID NO: 3779422 - DNA, 25 bp, Homo sapien
ttcagcaaatccataggtggtatgt

SEQ ID NO: 3779423 - DNA, 25 bp, Homo sapien
aatcattacgtcaataatagaaaac

SEQ ID NO: 3779424 - DNA, 25 bp, Homo sapien
cactgtcaacattggcattcagcaa

SEQ ID NO: 3779425 - DNA, 25 bp, Homo sapien
tcacataaatattacagcaatagaa

SEQ ID NO: 3779426 - DNA, 25 bp, Homo sapien
aaaaacagcatgatggaaaacttac

SEQ ID NO: 3779427 - DNA, 25 bp, Homo sapien
tagaaaaacagcatgatggaaaact

SEQ ID NO: 3779428 - DNA, 25 bp, Homo sapien
agcaatagaaaaacagcatgatgga

SEQ ID NO: 3779429 - DNA, 25 bp, Homo sapien
tataaaaacgtaccatggcaatagc

SEQ ID NO: 3779430 - DNA, 25 bp, Homo sapien
aaaacgtaccatggcaatagctaga

SEQ ID NO: 3779431 - DNA, 25 bp, Homo sapien
ccatggcaatagctagaaccaacca

SEQ ID NO: 3779432 - DNA, 25 bp, Homo sapien
cgtaccatggcaatagctagaacca

SEQ ID NO: 3779433 - DNA, 25 bp, Homo sapien
cagttggctttcaagacagagagtc

SEQ ID NO: 3779434 - DNA, 25 bp, Homo sapien
aaaatacatggtgctttgagggacg

SEQ ID NO: 3779435 - DNA, 25 bp, Homo sapien
gaaagcatttaattctgcaccaggt

SEQ ID NO: 3779436 - DNA, 25 bp, Homo sapien
tcgggagcagattgcaaaaagcctt

SEQ ID NO: 3779437 - DNA, 25 bp, Homo sapien
aaatttttgtcaatcacatttttct

SEQ ID NO: 3779438 - DNA, 25 bp, Homo sapien
taagccggaagtggtaatcccagca

SEQ ID NO: 3779439 - DNA, 25 bp, Homo sapien
ttaagccggaagtggtaatcccagc

SEQ ID NO: 3779440 - DNA, 25 bp, Homo sapien
tattaagccggaagtggtaatccca

SEQ ID NO: 3779441 - DNA, 25 bp, Homo sapien
ggctgaggttggcagtgagcggaga

SEQ ID NO: 3779442 - DNA, 25 bp, Homo sapien
aattaatggggcgtggtggcccacg

SEQ ID NO: 3779443 - DNA, 25 bp, Homo sapien
taatggggcgtggtggcccacgctt

SEQ ID NO: 3779444 - DNA, 25 bp, Homo sapien
gctgaggttggcagtgagcggagat

SEQ ID NO: 3779445 - DNA, 25 bp, Homo sapien
agcctgcagcccgagagccgctgcc

SEQ ID NO: 3779446 - DNA, 25 bp, Homo sapien
tgtcgtagaaggtgagccaggcggt

SEQ ID NO: 3779447 - DNA, 25 bp, Homo sapien
tggacgccatggtggccgcgcacct

SEQ ID NO: 3779448 - DNA, 25 bp, Homo sapien
gaggcgccgccgttggtgccgtcct

SEQ ID NO: 3779449 - DNA, 25 bp, Homo sapien
agcgcgcagggggctcggcgcagcc

SEQ ID NO: 3779450 - DNA, 25 bp, Homo sapien
gcagcgcgcagggggctcggcgcag

SEQ ID NO: 3779451 - DNA, 25 bp, Homo sapien
cagcgcgcagggggctcggcgcagc

SEQ ID NO: 3779452 - DNA, 25 bp, Homo sapien
tgagacagtgtctcgctgtgttgct

SEQ ID NO: 3779453 - DNA, 25 bp, Homo sapien
ttacaggtgcaagctaccataccca

SEQ ID NO: 3779454 - DNA, 25 bp, Homo sapien
cagctaatttttttttttgagacag

SEQ ID NO: 3779455 - DNA, 25 bp, Homo sapien
agacagtgtctcgctgtgttgctca

SEQ ID NO: 3779456 - DNA, 25 bp, Homo sapien
cagaacgctattgtaatcattgggc

SEQ ID NO: 3779457 - DNA, 25 bp, Homo sapien
cattgggctcactgcatatgcttcc

SEQ ID NO: 3779458 - DNA, 25 bp, Homo sapien
gaaactgattccaggcagaacgcta

SEQ ID NO: 3779459 - DNA, 25 bp, Homo sapien
tgcatagcaccctcctaatatattg

SEQ ID NO: 3779460 - DNA, 25 bp, Homo sapien
gtcaactgctaggaccaactgccag

SEQ ID NO: 3779461 - DNA, 25 bp, Homo sapien
ccaagcagatacataggagctccca

SEQ ID NO: 3779462 - DNA, 25 bp, Homo sapien
tgtatgcccatccaacacactgaga

SEQ ID NO: 3779463 - DNA, 25 bp, Homo sapien
tatggaatatctaccgtgaagagcc

SEQ ID NO: 3779464 - DNA, 25 bp, Homo sapien
tcaaggcttgaacagtttgtgccct

SEQ ID NO: 3779465 - DNA, 25 bp, Homo sapien
tctaggtcagaatgcacggatactg

SEQ ID NO: 3779466 - DNA, 25 bp, Homo sapien
aacagagtaattcagtccggagtac

SEQ ID NO: 3779467 - DNA, 25 bp, Homo sapien
tgtgccctggcttattgctggcaac

SEQ ID NO: 3779468 - DNA, 25 bp, Homo sapien
caagtttgtcacctcacgcagctaa

SEQ ID NO: 3779469 - DNA, 25 bp, Homo sapien
tctgcagattccaaagccgggcgtt

SEQ ID NO: 3779470 - DNA, 25 bp, Homo sapien
gttagtcagtaggtgccaacgccct

SEQ ID NO: 3779471 - DNA, 25 bp, Homo sapien
caagtgggacgcaacatctctagta

SEQ ID NO: 3779472 - DNA, 25 bp, Homo sapien
ctcagctcacggtgaaatcataggc

SEQ ID NO: 3779473 - DNA, 25 bp, Homo sapien
cttggaagtttatataagagtagaa

SEQ ID NO: 3779474 - DNA, 25 bp, Homo sapien
ttaattatgaaaggtggatgttgaa

SEQ ID NO: 3779475 - DNA, 25 bp, Homo sapien
cactgaaacttggaagtttatataa

SEQ ID NO: 3779476 - DNA, 25 bp, Homo sapien
gcttagagtctaaaaacaaacattc

SEQ ID NO: 3779477 - DNA, 25 bp, Homo sapien
cctagatatccatctccttactgag

SEQ ID NO: 3779478 - DNA, 25 bp, Homo sapien
ttgcctgagctctcgacctagatat

SEQ ID NO: 3779479 - DNA, 25 bp, Homo sapien
gactcctggatttatgttcttactc

SEQ ID NO: 3779480 - DNA, 25 bp, Homo sapien
tttcttaggataaacaacaggcagt

SEQ ID NO: 3779481 - DNA, 25 bp, Homo sapien
tgctaacattgctttcaaggcaggt

SEQ ID NO: 3779482 - DNA, 25 bp, Homo sapien
tgtacgatcatagctaacttcagcc

SEQ ID NO: 3779483 - DNA, 25 bp, Homo sapien
ggtgtacttgcagtagagtccctca

SEQ ID NO: 3779484 - DNA, 25 bp, Homo sapien
tcactgattgggaatttcccttctt

SEQ ID NO: 3779485 - DNA, 25 bp, Homo sapien
tcctatccgagaacatagcatctct

SEQ ID NO: 3779486 - DNA, 25 bp, Homo sapien
atgtttcgtctgaggtattttgtcc

SEQ ID NO: 3779487 - DNA, 25 bp, Homo sapien
tattaaatcttcctatccgagaaca

SEQ ID NO: 3779488 - DNA, 25 bp, Homo sapien
gcaaaaagtctatggcaccgttgag

SEQ ID NO: 3779489 - DNA, 25 bp, Homo sapien
aacccacagctggagttgcctcaaa

SEQ ID NO: 3779490 - DNA, 25 bp, Homo sapien
gagactgcggattcatgtaactttg

SEQ ID NO: 3779491 - DNA, 25 bp, Homo sapien
gctattcttactggctgaacccaca

SEQ ID NO: 3779492 - DNA, 25 bp, Homo sapien
gtattccagtaccagccagcaagct

SEQ ID NO: 3779493 - DNA, 25 bp, Homo sapien
gacagaggcccatttactttgccat

SEQ ID NO: 3779494 - DNA, 25 bp, Homo sapien
gaagataataagaaggtaagcaccc

SEQ ID NO: 3779495 - DNA, 25 bp, Homo sapien
gactcgctcaactcatgtaatctgg

SEQ ID NO: 3779496 - DNA, 25 bp, Homo sapien
tagaggcagtggataaagacaaccc

SEQ ID NO: 3779497 - DNA, 25 bp, Homo sapien
tgtcaagaaccctggtgatgcccat

SEQ ID NO: 3779498 - DNA, 25 bp, Homo sapien
gaaatgaggttatgaggccttccct

SEQ ID NO: 3779499 - DNA, 25 bp, Homo sapien
tctgaatgccgtggatctgccgagg

SEQ ID NO: 3779500 - DNA, 25 bp, Homo sapien
tcagaaggctctgctataggacccg

SEQ ID NO: 3779501 - DNA, 25 bp, Homo sapien
taaatgccactgacaatgttatgag

SEQ ID NO: 3779502 - DNA, 25 bp, Homo sapien
cacagcaaccatattctcagaaggc

SEQ ID NO: 3779503 - DNA, 25 bp, Homo sapien
taatatgccccaggtgccaaactat

SEQ ID NO: 3779504 - DNA, 25 bp, Homo sapien
tacatgaaggcgcattatgttgtcg

SEQ ID NO: 3779505 - DNA, 25 bp, Homo sapien
tgtcatcacaccagcgtacagtagc

SEQ ID NO: 3779506 - DNA, 25 bp, Homo sapien
gcctctgcatactactggctgtcat

SEQ ID NO: 3779507 - DNA, 25 bp, Homo sapien
gacatttcagagtattgtgggacca

SEQ ID NO: 3779508 - DNA, 25 bp, Homo sapien
gatgctgccgtagctcagtacactt

SEQ ID NO: 3779509 - DNA, 25 bp, Homo sapien
tatcctcaagccattgatgctgccg

SEQ ID NO: 3779510 - DNA, 25 bp, Homo sapien
aacatgtagctgctctgtgatagcc

SEQ ID NO: 3779511 - DNA, 25 bp, Homo sapien
tcggaagctgcacacataaaggaac

SEQ ID NO: 3779512 - DNA, 25 bp, Homo sapien
tcagggactctgtagtccactgtgg

SEQ ID NO: 3779513 - DNA, 25 bp, Homo sapien
gagtctggatagttgcatatgaaga

SEQ ID NO: 3779514 - DNA, 25 bp, Homo sapien
ccactgtggagtctggatagttgca

SEQ ID NO: 3779515 - DNA, 25 bp, Homo sapien
tcctcagggactctgtagtccactg

SEQ ID NO: 3779516 - DNA, 25 bp, Homo sapien
aaataaatctgctcccaatggccct

SEQ ID NO: 3779517 - DNA, 25 bp, Homo sapien
ggcggtttccactatcacatcagcg

SEQ ID NO: 3779518 - DNA, 25 bp, Homo sapien
gctccctgcaaaggaggcggtttcc

SEQ ID NO: 3779519 - DNA, 25 bp, Homo sapien
acatcagcgagaggtgcccggtatg

SEQ ID NO: 3779520 - DNA, 25 bp, Homo sapien
cctgacgctactggtgcctggatgg

SEQ ID NO: 3779521 - DNA, 25 bp, Homo sapien
tgtcgcattacatcctctcttagtg

SEQ ID NO: 3779522 - DNA, 25 bp, Homo sapien
tctcttagtgttgagctaagtcccc

SEQ ID NO: 3779523 - DNA, 25 bp, Homo sapien
tgccaactgtctgcccaagcactgt

SEQ ID NO: 3779524 - DNA, 25 bp, Homo sapien
tggtagactctgtgcagagctccac

SEQ ID NO: 3779525 - DNA, 25 bp, Homo sapien
ccataggggcatctgagtggtagac

SEQ ID NO: 3779526 - DNA, 25 bp, Homo sapien
gagctccacattttttacccattga

SEQ ID NO: 3779527 - DNA, 25 bp, Homo sapien
gcatctgagtggtagactctgtgca

SEQ ID NO: 3779528 - DNA, 25 bp, Homo sapien
agtcatgaagctatgagctacttct

SEQ ID NO: 3779529 - DNA, 25 bp, Homo sapien
tctagcccaggcttggtacggcact

SEQ ID NO: 3779530 - DNA, 25 bp, Homo sapien
tatgagctacttctgtgctatttgg

SEQ ID NO: 3779531 - DNA, 25 bp, Homo sapien
tgggatgccatttgccaacgtctgt

SEQ ID NO: 3779532 - DNA, 25 bp, Homo sapien
tctagagaacgttctagcaaaaggt

SEQ ID NO: 3779533 - DNA, 25 bp, Homo sapien
gacattccctcttaggtgtagcctc

SEQ ID NO: 3779534 - DNA, 25 bp, Homo sapien
cttaggtgtagcctccttttcactt

SEQ ID NO: 3779535 - DNA, 25 bp, Homo sapien
cttcctggcctgactgacattccct

SEQ ID NO: 3779536 - DNA, 25 bp, Homo sapien
acaggatgtctcctcagtagaggct

SEQ ID NO: 3779537 - DNA, 25 bp, Homo sapien
tgttttgcgtcttagttccgccctc

SEQ ID NO: 3779538 - DNA, 25 bp, Homo sapien
tttccagccaccctcatgtgacagg

SEQ ID NO: 3779539 - DNA, 25 bp, Homo sapien
tagaggctttccctaaattcaggag

SEQ ID NO: 3779540 - DNA, 25 bp, Homo sapien
tctgtcattccgggtgctgttctcc

SEQ ID NO: 3779541 - DNA, 25 bp, Homo sapien
gctgttctcctactgggtaagtctg

SEQ ID NO: 3779542 - DNA, 25 bp, Homo sapien
gtaagtctgctctgaggcaggggat

SEQ ID NO: 3779543 - DNA, 25 bp, Homo sapien
ctgttctcctactgggtaagtctgc

SEQ ID NO: 3779544 - DNA, 25 bp, Homo sapien
gagtgtctctggctggaaggagggc

SEQ ID NO: 3779545 - DNA, 25 bp, Homo sapien
gtccgagggtatcatcgcagatcat

SEQ ID NO: 3779546 - DNA, 25 bp, Homo sapien
ccgcgtcttaggtccgagggtatca

SEQ ID NO: 3779547 - DNA, 25 bp, Homo sapien
atgtctccccgcgtcttaggtccga

SEQ ID NO: 3779548 - DNA, 25 bp, Homo sapien
ggagagcatcccacagcattagcac

SEQ ID NO: 3779549 - DNA, 25 bp, Homo sapien
ttagcaccataagtctctgtgggct

SEQ ID NO: 3779550 - DNA, 25 bp, Homo sapien
tgctgccaacggatgggctggttct

SEQ ID NO: 3779551 - DNA, 25 bp, Homo sapien
ctgctgccaacggatgggctggttc

SEQ ID NO: 3779552 - DNA, 25 bp, Homo sapien
caatggtgtgatcttggctcactgc

SEQ ID NO: 3779553 - DNA, 25 bp, Homo sapien
cgtgggttcaagcaattctcctgcc

SEQ ID NO: 3779554 - DNA, 25 bp, Homo sapien
aacctctgcctcgtgggttcaagca

SEQ ID NO: 3779555 - DNA, 25 bp, Homo sapien
cacccagccttgagtgcaatggtgt

SEQ ID NO: 3779556 - DNA, 25 bp, Homo sapien
gctgaagaaataggagtgagagcag

SEQ ID NO: 3779557 - DNA, 25 bp, Homo sapien
gcagaaactagctgtggagaagtag

SEQ ID NO: 3779558 - DNA, 25 bp, Homo sapien
agcagaaactagctgtggagaagta

SEQ ID NO: 3779559 - DNA, 25 bp, Homo sapien
gcacgtgtcagttttgggtagcaac

SEQ ID NO: 3779560 - DNA, 25 bp, Homo sapien
catgtgatgtgacttgccgaagatc

SEQ ID NO: 3779561 - DNA, 25 bp, Homo sapien
aagagtgactggctccctaatgtcc

SEQ ID NO: 3779562 - DNA, 25 bp, Homo sapien
caacaggtggctgactcatgtggct

SEQ ID NO: 3779563 - DNA, 25 bp, Homo sapien
gagaaagtgttggaattcatgattc

SEQ ID NO: 3779564 - DNA, 25 bp, Homo sapien
tcattcattctggagattgagtctc

SEQ ID NO: 3779565 - DNA, 25 bp, Homo sapien
tgccttgtcaactgaattttattgt

SEQ ID NO: 3779566 - DNA, 25 bp, Homo sapien
caagaatcctaagggagagaaagtg

SEQ ID NO: 3779567 - DNA, 25 bp, Homo sapien
gtgaagctgctgaactttgcctgtg

SEQ ID NO: 3779568 - DNA, 25 bp, Homo sapien
tgaagctgctgaactttgcctgtgg

SEQ ID NO: 3779569 - DNA, 25 bp, Homo sapien
tatagcctttagttaatcccaggtg

SEQ ID NO: 3779570 - DNA, 25 bp, Homo sapien
tgaggtacactaactgggctgctga

SEQ ID NO: 3779571 - DNA, 25 bp, Homo sapien
tggctactggaagacagcacattgc

SEQ ID NO: 3779572 - DNA, 25 bp, Homo sapien
gatggacaccatactagaattctaa

SEQ ID NO: 3779573 - DNA, 25 bp, Homo sapien
caagcaaggagattacatgtttcac

SEQ ID NO: 3779574 - DNA, 25 bp, Homo sapien
tgatgtggtgtcaggctctgcccgt

SEQ ID NO: 3779575 - DNA, 25 bp, Homo sapien
gagcaagggatcgtgcactcgaata

SEQ ID NO: 3779576 - DNA, 25 bp, Homo sapien
tctgcccgtgtgactcaagcaagga

SEQ ID NO: 3779577 - DNA, 25 bp, Homo sapien
aggagcaggcggaacaagcttaggg

SEQ ID NO: 3779578 - DNA, 25 bp, Homo sapien
tagggaggccaggcggtaacaggta

SEQ ID NO: 3779579 - DNA, 25 bp, Homo sapien
aggccaggcggtaacaggtaaccat

SEQ ID NO: 3779580 - DNA, 25 bp, Homo sapien
gcttagggaggccaggcggtaacag

SEQ ID NO: 3779581 - DNA, 25 bp, Homo sapien
ccactgtggagtctggatagttgca

SEQ ID NO: 3779582 - DNA, 25 bp, Homo sapien
tcagggactctgtagtccactgtgg

SEQ ID NO: 3779583 - DNA, 25 bp, Homo sapien
gagtctggatagttgcatatgaaga

SEQ ID NO: 3779584 - DNA, 25 bp, Homo sapien
tcctcagggactctgtagtccactg

SEQ ID NO: 3779585 - DNA, 25 bp, Homo sapien
aaataaatctgctcccaatggccct

SEQ ID NO: 3779586 - DNA, 25 bp, Homo sapien
gctccctgcaaaggaggcggtttcc

SEQ ID NO: 3779587 - DNA, 25 bp, Homo sapien
ggcggtttccactatcacatcagcg

SEQ ID NO: 3779588 - DNA, 25 bp, Homo sapien
acatcagcgagaggtgcccggtatg

SEQ ID NO: 3779589 - DNA, 25 bp, Homo sapien
tgccaactgtctgcccaagcactgt

SEQ ID NO: 3779590 - DNA, 25 bp, Homo sapien
tctcttagtgttgagctaagtcccc

SEQ ID NO: 3779591 - DNA, 25 bp, Homo sapien
cctgacgctactggtgcctggatgg

SEQ ID NO: 3779592 - DNA, 25 bp, Homo sapien
tgtcgcattacatcctctcttagtg

SEQ ID NO: 3779593 - DNA, 25 bp, Homo sapien
ctccaggactgggccataggggcat

SEQ ID NO: 3779594 - DNA, 25 bp, Homo sapien
ccctccaggactgggccataggggc

SEQ ID NO: 3779595 - DNA, 25 bp, Homo sapien
gctccctccaggactgggccatagg

SEQ ID NO: 3779596 - DNA, 25 bp, Homo sapien
ggccttgcttaaggggctccctcca

SEQ ID NO: 3779597 - DNA, 25 bp, Homo sapien
gacattccctcttaggtgtagcctc

SEQ ID NO: 3779598 - DNA, 25 bp, Homo sapien
tctagagaacgttctagcaaaaggt

SEQ ID NO: 3779599 - DNA, 25 bp, Homo sapien
cttaggtgtagcctccttttcactt

SEQ ID NO: 3779600 - DNA, 25 bp, Homo sapien
cttcctggcctgactgacattccct

SEQ ID NO: 3779601 - DNA, 25 bp, Homo sapien
acaggatgtctcctcagtagaggct

SEQ ID NO: 3779602 - DNA, 25 bp, Homo sapien
tgttttgcgtcttagttccgccctc

SEQ ID NO: 3779603 - DNA, 25 bp, Homo sapien
tttccagccaccctcatgtgacagg

SEQ ID NO: 3779604 - DNA, 25 bp, Homo sapien
tagaggctttccctaaattcaggag

SEQ ID NO: 3779605 - DNA, 25 bp, Homo sapien
tctgtcattccgggtgctgttctcc

SEQ ID NO: 3779606 - DNA, 25 bp, Homo sapien
gctgttctcctactgggtaagtctg

SEQ ID NO: 3779607 - DNA, 25 bp, Homo sapien
gtaagtctgctctgaggcaggggat

SEQ ID NO: 3779608 - DNA, 25 bp, Homo sapien
ctgttctcctactgggtaagtctgc

SEQ ID NO: 3779609 - DNA, 25 bp, Homo sapien
atgtctccccgcgtcttaggtccaa

SEQ ID NO: 3779610 - DNA, 25 bp, Homo sapien
gagtgtctctggctggaaggagggc

SEQ ID NO: 3779611 - DNA, 25 bp, Homo sapien
ggtccaagggtatcatcgcagatca

SEQ ID NO: 3779612 - DNA, 25 bp, Homo sapien
ccgcgtcttaggtccaagggtatca

SEQ ID NO: 3779613 - DNA, 25 bp, Homo sapien
ttagcaccataagtctctgtgggct

SEQ ID NO: 3779614 - DNA, 25 bp, Homo sapien
ggagagcatcccacagcattagcac

SEQ ID NO: 3779615 - DNA, 25 bp, Homo sapien
ctgctgccaacggatgggctggttc

SEQ ID NO: 3779616 - DNA, 25 bp, Homo sapien
tgctgccaacggatgggctggttct

SEQ ID NO: 3779617 - DNA, 25 bp, Homo sapien
gcagaaactagctgtggagaagtag

SEQ ID NO: 3779618 - DNA, 25 bp, Homo sapien
gctgaagaaataggagtgagagcag

SEQ ID NO: 3779619 - DNA, 25 bp, Homo sapien
agcagaaactagctgtggagaagta

SEQ ID NO: 3779620 - DNA, 25 bp, Homo sapien
atggccccgggaaggtgtagatatt

SEQ ID NO: 3779621 - DNA, 25 bp, Homo sapien
gagcgaatggccccgggaaggtgta

SEQ ID NO: 3779622 - DNA, 25 bp, Homo sapien
gccccgggaaggtgtagatattcat

SEQ ID NO: 3779623 - DNA, 25 bp, Homo sapien
gcgaatggccccgggaaggtgtaga

SEQ ID NO: 3779624 - DNA, 25 bp, Homo sapien
gacttccacatcagtcctagaacag

SEQ ID NO: 3779625 - DNA, 25 bp, Homo sapien
taatcatcatgttaacgaagaagag

SEQ ID NO: 3779626 - DNA, 25 bp, Homo sapien
ttagagtgtttaccgctgaagagct

SEQ ID NO: 3779627 - DNA, 25 bp, Homo sapien
gaagagctgaggtccgtgttgtttc

SEQ ID NO: 3779628 - DNA, 25 bp, Homo sapien
gagaaagtgttggaattcatgattc

SEQ ID NO: 3779629 - DNA, 25 bp, Homo sapien
tcattcattctggagattgagtctc

SEQ ID NO: 3779630 - DNA, 25 bp, Homo sapien
caagaatcctaagggagagaaagtg

SEQ ID NO: 3779631 - DNA, 25 bp, Homo sapien
tgccttgtcaactgaattttattgt

SEQ ID NO: 3779632 - DNA, 25 bp, Homo sapien
tatccttgatggaaggacggtggct

SEQ ID NO: 3779633 - DNA, 25 bp, Homo sapien
ctgaggagttaaccctggaatgtcc

SEQ ID NO: 3779634 - DNA, 25 bp, Homo sapien
caatggatggaagtggaacagaact

SEQ ID NO: 3779635 - DNA, 25 bp, Homo sapien
gatggttaatgggatgccgcagcct

SEQ ID NO: 3779636 - DNA, 25 bp, Homo sapien
aaaatctctagttgagacgtgtctc

SEQ ID NO: 3779637 - DNA, 25 bp, Homo sapien
cgtgtctcattttgaaatctgtgaa

SEQ ID NO: 3779638 - DNA, 25 bp, Homo sapien
aaatctctagttgagacgtgtctca

SEQ ID NO: 3779639 - DNA, 25 bp, Homo sapien
ttgagacgtgtctcattttgaaatc

SEQ ID NO: 3779640 - DNA, 25 bp, Homo sapien
tatagcctttagttaatcccaggtg

SEQ ID NO: 3779641 - DNA, 25 bp, Homo sapien
tgaggtacactaactgggctgctga

SEQ ID NO: 3779642 - DNA, 25 bp, Homo sapien
tggctactggaagacagcacattgc

SEQ ID NO: 3779643 - DNA, 25 bp, Homo sapien
gatggacaccatactagaattctaa

SEQ ID NO: 3779644 - DNA, 25 bp, Homo sapien
ggcagtgccggctccttgttacaaa

SEQ ID NO: 3779645 - DNA, 25 bp, Homo sapien
cagtgctgtcgtggcagagcttaga

SEQ ID NO: 3779646 - DNA, 25 bp, Homo sapien
tggtaaacacgtttgcctttggcga

SEQ ID NO: 3779647 - DNA, 25 bp, Homo sapien
cagtgcagattccatcaggcagtgc

SEQ ID NO: 3779648 - DNA, 25 bp, Homo sapien
tacattgcccctaggaaacgcttgc

SEQ ID NO: 3779649 - DNA, 25 bp, Homo sapien
aaacgcttgccctcttgtgcttgga

SEQ ID NO: 3779650 - DNA, 25 bp, Homo sapien
caaagatttagaaaccctgggacag

SEQ ID NO: 3779651 - DNA, 25 bp, Homo sapien
taaacttcaggagactttgccgtgc

SEQ ID NO: 3779652 - DNA, 25 bp, Homo sapien
taaataaccttgaaggtaatatgtg

SEQ ID NO: 3779653 - DNA, 25 bp, Homo sapien
ataaccttgaaggtaatatgtggaa

SEQ ID NO: 3779654 - DNA, 25 bp, Homo sapien
ggaacagattcattgagattgacta

SEQ ID NO: 3779655 - DNA, 25 bp, Homo sapien
ggtaatatgtggaacagattcattg

SEQ ID NO: 3779656 - DNA, 25 bp, Homo sapien
tgtgtggagcacatcagtcctcaga

SEQ ID NO: 3779657 - DNA, 25 bp, Homo sapien
caagagccatttgtcatgcagaacc

SEQ ID NO: 3779658 - DNA, 25 bp, Homo sapien
tatgggtcagttcagggcaattgct

SEQ ID NO: 3779659 - DNA, 25 bp, Homo sapien
ctattagccgaggaaaaaccagcat

SEQ ID NO: 3779660 - DNA, 25 bp, Homo sapien
ctgaggccatagttgatattcttca

SEQ ID NO: 3779661 - DNA, 25 bp, Homo sapien
ccctgaggccatagttgatattctt

SEQ ID NO: 3779662 - DNA, 25 bp, Homo sapien
gccctgaggccatagttgatattct

SEQ ID NO: 3779663 - DNA, 25 bp, Homo sapien
gaggccatagttgatattcttcatc

SEQ ID NO: 3779664 - DNA, 25 bp, Homo sapien
acagggatctgtggtctgacagtac

SEQ ID NO: 3779665 - DNA, 25 bp, Homo sapien
gaacagggatctgtggtctgacagt

SEQ ID NO: 3779666 - DNA, 25 bp, Homo sapien
tactttcttgtattccctggtgcat

SEQ ID NO: 3779667 - DNA, 25 bp, Homo sapien
ggttgtggaccactactttcttgta

SEQ ID NO: 3779668 - DNA, 25 bp, Homo sapien
tgtcgcccagaagtaatatcacagc

SEQ ID NO: 3779669 - DNA, 25 bp, Homo sapien
agaagtgtcgcccagaagtaatatc

SEQ ID NO: 3779670 - DNA, 25 bp, Homo sapien
gcccagaagtaatatcacagccaga

SEQ ID NO: 3779671 - DNA, 25 bp, Homo sapien
agtaatatcacagccagacctttgc

SEQ ID NO: 3779672 - DNA, 25 bp, Homo sapien
ctttgtctttgagtccattgctcca

SEQ ID NO: 3779673 - DNA, 25 bp, Homo sapien
ccattgctccatgccgggatgtgag

SEQ ID NO: 3779674 - DNA, 25 bp, Homo sapien
tgagatggcaggtcatagtaaacca

SEQ ID NO: 3779675 - DNA, 25 bp, Homo sapien
gcagttctggatcctactttgtctt

SEQ ID NO: 3779676 - DNA, 25 bp, Homo sapien
tttatctcgtaacaagtggaaatcc

SEQ ID NO: 3779677 - DNA, 25 bp, Homo sapien
cttctttatctcgtaacaagtggaa

SEQ ID NO: 3779678 - DNA, 25 bp, Homo sapien
tatctcgtaacaagtggaaatccat

SEQ ID NO: 3779679 - DNA, 25 bp, Homo sapien
tctttatctcgtaacaagtggaaat

SEQ ID NO: 3779680 - DNA, 25 bp, Homo sapien
atttcaaagcagttccaggatctct

SEQ ID NO: 3779681 - DNA, 25 bp, Homo sapien
taactggaggaaccagctggctcct

SEQ ID NO: 3779682 - DNA, 25 bp, Homo sapien
gcagttccaggatctctgaaggagg

SEQ ID NO: 3779683 - DNA, 25 bp, Homo sapien
cacatgtggcttcaaggcttgcagg

SEQ ID NO: 3779684 - DNA, 25 bp, Homo sapien
actgaatgcaccatttaagccactg

SEQ ID NO: 3779685 - DNA, 25 bp, Homo sapien
tcacaaaggcgagtgcccctgggta

SEQ ID NO: 3779686 - DNA, 25 bp, Homo sapien
tgttttgatggagtatcacagaaag

SEQ ID NO: 3779687 - DNA, 25 bp, Homo sapien
tttgatggagtatcacagaaagatg

SEQ ID NO: 3779688 - DNA, 25 bp, Homo sapien
gacaataatacaaatgtgccgatct

SEQ ID NO: 3779689 - DNA, 25 bp, Homo sapien
tgccgatctccaaccactatctaat

SEQ ID NO: 3779690 - DNA, 25 bp, Homo sapien
cagtctgcagcatatgggggcaaca

SEQ ID NO: 3779691 - DNA, 25 bp, Homo sapien
cagaaaaacacacaatcgagatggt

SEQ ID NO: 3779692 - DNA, 25 bp, Homo sapien
tggtacatgttgtgaagaggatttc

SEQ ID NO: 3779693 - DNA, 25 bp, Homo sapien
gtacatgttgtgaagaggatttcca

SEQ ID NO: 3779694 - DNA, 25 bp, Homo sapien
ctggtacatgttgtgaagaggattt

SEQ ID NO: 3779695 - DNA, 25 bp, Homo sapien
ggtacatgttgtgaagaggatttcc

SEQ ID NO: 3779696 - DNA, 25 bp, Homo sapien
tcctcccattccttccaataccaga

SEQ ID NO: 3779697 - DNA, 25 bp, Homo sapien
tgaggatctgtgaatcctgcctgcc

SEQ ID NO: 3779698 - DNA, 25 bp, Homo sapien
ccaccgcttgtgagccatgaggatc

SEQ ID NO: 3779699 - DNA, 25 bp, Homo sapien
ttttctctcggttctccaccgcttg

SEQ ID NO: 3779700 - DNA, 25 bp, Homo sapien
agcattgatcttgttgttgattccc

SEQ ID NO: 3779701 - DNA, 25 bp, Homo sapien
caatgctctgtcctctacatacctg

SEQ ID NO: 3779702 - DNA, 25 bp, Homo sapien
tctgtaagatgtagttcaaatccct

SEQ ID NO: 3779703 - DNA, 25 bp, Homo sapien
tatttgctagccttatctgccaatg

SEQ ID NO: 3779704 - DNA, 25 bp, Homo sapien
tttctctccgttgagtgtttgcggt

SEQ ID NO: 3779705 - DNA, 25 bp, Homo sapien
ctgcaggttgttgtgaaattggaga

SEQ ID NO: 3779706 - DNA, 25 bp, Homo sapien
tgtttgcggtttctggaaaaagtca

SEQ ID NO: 3779707 - DNA, 25 bp, Homo sapien
gaaaaagtcagcttcgctgcaggtt

SEQ ID NO: 3779708 - DNA, 25 bp, Homo sapien
gcagacagatgtaacagtttgggcc

SEQ ID NO: 3779709 - DNA, 25 bp, Homo sapien
caggcagcagacagatgtaacagtt

SEQ ID NO: 3779710 - DNA, 25 bp, Homo sapien
gatgtaacagtttgggccgaggtaa

SEQ ID NO: 3779711 - DNA, 25 bp, Homo sapien
agatgtaacagtttgggccgaggta

SEQ ID NO: 3779712 - DNA, 25 bp, Homo sapien
tgggcttgcattgaaaactagaaaa

SEQ ID NO: 3779713 - DNA, 25 bp, Homo sapien
agatactggggttcttctagttgag

SEQ ID NO: 3779714 - DNA, 25 bp, Homo sapien
gtgagatactggggttcttctagtt

SEQ ID NO: 3779715 - DNA, 25 bp, Homo sapien
ctgtgagatactggggttcttctag

SEQ ID NO: 3779716 - DNA, 25 bp, Homo sapien
gtgccaggctccctaacatataaac

SEQ ID NO: 3779717 - DNA, 25 bp, Homo sapien
caggctccctaacatataaacacgc

SEQ ID NO: 3779718 - DNA, 25 bp, Homo sapien
gctccctaacatataaacacgctta

SEQ ID NO: 3779719 - DNA, 25 bp, Homo sapien
gccaggctccctaacatataaacac

SEQ ID NO: 3779720 - DNA, 25 bp, Homo sapien
gaagtctcatcaggaatgagtgagc

SEQ ID NO: 3779721 - DNA, 25 bp, Homo sapien
ccagtgtctgatcagtactctcatc

SEQ ID NO: 3779722 - DNA, 25 bp, Homo sapien
cccagggatgtccagtgtctgatca

SEQ ID NO: 3779723 - DNA, 25 bp, Homo sapien
gttgagaatgaagtctcatcaggaa

SEQ ID NO: 3779724 - DNA, 25 bp, Homo sapien
tagacgaaggatgatctgtccccag

SEQ ID NO: 3779725 - DNA, 25 bp, Homo sapien
cagtccccgcttgcaacatttgagt

SEQ ID NO: 3779726 - DNA, 25 bp, Homo sapien
tctttgcactgtccttagacgaagg

SEQ ID NO: 3779727 - DNA, 25 bp, Homo sapien
gtcctggtccgtgccaattgggaat

SEQ ID NO: 3779728 - DNA, 25 bp, Homo sapien
tgtgttctccttggctacatttatg

SEQ ID NO: 3779729 - DNA, 25 bp, Homo sapien
gttctccttggctacatttatgtac

SEQ ID NO: 3779730 - DNA, 25 bp, Homo sapien
ttaaagacatgtgttctccttggct

SEQ ID NO: 3779731 - DNA, 25 bp, Homo sapien
taaagacatgtgttctccttggcta

SEQ ID NO: 3779732 - DNA, 25 bp, Homo sapien
ttttccataggttgctgcgttgcac

SEQ ID NO: 3779733 - DNA, 25 bp, Homo sapien
tactctatgctcctgccgcgtatag

SEQ ID NO: 3779734 - DNA, 25 bp, Homo sapien
ctgtttttgggattttcaagcgcca

SEQ ID NO: 3779735 - DNA, 25 bp, Homo sapien
tatagcccggactcgcgaactgttt

SEQ ID NO: 3779736 - DNA, 25 bp, Homo sapien
gatttgttcaatgacgcgtactcgt

SEQ ID NO: 3779737 - DNA, 25 bp, Homo sapien
catctctggctgatttgttcaatga

SEQ ID NO: 3779738 - DNA, 25 bp, Homo sapien
agaacattgtttactcttttcaagg

SEQ ID NO: 3779739 - DNA, 25 bp, Homo sapien
gcgtactcgttcaccaatgtgtgga

SEQ ID NO: 3779740 - DNA, 25 bp, Homo sapien
atgtgtttaaggagtaaagtctaga

SEQ ID NO: 3779741 - DNA, 25 bp, Homo sapien
tgtgtttaaggagtaaagtctagaa

SEQ ID NO: 3779742 - DNA, 25 bp, Homo sapien
caagaccgtgtgtgctctatttggt

SEQ ID NO: 3779743 - DNA, 25 bp, Homo sapien
tatttggtaccgctggctgcatcat

SEQ ID NO: 3779744 - DNA, 25 bp, Homo sapien
cttgcaaggtgctcaagaccgtgtg

SEQ ID NO: 3779745 - DNA, 25 bp, Homo sapien
catcattaaacgcacactctgccta

SEQ ID NO: 3779746 - DNA, 25 bp, Homo sapien
agatctttgtagtcataattgtcca

SEQ ID NO: 3779747 - DNA, 25 bp, Homo sapien
ctgcagagaaaatcgctgttcttgt

SEQ ID NO: 3779748 - DNA, 25 bp, Homo sapien
gatctttgtagtcataattgtccat

SEQ ID NO: 3779749 - DNA, 25 bp, Homo sapien
cagagaaaatcgctgttcttgttgt

SEQ ID NO: 3779750 - DNA, 25 bp, Homo sapien
tgctgccaaaccttgtagggacagg

SEQ ID NO: 3779751 - DNA, 25 bp, Homo sapien
aagcaaacatctggcaagggtgcct

SEQ ID NO: 3779752 - DNA, 25 bp, Homo sapien
aattctgaagtttgtgttgccatgg

SEQ ID NO: 3779753 - DNA, 25 bp, Homo sapien
ggtaatagacccctgggagatgctt

SEQ ID NO: 3779754 - DNA, 25 bp, Homo sapien
aatcttcagcacttgaatgatgatc

SEQ ID NO: 3779755 - DNA, 25 bp, Homo sapien
cggaaagcccgtaagcaaatgctgt

SEQ ID NO: 3779756 - DNA, 25 bp, Homo sapien
tcacagagtttggacaggcactggg

SEQ ID NO: 3779757 - DNA, 25 bp, Homo sapien
tcataagtatgtacggaaagcccgt

SEQ ID NO: 3779758 - DNA, 25 bp, Homo sapien
ggtacagtctgttgtttggtatagc

SEQ ID NO: 3779759 - DNA, 25 bp, Homo sapien
gaacaaggccagacaaaggtacagt

SEQ ID NO: 3779760 - DNA, 25 bp, Homo sapien
ctgaaaaaatcgtctcctctgatct

SEQ ID NO: 3779761 - DNA, 25 bp, Homo sapien
gatttcatcacctgaaccttcaagg

SEQ ID NO: 3779762 - DNA, 25 bp, Homo sapien
gcattagtcacttttccttgtttga

SEQ ID NO: 3779763 - DNA, 25 bp, Homo sapien
tccttgtttgatatttacagctttc

SEQ ID NO: 3779764 - DNA, 25 bp, Homo sapien
acagctttctcttgtcctttgtatc

SEQ ID NO: 3779765 - DNA, 25 bp, Homo sapien
cttggctggcattagtcacttttcc

SEQ ID NO: 3779766 - DNA, 25 bp, Homo sapien
tgtattgtgtcacatggagccacag

SEQ ID NO: 3779767 - DNA, 25 bp, Homo sapien
tttccccgatgggaccaactgctcc

SEQ ID NO: 3779768 - DNA, 25 bp, Homo sapien
gaaacagcagcattgtgcagtcact

SEQ ID NO: 3779769 - DNA, 25 bp, Homo sapien
gcagcattgtgcagtcacttctttc

SEQ ID NO: 3779770 - DNA, 25 bp, Homo sapien
gaacgtcccagtgtgctccagtcct

SEQ ID NO: 3779771 - DNA, 25 bp, Homo sapien
acgtcccagtgtgctccagtcctct

SEQ ID NO: 3779772 - DNA, 25 bp, Homo sapien
atgaacgtcccagtgtgctccagtc

SEQ ID NO: 3779773 - DNA, 25 bp, Homo sapien
tgaacgtcccagtgtgctccagtcc

SEQ ID NO: 3779774 - DNA, 25 bp, Homo sapien
gttggagaagtgtgttcaaaactca

SEQ ID NO: 3779775 - DNA, 25 bp, Homo sapien
tttctggttcgtgcacctgtggccc

SEQ ID NO: 3779776 - DNA, 25 bp, Homo sapien
catttctggttcgtgcacctgtggc

SEQ ID NO: 3779777 - DNA, 25 bp, Homo sapien
gagaagtgtgttcaaaactcatttc

SEQ ID NO: 3779778 - DNA, 25 bp, Homo sapien
tcatgactgagacacgttctctcac

SEQ ID NO: 3779779 - DNA, 25 bp, Homo sapien
gcaaggttatgtcctggcgttagag

SEQ ID NO: 3779780 - DNA, 25 bp, Homo sapien
gaggctggttcatgactgagacacg

SEQ ID NO: 3779781 - DNA, 25 bp, Homo sapien
tcctggcgttagaggctggttcatg

SEQ ID NO: 3779782 - DNA, 25 bp, Homo sapien
tggctgatgccgttctgtcactctg

SEQ ID NO: 3779783 - DNA, 25 bp, Homo sapien
ctggctgatgccgttctgtcactct

SEQ ID NO: 3779784 - DNA, 25 bp, Homo sapien
gctgatgccgttctgtcactctgtc

SEQ ID NO: 3779785 - DNA, 25 bp, Homo sapien
ggctgatgccgttctgtcactctgt

SEQ ID NO: 3779786 - DNA, 25 bp, Homo sapien
gatcggctgctacagtaccacctag

SEQ ID NO: 3779787 - DNA, 25 bp, Homo sapien
gcgcaagcccacagtatggacatct

SEQ ID NO: 3779788 - DNA, 25 bp, Homo sapien
agagacattcgccattggttaaaac

SEQ ID NO: 3779789 - DNA, 25 bp, Homo sapien
aaacacagaggcacgatcggctgct

SEQ ID NO: 3779790 - DNA, 25 bp, Homo sapien
ttctgaaacatctctcccgcttgca

SEQ ID NO: 3779791 - DNA, 25 bp, Homo sapien
cccgcttgcatttggcatgtggttt

SEQ ID NO: 3779792 - DNA, 25 bp, Homo sapien
acatctctcccgcttgcatttggca

SEQ ID NO: 3779793 - DNA, 25 bp, Homo sapien
gcatttggcatgtggttttataact

SEQ ID NO: 3779794 - DNA, 25 bp, Homo sapien
gcgtgccctgattctgtactgatga

SEQ ID NO: 3779795 - DNA, 25 bp, Homo sapien
gaaactcttccagttctagcctggt

SEQ ID NO: 3779796 - DNA, 25 bp, Homo sapien
gatagcaagtattccaaggttgcct

SEQ ID NO: 3779797 - DNA, 25 bp, Homo sapien
aaggttgccttactcgcgtgccctg

SEQ ID NO: 3779798 - DNA, 25 bp, Homo sapien
ggattcggttccaagcagcgtggta

SEQ ID NO: 3779799 - DNA, 25 bp, Homo sapien
tcttcctgtataaaacttgacaaaa

SEQ ID NO: 3779800 - DNA, 25 bp, Homo sapien
gattaaagtctcatgcaggttgtgg

SEQ ID NO: 3779801 - DNA, 25 bp, Homo sapien
tgtgatggcgtactcaaaactagtc

SEQ ID NO: 3779802 - DNA, 25 bp, Homo sapien
tagtatctgtgaggaccaccttttc

SEQ ID NO: 3779803 - DNA, 25 bp, Homo sapien
catagtatctgtgaggaccaccttt

SEQ ID NO: 3779804 - DNA, 25 bp, Homo sapien
ttcatagtatctgtgaggaccacct

SEQ ID NO: 3779805 - DNA, 25 bp, Homo sapien
tcatagtatctgtgaggaccacctt

SEQ ID NO: 3779806 - DNA, 25 bp, Homo sapien
atgaaacaagatccatctttggctt

SEQ ID NO: 3779807 - DNA, 25 bp, Homo sapien
gaccactgtacagcctagtggtaga

SEQ ID NO: 3779808 - DNA, 25 bp, Homo sapien
tcaagaccatcgcaaactgattttg

SEQ ID NO: 3779809 - DNA, 25 bp, Homo sapien
cagcctagtggtagaatcaagacca

SEQ ID NO: 3779810 - DNA, 25 bp, Homo sapien
cattgtgaagaaggcaatcataggc

SEQ ID NO: 3779811 - DNA, 25 bp, Homo sapien
taacagtgaatccaggatgctgctg

SEQ ID NO: 3779812 - DNA, 25 bp, Homo sapien
gaggtaacagtgaatccaggatgct

SEQ ID NO: 3779813 - DNA, 25 bp, Homo sapien
caatcataggcgagcagccgcggga

SEQ ID NO: 3779814 - DNA, 25 bp, Homo sapien
gagtagaaggtgggaagaaatggac

SEQ ID NO: 3779815 - DNA, 25 bp, Homo sapien
agaaggtgggaagaaatggaccgag

SEQ ID NO: 3779816 - DNA, 25 bp, Homo sapien
ctgggagtagaaggtgggaagaaat

SEQ ID NO: 3779817 - DNA, 25 bp, Homo sapien
tagaaggtgggaagaaatggaccga

SEQ ID NO: 3779818 - DNA, 25 bp, Homo sapien
aggcacagtgcagcttggtgaagcc

SEQ ID NO: 3779819 - DNA, 25 bp, Homo sapien
ggcacagtgcagcttggtgaagcca

SEQ ID NO: 3779820 - DNA, 25 bp, Homo sapien
tgcagcttggtgaagccacacgctg

SEQ ID NO: 3779821 - DNA, 25 bp, Homo sapien
cggcgagtacgggtgtcctatgtaa

SEQ ID NO: 3779822 - DNA, 25 bp, Homo sapien
cgagtacgggtgtcctatgtaagtt

SEQ ID NO: 3779823 - DNA, 25 bp, Homo sapien
gcgagtacgggtgtcctatgtaagt

SEQ ID NO: 3779824 - DNA, 25 bp, Homo sapien
cgccggcgagtacgggtgtcctatg

SEQ ID NO: 3779825 - DNA, 25 bp, Homo sapien
gctgtctacttggttgctgcctgtg

SEQ ID NO: 3779826 - DNA, 25 bp, Homo sapien
gagtctcggttttctcacccatata

SEQ ID NO: 3779827 - DNA, 25 bp, Homo sapien
caaatggaatcagacttagcctggg

SEQ ID NO: 3779828 - DNA, 25 bp, Homo sapien
tgatcacctttgagcttttagagca

SEQ ID NO: 3779829 - DNA, 25 bp, Homo sapien
gagcagtcccttttagaaggatgcc

SEQ ID NO: 3779830 - DNA, 25 bp, Homo sapien
gcccaaggctattctgaaagttaga

SEQ ID NO: 3779831 - DNA, 25 bp, Homo sapien
cacttggcacggagtaagtactcaa

SEQ ID NO: 3779832 - DNA, 25 bp, Homo sapien
tgttctcagaaaagtctagtctagc

SEQ ID NO: 3779833 - DNA, 25 bp, Homo sapien
gaaccacaggtctgaacaaacactg

SEQ ID NO: 3779834 - DNA, 25 bp, Homo sapien
tgttgttgttggaaccacaggtctg

SEQ ID NO: 3779835 - DNA, 25 bp, Homo sapien
tcttcttgttgttggaatttcttct

SEQ ID NO: 3779836 - DNA, 25 bp, Homo sapien
tgttggaaccacaggtctgaacaaa

SEQ ID NO: 3779837 - DNA, 25 bp, Homo sapien
cagtatcacttagcagtggagcagg

SEQ ID NO: 3779838 - DNA, 25 bp, Homo sapien
taagaagtggatgatcaggccaatc

SEQ ID NO: 3779839 - DNA, 25 bp, Homo sapien
ggcaaaagtggtgagctcagacaat

SEQ ID NO: 3779840 - DNA, 25 bp, Homo sapien
atacaaactacatggacggcaccct

SEQ ID NO: 3779841 - DNA, 25 bp, Homo sapien
ctcacttaagcagatcatgtatggg

SEQ ID NO: 3779842 - DNA, 25 bp, Homo sapien
tacatcatgacgaaagaaatgcagg

SEQ ID NO: 3779843 - DNA, 25 bp, Homo sapien
ggaaccagtttcctataaccagcta

SEQ ID NO: 3779844 - DNA, 25 bp, Homo sapien
ggtgagtaataaggaactggcttca

SEQ ID NO: 3779845 - DNA, 25 bp, Homo sapien
tgttggtgaaactattgttgaccgc

SEQ ID NO: 3779846 - DNA, 25 bp, Homo sapien
gagaactttttgcatttgggtaaca

SEQ ID NO: 3779847 - DNA, 25 bp, Homo sapien
tctgtgtctggcaaaccagagaact

SEQ ID NO: 3779848 - DNA, 25 bp, Homo sapien
caaagacgtttggaaatatactcca

SEQ ID NO: 3779849 - DNA, 25 bp, Homo sapien
taactcgagacagtgcaggaaaaat

SEQ ID NO: 3779850 - DNA, 25 bp, Homo sapien
tctatgtgggtgaaggtaaaaagag

SEQ ID NO: 3779851 - DNA, 25 bp, Homo sapien
taaccttgagatcactatatccaga

SEQ ID NO: 3779852 - DNA, 25 bp, Homo sapien
cccaagttactaagtgtcttgctga

SEQ ID NO: 3779853 - DNA, 25 bp, Homo sapien
tagcagtcaaagttgtagaacagac

SEQ ID NO: 3779854 - DNA, 25 bp, Homo sapien
agatattgtcccagtgatgcccaga

SEQ ID NO: 3779855 - DNA, 25 bp, Homo sapien
agcagcagtccagggaagtttgatg

SEQ ID NO: 3779856 - DNA, 25 bp, Homo sapien
tgatgcccagaacctgaatagcagc

SEQ ID NO: 3779857 - DNA, 25 bp, Homo sapien
aattcttagaagctgtgcaacccgt

SEQ ID NO: 3779858 - DNA, 25 bp, Homo sapien
gtatgaaggcaacccatatgaaggt

SEQ ID NO: 3779859 - DNA, 25 bp, Homo sapien
gaagctgtgcaacccgtatgaaggc

SEQ ID NO: 3779860 - DNA, 25 bp, Homo sapien
gagccagtactgaattcttagaagc

SEQ ID NO: 3779861 - DNA, 25 bp, Homo sapien
ctggaaaaaatactgagaggcaaca

SEQ ID NO: 3779862 - DNA, 25 bp, Homo sapien
tggaaaaaatactgagaggcaacac

SEQ ID NO: 3779863 - DNA, 25 bp, Homo sapien
cacaatgggcaagtatattatctca

SEQ ID NO: 3779864 - DNA, 25 bp, Homo sapien
acttcacccggcctaatcagtgttt

SEQ ID NO: 3779865 - DNA, 25 bp, Homo sapien
tatgtttataccacctaagagttgt

SEQ ID NO: 3779866 - DNA, 25 bp, Homo sapien
tcatacgtagaattgcaagtcatgg

SEQ ID NO: 3779867 - DNA, 25 bp, Homo sapien
gaaggcaagaaagaagaaggtgctt

SEQ ID NO: 3779868 - DNA, 25 bp, Homo sapien
gcaagaaagaagaaggtgctttcat

SEQ ID NO: 3779869 - DNA, 25 bp, Homo sapien
cctgcagaaggcaagaaagaagaag

SEQ ID NO: 3779870 - DNA, 25 bp, Homo sapien
ggcaagaaagaagaaggtgctttca

SEQ ID NO: 3779871 - DNA, 25 bp, Homo sapien
tgtcctaatgaaaagagataatcac

SEQ ID NO: 3779872 - DNA, 25 bp, Homo sapien
gtcctaatgaaaagagataatcaca

SEQ ID NO: 3779873 - DNA, 25 bp, Homo sapien
ctaatgaaaagagataatcacattc

SEQ ID NO: 3779874 - DNA, 25 bp, Homo sapien
tcctaatgaaaagagataatcacat

SEQ ID NO: 3779875 - DNA, 25 bp, Homo sapien
agattcttgcataaagtcttgttcc

SEQ ID NO: 3779876 - DNA, 25 bp, Homo sapien
gattcttgcataaagtcttgttcct

SEQ ID NO: 3779877 - DNA, 25 bp, Homo sapien
ttcttgcataaagtcttgttcctcc

SEQ ID NO: 3779878 - DNA, 25 bp, Homo sapien
tgagattcttgcataaagtcttgtt

SEQ ID NO: 3779879 - DNA, 25 bp, Homo sapien
caggaggaaatctcttcagatggca

SEQ ID NO: 3779880 - DNA, 25 bp, Homo sapien
aggaggaaatctcttcagatggcag

SEQ ID NO: 3779881 - DNA, 25 bp, Homo sapien
ggaggaaatctcttcagatggcagg

SEQ ID NO: 3779882 - DNA, 25 bp, Homo sapien
tcaggaggaaatctcttcagatggc

SEQ ID NO: 3779883 - DNA, 25 bp, Homo sapien
tctgaagctgctgaattgcaggcgg

SEQ ID NO: 3779884 - DNA, 25 bp, Homo sapien
gctgctgaattgcaggcgggattga

SEQ ID NO: 3779885 - DNA, 25 bp, Homo sapien
tgctgaattgcaggcgggattgatc

SEQ ID NO: 3779886 - DNA, 25 bp, Homo sapien
cttatctgaagctgctgaattgcag

SEQ ID NO: 3779887 - DNA, 25 bp, Homo sapien
cttttcagattagtgagcatgcatc

SEQ ID NO: 3779888 - DNA, 25 bp, Homo sapien
cacggtgtgaatacgagctgggact

SEQ ID NO: 3779889 - DNA, 25 bp, Homo sapien
ggaagttggaaacaagctaaggaca

SEQ ID NO: 3779890 - DNA, 25 bp, Homo sapien
taactgggcacttaactgagatccc

SEQ ID NO: 3779891 - DNA, 25 bp, Homo sapien
tagcttctgccaattatcaaagtgg

SEQ ID NO: 3779892 - DNA, 25 bp, Homo sapien
gcttctgccaattatcaaagtggtc

SEQ ID NO: 3779893 - DNA, 25 bp, Homo sapien
tctgccaattatcaaagtggtcctc

SEQ ID NO: 3779894 - DNA, 25 bp, Homo sapien
caattatcaaagtggtcctcaactt

SEQ ID NO: 3779895 - DNA, 25 bp, Homo sapien
ggcctggcagagaccctgtgccttt

SEQ ID NO: 3779896 - DNA, 25 bp, Homo sapien
tagattttacattgtcaggggcagc

SEQ ID NO: 3779897 - DNA, 25 bp, Homo sapien
aagccaacatatcatcacatttctg

SEQ ID NO: 3779898 - DNA, 25 bp, Homo sapien
tgtgcctttgtagcttcctgcaggg

SEQ ID NO: 3779899 - DNA, 25 bp, Homo sapien
tgctggccttgaaaaggtcagaagg

SEQ ID NO: 3779900 - DNA, 25 bp, Homo sapien
gtgctggccttgaaaaggtcagaag

SEQ ID NO: 3779901 - DNA, 25 bp, Homo sapien
ttcaaggatgaagctgccataggct

SEQ ID NO: 3779902 - DNA, 25 bp, Homo sapien
tgattccttcaaggatgaagctgcc

SEQ ID NO: 3779903 - DNA, 25 bp, Homo sapien
ccatcttgattccttcaaggatgaa

SEQ ID NO: 3779904 - DNA, 25 bp, Homo sapien
ccttcaaggatgaagctgccatagg

SEQ ID NO: 3779905 - DNA, 25 bp, Homo sapien
tcaaagatcgtgagaggaggtgcac

SEQ ID NO: 3779906 - DNA, 25 bp, Homo sapien
catggcgggcaggaatcatatttgc

SEQ ID NO: 3779907 - DNA, 25 bp, Homo sapien
gcaaacaggtgtattcctagccact

SEQ ID NO: 3779908 - DNA, 25 bp, Homo sapien
tttcgcccacatgaattccagcagg

SEQ ID NO: 3779909 - DNA, 25 bp, Homo sapien
ctgccgatgaatcaacattgtaaga

SEQ ID NO: 3779910 - DNA, 25 bp, Homo sapien
gcgggtaagaacagtacaggagcat

SEQ ID NO: 3779911 - DNA, 25 bp, Homo sapien
catcaataaactgccgatgaatcaa

SEQ ID NO: 3779912 - DNA, 25 bp, Homo sapien
gagcatagggtgatccagcgtcaca

SEQ ID NO: 3779913 - DNA, 25 bp, Homo sapien
ttgaggatgtcttgtacccagtcac

SEQ ID NO: 3779914 - DNA, 25 bp, Homo sapien
cctggttgaaatcctgtcgccccat

SEQ ID NO: 3779915 - DNA, 25 bp, Homo sapien
gaggatgtcttgtacccagtcaccc

SEQ ID NO: 3779916 - DNA, 25 bp, Homo sapien
cgctttcttcctggttgaaatcctg

SEQ ID NO: 3779917 - DNA, 25 bp, Homo sapien
cccagagcatggataggaaaggagc

SEQ ID NO: 3779918 - DNA, 25 bp, Homo sapien
tgcagctgcggacgataaaggcgct

SEQ ID NO: 3779919 - DNA, 25 bp, Homo sapien
tgtctggctcatgaaggccacctgg

SEQ ID NO: 3779920 - DNA, 25 bp, Homo sapien
tgatatctgtgtaagcgcaagggct

SEQ ID NO: 3779921 - DNA, 25 bp, Homo sapien
cgacatgaagacttttacgcagagc

SEQ ID NO: 3779922 - DNA, 25 bp, Homo sapien
tcttagagcactataactgaatgtc

SEQ ID NO: 3779923 - DNA, 25 bp, Homo sapien
accagatgttaacagggaacgacat

SEQ ID NO: 3779924 - DNA, 25 bp, Homo sapien
ggaaggattattataaattgcagtt

SEQ ID NO: 3779925 - DNA, 25 bp, Homo sapien
aatggaacgtacttaatactatttg

SEQ ID NO: 3779926 - DNA, 25 bp, Homo sapien
tacaaatggaacgtacttaatacta

SEQ ID NO: 3779927 - DNA, 25 bp, Homo sapien
caaatggaacgtacttaatactatt

SEQ ID NO: 3779928 - DNA, 25 bp, Homo sapien
tggaacgtacttaatactatttgaa

SEQ ID NO: 3779929 - DNA, 25 bp, Homo sapien
aattacatgtgacctcagtgaggaa

SEQ ID NO: 3779930 - DNA, 25 bp, Homo sapien
tccattcccagtgtagtgagtgata

SEQ ID NO: 3779931 - DNA, 25 bp, Homo sapien
gggttatgtcttgtctctacaatta

SEQ ID NO: 3779932 - DNA, 25 bp, Homo sapien
tgaggaatcaggattgtcaattatg

SEQ ID NO: 3779933 - DNA, 25 bp, Homo sapien
cgagctgacaataggcaatccaaca

SEQ ID NO: 3779934 - DNA, 25 bp, Homo sapien
aaagtataaggcaggcggaggcata

SEQ ID NO: 3779935 - DNA, 25 bp, Homo sapien
ggctctcattgcaaggagtccaacc

SEQ ID NO: 3779936 - DNA, 25 bp, Homo sapien
gaaaatccacctgagttgacaatag

SEQ ID NO: 3779937 - DNA, 25 bp, Homo sapien
tcagaagtactgttgcttgcaaagc

SEQ ID NO: 3779938 - DNA, 25 bp, Homo sapien
ctgttgcttgcaaagcatatttgtt

SEQ ID NO: 3779939 - DNA, 25 bp, Homo sapien
atgtggctttatagtcagaagtact

SEQ ID NO: 3779940 - DNA, 25 bp, Homo sapien
ctttatagtcagaagtactgttgct

SEQ ID NO: 3779941 - DNA, 25 bp, Homo sapien
gagcccattctcaccagcgtggaag

SEQ ID NO: 3779942 - DNA, 25 bp, Homo sapien
gaccagtgttgagaacaagaggtag

SEQ ID NO: 3779943 - DNA, 25 bp, Homo sapien
ttctcaccagcgtggaagacccggg

SEQ ID NO: 3779944 - DNA, 25 bp, Homo sapien
caggaccagtgttgagaacaagagg

SEQ ID NO: 3779945 - DNA, 25 bp, Homo sapien
ggcggcatgaggcagaaagaaagca

SEQ ID NO: 3779946 - DNA, 25 bp, Homo sapien
cggcatgaggcagaaagaaagcact

SEQ ID NO: 3779947 - DNA, 25 bp, Homo sapien
ggcatgaggcagaaagaaagcactt

SEQ ID NO: 3779948 - DNA, 25 bp, Homo sapien
ctggcggcatgaggcagaaagaaag

SEQ ID NO: 3779949 - DNA, 25 bp, Homo sapien
tatgctcacccatcacgtagttcgt

SEQ ID NO: 3779950 - DNA, 25 bp, Homo sapien
ttgcatttaactttgaaggcacaca

SEQ ID NO: 3779951 - DNA, 25 bp, Homo sapien
cgtagttcgttatcaccactacaga

SEQ ID NO: 3779952 - DNA, 25 bp, Homo sapien
tattgacaagctagtgaaacctgcg

SEQ ID NO: 3779953 - DNA, 25 bp, Homo sapien
actgccgctcgtatcaccctgttta

SEQ ID NO: 3779954 - DNA, 25 bp, Homo sapien
caactcattgtctcctcctcagaga

SEQ ID NO: 3779955 - DNA, 25 bp, Homo sapien
cctcagagacttcttgagcactgcc

SEQ ID NO: 3779956 - DNA, 25 bp, Homo sapien
tgtcatctatgtcccaactcattgt

SEQ ID NO: 3779957 - DNA, 25 bp, Homo sapien
ttttccccatgcacacgaacttctt

SEQ ID NO: 3779958 - DNA, 25 bp, Homo sapien
catgagattcccagcagtcttgatt

SEQ ID NO: 3779959 - DNA, 25 bp, Homo sapien
tttccccatgcacacgaacttcttg

SEQ ID NO: 3779960 - DNA, 25 bp, Homo sapien
gattcccagcagtcttgatttcata

SEQ ID NO: 3779961 - DNA, 25 bp, Homo sapien
tcatctgagaggacttttatacctt

SEQ ID NO: 3779962 - DNA, 25 bp, Homo sapien
atctgagaggacttttatacctttc

SEQ ID NO: 3779963 - DNA, 25 bp, Homo sapien
ctgcaccttgcctaggaactattta

SEQ ID NO: 3779964 - DNA, 25 bp, Homo sapien
caccttgcctaggaactatttatta

SEQ ID NO: 3779965 - DNA, 25 bp, Homo sapien
ctcccaggatgcatgcaaaaggaag

SEQ ID NO: 3779966 - DNA, 25 bp, Homo sapien
gatacagagcaatgcaaaacagtag

SEQ ID NO: 3779967 - DNA, 25 bp, Homo sapien
cgcgttaattgctgcaggatttcta

SEQ ID NO: 3779968 - DNA, 25 bp, Homo sapien
cagtagatgtcagatgccatttgac

SEQ ID NO: 3779969 - DNA, 25 bp, Homo sapien
gccatttgactaacatacgcgttaa

SEQ ID NO: 3779970 - DNA, 25 bp, Homo sapien
aaacctgcttcagttgcattgcatg

SEQ ID NO: 3779971 - DNA, 25 bp, Homo sapien
catacagtttgttcacccctaaatt

SEQ ID NO: 3779972 - DNA, 25 bp, Homo sapien
ttctatctaaacctgcttcagttgc

SEQ ID NO: 3779973 - DNA, 25 bp, Homo sapien
ttgcatacagtttgttcacccctaa

SEQ ID NO: 3779974 - DNA, 25 bp, Homo sapien
gagccccatggttgactagctgaag

SEQ ID NO: 3779975 - DNA, 25 bp, Homo sapien
ttttctgcttgtcttgagccccatg

SEQ ID NO: 3779976 - DNA, 25 bp, Homo sapien
ccccatggttgactagctgaagcat

SEQ ID NO: 3779977 - DNA, 25 bp, Homo sapien
tcttgagccccatggttgactagct

SEQ ID NO: 3779978 - DNA, 25 bp, Homo sapien
tgcatttcatgctttccccagctct

SEQ ID NO: 3779979 - DNA, 25 bp, Homo sapien
gacatagtacctagttccagaaaat

SEQ ID NO: 3779980 - DNA, 25 bp, Homo sapien
tgaatcactatgttaaccctacaga

SEQ ID NO: 3779981 - DNA, 25 bp, Homo sapien
tgagcatgcccttttggagttacaa

SEQ ID NO: 3779982 - DNA, 25 bp, Homo sapien
tgacatcaaggacatgaccccattg

SEQ ID NO: 3779983 - DNA, 25 bp, Homo sapien
ttcactcggatatcttgggacccag

SEQ ID NO: 3779984 - DNA, 25 bp, Homo sapien
cagttcagcttgtgtatcccaggga

SEQ ID NO: 3779985 - DNA, 25 bp, Homo sapien
gggttatagactcacttacgcagga

SEQ ID NO: 3779986 - DNA, 25 bp, Homo sapien
aggcctaaatacatctttattaatc

SEQ ID NO: 3779987 - DNA, 25 bp, Homo sapien
taggcctaaatacatctttattaat

SEQ ID NO: 3779988 - DNA, 25 bp, Homo sapien
tatagtggatcacaccggcagcagc

SEQ ID NO: 3779989 - DNA, 25 bp, Homo sapien
tttttgttgaccgacgccggctgca

SEQ ID NO: 3779990 - DNA, 25 bp, Homo sapien
tctcagatgtgatgttttcgctggg

SEQ ID NO: 3779991 - DNA, 25 bp, Homo sapien
ccaggcgttgtcacggagaagaact

SEQ ID NO: 3779992 - DNA, 25 bp, Homo sapien
caacagctgagctggttgtcagtgg

SEQ ID NO: 3779993 - DNA, 25 bp, Homo sapien
ttgcaaagcttcgtgaaccaccacc

SEQ ID NO: 3779994 - DNA, 25 bp, Homo sapien
tttgcttggctcatgaggcacctac

SEQ ID NO: 3779995 - DNA, 25 bp, Homo sapien
gagtagtcgctgtcaacttccaatg

SEQ ID NO: 3779996 - DNA, 25 bp, Homo sapien
gcaaaaacgcataaagcgagaaatg

SEQ ID NO: 3779997 - DNA, 25 bp, Homo sapien
gtcattagcaaaaacgcataaagcg

SEQ ID NO: 3779998 - DNA, 25 bp, Homo sapien
ttagcaaaaacgcataaagcgagaa

SEQ ID NO: 3779999 - DNA, 25 bp, Homo sapien
caaaaacgcataaagcgagaaatgc

SEQ ID NO: 3780000 - DNA, 25 bp, Homo sapien
taaactagtcatgtcaagatcaccc

SEQ ID NO: 3780001 - DNA, 25 bp, Homo sapien
taagatgtgagctagtgcccaccac

SEQ ID NO: 3780002 - DNA, 25 bp, Homo sapien
gaaatcttggacagcccagggctaa

SEQ ID NO: 3780003 - DNA, 25 bp, Homo sapien
tcttccctggattggtgcaacagcc

SEQ ID NO: 3780004 - DNA, 25 bp, Homo sapien
taagcctggctaccaaaactgtaca

SEQ ID NO: 3780005 - DNA, 25 bp, Homo sapien
cagaggttctgtgctcataggcgga

SEQ ID NO: 3780006 - DNA, 25 bp, Homo sapien
tgtagggtcttgtaccacacaggaa

SEQ ID NO: 3780007 - DNA, 25 bp, Homo sapien
tcctgttctgtctagggtcccctgg

SEQ ID NO: 3780008 - DNA, 25 bp, Homo sapien
tagatatacaaatcctctgagaggc

SEQ ID NO: 3780009 - DNA, 25 bp, Homo sapien
caacccttcgttggcaaaacttcag

SEQ ID NO: 3780010 - DNA, 25 bp, Homo sapien
tgagaggctggtttctaacatagaa

SEQ ID NO: 3780011 - DNA, 25 bp, Homo sapien
tatatgttagcaatgagcatgatac

SEQ ID NO: 3780012 - DNA, 25 bp, Homo sapien
gactgtctgcacttagtgtaggcca

SEQ ID NO: 3780013 - DNA, 25 bp, Homo sapien
gaggttcaatatgttacccactggc

SEQ ID NO: 3780014 - DNA, 25 bp, Homo sapien
ctataacggaagctttgcatgtgga

SEQ ID NO: 3780015 - DNA, 25 bp, Homo sapien
taaagctctatgaagcgatgacgct

SEQ ID NO: 3780016 - DNA, 25 bp, Homo sapien
tgaggaaggcttgccccgtcttcaa

SEQ ID NO: 3780017 - DNA, 25 bp, Homo sapien
gccccgtcttcaagatgctgagctg

SEQ ID NO: 3780018 - DNA, 25 bp, Homo sapien
cagtgggtataagaaactgtgggat

SEQ ID NO: 3780019 - DNA, 25 bp, Homo sapien
ttaattcagtgggtataagaaactg

SEQ ID NO: 3780020 - DNA, 25 bp, Homo sapien
taaagtatgtatgtaaggctaccac

SEQ ID NO: 3780021 - DNA, 25 bp, Homo sapien
tgcaccaggattctgaaagtccact

SEQ ID NO: 3780022 - DNA, 25 bp, Homo sapien
tcagcacatattagggctgggcgca

SEQ ID NO: 3780023 - DNA, 25 bp, Homo sapien
tctactaatacagtgttgcaccagg

SEQ ID NO: 3780024 - DNA, 25 bp, Homo sapien
tgctcagtagcccattagctgctgc

SEQ ID NO: 3780025 - DNA, 25 bp, Homo sapien
tttacacgcctgttcaagtgctcag

SEQ ID NO: 3780026 - DNA, 25 bp, Homo sapien
gcaagaatccaacggcctaagagga

SEQ ID NO: 3780027 - DNA, 25 bp, Homo sapien
gaattcaacctccacgactgcagtg

SEQ ID NO: 3780028 - DNA, 25 bp, Homo sapien
aacacaagatcctggttccgaaaat

SEQ ID NO: 3780029 - DNA, 25 bp, Homo sapien
aaaacagtcaaacacctgtcaggga

SEQ ID NO: 3780030 - DNA, 25 bp, Homo sapien
caaaagcttccgtacatcctgcagt

SEQ ID NO: 3780031 - DNA, 25 bp, Homo sapien
ttgagcacaagtaatccaaacgatg

SEQ ID NO: 3780032 - DNA, 25 bp, Homo sapien
gcctggtgtgctcctttcgctgcca

SEQ ID NO: 3780033 - DNA, 25 bp, Homo sapien
tgatcagaggactgatcgctccgct

SEQ ID NO: 3780034 - DNA, 25 bp, Homo sapien
cttggttaacgcctggtgtgctcct

SEQ ID NO: 3780035 - DNA, 25 bp, Homo sapien
tgccagggttctcaaggtgatcaga

SEQ ID NO: 3780036 - DNA, 25 bp, Homo sapien
gatgtatccaacaagccagaatcag

SEQ ID NO: 3780037 - DNA, 25 bp, Homo sapien
aaaatctgttgccacccaggtgatg

SEQ ID NO: 3780038 - DNA, 25 bp, Homo sapien
tgtacctctggctgactaaatttgg

SEQ ID NO: 3780039 - DNA, 25 bp, Homo sapien
tagagtcttaatgccaagtcagcag

SEQ ID NO: 3780040 - DNA, 25 bp, Homo sapien
gtgcttcttataaccaaagtttctg

SEQ ID NO: 3780041 - DNA, 25 bp, Homo sapien
aggttcactgtctgtcagaacccag

SEQ ID NO: 3780042 - DNA, 25 bp, Homo sapien
tgtcagaacccagaagtgcttctta

SEQ ID NO: 3780043 - DNA, 25 bp, Homo sapien
actgtctgtcagaacccagaagtgc

SEQ ID NO: 3780044 - DNA, 25 bp, Homo sapien
agttcttaccaaatattcttagcct

SEQ ID NO: 3780045 - DNA, 25 bp, Homo sapien
aatgattaagctggggtggtagagt

SEQ ID NO: 3780046 - DNA, 25 bp, Homo sapien
caatgcactccagcctggtgacaac

SEQ ID NO: 3780047 - DNA, 25 bp, Homo sapien
ctgcagtgaaccgtgactgtaccaa

SEQ ID NO: 3780048 - DNA, 25 bp, Homo sapien
gcagtgaaccgtgactgtaccaatg

SEQ ID NO: 3780049 - DNA, 25 bp, Homo sapien
ggctgcagtgaaccgtgactgtacc

SEQ ID NO: 3780050 - DNA, 25 bp, Homo sapien
catgttgtactttgggacaatgcca

SEQ ID NO: 3780051 - DNA, 25 bp, Homo sapien
cactgaactgtctaacaaacctggt

SEQ ID NO: 3780052 - DNA, 25 bp, Homo sapien
gttactgttacaaaaaggtgctgct

SEQ ID NO: 3780053 - DNA, 25 bp, Homo sapien
ttttattcaacgtgagctctagcag

SEQ ID NO: 3780054 - DNA, 25 bp, Homo sapien
gggcttaaggtgcatggctagaaaa

SEQ ID NO: 3780055 - DNA, 25 bp, Homo sapien
cgtaagtgccaggagaacattagat

SEQ ID NO: 3780056 - DNA, 25 bp, Homo sapien
tttgaatgagagtgtcgtaagtgcc

SEQ ID NO: 3780057 - DNA, 25 bp, Homo sapien
tgcctatccaacctcagggaaaggt

SEQ ID NO: 3780058 - DNA, 25 bp, Homo sapien
gatttaacaccatgagacagcctta

SEQ ID NO: 3780059 - DNA, 25 bp, Homo sapien
caaggcctaataacttttgggtgat

SEQ ID NO: 3780060 - DNA, 25 bp, Homo sapien
caagagaccttgcaatccttatgga

SEQ ID NO: 3780061 - DNA, 25 bp, Homo sapien
tccatttcttaagcccaaggcctaa

SEQ ID NO: 3780062 - DNA, 25 bp, Homo sapien
cattattggcacatagtcaatgttt

SEQ ID NO: 3780063 - DNA, 25 bp, Homo sapien
tccattattggcacatagtcaatgt

SEQ ID NO: 3780064 - DNA, 25 bp, Homo sapien
ctccattattggcacatagtcaatg

SEQ ID NO: 3780065 - DNA, 25 bp, Homo sapien
ccattattggcacatagtcaatgtt

SEQ ID NO: 3780066 - DNA, 25 bp, Homo sapien
cagacatctataggcatctgctttt

SEQ ID NO: 3780067 - DNA, 25 bp, Homo sapien
gaaaatataatctcataccaccccc

SEQ ID NO: 3780068 - DNA, 25 bp, Homo sapien
acattagatcacaaatgaaaatatg

SEQ ID NO: 3780069 - DNA, 25 bp, Homo sapien
aaaatatgctccagacatctatagg

SEQ ID NO: 3780070 - DNA, 25 bp, Homo sapien
tcatcattcagttggcctgacaaca

SEQ ID NO: 3780071 - DNA, 25 bp, Homo sapien
acatcatcattcagttggcctgaca

SEQ ID NO: 3780072 - DNA, 25 bp, Homo sapien
tggatccctggtaaaacagctggca

SEQ ID NO: 3780073 - DNA, 25 bp, Homo sapien
ctatgtctctggatccctggtaaaa

SEQ ID NO: 3780074 - DNA, 25 bp, Homo sapien
aaaaccacagacagcaaatgtttgg

SEQ ID NO: 3780075 - DNA, 25 bp, Homo sapien
acagcaaatgtttggaattttcatt

SEQ ID NO: 3780076 - DNA, 25 bp, Homo sapien
aaccacagacagcaaatgtttggaa

SEQ ID NO: 3780077 - DNA, 25 bp, Homo sapien
tttcatttctgagcatccatccctc

SEQ ID NO: 3780078 - DNA, 25 bp, Homo sapien
gcattttacaaattttgcaataaaa

SEQ ID NO: 3780079 - DNA, 25 bp, Homo sapien
ttttgcattttacaaattttgcaat

SEQ ID NO: 3780080 - DNA, 25 bp, Homo sapien
ttgcattttacaaattttgcaataa

SEQ ID NO: 3780081 - DNA, 25 bp, Homo sapien
ctatgtgcttttgcattttacaaat

SEQ ID NO: 3780082 - DNA, 25 bp, Homo sapien
agagagtccatgtcagtgtccggta

SEQ ID NO: 3780083 - DNA, 25 bp, Homo sapien
tcttctggcctctctaagagagtcc

SEQ ID NO: 3780084 - DNA, 25 bp, Homo sapien
gtccttattagccagacgcaacatg

SEQ ID NO: 3780085 - DNA, 25 bp, Homo sapien
tagccagacgcaacatgtcttctct

SEQ ID NO: 3780086 - DNA, 25 bp, Homo sapien
agccgatggatcaaatcgctgcagc

SEQ ID NO: 3780087 - DNA, 25 bp, Homo sapien
ttcaactgttcacatgagagcccag

SEQ ID NO: 3780088 - DNA, 25 bp, Homo sapien
tggatcaaatcgctgcagctgtttc

SEQ ID NO: 3780089 - DNA, 25 bp, Homo sapien
tgtttcaactgttcacatgagagcc

SEQ ID NO: 3780090 - DNA, 25 bp, Homo sapien
tgcacgtgctataaaccagcacacc

SEQ ID NO: 3780091 - DNA, 25 bp, Homo sapien
tgttcttcattttcggccagtgtta

SEQ ID NO: 3780092 - DNA, 25 bp, Homo sapien
ccagtgttatagtgcacgtgctata

SEQ ID NO: 3780093 - DNA, 25 bp, Homo sapien
cattttcggccagtgttatagtgca

SEQ ID NO: 3780094 - DNA, 25 bp, Homo sapien
aatctagtctcagtacagcagccaa

SEQ ID NO: 3780095 - DNA, 25 bp, Homo sapien
gctctaccttcacattctagccaga

SEQ ID NO: 3780096 - DNA, 25 bp, Homo sapien
ttttgcctggattattccaaccgcc

SEQ ID NO: 3780097 - DNA, 25 bp, Homo sapien
cactatcattgtggtccaagcctct

SEQ ID NO: 3780098 - DNA, 25 bp, Homo sapien
tctcaagtcaaagtgggtttcggct

SEQ ID NO: 3780099 - DNA, 25 bp, Homo sapien
tagagctgttatccctgctactcag

SEQ ID NO: 3780100 - DNA, 25 bp, Homo sapien
agtcacttaggtggaagagccatgg

SEQ ID NO: 3780101 - DNA, 25 bp, Homo sapien
catggctcaagtcaacaaggctcaa

SEQ ID NO: 3780102 - DNA, 25 bp, Homo sapien
gctatggagattgctgtcagtagtt

SEQ ID NO: 3780103 - DNA, 25 bp, Homo sapien
tattgtaatgaacgctgctatggag

SEQ ID NO: 3780104 - DNA, 25 bp, Homo sapien
aacgctgctatggagattgctgtca

SEQ ID NO: 3780105 - DNA, 25 bp, Homo sapien
tttggctattgtaatgaacgctgct

SEQ ID NO: 3780106 - DNA, 25 bp, Homo sapien
gaagagttttcgctgtaatggctga

SEQ ID NO: 3780107 - DNA, 25 bp, Homo sapien
caagtacaggccatgtttggtctct

SEQ ID NO: 3780108 - DNA, 25 bp, Homo sapien
gcatccagaagaattcggtcaaagg

SEQ ID NO: 3780109 - DNA, 25 bp, Homo sapien
ccattccactacagggtgcatccag

SEQ ID NO: 3780110 - DNA, 25 bp, Homo sapien
gtttgactgttgtgaaacacactga

SEQ ID NO: 3780111 - DNA, 25 bp, Homo sapien
ggaattaattctagttgttctggaa

SEQ ID NO: 3780112 - DNA, 25 bp, Homo sapien
ttctgtgttcctgagtctccttgtt

SEQ ID NO: 3780113 - DNA, 25 bp, Homo sapien
ggtaattcctattgaagacagcccc

SEQ ID NO: 3780114 - DNA, 25 bp, Homo sapien
actcatcagctctaggttgccccag

SEQ ID NO: 3780115 - DNA, 25 bp, Homo sapien
cctgtaagcctttcggttgtggtag

SEQ ID NO: 3780116 - DNA, 25 bp, Homo sapien
ccagggctctccgttgcttacagcc

SEQ ID NO: 3780117 - DNA, 25 bp, Homo sapien
tctctccggcataaatttgtactaa

SEQ ID NO: 3780118 - DNA, 25 bp, Homo sapien
tgccactgtactccagactggtgac

SEQ ID NO: 3780119 - DNA, 25 bp, Homo sapien
ctgtactccagactggtgacagagt

SEQ ID NO: 3780120 - DNA, 25 bp, Homo sapien
cactgtactccagactggtgacaga

SEQ ID NO: 3780121 - DNA, 25 bp, Homo sapien
gccactgtactccagactggtgaca

SEQ ID NO: 3780122 - DNA, 25 bp, Homo sapien
actgtatgccacaaatatatgatct

SEQ ID NO: 3780123 - DNA, 25 bp, Homo sapien
tatgccacaaatatatgatctgtca

SEQ ID NO: 3780124 - DNA, 25 bp, Homo sapien
caaaattatatacatgtcaaaacat

SEQ ID NO: 3780125 - DNA, 25 bp, Homo sapien
tgtatgccacaaatatatgatctgt

SEQ ID NO: 3780126 - DNA, 25 bp, Homo sapien
taaccgcctttgttccatcaaaaca

SEQ ID NO: 3780127 - DNA, 25 bp, Homo sapien
tccaccatatcaagtttaaccgcct

SEQ ID NO: 3780128 - DNA, 25 bp, Homo sapien
tcaaaacaaaatgccctgatggaat

SEQ ID NO: 3780129 - DNA, 25 bp, Homo sapien
ggaattcagccctaacaataaggca

SEQ ID NO: 3780130 - DNA, 25 bp, Homo sapien
caggagagttccagctagcatcggg

SEQ ID NO: 3780131 - DNA, 25 bp, Homo sapien
ggccagtgccctttcagatgaagct

SEQ ID NO: 3780132 - DNA, 25 bp, Homo sapien
tgggaagaattgaccgcagcacagc

SEQ ID NO: 3780133 - DNA, 25 bp, Homo sapien
tcaacgtgggatgaccgagcttggt

SEQ ID NO: 3780134 - DNA, 25 bp, Homo sapien
tacatgacttactaaggcagatggc

SEQ ID NO: 3780135 - DNA, 25 bp, Homo sapien
ccaggttgaggatttagtacatgac

SEQ ID NO: 3780136 - DNA, 25 bp, Homo sapien
tgctgcacacaagtctagaatcttc

SEQ ID NO: 3780137 - DNA, 25 bp, Homo sapien
aatgtgtgttgttttccctccaggt

SEQ ID NO: 3780138 - DNA, 25 bp, Homo sapien
tgcagcacacaacaaactactcctt

SEQ ID NO: 3780139 - DNA, 25 bp, Homo sapien
tctaaattaggacccaagaactgca

SEQ ID NO: 3780140 - DNA, 25 bp, Homo sapien
aagggttacatctggagcattggca

SEQ ID NO: 3780141 - DNA, 25 bp, Homo sapien
agatgcagatcttccaagggttaca

SEQ ID NO: 3780142 - DNA, 25 bp, Homo sapien
taagtaacggggcagtacactgtca

SEQ ID NO: 3780143 - DNA, 25 bp, Homo sapien
aaatgaagggctgagatatactggt

SEQ ID NO: 3780144 - DNA, 25 bp, Homo sapien
tcaaatgaagggctgagatatactg

SEQ ID NO: 3780145 - DNA, 25 bp, Homo sapien
actgtcaaatgaagggctgagatat

SEQ ID NO: 3780146 - DNA, 25 bp, Homo sapien
ggctgaaagttggttgcctcctaac

SEQ ID NO: 3780147 - DNA, 25 bp, Homo sapien
tctagggaatccaacagtcaacttc

SEQ ID NO: 3780148 - DNA, 25 bp, Homo sapien
ggatatcgtccaattctaaagggag

SEQ ID NO: 3780149 - DNA, 25 bp, Homo sapien
aaagtgctgctacctagatctaggg

SEQ ID NO: 3780150 - DNA, 25 bp, Homo sapien
caaaaaggatgctgatttccccaaa

SEQ ID NO: 3780151 - DNA, 25 bp, Homo sapien
aaaaaggatgctgatttccccaaag

SEQ ID NO: 3780152 - DNA, 25 bp, Homo sapien
aaaaggatgctgatttccccaaagc

SEQ ID NO: 3780153 - DNA, 25 bp, Homo sapien
tcattgacccacaaaaaggatgctg

SEQ ID NO: 3780154 - DNA, 25 bp, Homo sapien
gaagatttctttgcggcttagttca

SEQ ID NO: 3780155 - DNA, 25 bp, Homo sapien
cggcttagttcagaaatcccatttc

SEQ ID NO: 3780156 - DNA, 25 bp, Homo sapien
tctttgcggcttagttcagaaatcc

SEQ ID NO: 3780157 - DNA, 25 bp, Homo sapien
actgaagatttctttgcggcttagt

SEQ ID NO: 3780158 - DNA, 25 bp, Homo sapien
ttaaaactgcattgccacactgggc

SEQ ID NO: 3780159 - DNA, 25 bp, Homo sapien
ggcatagacatgggctcctcttaaa

SEQ ID NO: 3780160 - DNA, 25 bp, Homo sapien
catagacatgggctcctcttaaaac

SEQ ID NO: 3780161 - DNA, 25 bp, Homo sapien
ttgtgatgctgacacaattcctggg

SEQ ID NO: 3780162 - DNA, 25 bp, Homo sapien
atatctgcctctcccaacttcttca

SEQ ID NO: 3780163 - DNA, 25 bp, Homo sapien
ttcatatctgcctctcccaacttct

SEQ ID NO: 3780164 - DNA, 25 bp, Homo sapien
atctgcctctcccaacttcttcagt

SEQ ID NO: 3780165 - DNA, 25 bp, Homo sapien
ctgcctctcccaacttcttcagttt

SEQ ID NO: 3780166 - DNA, 25 bp, Homo sapien
aagaaatagcaaccaactttgctgc

SEQ ID NO: 3780167 - DNA, 25 bp, Homo sapien
gaaaagaaatagcaaccaactttgc

SEQ ID NO: 3780168 - DNA, 25 bp, Homo sapien
aatagcaaccaactttgctgctcat

SEQ ID NO: 3780169 - DNA, 25 bp, Homo sapien
gaaatagcaaccaactttgctgctc

SEQ ID NO: 3780170 - DNA, 25 bp, Homo sapien
tcctgaatagccgtgacgacaggta

SEQ ID NO: 3780171 - DNA, 25 bp, Homo sapien
aggaataagtaagccaccagatcca

SEQ ID NO: 3780172 - DNA, 25 bp, Homo sapien
tagccgtgacgacaggtaagcacca

SEQ ID NO: 3780173 - DNA, 25 bp, Homo sapien
acaggaataagtaagccaccagatc

SEQ ID NO: 3780174 - DNA, 25 bp, Homo sapien
agtaacacatcttgaaggtctggat

SEQ ID NO: 3780175 - DNA, 25 bp, Homo sapien
taagtaacacatcttgaaggtctgg

SEQ ID NO: 3780176 - DNA, 25 bp, Homo sapien
aggaataagtaacacatcttgaagg

SEQ ID NO: 3780177 - DNA, 25 bp, Homo sapien
taggaacacttaatccattaaactg

SEQ ID NO: 3780178 - DNA, 25 bp, Homo sapien
tactctattagagggcagcacgcaa

SEQ ID NO: 3780179 - DNA, 25 bp, Homo sapien
gaagacaattggacaccctacacag

SEQ ID NO: 3780180 - DNA, 25 bp, Homo sapien
aacaagtctgcctcgtaggttaggg

SEQ ID NO: 3780181 - DNA, 25 bp, Homo sapien
gcatgtttgcattgccccacaggat

SEQ ID NO: 3780182 - DNA, 25 bp, Homo sapien
ttgtaaatgatggaggatgtgacag

SEQ ID NO: 3780183 - DNA, 25 bp, Homo sapien
gctaaatgtgtattcactctgacag

SEQ ID NO: 3780184 - DNA, 25 bp, Homo sapien
tgaggctaaatgtgtattcactctg

SEQ ID NO: 3780185 - DNA, 25 bp, Homo sapien
cttctgaagttcatcaagtaacaga

SEQ ID NO: 3780186 - DNA, 25 bp, Homo sapien
gcttcttgtttacctaaagcagtca

SEQ ID NO: 3780187 - DNA, 25 bp, Homo sapien
cttgtttacctaaagcagtcacaat

SEQ ID NO: 3780188 - DNA, 25 bp, Homo sapien
ctgcttcttgtttacctaaagcagt

SEQ ID NO: 3780189 - DNA, 25 bp, Homo sapien
ttcttgtttacctaaagcagtcaca

SEQ ID NO: 3780190 - DNA, 25 bp, Homo sapien
tagttttcaacctcaggtctcaaag

SEQ ID NO: 3780191 - DNA, 25 bp, Homo sapien
ttcataaagccttccttaagatagt

SEQ ID NO: 3780192 - DNA, 25 bp, Homo sapien
tccttattcataaagccttccttaa

SEQ ID NO: 3780193 - DNA, 25 bp, Homo sapien
caggtctcaaagatatcttagggaa

SEQ ID NO: 3780194 - DNA, 25 bp, Homo sapien
tttcggaaatgcagaggtacacgct

SEQ ID NO: 3780195 - DNA, 25 bp, Homo sapien
taatagtgacgagtgtcttgacacc

SEQ ID NO: 3780196 - DNA, 25 bp, Homo sapien
gatcacgctgagttaatttcggaaa

SEQ ID NO: 3780197 - DNA, 25 bp, Homo sapien
gaggaaaatcttgccgatcacgctg

SEQ ID NO: 3780198 - DNA, 25 bp, Homo sapien
gaaacggacgcagatcagtaagcca

SEQ ID NO: 3780199 - DNA, 25 bp, Homo sapien
tatttctcggcggaaagtcgcttcc

SEQ ID NO: 3780200 - DNA, 25 bp, Homo sapien
ctcaggttaagtaggcagaccccgc

SEQ ID NO: 3780201 - DNA, 25 bp, Homo sapien
gaatttgggcgcatcagccaccgtt

SEQ ID NO: 3780202 - DNA, 25 bp, Homo sapien
gaacaggtactttccatgacacacc

SEQ ID NO: 3780203 - DNA, 25 bp, Homo sapien
tgtacccaagcctaatccataatgg

SEQ ID NO: 3780204 - DNA, 25 bp, Homo sapien
tgaccatagcaccactgatggctag

SEQ ID NO: 3780205 - DNA, 25 bp, Homo sapien
tagtgccacacacggacagaattga

SEQ ID NO: 3780206 - DNA, 25 bp, Homo sapien
actatagtatctggaaagtggcctg

SEQ ID NO: 3780207 - DNA, 25 bp, Homo sapien
ttagggactatagtatctggaaagt

SEQ ID NO: 3780208 - DNA, 25 bp, Homo sapien
ataaattagggactatagtatctgg

SEQ ID NO: 3780209 - DNA, 25 bp, Homo sapien
gactatagtatctggaaagtggcct

SEQ ID NO: 3780210 - DNA, 25 bp, Homo sapien
tgaatacaatttagttaagaatact

SEQ ID NO: 3780211 - DNA, 25 bp, Homo sapien
taagaatactgccaggattaaacaa

SEQ ID NO: 3780212 - DNA, 25 bp, Homo sapien
aaatcaatcttggattggttcatct

SEQ ID NO: 3780213 - DNA, 25 bp, Homo sapien
aatcaatcttggattggttcatctt

SEQ ID NO: 3780214 - DNA, 25 bp, Homo sapien
tttatcttgctcgtatccttcccac

SEQ ID NO: 3780215 - DNA, 25 bp, Homo sapien
ggaacattggaaattagcactataa

SEQ ID NO: 3780216 - DNA, 25 bp, Homo sapien
tgaaaatccagcagtccaactgttg

SEQ ID NO: 3780217 - DNA, 25 bp, Homo sapien
tgccagacttaaatccctcgctgct

SEQ ID NO: 3780218 - DNA, 25 bp, Homo sapien
gcctcagccacctcattagtcggga

SEQ ID NO: 3780219 - DNA, 25 bp, Homo sapien
taacagatcgataggtacatcagca

SEQ ID NO: 3780220 - DNA, 25 bp, Homo sapien
gaagaagctgttacggaatctaaag

SEQ ID NO: 3780221 - DNA, 25 bp, Homo sapien
ctctacataggaggttgaaacttgc

SEQ ID NO: 3780222 - DNA, 25 bp, Homo sapien
taacgttggagcatattatcctgca

SEQ ID NO: 3780223 - DNA, 25 bp, Homo sapien
gccacgttgccaaggttaaaatcca

SEQ ID NO: 3780224 - DNA, 25 bp, Homo sapien
catagcactgggaggacgtaagtca

SEQ ID NO: 3780225 - DNA, 25 bp, Homo sapien
cattcagtttcgtttcatgccaggc

SEQ ID NO: 3780226 - DNA, 25 bp, Homo sapien
caaacgttttgaaggctgacatcag

SEQ ID NO: 3780227 - DNA, 25 bp, Homo sapien
aaacggcggctgctcacttagagaa

SEQ ID NO: 3780228 - DNA, 25 bp, Homo sapien
gagcacgcaccaagggaaatttccc

SEQ ID NO: 3780229 - DNA, 25 bp, Homo sapien
tatgcgtggacttcgatctgggatc

SEQ ID NO: 3780230 - DNA, 25 bp, Homo sapien
cgctggccgtttgggactctcctac

SEQ ID NO: 3780231 - DNA, 25 bp, Homo sapien
cgcaaattcccagccgctggccgtt

SEQ ID NO: 3780232 - DNA, 25 bp, Homo sapien
aattcccagccgctggccgtttggg

SEQ ID NO: 3780233 - DNA, 25 bp, Homo sapien
cagccgctggccgtttgggactctc

SEQ ID NO: 3780234 - DNA, 25 bp, Homo sapien
aagcgtgtgttgtctaagtaaagca

SEQ ID NO: 3780235 - DNA, 25 bp, Homo sapien
caaggtaaatcgaatgtgcagccag

SEQ ID NO: 3780236 - DNA, 25 bp, Homo sapien
tgtgaataagtatactaaagcgtgt

SEQ ID NO: 3780237 - DNA, 25 bp, Homo sapien
gagtctcatgcgtcttataaattag

SEQ ID NO: 3780238 - DNA, 25 bp, Homo sapien
tctggactgtaagcaggtttcaaac

SEQ ID NO: 3780239 - DNA, 25 bp, Homo sapien
ctcttaactctggactgtaagcagg

SEQ ID NO: 3780240 - DNA, 25 bp, Homo sapien
gcaggtttcaaacacactaaactta

SEQ ID NO: 3780241 - DNA, 25 bp, Homo sapien
tgtaagcaggtttcaaacacactaa

SEQ ID NO: 3780242 - DNA, 25 bp, Homo sapien
tctgcctctcctcgtatttagggta

SEQ ID NO: 3780243 - DNA, 25 bp, Homo sapien
aaattgtgcccctcagacctaaagg

SEQ ID NO: 3780244 - DNA, 25 bp, Homo sapien
catgaggtcgaaaaaacttcaaaag

SEQ ID NO: 3780245 - DNA, 25 bp, Homo sapien
aagtaaagacaatatcatgaggtcg

SEQ ID NO: 3780246 - DNA, 25 bp, Homo sapien
agactgattagggttttagaatttg

SEQ ID NO: 3780247 - DNA, 25 bp, Homo sapien
ggagtgaagactgattagggtttta

SEQ ID NO: 3780248 - DNA, 25 bp, Homo sapien
agtgaagactgattagggttttaga

SEQ ID NO: 3780249 - DNA, 25 bp, Homo sapien
gagtgaagactgattagggttttag

SEQ ID NO: 3780250 - DNA, 25 bp, Homo sapien
ccctcaggaaatttagggactctga

SEQ ID NO: 3780251 - DNA, 25 bp, Homo sapien
taactaagggatagcattccttgga

SEQ ID NO: 3780252 - DNA, 25 bp, Homo sapien
ccatcagtgttggtaagatatcaaa

SEQ ID NO: 3780253 - DNA, 25 bp, Homo sapien
tcaaatgactatcagttgatcccag

SEQ ID NO: 3780254 - DNA, 25 bp, Homo sapien
ccaagtaaaacgatgctgtttgctc

SEQ ID NO: 3780255 - DNA, 25 bp, Homo sapien
tataatgagttgtttgcatgcctac

SEQ ID NO: 3780256 - DNA, 25 bp, Homo sapien
caatcatggtgcaatatagtgtaac

SEQ ID NO: 3780257 - DNA, 25 bp, Homo sapien
gttaagtttaggttgccagtactca

SEQ ID NO: 3780258 - DNA, 25 bp, Homo sapien
tttcctgctaactggcggaagaact

SEQ ID NO: 3780259 - DNA, 25 bp, Homo sapien
gccgaagccacctgggttcgggatc

SEQ ID NO: 3780260 - DNA, 25 bp, Homo sapien
tgcagccgaagccacctgggttcgg

SEQ ID NO: 3780261 - DNA, 25 bp, Homo sapien
gctaactggcggaagaactgctgtt

SEQ ID NO: 3780262 - DNA, 25 bp, Homo sapien
atatatttatgggatccatgagctg

SEQ ID NO: 3780263 - DNA, 25 bp, Homo sapien
atatttatgggatccatgagctgtt

SEQ ID NO: 3780264 - DNA, 25 bp, Homo sapien
ggatccatgagctgttttgatacag

SEQ ID NO: 3780265 - DNA, 25 bp, Homo sapien
tgggatccatgagctgttttgatac

SEQ ID NO: 3780266 - DNA, 25 bp, Homo sapien
caatagtacttgagggccttgaaaa

SEQ ID NO: 3780267 - DNA, 25 bp, Homo sapien
gtcatccccataatcgagtgacaat

SEQ ID NO: 3780268 - DNA, 25 bp, Homo sapien
aaataatgctgaataggattgcttc

SEQ ID NO: 3780269 - DNA, 25 bp, Homo sapien
gcctatctgtcactggaccgttcca

SEQ ID NO: 3780270 - DNA, 25 bp, Homo sapien
tcattcggcgttggttactaagtat

SEQ ID NO: 3780271 - DNA, 25 bp, Homo sapien
ttcggcgttggttactaagtatgtc

SEQ ID NO: 3780272 - DNA, 25 bp, Homo sapien
cggcgttggttactaagtatgtcgt

SEQ ID NO: 3780273 - DNA, 25 bp, Homo sapien
cattcggcgttggttactaagtatg

SEQ ID NO: 3780274 - DNA, 25 bp, Homo sapien
atttgcacaaagctgttccgatgag

SEQ ID NO: 3780275 - DNA, 25 bp, Homo sapien
gctgttccgatgagcatggtaccca

SEQ ID NO: 3780276 - DNA, 25 bp, Homo sapien
ggtacccatgggtttagatactgat

SEQ ID NO: 3780277 - DNA, 25 bp, Homo sapien
ctacagggtttagttgagatctctg

SEQ ID NO: 3780278 - DNA, 25 bp, Homo sapien
aacattataccacaaaggtcaaggc

SEQ ID NO: 3780279 - DNA, 25 bp, Homo sapien
tcttcaaaggcttggatttcactcc

SEQ ID NO: 3780280 - DNA, 25 bp, Homo sapien
tactcaggatcaacaagcagccctt

SEQ ID NO: 3780281 - DNA, 25 bp, Homo sapien
ccacaaaggtcaaggcagtactcag

SEQ ID NO: 3780282 - DNA, 25 bp, Homo sapien
ggctggatcagcaaatgtattatcg

SEQ ID NO: 3780283 - DNA, 25 bp, Homo sapien
ttggctggatcagcaaatgtattat

SEQ ID NO: 3780284 - DNA, 25 bp, Homo sapien
tggctggatcagcaaatgtattatc

SEQ ID NO: 3780285 - DNA, 25 bp, Homo sapien
gattggctggatcagcaaatgtatt

SEQ ID NO: 3780286 - DNA, 25 bp, Homo sapien
tagattcctggtccgaattcagagg

SEQ ID NO: 3780287 - DNA, 25 bp, Homo sapien
tctagcagtataggaactttacatt

SEQ ID NO: 3780288 - DNA, 25 bp, Homo sapien
catttgttctacgtatagattcctg

SEQ ID NO: 3780289 - DNA, 25 bp, Homo sapien
ggtccgaattcagaggttctagcag

SEQ ID NO: 3780290 - DNA, 25 bp, Homo sapien
cccttcataactccctccctcattt

SEQ ID NO: 3780291 - DNA, 25 bp, Homo sapien
ttgctgacaacctcccactggaaca

SEQ ID NO: 3780292 - DNA, 25 bp, Homo sapien
atttgctgacaacctcccactggaa

SEQ ID NO: 3780293 - DNA, 25 bp, Homo sapien
tgctgacaacctcccactggaacat

SEQ ID NO: 3780294 - DNA, 25 bp, Homo sapien
ttttgctagcagccactgccattgt

SEQ ID NO: 3780295 - DNA, 25 bp, Homo sapien
tgaaggctctcagtaggcttggaat

SEQ ID NO: 3780296 - DNA, 25 bp, Homo sapien
ccaaactgattttatcatgaggcat

SEQ ID NO: 3780297 - DNA, 25 bp, Homo sapien
gggagcctcggcatacatcagtcca

SEQ ID NO: 3780298 - DNA, 25 bp, Homo sapien
gcatacatcagtccactgaaggctc

SEQ ID NO: 3780299 - DNA, 25 bp, Homo sapien
tcttttgtccacttgatttcagcac

SEQ ID NO: 3780300 - DNA, 25 bp, Homo sapien
gcaccaagtactctgtaggcataca

SEQ ID NO: 3780301 - DNA, 25 bp, Homo sapien
cactaaagtcgtggacagttccctc

SEQ ID NO: 3780302 - DNA, 25 bp, Homo sapien
tgctttcttgaaacctggacaagcc

SEQ ID NO: 3780303 - DNA, 25 bp, Homo sapien
cttcctccttcttgctgatactagg

SEQ ID NO: 3780304 - DNA, 25 bp, Homo sapien
ccccagatttcatggatgtggtcaa

SEQ ID NO: 3780305 - DNA, 25 bp, Homo sapien
tccatgtgctaagaggtcaaagcca

SEQ ID NO: 3780306 - DNA, 25 bp, Homo sapien
tcttgctgatactaggtaagcccca

SEQ ID NO: 3780307 - DNA, 25 bp, Homo sapien
gaaagagacggtaactcagtaggct

SEQ ID NO: 3780308 - DNA, 25 bp, Homo sapien
gacggtaactcagtaggctcacttt

SEQ ID NO: 3780309 - DNA, 25 bp, Homo sapien
tggaaagagacggtaactcagtagg

SEQ ID NO: 3780310 - DNA, 25 bp, Homo sapien
gagacggtaactcagtaggctcact

SEQ ID NO: 3780311 - DNA, 25 bp, Homo sapien
ggatgatttctttgtggtcacacaa

SEQ ID NO: 3780312 - DNA, 25 bp, Homo sapien
gagatggagttcattagcaggaaca

SEQ ID NO: 3780313 - DNA, 25 bp, Homo sapien
tcaatagtctgtgtatgagatgctg

SEQ ID NO: 3780314 - DNA, 25 bp, Homo sapien
tcacacaacggatgagagagatgga

SEQ ID NO: 3780315 - DNA, 25 bp, Homo sapien
gcgttgggatgttattgtaattctt

SEQ ID NO: 3780316 - DNA, 25 bp, Homo sapien
ttatcttccttatttgttaggccca

SEQ ID NO: 3780317 - DNA, 25 bp, Homo sapien
cttttgcgttgggatgttattgtaa

SEQ ID NO: 3780318 - DNA, 25 bp, Homo sapien
tatcttccttatttgttaggcccat

SEQ ID NO: 3780319 - DNA, 25 bp, Homo sapien
cgtcccttgcaactgtccctctttc

SEQ ID NO: 3780320 - DNA, 25 bp, Homo sapien
ttgcaactgtccctctttcatcctc

SEQ ID NO: 3780321 - DNA, 25 bp, Homo sapien
gcaactgtccctctttcatcctctg

SEQ ID NO: 3780322 - DNA, 25 bp, Homo sapien
catcctctgtgttttcagcccacat

SEQ ID NO: 3780323 - DNA, 25 bp, Homo sapien
ggaggtctaaaaggagaataccatc

SEQ ID NO: 3780324 - DNA, 25 bp, Homo sapien
aaaattgctaatctaaggaggtcta

SEQ ID NO: 3780325 - DNA, 25 bp, Homo sapien
acaagcacatgaattaagcaccagg

SEQ ID NO: 3780326 - DNA, 25 bp, Homo sapien
cccatgcctctttaagggtatgacc

SEQ ID NO: 3780327 - DNA, 25 bp, Homo sapien
tctccatcctccatccttcatcctc

SEQ ID NO: 3780328 - DNA, 25 bp, Homo sapien
tccatcctccatccttcatcctcca

SEQ ID NO: 3780329 - DNA, 25 bp, Homo sapien
ccactcgctgctgccaactttctcc

SEQ ID NO: 3780330 - DNA, 25 bp, Homo sapien
aactttctccatcctccatccttca

SEQ ID NO: 3780331 - DNA, 25 bp, Homo sapien
ggtaccagtggccatcaggagaata

SEQ ID NO: 3780332 - DNA, 25 bp, Homo sapien
gttctccctcgatgctgagtcccag

SEQ ID NO: 3780333 - DNA, 25 bp, Homo sapien
ctgcttcagtgcagtcagaggtacc

SEQ ID NO: 3780334 - DNA, 25 bp, Homo sapien
tctcttcccgatgattgctttccag

SEQ ID NO: 3780335 - DNA, 25 bp, Homo sapien
tgctgaccatcatcgtgttcttgtc

SEQ ID NO: 3780336 - DNA, 25 bp, Homo sapien
tctgctgaccatcatcgtgttcttg

SEQ ID NO: 3780337 - DNA, 25 bp, Homo sapien
tgtcccaggttgaagtgtgaagaca

SEQ ID NO: 3780338 - DNA, 25 bp, Homo sapien
gtgtgaagacagtctctttttccat

SEQ ID NO: 3780339 - DNA, 25 bp, Homo sapien
tttggaagtaagactggataatttc

SEQ ID NO: 3780340 - DNA, 25 bp, Homo sapien
gaagtaagactggataatttctgca

SEQ ID NO: 3780341 - DNA, 25 bp, Homo sapien
tggaagtaagactggataatttctg

SEQ ID NO: 3780342 - DNA, 25 bp, Homo sapien
aagtaagactggataatttctgcat

SEQ ID NO: 3780343 - DNA, 25 bp, Homo sapien
cgttctgttgcccagtggcgcgggc

SEQ ID NO: 3780344 - DNA, 25 bp, Homo sapien
ttgcccagtggcgcgggcacagtct

SEQ ID NO: 3780345 - DNA, 25 bp, Homo sapien
tgcccagtggcgcgggcacagtctc

SEQ ID NO: 3780346 - DNA, 25 bp, Homo sapien
tctgttgcccagtggcgcgggcaca

SEQ ID NO: 3780347 - DNA, 25 bp, Homo sapien
cagagatttcgttgccacttgttca

SEQ ID NO: 3780348 - DNA, 25 bp, Homo sapien
tgtattacatattggaacgtggacg

SEQ ID NO: 3780349 - DNA, 25 bp, Homo sapien
tgtaaacagttgtgtctaccactca

SEQ ID NO: 3780350 - DNA, 25 bp, Homo sapien
taataaaaacacttccatgagggtc

SEQ ID NO: 3780351 - DNA, 25 bp, Homo sapien
cacagcagccaccgatgctagtgct

SEQ ID NO: 3780352 - DNA, 25 bp, Homo sapien
cagccaccgatgctagtgctggaga

SEQ ID NO: 3780353 - DNA, 25 bp, Homo sapien
catcttccaactttacctgaacagt

SEQ ID NO: 3780354 - DNA, 25 bp, Homo sapien
tagtgctggagaccgtgaacagacc

SEQ ID NO: 3780355 - DNA, 25 bp, Homo sapien
ttgatactatttcgttgaagaattc

SEQ ID NO: 3780356 - DNA, 25 bp, Homo sapien
tgatactatttcgttgaagaattct

SEQ ID NO: 3780357 - DNA, 25 bp, Homo sapien
cttgatactatttcgttgaagaatt

SEQ ID NO: 3780358 - DNA, 25 bp, Homo sapien
aggacattcgaaggacacacctgag

SEQ ID NO: 3780359 - DNA, 25 bp, Homo sapien
gaatgctgagggacaaccatgtcct

SEQ ID NO: 3780360 - DNA, 25 bp, Homo sapien
taatttcttggtcgggtagctctgc

SEQ ID NO: 3780361 - DNA, 25 bp, Homo sapien
caccctcaagtagatgcaggatgcc

SEQ ID NO: 3780362 - DNA, 25 bp, Homo sapien
tgagaactccaaacagatctgggcc

SEQ ID NO: 3780363 - DNA, 25 bp, Homo sapien
atctgggcctttaaatgatggaagc

SEQ ID NO: 3780364 - DNA, 25 bp, Homo sapien
acagatctgggcctttaaatgatgg

SEQ ID NO: 3780365 - DNA, 25 bp, Homo sapien
tcatctgtaactctgagaactccaa

SEQ ID NO: 3780366 - DNA, 25 bp, Homo sapien
agttctagtggggagcagccaagca

SEQ ID NO: 3780367 - DNA, 25 bp, Homo sapien
ctcagttctagtggggagcagccaa

SEQ ID NO: 3780368 - DNA, 25 bp, Homo sapien
ccttgtcctcagttctagtggggag

SEQ ID NO: 3780369 - DNA, 25 bp, Homo sapien
cagccaagcaggtcaatataacgca

SEQ ID NO: 3780370 - DNA, 25 bp, Homo sapien
ggattgcaggtatgctttagttcta

SEQ ID NO: 3780371 - DNA, 25 bp, Homo sapien
ccagccttttcggattgcaggtatg

SEQ ID NO: 3780372 - DNA, 25 bp, Homo sapien
gatccttcggctacaccagcctttt

SEQ ID NO: 3780373 - DNA, 25 bp, Homo sapien
ttaggaaaccatacgactctctcgg

SEQ ID NO: 3780374 - DNA, 25 bp, Homo sapien
aatgtccaaataggcgatttcggtc

SEQ ID NO: 3780375 - DNA, 25 bp, Homo sapien
gatcccagcttagcacgggctttgg

SEQ ID NO: 3780376 - DNA, 25 bp, Homo sapien
tcggtcccagctggatcccagctta

SEQ ID NO: 3780377 - DNA, 25 bp, Homo sapien
tgggggctttatcacctccatctgt

SEQ ID NO: 3780378 - DNA, 25 bp, Homo sapien
tgatatttcatcgagaaatgctgaa

SEQ ID NO: 3780379 - DNA, 25 bp, Homo sapien
gatatttcatcgagaaatgctgaag

SEQ ID NO: 3780380 - DNA, 25 bp, Homo sapien
tttgatatttcatcgagaaatgctg

SEQ ID NO: 3780381 - DNA, 25 bp, Homo sapien
ttctttgatatttcatcgagaaatg

SEQ ID NO: 3780382 - DNA, 25 bp, Homo sapien
gaggactgctctatctccgggtcag

SEQ ID NO: 3780383 - DNA, 25 bp, Homo sapien
agtgttgggctgtttcgtgtattga

SEQ ID NO: 3780384 - DNA, 25 bp, Homo sapien
tcatggtgccagactgtttcacaca

SEQ ID NO: 3780385 - DNA, 25 bp, Homo sapien
gctgctccactaccgggttgggtgt

SEQ ID NO: 3780386 - DNA, 25 bp, Homo sapien
ggaatgtacctaataccatagaagc

SEQ ID NO: 3780387 - DNA, 25 bp, Homo sapien
ggttgtacgacaatgggaatgtacc

SEQ ID NO: 3780388 - DNA, 25 bp, Homo sapien
gaatctacttcactgtgttccagaa

SEQ ID NO: 3780389 - DNA, 25 bp, Homo sapien
tactgtgatattgtctctagatgtc

SEQ ID NO: 3780390 - DNA, 25 bp, Homo sapien
ttcagtcaggtaagtgagctgatca

SEQ ID NO: 3780391 - DNA, 25 bp, Homo sapien
gtcatgaattagtgcattgacctgc

SEQ ID NO: 3780392 - DNA, 25 bp, Homo sapien
gccatgggagtcactgaaggtttca

SEQ ID NO: 3780393 - DNA, 25 bp, Homo sapien
gtcctttagataggccgctcttttg

SEQ ID NO: 3780394 - DNA, 25 bp, Homo sapien
ggatgctcatgtaggtgtaacctag

SEQ ID NO: 3780395 - DNA, 25 bp, Homo sapien
gcttggtagagtttatgcccatggg

SEQ ID NO: 3780396 - DNA, 25 bp, Homo sapien
cctcccagattgaggagtcttgcat

SEQ ID NO: 3780397 - DNA, 25 bp, Homo sapien
gggcaacctgtgaccactcaaaaat

SEQ ID NO: 3780398 - DNA, 25 bp, Homo sapien
tacagcattaggcaacttgataagg

SEQ ID NO: 3780399 - DNA, 25 bp, Homo sapien
taggttccaatacagcattaggcaa

SEQ ID NO: 3780400 - DNA, 25 bp, Homo sapien
taggcaacttgataaggtatcccat

SEQ ID NO: 3780401 - DNA, 25 bp, Homo sapien
tccttagaaggcctattaggttcca

SEQ ID NO: 3780402 - DNA, 25 bp, Homo sapien
gcacagagttcggtgagtggattct

SEQ ID NO: 3780403 - DNA, 25 bp, Homo sapien
gcagggctcaactgaggttacctgg

SEQ ID NO: 3780404 - DNA, 25 bp, Homo sapien
gagtaacaccattccatacagctag

SEQ ID NO: 3780405 - DNA, 25 bp, Homo sapien
gtagatggaggcattttcagcacag

SEQ ID NO: 3780406 - DNA, 25 bp, Homo sapien
aattgaggttgtagtacactacgat

SEQ ID NO: 3780407 - DNA, 25 bp, Homo sapien
tgtaatcccattgagaggggaaagg

SEQ ID NO: 3780408 - DNA, 25 bp, Homo sapien
gaggttgtagtacactacgatcatg

SEQ ID NO: 3780409 - DNA, 25 bp, Homo sapien
tagtacactacgatcatgccattgc

SEQ ID NO: 3780410 - DNA, 25 bp, Homo sapien
tgtgaagaattgttataattgcccc

SEQ ID NO: 3780411 - DNA, 25 bp, Homo sapien
tgaagaattgttataattgccccca

SEQ ID NO: 3780412 - DNA, 25 bp, Homo sapien
gaagaattgttataattgcccccaa

SEQ ID NO: 3780413 - DNA, 25 bp, Homo sapien
cctgtgaagaattgttataattgcc

SEQ ID NO: 3780414 - DNA, 25 bp, Homo sapien
ttaatcaatcttcgttgaacaatgt

SEQ ID NO: 3780415 - DNA, 25 bp, Homo sapien
caatcttcgttgaacaatgtatagc

SEQ ID NO: 3780416 - DNA, 25 bp, Homo sapien
gaacaatgtatagctttgccacatg

SEQ ID NO: 3780417 - DNA, 25 bp, Homo sapien
aatcaatcttcgttgaacaatgtat

SEQ ID NO: 3780418 - DNA, 25 bp, Homo sapien
cgttattggtaacagagactgattt

SEQ ID NO: 3780419 - DNA, 25 bp, Homo sapien
gactgatttaagtagggcatgattt

SEQ ID NO: 3780420 - DNA, 25 bp, Homo sapien
tactgacgttattggtaacagagac

SEQ ID NO: 3780421 - DNA, 25 bp, Homo sapien
ttatgcacgggagccgcttcattgt

SEQ ID NO: 3780422 - DNA, 25 bp, Homo sapien
agaatttagattggcctttccatca

SEQ ID NO: 3780423 - DNA, 25 bp, Homo sapien
cagaatttagattggcctttccatc

SEQ ID NO: 3780424 - DNA, 25 bp, Homo sapien
ttcagaatttagattggcctttcca

SEQ ID NO: 3780425 - DNA, 25 bp, Homo sapien
atttagattggcctttccatcacag

SEQ ID NO: 3780426 - DNA, 25 bp, Homo sapien
gatgctataaataaccgataaaggc

SEQ ID NO: 3780427 - DNA, 25 bp, Homo sapien
tgtagggcaatgtaaaggtcaaaga

SEQ ID NO: 3780428 - DNA, 25 bp, Homo sapien
cagttgctgatgagcaaagctgtag

SEQ ID NO: 3780429 - DNA, 25 bp, Homo sapien
aataaccgataaaggcagttgctga

SEQ ID NO: 3780430 - DNA, 25 bp, Homo sapien
acttgtactgacagagttggtccta

SEQ ID NO: 3780431 - DNA, 25 bp, Homo sapien
gaagtcttgagaggtacatgggaaa

SEQ ID NO: 3780432 - DNA, 25 bp, Homo sapien
gccttaggttttgtcaaagttcata

SEQ ID NO: 3780433 - DNA, 25 bp, Homo sapien
gctgtcaacaagagtgccttaggtt

SEQ ID NO: 3780434 - DNA, 25 bp, Homo sapien
acaggctagaaatttcctggacacc

SEQ ID NO: 3780435 - DNA, 25 bp, Homo sapien
taatagtgacttcacggagtgtagg

SEQ ID NO: 3780436 - DNA, 25 bp, Homo sapien
caccaggctagcaatttcatggagt

SEQ ID NO: 3780437 - DNA, 25 bp, Homo sapien
cactgtagtcggcatcgtctgaggc

SEQ ID NO: 3780438 - DNA, 25 bp, Homo sapien
tctgcctggatcagagctttgtctc

SEQ ID NO: 3780439 - DNA, 25 bp, Homo sapien
gcctggatcagagctttgtctccca

SEQ ID NO: 3780440 - DNA, 25 bp, Homo sapien
tgcctggatcagagctttgtctccc

SEQ ID NO: 3780441 - DNA, 25 bp, Homo sapien
gctacttgtctcttttgagttgcca

SEQ ID NO: 3780442 - DNA, 25 bp, Homo sapien
tttatggaaacagggctacttgtct

SEQ ID NO: 3780443 - DNA, 25 bp, Homo sapien
ggaatcagaagggtgcatttcattt

SEQ ID NO: 3780444 - DNA, 25 bp, Homo sapien
cactggaatcagaagggtgcatttc

SEQ ID NO: 3780445 - DNA, 25 bp, Homo sapien
agggctaaaagagtcccaatcattt

SEQ ID NO: 3780446 - DNA, 25 bp, Homo sapien
tacatgagggctaaaagagtcccaa

SEQ ID NO: 3780447 - DNA, 25 bp, Homo sapien
tgagggctaaaagagtcccaatcat

SEQ ID NO: 3780448 - DNA, 25 bp, Homo sapien
catgagggctaaaagagtcccaatc

SEQ ID NO: 3780449 - DNA, 25 bp, Homo sapien
tactgagcatcttctgtgtaggatg

SEQ ID NO: 3780450 - DNA, 25 bp, Homo sapien
tgagcatcttctgtgtaggatgcat

SEQ ID NO: 3780451 - DNA, 25 bp, Homo sapien
actgagcatcttctgtgtaggatgc

SEQ ID NO: 3780452 - DNA, 25 bp, Homo sapien
ttactgagcatcttctgtgtaggat

SEQ ID NO: 3780453 - DNA, 25 bp, Homo sapien
cacggcaagctccacgtttaattaa

SEQ ID NO: 3780454 - DNA, 25 bp, Homo sapien
gatgggtggatgatctccaagcgtt

SEQ ID NO: 3780455 - DNA, 25 bp, Homo sapien
agcatcaacgttcccaccttgtgga

SEQ ID NO: 3780456 - DNA, 25 bp, Homo sapien
tccaagcgtttcaccgagatttcac

SEQ ID NO: 3780457 - DNA, 25 bp, Homo sapien
tttggatctagatttcctgaatcca

SEQ ID NO: 3780458 - DNA, 25 bp, Homo sapien
gaatccattcacattgcttgtcttt

SEQ ID NO: 3780459 - DNA, 25 bp, Homo sapien
aatccattcacattgcttgtctttt

SEQ ID NO: 3780460 - DNA, 25 bp, Homo sapien
atccattcacattgcttgtcttttc

SEQ ID NO: 3780461 - DNA, 25 bp, Homo sapien
agcattacgagcagcacaaatggcc

SEQ ID NO: 3780462 - DNA, 25 bp, Homo sapien
tacgtcaactcatctggctccaagg

SEQ ID NO: 3780463 - DNA, 25 bp, Homo sapien
gaaggatccgttgccagaattacta

SEQ ID NO: 3780464 - DNA, 25 bp, Homo sapien
gaatgtgtactgttcggttctggtt

SEQ ID NO: 3780465 - DNA, 25 bp, Homo sapien
ccagcaagccttggaatgtgtactg

SEQ ID NO: 3780466 - DNA, 25 bp, Homo sapien
agctgggccttcagttccttagtta

SEQ ID NO: 3780467 - DNA, 25 bp, Homo sapien
taagtggccctctgtgtttagccat

SEQ ID NO: 3780468 - DNA, 25 bp, Homo sapien
agttacccagttaagtggccctctg

SEQ ID NO: 3780469 - DNA, 25 bp, Homo sapien
gctgggccttcagttccttagttac

SEQ ID NO: 3780470 - DNA, 25 bp, Homo sapien
agatctttggtcagatttgattggc

SEQ ID NO: 3780471 - DNA, 25 bp, Homo sapien
ccaccacccactaaaagtagatctt

SEQ ID NO: 3780472 - DNA, 25 bp, Homo sapien
tttggtcagatttgattggcctgaa

SEQ ID NO: 3780473 - DNA, 25 bp, Homo sapien
aaagtagatctttggtcagatttga

SEQ ID NO: 3780474 - DNA, 25 bp, Homo sapien
catttaactctaacacataaaacca

SEQ ID NO: 3780475 - DNA, 25 bp, Homo sapien
gcagcctgaaatgagaagttcccat

SEQ ID NO: 3780476 - DNA, 25 bp, Homo sapien
tctaacacataaaaccaatgccaac

SEQ ID NO: 3780477 - DNA, 25 bp, Homo sapien
tgaagcaagcaggataacagaggaa

SEQ ID NO: 3780478 - DNA, 25 bp, Homo sapien
aagatcaacgtgtaggcaggtttgg

SEQ ID NO: 3780479 - DNA, 25 bp, Homo sapien
ccaagatcaacgtgtaggcaggttt

SEQ ID NO: 3780480 - DNA, 25 bp, Homo sapien
gatcaacgtgtaggcaggtttggtg

SEQ ID NO: 3780481 - DNA, 25 bp, Homo sapien
tttctcccacttctggaggctaaaa

SEQ ID NO: 3780482 - DNA, 25 bp, Homo sapien
taaagctcctatctgtaaatacagt

SEQ ID NO: 3780483 - DNA, 25 bp, Homo sapien
catctgcgaagtgatttttcaggca

SEQ ID NO: 3780484 - DNA, 25 bp, Homo sapien
gacacaattcagtccctaagaatgc

SEQ ID NO: 3780485 - DNA, 25 bp, Homo sapien
aatacagtcctgttgcgggttaggg

SEQ ID NO: 3780486 - DNA, 25 bp, Homo sapien
gatggttttgccgactgcatggatt

SEQ ID NO: 3780487 - DNA, 25 bp, Homo sapien
tccggtaccccatttccattcagat

SEQ ID NO: 3780488 - DNA, 25 bp, Homo sapien
cagcttgatgagtccagctgctccg

SEQ ID NO: 3780489 - DNA, 25 bp, Homo sapien
catggatttccagcttgatgagtcc

SEQ ID NO: 3780490 - DNA, 25 bp, Homo sapien
tttttcatctggaaggacagtagga

SEQ ID NO: 3780491 - DNA, 25 bp, Homo sapien
tcatctggaaggacagtaggagcag

SEQ ID NO: 3780492 - DNA, 25 bp, Homo sapien
tttcatctggaaggacagtaggagc

SEQ ID NO: 3780493 - DNA, 25 bp, Homo sapien
ttcatctggaaggacagtaggagca

SEQ ID NO: 3780494 - DNA, 25 bp, Homo sapien
gcctaggaaatccacacaaatgtac

SEQ ID NO: 3780495 - DNA, 25 bp, Homo sapien
ggtacaagccaaaataagtagaagc

SEQ ID NO: 3780496 - DNA, 25 bp, Homo sapien
caatactattagattgaaaacaggg

SEQ ID NO: 3780497 - DNA, 25 bp, Homo sapien
ccaggccttggattattctatttgc

SEQ ID NO: 3780498 - DNA, 25 bp, Homo sapien
ttgacaagaccagatgagatcagac

SEQ ID NO: 3780499 - DNA, 25 bp, Homo sapien
gcccaaccctggcttagctttgaca

SEQ ID NO: 3780500 - DNA, 25 bp, Homo sapien
ggaagcttcccattcaggtagtaac

SEQ ID NO: 3780501 - DNA, 25 bp, Homo sapien
cagcacacggtattcccaggaagct

SEQ ID NO: 3780502 - DNA, 25 bp, Homo sapien
tgtccatcttctcttaacctcaatt

SEQ ID NO: 3780503 - DNA, 25 bp, Homo sapien
gtccatcttctcttaacctcaattt

SEQ ID NO: 3780504 - DNA, 25 bp, Homo sapien
tctttttgctcgtctgttttgattc

SEQ ID NO: 3780505 - DNA, 25 bp, Homo sapien
gcaaactggaatttcactagcacag

SEQ ID NO: 3780506 - DNA, 25 bp, Homo sapien
aaatacttagccttagcaaactgga

SEQ ID NO: 3780507 - DNA, 25 bp, Homo sapien
acgagtgagcatgtcctggtcccag

SEQ ID NO: 3780508 - DNA, 25 bp, Homo sapien
tgcttttgcagctagagtgtcacga

SEQ ID NO: 3780509 - DNA, 25 bp, Homo sapien
gaagactactttactgtattacggc

SEQ ID NO: 3780510 - DNA, 25 bp, Homo sapien
agtatcccaggttgttctaaatcca

SEQ ID NO: 3780511 - DNA, 25 bp, Homo sapien
cagtctctgacattgctgggttgca

SEQ ID NO: 3780512 - DNA, 25 bp, Homo sapien
gacacaaactccaagcaacctatag

SEQ ID NO: 3780513 - DNA, 25 bp, Homo sapien
tatgcagtatgtcagatgctgaccc

SEQ ID NO: 3780514 - DNA, 25 bp, Homo sapien
tgatttatgcagtatgtcagatgct

SEQ ID NO: 3780515 - DNA, 25 bp, Homo sapien
atattggttcagtgatttatgcagt

SEQ ID NO: 3780516 - DNA, 25 bp, Homo sapien
tttatgcagtatgtcagatgctgac

SEQ ID NO: 3780517 - DNA, 25 bp, Homo sapien
cagtgacggcttttgtggtcagcat

SEQ ID NO: 3780518 - DNA, 25 bp, Homo sapien
tgtggtcagcatatttacttcctgc

SEQ ID NO: 3780519 - DNA, 25 bp, Homo sapien
ttaaacagtgacggcttttgtggtc

SEQ ID NO: 3780520 - DNA, 25 bp, Homo sapien
ttgtggtcagcatatttacttcctg

SEQ ID NO: 3780521 - DNA, 25 bp, Homo sapien
gcggaacaggaagctacatacaaac

SEQ ID NO: 3780522 - DNA, 25 bp, Homo sapien
tgctcatcttcagggaagccgccaa

SEQ ID NO: 3780523 - DNA, 25 bp, Homo sapien
taatgtcttgggctaagcggaacag

SEQ ID NO: 3780524 - DNA, 25 bp, Homo sapien
gaaaggccatgcctaatctactgca

SEQ ID NO: 3780525 - DNA, 25 bp, Homo sapien
tgtcttctaggcattcacagggtgc

SEQ ID NO: 3780526 - DNA, 25 bp, Homo sapien
tcacagggtgctgtgacagagagat

SEQ ID NO: 3780527 - DNA, 25 bp, Homo sapien
tatccctcagagaacttatagtcta

SEQ ID NO: 3780528 - DNA, 25 bp, Homo sapien
accagacatgttccttatccctcag

SEQ ID NO: 3780529 - DNA, 25 bp, Homo sapien
aggtgggaggattgcttgaggctag

SEQ ID NO: 3780530 - DNA, 25 bp, Homo sapien
ctgtaattccagtacgttcagaggc

SEQ ID NO: 3780531 - DNA, 25 bp, Homo sapien
gtaattccagtacgttcagaggctg

SEQ ID NO: 3780532 - DNA, 25 bp, Homo sapien
ctgggcaatatagtgagatgtcatc

SEQ ID NO: 3780533 - DNA, 25 bp, Homo sapien
ttgaaggcaattctgttgacaatag

SEQ ID NO: 3780534 - DNA, 25 bp, Homo sapien
aggcaattctgttgacaatagcatc

SEQ ID NO: 3780535 - DNA, 25 bp, Homo sapien
gaaggcaattctgttgacaatagca

SEQ ID NO: 3780536 - DNA, 25 bp, Homo sapien
ggcaattctgttgacaatagcatct

SEQ ID NO: 3780537 - DNA, 25 bp, Homo sapien
ccttgcaactgacggccaagctggt

SEQ ID NO: 3780538 - DNA, 25 bp, Homo sapien
gatcttttgtgttgcttctgcctca

SEQ ID NO: 3780539 - DNA, 25 bp, Homo sapien
tctgcctgctgaccgtggtctgggt

SEQ ID NO: 3780540 - DNA, 25 bp, Homo sapien
tgcctcacacccttgcaactgacgg

SEQ ID NO: 3780541 - DNA, 25 bp, Homo sapien
cagtggtgcctaagtcctgaggacc

SEQ ID NO: 3780542 - DNA, 25 bp, Homo sapien
tacagaaggcttagtgaaaccagca

SEQ ID NO: 3780543 - DNA, 25 bp, Homo sapien
tgaggaccccaggatacatggaatc

SEQ ID NO: 3780544 - DNA, 25 bp, Homo sapien
gagaccaagtctgatccaacatgtg

SEQ ID NO: 3780545 - DNA, 25 bp, Homo sapien
gagctgcagcatcgttgtgttcgca

SEQ ID NO: 3780546 - DNA, 25 bp, Homo sapien
tgttcgcagtaaagttcagaggcag

SEQ ID NO: 3780547 - DNA, 25 bp, Homo sapien
tacaggttagatgagggctccatga

SEQ ID NO: 3780548 - DNA, 25 bp, Homo sapien
tcaggttagctttcctacaggttag

SEQ ID NO: 3780549 - DNA, 25 bp, Homo sapien
agttttaggttttatgcaattgctg

SEQ ID NO: 3780550 - DNA, 25 bp, Homo sapien
gaagaggagttgaaattctgattat

SEQ ID NO: 3780551 - DNA, 25 bp, Homo sapien
ttaagaagaggagttgaaattctga

SEQ ID NO: 3780552 - DNA, 25 bp, Homo sapien
tttaggttttatgcaattgctgggc

SEQ ID NO: 3780553 - DNA, 25 bp, Homo sapien
tccagaattctctgtgctacctatt

SEQ ID NO: 3780554 - DNA, 25 bp, Homo sapien
gaatccagaattctctgtgctacct

SEQ ID NO: 3780555 - DNA, 25 bp, Homo sapien
cctaggttctataggaattgaacct

SEQ ID NO: 3780556 - DNA, 25 bp, Homo sapien
acccctgagaatccagaattctctg

SEQ ID NO: 3780557 - DNA, 25 bp, Homo sapien
ccagtggtagtggaagactcccgct

SEQ ID NO: 3780558 - DNA, 25 bp, Homo sapien
tcacagtgattggtccagcaggtag

SEQ ID NO: 3780559 - DNA, 25 bp, Homo sapien
ggagaaagcaattttggcgactgat

SEQ ID NO: 3780560 - DNA, 25 bp, Homo sapien
cataggaagagctgtaactgcccca

SEQ ID NO: 3780561 - DNA, 25 bp, Homo sapien
attctttcccacttcgtgatctttg

SEQ ID NO: 3780562 - DNA, 25 bp, Homo sapien
tcccacttcgtgatctttgccccag

SEQ ID NO: 3780563 - DNA, 25 bp, Homo sapien
tctttcccacttcgtgatctttgcc

SEQ ID NO: 3780564 - DNA, 25 bp, Homo sapien
cacttcgtgatctttgccccagaac

SEQ ID NO: 3780565 - DNA, 25 bp, Homo sapien
gttctgagactattcttgtaccact

SEQ ID NO: 3780566 - DNA, 25 bp, Homo sapien
tggcaggtgttacggataatttcat

SEQ ID NO: 3780567 - DNA, 25 bp, Homo sapien
agagttctgagactattcttgtacc

SEQ ID NO: 3780568 - DNA, 25 bp, Homo sapien
acaaagagttctgagactattcttg

SEQ ID NO: 3780569 - DNA, 25 bp, Homo sapien
ccacccttgcacatggacgatattg

SEQ ID NO: 3780570 - DNA, 25 bp, Homo sapien
tgcacatggacgatattgatctctg

SEQ ID NO: 3780571 - DNA, 25 bp, Homo sapien
acgatattgatctctgtgctgttcc

SEQ ID NO: 3780572 - DNA, 25 bp, Homo sapien
catggacgatattgatctctgtgct

SEQ ID NO: 3780573 - DNA, 25 bp, Homo sapien
tccccgcggttgttgttcagtgtcg

SEQ ID NO: 3780574 - DNA, 25 bp, Homo sapien
tgtggcaagttgcaaagagagcctc

SEQ ID NO: 3780575 - DNA, 25 bp, Homo sapien
tggaaccgacagtttgcgagcctcg

SEQ ID NO: 3780576 - DNA, 25 bp, Homo sapien
cggcgctggctgtggaattagatct

SEQ ID NO: 3780577 - DNA, 25 bp, Homo sapien
atagtgactatttgactgtgacctt

SEQ ID NO: 3780578 - DNA, 25 bp, Homo sapien
cacgatggaggagtgagctcaactc

SEQ ID NO: 3780579 - DNA, 25 bp, Homo sapien
tgcaagttgctacccctccatagac

SEQ ID NO: 3780580 - DNA, 25 bp, Homo sapien
tcgcatcttatctctggaccagcaa

SEQ ID NO: 3780581 - DNA, 25 bp, Homo sapien
taggatcctccttaacaatggctca

SEQ ID NO: 3780582 - DNA, 25 bp, Homo sapien
tactgtttttcttgaaacattctcc

SEQ ID NO: 3780583 - DNA, 25 bp, Homo sapien
aacattctccagagttcttcctctc

SEQ ID NO: 3780584 - DNA, 25 bp, Homo sapien
cattctccagagttcttcctctctt

SEQ ID NO: 3780585 - DNA, 25 bp, Homo sapien
gaaacattctccagagttcttcctc

SEQ ID NO: 3780586 - DNA, 25 bp, Homo sapien
aattattcaatgtcaatttatccaa

SEQ ID NO: 3780587 - DNA, 25 bp, Homo sapien
aagctaaggtattaatttgataatt

SEQ ID NO: 3780588 - DNA, 25 bp, Homo sapien
tccaatatcgatttattctcatgtt

SEQ ID NO: 3780589 - DNA, 25 bp, Homo sapien
caatgtcaatttatccaatatcgat

SEQ ID NO: 3780590 - DNA, 25 bp, Homo sapien
caccatccacgggtaccactgagag

SEQ ID NO: 3780591 - DNA, 25 bp, Homo sapien
cacgggtaccactgagagcttctgg

SEQ ID NO: 3780592 - DNA, 25 bp, Homo sapien
ggattcctccataaggacaccatcc

SEQ ID NO: 3780593 - DNA, 25 bp, Homo sapien
gattcctccataaggacaccatcca

SEQ ID NO: 3780594 - DNA, 25 bp, Homo sapien
caccagtgtgctcataaattgtaat

SEQ ID NO: 3780595 - DNA, 25 bp, Homo sapien
cataaattgtaataaacgtgtagga

SEQ ID NO: 3780596 - DNA, 25 bp, Homo sapien
ttatggtgacttcttgccagatgaa

SEQ ID NO: 3780597 - DNA, 25 bp, Homo sapien
cacgtgtgccataacacaaaggttc

SEQ ID NO: 3780598 - DNA, 25 bp, Homo sapien
agaagaaataactgttgtcattgtt

SEQ ID NO: 3780599 - DNA, 25 bp, Homo sapien
gaagaaataactgttgtcattgttg

SEQ ID NO: 3780600 - DNA, 25 bp, Homo sapien
aagaaataactgttgtcattgttgt

SEQ ID NO: 3780601 - DNA, 25 bp, Homo sapien
ttgtcattgttgttaacttgaattt

SEQ ID NO: 3780602 - DNA, 25 bp, Homo sapien
ttgtgtctctttggtccaaatttac

SEQ ID NO: 3780603 - DNA, 25 bp, Homo sapien
tttgtgtctctttggtccaaattta

SEQ ID NO: 3780604 - DNA, 25 bp, Homo sapien
ttacatgtgctatcagactggctgg

SEQ ID NO: 3780605 - DNA, 25 bp, Homo sapien
gcaccggaggtgttgtgactcccac

SEQ ID NO: 3780606 - DNA, 25 bp, Homo sapien
caagtggcctgagcagatcgggaca

SEQ ID NO: 3780607 - DNA, 25 bp, Homo sapien
catttaccgtagtgacaggagacaa

SEQ ID NO: 3780608 - DNA, 25 bp, Homo sapien
aacgtctcagggacataggtcaagg
